United States Patent Application Publication US 2006/0003322 A1 - sequence listing, part 10

SEQ ID NO: 376285 - RNA, 25 nt, Human
accagaauggcagaaaaaaagucug

SEQ ID NO: 376286 - RNA, 22 nt, Human
acccugcggucacaacuccaga

SEQ ID NO: 376287 - RNA, 18 nt, Human
acccugggugaggcuccu

SEQ ID NO: 376288 - RNA, 21 nt, Human
agacaggaggcaggaagagga

SEQ ID NO: 376289 - RNA, 22 nt, Human
agacaggaggcaggaagaggaa

SEQ ID NO: 376290 - RNA, 23 nt, Human
agcugccuccuggccucugaagc

SEQ ID NO: 376291 - RNA, 19 nt, Human
agcugugcuccaggaugac

SEQ ID NO: 376292 - RNA, 19 nt, Human
aggcuccugcucuucggcu

SEQ ID NO: 376293 - RNA, 18 nt, Human
agugaggcugggugugug

SEQ ID NO: 376294 - RNA, 20 nt, Human
aucagcucuucaccuuuggu

SEQ ID NO: 376295 - RNA, 20 nt, Human
aucagcucuucaccuuuggu

SEQ ID NO: 376296 - RNA, 22 nt, Human
auggagugaggcugggugugug

SEQ ID NO: 376297 - RNA, 21 nt, Human
auggaucccugaggagccagu

SEQ ID NO: 376298 - RNA, 22 nt, Human
auggcagaaaaaaagucugcag

SEQ ID NO: 376299 - RNA, 21 nt, Human
caacuccagaagacaggaggc

SEQ ID NO: 376300 - RNA, 25 nt, Human
caccagaauggcagaaaaaaagucu

SEQ ID NO: 376301 - RNA, 18 nt, Human
cacccagggugggugggc

SEQ ID NO: 376302 - RNA, 19 nt, Human
cacccagggugggugggca

SEQ ID NO: 376303 - RNA, 20 nt, Human
cacccagggugggugggcag

SEQ ID NO: 376304 - RNA, 20 nt, Human
caccuuuggugcuaaauuca

SEQ ID NO: 376305 - RNA, 20 nt, Human
caccuuuggugcuaaauuca

SEQ ID NO: 376306 - RNA, 18 nt, Human
cacgcuuuuucucaccag

SEQ ID NO: 376307 - RNA, 21 nt, Human
cagacccugggugaggcuccu

SEQ ID NO: 376308 - RNA, 18 nt, Human
caggcuuagucagagcca

SEQ ID NO: 376309 - RNA, 21 nt, Human
caguccacggagcacagccga

SEQ ID NO: 376310 - RNA, 18 nt, Human
cauccaucucugguuucu

SEQ ID NO: 376311 - RNA, 20 nt, Human
ccaguccacggagcacagcc

SEQ ID NO: 376312 - RNA, 18 nt, Human
cccucccgugaaggagcc

SEQ ID NO: 376313 - RNA, 19 nt, Human
ccugcggucacaacuccag

SEQ ID NO: 376314 - RNA, 21 nt, Human
ccugcggucacaacuccagaa

SEQ ID NO: 376315 - RNA, 20 nt, Human
cgcaacaccuauuccaggga

SEQ ID NO: 376316 - RNA, 26 nt, Human
cuccuggccucugaagccgauccacc

SEQ ID NO: 376317 - RNA, 23 nt, Human
cucuucggcugcagagagcugcc

SEQ ID NO: 376318 - RNA, 24 nt, Human
gaagacaggaggcaggaagaggaa

SEQ ID NO: 376319 - RNA, 21 nt, Human
gacaggaggcaggaagaggaa

SEQ ID NO: 376320 - RNA, 24 nt, Human
gagcugccuccuggccucugaagc

SEQ ID NO: 376321 - RNA, 21 nt, Human
gagcugugcuccaggaugacu

SEQ ID NO: 376322 - RNA, 19 nt, Human
gcugcagagagcugccucc

SEQ ID NO: 376323 - RNA, 20 nt, Human
ggagcacagccgagaggcag

SEQ ID NO: 376324 - RNA, 20 nt, Human
ggagugaggcugggugugug

SEQ ID NO: 376325 - RNA, 21 nt, Human
ggcccggagcgugggaagagc

SEQ ID NO: 376326 - RNA, 27 nt, Human
ggcccggagcgugggaagagcugucgu

SEQ ID NO: 376327 - RNA, 23 nt, Human
gggugggcaggcagcggggcucc

SEQ ID NO: 376328 - RNA, 22 nt, Human
ggugggcaggcagcggggcucc

SEQ ID NO: 376329 - RNA, 22 nt, Human
ggugggugggcaggcagcgggg

SEQ ID NO: 376330 - RNA, 26 nt, Human
uaagcccuugggauacuucaacaucc

SEQ ID NO: 376331 - RNA, 26 nt, Human
uaagcccuugggauacuucaacaucc

SEQ ID NO: 376332 - RNA, 22 nt, Human
uacgcaacaccuauuccaggga

SEQ ID NO: 376333 - RNA, 20 nt, Human
uauuugauacgcaacaccua

SEQ ID NO: 376334 - RNA, 20 nt, Human
ucgcacugaggaucauacuc

SEQ ID NO: 376335 - RNA, 18 nt, Human
ugaaggagcacaaauaug

SEQ ID NO: 376336 - RNA, 25 nt, Human
ugauggagugaggcugggugugugg

SEQ ID NO: 376337 - RNA, 20 nt, Human
uggcagaaaaaaagucugca

SEQ ID NO: 376338 - RNA, 22 nt, Human
uggcagaaaaaaagucugcaga

SEQ ID NO: 376339 - RNA, 26 nt, Human
uggcagaaaaaaagucugcagauccc

SEQ ID NO: 376340 - RNA, 19 nt, Human
uggccucugaagccgaucc

SEQ ID NO: 376341 - RNA, 18 nt, Human
ugggcaggcagcggggcu

SEQ ID NO: 376342 - RNA, 24 nt, Human
uucucuuuuccuucuucaucugua

SEQ ID NO: 376343 - RNA, 18 nt, Human
uuuuaucagcucuucacc

SEQ ID NO: 376344 - RNA, 18 nt, Human
uuuuaucagcucuucacc

SEQ ID NO: 376345 - RNA, 26 nt, Human
ccgcggggaccccacggacccugcgu

SEQ ID NO: 376346 - RNA, 21 nt, Human
gcccuggggccuccuucagcc

SEQ ID NO: 376347 - RNA, 22 nt, Human
ggcccuggggccuccuucagcc

SEQ ID NO: 376348 - RNA, 18 nt, Human
uagucacugacgcuaaag

SEQ ID NO: 376349 - RNA, 21 nt, Human
aaccuaacagguuacccacag

SEQ ID NO: 376350 - RNA, 21 nt, Human
aagugacguuaggacaaggau

SEQ ID NO: 376351 - RNA, 23 nt, Human
accugaaaaugugacuuuugaaa

SEQ ID NO: 376352 - RNA, 24 nt, Human
aggaguauaacucucuauucugaa

SEQ ID NO: 376353 - RNA, 22 nt, Human
auuuuauugaaacccucuuuca

SEQ ID NO: 376354 - RNA, 23 nt, Human
caaaaugccuuaaggcccuuuaa

SEQ ID NO: 376355 - RNA, 24 nt, Human
caaggccagcuuuccuugccuaug

SEQ ID NO: 376356 - RNA, 23 nt, Human
cacccguuuaccacuuccuaagu

SEQ ID NO: 376357 - RNA, 21 nt, Human
ccccgccgccgucugcccucc

SEQ ID NO: 376358 - RNA, 22 nt, Human
ccccgccgccgucugcccuccu

SEQ ID NO: 376359 - RNA, 24 nt, Human
ccccgccgccgucugcccuccucg

SEQ ID NO: 376360 - RNA, 22 nt, Human
ccucgagcucugcggggaagcc

SEQ ID NO: 376361 - RNA, 22 nt, Human
cgucugcccuccucgagcucug

SEQ ID NO: 376362 - RNA, 25 nt, Human
cucaaaacuacucugcugugaauuu

SEQ ID NO: 376363 - RNA, 20 nt, Human
guaaaaccuaacagguuacc

SEQ ID NO: 376364 - RNA, 23 nt, Human
gugacuuuugaaacuugggaaag

SEQ ID NO: 376365 - RNA, 20 nt, Human
uacuauauaguuagcaaggc

SEQ ID NO: 376366 - RNA, 20 nt, Human
ucacauauucaagcuacgaa

SEQ ID NO: 376367 - RNA, 23 nt, Human
ucacccguuuaccacuuccuaag

SEQ ID NO: 376368 - RNA, 19 nt, Human
ucagagucuccuucaagug

SEQ ID NO: 376369 - RNA, 21 nt, Human
uccuuaaauaccugaaaaugu

SEQ ID NO: 376370 - RNA, 22 nt, Human
ucguggcgacgacucggccucc

SEQ ID NO: 376371 - RNA, 23 nt, Human
ucugcccuccucgagcucugcgg

SEQ ID NO: 376372 - RNA, 23 nt, Human
ucugucaucaguuuccuccuuca

SEQ ID NO: 376373 - RNA, 23 nt, Human
ugauaaagaggaguaaauuuuuc

SEQ ID NO: 376374 - RNA, 20 nt, Human
ugcauguacgagugugugug

SEQ ID NO: 376375 - RNA, 23 nt, Human
ugccuaugacaaauuggcuagaa

SEQ ID NO: 376376 - RNA, 18 nt, Human
ugcgaguccaccaagggg

SEQ ID NO: 376377 - RNA, 24 nt, Human
ugucugcauguacgagugugugug

SEQ ID NO: 376378 - RNA, 21 nt, Human
uuaaauaccugaaaaugugac

SEQ ID NO: 376379 - RNA, 20 nt, Human
uuuauugaaacccucuuuca

SEQ ID NO: 376380 - RNA, 23 nt, Human
uuuauugaaacccucuuucaccc

SEQ ID NO: 376381 - RNA, 24 nt, Human
uuuuuugcuguuuuuauuuaaaau

SEQ ID NO: 376382 - RNA, 20 nt, Human
uuuuuuuuuuuuuuuugcug

SEQ ID NO: 376383 - RNA, 24 nt, Human
uuuuuuuuuuuuuuuuugcuguuu

SEQ ID NO: 376384 - RNA, 27 nt, Human
uuuuuuuuuuuuuuuuuuuuuuugggg

SEQ ID NO: 376385 - RNA, 19 nt, Human
aacaaaacaacucugcccu

SEQ ID NO: 376386 - RNA, 19 nt, Human
aagccagaacaaaacaacu

SEQ ID NO: 376387 - RNA, 22 nt, Human
aagccagaacaaaacaacucug

SEQ ID NO: 376388 - RNA, 19 nt, Human
aaucaaaugccugcuuucc

SEQ ID NO: 376389 - RNA, 24 nt, Human
acaacucugcccuaccuuuccugc

SEQ ID NO: 376390 - RNA, 26 nt, Human
acagggaagggaagauauuucuccca

SEQ ID NO: 376391 - RNA, 20 nt, Human
accccacuucccuccucacc

SEQ ID NO: 376392 - RNA, 25 nt, Human
accccacuucccuccucaccccuca

SEQ ID NO: 376393 - RNA, 20 nt, Human
acucuccccaagccagaaca

SEQ ID NO: 376394 - RNA, 23 nt, Human
acucuccccaagccagaacaaaa

SEQ ID NO: 376395 - RNA, 19 nt, Human
acugaguauucaccaggug

SEQ ID NO: 376396 - RNA, 21 nt, Human
agaacccuuuauguaaagccu

SEQ ID NO: 376397 - RNA, 23 nt, Human
agacagcaaacaacuccuggagc

SEQ ID NO: 376398 - RNA, 20 nt, Human
agcggaaaggaccuccugga

SEQ ID NO: 376399 - RNA, 23 nt, Human
auaauaauaaaaguucugauguc

SEQ ID NO: 376400 - RNA, 21 nt, Human
aucccacucuccccaagccag

SEQ ID NO: 376401 - RNA, 22 nt, Human
aucccacucuccccaagccaga

SEQ ID NO: 376402 - RNA, 25 nt, Human
caaaaaaagcuaccuuauauggaag

SEQ ID NO: 376403 - RNA, 22 nt, Human
caaaaguuuccccagagacaag

SEQ ID NO: 376404 - RNA, 22 nt, Human
caaaaucaaaugccugcuuucc

SEQ ID NO: 376405 - RNA, 18 nt, Human
caagccagaacaaaacaa

SEQ ID NO: 376406 - RNA, 19 nt, Human
caccaugucugcacacacc

SEQ ID NO: 376407 - RNA, 20 nt, Human
caccaugucugcacacaccg

SEQ ID NO: 376408 - RNA, 18 nt, Human
cacucuccccaagccaga

SEQ ID NO: 376409 - RNA, 23 nt, Human
cacugggccugcuuuaccuccuc

SEQ ID NO: 376410 - RNA, 21 nt, Human
cagacagaaauagauuccaua

SEQ ID NO: 376411 - RNA, 18 nt, Human
cagguggcgguggaggca

SEQ ID NO: 376412 - RNA, 18 nt, Human
cauggaucccacucuccc

SEQ ID NO: 376413 - RNA, 25 nt, Human
cccaagccagaacaaaaccgggguc

SEQ ID NO: 376414 - RNA, 18 nt, Human
ccccagagacaaggguac

SEQ ID NO: 376415 - RNA, 19 nt, Human
ccccccuccaccacccagc

SEQ ID NO: 376416 - RNA, 19 nt, Human
ccccgcucugcccccaaca

SEQ ID NO: 376417 - RNA, 18 nt, Human
ccccuuccucccuacuuu

SEQ ID NO: 376418 - RNA, 19 nt, Human
ccccuuccucccuacuuuc

SEQ ID NO: 376419 - RNA, 21 nt, Human
cccuguacauauaccuguccc

SEQ ID NO: 376420 - RNA, 20 nt, Human
cccugucuggcuuggucccc

SEQ ID NO: 376421 - RNA, 19 nt, Human
ccucuguccucuugaguua

SEQ ID NO: 376422 - RNA, 22 nt, Human
ccucuucaaguacagugagaau

SEQ ID NO: 376423 - RNA, 19 nt, Human
ccugcugcagacagggugu

SEQ ID NO: 376424 - RNA, 19 nt, Human
cuacuuucuguaaauaucu

SEQ ID NO: 376425 - RNA, 22 nt, Human
cuccccccuccaccacccagcc

SEQ ID NO: 376426 - RNA, 18 nt, Human
cucuuccauagcuuuggc

SEQ ID NO: 376427 - RNA, 22 nt, Human
cucuuccauagcuuuggcacaa

SEQ ID NO: 376428 - RNA, 18 nt, Human
cugggcggacuugcaggu

SEQ ID NO: 376429 - RNA, 19 nt, Human
cuuccucccuacuuucugu

SEQ ID NO: 376430 - RNA, 18 nt, Human
cuuggggaugaaagagaa

SEQ ID NO: 376431 - RNA, 22 nt, Human
cuuuauguaaagccucuucaag

SEQ ID NO: 376432 - RNA, 21 nt, Human
gagaacccuuuauguaaagcc

SEQ ID NO: 376433 - RNA, 20 nt, Human
gaguauucaccaggugugga

SEQ ID NO: 376434 - RNA, 23 nt, Human
gauagucuucugcugcugguacc

SEQ ID NO: 376435 - RNA, 23 nt, Human
gcaaaaguuuccccagagacaag

SEQ ID NO: 376436 - RNA, 23 nt, Human
gcaauggaaaagagccacaaaaa

SEQ ID NO: 376437 - RNA, 24 nt, Human
gcccuguacauauaccugucccug

SEQ ID NO: 376438 - RNA, 19 nt, Human
gcggacuugcagguggcgg

SEQ ID NO: 376439 - RNA, 20 nt, Human
gcugcugguaccuggguggg

SEQ ID NO: 376440 - RNA, 27 nt, Human
ggaaaggaccuccuggacuccuguaaa

SEQ ID NO: 376441 - RNA, 23 nt, Human
gggauaggggcaaucccaaggaa

SEQ ID NO: 376442 - RNA, 20 nt, Human
guaaagccucuucaaguaca

SEQ ID NO: 376443 - RNA, 21 nt, Human
guaaagccucuucaaguacag

SEQ ID NO: 376444 - RNA, 20 nt, Human
uaaacccccauucuuuccaa

SEQ ID NO: 376445 - RNA, 25 nt, Human
uaccccacuucccuccucaccccuc

SEQ ID NO: 376446 - RNA, 20 nt, Human
uaccccacuucccuccucag

SEQ ID NO: 376447 - RNA, 19 nt, Human
uaccuuuccugccccgcuc

SEQ ID NO: 376448 - RNA, 18 nt, Human
uacuggguugacauagag

SEQ ID NO: 376449 - RNA, 20 nt, Human
uaggggcaaucccaaggaaa

SEQ ID NO: 376450 - RNA, 24 nt, Human
uaugcacacagugacucacagaau

SEQ ID NO: 376451 - RNA, 24 nt, Human
ucagacuccagcuacuggguugac

SEQ ID NO: 376452 - RNA, 27 nt, Human
uccauaccccacuucccuccucacccc

SEQ ID NO: 376453 - RNA, 21 nt, Human
ucccacucuccccaagccaga

SEQ ID NO: 376454 - RNA, 22 nt, Human
uccccaagccagaacaaaacaa

SEQ ID NO: 376455 - RNA, 24 nt, Human
uccccaagccagaacaaaacaacu

SEQ ID NO: 376456 - RNA, 23 nt, Human
uccccccuccaccacccagccuu

SEQ ID NO: 376457 - RNA, 20 nt, Human
uccccuuccucccuacuuuc

SEQ ID NO: 376458 - RNA, 25 nt, Human
uccccuuccucccuacuuucuguaa

SEQ ID NO: 376459 - RNA, 22 nt, Human
uccucaccagccucuguccucu

SEQ ID NO: 376460 - RNA, 23 nt, Human
uccucaccagccucuguccucuu

SEQ ID NO: 376461 - RNA, 23 nt, Human
uccuccucucugacaguuugggc

SEQ ID NO: 376462 - RNA, 20 nt, Human
uccuggacuccuguaaaccc

SEQ ID NO: 376463 - RNA, 21 nt, Human
uccuggacuccuguaaacccc

SEQ ID NO: 376464 - RNA, 18 nt, Human
ucucccaauugguagggg

SEQ ID NO: 376465 - RNA, 21 nt, Human
ucuguccucuugaguuaccgu

SEQ ID NO: 376466 - RNA, 22 nt, Human
ucuucugcugcugguaccuggg

SEQ ID NO: 376467 - RNA, 18 nt, Human
ugagaauuaacuuccucc

SEQ ID NO: 376468 - RNA, 21 nt, Human
ugccaggaugagcauggaucc

SEQ ID NO: 376469 - RNA, 19 nt, Human
ugcgcagaaguccagcugg

SEQ ID NO: 376470 - RNA, 20 nt, Human
ugcugcugguaccugggugg

SEQ ID NO: 376471 - RNA, 19 nt, Human
uggacuccuguaaaccccc

SEQ ID NO: 376472 - RNA, 19 nt, Human
uggcagagccuauuugucc

SEQ ID NO: 376473 - RNA, 24 nt, Human
ugguguugagaagcugcaguucuu

SEQ ID NO: 376474 - RNA, 23 nt, Human
ugucauagugugggauaggggca

SEQ ID NO: 376475 - RNA, 19 nt, Human
uguggcucuuaggagagcg

SEQ ID NO: 376476 - RNA, 24 nt, Human
uuccauagcuuuggcacaauuacc

SEQ ID NO: 376477 - RNA, 25 nt, Human
uuuccugccccgcucugcccccaac

SEQ ID NO: 376478 - RNA, 19 nt, Human
caagaauagguaucuuuua

SEQ ID NO: 376479 - RNA, 21 nt, Human
uaguggaaaucuuuugacugu

SEQ ID NO: 376480 - RNA, 23 nt, Human
ucuuuuaauccaccacagugaca

SEQ ID NO: 376481 - RNA, 23 nt, Human
uugagauuauuuugguuccuuuu

SEQ ID NO: 376482 - RNA, 22 nt, Human
aacacauuuuucccucaugacu

SEQ ID NO: 376483 - RNA, 25 nt, Human
aacuugccuucuccccacagcaucu

SEQ ID NO: 376484 - RNA, 20 nt, Human
aaguugcaucaccuauaacc

SEQ ID NO: 376485 - RNA, 21 nt, Human
aaugaauucacuuugauggau

SEQ ID NO: 376486 - RNA, 19 nt, Human
acuuugauggauaaagagg

SEQ ID NO: 376487 - RNA, 22 nt, Human
aguuggcuggucucaaugucuu

SEQ ID NO: 376488 - RNA, 21 nt, Human
auaaagagguauaaugauuaa

SEQ ID NO: 376489 - RNA, 19 nt, Human
augaauucacuuugaugga

SEQ ID NO: 376490 - RNA, 20 nt, Human
caaggcaagaaguuggcugg

SEQ ID NO: 376491 - RNA, 21 nt, Human
ccaauaucugaugcaaaguau

SEQ ID NO: 376492 - RNA, 20 nt, Human
cccaaggauguuggugauga

SEQ ID NO: 376493 - RNA, 22 nt, Human
cccuugcuaggaaggaccuuau

SEQ ID NO: 376494 - RNA, 22 nt, Human
ccugaaacacauuuuucccuca

SEQ ID NO: 376495 - RNA, 18 nt, Human
ccugaaauuauuuuucca

SEQ ID NO: 376496 - RNA, 22 nt, Human
cugcuuucaaaauccagccacc

SEQ ID NO: 376497 - RNA, 26 nt, Human
cuuauaaucuuauauaaauaucuucu

SEQ ID NO: 376498 - RNA, 22 nt, Human
cuuucaaaauccagccacccaa

SEQ ID NO: 376499 - RNA, 21 nt, Human
gaaggucuaucuuuguaacuu

SEQ ID NO: 376500 - RNA, 26 nt, Human
uaagccaagggaagaggccugaaaca

SEQ ID NO: 376501 - RNA, 22 nt, Human
uaaggauaauaccaugaaaauc

SEQ ID NO: 376502 - RNA, 21 nt, Human
uauaaccagaagucugcuuuc

SEQ ID NO: 376503 - RNA, 24 nt, Human
ucaguaguuaucaaggcaagaagu

SEQ ID NO: 376504 - RNA, 21 nt, Human
ucuaucuuuguaacuugccuu

SEQ ID NO: 376505 - RNA, 20 nt, Human
ugaaaacauuuauuucuucc

SEQ ID NO: 376506 - RNA, 30 nt, Human
ugauaggcuucaucagauucccaaagccuu

SEQ ID NO: 376507 - RNA, 24 nt, Human
ugcaucaccuauaaccagaagucu

SEQ ID NO: 376508 - RNA, 21 nt, Human
uggaaaaggcauaauucuuua

SEQ ID NO: 376509 - RNA, 20 nt, Human
uggauuucuuuugucuuccc

SEQ ID NO: 376510 - RNA, 23 nt, Human
uguaacuugccuucuccccacag

SEQ ID NO: 376511 - RNA, 18 nt, Human
uucaggauuguuuuucaa

SEQ ID NO: 376512 - RNA, 26 nt, Human
uuggugaugauagucaugguuuuuuc

SEQ ID NO: 376513 - RNA, 23 nt, Human
uuuccuguaagccaagggaagag

SEQ ID NO: 376514 - RNA, 22 nt, Human
cauugcccaagguugagagaug

SEQ ID NO: 376515 - RNA, 18 nt, Human
gcccaagguugagagaug

SEQ ID NO: 376516 - RNA, 24 nt, Human
uauauugguucuucaaugucagug

SEQ ID NO: 376517 - RNA, 20 nt, Human
ucaaugucaguggcaggcuu

SEQ ID NO: 376518 - RNA, 18 nt, Human
gcccaagguugagagaug

SEQ ID NO: 376519 - RNA, 23 nt, Human
uuuuuuuuuuuuuuuuucagcuu

SEQ ID NO: 376520 - RNA, 26 nt, Human
uuuuuuuuuuuuuuuuuuuucagcuu

SEQ ID NO: 376521 - RNA, 24 nt, Human
uuuuuuuuuuuuuuuuuuuuucag

SEQ ID NO: 376522 - RNA, 22 nt, Human
aaaaauucucaacaaaauauua

SEQ ID NO: 376523 - RNA, 21 nt, Human
aaaagaagauauuggagaaga

SEQ ID NO: 376524 - RNA, 24 nt, Human
aaaagaagauauuggagaagaaac

SEQ ID NO: 376525 - RNA, 21 nt, Human
aaaauucucaacaaaauauua

SEQ ID NO: 376526 - RNA, 21 nt, Human
aaacaaaugcugcaauaaagc

SEQ ID NO: 376527 - RNA, 27 nt, Human
aaacacacaaucucccaagauugaacc

SEQ ID NO: 376528 - RNA, 30 nt, Human
aaacuuaccaaccaacacaaaagcccuagg

SEQ ID NO: 376529 - RNA, 19 nt, Human
aaagaagaaaaucuggagg

SEQ ID NO: 376530 - RNA, 20 nt, Human
aaagagauguacucuugguc

SEQ ID NO: 376531 - RNA, 18 nt, Human
aaauuccuggaaacacac

SEQ ID NO: 376532 - RNA, 24 nt, Human
aacacaaaagcccuagaccagaug

SEQ ID NO: 376533 - RNA, 24 nt, Human
aaccaggaagagacagaaaccccc

SEQ ID NO: 376534 - RNA, 18 nt, Human
aagaagaaaaucuggagg

SEQ ID NO: 376535 - RNA, 20 nt, Human
aagaagauauuggagaagaa

SEQ ID NO: 376536 - RNA, 22 nt, Human
aagaagauauuggagaagaaac

SEQ ID NO: 376537 - RNA, 24 nt, Human
aagcaacaccagugaaaccaagga

SEQ ID NO: 376538 - RNA, 24 nt, Human
aagcaacaccagugaaaccaaggg

SEQ ID NO: 376539 - RNA, 28 nt, Human
aagcaacaccagugaaacccccaguagg

SEQ ID NO: 376540 - RNA, 24 nt, Human
aauuaguaauaaaaaacuuaccaa

SEQ ID NO: 376541 - RNA, 22 nt, Human
acagcaaagcaacaccagugaa

SEQ ID NO: 376542 - RNA, 19 nt, Human
agaaaccccuccuagacca

SEQ ID NO: 376543 - RNA, 24 nt, Human
agaaaccccuccuagaccaauauc

SEQ ID NO: 376544 - RNA, 21 nt, Human
agaagaaaaucuggaggaaac

SEQ ID NO: 376545 - RNA, 23 nt, Human
agcaaagcaacaccagugaaacc

SEQ ID NO: 376546 - RNA, 22 nt, Human
aggaaagaaagcagugcuucag

SEQ ID NO: 376547 - RNA, 24 nt, Human
aggaagagacagaaaccccuccua

SEQ ID NO: 376548 - RNA, 22 nt, Human
agguaaaagaagauauuggaga

SEQ ID NO: 376549 - RNA, 21 nt, Human
aguccuguucucaucacuuca

SEQ ID NO: 376550 - RNA, 19 nt, Human
auaaagaagaaaaucugga

SEQ ID NO: 376551 - RNA, 18 nt, Human
auaaagcaagucacacag

SEQ ID NO: 376552 - RNA, 22 nt, Human
aucacuucacaguagaugaagg

SEQ ID NO: 376553 - RNA, 22 nt, Human
auuguuuuccugugcccaucca

SEQ ID NO: 376554 - RNA, 22 nt, Human
auuguuuuccugugcccaucca

SEQ ID NO: 376555 - RNA, 20 nt, Human
caaacauucuggcagagaca

SEQ ID NO: 376556 - RNA, 19 nt, Human
caaagcaacaccagugaaa

SEQ ID NO: 376557 - RNA, 20 nt, Human
caaagcaacaccagugaaac

SEQ ID NO: 376558 - RNA, 23 nt, Human
caaagcaacaccagugaaaccaa

SEQ ID NO: 376559 - RNA, 22 nt, Human
caaaugcugcaauaaagcaagu

SEQ ID NO: 376560 - RNA, 19 nt, Human
caacacaaaagcccuagac

SEQ ID NO: 376561 - RNA, 20 nt, Human
caacacaaaagcccuagacc

SEQ ID NO: 376562 - RNA, 23 nt, Human
caacacaaaagcccuagaccaga

SEQ ID NO: 376563 - RNA, 24 nt, Human
caacaccagugaaaccaaggacac

SEQ ID NO: 376564 - RNA, 21 nt, Human
caagaugcagaaagaauaacu

SEQ ID NO: 376565 - RNA, 22 nt, Human
cacacaaucucccaagauugaa

SEQ ID NO: 376566 - RNA, 24 nt, Human
cacacagauuuuuugguuucccag

SEQ ID NO: 376567 - RNA, 22 nt, Human
caccagugaaaccaaggacacc

SEQ ID NO: 376568 - RNA, 23 nt, Human
caccuucccccucuucacacaca

SEQ ID NO: 376569 - RNA, 21 nt, Human
cagagguuuaagacuugggcc

SEQ ID NO: 376570 - RNA, 24 nt, Human
cagcaaagcaacaccagugaaacc

SEQ ID NO: 376571 - RNA, 25 nt, Human
cagcaaagcaacaccagugaaacca

SEQ ID NO: 376572 - RNA, 21 nt, Human
caggugauaagccucaagcau

SEQ ID NO: 376573 - RNA, 23 nt, Human
caguuagagauaauuuucucaac

SEQ ID NO: 376574 - RNA, 23 nt, Human
caguuagagauaauuuucucaac

SEQ ID NO: 376575 - RNA, 18 nt, Human
caguucugggugcugccu

SEQ ID NO: 376576 - RNA, 18 nt, Human
caguucugggugcugccu

SEQ ID NO: 376577 - RNA, 21 nt, Human
ccaaaauaaaacaaaugcugc

SEQ ID NO: 376578 - RNA, 22 nt, Human
ccaaacaguccccagagaacuc

SEQ ID NO: 376579 - RNA, 18 nt, Human
ccagacuaccaaaauaaa

SEQ ID NO: 376580 - RNA, 20 nt, Human
ccagcccucuucauauuucu

SEQ ID NO: 376581 - RNA, 25 nt, Human
ccccagagaacuccagcugucauga

SEQ ID NO: 376582 - RNA, 19 nt, Human
ccccagagguuuaagacuu

SEQ ID NO: 376583 - RNA, 18 nt, Human
cccuccuagaccaauauc

SEQ ID NO: 376584 - RNA, 22 nt, Human
ccuugcuguugaucuucccuuc

SEQ ID NO: 376585 - RNA, 22 nt, Human
cuagaccaauaucaagcgcuga

SEQ ID NO: 376586 - RNA, 23 nt, Human
cuaugccaaaaaaucaaggagga

SEQ ID NO: 376587 - RNA, 24 nt, Human
cuuaccaaccaacacaaaagcccu

SEQ ID NO: 376588 - RNA, 23 nt, Human
cuucacacacagcagacaucucc

SEQ ID NO: 376589 - RNA, 25 nt, Human
cuucuuauaaaugcuauauagggau

SEQ ID NO: 376590 - RNA, 27 nt, Human
cuuuggugauauugcagguucaguucc

SEQ ID NO: 376591 - RNA, 19 nt, Human
gaaaauuucaggccaauau

SEQ ID NO: 376592 - RNA, 20 nt, Human
gcacguucuggcuguggcag

SEQ ID NO: 376593 - RNA, 18 nt, Human
gcauuucuaaacauauau

SEQ ID NO: 376594 - RNA, 18 nt, Human
gcauuucuaaacauauau

SEQ ID NO: 376595 - RNA, 25 nt, Human
ggaaaagaaaauuucaggccaauau

SEQ ID NO: 376596 - RNA, 19 nt, Human
ggugauaagccucaagcau

SEQ ID NO: 376597 - RNA, 22 nt, Human
uaaaagaagauauuggagaaga

SEQ ID NO: 376598 - RNA, 27 nt, Human
uaaagaagaaaaucuggaggaaacggc

SEQ ID NO: 376599 - RNA, 18 nt, Human
uaaagcaagucacacaga

SEQ ID NO: 376600 - RNA, 24 nt, Human
uaaagcaagucacacagauuuuuu

SEQ ID NO: 376601 - RNA, 21 nt, Human
uaaaugcuauauagggauguu

SEQ ID NO: 376602 - RNA, 24 nt, Human
uaaauuccuggaaacacacaaucu

SEQ ID NO: 376603 - RNA, 26 nt, Human
uaccaaaauaaaacaaaugcugcaau

SEQ ID NO: 376604 - RNA, 27 nt, Human
uaccaaaauaaaacaaaugcugcaaua

SEQ ID NO: 376605 - RNA, 19 nt, Human
uacuaugucaaaaaucaca

SEQ ID NO: 376606 - RNA, 25 nt, Human
uagcagaaauaauuuauuugcacag

SEQ ID NO: 376607 - RNA, 23 nt, Human
uagguaaaagaagauauuggaga

SEQ ID NO: 376608 - RNA, 18 nt, Human
uaugaagccagcaucagc

SEQ ID NO: 376609 - RNA, 20 nt, Human
uaugccaaaaaaucaaggag

SEQ ID NO: 376610 - RNA, 21 nt, Human
uauugcaaauacucauauuua

SEQ ID NO: 376611 - RNA, 21 nt, Human
uccagacuaccaaaauaaaaa

SEQ ID NO: 376612 - RNA, 21 nt, Human
uccagcccucuucauauuucu

SEQ ID NO: 376613 - RNA, 24 nt, Human
ucccaaugaacauauuugcaaaaa

SEQ ID NO: 376614 - RNA, 21 nt, Human
uccccagagaacuccagcugu

SEQ ID NO: 376615 - RNA, 19 nt, Human
ucgaugcacauaaagaaga

SEQ ID NO: 376616 - RNA, 22 nt, Human
ucgaugcacauaaagaagaaaa

SEQ ID NO: 376617 - RNA, 19 nt, Human
ucuuauucauucuucccuc

SEQ ID NO: 376618 - RNA, 24 nt, Human
ucuuuuuuuucuuuuguauccuau

SEQ ID NO: 376619 - RNA, 24 nt, Human
ucuuuuuuuucuuuuguauccuau

SEQ ID NO: 376620 - RNA, 25 nt, Human
ugaaaagagauguacucuugguccu

SEQ ID NO: 376621 - RNA, 22 nt, Human
ugacaggaggugccuccugagg

SEQ ID NO: 376622 - RNA, 19 nt, Human
uggagaagaaacaucauca

SEQ ID NO: 376623 - RNA, 26 nt, Human
uggcagagacacaguggaaaagaaaa

SEQ ID NO: 376624 - RNA, 20 nt, Human
ugggugcugccugcagacaa

SEQ ID NO: 376625 - RNA, 20 nt, Human
ugggugcugccugcagacaa

SEQ ID NO: 376626 - RNA, 23 nt, Human
uuaagguagcagaaauaauuuau

SEQ ID NO: 376627 - RNA, 20 nt, Human
uuagagauaauuuucucaac

SEQ ID NO: 376628 - RNA, 20 nt, Human
uuagagauaauuuucucaac

SEQ ID NO: 376629 - RNA, 18 nt, Human
uuaggaaauaauuuuaag

SEQ ID NO: 376630 - RNA, 18 nt, Human
uuaggaaauaauuuuaag

SEQ ID NO: 376631 - RNA, 21 nt, Human
uuggagaagaaacaucaucag

SEQ ID NO: 376632 - RNA, 18 nt, Human
uuuuaagguagcagaaau

SEQ ID NO: 376633 - RNA, 21 nt, Human
uuuuuuuuuuuuuuuuuacag

SEQ ID NO: 376634 - RNA, 24 nt, Human
aaacagccuggcagucccuagagc

SEQ ID NO: 376635 - RNA, 21 nt, Human
aacaaaccauccaaacauuuu

SEQ ID NO: 376636 - RNA, 20 nt, Human
aacaacaaaccauccaaaca

SEQ ID NO: 376637 - RNA, 19 nt, Human
aacagaacacuaaagagaa

SEQ ID NO: 376638 - RNA, 23 nt, Human
aagaacaaccgauucaccaacuc

SEQ ID NO: 376639 - RNA, 22 nt, Human
agagagaauccgguacugugga

SEQ ID NO: 376640 - RNA, 21 nt, Human
agcuacaaauggcaagagaaa

SEQ ID NO: 376641 - RNA, 23 nt, Human
aggcagaacaacaaaccauccaa

SEQ ID NO: 376642 - RNA, 24 nt, Human
aggcagagcccagcagauccgugg

SEQ ID NO: 376643 - RNA, 20 nt, Human
aggcagccaagacccugaaa

SEQ ID NO: 376644 - RNA, 19 nt, Human
aggcaggcaggcggcaggc

SEQ ID NO: 376645 - RNA, 19 nt, Human
aggcaggcggcaggcagag

SEQ ID NO: 376646 - RNA, 20 nt, Human
aggcaggcggcaggcagagc

SEQ ID NO: 376647 - RNA, 24 nt, Human
agggaucucucccaccacugagcc

SEQ ID NO: 376648 - RNA, 19 nt, Human
auaagaagcagcuuuuuca

SEQ ID NO: 376649 - RNA, 20 nt, Human
augaacacaaagucugacuc

SEQ ID NO: 376650 - RNA, 24 nt, Human
caagacccugaaaugaaaugaaca

SEQ ID NO: 376651 - RNA, 24 nt, Human
cacaucauggugagaguuuguaug

SEQ ID NO: 376652 - RNA, 22 nt, Human
cacuaaagagaaaaguugaagc

SEQ ID NO: 376653 - RNA, 21 nt, Human
cacugagccucuagucccaaa

SEQ ID NO: 376654 - RNA, 24 nt, Human
cagccucaggcaaaccacguucug

SEQ ID NO: 376655 - RNA, 23 nt, Human
cagccugugagauccgaccaucc

SEQ ID NO: 376656 - RNA, 22 nt, Human
caggcaggcaggcggcaggcag

SEQ ID NO: 376657 - RNA, 22 nt, Human
cagucccuagagccccugagaa

SEQ ID NO: 376658 - RNA, 25 nt, Human
cauccaaaugugaggaaagaacaac

SEQ ID NO: 376659 - RNA, 20 nt, Human
ccaaaaguuugaaccaacag

SEQ ID NO: 376660 - RNA, 18 nt, Human
ccaggcagaacaacaaac

SEQ ID NO: 376661 - RNA, 19 nt, Human
cccaaaaguuugaaccaac

SEQ ID NO: 376662 - RNA, 20 nt, Human
cccacaggcagccaagaccc

SEQ ID NO: 376663 - RNA, 24 nt, Human
cccacaggcagccaagacccugaa

SEQ ID NO: 376664 - RNA, 26 nt, Human
cccaccacugagccucuagucccaaa

SEQ ID NO: 376665 - RNA, 23 nt, Human
ccucuagucccaaaaccauccuu

SEQ ID NO: 376666 - RNA, 25 nt, Human
cuccaggccaccuggggaagcccac

SEQ ID NO: 376667 - RNA, 21 nt, Human
cucucccaccacugagccucu

SEQ ID NO: 376668 - RNA, 20 nt, Human
cugugagauccgaccauccc

SEQ ID NO: 376669 - RNA, 19 nt, Human
gaacaacaaaccauccaaa

SEQ ID NO: 376670 - RNA, 24 nt, Human
gacccugaaaugaaaugaacacaa

SEQ ID NO: 376671 - RNA, 24 nt, Human
gagaagcccugcaggaugcgcuga

SEQ ID NO: 376672 - RNA, 23 nt, Human
gccccagaaucuuucucucaguu

SEQ ID NO: 376673 - RNA, 23 nt, Human
gcggcaggcagagcgcgcucucc

SEQ ID NO: 376674 - RNA, 22 nt, Human
ggaggaacaugcuaaaaaccuu

SEQ ID NO: 376675 - RNA, 19 nt, Human
ggagggugaagaaaaggag

SEQ ID NO: 376676 - RNA, 18 nt, Human
ggcaggcaggcaggcggc

SEQ ID NO: 376677 - RNA, 19 nt, Human
gggaacccucaguggcagg

SEQ ID NO: 376678 - RNA, 20 nt, Human
ggugaagaaaaggaggaaca

SEQ ID NO: 376679 - RNA, 20 nt, Human
gucaugucuuggguuagaau

SEQ ID NO: 376680 - RNA, 18 nt, Human
guccgugcucccaaaagu

SEQ ID NO: 376681 - RNA, 18 nt, Human
uaagacaaugggcaaagc

SEQ ID NO: 376682 - RNA, 27 nt, Human
uaaggcagagcccagcagauccguguc

SEQ ID NO: 376683 - RNA, 19 nt, Human
uaaguuacagcuaagaaug

SEQ ID NO: 376684 - RNA, 18 nt, Human
uaauaguuaaguuacagc

SEQ ID NO: 376685 - RNA, 24 nt, Human
uacagcuaagaaugucaugucuug

SEQ ID NO: 376686 - RNA, 20 nt, Human
uagcaccguuaauguauuca

SEQ ID NO: 376687 - RNA, 22 nt, Human
ucaaacagaacacuaaagagaa

SEQ ID NO: 376688 - RNA, 22 nt, Human
uccaaaugugaggaaagaacaa

SEQ ID NO: 376689 - RNA, 24 nt, Human
ucccaaaaguuugaaccaacagcc

SEQ ID NO: 376690 - RNA, 25 nt, Human
ucccagagaacugacaguccgugcu

SEQ ID NO: 376691 - RNA, 26 nt, Human
ucccuagagccccugagaagagcccu

SEQ ID NO: 376692 - RNA, 24 nt, Human
uccuggcugaaacagccuggcagu

SEQ ID NO: 376693 - RNA, 22 nt, Human
ucuccaggcagaacaacaaacc

SEQ ID NO: 376694 - RNA, 20 nt, Human
ucucucccaccacugagccu

SEQ ID NO: 376695 - RNA, 21 nt, Human
ugaaaagaaacugcacugaaa

SEQ ID NO: 376696 - RNA, 22 nt, Human
ugaaaagaaacugcacugaaag

SEQ ID NO: 376697 - RNA, 25 nt, Human
ugaaaagaaacugcacugaaaggua

SEQ ID NO: 376698 - RNA, 22 nt, Human
ugaaaugaaaugaacacaaagu

SEQ ID NO: 376699 - RNA, 19 nt, Human
ugaccacuucccagagaac

SEQ ID NO: 376700 - RNA, 19 nt, Human
ugcacugaaagguaaagga

SEQ ID NO: 376701 - RNA, 19 nt, Human
uggcaggcaggcaggcggc

SEQ ID NO: 376702 - RNA, 23 nt, Human
uuagcaccguuaauguauucacu

SEQ ID NO: 376703 - RNA, 23 nt, Human
uucaugaaaugcuuggaggugaa

SEQ ID NO: 376704 - RNA, 22 nt, Human
uugugaaacucuucacaucaug

SEQ ID NO: 376705 - RNA, 20 nt, Human
uuucaugaaaugcuuggagg

SEQ ID NO: 376706 - RNA, 19 nt, Human
uuugaaguuucucuugauu

SEQ ID NO: 376707 - RNA, 19 nt, Human
uuugcccaccuccaggcca

SEQ ID NO: 376708 - RNA, 23 nt, Human
uuuuuuuuuuuuuuuuucaguuu

SEQ ID NO: 376709 - RNA, 22 nt, Human
uuuuuuuuuuuuuuuuuuucag

SEQ ID NO: 376710 - RNA, 22 nt, Human
aaaaaacaaaaacaccuuagaa

SEQ ID NO: 376711 - RNA, 18 nt, Human
aaaaaacaggaaaaaagc

SEQ ID NO: 376712 - RNA, 26 nt, Human
aaaaaacaggaaaaaagcaaacauac

SEQ ID NO: 376713 - RNA, 27 nt, Human
aaaaacaaaaacaccuuagaaaaggga

SEQ ID NO: 376714 - RNA, 21 nt, Human
aaaaacacuuuauuuaauaaa

SEQ ID NO: 376715 - RNA, 27 nt, Human
aaaaagcaaacauacaaaaaacaaaaa

SEQ ID NO: 376716 - RNA, 27 nt, Human
aaaagcaaacauacaaaaaacaaaaac

SEQ ID NO: 376717 - RNA, 23 nt, Human
aaacaaaaaacaggaaaaaagca

SEQ ID NO: 376718 - RNA, 24 nt, Human
aaacaaaaaacaggaaaaaagcaa

SEQ ID NO: 376719 - RNA, 25 nt, Human
aaacaggaaaaaagcaaacauacaa

SEQ ID NO: 376720 - RNA, 19 nt, Human
aaacaucacacauccaaaa

SEQ ID NO: 376721 - RNA, 20 nt, Human
aaacaucacacauccaaaac

SEQ ID NO: 376722 - RNA, 25 nt, Human
aaagcaaacauacaaaaaacaaaaa

SEQ ID NO: 376723 - RNA, 21 nt, Human
aacaaaaaacaggaaaaaagc

SEQ ID NO: 376724 - RNA, 20 nt, Human
aacauacaaaaaacaaaaac

SEQ ID NO: 376725 - RNA, 20 nt, Human
aagcaaacauacaaaaaaca

SEQ ID NO: 376726 - RNA, 23 nt, Human
aaggaagaacucggucggcggcg

SEQ ID NO: 376727 - RNA, 21 nt, Human
acaaaaaacaggaaaaaagca

SEQ ID NO: 376728 - RNA, 23 nt, Human
aggaaaaaagcaaacauacaaaa

SEQ ID NO: 376729 - RNA, 24 nt, Human
agggggaagggaggaacgccgggc

SEQ ID NO: 376730 - RNA, 18 nt, Human
auacaaaaaacaaaaaca

SEQ ID NO: 376731 - RNA, 21 nt, Human
auacaaaaaacaaaaacaccu

SEQ ID NO: 376732 - RNA, 25 nt, Human
auacaaaaaacaaaaacaccuuaga

SEQ ID NO: 376733 - RNA, 21 nt, Human
aucagcuuuuuguucucccau

SEQ ID NO: 376734 - RNA, 18 nt, Human
auccaaaacaugguacca

SEQ ID NO: 376735 - RNA, 19 nt, Human
augaaacagcaucuacaaa

SEQ ID NO: 376736 - RNA, 18 nt, Human
caaaaaacaggaaaaaag

SEQ ID NO: 376737 - RNA, 21 nt, Human
caaaaaacaggaaaaaagcaa

SEQ ID NO: 376738 - RNA, 20 nt, Human
caaaaguugcuuuauucaac

SEQ ID NO: 376739 - RNA, 22 nt, Human
caacuuacaaaaaguacacacc

SEQ ID NO: 376740 - RNA, 19 nt, Human
caccaacaaaugcagacaa

SEQ ID NO: 376741 - RNA, 23 nt, Human
caccauagguuaaguaggcgccu

SEQ ID NO: 376742 - RNA, 20 nt, Human
caccgcgacgacagcaaggc

SEQ ID NO: 376743 - RNA, 28 nt, Human
caccuuagaaaagggagcucauccuaag

SEQ ID NO: 376744 - RNA, 24 nt, Human
cacugccguaaauggaaaaaacaa

SEQ ID NO: 376745 - RNA, 21 nt, Human
cagacaaccugaucuaauuaa

SEQ ID NO: 376746 - RNA, 18 nt, Human
cagcaaggcgacccgguc

SEQ ID NO: 376747 - RNA, 23 nt, Human
cagcagcaguagcaguagcagga

SEQ ID NO: 376748 - RNA, 21 nt, Human
cagcuaaguuuuaaagcugaa

SEQ ID NO: 376749 - RNA, 21 nt, Human
caggaaaaaagcaaacauaca

SEQ ID NO: 376750 - RNA, 19 nt, Human
caguagcaggaaaaucacc

SEQ ID NO: 376751 - RNA, 19 nt, Human
cauauaaacaucacacauc

SEQ ID NO: 376752 - RNA, 24 nt, Human
cccagugguaguggcgguggcuuu

SEQ ID NO: 376753 - RNA, 22 nt, Human
cccugcagagaugaaauccaac

SEQ ID NO: 376754 - RNA, 25 nt, Human
ccuaaaaauuaccuucuuccauuaa

SEQ ID NO: 376755 - RNA, 22 nt, Human
ccuuguguuuuuacaaaaauag

SEQ ID NO: 376756 - RNA, 20 nt, Human
cggggcggcgggaagggguc

SEQ ID NO: 376757 - RNA, 26 nt, Human
cguaaauggaaaaaacaaaaaacagg

SEQ ID NO: 376758 - RNA, 21 nt, Human
cguuucauucuacugaagcca

SEQ ID NO: 376759 - RNA, 20 nt, Human
cucccauauaaacaucacag

SEQ ID NO: 376760 - RNA, 19 nt, Human
cuuaaacucaacucaggau

SEQ ID NO: 376761 - RNA, 21 nt, Human
cuuguguuuuuacaaaaauag

SEQ ID NO: 376762 - RNA, 18 nt, Human
gagaugaaauccaacagu

SEQ ID NO: 376763 - RNA, 20 nt, Human
gcagcagcagcaguagcagu

SEQ ID NO: 376764 - RNA, 22 nt, Human
ggaaaaaacaaaaaacaggaaa

SEQ ID NO: 376765 - RNA, 19 nt, Human
ggcgagggggaagggagga

SEQ ID NO: 376766 - RNA, 19 nt, Human
ggcggcgggaaggggucgg

SEQ ID NO: 376767 - RNA, 22 nt, Human
ggcgguggcagcagcagcagua

SEQ ID NO: 376768 - RNA, 18 nt, Human
ggggcggggcggcgggaa

SEQ ID NO: 376769 - RNA, 19 nt, Human
ggggcugggggcggggcgg

SEQ ID NO: 376770 - RNA, 21 nt, Human
guggcgguggcagcagcagca

SEQ ID NO: 376771 - RNA, 21 nt, Human
gugguaguggcgguggcagca

SEQ ID NO: 376772 - RNA, 23 nt, Human
uaacaaauaauuuaccuuuagaa

SEQ ID NO: 376773 - RNA, 22 nt, Human
uacacaccauagguuaaguagg

SEQ ID NO: 376774 - RNA, 22 nt, Human
ucaaagcaucugaaaauuucaa

SEQ ID NO: 376775 - RNA, 19 nt, Human
uccauuaauaggaagaccc

SEQ ID NO: 376776 - RNA, 18 nt, Human
ucugaaaaggaagaacuc

SEQ ID NO: 376777 - RNA, 20 nt, Human
ugaaaaggaagaacucgguc

SEQ ID NO: 376778 - RNA, 21 nt, Human
ugaaacagcaucuacaaaagu

SEQ ID NO: 376779 - RNA, 24 nt, Human
ugaaauaauacacauccuaaaaau

SEQ ID NO: 376780 - RNA, 23 nt, Human
ugagaaaaguuaaaugaauagca

SEQ ID NO: 376781 - RNA, 23 nt, Human
uggaaaaaacaaaaaacaggaaa

SEQ ID NO: 376782 - RNA, 18 nt, Human
ugugaugauguucacuua

SEQ ID NO: 376783 - RNA, 21 nt, Human
ugugaugauguucacuuacac

SEQ ID NO: 376784 - RNA, 18 nt, Human
ugugucaaguucaaagca

SEQ ID NO: 376785 - RNA, 19 nt, Human
uguguggggcugggggcgg

SEQ ID NO: 376786 - RNA, 26 nt, Human
uucuucacguuucauucuacugaagc

SEQ ID NO: 376787 - RNA, 26 nt, Human
uuuagagauggccuaauaggccuggg

SEQ ID NO: 376788 - RNA, 23 nt, Human
aaccaugcauacauacaucugcu

SEQ ID NO: 376789 - RNA, 20 nt, Human
aacuaaggaacucuaaaaag

SEQ ID NO: 376790 - RNA, 21 nt, Human
aagcaauaucugguuuuugau

SEQ ID NO: 376791 - RNA, 21 nt, Human
acucuaaaaagugcuuaaaaa

SEQ ID NO: 376792 - RNA, 24 nt, Human
acucuaaaaagugcuuaaaaauaa

SEQ ID NO: 376793 - RNA, 21 nt, Human
acucugaggauguugcugugg

SEQ ID NO: 376794 - RNA, 23 nt, Human
acugaaguaaaagaacuaaucca

SEQ ID NO: 376795 - RNA, 23 nt, Human
agcacuuugaauguugcauggag

SEQ ID NO: 376796 - RNA, 20 nt, Human
aguaaauucaagcagaacac

SEQ ID NO: 376797 - RNA, 24 nt, Human
auauacaaagugauuuuuugugca

SEQ ID NO: 376798 - RNA, 20 nt, Human
auggugaaauaauuuaaaau

SEQ ID NO: 376799 - RNA, 21 nt, Human
auuaaaagaauaaaccuauga

SEQ ID NO: 376800 - RNA, 23 nt, Human
cauaaauagacaaauacuuuaua

SEQ ID NO: 376801 - RNA, 24 nt, Human
cauuuuugaagaaaaaaucaggaa

SEQ ID NO: 376802 - RNA, 23 nt, Human
ccaaacguggaauaucacaugau

SEQ ID NO: 376803 - RNA, 19 nt, Human
ccaugcauacauacaucug

SEQ ID NO: 376804 - RNA, 19 nt, Human
ccgcagguugcuggcggug

SEQ ID NO: 376805 - RNA, 18 nt, Human
gaagaaaaaaucaggaaa

SEQ ID NO: 376806 - RNA, 23 nt, Human
gaagaauacauucuuuguguacc

SEQ ID NO: 376807 - RNA, 25 nt, Human
gaagaauacauucuuuguguaccaa

SEQ ID NO: 376808 - RNA, 20 nt, Human
gagcugucacugcgcugccu

SEQ ID NO: 376809 - RNA, 20 nt, Human
gcugaguuaugaugcugugu

SEQ ID NO: 376810 - RNA, 21 nt, Human
gucaugcaccuguauuucuua

SEQ ID NO: 376811 - RNA, 20 nt, Human
guuaacaaaauaguauaacc

SEQ ID NO: 376812 - RNA, 25 nt, Human
uaaaagaacuaauccaguuugcagu

SEQ ID NO: 376813 - RNA, 22 nt, Human
uaaaagaauaaaccuaugaaga

SEQ ID NO: 376814 - RNA, 24 nt, Human
uaaacacugaaguaaaagaacuaa

SEQ ID NO: 376815 - RNA, 19 nt, Human
uaaaccuaugaagaauaca

SEQ ID NO: 376816 - RNA, 21 nt, Human
uaacagcauuuuugaagaaaa

SEQ ID NO: 376817 - RNA, 22 nt, Human
uaagaugauacagauuaaaucc

SEQ ID NO: 376818 - RNA, 24 nt, Human
uaguauaaccaugcauacauacag

SEQ ID NO: 376819 - RNA, 29 nt, Human
uauccaaacguggaauaucacaugauuuu

SEQ ID NO: 376820 - RNA, 20 nt, Human
ucugaggauguugcuguggc

SEQ ID NO: 376821 - RNA, 23 nt, Human
ucugauggaagcacuuugaaugu

SEQ ID NO: 376822 - RNA, 26 nt, Human
ugaagaauacauucuuuguguaccaa

SEQ ID NO: 376823 - RNA, 22 nt, Human
ugcccgcgcugggcgcaaguuc

SEQ ID NO: 376824 - RNA, 19 nt, Human
ugcgcugccugcuucuccg

SEQ ID NO: 376825 - RNA, 19 nt, Human
uggaauaucacaugauuua

SEQ ID NO: 376826 - RNA, 21 nt, Human
ugguccaggagcugguggcgg

SEQ ID NO: 376827 - RNA, 24 nt, Human
uugaagaaaaaaucaggaaauugu

SEQ ID NO: 376828 - RNA, 20 nt, Human
uuuaacaaauggcuaauggu

SEQ ID NO: 376829 - RNA, 20 nt, Human
aaaaaaauacugcaggucac

SEQ ID NO: 376830 - RNA, 21 nt, Human
aaaaaacaucagaagacaaac

SEQ ID NO: 376831 - RNA, 18 nt, Human
aaacuaagggcaaauauc

SEQ ID NO: 376832 - RNA, 20 nt, Human
aaagaaaauaaacuuaagag

SEQ ID NO: 376833 - RNA, 20 nt, Human
aaagcaagcagaaggaacua

SEQ ID NO: 376834 - RNA, 22 nt, Human
aaagcaagcagaaggaacuaga

SEQ ID NO: 376835 - RNA, 24 nt, Human
aaauacugcaggucacaugaagac

SEQ ID NO: 376836 - RNA, 20 nt, Human
aacccgccucccgcagaccg

SEQ ID NO: 376837 - RNA, 22 nt, Human
aagaaaaaacaucagaagacaa

SEQ ID NO: 376838 - RNA, 20 nt, Human
aagaacacaacaauuguuua

SEQ ID NO: 376839 - RNA, 26 nt, Human
aaggcagaucaacagacuagaacuag

SEQ ID NO: 376840 - RNA, 21 nt, Human
aaggccuuaaacaacaaaaaa

SEQ ID NO: 376841 - RNA, 24 nt, Human
acauuuugggagaacaaaaggcag

SEQ ID NO: 376842 - RNA, 20 nt, Human
agaaaaaacaucagaagaca

SEQ ID NO: 376843 - RNA, 23 nt, Human
agaaaaauaaaagguaaaaagaa

SEQ ID NO: 376844 - RNA, 21 nt, Human
agaacuagaacuuuugaguua

SEQ ID NO: 376845 - RNA, 22 nt, Human
agacaaacaaacaaauguucuu

SEQ ID NO: 376846 - RNA, 18 nt, Human
agauuucugacaaauaca

SEQ ID NO: 376847 - RNA, 23 nt, Human
agcgacggcggcagccacugcua

SEQ ID NO: 376848 - RNA, 20 nt, Human
aggagaaauuacuauuuuaa

SEQ ID NO: 376849 - RNA, 19 nt, Human
aggcaaggccuuaaacaac

SEQ ID NO: 376850 - RNA, 22 nt, Human
aggcagaucaacagacuagaac

SEQ ID NO: 376851 - RNA, 21 nt, Human
aggcauauuuauacaaacaaa

SEQ ID NO: 376852 - RNA, 24 nt, Human
aguuaauaaagcaagcagaaggaa

SEQ ID NO: 376853 - RNA, 23 nt, Human
auaaagcaagcagaaggaacuag

SEQ ID NO: 376854 - RNA, 24 nt, Human
auaaagcaagcagaaggaacuaga

SEQ ID NO: 376855 - RNA, 23 nt, Human
auaacccgccucccgcagaccga

SEQ ID NO: 376856 - RNA, 24 nt, Human
auuacaauauuuaaaaggccauga

SEQ ID NO: 376857 - RNA, 21 nt, Human
auuagaaaaaaaaauacugca

SEQ ID NO: 376858 - RNA, 22 nt, Human
cagaaaauaaauuccaucagga

SEQ ID NO: 376859 - RNA, 19 nt, Human
cagaaggaacuagaaaaau

SEQ ID NO: 376860 - RNA, 20 nt, Human
cagaaggaacuagaaaaaug

SEQ ID NO: 376861 - RNA, 21 nt, Human
caggaagaaguuaacagucua

SEQ ID NO: 376862 - RNA, 23 nt, Human
cauaacccgccucccgcagaccg

SEQ ID NO: 376863 - RNA, 24 nt, Human
caucaaggcaaggccuuaaacaac

SEQ ID NO: 376864 - RNA, 25 nt, Human
caucaaggcaaggccuuaaacaaca

SEQ ID NO: 376865 - RNA, 19 nt, Human
ccccgugugcccgccgguc

SEQ ID NO: 376866 - RNA, 21 nt, Human
ccgccgccgccauaacccgcc

SEQ ID NO: 376867 - RNA, 22 nt, Human
ccucccgcagaccgacgggaac

SEQ ID NO: 376868 - RNA, 23 nt, Human
cuacggcgggggccacagacccc

SEQ ID NO: 376869 - RNA, 24 nt, Human
cucuaaaaaguccuguaaacuuag

SEQ ID NO: 376870 - RNA, 21 nt, Human
cugcuacggcgggggccacag

SEQ ID NO: 376871 - RNA, 22 nt, Human
cuugcagaaaauaaauuccauc

SEQ ID NO: 376872 - RNA, 21 nt, Human
guaaacuaagggcaaauaucu

SEQ ID NO: 376873 - RNA, 19 nt, Human
uaaaagaugguaguuccac

SEQ ID NO: 376874 - RNA, 19 nt, Human
uaaauuccaucaggaagaa

SEQ ID NO: 376875 - RNA, 24 nt, Human
uaagaaaaaacaucagaagacaaa

SEQ ID NO: 376876 - RNA, 18 nt, Human
uaagacucuaaaaagucc

SEQ ID NO: 376877 - RNA, 18 nt, Human
uaaguaaaauguucugca

SEQ ID NO: 376878 - RNA, 18 nt, Human
uagcaagguaauagaaaa

SEQ ID NO: 376879 - RNA, 19 nt, Human
ucaacagacuagaacuaga

SEQ ID NO: 376880 - RNA, 25 nt, Human
ucacugccgccgccgccauaacccg

SEQ ID NO: 376881 - RNA, 19 nt, Human
ucuacucccuacaaugaca

SEQ ID NO: 376882 - RNA, 18 nt, Human
ucugcagguuuacaaagg

SEQ ID NO: 376883 - RNA, 23 nt, Human
ucuucaaguuuggugcacaaaua

SEQ ID NO: 376884 - RNA, 22 nt, Human
ugacaaauacauuagaaaaaaa

SEQ ID NO: 376885 - RNA, 19 nt, Human
ugcaacacaauauacaaau

SEQ ID NO: 376886 - RNA, 20 nt, Human
ugcccgccggucucaggagc

SEQ ID NO: 376887 - RNA, 20 nt, Human
uggaaacauuuucacagcag

SEQ ID NO: 376888 - RNA, 24 nt, Human
uggaaacauuuucacagcaguuaa

SEQ ID NO: 376889 - RNA, 22 nt, Human
uggcucucuuaaauaucagaau

SEQ ID NO: 376890 - RNA, 23 nt, Human
uucaucugcaacacaauauacaa

SEQ ID NO: 376891 - RNA, 21 nt, Human
uucaucuucaaguuuggugca

SEQ ID NO: 376892 - RNA, 19 nt, Human
uucuugugucuucuaccau

SEQ ID NO: 376893 - RNA, 24 nt, Human
uucuugugucuucuaccauucacu

SEQ ID NO: 376894 - RNA, 22 nt, Human
uugaagggauuaauaauuauua

SEQ ID NO: 376895 - RNA, 22 nt, Human
uuggcucucuuaaauaucagaa

SEQ ID NO: 376896 - RNA, 21 nt, Human
uuggugcacaaauauguaaga

SEQ ID NO: 376897 - RNA, 25 nt, Human
uuuauaaaacgaaaaaagaaaauaa

SEQ ID NO: 376898 - RNA, 21 nt, Human
uuugggagaacaaaaggcaga

SEQ ID NO: 376899 - RNA, 26 nt, Human
aaacgacucacaaacacaggacuccg

SEQ ID NO: 376900 - RNA, 23 nt, Human
acuacugagggccgcgagaggaa

SEQ ID NO: 376901 - RNA, 24 nt, Human
acugcaugcgugacuagaccagca

SEQ ID NO: 376902 - RNA, 25 nt, Human
caacacugcaugcgugacuagacca

SEQ ID NO: 376903 - RNA, 19 nt, Human
cagccacacugggaacgac

SEQ ID NO: 376904 - RNA, 21 nt, Human
cauccccaacacugcaugcgu

SEQ ID NO: 376905 - RNA, 22 nt, Human
cccaacacugcaugcgugacua

SEQ ID NO: 376906 - RNA, 23 nt, Human
ccccaacacugcaugcgugacua

SEQ ID NO: 376907 - RNA, 21 nt, Human
ccggagcccagugccugggcc

SEQ ID NO: 376908 - RNA, 22 nt, Human
ccucaacuugcaccaguccaca

SEQ ID NO: 376909 - RNA, 19 nt, Human
ccucuggguggccucagcc

SEQ ID NO: 376910 - RNA, 23 nt, Human
cgacugucuauaacccugggaac

SEQ ID NO: 376911 - RNA, 18 nt, Human
cucagagcaguaaaaacc

SEQ ID NO: 376912 - RNA, 20 nt, Human
cucagagcaguaaaaaccaa

SEQ ID NO: 376913 - RNA, 21 nt, Human
cuccggagcccagugccuggg

SEQ ID NO: 376914 - RNA, 20 nt, Human
gaaaagcaacucaggguggc

SEQ ID NO: 376915 - RNA, 21 nt, Human
gacuagaccagcaagaagucc

SEQ ID NO: 376916 - RNA, 27 nt, Human
gagcaguaaaaaccaaggcauccccaa

SEQ ID NO: 376917 - RNA, 20 nt, Human
gagccacaggaacuggggcg

SEQ ID NO: 376918 - RNA, 18 nt, Human
gauaaccuuccccauagg

SEQ ID NO: 376919 - RNA, 28 nt, Human
gcacugauaaccuuccccaaccggaggg

SEQ ID NO: 376920 - RNA, 19 nt, Human
gcagggacuacugagggcc

SEQ ID NO: 376921 - RNA, 22 nt, Human
gccacacugggaacgacugucu

SEQ ID NO: 376922 - RNA, 19 nt, Human
ggagcccagugccugggcc

SEQ ID NO: 376923 - RNA, 22 nt, Human
ggguccuuucauguccgauccc

SEQ ID NO: 376924 - RNA, 25 nt, Human
uaaaguaucucaacaauucucagag

SEQ ID NO: 376925 - RNA, 18 nt, Human
ucacaaacacaggacucc

SEQ ID NO: 376926 - RNA, 23 nt, Human
ucagcugaaaagcaacucagggu

SEQ ID NO: 376927 - RNA, 20 nt, Human
uccacauggcagcagggggc

SEQ ID NO: 376928 - RNA, 19 nt, Human
ucucagagcaguaaaaacc

SEQ ID NO: 376929 - RNA, 18 nt, Human
ucugaaugcucugcugcc

SEQ ID NO: 376930 - RNA, 21 nt, Human
ugaaaagcaacucaggguggc

SEQ ID NO: 376931 - RNA, 21 nt, Human
ugacuagaccagcaagaaguc

SEQ ID NO: 376932 - RNA, 20 nt, Human
ugagcuggaugacagggccg

SEQ ID NO: 376933 - RNA, 20 nt, Human
ugcagagaaacuuaaaauca

SEQ ID NO: 376934 - RNA, 18 nt, Human
ugcagggacuacugaggg

SEQ ID NO: 376935 - RNA, 21 nt, Human
ugcgugacuagaccagcaaga

SEQ ID NO: 376936 - RNA, 26 nt, Human
ugcucugcugccucuggguggccuca

SEQ ID NO: 376937 - RNA, 20 nt, Human
uggaugacagggccgcugga

SEQ ID NO: 376938 - RNA, 21 nt, Human
uggaugacagggccgcuggag

SEQ ID NO: 376939 - RNA, 20 nt, Human
uggcagcagggggcaguggu

SEQ ID NO: 376940 - RNA, 25 nt, Human
uggcagcagggggcaguggugaguc

SEQ ID NO: 376941 - RNA, 21 nt, Human
ugggaacgacugucuauaacc

SEQ ID NO: 376942 - RNA, 19 nt, Human
uggugaguccuccggagcc

SEQ ID NO: 376943 - RNA, 18 nt, Human
uguccgauccccuuagca

SEQ ID NO: 376944 - RNA, 21 nt, Human
uuuuccaacuacacaguuuau

SEQ ID NO: 376945 - RNA, 18 nt, Human
aaaauagacuccgcccuc

SEQ ID NO: 376946 - RNA, 18 nt, Human
aaauccuagcgccggccc

SEQ ID NO: 376947 - RNA, 19 nt, Human
acuccgcccucagccaucc

SEQ ID NO: 376948 - RNA, 20 nt, Human
cacaacucuagcagccaggc

SEQ ID NO: 376949 - RNA, 23 nt, Human
cacccccuagcucaggcuccgcc

SEQ ID NO: 376950 - RNA, 18 nt, Human
caccgcgcgacgcaucgu

SEQ ID NO: 376951 - RNA, 24 nt, Human
cacuguccuggccugaccuucagc

SEQ ID NO: 376952 - RNA, 24 nt, Human
caucgugcuagcuacacgcaucuc

SEQ ID NO: 376953 - RNA, 19 nt, Human
ccacacccccuagcucagg

SEQ ID NO: 376954 - RNA, 21 nt, Human
ccccugccaccacaacucuag

SEQ ID NO: 376955 - RNA, 23 nt, Human
cccgccggguccuccgggagcca

SEQ ID NO: 376956 - RNA, 20 nt, Human
ccggaaagcuaucgagaaca

SEQ ID NO: 376957 - RNA, 26 nt, Human
ccugccccuccugggcugauuggcca

SEQ ID NO: 376958 - RNA, 18 nt, Human
ccuggccugaccuucagc

SEQ ID NO: 376959 - RNA, 22 nt, Human
ccuuccagcaucacgucugguc

SEQ ID NO: 376960 - RNA, 25 nt, Human
cgacgugcuggcccuucccucuugg

SEQ ID NO: 376961 - RNA, 19 nt, Human
cgggacgagcccauuucuc

SEQ ID NO: 376962 - RNA, 22 nt, Human
cucgcucccagaucccuuucuu

SEQ ID NO: 376963 - RNA, 25 nt, Human
cucgcucccagaucccuuucuuccg

SEQ ID NO: 376964 - RNA, 24 nt, Human
cugggcccgccggguccuccggga

SEQ ID NO: 376965 - RNA, 19 nt, Human
gaauuuccccgcccccacc

SEQ ID NO: 376966 - RNA, 21 nt, Human
gccccggggaaccugccccuc

SEQ ID NO: 376967 - RNA, 18 nt, Human
gcccugggucuuaagccc

SEQ ID NO: 376968 - RNA, 26 nt, Human
gccggccccggggaaccugccccucc

SEQ ID NO: 376969 - RNA, 22 nt, Human
gcguaaaauagacuccgcccuc

SEQ ID NO: 376970 - RNA, 18 nt, Human
gcgucgggccagagcguc

SEQ ID NO: 376971 - RNA, 19 nt, Human
gcucuaugcucucugccgu

SEQ ID NO: 376972 - RNA, 23 nt, Human
gcucucugccguuaucgcccggc

SEQ ID NO: 376973 - RNA, 23 nt, Human
ggcccgccggguccuccgggagc

SEQ ID NO: 376974 - RNA, 18 nt, Human
guaaaauagacuccgccc

SEQ ID NO: 376975 - RNA, 18 nt, Human
guaggagcagguggcaag

SEQ ID NO: 376976 - RNA, 22 nt, Human
uagcagccaggccacacccccu

SEQ ID NO: 376977 - RNA, 18 nt, Human
uccccgcccccacccgcg

SEQ ID NO: 376978 - RNA, 19 nt, Human
ucuguuacaucaacgggac

SEQ ID NO: 376979 - RNA, 24 nt, Human
ugagacggggccagggccccugcc

SEQ ID NO: 376980 - RNA, 19 nt, Human
ugaggccuaccccagccag

SEQ ID NO: 376981 - RNA, 22 nt, Human
ugaggccuaccccagccaguac

SEQ ID NO: 376982 - RNA, 23 nt, Human
ugccaccacaacucuagcagcca

SEQ ID NO: 376983 - RNA, 21 nt, Human
uggaauguaggccccgccccc

SEQ ID NO: 376984 - RNA, 23 nt, Human
uggauggggcgaggcugcgggcc

SEQ ID NO: 376985 - RNA, 18 nt, Human
uggccggguaggagcagg

SEQ ID NO: 376986 - RNA, 21 nt, Human
uggccugaccuucagcucucc

SEQ ID NO: 376987 - RNA, 21 nt, Human
ugggucuuaagccauaguagg

SEQ ID NO: 376988 - RNA, 19 nt, Human
ugguaggagcaaggaguca

SEQ ID NO: 376989 - RNA, 22 nt, Human
ugguaggagcaaggagucaggu

SEQ ID NO: 376990 - RNA, 23 nt, Human
ugucauugggcgacgcguaaaau

SEQ ID NO: 376991 - RNA, 22 nt, Human
uguccuggccugaccuucagcc

SEQ ID NO: 376992 - RNA, 21 nt, Human
uuggggacggaggacgcgcau

SEQ ID NO: 376993 - RNA, 19 nt, Human
uuuccccgcccccacccgc

SEQ ID NO: 376994 - RNA, 21 nt, Human
uuuuuuuuuuuuuugagagga

SEQ ID NO: 376995 - RNA, 22 nt, Human
uuuuuuuuuuuuuuuugagagg

SEQ ID NO: 376996 - RNA, 18 nt, Human
uuuuuuuuuuuuuuuuug

SEQ ID NO: 376997 - RNA, 23 nt, Human
acaguccugccucugggccccgg

SEQ ID NO: 376998 - RNA, 23 nt, Human
agccgggguggaguccuggaggg

SEQ ID NO: 376999 - RNA, 24 nt, Human
agggaggcgaagcgggauguggag

SEQ ID NO: 377000 - RNA, 20 nt, Human
cacaguccugccucugggcc

SEQ ID NO: 377001 - RNA, 21 nt, Human
caggggcuggacggucguggg

SEQ ID NO: 377002 - RNA, 20 nt, Human
cccccugagcuacaggagcu

SEQ ID NO: 377003 - RNA, 19 nt, Human
ccccugagcuacaggagcc

SEQ ID NO: 377004 - RNA, 21 nt, Human
ccccugagcuacaggagcccu

SEQ ID NO: 377005 - RNA, 18 nt, Human
cccggcccgccacagucc

SEQ ID NO: 377006 - RNA, 24 nt, Human
ccggcccgccacaguccugccucu

SEQ ID NO: 377007 - RNA, 20 nt, Human
ccucaggauggggugcccgu

SEQ ID NO: 377008 - RNA, 18 nt, Human
ccucugcaagguugccgg

SEQ ID NO: 377009 - RNA, 20 nt, Human
ccuggaguggggggaggggc

SEQ ID NO: 377010 - RNA, 21 nt, Human
cgcccagcuggcgucgggagc

SEQ ID NO: 377011 - RNA, 24 nt, Human
cgcccagcuggcgucgggagccgg

SEQ ID NO: 377012 - RNA, 20 nt, Human
cggggaggccuggcggggcc

SEQ ID NO: 377013 - RNA, 23 nt, Human
cucugggccccgggagcguccuc

SEQ ID NO: 377014 - RNA, 28 nt, Human
cuugagacucccaaggcaguaccccggg

SEQ ID NO: 377015 - RNA, 21 nt, Human
gagguuaaugggugggagggg

SEQ ID NO: 377016 - RNA, 19 nt, Human
gaguggggggaggggcggg

SEQ ID NO: 377017 - RNA, 20 nt, Human
gcccagcuggcgucgggagc

SEQ ID NO: 377018 - RNA, 23 nt, Human
ggaguccuggagggaggcgaagc

SEQ ID NO: 377019 - RNA, 23 nt, Human
ggccuggaguggggggaggggcg

SEQ ID NO: 377020 - RNA, 18 nt, Human
ggcggggccggcgggggc

SEQ ID NO: 377021 - RNA, 20 nt, Human
ggcgucgggagccggggugg

SEQ ID NO: 377022 - RNA, 18 nt, Human
ggggaggccuggcggggc

SEQ ID NO: 377023 - RNA, 18 nt, Human
gugcccgucaggggcugg

SEQ ID NO: 377024 - RNA, 18 nt, Human
uaaugggugggaggggug

SEQ ID NO: 377025 - RNA, 22 nt, Human
uaccccgggucguccucugcaa

SEQ ID NO: 377026 - RNA, 23 nt, Human
ucaggggcuggacggucgugggg

SEQ ID NO: 377027 - RNA, 22 nt, Human
ugacauugcagggccagcacaa

SEQ ID NO: 377028 - RNA, 18 nt, Human
ugcagggcucaggccugc

SEQ ID NO: 377029 - RNA, 23 nt, Human
ugcagggcucaggccugcccccu

SEQ ID NO: 377030 - RNA, 24 nt, Human
ugccucugggccccgggagcgucc

SEQ ID NO: 377031 - RNA, 26 nt, Human
uggagggggccuggaguggggggagg

SEQ ID NO: 377032 - RNA, 20 nt, Human
uggaguggggggaggggcgg

SEQ ID NO: 377033 - RNA, 20 nt, Human
ugggaggagguuaaugggug

SEQ ID NO: 377034 - RNA, 21 nt, Human
ugggaggagguuaaugggugg

SEQ ID NO: 377035 - RNA, 19 nt, Human
uggggcgggugcagggcuc

SEQ ID NO: 377036 - RNA, 22 nt, Human
uggggugcccgucaggggcugg

SEQ ID NO: 377037 - RNA, 20 nt, Human
uugcagggccagcacaaguu

SEQ ID NO: 377038 - RNA, 24 nt, Human
uuuugggaggagguuaaugggugg

SEQ ID NO: 377039 - RNA, 20 nt, Human
aaggauucuuuuuuucuuua

SEQ ID NO: 377040 - RNA, 18 nt, Human
agaaaaaggggaaaugca

SEQ ID NO: 377041 - RNA, 24 nt, Human
aggaaaagagaaaaaggggaaaug

SEQ ID NO: 377042 - RNA, 18 nt, Human
aggagcaaaagccaagaa

SEQ ID NO: 377043 - RNA, 21 nt, Human
agugaagguggucucuccauc

SEQ ID NO: 377044 - RNA, 24 nt, Human
caaugcacaagucaccugggcagu

SEQ ID NO: 377045 - RNA, 26 nt, Human
ccaggagcaaaagccaagaaacaagg

SEQ ID NO: 377046 - RNA, 24 nt, Human
ccagugaagguggucucuccaucu

SEQ ID NO: 377047 - RNA, 18 nt, Human
ccccugcggucuguuacc

SEQ ID NO: 377048 - RNA, 21 nt, Human
ccgcgccggcugucuugcccc

SEQ ID NO: 377049 - RNA, 21 nt, Human
gagcaaaagccaagaaacaaa

SEQ ID NO: 377050 - RNA, 23 nt, Human
gagcaaaagccaagaaacaagga

SEQ ID NO: 377051 - RNA, 20 nt, Human
uaaagcaaugcacaagucac

SEQ ID NO: 377052 - RNA, 19 nt, Human
uauccaucacuacacaugg

SEQ ID NO: 377053 - RNA, 24 nt, Human
ucaccugggcaguaagcuuaacuc

SEQ ID NO: 377054 - RNA, 22 nt, Human
uccaggagcaaaagccaagaaa

SEQ ID NO: 377055 - RNA, 25 nt, Human
ucugccagugaagguggucucucca

SEQ ID NO: 377056 - RNA, 23 nt, Human
uggcugucuuccauaccugcucu

SEQ ID NO: 377057 - RNA, 23 nt, Human
ugucuugccccugcggucuguua

SEQ ID NO: 377058 - RNA, 20 nt, Human
uuaccugcgccacucgcagg

SEQ ID NO: 377059 - RNA, 21 nt, Human
uuccauaccugcucucagaaa

SEQ ID NO: 377060 - RNA, 24 nt, Human
agauggugaagguaggugauucag

SEQ ID NO: 377061 - RNA, 19 nt, Human
agcaaauaagacaagcucc

SEQ ID NO: 377062 - RNA, 20 nt, Human
aggaggaaagaaauggaaaa

SEQ ID NO: 377063 - RNA, 21 nt, Human
aggaggaaagaaauggaaaag

SEQ ID NO: 377064 - RNA, 21 nt, Human
auagcaaauaagacaagcucc

SEQ ID NO: 377065 - RNA, 23 nt, Human
auggaaaagacugaaaaucagug

SEQ ID NO: 377066 - RNA, 24 nt, Human
cccaaaagcucuguauuguuuucu

SEQ ID NO: 377067 - RNA, 18 nt, Human
cccucagaucacagauuc

SEQ ID NO: 377068 - RNA, 19 nt, Human
gaggaaagaaauggaaaag

SEQ ID NO: 377069 - RNA, 27 nt, Human
ggacauuuugagggcucaaacuuggug

SEQ ID NO: 377070 - RNA, 18 nt, Human
guuuauuuuuucccucau

SEQ ID NO: 377071 - RNA, 23 nt, Human
ucuaggaggaaagaaauggaaaa

SEQ ID NO: 377072 - RNA, 23 nt, Human
ucuauagcaaauaagaccggggc

SEQ ID NO: 377073 - RNA, 19 nt, Human
uggaaaagacugaaaauca

SEQ ID NO: 377074 - RNA, 19 nt, Human
uggaaaagacugaaaauca

SEQ ID NO: 377075 - RNA, 21 nt, Human
uggaaaugucuuuauacccuc

SEQ ID NO: 377076 - RNA, 23 nt, Human
uguaaucaggacauuuugagggc

SEQ ID NO: 377077 - RNA, 24 nt, Human
aaacccaucccugccagaccagga

SEQ ID NO: 377078 - RNA, 21 nt, Human
aaagcaaacccaucccugcca

SEQ ID NO: 377079 - RNA, 22 nt, Human
aagcaaagaaaacucuaccugg

SEQ ID NO: 377080 - RNA, 18 nt, Human
aagguggccgggcaggca

SEQ ID NO: 377081 - RNA, 24 nt, Human
aagguggccgggcaggcagggggc

SEQ ID NO: 377082 - RNA, 21 nt, Human
aagucgccuuuccggaccuuc

SEQ ID NO: 377083 - RNA, 22 nt, Human
acaaacaaaagaaacgauucca

SEQ ID NO: 377084 - RNA, 18 nt, Human
agcccccggaagucgccu

SEQ ID NO: 377085 - RNA, 24 nt, Human
agccgcgcuacaccucccaacgcg

SEQ ID NO: 377086 - RNA, 23 nt, Human
agccguuggggucucgcgaucag

SEQ ID NO: 377087 - RNA, 18 nt, Human
aggcaauggaauucaaca

SEQ ID NO: 377088 - RNA, 18 nt, Human
agguggccgggcaggcag

SEQ ID NO: 377089 - RNA, 19 nt, Human
agguggccgggcaggcagg

SEQ ID NO: 377090 - RNA, 24 nt, Human
aucacuucugugaugagaaaagag

SEQ ID NO: 377091 - RNA, 24 nt, Human
caaacaaaagaaacgauuccaaca

SEQ ID NO: 377092 - RNA, 23 nt, Human
caaagcaaacccaucccugccag

SEQ ID NO: 377093 - RNA, 24 nt, Human
caaagcccccggaagucgccuuuc

SEQ ID NO: 377094 - RNA, 18 nt, Human
cagagaaacagaccucaa

SEQ ID NO: 377095 - RNA, 20 nt, Human
cagccgagacgcgcaggcga

SEQ ID NO: 377096 - RNA, 23 nt, Human
cagccgagacgcgcaggcgacgc

SEQ ID NO: 377097 - RNA, 24 nt, Human
cauaaaucagacaaacaaaagaaa

SEQ ID NO: 377098 - RNA, 20 nt, Human
caucccugccagaccaggaa

SEQ ID NO: 377099 - RNA, 21 nt, Human
ccaaagcaaacccaucccugc

SEQ ID NO: 377100 - RNA, 21 nt, Human
ccaacaucacuucugugauga

SEQ ID NO: 377101 - RNA, 24 nt, Human
cccagagaaacagaccucagcccu

SEQ ID NO: 377102 - RNA, 22 nt, Human
cccaucccugccagaccaggaa

SEQ ID NO: 377103 - RNA, 18 nt, Human
ccccucccuuccccaguc

SEQ ID NO: 377104 - RNA, 19 nt, Human
cccucccuuccccaguccu

SEQ ID NO: 377105 - RNA, 25 nt, Human
ccucuauuuaaaaaaagcucacaca

SEQ ID NO: 377106 - RNA, 21 nt, Human
cgcccggccuucucggcgcgc

SEQ ID NO: 377107 - RNA, 22 nt, Human
cgccugcgacacucaacggccc

SEQ ID NO: 377108 - RNA, 18 nt, Human
cgcgcuacaccucccaac

SEQ ID NO: 377109 - RNA, 18 nt, Human
cggcucccgaagguggcc

SEQ ID NO: 377110 - RNA, 24 nt, Human
cuaccucccagagaaacagaccuc

SEQ ID NO: 377111 - RNA, 24 nt, Human
cucaaauccgagucaaucccucua

SEQ ID NO: 377112 - RNA, 19 nt, Human
cucccagagaaacagaccu

SEQ ID NO: 377113 - RNA, 20 nt, Human
cucccagagaaacagaccuc

SEQ ID NO: 377114 - RNA, 19 nt, Human
gaagccccucaacgcgcac

SEQ ID NO: 377115 - RNA, 18 nt, Human
gccaggugccaaagcccc

SEQ ID NO: 377116 - RNA, 24 nt, Human
gccgccugcgacacucaacggccc

SEQ ID NO: 377117 - RNA, 20 nt, Human
gccugcgacacucaacggcc

SEQ ID NO: 377118 - RNA, 20 nt, Human
gggcaggcagggggcggggc

SEQ ID NO: 377119 - RNA, 19 nt, Human
ggggaaggccccuuuuuau

SEQ ID NO: 377120 - RNA, 20 nt, Human
guguggggacgcccggccuu

SEQ ID NO: 377121 - RNA, 27 nt, Human
uaaaaaaaccauaaaucagacaaacaa

SEQ ID NO: 377122 - RNA, 24 nt, Human
uaauaaaaaacuuuuguuuauacu

SEQ ID NO: 377123 - RNA, 20 nt, Human
uagucuccccucccuucccc

SEQ ID NO: 377124 - RNA, 22 nt, Human
ucacucaaauccgagucaaucc

SEQ ID NO: 377125 - RNA, 22 nt, Human
ucagcccuaaugaucacucaaa

SEQ ID NO: 377126 - RNA, 19 nt, Human
ucagccgagacgcgcaggc

SEQ ID NO: 377127 - RNA, 22 nt, Human
uccaacaucacuucugugauga

SEQ ID NO: 377128 - RNA, 18 nt, Human
ucccagagaaacagaccu

SEQ ID NO: 377129 - RNA, 19 nt, Human
ucgccgccugcgacacuca

SEQ ID NO: 377130 - RNA, 18 nt, Human
ucgcgaucaggugcggga

SEQ ID NO: 377131 - RNA, 19 nt, Human
ucugugaugagaaaagagg

SEQ ID NO: 377132 - RNA, 19 nt, Human
uggccgggcaggcaggggg

SEQ ID NO: 377133 - RNA, 21 nt, Human
uuaaaaaaagcucacacauag

SEQ ID NO: 377134 - RNA, 18 nt, Human
uuccccaguccucuuggc

SEQ ID NO: 377135 - RNA, 22 nt, Human
acauucucgucccucaagaggg

SEQ ID NO: 377136 - RNA, 18 nt, Human
caaagcacccgcagguca

SEQ ID NO: 377137 - RNA, 20 nt, Human
caagccccgccccguccccc

SEQ ID NO: 377138 - RNA, 25 nt, Human
caccacccucucugagguggucaug

SEQ ID NO: 377139 - RNA, 22 nt, Human
cagccccgagucccugucccac

SEQ ID NO: 377140 - RNA, 27 nt, Human
cagccccgagucccugucccacccccu

SEQ ID NO: 377141 - RNA, 19 nt, Human
cagcgcagcucuggccucc

SEQ ID NO: 377142 - RNA, 21 nt, Human
caugccuccucgaugaagccg

SEQ ID NO: 377143 - RNA, 21 nt, Human
ccccagccccgagucccuguc

SEQ ID NO: 377144 - RNA, 20 nt, Human
cccccucagcagugccucuu

SEQ ID NO: 377145 - RNA, 21 nt, Human
cccccuuucccccucgagccc

SEQ ID NO: 377146 - RNA, 21 nt, Human
ccccgagucccugucccaccc

SEQ ID NO: 377147 - RNA, 24 nt, Human
ccccgccccgucccccagccccga

SEQ ID NO: 377148 - RNA, 18 nt, Human
ccccucagcagugccucu

SEQ ID NO: 377149 - RNA, 21 nt, Human
cccgccccgucccccagcccc

SEQ ID NO: 377150 - RNA, 21 nt, Human
cgccauggcugcugucagcgc

SEQ ID NO: 377151 - RNA, 18 nt, Human
cgccccgucccccagccc

SEQ ID NO: 377152 - RNA, 22 nt, Human
cgcgcccccucagcagugccuc

SEQ ID NO: 377153 - RNA, 18 nt, Human
ggaaugcgaugaucucau

SEQ ID NO: 377154 - RNA, 21 nt, Human
ucaagagcauguugagguuug

SEQ ID NO: 377155 - RNA, 19 nt, Human
ucaaugucucgcuugcaug

SEQ ID NO: 377156 - RNA, 24 nt, Human
ucaccacguucacauucucguccc

SEQ ID NO: 377157 - RNA, 19 nt, Human
ucccacccccuuucccccu

SEQ ID NO: 377158 - RNA, 21 nt, Human
ucccccagccccgagucccug

SEQ ID NO: 377159 - RNA, 18 nt, Human
uccccucgcgcccccuca

SEQ ID NO: 377160 - RNA, 21 nt, Human
uccccucgcgcccccucagca

SEQ ID NO: 377161 - RNA, 18 nt, Human
uggaaugcgaugaucuca

SEQ ID NO: 377162 - RNA, 19 nt, Human
uggaaugcgaugaucucau

SEQ ID NO: 377163 - RNA, 24 nt, Human
uguccaguagugugggucuuuguu

SEQ ID NO: 377164 - RNA, 22 nt, Human
ugucccacccccuuucccccuc

SEQ ID NO: 377165 - RNA, 20 nt, Human
ugucuccacugccgcucgcu

SEQ ID NO: 377166 - RNA, 19 nt, Human
uuugagcacugugaucuuu

SEQ ID NO: 377167 - RNA, 22 nt, Human
aaaaaggagauucgggugagga

SEQ ID NO: 377168 - RNA, 18 nt, Human
aaaagaaaaaaaaaaagg

SEQ ID NO: 377169 - RNA, 19 nt, Human
aacauggugaaaccccauc

SEQ ID NO: 377170 - RNA, 20 nt, Human
aacauggugaaaccccaucu

SEQ ID NO: 377171 - RNA, 21 nt, Human
aacauggugaaaccccaucuc

SEQ ID NO: 377172 - RNA, 21 nt, Human
aacauggugaaaccccaucuc

SEQ ID NO: 377173 - RNA, 21 nt, Human
aagaggugggugaggaggcaa

SEQ ID NO: 377174 - RNA, 21 nt, Human
aagcagcugggcaugguggug

SEQ ID NO: 377175 - RNA, 21 nt, Human
aaggugcuggaggcuggcuga

SEQ ID NO: 377176 - RNA, 24 nt, Human
aaucgccugaacuuaggaggcaga

SEQ ID NO: 377177 - RNA, 19 nt, Human
acaaagcgaaacucugucu

SEQ ID NO: 377178 - RNA, 20 nt, Human
acaaagcgaaacucugucuc

SEQ ID NO: 377179 - RNA, 24 nt, Human
acaaagcgaaacucugucucaaaa

SEQ ID NO: 377180 - RNA, 24 nt, Human
agagguugcagugaacugagaucg

SEQ ID NO: 377181 - RNA, 22 nt, Human
agaucaccugaggucaggaguu

SEQ ID NO: 377182 - RNA, 24 nt, Human
agcacuuugggaggcugaggcagg

SEQ ID NO: 377183 - RNA, 24 nt, Human
agccuagccaacauggugaaaccc

SEQ ID NO: 377184 - RNA, 22 nt, Human
agccugggcgacaaagcgaaac

SEQ ID NO: 377185 - RNA, 24 nt, Human
agccugggcgacaaagcgaaacuc

SEQ ID NO: 377186 - RNA, 18 nt, Human
agcgagggggcaguggga

SEQ ID NO: 377187 - RNA, 23 nt, Human
agcugggcaugguggugggugcc

SEQ ID NO: 377188 - RNA, 20 nt, Human
aggcagagguugcagugaac

SEQ ID NO: 377189 - RNA, 24 nt, Human
aggcagagguugcagugaacugag

SEQ ID NO: 377190 - RNA, 18 nt, Human
aggcaggagaaucgccug

SEQ ID NO: 377191 - RNA, 19 nt, Human
aggcaggagcaagagcugg

SEQ ID NO: 377192 - RNA, 22 nt, Human
aggcagguagaucaccugaggu

SEQ ID NO: 377193 - RNA, 26 nt, Human
aggcagguagaucaccugaggucagg

SEQ ID NO: 377194 - RNA, 22 nt, Human
aggcgcuaguugugggugcugg

SEQ ID NO: 377195 - RNA, 24 nt, Human
aggcucaugucuguaaucucagca

SEQ ID NO: 377196 - RNA, 21 nt, Human
aggcugaggcagguagaucac

SEQ ID NO: 377197 - RNA, 24 nt, Human
agggugccggguggaaacauggga

SEQ ID NO: 377198 - RNA, 19 nt, Human
aggucaggaguuugagacc

SEQ ID NO: 377199 - RNA, 19 nt, Human
aggugcuggaggcuggcuu

SEQ ID NO: 377200 - RNA, 20 nt, Human
aucaccugaggucaggaguu

SEQ ID NO: 377201 - RNA, 24 nt, Human
aucaccugaggucaggaguuugag

SEQ ID NO: 377202 - RNA, 19 nt, Human
augucuguaaucucagcac

SEQ ID NO: 377203 - RNA, 24 nt, Human
auugcacuccagccugggcgacaa

SEQ ID NO: 377204 - RNA, 19 nt, Human
caaaagaaaaaaaaaaagg

SEQ ID NO: 377205 - RNA, 24 nt, Human
caacauggugaaaccccaucucua

SEQ ID NO: 377206 - RNA, 23 nt, Human
caccugaggucaggaguuugaga

SEQ ID NO: 377207 - RNA, 24 nt, Human
cagcacuuugggaggcugaggcag

SEQ ID NO: 377208 - RNA, 24 nt, Human
cagcacuuugggaggcugaggcag

SEQ ID NO: 377209 - RNA, 18 nt, Human
caggagcaagagcuggga

SEQ ID NO: 377210 - RNA, 24 nt, Human
caggcaggagcaagagcugggacc

SEQ ID NO: 377211 - RNA, 24 nt, Human
cagguagaucaccugaggucagga

SEQ ID NO: 377212 - RNA, 22 nt, Human
caugguggugggugccuguaau

SEQ ID NO: 377213 - RNA, 24 nt, Human
caugucuguaaucucagcacuuug

SEQ ID NO: 377214 - RNA, 19 nt, Human
cauugcacuccagccuggg

SEQ ID NO: 377215 - RNA, 20 nt, Human
cauugcacuccagccugggc

SEQ ID NO: 377216 - RNA, 20 nt, Human
cauugcacuccagccugggc

SEQ ID NO: 377217 - RNA, 21 nt, Human
cauugcacuccagccugggcg

SEQ ID NO: 377218 - RNA, 22 nt, Human
cauugcacuccagccugggcga

SEQ ID NO: 377219 - RNA, 24 nt, Human
cauugcacuccagccugggcgaca

SEQ ID NO: 377220 - RNA, 24 nt, Human
ccuagccaacauggugaaacccca

SEQ ID NO: 377221 - RNA, 22 nt, Human
ccugaggucaggaguuugagac

SEQ ID NO: 377222 - RNA, 20 nt, Human
ccugggcgacaaagcgaaac

SEQ ID NO: 377223 - RNA, 23 nt, Human
cgaaacucugucucaaaagaaaa

SEQ ID NO: 377224 - RNA, 24 nt, Human
cgagggggcagugggauggugaga

SEQ ID NO: 377225 - RNA, 21 nt, Human
cgugcauugcacuccagccug

SEQ ID NO: 377226 - RNA, 22 nt, Human
cucaaaagaaaaaaaaaaagga

SEQ ID NO: 377227 - RNA, 23 nt, Human
cucaaaagaaaaaaaaaaaggag

SEQ ID NO: 377228 - RNA, 22 nt, Human
cucaugaggauucagagugaag

SEQ ID NO: 377229 - RNA, 24 nt, Human
cucaugucuguaaucucagcacuu

SEQ ID NO: 377230 - RNA, 20 nt, Human
cucuaccaaaaauacaaaaa

SEQ ID NO: 377231 - RNA, 22 nt, Human
cucuaccaaaaauacaaaaaag

SEQ ID NO: 377232 - RNA, 21 nt, Human
cugcccaggcgcuaguugugg

SEQ ID NO: 377233 - RNA, 22 nt, Human
cuggcugagauuccggccucca

SEQ ID NO: 377234 - RNA, 22 nt, Human
cugggugaggauggcagcagga

SEQ ID NO: 377235 - RNA, 21 nt, Human
cuguaaucucagcacuuuggg

SEQ ID NO: 377236 - RNA, 19 nt, Human
gacaaagcgaaacucuguc

SEQ ID NO: 377237 - RNA, 21 nt, Human
gacaaagcgaaacucugucuc

SEQ ID NO: 377238 - RNA, 23 nt, Human
gagaccagccuagccaacauggu

SEQ ID NO: 377239 - RNA, 24 nt, Human
gaucaccugaggucaggaguuuga

SEQ ID NO: 377240 - RNA, 20 nt, Human
gcacuggggccaggucacuc

SEQ ID NO: 377241 - RNA, 21 nt, Human
gcauugcacuccagccugggc

SEQ ID NO: 377242 - RNA, 24 nt, Human
gcauugcacuccagccugggcgac

SEQ ID NO: 377243 - RNA, 24 nt, Human
gccaacauggugaaaccccaucuc

SEQ ID NO: 377244 - RNA, 23 nt, Human
gcgacaaagcgaaacucugucuc

SEQ ID NO: 377245 - RNA, 18 nt, Human
ggaccggcucggcugaua

SEQ ID NO: 377246 - RNA, 23 nt, Human
ggaggcucaugucuguaaucuca

SEQ ID NO: 377247 - RNA, 24 nt, Human
ggaggcucaugucuguaaucucag

SEQ ID NO: 377248 - RNA, 19 nt, Human
ggcaggagcaagagcuggg

SEQ ID NO: 377249 - RNA, 22 nt, Human
ggcagugggauggugagaggga

SEQ ID NO: 377250 - RNA, 23 nt, Human
ggcaugguggugggugccuguaa

SEQ ID NO: 377251 - RNA, 20 nt, Human
ggcucaugucuguaaucuca

SEQ ID NO: 377252 - RNA, 21 nt, Human
ggcucaugucuguaaucucag

SEQ ID NO: 377253 - RNA, 23 nt, Human
gggcagugggauggugagaggga

SEQ ID NO: 377254 - RNA, 19 nt, Human
ggucaggaguuugagacca

SEQ ID NO: 377255 - RNA, 21 nt, Human
ggugccggguggaaacauggg

SEQ ID NO: 377256 - RNA, 24 nt, Human
gguggugggugccuguaaucucag

SEQ ID NO: 377257 - RNA, 21 nt, Human
uaccaaaaauacaaaaaagca

SEQ ID NO: 377258 - RNA, 22 nt, Human
uaccaaaaauacaaaaaagcag

SEQ ID NO: 377259 - RNA, 23 nt, Human
uagaucaccugaggucaggaguu

SEQ ID NO: 377260 - RNA, 24 nt, Human
uagaucaccugaggucaggaguuu

SEQ ID NO: 377261 - RNA, 27 nt, Human
uagaucaccugaggucaggaguuugag

SEQ ID NO: 377262 - RNA, 21 nt, Human
uaguugugggugcugggugag

SEQ ID NO: 377263 - RNA, 19 nt, Human
ucacuccaccaccucccga

SEQ ID NO: 377264 - RNA, 22 nt, Human
ucagggugccggguggaaacau

SEQ ID NO: 377265 - RNA, 22 nt, Human
ucaugaggauucagagugaaga

SEQ ID NO: 377266 - RNA, 19 nt, Human
ucauucaguccacagacgu

SEQ ID NO: 377267 - RNA, 22 nt, Human
uccagccugggcgacaaagcga

SEQ ID NO: 377268 - RNA, 26 nt, Human
uccagggcugagaagccucaugagga

SEQ ID NO: 377269 - RNA, 21 nt, Human
ucgugcauugcacuccagccu

SEQ ID NO: 377270 - RNA, 23 nt, Human
ucugucucaaaagaaaaaaaaaa

SEQ ID NO: 377271 - RNA, 24 nt, Human
ucugucucaaaagaaaaaaaaaaa

SEQ ID NO: 377272 - RNA, 19 nt, Human
ugaagaggugggugaggag

SEQ ID NO: 377273 - RNA, 23 nt, Human
ugagaccagccuagccaacaugg

SEQ ID NO: 377274 - RNA, 18 nt, Human
ugagaucgugcauugcac

SEQ ID NO: 377275 - RNA, 23 nt, Human
ugagaucgugcauugcacuccag

SEQ ID NO: 377276 - RNA, 25 nt, Human
ugagaucgugcauugcacuccagcc

SEQ ID NO: 377277 - RNA, 20 nt, Human
ugaggcaggagaaucgccug

SEQ ID NO: 377278 - RNA, 23 nt, Human
ugaggcaggagaaucgccugaac

SEQ ID NO: 377279 - RNA, 24 nt, Human
ugaggcaggagaaucgccugaacu

SEQ ID NO: 377280 - RNA, 25 nt, Human
ugaggcaggagaaucgccugaacuu

SEQ ID NO: 377281 - RNA, 20 nt, Human
ugaggcagguagaucaccug

SEQ ID NO: 377282 - RNA, 26 nt, Human
ugaggcagguagaucaccugagguca

SEQ ID NO: 377283 - RNA, 18 nt, Human
ugaggucaggaguuugag

SEQ ID NO: 377284 - RNA, 21 nt, Human
ugcacuccagccugggcgaca

SEQ ID NO: 377285 - RNA, 22 nt, Human
ugcauugcacuccagccugggc

SEQ ID NO: 377286 - RNA, 25 nt, Human
ugccagcccugcccugcccaggcgc

SEQ ID NO: 377287 - RNA, 20 nt, Human
ugcccaggcgcuaguugugg

SEQ ID NO: 377288 - RNA, 23 nt, Human
ugccuguaaucucaguuacucgg

SEQ ID NO: 377289 - RNA, 24 nt, Human
ugccuguaaucucaguuacucggg

SEQ ID NO: 377290 - RNA, 20 nt, Human
uggaggcuggcugagauucc

SEQ ID NO: 377291 - RNA, 22 nt, Human
uggcagcaggaaauccagggcu

SEQ ID NO: 377292 - RNA, 18 nt, Human
ugggagcgagggggcagu

SEQ ID NO: 377293 - RNA, 20 nt, Human
ugggaggcugaggcagguag

SEQ ID NO: 377294 - RNA, 24 nt, Human
ugggaggcugaggcagguagauca

SEQ ID NO: 377295 - RNA, 19 nt, Human
ugggugaggaggcaaggcg

SEQ ID NO: 377296 - RNA, 21 nt, Human
uggugagagggaaggugcugg

SEQ ID NO: 377297 - RNA, 22 nt, Human
uggugggugccuguaaucucag

SEQ ID NO: 377298 - RNA, 24 nt, Human
ugguggugggugccuguaaucuca

SEQ ID NO: 377299 - RNA, 23 nt, Human
ugucuguaaucucagcacuuugg

SEQ ID NO: 377300 - RNA, 25 nt, Human
uucagagugaagaggugggugagga

SEQ ID NO: 377301 - RNA, 28 nt, Human
uuccaggcaaacaggcaggagcaagagc

SEQ ID NO: 377302 - RNA, 21 nt, Human
uugcagugaacugagaucgug

SEQ ID NO: 377303 - RNA, 22 nt, Human
uugcagugaacugagaucgugc

SEQ ID NO: 377304 - RNA, 25 nt, Human
uugggaggcugaggcagguagauca

SEQ ID NO: 377305 - RNA, 23 nt, Human
aaaauuaaugaaaagccucuggc

SEQ ID NO: 377306 - RNA, 22 nt, Human
accccuaaaguauaaaggcaaa

SEQ ID NO: 377307 - RNA, 24 nt, Human
caccacaauucauuugcaacaucu

SEQ ID NO: 377308 - RNA, 26 nt, Human
caccacaauucauuugcaacaucuca

SEQ ID NO: 377309 - RNA, 24 nt, Human
cccuaaaguauaaaggcaaaggaa

SEQ ID NO: 377310 - RNA, 24 nt, Human
cuaaaguauaaaggcaaaggaaaa

SEQ ID NO: 377311 - RNA, 18 nt, Human
cuccagaagccccugucc

SEQ ID NO: 377312 - RNA, 25 nt, Human
gaaaauguaagaagaaaccgguacc

SEQ ID NO: 377313 - RNA, 24 nt, Human
uaagaccccuaaaguauaaaggcu

SEQ ID NO: 377314 - RNA, 23 nt, Human
ucugagcgggcggcgucgguguc

SEQ ID NO: 377315 - RNA, 19 nt, Human
ugccagaagcuccagaagc

SEQ ID NO: 377316 - RNA, 23 nt, Human
ugucucuauagaggcaagaauug

SEQ ID NO: 377317 - RNA, 23 nt, Human
uuaguuguaucguagaagguaaa

SEQ ID NO: 377318 - RNA, 21 nt, Human
uuuucaaaaauaauuuaaagg

SEQ ID NO: 377319 - RNA, 18 nt, Human
aaaaaauaaacaacaaca

SEQ ID NO: 377320 - RNA, 23 nt, Human
aaaaagaccaaaaccacccacug

SEQ ID NO: 377321 - RNA, 24 nt, Human
aaaagaccaaaaccacccacugua

SEQ ID NO: 377322 - RNA, 19 nt, Human
aacccaggguuugcuucca

SEQ ID NO: 377323 - RNA, 19 nt, Human
aagaaagcaaacauucuac

SEQ ID NO: 377324 - RNA, 23 nt, Human
aagagauagauaugugggccaga

SEQ ID NO: 377325 - RNA, 23 nt, Human
aagcaaacauucuacuucuaagg

SEQ ID NO: 377326 - RNA, 22 nt, Human
aagcagaaaugaaagaggggac

SEQ ID NO: 377327 - RNA, 24 nt, Human
aagcauggaacuccaauuugcacu

SEQ ID NO: 377328 - RNA, 20 nt, Human
aaggaaaugggggaacuuca

SEQ ID NO: 377329 - RNA, 21 nt, Human
aaguauccagacaccaauuuu

SEQ ID NO: 377330 - RNA, 24 nt, Human
acaacaaaaaaaaaacacaacacc

SEQ ID NO: 377331 - RNA, 21 nt, Human
acacccuuucucccauacaaa

SEQ ID NO: 377332 - RNA, 25 nt, Human
accaaaaccacccacuguagaaugg

SEQ ID NO: 377333 - RNA, 22 nt, Human
accuuggugccuuggagucuua

SEQ ID NO: 377334 - RNA, 19 nt, Human
acgaagccaaaggacuuug

SEQ ID NO: 377335 - RNA, 18 nt, Human
acuagguuuuugcuacau

SEQ ID NO: 377336 - RNA, 20 nt, Human
acugugccacgggacagggc

SEQ ID NO: 377337 - RNA, 23 nt, Human
acuucccuauccaaaaaauaaac

SEQ ID NO: 377338 - RNA, 20 nt, Human
agacuccaaugaguuuaguu

SEQ ID NO: 377339 - RNA, 24 nt, Human
agagagcaacaauggagaagagac

SEQ ID NO: 377340 - RNA, 21 nt, Human
agaggcuugcuuggguggcug

SEQ ID NO: 377341 - RNA, 21 nt, Human
agaggcuuucaguaacucugc

SEQ ID NO: 377342 - RNA, 20 nt, Human
agauagauaugugggccaga

SEQ ID NO: 377343 - RNA, 28 nt, Human
aggcaagagauagauaugugggccagag

SEQ ID NO: 377344 - RNA, 18 nt, Human
aguagaacaagcauggaa

SEQ ID NO: 377345 - RNA, 20 nt, Human
agugguucacccuguuccua

SEQ ID NO: 377346 - RNA, 21 nt, Human
aucacaugcuuguuggaaaaa

SEQ ID NO: 377347 - RNA, 18 nt, Human
augaugcuacuguauuca

SEQ ID NO: 377348 - RNA, 21 nt, Human
augcaccuacucaggacuaca

SEQ ID NO: 377349 - RNA, 20 nt, Human
auggagaagagaccuuggug

SEQ ID NO: 377350 - RNA, 23 nt, Human
augguggaacaaaauucugggau

SEQ ID NO: 377351 - RNA, 18 nt, Human
auuaguaucuugucacuu

SEQ ID NO: 377352 - RNA, 22 nt, Human
auuucaucuacaauagggacaa

SEQ ID NO: 377353 - RNA, 23 nt, Human
caaaaaauaaacaacaacaaaaa

SEQ ID NO: 377354 - RNA, 22 nt, Human
caaaaucagaauccucugggaa

SEQ ID NO: 377355 - RNA, 24 nt, Human
caacaaaaaaaaaacacaacaccc

SEQ ID NO: 377356 - RNA, 24 nt, Human
cacacacauacagucuuucuguac

SEQ ID NO: 377357 - RNA, 23 nt, Human
cacgggacagggcuugcacuuga

SEQ ID NO: 377358 - RNA, 24 nt, Human
cagccugcaggcuacaagagccaa

SEQ ID NO: 377359 - RNA, 24 nt, Human
caggguuauuuacgaagccaaagg

SEQ ID NO: 377360 - RNA, 23 nt, Human
caucacuauuucaucuacaauag

SEQ ID NO: 377361 - RNA, 19 nt, Human
caugguggaacaaaauucu

SEQ ID NO: 377362 - RNA, 27 nt, Human
ccaaaaaauaaacaacaacaaaaaaaa

SEQ ID NO: 377363 - RNA, 26 nt, Human
ccagagaggcuugcuuggguggcuga

SEQ ID NO: 377364 - RNA, 25 nt, Human
ccaguagaacaagcauggaacucca

SEQ ID NO: 377365 - RNA, 24 nt, Human
cccacuguagaaugggcucuugga

SEQ ID NO: 377366 - RNA, 24 nt, Human
ccuauccaaaaaauaaacaacaac

SEQ ID NO: 377367 - RNA, 22 nt, Human
ccuggggagcaggugcuugcgg

SEQ ID NO: 377368 - RNA, 23 nt, Human
cgaaugcugucaugucaaaguga

SEQ ID NO: 377369 - RNA, 22 nt, Human
cggguauagagagcaacaaugg

SEQ ID NO: 377370 - RNA, 24 nt, Human
cgugauuuuuaauauacuucauag

SEQ ID NO: 377371 - RNA, 19 nt, Human
cguggagagcuccaaacca

SEQ ID NO: 377372 - RNA, 25 nt, Human
cucguggagagcuccaaaccaaucc

SEQ ID NO: 377373 - RNA, 20 nt, Human
cucugggagacagggacagg

SEQ ID NO: 377374 - RNA, 18 nt, Human
cugaauuaaggccggggc

SEQ ID NO: 377375 - RNA, 22 nt, Human
cugugcaggcacuccuuucugc

SEQ ID NO: 377376 - RNA, 24 nt, Human
cugugcaggcacuccuuucugccu

SEQ ID NO: 377377 - RNA, 18 nt, Human
gaacuccaauuugcacuu

SEQ ID NO: 377378 - RNA, 24 nt, Human
gaagagacuuccucagccugcagg

SEQ ID NO: 377379 - RNA, 18 nt, Human
gaaguauccagacaccaa

SEQ ID NO: 377380 - RNA, 23 nt, Human
gaaguauccagacaccaauuuuu

SEQ ID NO: 377381 - RNA, 19 nt, Human
gaauguagagaugaugacc

SEQ ID NO: 377382 - RNA, 20 nt, Human
gacuacuguuugguacuugu

SEQ ID NO: 377383 - RNA, 22 nt, Human
gagggcugcauuuuaccuucag

SEQ ID NO: 377384 - RNA, 20 nt, Human
gcaguaacgggggcaggggg

SEQ ID NO: 377385 - RNA, 18 nt, Human
gcaucucauuaccuuacu

SEQ ID NO: 377386 - RNA, 21 nt, Human
gcugacacacagggcggucug

SEQ ID NO: 377387 - RNA, 27 nt, Human
gcuugcggcugacacacagggguuucc

SEQ ID NO: 377388 - RNA, 23 nt, Human
gcuugcuuggguggcugauucug

SEQ ID NO: 377389 - RNA, 23 nt, Human
ggagaaacagauacaaaaucucc

SEQ ID NO: 377390 - RNA, 20 nt, Human
ggagacagggacagggccca

SEQ ID NO: 377391 - RNA, 18 nt, Human
ggaugagcagggggacag

SEQ ID NO: 377392 - RNA, 24 nt, Human
ggccaucugagccgcagaccaugg

SEQ ID NO: 377393 - RNA, 18 nt, Human
gggaacaagcaguugucc

SEQ ID NO: 377394 - RNA, 22 nt, Human
gggggauuggucagcugccacu

SEQ ID NO: 377395 - RNA, 24 nt, Human
ggggguuccaaucugaggagggcu

SEQ ID NO: 377396 - RNA, 25 nt, Human
gguaacaagaagaaaaaaaugugag

SEQ ID NO: 377397 - RNA, 21 nt, Human
gguacuuguaucugggccagc

SEQ ID NO: 377398 - RNA, 21 nt, Human
gguggcucaggcucugggaga

SEQ ID NO: 377399 - RNA, 20 nt, Human
guacuuguaucugggccagc

SEQ ID NO: 377400 - RNA, 29 nt, Human
gugcuugcggcugacacacagggguuucc

SEQ ID NO: 377401 - RNA, 28 nt, Human
gugcuugcggcugacacacaggguuucc

SEQ ID NO: 377402 - RNA, 23 nt, Human
guuuauguggcuuuuguguggaa

SEQ ID NO: 377403 - RNA, 24 nt, Human
uaaaaagaccaaaaccacccacug

SEQ ID NO: 377404 - RNA, 23 nt, Human
uaaaacaaacacuauggugaaga

SEQ ID NO: 377405 - RNA, 25 nt, Human
uaaaacaaacacuauggugaagaac

SEQ ID NO: 377406 - RNA, 22 nt, Human
uaaccaugguggaacaaaauuc

SEQ ID NO: 377407 - RNA, 18 nt, Human
uaacgggggcagggggaa

SEQ ID NO: 377408 - RNA, 21 nt, Human
uaagauaauuaggcaaauuaa

SEQ ID NO: 377409 - RNA, 25 nt, Human
uacaguuaagcauuuacuauuaacc

SEQ ID NO: 377410 - RNA, 22 nt, Human
uacaugcaugcauauuuaugca

SEQ ID NO: 377411 - RNA, 22 nt, Human
uaccaaauuuggaacuagacuc

SEQ ID NO: 377412 - RNA, 22 nt, Human
uaccuguaucaaaugaggaagu

SEQ ID NO: 377413 - RNA, 23 nt, Human
uacuauuaaccaaagaguugugu

SEQ ID NO: 377414 - RNA, 22 nt, Human
uacuguacagcguggucaaggu

SEQ ID NO: 377415 - RNA, 18 nt, Human
uacuuggucacuauacaa

SEQ ID NO: 377416 - RNA, 18 nt, Human
uagaaugggcucuuggau

SEQ ID NO: 377417 - RNA, 23 nt, Human
uaggacacccugauaaaugaaaa

SEQ ID NO: 377418 - RNA, 21 nt, Human
uaguacucauggaaaguauua

SEQ ID NO: 377419 - RNA, 22 nt, Human
uaguucauuucuuaucuaagac

SEQ ID NO: 377420 - RNA, 19 nt, Human
uauaaaaagaccaaaacca

SEQ ID NO: 377421 - RNA, 21 nt, Human
uauaaaaagaccaaaaccacc

SEQ ID NO: 377422 - RNA, 22 nt, Human
uauaaaaagaccaaaaccaccc

SEQ ID NO: 377423 - RNA, 22 nt, Human
uauaaaaagaccaaaaccaccc

SEQ ID NO: 377424 - RNA, 23 nt, Human
uaucugggccagcuugauaggga

SEQ ID NO: 377425 - RNA, 21 nt, Human
ucaauuuuaauuuguucucuu

SEQ ID NO: 377426 - RNA, 20 nt, Human
ucagagaacaggagauaugu

SEQ ID NO: 377427 - RNA, 18 nt, Human
ucaggauuugaugggcuc

SEQ ID NO: 377428 - RNA, 21 nt, Human
ucaggguuauuuacgaagcca

SEQ ID NO: 377429 - RNA, 18 nt, Human
ucccaaaacagaguuugc

SEQ ID NO: 377430 - RNA, 22 nt, Human
ucuacaauagggacaacaaacu

SEQ ID NO: 377431 - RNA, 22 nt, Human
ucuuuaagugucaucuuaauuu

SEQ ID NO: 377432 - RNA, 25 nt, Human
ugaaggaaaugggggaacuucagag

SEQ ID NO: 377433 - RNA, 22 nt, Human
ugagaucccaaaacagaguuug

SEQ ID NO: 377434 - RNA, 21 nt, Human
ugagccgcagaccauggcuga

SEQ ID NO: 377435 - RNA, 24 nt, Human
ugauagggagagaaauccuaagga

SEQ ID NO: 377436 - RNA, 26 nt, Human
ugcaaaaaaggacuuuaauacaaauu

SEQ ID NO: 377437 - RNA, 22 nt, Human
ugcaugccuuagaaaaagcccu

SEQ ID NO: 377438 - RNA, 22 nt, Human
ugccuagaauauugguagaaac

SEQ ID NO: 377439 - RNA, 24 nt, Human
ugccuggggagcaggugcuugcgg

SEQ ID NO: 377440 - RNA, 19 nt, Human
ugcugcuguggguaggaaa

SEQ ID NO: 377441 - RNA, 20 nt, Human
ugcuugcggcugacacacag

SEQ ID NO: 377442 - RNA, 19 nt, Human
uggaaaaaucucacagaaa

SEQ ID NO: 377443 - RNA, 20 nt, Human
uggauggguccagggcuugg

SEQ ID NO: 377444 - RNA, 18 nt, Human
uggcaaauaacuaaccau

SEQ ID NO: 377445 - RNA, 20 nt, Human
uggcaucucauuaccuuacu

SEQ ID NO: 377446 - RNA, 19 nt, Human
uggcugaacauauuucuug

SEQ ID NO: 377447 - RNA, 26 nt, Human
ugggauugagugguuaaaaaaaaaaa

SEQ ID NO: 377448 - RNA, 21 nt, Human
ugggccagagaggcuugcuug

SEQ ID NO: 377449 - RNA, 19 nt, Human
uggucugucuuccuauggg

SEQ ID NO: 377450 - RNA, 21 nt, Human
ugguggcucaggcucugggag

SEQ ID NO: 377451 - RNA, 20 nt, Human
ugugaagcugcccgugucgu

SEQ ID NO: 377452 - RNA, 18 nt, Human
ugugaguggcauccuggg

SEQ ID NO: 377453 - RNA, 22 nt, Human
ugugcaugccuuagaaaaagcc

SEQ ID NO: 377454 - RNA, 21 nt, Human
ugugguguauuuuuuguuuuu

SEQ ID NO: 377455 - RNA, 18 nt, Human
uguguccucuuucuugug

SEQ ID NO: 377456 - RNA, 23 nt, Human
ugugugugcaaggcacacacaua

SEQ ID NO: 377457 - RNA, 23 nt, Human
uuaaaagagcuguucauggaaua

SEQ ID NO: 377458 - RNA, 30 nt, Human
uuauuccagaaauuuuguuccaggucuggg

SEQ ID NO: 377459 - RNA, 20 nt, Human
uucauggaauaagaauaaaa

SEQ ID NO: 377460 - RNA, 18 nt, Human
uuccaggucuggacaagc

SEQ ID NO: 377461 - RNA, 24 nt, Human
uuccucagccugcaggcuacaaga

SEQ ID NO: 377462 - RNA, 19 nt, Human
uucuaaggauaagguaacu

SEQ ID NO: 377463 - RNA, 23 nt, Human
uugagugguuaaaaaaaaaaauc

SEQ ID NO: 377464 - RNA, 22 nt, Human
uuggaggacuauuuccaagaag

SEQ ID NO: 377465 - RNA, 20 nt, Human
uuggauggguccagggcuug

SEQ ID NO: 377466 - RNA, 24 nt, Human
uugggaugggggauuggucagcug

SEQ ID NO: 377467 - RNA, 21 nt, Human
uuuggaacuagacuccaauga

SEQ ID NO: 377468 - RNA, 28 nt, Human
uuuuggcugaacauauuucuugcuugag

SEQ ID NO: 377469 - RNA, 21 nt, Human
uuuuguguggacaggcugaag

SEQ ID NO: 377470 - RNA, 22 nt, Human
aaaaaauaacaauccaacaaga

SEQ ID NO: 377471 - RNA, 19 nt, Human
aaaaagaaccuucugaaca

SEQ ID NO: 377472 - RNA, 18 nt, Human
aaaagaacuauaaaccac

SEQ ID NO: 377473 - RNA, 21 nt, Human
aaaagccacccaacaucaaug

SEQ ID NO: 377474 - RNA, 20 nt, Human
aaaauaacuuuaaaguacag

SEQ ID NO: 377475 - RNA, 26 nt, Human
aaacaaaaaauaacaauccaacaaga

SEQ ID NO: 377476 - RNA, 19 nt, Human
aaagacaugaaagacccag

SEQ ID NO: 377477 - RNA, 26 nt, Human
aaagaugagaauguggggaaucugcu

SEQ ID NO: 377478 - RNA, 21 nt, Human
aaauguccuuuuacacuaucc

SEQ ID NO: 377479 - RNA, 21 nt, Human
aacaagagucauguuacccau

SEQ ID NO: 377480 - RNA, 21 nt, Human
aacaauaaaugcaggaagaaa

SEQ ID NO: 377481 - RNA, 24 nt, Human
aagaacaaaagccacccaacauca

SEQ ID NO: 377482 - RNA, 18 nt, Human
aagaaccuucugaacacu

SEQ ID NO: 377483 - RNA, 23 nt, Human
aagaacuauaaaccaccuaacaa

SEQ ID NO: 377484 - RNA, 24 nt, Human
aagcccuaucuuuuauugaaaaug

SEQ ID NO: 377485 - RNA, 19 nt, Human
aagggaaaaauacacucua

SEQ ID NO: 377486 - RNA, 20 nt, Human
acaagggagcaaaagcccua

SEQ ID NO: 377487 - RNA, 20 nt, Human
acaauccaacaagagucauu

SEQ ID NO: 377488 - RNA, 19 nt, Human
acccugggacucaggcaua

SEQ ID NO: 377489 - RNA, 23 nt, Human
acuaagaagagaugggcaaacaa

SEQ ID NO: 377490 - RNA, 23 nt, Human
acuacugggcgaaccacccaucg

SEQ ID NO: 377491 - RNA, 19 nt, Human
agacaugaaagacccagug

SEQ ID NO: 377492 - RNA, 20 nt, Human
aggaagaggcuggcuggagg

SEQ ID NO: 377493 - RNA, 19 nt, Human
agggcgccccacucagccu

SEQ ID NO: 377494 - RNA, 20 nt, Human
agguguaaaaacuagcuacc

SEQ ID NO: 377495 - RNA, 25 nt, Human
aguaauaaggccuauaaaagaagaa

SEQ ID NO: 377496 - RNA, 21 nt, Human
auagucucucuuguguuaaaa

SEQ ID NO: 377497 - RNA, 19 nt, Human
auuuauuuauuuauuuuug

SEQ ID NO: 377498 - RNA, 19 nt, Human
auuucucagugaaagaaca

SEQ ID NO: 377499 - RNA, 26 nt, Human
auuuuguugaaggaaugcauuggggg

SEQ ID NO: 377500 - RNA, 27 nt, Human
caaaagccacccaacaucaaugcuccc

SEQ ID NO: 377501 - RNA, 21 nt, Human
caacaauaaaugcaggaagaa

SEQ ID NO: 377502 - RNA, 21 nt, Human
caagaacaagggagcaaaagc

SEQ ID NO: 377503 - RNA, 25 nt, Human
cagcugaaggugcugcucucacguu

SEQ ID NO: 377504 - RNA, 23 nt, Human
cauacuccucugaacccccaaaa

SEQ ID NO: 377505 - RNA, 20 nt, Human
cauugggcuuuggcuuugau

SEQ ID NO: 377506 - RNA, 22 nt, Human
ccaaaagcaagggaaaaauaca

SEQ ID NO: 377507 - RNA, 22 nt, Human
ccacagcccugguguggagcac

SEQ ID NO: 377508 - RNA, 24 nt, Human
ccacccaacaucaaugcuccucuu

SEQ ID NO: 377509 - RNA, 21 nt, Human
cccaaaagcaagggaaaaaua

SEQ ID NO: 377510 - RNA, 22 nt, Human
cccauaauauuccuuucccuua

SEQ ID NO: 377511 - RNA, 21 nt, Human
ccccaaaagcaagggaaaaau

SEQ ID NO: 377512 - RNA, 21 nt, Human
ccuggccagguggaagcucca

SEQ ID NO: 377513 - RNA, 23 nt, Human
cuccucugaacccccaaaagcaa

SEQ ID NO: 377514 - RNA, 19 nt, Human
cugcaggaagaggcuggcu

SEQ ID NO: 377515 - RNA, 19 nt, Human
cuguggccauuccuaugca

SEQ ID NO: 377516 - RNA, 19 nt, Human
gaaagaacaaaagccaccc

SEQ ID NO: 377517 - RNA, 22 nt, Human
gaacccccaaaagcaagggaaa

SEQ ID NO: 377518 - RNA, 18 nt, Human
gaaggaaugcauuggggg

SEQ ID NO: 377519 - RNA, 19 nt, Human
gaccaaauacaaacaugag

SEQ ID NO: 377520 - RNA, 19 nt, Human
gaccuaaaguuccacuaag

SEQ ID NO: 377521 - RNA, 25 nt, Human
gaugcuucuuauaaauuccccauug

SEQ ID NO: 377522 - RNA, 20 nt, Human
gcaggaagaaaaacugcuga

SEQ ID NO: 377523 - RNA, 20 nt, Human
gcaggaagaggcuggcugga

SEQ ID NO: 377524 - RNA, 22 nt, Human
ggugugcuuauaauugcuggga

SEQ ID NO: 377525 - RNA, 18 nt, Human
gucuagauguguguagga

SEQ ID NO: 377526 - RNA, 23 nt, Human
gugaaagaacaaaagccacccaa

SEQ ID NO: 377527 - RNA, 20 nt, Human
gugcagcccuggggaacucg

SEQ ID NO: 377528 - RNA, 23 nt, Human
uaaacaagcaaauaauccagcca

SEQ ID NO: 377529 - RNA, 20 nt, Human
uaaaccaccuaacaagacuu

SEQ ID NO: 377530 - RNA, 21 nt, Human
uaaaugcaggaagaaaaacug

SEQ ID NO: 377531 - RNA, 21 nt, Human
uaacuuuuucucucugcauau

SEQ ID NO: 377532 - RNA, 22 nt, Human
uaaggaacuuuaucaugggcug

SEQ ID NO: 377533 - RNA, 23 nt, Human
uaccaaaaaguucagaaggcugg

SEQ ID NO: 377534 - RNA, 24 nt, Human
uagaacaacauugcaaaaggucac

SEQ ID NO: 377535 - RNA, 21 nt, Human
uagcuuagaacaacauugcaa

SEQ ID NO: 377536 - RNA, 19 nt, Human
uauaaaagaagaaaugaaa

SEQ ID NO: 377537 - RNA, 20 nt, Human
uccucugaacccccaaaagc

SEQ ID NO: 377538 - RNA, 18 nt, Human
ucuccauguggaguaggu

SEQ ID NO: 377539 - RNA, 20 nt, Human
ucugaacacuuacuuagcuu

SEQ ID NO: 377540 - RNA, 21 nt, Human
ugaaaagagaccuaaaguucc

SEQ ID NO: 377541 - RNA, 23 nt, Human
ugaaaagagaccuaaaguuccac

SEQ ID NO: 377542 - RNA, 24 nt, Human
ugaaaagagaccuaaaguuccacu

SEQ ID NO: 377543 - RNA, 24 nt, Human
ugaacaggccaaagaugagaaugu

SEQ ID NO: 377544 - RNA, 21 nt, Human
ugacagguuugacuuuccacc

SEQ ID NO: 377545 - RNA, 23 nt, Human
ugacuaaaauaacuuuaaaguac

SEQ ID NO: 377546 - RNA, 26 nt, Human
ugaggaccucaucacucuuccacagg

SEQ ID NO: 377547 - RNA, 19 nt, Human
ugaggagacuugaaaagag

SEQ ID NO: 377548 - RNA, 18 nt, Human
ugauuugcaaacuugaac

SEQ ID NO: 377549 - RNA, 18 nt, Human
ugcauugggggggcuuug

SEQ ID NO: 377550 - RNA, 22 nt, Human
ugccgcacccugggacucaggc

SEQ ID NO: 377551 - RNA, 18 nt, Human
ugcuuauaauugcuggga

SEQ ID NO: 377552 - RNA, 23 nt, Human
ugcuugcucagcuuaaucccaua

SEQ ID NO: 377553 - RNA, 19 nt, Human
uggauacaaagguaguuca

SEQ ID NO: 377554 - RNA, 20 nt, Human
uggcuggaggugagggcgcc

SEQ ID NO: 377555 - RNA, 24 nt, Human
ugggaccaaauacaaacaugagac

SEQ ID NO: 377556 - RNA, 19 nt, Human
ugggcgaaccacacugcaa

SEQ ID NO: 377557 - RNA, 23 nt, Human
uggucucuaaagagaccaauuuu

SEQ ID NO: 377558 - RNA, 21 nt, Human
uggugacucuggaaucuagag

SEQ ID NO: 377559 - RNA, 23 nt, Human
uguaauaauggucccuccaagaa

SEQ ID NO: 377560 - RNA, 22 nt, Human
uguacauacuccucugaacccc

SEQ ID NO: 377561 - RNA, 23 nt, Human
uguguaggaagauuuuaaaauuu

SEQ ID NO: 377562 - RNA, 21 nt, Human
uuagaacaacauugcaaaagu

SEQ ID NO: 377563 - RNA, 20 nt, Human
uuaguaccaaaaaguucaga

SEQ ID NO: 377564 - RNA, 22 nt, Human
uucaagucuaccagcucuguuu

SEQ ID NO: 377565 - RNA, 25 nt, Human
uugaugacggugaggaccucaucac

SEQ ID NO: 377566 - RNA, 18 nt, Human
uuucucagugaaagaaca

SEQ ID NO: 377567 - RNA, 27 nt, Human
aagaagcaagguugggaaaggaggagg

SEQ ID NO: 377568 - RNA, 21 nt, Human
accccauggcuccgggggccc

SEQ ID NO: 377569 - RNA, 19 nt, Human
agccagagcccggagcucc

SEQ ID NO: 377570 - RNA, 18 nt, Human
agcuggagccuuggggau

SEQ ID NO: 377571 - RNA, 19 nt, Human
aggagcagcgggagcgcgg

SEQ ID NO: 377572 - RNA, 21 nt, Human
agguugggaaaggaggaggcu

SEQ ID NO: 377573 - RNA, 19 nt, Human
augcugcacggccuggccu

SEQ ID NO: 377574 - RNA, 18 nt, Human
cacccggcaggagcagcg

SEQ ID NO: 377575 - RNA, 19 nt, Human
cacccggcaggagcagcgg

SEQ ID NO: 377576 - RNA, 21 nt, Human
cacugacgcuuccgaaaccgc

SEQ ID NO: 377577 - RNA, 24 nt, Human
cagcaauaacuuauaaggagacca

SEQ ID NO: 377578 - RNA, 20 nt, Human
cagccagagcccggagcucc

SEQ ID NO: 377579 - RNA, 21 nt, Human
caggagcccccgacaccccau

SEQ ID NO: 377580 - RNA, 23 nt, Human
cauggaaacacugacgcuuccga

SEQ ID NO: 377581 - RNA, 18 nt, Human
ccaacucgcccugcccag

SEQ ID NO: 377582 - RNA, 23 nt, Human
ccaaugaggcuccaguuccuccu

SEQ ID NO: 377583 - RNA, 22 nt, Human
cccaaugcccgugccggccacc

SEQ ID NO: 377584 - RNA, 21 nt, Human
ccccaggggcugcggggcucu

SEQ ID NO: 377585 - RNA, 19 nt, Human
ccccauggcuccgggggcc

SEQ ID NO: 377586 - RNA, 19 nt, Human
cccgugccggccaccagag

SEQ ID NO: 377587 - RNA, 27 nt, Human
cccuaagaagcaagguugggaaaggag

SEQ ID NO: 377588 - RNA, 22 nt, Human
cccugcccagcgaccuuccccg

SEQ ID NO: 377589 - RNA, 20 nt, Human
ccggccaccagagggcccuu

SEQ ID NO: 377590 - RNA, 23 nt, Human
ccuggccuccagcgagaggcaga

SEQ ID NO: 377591 - RNA, 22 nt, Human
cgaaacccccugugccucggcc

SEQ ID NO: 377592 - RNA, 23 nt, Human
gagaaggggcugcgggggcggcg

SEQ ID NO: 377593 - RNA, 19 nt, Human
gaggaggcugagagcagac

SEQ ID NO: 377594 - RNA, 22 nt, Human
gaguagcuggagccuuggggau

SEQ ID NO: 377595 - RNA, 20 nt, Human
gccccauuuauucacuucuc

SEQ ID NO: 377596 - RNA, 18 nt, Human
gccucggccgccugcagc

SEQ ID NO: 377597 - RNA, 19 nt, Human
gcggccucaccgcggucag

SEQ ID NO: 377598 - RNA, 18 nt, Human
ggacgugggagaaaggag

SEQ ID NO: 377599 - RNA, 20 nt, Human
ggaggagaaggggcugcggg

SEQ ID NO: 377600 - RNA, 22 nt, Human
ggcagauaggacgugggagaaa

SEQ ID NO: 377601 - RNA, 23 nt, Human
ggccaaugaggcuccaguuccuc

SEQ ID NO: 377602 - RNA, 19 nt, Human
ggcggcgggggcugccgcu

SEQ ID NO: 377603 - RNA, 21 nt, Human
gguugggaaaggaggaggcug

SEQ ID NO: 377604 - RNA, 20 nt, Human
guugggaaaggaggaggcug

SEQ ID NO: 377605 - RNA, 21 nt, Human
uaacauggaaacacugacgcu

SEQ ID NO: 377606 - RNA, 19 nt, Human
uaucugcaaccacguggga

SEQ ID NO: 377607 - RNA, 22 nt, Human
uccaguuccuccugucuucgau

SEQ ID NO: 377608 - RNA, 20 nt, Human
ucccaaugcccgugccggcc

SEQ ID NO: 377609 - RNA, 19 nt, Human
ucccagccagagcccggag

SEQ ID NO: 377610 - RNA, 23 nt, Human
ucggaucacccucuucccucgug

SEQ ID NO: 377611 - RNA, 21 nt, Human
ugcaggaggaggaggcugaga

SEQ ID NO: 377612 - RNA, 24 nt, Human
ugcugcacggccuggccuccagcg

SEQ ID NO: 377613 - RNA, 19 nt, Human
ugggaaaggaggaggcugg

SEQ ID NO: 377614 - RNA, 23 nt, Human
ugggaaaggaggaggcuguuucc

SEQ ID NO: 377615 - RNA, 18 nt, Human
ugggagaaaggaggagaa

SEQ ID NO: 377616 - RNA, 22 nt, Human
ugggagaaaggaggagaagggg

SEQ ID NO: 377617 - RNA, 20 nt, Human
uggggaugacuuuauccugc

SEQ ID NO: 377618 - RNA, 25 nt, Human
aacaaauaagcaauugacaccacca

SEQ ID NO: 377619 - RNA, 18 nt, Human
aacuaauuaucaaacaca

SEQ ID NO: 377620 - RNA, 21 nt, Human
aagcaauugacaccaccaaau

SEQ ID NO: 377621 - RNA, 24 nt, Human
aagcaauugacaccaccaaauucu

SEQ ID NO: 377622 - RNA, 19 nt, Human
aaggcugcaacuggccuga

SEQ ID NO: 377623 - RNA, 19 nt, Human
acaaaaagauaaucacaac

SEQ ID NO: 377624 - RNA, 22 nt, Human
accacaaaaagauaaucacaac

SEQ ID NO: 377625 - RNA, 24 nt, Human
accacaaaaagauaaucacaacaa

SEQ ID NO: 377626 - RNA, 22 nt, Human
caaaauauacacuaacuuaaaa

SEQ ID NO: 377627 - RNA, 22 nt, Human
caaauagauacacauucaacca

SEQ ID NO: 377628 - RNA, 21 nt, Human
caccacaaaaagauaaucaac

SEQ ID NO: 377629 - RNA, 22 nt, Human
cauagacauaacccugaagcuu

SEQ ID NO: 377630 - RNA, 22 nt, Human
cucuuucauuuugcuauaaagc

SEQ ID NO: 377631 - RNA, 23 nt, Human
cuggacaaccgugggaaaacaaa

SEQ ID NO: 377632 - RNA, 22 nt, Human
gaaaacaaauaagcaauugaca

SEQ ID NO: 377633 - RNA, 20 nt, Human
gagaaagaagcauuucaugu

SEQ ID NO: 377634 - RNA, 24 nt, Human
guuugcuucuacauaaauuucuau

SEQ ID NO: 377635 - RNA, 25 nt, Human
uacagugauaguuugcauuucuucu

SEQ ID NO: 377636 - RNA, 20 nt, Human
uauauucucuuuuuaagugg

SEQ ID NO: 377637 - RNA, 28 nt, Human
ucaaauagauacacauucaaccaauaaa

SEQ ID NO: 377638 - RNA, 22 nt, Human
ucaagauaaaagauuuauucac

SEQ ID NO: 377639 - RNA, 24 nt, Human
ucuuucauuuugcuauaaagcauu

SEQ ID NO: 377640 - RNA, 23 nt, Human
ugcuggacaaccgugggaaaaca

SEQ ID NO: 377641 - RNA, 19 nt, Human
uggcugagaaggcugcaac

SEQ ID NO: 377642 - RNA, 23 nt, Human
uucacaccacaaaaagauaauca

SEQ ID NO: 377643 - RNA, 23 nt, Human
uuuuuuuuuuuuuuuuuuuuagg

SEQ ID NO: 377644 - RNA, 26 nt, Human
acaaccuccucucuucuguguuccag

SEQ ID NO: 377645 - RNA, 18 nt, Human
acagacacccaggagccc

SEQ ID NO: 377646 - RNA, 20 nt, Human
acagcuggcugugccugagg

SEQ ID NO: 377647 - RNA, 20 nt, Human
acccaggagccccuucuccc

SEQ ID NO: 377648 - RNA, 23 nt, Human
accuccucucuucuguguuccag

SEQ ID NO: 377649 - RNA, 20 nt, Human
agacaccaauacccauaacc

SEQ ID NO: 377650 - RNA, 21 nt, Human
agagacacaaccuccucucuu

SEQ ID NO: 377651 - RNA, 18 nt, Human
aggaaggagacaucagag

SEQ ID NO: 377652 - RNA, 24 nt, Human
aggaaggagacaucagagugagga

SEQ ID NO: 377653 - RNA, 18 nt, Human
agggcagcaggcaugaau

SEQ ID NO: 377654 - RNA, 21 nt, Human
augagcaagagacacaaccuc

SEQ ID NO: 377655 - RNA, 21 nt, Human
caaaaagguucaggaagccaa

SEQ ID NO: 377656 - RNA, 21 nt, Human
cacagggcucugggguauguc

SEQ ID NO: 377657 - RNA, 21 nt, Human
caccagaucacucuuuccucu

SEQ ID NO: 377658 - RNA, 22 nt, Human
caggagccccuucucccagccu

SEQ ID NO: 377659 - RNA, 26 nt, Human
cccauaaccucucuccuaagccuccu

SEQ ID NO: 377660 - RNA, 19 nt, Human
ccuauggcagggugugggg

SEQ ID NO: 377661 - RNA, 25 nt, Human
ccuuaaguucuauuccuggggauag

SEQ ID NO: 377662 - RNA, 25 nt, Human
cguguauacagacacccaggagccc

SEQ ID NO: 377663 - RNA, 27 nt, Human
cuacccacaggcuugcuaugagcaaga

SEQ ID NO: 377664 - RNA, 20 nt, Human
cuaugugggcugggacaugu

SEQ ID NO: 377665 - RNA, 20 nt, Human
gaaggaaggagacaucagag

SEQ ID NO: 377666 - RNA, 24 nt, Human
ggaggggugguagauucugaagga

SEQ ID NO: 377667 - RNA, 20 nt, Human
uaaccucucuccuaagccuc

SEQ ID NO: 377668 - RNA, 20 nt, Human
uaagccuccuuauaacccag

SEQ ID NO: 377669 - RNA, 24 nt, Human
uaccgucugcccuuccucccaucc

SEQ ID NO: 377670 - RNA, 19 nt, Human
uagagacaccaauacccau

SEQ ID NO: 377671 - RNA, 24 nt, Human
uagagacaccaauacccauaaccu

SEQ ID NO: 377672 - RNA, 24 nt, Human
uauaacccagggugcacagcacag

SEQ ID NO: 377673 - RNA, 21 nt, Human
uccuaagccuccuuauaaccc

SEQ ID NO: 377674 - RNA, 27 nt, Human
ucuccuaagccuccuuauaacccaggg

SEQ ID NO: 377675 - RNA, 19 nt, Human
ucugcccuuccucccaucc

SEQ ID NO: 377676 - RNA, 21 nt, Human
ugaaggaaggagacaucagag

SEQ ID NO: 377677 - RNA, 22 nt, Human
ugaaggaaggagacaucagagu

SEQ ID NO: 377678 - RNA, 20 nt, Human
ugagggcagggcagcaggca

SEQ ID NO: 377679 - RNA, 19 nt, Human
uguauacagacacccagga

SEQ ID NO: 377680 - RNA, 27 nt, Human
uucccaccccuuaaguucuauuccccc

SEQ ID NO: 377681 - RNA, 23 nt, Human
uucuuuuccuguucuucccaccc

SEQ ID NO: 377682 - RNA, 22 nt, Human
uuuuuuuuuuuuaaaggacaau

SEQ ID NO: 377683 - RNA, 21 nt, Human
uuuuuuuuuuuuuaaaggaca

SEQ ID NO: 377684 - RNA, 20 nt, Human
uuuuuuuuuuuuuuaaagga

SEQ ID NO: 377685 - RNA, 23 nt, Human
uuuuuuuuuuuuuuuuuuaaagg

SEQ ID NO: 377686 - RNA, 19 nt, Human
agacagaaugcuaauugca

SEQ ID NO: 377687 - RNA, 22 nt, Human
cucaagggcauggcuguggacc

SEQ ID NO: 377688 - RNA, 23 nt, Human
cucugguacuaagaccuucagcu

SEQ ID NO: 377689 - RNA, 19 nt, Human
cucuucagaugaauucuga

SEQ ID NO: 377690 - RNA, 26 nt, Human
gaccuucagcuucauucagagacucu

SEQ ID NO: 377691 - RNA, 19 nt, Human
gcagaaugggauaggggau

SEQ ID NO: 377692 - RNA, 19 nt, Human
gucucucuucagaugaauu

SEQ ID NO: 377693 - RNA, 22 nt, Human
uaggaaagaaagcuucauagca

SEQ ID NO: 377694 - RNA, 22 nt, Human
ugaaagugaauuuaaugggggu

SEQ ID NO: 377695 - RNA, 23 nt, Human
ugggggagacagaaugcuaauug

SEQ ID NO: 377696 - RNA, 23 nt, Human
uuaagucucucuucagaugaauu

SEQ ID NO: 377697 - RNA, 20 nt, Human
uuuuuugggggagacagaau

SEQ ID NO: 377698 - RNA, 21 nt, Human
acaggcuaaggggaaagaagc

SEQ ID NO: 377699 - RNA, 19 nt, Human
agacagaagacaucaaaau

SEQ ID NO: 377700 - RNA, 24 nt, Human
agacagagacagaagacaucaaaa

SEQ ID NO: 377701 - RNA, 18 nt, Human
agcucugaaaggccggua

SEQ ID NO: 377702 - RNA, 20 nt, Human
agguggagcuguggaacgag

SEQ ID NO: 377703 - RNA, 24 nt, Human
cagcauggcagccucagaaaggaa

SEQ ID NO: 377704 - RNA, 18 nt, Human
caggaguuuaggagucau

SEQ ID NO: 377705 - RNA, 19 nt, Human
cagguucuccgaagcagau

SEQ ID NO: 377706 - RNA, 21 nt, Human
caucaugggcagaucacaggc

SEQ ID NO: 377707 - RNA, 21 nt, Human
gacaguggcagcauggcagcc

SEQ ID NO: 377708 - RNA, 23 nt, Human
uaccaggaguuuaggagucaugg

SEQ ID NO: 377709 - RNA, 21 nt, Human
ucccuggauggcuuugaugag

SEQ ID NO: 377710 - RNA, 19 nt, Human
ucccuguguaucccuggau

SEQ ID NO: 377711 - RNA, 25 nt, Human
ucugaaaggccgguacagcugagga

SEQ ID NO: 377712 - RNA, 21 nt, Human
ugaaagaaaagugacaauugc

SEQ ID NO: 377713 - RNA, 21 nt, Human
ugaaaggccgguacagcugag

SEQ ID NO: 377714 - RNA, 26 nt, Human
ugauggcacccaaagagaagggaguc

SEQ ID NO: 377715 - RNA, 23 nt, Human
uggacaguggcagcauggcagcc

SEQ ID NO: 377716 - RNA, 22 nt, Human
uggcagcauggcagccucagaa

SEQ ID NO: 377717 - RNA, 18 nt, Human
uguggaacgaggugagcc

SEQ ID NO: 377718 - RNA, 19 nt, Human
uucagggagugaaagaaaa

SEQ ID NO: 377719 - RNA, 19 nt, Human
uugauggcacccaaagaga

SEQ ID NO: 377720 - RNA, 22 nt, Human
uuugauggcacccaaagagaag

SEQ ID NO: 377721 - RNA, 23 nt, Human
agccgaagaccagaaaagccaug

SEQ ID NO: 377722 - RNA, 18 nt, Human
aggucgagguguucagcc

SEQ ID NO: 377723 - RNA, 24 nt, Human
agugugugugaacaaaagcuuuau

SEQ ID NO: 377724 - RNA, 19 nt, Human
aucuucagaugaacccuga

SEQ ID NO: 377725 - RNA, 20 nt, Human
cuucaaaggaugcuggaccu

SEQ ID NO: 377726 - RNA, 22 nt, Human
gcagccgaagaccagaaaagcc

SEQ ID NO: 377727 - RNA, 24 nt, Human
ggaaacaugcauuucuuuucauuc

SEQ ID NO: 377728 - RNA, 19 nt, Human
ggaauuaaaagcaauuuaa

SEQ ID NO: 377729 - RNA, 19 nt, Human
ucucaagggcuugucugug

SEQ ID NO: 377730 - RNA, 21 nt, Human
ugaacaaaagcuuuauaguac

SEQ ID NO: 377731 - RNA, 19 nt, Human
ugagcagccgaagaccaga

SEQ ID NO: 377732 - RNA, 23 nt, Human
ugagcagccgaagaccagaaaag

SEQ ID NO: 377733 - RNA, 18 nt, Human
ugggaagaggguguccag

SEQ ID NO: 377734 - RNA, 19 nt, Human
ugugcagagaaggucgagg

SEQ ID NO: 377735 - RNA, 20 nt, Human
ugugcagagaaggucgaggu

SEQ ID NO: 377736 - RNA, 23 nt, Human
ugugcugauuacaaggucuacag

SEQ ID NO: 377737 - RNA, 18 nt, Human
uucagccucugggaucug

SEQ ID NO: 377738 - RNA, 20 nt, Human
uucagccucugggaucuggu

SEQ ID NO: 377739 - RNA, 23 nt, Human
uucuuuucauucgaaucuucaga

SEQ ID NO: 377740 - RNA, 18 nt, Human
aaagagccaguacuucag

SEQ ID NO: 377741 - RNA, 23 nt, Human
aagcaaaagucaaauauuaccug

SEQ ID NO: 377742 - RNA, 24 nt, Human
aauuacucuuuauugaucaaauca

SEQ ID NO: 377743 - RNA, 23 nt, Human
acaauggcucuaagguccaaaca

SEQ ID NO: 377744 - RNA, 19 nt, Human
accugcagggauucucccu

SEQ ID NO: 377745 - RNA, 23 nt, Human
agggaagcgagaggagaagaggg

SEQ ID NO: 377746 - RNA, 19 nt, Human
caaaacucauuugcuucua

SEQ ID NO: 377747 - RNA, 20 nt, Human
caaaucaccaggaaucugcc

SEQ ID NO: 377748 - RNA, 18 nt, Human
caacaagguuucuuuuau

SEQ ID NO: 377749 - RNA, 19 nt, Human
caccuagaaagggcagccg

SEQ ID NO: 377750 - RNA, 22 nt, Human
caccuagaaagggcagccggaa

SEQ ID NO: 377751 - RNA, 22 nt, Human
caccuagaaagggcagccggaa

SEQ ID NO: 377752 - RNA, 21 nt, Human
caggaaagagccaguacuuca

SEQ ID NO: 377753 - RNA, 24 nt, Human
caggaaagagccaguacuucagua

SEQ ID NO: 377754 - RNA, 24 nt, Human
cagguccuccuuucccagucauca

SEQ ID NO: 377755 - RNA, 22 nt, Human
ccaagugaugaacaaauauccc

SEQ ID NO: 377756 - RNA, 22 nt, Human
ccccaaaguucaaaauguuacu

SEQ ID NO: 377757 - RNA, 23 nt, Human
ccccgugcaaagaaaaaucccuc

SEQ ID NO: 377758 - RNA, 21 nt, Human
uaacagagaccaagucagaug

SEQ ID NO: 377759 - RNA, 19 nt, Human
uacuuuggcaagagaaaac

SEQ ID NO: 377760 - RNA, 23 nt, Human
ucagacaaguugcucaauucuug

SEQ ID NO: 377761 - RNA, 19 nt, Human
uccaaaacucauuugcuuc

SEQ ID NO: 377762 - RNA, 20 nt, Human
uccgugauuguggacaaugg

SEQ ID NO: 377763 - RNA, 24 nt, Human
ucuugagaaccauccgugauugug

SEQ ID NO: 377764 - RNA, 24 nt, Human
ugaacaaauauccccccaaaguuc

SEQ ID NO: 377765 - RNA, 22 nt, Human
ugaagcaaaagucaaauauuac

SEQ ID NO: 377766 - RNA, 26 nt, Human
ugaucaaaucaccaggaaucugccgc

SEQ ID NO: 377767 - RNA, 21 nt, Human
ugcaaagaaaaaucccucaac

SEQ ID NO: 377768 - RNA, 23 nt, Human
ugcucugccucucccaguccuua

SEQ ID NO: 377769 - RNA, 21 nt, Human
ugggcucugaggcuugcucug

SEQ ID NO: 377770 - RNA, 19 nt, Human
ugggcugauuccaaucacc

SEQ ID NO: 377771 - RNA, 22 nt, Human
uucccagucaucagacaaguug

SEQ ID NO: 377772 - RNA, 21 nt, Human
uucuuguccagagcaggaaag

SEQ ID NO: 377773 - RNA, 22 nt, Human
uugaucaaaucaccaggaaucu

SEQ ID NO: 377774 - RNA, 24 nt, Human
uuguggacaauggcucuaaggucc

SEQ ID NO: 377775 - RNA, 26 nt, Human
uuuuuuuuuuuuuuuuuuuaguuuuu

SEQ ID NO: 377776 - RNA, 19 nt, Human
aaccuggcaagauaaaaug

SEQ ID NO: 377777 - RNA, 30 nt, Human
acacaagcacacacacacacacacacacag

SEQ ID NO: 377778 - RNA, 23 nt, Human
acacacacacacacacacacaca

SEQ ID NO: 377779 - RNA, 23 nt, Human
acacacacacacacacacacaca

SEQ ID NO: 377780 - RNA, 23 nt, Human
acacacacacacacacacacaca

SEQ ID NO: 377781 - RNA, 23 nt, Human
acacacacacacacacacacaca

SEQ ID NO: 377782 - RNA, 23 nt, Human
acacacacacacacacacacacg

SEQ ID NO: 377783 - RNA, 25 nt, Human
acacacacacacacacacgaggcca

SEQ ID NO: 377784 - RNA, 22 nt, Human
accucuugcuugguccuagaau

SEQ ID NO: 377785 - RNA, 20 nt, Human
agaaacguuaaguauguggg

SEQ ID NO: 377786 - RNA, 21 nt, Human
agaaccuggcaagauaaaaug

SEQ ID NO: 377787 - RNA, 18 nt, Human
agagagaaauaauucaaa

SEQ ID NO: 377788 - RNA, 24 nt, Human
auaaaaauagaaacuuugacaccc

SEQ ID NO: 377789 - RNA, 23 nt, Human
caaacacaagcacacacacacac

SEQ ID NO: 377790 - RNA, 31 nt, Human
caaacacaagcacacacacacacacacacag

SEQ ID NO: 377791 - RNA, 24 nt, Human
cacacaaacacaagcacacacaca

SEQ ID NO: 377792 - RNA, 20 nt, Human
cacacacacacacacacaca

SEQ ID NO: 377793 - RNA, 20 nt, Human
cacacacacacacacacaca

SEQ ID NO: 377794 - RNA, 20 nt, Human
cacacacacacacacacaca

SEQ ID NO: 377795 - RNA, 20 nt, Human
cacacacacacacacacaca

SEQ ID NO: 377796 - RNA, 20 nt, Human
cacacacacacacacacaca

SEQ ID NO: 377797 - RNA, 20 nt, Human
cacacacacacacacacaca

SEQ ID NO: 377798 - RNA, 20 nt, Human
cacacacacacacacacaca

SEQ ID NO: 377799 - RNA, 20 nt, Human
cacacacacacacacacaca

SEQ ID NO: 377800 - RNA, 22 nt, Human
cacacacacacacacacacaca

SEQ ID NO: 377801 - RNA, 22 nt, Human
cacacacacacacacacacaca

SEQ ID NO: 377802 - RNA, 26 nt, Human
cacacacacacacacacacacacaca

SEQ ID NO: 377803 - RNA, 26 nt, Human
cacacacacacacacacacacacaca

SEQ ID NO: 377804 - RNA, 26 nt, Human
cacacacacacacacacacacacaca

SEQ ID NO: 377805 - RNA, 26 nt, Human
cacacacacacacacacacacacaca

SEQ ID NO: 377806 - RNA, 26 nt, Human
cacacacacacacacacacacacaca

SEQ ID NO: 377807 - RNA, 24 nt, Human
cagaaauauagaagcucaacauuu

SEQ ID NO: 377808 - RNA, 24 nt, Human
ccacuccuccaacucuauuaaccu

SEQ ID NO: 377809 - RNA, 22 nt, Human
ccaucagccauacacaaucgac

SEQ ID NO: 377810 - RNA, 19 nt, Human
cccaguaaauuucccacga

SEQ ID NO: 377811 - RNA, 24 nt, Human
ccccaaaaaauauuuuuaaaaaga

SEQ ID NO: 377812 - RNA, 18 nt, Human
cuagaaucccaucagcca

SEQ ID NO: 377813 - RNA, 23 nt, Human
cuggcaagauaaaaugugucaga

SEQ ID NO: 377814 - RNA, 20 nt, Human
gaaccuggcaagauaaaaug

SEQ ID NO: 377815 - RNA, 21 nt, Human
gagaaauaauucaaauggaac

SEQ ID NO: 377816 - RNA, 25 nt, Human
gcacacacacacacacacacacaca

SEQ ID NO: 377817 - RNA, 19 nt, Human
ggaaaaaaaaaaaaccucu

SEQ ID NO: 377818 - RNA, 19 nt, Human
gggaaaaaaaaaaaaccuc

SEQ ID NO: 377819 - RNA, 26 nt, Human
uaaaaauagaaacuuugacaccccuc

SEQ ID NO: 377820 - RNA, 26 nt, Human
uaaauguaauaugcacacaaacacaa

SEQ ID NO: 377821 - RNA, 19 nt, Human
uaauaugcacacaaacaca

SEQ ID NO: 377822 - RNA, 22 nt, Human
uacaguaaaauuagcugcccac

SEQ ID NO: 377823 - RNA, 22 nt, Human
uagcuuccacuccuccaacucu

SEQ ID NO: 377824 - RNA, 24 nt, Human
uaugcacacaaacacaagcacaca

SEQ ID NO: 377825 - RNA, 21 nt, Human
ucccagaaauauagaagcuuc

SEQ ID NO: 377826 - RNA, 18 nt, Human
uccuaaagguuuagaacc

SEQ ID NO: 377827 - RNA, 19 nt, Human
ugcacacaaacacaagcac

SEQ ID NO: 377828 - RNA, 23 nt, Human
ugcacacaaacacaagcacacac

SEQ ID NO: 377829 - RNA, 18 nt, Human
uggcaagauaaaaugugu

SEQ ID NO: 377830 - RNA, 22 nt, Human
uggcaagauaaaaugugucaga

SEQ ID NO: 377831 - RNA, 19 nt, Human
ugugggggaaaaaaaaaaa

SEQ ID NO: 377832 - RNA, 19 nt, Human
ugugggggaaaaaaaaaaa

SEQ ID NO: 377833 - RNA, 24 nt, Human
uugcuugguccuagaaucccauca

SEQ ID NO: 377834 - RNA, 22 nt, Human
uuuaaacacauuccaaaguuua

SEQ ID NO: 377835 - RNA, 18 nt, Human
aagcagcgaggggugggu

SEQ ID NO: 377836 - RNA, 22 nt, Human
agacacagaucugggucccaca

SEQ ID NO: 377837 - RNA, 26 nt, Human
caaggcgacgcagggcaagcagcgag

SEQ ID NO: 377838 - RNA, 21 nt, Human
cagaggagcggacaugcagca

SEQ ID NO: 377839 - RNA, 19 nt, Human
cagggcaagcagcgagggg

SEQ ID NO: 377840 - RNA, 21 nt, Human
cgacgcagggcaagcagcgag

SEQ ID NO: 377841 - RNA, 19 nt, Human
gcaagcagcgagggguggg

SEQ ID NO: 377842 - RNA, 19 nt, Human
gcaaggcgacgcagggcaa

SEQ ID NO: 377843 - RNA, 24 nt, Human
gcgaggggugggugacccagggag

SEQ ID NO: 377844 - RNA, 18 nt, Human
gcgugggugcgucgggcc

SEQ ID NO: 377845 - RNA, 25 nt, Human
ggaaugagggcagcugcuucaagaa

SEQ ID NO: 377846 - RNA, 22 nt, Human
ggagccuccgcggccuccgcuc

SEQ ID NO: 377847 - RNA, 19 nt, Human
gggcaagcagcgaggggug

SEQ ID NO: 377848 - RNA, 25 nt, Human
uccuaagucuuauuccaagcuaagc

SEQ ID NO: 377849 - RNA, 22 nt, Human
ucggcucucggggggugagggg

SEQ ID NO: 377850 - RNA, 19 nt, Human
ucugaagucggaaugaggg

SEQ ID NO: 377851 - RNA, 22 nt, Human
ugaagcaccauuuucuccuaag

SEQ ID NO: 377852 - RNA, 24 nt, Human
ugacuggaccggaagcggguuagu

SEQ ID NO: 377853 - RNA, 24 nt, Human
ugcugaaggaccgaggagccuccg

SEQ ID NO: 377854 - RNA, 24 nt, Human
uuagugaagcaccauuuucuccua

SEQ ID NO: 377855 - RNA, 18 nt, Human
aaaacuaauaacgucaug

SEQ ID NO: 377856 - RNA, 19 nt, Human
aagaacaccucagugagga

SEQ ID NO: 377857 - RNA, 20 nt, Human
agcaggcucuuagcagcucc

SEQ ID NO: 377858 - RNA, 20 nt, Human
agcucaucucgccuccaccu

SEQ ID NO: 377859 - RNA, 24 nt, Human
agguggcugcagggauguggggag

SEQ ID NO: 377860 - RNA, 25 nt, Human
agguggcugcagggauguggggagg

SEQ ID NO: 377861 - RNA, 21 nt, Human
caugucacugggcuggccugu

SEQ ID NO: 377862 - RNA, 21 nt, Human
cccucauguaaauggugauau

SEQ ID NO: 377863 - RNA, 21 nt, Human
cccugggacugaagcggggcc

SEQ ID NO: 377864 - RNA, 18 nt, Human
cuggccuguuuccucugc

SEQ ID NO: 377865 - RNA, 20 nt, Human
gaggacguagccugcucugc

SEQ ID NO: 377866 - RNA, 25 nt, Human
gaggauggagggcggggcugcgcag

SEQ ID NO: 377867 - RNA, 22 nt, Human
gcccugggacugaagcggggcc

SEQ ID NO: 377868 - RNA, 24 nt, Human
ggagguggcugcagggaugugggg

SEQ ID NO: 377869 - RNA, 19 nt, Human
ggauggagggcggggcugc

SEQ ID NO: 377870 - RNA, 21 nt, Human
gggaggauggagggcggggcu

SEQ ID NO: 377871 - RNA, 21 nt, Human
uccucugcgcuguggggagga

SEQ ID NO: 377872 - RNA, 24 nt, Human
ucuggcugcagugacucccaggaa

SEQ ID NO: 377873 - RNA, 19 nt, Human
ugaagcggggccacccgag

SEQ ID NO: 377874 - RNA, 22 nt, Human
ugagagggcucuggcugcagug

SEQ ID NO: 377875 - RNA, 22 nt, Human
ugcgcuguggggaggaguggag

SEQ ID NO: 377876 - RNA, 19 nt, Human
ugcugggagguggcugcag

SEQ ID NO: 377877 - RNA, 21 nt, Human
uggagggcggggcugcgcagc

SEQ ID NO: 377878 - RNA, 19 nt, Human
uggcugcagggaugugggg

SEQ ID NO: 377879 - RNA, 20 nt, Human
uggggaggauggagggcggg

SEQ ID NO: 377880 - RNA, 25 nt, Human
uguaaauggugauauauuuauacaa

SEQ ID NO: 377881 - RNA, 18 nt, Human
aaaagguaagagaagggc

SEQ ID NO: 377882 - RNA, 24 nt, Human
aaaagguaagagaagggcaggagg

SEQ ID NO: 377883 - RNA, 22 nt, Human
aaagguaagagaagggcaggag

SEQ ID NO: 377884 - RNA, 22 nt, Human
aacugucucagcugcuccucca

SEQ ID NO: 377885 - RNA, 20 nt, Human
acaggagagaaucuccuggu

SEQ ID NO: 377886 - RNA, 26 nt, Human
acauugaggaacauuaggcacagaga

SEQ ID NO: 377887 - RNA, 19 nt, Human
aggaggugaaggaaaggag

SEQ ID NO: 377888 - RNA, 29 nt, Human
agggcaggaggugaaggaaaggggacccc

SEQ ID NO: 377889 - RNA, 21 nt, Human
agguaagagaagggcaggagg

SEQ ID NO: 377890 - RNA, 19 nt, Human
cacuggcaguaagcaaggc

SEQ ID NO: 377891 - RNA, 21 nt, Human
cagcugcuccuccacaucagc

SEQ ID NO: 377892 - RNA, 21 nt, Human
ccagguacagucugucaugcc

SEQ ID NO: 377893 - RNA, 22 nt, Human
ccccaaaccccuugcacuuccu

SEQ ID NO: 377894 - RNA, 23 nt, Human
ccccaccccccccgaaaugcucu

SEQ ID NO: 377895 - RNA, 26 nt, Human
ccccccccgaaaugcucuauaaauua

SEQ ID NO: 377896 - RNA, 20 nt, Human
cccggggaugggguguuaau

SEQ ID NO: 377897 - RNA, 18 nt, Human
cccuaugggugugggacc

SEQ ID NO: 377898 - RNA, 18 nt, Human
cuccuccacaucagcucc

SEQ ID NO: 377899 - RNA, 23 nt, Human
cuggaauuucacugaaaagguaa

SEQ ID NO: 377900 - RNA, 21 nt, Human
gagaaucuccuggucugccag

SEQ ID NO: 377901 - RNA, 18 nt, Human
gaguugaugcccugcccu

SEQ ID NO: 377902 - RNA, 28 nt, Human
ggcaggaggugaaggaaagggggacccc

SEQ ID NO: 377903 - RNA, 24 nt, Human
guauuugggcaagaguguccuguu

SEQ ID NO: 377904 - RNA, 18 nt, Human
uaagagaagggcaggagg

SEQ ID NO: 377905 - RNA, 20 nt, Human
uacagucugucaugccuucc

SEQ ID NO: 377906 - RNA, 22 nt, Human
uaggaaaggaaaauccccaaac

SEQ ID NO: 377907 - RNA, 28 nt, Human
ucagcuccuucuuagaguucucccgggg

SEQ ID NO: 377908 - RNA, 21 nt, Human
ucagcugcuccuccacaucag

SEQ ID NO: 377909 - RNA, 21 nt, Human
uccccaaaccccuugcacuuc

SEQ ID NO: 377910 - RNA, 24 nt, Human
ugcaaaaagugcaguauuugggca

SEQ ID NO: 377911 - RNA, 19 nt, Human
ugcccugcccugcuucagc

SEQ ID NO: 377912 - RNA, 22 nt, Human
ugcccugcccugcuucagcuca

SEQ ID NO: 377913 - RNA, 22 nt, Human
ugggugugggacccaaugaauc

SEQ ID NO: 377914 - RNA, 20 nt, Human
uguccuguuuuuccagguaa

SEQ ID NO: 377915 - RNA, 21 nt, Human
uucacugaaaagguaagagaa

SEQ ID NO: 377916 - RNA, 22 nt, Human
uuuccagguacagucugucaug

SEQ ID NO: 377917 - RNA, 18 nt, Human
aaacagcagaagagaagg

SEQ ID NO: 377918 - RNA, 19 nt, Human
aacaacacaccuggaagcc

SEQ ID NO: 377919 - RNA, 29 nt, Human
aaccagaaggcagaaggcgaggggacccc

SEQ ID NO: 377920 - RNA, 21 nt, Human
accguggugagggacagaggc

SEQ ID NO: 377921 - RNA, 21 nt, Human
accugggucccaccaccaguc

SEQ ID NO: 377922 - RNA, 23 nt, Human
agaggcugcgguuggcugcucag

SEQ ID NO: 377923 - RNA, 21 nt, Human
agaggggguuaccuggguccc

SEQ ID NO: 377924 - RNA, 21 nt, Human
cacaccguggugagggacaga

SEQ ID NO: 377925 - RNA, 21 nt, Human
caccuccuuggccagacucaa

SEQ ID NO: 377926 - RNA, 18 nt, Human
cagaaggcgagugcccuc

SEQ ID NO: 377927 - RNA, 18 nt, Human
cagcaggcaguuguccug

SEQ ID NO: 377928 - RNA, 20 nt, Human
cagugacaguuccuggugaa

SEQ ID NO: 377929 - RNA, 21 nt, Human
caguuuccugaacggagggag

SEQ ID NO: 377930 - RNA, 22 nt, Human
ccccagggccugcuucagcucu

SEQ ID NO: 377931 - RNA, 25 nt, Human
ccccgaacaacacaccuggaagcca

SEQ ID NO: 377932 - RNA, 20 nt, Human
cccgaacaacacaccuggaa

SEQ ID NO: 377933 - RNA, 20 nt, Human
ccugggucccaccaccaguc

SEQ ID NO: 377934 - RNA, 19 nt, Human
ccugugcuccgcucuccuu

SEQ ID NO: 377935 - RNA, 21 nt, Human
cgaacaacacaccuggaagcc

SEQ ID NO: 377936 - RNA, 21 nt, Human
cuagcagcaggcaguuguccu

SEQ ID NO: 377937 - RNA, 22 nt, Human
cugcgccucugacugucaucug

SEQ ID NO: 377938 - RNA, 22 nt, Human
cuggaguuacagggugggggug

SEQ ID NO: 377939 - RNA, 21 nt, Human
cuguccccgaacaacacacug

SEQ ID NO: 377940 - RNA, 18 nt, Human
gagauggaguggcagcug

SEQ ID NO: 377941 - RNA, 22 nt, Human
gcaggggcagccacuccccaca

SEQ ID NO: 377942 - RNA, 18 nt, Human
ggagauggaguggcagcu

SEQ ID NO: 377943 - RNA, 23 nt, Human
ggaguuacagggugggggugggg

SEQ ID NO: 377944 - RNA, 28 nt, Human
ggaguuacaggguggggguggggaggga

SEQ ID NO: 377945 - RNA, 22 nt, Human
gggggugggagaggggguuacc

SEQ ID NO: 377946 - RNA, 18 nt, Human
ggggguggggagggaggg

SEQ ID NO: 377947 - RNA, 19 nt, Human
gggguggggagggagggcu

SEQ ID NO: 377948 - RNA, 23 nt, Human
gguggggguggggagggagggcu

SEQ ID NO: 377949 - RNA, 18 nt, Human
gguuaccugggucccacc

SEQ ID NO: 377950 - RNA, 19 nt, Human
gucccuggcaguuuccuga

SEQ ID NO: 377951 - RNA, 20 nt, Human
guggugagggacagaggcac

SEQ ID NO: 377952 - RNA, 18 nt, Human
guuacagggugggggugg

SEQ ID NO: 377953 - RNA, 25 nt, Human
guugaccuuggcaacagacccuagc

SEQ ID NO: 377954 - RNA, 21 nt, Human
uacaggguggggguggggagg

SEQ ID NO: 377955 - RNA, 20 nt, Human
ucaaggcgguggcugucccc

SEQ ID NO: 377956 - RNA, 25 nt, Human
uccacaccguggugagggacagagg

SEQ ID NO: 377957 - RNA, 18 nt, Human
uccccgaacaacacaccu

SEQ ID NO: 377958 - RNA, 23 nt, Human
uccccgaacaacacaccuggaag

SEQ ID NO: 377959 - RNA, 18 nt, Human
ugaacggagggagggagu

SEQ ID NO: 377960 - RNA, 21 nt, Human
ugagagcagcuggagauggag

SEQ ID NO: 377961 - RNA, 22 nt, Human
ugagggacagaggcacgaggcu

SEQ ID NO: 377962 - RNA, 23 nt, Human
ugcuccgcucuccuuguggccaa

SEQ ID NO: 377963 - RNA, 21 nt, Human
uggaauuaaacagcagaagag

SEQ ID NO: 377964 - RNA, 24 nt, Human
uggcaacagacccuagcagcaggc

SEQ ID NO: 377965 - RNA, 23 nt, Human
ugggagaggggguuaccuggguc

SEQ ID NO: 377966 - RNA, 23 nt, Human
ugguaggcggcuuccugcuccug

SEQ ID NO: 377967 - RNA, 22 nt, Human
acccaaucccccgacuccccag

SEQ ID NO: 377968 - RNA, 18 nt, Human
acuggcccccugcccacc

SEQ ID NO: 377969 - RNA, 20 nt, Human
agacgagaugugucaggucc

SEQ ID NO: 377970 - RNA, 25 nt, Human
agacgagaugugucagguccugggg

SEQ ID NO: 377971 - RNA, 25 nt, Human
aggggggaggagagaggaaaacagu

SEQ ID NO: 377972 - RNA, 24 nt, Human
caacccaaucccccgacuccccag

SEQ ID NO: 377973 - RNA, 22 nt, Human
cacaacccaaucccccgacucc

SEQ ID NO: 377974 - RNA, 25 nt, Human
cacaacccaaucccccgacucccca

SEQ ID NO: 377975 - RNA, 24 nt, Human
caccagcgcccccgugcccauccc

SEQ ID NO: 377976 - RNA, 21 nt, Human
caccccagcuucuuggggcag

SEQ ID NO: 377977 - RNA, 22 nt, Human
cacccccgggccccagcggcuu

SEQ ID NO: 377978 - RNA, 21 nt, Human
caccgccccacacccccgggc

SEQ ID NO: 377979 - RNA, 20 nt, Human
cacuccccccucccagacag

SEQ ID NO: 377980 - RNA, 19 nt, Human
cagacagagaucaaggcag

SEQ ID NO: 377981 - RNA, 18 nt, Human
cagccugauccgcaugcg

SEQ ID NO: 377982 - RNA, 22 nt, Human
cagcgucgcugucuccgcugcu

SEQ ID NO: 377983 - RNA, 25 nt, Human
cagcucggccccgccggcccgcggc

SEQ ID NO: 377984 - RNA, 25 nt, Human
caugcaggggugggcuuccccucgc

SEQ ID NO: 377985 - RNA, 20 nt, Human
ccacacccccgggccccagc

SEQ ID NO: 377986 - RNA, 18 nt, Human
ccacaccgccccacaccc

SEQ ID NO: 377987 - RNA, 18 nt, Human
cccacaacccaauccccc

SEQ ID NO: 377988 - RNA, 21 nt, Human
cccacaacccaaucccccgac

SEQ ID NO: 377989 - RNA, 21 nt, Human
cccacacccccgggccccagc

SEQ ID NO: 377990 - RNA, 19 nt, Human
ccccacacccccgggcccc

SEQ ID NO: 377991 - RNA, 21 nt, Human
ccccacacccccgggccccag

SEQ ID NO: 377992 - RNA, 20 nt, Human
ccccaucaagcucaguuauu

SEQ ID NO: 377993 - RNA, 23 nt, Human
cccccagcaccuggggugggggu

SEQ ID NO: 377994 - RNA, 20 nt, Human
ccccgggccccagcggcuuc

SEQ ID NO: 377995 - RNA, 18 nt, Human
ccccucccagacagagau

SEQ ID NO: 377996 - RNA, 24 nt, Human
ccccucccagacagagaucaaggc

SEQ ID NO: 377997 - RNA, 23 nt, Human
ccccucgccccuccccucaugaa

SEQ ID NO: 377998 - RNA, 21 nt, Human
cccggcccagcccggcucagc

SEQ ID NO: 377999 - RNA, 19 nt, Human
cccgugcccaucccuaggg

SEQ ID NO: 378000 - RNA, 22 nt, Human
cccucccugcccccuagcaccc

SEQ ID NO: 378001 - RNA, 24 nt, Human
cccugcccacccccaucaagcuca

SEQ ID NO: 378002 - RNA, 25 nt, Human
ccgccacaccgccccacacccccgg

SEQ ID NO: 378003 - RNA, 18 nt, Human
ccgcggccgccagcgucg

SEQ ID NO: 378004 - RNA, 19 nt, Human
ccggcccgcggcucagccu

SEQ ID NO: 378005 - RNA, 21 nt, Human
ccggugcccaccaugucacgc

SEQ ID NO: 378006 - RNA, 23 nt, Human
ccuagcacccuggaugguccagg

SEQ ID NO: 378007 - RNA, 21 nt, Human
ccucccugcccccuagcaccc

SEQ ID NO: 378008 - RNA, 24 nt, Human
ccugauccgcaugcgccgccgcgc

SEQ ID NO: 378009 - RNA, 18 nt, Human
cgaccgcccucccugucg

SEQ ID NO: 378010 - RNA, 18 nt, Human
cgccgcgaccgaccgccc

SEQ ID NO: 378011 - RNA, 24 nt, Human
cgcgaccgaccgcccucccugucg

SEQ ID NO: 378012 - RNA, 21 nt, Human
cgcugucuccgcugcucgccg

SEQ ID NO: 378013 - RNA, 19 nt, Human
cuagggccccuucacuccc

SEQ ID NO: 378014 - RNA, 26 nt, Human
cucgccgcgaccgaccgcccucccug

SEQ ID NO: 378015 - RNA, 21 nt, Human
cugggggcuuggcucaacugg

SEQ ID NO: 378016 - RNA, 20 nt, Human
cuuuccggugcccaccaugu

SEQ ID NO: 378017 - RNA, 18 nt, Human
gacccccagcaccugggg

SEQ ID NO: 378018 - RNA, 20 nt, Human
gagaucgacguuuugcaaaa

SEQ ID NO: 378019 - RNA, 23 nt, Human
gcagcaaucuccccaccacuucu

SEQ ID NO: 378020 - RNA, 21 nt, Human
gcaggagaaguccccuccuuu

SEQ ID NO: 378021 - RNA, 24 nt, Human
gcccccaccaccccagcuucuugg

SEQ ID NO: 378022 - RNA, 18 nt, Human
gccuucgcggaugcgggg

SEQ ID NO: 378023 - RNA, 22 nt, Human
gcuagggccccuucacuccccc

SEQ ID NO: 378024 - RNA, 19 nt, Human
gcucaacuggcccccugcc

SEQ ID NO: 378025 - RNA, 21 nt, Human
ggaggggggaggagagaggaa

SEQ ID NO: 378026 - RNA, 23 nt, Human
ggccauggggacugcccacaacc

SEQ ID NO: 378027 - RNA, 20 nt, Human
ggcggagugcagggggcuag

SEQ ID NO: 378028 - RNA, 21 nt, Human
ggcugggggcuuggcucaacu

SEQ ID NO: 378029 - RNA, 22 nt, Human
gggaggagagaggaaaacaguu

SEQ ID NO: 378030 - RNA, 22 nt, Human
gguggugagugggaaggggccg

SEQ ID NO: 378031 - RNA, 19 nt, Human
gguguccccucccugcccu

SEQ ID NO: 378032 - RNA, 19 nt, Human
uaaccgcauggcucugagg

SEQ ID NO: 378033 - RNA, 18 nt, Human
uagggcagagaggggggc

SEQ ID NO: 378034 - RNA, 19 nt, Human
uagggcagagaggggggca

SEQ ID NO: 378035 - RNA, 22 nt, Human
ucaccagcgcccccgugcccau

SEQ ID NO: 378036 - RNA, 20 nt, Human
ucagguccugggggugggaa

SEQ ID NO: 378037 - RNA, 18 nt, Human
uccgcaugcgccgccgcg

SEQ ID NO: 378038 - RNA, 20 nt, Human
uccgcugcucgccgcgaccg

SEQ ID NO: 378039 - RNA, 23 nt, Human
ucgccccuccccucaugaaguca

SEQ ID NO: 378040 - RNA, 23 nt, Human
ucgccgcgaccgaccgcccuccc

SEQ ID NO: 378041 - RNA, 18 nt, Human
ucuccaggcggccauggg

SEQ ID NO: 378042 - RNA, 22 nt, Human
ucugcagaucggggcugggggc

SEQ ID NO: 378043 - RNA, 24 nt, Human
ugcaggggugggcuuccccucgcc

SEQ ID NO: 378044 - RNA, 19 nt, Human
uggcccccugcccaccccc

SEQ ID NO: 378045 - RNA, 19 nt, Human
uggcucaacuggcccccug

SEQ ID NO: 378046 - RNA, 24 nt, Human
uggcucaacuggcccccugcccac

SEQ ID NO: 378047 - RNA, 21 nt, Human
ugggaaggggccgagauaugg

SEQ ID NO: 378048 - RNA, 22 nt, Human
uggggacugcccacaacccaau

SEQ ID NO: 378049 - RNA, 24 nt, Human
uuuuuuuuuuuuuuuuuuucaaag

SEQ ID NO: 378050 - RNA, 19 nt, Human
auccucuuccaaaagucuc

SEQ ID NO: 378051 - RNA, 21 nt, Human
augguaacaaucauuucuuuc

SEQ ID NO: 378052 - RNA, 24 nt, Human
auuuauauacaaaaaacuucaaaa

SEQ ID NO: 378053 - RNA, 25 nt, Human
caaaaacaaauuaauccaaaucuug

SEQ ID NO: 378054 - RNA, 23 nt, Human
caaaaugagguaccaagaggagc

SEQ ID NO: 378055 - RNA, 18 nt, Human
caaaaugagguaccaagg

SEQ ID NO: 378056 - RNA, 25 nt, Human
caagaggagcacggagagccggcca

SEQ ID NO: 378057 - RNA, 19 nt, Human
caaggcggagauuaucugc

SEQ ID NO: 378058 - RNA, 22 nt, Human
ccaaaaugagguaccaagagga

SEQ ID NO: 378059 - RNA, 24 nt, Human
ccccaaaaugagguaccaagagga

SEQ ID NO: 378060 - RNA, 18 nt, Human
cuauauauauccucuucc

SEQ ID NO: 378061 - RNA, 21 nt, Human
cuccccaaaaugagguaccaa

SEQ ID NO: 378062 - RNA, 20 nt, Human
uacuaugcuauauauauccu

SEQ ID NO: 378063 - RNA, 22 nt, Human
uaguguaaaaguaugugaagcc

SEQ ID NO: 378064 - RNA, 24 nt, Human
ugucuaacuuauuuaaccccuuca

SEQ ID NO: 378065 - RNA, 19 nt, Human
uuaaauugcaaauuaaagc

SEQ ID NO: 378066 - RNA, 23 nt, Human
aaagagaaagugaaagccauuag

SEQ ID NO: 378067 - RNA, 21 nt, Human
aaccaacauugcggaugcccu

SEQ ID NO: 378068 - RNA, 24 nt, Human
aaccagaggcccagccaaggccca

SEQ ID NO: 378069 - RNA, 21 nt, Human
aacuacaguggugaagagacc

SEQ ID NO: 378070 - RNA, 22 nt, Human
aacuggccuguacagagaccug

SEQ ID NO: 378071 - RNA, 18 nt, Human
aagagaccaggaggcagc

SEQ ID NO: 378072 - RNA, 18 nt, Human
aagcaagggacccccaga

SEQ ID NO: 378073 - RNA, 23 nt, Human
aagcagcugaugguuuggaaaug

SEQ ID NO: 378074 - RNA, 21 nt, Human
aaggucucuucagagggaccc

SEQ ID NO: 378075 - RNA, 24 nt, Human
aaggucucuucagagggaccccag

SEQ ID NO: 378076 - RNA, 18 nt, Human
agaaaaaguucacaugug

SEQ ID NO: 378077 - RNA, 20 nt, Human
agacagaagaggggcacgca

SEQ ID NO: 378078 - RNA, 21 nt, Human
agacagaagaggggcacgcag

SEQ ID NO: 378079 - RNA, 20 nt, Human
agcagccccugccuccagga

SEQ ID NO: 378080 - RNA, 23 nt, Human
agccugacagcuuccagcagaaa

SEQ ID NO: 378081 - RNA, 26 nt, Human
agcuaugugcugggcugcuccaucag

SEQ ID NO: 378082 - RNA, 25 nt, Human
agcuaugugcugggcugcuccaucg

SEQ ID NO: 378083 - RNA, 19 nt, Human
aggagggacaggguucccc

SEQ ID NO: 378084 - RNA, 21 nt, Human
agggcacccaggaaacaucag

SEQ ID NO: 378085 - RNA, 21 nt, Human
aucaacuaaaugucagggacc

SEQ ID NO: 378086 - RNA, 24 nt, Human
augccauuuaauuagauuguuuac

SEQ ID NO: 378087 - RNA, 19 nt, Human
caaaaucaaagccuguccc

SEQ ID NO: 378088 - RNA, 21 nt, Human
cacaggccucaagagaaggcc

SEQ ID NO: 378089 - RNA, 20 nt, Human
cagaaccagaggcccagcca

SEQ ID NO: 378090 - RNA, 20 nt, Human
cagagggugggccccugguc

SEQ ID NO: 378091 - RNA, 22 nt, Human
cagcagaaagugucagaaccag

SEQ ID NO: 378092 - RNA, 24 nt, Human
cagccugacagcuuccagcagaaa

SEQ ID NO: 378093 - RNA, 18 nt, Human
caggagcgcgcugcagug

SEQ ID NO: 378094 - RNA, 20 nt, Human
caggcccagcccugcugcaa

SEQ ID NO: 378095 - RNA, 22 nt, Human
cauuaggcaagcuaugugcugg

SEQ ID NO: 378096 - RNA, 19 nt, Human
ccacacgacuaugugaccu

SEQ ID NO: 378097 - RNA, 20 nt, Human
ccagcagaaagugucagaac

SEQ ID NO: 378098 - RNA, 23 nt, Human
cccacugccgcuguccaggggac

SEQ ID NO: 378099 - RNA, 19 nt, Human
cccagagcacaggccucaa

SEQ ID NO: 378100 - RNA, 18 nt, Human
cccagcaggaagcccaca

SEQ ID NO: 378101 - RNA, 21 nt, Human
ccccugccuccaggagaacuc

SEQ ID NO: 378102 - RNA, 22 nt, Human
cccugggcagagggugggcccc

SEQ ID NO: 378103 - RNA, 22 nt, Human
cccuucgugagccuucucaguc

SEQ ID NO: 378104 - RNA, 19 nt, Human
ccuaaccccugauccugga

SEQ ID NO: 378105 - RNA, 19 nt, Human
ccuaggcuuacuuuaucua

SEQ ID NO: 378106 - RNA, 19 nt, Human
ccucuaaaugggcgcgauu

SEQ ID NO: 378107 - RNA, 18 nt, Human
cgagauacacuuguuagg

SEQ ID NO: 378108 - RNA, 21 nt, Human
cggcgagccucgugccgaauu

SEQ ID NO: 378109 - RNA, 18 nt, Human
cucagucccagcaggaag

SEQ ID NO: 378110 - RNA, 23 nt, Human
cuccugggcccuggcauuguucu

SEQ ID NO: 378111 - RNA, 18 nt, Human
cucucagugaaaccaaca

SEQ ID NO: 378112 - RNA, 18 nt, Human
gaaagugucagaaccaga

SEQ ID NO: 378113 - RNA, 18 nt, Human
gagccagggcacccagga

SEQ ID NO: 378114 - RNA, 23 nt, Human
gaggcagcucucagugaaaccaa

SEQ ID NO: 378115 - RNA, 23 nt, Human
gcaaggacucccugggcagaggg

SEQ ID NO: 378116 - RNA, 20 nt, Human
gcuucuugcacccuaacccc

SEQ ID NO: 378117 - RNA, 20 nt, Human
ggaugcccuucgugagccuu

SEQ ID NO: 378118 - RNA, 22 nt, Human
ggcacagaauccucgacccaca

SEQ ID NO: 378119 - RNA, 18 nt, Human
ggccccugguccuggagg

SEQ ID NO: 378120 - RNA, 22 nt, Human
gggcaggcgguccuccugggcc

SEQ ID NO: 378121 - RNA, 26 nt, Human
gggcccuggcauuguucuuacaaaug

SEQ ID NO: 378122 - RNA, 25 nt, Human
ggucaggagcgcgcugcagugagcc

SEQ ID NO: 378123 - RNA, 18 nt, Human
gguccuggaggcacagaa

SEQ ID NO: 378124 - RNA, 22 nt, Human
gguuacagccacauccucuaaa

SEQ ID NO: 378125 - RNA, 21 nt, Human
gugaaacaaggcagcagcccc

SEQ ID NO: 378126 - RNA, 21 nt, Human
gugagccuucucagucccagc

SEQ ID NO: 378127 - RNA, 22 nt, Human
gugugaucugggacuggcaggu

SEQ ID NO: 378128 - RNA, 23 nt, Human
uaaaacaaaagagaaagugaaag

SEQ ID NO: 378129 - RNA, 19 nt, Human
uaaauggcuucuugcaccc

SEQ ID NO: 378130 - RNA, 20 nt, Human
uaacuggggaagacuucgau

SEQ ID NO: 378131 - RNA, 18 nt, Human
uaggagggacaggguucc

SEQ ID NO: 378132 - RNA, 23 nt, Human
ucagaguguaccaggucuguagc

SEQ ID NO: 378133 - RNA, 20 nt, Human
ucagcacacacacacacaca

SEQ ID NO: 378134 - RNA, 21 nt, Human
ucagcacacacacacacacag

SEQ ID NO: 378135 - RNA, 20 nt, Human
uccagcagguuacagccaca

SEQ ID NO: 378136 - RNA, 23 nt, Human
uccccuaaggcacuuuuaaagau

SEQ ID NO: 378137 - RNA, 20 nt, Human
ucccugggcagagggugggc

SEQ ID NO: 378138 - RNA, 25 nt, Human
ucccugggcagagggugggccccug

SEQ ID NO: 378139 - RNA, 25 nt, Human
ucgacccacacgacuaugugaccuc

SEQ ID NO: 378140 - RNA, 19 nt, Human
ugaaacaaggcagcagccc

SEQ ID NO: 378141 - RNA, 19 nt, Human
ugagagaacuacaguggug

SEQ ID NO: 378142 - RNA, 23 nt, Human
ugaucugggacuggcagguuauu

SEQ ID NO: 378143 - RNA, 20 nt, Human
ugaugugugaucugggacug

SEQ ID NO: 378144 - RNA, 24 nt, Human
ugccaccuagaaaaaguucacaug

SEQ ID NO: 378145 - RNA, 21 nt, Human
ugcccuucgugagccuucuca

SEQ ID NO: 378146 - RNA, 23 nt, Human
ugcugggcugcuaacguagcccc

SEQ ID NO: 378147 - RNA, 22 nt, Human
uggaagaaggcagagaaacugg

SEQ ID NO: 378148 - RNA, 20 nt, Human
uggacagugagcagccaagg

SEQ ID NO: 378149 - RNA, 23 nt, Human
uggacagugagcagccaaggucu

SEQ ID NO: 378150 - RNA, 23 nt, Human
ugggaaggagcuauggaguccca

SEQ ID NO: 378151 - RNA, 25 nt, Human
ugggccccugguccuggaggcacag

SEQ ID NO: 378152 - RNA, 23 nt, Human
uggugaagagaccaggaggcagc

SEQ ID NO: 378153 - RNA, 28 nt, Human
uguccagcuuccucgggccacacacccc

SEQ ID NO: 378154 - RNA, 23 nt, Human
ugucuugcuaacccucaaaauca

SEQ ID NO: 378155 - RNA, 19 nt, Human
uuaggagggacaggguucc

SEQ ID NO: 378156 - RNA, 20 nt, Human
uucacauguggacagugagc

SEQ ID NO: 378157 - RNA, 21 nt, Human
uuccccuaaggcacuuuuaaa

SEQ ID NO: 378158 - RNA, 18 nt, Human
uuccucgggccacacacc

SEQ ID NO: 378159 - RNA, 22 nt, Human
uuuugcugcccuaaauggcuuc

SEQ ID NO: 378160 - RNA, 18 nt, Human
uuuuuuuuuuuuuugcgg

SEQ ID NO: 378161 - RNA, 18 nt, Human
uuuuuuuuuuuuuuuuug

SEQ ID NO: 378162 - RNA, 22 nt, Human
uuuuuuuuuuuuuuuuugcggu

SEQ ID NO: 378163 - RNA, 25 nt, Human
uuuuuuuuuuuuuuuuuugcgguga

SEQ ID NO: 378164 - RNA, 23 nt, Human
uuuuuuuuuuuuuuuuuuugcgg

SEQ ID NO: 378165 - RNA, 20 nt, Human
aaaaaaaaaaaaaggacagu

SEQ ID NO: 378166 - RNA, 24 nt, Human
aaaagggcacccucagccccggcc

SEQ ID NO: 378167 - RNA, 25 nt, Human
aaaucuacaaaacacuguuaaaaaa

SEQ ID NO: 378168 - RNA, 20 nt, Human
acaaaacacuguuaaaaaaa

SEQ ID NO: 378169 - RNA, 25 nt, Human
acacaugcacacacauacacacaca

SEQ ID NO: 378170 - RNA, 26 nt, Human
acagagcuccaggagggagggaacgc

SEQ ID NO: 378171 - RNA, 33 nt, Human
acauggagacacgcacacaugcacacacauagu

SEQ ID NO: 378172 - RNA, 20 nt, Human
acucaucccacccacccacc

SEQ ID NO: 378173 - RNA, 20 nt, Human
agaauggauggcaaggggca

SEQ ID NO: 378174 - RNA, 18 nt, Human
agacaggggccacccagc

SEQ ID NO: 378175 - RNA, 18 nt, Human
agaggaccaacagcaggc

SEQ ID NO: 378176 - RNA, 21 nt, Human
agaugccacaaacugucagcu

SEQ ID NO: 378177 - RNA, 18 nt, Human
agccuggaagcagcggca

SEQ ID NO: 378178 - RNA, 22 nt, Human
agcggcagagggucugucucgg

SEQ ID NO: 378179 - RNA, 20 nt, Human
agcggcagugggaaucugcc

SEQ ID NO: 378180 - RNA, 19 nt, Human
aggcaaggccuugugcugc

SEQ ID NO: 378181 - RNA, 20 nt, Human
aggcaggcggggccaggggc

SEQ ID NO: 378182 - RNA, 24 nt, Human
aggccaggaccagggccuccugga

SEQ ID NO: 378183 - RNA, 21 nt, Human
aggccaggcaaggccuugugc

SEQ ID NO: 378184 - RNA, 18 nt, Human
aggccauggccacaugug

SEQ ID NO: 378185 - RNA, 18 nt, Human
aggccuugugcugcccag

SEQ ID NO: 378186 - RNA, 23 nt, Human
aggcgugcggccacagcgggagc

SEQ ID NO: 378187 - RNA, 23 nt, Human
aggcuggaaaagggcacccucag

SEQ ID NO: 378188 - RNA, 21 nt, Human
agggucccucaggucuaagga

SEQ ID NO: 378189 - RNA, 21 nt, Human
agucaucugaaaucuacaaaa

SEQ ID NO: 378190 - RNA, 24 nt, Human
augcacacacauacacacacacag

SEQ ID NO: 378191 - RNA, 27 nt, Human
auggagacacgcacacaugcacacagu

SEQ ID NO: 378192 - RNA, 19 nt, Human
auggcaguggguaacacgu

SEQ ID NO: 378193 - RNA, 21 nt, Human
caaacaucacccacaagccga

SEQ ID NO: 378194 - RNA, 19 nt, Human
caagucugggccuuggaau

SEQ ID NO: 378195 - RNA, 25 nt, Human
caauucuggauacccccccaccccc

SEQ ID NO: 378196 - RNA, 24 nt, Human
cacacacagggacccuuggcaaga

SEQ ID NO: 378197 - RNA, 22 nt, Human
cacccucagccccggccccagc

SEQ ID NO: 378198 - RNA, 19 nt, Human
caccgcccucucaggccac

SEQ ID NO: 378199 - RNA, 23 nt, Human
cagaauggauggcaaggggcagg

SEQ ID NO: 378200 - RNA, 19 nt, Human
cagagacccacagagcucc

SEQ ID NO: 378201 - RNA, 19 nt, Human
cagcccagagagacagcag

SEQ ID NO: 378202 - RNA, 25 nt, Human
cagcccagagagacagcaggggcca

SEQ ID NO: 378203 - RNA, 22 nt, Human
cagcccaggauccaagccgaga

SEQ ID NO: 378204 - RNA, 20 nt, Human
cagccuggaagcagcggcag

SEQ ID NO: 378205 - RNA, 21 nt, Human
cagcugccccuuuacagaugg

SEQ ID NO: 378206 - RNA, 22 nt, Human
caucccacccacccaccaucau

SEQ ID NO: 378207 - RNA, 24 nt, Human
caugcuguucccaacagcugggcu

SEQ ID NO: 378208 - RNA, 21 nt, Human
cauggccacauguggggcaga

SEQ ID NO: 378209 - RNA, 25 nt, Human
ccacccacccaccaucaucaggccc

SEQ ID NO: 378210 - RNA, 24 nt, Human
ccaggcccggcccagagccagggg

SEQ ID NO: 378211 - RNA, 21 nt, Human
ccagggcuaggcucaccaugu

SEQ ID NO: 378212 - RNA, 22 nt, Human
cccacagagagaggaccaacag

SEQ ID NO: 378213 - RNA, 26 nt, Human
cccacaucugccuccaugcuguuccc

SEQ ID NO: 378214 - RNA, 22 nt, Human
cccacccaccaucaucaggcca

SEQ ID NO: 378215 - RNA, 24 nt, Human
cccaccccccgcaagucggggccg

SEQ ID NO: 378216 - RNA, 23 nt, Human
cccagagagacagcaggggccac

SEQ ID NO: 378217 - RNA, 24 nt, Human
cccagcccuucuccugguuccucu

SEQ ID NO: 378218 - RNA, 20 nt, Human
cccagcucagccccacaucu

SEQ ID NO: 378219 - RNA, 21 nt, Human
cccccaggccucugcauaguc

SEQ ID NO: 378220 - RNA, 23 nt, Human
cccccccaccccccgcaagucug

SEQ ID NO: 378221 - RNA, 19 nt, Human
cccccgcaagucugggccu

SEQ ID NO: 378222 - RNA, 20 nt, Human
cccccgcaagucugggccuu

SEQ ID NO: 378223 - RNA, 23 nt, Human
ccccggccccagcccuucuccug

SEQ ID NO: 378224 - RNA, 19 nt, Human
ccccuggcaauucagcccc

SEQ ID NO: 378225 - RNA, 23 nt, Human
ccccuuguuuccugggcuguccc

SEQ ID NO: 378226 - RNA, 25 nt, Human
cccggcccagagccagggguccccu

SEQ ID NO: 378227 - RNA, 18 nt, Human
cccuagguccagaagccc

SEQ ID NO: 378228 - RNA, 22 nt, Human
cccucagccccggccccagccc

SEQ ID NO: 378229 - RNA, 21 nt, Human
ccucaugaguuaaagggugcc

SEQ ID NO: 378230 - RNA, 20 nt, Human
ccucucaggccacccuaggu

SEQ ID NO: 378231 - RNA, 19 nt, Human
ccugcaccuuuuacccuga

SEQ ID NO: 378232 - RNA, 24 nt, Human
ccuuaggcaguuggagagggauuu

SEQ ID NO: 378233 - RNA, 21 nt, Human
ccuugugcugcccagccugga

SEQ ID NO: 378234 - RNA, 19 nt, Human
cgaaugcauccucagaccc

SEQ ID NO: 378235 - RNA, 23 nt, Human
cgagacaggggccacccagccca

SEQ ID NO: 378236 - RNA, 27 nt, Human
cgcacauggagacacgcacacaugcag

SEQ ID NO: 378237 - RNA, 19 nt, Human
cgcauacccaccgcccucu

SEQ ID NO: 378238 - RNA, 23 nt, Human
cgggagaagacuuggguaauaaa

SEQ ID NO: 378239 - RNA, 23 nt, Human
cucagccccggccccagcccuuc

SEQ ID NO: 378240 - RNA, 24 nt, Human
cucaggccacccuagguccagaag

SEQ ID NO: 378241 - RNA, 20 nt, Human
cucaucccacccacccacca

SEQ ID NO: 378242 - RNA, 19 nt, Human
cuccacucugaacugcucc

SEQ ID NO: 378243 - RNA, 18 nt, Human
cucgcauacccaccgccc

SEQ ID NO: 378244 - RNA, 23 nt, Human
cucgcauacccaccgcccucuca

SEQ ID NO: 378245 - RNA, 21 nt, Human
cucucgacauagaccgggggu

SEQ ID NO: 378246 - RNA, 18 nt, Human
cucugaacugcuccgugg

SEQ ID NO: 378247 - RNA, 22 nt, Human
cucugaacugcuccguggccuu

SEQ ID NO: 378248 - RNA, 21 nt, Human
cucuuuggccagcucucgaca

SEQ ID NO: 378249 - RNA, 19 nt, Human
cugaggaugacagagggag

SEQ ID NO: 378250 - RNA, 21 nt, Human
cugcuccguggccuugggcau

SEQ ID NO: 378251 - RNA, 18 nt, Human
cuggauacccccccaccc

SEQ ID NO: 378252 - RNA, 25 nt, Human
cuuggccuccuuccccacuggcagg

SEQ ID NO: 378253 - RNA, 26 nt, Human
cuuggccuccuuccccacuggcaggg

SEQ ID NO: 378254 - RNA, 18 nt, Human
cuuggcucuucuaugucu

SEQ ID NO: 378255 - RNA, 20 nt, Human
gaagccccuuccaugccacc

SEQ ID NO: 378256 - RNA, 24 nt, Human
gaauccaccacacacccaaaggcc

SEQ ID NO: 378257 - RNA, 22 nt, Human
gagugcagggagaggcgugcgg

SEQ ID NO: 378258 - RNA, 23 nt, Human
gcacacaugcacacacauacaca

SEQ ID NO: 378259 - RNA, 24 nt, Human
gcacacaugcacacacauacacag

SEQ ID NO: 378260 - RNA, 22 nt, Human
gcagcggcagugggaaucugcc

SEQ ID NO: 378261 - RNA, 18 nt, Human
gcaggggccacccaaggu

SEQ ID NO: 378262 - RNA, 22 nt, Human
gccccaggcccggcccagagcc

SEQ ID NO: 378263 - RNA, 19 nt, Human
gcccggcccagagccaggg

SEQ ID NO: 378264 - RNA, 18 nt, Human
gcggaguaggcugaggcu

SEQ ID NO: 378265 - RNA, 20 nt, Human
gcgugcggccacagcgggag

SEQ ID NO: 378266 - RNA, 21 nt, Human
gcucaccauguguguccugcc

SEQ ID NO: 378267 - RNA, 19 nt, Human
gcucucaacugucucccca

SEQ ID NO: 378268 - RNA, 24 nt, Human
ggaccagagcugagcaguugcaga

SEQ ID NO: 378269 - RNA, 23 nt, Human
ggcaggguggcaggcaggcgggg

SEQ ID NO: 378270 - RNA, 19 nt, Human
ggccaggaccagggccucc

SEQ ID NO: 378271 - RNA, 20 nt, Human
ggcucaagaaccccuggcag

SEQ ID NO: 378272 - RNA, 19 nt, Human
gggacaaaguacggggaag

SEQ ID NO: 378273 - RNA, 23 nt, Human
gggcaagccccgagacaggggcc

SEQ ID NO: 378274 - RNA, 25 nt, Human
gggcacccucagccccggccccagc

SEQ ID NO: 378275 - RNA, 24 nt, Human
gggccaggaauugaaaugccacgg

SEQ ID NO: 378276 - RNA, 19 nt, Human
gggcugagcgggcagcggc

SEQ ID NO: 378277 - RNA, 26 nt, Human
ggggcaggguggcaggcaggcggggc

SEQ ID NO: 378278 - RNA, 22 nt, Human
ggggcccaucgcuccucuuugg

SEQ ID NO: 378279 - RNA, 24 nt, Human
gguaauaaagacguaugaaaggaa

SEQ ID NO: 378280 - RNA, 21 nt, Human
uaaauauggacgcacauggag

SEQ ID NO: 378281 - RNA, 22 nt, Human
uacccugauuccccagcucagc

SEQ ID NO: 378282 - RNA, 23 nt, Human
uaggcaggcacugcuuggccucc

SEQ ID NO: 378283 - RNA, 18 nt, Human
ucaaacaucacccacaag

SEQ ID NO: 378284 - RNA, 23 nt, Human
ucagaccccuuguuuccugggcu

SEQ ID NO: 378285 - RNA, 19 nt, Human
ucaggccaggcaaggccuu

SEQ ID NO: 378286 - RNA, 22 nt, Human
ucaggccaggcaaggccuugug

SEQ ID NO: 378287 - RNA, 23 nt, Human
ucagugagcggaguaggcugagg

SEQ ID NO: 378288 - RNA, 27 nt, Human
uccaccacacacccaaaggccgaacag

SEQ ID NO: 378289 - RNA, 19 nt, Human
ucccccaggccucugcaua

SEQ ID NO: 378290 - RNA, 23 nt, Human
uccccgcucucaacugucucccc

SEQ ID NO: 378291 - RNA, 18 nt, Human
uccugguuccucuuccag

SEQ ID NO: 378292 - RNA, 20 nt, Human
ucuccugaugucccagggcu

SEQ ID NO: 378293 - RNA, 23 nt, Human
ucucgaaugcauccucagacccc

SEQ ID NO: 378294 - RNA, 18 nt, Human
ucucgcauacccaccgcc

SEQ ID NO: 378295 - RNA, 19 nt, Human
ugaaaggaaaaguugaaau

SEQ ID NO: 378296 - RNA, 19 nt, Human
ugacagagggagcaccggg

SEQ ID NO: 378297 - RNA, 24 nt, Human
ugacagagggagcaccggguucca

SEQ ID NO: 378298 - RNA, 19 nt, Human
ugagcaguugcagaggcca

SEQ ID NO: 378299 - RNA, 23 nt, Human
ugauuccccagcucagccccaca

SEQ ID NO: 378300 - RNA, 22 nt, Human
ugcacacacauacacacacaca

SEQ ID NO: 378301 - RNA, 19 nt, Human
ugcagggagaggcgugcgg

SEQ ID NO: 378302 - RNA, 23 nt, Human
ugcagggagaggcgugcggccac

SEQ ID NO: 378303 - RNA, 27 nt, Human
uggaauggacgggagaagacuugggua

SEQ ID NO: 378304 - RNA, 21 nt, Human
uggacgggagaagacuugggu

SEQ ID NO: 378305 - RNA, 18 nt, Human
uggcaggcaggcggggcc

SEQ ID NO: 378306 - RNA, 21 nt, Human
uggcaggcaggcggggccagg

SEQ ID NO: 378307 - RNA, 19 nt, Human
uggccuccuuccccacugg

SEQ ID NO: 378308 - RNA, 18 nt, Human
uuagccucucaaaaccuc

SEQ ID NO: 378309 - RNA, 19 nt, Human
uuccaagcccgccuccacc

SEQ ID NO: 378310 - RNA, 18 nt, Human
uuccagagacccacagag

SEQ ID NO: 378311 - RNA, 18 nt, Human
uuccccagcucagccccc

SEQ ID NO: 378312 - RNA, 22 nt, Human
uugauugccuccagagccgagg

SEQ ID NO: 378313 - RNA, 24 nt, Human
uuuacagaugggcacacugaggcc

SEQ ID NO: 378314 - RNA, 19 nt, Human
uuucauaggcaggcacugc

SEQ ID NO: 378315 - RNA, 20 nt, Human
uuuuuuuuuuucugaggucu

SEQ ID NO: 378316 - RNA, 18 nt, Human
uuuuuuuuuuuuuuucug

SEQ ID NO: 378317 - RNA, 21 nt, Human
uuuuuuuuuuuuuuucugagg

SEQ ID NO: 378318 - RNA, 19 nt, Human
aaaaauuccuagaggacau

SEQ ID NO: 378319 - RNA, 19 nt, Human
aaaagaaggcuguagagaa

SEQ ID NO: 378320 - RNA, 19 nt, Human
aaacagaaagcaaaaacua

SEQ ID NO: 378321 - RNA, 23 nt, Human
aacagaacaaaaaaacuaggucu

SEQ ID NO: 378322 - RNA, 24 nt, Human
aacagaacaaaaaaacuaggucua

SEQ ID NO: 378323 - RNA, 20 nt, Human
aagagaaauuucacagacaa

SEQ ID NO: 378324 - RNA, 19 nt, Human
aagcaacaacagcaaaaca

SEQ ID NO: 378325 - RNA, 23 nt, Human
aagcaacacugcaguugaccuug

SEQ ID NO: 378326 - RNA, 23 nt, Human
aauggcuacccccagccucuaug

SEQ ID NO: 378327 - RNA, 25 nt, Human
acaacagcaaaacagaaagcaaaaa

SEQ ID NO: 378328 - RNA, 23 nt, Human
acacacuuggcaagacauagcca

SEQ ID NO: 378329 - RNA, 23 nt, Human
acagaaagcaaaaacuauuagaa

SEQ ID NO: 378330 - RNA, 21 nt, Human
acagaacaaaaaaacuagguc

SEQ ID NO: 378331 - RNA, 21 nt, Human
acagagagaaaccaugucaga

SEQ ID NO: 378332 - RNA, 20 nt, Human
acccauggccuaaaggugcc

SEQ ID NO: 378333 - RNA, 19 nt, Human
acccggugggcugggcugg

SEQ ID NO: 378334 - RNA, 21 nt, Human
acugcacaauggcuaccccca

SEQ ID NO: 378335 - RNA, 19 nt, Human
acugcaguugaccuugaag

SEQ ID NO: 378336 - RNA, 21 nt, Human
agaaaaaaaauuccuagagga

SEQ ID NO: 378337 - RNA, 23 nt, Human
agaaagcaaaaacuauuagaagg

SEQ ID NO: 378338 - RNA, 21 nt, Human
agacuagaagacagagagaaa

SEQ ID NO: 378339 - RNA, 27 nt, Human
agacuagaagacagagagaagggaccc

SEQ ID NO: 378340 - RNA, 19 nt, Human
agagcacauugauggcuca

SEQ ID NO: 378341 - RNA, 22 nt, Human
agcaacaacagcaaaacagaaa

SEQ ID NO: 378342 - RNA, 23 nt, Human
agcaacaacagcaaaacagaaag

SEQ ID NO: 378343 - RNA, 26 nt, Human
aggaggggcggcuaccggaggggcgg

SEQ ID NO: 378344 - RNA, 19 nt, Human
aggcaaagcaaugccagau

SEQ ID NO: 378345 - RNA, 19 nt, Human
aggccgcggcgggcaacau

SEQ ID NO: 378346 - RNA, 22 nt, Human
agggccacgaggagcuuccucc

SEQ ID NO: 378347 - RNA, 25 nt, Human
auaaaguagcaggaaaauuacaaag

SEQ ID NO: 378348 - RNA, 21 nt, Human
auacacagcaccugacacgaa

SEQ ID NO: 378349 - RNA, 23 nt, Human
auggccuccgagagagggcuccu

SEQ ID NO: 378350 - RNA, 21 nt, Human
caaguucuccacuuauacaca

SEQ ID NO: 378351 - RNA, 18 nt, Human
cacagcaccugacacgaa

SEQ ID NO: 378352 - RNA, 23 nt, Human
cacaguaggauauucaaccucca

SEQ ID NO: 378353 - RNA, 24 nt, Human
caccaccagcaccccucccugccc

SEQ ID NO: 378354 - RNA, 19 nt, Human
caccuuggaagggccacga

SEQ ID NO: 378355 - RNA, 24 nt, Human
cagaacaaaaaaacuaggucuaga

SEQ ID NO: 378356 - RNA, 22 nt, Human
cagagagaaaccaugucagacc

SEQ ID NO: 378357 - RNA, 19 nt, Human
cagcaaaacagaaagcaaa

SEQ ID NO: 378358 - RNA, 20 nt, Human
cagcaaaacagaaagcaaaa

SEQ ID NO: 378359 - RNA, 21 nt, Human
cagcaccccucccugcccggu

SEQ ID NO: 378360 - RNA, 26 nt, Human
cagcccuauagggggagggaagcaac

SEQ ID NO: 378361 - RNA, 20 nt, Human
caggagccacucacacaggc

SEQ ID NO: 378362 - RNA, 24 nt, Human
caggagccacucacacaggcagag

SEQ ID NO: 378363 - RNA, 19 nt, Human
ccaccagcaccccucccug

SEQ ID NO: 378364 - RNA, 22 nt, Human
cccccagccucuauggccuccg

SEQ ID NO: 378365 - RNA, 18 nt, Human
cccccgggccaugacugc

SEQ ID NO: 378366 - RNA, 18 nt, Human
ccucccugcccggugaug

SEQ ID NO: 378367 - RNA, 20 nt, Human
ccuccgagagagggcuccua

SEQ ID NO: 378368 - RNA, 23 nt, Human
cggcgcggggggaggaggggcgg

SEQ ID NO: 378369 - RNA, 24 nt, Human
cggugaugucacccggugggcugg

SEQ ID NO: 378370 - RNA, 21 nt, Human
cucuauggccuccgagagagg

SEQ ID NO: 378371 - RNA, 21 nt, Human
gaaaaugccaucaaagacagu

SEQ ID NO: 378372 - RNA, 22 nt, Human
gaagaaaaagaaggcuguagag

SEQ ID NO: 378373 - RNA, 20 nt, Human
gcaaaacagaaagcaaaaac

SEQ ID NO: 378374 - RNA, 25 nt, Human
gcaaagcaacaacagcaaaacagaa

SEQ ID NO: 378375 - RNA, 19 nt, Human
gcagcgugcuccaugcccc

SEQ ID NO: 378376 - RNA, 18 nt, Human
gcgcggggggaggagggg

SEQ ID NO: 378377 - RNA, 23 nt, Human
gcuccuagacagauuccagcccu

SEQ ID NO: 378378 - RNA, 21 nt, Human
gcuguagagaauuuuaacaau

SEQ ID NO: 378379 - RNA, 23 nt, Human
ggaaaacucaaaaucuacaaaag

SEQ ID NO: 378380 - RNA, 23 nt, Human
ggaagaaaaagaaggcuguagag

SEQ ID NO: 378381 - RNA, 18 nt, Human
ggaggaggggcggcuacc

SEQ ID NO: 378382 - RNA, 22 nt, Human
gggaaaacucaaaaucuacaaa

SEQ ID NO: 378383 - RNA, 23 nt, Human
gggcggcggcgcggggggggugc

SEQ ID NO: 378384 - RNA, 26 nt, Human
gggcuggaacaaguccagaugccuuu

SEQ ID NO: 378385 - RNA, 18 nt, Human
ggggggaggaggggcggc

SEQ ID NO: 378386 - RNA, 23 nt, Human
guaugaaccaccaccagcacccc

SEQ ID NO: 378387 - RNA, 22 nt, Human
guuuagggcccaggagccacuc

SEQ ID NO: 378388 - RNA, 24 nt, Human
uaaggcaaagcaaugccagaugaa

SEQ ID NO: 378389 - RNA, 26 nt, Human
uacaaaagagaaauuucacagacaac

SEQ ID NO: 378390 - RNA, 21 nt, Human
uacccccagccucuauggccu

SEQ ID NO: 378391 - RNA, 20 nt, Human
uaccggagucccgcacugcc

SEQ ID NO: 378392 - RNA, 21 nt, Human
uagaaaaaaaauuccuagagg

SEQ ID NO: 378393 - RNA, 19 nt, Human
uagaagacagagagaaacc

SEQ ID NO: 378394 - RNA, 21 nt, Human
uauggaagaaaaagaaggcug

SEQ ID NO: 378395 - RNA, 21 nt, Human
uauggaagaaaaagaaggcuu

SEQ ID NO: 378396 - RNA, 21 nt, Human
ucaacaaagaacaaacaggau

SEQ ID NO: 378397 - RNA, 19 nt, Human
ucaaucaacaaagaacaaa

SEQ ID NO: 378398 - RNA, 28 nt, Human
ucagaccagagcacauugauggcucacg

SEQ ID NO: 378399 - RNA, 20 nt, Human
uccuagacagauuccagccc

SEQ ID NO: 378400 - RNA, 20 nt, Human
ucuauggccuccgagagagg

SEQ ID NO: 378401 - RNA, 19 nt, Human
ugaaaaugccaucaaagac

SEQ ID NO: 378402 - RNA, 25 nt, Human
ugaaaaugccaucaaagacaguugu

SEQ ID NO: 378403 - RNA, 19 nt, Human
ugaccuugaagagaucacu

SEQ ID NO: 378404 - RNA, 24 nt, Human
ugcaaagcaacaacagcaaaacag

SEQ ID NO: 378405 - RNA, 20 nt, Human
ugccuguuuagggcccagga

SEQ ID NO: 378406 - RNA, 21 nt, Human
uggcaagacauagccaaaaga

SEQ ID NO: 378407 - RNA, 19 nt, Human
uggccuccgagagagggcu

SEQ ID NO: 378408 - RNA, 27 nt, Human
uuacacuacaagggaaaacucaaaauc

SEQ ID NO: 378409 - RNA, 21 nt, Human
uuagcuauggaagaaaaagaa

SEQ ID NO: 378410 - RNA, 25 nt, Human
uucaaccuccauuucagcguauuua

SEQ ID NO: 378411 - RNA, 21 nt, Human
uucccccgggccaugacugca

SEQ ID NO: 378412 - RNA, 21 nt, Human
uugaccuugaagagaucacug

SEQ ID NO: 378413 - RNA, 23 nt, Human
uugaccuugaagagaucacuggu

SEQ ID NO: 378414 - RNA, 18 nt, Human
uugauggcucacggugag

SEQ ID NO: 378415 - RNA, 19 nt, Human
uuuuuuuuuuuuaaauggc

SEQ ID NO: 378416 - RNA, 24 nt, Human
uuuuuuuuuuuuuuuuuuaaaugg

SEQ ID NO: 378417 - RNA, 19 nt, Human
aaaaauucuugauuacaga

SEQ ID NO: 378418 - RNA, 19 nt, Human
aaacauaggccugagaaga

SEQ ID NO: 378419 - RNA, 20 nt, Human
aaccuggccuucaagaauag

SEQ ID NO: 378420 - RNA, 18 nt, Human
aacuaagacacugcacaa

SEQ ID NO: 378421 - RNA, 23 nt, Human
aagaaaaaggaagccaugacugg

SEQ ID NO: 378422 - RNA, 18 nt, Human
aagcagcauguaaccuca

SEQ ID NO: 378423 - RNA, 19 nt, Human
aaugaacaacaaaaacacu

SEQ ID NO: 378424 - RNA, 19 nt, Human
accaagaaaaaggaagcca

SEQ ID NO: 378425 - RNA, 22 nt, Human
accaagaaaaaggaagccauga

SEQ ID NO: 378426 - RNA, 24 nt, Human
agccauccagggucauguuguucu

SEQ ID NO: 378427 - RNA, 23 nt, Human
aggaaaguugcuuggggcuucug

SEQ ID NO: 378428 - RNA, 22 nt, Human
augcuggggugaccccuucaca

SEQ ID NO: 378429 - RNA, 25 nt, Human
cagaauccccaggccagcuggcaga

SEQ ID NO: 378430 - RNA, 20 nt, Human
cagacaccacucagaauccc

SEQ ID NO: 378431 - RNA, 22 nt, Human
cagagcaauagcuaagaagcaa

SEQ ID NO: 378432 - RNA, 22 nt, Human
caggauaggggucccuggaagg

SEQ ID NO: 378433 - RNA, 20 nt, Human
cagggaguggguaugaagcc

SEQ ID NO: 378434 - RNA, 24 nt, Human
caguaaucuacaucauccucagac

SEQ ID NO: 378435 - RNA, 18 nt, Human
ccggggauugugaaaucu

SEQ ID NO: 378436 - RNA, 21 nt, Human
ccucaucauuaauucucuuug

SEQ ID NO: 378437 - RNA, 22 nt, Human
ccuuagagaguccauaucucag

SEQ ID NO: 378438 - RNA, 20 nt, Human
ccuucaagaauagccauacc

SEQ ID NO: 378439 - RNA, 26 nt, Human
cucagaauccccaggccagcuggcag

SEQ ID NO: 378440 - RNA, 19 nt, Human
cucagagcaauagcuaaga

SEQ ID NO: 378441 - RNA, 24 nt, Human
cucauaagccacccagguucaugc

SEQ ID NO: 378442 - RNA, 21 nt, Human
cucaugcuggggugaccccuu

SEQ ID NO: 378443 - RNA, 24 nt, Human
cugccuucaagucaaaaaauucuu

SEQ ID NO: 378444 - RNA, 27 nt, Human
cuggaaggguaggaguaaacucuaagc

SEQ ID NO: 378445 - RNA, 19 nt, Human
gagaacuacaaggaagaag

SEQ ID NO: 378446 - RNA, 18 nt, Human
gcaagcagcauguaaccu

SEQ ID NO: 378447 - RNA, 20 nt, Human
ggaaaugugggcucuguaug

SEQ ID NO: 378448 - RNA, 23 nt, Human
ggaggcaagcagcauguaacccc

SEQ ID NO: 378449 - RNA, 19 nt, Human
gguuauuaaaaccuggccu

SEQ ID NO: 378450 - RNA, 23 nt, Human
gugaaaucuucuggaaaacagag

SEQ ID NO: 378451 - RNA, 24 nt, Human
guguggaaaugugggcucuguaug

SEQ ID NO: 378452 - RNA, 21 nt, Human
uaaaacuguucucuauccucu

SEQ ID NO: 378453 - RNA, 19 nt, Human
uaagcagacaccacucaga

SEQ ID NO: 378454 - RNA, 24 nt, Human
uagcuaagaagcaacugucgccau

SEQ ID NO: 378455 - RNA, 25 nt, Human
uccaacuuuuuaaaugaaacuagaa

SEQ ID NO: 378456 - RNA, 24 nt, Human
ucucagagcaauagcuaagaagca

SEQ ID NO: 378457 - RNA, 20 nt, Human
ucuucuggaaaacagaggcu

SEQ ID NO: 378458 - RNA, 18 nt, Human
ucuugauuacagaguugu

SEQ ID NO: 378459 - RNA, 22 nt, Human
ucuuuguuuuacacuacucauu

SEQ ID NO: 378460 - RNA, 18 nt, Human
ugaaagacauaggagaag

SEQ ID NO: 378461 - RNA, 18 nt, Human
ugcucauuugucaaaaca

SEQ ID NO: 378462 - RNA, 22 nt, Human
uggaaaacagaggcacucauca

SEQ ID NO: 378463 - RNA, 19 nt, Human
uggacaucugguggaggca

SEQ ID NO: 378464 - RNA, 22 nt, Human
uggggugaccccuucacaagag

SEQ ID NO: 378465 - RNA, 22 nt, Human
ugguguggaaaugugggcucug

SEQ ID NO: 378466 - RNA, 25 nt, Human
uucucuauccucuuaguagccaucc

SEQ ID NO: 378467 - RNA, 18 nt, Human
uugaaaugaggucaaugc

SEQ ID NO: 378468 - RNA, 22 nt, Human
uuuucagcacuaugaggagagg

SEQ ID NO: 378469 - RNA, 20 nt, Human
agagagaggccucuggggca

SEQ ID NO: 378470 - RNA, 24 nt, Human
agagagaggccucuggggcagagc

SEQ ID NO: 378471 - RNA, 22 nt, Human
agcaaggaggggggccccccaa

SEQ ID NO: 378472 - RNA, 18 nt, Human
aggcccccugcccggccu

SEQ ID NO: 378473 - RNA, 24 nt, Human
auggcucggccccugcagugcccc

SEQ ID NO: 378474 - RNA, 22 nt, Human
caaaguggcuagagacaggggu

SEQ ID NO: 378475 - RNA, 19 nt, Human
caaucuaugaaaauaaagu

SEQ ID NO: 378476 - RNA, 18 nt, Human
cacaggaggaaaaaagcc

SEQ ID NO: 378477 - RNA, 24 nt, Human
cacgcugaccuacacuauguacac

SEQ ID NO: 378478 - RNA, 19 nt, Human
cagccagcggcccacccag

SEQ ID NO: 378479 - RNA, 18 nt, Human
caggcccccugcccggcc

SEQ ID NO: 378480 - RNA, 19 nt, Human
caggcccccugcccggccu

SEQ ID NO: 378481 - RNA, 22 nt, Human
ccacccagagacgcugcagcag

SEQ ID NO: 378482 - RNA, 19 nt, Human
cccacgacggagagagagg

SEQ ID NO: 378483 - RNA, 21 nt, Human
cccccaaaauggcucggcccc

SEQ ID NO: 378484 - RNA, 23 nt, Human
ccccccaaaauggcucggccccc

SEQ ID NO: 378485 - RNA, 24 nt, Human
ccgggaaagccaaguuggcuuccg

SEQ ID NO: 378486 - RNA, 24 nt, Human
ccucaggucaggaggcuaagcacg

SEQ ID NO: 378487 - RNA, 21 nt, Human
ccugcagugccccgaucggcc

SEQ ID NO: 378488 - RNA, 22 nt, Human
ccugccagccagcggcccaccc

SEQ ID NO: 378489 - RNA, 26 nt, Human
cugcaggcccccugcccggccugcca

SEQ ID NO: 378490 - RNA, 19 nt, Human
cugcagugccccgaucggc

SEQ ID NO: 378491 - RNA, 22 nt, Human
cuuccaccgcgaaggcacacag

SEQ ID NO: 378492 - RNA, 20 nt, Human
cuugcacugccuucggccuu

SEQ ID NO: 378493 - RNA, 20 nt, Human
gaaaauaaaguuugcaaaag

SEQ ID NO: 378494 - RNA, 23 nt, Human
gaaggcacacagcagccgcaggu

SEQ ID NO: 378495 - RNA, 21 nt, Human
gagaggccucuggggcagagc

SEQ ID NO: 378496 - RNA, 18 nt, Human
gcaaggaggggggccccc

SEQ ID NO: 378497 - RNA, 22 nt, Human
gcacaguccugcugcaggcccc

SEQ ID NO: 378498 - RNA, 22 nt, Human
gccucuggggcagagcccugcu

SEQ ID NO: 378499 - RNA, 22 nt, Human
gcuaagcacgcugaccuacacu

SEQ ID NO: 378500 - RNA, 21 nt, Human
gcugaccuacacuauguacac

SEQ ID NO: 378501 - RNA, 18 nt, Human
ggaaauguaccccucucu

SEQ ID NO: 378502 - RNA, 23 nt, Human
ggcucggccccugcagugccccg

SEQ ID NO: 378503 - RNA, 19 nt, Human
guacacaggaggaaaaaag

SEQ ID NO: 378504 - RNA, 22 nt, Human
uagggucaagaucgcgccccuc

SEQ ID NO: 378505 - RNA, 23 nt, Human
ucagcaccaucauggccgccggu

SEQ ID NO: 378506 - RNA, 20 nt, Human
uccugcugcaggcccccugc

SEQ ID NO: 378507 - RNA, 21 nt, Human
ugccuucggccuucaaagcuu

SEQ ID NO: 378508 - RNA, 19 nt, Human
uguacacgucucucuccca

SEQ ID NO: 378509 - RNA, 21 nt, Human
uguggaggccagagucucuug

SEQ ID NO: 378510 - RNA, 19 nt, Human
aaaaacaaugagcaggcuc

SEQ ID NO: 378511 - RNA, 23 nt, Human
aaaacauucguauaaaaagggga

SEQ ID NO: 378512 - RNA, 23 nt, Human
aaagccugauaaaaacugaggaa

SEQ ID NO: 378513 - RNA, 22 nt, Human
aagcaaaaaggagagaguaggg

SEQ ID NO: 378514 - RNA, 19 nt, Human
accuauccucucacgccca

SEQ ID NO: 378515 - RNA, 20 nt, Human
agaaaacauucguauaaaaa

SEQ ID NO: 378516 - RNA, 26 nt, Human
agagaaagccugauaaaaacugagga

SEQ ID NO: 378517 - RNA, 20 nt, Human
agguggaggggugggcugag

SEQ ID NO: 378518 - RNA, 21 nt, Human
aucaagacgcuacagcaacuc

SEQ ID NO: 378519 - RNA, 19 nt, Human
aucauggcaaacccaagca

SEQ ID NO: 378520 - RNA, 20 nt, Human
aucauggcaaacccaagcac

SEQ ID NO: 378521 - RNA, 21 nt, Human
auggcaaacccaagcacacug

SEQ ID NO: 378522 - RNA, 24 nt, Human
caacccccgcccggcaccgccuca

SEQ ID NO: 378523 - RNA, 20 nt, Human
cacuggccugaguggcccag

SEQ ID NO: 378524 - RNA, 18 nt, Human
cagcgcagaagccccccc

SEQ ID NO: 378525 - RNA, 19 nt, Human
cagggcugcccaguuucug

SEQ ID NO: 378526 - RNA, 24 nt, Human
caugcauccgcaggccugcccccu

SEQ ID NO: 378527 - RNA, 29 nt, Human
ccagagaaagccugauaaaaacugaggaa

SEQ ID NO: 378528 - RNA, 19 nt, Human
ccagggcugggccccccuc

SEQ ID NO: 378529 - RNA, 19 nt, Human
ccaggggagggaacgcaga

SEQ ID NO: 378530 - RNA, 23 nt, Human
cccaagcacacugguagaaaaca

SEQ ID NO: 378531 - RNA, 20 nt, Human
cccagggagagaaucaagac

SEQ ID NO: 378532 - RNA, 21 nt, Human
cccagggcugggccccccucc

SEQ ID NO: 378533 - RNA, 18 nt, Human
cccaguuucugcccugcc

SEQ ID NO: 378534 - RNA, 23 nt, Human
ccccccuccuccccuggcugucc

SEQ ID NO: 378535 - RNA, 18 nt, Human
cccccugccucccaccag

SEQ ID NO: 378536 - RNA, 22 nt, Human
ccccugccucccaccagccucc

SEQ ID NO: 378537 - RNA, 18 nt, Human
ccgcucagggagacgcgg

SEQ ID NO: 378538 - RNA, 19 nt, Human
ccuggugcucagagacugc

SEQ ID NO: 378539 - RNA, 23 nt, Human
cgcagacccagggagagaaucaa

SEQ ID NO: 378540 - RNA, 21 nt, Human
cgccaccgcccaugacacccg

SEQ ID NO: 378541 - RNA, 18 nt, Human
cgcccaugacacccgaca

SEQ ID NO: 378542 - RNA, 19 nt, Human
cgucgccaccgcccaugac

SEQ ID NO: 378543 - RNA, 24 nt, Human
cucacgcccaccaggcccuggacc

SEQ ID NO: 378544 - RNA, 19 nt, Human
cucagagacugcugucccc

SEQ ID NO: 378545 - RNA, 21 nt, Human
cucccagggcugggccccccu

SEQ ID NO: 378546 - RNA, 23 nt, Human
cucucacgcccaccaggcccugg

SEQ ID NO: 378547 - RNA, 18 nt, Human
cucuuccccaccacucuc

SEQ ID NO: 378548 - RNA, 19 nt, Human
cucuuccccaccacucuca

SEQ ID NO: 378549 - RNA, 24 nt, Human
gaagcccccccugccgucccgcuc

SEQ ID NO: 378550 - RNA, 23 nt, Human
gcaucauggcaaacccaagcaca

SEQ ID NO: 378551 - RNA, 18 nt, Human
gcuggaggcaggggcuug

SEQ ID NO: 378552 - RNA, 18 nt, Human
ggaagcaaaaaggagaga

SEQ ID NO: 378553 - RNA, 20 nt, Human
ggcaggggcuuggcagcuug

SEQ ID NO: 378554 - RNA, 18 nt, Human
ggcccuggaccaugggca

SEQ ID NO: 378555 - RNA, 19 nt, Human
ggccugagggcaacugcuc

SEQ ID NO: 378556 - RNA, 23 nt, Human
ggcugggccccccuccuccccug

SEQ ID NO: 378557 - RNA, 20 nt, Human
gggaagaugcugagggggag

SEQ ID NO: 378558 - RNA, 21 nt, Human
gggagggaacgcagacccagg

SEQ ID NO: 378559 - RNA, 21 nt, Human
gggcaugcugggcacaggccu

SEQ ID NO: 378560 - RNA, 21 nt, Human
gggcuuggcagcuugggagcu

SEQ ID NO: 378561 - RNA, 23 nt, Human
ggugcacuggccugaguggccca

SEQ ID NO: 378562 - RNA, 18 nt, Human
gucgccaccgcccaugac

SEQ ID NO: 378563 - RNA, 18 nt, Human
ucagggagacgcgggggc

SEQ ID NO: 378564 - RNA, 18 nt, Human
uccccuggcuguccugug

SEQ ID NO: 378565 - RNA, 22 nt, Human
uccgcaggccugcccccugccu

SEQ ID NO: 378566 - RNA, 21 nt, Human
ucgagagagagguggaggggu

SEQ ID NO: 378567 - RNA, 22 nt, Human
ugacacccgacaacccccgccc

SEQ ID NO: 378568 - RNA, 27 nt, Human
ugaggaagcaaaaaggagagaguaggg

SEQ ID NO: 378569 - RNA, 19 nt, Human
ugagggcaacugcucccug

SEQ ID NO: 378570 - RNA, 25 nt, Human
ugauaaaaacugaggaagcaaaaag

SEQ ID NO: 378571 - RNA, 18 nt, Human
ugcccugccaccuauccu

SEQ ID NO: 378572 - RNA, 19 nt, Human
ugcccugccaccuauccuc

SEQ ID NO: 378573 - RNA, 22 nt, Human
ugcccugccaccuauccucuca

SEQ ID NO: 378574 - RNA, 24 nt, Human
ugcuaucaagucagggcugcccag

SEQ ID NO: 378575 - RNA, 22 nt, Human
uggaggggugggcugagccugg

SEQ ID NO: 378576 - RNA, 23 nt, Human
uggaggggugggcugagccuggu

SEQ ID NO: 378577 - RNA, 20 nt, Human
uggcccagaagccucggcag

SEQ ID NO: 378578 - RNA, 22 nt, Human
uggccugaguggcccagaagcc

SEQ ID NO: 378579 - RNA, 23 nt, Human
ugggcaucuagugacagcagcuu

SEQ ID NO: 378580 - RNA, 25 nt, Human
uguaauaaagggaaaaacaaugagc

SEQ ID NO: 378581 - RNA, 22 nt, Human
uucaggagagagaaacucagga

SEQ ID NO: 378582 - RNA, 22 nt, Human
aaaaaggccucuucagcuggcc

SEQ ID NO: 378583 - RNA, 21 nt, Human
aaaagcaaaaauguggcaugc

SEQ ID NO: 378584 - RNA, 23 nt, Human
aaaagcaaaaauguggcaugcaa

SEQ ID NO: 378585 - RNA, 21 nt, Human
aaaagccaaaagaucuccagu

SEQ ID NO: 378586 - RNA, 18 nt, Human
aaaagcucaaaagcaaaa

SEQ ID NO: 378587 - RNA, 24 nt, Human
aaaauguugggauuacaggcguga

SEQ ID NO: 378588 - RNA, 19 nt, Human
aaauguugggauuacaggc

SEQ ID NO: 378589 - RNA, 23 nt, Human
aacaagaggagccucaggaaaga

SEQ ID NO: 378590 - RNA, 18 nt, Human
aacaucuuuggguagcug

SEQ ID NO: 378591 - RNA, 23 nt, Human
aagucacgaaauauauauaaaua

SEQ ID NO: 378592 - RNA, 22 nt, Human
aagucuuuugcaugagcuaaac

SEQ ID NO: 378593 - RNA, 20 nt, Human
aagugccacagaccaacacu

SEQ ID NO: 378594 - RNA, 19 nt, Human
acaacaaaaaggccucuuc

SEQ ID NO: 378595 - RNA, 20 nt, Human
acaacaaaaaggccucuuca

SEQ ID NO: 378596 - RNA, 22 nt, Human
acaacaaaaaggccucuucagc

SEQ ID NO: 378597 - RNA, 21 nt, Human
acaagaacaucaugcuggaaa

SEQ ID NO: 378598 - RNA, 18 nt, Human
accaaggccucaggugcu

SEQ ID NO: 378599 - RNA, 24 nt, Human
accagguaauccacccgccuuggc

SEQ ID NO: 378600 - RNA, 23 nt, Human
accccgcuccacauggaaccgaa

SEQ ID NO: 378601 - RNA, 21 nt, Human
acccgccuuggccucccaaaa

SEQ ID NO: 378602 - RNA, 22 nt, Human
acccgccuuggccucccaaaau

SEQ ID NO: 378603 - RNA, 25 nt, Human
acuaugcugcccaggcuggacucga

SEQ ID NO: 378604 - RNA, 20 nt, Human
acuccaaugagguguggcau

SEQ ID NO: 378605 - RNA, 20 nt, Human
agaaaucaauguccaaauaa

SEQ ID NO: 378606 - RNA, 20 nt, Human
agacagggucucacacuaug

SEQ ID NO: 378607 - RNA, 22 nt, Human
agacauuacauucgacaacaua

SEQ ID NO: 378608 - RNA, 18 nt, Human
agacuacaggcaugcacc

SEQ ID NO: 378609 - RNA, 20 nt, Human
agcauccaacccacucgagc

SEQ ID NO: 378610 - RNA, 20 nt, Human
agccuuucagauaacaauuc

SEQ ID NO: 378611 - RNA, 20 nt, Human
agcuucagggcuuauaggga

SEQ ID NO: 378612 - RNA, 20 nt, Human
aggaaagaggcaagcaucca

SEQ ID NO: 378613 - RNA, 23 nt, Human
aggcaugcaccaccagguaaucc

SEQ ID NO: 378614 - RNA, 19 nt, Human
aggcauuuuuguuguucua

SEQ ID NO: 378615 - RNA, 23 nt, Human
aggcgugagucacugugucuggc

SEQ ID NO: 378616 - RNA, 25 nt, Human
aggcuggagugcaguggcgcaaucu

SEQ ID NO: 378617 - RNA, 22 nt, Human
agguaauccacccgccuuggcc

SEQ ID NO: 378618 - RNA, 24 nt, Human
agguaauccacccgccuuggccuc

SEQ ID NO: 378619 - RNA, 18 nt, Human
aguagcugggaguacagg

SEQ ID NO: 378620 - RNA, 21 nt, Human
agucuuuaaaauuaaacccuu

SEQ ID NO: 378621 - RNA, 24 nt, Human
agugauucuccugccucagccucc

SEQ ID NO: 378622 - RNA, 20 nt, Human
agugcaguggcgcaaucucg

SEQ ID NO: 378623 - RNA, 24 nt, Human
agugcaguggcgcaaucucgguuc

SEQ ID NO: 378624 - RNA, 27 nt, Human
auauauacauacauacacuugaccaug

SEQ ID NO: 378625 - RNA, 19 nt, Human
auauauauauauauauaua

SEQ ID NO: 378626 - RNA, 19 nt, Human
auauauauauauauauaua

SEQ ID NO: 378627 - RNA, 19 nt, Human
auauauauauauauauaua

SEQ ID NO: 378628 - RNA, 19 nt, Human
auauauauauauauauaua

SEQ ID NO: 378629 - RNA, 19 nt, Human
auauauauauauauauaua

SEQ ID NO: 378630 - RNA, 19 nt, Human
auauauauauauauauaua

SEQ ID NO: 378631 - RNA, 19 nt, Human
auauauauauauauauaua

SEQ ID NO: 378632 - RNA, 19 nt, Human
auauauauauauauauaua

SEQ ID NO: 378633 - RNA, 19 nt, Human
auauauauauauauauaua

SEQ ID NO: 378634 - RNA, 19 nt, Human
auauauauauauauauaua

SEQ ID NO: 378635 - RNA, 19 nt, Human
auauauauauauauauaua

SEQ ID NO: 378636 - RNA, 19 nt, Human
auauauauauauauauaua

SEQ ID NO: 378637 - RNA, 19 nt, Human
auauauauauauauauaua

SEQ ID NO: 378638 - RNA, 19 nt, Human
auauauauauauauauaua

SEQ ID NO: 378639 - RNA, 19 nt, Human
auauauauauauauauaua

SEQ ID NO: 378640 - RNA, 19 nt, Human
auauauauauauauauaua

SEQ ID NO: 378641 - RNA, 19 nt, Human
auauauauauauauauaua

SEQ ID NO: 378642 - RNA, 19 nt, Human
auauauauauauauauaua

SEQ ID NO: 378643 - RNA, 19 nt, Human
auauauauauauauauaua

SEQ ID NO: 378644 - RNA, 19 nt, Human
auauauauauauauauaua

SEQ ID NO: 378645 - RNA, 19 nt, Human
auauauauauauauauaua

SEQ ID NO: 378646 - RNA, 19 nt, Human
auauauauauauauauaua

SEQ ID NO: 378647 - RNA, 19 nt, Human
auauauauauauauauaua

SEQ ID NO: 378648 - RNA, 19 nt, Human
auauauauauauauauaua

SEQ ID NO: 378649 - RNA, 19 nt, Human
auauauauauauauauaua

SEQ ID NO: 378650 - RNA, 19 nt, Human
auauauauauauauauaua

SEQ ID NO: 378651 - RNA, 19 nt, Human
auauauauauauauauaua

SEQ ID NO: 378652 - RNA, 19 nt, Human
auauauauauauauauaua

SEQ ID NO: 378653 - RNA, 19 nt, Human
auauauauauauauauaua

SEQ ID NO: 378654 - RNA, 19 nt, Human
auauauauauauauauaua

SEQ ID NO: 378655 - RNA, 19 nt, Human
auauauauauauauauaua

SEQ ID NO: 378656 - RNA, 19 nt, Human
auauauauauauauauaua

SEQ ID NO: 378657 - RNA, 19 nt, Human
auauauauauauauauaua

SEQ ID NO: 378658 - RNA, 19 nt, Human
auauauauauauauauaua

SEQ ID NO: 378659 - RNA, 23 nt, Human
aucaccuuucagcccaagugcca

SEQ ID NO: 378660 - RNA, 18 nt, Human
augccacaaacacacaac

SEQ ID NO: 378661 - RNA, 19 nt, Human
auggcaaagaaauaagcau

SEQ ID NO: 378662 - RNA, 20 nt, Human
auggggggacuuggaaaucu

SEQ ID NO: 378663 - RNA, 24 nt, Human
caaaagaucuccaguuauaagcac

SEQ ID NO: 378664 - RNA, 20 nt, Human
caaaaggagugacauuaaua

SEQ ID NO: 378665 - RNA, 20 nt, Human
caaaauaauacccuuacuga

SEQ ID NO: 378666 - RNA, 24 nt, Human
caaaauguugggauuacaggcgug

SEQ ID NO: 378667 - RNA, 18 nt, Human
caaauaauccauucauaa

SEQ ID NO: 378668 - RNA, 23 nt, Human
caacaaaaaggccucuucagcug

SEQ ID NO: 378669 - RNA, 25 nt, Human
caacagcacucuaccucagcuaucc

SEQ ID NO: 378670 - RNA, 20 nt, Human
caagugauucuccugccuca

SEQ ID NO: 378671 - RNA, 22 nt, Human
caagugauucuccugccucagc

SEQ ID NO: 378672 - RNA, 21 nt, Human
caccagguaauccacccgccu

SEQ ID NO: 378673 - RNA, 23 nt, Human
cacccgccuuggccucccaaaau

SEQ ID NO: 378674 - RNA, 26 nt, Human
cacugcaugaaccaaggccucagguu

SEQ ID NO: 378675 - RNA, 19 nt, Human
cacuggcuauacuccaaug

SEQ ID NO: 378676 - RNA, 23 nt, Human
cacuguaaccucugcgucccggg

SEQ ID NO: 378677 - RNA, 19 nt, Human
cagcaaaagcucaaaagca

SEQ ID NO: 378678 - RNA, 22 nt, Human
cagcccaagugccacagaccaa

SEQ ID NO: 378679 - RNA, 20 nt, Human
cagccuccugaguagcugag

SEQ ID NO: 378680 - RNA, 23 nt, Human
caggcuggacucgaacuacuagg

SEQ ID NO: 378681 - RNA, 21 nt, Human
cauaacagugcaguccucaga

SEQ ID NO: 378682 - RNA, 24 nt, Human
cauagaaaagccaaaagaucucca

SEQ ID NO: 378683 - RNA, 23 nt, Human
cauagcuucagggcuuauaggga

SEQ ID NO: 378684 - RNA, 22 nt, Human
caucaugcuggaaaacuucuuc

SEQ ID NO: 378685 - RNA, 21 nt, Human
caugcucgcaaaaggagugac

SEQ ID NO: 378686 - RNA, 18 nt, Human
cauggaaccgaaggugcu

SEQ ID NO: 378687 - RNA, 22 nt, Human
ccaaaauguugggauuacaggc

SEQ ID NO: 378688 - RNA, 22 nt, Human
ccaaaauguugggauuacaggc

SEQ ID NO: 378689 - RNA, 24 nt, Human
ccaaaauguugggauuacaggcgu

SEQ ID NO: 378690 - RNA, 22 nt, Human
ccacaaacacacaacgagccau

SEQ ID NO: 378691 - RNA, 20 nt, Human
ccacagaggagaacacaggg

SEQ ID NO: 378692 - RNA, 21 nt, Human
ccacagaggagaacacaggga

SEQ ID NO: 378693 - RNA, 21 nt, Human
cccaagugccacagaccaaca

SEQ ID NO: 378694 - RNA, 22 nt, Human
cccaggcuggagugcaguggcg

SEQ ID NO: 378695 - RNA, 22 nt, Human
ccccgcuccacauggaaccgaa

SEQ ID NO: 378696 - RNA, 23 nt, Human
cccgaguagcugggaguacaggu

SEQ ID NO: 378697 - RNA, 23 nt, Human
cccggguucaagugauucuccuc

SEQ ID NO: 378698 - RNA, 23 nt, Human
cccggguucaagugauucuccug

SEQ ID NO: 378699 - RNA, 20 nt, Human
ccucaaagaauccucugaua

SEQ ID NO: 378700 - RNA, 19 nt, Human
ccugaguagcugagacuac

SEQ ID NO: 378701 - RNA, 24 nt, Human
ccugaguagcugagacuacaggca

SEQ ID NO: 378702 - RNA, 19 nt, Human
ccuucauuacaaguggugc

SEQ ID NO: 378703 - RNA, 21 nt, Human
cguaacaucuuuggguagcug

SEQ ID NO: 378704 - RNA, 24 nt, Human
cgucccggguucaagugauucucc

SEQ ID NO: 378705 - RNA, 18 nt, Human
cuaggcccaaagccaucc

SEQ ID NO: 378706 - RNA, 18 nt, Human
cuccacauggaaccgaag

SEQ ID NO: 378707 - RNA, 21 nt, Human
cucgcucuguugcccaggcug

SEQ ID NO: 378708 - RNA, 24 nt, Human
cucgcucuguugcccaggcuggag

SEQ ID NO: 378709 - RNA, 20 nt, Human
cucuguugcccaggcuggag

SEQ ID NO: 378710 - RNA, 21 nt, Human
cugaagcucuguacaaugugg

SEQ ID NO: 378711 - RNA, 21 nt, Human
cugacccuuuaaaagaacaag

SEQ ID NO: 378712 - RNA, 23 nt, Human
cugccucagccuccugaguagcu

SEQ ID NO: 378713 - RNA, 21 nt, Human
cuggaaaacuucuucauuuca

SEQ ID NO: 378714 - RNA, 24 nt, Human
gaacuacuaggcccaaagccaucc

SEQ ID NO: 378715 - RNA, 24 nt, Human
gacuuuugucacuaauccauuuuc

SEQ ID NO: 378716 - RNA, 24 nt, Human
gaguacaggugugcaccaccaugc

SEQ ID NO: 378717 - RNA, 24 nt, Human
gaguagcugagacuacaggcaugc

SEQ ID NO: 378718 - RNA, 18 nt, Human
gauuacaggcgugaguca

SEQ ID NO: 378719 - RNA, 21 nt, Human
gauuacaggcgugagucacug

SEQ ID NO: 378720 - RNA, 24 nt, Human
gauuacaggcgugagucacugugu

SEQ ID NO: 378721 - RNA, 20 nt, Human
gccucagccuccugaguagc

SEQ ID NO: 378722 - RNA, 25 nt, Human
gcucuguugcccaggcuggagugca

SEQ ID NO: 378723 - RNA, 19 nt, Human
gcuggagugcaguggcgca

SEQ ID NO: 378724 - RNA, 22 nt, Human
ggaaagaaugaaagccuuucag

SEQ ID NO: 378725 - RNA, 18 nt, Human
gggaugcugugccuaaaa

SEQ ID NO: 378726 - RNA, 22 nt, Human
ggguucaagugauucuccugcc

SEQ ID NO: 378727 - RNA, 23 nt, Human
ggguucaagugauucuccugccu

SEQ ID NO: 378728 - RNA, 24 nt, Human
guaauccacccgccuuggccuccc

SEQ ID NO: 378729 - RNA, 24 nt, Human
gucucgcucuguugcccaggcugg

SEQ ID NO: 378730 - RNA, 24 nt, Human
gugauucuccugccucagccuccu

SEQ ID NO: 378731 - RNA, 23 nt, Human
guuaggaaagaggcaagcaucca

SEQ ID NO: 378732 - RNA, 20 nt, Human
uaaaaaaauuacaaaauaca

SEQ ID NO: 378733 - RNA, 20 nt, Human
uaaaacacauagcuucaggg

SEQ ID NO: 378734 - RNA, 28 nt, Human
uaaaccccgcuccacauggaaccgaagg

SEQ ID NO: 378735 - RNA, 23 nt, Human
uaacagcagagguucuaccuccu

SEQ ID NO: 378736 - RNA, 19 nt, Human
uaaccaaguucauuaacag

SEQ ID NO: 378737 - RNA, 21 nt, Human
uaaguaaggcuaagcuccaaa

SEQ ID NO: 378738 - RNA, 19 nt, Human
uaaguguagauggggggac

SEQ ID NO: 378739 - RNA, 21 nt, Human
uaauacauuaggaacaugaaa

SEQ ID NO: 378740 - RNA, 23 nt, Human
uaauauauacauacauacacuug

SEQ ID NO: 378741 - RNA, 24 nt, Human
uacaaaauacaaaugcccguguua

SEQ ID NO: 378742 - RNA, 23 nt, Human
uaggcccaaagccauccuccugu

SEQ ID NO: 378743 - RNA, 22 nt, Human
uaggugauuuagucaaaagaga

SEQ ID NO: 378744 - RNA, 24 nt, Human
uauaaauauauauauauauauaua

SEQ ID NO: 378745 - RNA, 20 nt, Human
uauauaaauauauauauaua

SEQ ID NO: 378746 - RNA, 20 nt, Human
uauauaaauauauauauaua

SEQ ID NO: 378747 - RNA, 22 nt, Human
uauauauaaauauauauauaua

SEQ ID NO: 378748 - RNA, 25 nt, Human
uauauauaaauauauauauauauau

SEQ ID NO: 378749 - RNA, 24 nt, Human
uauauauaaauauauauauauauu

SEQ ID NO: 378750 - RNA, 19 nt, Human
uauauauauauauauauau

SEQ ID NO: 378751 - RNA, 19 nt, Human
uauauauauauauauauau

SEQ ID NO: 378752 - RNA, 19 nt, Human
uauauauauauauauauau

SEQ ID NO: 378753 - RNA, 19 nt, Human
uauauauauauauauauau

SEQ ID NO: 378754 - RNA, 19 nt, Human
uauauauauauauauauau

SEQ ID NO: 378755 - RNA, 19 nt, Human
uauauauauauauauauau

SEQ ID NO: 378756 - RNA, 19 nt, Human
uauauauauauauauauau

SEQ ID NO: 378757 - RNA, 19 nt, Human
uauauauauauauauauau

SEQ ID NO: 378758 - RNA, 19 nt, Human
uauauauauauauauauau

SEQ ID NO: 378759 - RNA, 19 nt, Human
uauauauauauauauauau

SEQ ID NO: 378760 - RNA, 19 nt, Human
uauauauauauauauauau

SEQ ID NO: 378761 - RNA, 19 nt, Human
uauauauauauauauauau

SEQ ID NO: 378762 - RNA, 19 nt, Human
uauauauauauauauauau

SEQ ID NO: 378763 - RNA, 19 nt, Human
uauauauauauauauauau

SEQ ID NO: 378764 - RNA, 19 nt, Human
uauauauauauauauauau

SEQ ID NO: 378765 - RNA, 19 nt, Human
uauauauauauauauauau

SEQ ID NO: 378766 - RNA, 19 nt, Human
uauauauauauauauauau

SEQ ID NO: 378767 - RNA, 19 nt, Human
uauauauauauauauauau

SEQ ID NO: 378768 - RNA, 18 nt, Human
uaugcugcccaggcugga

SEQ ID NO: 378769 - RNA, 24 nt, Human
uaugcugcccaggcuggacucgaa

SEQ ID NO: 378770 - RNA, 18 nt, Human
uauuggaccuuuguuaga

SEQ ID NO: 378771 - RNA, 22 nt, Human
uauuuauuuauuuauuuuuggu

SEQ ID NO: 378772 - RNA, 21 nt, Human
ucaaaagagaacacugcauga

SEQ ID NO: 378773 - RNA, 20 nt, Human
ucaaaagcaaaaauguggca

SEQ ID NO: 378774 - RNA, 24 nt, Human
ucaaagaauccucugauaauuuua

SEQ ID NO: 378775 - RNA, 21 nt, Human
ucaacagcacucuaccucagc

SEQ ID NO: 378776 - RNA, 19 nt, Human
ucaagugauucuccugccu

SEQ ID NO: 378777 - RNA, 24 nt, Human
ucacacuaugcugcccaggcugga

SEQ ID NO: 378778 - RNA, 19 nt, Human
ucacuguaaccucugcggg

SEQ ID NO: 378779 - RNA, 22 nt, Human
ucacuguaaccucugcgggguc

SEQ ID NO: 378780 - RNA, 23 nt, Human
ucacuguaaccucugcgucccgg

SEQ ID NO: 378781 - RNA, 24 nt, Human
ucacuguaaccucugcgucccggg

SEQ ID NO: 378782 - RNA, 19 nt, Human
uccacauggaaccgaaggu

SEQ ID NO: 378783 - RNA, 18 nt, Human
ucccaaaaagugaaggcu

SEQ ID NO: 378784 - RNA, 24 nt, Human
ucccaaaauguugggauuacaggc

SEQ ID NO: 378785 - RNA, 19 nt, Human
ucccggguucaagugauuc

SEQ ID NO: 378786 - RNA, 21 nt, Human
ucccggguucaagugauucuc

SEQ ID NO: 378787 - RNA, 24 nt, Human
ucccggguucaagugauucuccug

SEQ ID NO: 378788 - RNA, 19 nt, Human
uccggggccuaaucaugcu

SEQ ID NO: 378789 - RNA, 24 nt, Human
uccugaguagcugagacuacaggc

SEQ ID NO: 378790 - RNA, 24 nt, Human
ucgcucuguugcccaggcuggagu

SEQ ID NO: 378791 - RNA, 24 nt, Human
ucucacacuaugcugcccaggcug

SEQ ID NO: 378792 - RNA, 30 nt, Human
ucucacacuaugcugcccaggcuggacucc

SEQ ID NO: 378793 - RNA, 24 nt, Human
ucuccugccucagccuccugagua

SEQ ID NO: 378794 - RNA, 19 nt, Human
ucucgcucuguugcccagg

SEQ ID NO: 378795 - RNA, 23 nt, Human
ucucgcucuguugcccaggcugg

SEQ ID NO: 378796 - RNA, 24 nt, Human
ucucgcucuguugcccaggcugga

SEQ ID NO: 378797 - RNA, 26 nt, Human
ucucgcucuguugcccaggcuggagu

SEQ ID NO: 378798 - RNA, 27 nt, Human
ucucgcucuguugcccaggcuggagug

SEQ ID NO: 378799 - RNA, 18 nt, Human
ucuguugcccaggcugga

SEQ ID NO: 378800 - RNA, 24 nt, Human
ucuguugcccaggcuggagugcag

SEQ ID NO: 378801 - RNA, 23 nt, Human
ugaauaacggaucuuuggaggag

SEQ ID NO: 378802 - RNA, 18 nt, Human
ugacauuaauagcuuugg

SEQ ID NO: 378803 - RNA, 21 nt, Human
ugagacuacaggcaugcacca

SEQ ID NO: 378804 - RNA, 24 nt, Human
ugagacuacaggcaugcaccacca

SEQ ID NO: 378805 - RNA, 23 nt, Human
ugagauagaggucucgcucuguu

SEQ ID NO: 378806 - RNA, 20 nt, Human
ugauucuccugccucagccu

SEQ ID NO: 378807 - RNA, 23 nt, Human
ugcaguggcgcaaucucgguuca

SEQ ID NO: 378808 - RNA, 24 nt, Human
ugcaugaaccaaggccucaggugc

SEQ ID NO: 378809 - RNA, 22 nt, Human
ugccacaaacacacaacgagcc

SEQ ID NO: 378810 - RNA, 22 nt, Human
ugccauuaucaccuuucagccc

SEQ ID NO: 378811 - RNA, 20 nt, Human
ugcccaggcuggacucgaac

SEQ ID NO: 378812 - RNA, 18 nt, Human
ugcccaggcuggagugca

SEQ ID NO: 378813 - RNA, 21 nt, Human
ugcccaggcuggagugcagug

SEQ ID NO: 378814 - RNA, 22 nt, Human
ugcccaggcuggagugcagugg

SEQ ID NO: 378815 - RNA, 24 nt, Human
ugccucagccuccugaguagcuga

SEQ ID NO: 378816 - RNA, 19 nt, Human
uggacucgaacuacuaggc

SEQ ID NO: 378817 - RNA, 23 nt, Human
uggagugcaguggcgcaaucucg

SEQ ID NO: 378818 - RNA, 24 nt, Human
uggagugcaguggcgcaaucucgg

SEQ ID NO: 378819 - RNA, 19 nt, Human
uggcaaagaaauaagcauc

SEQ ID NO: 378820 - RNA, 25 nt, Human
uggcaugcaaaaauauguguaaaug

SEQ ID NO: 378821 - RNA, 18 nt, Human
ugggauuacaggcgugag

SEQ ID NO: 378822 - RNA, 21 nt, Human
ugggauuacaggcgugaguca

SEQ ID NO: 378823 - RNA, 22 nt, Human
ugggauuacaggcgugagucac

SEQ ID NO: 378824 - RNA, 22 nt, Human
ugggauuacaggcgugagucac

SEQ ID NO: 378825 - RNA, 22 nt, Human
ugggauuacaggcgugagucac

SEQ ID NO: 378826 - RNA, 24 nt, Human
ugggauuacaggcgugagucacug

SEQ ID NO: 378827 - RNA, 21 nt, Human
ugggcugacagucccacuggg

SEQ ID NO: 378828 - RNA, 25 nt, Human
uggggggacuuggaaaucuccgggg

SEQ ID NO: 378829 - RNA, 23 nt, Human
uguggcaugcaaaaauaugugua

SEQ ID NO: 378830 - RNA, 26 nt, Human
uguguaaaccacccgaguagcuggga

SEQ ID NO: 378831 - RNA, 19 nt, Human
uuagaauacuguguccagg

SEQ ID NO: 378832 - RNA, 21 nt, Human
uucaagugauucuccugccuc

SEQ ID NO: 378833 - RNA, 23 nt, Human
uucaagugauucuccugccucag

SEQ ID NO: 378834 - RNA, 24 nt, Human
uucaagugauucuccugccucagc

SEQ ID NO: 378835 - RNA, 23 nt, Human
uucacuguaaccucugcggguuc

SEQ ID NO: 378836 - RNA, 18 nt, Human
uuccaguauauuauucug

SEQ ID NO: 378837 - RNA, 21 nt, Human
uucccaguguccgugcauuuc

SEQ ID NO: 378838 - RNA, 24 nt, Human
uugcccaggcuggagugcaguggc

SEQ ID NO: 378839 - RNA, 19 nt, Human
uuggaaaucuccggggccu

SEQ ID NO: 378840 - RNA, 19 nt, Human
uuggagauggugucuuccu

SEQ ID NO: 378841 - RNA, 20 nt, Human
uuggcacauacagagacuga

SEQ ID NO: 378842 - RNA, 22 nt, Human
uuguuagaauacuguguccagg

SEQ ID NO: 378843 - RNA, 18 nt, Human
uuuggaggaguucgugga

SEQ ID NO: 378844 - RNA, 24 nt, Human
aaacaagaugccacugaaagcugg

SEQ ID NO: 378845 - RNA, 18 nt, Human
aaacagcaacaaaaauca

SEQ ID NO: 378846 - RNA, 23 nt, Human
aaagcaucuccaagcauacauac

SEQ ID NO: 378847 - RNA, 20 nt, Human
aacaucuguugagugacagu

SEQ ID NO: 378848 - RNA, 21 nt, Human
aacuaaggcucucuaagcccc

SEQ ID NO: 378849 - RNA, 18 nt, Human
aagccagggcgcccugag

SEQ ID NO: 378850 - RNA, 20 nt, Human
aagcccccaaccccaaacag

SEQ ID NO: 378851 - RNA, 24 nt, Human
aagggcuucauucucaagguuuug

SEQ ID NO: 378852 - RNA, 21 nt, Human
aaggggauggugaacacgagu

SEQ ID NO: 378853 - RNA, 21 nt, Human
aaguagaucugcaccagcccu

SEQ ID NO: 378854 - RNA, 18 nt, Human
aagucagacgccacaaca

SEQ ID NO: 378855 - RNA, 18 nt, Human
acaaagcaucuccaagca

SEQ ID NO: 378856 - RNA, 21 nt, Human
acacaaagcaucuccaagcau

SEQ ID NO: 378857 - RNA, 23 nt, Human
acaccaaugaccaauucacauca

SEQ ID NO: 378858 - RNA, 21 nt, Human
acagcaacaaaaaucaagacu

SEQ ID NO: 378859 - RNA, 22 nt, Human
accagguuuggagacugaauug

SEQ ID NO: 378860 - RNA, 19 nt, Human
accccaccucucuuccccg

SEQ ID NO: 378861 - RNA, 18 nt, Human
accugauaaugaaaaccu

SEQ ID NO: 378862 - RNA, 23 nt, Human
acugccacaauaacuuacaaaga

SEQ ID NO: 378863 - RNA, 21 nt, Human
agaaagcccccaaccccaaac

SEQ ID NO: 378864 - RNA, 24 nt, Human
agaaauaaggcaggagcaacagaa

SEQ ID NO: 378865 - RNA, 18 nt, Human
agaccccugguggcuacu

SEQ ID NO: 378866 - RNA, 23 nt, Human
agaguucuucaguucuccugccu

SEQ ID NO: 378867 - RNA, 25 nt, Human
agcaaacaccaaugaccaauucaca

SEQ ID NO: 378868 - RNA, 19 nt, Human
agcaccucuuuuccuuugc

SEQ ID NO: 378869 - RNA, 18 nt, Human
agcuggguuuaguaggug

SEQ ID NO: 378870 - RNA, 23 nt, Human
aggaaacagcaacaaaaaucaag

SEQ ID NO: 378871 - RNA, 24 nt, Human
aggauuaaaaaaaaaaaauccuac

SEQ ID NO: 378872 - RNA, 23 nt, Human
agggguggagcagggcucuuuga

SEQ ID NO: 378873 - RNA, 29 nt, Human
aggucaggaaacagcaacaaaagggaccc

SEQ ID NO: 378874 - RNA, 21 nt, Human
aguagccccaccccaccucuc

SEQ ID NO: 378875 - RNA, 23 nt, Human
aguguugccauuaagaaagcuuu

SEQ ID NO: 378876 - RNA, 23 nt, Human
auaaaacucucuuaagacucuuu

SEQ ID NO: 378877 - RNA, 24 nt, Human
auaaaacucucuuaagacucuuua

SEQ ID NO: 378878 - RNA, 18 nt, Human
auauguguguguauguaa

SEQ ID NO: 378879 - RNA, 22 nt, Human
augaugcuaggggggccaggag

SEQ ID NO: 378880 - RNA, 27 nt, Human
auguguguguguguaaaauaugugugu

SEQ ID NO: 378881 - RNA, 21 nt, Human
augugugugugugugugugug

SEQ ID NO: 378882 - RNA, 22 nt, Human
augugugugugugugugugugu

SEQ ID NO: 378883 - RNA, 23 nt, Human
auguguguguguguguguguguu

SEQ ID NO: 378884 - RNA, 22 nt, Human
caaaacaagaugccacugaaag

SEQ ID NO: 378885 - RNA, 23 nt, Human
caaaacaagaugccacugaaagc

SEQ ID NO: 378886 - RNA, 20 nt, Human
caaagauaagaaaacucaga

SEQ ID NO: 378887 - RNA, 19 nt, Human
caacagaacaggcccaaag

SEQ ID NO: 378888 - RNA, 20 nt, Human
caauccaacaucuguugagu

SEQ ID NO: 378889 - RNA, 21 nt, Human
caauucacaucaauggaaaga

SEQ ID NO: 378890 - RNA, 19 nt, Human
caccucucuuccccgaagg

SEQ ID NO: 378891 - RNA, 19 nt, Human
cacgagucauguacagggu

SEQ ID NO: 378892 - RNA, 25 nt, Human
cagaauggcaacccaccaucucucc

SEQ ID NO: 378893 - RNA, 20 nt, Human
cagaguagagccagaauauu

SEQ ID NO: 378894 - RNA, 23 nt, Human
caggaaacagcaacaaaaaucaa

SEQ ID NO: 378895 - RNA, 19 nt, Human
cagggcucuuugaagcauc

SEQ ID NO: 378896 - RNA, 19 nt, Human
cauaugugugugugugugu

SEQ ID NO: 378897 - RNA, 19 nt, Human
cauaugugugugugugugu

SEQ ID NO: 378898 - RNA, 21 nt, Human
caucaccgcuccucaucuccu

SEQ ID NO: 378899 - RNA, 19 nt, Human
caugagccuggcuguggau

SEQ ID NO: 378900 - RNA, 22 nt, Human
ccaaccccaaacagguuacggg

SEQ ID NO: 378901 - RNA, 20 nt, Human
ccaggaaaaggauccaugcc

SEQ ID NO: 378902 - RNA, 21 nt, Human
ccaucagagacaaagguagga

SEQ ID NO: 378903 - RNA, 19 nt, Human
cccaggugacaggcaagaa

SEQ ID NO: 378904 - RNA, 27 nt, Human
ccccaccccaccucucuuccccgaaag

SEQ ID NO: 378905 - RNA, 19 nt, Human
cccccaaccccaaacaggu

SEQ ID NO: 378906 - RNA, 18 nt, Human
ccccugguggcuacugug

SEQ ID NO: 378907 - RNA, 25 nt, Human
cccggugcuggcaucaccgcuccuc

SEQ ID NO: 378908 - RNA, 21 nt, Human
cccuaggcccuggauggccag

SEQ ID NO: 378909 - RNA, 18 nt, Human
ccugccuagcacuuggaa

SEQ ID NO: 378910 - RNA, 22 nt, Human
ccugucucuggcuaaccuaaga

SEQ ID NO: 378911 - RNA, 24 nt, Human
cuaguagccccaccccaccucucu

SEQ ID NO: 378912 - RNA, 23 nt, Human
cugacccuucagaguccacacca

SEQ ID NO: 378913 - RNA, 22 nt, Human
cuuccagugcucugcgcauccc

SEQ ID NO: 378914 - RNA, 19 nt, Human
cuugagcccauguccucag

SEQ ID NO: 378915 - RNA, 18 nt, Human
gaagacuggacuauauau

SEQ ID NO: 378916 - RNA, 21 nt, Human
gacaggcaagaacaggucagg

SEQ ID NO: 378917 - RNA, 18 nt, Human
gaccugauaaugaaaacc

SEQ ID NO: 378918 - RNA, 20 nt, Human
gagagauuucaaaggcuagg

SEQ ID NO: 378919 - RNA, 18 nt, Human
gcaacagaacaggcccaa

SEQ ID NO: 378920 - RNA, 25 nt, Human
gccaaccaucuggucaaggcaucac

SEQ ID NO: 378921 - RNA, 26 nt, Human
gcuccuuuuggcuuuucgguguaaaa

SEQ ID NO: 378922 - RNA, 18 nt, Human
ggaaacagauccuugggu

SEQ ID NO: 378923 - RNA, 20 nt, Human
ggaagacagcucugccccca

SEQ ID NO: 378924 - RNA, 21 nt, Human
ggaagacagcucugcccccag

SEQ ID NO: 378925 - RNA, 20 nt, Human
ggaugcuaguagccccaccc

SEQ ID NO: 378926 - RNA, 18 nt, Human
ggcagugggaagggagag

SEQ ID NO: 378927 - RNA, 19 nt, Human
ggcuacugugugaacugcc

SEQ ID NO: 378928 - RNA, 20 nt, Human
gggaagcagagggcaguggg

SEQ ID NO: 378929 - RNA, 18 nt, Human
ggggauggaggagaggca

SEQ ID NO: 378930 - RNA, 20 nt, Human
ggguggacuuaaaacaaguu

SEQ ID NO: 378931 - RNA, 20 nt, Human
ggguggagcagggcucuuug

SEQ ID NO: 378932 - RNA, 21 nt, Human
guaggaacccgagaaaugucu

SEQ ID NO: 378933 - RNA, 22 nt, Human
gucaggguucccuuaauugucc

SEQ ID NO: 378934 - RNA, 21 nt, Human
guggagcagggcucuuugaag

SEQ ID NO: 378935 - RNA, 26 nt, Human
guguguguguguaaaauaugugugug

SEQ ID NO: 378936 - RNA, 24 nt, Human
guguguguguguguguaaaaugug

SEQ ID NO: 378937 - RNA, 21 nt, Human
gugugugugugugugugugug

SEQ ID NO: 378938 - RNA, 26 nt, Human
uaaggcaggagcaacagaacaggccc

SEQ ID NO: 378939 - RNA, 23 nt, Human
uacaaacuccucuguuuucuaaa

SEQ ID NO: 378940 - RNA, 24 nt, Human
uacacaaaugugacauacaaguca

SEQ ID NO: 378941 - RNA, 20 nt, Human
uacagaaaauaauaaggcua

SEQ ID NO: 378942 - RNA, 24 nt, Human
uacaggguugaaagagaaauaagg

SEQ ID NO: 378943 - RNA, 22 nt, Human
uaccaagggcuucauucucaag

SEQ ID NO: 378944 - RNA, 18 nt, Human
uaggaggaaaaaggaccc

SEQ ID NO: 378945 - RNA, 23 nt, Human
uaggcccuggauggccagcuccu

SEQ ID NO: 378946 - RNA, 19 nt, Human
uaggcugacucacuucacu

SEQ ID NO: 378947 - RNA, 24 nt, Human
uaggggauggaggagaggcaagag

SEQ ID NO: 378948 - RNA, 18 nt, Human
uaugugugugugugugug

SEQ ID NO: 378949 - RNA, 23 nt, Human
uaugugugugugugugugugugu

SEQ ID NO: 378950 - RNA, 24 nt, Human
uaugugugugugugugugugugug

SEQ ID NO: 378951 - RNA, 20 nt, Human
ucacugaaagaguucuucag

SEQ ID NO: 378952 - RNA, 23 nt, Human
ucaggaaacagcaacaaaaauca

SEQ ID NO: 378953 - RNA, 19 nt, Human
ucaguucuccugccuagca

SEQ ID NO: 378954 - RNA, 21 nt, Human
ucaguucuccugccuagcaac

SEQ ID NO: 378955 - RNA, 20 nt, Human
ucccugaagagagaccuugu

SEQ ID NO: 378956 - RNA, 20 nt, Human
uccucuguuuucuaaauugg

SEQ ID NO: 378957 - RNA, 19 nt, Human
uccuuggguaugaaagccc

SEQ ID NO: 378958 - RNA, 24 nt, Human
ucuaaauugggaugcuaguagccc

SEQ ID NO: 378959 - RNA, 21 nt, Human
ucuauaaucaguucccaaaac

SEQ ID NO: 378960 - RNA, 23 nt, Human
ugaacugccacaauaacuuacaa

SEQ ID NO: 378961 - RNA, 19 nt, Human
ugaccacucacacacuguu

SEQ ID NO: 378962 - RNA, 22 nt, Human
ugagcucugccgagaaggacuc

SEQ ID NO: 378963 - RNA, 21 nt, Human
ugauaaugaaaaccugucucu

SEQ ID NO: 378964 - RNA, 20 nt, Human
ugauacuccugggauagcau

SEQ ID NO: 378965 - RNA, 21 nt, Human
ugauuucccacaaagcaccuc

SEQ ID NO: 378966 - RNA, 19 nt, Human
ugcagugagcucugccgag

SEQ ID NO: 378967 - RNA, 21 nt, Human
ugccacaauaacuuacaaaga

SEQ ID NO: 378968 - RNA, 24 nt, Human
ugcuaggggggccaggagcacagg

SEQ ID NO: 378969 - RNA, 19 nt, Human
uggaaaaugguccaucaga

SEQ ID NO: 378970 - RNA, 18 nt, Human
uggaaagaacacagagag

SEQ ID NO: 378971 - RNA, 21 nt, Human
uggaaagaacacagagagaaa

SEQ ID NO: 378972 - RNA, 21 nt, Human
uggaagaugugacuucucuuc

SEQ ID NO: 378973 - RNA, 19 nt, Human
uggauggcaguagccaacc

SEQ ID NO: 378974 - RNA, 18 nt, Human
uggauggccagcuccuuu

SEQ ID NO: 378975 - RNA, 22 nt, Human
uggcaguagccaaccaucuggu

SEQ ID NO: 378976 - RNA, 23 nt, Human
uggccagcuccuuuuggcuuuuc

SEQ ID NO: 378977 - RNA, 18 nt, Human
uggcuacaaacuccucug

SEQ ID NO: 378978 - RNA, 22 nt, Human
uggcugaauuacgacgacuggg

SEQ ID NO: 378979 - RNA, 19 nt, Human
uggcuguggaugugucugg

SEQ ID NO: 378980 - RNA, 23 nt, Human
ugggggaagcagagggcaguggg

SEQ ID NO: 378981 - RNA, 20 nt, Human
uguaaaauauguguguguau

SEQ ID NO: 378982 - RNA, 20 nt, Human
uguaaaauauguguguguau

SEQ ID NO: 378983 - RNA, 18 nt, Human
uguaaaaugugugugugu

SEQ ID NO: 378984 - RNA, 21 nt, Human
ugucccaucccguuauguuuc

SEQ ID NO: 378985 - RNA, 22 nt, Human
uguguaaaauauguguguguau

SEQ ID NO: 378986 - RNA, 22 nt, Human
uguguaaaauauguguguguau

SEQ ID NO: 378987 - RNA, 22 nt, Human
uguguguguaaaauaugugugu

SEQ ID NO: 378988 - RNA, 23 nt, Human
uguguguguaaaauauguguguu

SEQ ID NO: 378989 - RNA, 20 nt, Human
uguguguguaaaaugugugu

SEQ ID NO: 378990 - RNA, 20 nt, Human
uguguguguaaaaugugugu

SEQ ID NO: 378991 - RNA, 28 nt, Human
uguguguguaaaauguguguguguguaa

SEQ ID NO: 378992 - RNA, 20 nt, Human
uguguguguguaaaauaugu

SEQ ID NO: 378993 - RNA, 21 nt, Human
uguguguguguaaaauaugug

SEQ ID NO: 378994 - RNA, 24 nt, Human
uguguguguguaaaauaugugugu

SEQ ID NO: 378995 - RNA, 21 nt, Human
uguguguguguaaaaugugug

SEQ ID NO: 378996 - RNA, 22 nt, Human
uguguguguguaaaaugugugu

SEQ ID NO: 378997 - RNA, 26 nt, Human
uguguguguguaaaaugugugugugu

SEQ ID NO: 378998 - RNA, 26 nt, Human
uguguguguguguaaaaugugugugu

SEQ ID NO: 378999 - RNA, 29 nt, Human
uguguguguguguaaaaugugugugugug

SEQ ID NO: 379000 - RNA, 29 nt, Human
uguguguguguguguaaaaugugugugug

SEQ ID NO: 379001 - RNA, 18 nt, Human
ugugugugugugugugug

SEQ ID NO: 379002 - RNA, 18 nt, Human
ugugugugugugugugug

SEQ ID NO: 379003 - RNA, 18 nt, Human
ugugugugugugugugug

SEQ ID NO: 379004 - RNA, 18 nt, Human
ugugugugugugugugug

SEQ ID NO: 379005 - RNA, 21 nt, Human
ugugugugugugugugugugu

SEQ ID NO: 379006 - RNA, 21 nt, Human
ugugugugugugugugugugu

SEQ ID NO: 379007 - RNA, 22 nt, Human
ugugugugugugugugugugua

SEQ ID NO: 379008 - RNA, 20 nt, Human
uguugccauuaagaaagcuu

SEQ ID NO: 379009 - RNA, 19 nt, Human
uguuugcagugagcucugc

SEQ ID NO: 379010 - RNA, 25 nt, Human
uuagaaccuaauuuucaacugaagu

SEQ ID NO: 379011 - RNA, 21 nt, Human
uuccagugcucugcgcauccc

SEQ ID NO: 379012 - RNA, 22 nt, Human
uucucuggcccagacagaacaa

SEQ ID NO: 379013 - RNA, 23 nt, Human
uuggaagggaaccagaaaaaagg

SEQ ID NO: 379014 - RNA, 20 nt, Human
uuuaauuuucuuucgauucc

SEQ ID NO: 379015 - RNA, 22 nt, Human
uuuacaggcugcuggcuacaaa

SEQ ID NO: 379016 - RNA, 18 nt, Human
uuucccacaaagcaccuc

SEQ ID NO: 379017 - RNA, 20 nt, Human
accgaaggcaaagaggacaa

SEQ ID NO: 379018 - RNA, 26 nt, Human
agagcuccaguuggaaugucgacauc

SEQ ID NO: 379019 - RNA, 23 nt, Human
aggcaugacugauaauggcugag

SEQ ID NO: 379020 - RNA, 18 nt, Human
caguuuuuaguaucucac

SEQ ID NO: 379021 - RNA, 25 nt, Human
ccaguuggaauguugauuacauuca

SEQ ID NO: 379022 - RNA, 22 nt, Human
ggcaaagaggacaagcaaagga

SEQ ID NO: 379023 - RNA, 18 nt, Human
uaaauaaugugacuuaaa

SEQ ID NO: 379024 - RNA, 21 nt, Human
uacaacagcuguuaagagaaa

SEQ ID NO: 379025 - RNA, 25 nt, Human
uaccgaaggcaaagaggacaagcaa

SEQ ID NO: 379026 - RNA, 22 nt, Human
uagcaagaaaauaaggcaugac

SEQ ID NO: 379027 - RNA, 24 nt, Human
ugaaaaauaaauaaugugacuuaa

SEQ ID NO: 379028 - RNA, 22 nt, Human
ugaggaaaguucuaaauggugu

SEQ ID NO: 379029 - RNA, 23 nt, Human
agacagacacacagacaguccgc

SEQ ID NO: 379030 - RNA, 23 nt, Human
agcugguauaggcuuggaggugg

SEQ ID NO: 379031 - RNA, 21 nt, Human
agguccgagguccuggguggc

SEQ ID NO: 379032 - RNA, 26 nt, Human
cagcaggagguccggcccggggcugg

SEQ ID NO: 379033 - RNA, 24 nt, Human
cagcauucuggggcuuguaacacu

SEQ ID NO: 379034 - RNA, 23 nt, Human
cccggggcuggaggggccgaggc

SEQ ID NO: 379035 - RNA, 25 nt, Human
ccgcaggcuccaagguccgaggucc

SEQ ID NO: 379036 - RNA, 24 nt, Human
cgagguccuggguggcaucagugg

SEQ ID NO: 379037 - RNA, 20 nt, Human
cgccgcagcacaacgggacc

SEQ ID NO: 379038 - RNA, 23 nt, Human
cgccgcagcacaacgggaccagc

SEQ ID NO: 379039 - RNA, 23 nt, Human
cggcccggggcuggaggggccga

SEQ ID NO: 379040 - RNA, 18 nt, Human
cggcgcggggcgcgggcc

SEQ ID NO: 379041 - RNA, 21 nt, Human
cgggggcaacagaaggcagag

SEQ ID NO: 379042 - RNA, 25 nt, Human
gagacagacacacagacaguccgcc

SEQ ID NO: 379043 - RNA, 23 nt, Human
gcgcuguacacagcugguauagg

SEQ ID NO: 379044 - RNA, 18 nt, Human
gcggggcgcgggcccggg

SEQ ID NO: 379045 - RNA, 21 nt, Human
gggcaggccgggcagcauucu

SEQ ID NO: 379046 - RNA, 22 nt, Human
gggcgggcgggcggcgcggggc

SEQ ID NO: 379047 - RNA, 19 nt, Human
ggggcaacagaaggcagag

SEQ ID NO: 379048 - RNA, 19 nt, Human
gggggcaacagaaggcaga

SEQ ID NO: 379049 - RNA, 22 nt, Human
gguccuggguggcaucaguggu

SEQ ID NO: 379050 - RNA, 19 nt, Human
ucagugguggcgccugggc

SEQ ID NO: 379051 - RNA, 23 nt, Human
uccuggguggcaucagugguggc

SEQ ID NO: 379052 - RNA, 22 nt, Human
uggguggcaucagugguggcgc

SEQ ID NO: 379053 - RNA, 22 nt, Human
agcacagaccaauuagccaaau

SEQ ID NO: 379054 - RNA, 18 nt, Human
agugguuaauuggugaaa

SEQ ID NO: 379055 - RNA, 21 nt, Human
cacagagaugucuacagagac

SEQ ID NO: 379056 - RNA, 21 nt, Human
cagcacagaccaauuagccaa

SEQ ID NO: 379057 - RNA, 18 nt, Human
ccagaaaccuagcuaucu

SEQ ID NO: 379058 - RNA, 22 nt, Human
cuggccaaaaggaaaaaauagc

SEQ ID NO: 379059 - RNA, 28 nt, Human
gaaaacaccuacugugggggaaccagaa

SEQ ID NO: 379060 - RNA, 20 nt, Human
gcagcacagaccaauuagcc

SEQ ID NO: 379061 - RNA, 18 nt, Human
ggaaccagaaaccuagcu

SEQ ID NO: 379062 - RNA, 21 nt, Human
uuuccaaaaggacccuaaucu

SEQ ID NO: 379063 - RNA, 21 nt, Human
aaacccggcagaaacccggga

SEQ ID NO: 379064 - RNA, 24 nt, Human
aaguaacuuauuguacaguccauu

SEQ ID NO: 379065 - RNA, 23 nt, Human
agggagaaacccggcagaaaccc

SEQ ID NO: 379066 - RNA, 21 nt, Human
caaauuagaagucuccauuca

SEQ ID NO: 379067 - RNA, 22 nt, Human
cgaugauaaagaugagaggcac

SEQ ID NO: 379068 - RNA, 19 nt, Human
cuccgaugauaaagaugag

SEQ ID NO: 379069 - RNA, 18 nt, Human
gagaaacccggcagaaac

SEQ ID NO: 379070 - RNA, 24 nt, Human
ggagaaacccggcagaaacccggg

SEQ ID NO: 379071 - RNA, 21 nt, Human
uaauugaaauuuaucugaaac

SEQ ID NO: 379072 - RNA, 19 nt, Human
uacgcgagaugcaaacuuc

SEQ ID NO: 379073 - RNA, 24 nt, Human
uauuuucuuccaaaaaacugcauu

SEQ ID NO: 379074 - RNA, 21 nt, Human
ucaacaacccaggagccgcag

SEQ ID NO: 379075 - RNA, 20 nt, Human
ugauaaagaugagaggcaca

SEQ ID NO: 379076 - RNA, 21 nt, Human
uuaacuuaaaagguggacaua

SEQ ID NO: 379077 - RNA, 23 nt, Human
uucauuaacuuaaaagguggaca

SEQ ID NO: 379078 - RNA, 22 nt, Human
uucugauguaaauuuguuucac

SEQ ID NO: 379079 - RNA, 24 nt, Human
uucugauguaaauuuguuucacug

SEQ ID NO: 379080 - RNA, 23 nt, Human
uuuucaguuucaaauuuuauuuc

SEQ ID NO: 379081 - RNA, 20 nt, Human
aaaaacacaaaagagauuag

SEQ ID NO: 379082 - RNA, 19 nt, Human
aaaaccccaguccuuucac

SEQ ID NO: 379083 - RNA, 18 nt, Human
aaaacggcacauagaaug

SEQ ID NO: 379084 - RNA, 24 nt, Human
aaauauccaaacccaauaacguaa

SEQ ID NO: 379085 - RNA, 19 nt, Human
aacugcuacgcagccgggc

SEQ ID NO: 379086 - RNA, 18 nt, Human
aagugcaguugacaggca

SEQ ID NO: 379087 - RNA, 24 nt, Human
aauaaucaaaaagauaaaccaugu

SEQ ID NO: 379088 - RNA, 19 nt, Human
acaaaagagauuagaccug

SEQ ID NO: 379089 - RNA, 19 nt, Human
acaacaaaacggcacauag

SEQ ID NO: 379090 - RNA, 21 nt, Human
accuccuaaguuacaauaaaa

SEQ ID NO: 379091 - RNA, 18 nt, Human
acgcagccgggccuggug

SEQ ID NO: 379092 - RNA, 22 nt, Human
agaaaagauaacaccaagaaaa

SEQ ID NO: 379093 - RNA, 26 nt, Human
agcuccgcagggagcgcccuggagca

SEQ ID NO: 379094 - RNA, 20 nt, Human
aggcagccucuucuuccagg

SEQ ID NO: 379095 - RNA, 25 nt, Human
auagaaauaaaaauaaauuuuugcc

SEQ ID NO: 379096 - RNA, 19 nt, Human
caacaggccaccuuaauag

SEQ ID NO: 379097 - RNA, 23 nt, Human
cacaugaaaaaucuuuauacaaa

SEQ ID NO: 379098 - RNA, 23 nt, Human
cacguuuccuuaaaagucaggag

SEQ ID NO: 379099 - RNA, 18 nt, Human
cagaagaaaacaggaagc

SEQ ID NO: 379100 - RNA, 21 nt, Human
cagcccgggcccggaaacugg

SEQ ID NO: 379101 - RNA, 20 nt, Human
caggaagcagcucagcacuc

SEQ ID NO: 379102 - RNA, 20 nt, Human
caggaggccacaaauuaggu

SEQ ID NO: 379103 - RNA, 24 nt, Human
caucacuauagaaauaaaaauaaa

SEQ ID NO: 379104 - RNA, 22 nt, Human
caucacucaacugcuacgcagc

SEQ ID NO: 379105 - RNA, 23 nt, Human
ccaaaacagucaucacuauagaa

SEQ ID NO: 379106 - RNA, 18 nt, Human
ccccaaguccuccaucac

SEQ ID NO: 379107 - RNA, 22 nt, Human
ccuggccuuguaccugggcaac

SEQ ID NO: 379108 - RNA, 21 nt, Human
ccuuguaccugggcaacaucc

SEQ ID NO: 379109 - RNA, 21 nt, Human
ccuuuuagaccuggagguaaa

SEQ ID NO: 379110 - RNA, 23 nt, Human
ccuuuuagaccuggagguaaaua

SEQ ID NO: 379111 - RNA, 22 nt, Human
ccuuuugguagcugaacuccaa

SEQ ID NO: 379112 - RNA, 24 nt, Human
cuccgcagggagcgcccuggagca

SEQ ID NO: 379113 - RNA, 26 nt, Human
cugacggugcgaccugcguuucuuuc

SEQ ID NO: 379114 - RNA, 24 nt, Human
cugcaacaggccaccuuaauagcu

SEQ ID NO: 379115 - RNA, 18 nt, Human
cugcaaggccugggugac

SEQ ID NO: 379116 - RNA, 19 nt, Human
cuggcaaaaagguagaaaa

SEQ ID NO: 379117 - RNA, 25 nt, Human
cuggugcacaaaaacacaaaagaga

SEQ ID NO: 379118 - RNA, 20 nt, Human
gaaaggccgggcggagaggc

SEQ ID NO: 379119 - RNA, 22 nt, Human
gaccuguguuugcuaaaacccc

SEQ ID NO: 379120 - RNA, 24 nt, Human
gauaugaucagauuuacaauuuuu

SEQ ID NO: 379121 - RNA, 23 nt, Human
gcaacuuccgaguucccaauuuc

SEQ ID NO: 379122 - RNA, 24 nt, Human
gcagcaacuuccgaguucccaauu

SEQ ID NO: 379123 - RNA, 19 nt, Human
gcgccccgcguggggacgc

SEQ ID NO: 379124 - RNA, 18 nt, Human
ggcggcggagcuccgcag

SEQ ID NO: 379125 - RNA, 18 nt, Human
gggcggagaggcgggcgg

SEQ ID NO: 379126 - RNA, 21 nt, Human
ggucccgaagauccuggccuu

SEQ ID NO: 379127 - RNA, 23 nt, Human
ggugcacaaaaacacaaaagaga

SEQ ID NO: 379128 - RNA, 20 nt, Human
uacaaccuuuucaauaggca

SEQ ID NO: 379129 - RNA, 22 nt, Human
uagcugaacuccaaaugaagcc

SEQ ID NO: 379130 - RNA, 24 nt, Human
uaucugcaaggccugggugacugg

SEQ ID NO: 379131 - RNA, 22 nt, Human
ucaaauauccaaacccaauaac

SEQ ID NO: 379132 - RNA, 27 nt, Human
ucaaauauccaaacccaauaacguaau

SEQ ID NO: 379133 - RNA, 23 nt, Human
ucacacuaccuuuuagaccugga

SEQ ID NO: 379134 - RNA, 20 nt, Human
ucagaagaaaacaggaagca

SEQ ID NO: 379135 - RNA, 20 nt, Human
ucaggccaaauacuccagga

SEQ ID NO: 379136 - RNA, 22 nt, Human
ucaggccaaauacuccaggacc

SEQ ID NO: 379137 - RNA, 19 nt, Human
uccgcagggagcgcccugg

SEQ ID NO: 379138 - RNA, 19 nt, Human
ucuccauauuuuaaguuca

SEQ ID NO: 379139 - RNA, 22 nt, Human
ucugcaaggccugggugacugg

SEQ ID NO: 379140 - RNA, 21 nt, Human
ucuguucauuucaaaccaaaa

SEQ ID NO: 379141 - RNA, 23 nt, Human
ugaacuccaaaugaagccagguc

SEQ ID NO: 379142 - RNA, 19 nt, Human
ugaaggcaauguugaagca

SEQ ID NO: 379143 - RNA, 21 nt, Human
ugaauaacaacaaaacggcac

SEQ ID NO: 379144 - RNA, 22 nt, Human
ugaauaacaacaaaacggcaca

SEQ ID NO: 379145 - RNA, 21 nt, Human
ugagaaaagauaacaccaaga

SEQ ID NO: 379146 - RNA, 24 nt, Human
ugaucagauuuacaauuuuucaga

SEQ ID NO: 379147 - RNA, 21 nt, Human
ugaugcaaagcuucaaacugg

SEQ ID NO: 379148 - RNA, 24 nt, Human
ugggucacacuaccuuuuagaccu

SEQ ID NO: 379149 - RNA, 22 nt, Human
uguguaauggcugcacacggug

SEQ ID NO: 379150 - RNA, 22 nt, Human
uuaucugcaaggccugggugac

SEQ ID NO: 379151 - RNA, 22 nt, Human
uucccccaaguccuccaucacg

SEQ ID NO: 379152 - RNA, 21 nt, Human
uuucccccaaguccuccauca

SEQ ID NO: 379153 - RNA, 24 nt, Human
uuuuaacuacagaaacaaugguua

SEQ ID NO: 379154 - RNA, 18 nt, Human
aaaaaacaaaauagaaaa

SEQ ID NO: 379155 - RNA, 21 nt, Human
aaaauagaaaagaguuaggug

SEQ ID NO: 379156 - RNA, 19 nt, Human
aagagaccaagggacugcg

SEQ ID NO: 379157 - RNA, 23 nt, Human
agagaccaagggacugcgugcuc

SEQ ID NO: 379158 - RNA, 19 nt, Human
augauggaguaaagaaagu

SEQ ID NO: 379159 - RNA, 18 nt, Human
caaaaucaaccagccaug

SEQ ID NO: 379160 - RNA, 20 nt, Human
cgugugcaugucacuaugua

SEQ ID NO: 379161 - RNA, 24 nt, Human
uaaaauagacuuuuaaaauuacaa

SEQ ID NO: 379162 - RNA, 24 nt, Human
uaauaaaauagacuuuuaaaauua

SEQ ID NO: 379163 - RNA, 20 nt, Human
uagaaagaguaaauaugguc

SEQ ID NO: 379164 - RNA, 22 nt, Human
ucggcagcgcagcgcgcuuccc

SEQ ID NO: 379165 - RNA, 22 nt, Human
ugccaagagaggaaccaucaug

SEQ ID NO: 379166 - RNA, 20 nt, Human
uuuuuuuuuuuuuugcucca

SEQ ID NO: 379167 - RNA, 23 nt, Human
uuuuuuuuuuuuuuuugcuccaa

SEQ ID NO: 379168 - RNA, 18 nt, Human
uuuuuuuuuuuuuuuuug

SEQ ID NO: 379169 - RNA, 20 nt, Human
uuuuuuuuuuuuuuuuugcu

SEQ ID NO: 379170 - RNA, 21 nt, Human
aaaaaaaacuauuaaaucuua

SEQ ID NO: 379171 - RNA, 20 nt, Human
aaaccaggcucuugcauggg

SEQ ID NO: 379172 - RNA, 20 nt, Human
aaaugucuucaguaucuaaa

SEQ ID NO: 379173 - RNA, 22 nt, Human
aacugccuuuuguucaacaucc

SEQ ID NO: 379174 - RNA, 22 nt, Human
aaggaaacacgggauuugagac

SEQ ID NO: 379175 - RNA, 21 nt, Human
aaggaaccuuuagguaaggag

SEQ ID NO: 379176 - RNA, 24 nt, Human
acuaggaaacaaaaugucuucagu

SEQ ID NO: 379177 - RNA, 20 nt, Human
agauucugucuuaccggugc

SEQ ID NO: 379178 - RNA, 18 nt, Human
agccuccgcgcgccuccc

SEQ ID NO: 379179 - RNA, 23 nt, Human
agccugucaguccacugccccau

SEQ ID NO: 379180 - RNA, 21 nt, Human
agucauugcuuuaaaauuuuc

SEQ ID NO: 379181 - RNA, 21 nt, Human
augaagacuuuggccuguaaa

SEQ ID NO: 379182 - RNA, 21 nt, Human
caacagugccucaagggggca

SEQ ID NO: 379183 - RNA, 19 nt, Human
caagaaccuauugacaagg

SEQ ID NO: 379184 - RNA, 23 nt, Human
cacaguacugaugaaccuguaua

SEQ ID NO: 379185 - RNA, 21 nt, Human
cacugaauucccaccauuucc

SEQ ID NO: 379186 - RNA, 21 nt, Human
cagaaccaguacccuggcuga

SEQ ID NO: 379187 - RNA, 22 nt, Human
cagcuuugaugggaagcuaaaa

SEQ ID NO: 379188 - RNA, 22 nt, Human
cagugccucaagggggcaugga

SEQ ID NO: 379189 - RNA, 20 nt, Human
cauugcuacaggccaucuua

SEQ ID NO: 379190 - RNA, 19 nt, Human
ccagaaccaguacccuggc

SEQ ID NO: 379191 - RNA, 20 nt, Human
ccggcgccgcgccuccagcu

SEQ ID NO: 379192 - RNA, 18 nt, Human
ccuccccggccgcaccuc

SEQ ID NO: 379193 - RNA, 19 nt, Human
cucaagacacaguacugau

SEQ ID NO: 379194 - RNA, 19 nt, Human
cugggcaauaaaugaagac

SEQ ID NO: 379195 - RNA, 20 nt, Human
cugggcaauaaaugaagacu

SEQ ID NO: 379196 - RNA, 25 nt, Human
cuucuuugcuuuuguccuuuaggaa

SEQ ID NO: 379197 - RNA, 18 nt, Human
gagguggguaugaaggag

SEQ ID NO: 379198 - RNA, 20 nt, Human
gccacucuccauuaagaauc

SEQ ID NO: 379199 - RNA, 22 nt, Human
gccaucuuaugucaguagaucc

SEQ ID NO: 379200 - RNA, 20 nt, Human
gccgcgccuccagcuccagc

SEQ ID NO: 379201 - RNA, 19 nt, Human
gccucaagggggcauggag

SEQ ID NO: 379202 - RNA, 21 nt, Human
gccuccagcuccagccuccgc

SEQ ID NO: 379203 - RNA, 19 nt, Human
gggcaaaguuuauuuucua

SEQ ID NO: 379204 - RNA, 21 nt, Human
uaaaaucucaagacacaguac

SEQ ID NO: 379205 - RNA, 22 nt, Human
uaaagacacugaauucccacca

SEQ ID NO: 379206 - RNA, 23 nt, Human
uaaaugaagacuuuggccuguaa

SEQ ID NO: 379207 - RNA, 22 nt, Human
uacaaguuuucaagaaccuauu

SEQ ID NO: 379208 - RNA, 21 nt, Human
uacccuggcugaaaagugaga

SEQ ID NO: 379209 - RNA, 19 nt, Human
uagaacaaugaaaacucca

SEQ ID NO: 379210 - RNA, 24 nt, Human
uagccaguccucaaauaacugccu

SEQ ID NO: 379211 - RNA, 22 nt, Human
uccccaaauggacuuaugaucc

SEQ ID NO: 379212 - RNA, 20 nt, Human
uccgcgcgccuccccggccg

SEQ ID NO: 379213 - RNA, 21 nt, Human
uccgcgcgccuccccggccgc

SEQ ID NO: 379214 - RNA, 22 nt, Human
uccgcgcgccuccccggccgca

SEQ ID NO: 379215 - RNA, 18 nt, Human
uccuuuccuuguaacaac

SEQ ID NO: 379216 - RNA, 19 nt, Human
ucucuuguuuauuuaaauu

SEQ ID NO: 379217 - RNA, 24 nt, Human
ugaaauagccacucuccauuaaga

SEQ ID NO: 379218 - RNA, 19 nt, Human
ugaccgacuuguucugaug

SEQ ID NO: 379219 - RNA, 19 nt, Human
ugauucuaagaggaugugc

SEQ ID NO: 379220 - RNA, 22 nt, Human
ugcaagacuuuuuuuuagccuu

SEQ ID NO: 379221 - RNA, 24 nt, Human
uguaacaacugaugagaaaaagua

SEQ ID NO: 379222 - RNA, 18 nt, Human
uguugcuaaaugacuguu

SEQ ID NO: 379223 - RNA, 21 nt, Human
uguuuauuuaaauuugggagc

SEQ ID NO: 379224 - RNA, 24 nt, Human
uucuaugucagccugucaguccac

SEQ ID NO: 379225 - RNA, 26 nt, Human
uugcaugggucuuuaaauggacuggu

SEQ ID NO: 379226 - RNA, 25 nt, Human
uugugguauaaagguuggguuuaca

SEQ ID NO: 379227 - RNA, 24 nt, Human
uuuaaaauuuucuacuuuuaauuu

SEQ ID NO: 379228 - RNA, 26 nt, Human
uuucaagaaccuauugacaagguuaa

SEQ ID NO: 379229 - RNA, 19 nt, Human
uuugugguauaaagguugg

SEQ ID NO: 379230 - RNA, 25 nt, Human
aaaaacagugaaaccaagacacuau

SEQ ID NO: 379231 - RNA, 25 nt, Human
aaaaccaaaaaaacaaacaaaaaac

SEQ ID NO: 379232 - RNA, 19 nt, Human
aaaaggggcgaagccagaa

SEQ ID NO: 379233 - RNA, 21 nt, Human
aaacaaaaaaccccucuggga

SEQ ID NO: 379234 - RNA, 22 nt, Human
aaacaaaaacagugaaaccaaa

SEQ ID NO: 379235 - RNA, 24 nt, Human
aaacaaaaacagugaaaccaagac

SEQ ID NO: 379236 - RNA, 22 nt, Human
aaacaaaaagaaaaucaaaacc

SEQ ID NO: 379237 - RNA, 24 nt, Human
aaacaaaaagaaaaucaaaaccaa

SEQ ID NO: 379238 - RNA, 25 nt, Human
aaacaaaaagaaaaucaaaaccaaa

SEQ ID NO: 379239 - RNA, 25 nt, Human
aaacaaacaaaaaaccccucuggga

SEQ ID NO: 379240 - RNA, 23 nt, Human
aaacagugaaaccaagacacuau

SEQ ID NO: 379241 - RNA, 18 nt, Human
aaaccaaauaaaauuuac

SEQ ID NO: 379242 - RNA, 24 nt, Human
aacaaaaagaaaaucaaaaccaaa

SEQ ID NO: 379243 - RNA, 22 nt, Human
aacaagacaaaaauaugaacag

SEQ ID NO: 379244 - RNA, 20 nt, Human
aaccaaaaaaacaaacaaaa

SEQ ID NO: 379245 - RNA, 24 nt, Human
aaccaagacacuauuccaaagucu

SEQ ID NO: 379246 - RNA, 19 nt, Human
aaccuagcaauuauuacaa

SEQ ID NO: 379247 - RNA, 25 nt, Human
aagaaaaacaaaaagaaaaucaaaa

SEQ ID NO: 379248 - RNA, 23 nt, Human
aagaaagaaaaacaaaaagaaaa

SEQ ID NO: 379249 - RNA, 22 nt, Human
aagaagaaagaaaaacaaaaag

SEQ ID NO: 379250 - RNA, 23 nt, Human
aagaagaagaaagaaaaacaaaa

SEQ ID NO: 379251 - RNA, 25 nt, Human
aagaagaagaaagaaaaacaaaaag

SEQ ID NO: 379252 - RNA, 27 nt, Human
aagaagaagaaagaaaaacaaaaagaa

SEQ ID NO: 379253 - RNA, 20 nt, Human
aauacacuguggacaccuuu

SEQ ID NO: 379254 - RNA, 22 nt, Human
aaucaaaaccaaaaaaacaaac

SEQ ID NO: 379255 - RNA, 22 nt, Human
aaugaaaaaaauaagaagaaga

SEQ ID NO: 379256 - RNA, 29 nt, Human
acaaaaaaaaaaucaaaacaaaaacaguu

SEQ ID NO: 379257 - RNA, 19 nt, Human
acaaaaagaaaaucaaaac

SEQ ID NO: 379258 - RNA, 22 nt, Human
acaaacauuucccccuaagacu

SEQ ID NO: 379259 - RNA, 23 nt, Human
acaagacaaaaauaugaacagag

SEQ ID NO: 379260 - RNA, 31 nt, Human
accaaaaaaacaaacaaaaaaccccucuggg

SEQ ID NO: 379261 - RNA, 24 nt, Human
accaaauaaaauuuacaucauaac

SEQ ID NO: 379262 - RNA, 21 nt, Human
agaagaaagaaaaacaaaaag

SEQ ID NO: 379263 - RNA, 19 nt, Human
agacaaaaauaugaacaga

SEQ ID NO: 379264 - RNA, 25 nt, Human
agcugcagcagcugcagccacagcc

SEQ ID NO: 379265 - RNA, 21 nt, Human
aggaaccauaaaaaugccaac

SEQ ID NO: 379266 - RNA, 20 nt, Human
aucaaaacaaaaaaaaaauc

SEQ ID NO: 379267 - RNA, 26 nt, Human
aucaaaacaaaaaaaaaaucaaaaca

SEQ ID NO: 379268 - RNA, 30 nt, Human
aucaaaaccaaaaaaacaaacaaaaaaccc

SEQ ID NO: 379269 - RNA, 24 nt, Human
caaaaacagugaaaccaagacacu

SEQ ID NO: 379270 - RNA, 24 nt, Human
caaaaagaaaaucaaaaccaaaaa

SEQ ID NO: 379271 - RNA, 25 nt, Human
caaaacaaaaaaaaaaucaaaacaa

SEQ ID NO: 379272 - RNA, 18 nt, Human
caagacaaaaauaugaac

SEQ ID NO: 379273 - RNA, 24 nt, Human
caagacaaaaauaugaacagagcc

SEQ ID NO: 379274 - RNA, 23 nt, Human
caauguaaauccaugcccccuuu

SEQ ID NO: 379275 - RNA, 21 nt, Human
cagcugcagccacagccuuuu

SEQ ID NO: 379276 - RNA, 21 nt, Human
cagucuccuucuucggcucug

SEQ ID NO: 379277 - RNA, 26 nt, Human
caucauaacaaacauuucccccuaag

SEQ ID NO: 379278 - RNA, 23 nt, Human
cauuucccccuaagacugugggg

SEQ ID NO: 379279 - RNA, 26 nt, Human
cccacaguguccuggcaaacaacaug

SEQ ID NO: 379280 - RNA, 26 nt, Human
ccccuaagacuguggggacacuuggg

SEQ ID NO: 379281 - RNA, 22 nt, Human
cuagagcucgaauccugauuca

SEQ ID NO: 379282 - RNA, 18 nt, Human
cuccuucuucggcucugg

SEQ ID NO: 379283 - RNA, 21 nt, Human
cugcagccacagccuuuuccu

SEQ ID NO: 379284 - RNA, 18 nt, Human
cuuucauuuucugucuca

SEQ ID NO: 379285 - RNA, 19 nt, Human
gaaaaaaauaagaagaaga

SEQ ID NO: 379286 - RNA, 29 nt, Human
gaccauacaaggucagaagcauaacuuaa

SEQ ID NO: 379287 - RNA, 22 nt, Human
gcagcugcagccacagccuuuu

SEQ ID NO: 379288 - RNA, 21 nt, Human
gcucuggcgcugccacuggcu

SEQ ID NO: 379289 - RNA, 22 nt, Human
gcugcagccacagccuuuuccu

SEQ ID NO: 379290 - RNA, 24 nt, Human
gcugcagccacagccuuuuccuuc

SEQ ID NO: 379291 - RNA, 20 nt, Human
gcugccacuggcucuuccug

SEQ ID NO: 379292 - RNA, 24 nt, Human
ggaacaaaaggggcgaagccagaa

SEQ ID NO: 379293 - RNA, 19 nt, Human
gggaacaaaaggggcgaag

SEQ ID NO: 379294 - RNA, 28 nt, Human
ggucacagcagcugcagcagcugcagcc

SEQ ID NO: 379295 - RNA, 24 nt, Human
uaaaaaaaaucaaaacaaaaaaaa

SEQ ID NO: 379296 - RNA, 22 nt, Human
uaaacccccuuuuuuaaaaagg

SEQ ID NO: 379297 - RNA, 22 nt, Human
uaacaaacauuucccccuaaga

SEQ ID NO: 379298 - RNA, 22 nt, Human
uaacaaacauuucccccuaaga

SEQ ID NO: 379299 - RNA, 22 nt, Human
uaagaagaagaaagaaaaacaa

SEQ ID NO: 379300 - RNA, 28 nt, Human
uaagaagaagaaagaaaaacaaaaagaa

SEQ ID NO: 379301 - RNA, 19 nt, Human
uaauacacuguggacaccu

SEQ ID NO: 379302 - RNA, 20 nt, Human
uaauacacuguggacaccuu

SEQ ID NO: 379303 - RNA, 20 nt, Human
ucagcagagacuccacaggc

SEQ ID NO: 379304 - RNA, 18 nt, Human
ucagucuccuucuucggc

SEQ ID NO: 379305 - RNA, 20 nt, Human
ucccccuaagacugugggga

SEQ ID NO: 379306 - RNA, 23 nt, Human
ucucagggccuuuucacgcaggu

SEQ ID NO: 379307 - RNA, 19 nt, Human
ucuccuucuucggcucugg

SEQ ID NO: 379308 - RNA, 22 nt, Human
ucuuguguuuuuugugcuucuu

SEQ ID NO: 379309 - RNA, 22 nt, Human
ugaaaaaaauaagaagaagaaa

SEQ ID NO: 379310 - RNA, 25 nt, Human
ugaaaaaaauaagaagaagaaagaa

SEQ ID NO: 379311 - RNA, 21 nt, Human
ugaaaccaagacacuauucca

SEQ ID NO: 379312 - RNA, 25 nt, Human
ugaaaccaagacacuauuccaaagu

SEQ ID NO: 379313 - RNA, 19 nt, Human
uggcagcugcaauggcugc

SEQ ID NO: 379314 - RNA, 20 nt, Human
uuccaaagucugggcccuuc

SEQ ID NO: 379315 - RNA, 23 nt, Human
uucuagggcauuuaaaggaaccc

SEQ ID NO: 379316 - RNA, 21 nt, Human
uucuucggcucuggcgcugcc

SEQ ID NO: 379317 - RNA, 21 nt, Human
uuguggcagcugcaauggcug

SEQ ID NO: 379318 - RNA, 18 nt, Human
uuuccuucuuguguuuuu

SEQ ID NO: 379319 - RNA, 25 nt, Human
aaaaaaccaaaaugccuuuaagaaa

SEQ ID NO: 379320 - RNA, 21 nt, Human
aaaaugccuuuaagaaacaug

SEQ ID NO: 379321 - RNA, 18 nt, Human
aaaccccccagaacacau

SEQ ID NO: 379322 - RNA, 22 nt, Human
aaagaaaaaaaaaaggggaggg

SEQ ID NO: 379323 - RNA, 18 nt, Human
aaaguuggggggaggggu

SEQ ID NO: 379324 - RNA, 22 nt, Human
aacaaagaaaaaaaaaagggga

SEQ ID NO: 379325 - RNA, 19 nt, Human
aacucccaucugcauuccc

SEQ ID NO: 379326 - RNA, 21 nt, Human
aacuguauccuccccuccccc

SEQ ID NO: 379327 - RNA, 23 nt, Human
aacuguauccuccccucccccaa

SEQ ID NO: 379328 - RNA, 24 nt, Human
acaaagaaaaaaaaaaggggaggg

SEQ ID NO: 379329 - RNA, 25 nt, Human
acaaagaaaaaaaaaaggggaggga

SEQ ID NO: 379330 - RNA, 26 nt, Human
acaggaacaaagaaaaaaaaaagggg

SEQ ID NO: 379331 - RNA, 19 nt, Human
accaccaucacaaucaccc

SEQ ID NO: 379332 - RNA, 19 nt, Human
acccucccacggcucugcu

SEQ ID NO: 379333 - RNA, 19 nt, Human
agaaaaaaaaaaggggagg

SEQ ID NO: 379334 - RNA, 20 nt, Human
agaaaaaaaaaaggggaggg

SEQ ID NO: 379335 - RNA, 22 nt, Human
agaacacaugaaccaggaagaa

SEQ ID NO: 379336 - RNA, 19 nt, Human
agacaaggacccucccacg

SEQ ID NO: 379337 - RNA, 22 nt, Human
agggaccaacuaauuccaacuc

SEQ ID NO: 379338 - RNA, 25 nt, Human
aggggagggaaagggagcccuccau

SEQ ID NO: 379339 - RNA, 23 nt, Human
aucugcauucccucccaccccaa

SEQ ID NO: 379340 - RNA, 24 nt, Human
caaccaccaucacaaucaccccug

SEQ ID NO: 379341 - RNA, 23 nt, Human
caacuaauuccaacuccugcccc

SEQ ID NO: 379342 - RNA, 21 nt, Human
caagaacaccuuauacaaccu

SEQ ID NO: 379343 - RNA, 28 nt, Human
caagaacaccuuauacaaccuccagucc

SEQ ID NO: 379344 - RNA, 21 nt, Human
caccgcucccgccgccuccgc

SEQ ID NO: 379345 - RNA, 18 nt, Human
caccuuauacaaccucca

SEQ ID NO: 379346 - RNA, 21 nt, Human
caccuuauacaaccuccaguc

SEQ ID NO: 379347 - RNA, 22 nt, Human
caccuuauacaaccuccagucc

SEQ ID NO: 379348 - RNA, 20 nt, Human
cacucgcaccccgccugggc

SEQ ID NO: 379349 - RNA, 18 nt, Human
caucacaaucaccccugg

SEQ ID NO: 379350 - RNA, 23 nt, Human
cauucccucccaccccaaacccc

SEQ ID NO: 379351 - RNA, 24 nt, Human
ccaaaccccccagaacacaugaac

SEQ ID NO: 379352 - RNA, 23 nt, Human
ccaaccaccaucacaaucacccc

SEQ ID NO: 379353 - RNA, 25 nt, Human
ccaacucccaucugcauucccuccc

SEQ ID NO: 379354 - RNA, 18 nt, Human
ccaccccaaaccccccag

SEQ ID NO: 379355 - RNA, 18 nt, Human
ccaugccucccuggcccu

SEQ ID NO: 379356 - RNA, 21 nt, Human
cccaaaccccccagaacacau

SEQ ID NO: 379357 - RNA, 24 nt, Human
cccaccccaaaccccccagaacac

SEQ ID NO: 379358 - RNA, 20 nt, Human
cccaucugcauucccuccca

SEQ ID NO: 379359 - RNA, 21 nt, Human
cccccagaacacaugaaccag

SEQ ID NO: 379360 - RNA, 22 nt, Human
cccucccccaacucccaucugc

SEQ ID NO: 379361 - RNA, 21 nt, Human
ccgccgccuccgcccgccgcc

SEQ ID NO: 379362 - RNA, 22 nt, Human
ccgccgccuccgcccgccgccu

SEQ ID NO: 379363 - RNA, 26 nt, Human
ccgccgccuccgcccgccgccuccga

SEQ ID NO: 379364 - RNA, 24 nt, Human
ccgccuccgcccgccgccuccccc

SEQ ID NO: 379365 - RNA, 22 nt, Human
ccgccuccgcccgccgccuccg

SEQ ID NO: 379366 - RNA, 24 nt, Human
ccgccucgccucgccgguccgccc

SEQ ID NO: 379367 - RNA, 21 nt, Human
ccgcucccgccgccuccgccc

SEQ ID NO: 379368 - RNA, 24 nt, Human
ccgcucccgccgccuccgcccgcc

SEQ ID NO: 379369 - RNA, 19 nt, Human
ccgcucccgccgccuccgg

SEQ ID NO: 379370 - RNA, 23 nt, Human
ccgcugcucgagcucccgagucc

SEQ ID NO: 379371 - RNA, 23 nt, Human
ccucaggggccgcaacgggcucc

SEQ ID NO: 379372 - RNA, 20 nt, Human
ccuccagucccaaccaccau

SEQ ID NO: 379373 - RNA, 27 nt, Human
ccuccagucccaaccaccaucacaauc

SEQ ID NO: 379374 - RNA, 23 nt, Human
ccucccaccccaaaccccccaga

SEQ ID NO: 379375 - RNA, 25 nt, Human
ccucccaccccaaaccccccagaac

SEQ ID NO: 379376 - RNA, 21 nt, Human
ccugaacuguauccuccccuc

SEQ ID NO: 379377 - RNA, 20 nt, Human
ccuggcccugacuccaggcc

SEQ ID NO: 379378 - RNA, 24 nt, Human
cgagcucccgagucccucgggccu

SEQ ID NO: 379379 - RNA, 21 nt, Human
cucccaccccaaaccccccag

SEQ ID NO: 379380 - RNA, 18 nt, Human
cuccccucccccaacucc

SEQ ID NO: 379381 - RNA, 20 nt, Human
cucccuggcccugacuccag

SEQ ID NO: 379382 - RNA, 21 nt, Human
cuucuggauacaaguggggcc

SEQ ID NO: 379383 - RNA, 19 nt, Human
cuuuaagaaacaugaaaag

SEQ ID NO: 379384 - RNA, 22 nt, Human
gagcagacaaggacccucccac

SEQ ID NO: 379385 - RNA, 20 nt, Human
gcaacgggcuccgacugcgc

SEQ ID NO: 379386 - RNA, 18 nt, Human
gccaagguucaaaggaga

SEQ ID NO: 379387 - RNA, 20 nt, Human
gcucuugcuguacagauuuu

SEQ ID NO: 379388 - RNA, 21 nt, Human
ggaagaagggacacuccuugu

SEQ ID NO: 379389 - RNA, 21 nt, Human
ggaccaacuaauuccaacucc

SEQ ID NO: 379390 - RNA, 25 nt, Human
gggagcccuccauccaagggcugcc

SEQ ID NO: 379391 - RNA, 25 nt, Human
gggccaugccucccuggcccugacu

SEQ ID NO: 379392 - RNA, 19 nt, Human
ggggacaguagggaccaac

SEQ ID NO: 379393 - RNA, 20 nt, Human
ggggggagggguucacaacc

SEQ ID NO: 379394 - RNA, 22 nt, Human
uauccuccccucccccaacucc

SEQ ID NO: 379395 - RNA, 21 nt, Human
ucacaggaacaaagaaaaaaa

SEQ ID NO: 379396 - RNA, 20 nt, Human
ucccaccccaaaccccccag

SEQ ID NO: 379397 - RNA, 22 nt, Human
ucccaccccaaaccccccagaa

SEQ ID NO: 379398 - RNA, 24 nt, Human
ucccccaacucccaucugcauucc

SEQ ID NO: 379399 - RNA, 24 nt, Human
ucccucccaccccaaaccccccag

SEQ ID NO: 379400 - RNA, 22 nt, Human
ucccuggcccugacuccaggcu

SEQ ID NO: 379401 - RNA, 23 nt, Human
uccgcccgccucagccgacgccg

SEQ ID NO: 379402 - RNA, 19 nt, Human
uccucaggggccgcaacgg

SEQ ID NO: 379403 - RNA, 21 nt, Human
uccugccccuuccuuccaaga

SEQ ID NO: 379404 - RNA, 19 nt, Human
ucuugccgccgccgcugcu

SEQ ID NO: 379405 - RNA, 23 nt, Human
ucuugccgccgccgcugcucgag

SEQ ID NO: 379406 - RNA, 20 nt, Human
ugaaaaguuggggggagggg

SEQ ID NO: 379407 - RNA, 22 nt, Human
ugaaaaguuggggggagggguu

SEQ ID NO: 379408 - RNA, 23 nt, Human
ugccaagguucaaaggagagcag

SEQ ID NO: 379409 - RNA, 23 nt, Human
ugccccuuccuuccaagaacacc

SEQ ID NO: 379410 - RNA, 22 nt, Human
ugcuggggaagaagggacacuc

SEQ ID NO: 379411 - RNA, 19 nt, Human
uggcuccagagcauugggu

SEQ ID NO: 379412 - RNA, 22 nt, Human
ugggguauccugaacuguaucc

SEQ ID NO: 379413 - RNA, 24 nt, Human
uguacagauuuuaaaaaaccaaaa

SEQ ID NO: 379414 - RNA, 22 nt, Human
uucaaaggagagcagacaagga

SEQ ID NO: 379415 - RNA, 24 nt, Human
uugcuguacagauuuuaaaaaacc

SEQ ID NO: 379416 - RNA, 18 nt, Human
aaaaggagcaucuaggua

SEQ ID NO: 379417 - RNA, 18 nt, Human
aaacaauauugaaacuaa

SEQ ID NO: 379418 - RNA, 21 nt, Human
aaacuuauuuuacuauccaaa

SEQ ID NO: 379419 - RNA, 20 nt, Human
aacuugcauuucuccgcccu

SEQ ID NO: 379420 - RNA, 19 nt, Human
aaggugccagaguucgaaa

SEQ ID NO: 379421 - RNA, 19 nt, Human
aggugccagaguucgaaac

SEQ ID NO: 379422 - RNA, 22 nt, Human
ccgcccucaacacccccucaac

SEQ ID NO: 379423 - RNA, 23 nt, Human
cgacaaaauugaaaggugccaga

SEQ ID NO: 379424 - RNA, 20 nt, Human
cuuuauuagccagagaaaag

SEQ ID NO: 379425 - RNA, 21 nt, Human
uaggucuuuguagccaauguu

SEQ ID NO: 379426 - RNA, 21 nt, Human
ucaaaaacaaggagagugcga

SEQ ID NO: 379427 - RNA, 19 nt, Human
uccaaaacucacuucuacc

SEQ ID NO: 379428 - RNA, 21 nt, Human
uccgcccucaacacccccuca

SEQ ID NO: 379429 - RNA, 21 nt, Human
ucuuuguagccaauguuaccc

SEQ ID NO: 379430 - RNA, 24 nt, Human
uuuacuauccaaaacucacuucua

SEQ ID NO: 379431 - RNA, 20 nt, Human
aaaaaaaaaaacaaagaaca

SEQ ID NO: 379432 - RNA, 20 nt, Human
aaaaaaaaacaaagaacaaa

SEQ ID NO: 379433 - RNA, 26 nt, Human
aaaaaaaaacaaagaacaaaaaacaa

SEQ ID NO: 379434 - RNA, 25 nt, Human
aaaaaaaacaaagaacaaaaaacaa

SEQ ID NO: 379435 - RNA, 20 nt, Human
aaaaaaaccuguucugaccu

SEQ ID NO: 379436 - RNA, 26 nt, Human
aaaaaacaaagaacaaaaaacaaaaa

SEQ ID NO: 379437 - RNA, 22 nt, Human
aaaaacagauagaauaaaccuc

SEQ ID NO: 379438 - RNA, 24 nt, Human
aaaacaaagaacaaaaaacaaaaa

SEQ ID NO: 379439 - RNA, 27 nt, Human
aaaacaaagaacaaaaaacaaaaacaa

SEQ ID NO: 379440 - RNA, 21 nt, Human
aaaacaaucaagcaucuacca

SEQ ID NO: 379441 - RNA, 20 nt, Human
aaacacacaaacacacacuc

SEQ ID NO: 379442 - RNA, 20 nt, Human
aaacagccacuuauccacaa

SEQ ID NO: 379443 - RNA, 20 nt, Human
aaagccuccucagauccaac

SEQ ID NO: 379444 - RNA, 20 nt, Human
aaauaaccgugguuagaaau

SEQ ID NO: 379445 - RNA, 21 nt, Human
aaauaaugauuaaaauaugcc

SEQ ID NO: 379446 - RNA, 24 nt, Human
aacugcuugaaccugggaggcgga

SEQ ID NO: 379447 - RNA, 23 nt, Human
aagagcaagacuccaucucaaaa

SEQ ID NO: 379448 - RNA, 19 nt, Human
acaaaaaacaaaaacaaaa

SEQ ID NO: 379449 - RNA, 20 nt, Human
acaaaaacaaaaaaaccugg

SEQ ID NO: 379450 - RNA, 22 nt, Human
acaaucaagcaucuaccaugcu

SEQ ID NO: 379451 - RNA, 23 nt, Human
acaccauuuugagaccaaaacaa

SEQ ID NO: 379452 - RNA, 23 nt, Human
acagucucaaauaaugauuaaaa

SEQ ID NO: 379453 - RNA, 23 nt, Human
acagugcugaggugacaauaugg

SEQ ID NO: 379454 - RNA, 22 nt, Human
accgccuugcauauucaccaca

SEQ ID NO: 379455 - RNA, 21 nt, Human
accuugaaacacacaaacaca

SEQ ID NO: 379456 - RNA, 25 nt, Human
acuaaaccacaaaggcugcuuacug

SEQ ID NO: 379457 - RNA, 24 nt, Human
acuccaucucaaaaaaaaaaacaa

SEQ ID NO: 379458 - RNA, 18 nt, Human
acugcacuccagccuggg

SEQ ID NO: 379459 - RNA, 19 nt, Human
acugcacuccagccugggc

SEQ ID NO: 379460 - RNA, 25 nt, Human
acugcacuccagccugggcgacaag

SEQ ID NO: 379461 - RNA, 24 nt, Human
agaacaaaaaacaaaaacaaaaaa

SEQ ID NO: 379462 - RNA, 29 nt, Human
agaacaaaaaacaaaaacaaaagggaccc

SEQ ID NO: 379463 - RNA, 25 nt, Human
agccugggcgacaagagcaagacuc

SEQ ID NO: 379464 - RNA, 22 nt, Human
aggcaggagaacugcuugaacc

SEQ ID NO: 379465 - RNA, 24 nt, Human
aggcaggagaacugcuugaaccug

SEQ ID NO: 379466 - RNA, 20 nt, Human
aggcggagguugcagugagc

SEQ ID NO: 379467 - RNA, 24 nt, Human
aggcggagguugcagugagcugag

SEQ ID NO: 379468 - RNA, 24 nt, Human
aggcugaggcaggagaacugcuug

SEQ ID NO: 379469 - RNA, 20 nt, Human
agugcugaggugacaauaug

SEQ ID NO: 379470 - RNA, 19 nt, Human
auaaucaggcacaggacag

SEQ ID NO: 379471 - RNA, 21 nt, Human
aucuagaguagaaaugugaaa

SEQ ID NO: 379472 - RNA, 22 nt, Human
augaaacagccacuuauccaca

SEQ ID NO: 379473 - RNA, 19 nt, Human
augcuguccagugcguagu

SEQ ID NO: 379474 - RNA, 20 nt, Human
auggugugcuuugucuuccc

SEQ ID NO: 379475 - RNA, 24 nt, Human
auugcgccacugcacuccagccug

SEQ ID NO: 379476 - RNA, 26 nt, Human
caaaaaaaaaaacaaagaacaaaaaa

SEQ ID NO: 379477 - RNA, 25 nt, Human
caaaaacaaaaaaaccuguucugac

SEQ ID NO: 379478 - RNA, 23 nt, Human
caaagaacaaaaaacaaaaacaa

SEQ ID NO: 379479 - RNA, 19 nt, Human
caacacaaaguaauucuua

SEQ ID NO: 379480 - RNA, 21 nt, Human
caaccaacauaaaaaagggaa

SEQ ID NO: 379481 - RNA, 23 nt, Human
caaccucggugcuuuaaaaacag

SEQ ID NO: 379482 - RNA, 21 nt, Human
caagacuccaucucaaaaaaa

SEQ ID NO: 379483 - RNA, 24 nt, Human
caauucaauuauaaagaauacauc

SEQ ID NO: 379484 - RNA, 23 nt, Human
cacagugcugaggugacaauaug

SEQ ID NO: 379485 - RNA, 24 nt, Human
cacuccagccugggcgacaagagc

SEQ ID NO: 379486 - RNA, 19 nt, Human
cacugcacuccagccuggg

SEQ ID NO: 379487 - RNA, 21 nt, Human
cacugcacuccagccugggcg

SEQ ID NO: 379488 - RNA, 22 nt, Human
cacugcacuccagccugggcga

SEQ ID NO: 379489 - RNA, 23 nt, Human
cacugcacuccagccugggcgac

SEQ ID NO: 379490 - RNA, 24 nt, Human
cacugcacuccagccugggcgaca

SEQ ID NO: 379491 - RNA, 18 nt, Human
cagauccaacacaaagua

SEQ ID NO: 379492 - RNA, 23 nt, Human
caucucaaaaaaaaaaacaaaga

SEQ ID NO: 379493 - RNA, 20 nt, Human
ccacugcacuccagccuggg

SEQ ID NO: 379494 - RNA, 20 nt, Human
ccacugcacuccagccuggg

SEQ ID NO: 379495 - RNA, 21 nt, Human
ccacugcacuccagccugggc

SEQ ID NO: 379496 - RNA, 21 nt, Human
ccacugcacuccagccugggc

SEQ ID NO: 379497 - RNA, 23 nt, Human
ccacugcacuccagccugggcga

SEQ ID NO: 379498 - RNA, 24 nt, Human
ccacugcacuccagccugggcgac

SEQ ID NO: 379499 - RNA, 23 nt, Human
ccaucucaaaaaaaaaaacaaag

SEQ ID NO: 379500 - RNA, 19 nt, Human
cccacugaaauuccuccuu

SEQ ID NO: 379501 - RNA, 19 nt, Human
ccugggaggcggagguugc

SEQ ID NO: 379502 - RNA, 23 nt, Human
ccugggcgacaagagcaagacuc

SEQ ID NO: 379503 - RNA, 21 nt, Human
cgacaagagcaagacuccauc

SEQ ID NO: 379504 - RNA, 26 nt, Human
cgccacugcacuccagccugggcgac

SEQ ID NO: 379505 - RNA, 25 nt, Human
cuaaaccacaaaggcugcuuacuga

SEQ ID NO: 379506 - RNA, 19 nt, Human
cuccaucucaaaaaaaaaa

SEQ ID NO: 379507 - RNA, 23 nt, Human
cugaccuugaaacacacaaacac

SEQ ID NO: 379508 - RNA, 24 nt, Human
cugaccuugaaacacacaaacaca

SEQ ID NO: 379509 - RNA, 21 nt, Human
cugcuguaaaaaguguacauu

SEQ ID NO: 379510 - RNA, 24 nt, Human
cugcuugaaccugggaggcggagg

SEQ ID NO: 379511 - RNA, 19 nt, Human
cuugaaccugggaggcgga

SEQ ID NO: 379512 - RNA, 21 nt, Human
cuugcauauucaccacaugaa

SEQ ID NO: 379513 - RNA, 20 nt, Human
cuuuuauaacuaaaccacaa

SEQ ID NO: 379514 - RNA, 23 nt, Human
gagauugcgccacugcacuccag

SEQ ID NO: 379515 - RNA, 21 nt, Human
gagguugcagugagcugagau

SEQ ID NO: 379516 - RNA, 23 nt, Human
gagguugcagugagcugagauug

SEQ ID NO: 379517 - RNA, 22 nt, Human
gccacugcacuccagccugggc

SEQ ID NO: 379518 - RNA, 24 nt, Human
gccacugcacuccagccugggcga

SEQ ID NO: 379519 - RNA, 22 nt, Human
ggagguugcagugagcugagau

SEQ ID NO: 379520 - RNA, 24 nt, Human
ggagguugcagugagcugagauug

SEQ ID NO: 379521 - RNA, 24 nt, Human
gggaaaaaccaauucaauuauaaa

SEQ ID NO: 379522 - RNA, 20 nt, Human
gggcuagauguuuucagauu

SEQ ID NO: 379523 - RNA, 19 nt, Human
guugcagugagcugagauu

SEQ ID NO: 379524 - RNA, 21 nt, Human
uaaaauaaucaggcacaggaa

SEQ ID NO: 379525 - RNA, 21 nt, Human
uaaacauacaaagcuguucac

SEQ ID NO: 379526 - RNA, 21 nt, Human
uaccuuugggcuagauguuuu

SEQ ID NO: 379527 - RNA, 26 nt, Human
uacuaaagccuuuuauaacuaaacca

SEQ ID NO: 379528 - RNA, 18 nt, Human
uagaauaaaccucaucaa

SEQ ID NO: 379529 - RNA, 24 nt, Human
uagaguagaaaugugaaaucaaga

SEQ ID NO: 379530 - RNA, 19 nt, Human
uagcuaaaauaaucaggca

SEQ ID NO: 379531 - RNA, 24 nt, Human
uauaacuaaaccacaaaggcugcu

SEQ ID NO: 379532 - RNA, 22 nt, Human
uauagcacaccauuuugagacc

SEQ ID NO: 379533 - RNA, 22 nt, Human
ucaaaaaaaaaaacaaagaaca

SEQ ID NO: 379534 - RNA, 19 nt, Human
uccaaaaacuagauggaau

SEQ ID NO: 379535 - RNA, 27 nt, Human
uccacaaaacuggaaggcuuuuaaaaa

SEQ ID NO: 379536 - RNA, 19 nt, Human
uccagccugggcgacaaga

SEQ ID NO: 379537 - RNA, 21 nt, Human
uccaucucaaaaaaaaaaaca

SEQ ID NO: 379538 - RNA, 19 nt, Human
ucccucuuccccuuacaaa

SEQ ID NO: 379539 - RNA, 23 nt, Human
ucccuuacccuucauaaacauac

SEQ ID NO: 379540 - RNA, 20 nt, Human
uccucuaugagaacagaaca

SEQ ID NO: 379541 - RNA, 23 nt, Human
ucucucucucauacacacacaga

SEQ ID NO: 379542 - RNA, 23 nt, Human
ucuuauugccucacauuuuaaaa

SEQ ID NO: 379543 - RNA, 24 nt, Human
ugaaccugggaggcggagguugca

SEQ ID NO: 379544 - RNA, 20 nt, Human
ugagaacagaacaguggacu

SEQ ID NO: 379545 - RNA, 21 nt, Human
ugagaccaaaacaaucaagcu

SEQ ID NO: 379546 - RNA, 22 nt, Human
ugagcugagauugcgccacugc

SEQ ID NO: 379547 - RNA, 24 nt, Human
ugaggcaggagaacugcuugaacc

SEQ ID NO: 379548 - RNA, 25 nt, Human
ugaggcaggagaacugcuugaaccu

SEQ ID NO: 379549 - RNA, 18 nt, Human
ugcuguccagugcguagu

SEQ ID NO: 379550 - RNA, 20 nt, Human
uggaaggcuuuuaaaaaaug

SEQ ID NO: 379551 - RNA, 21 nt, Human
uggaaggcuuuuaaaaaaugu

SEQ ID NO: 379552 - RNA, 29 nt, Human
ugggaggcggagguugcagugacaacggu

SEQ ID NO: 379553 - RNA, 24 nt, Human
ugggaggcggagguugcagugagc

SEQ ID NO: 379554 - RNA, 23 nt, Human
ugugaaaucaagaguauuuuuga

SEQ ID NO: 379555 - RNA, 22 nt, Human
uguuauaucaaccaacauaaaa

SEQ ID NO: 379556 - RNA, 22 nt, Human
uguugagaacaguauguucugc

SEQ ID NO: 379557 - RNA, 18 nt, Human
uuccaguuagacguggga

SEQ ID NO: 379558 - RNA, 24 nt, Human
uugaaccugggaggcggagguugc

SEQ ID NO: 379559 - RNA, 19 nt, Human
uugcagugagcugagauug

SEQ ID NO: 379560 - RNA, 20 nt, Human
uugcagugagcugagauugc

SEQ ID NO: 379561 - RNA, 22 nt, Human
uugcagugagcugagauugcgc

SEQ ID NO: 379562 - RNA, 23 nt, Human
uugcgccacugcacuccagccug

SEQ ID NO: 379563 - RNA, 24 nt, Human
uuuaccaaagccuccucagaucca

SEQ ID NO: 379564 - RNA, 19 nt, Human
uuucccucuuccccuuaca

SEQ ID NO: 379565 - RNA, 22 nt, Human
aagcggugccaauggggagagu

SEQ ID NO: 379566 - RNA, 31 nt, Human
agaaaaaaaaaacuuaagucccauaaagaag

SEQ ID NO: 379567 - RNA, 18 nt, Human
agacaaaggugguucaga

SEQ ID NO: 379568 - RNA, 22 nt, Human
aggcaggguuuguggcugagaa

SEQ ID NO: 379569 - RNA, 19 nt, Human
cacaaagccaucuggggca

SEQ ID NO: 379570 - RNA, 20 nt, Human
ccauaaagaaggcagaaaca

SEQ ID NO: 379571 - RNA, 19 nt, Human
ccucugcagagacaaaggu

SEQ ID NO: 379572 - RNA, 22 nt, Human
cgacauccuagagauggagagg

SEQ ID NO: 379573 - RNA, 23 nt, Human
gaaaaaaaaaacuuaagucccau

SEQ ID NO: 379574 - RNA, 24 nt, Human
gagaaaaaaaaaacuuaaguccca

SEQ ID NO: 379575 - RNA, 24 nt, Human
gagaagcggugccaauggggagag

SEQ ID NO: 379576 - RNA, 25 nt, Human
gagacaaaggugguucagaguucau

SEQ ID NO: 379577 - RNA, 18 nt, Human
gaguucauggggaaaaga

SEQ ID NO: 379578 - RNA, 22 nt, Human
ggggagaguggcaguguccaga

SEQ ID NO: 379579 - RNA, 22 nt, Human
ggguuuguggcugagaagcggu

SEQ ID NO: 379580 - RNA, 23 nt, Human
ucaacgcugguagccagcucccu

SEQ ID NO: 379581 - RNA, 18 nt, Human
ucucaccaaagacgacau

SEQ ID NO: 379582 - RNA, 24 nt, Human
ugccucugcagagacaaagguggu

SEQ ID NO: 379583 - RNA, 20 nt, Human
ugcuaaagcucgcuugcugg

SEQ ID NO: 379584 - RNA, 21 nt, Human
ugcugggauccggaugccucu

SEQ ID NO: 379585 - RNA, 19 nt, Human
uggagaggagaaaaaaaaa

SEQ ID NO: 379586 - RNA, 19 nt, Human
uggggaaaagaggcagggu

SEQ ID NO: 379587 - RNA, 24 nt, Human
uggggagaguggcaguguccagag

SEQ ID NO: 379588 - RNA, 24 nt, Human
uugauggugaagugacuucccugc

SEQ ID NO: 379589 - RNA, 18 nt, Human
uuuguggcugagaagcgg

SEQ ID NO: 379590 - RNA, 25 nt, Human
uuuuuuuuuuuuuuucacaguuuuu

SEQ ID NO: 379591 - RNA, 22 nt, Human
uuuuuuuuuuuuuuuuucacag

SEQ ID NO: 379592 - RNA, 21 nt, Human
cauuggguggagauuagcugg

SEQ ID NO: 379593 - RNA, 22 nt, Human
ucacugauggcaauggaucucu

SEQ ID NO: 379594 - RNA, 23 nt, Human
ucacugauggcaauggaucucug

SEQ ID NO: 379595 - RNA, 22 nt, Human
ucucuggaucgugcugcugcuu

SEQ ID NO: 379596 - RNA, 23 nt, Human
aaaaaauacaauagaaaccugaa

SEQ ID NO: 379597 - RNA, 20 nt, Human
aaaaauacaauagaaaccug

SEQ ID NO: 379598 - RNA, 23 nt, Human
aaagaagauuauguaaggaaugg

SEQ ID NO: 379599 - RNA, 20 nt, Human
aacaaaacaacuaaaacuac

SEQ ID NO: 379600 - RNA, 20 nt, Human
aagaugccacaaaauuuagc

SEQ ID NO: 379601 - RNA, 21 nt, Human
aaucaucuaaagcauuuggca

SEQ ID NO: 379602 - RNA, 21 nt, Human
accuccugccugucuccaaga

SEQ ID NO: 379603 - RNA, 18 nt, Human
agaagagugacuuuuauu

SEQ ID NO: 379604 - RNA, 21 nt, Human
agaaucuucaggccucugcuc

SEQ ID NO: 379605 - RNA, 21 nt, Human
agcaacugggccugaaauuca

SEQ ID NO: 379606 - RNA, 18 nt, Human
agguccucaucauucugc

SEQ ID NO: 379607 - RNA, 19 nt, Human
agucacuuaaaaacaaaac

SEQ ID NO: 379608 - RNA, 18 nt, Human
auggaacacaucagcauu

SEQ ID NO: 379609 - RNA, 22 nt, Human
caacaauaaucacagagagaag

SEQ ID NO: 379610 - RNA, 26 nt, Human
caacaauaaucacagagagaagucuc

SEQ ID NO: 379611 - RNA, 22 nt, Human
caacugggccugaaauucacca

SEQ ID NO: 379612 - RNA, 22 nt, Human
caagugauccacuuacggagcc

SEQ ID NO: 379613 - RNA, 22 nt, Human
cacagagagaagucuccccacc

SEQ ID NO: 379614 - RNA, 23 nt, Human
cacuuacggagccaagcuaaggg

SEQ ID NO: 379615 - RNA, 19 nt, Human
caugauuaguaaaguguau

SEQ ID NO: 379616 - RNA, 24 nt, Human
cauuacccaaucuuccucaaacau

SEQ ID NO: 379617 - RNA, 24 nt, Human
cauuuagaauacaacuaccaccac

SEQ ID NO: 379618 - RNA, 26 nt, Human
cccaacccagguguuguuaguuaucu

SEQ ID NO: 379619 - RNA, 21 nt, Human
ccgccgccccaacccaggugu

SEQ ID NO: 379620 - RNA, 18 nt, Human
ccuuccuuaaaauaugga

SEQ ID NO: 379621 - RNA, 18 nt, Human
cgcccugggcccuggagc

SEQ ID NO: 379622 - RNA, 18 nt, Human
cgcugcgaggcugggugg

SEQ ID NO: 379623 - RNA, 23 nt, Human
cuacaucauuuagaauacaacua

SEQ ID NO: 379624 - RNA, 31 nt, Human
cucuuuuguuucauaaaaauauaaaaauauu

SEQ ID NO: 379625 - RNA, 22 nt, Human
cugggugggugggugggugcgu

SEQ ID NO: 379626 - RNA, 24 nt, Human
cuuucucugcaagaauguuaaaaa

SEQ ID NO: 379627 - RNA, 21 nt, Human
gagccaagcuaagggagcuga

SEQ ID NO: 379628 - RNA, 19 nt, Human
gagcugaagagaagaggcc

SEQ ID NO: 379629 - RNA, 21 nt, Human
gaucuaugccauucuuuccuu

SEQ ID NO: 379630 - RNA, 21 nt, Human
gaugacuggaggugggaagga

SEQ ID NO: 379631 - RNA, 20 nt, Human
ggaauuaacuccagacugua

SEQ ID NO: 379632 - RNA, 19 nt, Human
ggagcugaagagaagaggc

SEQ ID NO: 379633 - RNA, 19 nt, Human
uaaaaacaaaacaacuaaa

SEQ ID NO: 379634 - RNA, 22 nt, Human
uaaaaacaaaacaacuaaaacu

SEQ ID NO: 379635 - RNA, 24 nt, Human
uaaaaacaaaacaacuaaaacuac

SEQ ID NO: 379636 - RNA, 20 nt, Human
uaaaagguuuaacaucuguu

SEQ ID NO: 379637 - RNA, 19 nt, Human
uaacaggaauuaacuccag

SEQ ID NO: 379638 - RNA, 19 nt, Human
uacaguuucaugaauggaa

SEQ ID NO: 379639 - RNA, 19 nt, Human
uacaucauuuagaauacaa

SEQ ID NO: 379640 - RNA, 26 nt, Human
uaccagggaaaauaaagagauucagc

SEQ ID NO: 379641 - RNA, 21 nt, Human
uacccaaucuuccucaaacau

SEQ ID NO: 379642 - RNA, 20 nt, Human
uagcaacaauaaucacagag

SEQ ID NO: 379643 - RNA, 18 nt, Human
uaucuagaggacauaaaa

SEQ ID NO: 379644 - RNA, 21 nt, Human
uauuuugauuuccuagguuga

SEQ ID NO: 379645 - RNA, 18 nt, Human
ucacuuaaaaacaaaaca

SEQ ID NO: 379646 - RNA, 18 nt, Human
ucagaagaaagaaucuuc

SEQ ID NO: 379647 - RNA, 22 nt, Human
ucagcauuacccaaucuuccuc

SEQ ID NO: 379648 - RNA, 23 nt, Human
ucagcucuucccccaccuccugc

SEQ ID NO: 379649 - RNA, 18 nt, Human
ucaucuaaagcauuuggc

SEQ ID NO: 379650 - RNA, 24 nt, Human
ucccccaccuccugccugucucca

SEQ ID NO: 379651 - RNA, 21 nt, Human
ucuaagacaagcaggaaaaug

SEQ ID NO: 379652 - RNA, 25 nt, Human
ucuccaaugugucuuuuuucccaag

SEQ ID NO: 379653 - RNA, 24 nt, Human
ucucugcaagaauguuaaaaaaaa

SEQ ID NO: 379654 - RNA, 23 nt, Human
ucugcuugguauucuguuggugu

SEQ ID NO: 379655 - RNA, 20 nt, Human
ugacuggaggugggaaggac

SEQ ID NO: 379656 - RNA, 21 nt, Human
ugacuggaggugggaaggacu

SEQ ID NO: 379657 - RNA, 28 nt, Human
ugacuggaggugggaaggacuagaggaa

SEQ ID NO: 379658 - RNA, 21 nt, Human
ugagaggcaaucaucuaaagc

SEQ ID NO: 379659 - RNA, 21 nt, Human
ugagcauaauuauaauuaaca

SEQ ID NO: 379660 - RNA, 20 nt, Human
ugcggcgcccugggcccugg

SEQ ID NO: 379661 - RNA, 25 nt, Human
ugcucuuuuguuucauaaaaauaua

SEQ ID NO: 379662 - RNA, 22 nt, Human
ugggaaggacuagaggaagaug

SEQ ID NO: 379663 - RNA, 23 nt, Human
ugggaaggacuagaggaagaugc

SEQ ID NO: 379664 - RNA, 22 nt, Human
uggggcugaugacuggaggugg

SEQ ID NO: 379665 - RNA, 21 nt, Human
uguguagaaauugaaaccauu

SEQ ID NO: 379666 - RNA, 22 nt, Human
uuccuagguugacuaagcauac

SEQ ID NO: 379667 - RNA, 21 nt, Human
uugcaaagccucuuccauuuc

SEQ ID NO: 379668 - RNA, 22 nt, Human
uuggaucuugcuuucucugcaa

SEQ ID NO: 379669 - RNA, 18 nt, Human
uugguauucuguuggugu

SEQ ID NO: 379670 - RNA, 22 nt, Human
uuuuuuguuuguuuaaccucag

SEQ ID NO: 379671 - RNA, 20 nt, Human
uuuuuuuuuuuuaauagggc

SEQ ID NO: 379672 - RNA, 31 nt, Human
uuuuuuuuuuuuuuuuuuuuuuuaauagggg

SEQ ID NO: 379673 - RNA, 21 nt, Human
aaaaugccccuccuagacccc

SEQ ID NO: 379674 - RNA, 18 nt, Human
aaaugccccuccuagacc

SEQ ID NO: 379675 - RNA, 18 nt, Human
agaggagccuggauuucu

SEQ ID NO: 379676 - RNA, 21 nt, Human
agaggagccuggauuucuugg

SEQ ID NO: 379677 - RNA, 21 nt, Human
agccacaaagacaggaagaga

SEQ ID NO: 379678 - RNA, 21 nt, Human
aggcaggggauagggguggug

SEQ ID NO: 379679 - RNA, 18 nt, Human
aggcagucuccaaaaugc

SEQ ID NO: 379680 - RNA, 20 nt, Human
caacagcaccucaguggggc

SEQ ID NO: 379681 - RNA, 26 nt, Human
ccagcaauaaaccaacaggguacccc

SEQ ID NO: 379682 - RNA, 20 nt, Human
cgauggaaccaaggaggcuc

SEQ ID NO: 379683 - RNA, 19 nt, Human
cggagccacaaagacagga

SEQ ID NO: 379684 - RNA, 20 nt, Human
cggagccacaaagacaggaa

SEQ ID NO: 379685 - RNA, 22 nt, Human
cguugccagcaauaaaccaaca

SEQ ID NO: 379686 - RNA, 25 nt, Human
gaaaaccccuuaguaagcacuucuc

SEQ ID NO: 379687 - RNA, 21 nt, Human
gagagcagggcaggauccagg

SEQ ID NO: 379688 - RNA, 18 nt, Human
gcaucccaaacgccuuuc

SEQ ID NO: 379689 - RNA, 19 nt, Human
gcuucacgauggaaccaag

SEQ ID NO: 379690 - RNA, 21 nt, Human
gggcugguccuucacuauggc

SEQ ID NO: 379691 - RNA, 22 nt, Human
uagaaaaccccuuaguaagcac

SEQ ID NO: 379692 - RNA, 21 nt, Human
uaguaagcacuucucuaaccc

SEQ ID NO: 379693 - RNA, 22 nt, Human
uauccuccaagagucccauagc

SEQ ID NO: 379694 - RNA, 20 nt, Human
uccaaaaugccccuccuaga

SEQ ID NO: 379695 - RNA, 23 nt, Human
uccaaaaugccccuccuagaccc

SEQ ID NO: 379696 - RNA, 22 nt, Human
uccuagaccccugagagaauuc

SEQ ID NO: 379697 - RNA, 18 nt, Human
ugagagggggaggcaggg

SEQ ID NO: 379698 - RNA, 19 nt, Human
uggaaccaaggaggcucuc

SEQ ID NO: 379699 - RNA, 23 nt, Human
uggcuucacgauggaaccaagga

SEQ ID NO: 379700 - RNA, 22 nt, Human
ugggagaggagggcuguggaag

SEQ ID NO: 379701 - RNA, 21 nt, Human
uggguauccuccaagaguccc

SEQ ID NO: 379702 - RNA, 18 nt, Human
uucacgauggaaccaagg

SEQ ID NO: 379703 - RNA, 19 nt, Human
aaggaagcaagggcagggc

SEQ ID NO: 379704 - RNA, 22 nt, Human
aaggaagcaagggcagggcugg

SEQ ID NO: 379705 - RNA, 25 nt, Human
cuagaggaaaagaaaacgagcuccc

SEQ ID NO: 379706 - RNA, 20 nt, Human
gaaggaagcaagggcagggc

SEQ ID NO: 379707 - RNA, 22 nt, Human
ggaaaagaaaacgagcucccau

SEQ ID NO: 379708 - RNA, 19 nt, Human
gggcagggcuggggugccg

SEQ ID NO: 379709 - RNA, 18 nt, Human
ucccagguccugugaugu

SEQ ID NO: 379710 - RNA, 28 nt, Human
ugccuagaggaaaagaaaacgagcuccc

SEQ ID NO: 379711 - RNA, 23 nt, Human
uuuauugaaggaagcaagggcag

SEQ ID NO: 379712 - RNA, 21 nt, Human
aaauuauaaacagccauccuu

SEQ ID NO: 379713 - RNA, 20 nt, Human
accccugcuccagcaacuug

SEQ ID NO: 379714 - RNA, 18 nt, Human
agaaggcaagcgcaaaga

SEQ ID NO: 379715 - RNA, 22 nt, Human
agggggauggggggacaccggg

SEQ ID NO: 379716 - RNA, 19 nt, Human
agguaggagcuacaggccu

SEQ ID NO: 379717 - RNA, 19 nt, Human
agguugggaaucuccucag

SEQ ID NO: 379718 - RNA, 24 nt, Human
caaaaugaaaguagaaauaggccc

SEQ ID NO: 379719 - RNA, 21 nt, Human
caggacaagcagcagcuacau

SEQ ID NO: 379720 - RNA, 23 nt, Human
caggacaagcagcagcuacaucc

SEQ ID NO: 379721 - RNA, 22 nt, Human
caggcugcacaagggaaaccaa

SEQ ID NO: 379722 - RNA, 19 nt, Human
cccacccuaucucucccca

SEQ ID NO: 379723 - RNA, 18 nt, Human
ccccgcgucccgccaccg

SEQ ID NO: 379724 - RNA, 18 nt, Human
cccgcgugcgcggccccg

SEQ ID NO: 379725 - RNA, 23 nt, Human
cccuagugacauacacaccaaca

SEQ ID NO: 379726 - RNA, 24 nt, Human
cccugccucccacccuaucucucc

SEQ ID NO: 379727 - RNA, 23 nt, Human
ccgcgugcgcggccccgcguccc

SEQ ID NO: 379728 - RNA, 20 nt, Human
cugcauugcccugccuccca

SEQ ID NO: 379729 - RNA, 24 nt, Human
cugcggccucgcgagggccccggc

SEQ ID NO: 379730 - RNA, 24 nt, Human
gcagagccccaggcugcacaaggg

SEQ ID NO: 379731 - RNA, 21 nt, Human
ggaagcuuuucccgcgugcgc

SEQ ID NO: 379732 - RNA, 23 nt, Human
ggacaagcagcagcuacauccuu

SEQ ID NO: 379733 - RNA, 22 nt, Human
gggcgcgcuggggggacgcggg

SEQ ID NO: 379734 - RNA, 21 nt, Human
uaaacagccauccuugggaag

SEQ ID NO: 379735 - RNA, 18 nt, Human
uaggccccagguaggagg

SEQ ID NO: 379736 - RNA, 21 nt, Human
ucaugaggagaaacugguacc

SEQ ID NO: 379737 - RNA, 21 nt, Human
ucccacccuaucucuccccaa

SEQ ID NO: 379738 - RNA, 22 nt, Human
ucccacccuaucucuccccaaa

SEQ ID NO: 379739 - RNA, 23 nt, Human
ucccacccuaucucuccccaaaa

SEQ ID NO: 379740 - RNA, 21 nt, Human
ucgggaaaguaagaugaggau

SEQ ID NO: 379741 - RNA, 19 nt, Human
ugaacaggacaagcagcag

SEQ ID NO: 379742 - RNA, 23 nt, Human
ugagaaggcaagcgcaaagagaa

SEQ ID NO: 379743 - RNA, 18 nt, Human
ugccucccacccuaucuc

SEQ ID NO: 379744 - RNA, 23 nt, Human
uggcacagaauccagggacugca

SEQ ID NO: 379745 - RNA, 24 nt, Human
uggcacagaauccagggacugcau

SEQ ID NO: 379746 - RNA, 23 nt, Human
uggguggggagucggggggugug

SEQ ID NO: 379747 - RNA, 20 nt, Human
uucacagaccagaaauacaa

SEQ ID NO: 379748 - RNA, 23 nt, Human
cacguucugcuucucaucaaggg

SEQ ID NO: 379749 - RNA, 18 nt, Human
gaugacgagggagccgca

SEQ ID NO: 379750 - RNA, 27 nt, Human
gcggcagcagugguggcgaguuggcag

SEQ ID NO: 379751 - RNA, 20 nt, Human
gugguggcgaguuggcagca

SEQ ID NO: 379752 - RNA, 21 nt, Human
gugguugcgauugcggcagca

SEQ ID NO: 379753 - RNA, 21 nt, Human
ucucacuucagagacaaagca

SEQ ID NO: 379754 - RNA, 19 nt, Human
ugcuucucaucaagggcau

SEQ ID NO: 379755 - RNA, 21 nt, Human
uggcagcaguuggugacaaag

SEQ ID NO: 379756 - RNA, 18 nt, Human
uugcuaugcaccugauga

SEQ ID NO: 379757 - RNA, 20 nt, Human
aaacacucagaacugcccuc

SEQ ID NO: 379758 - RNA, 23 nt, Human
acuguugugaacacuugcuuuca

SEQ ID NO: 379759 - RNA, 18 nt, Human
agagugaggggagcuuga

SEQ ID NO: 379760 - RNA, 22 nt, Human
aguauggaagaaucgaaagaga

SEQ ID NO: 379761 - RNA, 18 nt, Human
aucuuccucagggucgcu

SEQ ID NO: 379762 - RNA, 23 nt, Human
auggcaaugggaaaagcagaugg

SEQ ID NO: 379763 - RNA, 33 nt, Human
cugguacuugguguguguguguguguguguggu

SEQ ID NO: 379764 - RNA, 24 nt, Human
gaacucuuggcacacuaagaaaaa

SEQ ID NO: 379765 - RNA, 22 nt, Human
gcuaacaucgaacucuuggcac

SEQ ID NO: 379766 - RNA, 18 nt, Human
ggaaacagagugagggga

SEQ ID NO: 379767 - RNA, 23 nt, Human
gggcaugugucguaucccugagg

SEQ ID NO: 379768 - RNA, 21 nt, Human
guggugugguuugugugcgug

SEQ ID NO: 379769 - RNA, 20 nt, Human
gugugugugugugugugugu

SEQ ID NO: 379770 - RNA, 21 nt, Human
gugugugugugugugugugug

SEQ ID NO: 379771 - RNA, 21 nt, Human
gugugugugugugugugugug

SEQ ID NO: 379772 - RNA, 21 nt, Human
gugugugugugugugugugug

SEQ ID NO: 379773 - RNA, 21 nt, Human
gugugugugugugugugugug

SEQ ID NO: 379774 - RNA, 21 nt, Human
gugugugugugugugugugug

SEQ ID NO: 379775 - RNA, 21 nt, Human
gugugugugugugugugugug

SEQ ID NO: 379776 - RNA, 19 nt, Human
uaaacacucagaacugccc

SEQ ID NO: 379777 - RNA, 23 nt, Human
uaacagaaugacacaguguaaga

SEQ ID NO: 379778 - RNA, 22 nt, Human
uacacaaaccaaaauaugcauu

SEQ ID NO: 379779 - RNA, 19 nt, Human
uccaaagagaaaaucagac

SEQ ID NO: 379780 - RNA, 19 nt, Human
ugaccaggacgcauggcaa

SEQ ID NO: 379781 - RNA, 25 nt, Human
uggaagaauccaaagagaaaaucag

SEQ ID NO: 379782 - RNA, 25 nt, Human
uggauacacaaaccaaaauaugcau

SEQ ID NO: 379783 - RNA, 21 nt, Human
uggcaaugggaaaagcagaug

SEQ ID NO: 379784 - RNA, 18 nt, Human
ugggaaaagcagauggca

SEQ ID NO: 379785 - RNA, 23 nt, Human
ugguacuuggugugugugugugu

SEQ ID NO: 379786 - RNA, 22 nt, Human
uggugugugugugugugugugu

SEQ ID NO: 379787 - RNA, 22 nt, Human
ugguuugugugcgugugugugu

SEQ ID NO: 379788 - RNA, 19 nt, Human
ugugugugugugguguggu

SEQ ID NO: 379789 - RNA, 25 nt, Human
uguguguguguggugugguuugugu

SEQ ID NO: 379790 - RNA, 18 nt, Human
ugugugugugugugugug

SEQ ID NO: 379791 - RNA, 18 nt, Human
ugugugugugugugugug

SEQ ID NO: 379792 - RNA, 18 nt, Human
ugugugugugugugugug

SEQ ID NO: 379793 - RNA, 18 nt, Human
ugugugugugugugugug

SEQ ID NO: 379794 - RNA, 18 nt, Human
ugugugugugugugugug

SEQ ID NO: 379795 - RNA, 18 nt, Human
ugugugugugugugugug

SEQ ID NO: 379796 - RNA, 18 nt, Human
ugugugugugugugugug

SEQ ID NO: 379797 - RNA, 18 nt, Human
ugugugugugugugugug

SEQ ID NO: 379798 - RNA, 18 nt, Human
ugugugugugugugugug

SEQ ID NO: 379799 - RNA, 18 nt, Human
ugugugugugugugugug

SEQ ID NO: 379800 - RNA, 18 nt, Human
ugugugugugugugugug

SEQ ID NO: 379801 - RNA, 18 nt, Human
ugugugugugugugugug

SEQ ID NO: 379802 - RNA, 18 nt, Human
ugugugugugugugugug

SEQ ID NO: 379803 - RNA, 18 nt, Human
ugugugugugugugugug

SEQ ID NO: 379804 - RNA, 22 nt, Human
uguguguguguguguguggugu

SEQ ID NO: 379805 - RNA, 20 nt, Human
ugugugugugugugugugug

SEQ ID NO: 379806 - RNA, 21 nt, Human
ugugugugugugugugugugu

SEQ ID NO: 379807 - RNA, 21 nt, Human
ugugugugugugugugugugu

SEQ ID NO: 379808 - RNA, 21 nt, Human
ugugugugugugugugugugu

SEQ ID NO: 379809 - RNA, 21 nt, Human
ugugugugugugugugugugu

SEQ ID NO: 379810 - RNA, 21 nt, Human
ugugugugugugugugugugu

SEQ ID NO: 379811 - RNA, 21 nt, Human
ugugugugugugugugugugu

SEQ ID NO: 379812 - RNA, 21 nt, Human
ugugugugugugugugugugu

SEQ ID NO: 379813 - RNA, 21 nt, Human
ugugugugugugugugugugu

SEQ ID NO: 379814 - RNA, 21 nt, Human
ugugugugugugugugugugu

SEQ ID NO: 379815 - RNA, 21 nt, Human
ugugugugugugugugugugu

SEQ ID NO: 379816 - RNA, 21 nt, Human
ugugugugugugugugugugu

SEQ ID NO: 379817 - RNA, 21 nt, Human
ugugugugugugugugugugu

SEQ ID NO: 379818 - RNA, 21 nt, Human
ugugugugugugugugugugu

SEQ ID NO: 379819 - RNA, 21 nt, Human
ugugugugugugugugugugu

SEQ ID NO: 379820 - RNA, 21 nt, Human
ugugugugugugugugugugu

SEQ ID NO: 379821 - RNA, 21 nt, Human
ugugugugugugugugugugu

SEQ ID NO: 379822 - RNA, 21 nt, Human
ugugugugugugugugugugu

SEQ ID NO: 379823 - RNA, 21 nt, Human
ugugugugugugugugugugu

SEQ ID NO: 379824 - RNA, 21 nt, Human
ugugugugugugugugugugu

SEQ ID NO: 379825 - RNA, 21 nt, Human
ugugugugugugugugugugu

SEQ ID NO: 379826 - RNA, 21 nt, Human
ugugugugugugugugugugu

SEQ ID NO: 379827 - RNA, 21 nt, Human
ugugugugugugugugugugu

SEQ ID NO: 379828 - RNA, 21 nt, Human
ugugugugugugugugugugu

SEQ ID NO: 379829 - RNA, 21 nt, Human
ugugugugugugugugugugu

SEQ ID NO: 379830 - RNA, 21 nt, Human
ugugugugugugugugugugu

SEQ ID NO: 379831 - RNA, 21 nt, Human
ugugugugugugugugugugu

SEQ ID NO: 379832 - RNA, 22 nt, Human
ugugugugugugugugugugug

SEQ ID NO: 379833 - RNA, 22 nt, Human
ugugugugugugugugugugug

SEQ ID NO: 379834 - RNA, 22 nt, Human
ugugugugugugugugugugug

SEQ ID NO: 379835 - RNA, 22 nt, Human
ugugugugugugugugugugug

SEQ ID NO: 379836 - RNA, 22 nt, Human
ugugugugugugugugugugug

SEQ ID NO: 379837 - RNA, 22 nt, Human
ugugugugugugugugugugug

SEQ ID NO: 379838 - RNA, 22 nt, Human
ugugugugugugugugugugug

SEQ ID NO: 379839 - RNA, 18 nt, Human
uugcuaugcaccugauga

SEQ ID NO: 379840 - RNA, 18 nt, Human
uuggugugugugugugug

SEQ ID NO: 379841 - RNA, 23 nt, Human
acuguugugaacacuugcuuuca

SEQ ID NO: 379842 - RNA, 22 nt, Human
auggcaaugggaaaagcagaug

SEQ ID NO: 379843 - RNA, 24 nt, Human
caagaaaauacaauggaaacgcua

SEQ ID NO: 379844 - RNA, 23 nt, Human
cgcuaauaucguacucuuggcac

SEQ ID NO: 379845 - RNA, 33 nt, Human; identical to SEQ ID NO: 379763

SEQ ID NO: 379846 - RNA, 22 nt, Human
ggagaugcuuauacugguacuu

SEQ ID NO: 379847 - RNA, 19 nt, Human
gucauauccccaaggggag

SEQ ID NO: 379848 - RNA, 20 nt, Human
gugugugugugugugugugu

SEQ ID NO: 379849 - RNA, 21 nt, Human
gugugugugugugugugugug

SEQ ID NO: 379850 - RNA, 21 nt, Human
gugugugugugugugugugug

SEQ ID NO: 379851 - RNA, 22 nt, Human
guuugcaaagguuuauuuacug

SEQ ID NO: 379852 - RNA, 19 nt, Human
uaaacacucagaacugccc

SEQ ID NO: 379853 - RNA, 22 nt, Human
uacacaaaccaaaauaugcauu

SEQ ID NO: 379854 - RNA, 18 nt, Human
uacugguacuuggugugu

SEQ ID NO: 379855 - RNA, 21 nt, Human
uccacagccaugcccauguuc

SEQ ID NO: 379856 - RNA, 19 nt, Human
ugaccaggacgcauggcaa

SEQ ID NO: 379857 - RNA, 22 nt, Human
uggaaacgcuaauaucguacuc

SEQ ID NO: 379858 - RNA, 25 nt, Human
uggaagaauccaaagagaaaaucag

SEQ ID NO: 379859 - RNA, 25 nt, Human
uggauacacaaaccaaaauaugcau

SEQ ID NO: 379860 - RNA, 21 nt, Human
uggcaaugggaaaagcagaug

SEQ ID NO: 379861 - RNA, 20 nt, Human
ugggaaaagcagaugggaga

SEQ ID NO: 379862 - RNA, 19 nt, Human
ugggagaugcuuauacugg

SEQ ID NO: 379863 - RNA, 21 nt, Human
ugggagaugcuuauacuggua

SEQ ID NO: 379864 - RNA, 23 nt, Human
ugguacuuggugugugugugugu

SEQ ID NO: 379865 - RNA, 23 nt, Human
uggugugguuugugugugugugu

SEQ ID NO: 379866 - RNA, 22 nt, Human
uggugugugugugugugugugu

SEQ ID NO: 379867 - RNA, 25 nt, Human
uguggugugguuugugugugugugg

SEQ ID NO: 379868 - RNA, 25 nt, Human
uguguguguguggugugguuugugu

SEQ ID NO: 379869 - RNA, 18 nt, Human
ugugugugugugugugug

SEQ ID NO: 379870 - RNA, 18 nt, Human
ugugugugugugugugug

SEQ ID NO: 379871 - RNA, 18 nt, Human
ugugugugugugugugug

SEQ ID NO: 379872 - RNA, 18 nt, Human
ugugugugugugugugug

SEQ ID NO: 379873 - RNA, 18 nt, Human
ugugugugugugugugug

SEQ ID NO: 379874 - RNA, 18 nt, Human
ugugugugugugugugug

SEQ ID NO: 379875 - RNA, 18 nt, Human
ugugugugugugugugug

SEQ ID NO: 379876 - RNA, 22 nt, Human
uguguguguguguguguggugu

SEQ ID NO: 379877 - RNA, 20 nt, Human
ugugugugugugugugugug

SEQ ID NO: 379878 - RNA, 21 nt, Human
ugugugugugugugugugugu

SEQ ID NO: 379879 - RNA, 21 nt, Human
ugugugugugugugugugugu

SEQ ID NO: 379880 - RNA, 21 nt, Human
ugugugugugugugugugugu

SEQ ID NO: 379881 - RNA, 21 nt, Human
ugugugugugugugugugugu

SEQ ID NO: 379882 - RNA, 21 nt, Human
ugugugugugugugugugugu

SEQ ID NO: 379883 - RNA, 21 nt, Human
ugugugugugugugugugugu

SEQ ID NO: 379884 - RNA, 21 nt, Human
ugugugugugugugugugugu

SEQ ID NO: 379885 - RNA, 21 nt, Human
ugugugugugugugugugugu

SEQ ID NO: 379886 - RNA, 21 nt, Human
ugugugugugugugugugugu

SEQ ID NO: 379887 - RNA, 21 nt, Human
ugugugugugugugugugugu

SEQ ID NO: 379888 - RNA, 21 nt, Human
ugugugugugugugugugugu

SEQ ID NO: 379889 - RNA, 21 nt, Human
ugugugugugugugugugugu

SEQ ID NO: 379890 - RNA, 22 nt, Human
ugugugugugugugugugugug

SEQ ID NO: 379891 - RNA, 22 nt, Human
ugugugugugugugugugugug

SEQ ID NO: 379892 - RNA, 22 nt, Human
ugugugugugugugugugugug

SEQ ID NO: 379893 - RNA, 22 nt, Human
ugugugugugugugugugugug

SEQ ID NO: 379894 - RNA, 22 nt, Human
uuaaacacucagaacugcccuc

SEQ ID NO: 379895 - RNA, 20 nt, Human
uugcaaagguuuauuuacug

SEQ ID NO: 379896 - RNA, 18 nt, Human
uugcuaugcaccugauga

SEQ ID NO: 379897 - RNA, 18 nt, Human
uuggugugugugugugug

SEQ ID NO: 379898 - RNA, 21 nt, Human
uuuuuuuuuuuuuuuuuaacg

SEQ ID NO: 379899 - RNA, 22 nt, Human
aaaaaucggaaauuaaacacuu

SEQ ID NO: 379900 - RNA, 22 nt, Human
aaaaucggaaauuaaacacuca

SEQ ID NO: 379901 - RNA, 22 nt, Human
aaaugcagaggaaaaaaucgga

SEQ ID NO: 379902 - RNA, 20 nt, Human
aacaggaaacagagugaggg

SEQ ID NO: 379903 - RNA, 21 nt, Human
aauggagaaaagcagauggga

SEQ ID NO: 379904 - RNA, 23 nt, Human
acagcggaaacgccaacaucgaa

SEQ ID NO: 379905 - RNA, 19 nt, Human
accuccccucaguagucac

SEQ ID NO: 379906 - RNA, 23 nt, Human
acuguugugaacacuugcuuuca

SEQ ID NO: 379907 - RNA, 24 nt, Human
agaaucaaaagggcaaaucggcgg

SEQ ID NO: 379908 - RNA, 18 nt, Human
agaggaaaaaaucggaaa

SEQ ID NO: 379909 - RNA, 21 nt, Human
agcggaaacgccaacaucgaa

SEQ ID NO: 379910 - RNA, 21 nt, Human
aggaaacagagugaggggggc

SEQ ID NO: 379911 - RNA, 19 nt, Human
auggcaauggagaaaagca

SEQ ID NO: 379912 - RNA, 20 nt, Human
auggcaauggagaaaagcag

SEQ ID NO: 379913 - RNA, 23 nt, Human
auggcaauggagaaaagcagaug

SEQ ID NO: 379914 - RNA, 18 nt, Human
caacgaaaacgcuaaugu

SEQ ID NO: 379915 - RNA, 18 nt, Human
cagcgaaaacgcuaaugu

SEQ ID NO: 379916 - RNA, 18 nt, Human
cucaucagcgaaaacgcu

SEQ ID NO: 379917 - RNA, 27 nt, Human
cugguacuuggugugugugugugcgug

SEQ ID NO: 379918 - RNA, 21 nt, Human
gaacaggaaacagagugaggg

SEQ ID NO: 379919 - RNA, 24 nt, Human
gaacaggaaacagagugagggggg

SEQ ID NO: 379920 - RNA, 24 nt, Human
gaacucuuggcacacuaagaaaaa

SEQ ID NO: 379921 - RNA, 24 nt, Human
gacaauacuuguuuucugagguag

SEQ ID NO: 379922 - RNA, 22 nt, Human
ggagaugcuuauacugguacuu

SEQ ID NO: 379923 - RNA, 23 nt, Human
gggagagaggaggguagugcugu

SEQ ID NO: 379924 - RNA, 19 nt, Human
guacuuggugugugugugu

SEQ ID NO: 379925 - RNA, 21 nt, Human
gucgcauggcaauggagaaaa

SEQ ID NO: 379926 - RNA, 20 nt, Human
gugugugugugugcgugugu

SEQ ID NO: 379927 - RNA, 18 nt, Human
uacugguacuuggugugu

SEQ ID NO: 379928 - RNA, 19 nt, Human
ugaccaggacgcauggcaa

SEQ ID NO: 379929 - RNA, 23 nt, Human
ugcaagaaaauacagcggaaacg

SEQ ID NO: 379930 - RNA, 19 nt, Human
ugcagaggaaaaaaucgga

SEQ ID NO: 379931 - RNA, 19 nt, Human
ugcguguguggugugugug

SEQ ID NO: 379932 - RNA, 21 nt, Human
ugggagaugcuuauacuggua

SEQ ID NO: 379933 - RNA, 21 nt, Human
ugguacuuggugugugugugu

SEQ ID NO: 379934 - RNA, 22 nt, Human
uggugugugugugugcgugugu

SEQ ID NO: 379935 - RNA, 23 nt, Human
ugugcguguguggugugugugua

SEQ ID NO: 379936 - RNA, 23 nt, Human
ugugugcguguguggugugugug

SEQ ID NO: 379937 - RNA, 22 nt, Human
ugugugugcguguguggugugu

SEQ ID NO: 379938 - RNA, 18 nt, Human
ugugugugugugcgugug

SEQ ID NO: 379939 - RNA, 20 nt, Human
ugugugugugugcgugugug

SEQ ID NO: 379940 - RNA, 20 nt, Human
ugugugugugugcgugugug

SEQ ID NO: 379941 - RNA, 19 nt, Human
uguugaacguuugcaaagg

SEQ ID NO: 379942 - RNA, 18 nt, Human
uugcuaugcaccugauga

SEQ ID NO: 379943 - RNA, 20 nt, Human
uuguggaagaaucaaaaggg

SEQ ID NO: 379944 - RNA, 21 nt, Human
uuguggaagaaucaaaagggc

SEQ ID NO: 379945 - RNA, 21 nt, Human
uuuuuuuuuuuuuuguugaac

SEQ ID NO: 379946 - RNA, 18 nt, Human
uuuuuuuuuuuuuuuuug

SEQ ID NO: 379947 - RNA, 20 nt, Human
uuuuuuuuuuuuuuuuuguu

SEQ ID NO: 379948 - RNA, 19 nt, Human
aaguccacccugggagcug

SEQ ID NO: 379949 - RNA, 21 nt, Human
acacaaauacacacacugaag

SEQ ID NO: 379950 - RNA, 18 nt, Human
acccugggagcugguaaa

SEQ ID NO: 379951 - RNA, 20 nt, Human
acuuuggaggcugaggaagc

SEQ ID NO: 379952 - RNA, 20 nt, Human
agcccagauccggcagcccc

SEQ ID NO: 379953 - RNA, 21 nt, Human
agccugggcuuccucaagagc

SEQ ID NO: 379954 - RNA, 20 nt, Human
aggaggcuccgaagcuccgu

SEQ ID NO: 379955 - RNA, 24 nt, Human
cacacugaaguccacccugggagc

SEQ ID NO: 379956 - RNA, 22 nt, Human
cacagcccagauccggcagccc

SEQ ID NO: 379957 - RNA, 24 nt, Human
cacagcccagauccggcagcccca

SEQ ID NO: 379958 - RNA, 18 nt, Human
caccuucacugaggaggc

SEQ ID NO: 379959 - RNA, 25 nt, Human
caggguccuccgagccugggcuucc

SEQ ID NO: 379960 - RNA, 23 nt, Human
ccaccaguguccuccccuucuac

SEQ ID NO: 379961 - RNA, 25 nt, Human
ccaguguccuccccuucuaccuccc

SEQ ID NO: 379962 - RNA, 19 nt, Human
cccacagcccagauccggc

SEQ ID NO: 379963 - RNA, 22 nt, Human
cccccaguugggucaguagaac

SEQ ID NO: 379964 - RNA, 19 nt, Human
ccccgaggccgcucgcggg

SEQ ID NO: 379965 - RNA, 19 nt, Human
cccugggagcugguaaaac

SEQ ID NO: 379966 - RNA, 18 nt, Human
ccgaagcuccguucccgc

SEQ ID NO: 379967 - RNA, 19 nt, Human
ccuccccuucuaccuccca

SEQ ID NO: 379968 - RNA, 23 nt, Human
cgcagggcgcggggcgcggggcg

SEQ ID NO: 379969 - RNA, 18 nt, Human
cgcggggcgcaggcggcg

SEQ ID NO: 379970 - RNA, 22 nt, Human
cgcggggcgcggggcgcaggcg

SEQ ID NO: 379971 - RNA, 18 nt, Human
cggccggcucccauggcc

SEQ ID NO: 379972 - RNA, 23 nt, Human
cggggcgcggggcgcaggcggcg

SEQ ID NO: 379973 - RNA, 25 nt, Human
cgugcacacugggguggacgauggg

SEQ ID NO: 379974 - RNA, 20 nt, Human
gcccagauccggcagcccca

SEQ ID NO: 379975 - RNA, 19 nt, Human
gcccgcagggcgcggggcg

SEQ ID NO: 379976 - RNA, 18 nt, Human
gcggggcgcggggcgcag

SEQ ID NO: 379977 - RNA, 20 nt, Human
gcuggugcagucagcggucc

SEQ ID NO: 379978 - RNA, 23 nt, Human
ggcagccccaccaccuucacuga

SEQ ID NO: 379979 - RNA, 20 nt, Human
gggcgcggggcgcaggcggc

SEQ ID NO: 379980 - RNA, 20 nt, Human
guagaaccaccaguguccuc

SEQ ID NO: 379981 - RNA, 22 nt, Human
gucuucaaaccuuugcccccag

SEQ ID NO: 379982 - RNA, 24 nt, Human
guggcccaagggccccacagccca

SEQ ID NO: 379983 - RNA, 18 nt, Human
uaaaauguuuuacucauu

SEQ ID NO: 379984 - RNA, 23 nt, Human
ucacugaggaggcuccgaagcuc

SEQ ID NO: 379985 - RNA, 19 nt, Human
uccccgaggccgcucgcgg

SEQ ID NO: 379986 - RNA, 19 nt, Human
uccuuacagacaggggagg

SEQ ID NO: 379987 - RNA, 22 nt, Human
ucucagacccgucuguuuucca

SEQ ID NO: 379988 - RNA, 19 nt, Human
uggcccaagggccccacag

SEQ ID NO: 379989 - RNA, 18 nt, Human
uggccccgcagguguaca

SEQ ID NO: 379990 - RNA, 18 nt, Human
uggggcuggcgggggagg

SEQ ID NO: 379991 - RNA, 20 nt, Human
uggggcuggcgggggaggcu

SEQ ID NO: 379992 - RNA, 19 nt, Human
ugggguggacgaugggugg

SEQ ID NO: 379993 - RNA, 28 nt, Human
uguccuccccuucuaccucccagcucca

SEQ ID NO: 379994 - RNA, 20 nt, Human
aagcccgaggccggcagaaa

SEQ ID NO: 379995 - RNA, 23 nt, Human
agcccgaggccggcagaaaccaa

SEQ ID NO: 379996 - RNA, 24 nt, Human
caccagcagcaacagacaguauac

SEQ ID NO: 379997 - RNA, 24 nt, Human
caguacaaaaauaaaacuaacacu

SEQ ID NO: 379998 - RNA, 21 nt, Human
cccggagucucaggcucccgc

SEQ ID NO: 379999 - RNA, 19 nt, Human
ccugaggggccgcugcucc

SEQ ID NO: 380000 - RNA, 22 nt, Human
cgccgaggcccaggagcgacga

SEQ ID NO: 380001 - RNA, 25 nt, Human
cggcagaaaccaaaggaagguggcg

SEQ ID NO: 380002 - RNA, 19 nt, Human
cugcugccucucucgcggc

SEQ ID NO: 380003 - RNA, 23 nt, Human
cuguuagcaucaucuucugaguc

SEQ ID NO: 380004 - RNA, 18 nt, Human
cuuuacauuucuugguuu

SEQ ID NO: 380005 - RNA, 25 nt, Human
gaagcccgaggccggcagaaaccaa

SEQ ID NO: 380006 - RNA, 20 nt, Human
gaccgcagaggcgcaccggg

SEQ ID NO: 380007 - RNA, 19 nt, Human
gcagaggagggagcagccc

SEQ ID NO: 380008 - RNA, 27 nt, Human
gcggcgcgggcacgauuccuuccccgc

SEQ ID NO: 380009 - RNA, 23 nt, Human
gcuccgagaccugaggggccgcu

SEQ ID NO: 380010 - RNA, 19 nt, Human
ggagcagcccugcccggag

SEQ ID NO: 380011 - RNA, 24 nt, Human
gggccgcagaagcccgaggccggc

SEQ ID NO: 380012 - RNA, 23 nt, Human
uaaaacuaacacuguuagcauca

SEQ ID NO: 380013 - RNA, 23 nt, Human
uacaguauucacagaaauuaagg

SEQ ID NO: 380014 - RNA, 23 nt, Human
uauacaguauucacagaaauuaa

SEQ ID NO: 380015 - RNA, 18 nt, Human
ugacgagugcauccaaca

SEQ ID NO: 380016 - RNA, 22 nt, Human
ugcccggagucucaggcucccg

SEQ ID NO: 380017 - RNA, 18 nt, Human
uuaaacuaaaaauugcag

SEQ ID NO: 380018 - RNA, 20 nt, Human
uuagcaucaucuucugaguc

SEQ ID NO: 380019 - RNA, 22 nt, Human
aaaaaacaguuaagaaagcuua

SEQ ID NO: 380020 - RNA, 25 nt, Human
aaaaacaguuaagaaagcuuacagc

SEQ ID NO: 380021 - RNA, 26 nt, Human
aagcacccggccccuugggaauauac

SEQ ID NO: 380022 - RNA, 21 nt, Human
acaaauauuugccauauucuc

SEQ ID NO: 380023 - RNA, 18 nt, Human
acccagcgaaacuucauc

SEQ ID NO: 380024 - RNA, 21 nt, Human
agacagucagcugcacaaaac

SEQ ID NO: 380025 - RNA, 26 nt, Human
agagagcacuggcagagcugggggug

SEQ ID NO: 380026 - RNA, 22 nt, Human
agaggagccacagcagcccaga

SEQ ID NO: 380027 - RNA, 18 nt, Human
agcacuggcagagcuggg

SEQ ID NO: 380028 - RNA, 20 nt, Human
aggcagaggugggcuggcuu

SEQ ID NO: 380029 - RNA, 21 nt, Human
aggcagaggugggcuggcuug

SEQ ID NO: 380030 - RNA, 24 nt, Human
aggcaggcaggcaggccgaaggcc

SEQ ID NO: 380031 - RNA, 21 nt, Human
aggccgaaggccuccagggaa

SEQ ID NO: 380032 - RNA, 18 nt, Human
agggucccaggcugggcc

SEQ ID NO: 380033 - RNA, 20 nt, Human
agucagcugcacaaaacugg

SEQ ID NO: 380034 - RNA, 23 nt, Human
auacaaauauuugccauauucuc

SEQ ID NO: 380035 - RNA, 19 nt, Human
cacccagcgaaacuucauc

SEQ ID NO: 380036 - RNA, 19 nt, Human
cacuggcagagcugggggu

SEQ ID NO: 380037 - RNA, 18 nt, Human
cagagagcacuggcagag

SEQ ID NO: 380038 - RNA, 21 nt, Human
cagagggucccaggcugggcc

SEQ ID NO: 380039 - RNA, 21 nt, Human
cagcaaaaaauagaaacuuga

SEQ ID NO: 380040 - RNA, 22 nt, Human
caggcaggcaggcaggcaggcc

SEQ ID NO: 380041 - RNA, 24 nt, Human
caggcaggcaggccgaaggccucc

SEQ ID NO: 380042 - RNA, 24 nt, Human
ccagagagcacuggcagagcuggg

SEQ ID NO: 380043 - RNA, 23 nt, Human
ccccaggcuucaggcucugcaag

SEQ ID NO: 380044 - RNA, 27 nt, Human
ccuaagacccuggugccaugcuacaaa

SEQ ID NO: 380045 - RNA, 19 nt, Human
ccuucuccccaggcuucag

SEQ ID NO: 380046 - RNA, 22 nt, Human
cuagugguggcgccuaagcagu

SEQ ID NO: 380047 - RNA, 23 nt, Human
cuggacucugcuacugagaagga

SEQ ID NO: 380048 - RNA, 19 nt, Human
cugggcccaaacaacugua

SEQ ID NO: 380049 - RNA, 23 nt, Human
gagccaggcccagagagcacugg

SEQ ID NO: 380050 - RNA, 18 nt, Human
gagcugggggugggcuuc

SEQ ID NO: 380051 - RNA, 20 nt, Human
gcugggccuucuccccaggc

SEQ ID NO: 380052 - RNA, 22 nt, Human
gcuucaggcucugcaaggcacu

SEQ ID NO: 380053 - RNA, 19 nt, Human
ggcagaggagccacagcag

SEQ ID NO: 380054 - RNA, 22 nt, Human
ggcaggcaggccgaaggccucc

SEQ ID NO: 380055 - RNA, 22 nt, Human
ggcugggccuucuccccaggcc

SEQ ID NO: 380056 - RNA, 22 nt, Human
ggcugggccuucuccccaggcu

SEQ ID NO: 380057 - RNA, 19 nt, Human
gggaccucaggcaggcagg

SEQ ID NO: 380058 - RNA, 20 nt, Human
gggcccgggacuggcagcgg

SEQ ID NO: 380059 - RNA, 24 nt, Human
uaugaugaaggcagaggugggcug

SEQ ID NO: 380060 - RNA, 20 nt, Human
uccccaggcuucaggcucug

SEQ ID NO: 380061 - RNA, 25 nt, Human
ucuccccaggcuucaggcucugcaa

SEQ ID NO: 380062 - RNA, 23 nt, Human
ucugcaaacccagagcccuugcu

SEQ ID NO: 380063 - RNA, 25 nt, Human
ugaaggcagaggugggcuggcuugg

SEQ ID NO: 380064 - RNA, 19 nt, Human
ugagaacacccguagaugg

SEQ ID NO: 380065 - RNA, 21 nt, Human
ugagacagucagcugcacaaa

SEQ ID NO: 380066 - RNA, 20 nt, Human
uggcagagcugggggugggc

SEQ ID NO: 380067 - RNA, 23 nt, Human
ugggggcagaggagccacagcag

SEQ ID NO: 380068 - RNA, 22 nt, Human
uguuacaaaaaacaguuaagaa

SEQ ID NO: 380069 - RNA, 21 nt, Human
uugcugccuguccagguugug

SEQ ID NO: 380070 - RNA, 24 nt, Human
uuggaggauaggaucugugggggc

SEQ ID NO: 380071 - RNA, 19 nt, Human
aaaaaugucccccgccccc

SEQ ID NO: 380072 - RNA, 23 nt, Human
aaaaguaccucaaggcaauaaaa

SEQ ID NO: 380073 - RNA, 24 nt, Human
aaaaugucccccgcccccagccag

SEQ ID NO: 380074 - RNA, 19 nt, Human
aaacaacaaggaccuagac

SEQ ID NO: 380075 - RNA, 21 nt, Human
aaaccagcaaagcaauuucaa

SEQ ID NO: 380076 - RNA, 18 nt, Human
aaauaaauaugaaaccag

SEQ ID NO: 380077 - RNA, 22 nt, Human
aaaugacaaucaaaugaguuuc

SEQ ID NO: 380078 - RNA, 21 nt, Human
aacaaaccauuuaacauagga

SEQ ID NO: 380079 - RNA, 22 nt, Human
aacaacaaggaccuagacuaag

SEQ ID NO: 380080 - RNA, 24 nt, Human
aacaaucagaaacaaaugaaagga

SEQ ID NO: 380081 - RNA, 21 nt, Human
aacacagacaaauacacaaga

SEQ ID NO: 380082 - RNA, 21 nt, Human
aacuuguauacaaucucccuu

SEQ ID NO: 380083 - RNA, 22 nt, Human
aagagcagugacugugcaagag

SEQ ID NO: 380084 - RNA, 20 nt, Human
aagauguguuggcaaaagca

SEQ ID NO: 380085 - RNA, 23 nt, Human
aagcaagggccagaucauaaaga

SEQ ID NO: 380086 - RNA, 19 nt, Human
aauagagaugaaaaaagaa

SEQ ID NO: 380087 - RNA, 23 nt, Human
aaucauuaaacuacuaaaacaga

SEQ ID NO: 380088 - RNA, 20 nt, Human
aaugaaaggacauuauugaa

SEQ ID NO: 380089 - RNA, 20 nt, Human
aaugaagaggcauuaguaga

SEQ ID NO: 380090 - RNA, 24 nt, Human
acaaauacacaagacuucaaacau

SEQ ID NO: 380091 - RNA, 20 nt, Human
acauuaacaaccuuaacauc

SEQ ID NO: 380092 - RNA, 20 nt, Human
accaugcaggcuaacauaua

SEQ ID NO: 380093 - RNA, 28 nt, Human
acuuuaaagaaagcugaguauaaaagaa

SEQ ID NO: 380094 - RNA, 18 nt, Human
agaaacaaaugaaaggac

SEQ ID NO: 380095 - RNA, 19 nt, Human
agaaacaacaaggaccuag

SEQ ID NO: 380096 - RNA, 22 nt, Human
agaaacaacaaggaccuagacu

SEQ ID NO: 380097 - RNA, 20 nt, Human
agacaaauacacaagacuuu

SEQ ID NO: 380098 - RNA, 19 nt, Human
agacaaaugucaaacaaau

SEQ ID NO: 380099 - RNA, 20 nt, Human
agacaggaagcaaggagacc

SEQ ID NO: 380100 - RNA, 23 nt, Human
agagguaagcaagggccagauca

SEQ ID NO: 380101 - RNA, 18 nt, Human
agaugaaaaaagaaauga

SEQ ID NO: 380102 - RNA, 18 nt, Human
agcaggguggugacagug

SEQ ID NO: 380103 - RNA, 23 nt, Human
aggaauaaaauauauugaaaaaa

SEQ ID NO: 380104 - RNA, 22 nt, Human
aggaauacaggaggaggagccg

SEQ ID NO: 380105 - RNA, 22 nt, Human
aggagaugguggcagcggcggg

SEQ ID NO: 380106 - RNA, 20 nt, Human
aggaugaaaacaaucagaaa

SEQ ID NO: 380107 - RNA, 19 nt, Human
aggcaagaaacaacaagga

SEQ ID NO: 380108 - RNA, 23 nt, Human
aggcaagaaacaacaaggaccua

SEQ ID NO: 380109 - RNA, 24 nt, Human
aggcaagaaacaacaaggaccuag

SEQ ID NO: 380110 - RNA, 19 nt, Human
agugcuugugcacuaagcu

SEQ ID NO: 380111 - RNA, 20 nt, Human
auaugaaaccagcaaagcaa

SEQ ID NO: 380112 - RNA, 24 nt, Human
aucuucauccacuuaauucuguug

SEQ ID NO: 380113 - RNA, 21 nt, Human
augagagagagaggaggagac

SEQ ID NO: 380114 - RNA, 18 nt, Human
augcuuuaaaaugacauu

SEQ ID NO: 380115 - RNA, 19 nt, Human
caaucaaaugaguuucagc

SEQ ID NO: 380116 - RNA, 19 nt, Human
cacaagacuucaaacaugc

SEQ ID NO: 380117 - RNA, 19 nt, Human
cacgcacagcaaacagcac

SEQ ID NO: 380118 - RNA, 24 nt, Human
cacgcacagcaaacagcacgugca

SEQ ID NO: 380119 - RNA, 20 nt, Human
caggaggaggagcaguuuug

SEQ ID NO: 380120 - RNA, 22 nt, Human
caggaggaggagcaguuuuggu

SEQ ID NO: 380121 - RNA, 20 nt, Human
caugcaggcuaacauauaau

SEQ ID NO: 380122 - RNA, 25 nt, Human
cauuaaacuacuaaaacagacaguu

SEQ ID NO: 380123 - RNA, 23 nt, Human
ccacugacaaguucauaugauaa

SEQ ID NO: 380124 - RNA, 24 nt, Human
cccacugacaaguucauaugauaa

SEQ ID NO: 380125 - RNA, 22 nt, Human
cccccggagcccgcccgccgcc

SEQ ID NO: 380126 - RNA, 18 nt, Human
ccccggagcccgcccgcc

SEQ ID NO: 380127 - RNA, 20 nt, Human
ccgccgcgccgccgcggccc

SEQ ID NO: 380128 - RNA, 20 nt, Human
ccgccgcggcccgggcgccc

SEQ ID NO: 380129 - RNA, 24 nt, Human
ccgccggggacgcgggcucggcgg

SEQ ID NO: 380130 - RNA, 19 nt, Human
ccuagacuaagagggaugc

SEQ ID NO: 380131 - RNA, 18 nt, Human
ccuucuccagccuuauug

SEQ ID NO: 380132 - RNA, 19 nt, Human
cgaguuuccggcuugagca

SEQ ID NO: 380133 - RNA, 26 nt, Human
cgcacagcaaacagcacgugcaaagg

SEQ ID NO: 380134 - RNA, 20 nt, Human
cggcuuuuccuucuccagcc

SEQ ID NO: 380135 - RNA, 21 nt, Human
cgggguggauggcggagguca

SEQ ID NO: 380136 - RNA, 25 nt, Human
cgugcaaaggugcagaggugugcga

SEQ ID NO: 380137 - RNA, 18 nt, Human
cucaaggcaauaaaaaaa

SEQ ID NO: 380138 - RNA, 25 nt, Human
cuccugacagcauuaacacagacaa

SEQ ID NO: 380139 - RNA, 23 nt, Human
cucucugcugccgcggcucuugg

SEQ ID NO: 380140 - RNA, 24 nt, Human
cucucugcugccgcggcucuuggu

SEQ ID NO: 380141 - RNA, 21 nt, Human
cugaagucccugggaauccac

SEQ ID NO: 380142 - RNA, 22 nt, Human
gaacaacuaggacuugauccug

SEQ ID NO: 380143 - RNA, 22 nt, Human
gaagaacuuuaaagaaagcuga

SEQ ID NO: 380144 - RNA, 21 nt, Human
gacugugcaagaguugggaga

SEQ ID NO: 380145 - RNA, 19 nt, Human
gagaggaggagacggagga

SEQ ID NO: 380146 - RNA, 23 nt, Human
gagccugguacaucugggaaugg

SEQ ID NO: 380147 - RNA, 22 nt, Human
gauguggggagugagagaggga

SEQ ID NO: 380148 - RNA, 21 nt, Human
gcaagaaacaacaaggaccua

SEQ ID NO: 380149 - RNA, 25 nt, Human
gcccccagccaaaagcuauggaaau

SEQ ID NO: 380150 - RNA, 21 nt, Human
gcccggaggcgcagcucgcgc

SEQ ID NO: 380151 - RNA, 24 nt, Human
gcgccggcuuuuccuucuccagcc

SEQ ID NO: 380152 - RNA, 26 nt, Human
gcgccggcuuuuccuucuccagccuu

SEQ ID NO: 380153 - RNA, 20 nt, Human
ggaaagaagaggugaaucac

SEQ ID NO: 380154 - RNA, 21 nt, Human
ggagagcuaaggcugagaggu

SEQ ID NO: 380155 - RNA, 18 nt, Human
ggaggagacggaggagga

SEQ ID NO: 380156 - RNA, 18 nt, Human
ggaggagacggaggagga

SEQ ID NO: 380157 - RNA, 18 nt, Human
ggccgcgggcgcgccggc

SEQ ID NO: 380158 - RNA, 18 nt, Human
gguggugggggaagaggg

SEQ ID NO: 380159 - RNA, 18 nt, Human
guacaacaacaaaaacag

SEQ ID NO: 380160 - RNA, 20 nt, Human
uaaaaaugucccccgccccc

SEQ ID NO: 380161 - RNA, 18 nt, Human
uaaauaaaccgcaacuga

SEQ ID NO: 380162 - RNA, 23 nt, Human
uaaauacaacaaauaaauaugaa

SEQ ID NO: 380163 - RNA, 22 nt, Human
uaagacaggaagcaaggagacc

SEQ ID NO: 380164 - RNA, 21 nt, Human
uaauaauaagaaaucacccug

SEQ ID NO: 380165 - RNA, 18 nt, Human
uacugaaggccuaguugc

SEQ ID NO: 380166 - RNA, 24 nt, Human
uagaagaacuuuaaagaaagcuga

SEQ ID NO: 380167 - RNA, 21 nt, Human
uagacuaagagggaugcuuug

SEQ ID NO: 380168 - RNA, 18 nt, Human
uagaguauuaaagucaac

SEQ ID NO: 380169 - RNA, 22 nt, Human
uagaguggaugagcaggguggu

SEQ ID NO: 380170 - RNA, 20 nt, Human
uauaaaagaaagacggugga

SEQ ID NO: 380171 - RNA, 18 nt, Human
uauaaaagaaugaagagg

SEQ ID NO: 380172 - RNA, 19 nt, Human
uaucaggaugaaaacaauc

SEQ ID NO: 380173 - RNA, 23 nt, Human
uaugaaaccagcaaagcaauuuc

SEQ ID NO: 380174 - RNA, 19 nt, Human
ucagaaacaaaugaaagga

SEQ ID NO: 380175 - RNA, 21 nt, Human
ucagaaacaaaugaaaggaca

SEQ ID NO: 380176 - RNA, 23 nt, Human
uccacaaggaguuggcacagagg

SEQ ID NO: 380177 - RNA, 21 nt, Human
uccacgcacagcaaacagcac

SEQ ID NO: 380178 - RNA, 23 nt, Human
uccugaagucccugggaauccac

SEQ ID NO: 380179 - RNA, 19 nt, Human
ucgcgccgccgcgccgccg

SEQ ID NO: 380180 - RNA, 19 nt, Human
ucuacagugaacuacagua

SEQ ID NO: 380181 - RNA, 22 nt, Human
ugaaaaaagaaaugacuuggga

SEQ ID NO: 380182 - RNA, 21 nt, Human
ugacagcauuaacacagacaa

SEQ ID NO: 380183 - RNA, 23 nt, Human
ugagagagagaggaggagacgga

SEQ ID NO: 380184 - RNA, 20 nt, Human
ugagagguaagcaagggcca

SEQ ID NO: 380185 - RNA, 21 nt, Human
ugaguggaggacagggcuucu

SEQ ID NO: 380186 - RNA, 19 nt, Human
ugccaguaauuuaucgaac

SEQ ID NO: 380187 - RNA, 18 nt, Human
ugcugaacaacuaggacu

SEQ ID NO: 380188 - RNA, 18 nt, Human
uggaauaguccaugaaca

SEQ ID NO: 380189 - RNA, 23 nt, Human
uggauggcggaggucaggaauac

SEQ ID NO: 380190 - RNA, 19 nt, Human
ugggaaaaggagggaaaga

SEQ ID NO: 380191 - RNA, 18 nt, Human
ugggauuuuaccauuugg

SEQ ID NO: 380192 - RNA, 19 nt, Human
ugggggaagaggggugaug

SEQ ID NO: 380193 - RNA, 19 nt, Human
uggugggggaagaggggug

SEQ ID NO: 380194 - RNA, 21 nt, Human
ugguggugggggaagaggggu

SEQ ID NO: 380195 - RNA, 20 nt, Human
uguacaacaacaaaaacagc

SEQ ID NO: 380196 - RNA, 22 nt, Human
uguauacaaucucccuuaugug

SEQ ID NO: 380197 - RNA, 27 nt, Human
uguugcuaaauagagaugaaaaaagaa

SEQ ID NO: 380198 - RNA, 22 nt, Human
uuaaagaauaaauaaaccgcaa

SEQ ID NO: 380199 - RNA, 21 nt, Human
uucagcgcuccucucugcugc

SEQ ID NO: 380200 - RNA, 22 nt, Human
uucaggcaagaaacaacaagga

SEQ ID NO: 380201 - RNA, 20 nt, Human
uugauccugaagucccuggg

SEQ ID NO: 380202 - RNA, 19 nt, Human
uuggaagggcugccgaguu

SEQ ID NO: 380203 - RNA, 20 nt, Human
uugguuuguaccauguuaga

SEQ ID NO: 380204 - RNA, 24 nt, Human
uuuaaaaugacauucagcaaagua

SEQ ID NO: 380205 - RNA, 20 nt, Human
uuuaaccaugcaggcuaaca

SEQ ID NO: 380206 - RNA, 18 nt, Human
uuugggaaaaggagggaa

SEQ ID NO: 380207 - RNA, 19 nt, Human
uuugguggugggggaagag

SEQ ID NO: 380208 - RNA, 22 nt, Human
uuuuaaaaucucggaauggcuu

SEQ ID NO: 380209 - RNA, 23 nt, Human
uuuugguggugggggaagagggg

SEQ ID NO: 380210 - RNA, 19 nt, Human
uuuuuuuuuuuuguacaac

SEQ ID NO: 380211 - RNA, 26 nt, Human
uuuuuuuuuuuuuaaaaaguaccuca

SEQ ID NO: 380212 - RNA, 19 nt, Human
uuuuuuuuuuuuuuuuugu

SEQ ID NO: 380213 - RNA, 20 nt, Human
uuuuuuuuuuuuuuuuuugg

SEQ ID NO: 380214 - RNA, 24 nt, Human
aaaccagcagccauccccucucag

SEQ ID NO: 380215 - RNA, 19 nt, Human
aagaacucucugcuccacc

SEQ ID NO: 380216 - RNA, 22 nt, Human
aagaagaauggacuccaauuug

SEQ ID NO: 380217 - RNA, 18 nt, Human
aagaagcauuaggauucu

SEQ ID NO: 380218 - RNA, 21 nt, Human
aagcaggucuuucugaugcuu

SEQ ID NO: 380219 - RNA, 18 nt, Human
aagugcugccuccaauag

SEQ ID NO: 380220 - RNA, 20 nt, Human
acaaagagaggaagccugga

SEQ ID NO: 380221 - RNA, 21 nt, Human
accgaaagggcuguauaaucu

SEQ ID NO: 380222 - RNA, 19 nt, Human
accuugcacugggcuaccc

SEQ ID NO: 380223 - RNA, 18 nt, Human
acugcccuaaagaagaau

SEQ ID NO: 380224 - RNA, 20 nt, Human
acuggaaugcugggggcugg

SEQ ID NO: 380225 - RNA, 21 nt, Human
acuucauaaccgaaagggcug

SEQ ID NO: 380226 - RNA, 19 nt, Human
agaacagcaggaaggaugg

SEQ ID NO: 380227 - RNA, 25 nt, Human
agacaggaaaggagugggauccugg

SEQ ID NO: 380228 - RNA, 22 nt, Human
agcagagcuugccuacugcaaa

SEQ ID NO: 380229 - RNA, 27 nt, Human
aggacagcaugagggaaaagugcugcc

SEQ ID NO: 380230 - RNA, 20 nt, Human
aggcaggucaggucuuugga

SEQ ID NO: 380231 - RNA, 19 nt, Human
aggcaucacaguauauugc

SEQ ID NO: 380232 - RNA, 18 nt, Human
auaggacagcaugaggga

SEQ ID NO: 380233 - RNA, 22 nt, Human
augacacugacugauugguacu

SEQ ID NO: 380234 - RNA, 18 nt, Human
augcuuacaugcauagga

SEQ ID NO: 380235 - RNA, 19 nt, Human
auugcuuggggccugaaau

SEQ ID NO: 380236 - RNA, 18 nt, Human
caauaaguaagaacucuc

SEQ ID NO: 380237 - RNA, 19 nt, Human
caccacacagacaggaaag

SEQ ID NO: 380238 - RNA, 21 nt, Human
caccagauguacucagaggac

SEQ ID NO: 380239 - RNA, 27 nt, Human
caccuuuccccacuucuccuccccacu

SEQ ID NO: 380240 - RNA, 20 nt, Human
cagacaggaaaggaguggga

SEQ ID NO: 380241 - RNA, 21 nt, Human
cagcacaaucacaaagagagg

SEQ ID NO: 380242 - RNA, 22 nt, Human
cagcacaaucacaaagagagga

SEQ ID NO: 380243 - RNA, 22 nt, Human
caucacaguauauugcauucuu

SEQ ID NO: 380244 - RNA, 24 nt, Human
ccauccccucucaguucccaacuu

SEQ ID NO: 380245 - RNA, 19 nt, Human
ccaugucaacauagcccuc

SEQ ID NO: 380246 - RNA, 19 nt, Human
ccucucaguucccaacuuc

SEQ ID NO: 380247 - RNA, 23 nt, Human
ccuugcacugggcuacccugcaa

SEQ ID NO: 380248 - RNA, 20 nt, Human
cuagaacagcaggaaggaug

SEQ ID NO: 380249 - RNA, 24 nt, Human
cucagccucguccccaccuguggc

SEQ ID NO: 380250 - RNA, 18 nt, Human
cucugucacccaggccag

SEQ ID NO: 380251 - RNA, 20 nt, Human
cuggaugcuggcuuuaagau

SEQ ID NO: 380252 - RNA, 22 nt, Human
cugguuuugcauguggcaucag

SEQ ID NO: 380253 - RNA, 22 nt, Human
cuguaucuaugucucauguccu

SEQ ID NO: 380254 - RNA, 22 nt, Human
gaacaaaagaaauaaauggaga

SEQ ID NO: 380255 - RNA, 22 nt, Human
gaaugcugggggcugggaagca

SEQ ID NO: 380256 - RNA, 23 nt, Human
gagcauuuguacuaggcauccaa

SEQ ID NO: 380257 - RNA, 21 nt, Human
gaggaaauucuggaugcuggc

SEQ ID NO: 380258 - RNA, 19 nt, Human
gaugcuuugguuugggaaa

SEQ ID NO: 380259 - RNA, 22 nt, Human
gauugcuuggggccugaaaugu

SEQ ID NO: 380260 - RNA, 18 nt, Human
gcacaaucacaaagagag

SEQ ID NO: 380261 - RNA, 21 nt, Human
gcacaaucacaaagagaggaa

SEQ ID NO: 380262 - RNA, 20 nt, Human
gcacaccaccagauguacuc

SEQ ID NO: 380263 - RNA, 20 nt, Human
gccugcugacucucucagcc

SEQ ID NO: 380264 - RNA, 19 nt, Human
gcuacccugcaaacuggag

SEQ ID NO: 380265 - RNA, 22 nt, Human
gcuacccugcaaacuggagcag

SEQ ID NO: 380266 - RNA, 24 nt, Human
gggauccugggggacagcuguggu

SEQ ID NO: 380267 - RNA, 21 nt, Human
gggccccuaguuccucuacuu

SEQ ID NO: 380268 - RNA, 19 nt, Human
gggcugggaagcaggucuu

SEQ ID NO: 380269 - RNA, 19 nt, Human
gguguugggcucccggagg

SEQ ID NO: 380270 - RNA, 20 nt, Human
guuuauaguccuacugcugc

SEQ ID NO: 380271 - RNA, 21 nt, Human
uaacaaaauaaaucaaacuga

SEQ ID NO: 380272 - RNA, 18 nt, Human
uaagaguaaggcauccaa

SEQ ID NO: 380273 - RNA, 21 nt, Human
uaagauaagaguaaggcaucc

SEQ ID NO: 380274 - RNA, 21 nt, Human
uaagaugcuguuguugguucc

SEQ ID NO: 380275 - RNA, 18 nt, Human
uagaacagcaggaaggau

SEQ ID NO: 380276 - RNA, 23 nt, Human
uaggaugcauccacuuaagucuu

SEQ ID NO: 380277 - RNA, 19 nt, Human
uagucucuuccccaggucc

SEQ ID NO: 380278 - RNA, 22 nt, Human
uccauguuccuaguucccugca

SEQ ID NO: 380279 - RNA, 18 nt, Human
uccccacuucuccucccc

SEQ ID NO: 380280 - RNA, 21 nt, Human
ucccugcaacguaggcacaac

SEQ ID NO: 380281 - RNA, 18 nt, Human
uccuacugcugcugccaa

SEQ ID NO: 380282 - RNA, 19 nt, Human
uccugcucugucacccagg

SEQ ID NO: 380283 - RNA, 27 nt, Human
uccugcucugucacccaggccaguacc

SEQ ID NO: 380284 - RNA, 26 nt, Human
ucucacuguuuccuggggggcugggu

SEQ ID NO: 380285 - RNA, 18 nt, Human
ucucagauacuugauucu

SEQ ID NO: 380286 - RNA, 22 nt, Human
ucuggcucugccugcugacucu

SEQ ID NO: 380287 - RNA, 21 nt, Human
ucugucacccaggccaguacc

SEQ ID NO: 380288 - RNA, 23 nt, Human
ucuugacaucguacaccugguuu

SEQ ID NO: 380289 - RNA, 22 nt, Human
ugaugcuccuuuccagccacug

SEQ ID NO: 380290 - RNA, 23 nt, Human
ugcacugggcuacccugcaaacu

SEQ ID NO: 380291 - RNA, 19 nt, Human
ugccaugucaacauagccc

SEQ ID NO: 380292 - RNA, 22 nt, Human
ugcuguuguugguuccccucca

SEQ ID NO: 380293 - RNA, 21 nt, Human
ugcuuacaugcauaggaugca

SEQ ID NO: 380294 - RNA, 18 nt, Human
uggaaugcugggggcugg

SEQ ID NO: 380295 - RNA, 23 nt, Human
uggaaugcugggggcugggaagc

SEQ ID NO: 380296 - RNA, 22 nt, Human
ugggaaauaaugcuuacaugca

SEQ ID NO: 380297 - RNA, 21 nt, Human
ugggauccugggggacagcug

SEQ ID NO: 380298 - RNA, 19 nt, Human
uggggccugaaaugugaug

SEQ ID NO: 380299 - RNA, 23 nt, Human
ugucacccaggccaguaccuaga

SEQ ID NO: 380300 - RNA, 18 nt, Human
aaaaugagaaauaaagaa

SEQ ID NO: 380301 - RNA, 19 nt, Human
aaagguaaaccaacaucau

SEQ ID NO: 380302 - RNA, 18 nt, Human
aaccccaccaaccgcggc

SEQ ID NO: 380303 - RNA, 20 nt, Human
aagaaccucuaaaaagucag

SEQ ID NO: 380304 - RNA, 21 nt, Human
aauguaaaaguucaaaaggga

SEQ ID NO: 380305 - RNA, 19 nt, Human
aauuucuauccauugccuc

SEQ ID NO: 380306 - RNA, 24 nt, Human
acaggguccgcgacagcuccuccu

SEQ ID NO: 380307 - RNA, 21 nt, Human
agcaacagagaccgacucuac

SEQ ID NO: 380308 - RNA, 23 nt, Human
agcaacagagaccgacucuacag

SEQ ID NO: 380309 - RNA, 24 nt, Human
agcaaggagccgaggaagcccccg

SEQ ID NO: 380310 - RNA, 24 nt, Human
aggaaaagguaaaccaacaucauu

SEQ ID NO: 380311 - RNA, 19 nt, Human
aggcaaaaagagcaacaga

SEQ ID NO: 380312 - RNA, 25 nt, Human
aggcaaaaagagcaacagagaccga

SEQ ID NO: 380313 - RNA, 21 nt, Human
auguagauauauauauauaca

SEQ ID NO: 380314 - RNA, 22 nt, Human
auugccucuaucuuugguguca

SEQ ID NO: 380315 - RNA, 27 nt, Human
auuuccauuuuaaugaagaauuaaagg

SEQ ID NO: 380316 - RNA, 21 nt, Human
caacagcaaggagccgaggaa

SEQ ID NO: 380317 - RNA, 20 nt, Human
cacacacauauauauauaua

SEQ ID NO: 380318 - RNA, 21 nt, Human
cacacacauauauauauauau

SEQ ID NO: 380319 - RNA, 22 nt, Human
cauguagauauauauauauaca

SEQ ID NO: 380320 - RNA, 24 nt, Human
ccaacaucauuucuuuaaaaugag

SEQ ID NO: 380321 - RNA, 21 nt, Human
cccaccaaccgcggcagcagc

SEQ ID NO: 380322 - RNA, 18 nt, Human
ccgcgacagcuccuccuc

SEQ ID NO: 380323 - RNA, 19 nt, Human
ccuauaagcugaggauaaa

SEQ ID NO: 380324 - RNA, 18 nt, Human
ccucuaucuuugguguca

SEQ ID NO: 380325 - RNA, 22 nt, Human
cgagacaaauagccuuguauca

SEQ ID NO: 380326 - RNA, 18 nt, Human
cgaggaagcccccgcgcg

SEQ ID NO: 380327 - RNA, 23 nt, Human
cgaucaccacugugauucaaaau

SEQ ID NO: 380328 - RNA, 18 nt, Human
cggcaacagcaaggagcc

SEQ ID NO: 380329 - RNA, 24 nt, Human
cggcggcaacagcaaggagccgag

SEQ ID NO: 380330 - RNA, 26 nt, Human
cggcggcaacagcaaggagccgagga

SEQ ID NO: 380331 - RNA, 18 nt, Human
cuccucucacccaacccc

SEQ ID NO: 380332 - RNA, 18 nt, Human
cugcggcggcggcaacag

SEQ ID NO: 380333 - RNA, 20 nt, Human
cugcgugccgaggugucccc

SEQ ID NO: 380334 - RNA, 24 nt, Human
gagcaacagagaccgacucuacag

SEQ ID NO: 380335 - RNA, 21 nt, Human
gagguguccccggggacuccc

SEQ ID NO: 380336 - RNA, 28 nt, Human
gauauauauauauacacacacauauaua

SEQ ID NO: 380337 - RNA, 20 nt, Human
ggcaaaaagagcaacagaga

SEQ ID NO: 380338 - RNA, 24 nt, Human
guaaaaguucaaaagggaacauua

SEQ ID NO: 380339 - RNA, 25 nt, Human
guuucauuccucugcaggggcggaa

SEQ ID NO: 380340 - RNA, 23 nt, Human
uaauuuugucucauggucccaca

SEQ ID NO: 380341 - RNA, 25 nt, Human
uacaagagacuucgaaaauguagug

SEQ ID NO: 380342 - RNA, 20 nt, Human
uacaauguguuaaagacaua

SEQ ID NO: 380343 - RNA, 20 nt, Human
uacacacacauauauauaua

SEQ ID NO: 380344 - RNA, 23 nt, Human
uacacacacauauauauauauau

SEQ ID NO: 380345 - RNA, 23 nt, Human
uauacacacacauauauauauau

SEQ ID NO: 380346 - RNA, 24 nt, Human
uauacacacacauauauauauaua

SEQ ID NO: 380347 - RNA, 19 nt, Human
uauauacacacacauauau

SEQ ID NO: 380348 - RNA, 24 nt, Human
uauauacacacacauauauauaua

SEQ ID NO: 380349 - RNA, 19 nt, Human
uauauauacacacacauau

SEQ ID NO: 380350 - RNA, 24 nt, Human
uauauauacacacacauauauaua

SEQ ID NO: 380351 - RNA, 23 nt, Human
uauauauauauaucucuuuagcu

SEQ ID NO: 380352 - RNA, 18 nt, Human
uauguacauaacauuugu

SEQ ID NO: 380353 - RNA, 26 nt, Human
ucacacgaucaccacugugauucaaa

SEQ ID NO: 380354 - RNA, 19 nt, Human
ucacccaaccccaccaacc

SEQ ID NO: 380355 - RNA, 22 nt, Human
ucccucucgacagcacgggagu

SEQ ID NO: 380356 - RNA, 23 nt, Human
uccucaggcaaaaagagcaacag

SEQ ID NO: 380357 - RNA, 25 nt, Human
ucucacccaaccccaccaaccgcgg

SEQ ID NO: 380358 - RNA, 20 nt, Human
ucuuuggugucacugccacc

SEQ ID NO: 380359 - RNA, 23 nt, Human
ugaaaggaauuaaauguuguaag

SEQ ID NO: 380360 - RNA, 18 nt, Human
ugaaaugucaugccaaaa

SEQ ID NO: 380361 - RNA, 21 nt, Human
ugucacugccaccaauaaaca

SEQ ID NO: 380362 - RNA, 22 nt, Human
uguccccggggacucccucucg

SEQ ID NO: 380363 - RNA, 23 nt, Human
ugugaaacugaaacacacgacaa

SEQ ID NO: 380364 - RNA, 24 nt, Human
uuaaagacauauuuaaaauacuag

SEQ ID NO: 380365 - RNA, 21 nt, Human
uuaaaggauacaauguguuaa

SEQ ID NO: 380366 - RNA, 21 nt, Human
uucaaaauggccacuaaugca

SEQ ID NO: 380367 - RNA, 21 nt, Human
uuuaaaaauuucuauccauug

SEQ ID NO: 380368 - RNA, 22 nt, Human
uuucauuccucugcaggggcgg

SEQ ID NO: 380369 - RNA, 23 nt, Human
uuugaaacaucuacuuauuucca

SEQ ID NO: 380370 - RNA, 21 nt, Human
aaagcaauagggaaacauguc

SEQ ID NO: 380371 - RNA, 21 nt, Human
aacacgaaccccacccauccc

SEQ ID NO: 380372 - RNA, 21 nt, Human
acccauaucagccacuagcau

SEQ ID NO: 380373 - RNA, 22 nt, Human
agugguggggucgcugccgcug

SEQ ID NO: 380374 - RNA, 24 nt, Human
auaaagcaagacuucucaggcccu

SEQ ID NO: 380375 - RNA, 25 nt, Human
caccaaucugaauccuagugucaua

SEQ ID NO: 380376 - RNA, 23 nt, Human
cacuagcauuuuaaagaugguuu

SEQ ID NO: 380377 - RNA, 21 nt, Human
cccacacccauaucagccacu

SEQ ID NO: 380378 - RNA, 21 nt, Human
cccccacacccauaucagcca

SEQ ID NO: 380379 - RNA, 23 nt, Human
cccucaagcuucgccucugaguc

SEQ ID NO: 380380 - RNA, 24 nt, Human
ccgcugcugcugccgccgcugcug

SEQ ID NO: 380381 - RNA, 26 nt, Human
ccgcugcugcugccgccgcugcugcc

SEQ ID NO: 380382 - RNA, 18 nt, Human
cuaaacacgaaccccacc

SEQ ID NO: 380383 - RNA, 23 nt, Human
cugcaggagacccucugagauuc

SEQ ID NO: 380384 - RNA, 19 nt, Human
cugcugccucuucucucaa

SEQ ID NO: 380385 - RNA, 27 nt, Human
cugcugcugccgccgcugcugcugccu

SEQ ID NO: 380386 - RNA, 21 nt, Human
gaaagcaauagggaaacaugu

SEQ ID NO: 380387 - RNA, 20 nt, Human
gccgcugcugcugccgccgc

SEQ ID NO: 380388 - RNA, 18 nt, Human
gcugccucuucucucaag

SEQ ID NO: 380389 - RNA, 20 nt, Human
gcugcugccgccgcugcugc

SEQ ID NO: 380390 - RNA, 24 nt, Human
gcugcugccgccgcugcugcugcc

SEQ ID NO: 380391 - RNA, 25 nt, Human
gcugcugccgccgcugcugcugccu

SEQ ID NO: 380392 - RNA, 21 nt, Human
gcuuggacuauauuucuggaa

SEQ ID NO: 380393 - RNA, 21 nt, Human
gugguguugcugugcagcggc

SEQ ID NO: 380394 - RNA, 21 nt, Human
uaaacacgaaccccacccauc

SEQ ID NO: 380395 - RNA, 18 nt, Human
uacauaagggcccagaaa

SEQ ID NO: 380396 - RNA, 19 nt, Human
uaggggccugaacccucau

SEQ ID NO: 380397 - RNA, 25 nt, Human
ucaagggugguucuucguccuuccu

SEQ ID NO: 380398 - RNA, 19 nt, Human
uccaagagccucaucccug

SEQ ID NO: 380399 - RNA, 25 nt, Human
uccaagagccucaucccuguuuucu

SEQ ID NO: 380400 - RNA, 19 nt, Human
ucgcugccgcugcugcugc

SEQ ID NO: 380401 - RNA, 19 nt, Human
ucugugguguugcugugca

SEQ ID NO: 380402 - RNA, 22 nt, Human
ugacuggugccuaugaaagcaa

SEQ ID NO: 380403 - RNA, 23 nt, Human
ugaguuuugucuuuuuccacaga

SEQ ID NO: 380404 - RNA, 23 nt, Human
ugcugccucuucucucaagggug

SEQ ID NO: 380405 - RNA, 23 nt, Human
ugcugcugccgccgcugcugcug

SEQ ID NO: 380406 - RNA, 24 nt, Human
ugcugcugccgccgcugcugcugc

SEQ ID NO: 380407 - RNA, 20 nt, Human
uggcagugguggggucgcug

SEQ ID NO: 380408 - RNA, 21 nt, Human
uggggugcugcuuguucugug

SEQ ID NO: 380409 - RNA, 21 nt, Human
ugguggggucgcugccgcugc

SEQ ID NO: 380410 - RNA, 18 nt, Human
uguaccagugcagcuggg

SEQ ID NO: 380411 - RNA, 20 nt, Human
ugugcacauguacugccagc

SEQ ID NO: 380412 - RNA, 25 nt, Human
ugugcacauguacugccagcgcaug

SEQ ID NO: 380413 - RNA, 21 nt, Human
ugugguguugcugugcagcgg

SEQ ID NO: 380414 - RNA, 22 nt, Human
uuaaagaugguuuuaggugggu

SEQ ID NO: 380415 - RNA, 20 nt, Human
uuagacuugcaggcuuccag

SEQ ID NO: 380416 - RNA, 22 nt, Human
uuccaguagggauucuccugau

SEQ ID NO: 380417 - RNA, 25 nt, Human
uucugcuuugugcacauguacugcc

SEQ ID NO: 380418 - RNA, 25 nt, Human
uugagcccauaaagcaagacuucuc

SEQ ID NO: 380419 - RNA, 21 nt, Human
uuuuagguggguacauaaggg

SEQ ID NO: 380420 - RNA, 23 nt, Human
aaaaaaaaagaagaaaccuagua

SEQ ID NO: 380421 - RNA, 25 nt, Human
aaaaaauaaauaaaaacaaaagcaa

SEQ ID NO: 380422 - RNA, 18 nt, Human
aaaacaguagacacagga

SEQ ID NO: 380423 - RNA, 22 nt, Human
aaacaaaagcaaaaaacagcuc

SEQ ID NO: 380424 - RNA, 24 nt, Human
aaacaaaagcaaaaaacagcucca

SEQ ID NO: 380425 - RNA, 27 nt, Human
aaacaacuaacauuaaacacggaaaug

SEQ ID NO: 380426 - RNA, 23 nt, Human
aaacacaauaaaguaaaacacag

SEQ ID NO: 380427 - RNA, 24 nt, Human
aacaaaaaaaaagaagaaaccuag

SEQ ID NO: 380428 - RNA, 22 nt, Human
aacaaaacaguagacacaggaa

SEQ ID NO: 380429 - RNA, 21 nt, Human
aacacagugugaccacaucuc

SEQ ID NO: 380430 - RNA, 22 nt, Human
aacacagugugaccacaucucu

SEQ ID NO: 380431 - RNA, 24 nt, Human
aacacuuugggaggcuaagguggg

SEQ ID NO: 380432 - RNA, 21 nt, Human
aacauugugcugcugccaccu

SEQ ID NO: 380433 - RNA, 24 nt, Human
aagaagaaaccuaguaauucaaaa

SEQ ID NO: 380434 - RNA, 23 nt, Human
aauaaaaaauagaugaagucaaa

SEQ ID NO: 380435 - RNA, 24 nt, Human
aaugacuugaggccaggaguucaa

SEQ ID NO: 380436 - RNA, 20 nt, Human
aaugcccucucuuagauagc

SEQ ID NO: 380437 - RNA, 24 nt, Human
acaaaaaaaaagaagaaaccuagu

SEQ ID NO: 380438 - RNA, 22 nt, Human
acaacaaaacaguagacacagg

SEQ ID NO: 380439 - RNA, 23 nt, Human
acagagugagagccugucucaaa

SEQ ID NO: 380440 - RNA, 24 nt, Human
acagagugagagccugucucaaaa

SEQ ID NO: 380441 - RNA, 23 nt, Human
accaguggcaaaaaauaaauaaa

SEQ ID NO: 380442 - RNA, 22 nt, Human
acucuacgcuaauaaaaacaaa

SEQ ID NO: 380443 - RNA, 24 nt, Human
acugcccuccagcaugggcaacag

SEQ ID NO: 380444 - RNA, 20 nt, Human
acuugaggccaggaguucaa

SEQ ID NO: 380445 - RNA, 22 nt, Human
agaaaacacaauaaaguaaaac

SEQ ID NO: 380446 - RNA, 18 nt, Human
agaaacugaaacuaaacu

SEQ ID NO: 380447 - RNA, 18 nt, Human
agccugggcaacacagug

SEQ ID NO: 380448 - RNA, 19 nt, Human
agccugggcaacacagugu

SEQ ID NO: 380449 - RNA, 18 nt, Human
aggaauaaaaccaaacau

SEQ ID NO: 380450 - RNA, 20 nt, Human
aggaauacuaacacauaaac

SEQ ID NO: 380451 - RNA, 23 nt, Human
aggaguucaagaccagccugggc

SEQ ID NO: 380452 - RNA, 24 nt, Human
aggcaugguggcucacgcuuauaa

SEQ ID NO: 380453 - RNA, 23 nt, Human
aggcuaagguggggaaugacuug

SEQ ID NO: 380454 - RNA, 22 nt, Human
agguggggaaugacuugaggcc

SEQ ID NO: 380455 - RNA, 21 nt, Human
agucucaagauaagucuugga

SEQ ID NO: 380456 - RNA, 18 nt, Human
auaccacugcccuccagc

SEQ ID NO: 380457 - RNA, 20 nt, Human
auauuaacaacaacaaaaca

SEQ ID NO: 380458 - RNA, 22 nt, Human
aucuugucacaaaucccuuacu

SEQ ID NO: 380459 - RNA, 21 nt, Human
auuuaaaaaaaaaaaagugaa

SEQ ID NO: 380460 - RNA, 23 nt, Human
caaaaaacagcuccacuguucca

SEQ ID NO: 380461 - RNA, 20 nt, Human
caaaagcaaaaaacagcucc

SEQ ID NO: 380462 - RNA, 22 nt, Human
caaaagcaaaaaacagcuccac

SEQ ID NO: 380463 - RNA, 24 nt, Human
caaacuaccaugcacuugaaacac

SEQ ID NO: 380464 - RNA, 27 nt, Human
caaauaaaaaauagaugaagucaaaac

SEQ ID NO: 380465 - RNA, 24 nt, Human
caacacuuugggaggcuaaggugg

SEQ ID NO: 380466 - RNA, 21 nt, Human
caaguuaggcaccuuuggaau

SEQ ID NO: 380467 - RNA, 20 nt, Human
cacaucucuacaaaaaauua

SEQ ID NO: 380468 - RNA, 19 nt, Human
caccuguauucccagcuau

SEQ ID NO: 380469 - RNA, 21 nt, Human
caccuguauucccagcuauuc

SEQ ID NO: 380470 - RNA, 24 nt, Human
cacgcuuauaaucccaacacuuug

SEQ ID NO: 380471 - RNA, 24 nt, Human
cacugcccuccagcaugggcaaca

SEQ ID NO: 380472 - RNA, 24 nt, Human
cagcuauucaggaggcugagguag

SEQ ID NO: 380473 - RNA, 22 nt, Human
caguagaauaugagacuuccua

SEQ ID NO: 380474 - RNA, 24 nt, Human
caugagaaacugaaacuaaacuac

SEQ ID NO: 380475 - RNA, 24 nt, Human
cauguacacaaaaaaauauauaca

SEQ ID NO: 380476 - RNA, 21 nt, Human
ccacugcccuccagcaugggc

SEQ ID NO: 380477 - RNA, 24 nt, Human
ccacugcccuccagcaugggcaac

SEQ ID NO: 380478 - RNA, 25 nt, Human
cccacaauacucaauucuaaucauu

SEQ ID NO: 380479 - RNA, 23 nt, Human
cccauauuaacaacaacaaaaca

SEQ ID NO: 380480 - RNA, 20 nt, Human
ccuccagcaugggcaacaga

SEQ ID NO: 380481 - RNA, 21 nt, Human
ccuccagcaugggcaacagag

SEQ ID NO: 380482 - RNA, 21 nt, Human
ccuguauucccagcuauucag

SEQ ID NO: 380483 - RNA, 19 nt, Human
ccugucucaaaauuuaaaa

SEQ ID NO: 380484 - RNA, 20 nt, Human
ccuuuggaauuucaccaucc

SEQ ID NO: 380485 - RNA, 23 nt, Human
cgcuuauaaucccaacacuuugg

SEQ ID NO: 380486 - RNA, 20 nt, Human
cuaacauuaaacacggaaau

SEQ ID NO: 380487 - RNA, 18 nt, Human
cucacaccgcucucaaca

SEQ ID NO: 380488 - RNA, 22 nt, Human
cucacgcuuauaaucccaacac

SEQ ID NO: 380489 - RNA, 24 nt, Human
cucacgcuuauaaucccaacacuu

SEQ ID NO: 380490 - RNA, 19 nt, Human
cugaauugccucaaguucc

SEQ ID NO: 380491 - RNA, 21 nt, Human
cuguauucccagcuauucagg

SEQ ID NO: 380492 - RNA, 21 nt, Human
cuuugggaggcuaaggugggg

SEQ ID NO: 380493 - RNA, 18 nt, Human
gaaugacuugaggccagg

SEQ ID NO: 380494 - RNA, 19 nt, Human
gaggugaagcaaggacgug

SEQ ID NO: 380495 - RNA, 20 nt, Human
gaugugugcauguacacagu

SEQ ID NO: 380496 - RNA, 27 nt, Human
gcaaaaaauaaauaaaaacaaaagcaa

SEQ ID NO: 380497 - RNA, 18 nt, Human
gcggucagaucaaagcug

SEQ ID NO: 380498 - RNA, 22 nt, Human
gcgugcaccuguauucccagcu

SEQ ID NO: 380499 - RNA, 24 nt, Human
ggaaugacuugaggccaggaguuc

SEQ ID NO: 380500 - RNA, 21 nt, Human
ggccaggcaugguggcucacg

SEQ ID NO: 380501 - RNA, 23 nt, Human
gguggcucacgcuuauaauccca

SEQ ID NO: 380502 - RNA, 20 nt, Human
gugcauuccuucugucagau

SEQ ID NO: 380503 - RNA, 23 nt, Human
uaaaaaaaaaaaagugaaaaugc

SEQ ID NO: 380504 - RNA, 19 nt, Human
uaaaaaauagaugaaguca

SEQ ID NO: 380505 - RNA, 21 nt, Human
uaaaaaauagaugaagucaaa

SEQ ID NO: 380506 - RNA, 26 nt, Human
uaaaaacaaaagcaaaaaacagcucc

SEQ ID NO: 380507 - RNA, 22 nt, Human
uaaggcacccacagaauuaggg

SEQ ID NO: 380508 - RNA, 23 nt, Human
uaagguggggaaugacuugaggc

SEQ ID NO: 380509 - RNA, 25 nt, Human
uaagguggggaaugacuugaggcca

SEQ ID NO: 380510 - RNA, 23 nt, Human
uaagucuuggacaccaacugaau

SEQ ID NO: 380511 - RNA, 23 nt, Human
uaccaagcaccucacaccgcucu

SEQ ID NO: 380512 - RNA, 20 nt, Human
uaccaagcaccucacaccgg

SEQ ID NO: 380513 - RNA, 19 nt, Human
uaccugaggugaagcaagg

SEQ ID NO: 380514 - RNA, 18 nt, Human
uagaauaaccccuugagc

SEQ ID NO: 380515 - RNA, 30 nt, Human
uagaauaaccccuugagcggucagaucaaa

SEQ ID NO: 380516 - RNA, 22 nt, Human
uagaaugugaaaaucauuuaga

SEQ ID NO: 380517 - RNA, 20 nt, Human
uauaaucccaacacuuuggg

SEQ ID NO: 380518 - RNA, 22 nt, Human
uauucuuucuuuacacucaaga

SEQ ID NO: 380519 - RNA, 21 nt, Human
uauugcagaacaaaaaaaaag

SEQ ID NO: 380520 - RNA, 24 nt, Human
ucaaaauuuaaaaaaaaaaaagug

SEQ ID NO: 380521 - RNA, 20 nt, Human
ucauaccacugcccuccagc

SEQ ID NO: 380522 - RNA, 20 nt, Human
uccagcaugggcaacagagu

SEQ ID NO: 380523 - RNA, 24 nt, Human
uccagcaugggcaacagagugaga

SEQ ID NO: 380524 - RNA, 18 nt, Human
ugaaaaugcccucucuua

SEQ ID NO: 380525 - RNA, 24 nt, Human
ugaccacaucucuacaaaaaauua

SEQ ID NO: 380526 - RNA, 21 nt, Human
ugagaaacugaaacuaaacua

SEQ ID NO: 380527 - RNA, 23 nt, Human
ugagacuuccuacucuacgcuaa

SEQ ID NO: 380528 - RNA, 18 nt, Human
ugagauaauucaccauga

SEQ ID NO: 380529 - RNA, 20 nt, Human
ugagguagaauaaccccuug

SEQ ID NO: 380530 - RNA, 20 nt, Human
ugcagaacaaaaaaaaagaa

SEQ ID NO: 380531 - RNA, 23 nt, Human
ugcagaacaaaaaaaaagaagaa

SEQ ID NO: 380532 - RNA, 23 nt, Human
ugcagaacaaaaaaaaagaagaa

SEQ ID NO: 380533 - RNA, 23 nt, Human
uggcaaaaaauaaauaaaaacaa

SEQ ID NO: 380534 - RNA, 26 nt, Human
uggcaaaaaauaaauaaaagggaccc

SEQ ID NO: 380535 - RNA, 22 nt, Human
uggcgugcaccuguauucccag

SEQ ID NO: 380536 - RNA, 21 nt, Human
uggcucacgcuuauaauccca

SEQ ID NO: 380537 - RNA, 21 nt, Human
ugggaggcuaagguggggaau

SEQ ID NO: 380538 - RNA, 24 nt, Human
uggggccaggcaugguggcucacg

SEQ ID NO: 380539 - RNA, 24 nt, Human
ugguggcucacgcuuauaauccca

SEQ ID NO: 380540 - RNA, 19 nt, Human
ugucaaaauggguaugaag

SEQ ID NO: 380541 - RNA, 27 nt, Human
ugucuuguuuagcauguauuucagggg

SEQ ID NO: 380542 - RNA, 23 nt, Human
uuagaaugugaaaaucauuuaga

SEQ ID NO: 380543 - RNA, 18 nt, Human
uucaggaggcugagguag

SEQ ID NO: 380544 - RNA, 22 nt, Human
uugaggccaggaguucaagacc

SEQ ID NO: 380545 - RNA, 23 nt, Human
uuuaaaaaaaaaaaagugaaaau

SEQ ID NO: 380546 - RNA, 18 nt, Human
uuuuacaggccauguagc

SEQ ID NO: 380547 - RNA, 22 nt, Human
aaaccggucacauucucauccc

SEQ ID NO: 380548 - RNA, 23 nt, Human
aaaccggucacauucucauccca

SEQ ID NO: 380549 - RNA, 18 nt, Human
aacacaggccucugcgug

SEQ ID NO: 380550 - RNA, 21 nt, Human
aacacaugaauggcucaucac

SEQ ID NO: 380551 - RNA, 20 nt, Human
acccugaguggggcaggagg

SEQ ID NO: 380552 - RNA, 22 nt, Human
acccugaguggggcaggaggca

SEQ ID NO: 380553 - RNA, 21 nt, Human
agcggcggcgcuggaucccgg

SEQ ID NO: 380554 - RNA, 20 nt, Human
aggccucugcgugcucccag

SEQ ID NO: 380555 - RNA, 26 nt, Human
aucccacuucacucguaggccuccaa

SEQ ID NO: 380556 - RNA, 18 nt, Human
cacacagucccacaccuc

SEQ ID NO: 380557 - RNA, 23 nt, Human
caggagaggcguguuuggguaac

SEQ ID NO: 380558 - RNA, 24 nt, Human
cagugaugcuuuggauaauuucaa

SEQ ID NO: 380559 - RNA, 22 nt, Human
cauauacaaugccuucuccucg

SEQ ID NO: 380560 - RNA, 19 nt, Human
ccaacccugaguggggcag

SEQ ID NO: 380561 - RNA, 22 nt, Human
ccagcgccggguccauugcguc

SEQ ID NO: 380562 - RNA, 18 nt, Human
cccacaccuccucuagug

SEQ ID NO: 380563 - RNA, 23 nt, Human
cccacaccuccucuaguguccca

SEQ ID NO: 380564 - RNA, 23 nt, Human
cccacuucacucguaggccucca

SEQ ID NO: 380565 - RNA, 22 nt, Human
ccugggucuacccugccaggag

SEQ ID NO: 380566 - RNA, 18 nt, Human
cgcuggaucccgggugcc

SEQ ID NO: 380567 - RNA, 26 nt, Human
cuagugucccauauacaaugccuucu

SEQ ID NO: 380568 - RNA, 20 nt, Human
cuccuuggugucccaacagc

SEQ ID NO: 380569 - RNA, 19 nt, Human
cucguaggccuccaacagc

SEQ ID NO: 380570 - RNA, 19 nt, Human
cuucacacagucccacacc

SEQ ID NO: 380571 - RNA, 18 nt, Human
cuucacucguaggccucc

SEQ ID NO: 380572 - RNA, 20 nt, Human
cuucccggcaaaucuuccag

SEQ ID NO: 380573 - RNA, 21 nt, Human
cuucucggccacagccucgcu

SEQ ID NO: 380574 - RNA, 21 nt, Human
gcaacagggccugguuuucag

SEQ ID NO: 380575 - RNA, 23 nt, Human
gcacaggacugagggagcgguac

SEQ ID NO: 380576 - RNA, 20 nt, Human
gcugccagcgccggguccau

SEQ ID NO: 380577 - RNA, 24 nt, Human
gggcaggaggcaggaagggugggc

SEQ ID NO: 380578 - RNA, 23 nt, Human
gguacgccuucccggcaaaucuu

SEQ ID NO: 380579 - RNA, 23 nt, Human
guacuggagcaucuucucggcca

SEQ ID NO: 380580 - RNA, 23 nt, Human
gugaacacaggccucugcgugcu

SEQ ID NO: 380581 - RNA, 18 nt, Human
gugggcugccgccucugg

SEQ ID NO: 380582 - RNA, 20 nt, Human
guggucucugagagugaugg

SEQ ID NO: 380583 - RNA, 19 nt, Human
uaggccuccaacagcuggc

SEQ ID NO: 380584 - RNA, 23 nt, Human
uauuuggggggcugcagcacagg

SEQ ID NO: 380585 - RNA, 20 nt, Human
ucagaaaaauauauuugggg

SEQ ID NO: 380586 - RNA, 23 nt, Human
ucaguggcgaugaugauucucua

SEQ ID NO: 380587 - RNA, 24 nt, Human
ucaguggcgaugaugauucucuau

SEQ ID NO: 380588 - RNA, 26 nt, Human
ucaguggcgaugaugauucucuauga

SEQ ID NO: 380589 - RNA, 19 nt, Human
ucccaacagcuggagcucc

SEQ ID NO: 380590 - RNA, 21 nt, Human
ucccacuucacucguaggccu

SEQ ID NO: 380591 - RNA, 19 nt, Human
ucccauauacaaugccuuc

SEQ ID NO: 380592 - RNA, 21 nt, Human
ucgaugagucacgggaguucu

SEQ ID NO: 380593 - RNA, 23 nt, Human
ucgcaugguguccaggccgaguc

SEQ ID NO: 380594 - RNA, 22 nt, Human
ucucugucagaugguuagaggc

SEQ ID NO: 380595 - RNA, 20 nt, Human
ugaauggcucaucacacgcc

SEQ ID NO: 380596 - RNA, 20 nt, Human
ugagggagcgguacaugcuu

SEQ ID NO: 380597 - RNA, 22 nt, Human
ugaguggggcaggaggcaggaa

SEQ ID NO: 380598 - RNA, 24 nt, Human
ugcggggucgcggguguuaugagc

SEQ ID NO: 380599 - RNA, 19 nt, Human
ugcgugcucccaggcuccu

SEQ ID NO: 380600 - RNA, 22 nt, Human
ugcugugucccgccgguacugg

SEQ ID NO: 380601 - RNA, 23 nt, Human
ugcugugucccgccgguacugga

SEQ ID NO: 380602 - RNA, 25 nt, Human
uggcauucucagagaugcgcagucc

SEQ ID NO: 380603 - RNA, 25 nt, Human
uuuuuuuuuuuuuuuuuuauaucag

SEQ ID NO: 380604 - RNA, 19 nt, Human
aaaaggacaaaguagccca

SEQ ID NO: 380605 - RNA, 24 nt, Human
aaaaggacaaaguagcccauuuaa

SEQ ID NO: 380606 - RNA, 23 nt, Human
aaacauaugcaguucucaaugca

SEQ ID NO: 380607 - RNA, 26 nt, Human
aaacaucauccacucaaaaaaguguc

SEQ ID NO: 380608 - RNA, 20 nt, Human
aaaccaauggaaaacugcca

SEQ ID NO: 380609 - RNA, 19 nt, Human
aaagcagaauguauucagc

SEQ ID NO: 380610 - RNA, 23 nt, Human
aaauacaguauacuucacgaaac

SEQ ID NO: 380611 - RNA, 19 nt, Human
aaauuugguuuuuggcuuu

SEQ ID NO: 380612 - RNA, 18 nt, Human
aacaggccccagccagga

SEQ ID NO: 380613 - RNA, 23 nt, Human
aacaucauccacucaaaaaagug

SEQ ID NO: 380614 - RNA, 18 nt, Human
aacccacucuucagagaa

SEQ ID NO: 380615 - RNA, 20 nt, Human
aaccuugucaaacccaucuc

SEQ ID NO: 380616 - RNA, 18 nt, Human
aagcaaagaaaacaugua

SEQ ID NO: 380617 - RNA, 22 nt, Human
acagcaaaugaaacuuuucugc

SEQ ID NO: 380618 - RNA, 23 nt, Human
accacccuaauaacaaaaaggac

SEQ ID NO: 380619 - RNA, 21 nt, Human
acccuaauaacaaaaaggaca

SEQ ID NO: 380620 - RNA, 24 nt, Human
accuugugccccaacaagggccug

SEQ ID NO: 380621 - RNA, 19 nt, Human
agcaguaguggaaaaacaa

SEQ ID NO: 380622 - RNA, 19 nt, Human
agcaguaguggaaaaacaa

SEQ ID NO: 380623 - RNA, 21 nt, Human
aggaaaaagguaaaaauacag

SEQ ID NO: 380624 - RNA, 22 nt, Human
aggaacagaguagcaggaggga

SEQ ID NO: 380625 - RNA, 18 nt, Human
aggaaggaaaaagguaaa

SEQ ID NO: 380626 - RNA, 18 nt, Human
agguuuguaaacauguca

SEQ ID NO: 380627 - RNA, 21 nt, Human
aguagcaggagggaaucacag

SEQ ID NO: 380628 - RNA, 21 nt, Human
auagcaauuacaauggaaaag

SEQ ID NO: 380629 - RNA, 19 nt, Human
augcccuucagaguaacug

SEQ ID NO: 380630 - RNA, 20 nt, Human
auggaaaacugccaguuaca

SEQ ID NO: 380631 - RNA, 28 nt, Human
caaccaaaggagcagcuacgcacagcac

SEQ ID NO: 380632 - RNA, 19 nt, Human
caacugaaacuuagguucu

SEQ ID NO: 380633 - RNA, 24 nt, Human
caagaugaaagcagaauguauuca

SEQ ID NO: 380634 - RNA, 21 nt, Human
cacaggaugugaaggaacaga

SEQ ID NO: 380635 - RNA, 23 nt, Human
caccuugugccccaacaagggcc

SEQ ID NO: 380636 - RNA, 19 nt, Human
cacuuaaagcaaagaaaac

SEQ ID NO: 380637 - RNA, 21 nt, Human
cagcaaaugaaacuuuucugc

SEQ ID NO: 380638 - RNA, 18 nt, Human
cagccgagccccuccgca

SEQ ID NO: 380639 - RNA, 20 nt, Human
cagccgagccccuccgcaga

SEQ ID NO: 380640 - RNA, 21 nt, Human
cagccgagccccuccgcagac

SEQ ID NO: 380641 - RNA, 21 nt, Human
cagcgcuggcgccccgccccg

SEQ ID NO: 380642 - RNA, 19 nt, Human
caggagggaaucacagaug

SEQ ID NO: 380643 - RNA, 21 nt, Human
caggccccagccaggagcaag

SEQ ID NO: 380644 - RNA, 21 nt, Human
cauaacaaacaguaaagcuaa

SEQ ID NO: 380645 - RNA, 24 nt, Human
ccuaccagauccaugauggcuacc

SEQ ID NO: 380646 - RNA, 22 nt, Human
ccuagaaacacaggaugugaag

SEQ ID NO: 380647 - RNA, 22 nt, Human
ccuugugccccaacaagggcug

SEQ ID NO: 380648 - RNA, 24 nt, Human
cgaaacaucauccacucaaaaaag

SEQ ID NO: 380649 - RNA, 21 nt, Human
cgcggcggugcagccucuccc

SEQ ID NO: 380650 - RNA, 20 nt, Human
cucaagaaacagaauuuguc

SEQ ID NO: 380651 - RNA, 28 nt, Human
cugauaggcaguaacacggggaucucuu

SEQ ID NO: 380652 - RNA, 25 nt, Human
cugccaggcgcgauccccccggugc

SEQ ID NO: 380653 - RNA, 19 nt, Human
cugggucgccucugcucgg

SEQ ID NO: 380654 - RNA, 19 nt, Human
cuugugaaacccacucuuc

SEQ ID NO: 380655 - RNA, 25 nt, Human
cuuuuucuacuccuuucccaauuuu

SEQ ID NO: 380656 - RNA, 22 nt, Human
gaaaaacaagauacagccacau

SEQ ID NO: 380657 - RNA, 23 nt, Human
gaaacauaugcaguucucaaugc

SEQ ID NO: 380658 - RNA, 22 nt, Human
gaaacaucauccacucaaaaaa

SEQ ID NO: 380659 - RNA, 23 nt, Human
gagaaaaggcagcgcuggcgccc

SEQ ID NO: 380660 - RNA, 20 nt, Human
gcggcggugcagccucuccc

SEQ ID NO: 380661 - RNA, 21 nt, Human
ggaaagcacugugugcauauu

SEQ ID NO: 380662 - RNA, 20 nt, Human
ggauccggaagggcuaggcg

SEQ ID NO: 380663 - RNA, 18 nt, Human
gggcgcggcggugcagcc

SEQ ID NO: 380664 - RNA, 24 nt, Human
gugcagccgagccccuccgcagac

SEQ ID NO: 380665 - RNA, 25 nt, Human
gugguagcaguaguggaaaaacaag

SEQ ID NO: 380666 - RNA, 27 nt, Human
uaaaacaaaacucaagaaaucuuuauc

SEQ ID NO: 380667 - RNA, 25 nt, Human
uaaaauacacauuuucccccuacca

SEQ ID NO: 380668 - RNA, 25 nt, Human
uaacaguugggcacugacuuuaugc

SEQ ID NO: 380669 - RNA, 20 nt, Human
uaaugcaauacagauacuuu

SEQ ID NO: 380670 - RNA, 20 nt, Human
uaauguugucuucuuuguuu

SEQ ID NO: 380671 - RNA, 19 nt, Human
uacagcaaaugaaacuuuu

SEQ ID NO: 380672 - RNA, 18 nt, Human
uacugcuuuuucuacucc

SEQ ID NO: 380673 - RNA, 22 nt, Human
uagcaguaguggaaaaacaaga

SEQ ID NO: 380674 - RNA, 18 nt, Human
uccaccaaagaagaauac

SEQ ID NO: 380675 - RNA, 23 nt, Human
ucccuugggagaacuguaaaaau

SEQ ID NO: 380676 - RNA, 20 nt, Human
ucucccacagaaauuuaccg

SEQ ID NO: 380677 - RNA, 22 nt, Human
ucugcgcaggaaagcgaaacua

SEQ ID NO: 380678 - RNA, 18 nt, Human
ugaaggaacagaguagca

SEQ ID NO: 380679 - RNA, 20 nt, Human
ugcaauacagauacuuuagc

SEQ ID NO: 380680 - RNA, 20 nt, Human
ugccaagacugucgagguua

SEQ ID NO: 380681 - RNA, 19 nt, Human
ugccacggaaagcacugug

SEQ ID NO: 380682 - RNA, 22 nt, Human
ugccacggaaagcacugugugc

SEQ ID NO: 380683 - RNA, 19 nt, Human
ugccccaacaagggccugg

SEQ ID NO: 380684 - RNA, 22 nt, Human
ugcgcaggaaagcgaaacuacc

SEQ ID NO: 380685 - RNA, 23 nt, Human
uggaaaaacaagauacagccaca

SEQ ID NO: 380686 - RNA, 20 nt, Human
uguaaacaugucacucuucu

SEQ ID NO: 380687 - RNA, 24 nt, Human
ugucgccagagaagaugaaaaaaa

SEQ ID NO: 380688 - RNA, 18 nt, Human
ugucuggaaaaaguacag

SEQ ID NO: 380689 - RNA, 20 nt, Human
ugucuggaaaaaguacagga

SEQ ID NO: 380690 - RNA, 18 nt, Human
ugugaauagccuaacucc

SEQ ID NO: 380691 - RNA, 21 nt, Human
ugugauggcgauagcaauuac

SEQ ID NO: 380692 - RNA, 18 nt, Human
ugugguagcaguagugga

SEQ ID NO: 380693 - RNA, 18 nt, Human
uguugucuucuuuguuuu

SEQ ID NO: 380694 - RNA, 21 nt, Human
uuacacuuaaagcaaagaaaa

SEQ ID NO: 380695 - RNA, 20 nt, Human
uuuuuggcuuuuuuuuuuuu

SEQ ID NO: 380696 - RNA, 27 nt, Human
uuuuuggcuuuuuuuuuuuuuuuuaaa

SEQ ID NO: 380697 - RNA, 21 nt, Human
aaaaagaaaccuagggcuuag

SEQ ID NO: 380698 - RNA, 18 nt, Human
aaaagcagaucacccaca

SEQ ID NO: 380699 - RNA, 24 nt, Human
aaagugcugggauuacaggcguga

SEQ ID NO: 380700 - RNA, 22 nt, Human
aacaacaauaacaaaaagcugc

SEQ ID NO: 380701 - RNA, 25 nt, Human
aacccccggcucccccucccagucu

SEQ ID NO: 380702 - RNA, 18 nt, Human
aagaaaccuagggcuuag

SEQ ID NO: 380703 - RNA, 19 nt, Human
aagaaaccuagggcuuaga

SEQ ID NO: 380704 - RNA, 20 nt, Human
aagaaaccuagggcuuagau

SEQ ID NO: 380705 - RNA, 21 nt, Human
aagaaaccuagggcuuagaua

SEQ ID NO: 380706 - RNA, 20 nt, Human
aagggccucuccgagccgag

SEQ ID NO: 380707 - RNA, 19 nt, Human
aagugcugggauuacaggc

SEQ ID NO: 380708 - RNA, 19 nt, Human
aagugcugggauuacaggc

SEQ ID NO: 380709 - RNA, 26 nt, Human
aagugcugggauuacaggcgugagcc

SEQ ID NO: 380710 - RNA, 26 nt, Human
aauaacaaaaagcugcugagaaagga

SEQ ID NO: 380711 - RNA, 18 nt, Human
aauuuuggcucacugcaa

SEQ ID NO: 380712 - RNA, 21 nt, Human
acaacaacaacaauaacaaaa

SEQ ID NO: 380713 - RNA, 20 nt, Human
acaacaacaauaacaaaaag

SEQ ID NO: 380714 - RNA, 22 nt, Human
acaagacauuuccuuuuucucc

SEQ ID NO: 380715 - RNA, 18 nt, Human
acgggguuucaccguguu

SEQ ID NO: 380716 - RNA, 19 nt, Human
acgggguuucaccguguua

SEQ ID NO: 380717 - RNA, 20 nt, Human
acgggguuucaccguguuag

SEQ ID NO: 380718 - RNA, 24 nt, Human
acgggguuucaccguguuagccag

SEQ ID NO: 380719 - RNA, 22 nt, Human
agaaacaggcagaaggaugccg

SEQ ID NO: 380720 - RNA, 28 nt, Human
agaaacaggcagaaggaugccgguaccc

SEQ ID NO: 380721 - RNA, 19 nt, Human
agaaaggagggcaggggaa

SEQ ID NO: 380722 - RNA, 22 nt, Human
agaaaggagggcaggggaacaa

SEQ ID NO: 380723 - RNA, 23 nt, Human
agaaaggcuaugcugauacagug

SEQ ID NO: 380724 - RNA, 20 nt, Human
agaacacauccuuauuugca

SEQ ID NO: 380725 - RNA, 19 nt, Human
agaaugcagguaggcgccu

SEQ ID NO: 380726 - RNA, 19 nt, Human
agagacgggguuucaccgu

SEQ ID NO: 380727 - RNA, 26 nt, Human
agauuaaaaaaaaucuggaaccacaa

SEQ ID NO: 380728 - RNA, 24 nt, Human
agcgauucuccugccucagccucc

SEQ ID NO: 380729 - RNA, 24 nt, Human
aggagauuaaaaaaaaucuggaac

SEQ ID NO: 380730 - RNA, 26 nt, Human
aggccggggcugcgcgugucguggac

SEQ ID NO: 380731 - RNA, 27 nt, Human
aggccggggcugcgcgugucguggacc

SEQ ID NO: 380732 - RNA, 24 nt, Human
aggcgccucagucguaucuuucug

SEQ ID NO: 380733 - RNA, 20 nt, Human
aguagagacgggguuucacc

SEQ ID NO: 380734 - RNA, 21 nt, Human
aguagagacgggguuucaccg

SEQ ID NO: 380735 - RNA, 18 nt, Human
aguagcugggacuacagg

SEQ ID NO: 380736 - RNA, 19 nt, Human
aguagcugggacuacaggc

SEQ ID NO: 380737 - RNA, 23 nt, Human
aguagcugggacuacaggcgccc

SEQ ID NO: 380738 - RNA, 19 nt, Human
aguauguagcuauaggugg

SEQ ID NO: 380739 - RNA, 18 nt, Human
agugcagugugcaguggu

SEQ ID NO: 380740 - RNA, 24 nt, Human
agugcagugugcaguggugcaauu

SEQ ID NO: 380741 - RNA, 18 nt, Human
agugcugggauuacaggc

SEQ ID NO: 380742 - RNA, 24 nt, Human
caaagugcugggauuacaggcgug

SEQ ID NO: 380743 - RNA, 24 nt, Human
caacaacaauaacaaaaagcugcu

SEQ ID NO: 380744 - RNA, 25 nt, Human
caacaacaauaacaaaaagcugcug

SEQ ID NO: 380745 - RNA, 29 nt, Human
caacaacaauaacaaaaagcugcugagaa

SEQ ID NO: 380746 - RNA, 20 nt, Human
caagcgauucuccugccuca

SEQ ID NO: 380747 - RNA, 22 nt, Human
caagcgauucuccugccucagc

SEQ ID NO: 380748 - RNA, 20 nt, Human
caccccccgccacauccccu

SEQ ID NO: 380749 - RNA, 18 nt, Human
caccguguuagccaggau

SEQ ID NO: 380750 - RNA, 23 nt, Human
caccguguuagccaggauggucu

SEQ ID NO: 380751 - RNA, 24 nt, Human
caccguguuagccaggauggucuu

SEQ ID NO: 380752 - RNA, 19 nt, Human
cagaaacaggcagaaggau

SEQ ID NO: 380753 - RNA, 24 nt, Human
cagaaaggcuaugcugauacagug

SEQ ID NO: 380754 - RNA, 19 nt, Human
cagaaggaugccgcaggca

SEQ ID NO: 380755 - RNA, 19 nt, Human
cagaaggaugccgcaggca

SEQ ID NO: 380756 - RNA, 23 nt, Human
cagagaacacauccuuauuugca

SEQ ID NO: 380757 - RNA, 21 nt, Human
caggcgcccaccaccacaccc

SEQ ID NO: 380758 - RNA, 23 nt, Human
caggcgcccaccaccacacccag

SEQ ID NO: 380759 - RNA, 19 nt, Human
caggggaacaaaacaacac

SEQ ID NO: 380760 - RNA, 21 nt, Human
cagguucaagcgauucuccug

SEQ ID NO: 380761 - RNA, 22 nt, Human
ccaaagugcugggauuacaggc

SEQ ID NO: 380762 - RNA, 22 nt, Human
ccaaagugcugggauuacaggc

SEQ ID NO: 380763 - RNA, 24 nt, Human
ccaaagugcugggauuacaggcgu

SEQ ID NO: 380764 - RNA, 21 nt, Human
cccaccaccacacccagcuaa

SEQ ID NO: 380765 - RNA, 22 nt, Human
ccccccgccacauccccugauc

SEQ ID NO: 380766 - RNA, 21 nt, Human
ccccugaucaugggucucaga

SEQ ID NO: 380767 - RNA, 23 nt, Human
cccgaguagcugggacuacaggc

SEQ ID NO: 380768 - RNA, 24 nt, Human
cccgaguagcugggacuacaggcg

SEQ ID NO: 380769 - RNA, 18 nt, Human
cccggcucccccucccag

SEQ ID NO: 380770 - RNA, 20 nt, Human
cccugaucaugggucucaga

SEQ ID NO: 380771 - RNA, 24 nt, Human
ccucucagguucaagcgauucucc

SEQ ID NO: 380772 - RNA, 24 nt, Human
ccugaccuuaugauccgccucggc

SEQ ID NO: 380773 - RNA, 23 nt, Human
ccugccucagccucccgaguagc

SEQ ID NO: 380774 - RNA, 24 nt, Human
ccuuuaauuguuauuauuucuuaa

SEQ ID NO: 380775 - RNA, 23 nt, Human
ccuuuuucucccucuagccaccc

SEQ ID NO: 380776 - RNA, 21 nt, Human
cgcccaccaccacacccagcu

SEQ ID NO: 380777 - RNA, 24 nt, Human
cgccucggccucccaaagugcugg

SEQ ID NO: 380778 - RNA, 24 nt, Human
cggcucccccucccagucugcgcc

SEQ ID NO: 380779 - RNA, 21 nt, Human
cggggcugcgcgugugccggg

SEQ ID NO: 380780 - RNA, 24 nt, Human
cgggguuucaccguguuagccagg

SEQ ID NO: 380781 - RNA, 22 nt, Human
cgguuggggcuuguucccucgg

SEQ ID NO: 380782 - RNA, 24 nt, Human
cgguuggggcuuguucccucggcu

SEQ ID NO: 380783 - RNA, 25 nt, Human
cuagccaccccccgccacauccccu

SEQ ID NO: 380784 - RNA, 24 nt, Human
cucagccucccgaguagcugggac

SEQ ID NO: 380785 - RNA, 20 nt, Human
cuccugaccuuaugauccgc

SEQ ID NO: 380786 - RNA, 23 nt, Human
cucuauuuuuaaaagugcccaga

SEQ ID NO: 380787 - RNA, 24 nt, Human
cugcaaccuccgccucucagguuc

SEQ ID NO: 380788 - RNA, 23 nt, Human
cugccucagccucccgaguagcu

SEQ ID NO: 380789 - RNA, 24 nt, Human
cuuuuaguagagacgggguuucac

SEQ ID NO: 380790 - RNA, 18 nt, Human
gaaaggagggcaggggaa

SEQ ID NO: 380791 - RNA, 19 nt, Human
gacauuuccuuuuucuccc

SEQ ID NO: 380792 - RNA, 18 nt, Human
gaccuuaugauccgccuc

SEQ ID NO: 380793 - RNA, 24 nt, Human
gagacgggguuucaccguguuagc

SEQ ID NO: 380794 - RNA, 25 nt, Human
gaguagcugggacuacaggcgccca

SEQ ID NO: 380795 - RNA, 18 nt, Human
gauuacaggcgugagcca

SEQ ID NO: 380796 - RNA, 21 nt, Human
gauuacaggcgugagccacca

SEQ ID NO: 380797 - RNA, 22 nt, Human
gauuacaggcgugagccaccau

SEQ ID NO: 380798 - RNA, 24 nt, Human
gauuacaggcgugagccaccaugc

SEQ ID NO: 380799 - RNA, 21 nt, Human
gauucuccugccucagccucc

SEQ ID NO: 380800 - RNA, 18 nt, Human
gcccaccaccacacccag

SEQ ID NO: 380801 - RNA, 18 nt, Human
gcccaccaccacacccag

SEQ ID NO: 380802 - RNA, 23 nt, Human
gccucggccucccaaagugcugg

SEQ ID NO: 380803 - RNA, 24 nt, Human
gcgauucuccugccucagccuccc

SEQ ID NO: 380804 - RNA, 18 nt, Human
gcgccgccgcagcuccgg

SEQ ID NO: 380805 - RNA, 19 nt, Human
gcgugagccaccaugcccg

SEQ ID NO: 380806 - RNA, 19 nt, Human
gcuaaaaucagggguccca

SEQ ID NO: 380807 - RNA, 21 nt, Human
ggaacaaaacaacacaagaca

SEQ ID NO: 380808 - RNA, 24 nt, Human
ggauggucuugaucuccugaccuu

SEQ ID NO: 380809 - RNA, 24 nt, Human
ggauuacaggcgugagccaccaug

SEQ ID NO: 380810 - RNA, 23 nt, Human
ggcucccccucccagucugcgcc

SEQ ID NO: 380811 - RNA, 18 nt, Human
gggagagacagcgccaag

SEQ ID NO: 380812 - RNA, 19 nt, Human
ggggagagacagcgccaag

SEQ ID NO: 380813 - RNA, 23 nt, Human
gggguuucaccguguuagccagg

SEQ ID NO: 380814 - RNA, 22 nt, Human
ggguuucaccguguuagccagg

SEQ ID NO: 380815 - RNA, 22 nt, Human
ggucuugaucuccugaccuuau

SEQ ID NO: 380816 - RNA, 20 nt, Human
gguggcagaaugcagguagg

SEQ ID NO: 380817 - RNA, 23 nt, Human
guagagacgggguuucaccgugu

SEQ ID NO: 380818 - RNA, 21 nt, Human
gugagggguggcagaaugcag

SEQ ID NO: 380819 - RNA, 22 nt, Human
gugcaguggugcaauuuuggcu

SEQ ID NO: 380820 - RNA, 25 nt, Human
gugugcaguggugcaauuuuggcuc

SEQ ID NO: 380821 - RNA, 23 nt, Human
uaaaaagaaaccuagggcuuagu

SEQ ID NO: 380822 - RNA, 23 nt, Human
uaaaaagugcaaugccaggagua

SEQ ID NO: 380823 - RNA, 26 nt, Human
uaagaacaacaacaacaauaacaaaa

SEQ ID NO: 380824 - RNA, 27 nt, Human
uaagaacaacaacaacaauuggagacc

SEQ ID NO: 380825 - RNA, 24 nt, Human
uaauuuuuuguacuuuuaguagag

SEQ ID NO: 380826 - RNA, 25 nt, Human
uaauuuuuuguacuuuuaguagaga

SEQ ID NO: 380827 - RNA, 21 nt, Human
uacagaaaggcuaugcugaua

SEQ ID NO: 380828 - RNA, 23 nt, Human
uacaggcgugagccaccaugccc

SEQ ID NO: 380829 - RNA, 21 nt, Human
uagcagaaguaggagauuaaa

SEQ ID NO: 380830 - RNA, 21 nt, Human
uaguagagacgggguuucacc

SEQ ID NO: 380831 - RNA, 24 nt, Human
uaguagagacgggguuucaccgug

SEQ ID NO: 380832 - RNA, 26 nt, Human
uaguagagacgggguuucaccguguu

SEQ ID NO: 380833 - RNA, 26 nt, Human
uaguagagacgggguuucaccguugg

SEQ ID NO: 380834 - RNA, 24 nt, Human
ucaccguguuagccaggauggucu

SEQ ID NO: 380835 - RNA, 19 nt, Human
ucacugcaaccuccgccuc

SEQ ID NO: 380836 - RNA, 24 nt, Human
ucacugcaaccuccgccucucagg

SEQ ID NO: 380837 - RNA, 24 nt, Human
ucacugcaaccuccgccucucagg

SEQ ID NO: 380838 - RNA, 25 nt, Human
ucacugcaaccuccgccucucaggu

SEQ ID NO: 380839 - RNA, 27 nt, Human
ucacugcaaccuccgccucucagguuc

SEQ ID NO: 380840 - RNA, 23 nt, Human
ucagccucccgaguagcugggac

SEQ ID NO: 380841 - RNA, 24 nt, Human
ucagucguaucuuucugcagcuuc

SEQ ID NO: 380842 - RNA, 19 nt, Human
uccaggauccgguuggggc

SEQ ID NO: 380843 - RNA, 24 nt, Human
ucccaaagugcugggauuacaggc

SEQ ID NO: 380844 - RNA, 24 nt, Human
ucccgaguagcugggacuacaggc

SEQ ID NO: 380845 - RNA, 21 nt, Human
uccgagccgagggggagagac

SEQ ID NO: 380846 - RNA, 24 nt, Human
uccuuuuucucccucuagccaccc

SEQ ID NO: 380847 - RNA, 18 nt, Human
ucgcccaggauggagugc

SEQ ID NO: 380848 - RNA, 21 nt, Human
ucggaacccccggcucccccu

SEQ ID NO: 380849 - RNA, 18 nt, Human
ucggccucccaaagugcu

SEQ ID NO: 380850 - RNA, 25 nt, Human
ucuaagaacaacaacaacaauaaca

SEQ ID NO: 380851 - RNA, 24 nt, Human
ucucagacugucgcccaggaugga

SEQ ID NO: 380852 - RNA, 21 nt, Human
ucucagguucaagcgauucuc

SEQ ID NO: 380853 - RNA, 24 nt, Human
ucucagguucaagcgauucuccug

SEQ ID NO: 380854 - RNA, 24 nt, Human
ucuccugccucagccucccgagua

SEQ ID NO: 380855 - RNA, 18 nt, Human
ucugcagcuuccguucuc

SEQ ID NO: 380856 - RNA, 21 nt, Human
ucugcagcuuccguucucagc

SEQ ID NO: 380857 - RNA, 23 nt, Human
ucugcagcuuccguucucagcuc

SEQ ID NO: 380858 - RNA, 21 nt, Human
ucugcgccgccgcagcuccgg

SEQ ID NO: 380859 - RNA, 22 nt, Human
ugagacagagucucagacuguc

SEQ ID NO: 380860 - RNA, 22 nt, Human
ugcaguggugcaauuuuggcuc

SEQ ID NO: 380861 - RNA, 24 nt, Human
ugccucagccucccgaguagcugg

SEQ ID NO: 380862 - RNA, 24 nt, Human
ugcugggauuacaggcgugagcca

SEQ ID NO: 380863 - RNA, 19 nt, Human
uggagugcagugugcagug

SEQ ID NO: 380864 - RNA, 33 nt, Human
uggagugcagugugcaguggugcaauuuugggg

SEQ ID NO: 380865 - RNA, 21 nt, Human
ugggacuacaggcgcccacca

SEQ ID NO: 380866 - RNA, 24 nt, Human
ugggacuacaggcgcccaccacca

SEQ ID NO: 380867 - RNA, 18 nt, Human
ugggauuacaggcgugag

SEQ ID NO: 380868 - RNA, 22 nt, Human
ugggauuacaggcgugagccac

SEQ ID NO: 380869 - RNA, 23 nt, Human
ugggauuacaggcgugagccacc

SEQ ID NO: 380870 - RNA, 24 nt, Human
ugggauuacaggcgugagccacca

SEQ ID NO: 380871 - RNA, 25 nt, Human
ugggauuacaggcgugagccaccau

SEQ ID NO: 380872 - RNA, 21 nt, Human
uguagcuauagguggccugug

SEQ ID NO: 380873 - RNA, 24 nt, Human
ugugcaguggugcaauuuuggcuc

SEQ ID NO: 380874 - RNA, 18 nt, Human
uuagauaguccuaucuuc

SEQ ID NO: 380875 - RNA, 18 nt, Human
uuaguagagacgggguuu

SEQ ID NO: 380876 - RNA, 22 nt, Human
uuaguagagacgggguuucacc

SEQ ID NO: 380877 - RNA, 24 nt, Human
uuaguagagacgggguuucaccgu

SEQ ID NO: 380878 - RNA, 21 nt, Human
uucaagcgauucuccugccuc

SEQ ID NO: 380879 - RNA, 23 nt, Human
uucaagcgauucuccugccucag

SEQ ID NO: 380880 - RNA, 24 nt, Human
uucaagcgauucuccugccucagc

SEQ ID NO: 380881 - RNA, 21 nt, Human
uuuaaaaagaaaccuagggcu

SEQ ID NO: 380882 - RNA, 19 nt, Human
uuucaccguguuagccagg

SEQ ID NO: 380883 - RNA, 21 nt, Human
uuuuuguacuuuuaguagaga

SEQ ID NO: 380884 - RNA, 24 nt, Human
uuuuuuguacuuuuaguagagacg

SEQ ID NO: 380885 - RNA, 20 nt, Human
uuuuuuuuuuugagacagag

SEQ ID NO: 380886 - RNA, 26 nt, Human
uuuuuuuuuuuugagacagagucuca

SEQ ID NO: 380887 - RNA, 18 nt, Human
uuuuuuuuuuuuuuuuug

SEQ ID NO: 380888 - RNA, 19 nt, Human
aagcgccccucacaguccc

SEQ ID NO: 380889 - RNA, 19 nt, Human
agaagcgccccucacaguc

SEQ ID NO: 380890 - RNA, 21 nt, Human
agagagcuucagaugucaaac

SEQ ID NO: 380891 - RNA, 24 nt, Human
agaugucaaacauuuccuagaacc

SEQ ID NO: 380892 - RNA, 20 nt, Human
auuuccuagaaccugguauu

SEQ ID NO: 380893 - RNA, 20 nt, Human
caaagucagaagcgccccuc

SEQ ID NO: 380894 - RNA, 21 nt, Human
cacagucccuaggagaaagcc

SEQ ID NO: 380895 - RNA, 24 nt, Human
cagugcucaaguccaaagucagaa

SEQ ID NO: 380896 - RNA, 22 nt, Human
cccacccacucuauucuagaaa

SEQ ID NO: 380897 - RNA, 24 nt, Human
cccaggcagugcucaaguccaaag

SEQ ID NO: 380898 - RNA, 19 nt, Human
cccuucaccgggcguccuc

SEQ ID NO: 380899 - RNA, 18 nt, Human
cuaacacgcagaaacugc

SEQ ID NO: 380900 - RNA, 25 nt, Human
cuugcaaguuuaucugaagcuuugg

SEQ ID NO: 380901 - RNA, 22 nt, Human
gugaagagagcuucagauguca

SEQ ID NO: 380902 - RNA, 19 nt, Human
uauucuagaaaugcuaaca

SEQ ID NO: 380903 - RNA, 19 nt, Human
uauugggcaaagaacaguc

SEQ ID NO: 380904 - RNA, 22 nt, Human
ucaaacauuuccuagaaccugg

SEQ ID NO: 380905 - RNA, 19 nt, Human
uccaaagucagaagcgccc

SEQ ID NO: 380906 - RNA, 25 nt, Human
ucccuaggagaaagccgcugacgcc

SEQ ID NO: 380907 - RNA, 22 nt, Human
ucuuuaaacuuuuucauuugcu

SEQ ID NO: 380908 - RNA, 18 nt, Human
ugccacgggagugugaag

SEQ ID NO: 380909 - RNA, 18 nt, Human
ugccaggcuggagccccu

SEQ ID NO: 380910 - RNA, 21 nt, Human
ugggacuuuacuugggucagu

SEQ ID NO: 380911 - RNA, 21 nt, Human
uugcaaguuuaucugaagcuu

SEQ ID NO: 380912 - RNA, 24 nt, Human
uugcaaguuuaucugaagcuuugg

SEQ ID NO: 380913 - RNA, 18 nt, Human
uugcauuucuccucccac

SEQ ID NO: 380914 - RNA, 21 nt, Human
uugguuucaagcauuucaguc

SEQ ID NO: 380915 - RNA, 21 nt, Human
uuugcauuucuccucccacuu

SEQ ID NO: 380916 - RNA, 22 nt, Human
aaacaccauaacgugcaccaac

SEQ ID NO: 380917 - RNA, 18 nt, Human
aacuaaacucucagacag

SEQ ID NO: 380918 - RNA, 21 nt, Human
acacaaacacauacucgcacu

SEQ ID NO: 380919 - RNA, 23 nt, Human
acacacacacacacaaacacaua

SEQ ID NO: 380920 - RNA, 25 nt, Human
acacacacacacacacacacaaaca

SEQ ID NO: 380921 - RNA, 23 nt, Human
acacacacacacacacacacaca

SEQ ID NO: 380922 - RNA, 23 nt, Human
acacacacacacacacacacaca

SEQ ID NO: 380923 - RNA, 23 nt, Human
acacacacacacacacacacaca

SEQ ID NO: 380924 - RNA, 21 nt, Human
accaacgcacacacacacaca

SEQ ID NO: 380925 - RNA, 23 nt, Human
acgcacacacacacacacacaca

SEQ ID NO: 380926 - RNA, 31 nt, Human
acgugcaccaacgcacacacacacacacaca

SEQ ID NO: 380927 - RNA, 22 nt, Human
cacaaacacauacucgcacucc

SEQ ID NO: 380928 - RNA, 24 nt, Human
cacacacacacacaaacacauacu

SEQ ID NO: 380929 - RNA, 20 nt, Human
cacacacacacacacacaca

SEQ ID NO: 380930 - RNA, 20 nt, Human
cacacacacacacacacaca

SEQ ID NO: 380931 - RNA, 20 nt, Human
cacacacacacacacacaca

SEQ ID NO: 380932 - RNA, 20 nt, Human
cacacacacacacacacaca

SEQ ID NO: 380933 - RNA, 20 nt, Human
cacacacacacacacacaca

SEQ ID NO: 380934 - RNA, 20 nt, Human
cacacacacacacacacaca

SEQ ID NO: 380935 - RNA, 22 nt, Human
cacacacacacacacacacaca

SEQ ID NO: 380936 - RNA, 26 nt, Human
cacacacacacacacacacacacaaa

SEQ ID NO: 380937 - RNA, 26 nt, Human
cacacacacacacacacacacacaca

SEQ ID NO: 380938 - RNA, 26 nt, Human
cacacacacacacacacacacacaca

SEQ ID NO: 380939 - RNA, 31 nt, Human
caccaacgcacacacacacacacacacacag

SEQ ID NO: 380940 - RNA, 23 nt, Human
cagaaacacuaaggucacaacua

SEQ ID NO: 380941 - RNA, 22 nt, Human
cauggaauuaaaacauccacaa

SEQ ID NO: 380942 - RNA, 26 nt, Human
ccaacgcacacacacacacacacaca

SEQ ID NO: 380943 - RNA, 19 nt, Human
cccgcucgcucccucccuc

SEQ ID NO: 380944 - RNA, 26 nt, Human
ccgcccggggugacggcuccggccgc

SEQ ID NO: 380945 - RNA, 24 nt, Human
ccucccgccggggcccgcgggggc

SEQ ID NO: 380946 - RNA, 23 nt, Human
cgacucuccucccgccggggccc

SEQ ID NO: 380947 - RNA, 20 nt, Human
cgcacacacacacacacaca

SEQ ID NO: 380948 - RNA, 25 nt, Human
cgcacacacacacacacacacacac

SEQ ID NO: 380949 - RNA, 21 nt, Human
cgcacucccuucgcuggugcc

SEQ ID NO: 380950 - RNA, 24 nt, Human
cgcccgcccgcucgcucccucccu

SEQ ID NO: 380951 - RNA, 21 nt, Human
cugucuggcuugcccgcccgc

SEQ ID NO: 380952 - RNA, 20 nt, Human
gaagaugaagaagcugaaga

SEQ ID NO: 380953 - RNA, 26 nt, Human
gaagcgauucauggaauuaaaacauc

SEQ ID NO: 380954 - RNA, 18 nt, Human
gcgcgccgcucacgcgcg

SEQ ID NO: 380955 - RNA, 21 nt, Human
gcgcgccgcucacgcgcggag

SEQ ID NO: 380956 - RNA, 23 nt, Human
gcgcuggguccccgcccgggguc

SEQ ID NO: 380957 - RNA, 21 nt, Human
ggggcccgcgggggcgcgcgc

SEQ ID NO: 380958 - RNA, 26 nt, Human
gugcaccaacgcacacacacacacag

SEQ ID NO: 380959 - RNA, 27 nt, Human
uaaaacauccacaagagugauuccucc

SEQ ID NO: 380960 - RNA, 20 nt, Human
ucaaaagagaagcgauucau

SEQ ID NO: 380961 - RNA, 22 nt, Human
uccucuggugaagaugaagaag

SEQ ID NO: 380962 - RNA, 18 nt, Human
ucgcucccucccucggcc

SEQ ID NO: 380963 - RNA, 23 nt, Human
ugaagaagcugaagauggagagg

SEQ ID NO: 380964 - RNA, 24 nt, Human
ugcgcuggguccccgcccggggug

SEQ ID NO: 380965 - RNA, 19 nt, Human
aaaagaaaaauaagauaaa

SEQ ID NO: 380966 - RNA, 24 nt, Human
aaaagaaaaauaagauaaagcaca

SEQ ID NO: 380967 - RNA, 20 nt, Human
aaccuguacuaguaaccaca

SEQ ID NO: 380968 - RNA, 24 nt, Human
aacgcugucacuggcuggcucagg

SEQ ID NO: 380969 - RNA, 18 nt, Human
aauauccucuaucccugg

SEQ ID NO: 380970 - RNA, 23 nt, Human
acacacacacacacacacacaca

SEQ ID NO: 380971 - RNA, 21 nt, Human
acacacauacauacacacaca

SEQ ID NO: 380972 - RNA, 20 nt, Human
acacuccucucccguccucc

SEQ ID NO: 380973 - RNA, 23 nt, Human
acauacauacacacacacacaca

SEQ ID NO: 380974 - RNA, 19 nt, Human
accuccccccuuccaccac

SEQ ID NO: 380975 - RNA, 21 nt, Human
acuggcuggcucaggcagcug

SEQ ID NO: 380976 - RNA, 18 nt, Human
acuugcugcugucuucug

SEQ ID NO: 380977 - RNA, 26 nt, Human
agaccccuccuaugcucccacccagg

SEQ ID NO: 380978 - RNA, 20 nt, Human
agcacacuugcugcugucuu

SEQ ID NO: 380979 - RNA, 21 nt, Human
aggaggggcugugcccccaag

SEQ ID NO: 380980 - RNA, 18 nt, Human
aggaguagguggggauag

SEQ ID NO: 380981 - RNA, 23 nt, Human
aggcaaaagcagauagacacaug

SEQ ID NO: 380982 - RNA, 24 nt, Human
aggcaaaagcagauagacacaugg

SEQ ID NO: 380983 - RNA, 26 nt, Human
aggcauguuggggcgugucucagagc

SEQ ID NO: 380984 - RNA, 20 nt, Human
agggccacauggccaggccu

SEQ ID NO: 380985 - RNA, 29 nt, Human
auaaagcacacacauacauacacacacac

SEQ ID NO: 380986 - RNA, 23 nt, Human
auagucucauacacguaucagaa

SEQ ID NO: 380987 - RNA, 18 nt, Human
auggggcaacagaaaagg

SEQ ID NO: 380988 - RNA, 20 nt, Human
cacacacacacacacacaca

SEQ ID NO: 380989 - RNA, 20 nt, Human
cacacacacacacacacaca

SEQ ID NO: 380990 - RNA, 20 nt, Human
cacacacacacacacacaca

SEQ ID NO: 380991 - RNA, 20 nt, Human
cacacacacacacacacaca

SEQ ID NO: 380992 - RNA, 20 nt, Human
cacacacacacacacacaca

SEQ ID NO: 380993 - RNA, 22 nt, Human
cacacacacacacacacacaca

SEQ ID NO: 380994 - RNA, 22 nt, Human
cacacacacacacacacacaca

SEQ ID NO: 380995 - RNA, 22 nt, Human
cacacacacacacacacacaca

SEQ ID NO: 380996 - RNA, 26 nt, Human
cacacacacacacacacacacacaca

SEQ ID NO: 380997 - RNA, 26 nt, Human
cacacacacacacacacacacacaca

SEQ ID NO: 380998 - RNA, 24 nt, Human
cacacacacacacacacacacacu

SEQ ID NO: 380999 - RNA, 22 nt, Human
cacacacauacauacacacaca

SEQ ID NO: 381000 - RNA, 24 nt, Human
cacacacauacauacacacacaca

SEQ ID NO: 381001 - RNA, 21 nt, Human
cacacuccucucccguccucc

SEQ ID NO: 381002 - RNA, 18 nt, Human
cacagccacuuggaccca

SEQ ID NO: 381003 - RNA, 22 nt, Human
caccaccaccaaaaagaaaaau

SEQ ID NO: 381004 - RNA, 19 nt, Human
cacccagggucccuugagc

SEQ ID NO: 381005 - RNA, 25 nt, Human
cacccagggucccuugagcugcuuc

SEQ ID NO: 381006 - RNA, 20 nt, Human
cacccuggcucccaggcagc

SEQ ID NO: 381007 - RNA, 18 nt, Human
caccuccccccuuccacc

SEQ ID NO: 381008 - RNA, 19 nt, Human
caccuggcuaacaggaauu

SEQ ID NO: 381009 - RNA, 22 nt, Human
cacguucacacagcuauacacg

SEQ ID NO: 381010 - RNA, 20 nt, Human
cagaccccuccuaugcuccc

SEQ ID NO: 381011 - RNA, 21 nt, Human
cagcauuggagguguggagcc

SEQ ID NO: 381012 - RNA, 22 nt, Human
cagcauuggagguguggagcca

SEQ ID NO: 381013 - RNA, 22 nt, Human
cagcuauacacgaagaaucuca

SEQ ID NO: 381014 - RNA, 21 nt, Human
caggugcaggcauguuggggc

SEQ ID NO: 381015 - RNA, 20 nt, Human
caguggcugccccagcccgc

SEQ ID NO: 381016 - RNA, 25 nt, Human
cauacacacacacacacacacacac

SEQ ID NO: 381017 - RNA, 24 nt, Human
ccaccaccaccaaaaagaaaaaua

SEQ ID NO: 381018 - RNA, 28 nt, Human
ccaccaccaccaccaaaaaggccucggc

SEQ ID NO: 381019 - RNA, 21 nt, Human
ccacccagggucccuugagcu

SEQ ID NO: 381020 - RNA, 24 nt, Human
ccagggucccuugagcugcuuccc

SEQ ID NO: 381021 - RNA, 19 nt, Human
ccccaaggacccucccccc

SEQ ID NO: 381022 - RNA, 24 nt, Human
ccccaucacccucagagagcucug

SEQ ID NO: 381023 - RNA, 25 nt, Human
cccccaaggacccuccccccgacuc

SEQ ID NO: 381024 - RNA, 20 nt, Human
cccccgacuccccuugcccc

SEQ ID NO: 381025 - RNA, 20 nt, Human
cccccuuccaccaccaccac

SEQ ID NO: 381026 - RNA, 21 nt, Human
ccccgacuccccuugccccuc

SEQ ID NO: 381027 - RNA, 18 nt, Human
ccccuccugcucagcccc

SEQ ID NO: 381028 - RNA, 21 nt, Human
cccugcuagcaccuccccccu

SEQ ID NO: 381029 - RNA, 20 nt, Human
ccgacuccccuugccccucc

SEQ ID NO: 381030 - RNA, 18 nt, Human
ccuaugcucccacccagg

SEQ ID NO: 381031 - RNA, 18 nt, Human
ccuccuaugcucccaccc

SEQ ID NO: 381032 - RNA, 20 nt, Human
ccuccuaugcucccacccag

SEQ ID NO: 381033 - RNA, 19 nt, Human
ccugccuauccguccuagg

SEQ ID NO: 381034 - RNA, 23 nt, Human
ccugcuagcaccuccccccuucc

SEQ ID NO: 381035 - RNA, 20 nt, Human
ccugugcucuuacccagccc

SEQ ID NO: 381036 - RNA, 24 nt, Human
ccuuccaccaccaccaccaaaaag

SEQ ID NO: 381037 - RNA, 19 nt, Human
cgacuccccuugccccucc

SEQ ID NO: 381038 - RNA, 23 nt, Human
cuagcaccuccccccuuccacca

SEQ ID NO: 381039 - RNA, 20 nt, Human
cuggacccagacucucaccc

SEQ ID NO: 381040 - RNA, 20 nt, Human
cuggggggcaucugcaggug

SEQ ID NO: 381041 - RNA, 25 nt, Human
cugggggugaggcuggucaaagggc

SEQ ID NO: 381042 - RNA, 20 nt, Human
cugucucuuuggguucuccc

SEQ ID NO: 381043 - RNA, 18 nt, Human
cuugcugcugucuucugu

SEQ ID NO: 381044 - RNA, 25 nt, Human
cuuuggguucucccuccccuaaggg

SEQ ID NO: 381045 - RNA, 29 nt, Human
gaagccuuccaugcccuaaccugugcucu

SEQ ID NO: 381046 - RNA, 23 nt, Human
gacccacuugggcacagucagac

SEQ ID NO: 381047 - RNA, 25 nt, Human
gagcugucucuuugggucggguucc

SEQ ID NO: 381048 - RNA, 21 nt, Human
gaguucaaggcuggcccugcu

SEQ ID NO: 381049 - RNA, 21 nt, Human
gcaaaagcagauagacacaug

SEQ ID NO: 381050 - RNA, 21 nt, Human
gcaaccccucugcugucuucu

SEQ ID NO: 381051 - RNA, 18 nt, Human
gcaggucuguggggguag

SEQ ID NO: 381052 - RNA, 24 nt, Human
gcccccaaggacccuccccccgac

SEQ ID NO: 381053 - RNA, 18 nt, Human
gcucagccccaucacccu

SEQ ID NO: 381054 - RNA, 20 nt, Human
gcucaucuggcccaggcugg

SEQ ID NO: 381055 - RNA, 22 nt, Human
gcugcaggugcaggcauguugg

SEQ ID NO: 381056 - RNA, 18 nt, Human
gcuggggggcaucugcag

SEQ ID NO: 381057 - RNA, 22 nt, Human
gcugucuucucccuuucucagc

SEQ ID NO: 381058 - RNA, 19 nt, Human
ggaauaugucuucaccaag

SEQ ID NO: 381059 - RNA, 22 nt, Human
ggaaugauagaaaggaaggagu

SEQ ID NO: 381060 - RNA, 18 nt, Human
ggcuccacccacugugca

SEQ ID NO: 381061 - RNA, 19 nt, Human
ggcugcaggaggggcugug

SEQ ID NO: 381062 - RNA, 18 nt, Human
ggcuuaggaucuaugacc

SEQ ID NO: 381063 - RNA, 19 nt, Human
gggauaggggagugaaggg

SEQ ID NO: 381064 - RNA, 21 nt, Human
ggggauggagugagagugugg

SEQ ID NO: 381065 - RNA, 21 nt, Human
ggggauggagugagagugugg

SEQ ID NO: 381066 - RNA, 22 nt, Human
ggggugaggcuggucaaagggc

SEQ ID NO: 381067 - RNA, 20 nt, Human
gggucagaaugggcggagaa

SEQ ID NO: 381068 - RNA, 19 nt, Human
gguggauggggcaacagaa

SEQ ID NO: 381069 - RNA, 21 nt, Human
gugugugcgugcgugugcgcg

SEQ ID NO: 381070 - RNA, 31 nt, Human
uaagauaaagcacacacauacauacacacag

SEQ ID NO: 381071 - RNA, 20 nt, Human
uacacacacacacacacaca

SEQ ID NO: 381072 - RNA, 25 nt, Human
uacacacacacacacacacacacac

SEQ ID NO: 381073 - RNA, 24 nt, Human
uacauacacacacacacacacaca

SEQ ID NO: 381074 - RNA, 26 nt, Human
uacauacacacacacacacacacaca

SEQ ID NO: 381075 - RNA, 19 nt, Human
uacuaguaaccacaugucc

SEQ ID NO: 381076 - RNA, 21 nt, Human
uaguagaagagcugucucuuu

SEQ ID NO: 381077 - RNA, 19 nt, Human
uagugagguccuguucagu

SEQ ID NO: 381078 - RNA, 20 nt, Human
uaucagaagccuccaccugg

SEQ ID NO: 381079 - RNA, 19 nt, Human
uaugcucccacccaggguc

SEQ ID NO: 381080 - RNA, 23 nt, Human
uauguggucaugcaacuaaggug

SEQ ID NO: 381081 - RNA, 22 nt, Human
uaugugugugugcgugcgugug

SEQ ID NO: 381082 - RNA, 19 nt, Human
ucagggcaaaaccuguacu

SEQ ID NO: 381083 - RNA, 20 nt, Human
uccaccaccaccaccaaaaa

SEQ ID NO: 381084 - RNA, 22 nt, Human
uccccccgacuccccuugcccc

SEQ ID NO: 381085 - RNA, 18 nt, Human
uccucucccguccucccu

SEQ ID NO: 381086 - RNA, 24 nt, Human
ucuaugaccccugccuugagaggg

SEQ ID NO: 381087 - RNA, 24 nt, Human
ucucccguccucccucuucagugu

SEQ ID NO: 381088 - RNA, 22 nt, Human
ucugcugucuucucccuuucuc

SEQ ID NO: 381089 - RNA, 22 nt, Human
ucuucaccaauccaagugcccu

SEQ ID NO: 381090 - RNA, 18 nt, Human
ugaggcuggucaaagggc

SEQ ID NO: 381091 - RNA, 20 nt, Human
ugauacggggggauggaguu

SEQ ID NO: 381092 - RNA, 19 nt, Human
ugcaggugaggcuccugga

SEQ ID NO: 381093 - RNA, 24 nt, Human
ugcaggugcaggcauguuggggcg

SEQ ID NO: 381094 - RNA, 22 nt, Human
ugccccagcccgcuguuuccgg

SEQ ID NO: 381095 - RNA, 18 nt, Human
ugcgugugcgcgcugcag

SEQ ID NO: 381096 - RNA, 24 nt, Human
uggagguugccucggcaaccccuc

SEQ ID NO: 381097 - RNA, 21 nt, Human
uggcgguggauggggcaacag

SEQ ID NO: 381098 - RNA, 21 nt, Human
uggcucaggcagcugucuucc

SEQ ID NO: 381099 - RNA, 18 nt, Human
uggcugccccagcccgcu

SEQ ID NO: 381100 - RNA, 19 nt, Human
ugggacauugagaucccag

SEQ ID NO: 381101 - RNA, 21 nt, Human
ugggauaggggagugaaggga

SEQ ID NO: 381102 - RNA, 20 nt, Human
uggggcgugucucagagccu

SEQ ID NO: 381103 - RNA, 21 nt, Human
ugggguuggcccuuaggucca

SEQ ID NO: 381104 - RNA, 22 nt, Human
ugucacagccacuuggacccac

SEQ ID NO: 381105 - RNA, 20 nt, Human
ugucacuggcuggcucaggc

SEQ ID NO: 381106 - RNA, 19 nt, Human
uguccagagcaggucugug

SEQ ID NO: 381107 - RNA, 21 nt, Human
ugugcucuuacccagcccccc

SEQ ID NO: 381108 - RNA, 19 nt, Human
ugugguggguacaccuggg

SEQ ID NO: 381109 - RNA, 23 nt, Human
ugugugcgugcgugugcgcgcug

SEQ ID NO: 381110 - RNA, 20 nt, Human
uguucagugggaggcagcag

SEQ ID NO: 381111 - RNA, 19 nt, Human
uuccagucagugcuggaag

SEQ ID NO: 381112 - RNA, 24 nt, Human
uuggguucucccuccagcugggau

SEQ ID NO: 381113 - RNA, 20 nt, Human
uuuauggcuuaggaucuaug

SEQ ID NO: 381114 - RNA, 18 nt, Human
uuucagauuguguacagu

SEQ ID NO: 381115 - RNA, 21 nt, Human
uuuuuuuuuuuuuuuuuucag

SEQ ID NO: 381116 - RNA, 26 nt, Human
auugcaauuauaucaucaagugacaa

SEQ ID NO: 381117 - RNA, 23 nt, Human
caucaagugacaauugaaaaggg

SEQ ID NO: 381118 - RNA, 20 nt, Human
cauuugcauugcucuuugau

SEQ ID NO: 381119 - RNA, 26 nt, Human
cucaauaaucauguccugcaguuacu

SEQ ID NO: 381120 - RNA, 19 nt, Human
gagacuacagaaguaguga

SEQ ID NO: 381121 - RNA, 25 nt, Human
ucaagugacaauugaaaaggcaagu

SEQ ID NO: 381122 - RNA, 27 nt, Human
aaaaagaccaaacacggaggugcccag

SEQ ID NO: 381123 - RNA, 28 nt, Human
aaaaagaccaaacacggaggugcccagg

SEQ ID NO: 381124 - RNA, 18 nt, Human
aaaagaccaaacacggag

SEQ ID NO: 381125 - RNA, 20 nt, Human
aaagcaguuucaguauuuuc

SEQ ID NO: 381126 - RNA, 18 nt, Human
aaauaaaaauggaaccaa

SEQ ID NO: 381127 - RNA, 21 nt, Human
aaaugaucaucuaaaguuuaa

SEQ ID NO: 381128 - RNA, 22 nt, Human
aagaaggaaaaaagggagagga

SEQ ID NO: 381129 - RNA, 18 nt, Human
aaggaagaaggaaaaaag

SEQ ID NO: 381130 - RNA, 25 nt, Human
aagucagucucagacaaguuuccaa

SEQ ID NO: 381131 - RNA, 22 nt, Human
aaucgcugaccugggaggugga

SEQ ID NO: 381132 - RNA, 19 nt, Human
aauggaaccaaaugaucau

SEQ ID NO: 381133 - RNA, 20 nt, Human
acaagagcaaaacuccaccu

SEQ ID NO: 381134 - RNA, 25 nt, Human
acacaacaucaaaagcaagggaacc

SEQ ID NO: 381135 - RNA, 26 nt, Human
acacaacaucaaaagcaagggaacgc

SEQ ID NO: 381136 - RNA, 18 nt, Human
acaguaacacaacaucaa

SEQ ID NO: 381137 - RNA, 18 nt, Human
acaguagggguuaugcuu

SEQ ID NO: 381138 - RNA, 18 nt, Human
accacauacacauggaua

SEQ ID NO: 381139 - RNA, 18 nt, Human
accccagcacaguccagc

SEQ ID NO: 381140 - RNA, 23 nt, Human
accuuuuuuaaaaagagggcguu

SEQ ID NO: 381141 - RNA, 22 nt, Human
acgccacugcacuccagccugg

SEQ ID NO: 381142 - RNA, 24 nt, Human
acgccacugcacuccagccugggc

SEQ ID NO: 381143 - RNA, 19 nt, Human
acgcugaagagcgcucagg

SEQ ID NO: 381144 - RNA, 18 nt, Human
acugcacuccagccuggg

SEQ ID NO: 381145 - RNA, 19 nt, Human
acugcacuccagccugggc

SEQ ID NO: 381146 - RNA, 25 nt, Human
acugcacuccagccugggcgacaag

SEQ ID NO: 381147 - RNA, 22 nt, Human
agaaaaauuccagcguaaacaa

SEQ ID NO: 381148 - RNA, 19 nt, Human
agaggaagaagggacgaag

SEQ ID NO: 381149 - RNA, 21 nt, Human
aggaagcgggagccgagagag

SEQ ID NO: 381150 - RNA, 25 nt, Human
agggagaggaagaagggacgaaggg

SEQ ID NO: 381151 - RNA, 18 nt, Human
agguggagguugcaguga

SEQ ID NO: 381152 - RNA, 24 nt, Human
agguggagguugcagugagccgag

SEQ ID NO: 381153 - RNA, 23 nt, Human
aguccagccggccacagccgccu

SEQ ID NO: 381154 - RNA, 24 nt, Human
aucacgccacugcacuccagccug

SEQ ID NO: 381155 - RNA, 19 nt, Human
aucacugaaacuguccugg

SEQ ID NO: 381156 - RNA, 21 nt, Human
caaagcaguuucaguauuuuc

SEQ ID NO: 381157 - RNA, 23 nt, Human
caaaugaucaucuaaaguuuaaa

SEQ ID NO: 381158 - RNA, 22 nt, Human
caacacagcuguauacagaaac

SEQ ID NO: 381159 - RNA, 24 nt, Human
cacaacaucaaaagcaacacagcu

SEQ ID NO: 381160 - RNA, 26 nt, Human
cacaguccagccggccacagccgccu

SEQ ID NO: 381161 - RNA, 24 nt, Human
cacuccagccugggcgacaagagc

SEQ ID NO: 381162 - RNA, 22 nt, Human
cacucuggaaaaucacucugca

SEQ ID NO: 381163 - RNA, 19 nt, Human
cacugcacuccagccuggg

SEQ ID NO: 381164 - RNA, 21 nt, Human
cacugcacuccagccugggcg

SEQ ID NO: 381165 - RNA, 22 nt, Human
cacugcacuccagccugggcga

SEQ ID NO: 381166 - RNA, 23 nt, Human
cacugcacuccagccugggcgac

SEQ ID NO: 381167 - RNA, 24 nt, Human
cacugcacuccagccugggcgaca

SEQ ID NO: 381168 - RNA, 23 nt, Human
cagcacaguccagccggccacag

SEQ ID NO: 381169 - RNA, 21 nt, Human
cagcccuaauggagauguaau

SEQ ID NO: 381170 - RNA, 21 nt, Human
cagccggccacagccgccucc

SEQ ID NO: 381171 - RNA, 24 nt, Human
cagccggccacagccgccuccuug

SEQ ID NO: 381172 - RNA, 24 nt, Human
cagguuuauauggacuacauggag

SEQ ID NO: 381173 - RNA, 21 nt, Human
cagugcacacacuucugugua

SEQ ID NO: 381174 - RNA, 23 nt, Human
cagugcacacacuucuguguaca

SEQ ID NO: 381175 - RNA, 25 nt, Human
caguucugagagguuaagugguuaa

SEQ ID NO: 381176 - RNA, 25 nt, Human
caguucugagagguuaagugguuaa

SEQ ID NO: 381177 - RNA, 20 nt, Human
ccacugcacuccagccuggg

SEQ ID NO: 381178 - RNA, 21 nt, Human
ccacugcacuccagccugggc

SEQ ID NO: 381179 - RNA, 21 nt, Human
ccacugcacuccagccugggc

SEQ ID NO: 381180 - RNA, 23 nt, Human
ccacugcacuccagccugggcga

SEQ ID NO: 381181 - RNA, 23 nt, Human
ccacugcacuccagccugggcga

SEQ ID NO: 381182 - RNA, 24 nt, Human
ccacugcacuccagccugggcgac

SEQ ID NO: 381183 - RNA, 24 nt, Human
ccagcacaguccagccggccacag

SEQ ID NO: 381184 - RNA, 18 nt, Human
ccaggacuguuucagcug

SEQ ID NO: 381185 - RNA, 20 nt, Human
ccauggggagaaaaauucca

SEQ ID NO: 381186 - RNA, 19 nt, Human
ccgccgggccggggggggg

SEQ ID NO: 381187 - RNA, 21 nt, Human
ccugggagguggagguugcag

SEQ ID NO: 381188 - RNA, 22 nt, Human
ccuguuugcauuaacaaaaaua

SEQ ID NO: 381189 - RNA, 23 nt, Human
ccuguuugcauuaacaaaaauaa

SEQ ID NO: 381190 - RNA, 21 nt, Human
cgacaagagcaaaacuccacc

SEQ ID NO: 381191 - RNA, 19 nt, Human
cgcgcaaacgcugaagagc

SEQ ID NO: 381192 - RNA, 24 nt, Human
cuccuguaaucucagcuuaucggg

SEQ ID NO: 381193 - RNA, 20 nt, Human
cucgcagggcuaccagguuu

SEQ ID NO: 381194 - RNA, 21 nt, Human
cucucuggcauggcuguccag

SEQ ID NO: 381195 - RNA, 23 nt, Human
cugaccugggagguggagguugc

SEQ ID NO: 381196 - RNA, 21 nt, Human
cuuuaaaacagagaucaaagu

SEQ ID NO: 381197 - RNA, 20 nt, Human
cuuucuggcugcugcuccgg

SEQ ID NO: 381198 - RNA, 23 nt, Human
cuuucuuuuuuaaaaagagggcg

SEQ ID NO: 381199 - RNA, 25 nt, Human
cuuucuuuuuuaaaaagagggcguu

SEQ ID NO: 381200 - RNA, 25 nt, Human
cuuucuuuuuuaaaaagagggcguu

SEQ ID NO: 381201 - RNA, 22 nt, Human
gaagagaaagcaguggugaugg

SEQ ID NO: 381202 - RNA, 19 nt, Human
gaaggaagaaggaaaaaag

SEQ ID NO: 381203 - RNA, 20 nt, Human
gaaggaagaaggaaaaaagg

SEQ ID NO: 381204 - RNA, 18 nt, Human
gaagggagggaagaggcg

SEQ ID NO: 381205 - RNA, 21 nt, Human
gaagggagggaagaggcggag

SEQ ID NO: 381206 - RNA, 22 nt, Human
gacaagagcaaaacuccaccug

SEQ ID NO: 381207 - RNA, 24 nt, Human
gaccgccaggucaccgaguggcca

SEQ ID NO: 381208 - RNA, 24 nt, Human
gagaggaagaagggacgaagggag

SEQ ID NO: 381209 - RNA, 23 nt, Human
gagaucacgccacugcacuccag

SEQ ID NO: 381210 - RNA, 19 nt, Human
gaggugcccagggugugga

SEQ ID NO: 381211 - RNA, 22 nt, Human
gagguugcagugagccgagauc

SEQ ID NO: 381212 - RNA, 20 nt, Human
gaguggccguggaggaggcc

SEQ ID NO: 381213 - RNA, 22 nt, Human
gccacugcacuccagccugggc

SEQ ID NO: 381214 - RNA, 24 nt, Human
gccacugcacuccagccugggcga

SEQ ID NO: 381215 - RNA, 20 nt, Human
gccaucacaacaaaccccag

SEQ ID NO: 381216 - RNA, 20 nt, Human
gccgagaucacgccacugca

SEQ ID NO: 381217 - RNA, 19 nt, Human
gcugcugcuccggacucgu

SEQ ID NO: 381218 - RNA, 24 nt, Human
ggagaaaaauuccagcguaaacaa

SEQ ID NO: 381219 - RNA, 20 nt, Human
ggaggggaaggaagaaggaa

SEQ ID NO: 381220 - RNA, 20 nt, Human
ggagguugcagugagccgag

SEQ ID NO: 381221 - RNA, 22 nt, Human
ggagguugcagugagccgagau

SEQ ID NO: 381222 - RNA, 23 nt, Human
ggagguugcagugagccgagauc

SEQ ID NO: 381223 - RNA, 24 nt, Human
ggagguugcagugagccgagauca

SEQ ID NO: 381224 - RNA, 21 nt, Human
ggccgggggggggaggcgguc

SEQ ID NO: 381225 - RNA, 19 nt, Human
ggccggucaaaggccucuc

SEQ ID NO: 381226 - RNA, 18 nt, Human
ggcgguggcggcgaggag

SEQ ID NO: 381227 - RNA, 19 nt, Human
ggcgguggcggcgaggagg

SEQ ID NO: 381228 - RNA, 22 nt, Human
gggaggcugaagugggaaaauc

SEQ ID NO: 381229 - RNA, 24 nt, Human
gggccgggggggggaggcgguccu

SEQ ID NO: 381230 - RNA, 24 nt, Human
ggggaaaaaaaagaccaaacacgg

SEQ ID NO: 381231 - RNA, 25 nt, Human
ggggaaggaagaaggaaaaaaggga

SEQ ID NO: 381232 - RNA, 21 nt, Human
guccaauuuauacaacugugg

SEQ ID NO: 381233 - RNA, 23 nt, Human
guccaauuuauacaacuguggga

SEQ ID NO: 381234 - RNA, 20 nt, Human
gugcacacacuucuguguac

SEQ ID NO: 381235 - RNA, 19 nt, Human
guugcagugagccgagauc

SEQ ID NO: 381236 - RNA, 24 nt, Human
uaacacaacaucaaaagcaacaca

SEQ ID NO: 381237 - RNA, 18 nt, Human
uaacucgcagggcuacca

SEQ ID NO: 381238 - RNA, 22 nt, Human
uaauaaacucuggcugcugcuc

SEQ ID NO: 381239 - RNA, 23 nt, Human
uacaguagggguuaugcuuucug

SEQ ID NO: 381240 - RNA, 22 nt, Human
uauauggacuacauggagauca

SEQ ID NO: 381241 - RNA, 22 nt, Human
uauccuguaguguagugaaagc

SEQ ID NO: 381242 - RNA, 22 nt, Human
ucaaaggccucucucuggcaug

SEQ ID NO: 381243 - RNA, 21 nt, Human
ucaaaguucauuuaaguccug

SEQ ID NO: 381244 - RNA, 18 nt, Human
ucacaacaaaccccagca

SEQ ID NO: 381245 - RNA, 22 nt, Human
ucacaacaaaccccagcacagu

SEQ ID NO: 381246 - RNA, 23 nt, Human
ucacacaggggaaaaaaaagacc

SEQ ID NO: 381247 - RNA, 23 nt, Human
ucacgccacugcacuccagccug

SEQ ID NO: 381248 - RNA, 19 nt, Human
ucacugaaacuguccuggg

SEQ ID NO: 381249 - RNA, 28 nt, Human
ucacugaaacuguccuggguuggacccc

SEQ ID NO: 381250 - RNA, 18 nt, Human
ucagcccuaauggagaug

SEQ ID NO: 381251 - RNA, 21 nt, Human
ucagcccuaauggagauguaa

SEQ ID NO: 381252 - RNA, 25 nt, Human
ucagugcacacacuucuguguacag

SEQ ID NO: 381253 - RNA, 19 nt, Human
uccaaauuuucaaagcagu

SEQ ID NO: 381254 - RNA, 19 nt, Human
uccagccugggcgacaaga

SEQ ID NO: 381255 - RNA, 19 nt, Human
uccaggacuguuucagcug

SEQ ID NO: 381256 - RNA, 19 nt, Human
uccauggggagaaaaauuc

SEQ ID NO: 381257 - RNA, 21 nt, Human
ucccccggccggcgguccugg

SEQ ID NO: 381258 - RNA, 20 nt, Human
uccuguaguguagugaaagc

SEQ ID NO: 381259 - RNA, 22 nt, Human
ucgcugaccugggagguggagg

SEQ ID NO: 381260 - RNA, 21 nt, Human
ucucuggcauggcuguccagg

SEQ ID NO: 381261 - RNA, 18 nt, Human
ucuuccccacaggcagcu

SEQ ID NO: 381262 - RNA, 19 nt, Human
ucuuuuuuaaaaagagggc

SEQ ID NO: 381263 - RNA, 19 nt, Human
ugaaacuaagaauacagau

SEQ ID NO: 381264 - RNA, 23 nt, Human
ugaccugggagguggagguugca

SEQ ID NO: 381265 - RNA, 20 nt, Human
ugagaaauucucaaaugaaa

SEQ ID NO: 381266 - RNA, 22 nt, Human
ugagccgagaucacgccacugc

SEQ ID NO: 381267 - RNA, 28 nt, Human
ugcauuaacaaaaauaaaaaugaaauaa

SEQ ID NO: 381268 - RNA, 22 nt, Human
ugcuaugaagucuaaaguucua

SEQ ID NO: 381269 - RNA, 23 nt, Human
ugcugcccacauccuuuacccac

SEQ ID NO: 381270 - RNA, 22 nt, Human
ugcugcuggcugcugcuccgga

SEQ ID NO: 381271 - RNA, 19 nt, Human
uggaagcaguacuuaacuc

SEQ ID NO: 381272 - RNA, 20 nt, Human
uggagguugcagugagccga

SEQ ID NO: 381273 - RNA, 20 nt, Human
uggagguugcagugagccgg

SEQ ID NO: 381274 - RNA, 19 nt, Human
uggcauggcuguccagggu

SEQ ID NO: 381275 - RNA, 22 nt, Human
uggcauggcuguccaggguucu

SEQ ID NO: 381276 - RNA, 22 nt, Human
uggccaucacaacaaaccccag

SEQ ID NO: 381277 - RNA, 18 nt, Human
uggcggcgaggaggggaa

SEQ ID NO: 381278 - RNA, 20 nt, Human
ugggaaaaucgcugaccugg

SEQ ID NO: 381279 - RNA, 18 nt, Human
ugggagguggagguugca

SEQ ID NO: 381280 - RNA, 29 nt, Human
ugggagguggagguugcagugacaacggu

SEQ ID NO: 381281 - RNA, 24 nt, Human
ugggagguggagguugcagugagc

SEQ ID NO: 381282 - RNA, 21 nt, Human
ugggcgguggcggcgaggagg

SEQ ID NO: 381283 - RNA, 19 nt, Human
ugucccgggagaaccagcu

SEQ ID NO: 381284 - RNA, 21 nt, Human
uguccuggguuagucaaugaa

SEQ ID NO: 381285 - RNA, 20 nt, Human
ugucuaaccacauacacaug

SEQ ID NO: 381286 - RNA, 19 nt, Human
uuaauaaacuccuguaauc

SEQ ID NO: 381287 - RNA, 18 nt, Human
uuacuuacauuccauggg

SEQ ID NO: 381288 - RNA, 23 nt, Human
uuagcucuggggccggucaaagg

SEQ ID NO: 381289 - RNA, 24 nt, Human
uuccaggaacaauguugucuuugu

SEQ ID NO: 381290 - RNA, 24 nt, Human
uuccaggaacaauguugucuuugu

SEQ ID NO: 381291 - RNA, 22 nt, Human
uuccauggggagaaaaauucca

SEQ ID NO: 381292 - RNA, 18 nt, Human
uucuucuuucacacaggg

SEQ ID NO: 381293 - RNA, 18 nt, Human
uugcagugagccgagauc

SEQ ID NO: 381294 - RNA, 20 nt, Human
uugcagugagccgagaucac

SEQ ID NO: 381295 - RNA, 21 nt, Human
uugcagugagccgagaucacg

SEQ ID NO: 381296 - RNA, 18 nt, Human
uuuauacaacugugggag

SEQ ID NO: 381297 - RNA, 22 nt, Human
uuugauuuucucuggugcuuuu

SEQ ID NO: 381298 - RNA, 19 nt, Human
aaaaaaauccgaacaugca

SEQ ID NO: 381299 - RNA, 23 nt, Human
aaaaaaauccgaacaugcaaaau

SEQ ID NO: 381300 - RNA, 18 nt, Human
aaaaaaucaauucagagc

SEQ ID NO: 381301 - RNA, 23 nt, Human
aaaaaaucaauucagagcuugaa

SEQ ID NO: 381302 - RNA, 23 nt, Human
aaaaagaagaaggaaaauggaga

SEQ ID NO: 381303 - RNA, 19 nt, Human
aaaagaagaaggaaaaugg

SEQ ID NO: 381304 - RNA, 22 nt, Human
aaaagaagaaggaaaauggagg

SEQ ID NO: 381305 - RNA, 18 nt, Human
aaaaguucuaaccuagaa

SEQ ID NO: 381306 - RNA, 23 nt, Human
aaacauauaacguguccauaaaa

SEQ ID NO: 381307 - RNA, 23 nt, Human
aaacaugauccaguaaaacaaau

SEQ ID NO: 381308 - RNA, 27 nt, Human
aaagaagaaggaaaauggagaagagac

SEQ ID NO: 381309 - RNA, 23 nt, Human
aacaaaaacaaauucuaaaauug

SEQ ID NO: 381310 - RNA, 19 nt, Human
aacagaaugcaaaauucaa

SEQ ID NO: 381311 - RNA, 21 nt, Human
aacuaagaaaucaagacacag

SEQ ID NO: 381312 - RNA, 25 nt, Human
aacuauaagcuaguuuuagacuacc

SEQ ID NO: 381313 - RNA, 23 nt, Human
aagaagaaggaaaauggagaaga

SEQ ID NO: 381314 - RNA, 23 nt, Human
aagaagaaggaaaauggagaaga

SEQ ID NO: 381315 - RNA, 19 nt, Human
aagaaggaaaauggagaag

SEQ ID NO: 381316 - RNA, 24 nt, Human
aagagauagaugcaccuaaucaag

SEQ ID NO: 381317 - RNA, 19 nt, Human
aagcaaaaaaucaauucag

SEQ ID NO: 381318 - RNA, 21 nt, Human
aagcaaaaaaucaauucagag

SEQ ID NO: 381319 - RNA, 21 nt, Human
aaggcaacuaagaaaucaaga

SEQ ID NO: 381320 - RNA, 18 nt, Human
aauaaauaggggaaaaaa

SEQ ID NO: 381321 - RNA, 18 nt, Human
acacuaacaacuaccugg

SEQ ID NO: 381322 - RNA, 18 nt, Human
accuauaaagaaauaggc

SEQ ID NO: 381323 - RNA, 22 nt, Human
accuguuuauauucauuaguau

SEQ ID NO: 381324 - RNA, 22 nt, Human
acuacaguccaauuaaaacauu

SEQ ID NO: 381325 - RNA, 20 nt, Human
acugcuguaucccucacggc

SEQ ID NO: 381326 - RNA, 22 nt, Human
acuuuguaauacaauauagcug

SEQ ID NO: 381327 - RNA, 23 nt, Human
agaagaaggaaaauggagaagag

SEQ ID NO: 381328 - RNA, 27 nt, Human
agcuacuguaacaacagcuccaagcaa

SEQ ID NO: 381329 - RNA, 18 nt, Human
aggcaacuaagaaaucaa

SEQ ID NO: 381330 - RNA, 21 nt, Human
aggcagcaaaagaauuacuag

SEQ ID NO: 381331 - RNA, 21 nt, Human
aggcagccucuucuugccggg

SEQ ID NO: 381332 - RNA, 23 nt, Human
agucaguucaaaacaugauccag

SEQ ID NO: 381333 - RNA, 23 nt, Human
aguggcauguaggccauacuagc

SEQ ID NO: 381334 - RNA, 23 nt, Human
auaccccccaaaacacaugaccc

SEQ ID NO: 381335 - RNA, 18 nt, Human
auguaaaaaaagggagaa

SEQ ID NO: 381336 - RNA, 23 nt, Human
caaccaaagaagcacaguaauau

SEQ ID NO: 381337 - RNA, 26 nt, Human
caacuaagaaaucaagacacagauau

SEQ ID NO: 381338 - RNA, 24 nt, Human
caagacacagauauuuccccuucc

SEQ ID NO: 381339 - RNA, 20 nt, Human
caauacacucucuacacaca

SEQ ID NO: 381340 - RNA, 18 nt, Human
cagaucuucuagagcauu

SEQ ID NO: 381341 - RNA, 19 nt, Human
caucaaugacagaguauuu

SEQ ID NO: 381342 - RNA, 18 nt, Human
caucacaauuuauuucua

SEQ ID NO: 381343 - RNA, 19 nt, Human
cauguaggccauacuagca

SEQ ID NO: 381344 - RNA, 18 nt, Human
ccaaauagaagacaguga

SEQ ID NO: 381345 - RNA, 19 nt, Human
ccccccaaaacacaugacc

SEQ ID NO: 381346 - RNA, 21 nt, Human
ccccccaaaacacaugaccuu

SEQ ID NO: 381347 - RNA, 21 nt, Human
ccugaaucaauacuagcaacc

SEQ ID NO: 381348 - RNA, 21 nt, Human
cuacuguaacaacagcuccaa

SEQ ID NO: 381349 - RNA, 23 nt, Human
cuacuguaacaacagcuccaagc

SEQ ID NO: 381350 - RNA, 20 nt, Human
cuccaaaaacuucugagccu

SEQ ID NO: 381351 - RNA, 22 nt, Human
cuccuaagguaauagacuucua

SEQ ID NO: 381352 - RNA, 23 nt, Human
cugcuuagcugcagguagugguc

SEQ ID NO: 381353 - RNA, 23 nt, Human
cuuccuagaguuuacaauucuuu

SEQ ID NO: 381354 - RNA, 19 nt, Human
gaacaugcaaaauaccccc

SEQ ID NO: 381355 - RNA, 21 nt, Human
gaacaugcaaaauacccccca

SEQ ID NO: 381356 - RNA, 22 nt, Human
gaacaugcaaaauaccccccaa

SEQ ID NO: 381357 - RNA, 22 nt, Human
gaagacagugaagaauaugaaa

SEQ ID NO: 381358 - RNA, 23 nt, Human
gaagagauagaugcaccuaauca

SEQ ID NO: 381359 - RNA, 20 nt, Human
gcaaaauaccccccaaaaca

SEQ ID NO: 381360 - RNA, 18 nt, Human
gcaaaauuacagcuacug

SEQ ID NO: 381361 - RNA, 20 nt, Human
gcagcaaaagaauuacuaga

SEQ ID NO: 381362 - RNA, 18 nt, Human
ggaagacagagcgaagag

SEQ ID NO: 381363 - RNA, 18 nt, Human
gggcaaggaaagccaaag

SEQ ID NO: 381364 - RNA, 24 nt, Human
guaaaaaucacaauacacagauuu

SEQ ID NO: 381365 - RNA, 28 nt, Human
guaaaacaaauacacauuguuaugccuc

SEQ ID NO: 381366 - RNA, 26 nt, Human
guaaaacaacaaaaacaaauucuaaa

SEQ ID NO: 381367 - RNA, 21 nt, Human
guaucccucacggcuccaaaa

SEQ ID NO: 381368 - RNA, 22 nt, Human
guccuguaauuucuaaacuaca

SEQ ID NO: 381369 - RNA, 20 nt, Human
gugaagggaaaaaaaaaucc

SEQ ID NO: 381370 - RNA, 19 nt, Human
gugguaggcagccucuucu

SEQ ID NO: 381371 - RNA, 21 nt, Human
gugguuaaaauuucagaugac

SEQ ID NO: 381372 - RNA, 23 nt, Human
uaaagaaauaggcuuuaaaacuu

SEQ ID NO: 381373 - RNA, 21 nt, Human
uaacaacagcuccaagcaaaa

SEQ ID NO: 381374 - RNA, 19 nt, Human
uaacagcuucuugaaguuc

SEQ ID NO: 381375 - RNA, 21 nt, Human
uaacuuuaaauuaagugguua

SEQ ID NO: 381376 - RNA, 19 nt, Human
uaagaaaucaagacacaga

SEQ ID NO: 381377 - RNA, 23 nt, Human
uaagaguccaauuagaaacacua

SEQ ID NO: 381378 - RNA, 20 nt, Human
uaaggaauaaagacuaagau

SEQ ID NO: 381379 - RNA, 23 nt, Human
uaagguaaaacaacaaaaacaaa

SEQ ID NO: 381380 - RNA, 22 nt, Human
uaaguuaaacuauaagcuaguu

SEQ ID NO: 381381 - RNA, 20 nt, Human
uaauagaaacaaucuacaug

SEQ ID NO: 381382 - RNA, 22 nt, Human
uacacaauacagaucuucuaga

SEQ ID NO: 381383 - RNA, 21 nt, Human
uacacaauauucaauaagcaa

SEQ ID NO: 381384 - RNA, 18 nt, Human
uacccagugaaacagaau

SEQ ID NO: 381385 - RNA, 20 nt, Human
uaccccccaaaacacaugac

SEQ ID NO: 381386 - RNA, 23 nt, Human
uacccucccuagucaguucaaaa

SEQ ID NO: 381387 - RNA, 23 nt, Human
uagaugcaccuaaucaagaccaa

SEQ ID NO: 381388 - RNA, 21 nt, Human
uauguaaaaaaagggagaacu

SEQ ID NO: 381389 - RNA, 24 nt, Human
uauuaagaguccaauuagaaacac

SEQ ID NO: 381390 - RNA, 21 nt, Human
ucaauaccagcucauucaacc

SEQ ID NO: 381391 - RNA, 25 nt, Human
ucaauacuagcaacagaaugcaaaa

SEQ ID NO: 381392 - RNA, 20 nt, Human
ucccucacggcuccaaaaac

SEQ ID NO: 381393 - RNA, 20 nt, Human
uccuagaguuuacaauucuu

SEQ ID NO: 381394 - RNA, 18 nt, Human
ucuaaccuagaaacacag

SEQ ID NO: 381395 - RNA, 19 nt, Human
ucuaaccuagaaacacaga

SEQ ID NO: 381396 - RNA, 20 nt, Human
ugaaucaauacuagcaacag

SEQ ID NO: 381397 - RNA, 18 nt, Human
ugaaugcaauuugugcuu

SEQ ID NO: 381398 - RNA, 22 nt, Human
ugauuuuugugggguuuuuucc

SEQ ID NO: 381399 - RNA, 18 nt, Human
ugcaccuaaucaagacca

SEQ ID NO: 381400 - RNA, 22 nt, Human
ugcuguaucccucacggcucca

SEQ ID NO: 381401 - RNA, 24 nt, Human
ugugcaauaaaauaaaaaaguucu

SEQ ID NO: 381402 - RNA, 23 nt, Human
uguuuuguuuuuuguuuuugcuu

SEQ ID NO: 381403 - RNA, 19 nt, Human
uuagaaauaaaaacaaauu

SEQ ID NO: 381404 - RNA, 23 nt, Human
uucaaaacaugauccaguaaaac

SEQ ID NO: 381405 - RNA, 20 nt, Human
uucagaaauaaaaguaacag

SEQ ID NO: 381406 - RNA, 18 nt, Human
uuggucuuaaggaauaaa

SEQ ID NO: 381407 - RNA, 20 nt, Human
uuggucuuaaggaauaaaga

SEQ ID NO: 381408 - RNA, 24 nt, Human
uuguuuuguuuuuuguuuuugcuu

SEQ ID NO: 381409 - RNA, 23 nt, Human
uuuguguaucuuugaguucuucu

SEQ ID NO: 381410 - RNA, 23 nt, Human
uuuuguuuuuuguuuuugcuuuu

SEQ ID NO: 381411 - RNA, 19 nt, Human
aaaaaaaaaaaaaaaaaga

SEQ ID NO: 381412 - RNA, 24 nt, Human
aaaaaaaaaaaaaaaagaaaagaa

SEQ ID NO: 381413 - RNA, 23 nt, Human
aaaaaaaagaaaagaaaaaagga

SEQ ID NO: 381414 - RNA, 21 nt, Human
aaaauggacacaacacacaaa

SEQ ID NO: 381415 - RNA, 22 nt, Human
aaacuaaaucuauaugcaauaa

SEQ ID NO: 381416 - RNA, 22 nt, Human
aaagaaaauuagacauuggagg

SEQ ID NO: 381417 - RNA, 23 nt, Human
aaagagaagcaaaaaacuagcaa

SEQ ID NO: 381418 - RNA, 19 nt, Human
aaagucucccaccccauca

SEQ ID NO: 381419 - RNA, 19 nt, Human
aaauggacacaacacacaa

SEQ ID NO: 381420 - RNA, 19 nt, Human
aacuggucuaggucagccc

SEQ ID NO: 381421 - RNA, 22 nt, Human
aagaaaaaaggaaaucuacuga

SEQ ID NO: 381422 - RNA, 19 nt, Human
aagaagaugcaggcucaaa

SEQ ID NO: 381423 - RNA, 18 nt, Human
aagcaaaaaacuagcaac

SEQ ID NO: 381424 - RNA, 22 nt, Human
aaggaaaucuacugaacugaag

SEQ ID NO: 381425 - RNA, 23 nt, Human
aaggggggguaccacgguuugaa

SEQ ID NO: 381426 - RNA, 26 nt, Human
aaguuguuggguuuuuuuuuuuuccu

SEQ ID NO: 381427 - RNA, 19 nt, Human
acaaaggcagcaauguuug

SEQ ID NO: 381428 - RNA, 22 nt, Human
accaaaggcuucauauuaugcu

SEQ ID NO: 381429 - RNA, 26 nt, Human
accagcucuuuuucccucuuucuuuc

SEQ ID NO: 381430 - RNA, 18 nt, Human
accugauuuccaagaggc

SEQ ID NO: 381431 - RNA, 20 nt, Human
acuguuguucauagauaggu

SEQ ID NO: 381432 - RNA, 23 nt, Human
agaaaaaaggaaaucuacugaac

SEQ ID NO: 381433 - RNA, 24 nt, Human
agaaagagagaaauuugcuaggaa

SEQ ID NO: 381434 - RNA, 24 nt, Human
agauacuuuuaaagcucugagcag

SEQ ID NO: 381435 - RNA, 21 nt, Human
agauaucaucguggggagaaa

SEQ ID NO: 381436 - RNA, 20 nt, Human
agccucuggguugagguggg

SEQ ID NO: 381437 - RNA, 19 nt, Human
agcgaguuuggaguggccc

SEQ ID NO: 381438 - RNA, 19 nt, Human
aggcaccgaugaaagggga

SEQ ID NO: 381439 - RNA, 18 nt, Human
aggcagaaugaucacaug

SEQ ID NO: 381440 - RNA, 30 nt, Human
aggucacagccaaaaaaaaaaaaaaaaaaa

SEQ ID NO: 381441 - RNA, 24 nt, Human
aguagccucuggguugaggugggc

SEQ ID NO: 381442 - RNA, 20 nt, Human
agugaagauguggaucugga

SEQ ID NO: 381443 - RNA, 18 nt, Human
auugauuacagaagccua

SEQ ID NO: 381444 - RNA, 18 nt, Human
auuggaggaucaagacca

SEQ ID NO: 381445 - RNA, 22 nt, Human
caaaauggacacaacacacaaa

SEQ ID NO: 381446 - RNA, 24 nt, Human
caaacuggucuaggucagcccccg

SEQ ID NO: 381447 - RNA, 18 nt, Human
caauaaaacguaacacuu

SEQ ID NO: 381448 - RNA, 23 nt, Human
caccgccgcugcugcugcugcug

SEQ ID NO: 381449 - RNA, 21 nt, Human
cagccaaaaaccuaaauauca

SEQ ID NO: 381450 - RNA, 25 nt, Human
cagccccaagucccccggacuaaag

SEQ ID NO: 381451 - RNA, 18 nt, Human
cagcccccgaaucacucu

SEQ ID NO: 381452 - RNA, 18 nt, Human
cagcugccaggacuacuu

SEQ ID NO: 381453 - RNA, 22 nt, Human
cagcugccaggacuacuuuggc

SEQ ID NO: 381454 - RNA, 19 nt, Human
caucauggcagaaaugauc

SEQ ID NO: 381455 - RNA, 24 nt, Human
caugaauguuuuguguuugggggu

SEQ ID NO: 381456 - RNA, 23 nt, Human
ccaaaaaaaaaaaaaaaaaaaaa

SEQ ID NO: 381457 - RNA, 22 nt, Human
ccagcacagauucauaacacga

SEQ ID NO: 381458 - RNA, 20 nt, Human
ccaggaucccuaucacucga

SEQ ID NO: 381459 - RNA, 21 nt, Human
ccaugauauguuucauaaccu

SEQ ID NO: 381460 - RNA, 24 nt, Human
cccaagucccccggacuaaagacc

SEQ ID NO: 381461 - RNA, 21 nt, Human
ccccaagucccccggacuaaa

SEQ ID NO: 381462 - RNA, 19 nt, Human
ccccccuuuccucuuuccc

SEQ ID NO: 381463 - RNA, 20 nt, Human
cccccgaaucacucugcagc

SEQ ID NO: 381464 - RNA, 21 nt, Human
cccccgaaucacucugcagca

SEQ ID NO: 381465 - RNA, 24 nt, Human
cccccggacuaaagaccuaaaggc

SEQ ID NO: 381466 - RNA, 20 nt, Human
ccccugcaguccuaccccuc

SEQ ID NO: 381467 - RNA, 27 nt, Human
ccccugcaguccuaccccuccucccuc

SEQ ID NO: 381468 - RNA, 22 nt, Human
cccggacuaaagaccuaaaggc

SEQ ID NO: 381469 - RNA, 18 nt, Human
cccuccucccucucuucc

SEQ ID NO: 381470 - RNA, 23 nt, Human
ccgccgcugcugcugcugcugcc

SEQ ID NO: 381471 - RNA, 23 nt, Human
ccgccgcugcugcugcugcugcc

SEQ ID NO: 381472 - RNA, 25 nt, Human
ccgccgcugcugcugcugcugcugc

SEQ ID NO: 381473 - RNA, 28 nt, Human
ccgcugcugcugcugcugccaccgguuc

SEQ ID NO: 381474 - RNA, 20 nt, Human
ccgcugcugcugcugcugcu

SEQ ID NO: 381475 - RNA, 23 nt, Human
ccggugccuccgcugcugcugcu

SEQ ID NO: 381476 - RNA, 20 nt, Human
ccucccucucuuccucucuu

SEQ ID NO: 381477 - RNA, 23 nt, Human
ccucuccuggcuugagugaagau

SEQ ID NO: 381478 - RNA, 18 nt, Human
ccugcaguccuaccccuc

SEQ ID NO: 381479 - RNA, 20 nt, Human
ccugcaguccuaccccuccu

SEQ ID NO: 381480 - RNA, 20 nt, Human
ccuugagcagcacguuacug

SEQ ID NO: 381481 - RNA, 20 nt, Human
ccuuuccucuuucccucucc

SEQ ID NO: 381482 - RNA, 23 nt, Human
cgcugcugcugcugcugccaccg

SEQ ID NO: 381483 - RNA, 25 nt, Human
cggaaagaaaauuagacauuggagg

SEQ ID NO: 381484 - RNA, 18 nt, Human
cgugcuacaggacgaaaa

SEQ ID NO: 381485 - RNA, 21 nt, Human
cuccgcugcugcugcugcugc

SEQ ID NO: 381486 - RNA, 19 nt, Human
cuccugaggagaggcagaa

SEQ ID NO: 381487 - RNA, 22 nt, Human
cuccuggcuugagugaagaugu

SEQ ID NO: 381488 - RNA, 25 nt, Human
cucucagccccaagucccccggacu

SEQ ID NO: 381489 - RNA, 23 nt, Human
cugcugccaccgccgcugcugcu

SEQ ID NO: 381490 - RNA, 22 nt, Human
cugcugcugcugcagucgcugc

SEQ ID NO: 381491 - RNA, 22 nt, Human
cugcugcugcugccaccgccgc

SEQ ID NO: 381492 - RNA, 18 nt, Human
cugcugcugcugcugcag

SEQ ID NO: 381493 - RNA, 19 nt, Human
cugcugcugggucugcugc

SEQ ID NO: 381494 - RNA, 19 nt, Human
cuucaaauuacaauggcug

SEQ ID NO: 381495 - RNA, 23 nt, Human
cuuuuucccucuuucuuucuuuu

SEQ ID NO: 381496 - RNA, 20 nt, Human
gaaaaauaaagcuaaguuac

SEQ ID NO: 381497 - RNA, 23 nt, Human
gacuaaagaccuaaaggcugauu

SEQ ID NO: 381498 - RNA, 23 nt, Human
gagcauuuaagacaugcauuuaa

SEQ ID NO: 381499 - RNA, 22 nt, Human
gcaaauauaauggcacaaaaau

SEQ ID NO: 381500 - RNA, 18 nt, Human
gcauuuaagacaugcauu

SEQ ID NO: 381501 - RNA, 21 nt, Human
gccaaaaaaaaaaaaaaaaaa

SEQ ID NO: 381502 - RNA, 20 nt, Human
gccaccgccgcugcugcugc

SEQ ID NO: 381503 - RNA, 19 nt, Human
gccccccuuuccucuuucc

SEQ ID NO: 381504 - RNA, 19 nt, Human
gcucuuuuucccucuuucu

SEQ ID NO: 381505 - RNA, 20 nt, Human
gcugcagucgcugcuucuug

SEQ ID NO: 381506 - RNA, 20 nt, Human
gcugccaccgccgcugcugc

SEQ ID NO: 381507 - RNA, 20 nt, Human
gcugccgccgcugcugcugc

SEQ ID NO: 381508 - RNA, 20 nt, Human
gcugcugccgccgcugcugc

SEQ ID NO: 381509 - RNA, 23 nt, Human
gcugcugccgccgcugcugcugc

SEQ ID NO: 381510 - RNA, 23 nt, Human
gcuuuguuuaagcagaguccucu

SEQ ID NO: 381511 - RNA, 19 nt, Human
ggacagccaggcucaagca

SEQ ID NO: 381512 - RNA, 22 nt, Human
ggagaugugcccucucuccucc

SEQ ID NO: 381513 - RNA, 21 nt, Human
gggaauuggagggaguagggu

SEQ ID NO: 381514 - RNA, 18 nt, Human
ggggauagaaaauaggaa

SEQ ID NO: 381515 - RNA, 23 nt, Human
gggggugggaagugugggaggga

SEQ ID NO: 381516 - RNA, 21 nt, Human
gggugggaagugugggaggga

SEQ ID NO: 381517 - RNA, 20 nt, Human
ggugggaagugugggaggga

SEQ ID NO: 381518 - RNA, 19 nt, Human
guacuuucuccugaggaga

SEQ ID NO: 381519 - RNA, 20 nt, Human
guccaagcccauagggaugc

SEQ ID NO: 381520 - RNA, 20 nt, Human
guccuggcuuaguuggguuu

SEQ ID NO: 381521 - RNA, 20 nt, Human
gugaugcugcugcugccacc

SEQ ID NO: 381522 - RNA, 22 nt, Human
gugaugcugcugcugccaccgg

SEQ ID NO: 381523 - RNA, 25 nt, Human
gugccuccgcugcugcugcugcugc

SEQ ID NO: 381524 - RNA, 20 nt, Human
gugcugcugcugcugcugcu

SEQ ID NO: 381525 - RNA, 25 nt, Human
guuuuuuuuuuuuccugccccccuu

SEQ ID NO: 381526 - RNA, 23 nt, Human
uaaaaaaaucaaaccaggcacag

SEQ ID NO: 381527 - RNA, 19 nt, Human
uaaaaaaggccacaaggag

SEQ ID NO: 381528 - RNA, 18 nt, Human
uaaaaaauaagcaaauaa

SEQ ID NO: 381529 - RNA, 18 nt, Human
uaaauaaaguuuccuuau

SEQ ID NO: 381530 - RNA, 22 nt, Human
uaaauaaugacauauaccagau

SEQ ID NO: 381531 - RNA, 22 nt, Human
uaacaaucugaugucagcacgc

SEQ ID NO: 381532 - RNA, 19 nt, Human
uaaggggggaauuggaggg

SEQ ID NO: 381533 - RNA, 24 nt, Human
uaagucaagaguagccucuggggg

SEQ ID NO: 381534 - RNA, 26 nt, Human
uacacucaaaauuggugugucaacac

SEQ ID NO: 381535 - RNA, 21 nt, Human
uagcucauuagagaucaagaa

SEQ ID NO: 381536 - RNA, 24 nt, Human
uagcucauuagagaucaagaauuc

SEQ ID NO: 381537 - RNA, 24 nt, Human
uaggaacuacuuuaaaaaaaucaa

SEQ ID NO: 381538 - RNA, 25 nt, Human
uauacugcuuuguuuaagcagaguc

SEQ ID NO: 381539 - RNA, 21 nt, Human
uaucuuagaaggaauucacca

SEQ ID NO: 381540 - RNA, 18 nt, Human
uauguguagauauaugua

SEQ ID NO: 381541 - RNA, 19 nt, Human
uauguguagauauauguau

SEQ ID NO: 381542 - RNA, 19 nt, Human
uauuccacaguuagaccuu

SEQ ID NO: 381543 - RNA, 21 nt, Human
ucaaaccaggcacaguacacu

SEQ ID NO: 381544 - RNA, 27 nt, Human
ucaaaccaggcacaguacacucaaaau

SEQ ID NO: 381545 - RNA, 18 nt, Human
ucacauggauuuuguugg

SEQ ID NO: 381546 - RNA, 20 nt, Human
ucagagaagucagccuugcc

SEQ ID NO: 381547 - RNA, 20 nt, Human
ucagccuugccugggggugg

SEQ ID NO: 381548 - RNA, 18 nt, Human
ucauacaggcccaucuua

SEQ ID NO: 381549 - RNA, 22 nt, Human
ucauggcagaaaugaucaaacc

SEQ ID NO: 381550 - RNA, 25 nt, Human
ucccaccccaucaucauuugccaga

SEQ ID NO: 381551 - RNA, 20 nt, Human
uccgcugcugcugcugcugc

SEQ ID NO: 381552 - RNA, 23 nt, Human
uccuaauguauaguaggccuuau

SEQ ID NO: 381553 - RNA, 24 nt, Human
uccugccccccuuuccucuuuccc

SEQ ID NO: 381554 - RNA, 22 nt, Human
uccuggaauuuccaguuggaug

SEQ ID NO: 381555 - RNA, 25 nt, Human
uccuugagcagcacguuacugguuu

SEQ ID NO: 381556 - RNA, 19 nt, Human
ucucucagccccaaguccc

SEQ ID NO: 381557 - RNA, 21 nt, Human
ucucuugacauugaccuuugg

SEQ ID NO: 381558 - RNA, 18 nt, Human
ucugguuggacagccagg

SEQ ID NO: 381559 - RNA, 23 nt, Human
ucuuuuuuucuauuuuuuuacga

SEQ ID NO: 381560 - RNA, 21 nt, Human
ugaagaaagagagaaauuugc

SEQ ID NO: 381561 - RNA, 18 nt, Human
ugaauguuuuguguuugg

SEQ ID NO: 381562 - RNA, 21 nt, Human
ugacauauaccagauaugcuu

SEQ ID NO: 381563 - RNA, 21 nt, Human
ugagcaguuacaguacguaaa

SEQ ID NO: 381564 - RNA, 24 nt, Human
ugaggugggcugggagauuaacau

SEQ ID NO: 381565 - RNA, 20 nt, Human
ugccugggggugggaagugu

SEQ ID NO: 381566 - RNA, 21 nt, Human
ugccugggggugggaagugug

SEQ ID NO: 381567 - RNA, 27 nt, Human
ugcugcugccgccgcugcugcugcugc

SEQ ID NO: 381568 - RNA, 21 nt, Human
ugcugcugcugcagucgcugc

SEQ ID NO: 381569 - RNA, 27 nt, Human
ugcugcugcugccgccgcugcugcugc

SEQ ID NO: 381570 - RNA, 20 nt, Human
ugcugcugcugcugccaccg

SEQ ID NO: 381571 - RNA, 18 nt, Human
ugcugcugcugcugcugc

SEQ ID NO: 381572 - RNA, 24 nt, Human
ugcugcugcugcugggucugcugc

SEQ ID NO: 381573 - RNA, 22 nt, Human
uggccccugcaguccuaccccu

SEQ ID NO: 381574 - RNA, 24 nt, Human
uggccccugcaguccuaccccucc

SEQ ID NO: 381575 - RNA, 19 nt, Human
uggggaccuggggauggga

SEQ ID NO: 381576 - RNA, 18 nt, Human
ugggguccuggcuuaguu

SEQ ID NO: 381577 - RNA, 20 nt, Human
ugguaaaagaggguacuuuc

SEQ ID NO: 381578 - RNA, 21 nt, Human
ugucagcacgcuuagaggcug

SEQ ID NO: 381579 - RNA, 23 nt, Human
ugugcugcugcugcugcugcugg

SEQ ID NO: 381580 - RNA, 21 nt, Human
uguguagauauauguauugua

SEQ ID NO: 381581 - RNA, 22 nt, Human
ugugucaacaccccuaaaauga

SEQ ID NO: 381582 - RNA, 24 nt, Human
uguugcuggugaugcugcugcugc

SEQ ID NO: 381583 - RNA, 23 nt, Human
uguuguugcuggugaugcugcug

SEQ ID NO: 381584 - RNA, 23 nt, Human
uuccaguuggaugugacagagau

SEQ ID NO: 381585 - RNA, 22 nt, Human
uucccucuuucuuucuuuuuuu

SEQ ID NO: 381586 - RNA, 20 nt, Human
uuccugucucauacaggccc

SEQ ID NO: 381587 - RNA, 19 nt, Human
uugcaccucuggcuuuugc

SEQ ID NO: 381588 - RNA, 20 nt, Human
uuggagggaguagggugggg

SEQ ID NO: 381589 - RNA, 19 nt, Human
uuggaugugacagagaucu

SEQ ID NO: 381590 - RNA, 20 nt, Human
uugguuccuggaauuuccag

SEQ ID NO: 381591 - RNA, 21 nt, Human
uugguuccuggaauuuccagu

SEQ ID NO: 381592 - RNA, 18 nt, Human
uuuggaaguuuaaggggg

SEQ ID NO: 381593 - RNA, 19 nt, Human
uuuuuuccugccccccuuu

SEQ ID NO: 381594 - RNA, 27 nt, Human
uuuuuuuuuguuguuguugcuggugau

SEQ ID NO: 381595 - RNA, 23 nt, Human
uuuuuuuuuuccugccccccuuu

SEQ ID NO: 381596 - RNA, 19 nt, Human
uuuuuuuuuuuccugcccc

SEQ ID NO: 381597 - RNA, 21 nt, Human
aaacagaauaauggaaaucca

SEQ ID NO: 381598 - RNA, 26 nt, Human
aaacagaauaauggaaauccaagcag

SEQ ID NO: 381599 - RNA, 25 nt, Human
aaacauuugaauaccuuuagaaaua

SEQ ID NO: 381600 - RNA, 19 nt, Human
aaccaaacagaauaaugga

SEQ ID NO: 381601 - RNA, 21 nt, Human
caaccuccagaauccagaaaa

SEQ ID NO: 381602 - RNA, 24 nt, Human
caauuaccaauuuuauucucuaac

SEQ ID NO: 381603 - RNA, 25 nt, Human
cagaauccagaaaauauaguuaucc

SEQ ID NO: 381604 - RNA, 24 nt, Human
cagauuacaagaauaugacacuua

SEQ ID NO: 381605 - RNA, 19 nt, Human
caggaucaaucuggucacg

SEQ ID NO: 381606 - RNA, 18 nt, Human
ccuccagaauccagaaaa

SEQ ID NO: 381607 - RNA, 23 nt, Human
cuaauccuaagacaaaacacuau

SEQ ID NO: 381608 - RNA, 24 nt, Human
cuuccaaccacuguaaauaccuga

SEQ ID NO: 381609 - RNA, 23 nt, Human
uaaaacuccuggagaaugcagau

SEQ ID NO: 381610 - RNA, 22 nt, Human
uaguaagaacugggaaucucau

SEQ ID NO: 381611 - RNA, 21 nt, Human
uauggcaguuacugaauauua

SEQ ID NO: 381612 - RNA, 23 nt, Human
ucacaaauaaccauuauuucugc

SEQ ID NO: 381613 - RNA, 20 nt, Human
uccuaagacaaaacacuaug

SEQ ID NO: 381614 - RNA, 23 nt, Human
ucuuccaaccacuguaaauaccu

SEQ ID NO: 381615 - RNA, 19 nt, Human
uggaaaagguaaucugaua

SEQ ID NO: 381616 - RNA, 19 nt, Human
caaaaaaagaugagaacca

SEQ ID NO: 381617 - RNA, 23 nt, Human
caaauaccaaggcagaucuuaag

SEQ ID NO: 381618 - RNA, 20 nt, Human
uaagcugcaaaaaaagauga

SEQ ID NO: 381619 - RNA, 23 nt, Human
uaagcugcaaaaaaagaugagaa

SEQ ID NO: 381620 - RNA, 18 nt, Human
aaacuugaaauguuggug

SEQ ID NO: 381621 - RNA, 20 nt, Human
agagcgcggagccuccaagc

SEQ ID NO: 381622 - RNA, 22 nt, Human
cagccacccacucuucgccuua

SEQ ID NO: 381623 - RNA, 21 nt, Human
cagcugcaggccccgccuccu

SEQ ID NO: 381624 - RNA, 22 nt, Human
ccaccugcuggcgccccgcguc

SEQ ID NO: 381625 - RNA, 22 nt, Human
ccagaggugcgggccccacgcg

SEQ ID NO: 381626 - RNA, 20 nt, Human
ccgugagucucggcugccga

SEQ ID NO: 381627 - RNA, 18 nt, Human
ccuccaagccagcugcag

SEQ ID NO: 381628 - RNA, 23 nt, Human
ccuccaagccagcugcaggcccc

SEQ ID NO: 381629 - RNA, 25 nt, Human
cgcggagccuccaagccagcugcag

SEQ ID NO: 381630 - RNA, 24 nt, Human
cuccaagccagcugcaggccccgc

SEQ ID NO: 381631 - RNA, 19 nt, Human
cuucagccacccacucuuc

SEQ ID NO: 381632 - RNA, 21 nt, Human
gccgcugcugcccagaggugc

SEQ ID NO: 381633 - RNA, 21 nt, Human
ucagccacccacucuucgccu

SEQ ID NO: 381634 - RNA, 23 nt, Human
uccaagccagcugcaggccccgc

SEQ ID NO: 381635 - RNA, 23 nt, Human
uccagcgccaccugcuggcgccc

SEQ ID NO: 381636 - RNA, 21 nt, Human
ucggcugccgcugcugcccag

SEQ ID NO: 381637 - RNA, 24 nt, Human
ucucggcugccgcugcugcccaga

SEQ ID NO: 381638 - RNA, 28 nt, Human
ugcgcguccagcgccaccugcuggcgcc

SEQ ID NO: 381639 - RNA, 24 nt, Human
uucgccuuagcuugaccgugaguc

SEQ ID NO: 381640 - RNA, 18 nt, Human
uuuuuuuuuuuuuccuug

SEQ ID NO: 381641 - RNA, 22 nt, Human
uuuuuuuuuuuuuuuuuuccuu

SEQ ID NO: 381642 - RNA, 21 nt, Human
aaaauaccuuuacagccauag

SEQ ID NO: 381643 - RNA, 23 nt, Human
aaacaagaaaccaaaccucaaaa

SEQ ID NO: 381644 - RNA, 22 nt, Human
aaagaacaaacuucaaagauua

SEQ ID NO: 381645 - RNA, 18 nt, Human
aacacagaaaaccccauu

SEQ ID NO: 381646 - RNA, 27 nt, Human
aagagaagagaagagaagagaggcgag

SEQ ID NO: 381647 - RNA, 23 nt, Human
aagagaagagaagagaggcgaga

SEQ ID NO: 381648 - RNA, 24 nt, Human
aagagacagaaacaagaaaccaaa

SEQ ID NO: 381649 - RNA, 19 nt, Human
aagcaagagacagaaacaa

SEQ ID NO: 381650 - RNA, 27 nt, Human
aagcaagagacagaaacaagaaaccaa

SEQ ID NO: 381651 - RNA, 28 nt, Human
aagcaagagacagaaacaagagggaccc

SEQ ID NO: 381652 - RNA, 20 nt, Human
aaguaacaugaaaaugggau

SEQ ID NO: 381653 - RNA, 20 nt, Human
aaguggaggaggaagagaag

SEQ ID NO: 381654 - RNA, 21 nt, Human
aauaauaaugaaggacccaag

SEQ ID NO: 381655 - RNA, 20 nt, Human
aauaaugaaggacccaagga

SEQ ID NO: 381656 - RNA, 21 nt, Human
aaugccuucuuggccagggca

SEQ ID NO: 381657 - RNA, 21 nt, Human
acagcagagacagaagcugaa

SEQ ID NO: 381658 - RNA, 21 nt, Human
accaaaccucaaaacugggac

SEQ ID NO: 381659 - RNA, 19 nt, Human
accaaagaacaaacuucaa

SEQ ID NO: 381660 - RNA, 20 nt, Human
accaaagaacaaacuucaaa

SEQ ID NO: 381661 - RNA, 18 nt, Human
accuauaccaucuuccuu

SEQ ID NO: 381662 - RNA, 19 nt, Human
accucaaaacugggacagc

SEQ ID NO: 381663 - RNA, 20 nt, Human
acuugggaaauucagauuac

SEQ ID NO: 381664 - RNA, 22 nt, Human
agaacacccagggaaggacaag

SEQ ID NO: 381665 - RNA, 24 nt, Human
agaagagaagagaagagaggcgag

SEQ ID NO: 381666 - RNA, 18 nt, Human
agacagaaacaagaaacc

SEQ ID NO: 381667 - RNA, 23 nt, Human
agacagaaacaagaaaccaaacc

SEQ ID NO: 381668 - RNA, 25 nt, Human
agacagaaacaagaaaccaaaccuc

SEQ ID NO: 381669 - RNA, 21 nt, Human
agccauagcaaaaacagguaa

SEQ ID NO: 381670 - RNA, 20 nt, Human
agccugcccccuccaacagc

SEQ ID NO: 381671 - RNA, 19 nt, Human
aggaagagaagagaagaga

SEQ ID NO: 381672 - RNA, 20 nt, Human
aggagggcuggcuccucagg

SEQ ID NO: 381673 - RNA, 21 nt, Human
aggagggcuggcuccucaggu

SEQ ID NO: 381674 - RNA, 18 nt, Human
aggcagguguggguggga

SEQ ID NO: 381675 - RNA, 19 nt, Human
aggcaggugugggugggag

SEQ ID NO: 381676 - RNA, 19 nt, Human
agggaggagcccgaaagca

SEQ ID NO: 381677 - RNA, 21 nt, Human
agggaggcagguguggguggg

SEQ ID NO: 381678 - RNA, 18 nt, Human
aggguguccagggaguac

SEQ ID NO: 381679 - RNA, 18 nt, Human
agguaagggagagaguug

SEQ ID NO: 381680 - RNA, 20 nt, Human
aguggagagggagugacagc

SEQ ID NO: 381681 - RNA, 19 nt, Human
agugggguggaacagaucu

SEQ ID NO: 381682 - RNA, 18 nt, Human
aguggugggagggaggag

SEQ ID NO: 381683 - RNA, 19 nt, Human
aucauggcuguggcucucc

SEQ ID NO: 381684 - RNA, 24 nt, Human
augaaauaacacagaaaaccccau

SEQ ID NO: 381685 - RNA, 20 nt, Human
caaaacugggacagcagaga

SEQ ID NO: 381686 - RNA, 20 nt, Human
caaaauaggaucccaggauu

SEQ ID NO: 381687 - RNA, 27 nt, Human
caacuccagggcuccauaagagcccuu

SEQ ID NO: 381688 - RNA, 23 nt, Human
caagaaaccaaaccucaaaacug

SEQ ID NO: 381689 - RNA, 23 nt, Human
caagagacagaaacaagaaacca

SEQ ID NO: 381690 - RNA, 22 nt, Human
caaugaacagaugccucucccc

SEQ ID NO: 381691 - RNA, 22 nt, Human
caccccugcggaagggggccgg

SEQ ID NO: 381692 - RNA, 23 nt, Human
caccccuuccccaaacugguugu

SEQ ID NO: 381693 - RNA, 19 nt, Human
caccucgggaucccagagg

SEQ ID NO: 381694 - RNA, 22 nt, Human
cacgcuggcggucacucaugug

SEQ ID NO: 381695 - RNA, 18 nt, Human
cacggcucaucugaggag

SEQ ID NO: 381696 - RNA, 19 nt, Human
cagaaacaagaaaccaaac

SEQ ID NO: 381697 - RNA, 19 nt, Human
cagaagcugaaccccagag

SEQ ID NO: 381698 - RNA, 19 nt, Human
cagaaguggaggaggaaga

SEQ ID NO: 381699 - RNA, 20 nt, Human
cagaccccuggaccagcccu

SEQ ID NO: 381700 - RNA, 24 nt, Human
cagaugccucucccaacccauucc

SEQ ID NO: 381701 - RNA, 19 nt, Human
cagcagagacagaagcugg

SEQ ID NO: 381702 - RNA, 21 nt, Human
cagcagcagcccaugguuggg

SEQ ID NO: 381703 - RNA, 27 nt, Human
cagcauccuugcccaacaacuccaggg

SEQ ID NO: 381704 - RNA, 24 nt, Human
cagccacccgcgagccugcccccu

SEQ ID NO: 381705 - RNA, 24 nt, Human
cagguggggcugaggggcucagcu

SEQ ID NO: 381706 - RNA, 22 nt, Human
ccaaaccucaaaacugggacag

SEQ ID NO: 381707 - RNA, 22 nt, Human
ccaaugaacagaugccucuccc

SEQ ID NO: 381708 - RNA, 25 nt, Human
ccagaccccuggaccagcccuuccc

SEQ ID NO: 381709 - RNA, 18 nt, Human
ccagaggcaaagccagga

SEQ ID NO: 381710 - RNA, 22 nt, Human
ccagaggcaaagccaggagccc

SEQ ID NO: 381711 - RNA, 20 nt, Human
ccagccccagguauacccac

SEQ ID NO: 381712 - RNA, 19 nt, Human
ccaggagcccgggagugca

SEQ ID NO: 381713 - RNA, 23 nt, Human
ccaguuaucuugaaggaagggag

SEQ ID NO: 381714 - RNA, 20 nt, Human
cccaggcccaaaauaggauc

SEQ ID NO: 381715 - RNA, 20 nt, Human
cccaugguugggacggaggc

SEQ ID NO: 381716 - RNA, 25 nt, Human
cccaugguugggacggaggcagggc

SEQ ID NO: 381717 - RNA, 20 nt, Human
ccccaggcccaaaauaggau

SEQ ID NO: 381718 - RNA, 25 nt, Human
ccccauccugccuacuucuuaagag

SEQ ID NO: 381719 - RNA, 19 nt, Human
ccccuggaccagcccuucc

SEQ ID NO: 381720 - RNA, 21 nt, Human
ccccuggaccagcccuuccca

SEQ ID NO: 381721 - RNA, 25 nt, Human
ccccuggaccagcccuucccaugcc

SEQ ID NO: 381722 - RNA, 18 nt, Human
cccgaaagcaagagacag

SEQ ID NO: 381723 - RNA, 21 nt, Human
cccgcgagccugcccccucca

SEQ ID NO: 381724 - RNA, 21 nt, Human
cccuccuaagaccagccccag

SEQ ID NO: 381725 - RNA, 21 nt, Human
ccuaagaccagccccagguau

SEQ ID NO: 381726 - RNA, 22 nt, Human
ccuagccccagucuggagcaaa

SEQ ID NO: 381727 - RNA, 19 nt, Human
ccuccuaagaccagcccca

SEQ ID NO: 381728 - RNA, 21 nt, Human
ccucgggaucccagaggcaaa

SEQ ID NO: 381729 - RNA, 24 nt, Human
ccugaccucgcccugccgaagagc

SEQ ID NO: 381730 - RNA, 19 nt, Human
ccugcccccuccaacagcc

SEQ ID NO: 381731 - RNA, 18 nt, Human
ccugccuacuucuuaaga

SEQ ID NO: 381732 - RNA, 19 nt, Human
ccuuagccaccccuucccc

SEQ ID NO: 381733 - RNA, 25 nt, Human
ccuuuacugccaccccauccugccc

SEQ ID NO: 381734 - RNA, 22 nt, Human
cgacccgcaggguccugagggc

SEQ ID NO: 381735 - RNA, 19 nt, Human
cgccaauagagccauuauc

SEQ ID NO: 381736 - RNA, 22 nt, Human
cgccaguaaugccuucuuggcc

SEQ ID NO: 381737 - RNA, 22 nt, Human
cggaaugggucaaaucccucug

SEQ ID NO: 381738 - RNA, 27 nt, Human
cggaggcagggcaggcaggccauggug

SEQ ID NO: 381739 - RNA, 25 nt, Human
cgggaagaauccaaauguggagagc

SEQ ID NO: 381740 - RNA, 19 nt, Human
cgggcaggguggcugcggg

SEQ ID NO: 381741 - RNA, 24 nt, Human
cucagccacagccuucuugccagc

SEQ ID NO: 381742 - RNA, 23 nt, Human
cuccaaguuugggugcgggagga

SEQ ID NO: 381743 - RNA, 23 nt, Human
cuccaaugaacagaugccucucc

SEQ ID NO: 381744 - RNA, 23 nt, Human
cucccaacccauucccaagccug

SEQ ID NO: 381745 - RNA, 19 nt, Human
cucccccauggaucccugg

SEQ ID NO: 381746 - RNA, 21 nt, Human
cuccucagccacagccuucuu

SEQ ID NO: 381747 - RNA, 18 nt, Human
cucgugccgcuuccggag

SEQ ID NO: 381748 - RNA, 19 nt, Human
cucgugccgcuuccggaga

SEQ ID NO: 381749 - RNA, 23 nt, Human
cugacccacaucaauaccaaaga

SEQ ID NO: 381750 - RNA, 26 nt, Human
cugccgaagagcggcgagcagcagaa

SEQ ID NO: 381751 - RNA, 18 nt, Human
cuggggagcuggggcugu

SEQ ID NO: 381752 - RNA, 19 nt, Human
cuugcagggcucggcuguc

SEQ ID NO: 381753 - RNA, 21 nt, Human
cuugcagggcucggcuguccc

SEQ ID NO: 381754 - RNA, 18 nt, Human
cuuggccagggcagggcu

SEQ ID NO: 381755 - RNA, 20 nt, Human
gaaacaagaaaccaaaccuc

SEQ ID NO: 381756 - RNA, 23 nt, Human
gagacagaagcugaaccccagag

SEQ ID NO: 381757 - RNA, 20 nt, Human
gagcagcagaagcuggggag

SEQ ID NO: 381758 - RNA, 18 nt, Human
gaggaagagaagagaaga

SEQ ID NO: 381759 - RNA, 21 nt, Human
gcgagcagcagaagcugggga

SEQ ID NO: 381760 - RNA, 22 nt, Human
gcgagcagcagaagcuggggag

SEQ ID NO: 381761 - RNA, 23 nt, Human
gcucaucugaggagguuuggggg

SEQ ID NO: 381762 - RNA, 19 nt, Human
ggacagcagagacagaagc

SEQ ID NO: 381763 - RNA, 20 nt, Human
ggagccacuuguccugagcc

SEQ ID NO: 381764 - RNA, 21 nt, Human
ggagggcgugcgacccgcagg

SEQ ID NO: 381765 - RNA, 21 nt, Human
ggcagggaguggggcagagga

SEQ ID NO: 381766 - RNA, 18 nt, Human
gggaucccagaggcaaag

SEQ ID NO: 381767 - RNA, 21 nt, Human
gggggaaaguggucacacagc

SEQ ID NO: 381768 - RNA, 21 nt, Human
gggguggaacagaucugaggc

SEQ ID NO: 381769 - RNA, 21 nt, Human
gguaagagggaggcaggugug

SEQ ID NO: 381770 - RNA, 18 nt, Human
gguggggcugaggggcuc

SEQ ID NO: 381771 - RNA, 19 nt, Human
gguuguucucugagaauug

SEQ ID NO: 381772 - RNA, 23 nt, Human
guauacccaccccaggcccaaaa

SEQ ID NO: 381773 - RNA, 22 nt, Human
gucuagagggugggaagggugg

SEQ ID NO: 381774 - RNA, 23 nt, Human
gugggguggaacagaucugaggc

SEQ ID NO: 381775 - RNA, 19 nt, Human
uaacacagaaaaccccauu

SEQ ID NO: 381776 - RNA, 18 nt, Human
uacaaaguaacaugaaaa

SEQ ID NO: 381777 - RNA, 21 nt, Human
uacagccauagcaaaaacagg

SEQ ID NO: 381778 - RNA, 21 nt, Human
uacccaccccaggcccaaaau

SEQ ID NO: 381779 - RNA, 25 nt, Human
uacucguccuaucuucccugcaacu

SEQ ID NO: 381780 - RNA, 23 nt, Human
uagcacccuccuaagaccagccc

SEQ ID NO: 381781 - RNA, 24 nt, Human
uagcacccuccuaagaccagcccc

SEQ ID NO: 381782 - RNA, 22 nt, Human
uagccaccccuuccccaaacug

SEQ ID NO: 381783 - RNA, 18 nt, Human
uaggaucccaggauaaag

SEQ ID NO: 381784 - RNA, 23 nt, Human
ucaaaacugggacagcagagaca

SEQ ID NO: 381785 - RNA, 21 nt, Human
ucagcgccaguaaugccuucu

SEQ ID NO: 381786 - RNA, 23 nt, Human
uccagcccaugguucagcgccag

SEQ ID NO: 381787 - RNA, 20 nt, Human
ucccaacccauucccaagcc

SEQ ID NO: 381788 - RNA, 22 nt, Human
ucccaagccuggccucucuuua

SEQ ID NO: 381789 - RNA, 23 nt, Human
ucccagaggcaaagccaggagcc

SEQ ID NO: 381790 - RNA, 22 nt, Human
uccucagccacagccuucuugc

SEQ ID NO: 381791 - RNA, 22 nt, Human
uccugcagugugggggagcagg

SEQ ID NO: 381792 - RNA, 22 nt, Human
uccugggccuccuaggccgagg

SEQ ID NO: 381793 - RNA, 24 nt, Human
uccuuagccaccccuuccccaaac

SEQ ID NO: 381794 - RNA, 24 nt, Human
ucucccaacccauucccaagccug

SEQ ID NO: 381795 - RNA, 19 nt, Human
ucuccgcgggcacagaagu

SEQ ID NO: 381796 - RNA, 26 nt, Human
ucugcagccuagcacccuccuaagac

SEQ ID NO: 381797 - RNA, 20 nt, Human
ucuuccggccugggcuggag

SEQ ID NO: 381798 - RNA, 21 nt, Human
ucuuccggccugggcuggagu

SEQ ID NO: 381799 - RNA, 20 nt, Human
ugaaauaacacagaaaaccc

SEQ ID NO: 381800 - RNA, 24 nt, Human
ugaaauaacacagaaaagggaggc

SEQ ID NO: 381801 - RNA, 19 nt, Human
ugaacagaugccucuccca

SEQ ID NO: 381802 - RNA, 22 nt, Human
ugaacagaugccucucccaacc

SEQ ID NO: 381803 - RNA, 22 nt, Human
ugaaccccagagguggagcugg

SEQ ID NO: 381804 - RNA, 20 nt, Human
ugaaggaagggagggaagga

SEQ ID NO: 381805 - RNA, 22 nt, Human
ugaaggaagggagggaaggagg

SEQ ID NO: 381806 - RNA, 21 nt, Human
ugaaggacccaaggaugaggg

SEQ ID NO: 381807 - RNA, 20 nt, Human
ugacagcauccuugcccaac

SEQ ID NO: 381808 - RNA, 21 nt, Human
ugagugggguggaacagaucu

SEQ ID NO: 381809 - RNA, 23 nt, Human
ugagugggguggaacagaucuga

SEQ ID NO: 381810 - RNA, 22 nt, Human
ugcacugaaguggagagggagu

SEQ ID NO: 381811 - RNA, 22 nt, Human
ugcagccuagcacccuccuaag

SEQ ID NO: 381812 - RNA, 21 nt, Human
ugcccagaccccuggaccagc

SEQ ID NO: 381813 - RNA, 19 nt, Human
uggagcaaacagaaccacu

SEQ ID NO: 381814 - RNA, 22 nt, Human
uggcagggaguggggcagagga

SEQ ID NO: 381815 - RNA, 18 nt, Human
uggcuccucagguccaac

SEQ ID NO: 381816 - RNA, 23 nt, Human
uggcugcggggcugcugucagcu

SEQ ID NO: 381817 - RNA, 20 nt, Human
ugggaagggugggggaaagu

SEQ ID NO: 381818 - RNA, 22 nt, Human
ugggaagggugggggaaagugg

SEQ ID NO: 381819 - RNA, 18 nt, Human
ugggacagcagagacaga

SEQ ID NO: 381820 - RNA, 20 nt, Human
uguccccaacuggagauggu

SEQ ID NO: 381821 - RNA, 19 nt, Human
ugugagaacgggaagaauc

SEQ ID NO: 381822 - RNA, 20 nt, Human
uucaaaaaaugacagcaucc

SEQ ID NO: 381823 - RNA, 21 nt, Human
uucccaagccuggccucucuu

SEQ ID NO: 381824 - RNA, 19 nt, Human
uuccuuagccaccccuucc

SEQ ID NO: 381825 - RNA, 23 nt, Human
uugaugcuuggggagcuuugggg

SEQ ID NO: 381826 - RNA, 20 nt, Human
uuggggccaguuaucuugaa

SEQ ID NO: 381827 - RNA, 19 nt, Human
uugucuagagggugggaag

SEQ ID NO: 381828 - RNA, 18 nt, Human
aaaaaaaccaacuauggg

SEQ ID NO: 381829 - RNA, 23 nt, Human
aacccccuccccuccccauaaca

SEQ ID NO: 381830 - RNA, 19 nt, Human
aacuaggggcaggggaaag

SEQ ID NO: 381831 - RNA, 19 nt, Human
acagcaacuaggggcaggg

SEQ ID NO: 381832 - RNA, 20 nt, Human
accugaggcuggaagaaccc

SEQ ID NO: 381833 - RNA, 22 nt, Human
agacagcugggaccugaggcug

SEQ ID NO: 381834 - RNA, 19 nt, Human
aggcuggaagaacccccuc

SEQ ID NO: 381835 - RNA, 22 nt, Human
caacgugagacagcugggaccu

SEQ ID NO: 381836 - RNA, 18 nt, Human
caugcccacugccccaaa

SEQ ID NO: 381837 - RNA, 27 nt, Human
ccacugccccaaauaaaaaaaaaacca

SEQ ID NO: 381838 - RNA, 21 nt, Human
ccccaaauaaaaaaaaaacca

SEQ ID NO: 381839 - RNA, 22 nt, Human
ccccugcucucccuuccgcucc

SEQ ID NO: 381840 - RNA, 24 nt, Human
ccgagacagcaacuaggggcaggg

SEQ ID NO: 381841 - RNA, 19 nt, Human
ccgcggucccagcuccucu

SEQ ID NO: 381842 - RNA, 20 nt, Human
ccuucucuccccugcucucc

SEQ ID NO: 381843 - RNA, 19 nt, Human
cgagacagcaacuaggggc

SEQ ID NO: 381844 - RNA, 20 nt, Human
cgagggcagcggugaagaga

SEQ ID NO: 381845 - RNA, 19 nt, Human
cgugugcugggagggccca

SEQ ID NO: 381846 - RNA, 22 nt, Human
cuccccuccccauaacaugccc

SEQ ID NO: 381847 - RNA, 23 nt, Human
cugccccaaauaaaaaaaaaacc

SEQ ID NO: 381848 - RNA, 25 nt, Human
cuggaagaacccccuccccucccca

SEQ ID NO: 381849 - RNA, 18 nt, Human
gaagaacccccuccccuc

SEQ ID NO: 381850 - RNA, 20 nt, Human
gacagcugggaccugaggcu

SEQ ID NO: 381851 - RNA, 18 nt, Human
gcgaagggaaggggggau

SEQ ID NO: 381852 - RNA, 22 nt, Human
ggaaagagacauggaacucgag

SEQ ID NO: 381853 - RNA, 20 nt, Human
gggcccagaggcagcggcgg

SEQ ID NO: 381854 - RNA, 23 nt, Human
uaaaaaaaaaaccaacuauggga

SEQ ID NO: 381855 - RNA, 25 nt, Human
uaaaaaaaaaaccaacuaugggaga

SEQ ID NO: 381856 - RNA, 19 nt, Human
uaacaugcccacugcccca

SEQ ID NO: 381857 - RNA, 18 nt, Human
ucccagcuccucuuucca

SEQ ID NO: 381858 - RNA, 23 nt, Human
uccccauaacaugcccacugccc

SEQ ID NO: 381859 - RNA, 18 nt, Human
uccccugcucucccuucc

SEQ ID NO: 381860 - RNA, 20 nt, Human
uccccugcucucccuuccga

SEQ ID NO: 381861 - RNA, 20 nt, Human
uccgugcugcucgccgcggu

SEQ ID NO: 381862 - RNA, 22 nt, Human
ucgccgcggucccagcuccucu

SEQ ID NO: 381863 - RNA, 20 nt, Human
ucucugugucuuccccggga

SEQ ID NO: 381864 - RNA, 18 nt, Human
ugccccaaauaaaaaaaa

SEQ ID NO: 381865 - RNA, 23 nt, Human
ugcugggagggcccagaggcagc

SEQ ID NO: 381866 - RNA, 21 nt, Human
uggaagaacccccuccccucc

SEQ ID NO: 381867 - RNA, 26 nt, Human
uggaagaacccccuccccuccccaua

SEQ ID NO: 381868 - RNA, 18 nt, Human
ugggagggcccagaggca

SEQ ID NO: 381869 - RNA, 19 nt, Human
ugggagggcccagaggcag

SEQ ID NO: 381870 - RNA, 21 nt, Human
ugggagggcccagaggcagcg

SEQ ID NO: 381871 - RNA, 23 nt, Human
uuccccgggguuauguauaaaua

SEQ ID NO: 381872 - RNA, 20 nt, Human
aaaaaccaagaauuccagcc

SEQ ID NO: 381873 - RNA, 18 nt, Human
aaacaggagaggacucga

SEQ ID NO: 381874 - RNA, 26 nt, Human
aacacccauuccucuuggacccugac

SEQ ID NO: 381875 - RNA, 21 nt, Human
aacugcuccaccuaacaugcu

SEQ ID NO: 381876 - RNA, 25 nt, Human
aagagaaguccaacagacugccagc

SEQ ID NO: 381877 - RNA, 22 nt, Human
aagcugccagccacagccccgg

SEQ ID NO: 381878 - RNA, 26 nt, Human
aagucaggaacgcuggggcaggucua

SEQ ID NO: 381879 - RNA, 23 nt, Human
aauauacauuagguucaggugac

SEQ ID NO: 381880 - RNA, 18 nt, Human
acacaggagccugugcgg

SEQ ID NO: 381881 - RNA, 20 nt, Human
acaccaacugcuccaccuaa

SEQ ID NO: 381882 - RNA, 18 nt, Human
acagacgcaagagggaaa

SEQ ID NO: 381883 - RNA, 21 nt, Human
acaggagccugugcgggggcc

SEQ ID NO: 381884 - RNA, 23 nt, Human
acaggccagcaagaagucaggaa

SEQ ID NO: 381885 - RNA, 19 nt, Human
acccauuccucuuggaccc

SEQ ID NO: 381886 - RNA, 25 nt, Human
accccgaaggcccagcaggagucca

SEQ ID NO: 381887 - RNA, 21 nt, Human
accucacccuccacaggccag

SEQ ID NO: 381888 - RNA, 21 nt, Human
acgcaagagggaaaagggguc

SEQ ID NO: 381889 - RNA, 21 nt, Human
agagcaaaacugguauuuucg

SEQ ID NO: 381890 - RNA, 18 nt, Human
aggccagcaagaagucag

SEQ ID NO: 381891 - RNA, 18 nt, Human
aggccaucuccugagcag

SEQ ID NO: 381892 - RNA, 18 nt, Human
cacaguugggguggcaca

SEQ ID NO: 381893 - RNA, 22 nt, Human
caccuaacaugcucaguggcac

SEQ ID NO: 381894 - RNA, 23 nt, Human
caccucacccuccacaggccagc

SEQ ID NO: 381895 - RNA, 18 nt, Human
caccugggcagaagaggc

SEQ ID NO: 381896 - RNA, 22 nt, Human
cacgugccacaccaacugcucc

SEQ ID NO: 381897 - RNA, 23 nt, Human
cagcacgcaucgcagccuggcag

SEQ ID NO: 381898 - RNA, 21 nt, Human
cagcagugcuuugucccacag

SEQ ID NO: 381899 - RNA, 22 nt, Human
cauagacaaggcuuugucuuaa

SEQ ID NO: 381900 - RNA, 23 nt, Human
ccaacugagaccccgaaggccca

SEQ ID NO: 381901 - RNA, 25 nt, Human
ccaccaagcugccagccacagcccc

SEQ ID NO: 381902 - RNA, 21 nt, Human
ccaucuccugagcagccagcu

SEQ ID NO: 381903 - RNA, 22 nt, Human
cccaccaagcugccagccacag

SEQ ID NO: 381904 - RNA, 21 nt, Human
cccgcacgugccacaccaagg

SEQ ID NO: 381905 - RNA, 18 nt, Human
cccuggggcccaccaagc

SEQ ID NO: 381906 - RNA, 23 nt, Human
ccggugccaacaccccgcacgug

SEQ ID NO: 381907 - RNA, 21 nt, Human
ccucccucuuuccccgguccc

SEQ ID NO: 381908 - RNA, 21 nt, Human
ccuggcuccucugggaacaga

SEQ ID NO: 381909 - RNA, 21 nt, Human
ccugggcagaagaggccaggc

SEQ ID NO: 381910 - RNA, 21 nt, Human
cuauggagcagacuggguugu

SEQ ID NO: 381911 - RNA, 19 nt, Human
cugaccccaccaacagccc

SEQ ID NO: 381912 - RNA, 23 nt, Human
cugagaccccgaaggcccagcag

SEQ ID NO: 381913 - RNA, 20 nt, Human
cugcaggccuggcuccucug

SEQ ID NO: 381914 - RNA, 18 nt, Human
cugccauguuccuggggc

SEQ ID NO: 381915 - RNA, 20 nt, Human
cuggggcaggucuaucaggc

SEQ ID NO: 381916 - RNA, 19 nt, Human
cuuggacccugaccccacc

SEQ ID NO: 381917 - RNA, 23 nt, Human
gaaaugcaaggugggacuccuga

SEQ ID NO: 381918 - RNA, 18 nt, Human
gaagccaacugagacccc

SEQ ID NO: 381919 - RNA, 24 nt, Human
gaagccaacugagaccccgaaggc

SEQ ID NO: 381920 - RNA, 20 nt, Human
gaagggaucuggggcucaag

SEQ ID NO: 381921 - RNA, 20 nt, Human
gaaguccaacagacugccag

SEQ ID NO: 381922 - RNA, 23 nt, Human
gaccccaccaacagccccauccc

SEQ ID NO: 381923 - RNA, 22 nt, Human
gagaacaggaggaaugaggccg

SEQ ID NO: 381924 - RNA, 23 nt, Human
gagaaggcccuggggcccaccaa

SEQ ID NO: 381925 - RNA, 18 nt, Human
gagggacuugaugauuga

SEQ ID NO: 381926 - RNA, 19 nt, Human
gaguccaucugagguacag

SEQ ID NO: 381927 - RNA, 19 nt, Human
gccagccacagccccgggc

SEQ ID NO: 381928 - RNA, 20 nt, Human
gcgcgguggcgccggcucgg

SEQ ID NO: 381929 - RNA, 24 nt, Human
ggacccugaccccaccaacagccc

SEQ ID NO: 381930 - RNA, 22 nt, Human
ggcgcgguggcgccggcucggg

SEQ ID NO: 381931 - RNA, 22 nt, Human
gggaacagaaauggcugugagg

SEQ ID NO: 381932 - RNA, 19 nt, Human
ggggauggggcagaggcaa

SEQ ID NO: 381933 - RNA, 22 nt, Human
gguggcacagggcgaggggcug

SEQ ID NO: 381934 - RNA, 18 nt, Human
uagaaucagaaucugggg

SEQ ID NO: 381935 - RNA, 25 nt, Human
ucaccugcagacagggugggccaga

SEQ ID NO: 381936 - RNA, 20 nt, Human
uccugaacacagucgggggg

SEQ ID NO: 381937 - RNA, 24 nt, Human
uccugagcagccagcugcaggccu

SEQ ID NO: 381938 - RNA, 20 nt, Human
ucuuggacccugaccccacc

SEQ ID NO: 381939 - RNA, 20 nt, Human
ugaaaaaccaagaauuccag

SEQ ID NO: 381940 - RNA, 24 nt, Human
ugaaaaaccaagaauuccagcccg

SEQ ID NO: 381941 - RNA, 24 nt, Human
ugaagagaaguccaacagacugcc

SEQ ID NO: 381942 - RNA, 26 nt, Human
ugacaaauaauuacaccucacccucc

SEQ ID NO: 381943 - RNA, 24 nt, Human
ugaccccaccaacagccccauccc

SEQ ID NO: 381944 - RNA, 21 nt, Human
ugaguuacauguucacagaga

SEQ ID NO: 381945 - RNA, 19 nt, Human
ugcaaggugggacuccuga

SEQ ID NO: 381946 - RNA, 21 nt, Human
ugcaggaagggggacgcgaga

SEQ ID NO: 381947 - RNA, 21 nt, Human
ugccaacaccccgcacgugcc

SEQ ID NO: 381948 - RNA, 20 nt, Human
ugcucaguggcacaggcuca

SEQ ID NO: 381949 - RNA, 22 nt, Human
uggacccugaccccaccaacag

SEQ ID NO: 381950 - RNA, 23 nt, Human
uggagcagacuggguuguggaag

SEQ ID NO: 381951 - RNA, 18 nt, Human
uggcacaggcucaggcag

SEQ ID NO: 381952 - RNA, 21 nt, Human
uggcugaaaaaccaagaauuc

SEQ ID NO: 381953 - RNA, 21 nt, Human
uggggcagaggcaaacagccc

SEQ ID NO: 381954 - RNA, 21 nt, Human
uggggcccaccaagcugccag

SEQ ID NO: 381955 - RNA, 23 nt, Human
ugggguggcacagggcgaggggc

SEQ ID NO: 381956 - RNA, 21 nt, Human
ugucccacagagagcaaaacu

SEQ ID NO: 381957 - RNA, 19 nt, Human
uguguacgcguaugugugu

SEQ ID NO: 381958 - RNA, 22 nt, Human
ugugugcauucacacccaugug

SEQ ID NO: 381959 - RNA, 24 nt, Human
ugugugcauucacacccaugugca

SEQ ID NO: 381960 - RNA, 26 nt, Human
ugugugcauucacacccaugugcagg

SEQ ID NO: 381961 - RNA, 20 nt, Human
uguguguacgcguaugugug

SEQ ID NO: 381962 - RNA, 23 nt, Human
uucaccugcagacagggugggcc

SEQ ID NO: 381963 - RNA, 25 nt, Human
uucaucagcagugcuuugucccaca

SEQ ID NO: 381964 - RNA, 26 nt, Human
uucaucagcagugcuuugucccacag

SEQ ID NO: 381965 - RNA, 22 nt, Human
uuucgcaaacaggagaggacuc

SEQ ID NO: 381966 - RNA, 27 nt, Human
aaaaaaaaaggcaacaaaaaccccaaa

SEQ ID NO: 381967 - RNA, 22 nt, Human
aaaaaaccaaagcggccgcgcg

SEQ ID NO: 381968 - RNA, 21 nt, Human
aaaaaccaaagcggccgcgcg

SEQ ID NO: 381969 - RNA, 24 nt, Human
aaaaagaaaaaaaaaaggcaacaa

SEQ ID NO: 381970 - RNA, 22 nt, Human
aaaagaaaaaaaaaaggcaaca

SEQ ID NO: 381971 - RNA, 25 nt, Human
aaaagaaaaaaaaaaggcaacaaaa

SEQ ID NO: 381972 - RNA, 28 nt, Human
aaaagaaaauggaaccaaccaaacaaaa

SEQ ID NO: 381973 - RNA, 23 nt, Human
aaaaggcaacaaaaaccccaaaa

SEQ ID NO: 381974 - RNA, 21 nt, Human
aagggaaaaacccuucuucca

SEQ ID NO: 381975 - RNA, 19 nt, Human
acaaaaaaccaaagcggcc

SEQ ID NO: 381976 - RNA, 20 nt, Human
accaaacaaaaaaccaaagc

SEQ ID NO: 381977 - RNA, 21 nt, Human
accccaaaaggaagggaaaaa

SEQ ID NO: 381978 - RNA, 23 nt, Human
accccacagccccccugccaccc

SEQ ID NO: 381979 - RNA, 23 nt, Human
agaaaaaaaaaaggcaacaaaaa

SEQ ID NO: 381980 - RNA, 26 nt, Human
agaaaaaaaaaaggcaacaaaaaccc

SEQ ID NO: 381981 - RNA, 19 nt, Human
agaaaaaaagaaaauggaa

SEQ ID NO: 381982 - RNA, 22 nt, Human
agcagcucccaaacaccccuca

SEQ ID NO: 381983 - RNA, 18 nt, Human
agccccccugccacccag

SEQ ID NO: 381984 - RNA, 20 nt, Human
agccuggucuccacacccgc

SEQ ID NO: 381985 - RNA, 24 nt, Human
agcgcaguggccuugggggagagg

SEQ ID NO: 381986 - RNA, 18 nt, Human
aggcaacaaaaaccccaa

SEQ ID NO: 381987 - RNA, 24 nt, Human
aggcaacaaaaaccccaaaaggaa

SEQ ID NO: 381988 - RNA, 19 nt, Human
caaccaaacaaaaaaccaa

SEQ ID NO: 381989 - RNA, 21 nt, Human
cacccagcagcucccaaacac

SEQ ID NO: 381990 - RNA, 19 nt, Human
caccccucacagccacagc

SEQ ID NO: 381991 - RNA, 21 nt, Human
cacggcacccuccgagucccc

SEQ ID NO: 381992 - RNA, 22 nt, Human
cagcagcucccaaacaccccuc

SEQ ID NO: 381993 - RNA, 22 nt, Human
caggaagacugagggccuggcg

SEQ ID NO: 381994 - RNA, 22 nt, Human
ccaaaaggaagggaaaaacccu

SEQ ID NO: 381995 - RNA, 23 nt, Human
ccaaccaaacaaaaaaccaaagc

SEQ ID NO: 381996 - RNA, 20 nt, Human
ccacccagcagcucccaaac

SEQ ID NO: 381997 - RNA, 25 nt, Human
ccacccagcagcucccaaacacccc

SEQ ID NO: 381998 - RNA, 21 nt, Human
cccaaacaccccucacagcca

SEQ ID NO: 381999 - RNA, 23 nt, Human
cccaaacaccccucacagccaca

SEQ ID NO: 382000 - RNA, 20 nt, Human
cccagcagcucccaaacacc

SEQ ID NO: 382001 - RNA, 22 nt, Human
ccccacagccccccugccaccc

SEQ ID NO: 382002 - RNA, 19 nt, Human
cccccugccacccagcagc

SEQ ID NO: 382003 - RNA, 27 nt, Human
cccccugccacccagcagcucccaaac

SEQ ID NO: 382004 - RNA, 21 nt, Human
ccccugccacccagcagcucc

SEQ ID NO: 382005 - RNA, 18 nt, Human
cccgccgccagcccugag

SEQ ID NO: 382006 - RNA, 21 nt, Human
cccugccacccagcagcuccc

SEQ ID NO: 382007 - RNA, 19 nt, Human
cccugcugucccccugccc

SEQ ID NO: 382008 - RNA, 22 nt, Human
ccuccggccgggccgccaaagc

SEQ ID NO: 382009 - RNA, 22 nt, Human
ccucgcccgcacggcacccucc

SEQ ID NO: 382010 - RNA, 18 nt, Human
ccugcccuccggccgggc

SEQ ID NO: 382011 - RNA, 23 nt, Human
cgcacggcacccuccgagucccc

SEQ ID NO: 382012 - RNA, 21 nt, Human
cggcucagacgcgaguuccag

SEQ ID NO: 382013 - RNA, 23 nt, Human
cggggcuccuggacacgggcugc

SEQ ID NO: 382014 - RNA, 25 nt, Human
cucacagccacagcucaaauccacc

SEQ ID NO: 382015 - RNA, 22 nt, Human
cucccaaacaccccucacagcc

SEQ ID NO: 382016 - RNA, 22 nt, Human
cugcgaagucaacaagccgcgu

SEQ ID NO: 382017 - RNA, 21 nt, Human
cugcggcggggccgccggacg

SEQ ID NO: 382018 - RNA, 21 nt, Human
cuggcggggcuccuggacacg

SEQ ID NO: 382019 - RNA, 20 nt, Human
cuggucugcggcggggccgc

SEQ ID NO: 382020 - RNA, 19 nt, Human
cugucccccugcccggccc

SEQ ID NO: 382021 - RNA, 19 nt, Human
cuucuccaaaauuuuacaa

SEQ ID NO: 382022 - RNA, 20 nt, Human
gaggguccugcccuccggcc

SEQ ID NO: 382023 - RNA, 18 nt, Human
gagucccgccgccagccc

SEQ ID NO: 382024 - RNA, 19 nt, Human
gcagcucccaaacaccccu

SEQ ID NO: 382025 - RNA, 18 nt, Human
gccaguagucuccacaua

SEQ ID NO: 382026 - RNA, 23 nt, Human
ggaaggcuccgcccggggcugcg

SEQ ID NO: 382027 - RNA, 21 nt, Human
ggcaacaaaaaccccaaaagg

SEQ ID NO: 382028 - RNA, 18 nt, Human
ggcacagaagcauggcgg

SEQ ID NO: 382029 - RNA, 19 nt, Human
ggcaggaagacugagggcc

SEQ ID NO: 382030 - RNA, 21 nt, Human
ggccuggcgcgggcaccuggc

SEQ ID NO: 382031 - RNA, 24 nt, Human
ggccuugggggagaggugaggguc

SEQ ID NO: 382032 - RNA, 24 nt, Human
gggaaaaacccuucuuccaacaga

SEQ ID NO: 382033 - RNA, 20 nt, Human
gggaaggcuccgcccggggc

SEQ ID NO: 382034 - RNA, 19 nt, Human
gggcaccuggcggggcucc

SEQ ID NO: 382035 - RNA, 19 nt, Human
ggggucccaagagcgcagu

SEQ ID NO: 382036 - RNA, 18 nt, Human
gggucaggagccuggucu

SEQ ID NO: 382037 - RNA, 22 nt, Human
uacaaagaaaaaagaaaaaaaa

SEQ ID NO: 382038 - RNA, 24 nt, Human
uauugaccgcacacuccugcuugc

SEQ ID NO: 382039 - RNA, 22 nt, Human
uccacauaaagugcauggaggc

SEQ ID NO: 382040 - RNA, 20 nt, Human
uccagguggcgcugcaugcc

SEQ ID NO: 382041 - RNA, 24 nt, Human
ucccaagcuuuauuuauugccaaa

SEQ ID NO: 382042 - RNA, 24 nt, Human
uccccgccgcgucugcaccauccc

SEQ ID NO: 382043 - RNA, 20 nt, Human
ucccugcugucccccugccc

SEQ ID NO: 382044 - RNA, 18 nt, Human
uccgacuucccuucucca

SEQ ID NO: 382045 - RNA, 23 nt, Human
uccgcgggugagcgguccuuccu

SEQ ID NO: 382046 - RNA, 24 nt, Human
uccggccgggccgccaaagcgggg

SEQ ID NO: 382047 - RNA, 23 nt, Human
uccuggacacgggcugcaggcgg

SEQ ID NO: 382048 - RNA, 23 nt, Human
uccuggagucccgccgccagccc

SEQ ID NO: 382049 - RNA, 22 nt, Human
ucugcggaccggcgggcaccgg

SEQ ID NO: 382050 - RNA, 22 nt, Human
ugacccgagagcgcaaaggcgg

SEQ ID NO: 382051 - RNA, 23 nt, Human
ugagcgguccuuccuuguguucc

SEQ ID NO: 382052 - RNA, 21 nt, Human
ugagggccuggcgcgggcacc

SEQ ID NO: 382053 - RNA, 18 nt, Human
ugcauggaggccgccucc

SEQ ID NO: 382054 - RNA, 21 nt, Human
ugccacccagcagcucccaaa

SEQ ID NO: 382055 - RNA, 24 nt, Human
uggaaccaaccaaacaaaaaacca

SEQ ID NO: 382056 - RNA, 25 nt, Human
uggaaccaaccaaacaaaaaaccaa

SEQ ID NO: 382057 - RNA, 25 nt, Human
uggaaccaaccaaacaaaaaaccag

SEQ ID NO: 382058 - RNA, 22 nt, Human
uggggcguggucggcacagaag

SEQ ID NO: 382059 - RNA, 21 nt, Human
uucccaagcuuuauuuauugc

SEQ ID NO: 382060 - RNA, 22 nt, Human
uugcuccggguuuucucugggg

SEQ ID NO: 382061 - RNA, 19 nt, Human
uugggcggccucgcccgca

SEQ ID NO: 382062 - RNA, 22 nt, Human
uuuuuuuuuuucaagcuuccca

SEQ ID NO: 382063 - RNA, 22 nt, Human
uuuuuuuuuuuuuuucaagcuu

SEQ ID NO: 382064 - RNA, 24 nt, Human
uuuuuuuuuuuuuuuuuuuucaag

SEQ ID NO: 382065 - RNA, 24 nt, Human
aaaagagaaaaaaauaaagacaaa

SEQ ID NO: 382066 - RNA, 18 nt, Human
aaagacaaaugagguggc

SEQ ID NO: 382067 - RNA, 25 nt, Human
aagagaaaaaaauaaagacaaauga

SEQ ID NO: 382068 - RNA, 22 nt, Human
aagcgagggccaggggugaggc

SEQ ID NO: 382069 - RNA, 20 nt, Human
agaaggaaggagacagaggg

SEQ ID NO: 382070 - RNA, 21 nt, Human
agcagccgugcuggccuucuu

SEQ ID NO: 382071 - RNA, 20 nt, Human
ccaauagaaaggacagaaac

SEQ ID NO: 382072 - RNA, 18 nt, Human
ccgagaaggaaggagaca

SEQ ID NO: 382073 - RNA, 19 nt, Human
cggguuggggcggaacugg

SEQ ID NO: 382074 - RNA, 22 nt, Human
cgugggcugcugggcugcuggg

SEQ ID NO: 382075 - RNA, 20 nt, Human
gagaaggaaggagacagagg

SEQ ID NO: 382076 - RNA, 20 nt, Human
gagcagccgugcuggccuuc

SEQ ID NO: 382077 - RNA, 21 nt, Human
gcggcgucgugagcagccgug

SEQ ID NO: 382078 - RNA, 19 nt, Human
gcugcugggcugcugggcu

SEQ ID NO: 382079 - RNA, 22 nt, Human
ggcugcugggcugcugggcugu

SEQ ID NO: 382080 - RNA, 20 nt, Human
gggcugcugggcugcugggc

SEQ ID NO: 382081 - RNA, 25 nt, Human
gggcugcugggcuguuuggucugcu

SEQ ID NO: 382082 - RNA, 21 nt, Human
guccaggguucccggguuggg

SEQ ID NO: 382083 - RNA, 22 nt, Human
uccaggguucccggguuggggc

SEQ ID NO: 382084 - RNA, 25 nt, Human
ucccugaacacacacaaagggaaca

SEQ ID NO: 382085 - RNA, 20 nt, Human
ugaacacacacaaagggaac

SEQ ID NO: 382086 - RNA, 24 nt, Human
ugagcagccgugcuggccuucuuu

SEQ ID NO: 382087 - RNA, 22 nt, Human
ugagguggcagagcaggagagc

SEQ ID NO: 382088 - RNA, 18 nt, Human
ugaugucucagugcuaca

SEQ ID NO: 382089 - RNA, 18 nt, Human
ugcggagagguggugaug

SEQ ID NO: 382090 - RNA, 19 nt, Human
uggcagagcaggagagcuc

SEQ ID NO: 382091 - RNA, 25 nt, Human
uggcuggcuccuauuggcugaaauu

SEQ ID NO: 382092 - RNA, 18 nt, Human
uuuuuuuuuuuuuuuuug

SEQ ID NO: 382093 - RNA, 18 nt, Human
uuuuuuuuuuuuuuuuug

SEQ ID NO: 382094 - RNA, 18 nt, Human
uuuuuuuuuuuuuuuuug

SEQ ID NO: 382095 - RNA, 23 nt, Human
aaaauucuuucauagaaaggcuu

SEQ ID NO: 382096 - RNA, 22 nt, Human
aaaguucucccugacaccuucc

SEQ ID NO: 382097 - RNA, 18 nt, Human
acgcugaaaccacggaaa

SEQ ID NO: 382098 - RNA, 21 nt, Human
cugaaaccacggaaaguucuc

SEQ ID NO: 382099 - RNA, 22 nt, Human
cugaaaccacggaaaguucucc

SEQ ID NO: 382100 - RNA, 21 nt, Human
uaagagcaaagucagguguuc

SEQ ID NO: 382101 - RNA, 21 nt, Human
uacaugguuuacauuauaggu

SEQ ID NO: 382102 - RNA, 19 nt, Human
uaucucagauacaugguuu

SEQ ID NO: 382103 - RNA, 21 nt, Human
uauggucuaagagcaaaguca

SEQ ID NO: 382104 - RNA, 23 nt, Human
ucaggcucggcucucuaaaccgc

SEQ ID NO: 382105 - RNA, 22 nt, Human
uucaggcucuggccuggguucu

SEQ ID NO: 382106 - RNA, 23 nt, Human
uuccgaggccugggcggugcccu

SEQ ID NO: 382107 - RNA, 21 nt, Human
uuucaggcucuggccuggguu

SEQ ID NO: 382108 - RNA, 22 nt, Human
aaaccccaccacugggucagaa

SEQ ID NO: 382109 - RNA, 23 nt, Human
aaaccccaccacugggucagaaa

SEQ ID NO: 382110 - RNA, 20 nt, Human
aacccugcccuccuucacca

SEQ ID NO: 382111 - RNA, 22 nt, Human
aacccugcccuccuucaccagc

SEQ ID NO: 382112 - RNA, 22 nt, Human
acucauccuggcucccaagccu

SEQ ID NO: 382113 - RNA, 19 nt, Human
agaaaagaacccugcccuc

SEQ ID NO: 382114 - RNA, 20 nt, Human
agaaaccaggcaaacagcag

SEQ ID NO: 382115 - RNA, 20 nt, Human
agaacccugcccuccuucac

SEQ ID NO: 382116 - RNA, 19 nt, Human
agccacagccuuggcacca

SEQ ID NO: 382117 - RNA, 19 nt, Human
agggcagagaagcauugcu

SEQ ID NO: 382118 - RNA, 18 nt, Human
cacguagagaaaagaacc

SEQ ID NO: 382119 - RNA, 20 nt, Human
cacguagagaaaagaacccu

SEQ ID NO: 382120 - RNA, 27 nt, Human
cagagguacuuuauuuggcaauuuuaa

SEQ ID NO: 382121 - RNA, 18 nt, Human
cagccuuggcaccauuuc

SEQ ID NO: 382122 - RNA, 19 nt, Human
cauuuuacacgaaagggaa

SEQ ID NO: 382123 - RNA, 20 nt, Human
cauuuuacacgaaagggaac

SEQ ID NO: 382124 - RNA, 19 nt, Human
ccccagaaaucccaccuuc

SEQ ID NO: 382125 - RNA, 19 nt, Human
cccucccggcccacucuga

SEQ ID NO: 382126 - RNA, 22 nt, Human
cccuccuucaccagccucccca

SEQ ID NO: 382127 - RNA, 25 nt, Human
ccugcccuccuucaccaaucgguug

SEQ ID NO: 382128 - RNA, 19 nt, Human
cuccccagaaaucccaccu

SEQ ID NO: 382129 - RNA, 29 nt, Human
cuucaccagccuccccagaaaucccaccu

SEQ ID NO: 382130 - RNA, 18 nt, Human
gagguggaaguuggggag

SEQ ID NO: 382131 - RNA, 20 nt, Human
gcauugcucaaaccccacca

SEQ ID NO: 382132 - RNA, 18 nt, Human
gccaccaucaugcagcuc

SEQ ID NO: 382133 - RNA, 22 nt, Human
gcucugcggagguggaaguugg

SEQ ID NO: 382134 - RNA, 21 nt, Human
uaacaugacacguagagaaaa

SEQ ID NO: 382135 - RNA, 24 nt, Human
uaacaugacacguagagaaaagaa

SEQ ID NO: 382136 - RNA, 24 nt, Human
uccuggcucccaagccuucccaag

SEQ ID NO: 382137 - RNA, 22 nt, Human
ugacacguagagaaaagaaccc

SEQ ID NO: 382138 - RNA, 19 nt, Human
ugagcgcagacguccuucc

SEQ ID NO: 382139 - RNA, 24 nt, Human
ugagcgcagacguccuuccuaacc

SEQ ID NO: 382140 - RNA, 18 nt, Human
uggaaguuggggagcuuu

SEQ ID NO: 382141 - RNA, 18 nt, Human
uggcgugccugccaugac

SEQ ID NO: 382142 - RNA, 18 nt, Human
uggcucccaagccuuccc

SEQ ID NO: 382143 - RNA, 24 nt, Human
uggcucccaagccuucccaaggug

SEQ ID NO: 382144 - RNA, 21 nt, Human
uucaagacagaguaauaacag

SEQ ID NO: 382145 - RNA, 23 nt, Human
aaaacaaacgaaagcacucuccc

SEQ ID NO: 382146 - RNA, 19 nt, Human
aaaaggaggaggaugaaga

SEQ ID NO: 382147 - RNA, 18 nt, Human
aaacaaaaccccaaaugc

SEQ ID NO: 382148 - RNA, 19 nt, Human
aaaccccaaaugccaaagg

SEQ ID NO: 382149 - RNA, 23 nt, Human
aaagaugauaugcagaauccacu

SEQ ID NO: 382150 - RNA, 26 nt, Human
aacccccuucucgcuccuucuuccau

SEQ ID NO: 382151 - RNA, 22 nt, Human
aauuauuaaugacaaacccugc

SEQ ID NO: 382152 - RNA, 22 nt, Human
acaaaaccccaaaugccaaagg

SEQ ID NO: 382153 - RNA, 20 nt, Human
acacuaagaaauaguaccau

SEQ ID NO: 382154 - RNA, 18 nt, Human
acauguaauaaaggcaag

SEQ ID NO: 382155 - RNA, 19 nt, Human
accccaaaugccaaaggaa

SEQ ID NO: 382156 - RNA, 23 nt, Human
acccugcaaauacaaaauaaaac

SEQ ID NO: 382157 - RNA, 24 nt, Human
agaaggaaaaaaggaaaaacaaaa

SEQ ID NO: 382158 - RNA, 21 nt, Human
agcacagugaagacugugugu

SEQ ID NO: 382159 - RNA, 23 nt, Human
aggaaaaaaggaaaaacaaaacc

SEQ ID NO: 382160 - RNA, 22 nt, Human
aggaugaagaaggaaaaaagga

SEQ ID NO: 382161 - RNA, 23 nt, Human
aguaauaaaauaaaauaaaauga

SEQ ID NO: 382162 - RNA, 20 nt, Human
caaaaccccaaaugccaaag

SEQ ID NO: 382163 - RNA, 22 nt, Human
caaaucacuggucacagaauuc

SEQ ID NO: 382164 - RNA, 22 nt, Human
caccccucucugcuggcucucu

SEQ ID NO: 382165 - RNA, 18 nt, Human
caguggcacgauuccaaa

SEQ ID NO: 382166 - RNA, 23 nt, Human
ccaguuucucccauuuaaaacaa

SEQ ID NO: 382167 - RNA, 26 nt, Human
ccaucugagagacuucaucuggcugc

SEQ ID NO: 382168 - RNA, 28 nt, Human
cccaaaucacuggucacagaauucaaaa

SEQ ID NO: 382169 - RNA, 22 nt, Human
cccccuucucgcuccuucuucc

SEQ ID NO: 382170 - RNA, 25 nt, Human
ccccuucucgcuccuucuuccauuc

SEQ ID NO: 382171 - RNA, 18 nt, Human
cccuccccacccaucuga

SEQ ID NO: 382172 - RNA, 21 nt, Human
cccuccccacccaucugagag

SEQ ID NO: 382173 - RNA, 18 nt, Human
ccuccaggauaaggcuuc

SEQ ID NO: 382174 - RNA, 18 nt, Human
ccucucugcuggcucucu

SEQ ID NO: 382175 - RNA, 20 nt, Human
ccuggcgcugggguggcucc

SEQ ID NO: 382176 - RNA, 18 nt, Human
ccuucucgcuccuucuuc

SEQ ID NO: 382177 - RNA, 19 nt, Human
ccuucucgcuccuucuucc

SEQ ID NO: 382178 - RNA, 20 nt, Human
ccuuggcaacaugcuccagu

SEQ ID NO: 382179 - RNA, 19 nt, Human
cgaaagcacucucccuaac

SEQ ID NO: 382180 - RNA, 21 nt, Human
cgaaagcacucucccuaaccc

SEQ ID NO: 382181 - RNA, 22 nt, Human
cgaaagcacucucccuaaccca

SEQ ID NO: 382182 - RNA, 21 nt, Human
cuccuccaggauaaggcuucg

SEQ ID NO: 382183 - RNA, 26 nt, Human
cucuccuccaggauaaggcuucguca

SEQ ID NO: 382184 - RNA, 22 nt, Human
cuggaaggagcugacccucccc

SEQ ID NO: 382185 - RNA, 20 nt, Human
cuggcgcagaccagcagugg

SEQ ID NO: 382186 - RNA, 19 nt, Human
cuucucgcuccuucuucca

SEQ ID NO: 382187 - RNA, 26 nt, Human
cuuggcaacaugcuccaguuucuccc

SEQ ID NO: 382188 - RNA, 19 nt, Human
gaaagcacucucccuaacc

SEQ ID NO: 382189 - RNA, 24 nt, Human
gagcgcuucauggggagaaacuga

SEQ ID NO: 382190 - RNA, 19 nt, Human
gagcugacccuccccaccc

SEQ ID NO: 382191 - RNA, 20 nt, Human
gaggaugaagaaggaaaaaa

SEQ ID NO: 382192 - RNA, 19 nt, Human
gaugaagaaggaaaaaagg

SEQ ID NO: 382193 - RNA, 19 nt, Human
ggcgccuggcgcuggggug

SEQ ID NO: 382194 - RNA, 21 nt, Human
ggcugcagcacagugaagacu

SEQ ID NO: 382195 - RNA, 22 nt, Human
ggggcguagggcaaacggggaa

SEQ ID NO: 382196 - RNA, 18 nt, Human
uaaaacccaaaucacugg

SEQ ID NO: 382197 - RNA, 27 nt, Human
uaaaaugaucgcuggaaggagcugaag

SEQ ID NO: 382198 - RNA, 21 nt, Human
uaaaauuaaaaacaaaaguaa

SEQ ID NO: 382199 - RNA, 19 nt, Human
uaaagcaggauaccugagg

SEQ ID NO: 382200 - RNA, 22 nt, Human
uaccaucgaugaaaaaggaaau

SEQ ID NO: 382201 - RNA, 21 nt, Human
uauauacaaaucuguacaccc

SEQ ID NO: 382202 - RNA, 20 nt, Human
uaucauaaucccaaauauac

SEQ ID NO: 382203 - RNA, 25 nt, Human
ucaguaacccccuucucgcuccuuc

SEQ ID NO: 382204 - RNA, 22 nt, Human
uccaaacaaaugucagacgaga

SEQ ID NO: 382205 - RNA, 23 nt, Human
uccacugacguuaucuacagaag

SEQ ID NO: 382206 - RNA, 21 nt, Human
ucccuggacgggcgccuggcg

SEQ ID NO: 382207 - RNA, 23 nt, Human
ucccuggacgggcgccuggcgcu

SEQ ID NO: 382208 - RNA, 18 nt, Human
uccuucuuccauucaccc

SEQ ID NO: 382209 - RNA, 23 nt, Human
ucgguggagucagcgaaggcucu

SEQ ID NO: 382210 - RNA, 19 nt, Human
ucucugccuuggcaacaug

SEQ ID NO: 382211 - RNA, 19 nt, Human
ugacaaacccugcaaauac

SEQ ID NO: 382212 - RNA, 18 nt, Human
ugagagacuucaucuggc

SEQ ID NO: 382213 - RNA, 21 nt, Human
ugauaugcagaauccacuaca

SEQ ID NO: 382214 - RNA, 19 nt, Human
ugaucgcuggaaggagcug

SEQ ID NO: 382215 - RNA, 24 nt, Human
ugcaaauacaaaauaaaacccaaa

SEQ ID NO: 382216 - RNA, 21 nt, Human
ugccuuggcaacaugcuccag

SEQ ID NO: 382217 - RNA, 23 nt, Human
uggaaaggacgguacaucuggcg

SEQ ID NO: 382218 - RNA, 19 nt, Human
uggcaacaugcuccaguuu

SEQ ID NO: 382219 - RNA, 21 nt, Human
uggcaacaugcuccaguuucu

SEQ ID NO: 382220 - RNA, 18 nt, Human
uuccauucaccccucucu

SEQ ID NO: 382221 - RNA, 24 nt, Human
uucucgcuccuucuuccauucacc

SEQ ID NO: 382222 - RNA, 25 nt, Human
uuuguacacagugauuccuuaugca

SEQ ID NO: 382223 - RNA, 22 nt, Human
aacuagucccagaacauuucua

SEQ ID NO: 382224 - RNA, 21 nt, Human
aagaaccucugcaacaacaac

SEQ ID NO: 382225 - RNA, 28 nt, Human
aagcagcgacgaaaauaguccuugaagc

SEQ ID NO: 382226 - RNA, 18 nt, Human
agaucauucaggccggag

SEQ ID NO: 382227 - RNA, 21 nt, Human
aggggaagagaguguggaggc

SEQ ID NO: 382228 - RNA, 23 nt, Human
caacuagucccagaacauuucua

SEQ ID NO: 382229 - RNA, 19 nt, Human
cacguaccacaaaaacuac

SEQ ID NO: 382230 - RNA, 20 nt, Human
cacugcacguaccacaaaaa

SEQ ID NO: 382231 - RNA, 20 nt, Human
cauggagaucauucaggccg

SEQ ID NO: 382232 - RNA, 22 nt, Human
ccacaaaaacuacuacugaccu

SEQ ID NO: 382233 - RNA, 18 nt, Human
ccagaacauuucuagaua

SEQ ID NO: 382234 - RNA, 20 nt, Human
ccaggauuggagacuuaaaa

SEQ ID NO: 382235 - RNA, 21 nt, Human
cccaggauuggagacuuaaaa

SEQ ID NO: 382236 - RNA, 22 nt, Human
cccaggauuggagacuuaaaac

SEQ ID NO: 382237 - RNA, 22 nt, Human
ccugccugcaugcacucaaaaa

SEQ ID NO: 382238 - RNA, 19 nt, Human
cgcaagcagcgacgaaaau

SEQ ID NO: 382239 - RNA, 21 nt, Human
cuaaagauacaacucaacuag

SEQ ID NO: 382240 - RNA, 25 nt, Human
cugaacaauuccugaaaaaccugaa

SEQ ID NO: 382241 - RNA, 18 nt, Human
gaagagaguguggaggcu

SEQ ID NO: 382242 - RNA, 24 nt, Human
gggcggcuagaaggugacagaaaa

SEQ ID NO: 382243 - RNA, 18 nt, Human
gugaccgcgucuucaugg

SEQ ID NO: 382244 - RNA, 24 nt, Human
guguauuaaccaaaccaaacaaag

SEQ ID NO: 382245 - RNA, 18 nt, Human
uaaaacgcaagcagcgac

SEQ ID NO: 382246 - RNA, 22 nt, Human
uaccacaaaaacuacuacugac

SEQ ID NO: 382247 - RNA, 18 nt, Human
uacuaaagauacaacuca

SEQ ID NO: 382248 - RNA, 20 nt, Human
uacuaaagauacaacucaac

SEQ ID NO: 382249 - RNA, 21 nt, Human
uccaaaucuccacuucgugau

SEQ ID NO: 382250 - RNA, 18 nt, Human
ucugcaaacagagaucac

SEQ ID NO: 382251 - RNA, 23 nt, Human
ucuguguauuaaccaaaccaaac

SEQ ID NO: 382252 - RNA, 21 nt, Human
ugaaaaaccugauuaugaagg

SEQ ID NO: 382253 - RNA, 23 nt, Human
ugaaaaaccugauuaugaaggca

SEQ ID NO: 382254 - RNA, 22 nt, Human
ugaaggcacugaugccguaccc

SEQ ID NO: 382255 - RNA, 26 nt, Human
ugccguacccacuuucugcaaacaga

SEQ ID NO: 382256 - RNA, 21 nt, Human
uggaggcugcgugaccgcguc

SEQ ID NO: 382257 - RNA, 21 nt, Human
uuuuuugcauagccaaacauc

SEQ ID NO: 382258 - RNA, 18 nt, Human
uuuuuuuuuuuuuuuuug

SEQ ID NO: 382259 - RNA, 21 nt, Human
uuuuuuuuuuuuuuuuugcau

SEQ ID NO: 382260 - RNA, 24 nt, Human
uuuuuuuuuuuuuuuuuugcauag

SEQ ID NO: 382261 - RNA, 28 nt, Human
aaacagguaauauguaacaaaagccaga

SEQ ID NO: 382262 - RNA, 19 nt, Human
aacagcaccuuagccaaga

SEQ ID NO: 382263 - RNA, 18 nt, Human
aacagguaauauguaaca

SEQ ID NO: 382264 - RNA, 19 nt, Human
aaccagaaaaccagaagca

SEQ ID NO: 382265 - RNA, 21 nt, Human
aagaaaauaaagaccuguggc

SEQ ID NO: 382266 - RNA, 25 nt, Human
aagaaaccgucacacaggcuucuga

SEQ ID NO: 382267 - RNA, 22 nt, Human
aagcaggauagcuguuuauggc

SEQ ID NO: 382268 - RNA, 24 nt, Human
acaaagaaaagaagagguguuaga

SEQ ID NO: 382269 - RNA, 22 nt, Human
acaaccagaaaaccagaagcaa

SEQ ID NO: 382270 - RNA, 24 nt, Human
accgcaaccuccacuuccagguuc

SEQ ID NO: 382271 - RNA, 22 nt, Human
accucaguuucccgaguagcug

SEQ ID NO: 382272 - RNA, 23 nt, Human
accucaguuucccgaguagcugg

SEQ ID NO: 382273 - RNA, 24 nt, Human
accucaguuucccgaguagcuggg

SEQ ID NO: 382274 - RNA, 18 nt, Human
accuguggcugcauagga

SEQ ID NO: 382275 - RNA, 20 nt, Human
agaaaauccucuuacuacca

SEQ ID NO: 382276 - RNA, 18 nt, Human
agaaacaaagaaaagaag

SEQ ID NO: 382277 - RNA, 21 nt, Human
agacuaaagaaaccgucacac

SEQ ID NO: 382278 - RNA, 21 nt, Human
agacuuucugggccuucuaag

SEQ ID NO: 382279 - RNA, 18 nt, Human
agccaagaggguuccagc

SEQ ID NO: 382280 - RNA, 21 nt, Human
agccgugaagagaaagugagg

SEQ ID NO: 382281 - RNA, 22 nt, Human
aguagaaaugguugucuuuguu

SEQ ID NO: 382282 - RNA, 23 nt, Human
aguuauuuuuaaaacaccuauca

SEQ ID NO: 382283 - RNA, 23 nt, Human
aguuuucuggaggacaaacaggu

SEQ ID NO: 382284 - RNA, 23 nt, Human
auguaacaaaagccagagaaaga

SEQ ID NO: 382285 - RNA, 19 nt, Human
auuccgucagcuggcucug

SEQ ID NO: 382286 - RNA, 24 nt, Human
caagcugguaacccccaucaacac

SEQ ID NO: 382287 - RNA, 21 nt, Human
cacacaggcuucugaagugac

SEQ ID NO: 382288 - RNA, 20 nt, Human
caccgcaaccuccacuucca

SEQ ID NO: 382289 - RNA, 21 nt, Human
cacucagaaaagcagcauggg

SEQ ID NO: 382290 - RNA, 19 nt, Human
caggaggagauaaaucaau

SEQ ID NO: 382291 - RNA, 25 nt, Human
caguuuuucagaugcauuauggaag

SEQ ID NO: 382292 - RNA, 18 nt, Human
caugccuuaauuuguguu

SEQ ID NO: 382293 - RNA, 21 nt, Human
cauucugaugaacuuaggaaa

SEQ ID NO: 382294 - RNA, 18 nt, Human
ccagaaaaccagaagcaa

SEQ ID NO: 382295 - RNA, 19 nt, Human
ccagguucaaucgauucuc

SEQ ID NO: 382296 - RNA, 22 nt, Human
ccauaaauaaagugcaccauga

SEQ ID NO: 382297 - RNA, 21 nt, Human
ccauuggcagcacuugcaggu

SEQ ID NO: 382298 - RNA, 24 nt, Human
cccaccucaguuucccgaguagcu

SEQ ID NO: 382299 - RNA, 19 nt, Human
cccaggcuggagugcgaca

SEQ ID NO: 382300 - RNA, 23 nt, Human
cccauuggcagcacuugcaggua

SEQ ID NO: 382301 - RNA, 18 nt, Human
ccccaucaacacucagaa

SEQ ID NO: 382302 - RNA, 23 nt, Human
ccccaucaacacucagaaaagca

SEQ ID NO: 382303 - RNA, 19 nt, Human
cccgaguagcugggauuac

SEQ ID NO: 382304 - RNA, 23 nt, Human
ccgcaaccuccacuuccagguuc

SEQ ID NO: 382305 - RNA, 18 nt, Human
ccuccugccuaggccugg

SEQ ID NO: 382306 - RNA, 19 nt, Human
ccuccugccuaggccuggg

SEQ ID NO: 382307 - RNA, 21 nt, Human
ccuguaagucacacauauaua

SEQ ID NO: 382308 - RNA, 18 nt, Human
ccuucagccagaauccug

SEQ ID NO: 382309 - RNA, 24 nt, Human
ccuucauucugaugaacuuaggaa

SEQ ID NO: 382310 - RNA, 21 nt, Human
cgacaggaugaucuuggcuca

SEQ ID NO: 382311 - RNA, 24 nt, Human
cgcucuuguugcccaggcuggagu

SEQ ID NO: 382312 - RNA, 22 nt, Human
cuagguauaaagacuaaagaaa

SEQ ID NO: 382313 - RNA, 21 nt, Human
cucaaguuauuuuuaaaacac

SEQ ID NO: 382314 - RNA, 23 nt, Human
cucaccgcaaccuccacuuccag

SEQ ID NO: 382315 - RNA, 23 nt, Human
cucaguuucccgaguagcuggga

SEQ ID NO: 382316 - RNA, 19 nt, Human
cuguaccuguaagucacac

SEQ ID NO: 382317 - RNA, 23 nt, Human
cuuccagguucaaucgauucucc

SEQ ID NO: 382318 - RNA, 24 nt, Human
cuuguugcccaggcuggagugcga

SEQ ID NO: 382319 - RNA, 25 nt, Human
cuuucugggccuucuaagagcaaca

SEQ ID NO: 382320 - RNA, 24 nt, Human
gaguagcugggauuacagcgaugc

SEQ ID NO: 382321 - RNA, 22 nt, Human
gaugcauuauggaagaaaaucc

SEQ ID NO: 382322 - RNA, 24 nt, Human
gccugaggcugagguauggguaga

SEQ ID NO: 382323 - RNA, 21 nt, Human
gcucaugaugcuucucuucca

SEQ ID NO: 382324 - RNA, 24 nt, Human
gcucuuguugcccaggcuggagug

SEQ ID NO: 382325 - RNA, 22 nt, Human
ggcugcuagaaacaaagaaaag

SEQ ID NO: 382326 - RNA, 24 nt, Human
ggcugcuagaaacaaagaaaagaa

SEQ ID NO: 382327 - RNA, 23 nt, Human
guguuaugggaaguuggaggcac

SEQ ID NO: 382328 - RNA, 24 nt, Human
uaaaacaccuaucaaauuggcuca

SEQ ID NO: 382329 - RNA, 21 nt, Human
uaaagaaaccgucacacaggc

SEQ ID NO: 382330 - RNA, 22 nt, Human
uaacaaaagccagagaaagaga

SEQ ID NO: 382331 - RNA, 19 nt, Human
uaagagcaacaguggauca

SEQ ID NO: 382332 - RNA, 22 nt, Human
uaaguaagaaaauaaagaccug

SEQ ID NO: 382333 - RNA, 19 nt, Human
uaagucacacauauauauc

SEQ ID NO: 382334 - RNA, 20 nt, Human
uaccacauuucaggagacuu

SEQ ID NO: 382335 - RNA, 19 nt, Human
uaccauaaauaaagugcac

SEQ ID NO: 382336 - RNA, 25 nt, Human
uacuuggugggcuuggcagagagcg

SEQ ID NO: 382337 - RNA, 26 nt, Human
uagaauccacccauugugcacucucc

SEQ ID NO: 382338 - RNA, 21 nt, Human
uaggaaauaccaugcaacaac

SEQ ID NO: 382339 - RNA, 23 nt, Human
uagguauaaagacuaaagaaacc

SEQ ID NO: 382340 - RNA, 23 nt, Human
uaguaccauaaauaaagugcacc

SEQ ID NO: 382341 - RNA, 31 nt, Human
uaucuuuuuuuuucuuuuugagauggaguuu

SEQ ID NO: 382342 - RNA, 19 nt, Human
ucaagagugugagaggaaa

SEQ ID NO: 382343 - RNA, 19 nt, Human
ucacacaggcuucugaagu

SEQ ID NO: 382344 - RNA, 23 nt, Human
ucaccgcaaccuccacuuccagg

SEQ ID NO: 382345 - RNA, 19 nt, Human
ucagccagaauccuggcug

SEQ ID NO: 382346 - RNA, 23 nt, Human
ucaguuucccgaguagcugggau

SEQ ID NO: 382347 - RNA, 22 nt, Human
ucccgaguagcugggauuacag

SEQ ID NO: 382348 - RNA, 23 nt, Human
ucccgaguagcugggauuacagc

SEQ ID NO: 382349 - RNA, 18 nt, Human
uccuggcugcugagacug

SEQ ID NO: 382350 - RNA, 20 nt, Human
uccuucagccagaauccugg

SEQ ID NO: 382351 - RNA, 23 nt, Human
ucgcucuuguugcccaggcugga

SEQ ID NO: 382352 - RNA, 21 nt, Human
ucugucuuagggauuuucugg

SEQ ID NO: 382353 - RNA, 22 nt, Human
ucuuguugcccaggcuggagug

SEQ ID NO: 382354 - RNA, 22 nt, Human
ucuuuuuuuuucuuuuugagau

SEQ ID NO: 382355 - RNA, 21 nt, Human
ugacccagaaaucccaccccu

SEQ ID NO: 382356 - RNA, 22 nt, Human
ugcaacaaccagaaaaccagaa

SEQ ID NO: 382357 - RNA, 20 nt, Human
ugcaaugcccaaagacuuuc

SEQ ID NO: 382358 - RNA, 18 nt, Human
ugcccaggcuggagugcg

SEQ ID NO: 382359 - RNA, 20 nt, Human
ugcccaggcuggagugcgac

SEQ ID NO: 382360 - RNA, 18 nt, Human
ugcuuuauuuccuuagua

SEQ ID NO: 382361 - RNA, 24 nt, Human
uggagugcgacaggaugaucuugg

SEQ ID NO: 382362 - RNA, 23 nt, Human
uggcucuguacuucuauugggcu

SEQ ID NO: 382363 - RNA, 22 nt, Human
ugggauuacagcgaugcgcuac

SEQ ID NO: 382364 - RNA, 24 nt, Human
ugggauuacagcgaugcgcuacca

SEQ ID NO: 382365 - RNA, 25 nt, Human
ugggauuacagcgaugcgcuaccau

SEQ ID NO: 382366 - RNA, 21 nt, Human
ugggcuuggcagagagcgugu

SEQ ID NO: 382367 - RNA, 21 nt, Human
uggugggcuuggcagagagcg

SEQ ID NO: 382368 - RNA, 21 nt, Human
ugguggguuccaucaacuucu

SEQ ID NO: 382369 - RNA, 25 nt, Human
uucaaucgauucucccaccucaguu

SEQ ID NO: 382370 - RNA, 18 nt, Human
uuccaaagggguucugga

SEQ ID NO: 382371 - RNA, 22 nt, Human
uuccaggccuccugccuaggcc

SEQ ID NO: 382372 - RNA, 24 nt, Human
uucgcucuuguugcccaggcugga

SEQ ID NO: 382373 - RNA, 18 nt, Human
uugcccaggcuggagugc

SEQ ID NO: 382374 - RNA, 22 nt, Human
uugguggguuccaucaacuucu

SEQ ID NO: 382375 - RNA, 26 nt, Human
uuuaaaacaccuaucaaauuggcuca

SEQ ID NO: 382376 - RNA, 20 nt, Human
uuuccccuucauucugauga

SEQ ID NO: 382377 - RNA, 24 nt, Human
uuucgcucuuguugcccaggcugg

SEQ ID NO: 382378 - RNA, 21 nt, Human
uuuuccccuucauucugauga

SEQ ID NO: 382379 - RNA, 21 nt, Human
uuuucuggaggacaaacaggu

SEQ ID NO: 382380 - RNA, 25 nt, Human
uuuuuucuuuuugagauggaguuuc

SEQ ID NO: 382381 - RNA, 25 nt, Human
aaaaacagacaauguaaaacuuucc

SEQ ID NO: 382382 - RNA, 19 nt, Human
accaauguacauacacaca

SEQ ID NO: 382383 - RNA, 21 nt, Human
acuaggagucucuguuccugg

SEQ ID NO: 382384 - RNA, 20 nt, Human
agaaaaacagacaauguaaa

SEQ ID NO: 382385 - RNA, 21 nt, Human
agaauucacccaaagccuggg

SEQ ID NO: 382386 - RNA, 22 nt, Human
agagcccuucccacuggcgcac

SEQ ID NO: 382387 - RNA, 19 nt, Human
agauaauauaccugacccc

SEQ ID NO: 382388 - RNA, 24 nt, Human
auauaccugaccaauguacauaca

SEQ ID NO: 382389 - RNA, 20 nt, Human
auccagaauucacccaaagc

SEQ ID NO: 382390 - RNA, 22 nt, Human
caagagagcccuucccacuggc

SEQ ID NO: 382391 - RNA, 25 nt, Human
caauguacauacacacaucaagaug

SEQ ID NO: 382392 - RNA, 18 nt, Human
cagaauucacccaaagcc

SEQ ID NO: 382393 - RNA, 21 nt, Human
cuaggagucucuguuccuggg

SEQ ID NO: 382394 - RNA, 19 nt, Human
cugacugucaagagagccc

SEQ ID NO: 382395 - RNA, 18 nt, Human
cuggcgcacauuccugag

SEQ ID NO: 382396 - RNA, 19 nt, Human
cuguggagagacgacagag

SEQ ID NO: 382397 - RNA, 23 nt, Human
gagaagaaaaacagacaauguaa

SEQ ID NO: 382398 - RNA, 19 nt, Human
gagaugccaccaccugcgu

SEQ ID NO: 382399 - RNA, 18 nt, Human
gccauccagaauucaccc

SEQ ID NO: 382400 - RNA, 19 nt, Human
gcuguggagagacgacaga

SEQ ID NO: 382401 - RNA, 23 nt, Human
ggugcuguggagagacgacagag

SEQ ID NO: 382402 - RNA, 24 nt, Human
uaaaacucugaguuaaaagcgcca

SEQ ID NO: 382403 - RNA, 21 nt, Human
uaaaagcgccaauauaaaucc

SEQ ID NO: 382404 - RNA, 20 nt, Human
ucuuccagaaagaacaauug

SEQ ID NO: 382405 - RNA, 21 nt, Human
uggagcuggggcccucacagc

SEQ ID NO: 382406 - RNA, 24 nt, Human
ugggagaagaaaaacagacaaugu

SEQ ID NO: 382407 - RNA, 20 nt, Human
uggguggagcuggggcccuc

SEQ ID NO: 382408 - RNA, 24 nt, Human
aaaggaaugccaccagagaaaaaa

SEQ ID NO: 382409 - RNA, 19 nt, Human
aaccaguauaaguagcaca

SEQ ID NO: 382410 - RNA, 18 nt, Human
aaggcagcgccaaggaca

SEQ ID NO: 382411 - RNA, 18 nt, Human
acaaggcagcgccaagga

SEQ ID NO: 382412 - RNA, 22 nt, Human
acagccaggcucuggauuugcc

SEQ ID NO: 382413 - RNA, 18 nt, Human
accagagaaaaaauacaa

SEQ ID NO: 382414 - RNA, 19 nt, Human
acuccgaccagccgccccu

SEQ ID NO: 382415 - RNA, 20 nt, Human
agaaaaaauacaagucugua

SEQ ID NO: 382416 - RNA, 21 nt, Human
agacacauggccucuucugua

SEQ ID NO: 382417 - RNA, 21 nt, Human
agcacaauucucguggcuacu

SEQ ID NO: 382418 - RNA, 21 nt, Human
agcgccaaggacacucaggga

SEQ ID NO: 382419 - RNA, 23 nt, Human
agcgccaaggacacucagggacg

SEQ ID NO: 382420 - RNA, 23 nt, Human
aggcagcgccaaggacacucagg

SEQ ID NO: 382421 - RNA, 24 nt, Human
agugucauguuuauugauguggag

SEQ ID NO: 382422 - RNA, 24 nt, Human
auaucuuuauuuucauacuuaaaa

SEQ ID NO: 382423 - RNA, 24 nt, Human
auauggcagcccuggcucaaggau

SEQ ID NO: 382424 - RNA, 23 nt, Human
caaaucccuaaauggagguagag

SEQ ID NO: 382425 - RNA, 19 nt, Human
caagcaaaucccuaaaugg

SEQ ID NO: 382426 - RNA, 26 nt, Human
caaggauuucucccccugcacgauuc

SEQ ID NO: 382427 - RNA, 19 nt, Human
cacagccaggcucuggauu

SEQ ID NO: 382428 - RNA, 23 nt, Human
cacagccaggcucuggauuugcc

SEQ ID NO: 382429 - RNA, 18 nt, Human
cagcccuggcucaaggau

SEQ ID NO: 382430 - RNA, 21 nt, Human
caggcucuggauuugccuccu

SEQ ID NO: 382431 - RNA, 23 nt, Human
ccagagaaaaaauacaagucugu

SEQ ID NO: 382432 - RNA, 25 nt, Human
cccacagccaggcucuggauuugcc

SEQ ID NO: 382433 - RNA, 18 nt, Human
cccacggucuacccaccc

SEQ ID NO: 382434 - RNA, 23 nt, Human
cccaggagcggaugcaaaggcgc

SEQ ID NO: 382435 - RNA, 22 nt, Human
cccccacggucuacccaccucg

SEQ ID NO: 382436 - RNA, 26 nt, Human
ccccuuguccccgccguccucguccg

SEQ ID NO: 382437 - RNA, 27 nt, Human
ccccuuguccccgccguccucguccgc

SEQ ID NO: 382438 - RNA, 23 nt, Human
ccuacagggcgccucggugccca

SEQ ID NO: 382439 - RNA, 18 nt, Human
ccugcgacccaaggaccu

SEQ ID NO: 382440 - RNA, 21 nt, Human
cgaccagccgccccuuguccc

SEQ ID NO: 382441 - RNA, 21 nt, Human
cgccaacccaauaaguuacac

SEQ ID NO: 382442 - RNA, 23 nt, Human
cuaaaggaaugccaccagagaaa

SEQ ID NO: 382443 - RNA, 18 nt, Human
cucagggacggaggaacc

SEQ ID NO: 382444 - RNA, 20 nt, Human
cugcagucgaaccuugccuc

SEQ ID NO: 382445 - RNA, 24 nt, Human
gcagaguggucacuuuccccacag

SEQ ID NO: 382446 - RNA, 19 nt, Human
gccacugagauauccccca

SEQ ID NO: 382447 - RNA, 22 nt, Human
gcgggcacaaggcagcgccaag

SEQ ID NO: 382448 - RNA, 18 nt, Human
ggaaugccaccagagaaa

SEQ ID NO: 382449 - RNA, 23 nt, Human
ggcacaaggcagcgccaaggaca

SEQ ID NO: 382450 - RNA, 23 nt, Human
gggacggaggaaccgacagggga

SEQ ID NO: 382451 - RNA, 20 nt, Human
uaaggaggacuagaaaccca

SEQ ID NO: 382452 - RNA, 23 nt, Human
uacacacaugcuaugacuccaau

SEQ ID NO: 382453 - RNA, 25 nt, Human
uacagggcgccucggugcccaggag

SEQ ID NO: 382454 - RNA, 21 nt, Human
uaucccaagcaaaucccuaaa

SEQ ID NO: 382455 - RNA, 21 nt, Human
ucacucagguacuaggaaggu

SEQ ID NO: 382456 - RNA, 26 nt, Human
ucagagugucauguuuauugaugugg

SEQ ID NO: 382457 - RNA, 18 nt, Human
uccgccacugagauaucc

SEQ ID NO: 382458 - RNA, 18 nt, Human
ugaagacaccaugccuag

SEQ ID NO: 382459 - RNA, 22 nt, Human
ugcaaaggcgcugggcgggcac

SEQ ID NO: 382460 - RNA, 18 nt, Human
ugcccaggagcggaugca

SEQ ID NO: 382461 - RNA, 21 nt, Human
uguuccuauuuuucacacucu

SEQ ID NO: 382462 - RNA, 18 nt, Human
uuacacacucacucaggu

SEQ ID NO: 382463 - RNA, 20 nt, Human
uuucucccccugcacgauuc

SEQ ID NO: 382464 - RNA, 25 nt, Human
aaagaacuucucagaaagcugugca

SEQ ID NO: 382465 - RNA, 23 nt, Human
aagauccaaaaccgucugaagga

SEQ ID NO: 382466 - RNA, 24 nt, Human
aagcugugcaguaagauccaaaac

SEQ ID NO: 382467 - RNA, 18 nt, Human
agaaauucucacugguug

SEQ ID NO: 382468 - RNA, 21 nt, Human
augcaagccacaaaacauggc

SEQ ID NO: 382469 - RNA, 21 nt, Human
caguaagauccaaaaccgucu

SEQ ID NO: 382470 - RNA, 22 nt, Human
cauauuuguucuaaucaugaag

SEQ ID NO: 382471 - RNA, 23 nt, Human
cauggcaccaaaagaacuucuca

SEQ ID NO: 382472 - RNA, 19 nt, Human
ccacaaaacauggcaccaa

SEQ ID NO: 382473 - RNA, 20 nt, Human
gaaagcugugcaguaagauc

SEQ ID NO: 382474 - RNA, 21 nt, Human
gauccaaaaccgucugaagga

SEQ ID NO: 382475 - RNA, 27 nt, Human
uaaaugacucccccgccgaguccccca

SEQ ID NO: 382476 - RNA, 20 nt, Human
uauuuguucuaaucaugaag

SEQ ID NO: 382477 - RNA, 23 nt, Human
uccaaaaccgucugaaggaagaa

SEQ ID NO: 382478 - RNA, 19 nt, Human
ugaaggaagaaauucucac

SEQ ID NO: 382479 - RNA, 22 nt, Human
ugacucccccgccgaguccccc

SEQ ID NO: 382480 - RNA, 21 nt, Human
ugcaagccacaaaacauggca

SEQ ID NO: 382481 - RNA, 26 nt, Human
ugcaagccacaaaacauggcaccaaa

SEQ ID NO: 382482 - RNA, 20 nt, Human
uuaaaugacucccccgccga

SEQ ID NO: 382483 - RNA, 21 nt, Human
uugguguuaauugguucuucc

SEQ ID NO: 382484 - RNA, 22 nt, Human
aaaaauagcuacauuagaaaga

SEQ ID NO: 382485 - RNA, 19 nt, Human
aaaagggacacagaacaaa

SEQ ID NO: 382486 - RNA, 23 nt, Human
aacucaaaagaagucacugccac

SEQ ID NO: 382487 - RNA, 20 nt, Human
aagaagucacugccaccaac

SEQ ID NO: 382488 - RNA, 25 nt, Human
acauuagaaagaccaacacuuuaga

SEQ ID NO: 382489 - RNA, 25 nt, Human
accagccccaaaggccccaucugga

SEQ ID NO: 382490 - RNA, 19 nt, Human
agagcaagcaaaccaccaa

SEQ ID NO: 382491 - RNA, 23 nt, Human
agauauucagcaucuaacaguuc

SEQ ID NO: 382492 - RNA, 18 nt, Human
agcaagcaaaccaccaag

SEQ ID NO: 382493 - RNA, 21 nt, Human
aguagcaucugguaagauugg

SEQ ID NO: 382494 - RNA, 23 nt, Human
auaaaguuuuauuaauauucuga

SEQ ID NO: 382495 - RNA, 25 nt, Human
aucuggaacaaguaucaaccaggag

SEQ ID NO: 382496 - RNA, 18 nt, Human
caacacuuuagaaaaaga

SEQ ID NO: 382497 - RNA, 23 nt, Human
cagucauuguggaaggagacaau

SEQ ID NO: 382498 - RNA, 22 nt, Human
caguccuacauuagcuucuaaa

SEQ ID NO: 382499 - RNA, 22 nt, Human
cauuagaaagaccaacacuuua

SEQ ID NO: 382500 - RNA, 26 nt, Human
ccugggcugaggcauccaaacaaagc

SEQ ID NO: 382501 - RNA, 22 nt, Human
cuagaaacacgcuugugcuuuu

SEQ ID NO: 382502 - RNA, 20 nt, Human
cuagccauuaacccaguaca

SEQ ID NO: 382503 - RNA, 22 nt, Human
cucaaaagaagucacugccacc

SEQ ID NO: 382504 - RNA, 24 nt, Human
cuggggcaagaaacggggcagaga

SEQ ID NO: 382505 - RNA, 23 nt, Human
gaccugggcugaggcauccaaac

SEQ ID NO: 382506 - RNA, 19 nt, Human
gcaagaaacggggcagaga

SEQ ID NO: 382507 - RNA, 20 nt, Human
gcuacauuagaaagaccaaa

SEQ ID NO: 382508 - RNA, 19 nt, Human
ggacagaauugggauugaa

SEQ ID NO: 382509 - RNA, 26 nt, Human
ggacaugccccaccuguaacguagag

SEQ ID NO: 382510 - RNA, 19 nt, Human
gggauggggagaaagucag

SEQ ID NO: 382511 - RNA, 20 nt, Human
ggggauggggagaaagucag

SEQ ID NO: 382512 - RNA, 18 nt, Human
uaaaagggacacagaaca

SEQ ID NO: 382513 - RNA, 19 nt, Human
uaaaagggacacagaacag

SEQ ID NO: 382514 - RNA, 22 nt, Human
uaacagcugaccugggcugagg

SEQ ID NO: 382515 - RNA, 21 nt, Human
uaacucaaaagaagucacugc

SEQ ID NO: 382516 - RNA, 23 nt, Human
uacaccaaguguacugaaguaga

SEQ ID NO: 382517 - RNA, 24 nt, Human
uacauacucuuuucacaaauaugu

SEQ ID NO: 382518 - RNA, 20 nt, Human
uacauuagaaagaccaacac

SEQ ID NO: 382519 - RNA, 24 nt, Human
uacauuagaaagaccaacacuuua

SEQ ID NO: 382520 - RNA, 19 nt, Human
uagaaaaagaguaaaacac

SEQ ID NO: 382521 - RNA, 20 nt, Human
uagaaaaagaguaaaacacu

SEQ ID NO: 382522 - RNA, 23 nt, Human
ucuaaaauauuugucaggaggga

SEQ ID NO: 382523 - RNA, 20 nt, Human
ucuaacaguucaaaagaagc

SEQ ID NO: 382524 - RNA, 19 nt, Human
ucucuagaaacacgcuugu

SEQ ID NO: 382525 - RNA, 19 nt, Human
ugcaaaccacacuggggca

SEQ ID NO: 382526 - RNA, 22 nt, Human
ugcaacaagaaaaauagcuaca

SEQ ID NO: 382527 - RNA, 24 nt, Human
uggaaggagacaaugcaaaccaca

SEQ ID NO: 382528 - RNA, 20 nt, Human
ugggacagaauugggauuga

SEQ ID NO: 382529 - RNA, 18 nt, Human
uggggagaaagucaguuc

SEQ ID NO: 382530 - RNA, 18 nt, Human
aggcagggggauuuacua

SEQ ID NO: 382531 - RNA, 18 nt, Human
agggaugugcagacgcug

SEQ ID NO: 382532 - RNA, 18 nt, Human
guggggcgugccagaccc

SEQ ID NO: 382533 - RNA, 18 nt, Human
guggggcgugccagaccc

SEQ ID NO: 382534 - RNA, 19 nt, Human
guggggcgugccagacccu

SEQ ID NO: 382535 - RNA, 19 nt, Human
uaggcagggggauuuacua

SEQ ID NO: 382536 - RNA, 28 nt, Human
caaucacugcaaccucacuacagcuggg

SEQ ID NO: 382537 - RNA, 19 nt, Human
ccucuguucaugguuucug

SEQ ID NO: 382538 - RNA, 19 nt, Human
cuuguucauccucuguuca

SEQ ID NO: 382539 - RNA, 20 nt, Human
uaauaagcauauucccauga

SEQ ID NO: 382540 - RNA, 20 nt, Human
ucacugcaaccucacuacag

SEQ ID NO: 382541 - RNA, 20 nt, Human
ucacugcaaccucacuacag

SEQ ID NO: 382542 - RNA, 25 nt, Human
ucacugcaaccucacuacagcuggg

SEQ ID NO: 382543 - RNA, 26 nt, Human
ugaagcaggccaauccuacucaauca

SEQ ID NO: 382544 - RNA, 21 nt, Human
uggggaacugagcugugaugg

SEQ ID NO: 382545 - RNA, 19 nt, Human
uucaugguuucugcaccag

SEQ ID NO: 382546 - RNA, 21 nt, Human
aagcggucgggguggccagga

SEQ ID NO: 382547 - RNA, 23 nt, Human
acgccagguagggcagggaaccc

SEQ ID NO: 382548 - RNA, 25 nt, Human
auaguggcggcaauggccucagccc

SEQ ID NO: 382549 - RNA, 18 nt, Human
caccugcuuuuccagccc

SEQ ID NO: 382550 - RNA, 18 nt, Human
caccugcuuuuccagccc

SEQ ID NO: 382551 - RNA, 18 nt, Human
cagcccacccucaccugc

SEQ ID NO: 382552 - RNA, 19 nt, Human
ccucaccugcuuuuccagc

SEQ ID NO: 382553 - RNA, 25 nt, Human
ccuggaccaggacgccagguagggc

SEQ ID NO: 382554 - RNA, 19 nt, Human
cucagcccagcccacccuc

SEQ ID NO: 382555 - RNA, 21 nt, Human
cucccaagcuccgcgccucgc

SEQ ID NO: 382556 - RNA, 20 nt, Human
gcccagggcuccccuggacc

SEQ ID NO: 382557 - RNA, 19 nt, Human
uaguggcggcaauggccuc

SEQ ID NO: 382558 - RNA, 22 nt, Human
uauuacacagauaguggcggca

SEQ ID NO: 382559 - RNA, 19 nt, Human
ugagaggggaaacagucca

SEQ ID NO: 382560 - RNA, 21 nt, Human
ugagaggggaaacaguccaga

SEQ ID NO: 382561 - RNA, 19 nt, Human
uggccaggaacauaaacua

SEQ ID NO: 382562 - RNA, 20 nt, Human
uuccagcccacaaaggggga

SEQ ID NO: 382563 - RNA, 21 nt, Human
aaagccgagggaggguggggc

SEQ ID NO: 382564 - RNA, 21 nt, Human
aacgcuuuuuuuuuuuuuuuu

SEQ ID NO: 382565 - RNA, 21 nt, Human
aacgcuuuuuuuuuuuuuuuu

SEQ ID NO: 382566 - RNA, 21 nt, Human
acccuggcggcccugccuggg

SEQ ID NO: 382567 - RNA, 24 nt, Human
accgaguuacugaaggcaaggaag

SEQ ID NO: 382568 - RNA, 18 nt, Human
acucgcaugcaucucccu

SEQ ID NO: 382569 - RNA, 22 nt, Human
acugcaggccugaaaugacauc

SEQ ID NO: 382570 - RNA, 25 nt, Human
agaaggcaacacggacaguggucac

SEQ ID NO: 382571 - RNA, 22 nt, Human
agacugcaggccugaaaugaca

SEQ ID NO: 382572 - RNA, 22 nt, Human
agaggacagggcaggucagcug

SEQ ID NO: 382573 - RNA, 23 nt, Human
agaggacagggcaggucagcugg

SEQ ID NO: 382574 - RNA, 26 nt, Human
agaggcggggguugggagggcagccc

SEQ ID NO: 382575 - RNA, 19 nt, Human
aggaaugugggaagggaag

SEQ ID NO: 382576 - RNA, 24 nt, Human
agggaagagcagaaccugggccca

SEQ ID NO: 382577 - RNA, 24 nt, Human
aguggaguggcaguuuggguggcu

SEQ ID NO: 382578 - RNA, 19 nt, Human
caacaggagccaccauccc

SEQ ID NO: 382579 - RNA, 21 nt, Human
cacacggacacggccccaucc

SEQ ID NO: 382580 - RNA, 21 nt, Human
cacacucacagagaucaugca

SEQ ID NO: 382581 - RNA, 22 nt, Human
caccauguggccagcugguccc

SEQ ID NO: 382582 - RNA, 20 nt, Human
cacccuggcggcccugccug

SEQ ID NO: 382583 - RNA, 22 nt, Human
cacggacacggccccauccccu

SEQ ID NO: 382584 - RNA, 19 nt, Human
cagagcugggcugucccuc

SEQ ID NO: 382585 - RNA, 18 nt, Human
cagcugguuguaccaaga

SEQ ID NO: 382586 - RNA, 20 nt, Human
caugcacacgacacggggcg

SEQ ID NO: 382587 - RNA, 23 nt, Human
ccacaagggagaggguccugggg

SEQ ID NO: 382588 - RNA, 22 nt, Human
ccaccgaguuacugaaggcaag

SEQ ID NO: 382589 - RNA, 24 nt, Human
ccagaggcggggguugggagggca

SEQ ID NO: 382590 - RNA, 20 nt, Human
ccagguggcagcagccaggg

SEQ ID NO: 382591 - RNA, 20 nt, Human
ccccagggaagagcagaacc

SEQ ID NO: 382592 - RNA, 25 nt, Human
ccccuaaccugaaaagcagcaccau

SEQ ID NO: 382593 - RNA, 19 nt, Human
ccccuaggcaggggaggga

SEQ ID NO: 382594 - RNA, 21 nt, Human
cccugccugggucugcuccuc

SEQ ID NO: 382595 - RNA, 20 nt, Human
cccuggcggcccugccuggg

SEQ ID NO: 382596 - RNA, 19 nt, Human
ccuuuggugaagggguugg

SEQ ID NO: 382597 - RNA, 21 nt, Human
cgagggaggguggggcacacg

SEQ ID NO: 382598 - RNA, 27 nt, Human
cgcacacucacagagaucaugcacacg

SEQ ID NO: 382599 - RNA, 19 nt, Human
cgcaugcaucucccugccu

SEQ ID NO: 382600 - RNA, 27 nt, Human
cggcuggcugccgaauacugcaucugg

SEQ ID NO: 382601 - RNA, 23 nt, Human
cuccuggggccggaggaaugugg

SEQ ID NO: 382602 - RNA, 18 nt, Human
cucugagccagaggcggg

SEQ ID NO: 382603 - RNA, 21 nt, Human
cugggcccaccgaguuacuga

SEQ ID NO: 382604 - RNA, 18 nt, Human
cugguccccaccccucag

SEQ ID NO: 382605 - RNA, 23 nt, Human
cuuuuuuuuuuuuuuuuuuacag

SEQ ID NO: 382606 - RNA, 21 nt, Human
gaagccccaagguggugagga

SEQ ID NO: 382607 - RNA, 19 nt, Human
gaagggguuggggggaauc

SEQ ID NO: 382608 - RNA, 23 nt, Human
gagcaugggggccgggagggagg

SEQ ID NO: 382609 - RNA, 22 nt, Human
gagccagaggcggggguuggga

SEQ ID NO: 382610 - RNA, 19 nt, Human
gaggguccuggggcggggg

SEQ ID NO: 382611 - RNA, 21 nt, Human
gauggcaagggcaggaugaga

SEQ ID NO: 382612 - RNA, 26 nt, Human
gcaagacaacaggagccaccauccca

SEQ ID NO: 382613 - RNA, 25 nt, Human
gcagcagccagggccuccuuggagu

SEQ ID NO: 382614 - RNA, 21 nt, Human
gccagggccuccuuggagugg

SEQ ID NO: 382615 - RNA, 18 nt, Human
gcucugagccagaggcgg

SEQ ID NO: 382616 - RNA, 22 nt, Human
gcucugcuuguggggacagcug

SEQ ID NO: 382617 - RNA, 21 nt, Human
gcuggcuugagggacugacug

SEQ ID NO: 382618 - RNA, 18 nt, Human
ggaggaggagguagcccu

SEQ ID NO: 382619 - RNA, 19 nt, Human
ggaggguggggcacacgga

SEQ ID NO: 382620 - RNA, 23 nt, Human
ggaguaaagccgagggagggugg

SEQ ID NO: 382621 - RNA, 21 nt, Human
gggagaggguccuggggcggg

SEQ ID NO: 382622 - RNA, 23 nt, Human
gggcaggaugagacugcaggccu

SEQ ID NO: 382623 - RNA, 18 nt, Human
gggccgggagggagggug

SEQ ID NO: 382624 - RNA, 19 nt, Human
ggggacggagggcccaugg

SEQ ID NO: 382625 - RNA, 21 nt, Human
ggggagggagccuggagccau

SEQ ID NO: 382626 - RNA, 18 nt, Human
uagcugcugggguggcug

SEQ ID NO: 382627 - RNA, 21 nt, Human
ucaccucuccccuaaccugaa

SEQ ID NO: 382628 - RNA, 23 nt, Human
ucacgccccgcuggcugccuccc

SEQ ID NO: 382629 - RNA, 18 nt, Human
ucagaccuagcccaaggg

SEQ ID NO: 382630 - RNA, 21 nt, Human
ucagcgacugagacucagagc

SEQ ID NO: 382631 - RNA, 22 nt, Human
ucagggcucugcuuguggggac

SEQ ID NO: 382632 - RNA, 18 nt, Human
uccccaccccucagggcu

SEQ ID NO: 382633 - RNA, 18 nt, Human
uccccggcuggcugccga

SEQ ID NO: 382634 - RNA, 20 nt, Human
ucccuagcugcugggguggc

SEQ ID NO: 382635 - RNA, 24 nt, Human
ucccugccuguccacaagggagag

SEQ ID NO: 382636 - RNA, 21 nt, Human
ucucccugccuguccacaagg

SEQ ID NO: 382637 - RNA, 20 nt, Human
ugaaggcaaggaagcguggc

SEQ ID NO: 382638 - RNA, 23 nt, Human
ugagaagccccaagguggugagg

SEQ ID NO: 382639 - RNA, 19 nt, Human
ugagacugcaggccugaaa

SEQ ID NO: 382640 - RNA, 21 nt, Human
ugaggaggaggagguagcccu

SEQ ID NO: 382641 - RNA, 19 nt, Human
ugcagccugcuuugccucc

SEQ ID NO: 382642 - RNA, 18 nt, Human
ugcaucucccugccuguc

SEQ ID NO: 382643 - RNA, 19 nt, Human
ugccugggucugcuccucg

SEQ ID NO: 382644 - RNA, 21 nt, Human
ugcugcaugcacucgcaugca

SEQ ID NO: 382645 - RNA, 19 nt, Human
uggagaggacagggcaggu

SEQ ID NO: 382646 - RNA, 23 nt, Human
uggcaagggcaggaugagacugc

SEQ ID NO: 382647 - RNA, 21 nt, Human
uggcagagaagggagcauggg

SEQ ID NO: 382648 - RNA, 24 nt, Human
uggcagagaagggagcauggggga

SEQ ID NO: 382649 - RNA, 25 nt, Human
uggcagagaagggagcaugggggcc

SEQ ID NO: 382650 - RNA, 21 nt, Human
uggcagcagccagggccuccu

SEQ ID NO: 382651 - RNA, 20 nt, Human
uggcagccugagccucccug

SEQ ID NO: 382652 - RNA, 23 nt, Human
uggcagccugagccucccuggca

SEQ ID NO: 382653 - RNA, 20 nt, Human
uggcagccugagccucccuu

SEQ ID NO: 382654 - RNA, 18 nt, Human
uggcugccucccucugcc

SEQ ID NO: 382655 - RNA, 19 nt, Human
uggcugccucccucugccu

SEQ ID NO: 382656 - RNA, 21 nt, Human
ugggaagggaagcugaggccc

SEQ ID NO: 382657 - RNA, 23 nt, Human
ugggaagggaagcugaggcccag

SEQ ID NO: 382658 - RNA, 22 nt, Human
ugggagggcagcccagccaggu

SEQ ID NO: 382659 - RNA, 22 nt, Human
ugggcaggaguaaagccgaggg

SEQ ID NO: 382660 - RNA, 28 nt, Human
ugggcaggaguaaagccgagggagggug

SEQ ID NO: 382661 - RNA, 21 nt, Human
ugggggccgggagggagggug

SEQ ID NO: 382662 - RNA, 22 nt, Human
ugugcacacugcaucacgcccc

SEQ ID NO: 382663 - RNA, 18 nt, Human
ugugggaagggaagcuga

SEQ ID NO: 382664 - RNA, 18 nt, Human
uucaagaaggcaacacgg

SEQ ID NO: 382665 - RNA, 18 nt, Human
uugggagggcagcccagc

SEQ ID NO: 382666 - RNA, 26 nt, Human
aaacaugauuacaggaaucuuccuac

SEQ ID NO: 382667 - RNA, 18 nt, Human
aacccgcccaaccccccc

SEQ ID NO: 382668 - RNA, 22 nt, Human
aauccaacaaaaaaaugaaaga

SEQ ID NO: 382669 - RNA, 22 nt, Human
aauuaaaaaaacaugauuacag

SEQ ID NO: 382670 - RNA, 18 nt, Human
acacuuugugcuguugug

SEQ ID NO: 382671 - RNA, 18 nt, Human
accauccuuuauacaaua

SEQ ID NO: 382672 - RNA, 18 nt, Human
acuucaggguaaaaaaga

SEQ ID NO: 382673 - RNA, 18 nt, Human
aggaacccgcccaacccc

SEQ ID NO: 382674 - RNA, 18 nt, Human
aggaacccgcccaacccc

SEQ ID NO: 382675 - RNA, 20 nt, Human
aucagacuuaaauagaccag

SEQ ID NO: 382676 - RNA, 25 nt, Human
caaaggaacccgcccaaccccccca

SEQ ID NO: 382677 - RNA, 20 nt, Human
caacaaaaaaaugaaagaca

SEQ ID NO: 382678 - RNA, 27 nt, Human
cagaaagaguaucaaauuaacuagaaa

SEQ ID NO: 382679 - RNA, 19 nt, Human
caggguaaaaaagaucuua

SEQ ID NO: 382680 - RNA, 20 nt, Human
ccaacaaaaaaaugaaagac

SEQ ID NO: 382681 - RNA, 25 nt, Human
ccaacccccccaauaaaaauaacaa

SEQ ID NO: 382682 - RNA, 19 nt, Human
cccguaaacaucagacuua

SEQ ID NO: 382683 - RNA, 24 nt, Human
cuuaaaggaaauccaacaaaaaaa

SEQ ID NO: 382684 - RNA, 19 nt, Human
gcagggagaucccaacaga

SEQ ID NO: 382685 - RNA, 22 nt, Human
gguaaaaaagaucuuaaaggaa

SEQ ID NO: 382686 - RNA, 19 nt, Human
uaaaaaaacaugauuacag

SEQ ID NO: 382687 - RNA, 18 nt, Human
uacaacccauguauugga

SEQ ID NO: 382688 - RNA, 20 nt, Human
uauauacacagaaagaguag

SEQ ID NO: 382689 - RNA, 25 nt, Human
uauuaaauugaagaccaagggaguu

SEQ ID NO: 382690 - RNA, 21 nt, Human
uccaacaaaaaaaugaaagac

SEQ ID NO: 382691 - RNA, 19 nt, Human
uccgaauuccccaaacuaa

SEQ ID NO: 382692 - RNA, 21 nt, Human
uccuuuauacaauagcuuuaa

SEQ ID NO: 382693 - RNA, 21 nt, Human
ucuaagcagucaccuggaccu

SEQ ID NO: 382694 - RNA, 18 nt, Human
uggcccaaaacuuaacaa

SEQ ID NO: 382695 - RNA, 18 nt, Human
ugugaaccagaaaaauac

SEQ ID NO: 382696 - RNA, 21 nt, Human
uguucuuauucgcuaauuuca

SEQ ID NO: 382697 - RNA, 21 nt, Human
uuaauccaaaggaacccgccc

SEQ ID NO: 382698 - RNA, 20 nt, Human
uuauuggagaauauuuuccc

SEQ ID NO: 382699 - RNA, 26 nt, Human
uucaggguaaaaaagaucuuaaagga

SEQ ID NO: 382700 - RNA, 21 nt, Human
agagcagguuuugcguaccaa

SEQ ID NO: 382701 - RNA, 21 nt, Human
ccaggugucacugcugguggu

SEQ ID NO: 382702 - RNA, 22 nt, Human
cccgccgcucggacucuuccug

SEQ ID NO: 382703 - RNA, 20 nt, Human
cgcucggacucuuccugcuc

SEQ ID NO: 382704 - RNA, 23 nt, Human
cuccgcccgccgcucggacucuu

SEQ ID NO: 382705 - RNA, 19 nt, Human
gcgcgaccggagccuggag

SEQ ID NO: 382706 - RNA, 19 nt, Human
ucccgugcgcgaccggagc

SEQ ID NO: 382707 - RNA, 23 nt, Human
aaacaagaagagggcaucacuga

SEQ ID NO: 382708 - RNA, 22 nt, Human
aaacaagguuuuaaaaacaccc

SEQ ID NO: 382709 - RNA, 25 nt, Human
aaacaagguuuuaaaaacacccaaa

SEQ ID NO: 382710 - RNA, 20 nt, Human
aaacaaguuucaagacagac

SEQ ID NO: 382711 - RNA, 26 nt, Human
aaacacgaugauguaugaccccacac

SEQ ID NO: 382712 - RNA, 24 nt, Human
aacaagguuuuaaaaacacccaaa

SEQ ID NO: 382713 - RNA, 21 nt, Human
aacacgaugauguaugacccc

SEQ ID NO: 382714 - RNA, 20 nt, Human
aacugcuuauuucuucaucu

SEQ ID NO: 382715 - RNA, 18 nt, Human
aagagggcaucacugaac

SEQ ID NO: 382716 - RNA, 18 nt, Human
aaggaacugaggcgggcg

SEQ ID NO: 382717 - RNA, 18 nt, Human
acaaacaagguccugaag

SEQ ID NO: 382718 - RNA, 18 nt, Human
acaacagcagcagcacaa

SEQ ID NO: 382719 - RNA, 19 nt, Human
acaacagcagcagcacaaa

SEQ ID NO: 382720 - RNA, 18 nt, Human
acaaugcagcgagcagag

SEQ ID NO: 382721 - RNA, 24 nt, Human
acagccuuccugcauuugcugcuu

SEQ ID NO: 382722 - RNA, 25 nt, Human
accacaaugcagcgagcagagaggg

SEQ ID NO: 382723 - RNA, 21 nt, Human
acccaagcaaugugcacguca

SEQ ID NO: 382724 - RNA, 20 nt, Human
accccgccgccuccucaggu

SEQ ID NO: 382725 - RNA, 24 nt, Human
acgggccaagaaccuucuccacag

SEQ ID NO: 382726 - RNA, 18 nt, Human
agcaaugugcacgucacc

SEQ ID NO: 382727 - RNA, 21 nt, Human
aggaacugaggcgggcggugg

SEQ ID NO: 382728 - RNA, 21 nt, Human
aggacaggaacaaccccaaac

SEQ ID NO: 382729 - RNA, 19 nt, Human
aggcuggggagggggcagu

SEQ ID NO: 382730 - RNA, 24 nt, Human
agguauuaugaaguaucugaaacu

SEQ ID NO: 382731 - RNA, 24 nt, Human
aguaauacacacauggccugcagg

SEQ ID NO: 382732 - RNA, 21 nt, Human
auaacagagaaagggaaacca

SEQ ID NO: 382733 - RNA, 21 nt, Human
caacaaggacaggaacaaccc

SEQ ID NO: 382734 - RNA, 20 nt, Human
cacacauggccugcaggagg

SEQ ID NO: 382735 - RNA, 21 nt, Human
cacagccauagcccucuguuc

SEQ ID NO: 382736 - RNA, 21 nt, Human
caccccagccuccacccacag

SEQ ID NO: 382737 - RNA, 23 nt, Human
caccgggaaggggugcugauuuc

SEQ ID NO: 382738 - RNA, 22 nt, Human
cacuguggacacaggcugggga

SEQ ID NO: 382739 - RNA, 18 nt, Human
cacuguuugguccgaggg

SEQ ID NO: 382740 - RNA, 23 nt, Human
cagagaaagggaaaccaacaucu

SEQ ID NO: 382741 - RNA, 19 nt, Human
cagccagggcgugcagggc

SEQ ID NO: 382742 - RNA, 22 nt, Human
cagccauagcccucuguucagg

SEQ ID NO: 382743 - RNA, 18 nt, Human
cagccuccacccacagcu

SEQ ID NO: 382744 - RNA, 19 nt, Human
caggcuccagacuaacugu

SEQ ID NO: 382745 - RNA, 20 nt, Human
cauccuaacaguccagaaau

SEQ ID NO: 382746 - RNA, 18 nt, Human
ccaacaucuucgacaaac

SEQ ID NO: 382747 - RNA, 28 nt, Human
ccaacgggccaagaaccuucuccacagc

SEQ ID NO: 382748 - RNA, 25 nt, Human
ccacaaugcagcgagcagugggaac

SEQ ID NO: 382749 - RNA, 24 nt, Human
ccacacaacacaagguauuaugaa

SEQ ID NO: 382750 - RNA, 20 nt, Human
cccagccuccacccacagcc

SEQ ID NO: 382751 - RNA, 21 nt, Human
ccccagccuccacccacagcu

SEQ ID NO: 382752 - RNA, 20 nt, Human
ccccgccgccuccucaggug

SEQ ID NO: 382753 - RNA, 21 nt, Human
cccucuguucaggggccucca

SEQ ID NO: 382754 - RNA, 22 nt, Human
cccuggacaccgggaaggggug

SEQ ID NO: 382755 - RNA, 19 nt, Human
ccucaggugggcgcgcugg

SEQ ID NO: 382756 - RNA, 19 nt, Human
ccugcggaccccgccgccu

SEQ ID NO: 382757 - RNA, 24 nt, Human
ccugcggaccccgccgccuccuca

SEQ ID NO: 382758 - RNA, 26 nt, Human
ccugcggaccccgccgccuccucagg

SEQ ID NO: 382759 - RNA, 21 nt, Human
cgagcagagagggcggggagc

SEQ ID NO: 382760 - RNA, 19 nt, Human
cgcaaaggaacugaggcgg

SEQ ID NO: 382761 - RNA, 21 nt, Human
cgccugcggaccccgccgccu

SEQ ID NO: 382762 - RNA, 27 nt, Human
cucaacaaggacaggaacaaccccaaa

SEQ ID NO: 382763 - RNA, 18 nt, Human
cugcugugcaccaauugc

SEQ ID NO: 382764 - RNA, 22 nt, Human
cuguucaggggccuccagaacc

SEQ ID NO: 382765 - RNA, 21 nt, Human
gaacaccacaaugcagcgagc

SEQ ID NO: 382766 - RNA, 25 nt, Human
gaagaugcuugccgagaggguacag

SEQ ID NO: 382767 - RNA, 20 nt, Human
gacaacagcagcagcacaaa

SEQ ID NO: 382768 - RNA, 21 nt, Human
gagaagagaacaccacaaugc

SEQ ID NO: 382769 - RNA, 21 nt, Human
gagacagccuuccugcauuug

SEQ ID NO: 382770 - RNA, 18 nt, Human
gagcgcugugggaugggg

SEQ ID NO: 382771 - RNA, 19 nt, Human
gaggauguguguggaucuu

SEQ ID NO: 382772 - RNA, 23 nt, Human
gaggguacagggucugugugagu

SEQ ID NO: 382773 - RNA, 19 nt, Human
gcagacaccccagccucca

SEQ ID NO: 382774 - RNA, 19 nt, Human
gcgccgagcucgcguacag

SEQ ID NO: 382775 - RNA, 26 nt, Human
gcgcugugggaugggggcguguuuug

SEQ ID NO: 382776 - RNA, 20 nt, Human
gcugggaaaggcaaagaggu

SEQ ID NO: 382777 - RNA, 19 nt, Human
ggcaacagacgcaaaggaa

SEQ ID NO: 382778 - RNA, 21 nt, Human
ggccaagaaccuucuccacag

SEQ ID NO: 382779 - RNA, 23 nt, Human
ggcgcaggugccugcgguuccgu

SEQ ID NO: 382780 - RNA, 24 nt, Human
ggcggcgagggggcugggcagggg

SEQ ID NO: 382781 - RNA, 18 nt, Human
gggacagaagggccuggg

SEQ ID NO: 382782 - RNA, 18 nt, Human
gggccacaggcuccagac

SEQ ID NO: 382783 - RNA, 20 nt, Human
ggggacagaacaagcagcgg

SEQ ID NO: 382784 - RNA, 20 nt, Human
ggggagggggcagugacagg

SEQ ID NO: 382785 - RNA, 21 nt, Human
ggggagggggcagugacaggc

SEQ ID NO: 382786 - RNA, 21 nt, Human
ggguaugagacgcugggaaag

SEQ ID NO: 382787 - RNA, 21 nt, Human
ggucguauaaguugggaggga

SEQ ID NO: 382788 - RNA, 21 nt, Human
gucacaaaucuuaaauaacgg

SEQ ID NO: 382789 - RNA, 22 nt, Human
guggaggaggacgcuggccuga

SEQ ID NO: 382790 - RNA, 18 nt, Human
gugggcgcgcugggccag

SEQ ID NO: 382791 - RNA, 19 nt, Human
guuauguacaaggucacaa

SEQ ID NO: 382792 - RNA, 20 nt, Human
uaaaaugaccaucuucucuu

SEQ ID NO: 382793 - RNA, 22 nt, Human
uaacagagaaagggaaaccaac

SEQ ID NO: 382794 - RNA, 23 nt, Human
uaagacgcccggcgcaggugccu

SEQ ID NO: 382795 - RNA, 20 nt, Human
uaauacacacauggccugca

SEQ ID NO: 382796 - RNA, 22 nt, Human
uacaaggucacaaaucuuaaau

SEQ ID NO: 382797 - RNA, 20 nt, Human
uaccggggguaugagacgcu

SEQ ID NO: 382798 - RNA, 23 nt, Human
uagcccucuguucaggggccucc

SEQ ID NO: 382799 - RNA, 23 nt, Human
uauauuucacgacaacagcagca

SEQ ID NO: 382800 - RNA, 21 nt, Human
uaucugaaacugaggauaauc

SEQ ID NO: 382801 - RNA, 22 nt, Human
ucaguguguccagcaguuucug

SEQ ID NO: 382802 - RNA, 22 nt, Human
uccacagccauagcccucuguu

SEQ ID NO: 382803 - RNA, 19 nt, Human
uccagaacccaucuguucu

SEQ ID NO: 382804 - RNA, 21 nt, Human
uccugauugucaccucccagg

SEQ ID NO: 382805 - RNA, 20 nt, Human
uccugcugugcaccaauugc

SEQ ID NO: 382806 - RNA, 19 nt, Human
ugaaauacuccaagaacac

SEQ ID NO: 382807 - RNA, 23 nt, Human
ugaguccaacgggccaagaaccu

SEQ ID NO: 382808 - RNA, 19 nt, Human
ugagucuugaggauggcga

SEQ ID NO: 382809 - RNA, 18 nt, Human
ugcacgucacccaggguu

SEQ ID NO: 382810 - RNA, 19 nt, Human
ugcauuugcugcuuuaguu

SEQ ID NO: 382811 - RNA, 18 nt, Human
ugccgagaggguacaggg

SEQ ID NO: 382812 - RNA, 19 nt, Human
ugccuggggacagaagggc

SEQ ID NO: 382813 - RNA, 22 nt, Human
ugccuggggacagaagggccug

SEQ ID NO: 382814 - RNA, 24 nt, Human
ugcuuauuucuucaucuguuuuau

SEQ ID NO: 382815 - RNA, 18 nt, Human
uggaggaggacgcuggcc

SEQ ID NO: 382816 - RNA, 21 nt, Human
uggcgccgagcucgcguacag

SEQ ID NO: 382817 - RNA, 20 nt, Human
ugggaagcugcggagcgcug

SEQ ID NO: 382818 - RNA, 25 nt, Human
uggggacagaagggccugggccaca

SEQ ID NO: 382819 - RNA, 21 nt, Human
uggugggaagcugcggagcgc

SEQ ID NO: 382820 - RNA, 19 nt, Human
ugugcaccaauugcacaug

SEQ ID NO: 382821 - RNA, 27 nt, Human
uguucaggggccuccagaacccaucug

SEQ ID NO: 382822 - RNA, 20 nt, Human
uuaaaaaacacaaugcauua

SEQ ID NO: 382823 - RNA, 22 nt, Human
uuaaaaacacccaaauuucuac

SEQ ID NO: 382824 - RNA, 22 nt, Human
uuauucaguuucuucagugugu

SEQ ID NO: 382825 - RNA, 21 nt, Human
uuccugacccuugaacgaagg

SEQ ID NO: 382826 - RNA, 20 nt, Human
uucucaacaaggacaggaac

SEQ ID NO: 382827 - RNA, 18 nt, Human
uugccgagaggguacagg

SEQ ID NO: 382828 - RNA, 22 nt, Human
uuuggaggggcgacuuauuuuu

SEQ ID NO: 382829 - RNA, 18 nt, Human
uuugguccgagggagggg

SEQ ID NO: 382830 - RNA, 24 nt, Human
aaagugcugggauuacagguuuga

SEQ ID NO: 382831 - RNA, 24 nt, Human
aagugauccacccgccuuggucuc

SEQ ID NO: 382832 - RNA, 18 nt, Human
aagugcugggauuacagg

SEQ ID NO: 382833 - RNA, 19 nt, Human
aagugcugggauuacaggu

SEQ ID NO: 382834 - RNA, 26 nt, Human
aagugcugggauuacagguuugagcc

SEQ ID NO: 382835 - RNA, 21 nt, Human
aauaaaauauucaaggaaaga

SEQ ID NO: 382836 - RNA, 18 nt, Human
aaucacggccacagucug

SEQ ID NO: 382837 - RNA, 24 nt, Human
acaaaacagggaggugaauaaagc

SEQ ID NO: 382838 - RNA, 29 nt, Human
acaagggggaaaagcacagaagcaccauu

SEQ ID NO: 382839 - RNA, 19 nt, Human
acagggaggugaauaaagc

SEQ ID NO: 382840 - RNA, 18 nt, Human
acaggguuucgccauguu

SEQ ID NO: 382841 - RNA, 19 nt, Human
acaggguuucgccauguug

SEQ ID NO: 382842 - RNA, 24 nt, Human
acaggguuucgccauguugcccag

SEQ ID NO: 382843 - RNA, 25 nt, Human
acccgccuuggucucccaaagugcu

SEQ ID NO: 382844 - RNA, 18 nt, Human
agacaagaacagagcaga

SEQ ID NO: 382845 - RNA, 25 nt, Human
agacaagaacagagcagaggggacc

SEQ ID NO: 382846 - RNA, 18 nt, Human
agacaggguuucgccaug

SEQ ID NO: 382847 - RNA, 18 nt, Human
agacaggguuucgccaug

SEQ ID NO: 382848 - RNA, 23 nt, Human
agacaggguuucgccauguugcc

SEQ ID NO: 382849 - RNA, 22 nt, Human
agagacaagaacagagcagaga

SEQ ID NO: 382850 - RNA, 24 nt, Human
agcgauucuccugucucagccucc

SEQ ID NO: 382851 - RNA, 24 nt, Human
agggaggugaauaaagcaaguaug

SEQ ID NO: 382852 - RNA, 22 nt, Human
aggucuacuucagccagauaac

SEQ ID NO: 382853 - RNA, 23 nt, Human
agguuugagccaucgugccuggc

SEQ ID NO: 382854 - RNA, 21 nt, Human
agucacccauaacuucauuug

SEQ ID NO: 382855 - RNA, 21 nt, Human
auaauugagaaaggcuaacuc

SEQ ID NO: 382856 - RNA, 24 nt, Human
augcugagcuaaaaauuccacacu

SEQ ID NO: 382857 - RNA, 24 nt, Human
auuuuuguauuuuuaguagagaca

SEQ ID NO: 382858 - RNA, 24 nt, Human
caaagugcugggauuacagguuug

SEQ ID NO: 382859 - RNA, 22 nt, Human
caagcgauucuccugucucagc

SEQ ID NO: 382860 - RNA, 24 nt, Human
caccacacccggcuaauuuuugua

SEQ ID NO: 382861 - RNA, 23 nt, Human
cacccgccuuggucucccaaagu

SEQ ID NO: 382862 - RNA, 24 nt, Human
cacccgccuuggucucccaaagug

SEQ ID NO: 382863 - RNA, 21 nt, Human
cacugcaaccucugccucccg

SEQ ID NO: 382864 - RNA, 23 nt, Human
cacugcaaccucugccucccggg

SEQ ID NO: 382865 - RNA, 23 nt, Human
cagagacaagaacagagcagaga

SEQ ID NO: 382866 - RNA, 19 nt, Human
cagccuccugagaagcuga

SEQ ID NO: 382867 - RNA, 24 nt, Human
caggguuucgccauguugcccagg

SEQ ID NO: 382868 - RNA, 19 nt, Human
caguucuagugaaauauaa

SEQ ID NO: 382869 - RNA, 20 nt, Human
cauguugcccaggcuggucu

SEQ ID NO: 382870 - RNA, 23 nt, Human
cauguugcccaggcuggucuuga

SEQ ID NO: 382871 - RNA, 24 nt, Human
cauguugcccaggcuggucuugaa

SEQ ID NO: 382872 - RNA, 24 nt, Human
cauuuuauucucucaaugcugagc

SEQ ID NO: 382873 - RNA, 21 nt, Human
ccaaagugcugggauuacagg

SEQ ID NO: 382874 - RNA, 22 nt, Human
ccaaagugcugggauuacaggu

SEQ ID NO: 382875 - RNA, 21 nt, Human
ccauguugcccaggcuggucu

SEQ ID NO: 382876 - RNA, 24 nt, Human
cccaaagugcugggauuacagguu

SEQ ID NO: 382877 - RNA, 20 nt, Human
cccggguucaagcgauucuc

SEQ ID NO: 382878 - RNA, 23 nt, Human
cccggguucaagcgauucuccug

SEQ ID NO: 382879 - RNA, 24 nt, Human
ccgccuuggucucccaaagugcug

SEQ ID NO: 382880 - RNA, 24 nt, Human
ccucccggguucaagcgauucucc

SEQ ID NO: 382881 - RNA, 22 nt, Human
ccugaccucaagugauccaccc

SEQ ID NO: 382882 - RNA, 23 nt, Human
ccugaccucaagugauccacccg

SEQ ID NO: 382883 - RNA, 24 nt, Human
ccugucucagccuccugagaagcu

SEQ ID NO: 382884 - RNA, 19 nt, Human
cgcaacacaaaacagggag

SEQ ID NO: 382885 - RNA, 24 nt, Human
cgccauguugcccaggcuggucuu

SEQ ID NO: 382886 - RNA, 27 nt, Human
cgccauguugcccaggcuggucuugaa

SEQ ID NO: 382887 - RNA, 19 nt, Human
cuaaccauuuuaccuaaau

SEQ ID NO: 382888 - RNA, 23 nt, Human
cuaauuuuuguauuuuuaguaga

SEQ ID NO: 382889 - RNA, 24 nt, Human
cucaagugauccacccgccuuggu

SEQ ID NO: 382890 - RNA, 24 nt, Human
cucacugcaaccucugccucccgg

SEQ ID NO: 382891 - RNA, 23 nt, Human
cugcaaccucugccucccggguu

SEQ ID NO: 382892 - RNA, 24 nt, Human
cugcaaccucugccucccggguuc

SEQ ID NO: 382893 - RNA, 19 nt, Human
gaaaagcacagaagcacca

SEQ ID NO: 382894 - RNA, 19 nt, Human
gaaucacggccacagucug

SEQ ID NO: 382895 - RNA, 23 nt, Human
gaccucaagugauccacccgccu

SEQ ID NO: 382896 - RNA, 20 nt, Human
gagagguggcaggacgggca

SEQ ID NO: 382897 - RNA, 18 nt, Human
gagguggcaggacgggca

SEQ ID NO: 382898 - RNA, 18 nt, Human
gauuacagguuugagcca

SEQ ID NO: 382899 - RNA, 21 nt, Human
gauuacagguuugagccaucg

SEQ ID NO: 382900 - RNA, 24 nt, Human
gauuacagguuugagccaucgugc

SEQ ID NO: 382901 - RNA, 23 nt, Human
gauuagccacaccaugaguuaua

SEQ ID NO: 382902 - RNA, 24 nt, Human
gcagagacaagaacagagcagaga

SEQ ID NO: 382903 - RNA, 19 nt, Human
gccgcgcaugaucucagcu

SEQ ID NO: 382904 - RNA, 22 nt, Human
gccuuggucucccaaagugcug

SEQ ID NO: 382905 - RNA, 24 nt, Human
gccuuggucucccaaagugcuggg

SEQ ID NO: 382906 - RNA, 24 nt, Human
gcgauucuccugucucagccuccu

SEQ ID NO: 382907 - RNA, 24 nt, Human
gcgcaugaucucagcucacugcaa

SEQ ID NO: 382908 - RNA, 21 nt, Human
gcugggauuacagguuugagc

SEQ ID NO: 382909 - RNA, 23 nt, Human
gcuggucuugaacuccugaccuc

SEQ ID NO: 382910 - RNA, 23 nt, Human
ggaaagacgcaacacaaaacagg

SEQ ID NO: 382911 - RNA, 22 nt, Human
ggaggugaauaaagcaaguaug

SEQ ID NO: 382912 - RNA, 24 nt, Human
ggcuggucuugaacuccugaccuc

SEQ ID NO: 382913 - RNA, 23 nt, Human
gggaaugaaggcagagacaagaa

SEQ ID NO: 382914 - RNA, 19 nt, Human
ggucuugaacuccugaccu

SEQ ID NO: 382915 - RNA, 24 nt, Human
gugauccacccgccuuggucuccc

SEQ ID NO: 382916 - RNA, 24 nt, Human
guuucgccauguugcccaggcugg

SEQ ID NO: 382917 - RNA, 23 nt, Human
uaaagcaaguauguuguaaaauc

SEQ ID NO: 382918 - RNA, 24 nt, Human
uaauuuuuguauuuuuaguagaga

SEQ ID NO: 382919 - RNA, 23 nt, Human
uacagagaagugccaccacaccc

SEQ ID NO: 382920 - RNA, 22 nt, Human
uagagacaggguuucgccaugu

SEQ ID NO: 382921 - RNA, 24 nt, Human
uaguagagacaggguuucgccaug

SEQ ID NO: 382922 - RNA, 20 nt, Human
uauucaaggaaagacgcaac

SEQ ID NO: 382923 - RNA, 22 nt, Human
uauucaaggaaagacgcaacag

SEQ ID NO: 382924 - RNA, 29 nt, Human
uauucuguccuuucagauaauuuacauuu

SEQ ID NO: 382925 - RNA, 20 nt, Human
ucacauaaaauuaggucuac

SEQ ID NO: 382926 - RNA, 24 nt, Human
ucacugcaaccucugccucccggg

SEQ ID NO: 382927 - RNA, 25 nt, Human
ucacugcaaccucugccucccgggu

SEQ ID NO: 382928 - RNA, 23 nt, Human
ucccaaagugcugggauuacagg

SEQ ID NO: 382929 - RNA, 21 nt, Human
ucccggguucaagcgauucuc

SEQ ID NO: 382930 - RNA, 24 nt, Human
ucccggguucaagcgauucuccug

SEQ ID NO: 382931 - RNA, 21 nt, Human
ucgccauguugcccaggcugg

SEQ ID NO: 382932 - RNA, 22 nt, Human
ucgccauguugcccaggcuggu

SEQ ID NO: 382933 - RNA, 24 nt, Human
ucuccugucucagccuccugagaa

SEQ ID NO: 382934 - RNA, 21 nt, Human
ucuugaacuccugaccucaag

SEQ ID NO: 382935 - RNA, 20 nt, Human
ugaagcaguggguauuagug

SEQ ID NO: 382936 - RNA, 24 nt, Human
ugaccucaagugauccacccgccu

SEQ ID NO: 382937 - RNA, 24 nt, Human
ugagaaaggcuaacucugggccaa

SEQ ID NO: 382938 - RNA, 24 nt, Human
ugagauuacagagaagugccacca

SEQ ID NO: 382939 - RNA, 21 nt, Human
ugagcuaaaaauuccacacau

SEQ ID NO: 382940 - RNA, 24 nt, Human
ugcccaggcuggucuugaacuccu

SEQ ID NO: 382941 - RNA, 21 nt, Human
uggaaaaagaauucuguucau

SEQ ID NO: 382942 - RNA, 20 nt, Human
uggcaggacgggcagcaggc

SEQ ID NO: 382943 - RNA, 18 nt, Human
ugggauuacagguuugag

SEQ ID NO: 382944 - RNA, 19 nt, Human
ugggauuacagguuugagc

SEQ ID NO: 382945 - RNA, 21 nt, Human
ugggauuacagguuugagcca

SEQ ID NO: 382946 - RNA, 21 nt, Human
ugggauuacagguuugagcca

SEQ ID NO: 382947 - RNA, 21 nt, Human
ugggauuacagguuugagcca

SEQ ID NO: 382948 - RNA, 22 nt, Human
ugggauuacagguuugagccau

SEQ ID NO: 382949 - RNA, 24 nt, Human
ugggauuacagguuugagccaucg

SEQ ID NO: 382950 - RNA, 18 nt, Human
uguagaaaagcugaaagu

SEQ ID NO: 382951 - RNA, 24 nt, Human
uguagaaaagcugaaaguugacug

SEQ ID NO: 382952 - RNA, 24 nt, Human
ugucucagccuccugagaagcuga

SEQ ID NO: 382953 - RNA, 20 nt, Human
uguuguaaaauccucccuug

SEQ ID NO: 382954 - RNA, 24 nt, Human
uuaguagagacaggguuucgccau

SEQ ID NO: 382955 - RNA, 19 nt, Human
uuauauauaccuuucaucc

SEQ ID NO: 382956 - RNA, 23 nt, Human
uucaagcgauucuccugucucag

SEQ ID NO: 382957 - RNA, 23 nt, Human
uuucgccauguugcccaggcugg

SEQ ID NO: 382958 - RNA, 24 nt, Human
uuucgccauguugcccaggcuggu

SEQ ID NO: 382959 - RNA, 23 nt, Human
uuuuuaguagagacaggguuucg

SEQ ID NO: 382960 - RNA, 24 nt, Human
uuuuuaguagagacaggguuucgc

SEQ ID NO: 382961 - RNA, 20 nt, Human
uuuuuguauuuuuaguagag

SEQ ID NO: 382962 - RNA, 23 nt, Human
aaaaggaggggucucccuacagg

SEQ ID NO: 382963 - RNA, 23 nt, Human
aaaauaccacccgguuucuacaa

SEQ ID NO: 382964 - RNA, 25 nt, Human
aaaaugccccauccccacccaacca

SEQ ID NO: 382965 - RNA, 20 nt, Human
aaaccccagucccaagaccc

SEQ ID NO: 382966 - RNA, 20 nt, Human
aaaccucugggaggcaccaa

SEQ ID NO: 382967 - RNA, 21 nt, Human
aaagcuuagcucagaaaaugc

SEQ ID NO: 382968 - RNA, 24 nt, Human
aacucaauccgaaaccccaguccc

SEQ ID NO: 382969 - RNA, 23 nt, Human
aacuccugcucccuggagaaccc

SEQ ID NO: 382970 - RNA, 20 nt, Human
aagaaaaccaaacaugauca

SEQ ID NO: 382971 - RNA, 25 nt, Human
aagaaaggguacauucaccaagcau

SEQ ID NO: 382972 - RNA, 20 nt, Human
aagaagaaaaccaaacauga

SEQ ID NO: 382973 - RNA, 21 nt, Human
aagaagaaaaccaaacaugau

SEQ ID NO: 382974 - RNA, 23 nt, Human
aagcaccuucucugguggcagcc

SEQ ID NO: 382975 - RNA, 20 nt, Human
acaggcagggcugcuguggu

SEQ ID NO: 382976 - RNA, 24 nt, Human
accagccagcagcccaagaaaccu

SEQ ID NO: 382977 - RNA, 19 nt, Human
acccaggcaccucaccugg

SEQ ID NO: 382978 - RNA, 23 nt, Human
acccauucacuuggaaaacagua

SEQ ID NO: 382979 - RNA, 18 nt, Human
accccucccuggccccag

SEQ ID NO: 382980 - RNA, 19 nt, Human
acccugcucccccagaaca

SEQ ID NO: 382981 - RNA, 24 nt, Human
acucggugggugagacuccccgag

SEQ ID NO: 382982 - RNA, 22 nt, Human
acucuccccuuggcuucuccag

SEQ ID NO: 382983 - RNA, 18 nt, Human
agaaaaccaaacaugauc

SEQ ID NO: 382984 - RNA, 18 nt, Human
agaaaaugccccaucccc

SEQ ID NO: 382985 - RNA, 20 nt, Human
agaggaagagggggcaagaa

SEQ ID NO: 382986 - RNA, 23 nt, Human
agauaggcuggcuucuggaaggc

SEQ ID NO: 382987 - RNA, 20 nt, Human
agccagaaagggaagaccag

SEQ ID NO: 382988 - RNA, 24 nt, Human
agccagcagagccacaggagccug

SEQ ID NO: 382989 - RNA, 22 nt, Human
agccagcagcccaagaaaccuc

SEQ ID NO: 382990 - RNA, 19 nt, Human
agcccagggagagauacag

SEQ ID NO: 382991 - RNA, 24 nt, Human
agcccucaggcaggucccgagcaa

SEQ ID NO: 382992 - RNA, 22 nt, Human
aggaaauucucuacuggucagc

SEQ ID NO: 382993 - RNA, 22 nt, Human
aggaagaggcaccagcuccagu

SEQ ID NO: 382994 - RNA, 20 nt, Human
aggagagggauuaggagugg

SEQ ID NO: 382995 - RNA, 20 nt, Human
aggcagauuuagggagggag

SEQ ID NO: 382996 - RNA, 18 nt, Human
aggcaggaaaggggcuug

SEQ ID NO: 382997 - RNA, 23 nt, Human
aggcuggcuucuggaaggcaaac

SEQ ID NO: 382998 - RNA, 19 nt, Human
agggacccaggcaccucac

SEQ ID NO: 382999 - RNA, 19 nt, Human
agggagcccucaggcaggu

SEQ ID NO: 383000 - RNA, 18 nt, Human
agggcugcuguggugggg

SEQ ID NO: 383001 - RNA, 19 nt, Human
aguagcaccccucccuggc

SEQ ID NO: 383002 - RNA, 22 nt, Human
aguguuagcaaaaccaaaguga

SEQ ID NO: 383003 - RNA, 18 nt, Human
caaaaccaaagugaaaga

SEQ ID NO: 383004 - RNA, 18 nt, Human
caaagacccuccaggucu

SEQ ID NO: 383005 - RNA, 21 nt, Human
caagcauccugugccagaagc

SEQ ID NO: 383006 - RNA, 21 nt, Human
cacccaaaaauucuuacaaaa

SEQ ID NO: 383007 - RNA, 23 nt, Human
cacccaaaaauucuuacaaaagu

SEQ ID NO: 383008 - RNA, 25 nt, Human
caccuggcauggauguccuagaagc

SEQ ID NO: 383009 - RNA, 18 nt, Human
cacuggggagcagcuggg

SEQ ID NO: 383010 - RNA, 19 nt, Human
cagaaaaugccccaucccc

SEQ ID NO: 383011 - RNA, 21 nt, Human
cagaaaaugccccauccccac

SEQ ID NO: 383012 - RNA, 18 nt, Human
cagaacagggccaccaug

SEQ ID NO: 383013 - RNA, 19 nt, Human
cagagccagugagauggag

SEQ ID NO: 383014 - RNA, 20 nt, Human
cagagcugcagggagggaaa

SEQ ID NO: 383015 - RNA, 20 nt, Human
cagagcuggagacccaggcc

SEQ ID NO: 383016 - RNA, 22 nt, Human
cagauggaaguacggcgaacug

SEQ ID NO: 383017 - RNA, 21 nt, Human
cagcuggugcccucauacccc

SEQ ID NO: 383018 - RNA, 23 nt, Human
caggcgaacaccaagcaccuucu

SEQ ID NO: 383019 - RNA, 25 nt, Human
cagggagaggcuggucaugguggca

SEQ ID NO: 383020 - RNA, 19 nt, Human
caggucccgagcaagagag

SEQ ID NO: 383021 - RNA, 18 nt, Human
caguccuccugcagccca

SEQ ID NO: 383022 - RNA, 22 nt, Human
caguguuagcaaaaccaaagug

SEQ ID NO: 383023 - RNA, 20 nt, Human
cauccccacccaaccaacga

SEQ ID NO: 383024 - RNA, 23 nt, Human
cauccugugccagaagcugugcu

SEQ ID NO: 383025 - RNA, 18 nt, Human
ccaagcauccugugccag

SEQ ID NO: 383026 - RNA, 22 nt, Human
ccaaguagcuugcagaagaggc

SEQ ID NO: 383027 - RNA, 22 nt, Human
ccagcuggugcccucauacccc

SEQ ID NO: 383028 - RNA, 21 nt, Human
ccaggucaggcgugggagaua

SEQ ID NO: 383029 - RNA, 20 nt, Human
ccaggugcuucacaaacuaa

SEQ ID NO: 383030 - RNA, 23 nt, Human
cccaagaaaccucugggaggcac

SEQ ID NO: 383031 - RNA, 19 nt, Human
cccagaacagggccaccau

SEQ ID NO: 383032 - RNA, 20 nt, Human
ccccacacaggccugagacc

SEQ ID NO: 383033 - RNA, 22 nt, Human
ccccacacaggccugagaccuc

SEQ ID NO: 383034 - RNA, 21 nt, Human
cccccagaacagggccaccau

SEQ ID NO: 383035 - RNA, 22 nt, Human
ccccccucagaauugcagcuga

SEQ ID NO: 383036 - RNA, 19 nt, Human
ccccgggcuccaucaggcc

SEQ ID NO: 383037 - RNA, 20 nt, Human
ccccgggcuccaucaggccc

SEQ ID NO: 383038 - RNA, 18 nt, Human
ccccugagcuggagguga

SEQ ID NO: 383039 - RNA, 23 nt, Human
ccccugagcuggaggugaggugg

SEQ ID NO: 383040 - RNA, 26 nt, Human
ccccuuaccuccuccacccacuacaa

SEQ ID NO: 383041 - RNA, 20 nt, Human
cccgaguggcuugcaucuug

SEQ ID NO: 383042 - RNA, 19 nt, Human
cccucagagccagugagau

SEQ ID NO: 383043 - RNA, 26 nt, Human
ccgaccuucagguuuucucccugacg

SEQ ID NO: 383044 - RNA, 21 nt, Human
ccgaguggcuugcaucuuggc

SEQ ID NO: 383045 - RNA, 23 nt, Human
ccuagaguuggggguaagaaggc

SEQ ID NO: 383046 - RNA, 20 nt, Human
ccuaguggcuccauggaggu

SEQ ID NO: 383047 - RNA, 22 nt, Human
ccuccugcagcccacacugagc

SEQ ID NO: 383048 - RNA, 18 nt, Human
ccuccugccuuacccugc

SEQ ID NO: 383049 - RNA, 21 nt, Human
ccucgcacaagccucccaaac

SEQ ID NO: 383050 - RNA, 22 nt, Human
ccucgcacaagccucccaaacc

SEQ ID NO: 383051 - RNA, 26 nt, Human
ccucgcacaagccucccaaacccccc

SEQ ID NO: 383052 - RNA, 22 nt, Human
ccugagaccucgcacaagccuc

SEQ ID NO: 383053 - RNA, 27 nt, Human
ccugagaccucgcacaagccucccaaa

SEQ ID NO: 383054 - RNA, 20 nt, Human
ccugcugggcugugcggcag

SEQ ID NO: 383055 - RNA, 20 nt, Human
cgaaaccccagucccaagac

SEQ ID NO: 383056 - RNA, 24 nt, Human
cgcacaagccucccaaaccccccu

SEQ ID NO: 383057 - RNA, 18 nt, Human
cgccucccuccugcuggg

SEQ ID NO: 383058 - RNA, 19 nt, Human
cgcucugcaucuggcuguc

SEQ ID NO: 383059 - RNA, 22 nt, Human
cuacaaaauaaaauaaggaaga

SEQ ID NO: 383060 - RNA, 24 nt, Human
cucccaaaccccccucagaauugc

SEQ ID NO: 383061 - RNA, 27 nt, Human
cucccaaaccccccucagaauugcagc

SEQ ID NO: 383062 - RNA, 18 nt, Human
cuccugacauauugcagg

SEQ ID NO: 383063 - RNA, 24 nt, Human
cucgcacaagccucccaaaccccc

SEQ ID NO: 383064 - RNA, 18 nt, Human
cucucccaaauacuccag

SEQ ID NO: 383065 - RNA, 21 nt, Human
cucucccaaauacuccaggcu

SEQ ID NO: 383066 - RNA, 20 nt, Human
cucugugcagccggcuccuc

SEQ ID NO: 383067 - RNA, 27 nt, Human
cucugugcagccggcuccuccagggcu

SEQ ID NO: 383068 - RNA, 23 nt, Human
cugcagcccacacugagccagca

SEQ ID NO: 383069 - RNA, 22 nt, Human
cugcagccccaggaaccgaguc

SEQ ID NO: 383070 - RNA, 20 nt, Human
cuggaggugagguggagggc

SEQ ID NO: 383071 - RNA, 22 nt, Human
cuggccccugcaggaucuuggg

SEQ ID NO: 383072 - RNA, 23 nt, Human
cugggggcagcucuuuggcugga

SEQ ID NO: 383073 - RNA, 20 nt, Human
cugguggcagcccagggaga

SEQ ID NO: 383074 - RNA, 25 nt, Human
cugucuccaccuaggggcacagcca

SEQ ID NO: 383075 - RNA, 18 nt, Human
cugugcaggcugcaggca

SEQ ID NO: 383076 - RNA, 20 nt, Human
gaagaccagacacaaaaaua

SEQ ID NO: 383077 - RNA, 20 nt, Human
gaccaggugcuucacaaacu

SEQ ID NO: 383078 - RNA, 23 nt, Human
gacccaggcaccucaccuggcau

SEQ ID NO: 383079 - RNA, 22 nt, Human
gaccucgcacaagccucccaaa

SEQ ID NO: 383080 - RNA, 20 nt, Human
gaccuucagguuuucucccu

SEQ ID NO: 383081 - RNA, 20 nt, Human
gagacuccccgaggcgaugg

SEQ ID NO: 383082 - RNA, 18 nt, Human
gagccuggccccugcagg

SEQ ID NO: 383083 - RNA, 18 nt, Human
gagcugcagggagggaaa

SEQ ID NO: 383084 - RNA, 22 nt, Human
gaggugagguggagggccugug

SEQ ID NO: 383085 - RNA, 20 nt, Human
gaguagcaaaggcuuccaga

SEQ ID NO: 383086 - RNA, 21 nt, Human
gagucgccacugacauuaaaa

SEQ ID NO: 383087 - RNA, 18 nt, Human
gcacccagcagauggaag

SEQ ID NO: 383088 - RNA, 24 nt, Human
gcagccccaggaaccgagucgcca

SEQ ID NO: 383089 - RNA, 21 nt, Human
gcagcccuacagccugaaggc

SEQ ID NO: 383090 - RNA, 18 nt, Human
gcagccggcuccuccagg

SEQ ID NO: 383091 - RNA, 22 nt, Human
gcaggcacugggggaacuggag

SEQ ID NO: 383092 - RNA, 20 nt, Human
gcaguacugggggugagggg

SEQ ID NO: 383093 - RNA, 24 nt, Human
gccaggaugccagaaaggagaggg

SEQ ID NO: 383094 - RNA, 19 nt, Human
gcuggacaggguccaaggu

SEQ ID NO: 383095 - RNA, 22 nt, Human
gcuggcugcagccccaggaacc

SEQ ID NO: 383096 - RNA, 22 nt, Human
ggacaggacugguuacagagcu

SEQ ID NO: 383097 - RNA, 24 nt, Human
ggaggccccuuaccuccuccaccc

SEQ ID NO: 383098 - RNA, 26 nt, Human
ggagugucucuacucucccccugccc

SEQ ID NO: 383099 - RNA, 23 nt, Human
ggcacagccaggguccagaguca

SEQ ID NO: 383100 - RNA, 19 nt, Human
ggcaguagaggcacagcug

SEQ ID NO: 383101 - RNA, 20 nt, Human
ggcaucccugcuggugccug

SEQ ID NO: 383102 - RNA, 23 nt, Human
gggcacuccuguggcaucccugc

SEQ ID NO: 383103 - RNA, 19 nt, Human
gggcaggcacugggggaac

SEQ ID NO: 383104 - RNA, 21 nt, Human
gggcaguagaggcacagcugc

SEQ ID NO: 383105 - RNA, 20 nt, Human
ggggaacuggagagggcaaa

SEQ ID NO: 383106 - RNA, 21 nt, Human
gggggaacuggagagggcaaa

SEQ ID NO: 383107 - RNA, 24 nt, Human
ggggguaggugagaaagagggcug

SEQ ID NO: 383108 - RNA, 20 nt, Human
ggggugcguagggcaggcac

SEQ ID NO: 383109 - RNA, 21 nt, Human
ggucagcuuggcuugaucuuc

SEQ ID NO: 383110 - RNA, 21 nt, Human
ggucaggggcucccucagagc

SEQ ID NO: 383111 - RNA, 23 nt, Human
ggugagaaagagggcugucucca

SEQ ID NO: 383112 - RNA, 24 nt, Human
ggugggggaaggccaguagggcuc

SEQ ID NO: 383113 - RNA, 20 nt, Human
gucagaaacaagagcuucac

SEQ ID NO: 383114 - RNA, 18 nt, Human
guccagagucaaaccuca

SEQ ID NO: 383115 - RNA, 20 nt, Human
gugauacccuguccugcccu

SEQ ID NO: 383116 - RNA, 24 nt, Human
uaaaauaccacccgguuucuacaa

SEQ ID NO: 383117 - RNA, 27 nt, Human
uaaaauaccacccgguuucuacaaaau

SEQ ID NO: 383118 - RNA, 20 nt, Human
uaacccgagaggaacuccaa

SEQ ID NO: 383119 - RNA, 24 nt, Human
uaaggcagcccuacagccugaagg

SEQ ID NO: 383120 - RNA, 22 nt, Human
uaagugagucacccaaaaauuc

SEQ ID NO: 383121 - RNA, 18 nt, Human
uacccugcucccccagaa

SEQ ID NO: 383122 - RNA, 19 nt, Human
uacccugcucccccagaac

SEQ ID NO: 383123 - RNA, 19 nt, Human
uacugggggugaggggcug

SEQ ID NO: 383124 - RNA, 18 nt, Human
uagaagaugaggcugggg

SEQ ID NO: 383125 - RNA, 23 nt, Human
uagaguuggggguaagaaggcag

SEQ ID NO: 383126 - RNA, 19 nt, Human
uagcuugcagaagaggcag

SEQ ID NO: 383127 - RNA, 23 nt, Human
uaggcuggcuucuggaaggcaaa

SEQ ID NO: 383128 - RNA, 19 nt, Human
ucaaagcugcacaagggag

SEQ ID NO: 383129 - RNA, 21 nt, Human
ucacuggggagcagcugggcu

SEQ ID NO: 383130 - RNA, 23 nt, Human
ucacuggggagcagcugggcucc

SEQ ID NO: 383131 - RNA, 18 nt, Human
ucagggagaggcugguca

SEQ ID NO: 383132 - RNA, 20 nt, Human
ucaugacuuugcuuugaaga

SEQ ID NO: 383133 - RNA, 22 nt, Human
uccacaaagacccuccaggucu

SEQ ID NO: 383134 - RNA, 21 nt, Human
ucccaggcuggcugcagcccc

SEQ ID NO: 383135 - RNA, 27 nt, Human
ucccaggcuggcugcagccccaggaac

SEQ ID NO: 383136 - RNA, 19 nt, Human
ucccccugccccgggcucc

SEQ ID NO: 383137 - RNA, 21 nt, Human
ucccccugccccgggcuccau

SEQ ID NO: 383138 - RNA, 22 nt, Human
uccccuuggcuucuccaguccc

SEQ ID NO: 383139 - RNA, 19 nt, Human
ucccugcuggccccugcag

SEQ ID NO: 383140 - RNA, 19 nt, Human
ucccugcuggugccugugu

SEQ ID NO: 383141 - RNA, 19 nt, Human
ucccuggagaacccagcug

SEQ ID NO: 383142 - RNA, 23 nt, Human
ucccuggagaacccagcuggugc

SEQ ID NO: 383143 - RNA, 20 nt, Human
uccgccucccuccugcuggg

SEQ ID NO: 383144 - RNA, 21 nt, Human
uccugccuuacccugcucccc

SEQ ID NO: 383145 - RNA, 19 nt, Human
ucucggagcucacccacuu

SEQ ID NO: 383146 - RNA, 22 nt, Human
ucugcaguacugggggugaggg

SEQ ID NO: 383147 - RNA, 21 nt, Human
ucuggcuguccgccucccucc

SEQ ID NO: 383148 - RNA, 18 nt, Human
ucugguggcagcccaggg

SEQ ID NO: 383149 - RNA, 21 nt, Human
ugaaccucacccucucccagg

SEQ ID NO: 383150 - RNA, 19 nt, Human
ugacuuugcuuugaagagg

SEQ ID NO: 383151 - RNA, 23 nt, Human
ugagauggagccuggccccugca

SEQ ID NO: 383152 - RNA, 26 nt, Human
ugagucacccaaaaauucuuacaaaa

SEQ ID NO: 383153 - RNA, 18 nt, Human
ugcaaagauguuuaaugc

SEQ ID NO: 383154 - RNA, 24 nt, Human
ugcagaagaggcagauuuagggag

SEQ ID NO: 383155 - RNA, 21 nt, Human
ugcagcagaggcagaugggag

SEQ ID NO: 383156 - RNA, 20 nt, Human
ugccagaagcugugcuggac

SEQ ID NO: 383157 - RNA, 20 nt, Human
ugccuuacccugcuccccca

SEQ ID NO: 383158 - RNA, 18 nt, Human
ugcugggcugugcggcag

SEQ ID NO: 383159 - RNA, 22 nt, Human
uggaaaacaguagcaccccucc

SEQ ID NO: 383160 - RNA, 19 nt, Human
uggagagggcaaacgacgg

SEQ ID NO: 383161 - RNA, 24 nt, Human
uggauguccuagaagccagaaagg

SEQ ID NO: 383162 - RNA, 24 nt, Human
uggcacugcgcagucuuccucaca

SEQ ID NO: 383163 - RNA, 21 nt, Human
uggcagcccagggagagauac

SEQ ID NO: 383164 - RNA, 26 nt, Human
uggcaggcgaacaccaagcaccuucu

SEQ ID NO: 383165 - RNA, 22 nt, Human
uggcauggauguccuagaagcc

SEQ ID NO: 383166 - RNA, 18 nt, Human
uggccugaugggucacaa

SEQ ID NO: 383167 - RNA, 19 nt, Human
uggccugaugggucacaag

SEQ ID NO: 383168 - RNA, 20 nt, Human
uggccugaugggucacaagg

SEQ ID NO: 383169 - RNA, 26 nt, Human
uggcuggaucucucaucaguggaguc

SEQ ID NO: 383170 - RNA, 24 nt, Human
ugggaggcaccaaugcccauagga

SEQ ID NO: 383171 - RNA, 21 nt, Human
ugggggcagcucuuuggcugg

SEQ ID NO: 383172 - RNA, 22 nt, Human
ugggggcugcagcgaggucuag

SEQ ID NO: 383173 - RNA, 20 nt, Human
uguacaaaaggaggggucuc

SEQ ID NO: 383174 - RNA, 19 nt, Human
ugucagaaacaagagcuuc

SEQ ID NO: 383175 - RNA, 21 nt, Human
uguggcaucccugcuggugcc

SEQ ID NO: 383176 - RNA, 18 nt, Human
uugcagaagaggcagauu

SEQ ID NO: 383177 - RNA, 19 nt, Human
uugcugguuccaggucagg

SEQ ID NO: 383178 - RNA, 20 nt, Human
acaugagccacugugccuga

SEQ ID NO: 383179 - RNA, 24 nt, Human
caaaucgcugggauugcagacaug

SEQ ID NO: 383180 - RNA, 20 nt, Human
cagcucaaccucccaaaucg

SEQ ID NO: 383181 - RNA, 24 nt, Human
cagcucaaccucccaaaucgcugg

SEQ ID NO: 383182 - RNA, 23 nt, Human
ccagcucaaccucccaaaucgcu

SEQ ID NO: 383183 - RNA, 22 nt, Human
ccuaccagcucaaccucccaaa

SEQ ID NO: 383184 - RNA, 18 nt, Human
gauugcagacaugagcca

SEQ ID NO: 383185 - RNA, 19 nt, Human
gauugcagacaugagccac

SEQ ID NO: 383186 - RNA, 21 nt, Human
gauugcagacaugagccacug

SEQ ID NO: 383187 - RNA, 18 nt, Human
gcacacucccucugcagu

SEQ ID NO: 383188 - RNA, 23 nt, Human
ugcagugacuccaggagccccuc

SEQ ID NO: 383189 - RNA, 18 nt, Human
ugggauugcagacaugag

SEQ ID NO: 383190 - RNA, 21 nt, Human
ugggauugcagacaugagcca

SEQ ID NO: 383191 - RNA, 22 nt, Human
ugggauugcagacaugagccac

SEQ ID NO: 383192 - RNA, 23 nt, Human
ugggauugcagacaugagccacu

SEQ ID NO: 383193 - RNA, 24 nt, Human
ugggauugcagacaugagccacug

SEQ ID NO: 383194 - RNA, 22 nt, Human
aacucacuguauccacaaccuc

SEQ ID NO: 383195 - RNA, 19 nt, Human
aaguagcugggacuacagg

SEQ ID NO: 383196 - RNA, 20 nt, Human
aaguagcugggacuacaggu

SEQ ID NO: 383197 - RNA, 26 nt, Human
aaguagcugggacuacagguaagugc

SEQ ID NO: 383198 - RNA, 20 nt, Human
acaugagccacugugccuga

SEQ ID NO: 383199 - RNA, 21 nt, Human
agccucugcuucccaaguagc

SEQ ID NO: 383200 - RNA, 23 nt, Human
agccucugcuucccaaguagcug

SEQ ID NO: 383201 - RNA, 24 nt, Human
caaaucgcugggauugcagacaug

SEQ ID NO: 383202 - RNA, 22 nt, Human
caaccuccugggcugaaaugau

SEQ ID NO: 383203 - RNA, 24 nt, Human
cacagccagaucaggucuccccaa

SEQ ID NO: 383204 - RNA, 22 nt, Human
cagccagaucaggucuccccaa

SEQ ID NO: 383205 - RNA, 20 nt, Human
cagcucaaccucccaaaucg

SEQ ID NO: 383206 - RNA, 21 nt, Human
ccacaaccuccugggcugaaa

SEQ ID NO: 383207 - RNA, 23 nt, Human
ccagcucaaccucccaaaucgcu

SEQ ID NO: 383208 - RNA, 22 nt, Human
cccaaguagcugggacuacagg

SEQ ID NO: 383209 - RNA, 23 nt, Human
cccaaguagcugggacuacaggu

SEQ ID NO: 383210 - RNA, 20 nt, Human
cccgggcaccgccuccccgu

SEQ ID NO: 383211 - RNA, 22 nt, Human
ccuaccagcucaaccucccaaa

SEQ ID NO: 383212 - RNA, 18 nt, Human
ccuccagccucugcuucc

SEQ ID NO: 383213 - RNA, 24 nt, Human
cucacuguauccacaaccuccugg

SEQ ID NO: 383214 - RNA, 24 nt, Human
cugaaaugauccuccagccucugc

SEQ ID NO: 383215 - RNA, 19 nt, Human
cuggcacagccagaucagg

SEQ ID NO: 383216 - RNA, 18 nt, Human
gauugcagacaugagcca

SEQ ID NO: 383217 - RNA, 19 nt, Human
gauugcagacaugagccac

SEQ ID NO: 383218 - RNA, 21 nt, Human
gauugcagacaugagccacug

SEQ ID NO: 383219 - RNA, 18 nt, Human
gcacacucccucugcagu

SEQ ID NO: 383220 - RNA, 22 nt, Human
gcucaaccucccaaaucgcugg

SEQ ID NO: 383221 - RNA, 18 nt, Human
uauuuucuuuggagggag

SEQ ID NO: 383222 - RNA, 24 nt, Human
ucacuauuuuaccaggcuggucuc

SEQ ID NO: 383223 - RNA, 24 nt, Human
ucacuguauccacaaccuccuggg

SEQ ID NO: 383224 - RNA, 24 nt, Human
ucccaaguagcugggacuacaggu

SEQ ID NO: 383225 - RNA, 21 nt, Human
ucuugcuugucauccaggcug

SEQ ID NO: 383226 - RNA, 23 nt, Human
ugaggucucacuauuuuaccagg

SEQ ID NO: 383227 - RNA, 23 nt, Human
ugcagugacuccaggagccccuc

SEQ ID NO: 383228 - RNA, 19 nt, Human
ugggacuacagguaagugc

SEQ ID NO: 383229 - RNA, 21 nt, Human
ugggacuacagguaagugcca

SEQ ID NO: 383230 - RNA, 18 nt, Human
ugggauugcagacaugag

SEQ ID NO: 383231 - RNA, 21 nt, Human
ugggauugcagacaugagcca

SEQ ID NO: 383232 - RNA, 22 nt, Human
ugggauugcagacaugagccac

SEQ ID NO: 383233 - RNA, 23 nt, Human
ugggauugcagacaugagccacu

SEQ ID NO: 383234 - RNA, 24 nt, Human
ugggauugcagacaugagccacug

SEQ ID NO: 383235 - RNA, 24 nt, Human
ugugauccuaccagcucaaccucc

SEQ ID NO: 383236 - RNA, 26 nt, Human
uuguagagaugaggucucacuauuuu

SEQ ID NO: 383237 - RNA, 18 nt, Human
uuucucaguguccaucug

SEQ ID NO: 383238 - RNA, 22 nt, Human
aaaaaauacccuacgaaaucca

SEQ ID NO: 383239 - RNA, 22 nt, Human
aagaauaguugggaaaaugggc

SEQ ID NO: 383240 - RNA, 21 nt, Human
aagcaagggaaaagaacaccu

SEQ ID NO: 383241 - RNA, 21 nt, Human
aagcagucaguuaagaccagc

SEQ ID NO: 383242 - RNA, 20 nt, Human
aagcauucagaauuuuaguu

SEQ ID NO: 383243 - RNA, 18 nt, Human
aagcauuuuaacacugac

SEQ ID NO: 383244 - RNA, 20 nt, Human
aagcuaccuuauaucuuacu

SEQ ID NO: 383245 - RNA, 24 nt, Human
acauagcaagacccuauuuuaaaa

SEQ ID NO: 383246 - RNA, 24 nt, Human
acauuguuuggaauugccagugca

SEQ ID NO: 383247 - RNA, 22 nt, Human
acugcauuagguacuaggagua

SEQ ID NO: 383248 - RNA, 25 nt, Human
agacagaacuccaggauugagccca

SEQ ID NO: 383249 - RNA, 23 nt, Human
agccauccugucuccuccuuucu

SEQ ID NO: 383250 - RNA, 24 nt, Human
agccugggcaacauagcaagaccc

SEQ ID NO: 383251 - RNA, 24 nt, Human
aggccauguuuccucagggcuggc

SEQ ID NO: 383252 - RNA, 20 nt, Human
aguugccugaauggccagga

SEQ ID NO: 383253 - RNA, 26 nt, Human
auccugucuccuccuuucugcuuuca

SEQ ID NO: 383254 - RNA, 20 nt, Human
augggaagcaagggaaaaga

SEQ ID NO: 383255 - RNA, 18 nt, Human
caagggcacuugcugugu

SEQ ID NO: 383256 - RNA, 23 nt, Human
caaguuccagcugaaagucagca

SEQ ID NO: 383257 - RNA, 20 nt, Human
cagcagcucaaaggcccacu

SEQ ID NO: 383258 - RNA, 20 nt, Human
cagcucaaaggcccacucaa

SEQ ID NO: 383259 - RNA, 24 nt, Human
caggauugagcccaggcuggaguu

SEQ ID NO: 383260 - RNA, 19 nt, Human
caggcacugcauuagguac

SEQ ID NO: 383261 - RNA, 24 nt, Human
caguuaagaccagccugggcaaca

SEQ ID NO: 383262 - RNA, 26 nt, Human
cauagcaagacccuauuuuaaaaaaa

SEQ ID NO: 383263 - RNA, 19 nt, Human
caugcuuucuguuuccuau

SEQ ID NO: 383264 - RNA, 21 nt, Human
ccaccagugaggcacucaggc

SEQ ID NO: 383265 - RNA, 22 nt, Human
ccagaauaauggggauuaaaac

SEQ ID NO: 383266 - RNA, 21 nt, Human
ccaggcacugcauuagguacu

SEQ ID NO: 383267 - RNA, 19 nt, Human
cccaauuaccuccaugccu

SEQ ID NO: 383268 - RNA, 19 nt, Human
cccucuacaaguucucaag

SEQ ID NO: 383269 - RNA, 22 nt, Human
ccugggcaacauagcaagaccc

SEQ ID NO: 383270 - RNA, 24 nt, Human
ccugucuccuccuuucugcuuucc

SEQ ID NO: 383271 - RNA, 21 nt, Human
cguuguugacagccauccugu

SEQ ID NO: 383272 - RNA, 23 nt, Human
cucauauacauauaguuaaaacu

SEQ ID NO: 383273 - RNA, 25 nt, Human
cugcaacugggacaaauaugggaag

SEQ ID NO: 383274 - RNA, 21 nt, Human
gaagaguaaauacauaagaag

SEQ ID NO: 383275 - RNA, 23 nt, Human
gacccaauuaccuccaugccugg

SEQ ID NO: 383276 - RNA, 18 nt, Human
gacuaaaagaaaaggguc

SEQ ID NO: 383277 - RNA, 20 nt, Human
gauccuuuuuaaaaaaugaa

SEQ ID NO: 383278 - RNA, 18 nt, Human
gccauguuuccucagggc

SEQ ID NO: 383279 - RNA, 20 nt, Human
gcugcagucauuuauccaug

SEQ ID NO: 383280 - RNA, 23 nt, Human
gguauagauaagaaauugaagag

SEQ ID NO: 383281 - RNA, 19 nt, Human
guauagauaagaaauugaa

SEQ ID NO: 383282 - RNA, 22 nt, Human
uaaaaaaaauacccuacgaaau

SEQ ID NO: 383283 - RNA, 20 nt, Human
uaaaaaaugaaguggugaca

SEQ ID NO: 383284 - RNA, 28 nt, Human
uaaaaagcagucaguuaagaccagccug

SEQ ID NO: 383285 - RNA, 18 nt, Human
uaaaaaggugcuuauuug

SEQ ID NO: 383286 - RNA, 19 nt, Human
uacccucagcuauggaaug

SEQ ID NO: 383287 - RNA, 24 nt, Human
uagaacuuaggccaauaagaguuu

SEQ ID NO: 383288 - RNA, 19 nt, Human
uagcacugggacuauucac

SEQ ID NO: 383289 - RNA, 26 nt, Human
uauaaccuaauauuuggacuuauacc

SEQ ID NO: 383290 - RNA, 22 nt, Human
uauggcaugagacugaacccaa

SEQ ID NO: 383291 - RNA, 19 nt, Human
ucaagggcacuugcugugu

SEQ ID NO: 383292 - RNA, 26 nt, Human
ucagagauucuucuggcugggacuga

SEQ ID NO: 383293 - RNA, 27 nt, Human
ucauuuauccaugcacuuuuuuacucc

SEQ ID NO: 383294 - RNA, 20 nt, Human
uccaugcacuuuuuuacucc

SEQ ID NO: 383295 - RNA, 19 nt, Human
ucccaaaaggccacuguca

SEQ ID NO: 383296 - RNA, 19 nt, Human
ucccacccaccagugaggc

SEQ ID NO: 383297 - RNA, 19 nt, Human
ucccagggugaacugcucc

SEQ ID NO: 383298 - RNA, 23 nt, Human
uccuucugauagugaccagacag

SEQ ID NO: 383299 - RNA, 18 nt, Human
ucuucuggcugggacuga

SEQ ID NO: 383300 - RNA, 22 nt, Human
ugaagaguaaauacauaagaag

SEQ ID NO: 383301 - RNA, 20 nt, Human
ugacagccauccugucuccu

SEQ ID NO: 383302 - RNA, 21 nt, Human
ugacauuguuuggaauugcca

SEQ ID NO: 383303 - RNA, 19 nt, Human
ugaccagacagaacuccag

SEQ ID NO: 383304 - RNA, 21 nt, Human
ugacguuguugacagccaucc

SEQ ID NO: 383305 - RNA, 26 nt, Human
ugagacugaacccaagaauuaacaau

SEQ ID NO: 383306 - RNA, 18 nt, Human
ugagcccaggcuggaguu

SEQ ID NO: 383307 - RNA, 23 nt, Human
ugccugaauggccaggacagaug

SEQ ID NO: 383308 - RNA, 21 nt, Human
ugccugggagccaugcccaug

SEQ ID NO: 383309 - RNA, 19 nt, Human
uggccaggacagaugacag

SEQ ID NO: 383310 - RNA, 21 nt, Human
ugggaagcaagggaaaagaac

SEQ ID NO: 383311 - RNA, 19 nt, Human
ugggacaaauaugggaagc

SEQ ID NO: 383312 - RNA, 21 nt, Human
ugggacuaaaagaaaaggguc

SEQ ID NO: 383313 - RNA, 19 nt, Human
uguauacauucacaauaug

SEQ ID NO: 383314 - RNA, 22 nt, Human
ugucuccuccuuucugcuuuca

SEQ ID NO: 383315 - RNA, 19 nt, Human
uguugacagccauccuguc

SEQ ID NO: 383316 - RNA, 19 nt, Human
uuagggcuuccaaaagggu

SEQ ID NO: 383317 - RNA, 21 nt, Human
uuaguuuauuaagcuaccuua

SEQ ID NO: 383318 - RNA, 21 nt, Human
uucuucuggcugggacugaag

SEQ ID NO: 383319 - RNA, 30 nt, Human
uucuuuuuuuccuuuuuuuuuucucuuuuu

SEQ ID NO: 383320 - RNA, 27 nt, Human
uugggacuaaaagaaaagggucaaagu

SEQ ID NO: 383321 - RNA, 21 nt, Human
uuuuuuccuuuuuuuuuucuc

SEQ ID NO: 383322 - RNA, 18 nt, Human
aaagucugggaucccaug

SEQ ID NO: 383323 - RNA, 19 nt, Human
aaagugcugggauuacaga

SEQ ID NO: 383324 - RNA, 24 nt, Human
aaagugcugggauuacagacauga

SEQ ID NO: 383325 - RNA, 20 nt, Human
aaccucugccuccugaguuc

SEQ ID NO: 383326 - RNA, 24 nt, Human
aacgauucuccuaccucagccucc

SEQ ID NO: 383327 - RNA, 21 nt, Human
aagugcugggauuacagacau

SEQ ID NO: 383328 - RNA, 26 nt, Human
aagugcugggauuacagacaugagcc

SEQ ID NO: 383329 - RNA, 19 nt, Human
acaaggaagggaucagaga

SEQ ID NO: 383330 - RNA, 21 nt, Human
acaugagccaaugcgccuggc

SEQ ID NO: 383331 - RNA, 19 nt, Human
acccaggcuggagugcagu

SEQ ID NO: 383332 - RNA, 19 nt, Human
agagaugggguuucaccgu

SEQ ID NO: 383333 - RNA, 22 nt, Human
agcaaggauaaaacgaucuuua

SEQ ID NO: 383334 - RNA, 18 nt, Human
agccaaugcgccuggcua

SEQ ID NO: 383335 - RNA, 19 nt, Human
aggcaugaaccaccgcgcc

SEQ ID NO: 383336 - RNA, 25 nt, Human
aggcuggagugcaguggcgcgaucu

SEQ ID NO: 383337 - RNA, 22 nt, Human
aggguuucaucauguuggccag

SEQ ID NO: 383338 - RNA, 23 nt, Human
aggguuucaucauguuggccagg

SEQ ID NO: 383339 - RNA, 19 nt, Human
aguagcugggacuauaggc

SEQ ID NO: 383340 - RNA, 23 nt, Human
agugcaguggcgcgaucuuggcu

SEQ ID NO: 383341 - RNA, 24 nt, Human
agugcaguggcgcgaucuuggcuc

SEQ ID NO: 383342 - RNA, 24 nt, Human
agugcugggauuacagacaugagc

SEQ ID NO: 383343 - RNA, 18 nt, Human
agugcugggauuacaggc

SEQ ID NO: 383344 - RNA, 22 nt, Human
agugcugggauuacaggcauga

SEQ ID NO: 383345 - RNA, 18 nt, Human
auaggguuucaucauguu

SEQ ID NO: 383346 - RNA, 23 nt, Human
auaggguuucaucauguuggcca

SEQ ID NO: 383347 - RNA, 24 nt, Human
auaggguuucaucauguuggccag

SEQ ID NO: 383348 - RNA, 24 nt, Human
auagugcugggauuacaggcauga

SEQ ID NO: 383349 - RNA, 24 nt, Human
aucauguuggccaggauggucucg

SEQ ID NO: 383350 - RNA, 18 nt, Human
augaccucuuccugcgug

SEQ ID NO: 383351 - RNA, 18 nt, Human
augggguuucaccguguu

SEQ ID NO: 383352 - RNA, 20 nt, Human
augggguuucaccguguuag

SEQ ID NO: 383353 - RNA, 24 nt, Human
augggguuucaccguguuagccag

SEQ ID NO: 383354 - RNA, 24 nt, Human
auuuuuguauuuuuaguagagaua

SEQ ID NO: 383355 - RNA, 20 nt, Human
caaacgauucuccuaccuca

SEQ ID NO: 383356 - RNA, 24 nt, Human
caaagugcugggauuacagacaug

SEQ ID NO: 383357 - RNA, 19 nt, Human
cacaaugaccccagucagg

SEQ ID NO: 383358 - RNA, 22 nt, Human
caccaccaugcccggcuaauuu

SEQ ID NO: 383359 - RNA, 24 nt, Human
caccaugcccggcuaauuuuugua

SEQ ID NO: 383360 - RNA, 24 nt, Human
cacccaggcuggagugcaguggcg

SEQ ID NO: 383361 - RNA, 22 nt, Human
cacccccccgaccucccaaagu

SEQ ID NO: 383362 - RNA, 18 nt, Human
caccgcuggaggcugugg

SEQ ID NO: 383363 - RNA, 18 nt, Human
caccguguuagccaggau

SEQ ID NO: 383364 - RNA, 24 nt, Human
caccguguuagccaggauggucuc

SEQ ID NO: 383365 - RNA, 24 nt, Human
cacugcaaccuuugcaucccuggg

SEQ ID NO: 383366 - RNA, 21 nt, Human
cagcaaggauaaaacgaucuu

SEQ ID NO: 383367 - RNA, 22 nt, Human
caggauaaaauaauaagucuua

SEQ ID NO: 383368 - RNA, 19 nt, Human
caguggcgcgaucuuggcu

SEQ ID NO: 383369 - RNA, 24 nt, Human
cauagugcugggauuacaggcaug

SEQ ID NO: 383370 - RNA, 22 nt, Human
caucauguuggccaggaugguc

SEQ ID NO: 383371 - RNA, 24 nt, Human
caucauguuggccaggauggucuc

SEQ ID NO: 383372 - RNA, 21 nt, Human
cauguuggccaggauggucuc

SEQ ID NO: 383373 - RNA, 18 nt, Human
cauugcaaacauuuaaaa

SEQ ID NO: 383374 - RNA, 21 nt, Human
cauugcaaccucugccuccug

SEQ ID NO: 383375 - RNA, 19 nt, Human
ccaaagugcugggauuaca

SEQ ID NO: 383376 - RNA, 24 nt, Human
ccaaagugcugggauuacagacau

SEQ ID NO: 383377 - RNA, 21 nt, Human
ccacccccccgaccucccaaa

SEQ ID NO: 383378 - RNA, 23 nt, Human
ccauagugcugggauuacaggca

SEQ ID NO: 383379 - RNA, 24 nt, Human
ccauagugcugggauuacaggcau

SEQ ID NO: 383380 - RNA, 19 nt, Human
cccccacccccccgaccuc

SEQ ID NO: 383381 - RNA, 21 nt, Human
cccccacccccccgaccuccc

SEQ ID NO: 383382 - RNA, 19 nt, Human
cccgaguagcugggacuau

SEQ ID NO: 383383 - RNA, 24 nt, Human
cccgaguagcugggacuauaggcg

SEQ ID NO: 383384 - RNA, 23 nt, Human
cccgugauccucccccacccccc

SEQ ID NO: 383385 - RNA, 23 nt, Human
ccuaccucagccucccgaguagc

SEQ ID NO: 383386 - RNA, 24 nt, Human
ccuaccucagccucccgaguagcu

SEQ ID NO: 383387 - RNA, 24 nt, Human
ccuccugaguucaaacgauucucc

SEQ ID NO: 383388 - RNA, 18 nt, Human
ccuggccaaccgugguaa

SEQ ID NO: 383389 - RNA, 24 nt, Human
ccuggccaaccgugguaacuuuua

SEQ ID NO: 383390 - RNA, 26 nt, Human
ccuggcuaauuuuuuuuguuuuuugu

SEQ ID NO: 383391 - RNA, 24 nt, Human
cgcucugucacccaggcuggagug

SEQ ID NO: 383392 - RNA, 21 nt, Human
cgugauccucccccacccccc

SEQ ID NO: 383393 - RNA, 22 nt, Human
cgugauccucccccaccccccc

SEQ ID NO: 383394 - RNA, 23 nt, Human
cgugcaccaccaugcccggcuaa

SEQ ID NO: 383395 - RNA, 25 nt, Human
cucacugcaaccuuugcaucccugg

SEQ ID NO: 383396 - RNA, 24 nt, Human
cucagccucccgaguagcugggac

SEQ ID NO: 383397 - RNA, 19 nt, Human
cucauugcaaccucugccu

SEQ ID NO: 383398 - RNA, 23 nt, Human
cucauugcaaccucugccuccug

SEQ ID NO: 383399 - RNA, 22 nt, Human
cucccccacccccccgaccucc

SEQ ID NO: 383400 - RNA, 18 nt, Human
cuccugaccccgugaucc

SEQ ID NO: 383401 - RNA, 24 nt, Human
cuccugaccucgugauccgcccgu

SEQ ID NO: 383402 - RNA, 24 nt, Human
cucgcucugucacccaggcuggag

SEQ ID NO: 383403 - RNA, 19 nt, Human
cugucacccaggcuggagu

SEQ ID NO: 383404 - RNA, 24 nt, Human
gaccccgugauccucccccacccc

SEQ ID NO: 383405 - RNA, 22 nt, Human
gaccucgugauccgcccgucuc

SEQ ID NO: 383406 - RNA, 22 nt, Human
gaccucgugauccgcccgucuc

SEQ ID NO: 383407 - RNA, 24 nt, Human
gaccucgugauccgcccgucucgg

SEQ ID NO: 383408 - RNA, 22 nt, Human
gacuauaggcgugcaccaccau

SEQ ID NO: 383409 - RNA, 23 nt, Human
gagauaggguuucaucauguugg

SEQ ID NO: 383410 - RNA, 18 nt, Human
gagaugggguuucaccgu

SEQ ID NO: 383411 - RNA, 24 nt, Human
gagaugggguuucaccguguuagc

SEQ ID NO: 383412 - RNA, 18 nt, Human
gauuacagacaugagcca

SEQ ID NO: 383413 - RNA, 22 nt, Human
gauuacagacaugagccaaugc

SEQ ID NO: 383414 - RNA, 22 nt, Human
gauuacagacaugagccaaugc

SEQ ID NO: 383415 - RNA, 22 nt, Human
gauuacaggcaugaaccaccgc

SEQ ID NO: 383416 - RNA, 20 nt, Human
gcagcuacaggcagaucagc

SEQ ID NO: 383417 - RNA, 22 nt, Human
gcccggcuaauuuuuguauuuu

SEQ ID NO: 383418 - RNA, 22 nt, Human
gccuccugaguucaaacgauuc

SEQ ID NO: 383419 - RNA, 21 nt, Human
gcucauugcaaccucugccuc

SEQ ID NO: 383420 - RNA, 25 nt, Human
gcucugucacccaggcuggagugca

SEQ ID NO: 383421 - RNA, 19 nt, Human
gcuggagugcaguggcgcg

SEQ ID NO: 383422 - RNA, 24 nt, Human
ggacuauaggcgugcaccaccaug

SEQ ID NO: 383423 - RNA, 24 nt, Human
ggauggucucagucuccugaccuc

SEQ ID NO: 383424 - RNA, 22 nt, Human
ggauuacagacaugagccaaug

SEQ ID NO: 383425 - RNA, 22 nt, Human
ggauuacaggcaugaaccaccg

SEQ ID NO: 383426 - RNA, 22 nt, Human
gggguuucaccguguuagccag

SEQ ID NO: 383427 - RNA, 21 nt, Human
ggguuucaucauguuggccag

SEQ ID NO: 383428 - RNA, 22 nt, Human
ggguuucaucauguuggccagg

SEQ ID NO: 383429 - RNA, 24 nt, Human
gucucgcucugucacccaggcugg

SEQ ID NO: 383430 - RNA, 22 nt, Human
gucugggaucccaugacucaac

SEQ ID NO: 383431 - RNA, 23 nt, Human
gugauccucccccacccccccga

SEQ ID NO: 383432 - RNA, 21 nt, Human
uaaaaaagucugggaucccau

SEQ ID NO: 383433 - RNA, 24 nt, Human
uaauuuuuguauuuuuaguagaga

SEQ ID NO: 383434 - RNA, 20 nt, Human
uacacaaugaccccagucag

SEQ ID NO: 383435 - RNA, 22 nt, Human
uacaggcaugaaccaccgcgcc

SEQ ID NO: 383436 - RNA, 24 nt, Human
uaccucagccucccgaguagcugg

SEQ ID NO: 383437 - RNA, 24 nt, Human
uaguagagauaggguuucaucaug

SEQ ID NO: 383438 - RNA, 21 nt, Human
uaguagagaugggguuucacc

SEQ ID NO: 383439 - RNA, 24 nt, Human
uaguagagaugggguuucaccgug

SEQ ID NO: 383440 - RNA, 26 nt, Human
uaguagagaugggguuucaccguguu

SEQ ID NO: 383441 - RNA, 25 nt, Human
uagugcugggauuacaggcaugaac

SEQ ID NO: 383442 - RNA, 18 nt, Human
ucaaugucauucuccaua

SEQ ID NO: 383443 - RNA, 24 nt, Human
ucacccaggcuggagugcaguggc

SEQ ID NO: 383444 - RNA, 24 nt, Human
ucaccguguuagccaggauggucu

SEQ ID NO: 383445 - RNA, 21 nt, Human
ucacugcaaccuuugcauccc

SEQ ID NO: 383446 - RNA, 25 nt, Human
ucacugcaaccuuugcaucccuggg

SEQ ID NO: 383447 - RNA, 24 nt, Human
ucacuguagcuauuucuuauuuuu

SEQ ID NO: 383448 - RNA, 23 nt, Human
ucagccucccgaguagcugggac

SEQ ID NO: 383449 - RNA, 19 nt, Human
ucauugcaaccucugccuc

SEQ ID NO: 383450 - RNA, 22 nt, Human
ucauugcaaccucugccuccug

SEQ ID NO: 383451 - RNA, 25 nt, Human
ucauugcaaccucugccuccugagu

SEQ ID NO: 383452 - RNA, 18 nt, Human
ucccaaagugcugggauu

SEQ ID NO: 383453 - RNA, 24 nt, Human
ucccaaagugcugggauuacagac

SEQ ID NO: 383454 - RNA, 24 nt, Human
ucccauagugcugggauuacaggc

SEQ ID NO: 383455 - RNA, 25 nt, Human
ucccccacccccccgaccucccaaa

SEQ ID NO: 383456 - RNA, 24 nt, Human
ucccgaguagcugggacuauaggc

SEQ ID NO: 383457 - RNA, 21 nt, Human
ucccugggcuuugaacccugg

SEQ ID NO: 383458 - RNA, 23 nt, Human
ucccugggcuuugaacccugguu

SEQ ID NO: 383459 - RNA, 21 nt, Human
uccugaguucaaacgauucuc

SEQ ID NO: 383460 - RNA, 27 nt, Human
ucuaaaaucugucacuguagcuauuuc

SEQ ID NO: 383461 - RNA, 22 nt, Human
ucuccauauaagauccagagug

SEQ ID NO: 383462 - RNA, 24 nt, Human
ucuccuaccucagccucccgagua

SEQ ID NO: 383463 - RNA, 19 nt, Human
ucucgcucugucacccagg

SEQ ID NO: 383464 - RNA, 23 nt, Human
ucucgcucugucacccaggcugg

SEQ ID NO: 383465 - RNA, 24 nt, Human
ucucgcucugucacccaggcugga

SEQ ID NO: 383466 - RNA, 26 nt, Human
ucucgcucugucacccaggcuggagu

SEQ ID NO: 383467 - RNA, 27 nt, Human
ucucgcucugucacccaggcuggagug

SEQ ID NO: 383468 - RNA, 24 nt, Human
ucugucacccaggcuggagugcag

SEQ ID NO: 383469 - RNA, 19 nt, Human
ugaccccgugauccucccc

SEQ ID NO: 383470 - RNA, 21 nt, Human
ugaccccgugauccuccccca

SEQ ID NO: 383471 - RNA, 22 nt, Human
ugacucaacucacugcaaccuu

SEQ ID NO: 383472 - RNA, 22 nt, Human
ugcaguggcgcgaucuuggcuc

SEQ ID NO: 383473 - RNA, 24 nt, Human
ugcccggcuaauuuuuguauuuuu

SEQ ID NO: 383474 - RNA, 24 nt, Human
ugcugggauuacagacaugagcca

SEQ ID NO: 383475 - RNA, 23 nt, Human
ugcugggauuacaggcaugaacc

SEQ ID NO: 383476 - RNA, 23 nt, Human
uggagugcaguggcgcgaucuug

SEQ ID NO: 383477 - RNA, 24 nt, Human
uggagugcaguggcgcgaucuugg

SEQ ID NO: 383478 - RNA, 24 nt, Human
uggccaggauggucucgaucuccu

SEQ ID NO: 383479 - RNA, 21 nt, Human
ugggacuauaggcgugcacca

SEQ ID NO: 383480 - RNA, 24 nt, Human
ugggacuauaggcgugcaccacca

SEQ ID NO: 383481 - RNA, 25 nt, Human
ugggacuauaggcgugcaccaccau

SEQ ID NO: 383482 - RNA, 18 nt, Human
ugggauuacagacaugag

SEQ ID NO: 383483 - RNA, 21 nt, Human
ugggauuacagacaugagcca

SEQ ID NO: 383484 - RNA, 21 nt, Human
ugggauuacagacaugagcca

SEQ ID NO: 383485 - RNA, 24 nt, Human
ugggauuacagacaugagccaaug

SEQ ID NO: 383486 - RNA, 27 nt, Human
ugggauuacagacaugagccaaugcgc

SEQ ID NO: 383487 - RNA, 21 nt, Human
ugggauuacaggcaugaacca

SEQ ID NO: 383488 - RNA, 23 nt, Human
ugggauuacaggcaugaaccacc

SEQ ID NO: 383489 - RNA, 24 nt, Human
ugggauuacaggcaugaaccaccg

SEQ ID NO: 383490 - RNA, 24 nt, Human
ugggauuacaggcaugaaccaccg

SEQ ID NO: 383491 - RNA, 24 nt, Human
ugggguuucaccguguuagccagg

SEQ ID NO: 383492 - RNA, 19 nt, Human
uguaaacgggaaacauugc

SEQ ID NO: 383493 - RNA, 18 nt, Human
uuaguagagauaggguuu

SEQ ID NO: 383494 - RNA, 20 nt, Human
uuaguagagauaggguuuca

SEQ ID NO: 383495 - RNA, 24 nt, Human
uuaguagagauaggguuucaucau

SEQ ID NO: 383496 - RNA, 18 nt, Human
uuaguagagaugggguuu

SEQ ID NO: 383497 - RNA, 22 nt, Human
uuaguagagaugggguuucacc

SEQ ID NO: 383498 - RNA, 24 nt, Human
uuaguagagaugggguuucaccgu

SEQ ID NO: 383499 - RNA, 24 nt, Human
uucaaacgauucuccuaccucagc

SEQ ID NO: 383500 - RNA, 23 nt, Human
uugagacggucucgcucugucac

SEQ ID NO: 383501 - RNA, 19 nt, Human
uugcaaccucugccuccug

SEQ ID NO: 383502 - RNA, 23 nt, Human
uugcaaccucugccuccugaguu

SEQ ID NO: 383503 - RNA, 24 nt, Human
uugcaaccucugccuccugaguuc

SEQ ID NO: 383504 - RNA, 18 nt, Human
uugcaucccugggcuuug

SEQ ID NO: 383505 - RNA, 23 nt, Human
uuguauuuuuaguagagaugggg

SEQ ID NO: 383506 - RNA, 21 nt, Human
uuuaacaaggaagggaucaga

SEQ ID NO: 383507 - RNA, 19 nt, Human
uuucaccguguuagccagg

SEQ ID NO: 383508 - RNA, 19 nt, Human
uuucaucauguuggccagg

SEQ ID NO: 383509 - RNA, 28 nt, Human
uuugcaucccugggcuuugaacccuggu

SEQ ID NO: 383510 - RNA, 20 nt, Human
uuuuguauuuuuaguagaga

SEQ ID NO: 383511 - RNA, 23 nt, Human
uuuuuaguagagauaggguuuca

SEQ ID NO: 383512 - RNA, 24 nt, Human
uuuuuaguagagaugggguuucac

SEQ ID NO: 383513 - RNA, 20 nt, Human
uuuuuguauuuuuaguagag

SEQ ID NO: 383514 - RNA, 22 nt, Human
uuuuuguauuuuuaguagagaa

SEQ ID NO: 383515 - RNA, 22 nt, Human
uuuuuuguauuuuuaguagagg

SEQ ID NO: 383516 - RNA, 22 nt, Human
aaaccccgccccuacuaaaaag

SEQ ID NO: 383517 - RNA, 18 nt, Human
aacauggugaaaccccgc

SEQ ID NO: 383518 - RNA, 20 nt, Human
aacauggugaaaccccgccc

SEQ ID NO: 383519 - RNA, 20 nt, Human
aagacaaaaaucagccaagc

SEQ ID NO: 383520 - RNA, 24 nt, Human
aaucgcuugaacccaggaggcgga

SEQ ID NO: 383521 - RNA, 24 nt, Human
accugaggucaggaguuugagacc

SEQ ID NO: 383522 - RNA, 22 nt, Human
agaaucgcuugaacccaggagg

SEQ ID NO: 383523 - RNA, 24 nt, Human
agcacuuugggagacagagguggg

SEQ ID NO: 383524 - RNA, 23 nt, Human
agccaagcgugguggcgcaugcc

SEQ ID NO: 383525 - RNA, 22 nt, Human
agccuggccaacauggugaaac

SEQ ID NO: 383526 - RNA, 24 nt, Human
agccuggccaacauggugaaaccc

SEQ ID NO: 383527 - RNA, 20 nt, Human
aggaguuugagaccagccug

SEQ ID NO: 383528 - RNA, 23 nt, Human
aggcaggagaaucgcuugaaccc

SEQ ID NO: 383529 - RNA, 24 nt, Human
aggcaggagaaucgcuugaaccca

SEQ ID NO: 383530 - RNA, 24 nt, Human
aggcggagguugcagugagccgag

SEQ ID NO: 383531 - RNA, 20 nt, Human
aggcugaggcaggagaaucg

SEQ ID NO: 383532 - RNA, 24 nt, Human
aggcugaggcaggagaaucgcuug

SEQ ID NO: 383533 - RNA, 22 nt, Human
agguggguggaucaccugaggu

SEQ ID NO: 383534 - RNA, 24 nt, Human
aguggcacacuccuguaaucccag

SEQ ID NO: 383535 - RNA, 24 nt, Human
caacauggugaaaccccgccccua

SEQ ID NO: 383536 - RNA, 24 nt, Human
caaggaacuuccuccucagagccu

SEQ ID NO: 383537 - RNA, 23 nt, Human
caccugaggucaggaguuugaga

SEQ ID NO: 383538 - RNA, 22 nt, Human
cacuccuguaaucccagcacuu

SEQ ID NO: 383539 - RNA, 24 nt, Human
cacuccuguaaucccagcacuuug

SEQ ID NO: 383540 - RNA, 25 nt, Human
cagagguggguggaucaccugaggu

SEQ ID NO: 383541 - RNA, 24 nt, Human
cagcacuuugggagacagaggugg

SEQ ID NO: 383542 - RNA, 19 nt, Human
caggcgcaguggcacacuc

SEQ ID NO: 383543 - RNA, 22 nt, Human
ccaggaggcggagguugcagug

SEQ ID NO: 383544 - RNA, 21 nt, Human
ccccuacuaaaaagacaaaaa

SEQ ID NO: 383545 - RNA, 22 nt, Human
cccuacuaaaaagacaaaaauc

SEQ ID NO: 383546 - RNA, 22 nt, Human
ccugaggucaggaguuugagac

SEQ ID NO: 383547 - RNA, 23 nt, Human
ccuggccaacauggugaaacccc

SEQ ID NO: 383548 - RNA, 24 nt, Human
ccuggccaacauggugaaaccccg

SEQ ID NO: 383549 - RNA, 22 nt, Human
ccuguaaucccagcacuuuggg

SEQ ID NO: 383550 - RNA, 25 nt, Human
cuaaaaagacaaaaaucagccaagc

SEQ ID NO: 383551 - RNA, 23 nt, Human
cuccuguaaucccagcacuuugg

SEQ ID NO: 383552 - RNA, 30 nt, Human
gagacagagguggguggaucaccugagguu

SEQ ID NO: 383553 - RNA, 25 nt, Human
gagguggguggaucaccugagguca

SEQ ID NO: 383554 - RNA, 22 nt, Human
gagguugcagugagccgagauc

SEQ ID NO: 383555 - RNA, 24 nt, Human
gaucaccugaggucaggaguuuga

SEQ ID NO: 383556 - RNA, 22 nt, Human
gcaggagaaucgcuugaaccca

SEQ ID NO: 383557 - RNA, 18 nt, Human
gccaacauggugaaaccc

SEQ ID NO: 383558 - RNA, 22 nt, Human
ggagaguagggaggugggugcu

SEQ ID NO: 383559 - RNA, 22 nt, Human
ggaggcggagguugcagugagc

SEQ ID NO: 383560 - RNA, 18 nt, Human
ggagguugcagugagccg

SEQ ID NO: 383561 - RNA, 20 nt, Human
ggagguugcagugagccgag

SEQ ID NO: 383562 - RNA, 22 nt, Human
ggagguugcagugagccgagau

SEQ ID NO: 383563 - RNA, 23 nt, Human
ggagguugcagugagccgagauc

SEQ ID NO: 383564 - RNA, 24 nt, Human
ggagguugcagugagccgagauca

SEQ ID NO: 383565 - RNA, 22 nt, Human
ggaucaccugaggucaggaguu

SEQ ID NO: 383566 - RNA, 21 nt, Human
gggaggugggugcuggaguuc

SEQ ID NO: 383567 - RNA, 19 nt, Human
ggucaggaguuugagacca

SEQ ID NO: 383568 - RNA, 24 nt, Human
ggucaggcgcaguggcacacuccu

SEQ ID NO: 383569 - RNA, 22 nt, Human
ggugaaaccccgccccuacuaa

SEQ ID NO: 383570 - RNA, 21 nt, Human
gguggaucaccugaggucagg

SEQ ID NO: 383571 - RNA, 19 nt, Human
guugcagugagccgagauc

SEQ ID NO: 383572 - RNA, 20 nt, Human
uaaaguggugacacuguccc

SEQ ID NO: 383573 - RNA, 19 nt, Human
uacuccggaggcugaggca

SEQ ID NO: 383574 - RNA, 19 nt, Human
ucaccugaggucaggaguu

SEQ ID NO: 383575 - RNA, 24 nt, Human
ucagagccucagucccucuucugu

SEQ ID NO: 383576 - RNA, 23 nt, Human
ucagccaagcgugguggcgcaug

SEQ ID NO: 383577 - RNA, 24 nt, Human
ucgcuugaacccaggaggcggagg

SEQ ID NO: 383578 - RNA, 19 nt, Human
ucucaggguggcgacacuc

SEQ ID NO: 383579 - RNA, 23 nt, Human
ugagaccagccuggccaacaugg

SEQ ID NO: 383580 - RNA, 24 nt, Human
ugagaccagccuggccaacauggu

SEQ ID NO: 383581 - RNA, 20 nt, Human
ugaggcaggagaaucgcuug

SEQ ID NO: 383582 - RNA, 24 nt, Human
ugaggcaggagaaucgcuugaacc

SEQ ID NO: 383583 - RNA, 25 nt, Human
ugaggcaggagaaucgcuugaaccc

SEQ ID NO: 383584 - RNA, 18 nt, Human
ugaggucaggaguuugag

SEQ ID NO: 383585 - RNA, 19 nt, Human
ugccuguacucccaguuac

SEQ ID NO: 383586 - RNA, 23 nt, Human
uggaucaccugaggucaggaguu

SEQ ID NO: 383587 - RNA, 24 nt, Human
uggaucaccugaggucaggaguuu

SEQ ID NO: 383588 - RNA, 27 nt, Human
uggaucaccugaggucaggaguuugag

SEQ ID NO: 383589 - RNA, 22 nt, Human
uggcacacuccuguaaucccag

SEQ ID NO: 383590 - RNA, 24 nt, Human
uggcacacuccuguaaucccagca

SEQ ID NO: 383591 - RNA, 18 nt, Human
uggccaacauggugaaac

SEQ ID NO: 383592 - RNA, 21 nt, Human
uggcgacacucggacccuggc

SEQ ID NO: 383593 - RNA, 19 nt, Human
ugggagacagaggugggug

SEQ ID NO: 383594 - RNA, 24 nt, Human
ugggagacagagguggguggauca

SEQ ID NO: 383595 - RNA, 24 nt, Human
uggguggaucaccugaggucagga

SEQ ID NO: 383596 - RNA, 20 nt, Human
uggugaaaccccgccccuaa

SEQ ID NO: 383597 - RNA, 24 nt, Human
ugguggcgcaugccuguacuccca

SEQ ID NO: 383598 - RNA, 18 nt, Human
uuccuccucagagccuca

SEQ ID NO: 383599 - RNA, 24 nt, Human
uugaacccaggaggcggagguugc

SEQ ID NO: 383600 - RNA, 18 nt, Human
uugcagugagccgagauc

SEQ ID NO: 383601 - RNA, 20 nt, Human
uugcagugagccgagaucac

SEQ ID NO: 383602 - RNA, 21 nt, Human
uugcagugagccgagaucacg

SEQ ID NO: 383603 - RNA, 19 nt, Human
uugggagacagaggugggu

SEQ ID NO: 383604 - RNA, 20 nt, Human
aaaugggcccuuagagaaaa

SEQ ID NO: 383605 - RNA, 21 nt, Human
aacaaguacaguaguaccccc

SEQ ID NO: 383606 - RNA, 24 nt, Human
aacaaguacaguaguacccccuua

SEQ ID NO: 383607 - RNA, 20 nt, Human
aacccuauauuacccggaau

SEQ ID NO: 383608 - RNA, 20 nt, Human
aacuugcuuccucuucucug

SEQ ID NO: 383609 - RNA, 18 nt, Human
aagaagcccagauucugg

SEQ ID NO: 383610 - RNA, 23 nt, Human
aagaagcccagauucugggggca

SEQ ID NO: 383611 - RNA, 21 nt, Human
aauuccggaaagggguggagg

SEQ ID NO: 383612 - RNA, 19 nt, Human
accacagcucugugcagca

SEQ ID NO: 383613 - RNA, 22 nt, Human
acugugcugacaggauggcagg

SEQ ID NO: 383614 - RNA, 21 nt, Human
acuugagucugcaggccuguu

SEQ ID NO: 383615 - RNA, 33 nt, Human
agauguuugaaaccacagauugcaccaaaccuc

SEQ ID NO: 383616 - RNA, 25 nt, Human
aggaccgaaaccaaaugucuacugg

SEQ ID NO: 383617 - RNA, 21 nt, Human
agggaggccuaagggaauggg

SEQ ID NO: 383618 - RNA, 21 nt, Human
aucagaaucaccuuucuccca

SEQ ID NO: 383619 - RNA, 19 nt, Human
augcggguggggaaugggg

SEQ ID NO: 383620 - RNA, 22 nt, Human
caacaaguacaguaguaccccc

SEQ ID NO: 383621 - RNA, 22 nt, Human
caccaaacccuauauuacccgg

SEQ ID NO: 383622 - RNA, 23 nt, Human
cagcagcauuguagcagaccugu

SEQ ID NO: 383623 - RNA, 19 nt, Human
cagcucugugcagcagcag

SEQ ID NO: 383624 - RNA, 18 nt, Human
caucugccuagcagagcu

SEQ ID NO: 383625 - RNA, 21 nt, Human
cccugggaggggauauuaggg

SEQ ID NO: 383626 - RNA, 21 nt, Human
ccuugaggggauugacuugag

SEQ ID NO: 383627 - RNA, 22 nt, Human
cgaaaccaaaugucuacuggcc

SEQ ID NO: 383628 - RNA, 24 nt, Human
cggaaagggguggagguggcuccu

SEQ ID NO: 383629 - RNA, 21 nt, Human
cugacuuaaacagggauaaaa

SEQ ID NO: 383630 - RNA, 18 nt, Human
gagaaaacuuggagcacu

SEQ ID NO: 383631 - RNA, 20 nt, Human
gcccagauucugggggcaaa

SEQ ID NO: 383632 - RNA, 21 nt, Human
ggaaugggguaggagggaugg

SEQ ID NO: 383633 - RNA, 18 nt, Human
gggaaugggguaggaggg

SEQ ID NO: 383634 - RNA, 19 nt, Human
ggguggggaaugggguagg

SEQ ID NO: 383635 - RNA, 19 nt, Human
gguaggagggaugggugcu

SEQ ID NO: 383636 - RNA, 20 nt, Human
uagcagagcuaacaugaaga

SEQ ID NO: 383637 - RNA, 23 nt, Human
ucagaaucaccuuucucccaucu

SEQ ID NO: 383638 - RNA, 19 nt, Human
ucagcagaggacaacugug

SEQ ID NO: 383639 - RNA, 23 nt, Human
ucauuuguggagcaggccugaau

SEQ ID NO: 383640 - RNA, 22 nt, Human
ucugggaucaagauagggagac

SEQ ID NO: 383641 - RNA, 24 nt, Human
ucuugagagugggaguccaaaugg

SEQ ID NO: 383642 - RNA, 21 nt, Human
ugaaaaaaaguagugacagcc

SEQ ID NO: 383643 - RNA, 20 nt, Human
ugaaaccacagauugcacca

SEQ ID NO: 383644 - RNA, 22 nt, Human
ugagaggaagacacagagaagg

SEQ ID NO: 383645 - RNA, 24 nt, Human
ugcugacaggauggcagguaaugc

SEQ ID NO: 383646 - RNA, 18 nt, Human
uggcagguaaugcgggug

SEQ ID NO: 383647 - RNA, 18 nt, Human
uggggaaugggguaggag

SEQ ID NO: 383648 - RNA, 20 nt, Human
uggggauauguucuacgacc

SEQ ID NO: 383649 - RNA, 21 nt, Human
uggggcgcuggggcugaaaug

SEQ ID NO: 383650 - RNA, 24 nt, Human
uggggcugaaaugaaucauuugug

SEQ ID NO: 383651 - RNA, 20 nt, Human
ugggguaggagggaugggug

SEQ ID NO: 383652 - RNA, 24 nt, Human
ugggucagacugacuuaaacaggg

SEQ ID NO: 383653 - RNA, 18 nt, Human
uguagaaggaagauucug

SEQ ID NO: 383654 - RNA, 22 nt, Human
uuccaagccguucugaacuugc

SEQ ID NO: 383655 - RNA, 22 nt, Human
uucucugaaaugacaucugccu

SEQ ID NO: 383656 - RNA, 22 nt, Human
aaaaggaaaaacaaaaggaaau

SEQ ID NO: 383657 - RNA, 20 nt, Human
aaaaggaaauccagaacaau

SEQ ID NO: 383658 - RNA, 19 nt, Human
aaacaaaaggaaauccaga

SEQ ID NO: 383659 - RNA, 22 nt, Human
aaagauggaaaacuaaaaggaa

SEQ ID NO: 383660 - RNA, 23 nt, Human
agacgguacaacaaaagcaagcu

SEQ ID NO: 383661 - RNA, 23 nt, Human
aggaaaaacaaaaggaaauccag

SEQ ID NO: 383662 - RNA, 18 nt, Human
caaaaggaaauccagaac

SEQ ID NO: 383663 - RNA, 26 nt, Human
caaaaggaaauccagaacaauccgcc

SEQ ID NO: 383664 - RNA, 18 nt, Human
caggaagguggggacccu

SEQ ID NO: 383665 - RNA, 18 nt, Human
ccaaugagcaccagggag

SEQ ID NO: 383666 - RNA, 23 nt, Human
cccacaauccugcgcuccacccc

SEQ ID NO: 383667 - RNA, 29 nt, Human
cccccagacucuacucagauuccaaugag

SEQ ID NO: 383668 - RNA, 25 nt, Human
cccuccuacgccacaugcuagaccu

SEQ ID NO: 383669 - RNA, 19 nt, Human
cccugggagaagaaaaccc

SEQ ID NO: 383670 - RNA, 25 nt, Human
ccuagcccugcaggaggaucuugug

SEQ ID NO: 383671 - RNA, 18 nt, Human
ccuccuacgccacaugcu

SEQ ID NO: 383672 - RNA, 22 nt, Human
ccuccuacgccacaugcuagac

SEQ ID NO: 383673 - RNA, 23 nt, Human
cuaaaaggaaaaacaaaaggaaa

SEQ ID NO: 383674 - RNA, 23 nt, Human
cuuccgcugcugcugggaaagac

SEQ ID NO: 383675 - RNA, 21 nt, Human
gaagguggggacccuccccca

SEQ ID NO: 383676 - RNA, 19 nt, Human
gaaguccaccggcccugcc

SEQ ID NO: 383677 - RNA, 20 nt, Human
gagccucaguuuccccgcug

SEQ ID NO: 383678 - RNA, 23 nt, Human
ggacccucccccagacucuacuc

SEQ ID NO: 383679 - RNA, 21 nt, Human
gggagaagaaaaccccuuagg

SEQ ID NO: 383680 - RNA, 22 nt, Human
uacaacaaaagcaagcuguggg

SEQ ID NO: 383681 - RNA, 19 nt, Human
uccccaguuuccgaaucug

SEQ ID NO: 383682 - RNA, 23 nt, Human
ucccccagacucuacucagauuc

SEQ ID NO: 383683 - RNA, 21 nt, Human
ucccugggagaagaaaacccc

SEQ ID NO: 383684 - RNA, 23 nt, Human
uccuacgccacaugcuagaccuc

SEQ ID NO: 383685 - RNA, 20 nt, Human
uccugcgcuccaccccgagc

SEQ ID NO: 383686 - RNA, 19 nt, Human
uggaaaacuaaaaggaaaa

SEQ ID NO: 383687 - RNA, 22 nt, Human
ugggaaagacagcagucuuggc

SEQ ID NO: 383688 - RNA, 25 nt, Human
ugggagaagaaaaccccuuagggaa

SEQ ID NO: 383689 - RNA, 20 nt, Human
uggggaggagguacaggaag

SEQ ID NO: 383690 - RNA, 26 nt, Human
uggggaggagguacaggaaggugggg

SEQ ID NO: 383691 - RNA, 21 nt, Human
ugucacagccaagggccaggg

SEQ ID NO: 383692 - RNA, 21 nt, Human
aagcgguggcagcagcagggg

SEQ ID NO: 383693 - RNA, 24 nt, Human
acucauucucaccuuccucuuccu

SEQ ID NO: 383694 - RNA, 21 nt, Human
acuuuauggacauaaaaggag

SEQ ID NO: 383695 - RNA, 21 nt, Human
agccaggccuuucccagccuc

SEQ ID NO: 383696 - RNA, 22 nt, Human
aggaagcgguggcagcagcagg

SEQ ID NO: 383697 - RNA, 23 nt, Human
aggcaggaagcgguggcagcagc

SEQ ID NO: 383698 - RNA, 20 nt, Human
aggcggucaucaaaagaggu

SEQ ID NO: 383699 - RNA, 18 nt, Human
agggagggaggcaguggg

SEQ ID NO: 383700 - RNA, 21 nt, Human
aggggcugggcagugcuuccc

SEQ ID NO: 383701 - RNA, 24 nt, Human
agguggucggugagggucuggagc

SEQ ID NO: 383702 - RNA, 19 nt, Human
auacuuucccuccucuccc

SEQ ID NO: 383703 - RNA, 18 nt, Human
caaguucacaaggccauc

SEQ ID NO: 383704 - RNA, 24 nt, Human
caccaaagagaacgucucacuuca

SEQ ID NO: 383705 - RNA, 23 nt, Human
caccuuccucuuccuccucccug

SEQ ID NO: 383706 - RNA, 25 nt, Human
caccuuccucuuccuccucccugcc

SEQ ID NO: 383707 - RNA, 18 nt, Human
caggcaggggcugggcag

SEQ ID NO: 383708 - RNA, 19 nt, Human
caggggcugggcagugcuu

SEQ ID NO: 383709 - RNA, 20 nt, Human
cagugggcagccaggccuuu

SEQ ID NO: 383710 - RNA, 20 nt, Human
cauccggguugaccaccaaa

SEQ ID NO: 383711 - RNA, 21 nt, Human
ccaaacugaauaaauagcauc

SEQ ID NO: 383712 - RNA, 23 nt, Human
ccacccggcuguuggcaucaggg

SEQ ID NO: 383713 - RNA, 20 nt, Human
cccugccacacuccccuccc

SEQ ID NO: 383714 - RNA, 21 nt, Human
cccugccacacuccccuccca

SEQ ID NO: 383715 - RNA, 24 nt, Human
ccuccucucccuccugccccaaac

SEQ ID NO: 383716 - RNA, 18 nt, Human
ccuuccucuuccuccucc

SEQ ID NO: 383717 - RNA, 21 nt, Human
cggguugaccaccaaagagaa

SEQ ID NO: 383718 - RNA, 19 nt, Human
cuccccacgagagcuaggg

SEQ ID NO: 383719 - RNA, 20 nt, Human
cuccucucccuccugcccca

SEQ ID NO: 383720 - RNA, 18 nt, Human
cuccugccccaaacugaa

SEQ ID NO: 383721 - RNA, 18 nt, Human
cuuggacagccacccggc

SEQ ID NO: 383722 - RNA, 23 nt, Human
cuuuugacuuugacacccaaauu

SEQ ID NO: 383723 - RNA, 21 nt, Human
gcagugcuucccugugucccc

SEQ ID NO: 383724 - RNA, 19 nt, Human
gcaucagggucagaaauac

SEQ ID NO: 383725 - RNA, 19 nt, Human
gcuuggacagccacccggc

SEQ ID NO: 383726 - RNA, 20 nt, Human
ggcagggagggaggcagugg

SEQ ID NO: 383727 - RNA, 22 nt, Human
ggcagggagggaggcagugggc

SEQ ID NO: 383728 - RNA, 25 nt, Human
gggggaaagggcagccaggcagggg

SEQ ID NO: 383729 - RNA, 23 nt, Human
uaaaaggaggggcagggagggag

SEQ ID NO: 383730 - RNA, 21 nt, Human
uaaauagcaucccucucccca

SEQ ID NO: 383731 - RNA, 24 nt, Human
uaaauagcaucccucuccccacga

SEQ ID NO: 383732 - RNA, 26 nt, Human
uaaauagcaucccucuccccacgaga

SEQ ID NO: 383733 - RNA, 19 nt, Human
uacuuucccuccucucccu

SEQ ID NO: 383734 - RNA, 20 nt, Human
uagaauacaaaacuguucua

SEQ ID NO: 383735 - RNA, 26 nt, Human
ucacaaggccauccagccugucaccc

SEQ ID NO: 383736 - RNA, 19 nt, Human
ucaccuuccucuuccuccu

SEQ ID NO: 383737 - RNA, 22 nt, Human
ucaccuuccucuuccuccuccc

SEQ ID NO: 383738 - RNA, 21 nt, Human
ucagaaauacuuucccuccuc

SEQ ID NO: 383739 - RNA, 25 nt, Human
ucagaaauacuuucccuccucuccc

SEQ ID NO: 383740 - RNA, 21 nt, Human
ucagggucagaaauacuuucc

SEQ ID NO: 383741 - RNA, 21 nt, Human
ucccuguguccccugcaaucc

SEQ ID NO: 383742 - RNA, 21 nt, Human
ucccuguguccccugcaaucc

SEQ ID NO: 383743 - RNA, 21 nt, Human
uccucuuccuccucccugcca

SEQ ID NO: 383744 - RNA, 23 nt, Human
uccugccccaaacugaauaaaua

SEQ ID NO: 383745 - RNA, 23 nt, Human
ucucccuccugccccaaacugaa

SEQ ID NO: 383746 - RNA, 19 nt, Human
ucuucugaaucaccagagu

SEQ ID NO: 383747 - RNA, 18 nt, Human
ugaaucaccagagucacu

SEQ ID NO: 383748 - RNA, 23 nt, Human
ugaaucaccagagucacugcccu

SEQ ID NO: 383749 - RNA, 18 nt, Human
ugacacccaaauucuccu

SEQ ID NO: 383750 - RNA, 20 nt, Human
ugacaggcaggaagcggugg

SEQ ID NO: 383751 - RNA, 18 nt, Human
uggacagccacccggcug

SEQ ID NO: 383752 - RNA, 21 nt, Human
uggcaucagggucagaaauac

SEQ ID NO: 383753 - RNA, 18 nt, Human
uugaccaccaaagagaac

SEQ ID NO: 383754 - RNA, 22 nt, Human
uugaccaccaaagagaacgucu

SEQ ID NO: 383755 - RNA, 20 nt, Human
uuugacuuugacacccaaau

SEQ ID NO: 383756 - RNA, 21 nt, Human
ccggccccgcgggcgcuuccg

SEQ ID NO: 383757 - RNA, 21 nt, Human
cgcacccggccccgcgggcgc

SEQ ID NO: 383758 - RNA, 23 nt, Human
uuuuuuuuuuuuuuuuuucacgg

SEQ ID NO: 383759 - RNA, 23 nt, Human
aaaaaaacucaaaaauaggacug

SEQ ID NO: 383760 - RNA, 23 nt, Human
aaaaaacucaaaaauaggacuga

SEQ ID NO: 383761 - RNA, 18 nt, Human
aaaaagagaaacacagua

SEQ ID NO: 383762 - RNA, 21 nt, Human
aaaaagagaaacacaguauaa

SEQ ID NO: 383763 - RNA, 18 nt, Human
aaaauacagcauaaaaug

SEQ ID NO: 383764 - RNA, 22 nt, Human
aaaauacagcauaaaaugagau

SEQ ID NO: 383765 - RNA, 22 nt, Human
aaacguuuucaaacacaacuaa

SEQ ID NO: 383766 - RNA, 21 nt, Human
aaagcaaaaaaaucuuagaaa

SEQ ID NO: 383767 - RNA, 18 nt, Human
aaccgugacuuggccaag

SEQ ID NO: 383768 - RNA, 22 nt, Human
aaccugccucaccccugcccug

SEQ ID NO: 383769 - RNA, 26 nt, Human
aagagggaggcaggcucggggcuggg

SEQ ID NO: 383770 - RNA, 27 nt, Human
aagcacuuaugagcagaaaccugccuc

SEQ ID NO: 383771 - RNA, 24 nt, Human
aagcaguuaagcucccccaaaaag

SEQ ID NO: 383772 - RNA, 19 nt, Human
aagcgggcuguucacucca

SEQ ID NO: 383773 - RNA, 24 nt, Human
aaggacuucuugccccuccaccuu

SEQ ID NO: 383774 - RNA, 25 nt, Human
aaggcccccuccuguacccccacaa

SEQ ID NO: 383775 - RNA, 28 nt, Human
aaggcccccuccuguacccccacaaaaa

SEQ ID NO: 383776 - RNA, 22 nt, Human
aagggaggggaagggaagagga

SEQ ID NO: 383777 - RNA, 23 nt, Human
aagggaggggaagggaagaggau

SEQ ID NO: 383778 - RNA, 18 nt, Human
aaguggugugucggggcu

SEQ ID NO: 383779 - RNA, 20 nt, Human
aaugagauuuagaucuguuu

SEQ ID NO: 383780 - RNA, 22 nt, Human
acaguauaaggcaguguuagaa

SEQ ID NO: 383781 - RNA, 19 nt, Human
accacagagaaaccgugac

SEQ ID NO: 383782 - RNA, 19 nt, Human
acccgcugcggccuccaca

SEQ ID NO: 383783 - RNA, 22 nt, Human
acccuacuuuccaccaaucagc

SEQ ID NO: 383784 - RNA, 19 nt, Human
accugccucaccccugccc

SEQ ID NO: 383785 - RNA, 20 nt, Human
agaggauacauaaaagcugg

SEQ ID NO: 383786 - RNA, 19 nt, Human
agagggaggcaggcucggg

SEQ ID NO: 383787 - RNA, 22 nt, Human
agcagcccuggagacaggcuga

SEQ ID NO: 383788 - RNA, 22 nt, Human
agccaaccaaccuugaccacag

SEQ ID NO: 383789 - RNA, 18 nt, Human
agccagccuguccccaga

SEQ ID NO: 383790 - RNA, 19 nt, Human
agccaggcagguagggauc

SEQ ID NO: 383791 - RNA, 20 nt, Human
agcccuucccacugccagcu

SEQ ID NO: 383792 - RNA, 26 nt, Human
agcggcugcggcucugcaagcugguc

SEQ ID NO: 383793 - RNA, 24 nt, Human
aggcucggggcugggccgcagcag

SEQ ID NO: 383794 - RNA, 21 nt, Human
agggaggggaagggaagagga

SEQ ID NO: 383795 - RNA, 22 nt, Human
agggaggggaagggaagaggau

SEQ ID NO: 383796 - RNA, 19 nt, Human
agggccaggagaaacagga

SEQ ID NO: 383797 - RNA, 20 nt, Human
aggucuaggggccagagaga

SEQ ID NO: 383798 - RNA, 18 nt, Human
auaaacagcagcuucuac

SEQ ID NO: 383799 - RNA, 23 nt, Human
auaaagcaaaaaaaucuuagaaa

SEQ ID NO: 383800 - RNA, 24 nt, Human
aucccacuuauccuccccucccug

SEQ ID NO: 383801 - RNA, 27 nt, Human
aucccacuuauccuccccucccugcaa

SEQ ID NO: 383802 - RNA, 18 nt, Human
augauaauaccaaugcgu

SEQ ID NO: 383803 - RNA, 21 nt, Human
caaaacaucugugccuuuacc

SEQ ID NO: 383804 - RNA, 20 nt, Human
caaacggacaaucugaguga

SEQ ID NO: 383805 - RNA, 22 nt, Human
caacaagcaguuaagcuccccc

SEQ ID NO: 383806 - RNA, 23 nt, Human
caacaagcaguuaagcuccccca

SEQ ID NO: 383807 - RNA, 26 nt, Human
caacaagcaguuaagcucccccaaaa

SEQ ID NO: 383808 - RNA, 24 nt, Human
cacacccccugcccacagcggcug

SEQ ID NO: 383809 - RNA, 18 nt, Human
caccaaucagccaaccaa

SEQ ID NO: 383810 - RNA, 28 nt, Human
cacccagaccagcagcuuccccaaggac

SEQ ID NO: 383811 - RNA, 21 nt, Human
cagaaacaacaucaaagccac

SEQ ID NO: 383812 - RNA, 21 nt, Human
cagaacuggugcugacugcuc

SEQ ID NO: 383813 - RNA, 18 nt, Human
cagcagcacccagaccag

SEQ ID NO: 383814 - RNA, 23 nt, Human
cagcauaaaaugagauuuagauc

SEQ ID NO: 383815 - RNA, 19 nt, Human
cagcuuggaggccagcagc

SEQ ID NO: 383816 - RNA, 21 nt, Human
caggauuaagaucaaaucggu

SEQ ID NO: 383817 - RNA, 25 nt, Human
caggugucucugcaaauaaaguucu

SEQ ID NO: 383818 - RNA, 20 nt, Human
caguccuugacggccacggg

SEQ ID NO: 383819 - RNA, 20 nt, Human
cauacggcacuaacagggag

SEQ ID NO: 383820 - RNA, 23 nt, Human
ccaaggacuucuugccccuccac

SEQ ID NO: 383821 - RNA, 21 nt, Human
ccaauggaugagaggccaaga

SEQ ID NO: 383822 - RNA, 20 nt, Human
ccacauaaagcaaaaaaauc

SEQ ID NO: 383823 - RNA, 24 nt, Human
ccagcagcuuccccaaggacuucu

SEQ ID NO: 383824 - RNA, 19 nt, Human
ccagcugccaggcuggccu

SEQ ID NO: 383825 - RNA, 25 nt, Human
cccaugugagguaacuggguugagu

SEQ ID NO: 383826 - RNA, 18 nt, Human
ccccaaaaagagaaacac

SEQ ID NO: 383827 - RNA, 23 nt, Human
ccccaaggacuucuugccccucc

SEQ ID NO: 383828 - RNA, 18 nt, Human
cccgcacccgcugcggcc

SEQ ID NO: 383829 - RNA, 20 nt, Human
cccgcacccgcugcggccuc

SEQ ID NO: 383830 - RNA, 21 nt, Human
cccgcacccgcugcggccucc

SEQ ID NO: 383831 - RNA, 21 nt, Human
cccugcccacagcggcugcgg

SEQ ID NO: 383832 - RNA, 20 nt, Human
ccgcacccgcugcggccucc

SEQ ID NO: 383833 - RNA, 23 nt, Human
ccuagcccacccagggccaggag

SEQ ID NO: 383834 - RNA, 21 nt, Human
ccucaagcuacuaaaacuccc

SEQ ID NO: 383835 - RNA, 18 nt, Human
ccucaccccugcccugca

SEQ ID NO: 383836 - RNA, 26 nt, Human
ccucaggaaaguggugugucggggcu

SEQ ID NO: 383837 - RNA, 24 nt, Human
ccucccugcaaaggcaucuucccg

SEQ ID NO: 383838 - RNA, 19 nt, Human
ccuccuguacccccacaaa

SEQ ID NO: 383839 - RNA, 21 nt, Human
ccuccuguacccccacaaaaa

SEQ ID NO: 383840 - RNA, 21 nt, Human
ccugaagccauugcucgaucu

SEQ ID NO: 383841 - RNA, 20 nt, Human
ccuguacccccacaaaaaaa

SEQ ID NO: 383842 - RNA, 27 nt, Human
cgcuaaaaauguaaacuuacaaauaag

SEQ ID NO: 383843 - RNA, 21 nt, Human
cggcgugggggaggcuuccag

SEQ ID NO: 383844 - RNA, 20 nt, Human
cugcgcuuucgagaccuugc

SEQ ID NO: 383845 - RNA, 22 nt, Human
cugcugcuggggcuaccccugu

SEQ ID NO: 383846 - RNA, 21 nt, Human
cuugcagggugcugcugcugg

SEQ ID NO: 383847 - RNA, 23 nt, Human
gagaggccaagagggaggcaggc

SEQ ID NO: 383848 - RNA, 19 nt, Human
gagcuccugccacaccccc

SEQ ID NO: 383849 - RNA, 23 nt, Human
gcacugaagggucagacgccaga

SEQ ID NO: 383850 - RNA, 21 nt, Human
gcaucuucccgaaucaggccc

SEQ ID NO: 383851 - RNA, 18 nt, Human
gccacacccccugcccac

SEQ ID NO: 383852 - RNA, 19 nt, Human
gcgugggggaggcuuccag

SEQ ID NO: 383853 - RNA, 24 nt, Human
gcucccccaaaaagagaaacacag

SEQ ID NO: 383854 - RNA, 18 nt, Human
gcugcuggggcuaccccu

SEQ ID NO: 383855 - RNA, 21 nt, Human
ggacuucuugccccuccaccu

SEQ ID NO: 383856 - RNA, 26 nt, Human
ggagaagagaacccaugucccgucgg

SEQ ID NO: 383857 - RNA, 21 nt, Human
ggagcgagguguggaccaaga

SEQ ID NO: 383858 - RNA, 25 nt, Human
ggagcuccugccacacccccugccc

SEQ ID NO: 383859 - RNA, 22 nt, Human
ggggguaaggaaguaggcuacc

SEQ ID NO: 383860 - RNA, 21 nt, Human
gggguaaggaaguaggcuacc

SEQ ID NO: 383861 - RNA, 23 nt, Human
gugcugcucagccagggcggccu

SEQ ID NO: 383862 - RNA, 21 nt, Human
uaaaacacuuggcaccaaucc

SEQ ID NO: 383863 - RNA, 22 nt, Human
uaaaaugagauuuagaucuguu

SEQ ID NO: 383864 - RNA, 20 nt, Human
uaaaguucucaaaacaucug

SEQ ID NO: 383865 - RNA, 21 nt, Human
uaacuggguugaguccguggg

SEQ ID NO: 383866 - RNA, 22 nt, Human
uaacuggguugaguccguggga

SEQ ID NO: 383867 - RNA, 20 nt, Human
uaaggcaucacaaauuguaa

SEQ ID NO: 383868 - RNA, 19 nt, Human
uaccccuguguggucucac

SEQ ID NO: 383869 - RNA, 24 nt, Human
uauaaaauacagcauaaaaugaga

SEQ ID NO: 383870 - RNA, 18 nt, Human
uaugagcagaaaccugcc

SEQ ID NO: 383871 - RNA, 18 nt, Human
ucaaaacaucugugccuu

SEQ ID NO: 383872 - RNA, 20 nt, Human
ucaaaacaucugugccuuua

SEQ ID NO: 383873 - RNA, 25 nt, Human
ucaaaacguuuucaaacacaacuaa

SEQ ID NO: 383874 - RNA, 18 nt, Human
ucacaggagaagagaacc

SEQ ID NO: 383875 - RNA, 19 nt, Human
ucacaggagaagagaaccc

SEQ ID NO: 383876 - RNA, 21 nt, Human
ucagccagggcggccugcgcu

SEQ ID NO: 383877 - RNA, 23 nt, Human
ucgcuccgcgucggcugcggcuc

SEQ ID NO: 383878 - RNA, 22 nt, Human
ucuugccccuccaccuugccuc

SEQ ID NO: 383879 - RNA, 28 nt, Human
ugaaccacccaaaauaauuuaguaguuu

SEQ ID NO: 383880 - RNA, 18 nt, Human
ugacuuggccaaggucau

SEQ ID NO: 383881 - RNA, 18 nt, Human
ugacuuggccaaggucau

SEQ ID NO: 383882 - RNA, 21 nt, Human
ugagaugccacagccaagcgg

SEQ ID NO: 383883 - RNA, 19 nt, Human
ugagcagaaaccugccuca

SEQ ID NO: 383884 - RNA, 20 nt, Human
ugagcagcuggccaggcugg

SEQ ID NO: 383885 - RNA, 21 nt, Human
ugcugcuggggcuaccccugu

SEQ ID NO: 383886 - RNA, 22 nt, Human
uggccaaggucauuugaugggg

SEQ ID NO: 383887 - RNA, 23 nt, Human
uggccaaggucauuugauggggg

SEQ ID NO: 383888 - RNA, 21 nt, Human
uggccaggcuggcuugcaggg

SEQ ID NO: 383889 - RNA, 21 nt, Human
uggcugaaccacccaaaauaa

SEQ ID NO: 383890 - RNA, 18 nt, Human
ugggacuaguucggcugu

SEQ ID NO: 383891 - RNA, 21 nt, Human
ugggggaggcuuccagcugcc

SEQ ID NO: 383892 - RNA, 24 nt, Human
ugggucuccagugcugggagcucc

SEQ ID NO: 383893 - RNA, 19 nt, Human
ugggugucccuaaauguuu

SEQ ID NO: 383894 - RNA, 18 nt, Human
ugugccuuuaccaaggga

SEQ ID NO: 383895 - RNA, 23 nt, Human
uucaaacacaacuaagauauaaa

SEQ ID NO: 383896 - RNA, 21 nt, Human
uucccacauaaagcaaaaaaa

SEQ ID NO: 383897 - RNA, 19 nt, Human
uugaugggggcugucauac

SEQ ID NO: 383898 - RNA, 22 nt, Human
aaaaagcagaaggcagcccugc

SEQ ID NO: 383899 - RNA, 23 nt, Human
aaaaaggcuggcccagccuuggc

SEQ ID NO: 383900 - RNA, 23 nt, Human
aaacagagaugaugacucggaau

SEQ ID NO: 383901 - RNA, 23 nt, Human
aaacagagaugaugacucggaau

SEQ ID NO: 383902 - RNA, 22 nt, Human
aaccaguggauggggcucugca

SEQ ID NO: 383903 - RNA, 22 nt, Human
aaccaguggauggggcucugca

SEQ ID NO: 383904 - RNA, 19 nt, Human
aaccuagucagccgccgca

SEQ ID NO: 383905 - RNA, 21 nt, Human
aacuguuucccuacuguccug

SEQ ID NO: 383906 - RNA, 21 nt, Human
aacuguuucccuacuguccug

SEQ ID NO: 383907 - RNA, 22 nt, Human
aagaccagcaagaauuugaaaa

SEQ ID NO: 383908 - RNA, 24 nt, Human
aauuaggaaugagucccaccuagc

SEQ ID NO: 383909 - RNA, 20 nt, Human
acaggaggccugcgggaggg

SEQ ID NO: 383910 - RNA, 23 nt, Human
acccuaggaccccucucagccac

SEQ ID NO: 383911 - RNA, 24 nt, Human
acccuaggaccccucucagccacc

SEQ ID NO: 383912 - RNA, 23 nt, Human
accgacaaacugaacagcugugg

SEQ ID NO: 383913 - RNA, 24 nt, Human
acugcugagauccccaacgggcca

SEQ ID NO: 383914 - RNA, 24 nt, Human
acugcugagauccccaacgggcca

SEQ ID NO: 383915 - RNA, 19 nt, Human
acuuucuuccaccuggcug

SEQ ID NO: 383916 - RNA, 19 nt, Human
acuuucuuccaccuggcug

SEQ ID NO: 383917 - RNA, 22 nt, Human
agaaaggaguauuuuaaaucca

SEQ ID NO: 383918 - RNA, 21 nt, Human
agagccccucccaacucugac

SEQ ID NO: 383919 - RNA, 23 nt, Human
agaugcccagaagggucugaaac

SEQ ID NO: 383920 - RNA, 25 nt, Human
agcacagccccagaacgcacugccc

SEQ ID NO: 383921 - RNA, 23 nt, Human
agccgccgcagccucucggcccc

SEQ ID NO: 383922 - RNA, 22 nt, Human
aggcccacagcugcucugugca

SEQ ID NO: 383923 - RNA, 19 nt, Human
aggcgccucccuucuccag

SEQ ID NO: 383924 - RNA, 18 nt, Human
agggcaugggaagccugg

SEQ ID NO: 383925 - RNA, 23 nt, Human
aggggcugccaccuguagggggc

SEQ ID NO: 383926 - RNA, 20 nt, Human
agguucccucucucccugcc

SEQ ID NO: 383927 - RNA, 21 nt, Human
agguucccucucucccugccc

SEQ ID NO: 383928 - RNA, 23 nt, Human
auuaggaaugagucccaccuagc

SEQ ID NO: 383929 - RNA, 23 nt, Human
auuaggaaugagucccaccuagc

SEQ ID NO: 383930 - RNA, 22 nt, Human
caaacgcucuggccaggagcuc

SEQ ID NO: 383931 - RNA, 20 nt, Human
caccaggaaggaaagguuug

SEQ ID NO: 383932 - RNA, 21 nt, Human
cacccuaggaccccucucagc

SEQ ID NO: 383933 - RNA, 19 nt, Human
cacccuccugccccacugc

SEQ ID NO: 383934 - RNA, 23 nt, Human
cacccuccugccccacugcugag

SEQ ID NO: 383935 - RNA, 25 nt, Human
cacggccuggcccucccgccgcagu

SEQ ID NO: 383936 - RNA, 25 nt, Human
cagaaaggaguauuuuaaauccacc

SEQ ID NO: 383937 - RNA, 18 nt, Human
cagaaggcagcccugccu

SEQ ID NO: 383938 - RNA, 21 nt, Human
cagauguccuggguuugcgcc

SEQ ID NO: 383939 - RNA, 20 nt, Human
cagcaaacagagaugaugac

SEQ ID NO: 383940 - RNA, 20 nt, Human
cagcaaacagagaugaugac

SEQ ID NO: 383941 - RNA, 21 nt, Human
cagcacagccccagaacgcaa

SEQ ID NO: 383942 - RNA, 18 nt, Human
cagcaugggagugggcag

SEQ ID NO: 383943 - RNA, 19 nt, Human
cagccucucggccccgccu

SEQ ID NO: 383944 - RNA, 21 nt, Human
cagccucucggccccgccucg

SEQ ID NO: 383945 - RNA, 19 nt, Human
cagcggggagaccugggac

SEQ ID NO: 383946 - RNA, 29 nt, Human
caggacuccccgaaaucaggcacccuccc

SEQ ID NO: 383947 - RNA, 29 nt, Human
caggacuccccgaaaucaggcacccuccc

SEQ ID NO: 383948 - RNA, 20 nt, Human
cagggaaaccaagccccagg

SEQ ID NO: 383949 - RNA, 21 nt, Human
cagggcagggaaaccaagccc

SEQ ID NO: 383950 - RNA, 22 nt, Human
cagguucccucucucccugccc

SEQ ID NO: 383951 - RNA, 21 nt, Human
caucccccacauucccaugac

SEQ ID NO: 383952 - RNA, 19 nt, Human
cauggcacagacauaugug

SEQ ID NO: 383953 - RNA, 19 nt, Human
cauggcacagacauaugug

SEQ ID NO: 383954 - RNA, 25 nt, Human
ccaauggcuuucaaggccauucccu

SEQ ID NO: 383955 - RNA, 18 nt, Human
ccagcgcccgcacaccag

SEQ ID NO: 383956 - RNA, 18 nt, Human
cccaggucaugcuggcuu

SEQ ID NO: 383957 - RNA, 25 nt, Human
cccccacauucccaugacugucccu

SEQ ID NO: 383958 - RNA, 22 nt, Human
ccccgccgcgccgcgguccgaa

SEQ ID NO: 383959 - RNA, 19 nt, Human
cccgccgcgccgcgguccg

SEQ ID NO: 383960 - RNA, 23 nt, Human
cccgccgcgccgcgguccgaaaa

SEQ ID NO: 383961 - RNA, 26 nt, Human
cccggccugcccaacacugcucagag

SEQ ID NO: 383962 - RNA, 26 nt, Human
cccggccugcccaacacugcucagag

SEQ ID NO: 383963 - RNA, 18 nt, Human
cccucucucccugcccca

SEQ ID NO: 383964 - RNA, 24 nt, Human
ccgccgcagccucucggccccgcc

SEQ ID NO: 383965 - RNA, 25 nt, Human
ccgccgcagccucucggccccgccu

SEQ ID NO: 383966 - RNA, 18 nt, Human
ccgccgcagucucucuuc

SEQ ID NO: 383967 - RNA, 19 nt, Human
ccgcgucucucccacggcc

SEQ ID NO: 383968 - RNA, 22 nt, Human
ccuaaguuucccccuaaguaaa

SEQ ID NO: 383969 - RNA, 22 nt, Human
ccuaggcugagagaagcaaggc

SEQ ID NO: 383970 - RNA, 22 nt, Human
ccuaggcugagagaagcaaggc

SEQ ID NO: 383971 - RNA, 23 nt, Human
ccucgggaugggagacccggccu

SEQ ID NO: 383972 - RNA, 23 nt, Human
ccucgggaugggagacccggccu

SEQ ID NO: 383973 - RNA, 20 nt, Human
ccuggaaaacucuaggacug

SEQ ID NO: 383974 - RNA, 22 nt, Human
cgaaaucaggcacccuccugcc

SEQ ID NO: 383975 - RNA, 18 nt, Human
cgagccucaagcagcgca

SEQ ID NO: 383976 - RNA, 22 nt, Human
cgccccagcgcccgcacaccag

SEQ ID NO: 383977 - RNA, 19 nt, Human
cggaagagggccugcgggg

SEQ ID NO: 383978 - RNA, 24 nt, Human
cgguccgaaaaccuagucagccgc

SEQ ID NO: 383979 - RNA, 25 nt, Human
cgugggcagcagcugucacacgggc

SEQ ID NO: 383980 - RNA, 25 nt, Human
cgugggcagcagcugucacacgggc

SEQ ID NO: 383981 - RNA, 23 nt, Human
cuccacugcugagauccccaacu

SEQ ID NO: 383982 - RNA, 22 nt, Human
cucccaacucugacaacaggcu

SEQ ID NO: 383983 - RNA, 22 nt, Human
cucccaacucugacaacaggcu

SEQ ID NO: 383984 - RNA, 24 nt, Human
cucccaacucugacaacaggcucg

SEQ ID NO: 383985 - RNA, 24 nt, Human
cucccaacucugacaacaggcucg

SEQ ID NO: 383986 - RNA, 18 nt, Human
cucugugcaggggcccuc

SEQ ID NO: 383987 - RNA, 24 nt, Human
cugaaacacccuaggaccccucuc

SEQ ID NO: 383988 - RNA, 18 nt, Human
cugaaucuugauuuucua

SEQ ID NO: 383989 - RNA, 23 nt, Human
cugccuccacacugggguuuggu

SEQ ID NO: 383990 - RNA, 19 nt, Human
cugcugaguuaaugaguac

SEQ ID NO: 383991 - RNA, 21 nt, Human
cuggcuggccaggaaggcagc

SEQ ID NO: 383992 - RNA, 21 nt, Human
cuggcuggccaggaaggcagc

SEQ ID NO: 383993 - RNA, 21 nt, Human
cuuggaaacuuucuuccaccu

SEQ ID NO: 383994 - RNA, 24 nt, Human
cuuggaaacuuucuuccaccugga

SEQ ID NO: 383995 - RNA, 24 nt, Human
cuuggaaacuuucuuccaccugga

SEQ ID NO: 383996 - RNA, 20 nt, Human
gaaggcagcccugccugcug

SEQ ID NO: 383997 - RNA, 21 nt, Human
gacaacaggcucgggucagga

SEQ ID NO: 383998 - RNA, 18 nt, Human
gaccugggacccgcccca

SEQ ID NO: 383999 - RNA, 18 nt, Human
gagccucaagcagcgcag

SEQ ID NO: 384000 - RNA, 24 nt, Human
gcagaaggcagcccugccugcugg

SEQ ID NO: 384001 - RNA, 21 nt, Human
gcagcagcugucacacgggcc

SEQ ID NO: 384002 - RNA, 23 nt, Human
gcaggggcugccaccuguagggg

SEQ ID NO: 384003 - RNA, 19 nt, Human
gcccaaaaaaggcuggccc

SEQ ID NO: 384004 - RNA, 18 nt, Human
gccccggaggcucaggcg

SEQ ID NO: 384005 - RNA, 23 nt, Human
gcuguggaaggagaugcccagaa

SEQ ID NO: 384006 - RNA, 18 nt, Human
gcuucaucccccacauuc

SEQ ID NO: 384007 - RNA, 19 nt, Human
ggaaggcagcaaacagaga

SEQ ID NO: 384008 - RNA, 24 nt, Human
ggaaugagucccaccuagcuucca

SEQ ID NO: 384009 - RNA, 24 nt, Human
ggaaugagucccaccuagcuucca

SEQ ID NO: 384010 - RNA, 22 nt, Human
ggacauggacucugcaucugcu

SEQ ID NO: 384011 - RNA, 19 nt, Human
ggaccccucucagccaccc

SEQ ID NO: 384012 - RNA, 22 nt, Human
ggcagaauuaggaaugaguccc

SEQ ID NO: 384013 - RNA, 22 nt, Human
ggcagaauuaggaaugaguccc

SEQ ID NO: 384014 - RNA, 18 nt, Human
ggcaggggcugccaccug

SEQ ID NO: 384015 - RNA, 23 nt, Human
gggcagcagcugucacacgggcc

SEQ ID NO: 384016 - RNA, 24 nt, Human
gggcaggggcugccaccuguaggg

SEQ ID NO: 384017 - RNA, 21 nt, Human
gggcugccaccuguagggggc

SEQ ID NO: 384018 - RNA, 27 nt, Human
gguaacaggagcagcacagccccagaa

SEQ ID NO: 384019 - RNA, 23 nt, Human
gguggucaagugccucugcgacc

SEQ ID NO: 384020 - RNA, 22 nt, Human
guccgaaaaccuagucagccgc

SEQ ID NO: 384021 - RNA, 23 nt, Human
gugaagcugagggacuguugggg

SEQ ID NO: 384022 - RNA, 23 nt, Human
uaacgggcuucccaaggaagucc

SEQ ID NO: 384023 - RNA, 24 nt, Human
uacagccaggcgccucccuucucc

SEQ ID NO: 384024 - RNA, 20 nt, Human
uagcuuggaaacuuucuucc

SEQ ID NO: 384025 - RNA, 20 nt, Human
uagcuuggaaacuuucuucc

SEQ ID NO: 384026 - RNA, 25 nt, Human
uaggcugagagaagcaaggcuguga

SEQ ID NO: 384027 - RNA, 25 nt, Human
uaggcugagagaagcaaggcuguga

SEQ ID NO: 384028 - RNA, 22 nt, Human
ucaaagagaccgacaaacugaa

SEQ ID NO: 384029 - RNA, 19 nt, Human
ucagaagguaacaggagca

SEQ ID NO: 384030 - RNA, 23 nt, Human
ucagcuucuuacggagccccaca

SEQ ID NO: 384031 - RNA, 24 nt, Human
uccccaacgggccagaccuagcuu

SEQ ID NO: 384032 - RNA, 24 nt, Human
uccccaacgggccagaccuagcuu

SEQ ID NO: 384033 - RNA, 22 nt, Human
ucggaagagggccugcggggga

SEQ ID NO: 384034 - RNA, 19 nt, Human
ucggucaaacgcucuggcc

SEQ ID NO: 384035 - RNA, 22 nt, Human
ucuacauauggauucagaaggu

SEQ ID NO: 384036 - RNA, 19 nt, Human
ucugaaacccaggcauggc

SEQ ID NO: 384037 - RNA, 24 nt, Human
ucugacaacaggcucgggucagga

SEQ ID NO: 384038 - RNA, 19 nt, Human
ucugcugaguuaaugagua

SEQ ID NO: 384039 - RNA, 19 nt, Human
ucuuacggagccccacaag

SEQ ID NO: 384040 - RNA, 18 nt, Human
ugaaacacccuaggaccc

SEQ ID NO: 384041 - RNA, 20 nt, Human
ugaaacacccuaggaccccu

SEQ ID NO: 384042 - RNA, 21 nt, Human
ugaaacccaggcauggcucca

SEQ ID NO: 384043 - RNA, 24 nt, Human
ugaaacccaggcauggcuccacug

SEQ ID NO: 384044 - RNA, 19 nt, Human
ugcagggccgugagcaggu

SEQ ID NO: 384045 - RNA, 22 nt, Human
ugccccaaggcaaggcaggcag

SEQ ID NO: 384046 - RNA, 24 nt, Human
ugccccacugcugagauccccaac

SEQ ID NO: 384047 - RNA, 19 nt, Human
ugcccgaggaggaaggcuc

SEQ ID NO: 384048 - RNA, 22 nt, Human
ugccugggcuucaucccccaca

SEQ ID NO: 384049 - RNA, 20 nt, Human
ugcugcagcucagcagugcc

SEQ ID NO: 384050 - RNA, 19 nt, Human
uggaaacuuucuuccaccu

SEQ ID NO: 384051 - RNA, 19 nt, Human
uggaaacuuucuuccaccu

SEQ ID NO: 384052 - RNA, 21 nt, Human
uggaaacuuucuuccaccugg

SEQ ID NO: 384053 - RNA, 21 nt, Human
uggaaacuuucuuccaccugg

SEQ ID NO: 384054 - RNA, 19 nt, Human
uggaaggagaugcccagaa

SEQ ID NO: 384055 - RNA, 19 nt, Human
uggaaggccucccugucuc

SEQ ID NO: 384056 - RNA, 19 nt, Human
uggaggaaaugcugccuca

SEQ ID NO: 384057 - RNA, 19 nt, Human
uggauggggcucugcacag

SEQ ID NO: 384058 - RNA, 19 nt, Human
uggauggggcucugcacag

SEQ ID NO: 384059 - RNA, 18 nt, Human
uggcucagggcaagaacc

SEQ ID NO: 384060 - RNA, 18 nt, Human
uggcucagggcaagaacc

SEQ ID NO: 384061 - RNA, 18 nt, Human
uggcucagggcaagaacc

SEQ ID NO: 384062 - RNA, 19 nt, Human
uggcucagggcaagaacca

SEQ ID NO: 384063 - RNA, 19 nt, Human
ugggacccagcacggggcc

SEQ ID NO: 384064 - RNA, 18 nt, Human
ugggcagaaaggaguauu

SEQ ID NO: 384065 - RNA, 21 nt, Human
uggggcagaguggaaggccuc

SEQ ID NO: 384066 - RNA, 22 nt, Human
ugggggagggcaugggaagccu

SEQ ID NO: 384067 - RNA, 22 nt, Human
ugggugaagcugagggacuguu

SEQ ID NO: 384068 - RNA, 20 nt, Human
uguggaaggagaugcccaga

SEQ ID NO: 384069 - RNA, 21 nt, Human
uguggaggaaaugcugccuca

SEQ ID NO: 384070 - RNA, 21 nt, Human
uucccucagaacccccuggaa

SEQ ID NO: 384071 - RNA, 18 nt, Human
uucccugccugggcuuca

SEQ ID NO: 384072 - RNA, 19 nt, Human
uugcgcccugcucugcugc

SEQ ID NO: 384073 - RNA, 22 nt, Human
uuggaaacuuucuuccaccugg

SEQ ID NO: 384074 - RNA, 22 nt, Human
uuggaaacuuucuuccaccugg

SEQ ID NO: 384075 - RNA, 19 nt, Human
uuggcuccagcuccgugga

SEQ ID NO: 384076 - RNA, 24 nt, Human
acuguugugucugucucucagcuc

SEQ ID NO: 384077 - RNA, 19 nt, Human
agagcaccacugugucccc

SEQ ID NO: 384078 - RNA, 22 nt, Human
agguggucaguuuccauccaug

SEQ ID NO: 384079 - RNA, 22 nt, Human
auucacuucacucucucuccag

SEQ ID NO: 384080 - RNA, 21 nt, Human
caagcucaugcucaccucaca

SEQ ID NO: 384081 - RNA, 18 nt, Human
cacaccagcuccuguuca

SEQ ID NO: 384082 - RNA, 21 nt, Human
cacaccucaggguuguccucu

SEQ ID NO: 384083 - RNA, 18 nt, Human
cagaaaggaaugagaccc

SEQ ID NO: 384084 - RNA, 20 nt, Human
cagaagccaagagagcgggg

SEQ ID NO: 384085 - RNA, 19 nt, Human
cagaccaggccccagucuc

SEQ ID NO: 384086 - RNA, 26 nt, Human
cagcagagcaccacugugucccccuc

SEQ ID NO: 384087 - RNA, 26 nt, Human
caggaugcaccacgccuggacgugcu

SEQ ID NO: 384088 - RNA, 26 nt, Human
caggcaguggggaacaggcagugacc

SEQ ID NO: 384089 - RNA, 24 nt, Human
cagucuuugucucauaaccggaga

SEQ ID NO: 384090 - RNA, 20 nt, Human
caucccacuuuguaucuugc

SEQ ID NO: 384091 - RNA, 23 nt, Human
ccaccguuccuccucccugaccc

SEQ ID NO: 384092 - RNA, 18 nt, Human
cccaggaugcaccacgcc

SEQ ID NO: 384093 - RNA, 26 nt, Human
cccauaugccacaccucaggguuguc

SEQ ID NO: 384094 - RNA, 21 nt, Human
ccgggccguucacgacucaca

SEQ ID NO: 384095 - RNA, 23 nt, Human
ccuaggacggaagacggcggccc

SEQ ID NO: 384096 - RNA, 22 nt, Human
ccuccaaauucugagcaguaaa

SEQ ID NO: 384097 - RNA, 20 nt, Human
ccugcaaaccucggggaagc

SEQ ID NO: 384098 - RNA, 20 nt, Human
cgccccggggcacuggggaa

SEQ ID NO: 384099 - RNA, 23 nt, Human
cgccccggggcacuggggaacag

SEQ ID NO: 384100 - RNA, 24 nt, Human
cggcagcagaggccaccgucuucu

SEQ ID NO: 384101 - RNA, 22 nt, Human
cucucucuuucucacaugggau

SEQ ID NO: 384102 - RNA, 25 nt, Human
cugggucugaaggucccggauccug

SEQ ID NO: 384103 - RNA, 19 nt, Human
cuuuguaucuugcauucac

SEQ ID NO: 384104 - RNA, 19 nt, Human
gaacagaaaggaaugagac

SEQ ID NO: 384105 - RNA, 23 nt, Human
gaacagaaaggaaugagacccca

SEQ ID NO: 384106 - RNA, 22 nt, Human
gacggaagacggcggccccagg

SEQ ID NO: 384107 - RNA, 27 nt, Human
gagaccccaacaggcagaagccaagag

SEQ ID NO: 384108 - RNA, 19 nt, Human
gcagcagaggccaccgucu

SEQ ID NO: 384109 - RNA, 21 nt, Human
ggcacuggggaacagaaagga

SEQ ID NO: 384110 - RNA, 20 nt, Human
gggaacaggcagugacugcc

SEQ ID NO: 384111 - RNA, 22 nt, Human
gggacagagccagcgucaagga

SEQ ID NO: 384112 - RNA, 19 nt, Human
gggaucugugaucugggcc

SEQ ID NO: 384113 - RNA, 18 nt, Human
ggugagcugcggacuaac

SEQ ID NO: 384114 - RNA, 23 nt, Human
guccuggagucuccuaggacgga

SEQ ID NO: 384115 - RNA, 18 nt, Human
gucugguaacagucacac

SEQ ID NO: 384116 - RNA, 20 nt, Human
gucuucugucccguggcucc

SEQ ID NO: 384117 - RNA, 18 nt, Human
uacugcucccucccucca

SEQ ID NO: 384118 - RNA, 20 nt, Human
uagguggucaguuuccaucc

SEQ ID NO: 384119 - RNA, 23 nt, Human
uauaugcauggaaagaguaugua

SEQ ID NO: 384120 - RNA, 22 nt, Human
ucacaacucagcagagcaccac

SEQ ID NO: 384121 - RNA, 26 nt, Human
ucacuucacucucucuccagcuuuua

SEQ ID NO: 384122 - RNA, 18 nt, Human
ucagaggguguccuggag

SEQ ID NO: 384123 - RNA, 21 nt, Human
uccauaugccacuaaaauuca

SEQ ID NO: 384124 - RNA, 22 nt, Human
ucccccucacauggagaggccg

SEQ ID NO: 384125 - RNA, 25 nt, Human
ucccuagguccaaugcacuugaccc

SEQ ID NO: 384126 - RNA, 23 nt, Human
ucccugacccugcaaaccucggg

SEQ ID NO: 384127 - RNA, 27 nt, Human
ucuccagcuuuuauucuuugggccgcc

SEQ ID NO: 384128 - RNA, 18 nt, Human
ucuccuaggacggaagac

SEQ ID NO: 384129 - RNA, 18 nt, Human
ucucucagcucaagcuca

SEQ ID NO: 384130 - RNA, 19 nt, Human
ugccacuaaaauucaccug

SEQ ID NO: 384131 - RNA, 22 nt, Human
ugccaggugcccauaugccaca

SEQ ID NO: 384132 - RNA, 24 nt, Human
ugcgaacacaggcaguggggaaca

SEQ ID NO: 384133 - RNA, 24 nt, Human
ugcucccucccuccaaauucugag

SEQ ID NO: 384134 - RNA, 18 nt, Human
uggaaagaguauguauuc

SEQ ID NO: 384135 - RNA, 20 nt, Human
uggagaggccgaggucugug

SEQ ID NO: 384136 - RNA, 18 nt, Human
ugggacagagccagcguc

SEQ ID NO: 384137 - RNA, 21 nt, Human
uguccuggagucuccuaggac

SEQ ID NO: 384138 - RNA, 25 nt, Human
uguccuggagucuccuaggacggaa

SEQ ID NO: 384139 - RNA, 24 nt, Human
ugucucauaaccggagaguuucau

SEQ ID NO: 384140 - RNA, 22 nt, Human
uucacgacucacaccuuccccg

SEQ ID NO: 384141 - RNA, 22 nt, Human
aagaugcuuaguucaaaauauc

SEQ ID NO: 384142 - RNA, 24 nt, Human
aagguuacuuuuuuugaauugcuc

SEQ ID NO: 384143 - RNA, 24 nt, Human
acuuuaagcuguaauagagaaagg

SEQ ID NO: 384144 - RNA, 21 nt, Human
agucauuuaguuucugaaagu

SEQ ID NO: 384145 - RNA, 19 nt, Human
caucaaaauuuccaaauca

SEQ ID NO: 384146 - RNA, 20 nt, Human
cccacugaggaauuaaacaa

SEQ ID NO: 384147 - RNA, 23 nt, Human
guucaaaauaucuuagauuuaau

SEQ ID NO: 384148 - RNA, 21 nt, Human
guuuagaaguugcaauuuuag

SEQ ID NO: 384149 - RNA, 24 nt, Human
uaaaaaugcuuaucaauuaacuau

SEQ ID NO: 384150 - RNA, 20 nt, Human
uaauagagaaagguaacacg

SEQ ID NO: 384151 - RNA, 21 nt, Human
uagugagcacuucaguucuuu

SEQ ID NO: 384152 - RNA, 24 nt, Human
uauuuuagaacaaauauaaagggu

SEQ ID NO: 384153 - RNA, 19 nt, Human
ucauuaacauauuuacaga

SEQ ID NO: 384154 - RNA, 26 nt, Human
uccuccuauaaauauuuucuuuuuau

SEQ ID NO: 384155 - RNA, 28 nt, Human
ugaaaaaaauaauuauaaaugcuggaaa

SEQ ID NO: 384156 - RNA, 18 nt, Human
ugaaaggcuguuacuuug

SEQ ID NO: 384157 - RNA, 21 nt, Human
ugaguagugagcacuucaguu

SEQ ID NO: 384158 - RNA, 18 nt, Human
uggaaaaauuggccucau

SEQ ID NO: 384159 - RNA, 24 nt, Human
uguaaaauuacaaauauuuauuac

SEQ ID NO: 384160 - RNA, 21 nt, Human
uuuaauauuauuuucacauuu

SEQ ID NO: 384161 - RNA, 20 nt, Human
uuuagaacaaauauaaaggg

SEQ ID NO: 384162 - RNA, 25 nt, Human
uuucuuggguucacugaacacaagg

SEQ ID NO: 384163 - RNA, 25 nt, Human
aaaccagccucagcccguaggccag

SEQ ID NO: 384164 - RNA, 21 nt, Human
aagcaggugcaaaaacaaaua

SEQ ID NO: 384165 - RNA, 20 nt, Human
aagccaucucccccaccccc

SEQ ID NO: 384166 - RNA, 21 nt, Human
aaggagcaaggcagccaucag

SEQ ID NO: 384167 - RNA, 18 nt, Human
agaccccucaaucuccag

SEQ ID NO: 384168 - RNA, 24 nt, Human
agagacccuacagcucuuagggcc

SEQ ID NO: 384169 - RNA, 19 nt, Human
agagcagguaggagcaggu

SEQ ID NO: 384170 - RNA, 18 nt, Human
agcaagggcuucccucuc

SEQ ID NO: 384171 - RNA, 19 nt, Human
agcaggugggggcaggugg

SEQ ID NO: 384172 - RNA, 20 nt, Human
agcaggugggggcaggugga

SEQ ID NO: 384173 - RNA, 21 nt, Human
aggaggccugcagcagacccc

SEQ ID NO: 384174 - RNA, 19 nt, Human
aggagggcagcaguggggg

SEQ ID NO: 384175 - RNA, 26 nt, Human
aggcagaagcaggugcaaaagggacc

SEQ ID NO: 384176 - RNA, 23 nt, Human
aggguugagggguguacaagagg

SEQ ID NO: 384177 - RNA, 18 nt, Human
agguaggagcaggugggg

SEQ ID NO: 384178 - RNA, 19 nt, Human
aguacaaaguuucuguggu

SEQ ID NO: 384179 - RNA, 19 nt, Human
auaccuuuggggcagcagg

SEQ ID NO: 384180 - RNA, 19 nt, Human
aucaccaccccaucaaugc

SEQ ID NO: 384181 - RNA, 25 nt, Human
aucaccaccccaucaaugcacauuc

SEQ ID NO: 384182 - RNA, 24 nt, Human
caaucuccaggcagaagcaggugc

SEQ ID NO: 384183 - RNA, 21 nt, Human
cacagacagacacauagaucu

SEQ ID NO: 384184 - RNA, 19 nt, Human
cacagauggggcugggaca

SEQ ID NO: 384185 - RNA, 19 nt, Human
cacagcccugaacguagag

SEQ ID NO: 384186 - RNA, 23 nt, Human
cacagcccugaacguagagcagg

SEQ ID NO: 384187 - RNA, 24 nt, Human
cacccccaauucuuggccuguacu

SEQ ID NO: 384188 - RNA, 22 nt, Human
cacugcacugugaaggcagagc

SEQ ID NO: 384189 - RNA, 24 nt, Human
cacugugaaggcagagcuuggucc

SEQ ID NO: 384190 - RNA, 18 nt, Human
cagagcucccaagagccc

SEQ ID NO: 384191 - RNA, 21 nt, Human
caggagggcagcaguggggga

SEQ ID NO: 384192 - RNA, 21 nt, Human
caucaccaccccaucaaugca

SEQ ID NO: 384193 - RNA, 26 nt, Human
cauucuuguccuaagugcuaucuacg

SEQ ID NO: 384194 - RNA, 23 nt, Human
ccacccccaauucuuggccugua

SEQ ID NO: 384195 - RNA, 23 nt, Human
ccagcacuguaagcacgagcaga

SEQ ID NO: 384196 - RNA, 28 nt, Human
ccagcacuguaagcacgagcagaaacca

SEQ ID NO: 384197 - RNA, 24 nt, Human
cccacagauggggcugggacaggg

SEQ ID NO: 384198 - RNA, 23 nt, Human
cccacggcuaacgacauucgggc

SEQ ID NO: 384199 - RNA, 21 nt, Human
cccauggacacccacuucccu

SEQ ID NO: 384200 - RNA, 25 nt, Human
cccauggacacccacuucccuucca

SEQ ID NO: 384201 - RNA, 21 nt, Human
ccccacccccaauucuuggcc

SEQ ID NO: 384202 - RNA, 21 nt, Human
ccccuagcaaccgcagagcuc

SEQ ID NO: 384203 - RNA, 23 nt, Human
ccccuuucuuucacuaguacaaa

SEQ ID NO: 384204 - RNA, 19 nt, Human
cccucagucagucuggccu

SEQ ID NO: 384205 - RNA, 21 nt, Human
ccuggagguuagucugggggg

SEQ ID NO: 384206 - RNA, 22 nt, Human
ccuggagguuagucuggggggc

SEQ ID NO: 384207 - RNA, 24 nt, Human
cgagcagaaaccagccucagcccg

SEQ ID NO: 384208 - RNA, 21 nt, Human
cgaggcccuggcagucauucu

SEQ ID NO: 384209 - RNA, 21 nt, Human
cgaggcccuggcagucauucu

SEQ ID NO: 384210 - RNA, 20 nt, Human
cuagguaccuucacugcacu

SEQ ID NO: 384211 - RNA, 19 nt, Human
cucccccacccccaauucu

SEQ ID NO: 384212 - RNA, 24 nt, Human
cugaguggugucagcggucaugac

SEQ ID NO: 384213 - RNA, 19 nt, Human
cugcacugccuuccucuca

SEQ ID NO: 384214 - RNA, 19 nt, Human
cugcucaguggcccaugga

SEQ ID NO: 384215 - RNA, 18 nt, Human
cuuagggccaacacuacc

SEQ ID NO: 384216 - RNA, 22 nt, Human
cuuggccuguacuuugccuucu

SEQ ID NO: 384217 - RNA, 21 nt, Human
gaaccagauucaguccaugcc

SEQ ID NO: 384218 - RNA, 18 nt, Human
gaagccaucucccccacc

SEQ ID NO: 384219 - RNA, 19 nt, Human
gaagguggguggggguuug

SEQ ID NO: 384220 - RNA, 23 nt, Human
gacauucgggccuagccggccuc

SEQ ID NO: 384221 - RNA, 19 nt, Human
gagcacaaagggcuggggu

SEQ ID NO: 384222 - RNA, 21 nt, Human
gagcaggugggggcaggugga

SEQ ID NO: 384223 - RNA, 23 nt, Human
gaggccugcagcagaccccucaa

SEQ ID NO: 384224 - RNA, 22 nt, Human
gcagaagcaggugcaaaaacaa

SEQ ID NO: 384225 - RNA, 18 nt, Human
gcagcagggaggaggccu

SEQ ID NO: 384226 - RNA, 24 nt, Human
gccaucucccccacccccaauucu

SEQ ID NO: 384227 - RNA, 19 nt, Human
gcugggacagggaaagggg

SEQ ID NO: 384228 - RNA, 19 nt, Human
gcuucaggcccccucaguc

SEQ ID NO: 384229 - RNA, 18 nt, Human
ggaauggcaggcagcaag

SEQ ID NO: 384230 - RNA, 21 nt, Human
ggcacagguagucaggaagga

SEQ ID NO: 384231 - RNA, 20 nt, Human
ggcuggggucugggaauggc

SEQ ID NO: 384232 - RNA, 18 nt, Human
gggaggaggccugcagca

SEQ ID NO: 384233 - RNA, 21 nt, Human
gggcuggggucugggaauggc

SEQ ID NO: 384234 - RNA, 19 nt, Human
gguggguggggguuuguaa

SEQ ID NO: 384235 - RNA, 19 nt, Human
guaggagcaggugggggca

SEQ ID NO: 384236 - RNA, 19 nt, Human
gugggggcagguggaggca

SEQ ID NO: 384237 - RNA, 22 nt, Human
guuucugugguuggggaaccag

SEQ ID NO: 384238 - RNA, 24 nt, Human
uacaagaggagaaccagauucagu

SEQ ID NO: 384239 - RNA, 21 nt, Human
uacagucucauguaggggcac

SEQ ID NO: 384240 - RNA, 22 nt, Human
uagaucuugguuccagcucuga

SEQ ID NO: 384241 - RNA, 22 nt, Human
ucaccacggccacagcccugaa

SEQ ID NO: 384242 - RNA, 18 nt, Human
ucagucuggccucagacu

SEQ ID NO: 384243 - RNA, 20 nt, Human
ucaugucgggcuaggcacuc

SEQ ID NO: 384244 - RNA, 23 nt, Human
uccagcucugaguggugucagcg

SEQ ID NO: 384245 - RNA, 24 nt, Human
uccaugccuggagguuagucuggg

SEQ ID NO: 384246 - RNA, 21 nt, Human
uccccauaccuuuggggcagc

SEQ ID NO: 384247 - RNA, 23 nt, Human
uccgugguuuucaaggcuucccu

SEQ ID NO: 384248 - RNA, 18 nt, Human
uccuggcauccaccuccg

SEQ ID NO: 384249 - RNA, 21 nt, Human
ucuaccuagugccuggcaccu

SEQ ID NO: 384250 - RNA, 23 nt, Human
ucucauguaggggcacucugggc

SEQ ID NO: 384251 - RNA, 20 nt, Human
ucugccugcucugggguugc

SEQ ID NO: 384252 - RNA, 20 nt, Human
ucuggccucugaugucugcc

SEQ ID NO: 384253 - RNA, 23 nt, Human
ucuggccucugaugucugccugc

SEQ ID NO: 384254 - RNA, 22 nt, Human
ugauagcagggcauacagucuc

SEQ ID NO: 384255 - RNA, 21 nt, Human
ugcaaaaacaaauauauucug

SEQ ID NO: 384256 - RNA, 20 nt, Human
ugcauaggguugaggggugu

SEQ ID NO: 384257 - RNA, 21 nt, Human
ugccuggagguuagucugggg

SEQ ID NO: 384258 - RNA, 22 nt, Human
ugccuggagguuagucuggggg

SEQ ID NO: 384259 - RNA, 25 nt, Human
uggaccaggugcucuaccuagugcc

SEQ ID NO: 384260 - RNA, 22 nt, Human
uggcaggcagcaagggcuuccc

SEQ ID NO: 384261 - RNA, 18 nt, Human
uggccagcucugcacugc

SEQ ID NO: 384262 - RNA, 25 nt, Human
uggcccauggacacccacuucccuu

SEQ ID NO: 384263 - RNA, 20 nt, Human
uggccucugaugucugccuu

SEQ ID NO: 384264 - RNA, 25 nt, Human
uggggaaccagcuucaugucgggcu

SEQ ID NO: 384265 - RNA, 21 nt, Human
uggggcugggacagggaaagg

SEQ ID NO: 384266 - RNA, 19 nt, Human
uguaagcacgagcagaaac

SEQ ID NO: 384267 - RNA, 21 nt, Human
uucccuuccaguggcaugugg

SEQ ID NO: 384268 - RNA, 22 nt, Human
aaagcuagauuugcugcauuua

SEQ ID NO: 384269 - RNA, 24 nt, Human
aaagugcugggaucacagguguga

SEQ ID NO: 384270 - RNA, 20 nt, Human
aaccuccgccuccugaauuc

SEQ ID NO: 384271 - RNA, 21 nt, Human
aaccugcaggaaguauaaaaa

SEQ ID NO: 384272 - RNA, 26 nt, Human
aagugcugggaucacaggugugagcc

SEQ ID NO: 384273 - RNA, 26 nt, Human
aauggaaaaguagaaaacaguauaaa

SEQ ID NO: 384274 - RNA, 19 nt, Human
acaggguuucaccaugaug

SEQ ID NO: 384275 - RNA, 20 nt, Human
acaggguuucaccaugaugg

SEQ ID NO: 384276 - RNA, 24 nt, Human
acaggguuucaccaugauggccag

SEQ ID NO: 384277 - RNA, 20 nt, Human
acagugaguauuaaacagga

SEQ ID NO: 384278 - RNA, 24 nt, Human
accaugauggccaggcuggucuug

SEQ ID NO: 384279 - RNA, 19 nt, Human
acuacaggcgugugccacc

SEQ ID NO: 384280 - RNA, 27 nt, Human
agaaaacaguauaaaauucaguaucac

SEQ ID NO: 384281 - RNA, 21 nt, Human
agacauacacucaucacaaca

SEQ ID NO: 384282 - RNA, 25 nt, Human
agagcucuucggagauuuuucuucu

SEQ ID NO: 384283 - RNA, 20 nt, Human
agccggccgggcagggaggc

SEQ ID NO: 384284 - RNA, 18 nt, Human
aggaaaaaaauauuauaa

SEQ ID NO: 384285 - RNA, 21 nt, Human
aggaaaaaaauauuauaauca

SEQ ID NO: 384286 - RNA, 24 nt, Human
aggcgugugccaccacgcccggcu

SEQ ID NO: 384287 - RNA, 23 nt, Human
aguagcugggacuacaggcgugu

SEQ ID NO: 384288 - RNA, 26 nt, Human
aguauuguuagguacagcugcucucc

SEQ ID NO: 384289 - RNA, 24 nt, Human
agugauucuccugccucagccucc

SEQ ID NO: 384290 - RNA, 20 nt, Human
agugcagugguaugaucuug

SEQ ID NO: 384291 - RNA, 23 nt, Human
agugcagugguaugaucuuggcu

SEQ ID NO: 384292 - RNA, 24 nt, Human
agugcagugguaugaucuuggcuc

SEQ ID NO: 384293 - RNA, 24 nt, Human
agugguaugaucuuggcucacugc

SEQ ID NO: 384294 - RNA, 23 nt, Human
auaauucaggcacacacuuuggc

SEQ ID NO: 384295 - RNA, 22 nt, Human
auguuaacauuaggaaaaaaau

SEQ ID NO: 384296 - RNA, 20 nt, Human
auucauguuacuaacaggcg

SEQ ID NO: 384297 - RNA, 18 nt, Human
auucuccugccucagccu

SEQ ID NO: 384298 - RNA, 22 nt, Human
caaaaaaccauccuggucccau

SEQ ID NO: 384299 - RNA, 24 nt, Human
caaagugcugggaucacaggugug

SEQ ID NO: 384300 - RNA, 20 nt, Human
caagugauucuccugccuca

SEQ ID NO: 384301 - RNA, 22 nt, Human
caagugauucuccugccucagc

SEQ ID NO: 384302 - RNA, 20 nt, Human
cacaacacaauuagaaaucu

SEQ ID NO: 384303 - RNA, 24 nt, Human
cacaacacaauuagaaaucucaga

SEQ ID NO: 384304 - RNA, 21 nt, Human
cacaggugugagccaccacac

SEQ ID NO: 384305 - RNA, 18 nt, Human
caccacacaggccuggcc

SEQ ID NO: 384306 - RNA, 24 nt, Human
caccacgcccggcuaauuuuugua

SEQ ID NO: 384307 - RNA, 21 nt, Human
caccaugauggccaggcuggu

SEQ ID NO: 384308 - RNA, 22 nt, Human
caccaugauggccaggcugguc

SEQ ID NO: 384309 - RNA, 23 nt, Human
caccaugauggccaggcuggucu

SEQ ID NO: 384310 - RNA, 19 nt, Human
caccuccucgcgccucggc

SEQ ID NO: 384311 - RNA, 21 nt, Human
cacugcaaccuccgccuccug

SEQ ID NO: 384312 - RNA, 20 nt, Human
cagccuccugaguagcuggg

SEQ ID NO: 384313 - RNA, 18 nt, Human
caggcgcccuuaaagugc

SEQ ID NO: 384314 - RNA, 24 nt, Human
caggguuucaccaugauggccagg

SEQ ID NO: 384315 - RNA, 24 nt, Human
caguagagacaggguuucaccaug

SEQ ID NO: 384316 - RNA, 26 nt, Human
caguagagacaggguuucaccaugau

SEQ ID NO: 384317 - RNA, 24 nt, Human
caugauggccaggcuggucuugaa

SEQ ID NO: 384318 - RNA, 19 nt, Human
cauuuucacaacacaauua

SEQ ID NO: 384319 - RNA, 21 nt, Human
ccaaagugcugggaucacagg

SEQ ID NO: 384320 - RNA, 24 nt, Human
ccaaagugcugggaucacaggugu

SEQ ID NO: 384321 - RNA, 20 nt, Human
ccaccacgcccggcuaauuu

SEQ ID NO: 384322 - RNA, 21 nt, Human
ccccgccgcccgggccuuggg

SEQ ID NO: 384323 - RNA, 24 nt, Human
ccgccuccugaauucaagugauuc

SEQ ID NO: 384324 - RNA, 26 nt, Human
ccggccgggcagggaggcgggucagc

SEQ ID NO: 384325 - RNA, 23 nt, Human
ccugaauucaagugauucuccug

SEQ ID NO: 384326 - RNA, 23 nt, Human
ccugaguagcugggacuacaggc

SEQ ID NO: 384327 - RNA, 24 nt, Human
ccugaguagcugggacuacaggcg

SEQ ID NO: 384328 - RNA, 23 nt, Human
ccugccucagccuccugaguagc

SEQ ID NO: 384329 - RNA, 22 nt, Human
ccuggucccauuaucauguccu

SEQ ID NO: 384330 - RNA, 21 nt, Human
cgaaauacgaaaugaagcuga

SEQ ID NO: 384331 - RNA, 24 nt, Human
cgacacagauuuccaauucauguu

SEQ ID NO: 384332 - RNA, 22 nt, Human
cgcgcuccagccucaccuccuc

SEQ ID NO: 384333 - RNA, 20 nt, Human
cggccgggcagggaggcggg

SEQ ID NO: 384334 - RNA, 21 nt, Human
cggccgggcagggaggcgggu

SEQ ID NO: 384335 - RNA, 19 nt, Human
cgggagccggccgggcagg

SEQ ID NO: 384336 - RNA, 24 nt, Human
cgugauccuccuaccucagccucc

SEQ ID NO: 384337 - RNA, 24 nt, Human
cucacgugauccuccuaccucagc

SEQ ID NO: 384338 - RNA, 24 nt, Human
cucagccuccugaguagcugggac

SEQ ID NO: 384339 - RNA, 21 nt, Human
cucccaagaaagagcuaaaga

SEQ ID NO: 384340 - RNA, 23 nt, Human
cucccuugaaaacuaauauauuc

SEQ ID NO: 384341 - RNA, 20 nt, Human
cuccucgcgccucggccccc

SEQ ID NO: 384342 - RNA, 19 nt, Human
cuccugaauucaagugauu

SEQ ID NO: 384343 - RNA, 22 nt, Human
cuccugccucagccuccugagu

SEQ ID NO: 384344 - RNA, 23 nt, Human
cucggccccgccucgugccgguu

SEQ ID NO: 384345 - RNA, 23 nt, Human
cugcaaccuccgccuccugaauu

SEQ ID NO: 384346 - RNA, 24 nt, Human
cugcaaccuccgccuccugaauuc

SEQ ID NO: 384347 - RNA, 23 nt, Human
cugccucagccuccugaguagcu

SEQ ID NO: 384348 - RNA, 18 nt, Human
cugccugaaauugagagg

SEQ ID NO: 384349 - RNA, 24 nt, Human
cuuacugugucacucaggcugcag

SEQ ID NO: 384350 - RNA, 20 nt, Human
gaaauacgaaaugaagcuga

SEQ ID NO: 384351 - RNA, 21 nt, Human
gaaccgccacgucgccaucug

SEQ ID NO: 384352 - RNA, 26 nt, Human
gaagcugaaauuaauuuuuacauuua

SEQ ID NO: 384353 - RNA, 20 nt, Human
gaguagcugggacuacaggc

SEQ ID NO: 384354 - RNA, 25 nt, Human
gaguagcugggacuacaggcgugug

SEQ ID NO: 384355 - RNA, 20 nt, Human
gaguuggggucgcggcgggc

SEQ ID NO: 384356 - RNA, 18 nt, Human
gaucacaggugugagcca

SEQ ID NO: 384357 - RNA, 20 nt, Human
gauuacuuuuuaagaagaac

SEQ ID NO: 384358 - RNA, 19 nt, Human
gcccgcgggacggccccgc

SEQ ID NO: 384359 - RNA, 22 nt, Human
gcccggcuaauuuuuguauuuu

SEQ ID NO: 384360 - RNA, 18 nt, Human
gcccuuaaagugcuccau

SEQ ID NO: 384361 - RNA, 23 nt, Human
gcgucccggaguuggggucgcgg

SEQ ID NO: 384362 - RNA, 18 nt, Human
gcucuccaggcagcuugu

SEQ ID NO: 384363 - RNA, 23 nt, Human
gcuggucuugaacucccgaccuc

SEQ ID NO: 384364 - RNA, 19 nt, Human
ggacuacaggcgugugcca

SEQ ID NO: 384365 - RNA, 24 nt, Human
ggaguuggggucgcggcgggcggg

SEQ ID NO: 384366 - RNA, 20 nt, Human
ggccgggcagggaggcgggu

SEQ ID NO: 384367 - RNA, 24 nt, Human
ggcuggucuugaacucccgaccuc

SEQ ID NO: 384368 - RNA, 27 nt, Human
gggaacagggaaggcgagggggccggu

SEQ ID NO: 384369 - RNA, 20 nt, Human
gucagcggccugggggagga

SEQ ID NO: 384370 - RNA, 24 nt, Human
gugauccuccuaccucagccuccc

SEQ ID NO: 384371 - RNA, 24 nt, Human
gugauucuccugccucagccuccu

SEQ ID NO: 384372 - RNA, 25 nt, Human
uaaaacaaguaucaguucaaaaaua

SEQ ID NO: 384373 - RNA, 19 nt, Human
uaaagucuagcuucuccca

SEQ ID NO: 384374 - RNA, 21 nt, Human
uaaagucuagcuucucccaag

SEQ ID NO: 384375 - RNA, 20 nt, Human
uaaagugcuccauuccccuu

SEQ ID NO: 384376 - RNA, 19 nt, Human
uaagaagaaccugcaggaa

SEQ ID NO: 384377 - RNA, 24 nt, Human
uaauuuuuguauuuucaguagaga

SEQ ID NO: 384378 - RNA, 23 nt, Human
uacaggcgugugccaccacgccc

SEQ ID NO: 384379 - RNA, 24 nt, Human
uaccucagccucccaaagugcugg

SEQ ID NO: 384380 - RNA, 23 nt, Human
uacucgacacagauuuccaauuc

SEQ ID NO: 384381 - RNA, 20 nt, Human
uacugugucacucaggcugc

SEQ ID NO: 384382 - RNA, 26 nt, Human
uagaaaacaguauaaaauucaguauc

SEQ ID NO: 384383 - RNA, 20 nt, Human
uagagacaggguuucaccau

SEQ ID NO: 384384 - RNA, 21 nt, Human
uagagacaggguuucaccaug

SEQ ID NO: 384385 - RNA, 19 nt, Human
ucacugcaaccuccgccuc

SEQ ID NO: 384386 - RNA, 20 nt, Human
ucacugcaaccuccgccucc

SEQ ID NO: 384387 - RNA, 22 nt, Human
ucacugcaaccuccgccuccug

SEQ ID NO: 384388 - RNA, 23 nt, Human
ucacugcaaccuccgccuccuga

SEQ ID NO: 384389 - RNA, 26 nt, Human
ucacugcaaccuccgccuccugaauu

SEQ ID NO: 384390 - RNA, 18 nt, Human
ucagccucccaaagugcu

SEQ ID NO: 384391 - RNA, 23 nt, Human
ucagccuccugaguagcugggac

SEQ ID NO: 384392 - RNA, 19 nt, Human
ucagcggccugggggagga

SEQ ID NO: 384393 - RNA, 24 nt, Human
ucaguagagacaggguuucaccau

SEQ ID NO: 384394 - RNA, 21 nt, Human
ucaguaucaccuauuugucuc

SEQ ID NO: 384395 - RNA, 23 nt, Human
ucagucuaugagacccagugacc

SEQ ID NO: 384396 - RNA, 23 nt, Human
ucccaaagugcugggaucacagg

SEQ ID NO: 384397 - RNA, 27 nt, Human
uccuccuaccucagccucccaaagugc

SEQ ID NO: 384398 - RNA, 21 nt, Human
uccugaauucaagugauucuc

SEQ ID NO: 384399 - RNA, 24 nt, Human
uccugaauucaagugauucuccug

SEQ ID NO: 384400 - RNA, 24 nt, Human
uccugaguagcugggacuacaggc

SEQ ID NO: 384401 - RNA, 18 nt, Human
ugaauucaagugauucuc

SEQ ID NO: 384402 - RNA, 23 nt, Human
ugaauucaagugauucuccugcc

SEQ ID NO: 384403 - RNA, 24 nt, Human
ugaauucaagugauucuccugccu

SEQ ID NO: 384404 - RNA, 19 nt, Human
ugaggugccaauguuuuaa

SEQ ID NO: 384405 - RNA, 19 nt, Human
ugcagugcagugguaugau

SEQ ID NO: 384406 - RNA, 24 nt, Human
ugcagugcagugguaugaucuugg

SEQ ID NO: 384407 - RNA, 22 nt, Human
ugcagugguaugaucuuggcuc

SEQ ID NO: 384408 - RNA, 25 nt, Human
ugcagugguaugaucuuuggaaggc

SEQ ID NO: 384409 - RNA, 24 nt, Human
ugccucagccuccugaguagcugg

SEQ ID NO: 384410 - RNA, 19 nt, Human
ugccugaaauugagaggcu

SEQ ID NO: 384411 - RNA, 19 nt, Human
ugcuccauuccccuugcuu

SEQ ID NO: 384412 - RNA, 24 nt, Human
ugcugggaucacaggugugagcca

SEQ ID NO: 384413 - RNA, 18 nt, Human
uggaagccucccacuccc

SEQ ID NO: 384414 - RNA, 21 nt, Human
uggagcaaugagcuuagguaa

SEQ ID NO: 384415 - RNA, 23 nt, Human
uggccaggcuggucuugaacucc

SEQ ID NO: 384416 - RNA, 24 nt, Human
ugggaacagggaaggcgagggggc

SEQ ID NO: 384417 - RNA, 18 nt, Human
ugggacuacaggcgugug

SEQ ID NO: 384418 - RNA, 21 nt, Human
ugggacuacaggcgugugcca

SEQ ID NO: 384419 - RNA, 22 nt, Human
ugggacuacaggcgugugccac

SEQ ID NO: 384420 - RNA, 24 nt, Human
ugggacuacaggcgugugccacca

SEQ ID NO: 384421 - RNA, 18 nt, Human
ugggaucacaggugugag

SEQ ID NO: 384422 - RNA, 19 nt, Human
ugggaucacaggugugagc

SEQ ID NO: 384423 - RNA, 22 nt, Human
ugggaucacaggugugagccac

SEQ ID NO: 384424 - RNA, 23 nt, Human
ugggaucacaggugugagccacc

SEQ ID NO: 384425 - RNA, 24 nt, Human
ugggaucacaggugugagccacca

SEQ ID NO: 384426 - RNA, 24 nt, Human
ugggggaggauaggcguccgcagc

SEQ ID NO: 384427 - RNA, 19 nt, Human
uguaaauagucugccuucc

SEQ ID NO: 384428 - RNA, 24 nt, Human
uuaggaaaaaaauauuauaaucau

SEQ ID NO: 384429 - RNA, 28 nt, Human
uuauuuuagguaaucaaagccuggagca

SEQ ID NO: 384430 - RNA, 21 nt, Human
uucaagugauucuccugccuc

SEQ ID NO: 384431 - RNA, 23 nt, Human
uucaagugauucuccugccucag

SEQ ID NO: 384432 - RNA, 24 nt, Human
uucaagugauucuccugccucagc

SEQ ID NO: 384433 - RNA, 23 nt, Human
uucauguuacuaacaggcgcccu

SEQ ID NO: 384434 - RNA, 18 nt, Human
uucucccaagaaagagcu

SEQ ID NO: 384435 - RNA, 31 nt, Human
uuggaagccucccacucccuugaaaacuaag

SEQ ID NO: 384436 - RNA, 21 nt, Human
uuggucucuaagcacuauaaa

SEQ ID NO: 384437 - RNA, 22 nt, Human
uuguuagguacagcugcucucc

SEQ ID NO: 384438 - RNA, 19 nt, Human
uuuagguaaucaaagccug

SEQ ID NO: 384439 - RNA, 21 nt, Human
uuucaccaugauggccaggcu

SEQ ID NO: 384440 - RNA, 19 nt, Human
uuuuaagaagaaccugcag

SEQ ID NO: 384441 - RNA, 24 nt, Human
uuuucaguagagacaggguuucac

SEQ ID NO: 384442 - RNA, 20 nt, Human
uuuuuguauuuucaguagag

SEQ ID NO: 384443 - RNA, 23 nt, Human
uuuuuguauuuucaguagagaca

SEQ ID NO: 384444 - RNA, 23 nt, Human
uuuuuuuuuuuuggagacagucu

SEQ ID NO: 384445 - RNA, 20 nt, Human
uuuuuuuuuuuuuuuuuugg

SEQ ID NO: 384446 - RNA, 26 nt, Human
aaaaaaaaaaaaaaaggcauugccua

SEQ ID NO: 384447 - RNA, 25 nt, Human
aaaaaaaaaaaaaggcauugccuag

SEQ ID NO: 384448 - RNA, 20 nt, Human
aaaaaaaaggcauugccuag

SEQ ID NO: 384449 - RNA, 18 nt, Human
aaaaacaccaguccaaaa

SEQ ID NO: 384450 - RNA, 19 nt, Human
aaaaacaccaguccaaaaa

SEQ ID NO: 384451 - RNA, 18 nt, Human
aaaaaggcauugccuagc

SEQ ID NO: 384452 - RNA, 21 nt, Human
aaaaauauauauccauuuccc

SEQ ID NO: 384453 - RNA, 26 nt, Human
aaaacaaaacaaaacacguuauaccc

SEQ ID NO: 384454 - RNA, 19 nt, Human
aaaacucagugagaaucca

SEQ ID NO: 384455 - RNA, 20 nt, Human
aaaauacacaacuccgggac

SEQ ID NO: 384456 - RNA, 21 nt, Human
aaaauacacaacuccgggaca

SEQ ID NO: 384457 - RNA, 22 nt, Human
aaaaucccaaaaguuagcccaa

SEQ ID NO: 384458 - RNA, 19 nt, Human
aaaccaucaucaaaaaugc

SEQ ID NO: 384459 - RNA, 21 nt, Human
aaaccaucaucaaaaaugcag

SEQ ID NO: 384460 - RNA, 22 nt, Human
aaagaucacgaugucagcaagc

SEQ ID NO: 384461 - RNA, 28 nt, Human
aacaaaacaaaacacguuauacccucga

SEQ ID NO: 384462 - RNA, 19 nt, Human
aacagaagcaacuccaucu

SEQ ID NO: 384463 - RNA, 18 nt, Human
aacuaaaagcugagcauc

SEQ ID NO: 384464 - RNA, 18 nt, Human
aacuaaaagcugagcauc

SEQ ID NO: 384465 - RNA, 22 nt, Human
aacucucucuuuucuuccgcua

SEQ ID NO: 384466 - RNA, 23 nt, Human
aagcaacugcaucuaucagaagc

SEQ ID NO: 384467 - RNA, 23 nt, Human
aagcacaaaguaaaaucccaaaa

SEQ ID NO: 384468 - RNA, 25 nt, Human
aauccucguuccucuaaguuaaagg

SEQ ID NO: 384469 - RNA, 24 nt, Human
acaaaacaaaacacguuauacccu

SEQ ID NO: 384470 - RNA, 24 nt, Human
acagaagcaacuccaucuaccuuu

SEQ ID NO: 384471 - RNA, 24 nt, Human
agaaugguguuuuccaaaaggcuu

SEQ ID NO: 384472 - RNA, 22 nt, Human
agagcaaacuuuucuguauaua

SEQ ID NO: 384473 - RNA, 24 nt, Human
agcaccggaagcaguacucagaaa

SEQ ID NO: 384474 - RNA, 24 nt, Human
aucuuuaacaaugucagguucuga

SEQ ID NO: 384475 - RNA, 20 nt, Human
caaaaaaaaaaaaaaaggca

SEQ ID NO: 384476 - RNA, 22 nt, Human
caaaacaaaacacguuauaccc

SEQ ID NO: 384477 - RNA, 23 nt, Human
caacugcaucuaucagaagcgau

SEQ ID NO: 384478 - RNA, 24 nt, Human
caaggccauccacuugaacucucu

SEQ ID NO: 384479 - RNA, 23 nt, Human
cacaugaaaccugaggacacuuc

SEQ ID NO: 384480 - RNA, 22 nt, Human
cagaacaggauaaauuuagaau

SEQ ID NO: 384481 - RNA, 23 nt, Human
cagaacaggauaaauuuagaaug

SEQ ID NO: 384482 - RNA, 20 nt, Human
cagauacuuuuauuaauucu

SEQ ID NO: 384483 - RNA, 20 nt, Human
caggaaacagguaaaggcua

SEQ ID NO: 384484 - RNA, 22 nt, Human
cagugcuaucuauagcagcugc

SEQ ID NO: 384485 - RNA, 19 nt, Human
cauccauuacugggcaaau

SEQ ID NO: 384486 - RNA, 21 nt, Human
ccacaugaaaccugaggacac

SEQ ID NO: 384487 - RNA, 23 nt, Human
ccaguccaaaaauauauaucccc

SEQ ID NO: 384488 - RNA, 19 nt, Human
cccaaccuggccucggugg

SEQ ID NO: 384489 - RNA, 21 nt, Human
ccccuaguguccucgaggcug

SEQ ID NO: 384490 - RNA, 23 nt, Human
ccgguggcaggaucgccgcuucc

SEQ ID NO: 384491 - RNA, 23 nt, Human
cgguggcaggaucgccgcuuccc

SEQ ID NO: 384492 - RNA, 22 nt, Human
cucaaggccauccacuugaacu

SEQ ID NO: 384493 - RNA, 21 nt, Human
cugaaaacucugauugaaaaa

SEQ ID NO: 384494 - RNA, 22 nt, Human
cugcuucaaaaaaaaaaaaaaa

SEQ ID NO: 384495 - RNA, 23 nt, Human
cuucaaaaaaaaaaaaaaaggca

SEQ ID NO: 384496 - RNA, 22 nt, Human
cuucuuugguucaaagauuugu

SEQ ID NO: 384497 - RNA, 22 nt, Human
cuucuuugguucaaagauuugu

SEQ ID NO: 384498 - RNA, 19 nt, Human
gaagcgaugaugauucaga

SEQ ID NO: 384499 - RNA, 20 nt, Human
gacuauuugagaguaaaauu

SEQ ID NO: 384500 - RNA, 19 nt, Human
gagcaucgauuccucuuuc

SEQ ID NO: 384501 - RNA, 19 nt, Human
gagcaucgauuccucuuuc

SEQ ID NO: 384502 - RNA, 19 nt, Human
gaugauucagaacaggaua

SEQ ID NO: 384503 - RNA, 20 nt, Human
gauguuuuuauuuugacuau

SEQ ID NO: 384504 - RNA, 23 nt, Human
gcaguacucagaacaagucauac

SEQ ID NO: 384505 - RNA, 23 nt, Human
gcagugcuaucuauagcagcugc

SEQ ID NO: 384506 - RNA, 18 nt, Human
gcugaacuuccccaaccu

SEQ ID NO: 384507 - RNA, 20 nt, Human
gcuugaaacuuuccuuugac

SEQ ID NO: 384508 - RNA, 20 nt, Human
gcuugaaacuuuccuuugac

SEQ ID NO: 384509 - RNA, 21 nt, Human
gggagauauuaagguagaaag

SEQ ID NO: 384510 - RNA, 20 nt, Human
gguaaaggcuacaucccaaa

SEQ ID NO: 384511 - RNA, 21 nt, Human
uaaaggcuacaucccaaaagu

SEQ ID NO: 384512 - RNA, 18 nt, Human
uaacaaugucagguucug

SEQ ID NO: 384513 - RNA, 23 nt, Human
uaacagauacuuuuauuaauucu

SEQ ID NO: 384514 - RNA, 24 nt, Human
uaagaauucuuucuucuuugguuc

SEQ ID NO: 384515 - RNA, 24 nt, Human
uaagaauucuuucuucuuugguuc

SEQ ID NO: 384516 - RNA, 26 nt, Human
uacauaaaaacaaggcacuauacauu

SEQ ID NO: 384517 - RNA, 22 nt, Human
uacuuugugaaaaacaccaguc

SEQ ID NO: 384518 - RNA, 22 nt, Human
uagaaugguguuuuccaaaagg

SEQ ID NO: 384519 - RNA, 20 nt, Human
uagcuggaacaagaaggcag

SEQ ID NO: 384520 - RNA, 18 nt, Human
uaggaagugcaacuaaaa

SEQ ID NO: 384521 - RNA, 18 nt, Human
uaggaagugcaacuaaaa

SEQ ID NO: 384522 - RNA, 21 nt, Human
ucaaaaaaaaaaaaaaaggca

SEQ ID NO: 384523 - RNA, 22 nt, Human
ucaaaacucagugagaauccac

SEQ ID NO: 384524 - RNA, 28 nt, Human
ucaaaaucaucauaucucagcuuuucaa

SEQ ID NO: 384525 - RNA, 22 nt, Human
ucaugggcuucuccuucaguuu

SEQ ID NO: 384526 - RNA, 19 nt, Human
uccacaugaaaccugagga

SEQ ID NO: 384527 - RNA, 23 nt, Human
ucccgguggcaggaucgccgcuu

SEQ ID NO: 384528 - RNA, 19 nt, Human
uccucguuccucuaaguua

SEQ ID NO: 384529 - RNA, 22 nt, Human
ucuaauuuaaaaaacaaaacaa

SEQ ID NO: 384530 - RNA, 23 nt, Human
ucuccaauguagccagaaucuac

SEQ ID NO: 384531 - RNA, 22 nt, Human
ucuccagaguccaugccauuaa

SEQ ID NO: 384532 - RNA, 23 nt, Human
ucucuucaugggcuucuccuuca

SEQ ID NO: 384533 - RNA, 23 nt, Human
ucuuuaacaaugucagguucuga

SEQ ID NO: 384534 - RNA, 22 nt, Human
ugaaaaacaccaguccaaaaau

SEQ ID NO: 384535 - RNA, 24 nt, Human
ugaaaaauacuuugugaaaaacac

SEQ ID NO: 384536 - RNA, 25 nt, Human
ugaaaaauacuuugugaaaaacacc

SEQ ID NO: 384537 - RNA, 18 nt, Human
ugauugaaaaauacuuug

SEQ ID NO: 384538 - RNA, 18 nt, Human
uguacaaaaucaaagauc

SEQ ID NO: 384539 - RNA, 23 nt, Human
ugugaaaaacaccaguccaaaaa

SEQ ID NO: 384540 - RNA, 20 nt, Human
uguuggacgugaccgugagg

SEQ ID NO: 384541 - RNA, 20 nt, Human
uucaaaaaaaaaaaaaaagg

SEQ ID NO: 384542 - RNA, 23 nt, Human
uucaaaaaaaaaaaaaaaggcau

SEQ ID NO: 384543 - RNA, 21 nt, Human
uucagaacaggauaaauuuag

SEQ ID NO: 384544 - RNA, 23 nt, Human
uucagaacaggauaaauuuagaa

SEQ ID NO: 384545 - RNA, 26 nt, Human
uuccucuccaaaaagaacgccaaaaa

SEQ ID NO: 384546 - RNA, 20 nt, Human
uugacuuauaugguguuuau

SEQ ID NO: 384547 - RNA, 19 nt, Human
uuuagaauccacaaacuau

SEQ ID NO: 384548 - RNA, 20 nt, Human
uuuagaauccacaaacuauc

SEQ ID NO: 384549 - RNA, 23 nt, Human
aaaaauuagcaaaaaauugagaa

SEQ ID NO: 384550 - RNA, 19 nt, Human
aaaacaccugaugacaagc

SEQ ID NO: 384551 - RNA, 21 nt, Human
aaaaggaaacacgcugccaaa

SEQ ID NO: 384552 - RNA, 24 nt, Human
aaaaggaaacacgcugccaaagga

SEQ ID NO: 384553 - RNA, 24 nt, Human
aaacagccaaaaaucuuaagacaa

SEQ ID NO: 384554 - RNA, 24 nt, Human
aaagugcugggauuacaggcguga

SEQ ID NO: 384555 - RNA, 23 nt, Human
aaccggccaaucuaguuuaacag

SEQ ID NO: 384556 - RNA, 18 nt, Human
aagcuagaaaaccucuac

SEQ ID NO: 384557 - RNA, 20 nt, Human
aaggauauugccuccuagac

SEQ ID NO: 384558 - RNA, 19 nt, Human
aaguagcugggauuacagg

SEQ ID NO: 384559 - RNA, 25 nt, Human
aaguagcugggauuacaggcgcccg

SEQ ID NO: 384560 - RNA, 19 nt, Human
aagugcugggauuacaggc

SEQ ID NO: 384561 - RNA, 19 nt, Human
aagugcugggauuacaggc

SEQ ID NO: 384562 - RNA, 24 nt, Human
aaugugcagucaaaccacaggaaa

SEQ ID NO: 384563 - RNA, 19 nt, Human
acagaccauuucuucauug

SEQ ID NO: 384564 - RNA, 19 nt, Human
acagaggaagggaaaaagc

SEQ ID NO: 384565 - RNA, 20 nt, Human
acaggguuucaccagguugg

SEQ ID NO: 384566 - RNA, 24 nt, Human
acaggguuucaccagguuggccag

SEQ ID NO: 384567 - RNA, 23 nt, Human
accacgcccggcccccaaagcug

SEQ ID NO: 384568 - RNA, 18 nt, Human
accugaugacaagcacuc

SEQ ID NO: 384569 - RNA, 30 nt, Human
acucuguugcccaagcuggaguacaacggg

SEQ ID NO: 384570 - RNA, 19 nt, Human
agacaggguuucaccaggu

SEQ ID NO: 384571 - RNA, 19 nt, Human
agagaggcacagaaggaag

SEQ ID NO: 384572 - RNA, 21 nt, Human
agaggugauuagguucuuugu

SEQ ID NO: 384573 - RNA, 21 nt, Human
agauaaauaagaaggcuuccu

SEQ ID NO: 384574 - RNA, 19 nt, Human
agaugcauauaaacuauga

SEQ ID NO: 384575 - RNA, 22 nt, Human
agcaaaaaauugagaaaguuga

SEQ ID NO: 384576 - RNA, 23 nt, Human
agcagacauacagucaacuuccu

SEQ ID NO: 384577 - RNA, 24 nt, Human
agcuacugaauaaaaugauaauac

SEQ ID NO: 384578 - RNA, 21 nt, Human
aggaaauggcaaugacuccau

SEQ ID NO: 384579 - RNA, 24 nt, Human
aggugauccacccgccucggccuc

SEQ ID NO: 384580 - RNA, 24 nt, Human
agugauucuccugccucagccucc

SEQ ID NO: 384581 - RNA, 18 nt, Human
agugcugggauuacaggc

SEQ ID NO: 384582 - RNA, 18 nt, Human
auaauccucucacagccu

SEQ ID NO: 384583 - RNA, 21 nt, Human
auacuggagucuucuggugua

SEQ ID NO: 384584 - RNA, 20 nt, Human
aucagaugcauauaaacuau

SEQ ID NO: 384585 - RNA, 23 nt, Human
auuccaucaugauccuccccacc

SEQ ID NO: 384586 - RNA, 24 nt, Human
caaagugcugggauuacaggcgug

SEQ ID NO: 384587 - RNA, 22 nt, Human
caagugauucuccugccucagc

SEQ ID NO: 384588 - RNA, 27 nt, Human
caagugauucuccugccucagccuccc

SEQ ID NO: 384589 - RNA, 24 nt, Human
cacaacuucuagaaguagaaauuc

SEQ ID NO: 384590 - RNA, 20 nt, Human
cacauauguaaccgcuuagu

SEQ ID NO: 384591 - RNA, 22 nt, Human
caccacgcccggcccccaaagc

SEQ ID NO: 384592 - RNA, 22 nt, Human
caccagguuggccaggcugcuc

SEQ ID NO: 384593 - RNA, 23 nt, Human
cacccgccucggccucccaaagu

SEQ ID NO: 384594 - RNA, 21 nt, Human
caccugaugacaagcacucaa

SEQ ID NO: 384595 - RNA, 19 nt, Human
cacucuguugcccaagcug

SEQ ID NO: 384596 - RNA, 23 nt, Human
cacuuuauaaaggcaacuauaag

SEQ ID NO: 384597 - RNA, 19 nt, Human
caggaccuauuucacaacu

SEQ ID NO: 384598 - RNA, 21 nt, Human
caggcgcccgccaccacgcuc

SEQ ID NO: 384599 - RNA, 24 nt, Human
caggguuucaccagguuggccagg

SEQ ID NO: 384600 - RNA, 20 nt, Human
ccaaagugcugggauuacag

SEQ ID NO: 384601 - RNA, 22 nt, Human
ccaaagugcugggauuacaggc

SEQ ID NO: 384602 - RNA, 22 nt, Human
ccaaagugcugggauuacaggc

SEQ ID NO: 384603 - RNA, 24 nt, Human
ccaaagugcugggauuacaggcgu

SEQ ID NO: 384604 - RNA, 24 nt, Human
ccaaaugggauauacuuaguucau

SEQ ID NO: 384605 - RNA, 18 nt, Human
ccaacacccaaaucagcu

SEQ ID NO: 384606 - RNA, 22 nt, Human
ccaaguagcugggauuacaggc

SEQ ID NO: 384607 - RNA, 18 nt, Human
ccaggcagugugaggucu

SEQ ID NO: 384608 - RNA, 23 nt, Human
cccaaguagcugggauuacaggc

SEQ ID NO: 384609 - RNA, 23 nt, Human
cccaaguagcugggauuacaggc

SEQ ID NO: 384610 - RNA, 22 nt, Human
cccagggcuagagcagcuaagc

SEQ ID NO: 384611 - RNA, 19 nt, Human
cccauagauuucacagagg

SEQ ID NO: 384612 - RNA, 19 nt, Human
ccccgccaaccccuccugc

SEQ ID NO: 384613 - RNA, 22 nt, Human
ccccgccaaccccuccugccca

SEQ ID NO: 384614 - RNA, 18 nt, Human
ccccucaacauagcacau

SEQ ID NO: 384615 - RNA, 21 nt, Human
cccgccaccacgcucagcuaa

SEQ ID NO: 384616 - RNA, 18 nt, Human
cccucaacauagcacauc

SEQ ID NO: 384617 - RNA, 24 nt, Human
ccgccucccacguucaagugauuc

SEQ ID NO: 384618 - RNA, 23 nt, Human
ccuaaggccacacuguuuccauc

SEQ ID NO: 384619 - RNA, 24 nt, Human
ccucccacguucaagugauucucc

SEQ ID NO: 384620 - RNA, 22 nt, Human
ccugaccucaggugauccaccc

SEQ ID NO: 384621 - RNA, 23 nt, Human
ccugaccucaggugauccacccg

SEQ ID NO: 384622 - RNA, 20 nt, Human
ccugcugccccgccaacccc

SEQ ID NO: 384623 - RNA, 24 nt, Human
cgccucggccucccaaagugcugg

SEQ ID NO: 384624 - RNA, 22 nt, Human
cgugagccaccacgcccggccc

SEQ ID NO: 384625 - RNA, 24 nt, Human
cucacucuguugcccaagcuggag

SEQ ID NO: 384626 - RNA, 23 nt, Human
cucagccucccaaguagcuggga

SEQ ID NO: 384627 - RNA, 23 nt, Human
cucucauguaaauaaauacauac

SEQ ID NO: 384628 - RNA, 18 nt, Human
cugagguucucuguccuc

SEQ ID NO: 384629 - RNA, 24 nt, Human
cugcaaccuccgccucccacguuc

SEQ ID NO: 384630 - RNA, 23 nt, Human
cugccucagccucccaaguagcu

SEQ ID NO: 384631 - RNA, 24 nt, Human
cugcugccccgccaaccccuccug

SEQ ID NO: 384632 - RNA, 23 nt, Human
cuuaagacaaauaccuacagacc

SEQ ID NO: 384633 - RNA, 20 nt, Human
cuugaacuccugaccucagg

SEQ ID NO: 384634 - RNA, 30 nt, Human
cuuuucagguaacccuuguuugcaggaagg

SEQ ID NO: 384635 - RNA, 19 nt, Human
gaacccagggcuagagcag

SEQ ID NO: 384636 - RNA, 20 nt, Human
gaccaugugcaucuaaucug

SEQ ID NO: 384637 - RNA, 24 nt, Human
gaccucaggugauccacccgccuc

SEQ ID NO: 384638 - RNA, 18 nt, Human
gauuacaggcgcccgcca

SEQ ID NO: 384639 - RNA, 18 nt, Human
gauuacaggcgugagcca

SEQ ID NO: 384640 - RNA, 21 nt, Human
gauuacaggcgugagccacca

SEQ ID NO: 384641 - RNA, 22 nt, Human
gauuacaggcgugagccaccac

SEQ ID NO: 384642 - RNA, 22 nt, Human
gcaaccuccgccucccacguuc

SEQ ID NO: 384643 - RNA, 23 nt, Human
gcaagcacuagcauaagaacacc

SEQ ID NO: 384644 - RNA, 21 nt, Human
gccacacuguuuccaucccau

SEQ ID NO: 384645 - RNA, 20 nt, Human
gccucagccucccaaguagc

SEQ ID NO: 384646 - RNA, 24 nt, Human
gcuacagcuguggaauaagccagg

SEQ ID NO: 384647 - RNA, 20 nt, Human
gcucuugaacuccugaccuc

SEQ ID NO: 384648 - RNA, 19 nt, Human
gcuggaguacaacggcaug

SEQ ID NO: 384649 - RNA, 18 nt, Human
ggaaagguuccauuccuu

SEQ ID NO: 384650 - RNA, 19 nt, Human
ggauuacaggcgugagcca

SEQ ID NO: 384651 - RNA, 21 nt, Human
ggcagaaauccaacacccaaa

SEQ ID NO: 384652 - RNA, 23 nt, Human
ggcaugaucucagcucgcugcaa

SEQ ID NO: 384653 - RNA, 22 nt, Human
ggccaaucuaguuuaacagcac

SEQ ID NO: 384654 - RNA, 20 nt, Human
ggcuagagcagcuaagcccc

SEQ ID NO: 384655 - RNA, 24 nt, Human
ggcugcucuugaacuccugaccuc

SEQ ID NO: 384656 - RNA, 22 nt, Human
gggcaaagggguagucuccuuu

SEQ ID NO: 384657 - RNA, 18 nt, Human
guagcugggauuacaggc

SEQ ID NO: 384658 - RNA, 24 nt, Human
gugauccacccgccucggccuccc

SEQ ID NO: 384659 - RNA, 24 nt, Human
gugauucuccugccucagccuccc

SEQ ID NO: 384660 - RNA, 24 nt, Human
uaaacagaaagcuuuugcacaacc

SEQ ID NO: 384661 - RNA, 25 nt, Human
uaaacagaaagcuuuugcacaacca

SEQ ID NO: 384662 - RNA, 23 nt, Human
uaacagcacauacucggaaaagg

SEQ ID NO: 384663 - RNA, 20 nt, Human
uaagacaaauaccuacagac

SEQ ID NO: 384664 - RNA, 22 nt, Human
uaagacaaauaccuacagacca

SEQ ID NO: 384665 - RNA, 20 nt, Human
uaaggaaaacaccugaugac

SEQ ID NO: 384666 - RNA, 21 nt, Human
uaauuacaaaaguaaaaccaa

SEQ ID NO: 384667 - RNA, 27 nt, Human
uaauuuuuuuuguauuuuuaguagaga

SEQ ID NO: 384668 - RNA, 24 nt, Human
uacaccugccagcuacugaauaaa

SEQ ID NO: 384669 - RNA, 19 nt, Human
uacaggcgcccgccaccac

SEQ ID NO: 384670 - RNA, 23 nt, Human
uacaggcgugagccaccacgccc

SEQ ID NO: 384671 - RNA, 20 nt, Human
uagaagcuagaaaaccucua

SEQ ID NO: 384672 - RNA, 20 nt, Human
uagagacaggguuucaccag

SEQ ID NO: 384673 - RNA, 22 nt, Human
uagagacaggguuucaccaggu

SEQ ID NO: 384674 - RNA, 18 nt, Human
uagaucauauaugaaaac

SEQ ID NO: 384675 - RNA, 23 nt, Human
uagcacaucacaaaaauacauuu

SEQ ID NO: 384676 - RNA, 24 nt, Human
uagcagacauacagucaacuuccu

SEQ ID NO: 384677 - RNA, 25 nt, Human
uagggaaagaaauaucuuaguagaa

SEQ ID NO: 384678 - RNA, 19 nt, Human
uaguagagacaggguuuca

SEQ ID NO: 384679 - RNA, 18 nt, Human
uaucaagguccacaugug

SEQ ID NO: 384680 - RNA, 21 nt, Human
uauuaaggaaaacaccugaug

SEQ ID NO: 384681 - RNA, 21 nt, Human
uauuugacuccuaaggccaca

SEQ ID NO: 384682 - RNA, 24 nt, Human
ucaaaggcacaugauacaaaaaua

SEQ ID NO: 384683 - RNA, 18 nt, Human
ucaagugauucuccugcc

SEQ ID NO: 384684 - RNA, 22 nt, Human
ucagagcaccaauggucaaagg

SEQ ID NO: 384685 - RNA, 23 nt, Human
ucagagcaccaauggucaaaggc

SEQ ID NO: 384686 - RNA, 20 nt, Human
ucagccucccaaguagcugg

SEQ ID NO: 384687 - RNA, 23 nt, Human
uccaaaugggauauacuuaguuc

SEQ ID NO: 384688 - RNA, 22 nt, Human
uccaacacccaaaucagcuguc

SEQ ID NO: 384689 - RNA, 25 nt, Human
uccaacacccaaaucagcugucaaa

SEQ ID NO: 384690 - RNA, 26 nt, Human
uccaacacccaaaucagcugucaaau

SEQ ID NO: 384691 - RNA, 23 nt, Human
uccaagaacccagggcuagagca

SEQ ID NO: 384692 - RNA, 19 nt, Human
uccacagagguucugagua

SEQ ID NO: 384693 - RNA, 20 nt, Human
uccacaugugaccagaaagc

SEQ ID NO: 384694 - RNA, 24 nt, Human
ucccaaagugcugggauuacaggc

SEQ ID NO: 384695 - RNA, 24 nt, Human
ucccaaguagcugggauuacaggc

SEQ ID NO: 384696 - RNA, 24 nt, Human
ucccacguucaagugauucuccug

SEQ ID NO: 384697 - RNA, 21 nt, Human
uccuccccaccaugcagagac

SEQ ID NO: 384698 - RNA, 18 nt, Human
ucgcugcaaccuccgccu

SEQ ID NO: 384699 - RNA, 19 nt, Human
ucgcugcaaccuccgccuc

SEQ ID NO: 384700 - RNA, 24 nt, Human
ucgcugcaaccuccgccucccacg

SEQ ID NO: 384701 - RNA, 27 nt, Human
ucgcugcaaccuccgccucccacguuc

SEQ ID NO: 384702 - RNA, 18 nt, Human
ucggccucccaaagugcu

SEQ ID NO: 384703 - RNA, 18 nt, Human
ucuaauacaccugccagc

SEQ ID NO: 384704 - RNA, 27 nt, Human
ucuaauacaccugccagcuacugaaua

SEQ ID NO: 384705 - RNA, 23 nt, Human
ucucacucuguugcccaagcugg

SEQ ID NO: 384706 - RNA, 24 nt, Human
ucucacucuguugcccaagcugga

SEQ ID NO: 384707 - RNA, 25 nt, Human
ucucacucuguugcccaagcuggag

SEQ ID NO: 384708 - RNA, 26 nt, Human
ucucacucuguugcccaagcuggagu

SEQ ID NO: 384709 - RNA, 26 nt, Human
ucuccugccucagccucccaaguagc

SEQ ID NO: 384710 - RNA, 22 nt, Human
ucuggaaugagggauacuggag

SEQ ID NO: 384711 - RNA, 23 nt, Human
ucuugaacuccugaccucaggug

SEQ ID NO: 384712 - RNA, 21 nt, Human
ugacaagcacucaaacacucu

SEQ ID NO: 384713 - RNA, 26 nt, Human
ugacaagcacucaaacacucuugaaa

SEQ ID NO: 384714 - RNA, 19 nt, Human
ugacaugcuaucaucuuua

SEQ ID NO: 384715 - RNA, 21 nt, Human
ugaccucaggugauccacccg

SEQ ID NO: 384716 - RNA, 24 nt, Human
ugaccucaggugauccacccgccu

SEQ ID NO: 384717 - RNA, 19 nt, Human
ugacuccuaaggccacacu

SEQ ID NO: 384718 - RNA, 22 nt, Human
ugagauggagucucacucuguu

SEQ ID NO: 384719 - RNA, 18 nt, Human
ugagccccuccaaacucu

SEQ ID NO: 384720 - RNA, 20 nt, Human
ugauaauuuaugggauuaua

SEQ ID NO: 384721 - RNA, 20 nt, Human
ugauucuccugccucagccu

SEQ ID NO: 384722 - RNA, 25 nt, Human
ugcaggaagauaaauaagaaggcuu

SEQ ID NO: 384723 - RNA, 19 nt, Human
ugcaucuaaucugcuuucu

SEQ ID NO: 384724 - RNA, 19 nt, Human
ugcccaccuaacaaaggcu

SEQ ID NO: 384725 - RNA, 25 nt, Human
ugcccaccuaacaaaggcuaacaua

SEQ ID NO: 384726 - RNA, 24 nt, Human
ugccccgccaaccccuccugccca

SEQ ID NO: 384727 - RNA, 26 nt, Human
ugccccgccaaccccuccugcccagc

SEQ ID NO: 384728 - RNA, 24 nt, Human
ugccucagccucccaaguagcugg

SEQ ID NO: 384729 - RNA, 24 nt, Human
ugcucuugaacuccugaccucagg

SEQ ID NO: 384730 - RNA, 24 nt, Human
ugcugggauuacaggcgugagcca

SEQ ID NO: 384731 - RNA, 20 nt, Human
uggaaugagggauacuggag

SEQ ID NO: 384732 - RNA, 19 nt, Human
uggaguacaacggcaugau

SEQ ID NO: 384733 - RNA, 24 nt, Human
uggcagugagccccuccaaacucu

SEQ ID NO: 384734 - RNA, 24 nt, Human
uggccaggcugcucuugaacuccu

SEQ ID NO: 384735 - RNA, 21 nt, Human
ugggauuacaggcgcccgcca

SEQ ID NO: 384736 - RNA, 22 nt, Human
ugggauuacaggcgcccgccac

SEQ ID NO: 384737 - RNA, 24 nt, Human
ugggauuacaggcgcccgccacca

SEQ ID NO: 384738 - RNA, 18 nt, Human
ugggauuacaggcgugag

SEQ ID NO: 384739 - RNA, 19 nt, Human
ugggauuacaggcgugagc

SEQ ID NO: 384740 - RNA, 22 nt, Human
ugggauuacaggcgugagccac

SEQ ID NO: 384741 - RNA, 23 nt, Human
ugggauuacaggcgugagccacc

SEQ ID NO: 384742 - RNA, 24 nt, Human
ugggauuacaggcgugagccacca

SEQ ID NO: 384743 - RNA, 21 nt, Human
ugggauuauauuccaguuucc

SEQ ID NO: 384744 - RNA, 24 nt, Human
uguaugaugguuagggaaagaaau

SEQ ID NO: 384745 - RNA, 26 nt, Human
ugucaggaaauggaaagcgaaccggc

SEQ ID NO: 384746 - RNA, 18 nt, Human
ugugcagucaaaccacag

SEQ ID NO: 384747 - RNA, 22 nt, Human
uguuuuguuuuguuuugagaug

SEQ ID NO: 384748 - RNA, 25 nt, Human
uguuuuguuuuguuuuguuuugauu

SEQ ID NO: 384749 - RNA, 25 nt, Human
uguuuuguuuuguuuuguuuugauu

SEQ ID NO: 384750 - RNA, 20 nt, Human
uuacuguugcuucucaauua

SEQ ID NO: 384751 - RNA, 23 nt, Human
uuagaaaaauuagcaaaaaauug

SEQ ID NO: 384752 - RNA, 23 nt, Human
uuaggauacugacccacuuagag

SEQ ID NO: 384753 - RNA, 18 nt, Human
uuaguagagacaggguuu

SEQ ID NO: 384754 - RNA, 22 nt, Human
uucaaagaaagaguaaacaaac

SEQ ID NO: 384755 - RNA, 21 nt, Human
uucaagugauucuccugccuc

SEQ ID NO: 384756 - RNA, 23 nt, Human
uucaagugauucuccugccucag

SEQ ID NO: 384757 - RNA, 24 nt, Human
uucaagugauucuccugccucagc

SEQ ID NO: 384758 - RNA, 28 nt, Human
uucauuggcaaauauuuuccagucauaa

SEQ ID NO: 384759 - RNA, 24 nt, Human
uucuuuguagaauacuuuuuccuc

SEQ ID NO: 384760 - RNA, 23 nt, Human
uuguagaauacuuuuuccucauu

SEQ ID NO: 384761 - RNA, 21 nt, Human
uuucaccagguuggccaggcu

SEQ ID NO: 384762 - RNA, 23 nt, Human
uuugcacaaccacauauguaacc

SEQ ID NO: 384763 - RNA, 19 nt, Human
uuuguuuuguuuuguuuug

SEQ ID NO: 384764 - RNA, 24 nt, Human
uuuuuaguagagacaggguuucac

SEQ ID NO: 384765 - RNA, 21 nt, Human
uuuuuguauuuuuaguagaga

SEQ ID NO: 384766 - RNA, 21 nt, Human
uuuuuuguauuuuuaguagag

SEQ ID NO: 384767 - RNA, 24 nt, Human
uuuuuuguauuuuuaguagagaca

SEQ ID NO: 384768 - RNA, 25 nt, Human
aaacaagaaaagaguucaagugggc

SEQ ID NO: 384769 - RNA, 19 nt, Human
aaagaaauaaacaaaagcc

SEQ ID NO: 384770 - RNA, 23 nt, Human
aaauaacaacuauuauccauuua

SEQ ID NO: 384771 - RNA, 20 nt, Human
aaaugcuagcauauccacug

SEQ ID NO: 384772 - RNA, 19 nt, Human
aacaaaccaaagaaauaaa

SEQ ID NO: 384773 - RNA, 18 nt, Human
aacaggaaucaagcccaa

SEQ ID NO: 384774 - RNA, 21 nt, Human
aacuauuauucaacaggaauc

SEQ ID NO: 384775 - RNA, 23 nt, Human
aauuuaccuccccacccccucua

SEQ ID NO: 384776 - RNA, 25 nt, Human
acaaaccaaagaaauaaacaaaagc

SEQ ID NO: 384777 - RNA, 19 nt, Human
acaaagauaaaccuggagg

SEQ ID NO: 384778 - RNA, 25 nt, Human
acagacuaauuuguucauucauuga

SEQ ID NO: 384779 - RNA, 18 nt, Human
acuggcagauaccaucug

SEQ ID NO: 384780 - RNA, 24 nt, Human
acugugguucccuucuuuuucuuu

SEQ ID NO: 384781 - RNA, 25 nt, Human
agaagaaaaaggaacacauuuaaaa

SEQ ID NO: 384782 - RNA, 24 nt, Human
agcaccaacaucauuacaauuccc

SEQ ID NO: 384783 - RNA, 23 nt, Human
agcuaaaaugcuagcauauccac

SEQ ID NO: 384784 - RNA, 21 nt, Human
aggaagcagcaccaacaucau

SEQ ID NO: 384785 - RNA, 19 nt, Human
aggaggacaaggauaauuc

SEQ ID NO: 384786 - RNA, 19 nt, Human
agguaauugaucccuaaaa

SEQ ID NO: 384787 - RNA, 18 nt, Human
augacacuaguuaacaaa

SEQ ID NO: 384788 - RNA, 19 nt, Human
auugcuuuuaacuccuugu

SEQ ID NO: 384789 - RNA, 20 nt, Human
auuguuuugaagcaccuaaa

SEQ ID NO: 384790 - RNA, 23 nt, Human
caaaauguuccccaucuaacuga

SEQ ID NO: 384791 - RNA, 21 nt, Human
caaaucaacugcaaugggaaa

SEQ ID NO: 384792 - RNA, 23 nt, Human
caacaucauuacaauuccccaaa

SEQ ID NO: 384793 - RNA, 18 nt, Human
caagcccaaacccuggag

SEQ ID NO: 384794 - RNA, 25 nt, Human
caccuaaaacuucucaauaacaaaa

SEQ ID NO: 384795 - RNA, 24 nt, Human
cacugaacuuuauuccugaaaguc

SEQ ID NO: 384796 - RNA, 20 nt, Human
cagaagauaucaagcuaucc

SEQ ID NO: 384797 - RNA, 20 nt, Human
cagcacacugaacuuuauuc

SEQ ID NO: 384798 - RNA, 26 nt, Human
ccacacuaccucccuuugcacagcua

SEQ ID NO: 384799 - RNA, 25 nt, Human
cccacccccucuacuacauauucua

SEQ ID NO: 384800 - RNA, 19 nt, Human
ccccaaauaacaacuauua

SEQ ID NO: 384801 - RNA, 21 nt, Human
cccgcucccagaggaggcugg

SEQ ID NO: 384802 - RNA, 24 nt, Human
cccucuacuacauauucuauuagc

SEQ ID NO: 384803 - RNA, 25 nt, Human
cuaaugggcuagcaaaauguucccc

SEQ ID NO: 384804 - RNA, 21 nt, Human
cuaggguagaaaaugucuucc

SEQ ID NO: 384805 - RNA, 23 nt, Human
cucccagaggaggcuggaccggc

SEQ ID NO: 384806 - RNA, 21 nt, Human
cugugguucccuucuuuuucu

SEQ ID NO: 384807 - RNA, 27 nt, Human
gaaaaaggaacacauuuaaaaaacugc

SEQ ID NO: 384808 - RNA, 21 nt, Human
gaaguucacaggaauaaacug

SEQ ID NO: 384809 - RNA, 20 nt, Human
gauaaagaagacuggaaaaa

SEQ ID NO: 384810 - RNA, 22 nt, Human
gcaaugaaugguucaaucugaa

SEQ ID NO: 384811 - RNA, 20 nt, Human
gcagauaccaucugucagua

SEQ ID NO: 384812 - RNA, 21 nt, Human
gcuaaaaugcuagcauaucca

SEQ ID NO: 384813 - RNA, 21 nt, Human
gcugcaaugaaugguucaauc

SEQ ID NO: 384814 - RNA, 19 nt, Human
ggaaauuauucaggaaugc

SEQ ID NO: 384815 - RNA, 20 nt, Human
ggaggacaaggauaauucug

SEQ ID NO: 384816 - RNA, 20 nt, Human
gggaaaacagaagauaucaa

SEQ ID NO: 384817 - RNA, 21 nt, Human
guagaaaaugucuuccuuuca

SEQ ID NO: 384818 - RNA, 22 nt, Human
gucacauggauugcuuuuaacu

SEQ ID NO: 384819 - RNA, 22 nt, Human
uaaaaugagacaugugcuuuaa

SEQ ID NO: 384820 - RNA, 19 nt, Human
uaaacugguagauaagaca

SEQ ID NO: 384821 - RNA, 23 nt, Human
uaacaaaccaaagaaauaaacaa

SEQ ID NO: 384822 - RNA, 19 nt, Human
uacaaaguuucuccauagu

SEQ ID NO: 384823 - RNA, 18 nt, Human
uaccucccuuugcacagc

SEQ ID NO: 384824 - RNA, 18 nt, Human
uacugcugcaaugaaugg

SEQ ID NO: 384825 - RNA, 19 nt, Human
uagaagaacagguaccaug

SEQ ID NO: 384826 - RNA, 24 nt, Human
uaugcuagauaaacaagaaaagag

SEQ ID NO: 384827 - RNA, 22 nt, Human
uccaauuuucuuacacugcagu

SEQ ID NO: 384828 - RNA, 23 nt, Human
uccccaaauaacaacuauuaucc

SEQ ID NO: 384829 - RNA, 23 nt, Human
ugagaagaggguugaagagacug

SEQ ID NO: 384830 - RNA, 20 nt, Human
ugcaaugggaaaacagaaga

SEQ ID NO: 384831 - RNA, 22 nt, Human
ugcaaugggaaaacagaagaua

SEQ ID NO: 384832 - RNA, 21 nt, Human
uggaacaagauuuuaaaaagu

SEQ ID NO: 384833 - RNA, 21 nt, Human
ugggcuagcaaaauguucccc

SEQ ID NO: 384834 - RNA, 22 nt, Human
ugucaaauaaaugaaucaggua

SEQ ID NO: 384835 - RNA, 18 nt, Human
ugugaaaggcuugaguca

SEQ ID NO: 384836 - RNA, 24 nt, Human
ugugcacauacaaaguuucuccau

SEQ ID NO: 384837 - RNA, 21 nt, Human
ugugguucccuucuuuuucuu

SEQ ID NO: 384838 - RNA, 18 nt, Human
uucacagaagaaaaagga

SEQ ID NO: 384839 - RNA, 25 nt, Human
uucuuacacugcaguuaaaugguug

SEQ ID NO: 384840 - RNA, 22 nt, Human
uucuuuggcaagucagaggaau

SEQ ID NO: 384841 - RNA, 21 nt, Human
uugaucccuaaaacaugcaca

SEQ ID NO: 384842 - RNA, 20 nt, Human
uuucauacuuuacuugucug

SEQ ID NO: 384843 - RNA, 18 nt, Human
aaacacaaaucauucaug

SEQ ID NO: 384844 - RNA, 25 nt, Human
aaguauuuuuuaagucucaacuucc

SEQ ID NO: 384845 - RNA, 24 nt, Human
acaagaaaaaguaacaacaauaua

SEQ ID NO: 384846 - RNA, 21 nt, Human
agaauaaagaaugacccucaa

SEQ ID NO: 384847 - RNA, 19 nt, Human
aguaaagaauaaagaauga

SEQ ID NO: 384848 - RNA, 24 nt, Human
auaaugcauucuuagcauucaaag

SEQ ID NO: 384849 - RNA, 19 nt, Human
aucacaucgccaggaggaa

SEQ ID NO: 384850 - RNA, 20 nt, Human
augcauucuuagcauucaaa

SEQ ID NO: 384851 - RNA, 22 nt, Human
caagaaaaaguaacaacaauau

SEQ ID NO: 384852 - RNA, 22 nt, Human
cccucguuuccuucucccuuuc

SEQ ID NO: 384853 - RNA, 22 nt, Human
cguuuccuucucccuuucgccc

SEQ ID NO: 384854 - RNA, 21 nt, Human
guuuccuucucccuuucgccc

SEQ ID NO: 384855 - RNA, 25 nt, Human
uaaagaaacacaaaucauucaugca

SEQ ID NO: 384856 - RNA, 24 nt, Human
uaaauuccaucacaucgccaggag

SEQ ID NO: 384857 - RNA, 18 nt, Human
uaacuacacugauucucu

SEQ ID NO: 384858 - RNA, 18 nt, Human
uacaaauuugaaaacuua

SEQ ID NO: 384859 - RNA, 19 nt, Human
uacaagaaaaaguaacaac

SEQ ID NO: 384860 - RNA, 24 nt, Human
uaguaaagaauaaagaaugacccu

SEQ ID NO: 384861 - RNA, 22 nt, Human
ucgcccuaccgcccgcugccac

SEQ ID NO: 384862 - RNA, 21 nt, Human
ugacagguuuccagacaauau

SEQ ID NO: 384863 - RNA, 21 nt, Human
ugacccucaauaaugcauucu

SEQ ID NO: 384864 - RNA, 27 nt, Human
ugacccucaauaaugcauucuuagcau

SEQ ID NO: 384865 - RNA, 21 nt, Human
uucaaaggcuaacuuuacaaa

SEQ ID NO: 384866 - RNA, 21 nt, Human
uucucuguuacgguuguaaau

SEQ ID NO: 384867 - RNA, 18 nt, Human
uuggcucuggcaaauaag

SEQ ID NO: 384868 - RNA, 24 nt, Human
aaaaaaaauauuguauagacagaa

SEQ ID NO: 384869 - RNA, 21 nt, Human
aacugcauugauucaaaaaca

SEQ ID NO: 384870 - RNA, 18 nt, Human
acagagaauaauaauuag

SEQ ID NO: 384871 - RNA, 19 nt, Human
agacagaagucuucugggc

SEQ ID NO: 384872 - RNA, 23 nt, Human
cucauguuauagugguucccucu

SEQ ID NO: 384873 - RNA, 20 nt, Human
cuccaaaauuaaaaaaaaau

SEQ ID NO: 384874 - RNA, 19 nt, Human
cugcauugauucaaaaaca

SEQ ID NO: 384875 - RNA, 19 nt, Human
gaguauaauuaacucaaaa

SEQ ID NO: 384876 - RNA, 23 nt, Human
uaauuuauuaaagaaacucauuu

SEQ ID NO: 384877 - RNA, 18 nt, Human
uccaaaauuaaaaaaaaa

SEQ ID NO: 384878 - RNA, 23 nt, Human
ucggugacauguauauuuuucuc

SEQ ID NO: 384879 - RNA, 23 nt, Human
uuaaagcuuuuaucuccaaaauu

SEQ ID NO: 384880 - RNA, 23 nt, Human
uuggacucauguuauagugguuc

SEQ ID NO: 384881 - RNA, 19 nt, Human
uuuccucaguuauauacag

SEQ ID NO: 384882 - RNA, 24 nt, Human
aaaacaaacaaauccagcuagccc

SEQ ID NO: 384883 - RNA, 20 nt, Human
aagaaaacaaacaaauccag

SEQ ID NO: 384884 - RNA, 23 nt, Human
aaucacacagacaagaaaacaaa

SEQ ID NO: 384885 - RNA, 24 nt, Human
aaucacacagacaagaaaacaaac

SEQ ID NO: 384886 - RNA, 26 nt, Human
acacagacaagaaaacaaacaaaucc

SEQ ID NO: 384887 - RNA, 24 nt, Human
acagacaagaaaacaaacaaaucc

SEQ ID NO: 384888 - RNA, 26 nt, Human
acagacaagaaaacaaacaaauccag

SEQ ID NO: 384889 - RNA, 23 nt, Human
agacaagaaaacaaacaaaucca

SEQ ID NO: 384890 - RNA, 24 nt, Human
agacaagaaaacaaacaaauccag

SEQ ID NO: 384891 - RNA, 19 nt, Human
agacaugaaagggauuugg

SEQ ID NO: 384892 - RNA, 22 nt, Human
agggcgggcgcagcgcggggcc

SEQ ID NO: 384893 - RNA, 23 nt, Human
auaaccuguaugaaaaucacaca

SEQ ID NO: 384894 - RNA, 19 nt, Human
augucccugggcccgauga

SEQ ID NO: 384895 - RNA, 19 nt, Human
cacagacaagaaaacaaac

SEQ ID NO: 384896 - RNA, 21 nt, Human
cacccgcuccuccucgcucuc

SEQ ID NO: 384897 - RNA, 25 nt, Human
ccagcuagccccuuggauccugcca

SEQ ID NO: 384898 - RNA, 23 nt, Human
ccgccgggcccgcggcucuuccu

SEQ ID NO: 384899 - RNA, 22 nt, Human
ccgccgggguggccucagccgc

SEQ ID NO: 384900 - RNA, 20 nt, Human
ccucuggauacauuuuccug

SEQ ID NO: 384901 - RNA, 21 nt, Human
ccugcgccaggugaggcgagg

SEQ ID NO: 384902 - RNA, 25 nt, Human
ccugugaucaaaggcagccaccgac

SEQ ID NO: 384903 - RNA, 22 nt, Human
cgaugaguaacaaaugcacccc

SEQ ID NO: 384904 - RNA, 18 nt, Human
cggggccacccgcuccuc

SEQ ID NO: 384905 - RNA, 20 nt, Human
cuagccccuuggauccugcc

SEQ ID NO: 384906 - RNA, 20 nt, Human
cucccgggacugccuuugcu

SEQ ID NO: 384907 - RNA, 21 nt, Human
cugugaucaaaggcagccacc

SEQ ID NO: 384908 - RNA, 19 nt, Human
gccaccgacaggugcggga

SEQ ID NO: 384909 - RNA, 21 nt, Human
ggcauuuggaaaaggccgcuu

SEQ ID NO: 384910 - RNA, 20 nt, Human
gggcgggcgcagcgcggggc

SEQ ID NO: 384911 - RNA, 22 nt, Human
uaacaaaugcaccccgggaccc

SEQ ID NO: 384912 - RNA, 18 nt, Human
uaaggcauccuugggcau

SEQ ID NO: 384913 - RNA, 19 nt, Human
uagccccuuggauccugcc

SEQ ID NO: 384914 - RNA, 22 nt, Human
uauugucaggaaagcuuuucag

SEQ ID NO: 384915 - RNA, 22 nt, Human
ucaaaggcagccaccgacaggu

SEQ ID NO: 384916 - RNA, 27 nt, Human
uccaccugcgccaggugaggcgagggc

SEQ ID NO: 384917 - RNA, 21 nt, Human
ucccugggcccgaugaguaac

SEQ ID NO: 384918 - RNA, 20 nt, Human
ucgcucuccagccgccgccg

SEQ ID NO: 384919 - RNA, 22 nt, Human
ucucauggccguagaagcagcc

SEQ ID NO: 384920 - RNA, 23 nt, Human
ugccauccgucuuuucucccggg

SEQ ID NO: 384921 - RNA, 21 nt, Human
uggaaaaggccgcuuggggug

SEQ ID NO: 384922 - RNA, 18 nt, Human
uggaaagacaugaaaggg

SEQ ID NO: 384923 - RNA, 18 nt, Human
uggcagagggagguggcu

SEQ ID NO: 384924 - RNA, 25 nt, Human
ugggcauguuccauccaagccuggc

SEQ ID NO: 384925 - RNA, 26 nt, Human
uggggugagagugcucuaggccacuc

SEQ ID NO: 384926 - RNA, 18 nt, Human
ugugggcauguuccaucc

SEQ ID NO: 384927 - RNA, 21 nt, Human
uuccucugccuuugccuuccc

SEQ ID NO: 384928 - RNA, 23 nt, Human
uuuggaaaaggccgcuuggggug

SEQ ID NO: 384929 - RNA, 18 nt, Human
acugcgcggugcccagga

SEQ ID NO: 384930 - RNA, 18 nt, Human
aggagccgcgggggcgga

SEQ ID NO: 384931 - RNA, 20 nt, Human
cugcgacuuggggcaggggg

SEQ ID NO: 384932 - RNA, 18 nt, Human
ugcccaggagcacagcug

SEQ ID NO: 384933 - RNA, 25 nt, Human
aaacagcccuggaaucacaaguuau

SEQ ID NO: 384934 - RNA, 21 nt, Human
aaccagacagaggagcugaca

SEQ ID NO: 384935 - RNA, 26 nt, Human
aagcacgaacaggaacagguaaacaa

SEQ ID NO: 384936 - RNA, 18 nt, Human
acacugcauaggaaaaac

SEQ ID NO: 384937 - RNA, 22 nt, Human
accccggcgccagaccccgcag

SEQ ID NO: 384938 - RNA, 20 nt, Human
agaagauaaagucacacugg

SEQ ID NO: 384939 - RNA, 20 nt, Human
agcacaguucauugaagauc

SEQ ID NO: 384940 - RNA, 21 nt, Human
agcauugaaagaacgcagcaa

SEQ ID NO: 384941 - RNA, 23 nt, Human
agcuuggggggaggagaggaguu

SEQ ID NO: 384942 - RNA, 21 nt, Human
caaaccacccagaagauaaag

SEQ ID NO: 384943 - RNA, 18 nt, Human
cacaauucuuuuguauac

SEQ ID NO: 384944 - RNA, 19 nt, Human
cacugguggagggaaaguu

SEQ ID NO: 384945 - RNA, 20 nt, Human
cagaaagaaagcgaaaagca

SEQ ID NO: 384946 - RNA, 18 nt, Human
cagacagaggagcugaca

SEQ ID NO: 384947 - RNA, 19 nt, Human
cagacagaggagcugacac

SEQ ID NO: 384948 - RNA, 24 nt, Human
ccagugggagggucuguuuucccc

SEQ ID NO: 384949 - RNA, 20 nt, Human
cccccuacucccauuucacc

SEQ ID NO: 384950 - RNA, 21 nt, Human
ccccgcuuuccuuucguuugu

SEQ ID NO: 384951 - RNA, 21 nt, Human
ccccuacucccauuucacccc

SEQ ID NO: 384952 - RNA, 18 nt, Human
cccuguccaccccccuac

SEQ ID NO: 384953 - RNA, 23 nt, Human
cccuguccaccccccuacuccca

SEQ ID NO: 384954 - RNA, 19 nt, Human
ccggcgccagaccccgcag

SEQ ID NO: 384955 - RNA, 20 nt, Human
ccuccccgcuuuccuuucgu

SEQ ID NO: 384956 - RNA, 21 nt, Human
ccuguccaccccccuacuccc

SEQ ID NO: 384957 - RNA, 22 nt, Human
cgcggagggagagcgagggcgg

SEQ ID NO: 384958 - RNA, 25 nt, Human
cggcgccagaccccgcagacagcag

SEQ ID NO: 384959 - RNA, 21 nt, Human
cucuuaauguucuaucuaguu

SEQ ID NO: 384960 - RNA, 21 nt, Human
cucuuaauguucuaucuaguu

SEQ ID NO: 384961 - RNA, 19 nt, Human
cugagcuuggggggaggag

SEQ ID NO: 384962 - RNA, 20 nt, Human
cuggaaucacaaguuauaca

SEQ ID NO: 384963 - RNA, 19 nt, Human
gaacagguaaacaaccaga

SEQ ID NO: 384964 - RNA, 22 nt, Human
gauaaagucacacuggacuugg

SEQ ID NO: 384965 - RNA, 18 nt, Human
gccagaccccgcagacag

SEQ ID NO: 384966 - RNA, 28 nt, Human
ggaaaaacacaguccagucagcauugaa

SEQ ID NO: 384967 - RNA, 23 nt, Human
ggagaggaguuggguuuucuuuu

SEQ ID NO: 384968 - RNA, 24 nt, Human
ggcgccagaccccgcagacagcag

SEQ ID NO: 384969 - RNA, 19 nt, Human
ggcugggggcgcgcggggc

SEQ ID NO: 384970 - RNA, 25 nt, Human
gggcgcgcggggcuacggggucugg

SEQ ID NO: 384971 - RNA, 19 nt, Human
ggggaggagaggaguuggg

SEQ ID NO: 384972 - RNA, 20 nt, Human
gggggaggagaggaguuggg

SEQ ID NO: 384973 - RNA, 22 nt, Human
gucuguuuuccccuccccgcuu

SEQ ID NO: 384974 - RNA, 21 nt, Human
guuuucguuucuccccugucc

SEQ ID NO: 384975 - RNA, 21 nt, Human
uaaacaaccagacagaggagc

SEQ ID NO: 384976 - RNA, 24 nt, Human
uaaacaaccagacagaggagcuga

SEQ ID NO: 384977 - RNA, 23 nt, Human
uaggaaaaacacaguccagucag

SEQ ID NO: 384978 - RNA, 21 nt, Human
ucaaaccacccagaagauaaa

SEQ ID NO: 384979 - RNA, 24 nt, Human
uccagucagcauugaaagaacgca

SEQ ID NO: 384980 - RNA, 25 nt, Human
uccccgcuuuccuuucguuuguuuu

SEQ ID NO: 384981 - RNA, 19 nt, Human
uccuuucguuuguuuuugg

SEQ ID NO: 384982 - RNA, 24 nt, Human
ucuguuuuccccuccccgcuuucc

SEQ ID NO: 384983 - RNA, 26 nt, Human
ugaaagaacgcagcaacggcgucgac

SEQ ID NO: 384984 - RNA, 20 nt, Human
ugagcauuacaagcacgaac

SEQ ID NO: 384985 - RNA, 27 nt, Human
ugagcauuacaagcacgaacaggaaca

SEQ ID NO: 384986 - RNA, 19 nt, Human
uggugaaugucuuagaugc

SEQ ID NO: 384987 - RNA, 24 nt, Human
ugucuuagaugccuuucccgguug

SEQ ID NO: 384988 - RNA, 30 nt, Human
uguuuuccccuccccgcuuuccuuucguuu

SEQ ID NO: 384989 - RNA, 21 nt, Human
uuaaaaacacuaucaaaccac

SEQ ID NO: 384990 - RNA, 18 nt, Human
uuugugguuuucguuucu

SEQ ID NO: 384991 - RNA, 19 nt, Human
aaaaaggaaacggcauucc

SEQ ID NO: 384992 - RNA, 21 nt, Human
aaacacuaguaagaaugugaa

SEQ ID NO: 384993 - RNA, 21 nt, Human
aaacacuaguaagaaugugaa

SEQ ID NO: 384994 - RNA, 21 nt, Human
aaacacuaguaagaaugugaa

SEQ ID NO: 384995 - RNA, 18 nt, Human
aaacagcgguuccuaaac

SEQ ID NO: 384996 - RNA, 18 nt, Human
aaacagcgguuccuaaac

SEQ ID NO: 384997 - RNA, 18 nt, Human
aaacagcgguuccuaaac

SEQ ID NO: 384998 - RNA, 21 nt, Human
aaccuggaggcucucaaaggc

SEQ ID NO: 384999 - RNA, 21 nt, Human
aaccuggaggcucucaaaggc

SEQ ID NO: 385000 - RNA, 21 nt, Human
aaccuggaggcucucaaaggc

SEQ ID NO: 385001 - RNA, 22 nt, Human
aagaaauacaaacagcgguucc

SEQ ID NO: 385002 - RNA, 22 nt, Human
aagaaauacaaacagcgguucc

SEQ ID NO: 385003 - RNA, 22 nt, Human
aagaaauacaaacagcgguucc

SEQ ID NO: 385004 - RNA, 18 nt, Human
aagaugaggcaggagggg

SEQ ID NO: 385005 - RNA, 18 nt, Human
aagaugaggcaggagggg

SEQ ID NO: 385006 - RNA, 18 nt, Human
aagaugaggcaggagggg

SEQ ID NO: 385007 - RNA, 19 nt, Human
aagcugauuucuuuccugc

SEQ ID NO: 385008 - RNA, 19 nt, Human
aagcugauuucuuuccugc

SEQ ID NO: 385009 - RNA, 19 nt, Human
aagcugauuucuuuccugc

SEQ ID NO: 385010 - RNA, 21 nt, Human
aaguauguucucaggcccucc

SEQ ID NO: 385011 - RNA, 21 nt, Human
aaguauguucucaggcccucc

SEQ ID NO: 385012 - RNA, 21 nt, Human
aaguauguucucaggcccucc

SEQ ID NO: 385013 - RNA, 19 nt, Human
acagggucugguuucuuuc

SEQ ID NO: 385014 - RNA, 19 nt, Human
acagggucugguuucuuuc

SEQ ID NO: 385015 - RNA, 19 nt, Human
acagggucugguuucuuuc

SEQ ID NO: 385016 - RNA, 24 nt, Human
acagugguggaacagaauggguac

SEQ ID NO: 385017 - RNA, 19 nt, Human
acagugucugcguuugaug

SEQ ID NO: 385018 - RNA, 19 nt, Human
acagugucugcguuugaug

SEQ ID NO: 385019 - RNA, 19 nt, Human
acagugucugcguuugaug

SEQ ID NO: 385020 - RNA, 19 nt, Human
acucgcagacaucucacuu

SEQ ID NO: 385021 - RNA, 19 nt, Human
acucgcagacaucucacuu

SEQ ID NO: 385022 - RNA, 19 nt, Human
acucgcagacaucucacuu

SEQ ID NO: 385023 - RNA, 21 nt, Human
aggagggggacgaguguagca

SEQ ID NO: 385024 - RNA, 18 nt, Human
aggcaggagggggacgag

SEQ ID NO: 385025 - RNA, 18 nt, Human
aggcaggagggggacgag

SEQ ID NO: 385026 - RNA, 18 nt, Human
aggcaggagggggacgag

SEQ ID NO: 385027 - RNA, 29 nt, Human
aggccuguuuugaggaaccuggaggcucu

SEQ ID NO: 385028 - RNA, 29 nt, Human
aggccuguuuugaggaaccuggaggcucu

SEQ ID NO: 385029 - RNA, 29 nt, Human
aggccuguuuugaggaaccuggaggcucu

SEQ ID NO: 385030 - RNA, 27 nt, Human
agggggccggggcugugaggcgagggu

SEQ ID NO: 385031 - RNA, 21 nt, Human
agggucugguuucuuucuugg

SEQ ID NO: 385032 - RNA, 21 nt, Human
agggucugguuucuuucuugg

SEQ ID NO: 385033 - RNA, 21 nt, Human
agggucugguuucuuucuugg

SEQ ID NO: 385034 - RNA, 19 nt, Human
auguucucaggcccuccau

SEQ ID NO: 385035 - RNA, 22 nt, Human
caaaaaaagaaauacaaacagc

SEQ ID NO: 385036 - RNA, 22 nt, Human
caaaaaaagaaauacaaacagc

SEQ ID NO: 385037 - RNA, 22 nt, Human
caaaaaaagaaauacaaacagc

SEQ ID NO: 385038 - RNA, 18 nt, Human
caaaggcccaccucacag

SEQ ID NO: 385039 - RNA, 18 nt, Human
caaaggcccaccucacag

SEQ ID NO: 385040 - RNA, 18 nt, Human
caaaggcccaccucacag

SEQ ID NO: 385041 - RNA, 22 nt, Human
caacagauccauaaaaaggaaa

SEQ ID NO: 385042 - RNA, 22 nt, Human
caacagauccauaaaaaggaaa

SEQ ID NO: 385043 - RNA, 22 nt, Human
caacagauccauaaaaaggaaa

SEQ ID NO: 385044 - RNA, 21 nt, Human
cacuuggggucccacgcuggg

SEQ ID NO: 385045 - RNA, 21 nt, Human
cacuuggggucccacgcuggg

SEQ ID NO: 385046 - RNA, 22 nt, Human
caggagggggacgaguguagca

SEQ ID NO: 385047 - RNA, 22 nt, Human
caggagggggacgaguguagca

SEQ ID NO: 385048 - RNA, 18 nt, Human
caggcacguggguaggca

SEQ ID NO: 385049 - RNA, 18 nt, Human
caggcacguggguaggca

SEQ ID NO: 385050 - RNA, 18 nt, Human
caggcacguggguaggca

SEQ ID NO: 385051 - RNA, 21 nt, Human
caggcccuccauucuguuccc

SEQ ID NO: 385052 - RNA, 21 nt, Human
caggcccuccauucuguuccc

SEQ ID NO: 385053 - RNA, 21 nt, Human
caggcccuccauucuguuccc

SEQ ID NO: 385054 - RNA, 22 nt, Human
cauaaaaaggaaacggcauucc

SEQ ID NO: 385055 - RNA, 22 nt, Human
cauaaaaaggaaacggcauucc

SEQ ID NO: 385056 - RNA, 19 nt, Human
cauugcacuucggauccua

SEQ ID NO: 385057 - RNA, 19 nt, Human
cauugcacuucggauccua

SEQ ID NO: 385058 - RNA, 20 nt, Human
cauugcacuucggauccuau

SEQ ID NO: 385059 - RNA, 22 nt, Human
ccaccucacagucagacaaugc

SEQ ID NO: 385060 - RNA, 23 nt, Human
cccaaaggugagccaaacacuag

SEQ ID NO: 385061 - RNA, 23 nt, Human
cccaaaggugagccaaacacuag

SEQ ID NO: 385062 - RNA, 23 nt, Human
cccaaaggugagccaaacacuag

SEQ ID NO: 385063 - RNA, 21 nt, Human
cccaacagauccauaaaaagg

SEQ ID NO: 385064 - RNA, 21 nt, Human
cccaacagauccauaaaaagg

SEQ ID NO: 385065 - RNA, 21 nt, Human
cccaacagauccauaaaaagg

SEQ ID NO: 385066 - RNA, 23 nt, Human
cccaccucacagucagacaaugc

SEQ ID NO: 385067 - RNA, 23 nt, Human
cccaccucacagucagacaaugc

SEQ ID NO: 385068 - RNA, 20 nt, Human
ccccuguuucugucguguuc

SEQ ID NO: 385069 - RNA, 20 nt, Human
ccccuguuucugucguguuc

SEQ ID NO: 385070 - RNA, 20 nt, Human
ccccuguuucugucguguuc

SEQ ID NO: 385071 - RNA, 20 nt, Human
ccugcacagggggccggggc

SEQ ID NO: 385072 - RNA, 21 nt, Human
ccugccuggucuaagggcggg

SEQ ID NO: 385073 - RNA, 21 nt, Human
ccugccuggucuaagggcggg

SEQ ID NO: 385074 - RNA, 19 nt, Human
cuccaaaaaaagaaauaca

SEQ ID NO: 385075 - RNA, 24 nt, Human
cugucguguucugaaagaccccac

SEQ ID NO: 385076 - RNA, 24 nt, Human
cugucguguucugaaagaccccac

SEQ ID NO: 385077 - RNA, 24 nt, Human
cugucguguucugaaagaccccac

SEQ ID NO: 385078 - RNA, 19 nt, Human
cuguuuugaggaaccugga

SEQ ID NO: 385079 - RNA, 19 nt, Human
cuguuuugaggaaccugga

SEQ ID NO: 385080 - RNA, 19 nt, Human
cuguuuugaggaaccugga

SEQ ID NO: 385081 - RNA, 19 nt, Human
cuuggccucgucuucacuu

SEQ ID NO: 385082 - RNA, 20 nt, Human
cuuggccucgucuucacuug

SEQ ID NO: 385083 - RNA, 20 nt, Human
cuuuccugcaggaauuccga

SEQ ID NO: 385084 - RNA, 20 nt, Human
cuuuccugcaggaauuccga

SEQ ID NO: 385085 - RNA, 20 nt, Human
cuuuccugcaggaauuccga

SEQ ID NO: 385086 - RNA, 21 nt, Human
cuuugcugcuguggagauccg

SEQ ID NO: 385087 - RNA, 20 nt, Human
cuuuguaaacuagucuuuau

SEQ ID NO: 385088 - RNA, 20 nt, Human
cuuuguaaacuagucuuuau

SEQ ID NO: 385089 - RNA, 20 nt, Human
cuuuguaaacuagucuuuau

SEQ ID NO: 385090 - RNA, 19 nt, Human
gaaccaaggcugagaagga

SEQ ID NO: 385091 - RNA, 19 nt, Human
gaaccaaggcugagaagga

SEQ ID NO: 385092 - RNA, 19 nt, Human
gaaccaaggcugagaagga

SEQ ID NO: 385093 - RNA, 19 nt, Human
gaggcaggagggggacgag

SEQ ID NO: 385094 - RNA, 19 nt, Human
gaggcgaggguggcaccug

SEQ ID NO: 385095 - RNA, 22 nt, Human
gaugaggcaggagggggacgag

SEQ ID NO: 385096 - RNA, 22 nt, Human
gaugaggcaggagggggacgag

SEQ ID NO: 385097 - RNA, 21 nt, Human
gauuucuuuccugcaggaauu

SEQ ID NO: 385098 - RNA, 22 nt, Human
gcaaaacacuguuaaaagauua

SEQ ID NO: 385099 - RNA, 22 nt, Human
gcaaaacacuguuaaaagauua

SEQ ID NO: 385100 - RNA, 22 nt, Human
gcaaaacacuguuaaaagauua

SEQ ID NO: 385101 - RNA, 21 nt, Human
gcccaccucacagucagacaa

SEQ ID NO: 385102 - RNA, 21 nt, Human
gcccaccucacagucagacaa

SEQ ID NO: 385103 - RNA, 21 nt, Human
gcccaccucacagucagacaa

SEQ ID NO: 385104 - RNA, 20 nt, Human
gccuuugcccaaaggugagc

SEQ ID NO: 385105 - RNA, 20 nt, Human
gccuuugcccaaaggugagc

SEQ ID NO: 385106 - RNA, 20 nt, Human
gccuuugcccaaaggugagc

SEQ ID NO: 385107 - RNA, 23 nt, Human
gcggaugguuucagccuuggccu

SEQ ID NO: 385108 - RNA, 23 nt, Human
gcggaugguuucagccuuggccu

SEQ ID NO: 385109 - RNA, 19 nt, Human
gcuuggaggccugguuugg

SEQ ID NO: 385110 - RNA, 23 nt, Human
ggcgaggguggcaccuggcuugg

SEQ ID NO: 385111 - RNA, 18 nt, Human
gggauuuuucucuuuuug

SEQ ID NO: 385112 - RNA, 18 nt, Human
gggauuuuucucuuuuug

SEQ ID NO: 385113 - RNA, 18 nt, Human
gggauuuuucucuuuuug

SEQ ID NO: 385114 - RNA, 25 nt, Human
ggguggcaccuggcuuggaggccug

SEQ ID NO: 385115 - RNA, 23 nt, Human
gguggcaccuggcuuggaggccu

SEQ ID NO: 385116 - RNA, 23 nt, Human
guauguucucaggcccuccauuc

SEQ ID NO: 385117 - RNA, 23 nt, Human
guauguucucaggcccuccauuc

SEQ ID NO: 385118 - RNA, 20 nt, Human
guccaaauaagaauaaugcu

SEQ ID NO: 385119 - RNA, 20 nt, Human
guccaaauaagaauaaugcu

SEQ ID NO: 385120 - RNA, 20 nt, Human
guccaaauaagaauaaugcu

SEQ ID NO: 385121 - RNA, 22 nt, Human
uaaaaaggaaacggcauuccug

SEQ ID NO: 385122 - RNA, 22 nt, Human
uaaaaaggaaacggcauuccug

SEQ ID NO: 385123 - RNA, 22 nt, Human
uaaaaaggaaacggcauuccug

SEQ ID NO: 385124 - RNA, 21 nt, Human
uacggcccugcacagggggcc

SEQ ID NO: 385125 - RNA, 23 nt, Human
ucaggaccccacuaguggccgag

SEQ ID NO: 385126 - RNA, 23 nt, Human
ucaggaccccacuaguggccgag

SEQ ID NO: 385127 - RNA, 23 nt, Human
ucaggaccccacuaguggccgag

SEQ ID NO: 385128 - RNA, 27 nt, Human
uccaaaaaaagaaauacaaacagcggu

SEQ ID NO: 385129 - RNA, 27 nt, Human
uccaaaaaaagaaauacaaacagcggu

SEQ ID NO: 385130 - RNA, 27 nt, Human
uccaaaaaaagaaauacaaacagcggu

SEQ ID NO: 385131 - RNA, 19 nt, Human
uccuggugggaggccagag

SEQ ID NO: 385132 - RNA, 19 nt, Human
uccuggugggaggccagag

SEQ ID NO: 385133 - RNA, 19 nt, Human
uccuggugggaggccagag

SEQ ID NO: 385134 - RNA, 18 nt, Human
ucuccaaaaaaagaaaua

SEQ ID NO: 385135 - RNA, 20 nt, Human
ucuccaaaaaaagaaauaca

SEQ ID NO: 385136 - RNA, 20 nt, Human
ucuccaaaaaaagaaauaca

SEQ ID NO: 385137 - RNA, 19 nt, Human
ucuuucuuggccucaggac

SEQ ID NO: 385138 - RNA, 19 nt, Human
ucuuucuuggccucaggac

SEQ ID NO: 385139 - RNA, 19 nt, Human
ucuuucuuggccucaggac

SEQ ID NO: 385140 - RNA, 22 nt, Human
ugaaaugccaaacuagaaguga

SEQ ID NO: 385141 - RNA, 22 nt, Human
ugaaaugccaaacuagaaguga

SEQ ID NO: 385142 - RNA, 22 nt, Human
ugaaaugccaaacuagaaguga

SEQ ID NO: 385143 - RNA, 18 nt, Human
ugagaaggaagaugaggc

SEQ ID NO: 385144 - RNA, 18 nt, Human
ugagaaggaagaugaggc

SEQ ID NO: 385145 - RNA, 18 nt, Human
ugagaaggaagaugaggc

SEQ ID NO: 385146 - RNA, 18 nt, Human
ugagcguggauggaacua

SEQ ID NO: 385147 - RNA, 18 nt, Human
ugagcguggauggaacua

SEQ ID NO: 385148 - RNA, 18 nt, Human
ugagcguggauggaacua

SEQ ID NO: 385149 - RNA, 23 nt, Human
ugaggaaccuggaggcucucaaa

SEQ ID NO: 385150 - RNA, 23 nt, Human
ugaggaaccuggaggcucucaaa

SEQ ID NO: 385151 - RNA, 23 nt, Human
ugaggaaccuggaggcucucaaa

SEQ ID NO: 385152 - RNA, 21 nt, Human
ugaggcaggagggggacgagu

SEQ ID NO: 385153 - RNA, 19 nt, Human
ugaggcgaggguggcaccu

SEQ ID NO: 385154 - RNA, 21 nt, Human
ugaggcgaggguggcaccugg

SEQ ID NO: 385155 - RNA, 19 nt, Human
ugccuggucuaagggcggg

SEQ ID NO: 385156 - RNA, 19 nt, Human
ugccuggucuaagggcggg

SEQ ID NO: 385157 - RNA, 19 nt, Human
ugccuggucuaagggcggg

SEQ ID NO: 385158 - RNA, 22 nt, Human
ugcuggaaugucacggugaagg

SEQ ID NO: 385159 - RNA, 22 nt, Human
ugcuggaaugucacggugaagg

SEQ ID NO: 385160 - RNA, 22 nt, Human
ugcuggaaugucacggugaagg

SEQ ID NO: 385161 - RNA, 18 nt, Human
uggaaugucacggugaag

SEQ ID NO: 385162 - RNA, 18 nt, Human
uggaaugucacggugaag

SEQ ID NO: 385163 - RNA, 18 nt, Human
uggaaugucacggugaag

SEQ ID NO: 385164 - RNA, 21 nt, Human
uggaggccugguuuggggagc

SEQ ID NO: 385165 - RNA, 23 nt, Human
uggccucaggaccccacuagugg

SEQ ID NO: 385166 - RNA, 23 nt, Human
uggccucaggaccccacuagugg

SEQ ID NO: 385167 - RNA, 23 nt, Human
uggccucaggaccccacuagugg

SEQ ID NO: 385168 - RNA, 21 nt, Human
uggcguuagucagagaacagg

SEQ ID NO: 385169 - RNA, 21 nt, Human
uggcguuagucagagaacagg

SEQ ID NO: 385170 - RNA, 21 nt, Human
uggcugggauuuuucucuuuu

SEQ ID NO: 385171 - RNA, 21 nt, Human
uggcugggauuuuucucuuuu

SEQ ID NO: 385172 - RNA, 23 nt, Human
uggcuucuuggacucuucacccu

SEQ ID NO: 385173 - RNA, 23 nt, Human
ugggggccuuugccugccugguc

SEQ ID NO: 385174 - RNA, 23 nt, Human
ugggggccuuugccugccugguc

SEQ ID NO: 385175 - RNA, 23 nt, Human
ugggggccuuugccugccugguc

SEQ ID NO: 385176 - RNA, 20 nt, Human
uggggucccacgcugggagg

SEQ ID NO: 385177 - RNA, 20 nt, Human
uggggucccacgcugggagg

SEQ ID NO: 385178 - RNA, 24 nt, Human
uggggucccacgcugggagguguc

SEQ ID NO: 385179 - RNA, 24 nt, Human
uggggucccacgcugggagguguc

SEQ ID NO: 385180 - RNA, 22 nt, Human
uggguacaggagcccuaaccug

SEQ ID NO: 385181 - RNA, 22 nt, Human
uggguacaggagcccuaaccug

SEQ ID NO: 385182 - RNA, 22 nt, Human
uggguacaggagcccuaaccug

SEQ ID NO: 385183 - RNA, 25 nt, Human
ugugaggcgaggguggcaccuggcu

SEQ ID NO: 385184 - RNA, 19 nt, Human
uuccucagguugcggaugg

SEQ ID NO: 385185 - RNA, 19 nt, Human
uuccucagguugcggaugg

SEQ ID NO: 385186 - RNA, 24 nt, Human
uuccucagguugcggaugguuuca

SEQ ID NO: 385187 - RNA, 24 nt, Human
uuccucagguugcggaugguuuca

SEQ ID NO: 385188 - RNA, 22 nt, Human
uucuuggccucaggaccccacu

SEQ ID NO: 385189 - RNA, 22 nt, Human
uucuuggccucaggaccccacu

SEQ ID NO: 385190 - RNA, 22 nt, Human
uucuuggccucaggaccccacu

SEQ ID NO: 385191 - RNA, 18 nt, Human
uugcuguacagaguuugu

SEQ ID NO: 385192 - RNA, 18 nt, Human
uugcuguacagaguuugu

SEQ ID NO: 385193 - RNA, 19 nt, Human
uuugcugcuguggagaucc

SEQ ID NO: 385194 - RNA, 20 nt, Human
aaacacccaagauggaguua

SEQ ID NO: 385195 - RNA, 23 nt, Human
aaauaccccuggcccccacccuc

SEQ ID NO: 385196 - RNA, 20 nt, Human
aacacuggacugccccaccc

SEQ ID NO: 385197 - RNA, 18 nt, Human
aacagauaaccugccccc

SEQ ID NO: 385198 - RNA, 21 nt, Human
aacagauaaccugcccccaug

SEQ ID NO: 385199 - RNA, 22 nt, Human
aaccagguggugggggggucua

SEQ ID NO: 385200 - RNA, 23 nt, Human
aaggacaggccaguggacacugg

SEQ ID NO: 385201 - RNA, 21 nt, Human
aaggccaaggaaacaccucuc

SEQ ID NO: 385202 - RNA, 23 nt, Human
acacacacgcacacacacacaca

SEQ ID NO: 385203 - RNA, 24 nt, Human
acagcccaggagccgaccuggcug

SEQ ID NO: 385204 - RNA, 23 nt, Human
acagggggaugggcccccagcgc

SEQ ID NO: 385205 - RNA, 24 nt, Human
accgcacacacacgcacacacaca

SEQ ID NO: 385206 - RNA, 21 nt, Human
accgcccuucaccgcacacac

SEQ ID NO: 385207 - RNA, 19 nt, Human
accugcucugcucugcucc

SEQ ID NO: 385208 - RNA, 24 nt, Human
acgcagagcacagagcagcacccg

SEQ ID NO: 385209 - RNA, 18 nt, Human
acggggccacuggauuca

SEQ ID NO: 385210 - RNA, 20 nt, Human
acuugguucaccacagaugg

SEQ ID NO: 385211 - RNA, 22 nt, Human
agaaacccaggcgucagggcca

SEQ ID NO: 385212 - RNA, 22 nt, Human
agaaugacaguaacacugagca

SEQ ID NO: 385213 - RNA, 26 nt, Human
agacaguccccaacacuggacugccc

SEQ ID NO: 385214 - RNA, 23 nt, Human
agagaggggacagauggggaggg

SEQ ID NO: 385215 - RNA, 22 nt, Human
agagauuaugaccuccucaggc

SEQ ID NO: 385216 - RNA, 19 nt, Human
agcaccccccauuccuggc

SEQ ID NO: 385217 - RNA, 20 nt, Human
agcgcucucccauaccuccc

SEQ ID NO: 385218 - RNA, 19 nt, Human
aggacagucugugacugcc

SEQ ID NO: 385219 - RNA, 18 nt, Human
aggagguggguggccagg

SEQ ID NO: 385220 - RNA, 24 nt, Human
aggcagaagaccugacuccugaac

SEQ ID NO: 385221 - RNA, 21 nt, Human
aggcagggccugucacaaaca

SEQ ID NO: 385222 - RNA, 20 nt, Human
agggcagcugggaggaaaag

SEQ ID NO: 385223 - RNA, 20 nt, Human
aggggacagauggggagggg

SEQ ID NO: 385224 - RNA, 24 nt, Human
aggggcuggguguggagagagggg

SEQ ID NO: 385225 - RNA, 24 nt, Human
agucgggcagccugggcuuggccc

SEQ ID NO: 385226 - RNA, 24 nt, Human
agugaucaguccuuugagagacca

SEQ ID NO: 385227 - RNA, 22 nt, Human
augaccuccucaggccccacgg

SEQ ID NO: 385228 - RNA, 20 nt, Human
caaagcccuguccuugccgc

SEQ ID NO: 385229 - RNA, 22 nt, Human
caaauaccccuggcccccaccc

SEQ ID NO: 385230 - RNA, 18 nt, Human
cacaaacacccaagaugg

SEQ ID NO: 385231 - RNA, 21 nt, Human
cacagaacuucacucugccau

SEQ ID NO: 385232 - RNA, 19 nt, Human
cacagcucaucgcuccccu

SEQ ID NO: 385233 - RNA, 24 nt, Human
cacagugggccuucuggaaggcca

SEQ ID NO: 385234 - RNA, 25 nt, Human
caccagggcuuccuccacagcucau

SEQ ID NO: 385235 - RNA, 19 nt, Human
caccccugccccgagcuac

SEQ ID NO: 385236 - RNA, 19 nt, Human
cacccgcgcggugcccccc

SEQ ID NO: 385237 - RNA, 24 nt, Human
cacccggggugagcccucuuggag

SEQ ID NO: 385238 - RNA, 22 nt, Human
cacccuaugaccaagccacggu

SEQ ID NO: 385239 - RNA, 19 nt, Human
cacucugccauaaacacuc

SEQ ID NO: 385240 - RNA, 20 nt, Human
cacuggacugccccaccccu

SEQ ID NO: 385241 - RNA, 20 nt, Human
cacugggcccguccaccacc

SEQ ID NO: 385242 - RNA, 19 nt, Human
cagaacaucucacagccuc

SEQ ID NO: 385243 - RNA, 25 nt, Human
cagaggcugaugaggcgcugggcag

SEQ ID NO: 385244 - RNA, 22 nt, Human
cagcccauggucuucccugggc

SEQ ID NO: 385245 - RNA, 24 nt, Human
cagccugggcuuggccccaccucu

SEQ ID NO: 385246 - RNA, 21 nt, Human
cagcgcucucccauaccuccc

SEQ ID NO: 385247 - RNA, 26 nt, Human
cagcgcucucccauaccucccugucc

SEQ ID NO: 385248 - RNA, 21 nt, Human
caggagcaggggcugggugug

SEQ ID NO: 385249 - RNA, 24 nt, Human
caggagcccugggucccauccaaa

SEQ ID NO: 385250 - RNA, 20 nt, Human
caggagccgaccuggcugau

SEQ ID NO: 385251 - RNA, 25 nt, Human
cagggaccacccaugcccuuggucg

SEQ ID NO: 385252 - RNA, 20 nt, Human
cagggccugucacaaacacc

SEQ ID NO: 385253 - RNA, 23 nt, Human
cagggugacagcccccagugucc

SEQ ID NO: 385254 - RNA, 24 nt, Human
caggugagggaucgccugccucuu

SEQ ID NO: 385255 - RNA, 24 nt, Human
cagugggugagggucagaacaucu

SEQ ID NO: 385256 - RNA, 22 nt, Human
cauaaaauggagacggcccuga

SEQ ID NO: 385257 - RNA, 23 nt, Human
ccaaaucucgcccuccaucucuc

SEQ ID NO: 385258 - RNA, 24 nt, Human
ccaacagauaaccugcccccaugc

SEQ ID NO: 385259 - RNA, 20 nt, Human
ccaagccacgguguagccac

SEQ ID NO: 385260 - RNA, 21 nt, Human
ccaagccacgguguagccacc

SEQ ID NO: 385261 - RNA, 19 nt, Human
ccaccaccugcucugcucu

SEQ ID NO: 385262 - RNA, 18 nt, Human
ccacccaugcccuuggua

SEQ ID NO: 385263 - RNA, 21 nt, Human
ccagggcagagucaggagccc

SEQ ID NO: 385264 - RNA, 19 nt, Human
cccaacacuggacugcccc

SEQ ID NO: 385265 - RNA, 23 nt, Human
cccaggaugagccaacucagaag

SEQ ID NO: 385266 - RNA, 21 nt, Human
cccauccaaaucucgcccucc

SEQ ID NO: 385267 - RNA, 22 nt, Human
cccaugcccagcacaggccgga

SEQ ID NO: 385268 - RNA, 19 nt, Human
ccccaccccugccccgagc

SEQ ID NO: 385269 - RNA, 20 nt, Human
ccccagcgcucucccauacc

SEQ ID NO: 385270 - RNA, 18 nt, Human
ccccaggggcuguccucu

SEQ ID NO: 385271 - RNA, 20 nt, Human
cccccgaacccugacugacc

SEQ ID NO: 385272 - RNA, 20 nt, Human
ccccgaacccugacugaccc

SEQ ID NO: 385273 - RNA, 24 nt, Human
ccccgaacccugacugaccccaga

SEQ ID NO: 385274 - RNA, 20 nt, Human
cccguccaccaccugcucug

SEQ ID NO: 385275 - RNA, 23 nt, Human
cccuccggcugaggaucaccagc

SEQ ID NO: 385276 - RNA, 18 nt, Human
cccugccccgagcuaccc

SEQ ID NO: 385277 - RNA, 21 nt, Human
cccuguccuugccgcucugcc

SEQ ID NO: 385278 - RNA, 23 nt, Human
ccgcacacacacgcacacacaca

SEQ ID NO: 385279 - RNA, 19 nt, Human
ccggggcaccgacaagggc

SEQ ID NO: 385280 - RNA, 18 nt, Human
ccucaggccccacggccc

SEQ ID NO: 385281 - RNA, 18 nt, Human
ccucaggccccacggccc

SEQ ID NO: 385282 - RNA, 19 nt, Human
ccucaggggcucuugccug

SEQ ID NO: 385283 - RNA, 21 nt, Human
ccuggcccccacccucuaggc

SEQ ID NO: 385284 - RNA, 23 nt, Human
ccugggaggggcauucccccuuu

SEQ ID NO: 385285 - RNA, 20 nt, Human
ccugggucccauccaaaucu

SEQ ID NO: 385286 - RNA, 19 nt, Human
cgaggagaaacagaugggc

SEQ ID NO: 385287 - RNA, 25 nt, Human
cggggcaccgacaagggcuggagac

SEQ ID NO: 385288 - RNA, 24 nt, Human
cuagaccucaguuuccucaaccau

SEQ ID NO: 385289 - RNA, 21 nt, Human
cucacccuaugaccaagccac

SEQ ID NO: 385290 - RNA, 18 nt, Human
cucagcaccccccauucc

SEQ ID NO: 385291 - RNA, 21 nt, Human
cuccacagcucaucgcucccc

SEQ ID NO: 385292 - RNA, 20 nt, Human
cuccugcccucacucacgcc

SEQ ID NO: 385293 - RNA, 21 nt, Human
cugcacccgcgcggugccccc

SEQ ID NO: 385294 - RNA, 21 nt, Human
cugcagcccccgaacccugac

SEQ ID NO: 385295 - RNA, 27 nt, Human
cugcaggagggcccuucuuccucccag

SEQ ID NO: 385296 - RNA, 22 nt, Human
cugcagucgggcagccugggcu

SEQ ID NO: 385297 - RNA, 22 nt, Human
cuggcuccacagugggccuucu

SEQ ID NO: 385298 - RNA, 20 nt, Human
cugggcaggucccugccaga

SEQ ID NO: 385299 - RNA, 19 nt, Human
cugggcccucucuugugcu

SEQ ID NO: 385300 - RNA, 22 nt, Human
cuuagugaccccuccuagaggc

SEQ ID NO: 385301 - RNA, 21 nt, Human
cuucccagcauuaucuggauc

SEQ ID NO: 385302 - RNA, 20 nt, Human
cuucugggcugaacccggga

SEQ ID NO: 385303 - RNA, 24 nt, Human
cuuggccccaccucuaucacuagc

SEQ ID NO: 385304 - RNA, 21 nt, Human
cuugggccaagguuagggguc

SEQ ID NO: 385305 - RNA, 19 nt, Human
gaacccugacugaccccag

SEQ ID NO: 385306 - RNA, 18 nt, Human
gaagagcacguggucugc

SEQ ID NO: 385307 - RNA, 22 nt, Human
gaagagcacguggucugcaguc

SEQ ID NO: 385308 - RNA, 19 nt, Human
gaagccccaagcgugggga

SEQ ID NO: 385309 - RNA, 24 nt, Human
gacauggggagugucaggucaagu

SEQ ID NO: 385310 - RNA, 21 nt, Human
gagaggcuuuugguggacagu

SEQ ID NO: 385311 - RNA, 24 nt, Human
gagaggcuuuugguggacaguggg

SEQ ID NO: 385312 - RNA, 19 nt, Human
gagaggggacagaugggga

SEQ ID NO: 385313 - RNA, 21 nt, Human
gagcagcacccggggugagcc

SEQ ID NO: 385314 - RNA, 20 nt, Human
gagccucaguuucccuucug

SEQ ID NO: 385315 - RNA, 21 nt, Human
gagccucaguuucccuucugg

SEQ ID NO: 385316 - RNA, 20 nt, Human
gaggggcgggggcaggcggu

SEQ ID NO: 385317 - RNA, 21 nt, Human
gaguugggccugggguucccc

SEQ ID NO: 385318 - RNA, 21 nt, Human
gaucugucuuucccaccauuc

SEQ ID NO: 385319 - RNA, 19 nt, Human
gauucugggcaaguaaucu

SEQ ID NO: 385320 - RNA, 20 nt, Human
gcagcugggaggaaaaggga

SEQ ID NO: 385321 - RNA, 20 nt, Human
gcaggguccagcugcaggag

SEQ ID NO: 385322 - RNA, 20 nt, Human
gcaguaacgcugcgggaggg

SEQ ID NO: 385323 - RNA, 19 nt, Human
gcaguacccugaggucucc

SEQ ID NO: 385324 - RNA, 24 nt, Human
gccacacuucccagcauuaucugg

SEQ ID NO: 385325 - RNA, 18 nt, Human
gcccaggagccgaccugg

SEQ ID NO: 385326 - RNA, 21 nt, Human
gcccauggucuucccugggcc

SEQ ID NO: 385327 - RNA, 22 nt, Human
gccccgagcuacccuggaccuc

SEQ ID NO: 385328 - RNA, 19 nt, Human
gcugcagcccccgaacccu

SEQ ID NO: 385329 - RNA, 21 nt, Human
gcuggcuggcacccgaggaga

SEQ ID NO: 385330 - RNA, 23 nt, Human
ggaaagcuuugggagcaagggag

SEQ ID NO: 385331 - RNA, 18 nt, Human
ggaagagugagggauucu

SEQ ID NO: 385332 - RNA, 19 nt, Human
ggaagggcuucugggcuga

SEQ ID NO: 385333 - RNA, 18 nt, Human
ggaccacccaugcccuug

SEQ ID NO: 385334 - RNA, 23 nt, Human
ggagccacccugcaggguccagc

SEQ ID NO: 385335 - RNA, 19 nt, Human
ggaggccaagggccagggg

SEQ ID NO: 385336 - RNA, 20 nt, Human
ggagguggguggccagggaa

SEQ ID NO: 385337 - RNA, 20 nt, Human
ggauguggguggagggaccc

SEQ ID NO: 385338 - RNA, 25 nt, Human
ggcaggagcaggggcugggugugga

SEQ ID NO: 385339 - RNA, 24 nt, Human
ggcaguacccugaggucuccuagu

SEQ ID NO: 385340 - RNA, 23 nt, Human
ggccaagguuaggggucucccag

SEQ ID NO: 385341 - RNA, 21 nt, Human
ggccccacggcccucuuuggg

SEQ ID NO: 385342 - RNA, 21 nt, Human
ggcuuugaagaucaagaauca

SEQ ID NO: 385343 - RNA, 23 nt, Human
gggaagccccaagcguggggaug

SEQ ID NO: 385344 - RNA, 19 nt, Human
gggaggucacaagggcagg

SEQ ID NO: 385345 - RNA, 23 nt, Human
gggccagggguaggaccaggggg

SEQ ID NO: 385346 - RNA, 19 nt, Human
gggcuucugggcugaaccc

SEQ ID NO: 385347 - RNA, 24 nt, Human
gggcuucugggcugaacccgggaa

SEQ ID NO: 385348 - RNA, 18 nt, Human
ggggagggcagcugggag

SEQ ID NO: 385349 - RNA, 18 nt, Human
ggggauggggggauggug

SEQ ID NO: 385350 - RNA, 19 nt, Human
ggggauggggggauggugg

SEQ ID NO: 385351 - RNA, 21 nt, Human
ggggcuguccccaggggagga

SEQ ID NO: 385352 - RNA, 27 nt, Human
ggggcuguccucugccaacagaaggag

SEQ ID NO: 385353 - RNA, 22 nt, Human
gguaggagguggguggccaggg

SEQ ID NO: 385354 - RNA, 24 nt, Human
guaggaccagggggaugugggugg

SEQ ID NO: 385355 - RNA, 19 nt, Human
gucccuucucccauaaacu

SEQ ID NO: 385356 - RNA, 25 nt, Human
gucugugggacacgcagagcacaga

SEQ ID NO: 385357 - RNA, 20 nt, Human
gugaaaccuuuuuuccuggg

SEQ ID NO: 385358 - RNA, 23 nt, Human
uaacugcugagugaguaagcagg

SEQ ID NO: 385359 - RNA, 21 nt, Human
uaccaccagggcuuccuccac

SEQ ID NO: 385360 - RNA, 18 nt, Human
uaccccagacucugccga

SEQ ID NO: 385361 - RNA, 21 nt, Human
uaccccuggcccccacccucu

SEQ ID NO: 385362 - RNA, 21 nt, Human
uacccugaggucuccuagugc

SEQ ID NO: 385363 - RNA, 22 nt, Human
uaccggacagaguugggccugg

SEQ ID NO: 385364 - RNA, 22 nt, Human
uacguagacaguccccaacacu

SEQ ID NO: 385365 - RNA, 23 nt, Human
uagaugggggauggggggauggu

SEQ ID NO: 385366 - RNA, 24 nt, Human
uagccccucaacugcgacaccccc

SEQ ID NO: 385367 - RNA, 18 nt, Human
uagggaggcuggcuccac

SEQ ID NO: 385368 - RNA, 21 nt, Human
ucaccacccaugcccagcaca

SEQ ID NO: 385369 - RNA, 22 nt, Human
ucacccucucucaucuccaucc

SEQ ID NO: 385370 - RNA, 22 nt, Human
uccaaaucucgcccuccaucuc

SEQ ID NO: 385371 - RNA, 21 nt, Human
uccacggccacagcccaggag

SEQ ID NO: 385372 - RNA, 22 nt, Human
uccacggccacagcccaggagc

SEQ ID NO: 385373 - RNA, 19 nt, Human
uccagcugcaggagggccc

SEQ ID NO: 385374 - RNA, 21 nt, Human
uccagggcagagucaggagcc

SEQ ID NO: 385375 - RNA, 19 nt, Human
ucccauaccucccuguccc

SEQ ID NO: 385376 - RNA, 18 nt, Human
ucccugggccucccaugc

SEQ ID NO: 385377 - RNA, 23 nt, Human
uccuccucuuucccuuaacucug

SEQ ID NO: 385378 - RNA, 22 nt, Human
ucgagacuuaaccagguggugg

SEQ ID NO: 385379 - RNA, 24 nt, Human
ucgaggcaccugcugggcagcugg

SEQ ID NO: 385380 - RNA, 22 nt, Human
ucuccacggccacagcccagga

SEQ ID NO: 385381 - RNA, 21 nt, Human
ucucccauaaacuccugggag

SEQ ID NO: 385382 - RNA, 25 nt, Human
ucugcagucgggcagccugggcuug

SEQ ID NO: 385383 - RNA, 18 nt, Human
ucugggcugaacccggga

SEQ ID NO: 385384 - RNA, 22 nt, Human
ucuuagaugggggaugggggga

SEQ ID NO: 385385 - RNA, 20 nt, Human
ugaagagcccaccuugugca

SEQ ID NO: 385386 - RNA, 21 nt, Human
ugaaugcaaauaccccuggcc

SEQ ID NO: 385387 - RNA, 18 nt, Human
ugacaguaacacugagca

SEQ ID NO: 385388 - RNA, 19 nt, Human
ugaccuccucaggccccac

SEQ ID NO: 385389 - RNA, 21 nt, Human
ugacucagcaccccccauucc

SEQ ID NO: 385390 - RNA, 19 nt, Human
ugacuccugaaccucuccc

SEQ ID NO: 385391 - RNA, 20 nt, Human
ugacuccugaaccucucccu

SEQ ID NO: 385392 - RNA, 18 nt, Human
ugacugaccccagaugag

SEQ ID NO: 385393 - RNA, 19 nt, Human
ugagagaccacgaaggggu

SEQ ID NO: 385394 - RNA, 23 nt, Human
ugagaggagaggugacauagugu

SEQ ID NO: 385395 - RNA, 20 nt, Human
ugagaugacucagcaccccc

SEQ ID NO: 385396 - RNA, 20 nt, Human
ugagcccucuuggaggaggc

SEQ ID NO: 385397 - RNA, 22 nt, Human
ugagggccccaaggccucccag

SEQ ID NO: 385398 - RNA, 20 nt, Human
ugaguaagcaggugagggaa

SEQ ID NO: 385399 - RNA, 18 nt, Human
ugcagcagaaucagggug

SEQ ID NO: 385400 - RNA, 19 nt, Human
ugcagcagaaucagggugu

SEQ ID NO: 385401 - RNA, 26 nt, Human
ugcagucgggcagccugggcuuggcc

SEQ ID NO: 385402 - RNA, 18 nt, Human
ugccacacucuccccuac

SEQ ID NO: 385403 - RNA, 18 nt, Human
ugccacggggccacugga

SEQ ID NO: 385404 - RNA, 21 nt, Human
ugcccaggaugagccaacuca

SEQ ID NO: 385405 - RNA, 21 nt, Human
ugcccugggauauacuugcac

SEQ ID NO: 385406 - RNA, 21 nt, Human
ugccgcucugccucccauagg

SEQ ID NO: 385407 - RNA, 23 nt, Human
ugccuaggguggcaggcagggcc

SEQ ID NO: 385408 - RNA, 18 nt, Human
ugccucaggggcucuugc

SEQ ID NO: 385409 - RNA, 18 nt, Human
ugccucaggggcucuugc

SEQ ID NO: 385410 - RNA, 20 nt, Human
ugcugagugaguaagcaggu

SEQ ID NO: 385411 - RNA, 20 nt, Human
ugcugagugaguaagcaggu

SEQ ID NO: 385412 - RNA, 22 nt, Human
ugcugggcagcuggggccaaga

SEQ ID NO: 385413 - RNA, 20 nt, Human
uggaagggcuucugggcuga

SEQ ID NO: 385414 - RNA, 21 nt, Human
uggagagaggggacagauggg

SEQ ID NO: 385415 - RNA, 23 nt, Human
uggaggaggccaagggccagggg

SEQ ID NO: 385416 - RNA, 19 nt, Human
uggccagggaagagcacgu

SEQ ID NO: 385417 - RNA, 20 nt, Human
ugggcagcuggggccaagaa

SEQ ID NO: 385418 - RNA, 20 nt, Human
ugggcaguacccugaggucu

SEQ ID NO: 385419 - RNA, 19 nt, Human
ugggcugaacccgggaaga

SEQ ID NO: 385420 - RNA, 20 nt, Human
uggggaggggcgggggcagg

SEQ ID NO: 385421 - RNA, 20 nt, Human
ugggggcccaggauggggac

SEQ ID NO: 385422 - RNA, 19 nt, Human
uggguucugagucuucacu

SEQ ID NO: 385423 - RNA, 29 nt, Human
uggguucugagucuucacuuuauuacuau

SEQ ID NO: 385424 - RNA, 19 nt, Human
ugucaccagaagucaccac

SEQ ID NO: 385425 - RNA, 20 nt, Human
ugucauaaaggagggugcca

SEQ ID NO: 385426 - RNA, 19 nt, Human
ugugaaaccuuuuuuccug

SEQ ID NO: 385427 - RNA, 22 nt, Human
uguggacagagccccuucuccg

SEQ ID NO: 385428 - RNA, 19 nt, Human
uguggagagaggggacaga

SEQ ID NO: 385429 - RNA, 25 nt, Human
uucacuuuauuacuaugucaccgcu

SEQ ID NO: 385430 - RNA, 21 nt, Human
uucuccggauuggaaaaugaa

SEQ ID NO: 385431 - RNA, 19 nt, Human
uugccugugucauccuggg

SEQ ID NO: 385432 - RNA, 23 nt, Human
uuuccugggaggucacaagggca

SEQ ID NO: 385433 - RNA, 18 nt, Human
uuugccacucacucaccg

SEQ ID NO: 385434 - RNA, 24 nt, Human
aaagcgaggaaaaacacuagcuaa

SEQ ID NO: 385435 - RNA, 20 nt, Human
aacaggugaaagagaggggc

SEQ ID NO: 385436 - RNA, 21 nt, Human
aaccugagugaggacacaaga

SEQ ID NO: 385437 - RNA, 22 nt, Human
agauaauagcggcucccacggc

SEQ ID NO: 385438 - RNA, 22 nt, Human
aggauggaacaggugaaagaga

SEQ ID NO: 385439 - RNA, 21 nt, Human
aggggaagcaaaccugaguga

SEQ ID NO: 385440 - RNA, 22 nt, Human
aggggcuggcaguuccaggagg

SEQ ID NO: 385441 - RNA, 19 nt, Human
aguuccaggaggcucaugg

SEQ ID NO: 385442 - RNA, 24 nt, Human
caaggaggaagugccaugagcacc

SEQ ID NO: 385443 - RNA, 18 nt, Human
caccagccccgcccucac

SEQ ID NO: 385444 - RNA, 19 nt, Human
caccccugcccuccccagg

SEQ ID NO: 385445 - RNA, 22 nt, Human
caccccugcccuccccaggcuu

SEQ ID NO: 385446 - RNA, 24 nt, Human
caccccugcccuccccaggcuucc

SEQ ID NO: 385447 - RNA, 21 nt, Human
cacgggaggcagcccagaggc

SEQ ID NO: 385448 - RNA, 19 nt, Human
cacucggcacagacagagu

SEQ ID NO: 385449 - RNA, 25 nt, Human
cagcaucccaggccgggcaucuccc

SEQ ID NO: 385450 - RNA, 18 nt, Human
cagccccgcccucacacc

SEQ ID NO: 385451 - RNA, 20 nt, Human
cagccccgcccucacaccac

SEQ ID NO: 385452 - RNA, 21 nt, Human
cagggugguggcccccagauc

SEQ ID NO: 385453 - RNA, 22 nt, Human
caugagcaccagccccgcccuc

SEQ ID NO: 385454 - RNA, 23 nt, Human
ccaggccgggcaucucccccacg

SEQ ID NO: 385455 - RNA, 22 nt, Human
ccauggggcaccccugcccucc

SEQ ID NO: 385456 - RNA, 18 nt, Human
cccacggccugacccggg

SEQ ID NO: 385457 - RNA, 22 nt, Human
ccccugcccuccccaggcuucc

SEQ ID NO: 385458 - RNA, 24 nt, Human
cccgggccggggggaagcugaggc

SEQ ID NO: 385459 - RNA, 24 nt, Human
cccugcccuccccaggcuuccuaa

SEQ ID NO: 385460 - RNA, 18 nt, Human
ccgccgcugccgccgccg

SEQ ID NO: 385461 - RNA, 24 nt, Human
ccgucgccgccgcugccgccgccg

SEQ ID NO: 385462 - RNA, 18 nt, Human
ccucucugucccccuucc

SEQ ID NO: 385463 - RNA, 18 nt, Human
ccugcugccagggguggg

SEQ ID NO: 385464 - RNA, 20 nt, Human
cggcucccacggccugaccc

SEQ ID NO: 385465 - RNA, 21 nt, Human
cucacaccacgggaggcagcc

SEQ ID NO: 385466 - RNA, 27 nt, Human
cucacaccacgggaggcagcccagagg

SEQ ID NO: 385467 - RNA, 26 nt, Human
cuccccaggcuuccuaaguaacaacu

SEQ ID NO: 385468 - RNA, 19 nt, Human
gacugaagcccucugggca

SEQ ID NO: 385469 - RNA, 21 nt, Human
gagaacgcagauaauagcggc

SEQ ID NO: 385470 - RNA, 22 nt, Human
gaggggcuggcaguuccaggag

SEQ ID NO: 385471 - RNA, 23 nt, Human
gcagcccagaggccaccggcaca

SEQ ID NO: 385472 - RNA, 21 nt, Human
gcaguuccaggaggcucaugg

SEQ ID NO: 385473 - RNA, 21 nt, Human
gccccgcccucacaccacggg

SEQ ID NO: 385474 - RNA, 23 nt, Human
ggaaaguccagggcagaggggag

SEQ ID NO: 385475 - RNA, 18 nt, Human
ggcagaggggagggcccu

SEQ ID NO: 385476 - RNA, 18 nt, Human
gggaaaguccagggcaga

SEQ ID NO: 385477 - RNA, 21 nt, Human
gggcacaggcacuuggggugu

SEQ ID NO: 385478 - RNA, 22 nt, Human
gggcaggugugauggcccccac

SEQ ID NO: 385479 - RNA, 22 nt, Human
ggggaagcugaggcacuuguca

SEQ ID NO: 385480 - RNA, 22 nt, Human
ucaggcaaagcccuucccugcu

SEQ ID NO: 385481 - RNA, 21 nt, Human
ucccacggccugacccgggcc

SEQ ID NO: 385482 - RNA, 23 nt, Human
uccccaggcuuccuaaguaacaa

SEQ ID NO: 385483 - RNA, 23 nt, Human
ucccugcugccaggggugggagc

SEQ ID NO: 385484 - RNA, 22 nt, Human
ucgccgccgcugccgccgccgc

SEQ ID NO: 385485 - RNA, 24 nt, Human
ucgccgucgccgccgcugccgccg

SEQ ID NO: 385486 - RNA, 20 nt, Human
ucugccagcccccgccaggc

SEQ ID NO: 385487 - RNA, 23 nt, Human
ugaggacacaagagccugguccg

SEQ ID NO: 385488 - RNA, 19 nt, Human
ugcaggcggggcugagguc

SEQ ID NO: 385489 - RNA, 19 nt, Human
ugccaugagcaccagcccc

SEQ ID NO: 385490 - RNA, 20 nt, Human
ugcccuggaggagugagcgg

SEQ ID NO: 385491 - RNA, 22 nt, Human
ugcccuggaggagugagcggcu

SEQ ID NO: 385492 - RNA, 26 nt, Human
uggaacaggugaaagagaggggcugg

SEQ ID NO: 385493 - RNA, 19 nt, Human
uggcccccacgagucuuug

SEQ ID NO: 385494 - RNA, 21 nt, Human
ugggcaccugcuggcuucuag

SEQ ID NO: 385495 - RNA, 22 nt, Human
ugggcaccugcuggcuucuagc

SEQ ID NO: 385496 - RNA, 22 nt, Human
ugucaggcaaagcccuucccug

SEQ ID NO: 385497 - RNA, 19 nt, Human
ugucaguagcacaugggca

SEQ ID NO: 385498 - RNA, 22 nt, Human
ugugauggcccccacgagucuu

SEQ ID NO: 385499 - RNA, 23 nt, Human
uuuauaauacacucggcacagac

SEQ ID NO: 385500 - RNA, 21 nt, Human
acccccucuuggccccggaug

SEQ ID NO: 385501 - RNA, 21 nt, Human
accuugugccuuccuggccag

SEQ ID NO: 385502 - RNA, 21 nt, Human
agaaacgagacagucacuacc

SEQ ID NO: 385503 - RNA, 20 nt, Human
agagagaggagcagcuugug

SEQ ID NO: 385504 - RNA, 21 nt, Human
agcagccugugagagaaagug

SEQ ID NO: 385505 - RNA, 25 nt, Human
agcggccaccuacucuguccgcggc

SEQ ID NO: 385506 - RNA, 20 nt, Human
agcuaugcagagggacucca

SEQ ID NO: 385507 - RNA, 27 nt, Human
aggagcagcuuguggaguacuaggagg

SEQ ID NO: 385508 - RNA, 19 nt, Human
aggcagggacugggccagg

SEQ ID NO: 385509 - RNA, 18 nt, Human
agggacugggccaggaag

SEQ ID NO: 385510 - RNA, 26 nt, Human
agggacugggggaacuuggcaggggc

SEQ ID NO: 385511 - RNA, 22 nt, Human
agguggagaggcagggacuggg

SEQ ID NO: 385512 - RNA, 19 nt, Human
agucggaacaugggacacu

SEQ ID NO: 385513 - RNA, 19 nt, Human
aguggagaguggcuccgga

SEQ ID NO: 385514 - RNA, 19 nt, Human
aucacaacacugacagggc

SEQ ID NO: 385515 - RNA, 19 nt, Human
cacugagcuggaaggaccc

SEQ ID NO: 385516 - RNA, 25 nt, Human
caggaagccaagguaaagggaacca

SEQ ID NO: 385517 - RNA, 19 nt, Human
caggugcugagggacuggg

SEQ ID NO: 385518 - RNA, 21 nt, Human
caucuuguggggcacgguggc

SEQ ID NO: 385519 - RNA, 23 nt, Human
ccagaaccacccacaccugggca

SEQ ID NO: 385520 - RNA, 19 nt, Human
ccaggcauccuucuccucu

SEQ ID NO: 385521 - RNA, 24 nt, Human
cccagacacgcggguccacccccu

SEQ ID NO: 385522 - RNA, 19 nt, Human
cccccaaccccagagugag

SEQ ID NO: 385523 - RNA, 25 nt, Human
ccccgcuuuguccugggcagccccu

SEQ ID NO: 385524 - RNA, 20 nt, Human
ccccugcccccgcuuugucc

SEQ ID NO: 385525 - RNA, 20 nt, Human
ccccugcccccgcuuugucc

SEQ ID NO: 385526 - RNA, 20 nt, Human
ccgaggccgcugccucgugc

SEQ ID NO: 385527 - RNA, 19 nt, Human
ccguccggccggccccgcc

SEQ ID NO: 385528 - RNA, 18 nt, Human
ccugcugaggggcuuguc

SEQ ID NO: 385529 - RNA, 19 nt, Human
ccuggcacccaggcauccu

SEQ ID NO: 385530 - RNA, 20 nt, Human
ccuggcgccuucuguccgcc

SEQ ID NO: 385531 - RNA, 23 nt, Human
cguagagggcagcuggaccccca

SEQ ID NO: 385532 - RNA, 19 nt, Human
cucuccuggcaaggucuua

SEQ ID NO: 385533 - RNA, 19 nt, Human
cugaagggcuaggacaggg

SEQ ID NO: 385534 - RNA, 23 nt, Human
cuggaccaugaucacaacacuga

SEQ ID NO: 385535 - RNA, 23 nt, Human
cuggagccucugggccucucucc

SEQ ID NO: 385536 - RNA, 25 nt, Human
cuggagccucugggccucucuccug

SEQ ID NO: 385537 - RNA, 21 nt, Human
cuggggccugcguuggugggg

SEQ ID NO: 385538 - RNA, 25 nt, Human
gaaaauacacaaucucuggucuuuc

SEQ ID NO: 385539 - RNA, 21 nt, Human
gaacaugggacacugaaaaua

SEQ ID NO: 385540 - RNA, 23 nt, Human
gaccaugaucacaacacugaccg

SEQ ID NO: 385541 - RNA, 20 nt, Human
gaccaugaucacaacacugg

SEQ ID NO: 385542 - RNA, 23 nt, Human
gacccaagggaggucccggagac

SEQ ID NO: 385543 - RNA, 21 nt, Human
gagccucugggccucucuccu

SEQ ID NO: 385544 - RNA, 20 nt, Human
gaugggaacaguggccagga

SEQ ID NO: 385545 - RNA, 22 nt, Human
gcccgaggccgcugccucgugc

SEQ ID NO: 385546 - RNA, 19 nt, Human
gcccuggucugugccugcc

SEQ ID NO: 385547 - RNA, 20 nt, Human
gccuuggagcccuggucugu

SEQ ID NO: 385548 - RNA, 24 nt, Human
gcuggugucuuggcccacagcuac

SEQ ID NO: 385549 - RNA, 21 nt, Human
ggaaagccuuccccaggccag

SEQ ID NO: 385550 - RNA, 24 nt, Human
ggacugggccaggaagccaaggua

SEQ ID NO: 385551 - RNA, 19 nt, Human
ggagagggagagagugaua

SEQ ID NO: 385552 - RNA, 19 nt, Human
ggcaaggucuuacugaagg

SEQ ID NO: 385553 - RNA, 19 nt, Human
ggccucucuccugcugagg

SEQ ID NO: 385554 - RNA, 24 nt, Human
ggccuuggagcccuggucugugcc

SEQ ID NO: 385555 - RNA, 24 nt, Human
gggaggucccggagacccuggggc

SEQ ID NO: 385556 - RNA, 26 nt, Human
gggcaggggccggggccacagagaga

SEQ ID NO: 385557 - RNA, 23 nt, Human
gggccggggccacagagagagga

SEQ ID NO: 385558 - RNA, 19 nt, Human
ggggaacuuggcaggggca

SEQ ID NO: 385559 - RNA, 20 nt, Human
ggguggccuuggagcccugg

SEQ ID NO: 385560 - RNA, 22 nt, Human
gguggagaggcagggacugggc

SEQ ID NO: 385561 - RNA, 19 nt, Human
gucagcucaguuacagucu

SEQ ID NO: 385562 - RNA, 26 nt, Human
guggccuuggagcccuggucugugcc

SEQ ID NO: 385563 - RNA, 18 nt, Human
uauccccuucucaggacc

SEQ ID NO: 385564 - RNA, 21 nt, Human
ucaggaccucaguccuggggc

SEQ ID NO: 385565 - RNA, 19 nt, Human
ucaggagagggagagagug

SEQ ID NO: 385566 - RNA, 21 nt, Human
ucaguccuggggccaggugcu

SEQ ID NO: 385567 - RNA, 21 nt, Human
uccccaggccaguccauucca

SEQ ID NO: 385568 - RNA, 22 nt, Human
uccccagucuuggggcgagggu

SEQ ID NO: 385569 - RNA, 22 nt, Human
ucuaggcuacaauguaacaagg

SEQ ID NO: 385570 - RNA, 22 nt, Human
ucuccuggcaaggucuuacuga

SEQ ID NO: 385571 - RNA, 23 nt, Human
ucuguccgcggcacugagcugga

SEQ ID NO: 385572 - RNA, 18 nt, Human
ugagagaaaguggagagu

SEQ ID NO: 385573 - RNA, 18 nt, Human
ugagcuggaaggacccaa

SEQ ID NO: 385574 - RNA, 20 nt, Human
ugaguagucagcuaugcaga

SEQ ID NO: 385575 - RNA, 22 nt, Human
ugcagagggacuccaaccuggg

SEQ ID NO: 385576 - RNA, 18 nt, Human
uggagaguggcuccggac

SEQ ID NO: 385577 - RNA, 19 nt, Human
uggagcccuggucugugcc

SEQ ID NO: 385578 - RNA, 20 nt, Human
uggagcccuggucugugccu

SEQ ID NO: 385579 - RNA, 21 nt, Human
uggagcccuggucugugccug

SEQ ID NO: 385580 - RNA, 20 nt, Human
ugggaugggaacaguggcca

SEQ ID NO: 385581 - RNA, 18 nt, Human
ugggcuguucuagcagcc

SEQ ID NO: 385582 - RNA, 19 nt, Human
uguggcaaccacguuuggu

SEQ ID NO: 385583 - RNA, 22 nt, Human
uguucacuuaaauauccacaca

SEQ ID NO: 385584 - RNA, 23 nt, Human
uuccccugcccccgcuuuguccu

SEQ ID NO: 385585 - RNA, 21 nt, Human
uuggagcccuggucugugccu

SEQ ID NO: 385586 - RNA, 22 nt, Human
uuggagcccuggucugugccug

SEQ ID NO: 385587 - RNA, 22 nt, Human
uuuuuuuuuuuuuuuuucacag

SEQ ID NO: 385588 - RNA, 23 nt, Human
uuuuuuuuuuuuuuuuucacagu

SEQ ID NO: 385589 - RNA, 20 nt, Human
aggcagcccucuuccuccgg

SEQ ID NO: 385590 - RNA, 22 nt, Human
aaaacuuaaguaaaaagagcau

SEQ ID NO: 385591 - RNA, 18 nt, Human
aaaaggcuagaugcagug

SEQ ID NO: 385592 - RNA, 31 nt, Human
aacaaaugugcacacacacacacacacacag

SEQ ID NO: 385593 - RNA, 21 nt, Human
aacuagaaauaaaucuuuagc

SEQ ID NO: 385594 - RNA, 18 nt, Human
aagggaauggcaguauug

SEQ ID NO: 385595 - RNA, 22 nt, Human
aauauaagagugaagccauuau

SEQ ID NO: 385596 - RNA, 22 nt, Human
acaaaaugcuguguuccacccc

SEQ ID NO: 385597 - RNA, 23 nt, Human
acacacacacacacacacacaca

SEQ ID NO: 385598 - RNA, 23 nt, Human
acacacacacacacacacacaca

SEQ ID NO: 385599 - RNA, 23 nt, Human
acacacacacacacacacacaca

SEQ ID NO: 385600 - RNA, 23 nt, Human
acacacacacacacacacacaca

SEQ ID NO: 385601 - RNA, 23 nt, Human
acacacacacacacacacacaca

SEQ ID NO: 385602 - RNA, 23 nt, Human
acacacacacacacacacacaca

SEQ ID NO: 385603 - RNA, 23 nt, Human
acacacacacacacacacacaca

SEQ ID NO: 385604 - RNA, 23 nt, Human
acacacacacacacacacacaca

SEQ ID NO: 385605 - RNA, 20 nt, Human
acuagaaauaaaucuuuagc

SEQ ID NO: 385606 - RNA, 22 nt, Human
acuauaugggcaaaugcagaaa

SEQ ID NO: 385607 - RNA, 21 nt, Human
agacugaacaugaggccaaug

SEQ ID NO: 385608 - RNA, 25 nt, Human
agcacacacggcagucacaguguac

SEQ ID NO: 385609 - RNA, 18 nt, Human
agcuucuucucccccauc

SEQ ID NO: 385610 - RNA, 21 nt, Human
aggaaacuacgggucuaagca

SEQ ID NO: 385611 - RNA, 23 nt, Human
agugucauuuacuacauaauaac

SEQ ID NO: 385612 - RNA, 18 nt, Human
aucagcucuccuauaucu

SEQ ID NO: 385613 - RNA, 21 nt, Human
augggcaaaugcagaaaggcu

SEQ ID NO: 385614 - RNA, 25 nt, Human
augugcacacacacacacacacagu

SEQ ID NO: 385615 - RNA, 20 nt, Human
auuacugagguauuuacaga

SEQ ID NO: 385616 - RNA, 25 nt, Human
caaauacacaaacuagaaauaaauc

SEQ ID NO: 385617 - RNA, 20 nt, Human
caaaugugcacacacacaca

SEQ ID NO: 385618 - RNA, 20 nt, Human
caauauuucauaaauguuga

SEQ ID NO: 385619 - RNA, 20 nt, Human
cacacacacacacacacaca

SEQ ID NO: 385620 - RNA, 20 nt, Human
cacacacacacacacacaca

SEQ ID NO: 385621 - RNA, 20 nt, Human
cacacacacacacacacaca

SEQ ID NO: 385622 - RNA, 20 nt, Human
cacacacacacacacacaca

SEQ ID NO: 385623 - RNA, 20 nt, Human
cacacacacacacacacaca

SEQ ID NO: 385624 - RNA, 20 nt, Human
cacacacacacacacacaca

SEQ ID NO: 385625 - RNA, 20 nt, Human
cacacacacacacacacaca

SEQ ID NO: 385626 - RNA, 20 nt, Human
cacacacacacacacacaca

SEQ ID NO: 385627 - RNA, 20 nt, Human
cacacacacacacacacaca

SEQ ID NO: 385628 - RNA, 20 nt, Human
cacacacacacacacacaca

SEQ ID NO: 385629 - RNA, 20 nt, Human
cacacacacacacacacaca

SEQ ID NO: 385630 - RNA, 20 nt, Human
cacacacacacacacacaca

SEQ ID NO: 385631 - RNA, 20 nt, Human
cacacacacacacacacaca

SEQ ID NO: 385632 - RNA, 22 nt, Human
cacacacacacacacacacaca

SEQ ID NO: 385633 - RNA, 22 nt, Human
cacacacacacacacacacaca

SEQ ID NO: 385634 - RNA, 22 nt, Human
cacacacacacacacacacaca

SEQ ID NO: 385635 - RNA, 22 nt, Human
cacacacacacacacacacaca

SEQ ID NO: 385636 - RNA, 22 nt, Human
cacacacacacacacacacaca

SEQ ID NO: 385637 - RNA, 22 nt, Human
cacacacacacacacacacaca

SEQ ID NO: 385638 - RNA, 26 nt, Human
cacacacacacacacacacacacaca

SEQ ID NO: 385639 - RNA, 26 nt, Human
cacacacacacacacacacacacaca

SEQ ID NO: 385640 - RNA, 26 nt, Human
cacacacacacacacacacacacaca

SEQ ID NO: 385641 - RNA, 26 nt, Human
cacacacacacacacacacacacaca

SEQ ID NO: 385642 - RNA, 26 nt, Human
cacacacacacacacacacacacaca

SEQ ID NO: 385643 - RNA, 26 nt, Human
cacacacacacacacacacacacaca

SEQ ID NO: 385644 - RNA, 26 nt, Human
cacacacacacacacacacacacaca

SEQ ID NO: 385645 - RNA, 26 nt, Human
cacacacacacacacacacacacacg

SEQ ID NO: 385646 - RNA, 27 nt, Human
cacacacacacacacacacacacggaa

SEQ ID NO: 385647 - RNA, 24 nt, Human
cacacacacacacacggaacaccu

SEQ ID NO: 385648 - RNA, 21 nt, Human
cacagauuguuguguuaaaaa

SEQ ID NO: 385649 - RNA, 18 nt, Human
cacagugcuugacaaaau

SEQ ID NO: 385650 - RNA, 21 nt, Human
cacggcagucacaguguacac

SEQ ID NO: 385651 - RNA, 21 nt, Human
caguagaagggaauggcagua

SEQ ID NO: 385652 - RNA, 26 nt, Human
cauaauaacauugaaaacguuuaaaa

SEQ ID NO: 385653 - RNA, 18 nt, Human
cauacaaauacacaaacu

SEQ ID NO: 385654 - RNA, 19 nt, Human
ccacugaggaaacuacggg

SEQ ID NO: 385655 - RNA, 24 nt, Human
cccaaacaaaugugcacacacaca

SEQ ID NO: 385656 - RNA, 19 nt, Human
cccuuagcuucuucucccc

SEQ ID NO: 385657 - RNA, 21 nt, Human
cucagaucaugcuauuuugcc

SEQ ID NO: 385658 - RNA, 18 nt, Human
cucccccauccccaaaca

SEQ ID NO: 385659 - RNA, 21 nt, Human
cugaauugguccuuuguaaug

SEQ ID NO: 385660 - RNA, 22 nt, Human
cuucauaauagugucauuuacu

SEQ ID NO: 385661 - RNA, 26 nt, Human
cuuccacgaaaugguugucuaccaua

SEQ ID NO: 385662 - RNA, 19 nt, Human
gaagggaauggcaguauug

SEQ ID NO: 385663 - RNA, 24 nt, Human
ggaaaaaugaaaggacccauauua

SEQ ID NO: 385664 - RNA, 22 nt, Human
ggccuggaaauuaaaauggauc

SEQ ID NO: 385665 - RNA, 24 nt, Human
ggcuaaagagcacuauaugggcaa

SEQ ID NO: 385666 - RNA, 21 nt, Human
uaaaaagagcauauaaaaaga

SEQ ID NO: 385667 - RNA, 24 nt, Human
uaaaacaggauuccaaguaccacu

SEQ ID NO: 385668 - RNA, 25 nt, Human
uaaaagaagaguagauuuggagggc

SEQ ID NO: 385669 - RNA, 23 nt, Human
uaaaauagaacaucuuauuaaaa

SEQ ID NO: 385670 - RNA, 23 nt, Human
uaaaucuuuagcauacugguaua

SEQ ID NO: 385671 - RNA, 19 nt, Human
uacaaauacacaaacuaga

SEQ ID NO: 385672 - RNA, 18 nt, Human
uacaauaucacuacggaa

SEQ ID NO: 385673 - RNA, 21 nt, Human
uacacaaacuagaaauaaauc

SEQ ID NO: 385674 - RNA, 19 nt, Human
uagcuucuucucccccauc

SEQ ID NO: 385675 - RNA, 22 nt, Human
uagcuucuucucccccaucccc

SEQ ID NO: 385676 - RNA, 20 nt, Human
uagcuuuguaaauauguaca

SEQ ID NO: 385677 - RNA, 19 nt, Human
uaggugugaaaucuggaac

SEQ ID NO: 385678 - RNA, 19 nt, Human
uauaugggcaaaugcagaa

SEQ ID NO: 385679 - RNA, 18 nt, Human
uauugcacagugcuugac

SEQ ID NO: 385680 - RNA, 23 nt, Human
uccuugaggucagccuggaugcu

SEQ ID NO: 385681 - RNA, 22 nt, Human
ugaaaacguuuaaaaacuccuc

SEQ ID NO: 385682 - RNA, 20 nt, Human
ugacuucuccccuuagcuuc

SEQ ID NO: 385683 - RNA, 20 nt, Human
ugcacacacacacacacaca

SEQ ID NO: 385684 - RNA, 25 nt, Human
ugcacacacacacacacacacacac

SEQ ID NO: 385685 - RNA, 21 nt, Human
uggaaaaaugaaaggacccau

SEQ ID NO: 385686 - RNA, 22 nt, Human
uggaacagaauucacaggaugu

SEQ ID NO: 385687 - RNA, 22 nt, Human
uggaauauugcacagugcuuga

SEQ ID NO: 385688 - RNA, 22 nt, Human
uggaaugcagacgauacuauau

SEQ ID NO: 385689 - RNA, 18 nt, Human
uggcuaaagagcacuaua

SEQ ID NO: 385690 - RNA, 22 nt, Human
uggcuaaagagcacuauauggg

SEQ ID NO: 385691 - RNA, 23 nt, Human
uggcuggaaaaaugaaaggaccc

SEQ ID NO: 385692 - RNA, 20 nt, Human
ugggauuacaauacugucug

SEQ ID NO: 385693 - RNA, 25 nt, Human
ugugcacacacacacacacacacac

SEQ ID NO: 385694 - RNA, 19 nt, Human
uguguuaaaaauauccugc

SEQ ID NO: 385695 - RNA, 19 nt, Human
uugauauuuuugcuggaau

SEQ ID NO: 385696 - RNA, 21 nt, Human
uuguuguugguuuuuguuuuu

SEQ ID NO: 385697 - RNA, 22 nt, Human
uuuaguuuuugaaaagacgugg

SEQ ID NO: 385698 - RNA, 23 nt, Human
uuucaguucugaauugguccuuu

SEQ ID NO: 385699 - RNA, 25 nt, Human
uuuggaauuauuguaggugugaaau

SEQ ID NO: 385700 - RNA, 20 nt, Human
uuuuuucuuuuuaaauaguc

SEQ ID NO: 385701 - RNA, 18 nt, Human
aaaaaaaaaaaaaucggc

SEQ ID NO: 385702 - RNA, 19 nt, Human
aaaagaacagacacugucu

SEQ ID NO: 385703 - RNA, 18 nt, Human
aaacugccuggcuggauu

SEQ ID NO: 385704 - RNA, 23 nt, Human
aaagaaagaaaauuucuccuugc

SEQ ID NO: 385705 - RNA, 19 nt, Human
aacaaaucaauuacugagu

SEQ ID NO: 385706 - RNA, 22 nt, Human
aacaacaacaacaaaaagguag

SEQ ID NO: 385707 - RNA, 21 nt, Human
aacaacaacaacaacaaaaag

SEQ ID NO: 385708 - RNA, 20 nt, Human
aacacugugauaucaaacac

SEQ ID NO: 385709 - RNA, 20 nt, Human
aaguuccacucauacuucuc

SEQ ID NO: 385710 - RNA, 19 nt, Human
acaacaacaacaacaaaaa

SEQ ID NO: 385711 - RNA, 19 nt, Human
accucgguuccuguuuugg

SEQ ID NO: 385712 - RNA, 25 nt, Human
acuguccuuuugaaaugaaucugag

SEQ ID NO: 385713 - RNA, 25 nt, Human
agaaaagauagugaaacacauucuu

SEQ ID NO: 385714 - RNA, 22 nt, Human
agaacagacacugucucacaca

SEQ ID NO: 385715 - RNA, 20 nt, Human
agcaacaacaacaacaacaa

SEQ ID NO: 385716 - RNA, 20 nt, Human
agcgcagagcccagggcacc

SEQ ID NO: 385717 - RNA, 20 nt, Human
agcgcugaaaacaacagcgc

SEQ ID NO: 385718 - RNA, 22 nt, Human
agcuccuggaacagggaggagg

SEQ ID NO: 385719 - RNA, 21 nt, Human
aggcauagucauaaaaagcau

SEQ ID NO: 385720 - RNA, 18 nt, Human
agggaggaggcaaagagg

SEQ ID NO: 385721 - RNA, 21 nt, Human
aucggccucguccaacaacca

SEQ ID NO: 385722 - RNA, 19 nt, Human
augcuuuuuuaaucccaaa

SEQ ID NO: 385723 - RNA, 25 nt, Human
auguugcuuucacagagaugccgag

SEQ ID NO: 385724 - RNA, 21 nt, Human
auugcucuugaacgauuuugu

SEQ ID NO: 385725 - RNA, 22 nt, Human
caaaagaacagacacugucuca

SEQ ID NO: 385726 - RNA, 23 nt, Human
caaaagaacagacacugucucac

SEQ ID NO: 385727 - RNA, 23 nt, Human
caaaccaaacugaaaugaccaga

SEQ ID NO: 385728 - RNA, 20 nt, Human
caacaacaacaacaacaaaa

SEQ ID NO: 385729 - RNA, 24 nt, Human
caacuuuucacacucaaaaacacu

SEQ ID NO: 385730 - RNA, 21 nt, Human
cacaccaugcuuccuuccaaa

SEQ ID NO: 385731 - RNA, 21 nt, Human
cagcucaagacaaauuagccu

SEQ ID NO: 385732 - RNA, 21 nt, Human
ccaccauuaacuucuggcugc

SEQ ID NO: 385733 - RNA, 20 nt, Human
ccauguuaaaaaaaaaaaaa

SEQ ID NO: 385734 - RNA, 22 nt, Human
ccucgcacagugauuugccacc

SEQ ID NO: 385735 - RNA, 23 nt, Human
ccucgcacagugauuugccaccu

SEQ ID NO: 385736 - RNA, 18 nt, Human
cgaguggagcaagaugcu

SEQ ID NO: 385737 - RNA, 19 nt, Human
cgcccucgcacagugauuu

SEQ ID NO: 385738 - RNA, 22 nt, Human
cuaauuugacagccuaagcaua

SEQ ID NO: 385739 - RNA, 23 nt, Human
cuagcaacaacaacaacaacaaa

SEQ ID NO: 385740 - RNA, 18 nt, Human
cucacacaccaugcuucc

SEQ ID NO: 385741 - RNA, 22 nt, Human
cucagcuuguucacuguccuuu

SEQ ID NO: 385742 - RNA, 19 nt, Human
cugaaaacaacagcgcaga

SEQ ID NO: 385743 - RNA, 18 nt, Human
cugacacaaaaccugacu

SEQ ID NO: 385744 - RNA, 22 nt, Human
cuggcaauguaaaaaaucuuca

SEQ ID NO: 385745 - RNA, 24 nt, Human
gaaaacaacagcgcagagcccagg

SEQ ID NO: 385746 - RNA, 24 nt, Human
gaaaagauagugaaacacauucuu

SEQ ID NO: 385747 - RNA, 24 nt, Human
gaaagaaagaaaauuucuccuugc

SEQ ID NO: 385748 - RNA, 21 nt, Human
gaacagggaggaggcaaagag

SEQ ID NO: 385749 - RNA, 19 nt, Human
gaacauauguaaauuauau

SEQ ID NO: 385750 - RNA, 20 nt, Human
gacagaauuaauaaauacaa

SEQ ID NO: 385751 - RNA, 23 nt, Human
gauacaagacacaagucuguaaa

SEQ ID NO: 385752 - RNA, 21 nt, Human
gcaacaacaacaacaacaaaa

SEQ ID NO: 385753 - RNA, 23 nt, Human
gcacuggaaaaugauacaagaca

SEQ ID NO: 385754 - RNA, 24 nt, Human
gcuaaaguacugacacaaaaccug

SEQ ID NO: 385755 - RNA, 22 nt, Human
ggaacagggaggaggcaaagag

SEQ ID NO: 385756 - RNA, 18 nt, Human
gugaauaauccaaggcca

SEQ ID NO: 385757 - RNA, 18 nt, Human
guguucuguccgaggugc

SEQ ID NO: 385758 - RNA, 26 nt, Human
guuaaaaaaaaaaaaaucggccucgu

SEQ ID NO: 385759 - RNA, 23 nt, Human
uaaauuaaaugaagacuuaggug

SEQ ID NO: 385760 - RNA, 24 nt, Human
uaaucuuuguacauacagaaugua

SEQ ID NO: 385761 - RNA, 19 nt, Human
uaauuacaaaccaaacuga

SEQ ID NO: 385762 - RNA, 27 nt, Human
uaauucaacuguacucaaguuccacuc

SEQ ID NO: 385763 - RNA, 19 nt, Human
uaccucagcugcuaccacc

SEQ ID NO: 385764 - RNA, 23 nt, Human
uagcaacaacaacaacaacaaaa

SEQ ID NO: 385765 - RNA, 19 nt, Human
ucagaaaugaugaaauuag

SEQ ID NO: 385766 - RNA, 22 nt, Human
ucaggccacacugaggcuugug

SEQ ID NO: 385767 - RNA, 24 nt, Human
ucauaaaaugucugacuauuccua

SEQ ID NO: 385768 - RNA, 21 nt, Human
ucauuguuccauguuaaaaaa

SEQ ID NO: 385769 - RNA, 25 nt, Human
uccaacucuucuaauaaauagggaa

SEQ ID NO: 385770 - RNA, 20 nt, Human
uccaauauagaaagaaagaa

SEQ ID NO: 385771 - RNA, 23 nt, Human
uccauguuaaaaaaaaaaaaauc

SEQ ID NO: 385772 - RNA, 20 nt, Human
uccgaggugcugaagggaaa

SEQ ID NO: 385773 - RNA, 18 nt, Human
uccuggaacagggaggag

SEQ ID NO: 385774 - RNA, 26 nt, Human
ucguccaacaaccauaccucagcugc

SEQ ID NO: 385775 - RNA, 24 nt, Human
ucuaaaacaguacauuuucagaaa

SEQ ID NO: 385776 - RNA, 20 nt, Human
ucucaggccacacugaggcu

SEQ ID NO: 385777 - RNA, 22 nt, Human
ugaaguuacuuucuggucuacu

SEQ ID NO: 385778 - RNA, 21 nt, Human
ugaauuucagaacccuggcac

SEQ ID NO: 385779 - RNA, 23 nt, Human
ugacacaaaaccugacucaaaau

SEQ ID NO: 385780 - RNA, 21 nt, Human
ugacuuccccaaacuacacac

SEQ ID NO: 385781 - RNA, 19 nt, Human
ugaggcuugugacaggcag

SEQ ID NO: 385782 - RNA, 22 nt, Human
ugauuugccaccucgguuccug

SEQ ID NO: 385783 - RNA, 19 nt, Human
ugccuggaucucaagcgcc

SEQ ID NO: 385784 - RNA, 18 nt, Human
uggcacaaaagaacagac

SEQ ID NO: 385785 - RNA, 18 nt, Human
uggcuggauucacuugcc

SEQ ID NO: 385786 - RNA, 18 nt, Human
uggguacaaacgauggcc

SEQ ID NO: 385787 - RNA, 24 nt, Human
uguacauacagaauguaauacauu

SEQ ID NO: 385788 - RNA, 28 nt, Human
ugucucacacaccaugcuuccuuccaaa

SEQ ID NO: 385789 - RNA, 21 nt, Human
ugucugacuauuccuaguuau

SEQ ID NO: 385790 - RNA, 19 nt, Human
ugugcuaauuugacagccu

SEQ ID NO: 385791 - RNA, 21 nt, Human
uucaauccauuucuagcaaca

SEQ ID NO: 385792 - RNA, 25 nt, Human
uucacagucuuuucaaguagcaucu

SEQ ID NO: 385793 - RNA, 23 nt, Human
uucucaggccacacugaggcuug

SEQ ID NO: 385794 - RNA, 22 nt, Human
uuggguggugagauuggcuaau

SEQ ID NO: 385795 - RNA, 25 nt, Human
uuucucaggccacacugaggcuugu

SEQ ID NO: 385796 - RNA, 26 nt, Human
uuugcacaugacagaauuaauaaaua

SEQ ID NO: 385797 - RNA, 23 nt, Human
uuugccaccucgguuccuguuuu

SEQ ID NO: 385798 - RNA, 22 nt, Human
uuuguaguggaaugaagacaau

SEQ ID NO: 385799 - RNA, 22 nt, Human
aaagcagggggcaggacccggg

SEQ ID NO: 385800 - RNA, 20 nt, Human
aacaaagaacuccaacuccc

SEQ ID NO: 385801 - RNA, 19 nt, Human
aaggguggggcuggcuugg

SEQ ID NO: 385802 - RNA, 22 nt, Human
acccucuuccuccacggcccca

SEQ ID NO: 385803 - RNA, 20 nt, Human
accgcguugcccagagcaac

SEQ ID NO: 385804 - RNA, 22 nt, Human
accgcguugcccagagcaacag

SEQ ID NO: 385805 - RNA, 26 nt, Human
acucaagcacccuagucccccauucc

SEQ ID NO: 385806 - RNA, 23 nt, Human
agaggaagcuuaaggguggggcc

SEQ ID NO: 385807 - RNA, 19 nt, Human
aggacccgggggcaggaga

SEQ ID NO: 385808 - RNA, 20 nt, Human
aggggguguccaggaccuag

SEQ ID NO: 385809 - RNA, 19 nt, Human
agucuggggucaggggcua

SEQ ID NO: 385810 - RNA, 19 nt, Human
caacaaagaacuccaacuc

SEQ ID NO: 385811 - RNA, 25 nt, Human
ccagagcaacagccgggcuccucuc

SEQ ID NO: 385812 - RNA, 20 nt, Human
cccacaggcaucccgcugaa

SEQ ID NO: 385813 - RNA, 22 nt, Human
ccccacgcacaacaaagaacuc

SEQ ID NO: 385814 - RNA, 22 nt, Human
ccccagacguccuuugagcccc

SEQ ID NO: 385815 - RNA, 18 nt, Human
cccggcggggcaggcucg

SEQ ID NO: 385816 - RNA, 23 nt, Human
cccuagucccccauucccacccc

SEQ ID NO: 385817 - RNA, 18 nt, Human
cccuggggcaucugggug

SEQ ID NO: 385818 - RNA, 23 nt, Human
ccggcggggcaggcuccugucgg

SEQ ID NO: 385819 - RNA, 24 nt, Human
ccucgccccuccgcagggucugaa

SEQ ID NO: 385820 - RNA, 19 nt, Human
ccucucaagcgggguaaga

SEQ ID NO: 385821 - RNA, 23 nt, Human
cgcagaaaccggacagccaccgc

SEQ ID NO: 385822 - RNA, 21 nt, Human
cgggcggggcugacgcacaga

SEQ ID NO: 385823 - RNA, 26 nt, Human
cuccacggccccacaggcaucccgcu

SEQ ID NO: 385824 - RNA, 23 nt, Human
cucuuccuccacggccccacagg

SEQ ID NO: 385825 - RNA, 24 nt, Human
gaaccggaagcgggcgaaggcaga

SEQ ID NO: 385826 - RNA, 19 nt, Human
gcacaacaaagaacuccaa

SEQ ID NO: 385827 - RNA, 20 nt, Human
gcaggacccgggggcaggag

SEQ ID NO: 385828 - RNA, 21 nt, Human
gccuucccuucccgggguccc

SEQ ID NO: 385829 - RNA, 25 nt, Human
gcuccggggcccaccggugccuggg

SEQ ID NO: 385830 - RNA, 18 nt, Human
ggagagcagacgaggaug

SEQ ID NO: 385831 - RNA, 19 nt, Human
ggaggguaaccgucagagg

SEQ ID NO: 385832 - RNA, 21 nt, Human
ggggcaggacccgggggcagg

SEQ ID NO: 385833 - RNA, 24 nt, Human
ggggcaggacccgggggcaggaga

SEQ ID NO: 385834 - RNA, 20 nt, Human
ggggguguccaggaccuagu

SEQ ID NO: 385835 - RNA, 20 nt, Human
gggguggaagguggggggag

SEQ ID NO: 385836 - RNA, 21 nt, Human
guaguaucagccuccccgcac

SEQ ID NO: 385837 - RNA, 24 nt, Human
guggggcuggcuuggcuuuggccg

SEQ ID NO: 385838 - RNA, 22 nt, Human
uaucagccuccccgcacuugag

SEQ ID NO: 385839 - RNA, 21 nt, Human
uccccgcacuugagagggggu

SEQ ID NO: 385840 - RNA, 24 nt, Human
uccgcagggucugaaccggaagcg

SEQ ID NO: 385841 - RNA, 18 nt, Human
uccggggcccaccggugc

SEQ ID NO: 385842 - RNA, 19 nt, Human
uccggggcccaccggugcc

SEQ ID NO: 385843 - RNA, 25 nt, Human
ucucgggagucuggggucaggggcu

SEQ ID NO: 385844 - RNA, 23 nt, Human
ucugcagagacacucaagcaccc

SEQ ID NO: 385845 - RNA, 22 nt, Human
ugacgcacagacgcggaguccc

SEQ ID NO: 385846 - RNA, 24 nt, Human
ugacuucugccucguccucgcccc

SEQ ID NO: 385847 - RNA, 18 nt, Human
ugagaagacaggaauggu

SEQ ID NO: 385848 - RNA, 19 nt, Human
ugcccagagcaacagccgg

SEQ ID NO: 385849 - RNA, 24 nt, Human
ugccuucccuucccggggucccug

SEQ ID NO: 385850 - RNA, 22 nt, Human
uggcgggguccuggagucuuuu

SEQ ID NO: 385851 - RNA, 20 nt, Human
uggggcaucugggugugucc

SEQ ID NO: 385852 - RNA, 18 nt, Human
ugggguggaagguggggg

SEQ ID NO: 385853 - RNA, 18 nt, Human
ugugcuggaaaguugucg

SEQ ID NO: 385854 - RNA, 22 nt, Human
uguugccaggacaacgggcggg

SEQ ID NO: 385855 - RNA, 22 nt, Human
uuaaggguggggcuggcuuggc

SEQ ID NO: 385856 - RNA, 22 nt, Human
uuccuccacggccccacaggca

SEQ ID NO: 385857 - RNA, 22 nt, Human
uuggccgggggcuugggguggg

SEQ ID NO: 385858 - RNA, 20 nt, Human
uugggguggaaggugggggg

SEQ ID NO: 385859 - RNA, 19 nt, Human
aaccugcuguccucaacua

SEQ ID NO: 385860 - RNA, 21 nt, Human
aacucuccagucuggcaguuu

SEQ ID NO: 385861 - RNA, 18 nt, Human
aagccaccugggacagca

SEQ ID NO: 385862 - RNA, 18 nt, Human
aaggaagguccgcgcgca

SEQ ID NO: 385863 - RNA, 20 nt, Human
aaggaggggcuucacuaaua

SEQ ID NO: 385864 - RNA, 18 nt, Human
acgacaaaaagucacugc

SEQ ID NO: 385865 - RNA, 28 nt, Human
agacccgggaggagggcgcggaccaaga

SEQ ID NO: 385866 - RNA, 18 nt, Human
agggaugcuggggcucug

SEQ ID NO: 385867 - RNA, 25 nt, Human
caacuaaaaccugcuguccucaacu

SEQ ID NO: 385868 - RNA, 18 nt, Human
caccacuggcugccacga

SEQ ID NO: 385869 - RNA, 24 nt, Human
cacuguaugagaaauaaaccaaaa

SEQ ID NO: 385870 - RNA, 20 nt, Human
ccacgacaaaaagucacugc

SEQ ID NO: 385871 - RNA, 21 nt, Human
ccccgccguccccgaagccca

SEQ ID NO: 385872 - RNA, 24 nt, Human
ccccgccguccccgaagcccagac

SEQ ID NO: 385873 - RNA, 23 nt, Human
ccccgcuccaggcgcgccucccu

SEQ ID NO: 385874 - RNA, 21 nt, Human
ccccuccccgccguccccgaa

SEQ ID NO: 385875 - RNA, 24 nt, Human
cccugcucuuggccgccgcccuuc

SEQ ID NO: 385876 - RNA, 22 nt, Human
ccgcaguaguagugcuguucuc

SEQ ID NO: 385877 - RNA, 24 nt, Human
ccggcuccccuccccgccgucccc

SEQ ID NO: 385878 - RNA, 24 nt, Human
ccuccccgccguccccgaagccca

SEQ ID NO: 385879 - RNA, 21 nt, Human
ccuccccucccagggacgagc

SEQ ID NO: 385880 - RNA, 23 nt, Human
ccucgcccacggagccccaggcg

SEQ ID NO: 385881 - RNA, 22 nt, Human
cgccgcccuuccgagaaaaggg

SEQ ID NO: 385882 - RNA, 22 nt, Human
cgcgccuccgaugccucaacuc

SEQ ID NO: 385883 - RNA, 23 nt, Human
cgcuaccugagauccaccuuccc

SEQ ID NO: 385884 - RNA, 19 nt, Human
cgcuacugcaggugugagc

SEQ ID NO: 385885 - RNA, 21 nt, Human
cggcacagacccgggaggagg

SEQ ID NO: 385886 - RNA, 22 nt, Human
cggcucccgggucccggguccc

SEQ ID NO: 385887 - RNA, 22 nt, Human
cguccccgaagcccagacucgc

SEQ ID NO: 385888 - RNA, 25 nt, Human
cuaaaguaggacugguggaguuuac

SEQ ID NO: 385889 - RNA, 26 nt, Human
cuccacaguuggguucaucuguaagc

SEQ ID NO: 385890 - RNA, 22 nt, Human
cuccccgccguccccgaagccc

SEQ ID NO: 385891 - RNA, 24 nt, Human
cuccccuccccgccguccccgaag

SEQ ID NO: 385892 - RNA, 20 nt, Human
cuccgaugccucaacucucc

SEQ ID NO: 385893 - RNA, 18 nt, Human
cuggaaaaggaagguccg

SEQ ID NO: 385894 - RNA, 22 nt, Human
cugggacagcaccgcuacugca

SEQ ID NO: 385895 - RNA, 22 nt, Human
gcuuugggaugcgccgcgcucc

SEQ ID NO: 385896 - RNA, 22 nt, Human
ggacggaaauaagcaaaagcaa

SEQ ID NO: 385897 - RNA, 25 nt, Human
ggaugcuggggcucuggggaaaggu

SEQ ID NO: 385898 - RNA, 20 nt, Human
gggcucuggggaaaggugcc

SEQ ID NO: 385899 - RNA, 23 nt, Human
gucccgggucccggcacagaccc

SEQ ID NO: 385900 - RNA, 18 nt, Human
gugcaccuguccccacaa

SEQ ID NO: 385901 - RNA, 18 nt, Human
guucaucuguaagccacc

SEQ ID NO: 385902 - RNA, 24 nt, Human
uacacacauucuagggggcagagc

SEQ ID NO: 385903 - RNA, 23 nt, Human
uaugcuuaaaauacacacauucu

SEQ ID NO: 385904 - RNA, 19 nt, Human
ucaaaagaaaaauaugaaa

SEQ ID NO: 385905 - RNA, 24 nt, Human
ucacugcaucuuucgggaccuggg

SEQ ID NO: 385906 - RNA, 22 nt, Human
uccccacacgucccucgcccac

SEQ ID NO: 385907 - RNA, 19 nt, Human
ucccguccggcuccccucc

SEQ ID NO: 385908 - RNA, 19 nt, Human
uccggugcaccugucccca

SEQ ID NO: 385909 - RNA, 18 nt, Human
ucuccacaguuggguuca

SEQ ID NO: 385910 - RNA, 18 nt, Human
ucuguaagccaccuggga

SEQ ID NO: 385911 - RNA, 19 nt, Human
ucuguaagccaccugggac

SEQ ID NO: 385912 - RNA, 23 nt, Human
ugcaucuuucgggaccugggccu

SEQ ID NO: 385913 - RNA, 21 nt, Human
ugccaaaguugccaauacacu

SEQ ID NO: 385914 - RNA, 21 nt, Human
ugccucaacucuccagucugg

SEQ ID NO: 385915 - RNA, 18 nt, Human
ugcucuuggccgccgccc

SEQ ID NO: 385916 - RNA, 22 nt, Human
uguccucaacuaugauuuuauu

SEQ ID NO: 385917 - RNA, 18 nt, Human
uguccuuaacagcucaac

SEQ ID NO: 385918 - RNA, 20 nt, Human
ugugagcaagggaugcuggg

SEQ ID NO: 385919 - RNA, 20 nt, Human
uuaagagugugcuuuuuauc

SEQ ID NO: 385920 - RNA, 21 nt, Human
uuggguucaucuguaagccac

SEQ ID NO: 385921 - RNA, 20 nt, Human
uuucuggacccuggcaaaca

SEQ ID NO: 385922 - RNA, 24 nt, Human
uuugaaaaggaaguuacugaggcu

SEQ ID NO: 385923 - RNA, 21 nt, Human
uuuugcauauugcguuuauuu

SEQ ID NO: 385924 - RNA, 21 nt, Human
aaugauuuuuuuucuuuaggg

SEQ ID NO: 385925 - RNA, 24 nt, Human
acaaauacaguguaauaccaaaau

SEQ ID NO: 385926 - RNA, 24 nt, Human
accaugaaaacaaauaggaaaagc

SEQ ID NO: 385927 - RNA, 24 nt, Human
agacauuagaaucacauugaaacu

SEQ ID NO: 385928 - RNA, 20 nt, Human
aggaaaagcacaagacuguc

SEQ ID NO: 385929 - RNA, 26 nt, Human
auacaaauacaguguaauaccaaaau

SEQ ID NO: 385930 - RNA, 21 nt, Human
aucacauugaaacuuuuaaaa

SEQ ID NO: 385931 - RNA, 18 nt, Human
augcuucagagauacaaa

SEQ ID NO: 385932 - RNA, 19 nt, Human
augcuucagagauacaaau

SEQ ID NO: 385933 - RNA, 23 nt, Human
caaaugaagcugaauaaauaaug

SEQ ID NO: 385934 - RNA, 24 nt, Human
caauacauauuggcacaauaugaa

SEQ ID NO: 385935 - RNA, 22 nt, Human
caauaugaaaaauaaacacuuu

SEQ ID NO: 385936 - RNA, 21 nt, Human
cacaaaugaagcugaauaaau

SEQ ID NO: 385937 - RNA, 22 nt, Human
cacaacacaucauacaaugaaa

SEQ ID NO: 385938 - RNA, 19 nt, Human
caggaguuuccuuccuuuu

SEQ ID NO: 385939 - RNA, 22 nt, Human
cgcuccgcacucucgguagcug

SEQ ID NO: 385940 - RNA, 22 nt, Human
cuauauagucacaaaacaugaa

SEQ ID NO: 385941 - RNA, 25 nt, Human
cucauagugcaugucuuaauuuacc

SEQ ID NO: 385942 - RNA, 21 nt, Human
cugaauaaauaauguuaggua

SEQ ID NO: 385943 - RNA, 18 nt, Human
cugcucagugccuugcgg

SEQ ID NO: 385944 - RNA, 21 nt, Human
gcuaucacaacacaucauaca

SEQ ID NO: 385945 - RNA, 19 nt, Human
uacaguguaauaccaaaau

SEQ ID NO: 385946 - RNA, 19 nt, Human
uaucacaacacaucauaca

SEQ ID NO: 385947 - RNA, 25 nt, Human
ucaaccccaaacaauuguuauuaaa

SEQ ID NO: 385948 - RNA, 19 nt, Human
uccgagcgcacgcuggucg

SEQ ID NO: 385949 - RNA, 21 nt, Human
uccuuccuuuuccgcaguagc

SEQ ID NO: 385950 - RNA, 20 nt, Human
ugaauaaauaauguuaggua

SEQ ID NO: 385951 - RNA, 24 nt, Human
ugcuucaaagcaaugauuuuuuuu

SEQ ID NO: 385952 - RNA, 22 nt, Human
uggauuuugcgacggacagucc

SEQ ID NO: 385953 - RNA, 19 nt, Human
uuaaaacacauguuuacaa

SEQ ID NO: 385954 - RNA, 18 nt, Human
uuaacacugugcuuuguu

SEQ ID NO: 385955 - RNA, 22 nt, Human
uuggcacaauaugaaaaauaaa

SEQ ID NO: 385956 - RNA, 23 nt, Human
uuuaccugucauugcccauugac

SEQ ID NO: 385957 - RNA, 24 nt, Human
uuuuccgcaguagcugacacaacu

SEQ ID NO: 385958 - RNA, 29 nt, Human
uuuugcgacggacagucccgcgggguuga

SEQ ID NO: 385959 - RNA, 19 nt, Human
uuuuuuuucuuuagggacu

SEQ ID NO: 385960 - RNA, 21 nt, Human
uuuuuuuuuuuuuuuuucaag

SEQ ID NO: 385961 - RNA, 22 nt, Human
aacagggaagagaaaggguaac

SEQ ID NO: 385962 - RNA, 21 nt, Human
aagaggucuuccuaaugcagu

SEQ ID NO: 385963 - RNA, 19 nt, Human
aaugcaguccaggaguccg

SEQ ID NO: 385964 - RNA, 23 nt, Human
agcacaagaauguuacaagaaca

SEQ ID NO: 385965 - RNA, 23 nt, Human
cacuaugcaguuuccacaccagg

SEQ ID NO: 385966 - RNA, 19 nt, Human
cagggucagguagaaaaga

SEQ ID NO: 385967 - RNA, 18 nt, Human
caguccaggaguccggaa

SEQ ID NO: 385968 - RNA, 22 nt, Human
cccucacacacuggugcugccg

SEQ ID NO: 385969 - RNA, 20 nt, Human
cggugcuccugcaaagagag

SEQ ID NO: 385970 - RNA, 21 nt, Human
cggugcuccugcaaagagaga

SEQ ID NO: 385971 - RNA, 23 nt, Human
cugccugcuccccucacacacug

SEQ ID NO: 385972 - RNA, 26 nt, Human
cugccugcuccccucacacacuggug

SEQ ID NO: 385973 - RNA, 21 nt, Human
gcgcaccuggggauugggaca

SEQ ID NO: 385974 - RNA, 22 nt, Human
gggacagggaaagaggucuucc

SEQ ID NO: 385975 - RNA, 18 nt, Human
gggauauucacuaugcag

SEQ ID NO: 385976 - RNA, 18 nt, Human
ggggauugggacagggaa

SEQ ID NO: 385977 - RNA, 20 nt, Human
uaaugcaguccaggaguccg

SEQ ID NO: 385978 - RNA, 18 nt, Human
ucagguagaaaagaugga

SEQ ID NO: 385979 - RNA, 19 nt, Human
ucagguagaaaagauggag

SEQ ID NO: 385980 - RNA, 22 nt, Human
uggagcagcucugugccggggg

SEQ ID NO: 385981 - RNA, 21 nt, Human
uggcaggaucaaggaacuggc

SEQ ID NO: 385982 - RNA, 21 nt, Human
uggggauauucacuaugcagu

SEQ ID NO: 385983 - RNA, 22 nt, Human
aaaacaccaaaacacagcagca

SEQ ID NO: 385984 - RNA, 21 nt, Human
aaaaugugacuucuggcuuua

SEQ ID NO: 385985 - RNA, 24 nt, Human
aaacaccaaaacacagcagcaaaa

SEQ ID NO: 385986 - RNA, 23 nt, Human
aaacagaucacaaaaaaaucaga

SEQ ID NO: 385987 - RNA, 18 nt, Human
aaacaugaaaacaccaaa

SEQ ID NO: 385988 - RNA, 27 nt, Human
aagcaagcucacaaucacaugaccaca

SEQ ID NO: 385989 - RNA, 21 nt, Human
aagcagaugugcaaugaacua

SEQ ID NO: 385990 - RNA, 22 nt, Human
aaggggauccagagccccuucu

SEQ ID NO: 385991 - RNA, 24 nt, Human
aaguaaacaugaaaacaccaaaac

SEQ ID NO: 385992 - RNA, 21 nt, Human
aauagaucgaaacucugucuc

SEQ ID NO: 385993 - RNA, 23 nt, Human
acacaacaucuccauauuagaac

SEQ ID NO: 385994 - RNA, 19 nt, Human
acaguguugggauuacagg

SEQ ID NO: 385995 - RNA, 23 nt, Human
acauaaaucuucccucagauucc

SEQ ID NO: 385996 - RNA, 21 nt, Human
acuaacccuaaaggggccaca

SEQ ID NO: 385997 - RNA, 26 nt, Human
acuguuacucuauggagacucaagga

SEQ ID NO: 385998 - RNA, 22 nt, Human
acuuuggcaaagucaaaagcua

SEQ ID NO: 385999 - RNA, 27 nt, Human
agaaagcagacacuaucauuccagucg

SEQ ID NO: 386000 - RNA, 27 nt, Human
agacaggugguggagaagaccccaaag

SEQ ID NO: 386001 - RNA, 21 nt, Human
agaggacuaaaaaggaaauca

SEQ ID NO: 386002 - RNA, 19 nt, Human
agauaugaaaacccaagac

SEQ ID NO: 386003 - RNA, 21 nt, Human
agauaugaaaacccaagacug

SEQ ID NO: 386004 - RNA, 21 nt, Human
agaucgaaacucugucucaaa

SEQ ID NO: 386005 - RNA, 21 nt, Human
agcugaggaguguccaaauac

SEQ ID NO: 386006 - RNA, 22 nt, Human
aggaaguuaaaagggggcuuca

SEQ ID NO: 386007 - RNA, 20 nt, Human
aggaauuuggcuuuguuagu

SEQ ID NO: 386008 - RNA, 19 nt, Human
aggcagagggggagaaagu

SEQ ID NO: 386009 - RNA, 22 nt, Human
aggcccccggcccgcggcgccc

SEQ ID NO: 386010 - RNA, 21 nt, Human
agggcagacuugccaaacccu

SEQ ID NO: 386011 - RNA, 21 nt, Human
agguucuuaaggggucucuuc

SEQ ID NO: 386012 - RNA, 22 nt, Human
agguuucaccauguugccuagg

SEQ ID NO: 386013 - RNA, 20 nt, Human
agugcaguggcaugaucaug

SEQ ID NO: 386014 - RNA, 23 nt, Human
agugcaguggcaugaucauggcu

SEQ ID NO: 386015 - RNA, 24 nt, Human
agugcaguggcaugaucauggcuc

SEQ ID NO: 386016 - RNA, 20 nt, Human
auaaaucuucccucagauuc

SEQ ID NO: 386017 - RNA, 22 nt, Human
auaaaucuucccucagauucca

SEQ ID NO: 386018 - RNA, 24 nt, Human
auagaucgaaacucugucucaaaa

SEQ ID NO: 386019 - RNA, 19 nt, Human
auauuguucuuucauaagc

SEQ ID NO: 386020 - RNA, 20 nt, Human
augugugugagagugugugu

SEQ ID NO: 386021 - RNA, 21 nt, Human
caaaaaacuacaaaaaagugc

SEQ ID NO: 386022 - RNA, 23 nt, Human
caaaacgaaacauaaaucuuccc

SEQ ID NO: 386023 - RNA, 21 nt, Human
caacaggcuugaauauacagc

SEQ ID NO: 386024 - RNA, 20 nt, Human
caacgcagcacucaucccuc

SEQ ID NO: 386025 - RNA, 18 nt, Human
caacuugagcuauccucc

SEQ ID NO: 386026 - RNA, 22 nt, Human
caagaucuugcugucacccagg

SEQ ID NO: 386027 - RNA, 24 nt, Human
caagguuucaccauguugccuagg

SEQ ID NO: 386028 - RNA, 22 nt, Human
caagugauccuccugccucggc

SEQ ID NO: 386029 - RNA, 19 nt, Human
cacacacuucauggcaccc

SEQ ID NO: 386030 - RNA, 24 nt, Human
cacaggcacgugccaccaugccca

SEQ ID NO: 386031 - RNA, 19 nt, Human
caccaaaacacagcagcaa

SEQ ID NO: 386032 - RNA, 19 nt, Human
caccauguugccuagguag

SEQ ID NO: 386033 - RNA, 24 nt, Human
caccauguugccuagguagguuuc

SEQ ID NO: 386034 - RNA, 24 nt, Human
caccucagccucccaaguagcugg

SEQ ID NO: 386035 - RNA, 22 nt, Human
cacgcugcccuguaucuggacu

SEQ ID NO: 386036 - RNA, 21 nt, Human
cacggugcggccgcagcgggc

SEQ ID NO: 386037 - RNA, 18 nt, Human
cacuccagcugcuuuuac

SEQ ID NO: 386038 - RNA, 22 nt, Human
cacugcagccuugaccucccag

SEQ ID NO: 386039 - RNA, 23 nt, Human
cagaacuuucacucccacuaaaa

SEQ ID NO: 386040 - RNA, 20 nt, Human
cagauaccacuaaaaggcag

SEQ ID NO: 386041 - RNA, 22 nt, Human
cagaucaauauaaaacaaguaa

SEQ ID NO: 386042 - RNA, 24 nt, Human
cagcagcaaaaagauuuagcaauc

SEQ ID NO: 386043 - RNA, 21 nt, Human
cagcccaggaacaucuggggg

SEQ ID NO: 386044 - RNA, 23 nt, Human
cagccuugaccucccaggcuccc

SEQ ID NO: 386045 - RNA, 19 nt, Human
caggaauaagccacugugc

SEQ ID NO: 386046 - RNA, 21 nt, Human
caggcucccaccucagccucc

SEQ ID NO: 386047 - RNA, 21 nt, Human
caguggcaugaucauggcuca

SEQ ID NO: 386048 - RNA, 22 nt, Human
caucuauaaacauacauguaug

SEQ ID NO: 386049 - RNA, 27 nt, Human
caucugaaaauucuuuauaaauacaga

SEQ ID NO: 386050 - RNA, 22 nt, Human
caugcagaaagcagacacuauc

SEQ ID NO: 386051 - RNA, 20 nt, Human
cauggcucacugcagccuug

SEQ ID NO: 386052 - RNA, 24 nt, Human
cauguugccuagguagguuucaaa

SEQ ID NO: 386053 - RNA, 22 nt, Human
ccaaaacacagcagcaaaaaga

SEQ ID NO: 386054 - RNA, 21 nt, Human
ccaacaucuaggccagcagcu

SEQ ID NO: 386055 - RNA, 22 nt, Human
ccacacccauuaaagcugagga

SEQ ID NO: 386056 - RNA, 19 nt, Human
ccacaggccagcauugcac

SEQ ID NO: 386057 - RNA, 21 nt, Human
ccacaguguugggauuacagg

SEQ ID NO: 386058 - RNA, 24 nt, Human
ccacaguguugggauuacaggaau

SEQ ID NO: 386059 - RNA, 22 nt, Human
ccagcagcugccuucuacuuuc

SEQ ID NO: 386060 - RNA, 20 nt, Human
cccaccucagccucccaagu

SEQ ID NO: 386061 - RNA, 23 nt, Human
ccccgcgccgggcuccacuagcc

SEQ ID NO: 386062 - RNA, 21 nt, Human
cccggcccgcggcgcccggcc

SEQ ID NO: 386063 - RNA, 18 nt, Human
cccguccuguggccuccu

SEQ ID NO: 386064 - RNA, 22 nt, Human
cccuguaucuggacuggggaug

SEQ ID NO: 386065 - RNA, 19 nt, Human
ccggcgccgcguccuccuc

SEQ ID NO: 386066 - RNA, 19 nt, Human
ccuccaaaacgaaacauaa

SEQ ID NO: 386067 - RNA, 23 nt, Human
ccucccaggcucccaccucagcc

SEQ ID NO: 386068 - RNA, 20 nt, Human
ccuccccucacggugcggcc

SEQ ID NO: 386069 - RNA, 18 nt, Human
ccucccuggggcuaaaga

SEQ ID NO: 386070 - RNA, 18 nt, Human
ccucccuggggcuaaaga

SEQ ID NO: 386071 - RNA, 19 nt, Human
ccucuguuuaacacauagc

SEQ ID NO: 386072 - RNA, 22 nt, Human
ccuggacucaagugauccuccu

SEQ ID NO: 386073 - RNA, 23 nt, Human
ccuggacucaagugauccuccug

SEQ ID NO: 386074 - RNA, 20 nt, Human
ccuguggccuccucaggccc

SEQ ID NO: 386075 - RNA, 22 nt, Human
ccuguggccuccucaggccccc

SEQ ID NO: 386076 - RNA, 25 nt, Human
cggcagccggcgccgcguccuccuc

SEQ ID NO: 386077 - RNA, 18 nt, Human
cuaauuuuuauuuuggua

SEQ ID NO: 386078 - RNA, 23 nt, Human
cuaggacagcauucauauuacac

SEQ ID NO: 386079 - RNA, 18 nt, Human
cuaggccagcagcugccu

SEQ ID NO: 386080 - RNA, 21 nt, Human
cucaaggauuuagugguaagu

SEQ ID NO: 386081 - RNA, 24 nt, Human
cucaagugauccuccugccucggc

SEQ ID NO: 386082 - RNA, 21 nt, Human
cucacugcagccuugaccucc

SEQ ID NO: 386083 - RNA, 24 nt, Human
cucagccucccaaguagcugggac

SEQ ID NO: 386084 - RNA, 24 nt, Human
cucccaaguagcugggaccacagg

SEQ ID NO: 386085 - RNA, 22 nt, Human
cucccaggcucccaccucagcc

SEQ ID NO: 386086 - RNA, 19 nt, Human
cuccuccggcuccagcucc

SEQ ID NO: 386087 - RNA, 24 nt, Human
cucuauacuauauucuuacucucc

SEQ ID NO: 386088 - RNA, 19 nt, Human
cucugucucaaaaaaaaaa

SEQ ID NO: 386089 - RNA, 23 nt, Human
cugcagccuugaccucccaggcu

SEQ ID NO: 386090 - RNA, 18 nt, Human
cuggaggccagucaaacc

SEQ ID NO: 386091 - RNA, 19 nt, Human
cuggauaaaggcuaucuac

SEQ ID NO: 386092 - RNA, 19 nt, Human
cugguggagcgcuuccucc

SEQ ID NO: 386093 - RNA, 22 nt, Human
cuucauagggggaaacuaggag

SEQ ID NO: 386094 - RNA, 19 nt, Human
cuucauucacuggggucag

SEQ ID NO: 386095 - RNA, 22 nt, Human
cuuccaacucaguauacacaga

SEQ ID NO: 386096 - RNA, 24 nt, Human
cuuuccuuuuucacuccugguuuu

SEQ ID NO: 386097 - RNA, 22 nt, Human
gaauucauugagauuuauaugg

SEQ ID NO: 386098 - RNA, 20 nt, Human
gacauucugggauucccaga

SEQ ID NO: 386099 - RNA, 20 nt, Human
gagagucuguuacaucaguu

SEQ ID NO: 386100 - RNA, 18 nt, Human
gagauccuuugagaggag

SEQ ID NO: 386101 - RNA, 19 nt, Human
gaucauggcucacugcagc

SEQ ID NO: 386102 - RNA, 20 nt, Human
gaugacuuuaaaacaaacuu

SEQ ID NO: 386103 - RNA, 18 nt, Human
gauuacaggaauaagcca

SEQ ID NO: 386104 - RNA, 19 nt, Human
gauuacaggaauaagccac

SEQ ID NO: 386105 - RNA, 21 nt, Human
gauuacaggaauaagccacug

SEQ ID NO: 386106 - RNA, 24 nt, Human
gauuuagcaaucaauguuucuuuc

SEQ ID NO: 386107 - RNA, 21 nt, Human
gcagcaguaggcaugugcuuu

SEQ ID NO: 386108 - RNA, 23 nt, Human
gccaaacugucuccuuaaauaaa

SEQ ID NO: 386109 - RNA, 18 nt, Human
gccccgcgccgggcucca

SEQ ID NO: 386110 - RNA, 18 nt, Human
gcccuuuuucucuucugu

SEQ ID NO: 386111 - RNA, 21 nt, Human
gcucacugcagccuugaccuc

SEQ ID NO: 386112 - RNA, 21 nt, Human
gcuccagcuccuaggggcagg

SEQ ID NO: 386113 - RNA, 23 nt, Human
gcucccaccucagccucccaagu

SEQ ID NO: 386114 - RNA, 20 nt, Human
gcuucauucacuggggucag

SEQ ID NO: 386115 - RNA, 22 nt, Human
ggacucaagugauccuccugcc

SEQ ID NO: 386116 - RNA, 24 nt, Human
ggauuacaggaauaagccacugug

SEQ ID NO: 386117 - RNA, 19 nt, Human
ggcaaacacacacuugcua

SEQ ID NO: 386118 - RNA, 21 nt, Human
guagagacaagguuucaccau

SEQ ID NO: 386119 - RNA, 22 nt, Human
guagagacaagguuucaccaug

SEQ ID NO: 386120 - RNA, 25 nt, Human
guagauuuucuucacauacuuaaaa

SEQ ID NO: 386121 - RNA, 21 nt, Human
gucucaaaaaaaaaaaaaaag

SEQ ID NO: 386122 - RNA, 20 nt, Human
gucugaggacuaacccuaaa

SEQ ID NO: 386123 - RNA, 22 nt, Human
uaaaacaaguaaacaugaaaac

SEQ ID NO: 386124 - RNA, 23 nt, Human
uaaaacaaguaaacaugaaaaca

SEQ ID NO: 386125 - RNA, 20 nt, Human
uaaacagaucacaaaaaaau

SEQ ID NO: 386126 - RNA, 22 nt, Human
uaaagcauuacacagaccacca

SEQ ID NO: 386127 - RNA, 21 nt, Human
uaagacaacaggcuugaauau

SEQ ID NO: 386128 - RNA, 22 nt, Human
uaagacaggacagugcuuuaaa

SEQ ID NO: 386129 - RNA, 23 nt, Human
uaaguuuuuuuuuuuucucugca

SEQ ID NO: 386130 - RNA, 18 nt, Human
uaauacacugcuaaagaa

SEQ ID NO: 386131 - RNA, 21 nt, Human
uaauuuuuauuuugguagaga

SEQ ID NO: 386132 - RNA, 22 nt, Human
uacaaaauguuaagacaacagg

SEQ ID NO: 386133 - RNA, 19 nt, Human
uacaaguuaaagcauuaca

SEQ ID NO: 386134 - RNA, 19 nt, Human
uacacagaccaccacaggc

SEQ ID NO: 386135 - RNA, 23 nt, Human
uacacagaccaccacaggccagc

SEQ ID NO: 386136 - RNA, 23 nt, Human
uacaggaauaagccacugugccc

SEQ ID NO: 386137 - RNA, 18 nt, Human
uaccuuuauggaaaauga

SEQ ID NO: 386138 - RNA, 22 nt, Human
uagagacaagguuucaccaugu

SEQ ID NO: 386139 - RNA, 21 nt, Human
uaggguuucuuccagggcugu

SEQ ID NO: 386140 - RNA, 22 nt, Human
uauaaauacagaauuagcaguu

SEQ ID NO: 386141 - RNA, 23 nt, Human
uauguagaugaauauuccacaca

SEQ ID NO: 386142 - RNA, 20 nt, Human
ucaaaaaaaaaaaaaaagau

SEQ ID NO: 386143 - RNA, 24 nt, Human
ucaaaauggagggaaccggugaca

SEQ ID NO: 386144 - RNA, 23 nt, Human
ucaauguuucuuucugcaaaaug

SEQ ID NO: 386145 - RNA, 19 nt, Human
ucacugcagccuugaccuc

SEQ ID NO: 386146 - RNA, 23 nt, Human
ucacugcagccuugaccucccag

SEQ ID NO: 386147 - RNA, 24 nt, Human
ucacugcagccuugaccucccagg

SEQ ID NO: 386148 - RNA, 21 nt, Human
ucacuuccaacucaguauaca

SEQ ID NO: 386149 - RNA, 20 nt, Human
ucagccucccaaguagcugg

SEQ ID NO: 386150 - RNA, 22 nt, Human
uccacaguguugggauuacagg

SEQ ID NO: 386151 - RNA, 18 nt, Human
uccagaguuccaaaaucc

SEQ ID NO: 386152 - RNA, 24 nt, Human
uccauaccauucuggaaggcugcc

SEQ ID NO: 386153 - RNA, 25 nt, Human
ucccaaaccaacaucuaggccagca

SEQ ID NO: 386154 - RNA, 24 nt, Human
ucccaaguagcugggaccacaggc

SEQ ID NO: 386155 - RNA, 19 nt, Human
ucccagacuauauuguucu

SEQ ID NO: 386156 - RNA, 21 nt, Human
ucuacuuuccuuuuucacucc

SEQ ID NO: 386157 - RNA, 21 nt, Human
ucuggauccagaaucucaaca

SEQ ID NO: 386158 - RNA, 18 nt, Human
ucuggcacuaggggaugg

SEQ ID NO: 386159 - RNA, 20 nt, Human
ucuggcacuaggggauggga

SEQ ID NO: 386160 - RNA, 25 nt, Human
ucuguauuaacaaauggaggcagag

SEQ ID NO: 386161 - RNA, 23 nt, Human
ucugucucaaaaaaaaaaaaaaa

SEQ ID NO: 386162 - RNA, 25 nt, Human
ucuguuaucuuuuagauucuucaga

SEQ ID NO: 386163 - RNA, 23 nt, Human
ucuuacucuccagaguuccaaaa

SEQ ID NO: 386164 - RNA, 24 nt, Human
ucuucacaucuuuaaucccccaaa

SEQ ID NO: 386165 - RNA, 20 nt, Human
ucuuccaccagugugcuagg

SEQ ID NO: 386166 - RNA, 22 nt, Human
ucuugcugucacccaggaugga

SEQ ID NO: 386167 - RNA, 24 nt, Human
ucuugcugucacccaggauggagu

SEQ ID NO: 386168 - RNA, 21 nt, Human
ucuuuauuaaaguauuugaag

SEQ ID NO: 386169 - RNA, 28 nt, Human
ugaaaacaccaaaacacagcuggagacc

SEQ ID NO: 386170 - RNA, 20 nt, Human
ugaagacuuucagcauguaa

SEQ ID NO: 386171 - RNA, 20 nt, Human
ugaauauacagccuaagcac

SEQ ID NO: 386172 - RNA, 20 nt, Human
ugacaggcgccagcaagcgu

SEQ ID NO: 386173 - RNA, 20 nt, Human
ugacuucuuagaccuuuggc

SEQ ID NO: 386174 - RNA, 21 nt, Human
ugagaaaacugggcuucccgg

SEQ ID NO: 386175 - RNA, 18 nt, Human
ugagaaggaccgaggcug

SEQ ID NO: 386176 - RNA, 22 nt, Human
ugagaggccaggacaauuauca

SEQ ID NO: 386177 - RNA, 21 nt, Human
ugaguauaugucagauaccac

SEQ ID NO: 386178 - RNA, 19 nt, Human
ugaucuguacaagcuacga

SEQ ID NO: 386179 - RNA, 21 nt, Human
ugccucggccuuccacagugu

SEQ ID NO: 386180 - RNA, 18 nt, Human
ugcuagggaagggcugcc

SEQ ID NO: 386181 - RNA, 21 nt, Human
uggacaaaaaacuacaaaaaa

SEQ ID NO: 386182 - RNA, 24 nt, Human
uggacaaaaaacuacaaaaaagug

SEQ ID NO: 386183 - RNA, 24 nt, Human
uggacucaagugauccuccugccu

SEQ ID NO: 386184 - RNA, 18 nt, Human
uggagaagaccccaaaga

SEQ ID NO: 386185 - RNA, 22 nt, Human
uggaggccagucaaaccuuuuu

SEQ ID NO: 386186 - RNA, 19 nt, Human
uggagugcaguggcaugau

SEQ ID NO: 386187 - RNA, 21 nt, Human
uggagugcaguggcaugauca

SEQ ID NO: 386188 - RNA, 24 nt, Human
uggagugcaguggcaugaucaugg

SEQ ID NO: 386189 - RNA, 18 nt, Human
uggcaaagucaaaagcua

SEQ ID NO: 386190 - RNA, 18 nt, Human
uggcaugaucauggcuca

SEQ ID NO: 386191 - RNA, 20 nt, Human
uggccuccuccauacaaguu

SEQ ID NO: 386192 - RNA, 24 nt, Human
uggcucacugcagccuugaccucc

SEQ ID NO: 386193 - RNA, 24 nt, Human
ugggaccacaggcacgugccacca

SEQ ID NO: 386194 - RNA, 19 nt, Human
ugggauuacaggaauaagc

SEQ ID NO: 386195 - RNA, 22 nt, Human
ugggauuacaggaauaagccac

SEQ ID NO: 386196 - RNA, 22 nt, Human
ugggauuacaggaauaagccac

SEQ ID NO: 386197 - RNA, 24 nt, Human
ugggauuacaggaauaagccacug

SEQ ID NO: 386198 - RNA, 26 nt, Human
ugggauuacaggaauaagccacugug

SEQ ID NO: 386199 - RNA, 22 nt, Human
ugggggauauuuccucauaacg

SEQ ID NO: 386200 - RNA, 23 nt, Human
ugguagagacaagguuucaccau

SEQ ID NO: 386201 - RNA, 24 nt, Human
ugguagagacaagguuucaccaug

SEQ ID NO: 386202 - RNA, 19 nt, Human
uggucaccuacacgcugcc

SEQ ID NO: 386203 - RNA, 18 nt, Human
ugugcuacaauuaccuuu

SEQ ID NO: 386204 - RNA, 21 nt, Human
uguuuugaguauaugucagau

SEQ ID NO: 386205 - RNA, 23 nt, Human
uucaaaauggagggaaccgguga

SEQ ID NO: 386206 - RNA, 26 nt, Human
uucacucccacuaaaaaaaccccuag

SEQ ID NO: 386207 - RNA, 21 nt, Human
uucagaauaaauacaucuuua

SEQ ID NO: 386208 - RNA, 23 nt, Human
uucauauuacaccacagugacug

SEQ ID NO: 386209 - RNA, 18 nt, Human
uucaugugacuuuuacug

SEQ ID NO: 386210 - RNA, 25 nt, Human
uuccaaaauccuuuauuuuuaaaga

SEQ ID NO: 386211 - RNA, 22 nt, Human
uucugagucaggacucuauuuc

SEQ ID NO: 386212 - RNA, 18 nt, Human
uugaguucaaauuuguac

SEQ ID NO: 386213 - RNA, 20 nt, Human
uugcucuggauccagaaucu

SEQ ID NO: 386214 - RNA, 23 nt, Human
uugcucuuaaaaaaacccuuuug

SEQ ID NO: 386215 - RNA, 23 nt, Human
uuggagugguucaugugacuuuu

SEQ ID NO: 386216 - RNA, 24 nt, Human
uugguagagacaagguuucaccau

SEQ ID NO: 386217 - RNA, 21 nt, Human
uuuacagaacaaaagguuugg

SEQ ID NO: 386218 - RNA, 19 nt, Human
uuucaccauguugccuagg

SEQ ID NO: 386219 - RNA, 23 nt, Human
uuuuacagaacaaaagguuuggg

SEQ ID NO: 386220 - RNA, 23 nt, Human
uuuugguagagacaagguuucac

SEQ ID NO: 386221 - RNA, 22 nt, Human
aaaagugaaaacagaaccuguc

SEQ ID NO: 386222 - RNA, 23 nt, Human
aagcugcucacccugggaacuug

SEQ ID NO: 386223 - RNA, 22 nt, Human
agaaaggaaauacaguagugca

SEQ ID NO: 386224 - RNA, 21 nt, Human
agccgggagccggggcggccg

SEQ ID NO: 386225 - RNA, 23 nt, Human
ccuuaguacugcauacaaucaaa

SEQ ID NO: 386226 - RNA, 22 nt, Human
cucccugauacaggaacucuga

SEQ ID NO: 386227 - RNA, 25 nt, Human
cucgcugugcccuggcgugcaagcu

SEQ ID NO: 386228 - RNA, 19 nt, Human
gaaccuguccauggaacug

SEQ ID NO: 386229 - RNA, 18 nt, Human
gaucaaguuuacacuccu

SEQ ID NO: 386230 - RNA, 18 nt, Human
gcagccgggagccggggc

SEQ ID NO: 386231 - RNA, 19 nt, Human
gcagccgggagccggggcg

SEQ ID NO: 386232 - RNA, 19 nt, Human
gggcaaggccaaggucagc

SEQ ID NO: 386233 - RNA, 23 nt, Human
ggucauauugccgcaacaguuaa

SEQ ID NO: 386234 - RNA, 20 nt, Human
uaaggcaagagucccuaugc

SEQ ID NO: 386235 - RNA, 18 nt, Human
uauuagagaaucagacaa

SEQ ID NO: 386236 - RNA, 18 nt, Human
uccaaaagcugcucaccc

SEQ ID NO: 386237 - RNA, 21 nt, Human
uccuuaaggcaagagucccua

SEQ ID NO: 386238 - RNA, 25 nt, Human
ugaaaacagaaccuguccauggaac

SEQ ID NO: 386239 - RNA, 23 nt, Human
ugcucacccugggaacuugugua

SEQ ID NO: 386240 - RNA, 22 nt, Human
uggaacuggaggaacagcagug

SEQ ID NO: 386241 - RNA, 24 nt, Human
uggaggaacagcagugugccgacg

SEQ ID NO: 386242 - RNA, 19 nt, Human
uuagaaaggaaauacagua

SEQ ID NO: 386243 - RNA, 22 nt, Human
uugaaacaugcauuucuuguuu

SEQ ID NO: 386244 - RNA, 19 nt, Human
uuuuuuuuuuucaagaucc

SEQ ID NO: 386245 - RNA, 24 nt, Human
uuuuuuuuuuuuuuuuuuuucaag

SEQ ID NO: 386246 - RNA, 20 nt, Human
acaagacagaaaaaagaaca

SEQ ID NO: 386247 - RNA, 24 nt, Human
agaaaaaagaacaugacaccuaag

SEQ ID NO: 386248 - RNA, 22 nt, Human
agacaagacagaaaaaagaaca

SEQ ID NO: 386249 - RNA, 26 nt, Human
agacagaaaaaagaacaugacaccua

SEQ ID NO: 386250 - RNA, 22 nt, Human
cagaaaaaagaacaugacaccu

SEQ ID NO: 386251 - RNA, 19 nt, Human
caugacaccuaagagaauc

SEQ ID NO: 386252 - RNA, 18 nt, Human
cccgcgccgccgccgcca

SEQ ID NO: 386253 - RNA, 22 nt, Human
cccgcgccgccgccgccaggaa

SEQ ID NO: 386254 - RNA, 19 nt, Human
ccgcgccgccgccgccagg

SEQ ID NO: 386255 - RNA, 20 nt, Human
cguugccgggcucugagccc

SEQ ID NO: 386256 - RNA, 18 nt, Human
gaagacaagacagaaaaa

SEQ ID NO: 386257 - RNA, 19 nt, Human
gacaagacagaaaaaagaa

SEQ ID NO: 386258 - RNA, 18 nt, Human
gccaggaaggaggggucc

SEQ ID NO: 386259 - RNA, 21 nt, Human
ggacagacagacgggagcagg

SEQ ID NO: 386260 - RNA, 23 nt, Human
ggacagacagacgggagcagggg

SEQ ID NO: 386261 - RNA, 20 nt, Human
ggagcaggggggcggggaca

SEQ ID NO: 386262 - RNA, 22 nt, Human
gggggcggggacagcggcuccg

SEQ ID NO: 386263 - RNA, 19 nt, Human
ugaagacaagacagaaaaa

SEQ ID NO: 386264 - RNA, 23 nt, Human
ugagucauguuuucaaagcaauc

SEQ ID NO: 386265 - RNA, 28 nt, Human
acacaaccccccucugcagcagaguccu

SEQ ID NO: 386266 - RNA, 28 nt, Human
acacaaccccccucugcagcagaguccu

SEQ ID NO: 386267 - RNA, 22 nt, Human
agaaaaucagucuacuccgggc

SEQ ID NO: 386268 - RNA, 18 nt, Human
agacaggaggguggaagg

SEQ ID NO: 386269 - RNA, 19 nt, Human
agauggucuuguggccccu

SEQ ID NO: 386270 - RNA, 23 nt, Human
aggcaggucaaaggcaguggggg

SEQ ID NO: 386271 - RNA, 18 nt, Human
aggcgguaaagcccuacu

SEQ ID NO: 386272 - RNA, 19 nt, Human
aucuguacacaaccccccu

SEQ ID NO: 386273 - RNA, 19 nt, Human
aucuguacacaaccccccu

SEQ ID NO: 386274 - RNA, 23 nt, Human
caaccccccucugcagcagaguc

SEQ ID NO: 386275 - RNA, 23 nt, Human
caaccccccucugcagcagaguc

SEQ ID NO: 386276 - RNA, 21 nt, Human
cacuguguauguagauggucu

SEQ ID NO: 386277 - RNA, 20 nt, Human
ccaaagucacuuccagaaau

SEQ ID NO: 386278 - RNA, 26 nt, Human
ccauacugacccuuuuugcaaguccc

SEQ ID NO: 386279 - RNA, 18 nt, Human
ccucuugucucacagcug

SEQ ID NO: 386280 - RNA, 21 nt, Human
ccuguggcuggcgccuggggc

SEQ ID NO: 386281 - RNA, 21 nt, Human
cucgcaugcagccaaagucac

SEQ ID NO: 386282 - RNA, 21 nt, Human
cugcaccugccaaaggcccug

SEQ ID NO: 386283 - RNA, 21 nt, Human
cugcaguccccacuugucccu

SEQ ID NO: 386284 - RNA, 23 nt, Human
cuuuuugcaagucccagugugag

SEQ ID NO: 386285 - RNA, 22 nt, Human
gacccuuuuugcaagucccagu

SEQ ID NO: 386286 - RNA, 22 nt, Human
ggcucaggguccuucuaaagcc

SEQ ID NO: 386287 - RNA, 20 nt, Human
ggucuuguggccccuggaga

SEQ ID NO: 386288 - RNA, 21 nt, Human
ggucuuguggccccuggagag

SEQ ID NO: 386289 - RNA, 24 nt, Human
ggucuuguggccccuggagagcuc

SEQ ID NO: 386290 - RNA, 20 nt, Human
gucacuuccagaaauggaau

SEQ ID NO: 386291 - RNA, 18 nt, Human
uaaagcagacaggagggu

SEQ ID NO: 386292 - RNA, 19 nt, Human
ucaggguccuucuaaagcc

SEQ ID NO: 386293 - RNA, 18 nt, Human
ucagugauuugguuugag

SEQ ID NO: 386294 - RNA, 20 nt, Human
ucccuaacccauacugaccc

SEQ ID NO: 386295 - RNA, 22 nt, Human
ucccucuugucucacagcuggg

SEQ ID NO: 386296 - RNA, 21 nt, Human
uccugucguggcgccuggggc

SEQ ID NO: 386297 - RNA, 22 nt, Human
uccuguggcuggcgccuggggc

SEQ ID NO: 386298 - RNA, 23 nt, Human
ucgaagcuaggcguaaagccuac

SEQ ID NO: 386299 - RNA, 21 nt, Human
ugaggaaaagcugguccgacc

SEQ ID NO: 386300 - RNA, 19 nt, Human
ugcaugaagggaggcaggu

SEQ ID NO: 386301 - RNA, 24 nt, Human
uggaaaagaaaaaaagaaaaucag

SEQ ID NO: 386302 - RNA, 24 nt, Human
ugucguggcgccuggggcucaggg

SEQ ID NO: 386303 - RNA, 24 nt, Human
ugugaugauaaguuagcugcaguc

SEQ ID NO: 386304 - RNA, 19 nt, Human
uguggcuggcgccuggggc

SEQ ID NO: 386305 - RNA, 22 nt, Human
uuucccuaacccauacugaccc

SEQ ID NO: 386306 - RNA, 23 nt, Human
aacaaacucaugaccuucaaaga

SEQ ID NO: 386307 - RNA, 24 nt, Human
agaaaggcagcuuucaaucacaaa

SEQ ID NO: 386308 - RNA, 19 nt, Human
agaagaggggcgcgggagg

SEQ ID NO: 386309 - RNA, 21 nt, Human
aggggcccgggacucgcggga

SEQ ID NO: 386310 - RNA, 18 nt, Human
cauauuuaaugcacacau

SEQ ID NO: 386311 - RNA, 23 nt, Human
cgcgaggccuggggcacgcgggu

SEQ ID NO: 386312 - RNA, 21 nt, Human
gaaaggcagcuuucaaucaca

SEQ ID NO: 386313 - RNA, 24 nt, Human
gaagcauauuuaaugcacacauuu

SEQ ID NO: 386314 - RNA, 21 nt, Human
gacagcgacgagggggucccc

SEQ ID NO: 386315 - RNA, 21 nt, Human
ggcgcgggaggggcccgggac

SEQ ID NO: 386316 - RNA, 18 nt, Human
ggcgugcgccgggagucg

SEQ ID NO: 386317 - RNA, 20 nt, Human
gggcgcgggaggggcccggg

SEQ ID NO: 386318 - RNA, 21 nt, Human
uaaugcacacauuugaauguu

SEQ ID NO: 386319 - RNA, 20 nt, Human
uggaguccaaguucuggauu

SEQ ID NO: 386320 - RNA, 19 nt, Human
uucaaagaugucuucgucc

SEQ ID NO: 386321 - RNA, 19 nt, Human
aaacccaaggcgauaacaa

SEQ ID NO: 386322 - RNA, 18 nt, Human
acacaucccgccccccuc

SEQ ID NO: 386323 - RNA, 21 nt, Human
acaccagaguagcaacaugaa

SEQ ID NO: 386324 - RNA, 22 nt, Human
accccaccccauccccugcccc

SEQ ID NO: 386325 - RNA, 24 nt, Human
acccgcccucgcggccuccugcua

SEQ ID NO: 386326 - RNA, 19 nt, Human
acgcggaccggacgcgggc

SEQ ID NO: 386327 - RNA, 24 nt, Human
acugcguucaggcagcugaaacag

SEQ ID NO: 386328 - RNA, 19 nt, Human
agaaagaaaggagacccug

SEQ ID NO: 386329 - RNA, 22 nt, Human
agaugaccaaagacuggcacuu

SEQ ID NO: 386330 - RNA, 18 nt, Human
agcaacauuaucaaagac

SEQ ID NO: 386331 - RNA, 20 nt, Human
aggccaggaucuauuaaacc

SEQ ID NO: 386332 - RNA, 20 nt, Human
aggccaggaucuauuaaacc

SEQ ID NO: 386333 - RNA, 22 nt, Human
aggccaggaucuauuaaaccug

SEQ ID NO: 386334 - RNA, 20 nt, Human
aggcgcggggacucgucggg

SEQ ID NO: 386335 - RNA, 20 nt, Human
agggcugggauucaaaggag

SEQ ID NO: 386336 - RNA, 26 nt, Human
agguuuccuguuguuggaccgaaagg

SEQ ID NO: 386337 - RNA, 21 nt, Human
agugauagaaaucuggaggga

SEQ ID NO: 386338 - RNA, 23 nt, Human
aucccgccccccuccccguccca

SEQ ID NO: 386339 - RNA, 18 nt, Human
caaacuccucuucuccuc

SEQ ID NO: 386340 - RNA, 22 nt, Human
caaacugcguucaggcagcuga

SEQ ID NO: 386341 - RNA, 21 nt, Human
caaaggagguacagcucuuga

SEQ ID NO: 386342 - RNA, 20 nt, Human
caacauuaucaaagacaaca

SEQ ID NO: 386343 - RNA, 23 nt, Human
caagcauauguggucaguaauac

SEQ ID NO: 386344 - RNA, 23 nt, Human
cagccccagcccucccuugauuu

SEQ ID NO: 386345 - RNA, 18 nt, Human
cagcccucccuugauuuc

SEQ ID NO: 386346 - RNA, 20 nt, Human
caggcgucugcgccccggcc

SEQ ID NO: 386347 - RNA, 21 nt, Human
cauccaaacugcguucaggcu

SEQ ID NO: 386348 - RNA, 24 nt, Human
caucccgccccccuccccguccca

SEQ ID NO: 386349 - RNA, 25 nt, Human
caucccgccccccuccccgucccac

SEQ ID NO: 386350 - RNA, 21 nt, Human
cauuuuacaaaaaagaacauu

SEQ ID NO: 386351 - RNA, 23 nt, Human
cccagugacaagcauaugugguc

SEQ ID NO: 386352 - RNA, 21 nt, Human
cccgccccccuccccguccca

SEQ ID NO: 386353 - RNA, 27 nt, Human
cccgcgauaggaucagaaccggggucc

SEQ ID NO: 386354 - RNA, 22 nt, Human
cccggccgcucccuccggcucu

SEQ ID NO: 386355 - RNA, 23 nt, Human
cccucaagacagaagugagaaag

SEQ ID NO: 386356 - RNA, 18 nt, Human
cccucucuucuuuguucc

SEQ ID NO: 386357 - RNA, 19 nt, Human
ccgcccucgcggccuccug

SEQ ID NO: 386358 - RNA, 21 nt, Human
ccucaagacagaagugagaaa

SEQ ID NO: 386359 - RNA, 19 nt, Human
ccuccuccggaccgaaagc

SEQ ID NO: 386360 - RNA, 19 nt, Human
ccuggcgcgucugggccgc

SEQ ID NO: 386361 - RNA, 23 nt, Human
cgccccggccgcucccuccggcu

SEQ ID NO: 386362 - RNA, 20 nt, Human
cgcgacugucgccucuccuc

SEQ ID NO: 386363 - RNA, 22 nt, Human
cgcgacugucgccucuccucua

SEQ ID NO: 386364 - RNA, 18 nt, Human
cggguaggccaugauaca

SEQ ID NO: 386365 - RNA, 23 nt, Human
cuagaguuuucugucuccauugg

SEQ ID NO: 386366 - RNA, 21 nt, Human
cucccuuuucguucuuuccca

SEQ ID NO: 386367 - RNA, 19 nt, Human
cuccugcuacagaccuggc

SEQ ID NO: 386368 - RNA, 23 nt, Human
cuuuucguucuuucccagcccca

SEQ ID NO: 386369 - RNA, 22 nt, Human
gaacuagaguuuucugucucca

SEQ ID NO: 386370 - RNA, 18 nt, Human
gacacaccagaguagcaa

SEQ ID NO: 386371 - RNA, 18 nt, Human
gacugucgccucuccucu

SEQ ID NO: 386372 - RNA, 19 nt, Human
gcaggcgucugcgccccgg

SEQ ID NO: 386373 - RNA, 21 nt, Human
gccacaacgccuuugaguuaa

SEQ ID NO: 386374 - RNA, 21 nt, Human
gcccucagagcucgcccuccu

SEQ ID NO: 386375 - RNA, 24 nt, Human
gcccucccuugauuucucucacuc

SEQ ID NO: 386376 - RNA, 21 nt, Human
gcgggcggaugaggcgcgggg

SEQ ID NO: 386377 - RNA, 23 nt, Human
gcggggacucgucggggcucggg

SEQ ID NO: 386378 - RNA, 21 nt, Human
gcugugccaucccuuccuuca

SEQ ID NO: 386379 - RNA, 22 nt, Human
ggaccgaaagccgggaagggga

SEQ ID NO: 386380 - RNA, 22 nt, Human
ggcaggaauuugaaaggauaaa

SEQ ID NO: 386381 - RNA, 23 nt, Human
ggcaguaagggcaagcugaagaa

SEQ ID NO: 386382 - RNA, 24 nt, Human
gguaccccaccccauccccugccc

SEQ ID NO: 386383 - RNA, 22 nt, Human
uaaaaaaaaaauacaagucuug

SEQ ID NO: 386384 - RNA, 23 nt, Human
uaaaaaaaaaauacaagucuugg

SEQ ID NO: 386385 - RNA, 25 nt, Human
uaaaaaaaaaauacaagucuuggga

SEQ ID NO: 386386 - RNA, 20 nt, Human
uaagugauuugcucaaaggc

SEQ ID NO: 386387 - RNA, 22 nt, Human
uacucaccuguaggcuucuggg

SEQ ID NO: 386388 - RNA, 21 nt, Human
uaggcccaguuaacaaacucc

SEQ ID NO: 386389 - RNA, 25 nt, Human
uaucaaagacaacauauguacaaac

SEQ ID NO: 386390 - RNA, 26 nt, Human
uaucaaagacaacauauguacaaaca

SEQ ID NO: 386391 - RNA, 24 nt, Human
ucaaagacaacauauguacaaaca

SEQ ID NO: 386392 - RNA, 24 nt, Human
ucaaagacauccaaacugcguuca

SEQ ID NO: 386393 - RNA, 22 nt, Human
ucaaauaauuuaaacccaaggc

SEQ ID NO: 386394 - RNA, 21 nt, Human
ucaccuguaggcuucugggga

SEQ ID NO: 386395 - RNA, 24 nt, Human
ucacucccucucuucuuuguucca

SEQ ID NO: 386396 - RNA, 19 nt, Human
ucagagcucgcccuccugc

SEQ ID NO: 386397 - RNA, 21 nt, Human
ucccgccccccuccccguccc

SEQ ID NO: 386398 - RNA, 25 nt, Human
ucccgccccccuccccgucccacgg

SEQ ID NO: 386399 - RNA, 23 nt, Human
ucccucaagacagaagugagaaa

SEQ ID NO: 386400 - RNA, 21 nt, Human
ucccuugauuucucucacucc

SEQ ID NO: 386401 - RNA, 24 nt, Human
uccgggcaaugucuguccucaaag

SEQ ID NO: 386402 - RNA, 18 nt, Human
uccucuauacgcgacucc

SEQ ID NO: 386403 - RNA, 21 nt, Human
uccugacagguagggacuauc

SEQ ID NO: 386404 - RNA, 19 nt, Human
ucucacaguagcacacguu

SEQ ID NO: 386405 - RNA, 20 nt, Human
ucucccggcagaaagucuaa

SEQ ID NO: 386406 - RNA, 20 nt, Human
ugagaaagaaaggagacccc

SEQ ID NO: 386407 - RNA, 23 nt, Human
ugaggccaggaucuauuaaaccu

SEQ ID NO: 386408 - RNA, 19 nt, Human
ugguaaaugaggcuacuac

SEQ ID NO: 386409 - RNA, 18 nt, Human
ugucauacagauacuugu

SEQ ID NO: 386410 - RNA, 23 nt, Human
uucaggcagcugaaacaggcuuc

SEQ ID NO: 386411 - RNA, 20 nt, Human
uucauugcaaaguguggcuc

SEQ ID NO: 386412 - RNA, 26 nt, Human
uucccagccccagcccucccuugauu

SEQ ID NO: 386413 - RNA, 22 nt, Human
uuccuguuguuggaccgaaagg

SEQ ID NO: 386414 - RNA, 21 nt, Human
uucugguuugugccuuuccca

SEQ ID NO: 386415 - RNA, 21 nt, Human
uuucccagccccagcccuccc

SEQ ID NO: 386416 - RNA, 24 nt, Human
aaaauaacagagacauguuauauc

SEQ ID NO: 386417 - RNA, 24 nt, Human
aaaguacaaagccagacauuaaag

SEQ ID NO: 386418 - RNA, 21 nt, Human
aacacauacaccaaagcuuga

SEQ ID NO: 386419 - RNA, 26 nt, Human
aaugcccacucacauuuaauaauagc

SEQ ID NO: 386420 - RNA, 21 nt, Human
acaguggcgugaucucagcuc

SEQ ID NO: 386421 - RNA, 24 nt, Human
accaugagaauucagcugaaaaac

SEQ ID NO: 386422 - RNA, 25 nt, Human
acuuuguugcccaggcuggagcaca

SEQ ID NO: 386423 - RNA, 22 nt, Human
agcugaaaaacaacucuccaga

SEQ ID NO: 386424 - RNA, 27 nt, Human
aggcagacugcaaaguacaaagccaga

SEQ ID NO: 386425 - RNA, 18 nt, Human
aguggcgugaucucagcu

SEQ ID NO: 386426 - RNA, 18 nt, Human
caaaagacuacugcagau

SEQ ID NO: 386427 - RNA, 20 nt, Human
caacaggaguguuuuaaagc

SEQ ID NO: 386428 - RNA, 22 nt, Human
caacucuccagaaugcccaccc

SEQ ID NO: 386429 - RNA, 24 nt, Human
cacacaacucugcagcauaauacc

SEQ ID NO: 386430 - RNA, 19 nt, Human
cacuuuguugcccaggcug

SEQ ID NO: 386431 - RNA, 22 nt, Human
cacuuuguugcccaggcuggag

SEQ ID NO: 386432 - RNA, 24 nt, Human
cagaaccggccaacacauacacca

SEQ ID NO: 386433 - RNA, 24 nt, Human
cagagucucacuuuguugcccagg

SEQ ID NO: 386434 - RNA, 22 nt, Human
cagauuagacaggcagacugca

SEQ ID NO: 386435 - RNA, 20 nt, Human
cagcacugugaugugaggua

SEQ ID NO: 386436 - RNA, 22 nt, Human
cagcagagcuucuucaagacuu

SEQ ID NO: 386437 - RNA, 19 nt, Human
cauaauaccaacaacagga

SEQ ID NO: 386438 - RNA, 22 nt, Human
ccacauuccaaacuucugacuu

SEQ ID NO: 386439 - RNA, 25 nt, Human
ccauauuguccuuugacccaccaca

SEQ ID NO: 386440 - RNA, 21 nt, Human
cccaggcuggagcacaguggc

SEQ ID NO: 386441 - RNA, 21 nt, Human
cccaggcuggagcacaguggc

SEQ ID NO: 386442 - RNA, 18 nt, Human
ccucaaaagacuacugca

SEQ ID NO: 386443 - RNA, 24 nt, Human
ccuccuguguucaagcaauucucc

SEQ ID NO: 386444 - RNA, 23 nt, Human
ccuguguucaagcaauucuccug

SEQ ID NO: 386445 - RNA, 24 nt, Human
cucacuuuguugcccaggcuggag

SEQ ID NO: 386446 - RNA, 23 nt, Human
cucgcugcaaccucugccuccug

SEQ ID NO: 386447 - RNA, 20 nt, Human
cugaaaaacaacucuccagg

SEQ ID NO: 386448 - RNA, 24 nt, Human
cugcaaccucugccuccuguguuc

SEQ ID NO: 386449 - RNA, 25 nt, Human
cugcagauuagacaggcagacugca

SEQ ID NO: 386450 - RNA, 24 nt, Human
cuggagcacaguggcgugaucuca

SEQ ID NO: 386451 - RNA, 20 nt, Human
cuggcacaguggccauucuu

SEQ ID NO: 386452 - RNA, 22 nt, Human
gacccaccacauuccaaacuuc

SEQ ID NO: 386453 - RNA, 22 nt, Human
gcaaccucugccuccuguguuc

SEQ ID NO: 386454 - RNA, 21 nt, Human
gcugcuuuggucuuccucagc

SEQ ID NO: 386455 - RNA, 18 nt, Human
ggcaggaguccacguugg

SEQ ID NO: 386456 - RNA, 23 nt, Human
ggcaggaguccacguugggagga

SEQ ID NO: 386457 - RNA, 22 nt, Human
ggcuggagcacaguggcgugau

SEQ ID NO: 386458 - RNA, 24 nt, Human
gggcaggaguccacguugggagga

SEQ ID NO: 386459 - RNA, 18 nt, Human
gggcaucuggcacagugg

SEQ ID NO: 386460 - RNA, 18 nt, Human
gucuuccucagcagagcu

SEQ ID NO: 386461 - RNA, 20 nt, Human
uacaacuuaagguuuccuuu

SEQ ID NO: 386462 - RNA, 24 nt, Human
uagacaauacaacuuaagguuucc

SEQ ID NO: 386463 - RNA, 23 nt, Human
uaggaaauucaaaugggcaacgc

SEQ ID NO: 386464 - RNA, 21 nt, Human
uccuguguucaagcaauucuc

SEQ ID NO: 386465 - RNA, 24 nt, Human
uccuguguucaagcaauucuccug

SEQ ID NO: 386466 - RNA, 22 nt, Human
ucgcugcaaccucugccuccug

SEQ ID NO: 386467 - RNA, 23 nt, Human
ucgcugcaaccucugccuccugu

SEQ ID NO: 386468 - RNA, 22 nt, Human
ucucacuuuguugcccaggcug

SEQ ID NO: 386469 - RNA, 23 nt, Human
ucucacuuuguugcccaggcugg

SEQ ID NO: 386470 - RNA, 24 nt, Human
ucucacuuuguugcccaggcugga

SEQ ID NO: 386471 - RNA, 19 nt, Human
ucuccagaaugcccaccca

SEQ ID NO: 386472 - RNA, 24 nt, Human
ucugccuccuguguucaagcaauu

SEQ ID NO: 386473 - RNA, 19 nt, Human
ugaaaaacaacucuccaga

SEQ ID NO: 386474 - RNA, 24 nt, Human
ugaaaaacaacucuccagaaugcc

SEQ ID NO: 386475 - RNA, 19 nt, Human
ugacuucugaucccaagcu

SEQ ID NO: 386476 - RNA, 20 nt, Human
ugacuucugaucccaagcuc

SEQ ID NO: 386477 - RNA, 22 nt, Human
ugagacagagucucacuuuguu

SEQ ID NO: 386478 - RNA, 21 nt, Human
ugcccaggcuggagcacagug

SEQ ID NO: 386479 - RNA, 24 nt, Human
ugcccaggcuggagcacaguggcg

SEQ ID NO: 386480 - RNA, 22 nt, Human
ugcugcuuuggucuuccucagc

SEQ ID NO: 386481 - RNA, 19 nt, Human
ugcuuuggucuuccucagc

SEQ ID NO: 386482 - RNA, 24 nt, Human
uggcgugaucucagcucgcugcaa

SEQ ID NO: 386483 - RNA, 22 nt, Human
ugggaggaggaaaggcgcaggc

SEQ ID NO: 386484 - RNA, 24 nt, Human
uuaaagguuuuuuguuuuuuuuuu

SEQ ID NO: 386485 - RNA, 31 nt, Human
uuggcaacgagugcugcuuuggucuuccucu

SEQ ID NO: 386486 - RNA, 18 nt, Human
uuuguugcccaggcugga

SEQ ID NO: 386487 - RNA, 20 nt, Human
uuuuuuuuuuugagacagag

SEQ ID NO: 386488 - RNA, 26 nt, Human
uuuuuuuuuuuugagacagagucuca

SEQ ID NO: 386489 - RNA, 18 nt, Human
uuuuuuuuuuuuuuuuug

SEQ ID NO: 386490 - RNA, 21 nt, Human
aaaaugagcuugcucuuuucc

SEQ ID NO: 386491 - RNA, 21 nt, Human
aagguguuaguuaauuucaug

SEQ ID NO: 386492 - RNA, 22 nt, Human
aauaaaggaggacacggaaaaa

SEQ ID NO: 386493 - RNA, 25 nt, Human
accuaggcuggagaacagggaaggc

SEQ ID NO: 386494 - RNA, 18 nt, Human
agggaaggcugaccaagg

SEQ ID NO: 386495 - RNA, 22 nt, Human
auaaaacaacagucgcccagaa

SEQ ID NO: 386496 - RNA, 24 nt, Human
caaaagcaauaaauggaguuaaau

SEQ ID NO: 386497 - RNA, 26 nt, Human
caccuaggcuggagaacagggaaggc

SEQ ID NO: 386498 - RNA, 22 nt, Human
cagggaaaaauuauaccaaaag

SEQ ID NO: 386499 - RNA, 20 nt, Human
cuggagaacagggaaggcug

SEQ ID NO: 386500 - RNA, 20 nt, Human
gagaacagggaaggcugacc

SEQ ID NO: 386501 - RNA, 22 nt, Human
gagaacagggaaggcugaccaa

SEQ ID NO: 386502 - RNA, 19 nt, Human
gcuggagaacagggaaggc

SEQ ID NO: 386503 - RNA, 22 nt, Human
uacaggugugagccaccacgcc

SEQ ID NO: 386504 - RNA, 23 nt, Human
uacaggugugagccaccacgccu

SEQ ID NO: 386505 - RNA, 25 nt, Human
uguacaaauaugaacaaauugggga

SEQ ID NO: 386506 - RNA, 18 nt, Human
uuacaggugugagccacc

SEQ ID NO: 386507 - RNA, 18 nt, Human
acaggcugguguggggac

SEQ ID NO: 386508 - RNA, 19 nt, Human
ugguguggggacaugggga

SEQ ID NO: 386509 - RNA, 20 nt, Human
aaacaaaacgaaaccaaaac

SEQ ID NO: 386510 - RNA, 20 nt, Human
aaaccaaaacaaaacaaaaa

SEQ ID NO: 386511 - RNA, 24 nt, Human
aaacccgagcugcacaggccagga

SEQ ID NO: 386512 - RNA, 21 nt, Human
aacaaaacgaaaccaaaacaa

SEQ ID NO: 386513 - RNA, 18 nt, Human
aacaaagcaagaccccau

SEQ ID NO: 386514 - RNA, 19 nt, Human
aacaaagcaagaccccauc

SEQ ID NO: 386515 - RNA, 20 nt, Human
aacaaagcaagaccccaucu

SEQ ID NO: 386516 - RNA, 21 nt, Human
aacaaagcaagaccccaucuc

SEQ ID NO: 386517 - RNA, 19 nt, Human
aacgaaaccaaaacaaaac

SEQ ID NO: 386518 - RNA, 21 nt, Human
aagcccaggaguucaaggcug

SEQ ID NO: 386519 - RNA, 24 nt, Human
aagucuggaaccaauacuucuucc

SEQ ID NO: 386520 - RNA, 20 nt, Human
aaugccccaagaggucccaa

SEQ ID NO: 386521 - RNA, 21 nt, Human
accaaaauccacaggagaauc

SEQ ID NO: 386522 - RNA, 26 nt, Human
accaauuauucugcuauuccugccau

SEQ ID NO: 386523 - RNA, 19 nt, Human
accagauauaagaaacaac

SEQ ID NO: 386524 - RNA, 22 nt, Human
accccaucuccauaaaaaauaa

SEQ ID NO: 386525 - RNA, 21 nt, Human
acccuaucucaaacaaaacga

SEQ ID NO: 386526 - RNA, 18 nt, Human
acuuaaaaccagauauaa

SEQ ID NO: 386527 - RNA, 21 nt, Human
acuucaaaaugccccaagagg

SEQ ID NO: 386528 - RNA, 20 nt, Human
acuuuaggaggcugaggcag

SEQ ID NO: 386529 - RNA, 19 nt, Human
agacugaggugggaggguc

SEQ ID NO: 386530 - RNA, 19 nt, Human
agaugccugaggcagaagc

SEQ ID NO: 386531 - RNA, 20 nt, Human
agcaacuucaggcuucaaug

SEQ ID NO: 386532 - RNA, 23 nt, Human
agcugggcacaguagugugugcc

SEQ ID NO: 386533 - RNA, 24 nt, Human
aggacugcuugaagccaggaguuc

SEQ ID NO: 386534 - RNA, 19 nt, Human
aggauuggaggggagagga

SEQ ID NO: 386535 - RNA, 18 nt, Human
aggcaggaggacugcuug

SEQ ID NO: 386536 - RNA, 24 nt, Human
aggcugaggcaggaggacugcuug

SEQ ID NO: 386537 - RNA, 18 nt, Human
agggucacuuaagcccag

SEQ ID NO: 386538 - RNA, 24 nt, Human
agggucacuuaagcccaggaguuc

SEQ ID NO: 386539 - RNA, 20 nt, Human
aggugggagggucacuuaag

SEQ ID NO: 386540 - RNA, 21 nt, Human
aguagugugugccuguagucc

SEQ ID NO: 386541 - RNA, 22 nt, Human
aucacucaccaaaauccacagg

SEQ ID NO: 386542 - RNA, 25 nt, Human
aucacucaccaaaauccacaggaga

SEQ ID NO: 386543 - RNA, 22 nt, Human
augccgcugcacuccagccuag

SEQ ID NO: 386544 - RNA, 28 nt, Human
caaaacgaaaccaaaacaaaacaaaacu

SEQ ID NO: 386545 - RNA, 21 nt, Human
caaaauccacaggagaaucuu

SEQ ID NO: 386546 - RNA, 21 nt, Human
caaaaugccccaagagguccc

SEQ ID NO: 386547 - RNA, 30 nt, Human
caaacaaaacgaaaccaaaacaaaacaaag

SEQ ID NO: 386548 - RNA, 22 nt, Human
caagaggucccaaaauuuaguc

SEQ ID NO: 386549 - RNA, 31 nt, Human
caaguuggaaaacaguuuaaugaucacucaa

SEQ ID NO: 386550 - RNA, 23 nt, Human
cacuccagccuaggugauagagc

SEQ ID NO: 386551 - RNA, 21 nt, Human
cagaagaugcuuauggcccac

SEQ ID NO: 386552 - RNA, 24 nt, Human
caggaguucaaggcugcagucaug

SEQ ID NO: 386553 - RNA, 19 nt, Human
ccaaaacaaaacaaaacuc

SEQ ID NO: 386554 - RNA, 19 nt, Human
ccgcugcacuccagccuag

SEQ ID NO: 386555 - RNA, 20 nt, Human
ccgcugcacuccagccuagg

SEQ ID NO: 386556 - RNA, 21 nt, Human
ccgcugcacuccagccuaggu

SEQ ID NO: 386557 - RNA, 24 nt, Human
ccgcugcacuccagccuaggugau

SEQ ID NO: 386558 - RNA, 19 nt, Human
cgaaaccaaaacaaaacaa

SEQ ID NO: 386559 - RNA, 22 nt, Human
cgaaaccaaaacaaaacaaaac

SEQ ID NO: 386560 - RNA, 23 nt, Human
cgcugcacuccagccuaggugau

SEQ ID NO: 386561 - RNA, 25 nt, Human
cgcugcacuccagccuaggugauag

SEQ ID NO: 386562 - RNA, 23 nt, Human
cuaagucuuagcaacuucaggcu

SEQ ID NO: 386563 - RNA, 18 nt, Human
cucaggagacugaggugg

SEQ ID NO: 386564 - RNA, 25 nt, Human
cugaggcagaagcucggaaacccga

SEQ ID NO: 386565 - RNA, 20 nt, Human
cugcacuccagccuagguga

SEQ ID NO: 386566 - RNA, 25 nt, Human
cugcacuccagccuaggugauagag

SEQ ID NO: 386567 - RNA, 21 nt, Human
cuuauggcccacguaucuucu

SEQ ID NO: 386568 - RNA, 24 nt, Human
gcacuccagccuaggugauagagc

SEQ ID NO: 386569 - RNA, 19 nt, Human
gcacuuuaggaggcugagg

SEQ ID NO: 386570 - RNA, 22 nt, Human
gcacuuuaggaggcugaggcag

SEQ ID NO: 386571 - RNA, 23 nt, Human
gcagucaugccgcugcacuccag

SEQ ID NO: 386572 - RNA, 22 nt, Human
ggcagaagcucggaaacccgag

SEQ ID NO: 386573 - RNA, 24 nt, Human
gggcacaguagugugugccuguag

SEQ ID NO: 386574 - RNA, 23 nt, Human
gggucacuuaagcccaggaguuc

SEQ ID NO: 386575 - RNA, 24 nt, Human
ggucacuuaagcccaggaguucaa

SEQ ID NO: 386576 - RNA, 23 nt, Human
gucaugccgcugcacuccagccu

SEQ ID NO: 386577 - RNA, 21 nt, Human
uaaaaccagauauaagaaaca

SEQ ID NO: 386578 - RNA, 22 nt, Human
uaaaaccagauauaagaaacaa

SEQ ID NO: 386579 - RNA, 30 nt, Human
uaaaaccagauauaagaaacaaccuaaguu

SEQ ID NO: 386580 - RNA, 21 nt, Human
uaagaaacaaccuaagucuua

SEQ ID NO: 386581 - RNA, 22 nt, Human
uagagcaagacccuaucucaaa

SEQ ID NO: 386582 - RNA, 23 nt, Human
uagagcaagacccuaucucaaac

SEQ ID NO: 386583 - RNA, 22 nt, Human
uagcaacuucaggcuucaaugu

SEQ ID NO: 386584 - RNA, 23 nt, Human
uagcugggcacaguagugugugc

SEQ ID NO: 386585 - RNA, 19 nt, Human
uagugugugccuguagucc

SEQ ID NO: 386586 - RNA, 24 nt, Human
uagugugugccuguaguccuagcu

SEQ ID NO: 386587 - RNA, 27 nt, Human
ucaaacaaaacgaaaccaaaacaaaac

SEQ ID NO: 386588 - RNA, 21 nt, Human
ucacgaccagccugggcaaca

SEQ ID NO: 386589 - RNA, 21 nt, Human
ucacucaccaaaauccacagg

SEQ ID NO: 386590 - RNA, 23 nt, Human
ucacuuaagcccaggaguucaag

SEQ ID NO: 386591 - RNA, 21 nt, Human
ucccaaaauuuagucaaggca

SEQ ID NO: 386592 - RNA, 20 nt, Human
uccccuguccagaagaugcu

SEQ ID NO: 386593 - RNA, 26 nt, Human
ucuuaaauguuuacaagcaccaauua

SEQ ID NO: 386594 - RNA, 21 nt, Human
ugaaagcaguuccccugucca

SEQ ID NO: 386595 - RNA, 23 nt, Human
ugacaaauaucagaguuuugaga

SEQ ID NO: 386596 - RNA, 18 nt, Human
ugagauacuaaagcacca

SEQ ID NO: 386597 - RNA, 25 nt, Human
ugaggcaggaggacugcuugaagcc

SEQ ID NO: 386598 - RNA, 26 nt, Human
ugaggcaggaggacugcuugaagcca

SEQ ID NO: 386599 - RNA, 18 nt, Human
ugaggugggagggucacu

SEQ ID NO: 386600 - RNA, 23 nt, Human
ugaucacucaccaaaauccacag

SEQ ID NO: 386601 - RNA, 18 nt, Human
ugccgcugcacuccagcc

SEQ ID NO: 386602 - RNA, 24 nt, Human
ugccugaggcagaagcucggaaac

SEQ ID NO: 386603 - RNA, 24 nt, Human
ugccuguaguccuagcuacucagg

SEQ ID NO: 386604 - RNA, 22 nt, Human
ugggcaacaaagcaagacccca

SEQ ID NO: 386605 - RNA, 21 nt, Human
ugugccuguaguccuagcuac

SEQ ID NO: 386606 - RNA, 21 nt, Human
uuaagcccaggaguucaaggc

SEQ ID NO: 386607 - RNA, 24 nt, Human
uuagcugggcacaguagugugugc

SEQ ID NO: 386608 - RNA, 18 nt, Human
uucaucuacuuaaaacca

SEQ ID NO: 386609 - RNA, 18 nt, Human
uuuuuuuuuuuuuuuuug

SEQ ID NO: 386610 - RNA, 19 nt, Human
uuuuuuuuuuuuuuuuugc

SEQ ID NO: 386611 - RNA, 26 nt, Human
uuuuuuuuuuuuuuuuugcaaguugg

SEQ ID NO: 386612 - RNA, 23 nt, Human
aaaaaaaaaauccaaggaugaga

SEQ ID NO: 386613 - RNA, 21 nt, Human
aaaagggggaagggagaagga

SEQ ID NO: 386614 - RNA, 22 nt, Human
aaagcaaaugaaaugaaaguca

SEQ ID NO: 386615 - RNA, 21 nt, Human
aacccuuuacaaauccugcua

SEQ ID NO: 386616 - RNA, 25 nt, Human
agaaggaaacaaaacccuuuacaaa

SEQ ID NO: 386617 - RNA, 21 nt, Human
agcucaaguaucuccaaauac

SEQ ID NO: 386618 - RNA, 19 nt, Human
aggaggcuuuauucuuuug

SEQ ID NO: 386619 - RNA, 20 nt, Human
aggccaauuaaaggcagcag

SEQ ID NO: 386620 - RNA, 19 nt, Human
agggaaaagggggaaggga

SEQ ID NO: 386621 - RNA, 19 nt, Human
auaaaaucuucucuggaag

SEQ ID NO: 386622 - RNA, 24 nt, Human
auaaugcuuugucccauauucagu

SEQ ID NO: 386623 - RNA, 20 nt, Human
cacugacauuacaaaguaca

SEQ ID NO: 386624 - RNA, 20 nt, Human
cagcagcgucuaucucccca

SEQ ID NO: 386625 - RNA, 21 nt, Human
cagcagcgucuaucuccccau

SEQ ID NO: 386626 - RNA, 19 nt, Human
caugauaugcagagacugc

SEQ ID NO: 386627 - RNA, 24 nt, Human
cauuacaaaguacagggaaaaggg

SEQ ID NO: 386628 - RNA, 19 nt, Human
cccaaaaagaccauaaugc

SEQ ID NO: 386629 - RNA, 23 nt, Human
ccccaugauaugcagagacugcc

SEQ ID NO: 386630 - RNA, 24 nt, Human
cucucagucauuauagauauugcu

SEQ ID NO: 386631 - RNA, 23 nt, Human
cucuguaaagcauuaaaaaaaaa

SEQ ID NO: 386632 - RNA, 20 nt, Human
ggaaaagcaaaugaaaugaa

SEQ ID NO: 386633 - RNA, 18 nt, Human
ggaaguugggguaggagg

SEQ ID NO: 386634 - RNA, 23 nt, Human
ggagcugugaggaccaaggccaa

SEQ ID NO: 386635 - RNA, 27 nt, Human
ggcuuuauucuuuuggcagauccucuc

SEQ ID NO: 386636 - RNA, 18 nt, Human
gggaaaagggggaaggga

SEQ ID NO: 386637 - RNA, 20 nt, Human
guccauucccugaccuuucc

SEQ ID NO: 386638 - RNA, 18 nt, Human
uacaaaguacagggaaaa

SEQ ID NO: 386639 - RNA, 19 nt, Human
uacaaaguacagggaaaag

SEQ ID NO: 386640 - RNA, 23 nt, Human
uacagggaaaagggggaagggag

SEQ ID NO: 386641 - RNA, 18 nt, Human
uauucuggaaaagcaaau

SEQ ID NO: 386642 - RNA, 22 nt, Human
ucagcucaaguaucuccaaaua

SEQ ID NO: 386643 - RNA, 23 nt, Human
ucuccaaauacauugcuguccau

SEQ ID NO: 386644 - RNA, 26 nt, Human
ucucuguaaagcauuaaaaaaaaaaa

SEQ ID NO: 386645 - RNA, 19 nt, Human
ugagauggcugaguucuca

SEQ ID NO: 386646 - RNA, 18 nt, Human
ugccccagugaagcguuc

SEQ ID NO: 386647 - RNA, 22 nt, Human
ugccccagugaagcguucgucu

SEQ ID NO: 386648 - RNA, 19 nt, Human
uguuucuuuuuggagcugu

SEQ ID NO: 386649 - RNA, 19 nt, Human
uuaaaggcagcagcgucua

SEQ ID NO: 386650 - RNA, 24 nt, Human
uuacccaaaaagaccauaaugcuu

SEQ ID NO: 386651 - RNA, 18 nt, Human
uucucagcucaaguaucu

SEQ ID NO: 386652 - RNA, 18 nt, Human
uuuggagcugugaggacc

SEQ ID NO: 386653 - RNA, 19 nt, Human
aaacugucccagcccuccc

SEQ ID NO: 386654 - RNA, 22 nt, Human
aacagacauuucuagaagaaaa

SEQ ID NO: 386655 - RNA, 22 nt, Human
aaggaacauucaaaacagggaa

SEQ ID NO: 386656 - RNA, 18 nt, Human
aaucucaacagacauuuc

SEQ ID NO: 386657 - RNA, 24 nt, Human
agacaaaggaacauucaaaacagu

SEQ ID NO: 386658 - RNA, 19 nt, Human
agcccgccgagaacaacga

SEQ ID NO: 386659 - RNA, 21 nt, Human
aggcggcgcggcggccggagc

SEQ ID NO: 386660 - RNA, 20 nt, Human
augucagagacaaaggaaca

SEQ ID NO: 386661 - RNA, 23 nt, Human
caacagacauuucuagaagaaaa

SEQ ID NO: 386662 - RNA, 20 nt, Human
cagcccgccgagaacaacga

SEQ ID NO: 386663 - RNA, 24 nt, Human
cagcccgccgagaacaacgaauac

SEQ ID NO: 386664 - RNA, 19 nt, Human
ccacaaaaacaagcagccu

SEQ ID NO: 386665 - RNA, 20 nt, Human
ccacaaaaacaagcagccuu

SEQ ID NO: 386666 - RNA, 23 nt, Human
cccaagaagaggccacgaggaaa

SEQ ID NO: 386667 - RNA, 21 nt, Human
ccucccacccaaauaaaaauc

SEQ ID NO: 386668 - RNA, 19 nt, Human
cgagaacaacgaauacgaa

SEQ ID NO: 386669 - RNA, 22 nt, Human
cgagaacaacgaauacgaaagc

SEQ ID NO: 386670 - RNA, 24 nt, Human
cgagaacaacgaauacgaaagcca

SEQ ID NO: 386671 - RNA, 27 nt, Human
cuaacggccgcggcgcggaggccccuu

SEQ ID NO: 386672 - RNA, 27 nt, Human
cucccacccaaauaaaaauccaaaugu

SEQ ID NO: 386673 - RNA, 20 nt, Human
gaaaaacugucccagcccuc

SEQ ID NO: 386674 - RNA, 19 nt, Human
gcggcgcggcggccggagc

SEQ ID NO: 386675 - RNA, 26 nt, Human
ggccgcggcgcggaggccccacagcc

SEQ ID NO: 386676 - RNA, 19 nt, Human
ggcggcgcggcggccggag

SEQ ID NO: 386677 - RNA, 18 nt, Human
guuggaaacuaaaggggg

SEQ ID NO: 386678 - RNA, 20 nt, Human
uagaagaaaaacugucccag

SEQ ID NO: 386679 - RNA, 19 nt, Human
uagcuccaaggguugggga

SEQ ID NO: 386680 - RNA, 18 nt, Human
uauuacaaaacacuuuuc

SEQ ID NO: 386681 - RNA, 21 nt, Human
uggaaacuaaagggggaaauc

SEQ ID NO: 386682 - RNA, 26 nt, Human
uggcaauauuuuacaacgcauuuagc

SEQ ID NO: 386683 - RNA, 23 nt, Human
uuagcuccaaggguuggggagaa

SEQ ID NO: 386684 - RNA, 24 nt, Human
uuagcuccaaggguuggggagaag

SEQ ID NO: 386685 - RNA, 29 nt, Human
uuuuuuuuuuuuuuuuuuuuccacaaaaa

SEQ ID NO: 386686 - RNA, 19 nt, Human
aaaaaagaaaacagacaua

SEQ ID NO: 386687 - RNA, 25 nt, Human
aaaagaaaacagacauaguuacaaa

SEQ ID NO: 386688 - RNA, 23 nt, Human
aacauuacaaaaaagaaaacaga

SEQ ID NO: 386689 - RNA, 25 nt, Human
aacauuuaacauuacaaaaaagaaa

SEQ ID NO: 386690 - RNA, 22 nt, Human
aagaaaacagacauaguuacaa

SEQ ID NO: 386691 - RNA, 25 nt, Human
aagaaaacagacauaguuacaaaga

SEQ ID NO: 386692 - RNA, 24 nt, Human
agaaaacagacauaguuacaaaga

SEQ ID NO: 386693 - RNA, 18 nt, Human
aggcagcgcgcggcccgg

SEQ ID NO: 386694 - RNA, 18 nt, Human
aguaaagcuaaacucagu

SEQ ID NO: 386695 - RNA, 23 nt, Human
auaaaauagaauuucacuuccga

SEQ ID NO: 386696 - RNA, 23 nt, Human
auaacuaucuaccaagcuacuua

SEQ ID NO: 386697 - RNA, 20 nt, Human
cacugagcacagauguuucc

SEQ ID NO: 386698 - RNA, 22 nt, Human
cagacauaguuacaaagagcaa

SEQ ID NO: 386699 - RNA, 26 nt, Human
cauucaauaacuaucuaccaagcuac

SEQ ID NO: 386700 - RNA, 21 nt, Human
cauuccugcaccacugagcac

SEQ ID NO: 386701 - RNA, 20 nt, Human
cccggcucguaacuccuccu

SEQ ID NO: 386702 - RNA, 21 nt, Human
cuaccaagcuacuuacugugu

SEQ ID NO: 386703 - RNA, 19 nt, Human
cucguaacuccuccugcug

SEQ ID NO: 386704 - RNA, 21 nt, Human
cucguaacuccuccugcugca

SEQ ID NO: 386705 - RNA, 20 nt, Human
cugcagcaggcguaucguug

SEQ ID NO: 386706 - RNA, 18 nt, Human
cuuccgagcuuccaaaua

SEQ ID NO: 386707 - RNA, 24 nt, Human
gagcuuccaaauaauccacaguuu

SEQ ID NO: 386708 - RNA, 25 nt, Human
gagcuuccaaauaauccacaguuuc

SEQ ID NO: 386709 - RNA, 20 nt, Human
gcccggcucguaacuccucc

SEQ ID NO: 386710 - RNA, 21 nt, Human
gcccggcucguaacuccuccu

SEQ ID NO: 386711 - RNA, 20 nt, Human
ggaaaaugcauuccugcacc

SEQ ID NO: 386712 - RNA, 22 nt, Human
uaacuaucuaccaagcuacuua

SEQ ID NO: 386713 - RNA, 19 nt, Human
uacaaaaaagaaaacagac

SEQ ID NO: 386714 - RNA, 18 nt, Human
uacaaagagcaaaggcag

SEQ ID NO: 386715 - RNA, 19 nt, Human
uacccgccuaaauuuagag

SEQ ID NO: 386716 - RNA, 19 nt, Human
uacuguguagcuacaacug

SEQ ID NO: 386717 - RNA, 20 nt, Human
uacuguguagcuacaacugu

SEQ ID NO: 386718 - RNA, 22 nt, Human
uacuguguagcuacaacuguga

SEQ ID NO: 386719 - RNA, 20 nt, Human
uccaaauaauccacaguuuc

SEQ ID NO: 386720 - RNA, 25 nt, Human
uccaaauaauccacaguuucuaccg

SEQ ID NO: 386721 - RNA, 23 nt, Human
uccacuucuucaucaucugucac

SEQ ID NO: 386722 - RNA, 19 nt, Human
ucuaccaagcuacuuacug

SEQ ID NO: 386723 - RNA, 24 nt, Human
uuaauucuucacugaaaucacuca

SEQ ID NO: 386724 - RNA, 21 nt, Human
uuccaaauaauccacaguuuc

SEQ ID NO: 386725 - RNA, 18 nt, Human
uuguaguaauauaagcuu

SEQ ID NO: 386726 - RNA, 26 nt, Human
uuuaacauuacaaaaaagaaaacaga

SEQ ID NO: 386727 - RNA, 22 nt, Human
uuuguaguaauauaagcuucuu

SEQ ID NO: 386728 - RNA, 18 nt, Human
aaaaucccagcaacacag

SEQ ID NO: 386729 - RNA, 18 nt, Human
aaaaugagaaggggaggg

SEQ ID NO: 386730 - RNA, 27 nt, Human
aaaccagacagacccgggucccugcaa

SEQ ID NO: 386731 - RNA, 20 nt, Human
aacagagaauucccccaaac

SEQ ID NO: 386732 - RNA, 20 nt, Human
aaccuggauccaaggcaucu

SEQ ID NO: 386733 - RNA, 19 nt, Human
aagcaacccacaacagcag

SEQ ID NO: 386734 - RNA, 21 nt, Human
aaugagaaggggagggaggaa

SEQ ID NO: 386735 - RNA, 21 nt, Human
acaggaaaacagaaucuucca

SEQ ID NO: 386736 - RNA, 21 nt, Human
agaauucccccaaacugacau

SEQ ID NO: 386737 - RNA, 19 nt, Human
agacuaaaaucccagcaac

SEQ ID NO: 386738 - RNA, 18 nt, Human
agaggaaggaugaggggc

SEQ ID NO: 386739 - RNA, 23 nt, Human
agcaacacaggcccaccggcacc

SEQ ID NO: 386740 - RNA, 21 nt, Human
agcaccacacuggccaccucg

SEQ ID NO: 386741 - RNA, 18 nt, Human
agccagcacuccuggccc

SEQ ID NO: 386742 - RNA, 22 nt, Human
aggaaagaaaggggggagucug

SEQ ID NO: 386743 - RNA, 24 nt, Human
aggaugaggggcucucuggggcuu

SEQ ID NO: 386744 - RNA, 23 nt, Human
aggcccaccggcaccuccagccu

SEQ ID NO: 386745 - RNA, 23 nt, Human
aggcgugagaacugagggaccug

SEQ ID NO: 386746 - RNA, 19 nt, Human
caaagcaacccacaacagc

SEQ ID NO: 386747 - RNA, 23 nt, Human
caacacaggcccaccggcaccuc

SEQ ID NO: 386748 - RNA, 19 nt, Human
caacagagaauucccccaa

SEQ ID NO: 386749 - RNA, 22 nt, Human
caaccugaaaaaagaccuuucu

SEQ ID NO: 386750 - RNA, 23 nt, Human
caccaaacacgaggagccagcac

SEQ ID NO: 386751 - RNA, 19 nt, Human
caccacgagggaaaucuca

SEQ ID NO: 386752 - RNA, 22 nt, Human
caccagccaaccugaaaaaaga

SEQ ID NO: 386753 - RNA, 19 nt, Human
cacgcgagucaguguauga

SEQ ID NO: 386754 - RNA, 24 nt, Human
cacuggacaggaaggcgugagaac

SEQ ID NO: 386755 - RNA, 22 nt, Human
cagaaucuuccacugcagcuag

SEQ ID NO: 386756 - RNA, 18 nt, Human
cagcaacacaggcccacc

SEQ ID NO: 386757 - RNA, 24 nt, Human
cagcaacacaggcccaccggcacc

SEQ ID NO: 386758 - RNA, 19 nt, Human
cagcacagacuaaaauccc

SEQ ID NO: 386759 - RNA, 18 nt, Human
cagcggagcccugccucc

SEQ ID NO: 386760 - RNA, 21 nt, Human
cagcugccaaguguauuuagu

SEQ ID NO: 386761 - RNA, 21 nt, Human
caucagaaaccagacagaccc

SEQ ID NO: 386762 - RNA, 18 nt, Human
ccacaacagcagcugcca

SEQ ID NO: 386763 - RNA, 23 nt, Human
ccacagcugaggcgcagcggagc

SEQ ID NO: 386764 - RNA, 24 nt, Human
cccacagcugaggcgcagcggagc

SEQ ID NO: 386765 - RNA, 18 nt, Human
cccacaggaaaacagaau

SEQ ID NO: 386766 - RNA, 18 nt, Human
ccccagcuuuggcacucg

SEQ ID NO: 386767 - RNA, 21 nt, Human
ccucacuccacccucaccaaa

SEQ ID NO: 386768 - RNA, 27 nt, Human
ccucccagcacagacuaaaaucccagg

SEQ ID NO: 386769 - RNA, 22 nt, Human
cgccagaguucgugaccccggc

SEQ ID NO: 386770 - RNA, 23 nt, Human
cgggacgcuguccagccuaaaaa

SEQ ID NO: 386771 - RNA, 20 nt, Human
cucgccggacccuggcacca

SEQ ID NO: 386772 - RNA, 20 nt, Human
cuggacaggaaggcgugaga

SEQ ID NO: 386773 - RNA, 20 nt, Human
cuuccacugcagcuagagaa

SEQ ID NO: 386774 - RNA, 20 nt, Human
gacagcccacaggugccaga

SEQ ID NO: 386775 - RNA, 19 nt, Human
gagcauuuuccccacagga

SEQ ID NO: 386776 - RNA, 19 nt, Human
gaggggcucucuggggcuu

SEQ ID NO: 386777 - RNA, 21 nt, Human
gaggggcucucuggggcuuga

SEQ ID NO: 386778 - RNA, 22 nt, Human
gcaacacaggcccaccggcacc

SEQ ID NO: 386779 - RNA, 19 nt, Human
gcagcuagagaaacuccga

SEQ ID NO: 386780 - RNA, 22 nt, Human
gccucggcgugaugcucgccgg

SEQ ID NO: 386781 - RNA, 23 nt, Human
gcucucuggggcuugagggcagc

SEQ ID NO: 386782 - RNA, 19 nt, Human
ggaaaacagaaucuuccac

SEQ ID NO: 386783 - RNA, 22 nt, Human
ggaaggaugaggggcucucugg

SEQ ID NO: 386784 - RNA, 21 nt, Human
ggggagggaggaaagaaaggg

SEQ ID NO: 386785 - RNA, 21 nt, Human
ggggagggaggaaagaaaggg

SEQ ID NO: 386786 - RNA, 18 nt, Human
guauuuagucccugaacc

SEQ ID NO: 386787 - RNA, 18 nt, Human
guauuuuguugcccuguc

SEQ ID NO: 386788 - RNA, 24 nt, Human
uagacaucaaaaugagaaggggag

SEQ ID NO: 386789 - RNA, 24 nt, Human
uauuuuguugcccugucccuucaa

SEQ ID NO: 386790 - RNA, 18 nt, Human
ucaaaaugagaaggggag

SEQ ID NO: 386791 - RNA, 18 nt, Human
ucagagggcacuaucgac

SEQ ID NO: 386792 - RNA, 18 nt, Human
ucccagcaacacaggccc

SEQ ID NO: 386793 - RNA, 18 nt, Human
ucccagcaacacaggccc

SEQ ID NO: 386794 - RNA, 20 nt, Human
ucccuuaggcaugauaaaca

SEQ ID NO: 386795 - RNA, 22 nt, Human
ucucaaguagaaccccagcuuu

SEQ ID NO: 386796 - RNA, 24 nt, Human
ucucaaguagaaccccagcuuugg

SEQ ID NO: 386797 - RNA, 22 nt, Human
ucucuggggcuugagggcagcc

SEQ ID NO: 386798 - RNA, 18 nt, Human
ugagaaggggagggagga

SEQ ID NO: 386799 - RNA, 26 nt, Human
ugagaaggggagggaggaaagaaagg

SEQ ID NO: 386800 - RNA, 18 nt, Human
ugagucacaugcaauucc

SEQ ID NO: 386801 - RNA, 22 nt, Human
ugauaaacauuuuaacacccac

SEQ ID NO: 386802 - RNA, 24 nt, Human
ugcaugagcucagugucagguagu

SEQ ID NO: 386803 - RNA, 19 nt, Human
ugcccugucccuucaacuu

SEQ ID NO: 386804 - RNA, 19 nt, Human
ugccugaggcccccacagc

SEQ ID NO: 386805 - RNA, 23 nt, Human
ugcuuggcucaucaucacagugg

SEQ ID NO: 386806 - RNA, 24 nt, Human
uggaaacaaggaccaagcaccaca

SEQ ID NO: 386807 - RNA, 27 nt, Human
uugcccugucccuucaacuuggcucca

SEQ ID NO: 386808 - RNA, 21 nt, Human
uuuggcacucgggacggguca

SEQ ID NO: 386809 - RNA, 22 nt, Human
aaaaaguccccaggcguccucc

SEQ ID NO: 386810 - RNA, 24 nt, Human
aaacaggaauauaaaacuguucca

SEQ ID NO: 386811 - RNA, 23 nt, Human
aacaauagcaauuaaaaacuuca

SEQ ID NO: 386812 - RNA, 18 nt, Human
aacaggaauauaaaacug

SEQ ID NO: 386813 - RNA, 21 nt, Human
aaguuagguagaacuaaacca

SEQ ID NO: 386814 - RNA, 26 nt, Human
aauagguacaaagaaggggcuuugcu

SEQ ID NO: 386815 - RNA, 18 nt, Human
aaugcacaaauaaugcag

SEQ ID NO: 386816 - RNA, 22 nt, Human
acaaaaaggcguaaucugcaaa

SEQ ID NO: 386817 - RNA, 24 nt, Human
acaaagaaggggcuuugcucugga

SEQ ID NO: 386818 - RNA, 24 nt, Human
agaacuaaaccaaaaugcacaaau

SEQ ID NO: 386819 - RNA, 23 nt, Human
aggaagauaaauagucuaaaaaa

SEQ ID NO: 386820 - RNA, 18 nt, Human
agggaggggaggggaggg

SEQ ID NO: 386821 - RNA, 19 nt, Human
agggaggggaggggagggc

SEQ ID NO: 386822 - RNA, 22 nt, Human
agggaggggaggggagggcagg

SEQ ID NO: 386823 - RNA, 23 nt, Human
agggaggggaggggagggcaggg

SEQ ID NO: 386824 - RNA, 19 nt, Human
aggggaagggaggggaggg

SEQ ID NO: 386825 - RNA, 19 nt, Human
aggggaggggagggcaggg

SEQ ID NO: 386826 - RNA, 23 nt, Human
aguaacugugcaaaauuuacaug

SEQ ID NO: 386827 - RNA, 23 nt, Human
auaaaauaaacgaaaugagguca

SEQ ID NO: 386828 - RNA, 20 nt, Human
auucucagcggaguggaggg

SEQ ID NO: 386829 - RNA, 23 nt, Human
auuuccuaaaagacaaaauaaaa

SEQ ID NO: 386830 - RNA, 22 nt, Human
caacugacuauuacaaaaauaa

SEQ ID NO: 386831 - RNA, 21 nt, Human
cacaaauaaugcagaaacugc

SEQ ID NO: 386832 - RNA, 23 nt, Human
cacacauucagaaggagccaccu

SEQ ID NO: 386833 - RNA, 18 nt, Human
caccuacauaguaaguua

SEQ ID NO: 386834 - RNA, 20 nt, Human
cagaaggagccaccuuugcu

SEQ ID NO: 386835 - RNA, 22 nt, Human
ccaaaaugcacaaauaaugcag

SEQ ID NO: 386836 - RNA, 24 nt, Human
ccaacugacuauuacaaaaauaaa

SEQ ID NO: 386837 - RNA, 25 nt, Human
ccuccaggauucucagcggagugga

SEQ ID NO: 386838 - RNA, 22 nt, Human
cuaaaaaacacagugcaaguaa

SEQ ID NO: 386839 - RNA, 21 nt, Human
gaagggaggggaggggagggc

SEQ ID NO: 386840 - RNA, 19 nt, Human
gaggggaagggaaggaaga

SEQ ID NO: 386841 - RNA, 21 nt, Human
ggaagggaggggaggggaggg

SEQ ID NO: 386842 - RNA, 21 nt, Human
ggaguggaggggaagggaggg

SEQ ID NO: 386843 - RNA, 20 nt, Human
ggcagagaggagagcggggu

SEQ ID NO: 386844 - RNA, 20 nt, Human
ggcccaaggcuugcauacag

SEQ ID NO: 386845 - RNA, 19 nt, Human
gggcagagaggagagcggg

SEQ ID NO: 386846 - RNA, 26 nt, Human
gggcagagaggagagcggggugggag

SEQ ID NO: 386847 - RNA, 18 nt, Human
gggcagggggcagagagg

SEQ ID NO: 386848 - RNA, 23 nt, Human
ggggaagggaggggaggggaggg

SEQ ID NO: 386849 - RNA, 18 nt, Human
ggggaggggagggcaggg

SEQ ID NO: 386850 - RNA, 19 nt, Human
ggggaggggagggcagggg

SEQ ID NO: 386851 - RNA, 21 nt, Human
ggggaggggagggcagggggc

SEQ ID NO: 386852 - RNA, 23 nt, Human
ggggaggggagggcagggggcag

SEQ ID NO: 386853 - RNA, 22 nt, Human
uaaccucugaaaauagaaagaa

SEQ ID NO: 386854 - RNA, 22 nt, Human
uaaguuagguagaacuaaacca

SEQ ID NO: 386855 - RNA, 24 nt, Human
uacugaucagcguucaguucacac

SEQ ID NO: 386856 - RNA, 19 nt, Human
uagaaagaaccaauuagua

SEQ ID NO: 386857 - RNA, 22 nt, Human
uagguagaacuaaaccaaaaug

SEQ ID NO: 386858 - RNA, 22 nt, Human
uauguacaauuacugacaaaau

SEQ ID NO: 386859 - RNA, 22 nt, Human
ugaaaaaauggaaagacaggga

SEQ ID NO: 386860 - RNA, 18 nt, Human
uggaaagacagggauuuc

SEQ ID NO: 386861 - RNA, 23 nt, Human
uggacgucuguaaagucggccca

SEQ ID NO: 386862 - RNA, 22 nt, Human
uggaggggaagggaggggaggg

SEQ ID NO: 386863 - RNA, 18 nt, Human
uguaaagagguggcuguu

SEQ ID NO: 386864 - RNA, 21 nt, Human
uguacagaugcugaccacaca

SEQ ID NO: 386865 - RNA, 21 nt, Human
uguagacauacaccuacauag

SEQ ID NO: 386866 - RNA, 20 nt, Human
uucaacacuugauucacacc

SEQ ID NO: 386867 - RNA, 22 nt, Human
uuuuuuuuuuuuuuuuuuacag

SEQ ID NO: 386868 - RNA, 25 nt, Human
aaaaaauaacauuuuccuuuugaaa

SEQ ID NO: 386869 - RNA, 25 nt, Human
aaaacaauacaaaacaaaaaauaac

SEQ ID NO: 386870 - RNA, 20 nt, Human
aacaugcuuaaaaauuagga

SEQ ID NO: 386871 - RNA, 26 nt, Human
aagcaacgcccuaacguuccuucuaa

SEQ ID NO: 386872 - RNA, 18 nt, Human
acaaaaaauaaagguaag

SEQ ID NO: 386873 - RNA, 21 nt, Human
acacuggaacucagccgacca

SEQ ID NO: 386874 - RNA, 23 nt, Human
agacaaagaugaaucugagucug

SEQ ID NO: 386875 - RNA, 18 nt, Human
agagcucauauccccaag

SEQ ID NO: 386876 - RNA, 22 nt, Human
agccgaccaaagucaccacagu

SEQ ID NO: 386877 - RNA, 20 nt, Human
aggagcaggcagccuagggc

SEQ ID NO: 386878 - RNA, 24 nt, Human
auaaaaacuauccuugggauuuaa

SEQ ID NO: 386879 - RNA, 24 nt, Human
aucuauccccauuugucuuguuuu

SEQ ID NO: 386880 - RNA, 19 nt, Human
augaagaauaacauacgug

SEQ ID NO: 386881 - RNA, 24 nt, Human
augaagcagagaauuagcaacccc

SEQ ID NO: 386882 - RNA, 21 nt, Human
auuccaccucuuccccucuug

SEQ ID NO: 386883 - RNA, 26 nt, Human
caaaacaaaaaauaacauuuuccuuu

SEQ ID NO: 386884 - RNA, 19 nt, Human
caacggaccacuguuacuu

SEQ ID NO: 386885 - RNA, 19 nt, Human
caacuucugauuccagccc

SEQ ID NO: 386886 - RNA, 24 nt, Human
cagagaauuagcaaccccaggcac

SEQ ID NO: 386887 - RNA, 26 nt, Human
caggacagugcaacaaugcuuugugu

SEQ ID NO: 386888 - RNA, 24 nt, Human
cauaacugauuuucagaagacaaa

SEQ ID NO: 386889 - RNA, 19 nt, Human
ccagcccagaaaaccuacc

SEQ ID NO: 386890 - RNA, 21 nt, Human
cccaggcacaaucuaucccca

SEQ ID NO: 386891 - RNA, 19 nt, Human
ccgaccaaagucaccacag

SEQ ID NO: 386892 - RNA, 19 nt, Human
ccgauuccaccucuucccc

SEQ ID NO: 386893 - RNA, 22 nt, Human
ccuuuuaaguacagaauccaac

SEQ ID NO: 386894 - RNA, 20 nt, Human
cucagccgaccaaagucacc

SEQ ID NO: 386895 - RNA, 22 nt, Human
cucagccgaccaaagucaccac

SEQ ID NO: 386896 - RNA, 19 nt, Human
cugagucuguaagaguccc

SEQ ID NO: 386897 - RNA, 19 nt, Human
cuggauugucgugguguug

SEQ ID NO: 386898 - RNA, 21 nt, Human
gaaauacucuaauuugaaaac

SEQ ID NO: 386899 - RNA, 22 nt, Human
gagaauuagcaaccccaggcac

SEQ ID NO: 386900 - RNA, 21 nt, Human
gagguguuuuuuuuuuuuucc

SEQ ID NO: 386901 - RNA, 23 nt, Human
gcaguaaauagcaaggaucugga

SEQ ID NO: 386902 - RNA, 18 nt, Human
ggaagaacaggaugaaga

SEQ ID NO: 386903 - RNA, 20 nt, Human
ggugacugucauaguuagcu

SEQ ID NO: 386904 - RNA, 24 nt, Human
guccccucacuugguaccagaaac

SEQ ID NO: 386905 - RNA, 19 nt, Human
gucgugguguugggggcuu

SEQ ID NO: 386906 - RNA, 22 nt, Human
uaacuugcugaaacaaaaaaaa

SEQ ID NO: 386907 - RNA, 24 nt, Human
uaagcaacuucugauuccagccca

SEQ ID NO: 386908 - RNA, 20 nt, Human
uaccacuuugggacagguuc

SEQ ID NO: 386909 - RNA, 18 nt, Human
uagaauauggccauaaca

SEQ ID NO: 386910 - RNA, 20 nt, Human
uaguaacaaauagggccuua

SEQ ID NO: 386911 - RNA, 20 nt, Human
uaucugaggagcaggcagcc

SEQ ID NO: 386912 - RNA, 18 nt, Human
uccagcccagaaaaccua

SEQ ID NO: 386913 - RNA, 25 nt, Human
uccgauuccaccucuuccccucuug

SEQ ID NO: 386914 - RNA, 24 nt, Human
ucugaggagcaggcagccuagggc

SEQ ID NO: 386915 - RNA, 22 nt, Human
ugaaauuucaggacagugcaac

SEQ ID NO: 386916 - RNA, 21 nt, Human
ugaagcagagaauuagcaacc

SEQ ID NO: 386917 - RNA, 22 nt, Human
ugaagcagagaauuagcaaccc

SEQ ID NO: 386918 - RNA, 24 nt, Human
ugacaguaccuuuuaaguacagaa

SEQ ID NO: 386919 - RNA, 22 nt, Human
ugagauggauagguaagaguua

SEQ ID NO: 386920 - RNA, 18 nt, Human
ugcaugcuguauuaggga

SEQ ID NO: 386921 - RNA, 22 nt, Human
uggccugucacguacagagggu

SEQ ID NO: 386922 - RNA, 26 nt, Human
uguagaauauggccauaacaguccca

SEQ ID NO: 386923 - RNA, 23 nt, Human
ugugccaacaugcuuaaaaauua

SEQ ID NO: 386924 - RNA, 20 nt, Human
uguuacuuuuaaucaaaacg

SEQ ID NO: 386925 - RNA, 23 nt, Human
uuaaaauuuacuauacuguagaa

SEQ ID NO: 386926 - RNA, 19 nt, Human
uuaaauauacaaaaacaac

SEQ ID NO: 386927 - RNA, 20 nt, Human
uuaugccucuuccuuucucc

SEQ ID NO: 386928 - RNA, 25 nt, Human
uucuuuuuuuuuuuuuuaaagaggg

SEQ ID NO: 386929 - RNA, 23 nt, Human
uugcugaaacaaaaaaaaaugug

SEQ ID NO: 386930 - RNA, 24 nt, Human
uugcugaaacaaaaaaaaaugugg

SEQ ID NO: 386931 - RNA, 21 nt, Human
uuuuuuuuuuuuaaagagggu

SEQ ID NO: 386932 - RNA, 21 nt, Human
uuuuuuuuuuuuuuaaagagg

SEQ ID NO: 386933 - RNA, 19 nt, Human
aaaaacauucucuguagcu

SEQ ID NO: 386934 - RNA, 19 nt, Human
aaaauagcauuugaacaga

SEQ ID NO: 386935 - RNA, 23 nt, Human
aagcaccauaaauguccccucca

SEQ ID NO: 386936 - RNA, 22 nt, Human
aagcaggaugaauuauugaaau

SEQ ID NO: 386937 - RNA, 24 nt, Human
aaguagaacauggaagcuaaauuu

SEQ ID NO: 386938 - RNA, 20 nt, Human
agacaaaaacauucucugua

SEQ ID NO: 386939 - RNA, 21 nt, Human
agauuuuuccaagcagcauac

SEQ ID NO: 386940 - RNA, 19 nt, Human
auguagcuguuuuagcuga

SEQ ID NO: 386941 - RNA, 25 nt, Human
auuccauuaaucaugggccaagaaa

SEQ ID NO: 386942 - RNA, 20 nt, Human
auuugcuuuuagucucccuu

SEQ ID NO: 386943 - RNA, 21 nt, Human
caaagcaccauaaaugucccc

SEQ ID NO: 386944 - RNA, 21 nt, Human
cagaaaaugcauaguuuccac

SEQ ID NO: 386945 - RNA, 19 nt, Human
caguagcuuccaaaagguc

SEQ ID NO: 386946 - RNA, 18 nt, Human
caugggccaagaaaaaaa

SEQ ID NO: 386947 - RNA, 21 nt, Human
ccaaagcaccauaaauguccc

SEQ ID NO: 386948 - RNA, 22 nt, Human
ccacacaauccaaagcaccaua

SEQ ID NO: 386949 - RNA, 20 nt, Human
gaucauuuaacauaguuuuu

SEQ ID NO: 386950 - RNA, 22 nt, Human
gaucauuuaacauaguuuuuga

SEQ ID NO: 386951 - RNA, 23 nt, Human
uaaaauagcauuugaacagaaaa

SEQ ID NO: 386952 - RNA, 27 nt, Human
uaagaaaggaacccuaccuaguuacau

SEQ ID NO: 386953 - RNA, 21 nt, Human
uagaacauggaagcuaaauuu

SEQ ID NO: 386954 - RNA, 19 nt, Human
ucaaaacucaacagguaua

SEQ ID NO: 386955 - RNA, 22 nt, Human
uccaaagcaccauaaauguccc

SEQ ID NO: 386956 - RNA, 20 nt, Human
uccacacaauccaaagcacc

SEQ ID NO: 386957 - RNA, 22 nt, Human
uccaugaucauaauaccucuua

SEQ ID NO: 386958 - RNA, 18 nt, Human
uccuguucagauuuuucc

SEQ ID NO: 386959 - RNA, 26 nt, Human
ugaagcaggaugaauuauugaaauca

SEQ ID NO: 386960 - RNA, 18 nt, Human
uggaacuguccuguucag

SEQ ID NO: 386961 - RNA, 23 nt, Human
ugggugcacucaaaacucaacag

SEQ ID NO: 386962 - RNA, 21 nt, Human
uuccacacaauccaaagcacc

SEQ ID NO: 386963 - RNA, 20 nt, Human
uuucuaaauguaauaaauua

SEQ ID NO: 386964 - RNA, 20 nt, Human
aacacgcuacagucacagga

SEQ ID NO: 386965 - RNA, 19 nt, Human
aagaaagugacaugaagga

SEQ ID NO: 386966 - RNA, 21 nt, Human
aagcgagaucccagcagagaa

SEQ ID NO: 386967 - RNA, 20 nt, Human
aaggaugaagcccccggugg

SEQ ID NO: 386968 - RNA, 23 nt, Human
acaauaucuaaaaagaaagugac

SEQ ID NO: 386969 - RNA, 23 nt, Human
acacacacgggguccccacgagc

SEQ ID NO: 386970 - RNA, 20 nt, Human
acacgggguccccacgagca

SEQ ID NO: 386971 - RNA, 24 nt, Human
accaaccguccucuuuccaguccc

SEQ ID NO: 386972 - RNA, 27 nt, Human
accccaucuccugcaacaucucuccaa

SEQ ID NO: 386973 - RNA, 19 nt, Human
acgcuacagucacaggauc

SEQ ID NO: 386974 - RNA, 23 nt, Human
acgcuacagucacaggaucuccu

SEQ ID NO: 386975 - RNA, 27 nt, Human
agcacagacacacaaccaaccguccuc

SEQ ID NO: 386976 - RNA, 22 nt, Human
aggaaaacucuagcggcagccg

SEQ ID NO: 386977 - RNA, 21 nt, Human
aggcacacacacggggucccc

SEQ ID NO: 386978 - RNA, 23 nt, Human
agggaccuucaaagggucuccuc

SEQ ID NO: 386979 - RNA, 22 nt, Human
aggucgaagauccccgggcagc

SEQ ID NO: 386980 - RNA, 19 nt, Human
augaaggaagcaaucuaca

SEQ ID NO: 386981 - RNA, 19 nt, Human
caaugcaggcacacacacg

SEQ ID NO: 386982 - RNA, 21 nt, Human
cacacaaccaaccguccucuu

SEQ ID NO: 386983 - RNA, 23 nt, Human
caccccaucuccugcaacaucuc

SEQ ID NO: 386984 - RNA, 22 nt, Human
cagcagagaagcaggucgaaga

SEQ ID NO: 386985 - RNA, 19 nt, Human
caggaaaacucuagcggca

SEQ ID NO: 386986 - RNA, 24 nt, Human
ccaaccguccucuuuccagucccc

SEQ ID NO: 386987 - RNA, 31 nt, Human
ccaaugcaggcacacacacgggguccccacc

SEQ ID NO: 386988 - RNA, 22 nt, Human
ccacccgagcgcggggagcagg

SEQ ID NO: 386989 - RNA, 21 nt, Human
cccccgguggagagacggaga

SEQ ID NO: 386990 - RNA, 19 nt, Human
ccccgccacccgagcgcgg

SEQ ID NO: 386991 - RNA, 21 nt, Human
ccuggaaggaugaagcccccg

SEQ ID NO: 386992 - RNA, 25 nt, Human
cgcuuagcgagcaugcaugugugua

SEQ ID NO: 386993 - RNA, 23 nt, Human
cugcaugugugggaauccggggg

SEQ ID NO: 386994 - RNA, 21 nt, Human
cuggagucccucuucuccucc

SEQ ID NO: 386995 - RNA, 21 nt, Human
gaauccgggggcuggcaggug

SEQ ID NO: 386996 - RNA, 26 nt, Human
gcacagacacacaaccaaccguccuc

SEQ ID NO: 386997 - RNA, 19 nt, Human
gcacguguguacaugucug

SEQ ID NO: 386998 - RNA, 19 nt, Human
uaaaacacgcuacagucac

SEQ ID NO: 386999 - RNA, 22 nt, Human
uaaaacacgcuacagucacagg

SEQ ID NO: 387000 - RNA, 18 nt, Human
uccccgggcagcgcgaaa

SEQ ID NO: 387001 - RNA, 23 nt, Human
ucccuggaaggaugaagcccccg

SEQ ID NO: 387002 - RNA, 20 nt, Human
uccucuuuccaguccccaca

SEQ ID NO: 387003 - RNA, 20 nt, Human
ucuccucagaucaguggagg

SEQ ID NO: 387004 - RNA, 21 nt, Human
ucuccucagaucaguggaggc

SEQ ID NO: 387005 - RNA, 19 nt, Human
uguguacaugucugcaugu

SEQ ID NO: 387006 - RNA, 22 nt, Human
uguguacaugucugcaugugug

SEQ ID NO: 387007 - RNA, 20 nt, Human
uguguacgugcacgugugua

SEQ ID NO: 387008 - RNA, 24 nt, Human
uguguacgugcacguguguacaug

SEQ ID NO: 387009 - RNA, 21 nt, Human
aaauggcggcucccccggaac

SEQ ID NO: 387010 - RNA, 19 nt, Human
aacucacaaacucucccgg

SEQ ID NO: 387011 - RNA, 18 nt, Human
aagcuccaagucuuuucu

SEQ ID NO: 387012 - RNA, 19 nt, Human
agaaguucucuguagauca

SEQ ID NO: 387013 - RNA, 23 nt, Human
caaacaaaugaaagaacuuaaca

SEQ ID NO: 387014 - RNA, 18 nt, Human
caaagcagcaacagcagc

SEQ ID NO: 387015 - RNA, 21 nt, Human
caagaauuuucuaaugcugac

SEQ ID NO: 387016 - RNA, 22 nt, Human
cacaaacucucccggaacaaag

SEQ ID NO: 387017 - RNA, 18 nt, Human
cacaaagcagcaacagca

SEQ ID NO: 387018 - RNA, 22 nt, Human
cacacagcauuaaaaggacuag

SEQ ID NO: 387019 - RNA, 21 nt, Human
caccucgccggcccuccgucc

SEQ ID NO: 387020 - RNA, 25 nt, Human
cacuaaaaaguuccagcuacugcaa

SEQ ID NO: 387021 - RNA, 21 nt, Human
cagaugcaaugccaaguccca

SEQ ID NO: 387022 - RNA, 23 nt, Human
cagcaacagcagcuucuagaaaa

SEQ ID NO: 387023 - RNA, 21 nt, Human
cagcagcuucuagaaaaugga

SEQ ID NO: 387024 - RNA, 27 nt, Human
cagcgagcucucuucgccucggguacu

SEQ ID NO: 387025 - RNA, 23 nt, Human
ccagaccccgcaccucgccggcc

SEQ ID NO: 387026 - RNA, 21 nt, Human
ccaguacaauaaagccaagaa

SEQ ID NO: 387027 - RNA, 24 nt, Human
ccaguacaauaaagccaagaauuu

SEQ ID NO: 387028 - RNA, 24 nt, Human
cccccggaacgguuuucggcccag

SEQ ID NO: 387029 - RNA, 23 nt, Human
cgaauaccagucguuaacacaaa

SEQ ID NO: 387030 - RNA, 20 nt, Human
cggcccagaaagcccagcag

SEQ ID NO: 387031 - RNA, 23 nt, Human
cgggagagagccgagcgucuccu

SEQ ID NO: 387032 - RNA, 18 nt, Human
cgggccggagcgaaggga

SEQ ID NO: 387033 - RNA, 20 nt, Human
cuagacuagguucuucuuau

SEQ ID NO: 387034 - RNA, 18 nt, Human
cuagcaaaacaauauaaa

SEQ ID NO: 387035 - RNA, 20 nt, Human
cucccggaacaaagacacuc

SEQ ID NO: 387036 - RNA, 25 nt, Human
cucuacauauagaaagcugcuuuga

SEQ ID NO: 387037 - RNA, 24 nt, Human
gaaccauacauuccgcuaauccug

SEQ ID NO: 387038 - RNA, 21 nt, Human
ggaacaaagacacucaaaaaa

SEQ ID NO: 387039 - RNA, 21 nt, Human
ggcccuccguccgggucgccu

SEQ ID NO: 387040 - RNA, 21 nt, Human
gggaacaggaaagcaaauggc

SEQ ID NO: 387041 - RNA, 18 nt, Human
gggccggagcgaagggaa

SEQ ID NO: 387042 - RNA, 21 nt, Human
uaaaacaccaguuugcuauga

SEQ ID NO: 387043 - RNA, 18 nt, Human
uaacagaacacacagcau

SEQ ID NO: 387044 - RNA, 26 nt, Human
uaacagaacacacagcauuaaaagga

SEQ ID NO: 387045 - RNA, 25 nt, Human
uagcaaaacaauauaaauuugcuga

SEQ ID NO: 387046 - RNA, 28 nt, Human
uagcaaaacaauauaaauuugcugaaaa

SEQ ID NO: 387047 - RNA, 23 nt, Human
uauugcauaggaaaacauaugca

SEQ ID NO: 387048 - RNA, 20 nt, Human
ucagcgagcucucuucgccu

SEQ ID NO: 387049 - RNA, 22 nt, Human
ucgcaucaccagaccccgcacc

SEQ ID NO: 387050 - RNA, 25 nt, Human
ucgccuacccagcaaaaacggaagu

SEQ ID NO: 387051 - RNA, 19 nt, Human
ucucacgucaucacaaagc

SEQ ID NO: 387052 - RNA, 25 nt, Human
ucucccggaacaaagacacucaaaa

SEQ ID NO: 387053 - RNA, 23 nt, Human
ugaaaaacaaaauuacaaacaaa

SEQ ID NO: 387054 - RNA, 22 nt, Human
ugcuucuuauaggaugaacacc

SEQ ID NO: 387055 - RNA, 21 nt, Human
uguauuggaaacaacuuaaua

SEQ ID NO: 387056 - RNA, 23 nt, Human
uuccuuaauucuuccugccgcuu

SEQ ID NO: 387057 - RNA, 20 nt, Human
uugcugaaaaacaaaauuac

SEQ ID NO: 387058 - RNA, 18 nt, Human
uuuaaagugaaaaacaga

SEQ ID NO: 387059 - RNA, 24 nt, Human
uuuuuuuuuaaagugaaaaacaga

SEQ ID NO: 387060 - RNA, 25 nt, Human
aaaaaccaaaagaaaagcuaaaaca

SEQ ID NO: 387061 - RNA, 18 nt, Human
aaaagaaaagcuaaaaca

SEQ ID NO: 387062 - RNA, 18 nt, Human
aaacaacagaacauaagc

SEQ ID NO: 387063 - RNA, 18 nt, Human
aaacagcuguacggccuc

SEQ ID NO: 387064 - RNA, 23 nt, Human
aacagagacagaacacaaucuag

SEQ ID NO: 387065 - RNA, 21 nt, Human
aacauaacaagaccccauuuc

SEQ ID NO: 387066 - RNA, 19 nt, Human
aagcaaaaagaaaaccauc

SEQ ID NO: 387067 - RNA, 22 nt, Human
aagcaaaaagaaaaccaucacu

SEQ ID NO: 387068 - RNA, 23 nt, Human
aagcaaaaagaaaaccaucacua

SEQ ID NO: 387069 - RNA, 23 nt, Human
aauaauauaccuagaaaaaaacc

SEQ ID NO: 387070 - RNA, 19 nt, Human
aauucccaaauugacaaag

SEQ ID NO: 387071 - RNA, 22 nt, Human
acagaacacaaucuaguauuaa

SEQ ID NO: 387072 - RNA, 21 nt, Human
acagaacauaagcagcagcaa

SEQ ID NO: 387073 - RNA, 18 nt, Human
accucguuuuuuccccua

SEQ ID NO: 387074 - RNA, 24 nt, Human
acuaauaauauaccuagaaaaaaa

SEQ ID NO: 387075 - RNA, 18 nt, Human
agaaaaaaacccaaacaa

SEQ ID NO: 387076 - RNA, 26 nt, Human
agaaaagcuaaaacauaugcaaacca

SEQ ID NO: 387077 - RNA, 20 nt, Human
agacaauaccuuauuugacu

SEQ ID NO: 387078 - RNA, 24 nt, Human
agccugggcaacauaacaagaccc

SEQ ID NO: 387079 - RNA, 19 nt, Human
agcuguacggccucuaggc

SEQ ID NO: 387080 - RNA, 18 nt, Human
aggaaaaggcucaaaaua

SEQ ID NO: 387081 - RNA, 22 nt, Human
aggaggaaaaggcucaaaauaa

SEQ ID NO: 387082 - RNA, 19 nt, Human
aggcugaggcggaaggauc

SEQ ID NO: 387083 - RNA, 19 nt, Human
auaaaacacuaauaauaua

SEQ ID NO: 387084 - RNA, 23 nt, Human
auaaggcaacugaagggacaaaa

SEQ ID NO: 387085 - RNA, 21 nt, Human
auaauauaccuagaaaaaaac

SEQ ID NO: 387086 - RNA, 22 nt, Human
auagcacagaagcaauauaauc

SEQ ID NO: 387087 - RNA, 21 nt, Human
caaauugacaaagagaaaguc

SEQ ID NO: 387088 - RNA, 21 nt, Human
caacagaacauaagcagcagc

SEQ ID NO: 387089 - RNA, 22 nt, Human
caaccagcuccauccuaaaaac

SEQ ID NO: 387090 - RNA, 24 nt, Human
caacuguagucccagcuacucagg

SEQ ID NO: 387091 - RNA, 19 nt, Human
cacaguuucauccaaucug

SEQ ID NO: 387092 - RNA, 24 nt, Human
cagcuacucaggaggcugaggcgg

SEQ ID NO: 387093 - RNA, 23 nt, Human
cauaacaagaccccauuucuaaa

SEQ ID NO: 387094 - RNA, 21 nt, Human
cauccuaaaaacaacagaacc

SEQ ID NO: 387095 - RNA, 18 nt, Human
caucuuguucuuccuaac

SEQ ID NO: 387096 - RNA, 21 nt, Human
ccaaaagaaaagcuaaaacau

SEQ ID NO: 387097 - RNA, 22 nt, Human
ccaucacuaaaaacuccucuug

SEQ ID NO: 387098 - RNA, 19 nt, Human
ccuagaaaaaaacccaaac

SEQ ID NO: 387099 - RNA, 24 nt, Human
ccugggcaacauaacaagacccca

SEQ ID NO: 387100 - RNA, 22 nt, Human
cggccucuaggcuagacugccu

SEQ ID NO: 387101 - RNA, 21 nt, Human
cguuaccuuagcuccucucca

SEQ ID NO: 387102 - RNA, 25 nt, Human
cuaaaaacuccucuugcucccucuc

SEQ ID NO: 387103 - RNA, 23 nt, Human
cuccucuugcucccucuccugac

SEQ ID NO: 387104 - RNA, 19 nt, Human
cugaauaaucugcugguac

SEQ ID NO: 387105 - RNA, 21 nt, Human
cuguagucccagcuacucagg

SEQ ID NO: 387106 - RNA, 23 nt, Human
gaacacaaucuaguauuaacugc

SEQ ID NO: 387107 - RNA, 23 nt, Human
gcaucuuguucuuccuaaccuua

SEQ ID NO: 387108 - RNA, 22 nt, Human
ggagucugaauucagccugggc

SEQ ID NO: 387109 - RNA, 21 nt, Human
guacggccucuaggcuagacu

SEQ ID NO: 387110 - RNA, 22 nt, Human
uaaaaaccaaaagaaaagcuaa

SEQ ID NO: 387111 - RNA, 24 nt, Human
uaaaaggaacaauuuauuuauugc

SEQ ID NO: 387112 - RNA, 20 nt, Human
uaacaaccagcuccauccua

SEQ ID NO: 387113 - RNA, 23 nt, Human
uaagcccaggagucugaauucag

SEQ ID NO: 387114 - RNA, 18 nt, Human
uaaguagcaaagaaggua

SEQ ID NO: 387115 - RNA, 20 nt, Human
uaauaauaauaauucccaaa

SEQ ID NO: 387116 - RNA, 23 nt, Human
uaccauagcacagaagcaauaua

SEQ ID NO: 387117 - RNA, 21 nt, Human
uauaacugauucaacauaagg

SEQ ID NO: 387118 - RNA, 25 nt, Human
uaugcaaaccaaacagcuguacggc

SEQ ID NO: 387119 - RNA, 23 nt, Human
ucaaaauaaggauaacaguucau

SEQ ID NO: 387120 - RNA, 20 nt, Human
ucauccaaucugcagucugg

SEQ ID NO: 387121 - RNA, 21 nt, Human
uccaaagucaauccaaauuac

SEQ ID NO: 387122 - RNA, 25 nt, Human
uccauccuaaaaacaacagaacaua

SEQ ID NO: 387123 - RNA, 18 nt, Human
ucuccugaccacuucugg

SEQ ID NO: 387124 - RNA, 18 nt, Human
ugaacagagacagaacac

SEQ ID NO: 387125 - RNA, 18 nt, Human
ugacaaagagaaagucuc

SEQ ID NO: 387126 - RNA, 24 nt, Human
ugaccucguuuuuuccccuauguu

SEQ ID NO: 387127 - RNA, 19 nt, Human
ugaugaggguuaggaggaa

SEQ ID NO: 387128 - RNA, 20 nt, Human
ugccuuuagaagcauggcug

SEQ ID NO: 387129 - RNA, 21 nt, Human
ugggcaacauaacaagacccc

SEQ ID NO: 387130 - RNA, 22 nt, Human
ugggcaacauaacaagacccca

SEQ ID NO: 387131 - RNA, 18 nt, Human
uggugcacaacuguaguc

SEQ ID NO: 387132 - RNA, 21 nt, Human
uggugcacaacuguaguccca

SEQ ID NO: 387133 - RNA, 24 nt, Human
ugguggugcacaacuguaguccca

SEQ ID NO: 387134 - RNA, 20 nt, Human
uguagauuuuccaaagucaa

SEQ ID NO: 387135 - RNA, 19 nt, Human
uuaaagaacauagaccaua

SEQ ID NO: 387136 - RNA, 21 nt, Human
uuaauaauaauaauucccaaa

SEQ ID NO: 387137 - RNA, 21 nt, Human
uuauacuggccuuuucuacau

SEQ ID NO: 387138 - RNA, 19 nt, Human
uuuuuuuuuuuuaaaagga

SEQ ID NO: 387139 - RNA, 21 nt, Human
uuuuuuuuuuuuuuaaaagga

SEQ ID NO: 387140 - RNA, 24 nt, Human
uuuuuuuuuuuuuuuuuuaaaagg

SEQ ID NO: 387141 - RNA, 25 nt, Human
aaacauccagcaugcauguuuaaua

SEQ ID NO: 387142 - RNA, 19 nt, Human
aacuuuauuuuucuuacac

SEQ ID NO: 387143 - RNA, 18 nt, Human
aagcaacaugguccccgc

SEQ ID NO: 387144 - RNA, 24 nt, Human
acacuuuuaaggcugaugaaaaac

SEQ ID NO: 387145 - RNA, 19 nt, Human
acgcaaguucuuugccuag

SEQ ID NO: 387146 - RNA, 27 nt, Human
agaaaaagaaacacaggcauaaaggac

SEQ ID NO: 387147 - RNA, 19 nt, Human
agaaacacaggcauaaacc

SEQ ID NO: 387148 - RNA, 18 nt, Human
caaguucuuugccuagug

SEQ ID NO: 387149 - RNA, 19 nt, Human
cauggagaaaaagaaacac

SEQ ID NO: 387150 - RNA, 20 nt, Human
cauguuacauucagcaaggc

SEQ ID NO: 387151 - RNA, 25 nt, Human
cauguuuagcuuucucauggagaaa

SEQ ID NO: 387152 - RNA, 23 nt, Human
cuagugugguuuuuccaaccccu

SEQ ID NO: 387153 - RNA, 23 nt, Human
gagaaaaagaaacacaggcauaa

SEQ ID NO: 387154 - RNA, 24 nt, Human
gccuagugugguuuuuccaacccc

SEQ ID NO: 387155 - RNA, 22 nt, Human
ggaagcaacaugguccccgccg

SEQ ID NO: 387156 - RNA, 22 nt, Human
uaaaguguuacugacacuugaa

SEQ ID NO: 387157 - RNA, 18 nt, Human
uaaguagcuagccuuaua

SEQ ID NO: 387158 - RNA, 19 nt, Human
uagugugguuuuuccaacc

SEQ ID NO: 387159 - RNA, 19 nt, Human
ucaagaccaaguauacaug

SEQ ID NO: 387160 - RNA, 22 nt, Human
ucuaaaacacaacuugaaaaca

SEQ ID NO: 387161 - RNA, 18 nt, Human
ucuuuaguuuuauuuuaa

SEQ ID NO: 387162 - RNA, 24 nt, Human
ugaaugacaacuuuauuuuucuua

SEQ ID NO: 387163 - RNA, 24 nt, Human
ugaaugacaacuuuauuuuucuua

SEQ ID NO: 387164 - RNA, 23 nt, Human
uucauguuuagcuuucucaugga

SEQ ID NO: 387165 - RNA, 24 nt, Human
uuuauuuuucuuacacuuuuaagg

SEQ ID NO: 387166 - RNA, 20 nt, Human
uuuuucuguaauaaacuuaa

SEQ ID NO: 387167 - RNA, 23 nt, Human
aaccccaaaaauauuccaggaca

SEQ ID NO: 387168 - RNA, 19 nt, Human
aagaaggcuuccucagggc

SEQ ID NO: 387169 - RNA, 24 nt, Human
aagcgggauggcugcagccaagga

SEQ ID NO: 387170 - RNA, 24 nt, Human
aaguugggcugaggcugggggcac

SEQ ID NO: 387171 - RNA, 19 nt, Human
acaguggacuuggcccaca

SEQ ID NO: 387172 - RNA, 21 nt, Human
agaaguugggcugaggcuggg

SEQ ID NO: 387173 - RNA, 24 nt, Human
aggagacaguagaggugauggggg

SEQ ID NO: 387174 - RNA, 21 nt, Human
aggagcugggggagggccggg

SEQ ID NO: 387175 - RNA, 22 nt, Human
aggcaggcuaagcgggauggcu

SEQ ID NO: 387176 - RNA, 20 nt, Human
agggaggagcugcccaggug

SEQ ID NO: 387177 - RNA, 24 nt, Human
agggcugaagguaccacacgggug

SEQ ID NO: 387178 - RNA, 18 nt, Human
agggggcaggcugggcug

SEQ ID NO: 387179 - RNA, 18 nt, Human
aggugaugggggcagccg

SEQ ID NO: 387180 - RNA, 23 nt, Human
aggugaugggggcagccgggagg

SEQ ID NO: 387181 - RNA, 18 nt, Human
auccaggcuacccccagc

SEQ ID NO: 387182 - RNA, 24 nt, Human
caaggaggacaguggacuuggccc

SEQ ID NO: 387183 - RNA, 23 nt, Human
cacauccaggcuacccccagccc

SEQ ID NO: 387184 - RNA, 28 nt, Human
cacgggugugggugaggcaggcuaagcg

SEQ ID NO: 387185 - RNA, 19 nt, Human
caggaaggagugaagacuu

SEQ ID NO: 387186 - RNA, 23 nt, Human
caggaaggagugaagacuugugg

SEQ ID NO: 387187 - RNA, 18 nt, Human
ccaaggaggacaguggac

SEQ ID NO: 387188 - RNA, 18 nt, Human
ccaggacaagauaggggg

SEQ ID NO: 387189 - RNA, 22 nt, Human
cccaaaaauauuccaggacaag

SEQ ID NO: 387190 - RNA, 21 nt, Human
cccacauccaggcuaccccca

SEQ ID NO: 387191 - RNA, 18 nt, Human
ccccugcuuagcccaggg

SEQ ID NO: 387192 - RNA, 20 nt, Human
ccccugcuuagcccagggag

SEQ ID NO: 387193 - RNA, 22 nt, Human
ccgccaaggaggacaguggacu

SEQ ID NO: 387194 - RNA, 23 nt, Human
ccucagggcucgcaggaaggagu

SEQ ID NO: 387195 - RNA, 18 nt, Human
gcagccgggagggagggg

SEQ ID NO: 387196 - RNA, 24 nt, Human
ggagacaguagaggugaugggggc

SEQ ID NO: 387197 - RNA, 22 nt, Human
ggcacagggaggagcugcccag

SEQ ID NO: 387198 - RNA, 20 nt, Human
ggggagggccgggcucaggg

SEQ ID NO: 387199 - RNA, 18 nt, Human
gggggagggccgggcuca

SEQ ID NO: 387200 - RNA, 20 nt, Human
gggggcacagggaggagcug

SEQ ID NO: 387201 - RNA, 24 nt, Human
ggugaugggggcagccgggaggga

SEQ ID NO: 387202 - RNA, 24 nt, Human
uaccacacgggugugggugaggca

SEQ ID NO: 387203 - RNA, 19 nt, Human
uagcccagggaggagacag

SEQ ID NO: 387204 - RNA, 19 nt, Human
uagggggcaggcugggcug

SEQ ID NO: 387205 - RNA, 20 nt, Human
ugaggcugggggcacaggga

SEQ ID NO: 387206 - RNA, 21 nt, Human
ugaggcugggggcacagggag

SEQ ID NO: 387207 - RNA, 18 nt, Human
ugcagccaaggagcuggg

SEQ ID NO: 387208 - RNA, 26 nt, Human
uggcugcagccaaggagcugggggag

SEQ ID NO: 387209 - RNA, 25 nt, Human
uggcugcagccaaggagcugggggg

SEQ ID NO: 387210 - RNA, 21 nt, Human
ugggggagggccgggcucagg

SEQ ID NO: 387211 - RNA, 21 nt, Human
ugggggcagccgggagggagg

SEQ ID NO: 387212 - RNA, 21 nt, Human
uugcucagugacagagccuca

SEQ ID NO: 387213 - RNA, 21 nt, Human
aacucaucuuccucaagcccc

SEQ ID NO: 387214 - RNA, 23 nt, Human
aacucaucuuccucaagccccag

SEQ ID NO: 387215 - RNA, 27 nt, Human
aacucaucuuccucaagccccagacca

SEQ ID NO: 387216 - RNA, 24 nt, Human
aaggaagaggccaguugguccagu

SEQ ID NO: 387217 - RNA, 20 nt, Human
acaaauucuuuauuuaaauc

SEQ ID NO: 387218 - RNA, 20 nt, Human
acucaucuuccucaagcccc

SEQ ID NO: 387219 - RNA, 20 nt, Human
agaaggcagaggcagcauca

SEQ ID NO: 387220 - RNA, 18 nt, Human
agaggaugccagcaggca

SEQ ID NO: 387221 - RNA, 22 nt, Human
aggccagggcauggcgguggga

SEQ ID NO: 387222 - RNA, 22 nt, Human
aucuuccucaagccccagacca

SEQ ID NO: 387223 - RNA, 20 nt, Human
caacaaacucaucuuccuca

SEQ ID NO: 387224 - RNA, 21 nt, Human
caacaaacucaucuuccucaa

SEQ ID NO: 387225 - RNA, 23 nt, Human
cacagcugugggagaagcauacu

SEQ ID NO: 387226 - RNA, 18 nt, Human
cagcaucagugacuccca

SEQ ID NO: 387227 - RNA, 22 nt, Human
cagccacagcugugggagaagc

SEQ ID NO: 387228 - RNA, 21 nt, Human
cagcccucccucuccaucccc

SEQ ID NO: 387229 - RNA, 23 nt, Human
cagcccucccucuccauccccuc

SEQ ID NO: 387230 - RNA, 23 nt, Human
cagcuguggcuggggcagcagcu

SEQ ID NO: 387231 - RNA, 22 nt, Human
caggacaggcugaaccccccac

SEQ ID NO: 387232 - RNA, 21 nt, Human
cagggaaggcugccccagaug

SEQ ID NO: 387233 - RNA, 23 nt, Human
cagggaaggcugccccagaugug

SEQ ID NO: 387234 - RNA, 23 nt, Human
caucuuccucaagccccagacca

SEQ ID NO: 387235 - RNA, 21 nt, Human
ccaauggguggcgguggcugc

SEQ ID NO: 387236 - RNA, 26 nt, Human
cccccacccugacagaaaggagcuug

SEQ ID NO: 387237 - RNA, 22 nt, Human
ccccucaccccaccccuuagcc

SEQ ID NO: 387238 - RNA, 24 nt, Human
ccucaccccaccccuuagccacag

SEQ ID NO: 387239 - RNA, 19 nt, Human
ccucuccauccccucaccc

SEQ ID NO: 387240 - RNA, 23 nt, Human
ccugcagccacagcugugggaga

SEQ ID NO: 387241 - RNA, 24 nt, Human
ccugccagggaaggcugccccaga

SEQ ID NO: 387242 - RNA, 19 nt, Human
cucagagacagaacaggcc

SEQ ID NO: 387243 - RNA, 21 nt, Human
cucagagacagaacaggccag

SEQ ID NO: 387244 - RNA, 18 nt, Human
gaauguauuaguaagcau

SEQ ID NO: 387245 - RNA, 24 nt, Human
gagcacagucagugcagcuguggc

SEQ ID NO: 387246 - RNA, 19 nt, Human
gagcucagagacagaacag

SEQ ID NO: 387247 - RNA, 18 nt, Human
gcagcagcugccacaggc

SEQ ID NO: 387248 - RNA, 18 nt, Human
ggaaugucacugcuaaaa

SEQ ID NO: 387249 - RNA, 18 nt, Human
ggacaggcugaacccccc

SEQ ID NO: 387250 - RNA, 20 nt, Human
ggcaggggcaaggccugggg

SEQ ID NO: 387251 - RNA, 20 nt, Human
ggcugccccagauguguggg

SEQ ID NO: 387252 - RNA, 18 nt, Human
ggcuggggcagcagcugc

SEQ ID NO: 387253 - RNA, 19 nt, Human
gggcaaggccugggguggg

SEQ ID NO: 387254 - RNA, 19 nt, Human
ggggagcguucaagcgggc

SEQ ID NO: 387255 - RNA, 18 nt, Human
uaggccagggcauggcgg

SEQ ID NO: 387256 - RNA, 21 nt, Human
ucaacaaacucaucuuccuca

SEQ ID NO: 387257 - RNA, 21 nt, Human
ucagagacagaacaggccagg

SEQ ID NO: 387258 - RNA, 23 nt, Human
uccaauggguggcgguggcugcg

SEQ ID NO: 387259 - RNA, 23 nt, Human
uccagcaucagaaggcagaggca

SEQ ID NO: 387260 - RNA, 21 nt, Human
ucccuauaaauuaaguuccug

SEQ ID NO: 387261 - RNA, 24 nt, Human
uccugcagccacagcugugggaga

SEQ ID NO: 387262 - RNA, 24 nt, Human
ucuacauauauauuaaccauucgu

SEQ ID NO: 387263 - RNA, 20 nt, Human
ugaaccccccacccugacag

SEQ ID NO: 387264 - RNA, 20 nt, Human
ugacagaaaggagcuugaga

SEQ ID NO: 387265 - RNA, 19 nt, Human
ugagggacugaggccccua

SEQ ID NO: 387266 - RNA, 22 nt, Human
uggagagcagcgcacugacuca

SEQ ID NO: 387267 - RNA, 21 nt, Human
uggcggugagggacugaggcc

SEQ ID NO: 387268 - RNA, 19 nt, Human
ugggagaagcauacuugua

SEQ ID NO: 387269 - RNA, 23 nt, Human
uggggcagcagcugccacaggcc

SEQ ID NO: 387270 - RNA, 24 nt, Human
uggggcagcagcugccacaggcuu

SEQ ID NO: 387271 - RNA, 22 nt, Human
uggguggcgguggcugcgggga

SEQ ID NO: 387272 - RNA, 20 nt, Human
ugguaggcagcccucccucu

SEQ ID NO: 387273 - RNA, 19 nt, Human
uguauuaguaagcaugggg

SEQ ID NO: 387274 - RNA, 22 nt, Human
uguggugagcacagucagugca

SEQ ID NO: 387275 - RNA, 18 nt, Human
uuagccacagugaaggga

SEQ ID NO: 387276 - RNA, 21 nt, Human
aaaaaacccuauacaugacca

SEQ ID NO: 387277 - RNA, 22 nt, Human
aaaaaacccuauacaugaccaa

SEQ ID NO: 387278 - RNA, 21 nt, Human
aaaaaguaaaaauuagccagg

SEQ ID NO: 387279 - RNA, 19 nt, Human
aaacagaaaagccagcccc

SEQ ID NO: 387280 - RNA, 23 nt, Human
aaacagaaaagccagccccaggg

SEQ ID NO: 387281 - RNA, 22 nt, Human
aaacagccuuagauccuacagc

SEQ ID NO: 387282 - RNA, 20 nt, Human
aaaggugaacaauguugccc

SEQ ID NO: 387283 - RNA, 25 nt, Human
aaagugcugggcccgcccacagaag

SEQ ID NO: 387284 - RNA, 18 nt, Human
aaaguucuuuacguucuc

SEQ ID NO: 387285 - RNA, 20 nt, Human
aaauuccaaaugcaaagcau

SEQ ID NO: 387286 - RNA, 21 nt, Human
aacagaaaagccagccccagg

SEQ ID NO: 387287 - RNA, 18 nt, Human
aagaaggcaccucgaggc

SEQ ID NO: 387288 - RNA, 19 nt, Human
aagagucacacacccacag

SEQ ID NO: 387289 - RNA, 19 nt, Human
aagcaaaaauuccaaaugc

SEQ ID NO: 387290 - RNA, 21 nt, Human
aagcagaacuuugauccccag

SEQ ID NO: 387291 - RNA, 20 nt, Human
aaggcaggagaauugccugg

SEQ ID NO: 387292 - RNA, 22 nt, Human
aagggggggcuuuccagacagc

SEQ ID NO: 387293 - RNA, 21 nt, Human
aaguggccacacaggccaccc

SEQ ID NO: 387294 - RNA, 24 nt, Human
aauggcugacaccugugaucccag

SEQ ID NO: 387295 - RNA, 22 nt, Human
acacaucaucaccacauggguu

SEQ ID NO: 387296 - RNA, 21 nt, Human
acaccgucucucacacacaca

SEQ ID NO: 387297 - RNA, 22 nt, Human
acaccugugaucccagugcuuc

SEQ ID NO: 387298 - RNA, 20 nt, Human
acacgggcagggggcaaguc

SEQ ID NO: 387299 - RNA, 19 nt, Human
acaguguuggccucugggc

SEQ ID NO: 387300 - RNA, 21 nt, Human
acaguguuggccucugggcug

SEQ ID NO: 387301 - RNA, 21 nt, Human
accacuguacuccagccugag

SEQ ID NO: 387302 - RNA, 24 nt, Human
accacuguacuccagccugaguga

SEQ ID NO: 387303 - RNA, 19 nt, Human
accccaccugcccugaagc

SEQ ID NO: 387304 - RNA, 22 nt, Human
acgcugcggugugguccugggc

SEQ ID NO: 387305 - RNA, 19 nt, Human
acuccagccugagugacag

SEQ ID NO: 387306 - RNA, 20 nt, Human
acuccaucucuaccaaaaaa

SEQ ID NO: 387307 - RNA, 18 nt, Human
acuguacuccagccugag

SEQ ID NO: 387308 - RNA, 24 nt, Human
acuguacuccagccugagugacag

SEQ ID NO: 387309 - RNA, 18 nt, Human
agaaaaccacaucccacc

SEQ ID NO: 387310 - RNA, 23 nt, Human
agaaaagccagccccagggucag

SEQ ID NO: 387311 - RNA, 26 nt, Human
agaaaagccagccccagggucaguaa

SEQ ID NO: 387312 - RNA, 19 nt, Human
agaauugccugaagccagg

SEQ ID NO: 387313 - RNA, 24 nt, Human
agacccacccccaaaaggccgaaa

SEQ ID NO: 387314 - RNA, 22 nt, Human
agagaccaacgcaauucaucac

SEQ ID NO: 387315 - RNA, 25 nt, Human
agaggaaggauaaggucauggggga

SEQ ID NO: 387316 - RNA, 18 nt, Human
agaguucaaggcugcaga

SEQ ID NO: 387317 - RNA, 19 nt, Human
agaugugauucccuucagu

SEQ ID NO: 387318 - RNA, 26 nt, Human
agccacaggcuuaggaaggcaagucu

SEQ ID NO: 387319 - RNA, 21 nt, Human
agccaggacuucaagaccagc

SEQ ID NO: 387320 - RNA, 24 nt, Human
agccugggcaauauagcaagacuc

SEQ ID NO: 387321 - RNA, 18 nt, Human
agccuuagauccuacagc

SEQ ID NO: 387322 - RNA, 27 nt, Human
agccuuuccucuacccccuccuccccc

SEQ ID NO: 387323 - RNA, 25 nt, Human
agcuauuuaguccaacagcaacaac

SEQ ID NO: 387324 - RNA, 22 nt, Human
aggaaacagaaaagccagcccc

SEQ ID NO: 387325 - RNA, 23 nt, Human
aggacuucaagaccagccugggc

SEQ ID NO: 387326 - RNA, 19 nt, Human
aggagauaggccaagccag

SEQ ID NO: 387327 - RNA, 19 nt, Human
aggcaagucucauugggga

SEQ ID NO: 387328 - RNA, 20 nt, Human
aggcaagucucauuggggag

SEQ ID NO: 387329 - RNA, 18 nt, Human
aggcaggagaauugccug

SEQ ID NO: 387330 - RNA, 19 nt, Human
aggcagggcaagagggagg

SEQ ID NO: 387331 - RNA, 21 nt, Human
aggccaaagcgguuuacaauc

SEQ ID NO: 387332 - RNA, 18 nt, Human
aggccugcaguuacgcug

SEQ ID NO: 387333 - RNA, 24 nt, Human
aggcugaggugagaggauugcuug

SEQ ID NO: 387334 - RNA, 18 nt, Human
agggagagagagaaaugg

SEQ ID NO: 387335 - RNA, 24 nt, Human
aggugugguggcucacaccugugg

SEQ ID NO: 387336 - RNA, 23 nt, Human
auagggguggagagaaagaggca

SEQ ID NO: 387337 - RNA, 19 nt, Human
aucccauucaguccacacc

SEQ ID NO: 387338 - RNA, 23 nt, Human
aucgcaaacagcuuuccgccccc

SEQ ID NO: 387339 - RNA, 22 nt, Human
aucuagagcagacuguccacug

SEQ ID NO: 387340 - RNA, 21 nt, Human
aucucuuuuccauucuuauua

SEQ ID NO: 387341 - RNA, 24 nt, Human
auggcaccacuguacuccagccug

SEQ ID NO: 387342 - RNA, 24 nt, Human
auuagccaggugugguggcucaca

SEQ ID NO: 387343 - RNA, 20 nt, Human
auugucccuuucucugccuu

SEQ ID NO: 387344 - RNA, 24 nt, Human
caaaaggauucuucacuuuacaaa

SEQ ID NO: 387345 - RNA, 20 nt, Human
caaauagauaaucuggagaa

SEQ ID NO: 387346 - RNA, 20 nt, Human
caaccucccagacgcacccu

SEQ ID NO: 387347 - RNA, 20 nt, Human
caagcuggauggaucaacaa

SEQ ID NO: 387348 - RNA, 20 nt, Human
cacacaaagcccgacagggc

SEQ ID NO: 387349 - RNA, 20 nt, Human
cacacacacacacacacaca

SEQ ID NO: 387350 - RNA, 20 nt, Human
cacacacacacacacacaca

SEQ ID NO: 387351 - RNA, 22 nt, Human
cacacacacacacacacacaca

SEQ ID NO: 387352 - RNA, 22 nt, Human
cacacccacaguguuggccucu

SEQ ID NO: 387353 - RNA, 25 nt, Human
caccccaccugcccugaagcccacc

SEQ ID NO: 387354 - RNA, 20 nt, Human
cacucuacuaucauuguccc

SEQ ID NO: 387355 - RNA, 19 nt, Human
cacuguacuccagccugag

SEQ ID NO: 387356 - RNA, 19 nt, Human
cacuguacuccagccugag

SEQ ID NO: 387357 - RNA, 24 nt, Human
cacuguacuccagccugagugaca

SEQ ID NO: 387358 - RNA, 25 nt, Human
cacuguacuccagccugagugacag

SEQ ID NO: 387359 - RNA, 21 nt, Human
cagaacaagacaccgucucuc

SEQ ID NO: 387360 - RNA, 24 nt, Human
cagacccacccccaaaaggccgaa

SEQ ID NO: 387361 - RNA, 24 nt, Human
cagagccuagagggagagggcuag

SEQ ID NO: 387362 - RNA, 24 nt, Human
cagcaaagaaaucccucuaagcau

SEQ ID NO: 387363 - RNA, 22 nt, Human
cagcagccuaagaacgcccucc

SEQ ID NO: 387364 - RNA, 18 nt, Human
cagcaucuggcaagcugg

SEQ ID NO: 387365 - RNA, 18 nt, Human
caggccaaaagcagugac

SEQ ID NO: 387366 - RNA, 25 nt, Human
caggcuaucucuccucugaccuccu

SEQ ID NO: 387367 - RNA, 25 nt, Human
caggucuuaggaaagacagggaucc

SEQ ID NO: 387368 - RNA, 21 nt, Human
cagugaugaguucuugcaugg

SEQ ID NO: 387369 - RNA, 21 nt, Human
cauacaggacuucugugcaau

SEQ ID NO: 387370 - RNA, 20 nt, Human
caucuggauugacacaggaa

SEQ ID NO: 387371 - RNA, 20 nt, Human
ccaaaauaucucuugcucca

SEQ ID NO: 387372 - RNA, 21 nt, Human
ccaaacguuggaaaggaacca

SEQ ID NO: 387373 - RNA, 28 nt, Human
ccaaccaguccagggaaucgcaaacagc

SEQ ID NO: 387374 - RNA, 20 nt, Human
ccacaccauagcccuaggag

SEQ ID NO: 387375 - RNA, 26 nt, Human
ccaccugcccugaagcccaccauccc

SEQ ID NO: 387376 - RNA, 20 nt, Human
ccacuguacuccagccugag

SEQ ID NO: 387377 - RNA, 20 nt, Human
ccacuguacuccagccugag

SEQ ID NO: 387378 - RNA, 21 nt, Human
ccacuguacuccagccugagu

SEQ ID NO: 387379 - RNA, 24 nt, Human
ccacuguacuccagccugagugac

SEQ ID NO: 387380 - RNA, 22 nt, Human
ccagacccacccccaaaaggcc

SEQ ID NO: 387381 - RNA, 26 nt, Human
ccaggccaaaagcagugacaacucca

SEQ ID NO: 387382 - RNA, 20 nt, Human
ccauacccuagaagugaggc

SEQ ID NO: 387383 - RNA, 23 nt, Human
cccaccaucccagcagccuaaga

SEQ ID NO: 387384 - RNA, 20 nt, Human
cccacccccaaaaggccgaa

SEQ ID NO: 387385 - RNA, 19 nt, Human
cccaugggcuuagaugcag

SEQ ID NO: 387386 - RNA, 20 nt, Human
cccaugggcuuagaugcagg

SEQ ID NO: 387387 - RNA, 20 nt, Human
ccccagccagcuugggaggg

SEQ ID NO: 387388 - RNA, 24 nt, Human
ccccuccuccccccacccgccuua

SEQ ID NO: 387389 - RNA, 21 nt, Human
cccgaccaaccaguccaggga

SEQ ID NO: 387390 - RNA, 23 nt, Human
cccuaggagauaggccaagccag

SEQ ID NO: 387391 - RNA, 20 nt, Human
cccucugaauaggaucucca

SEQ ID NO: 387392 - RNA, 21 nt, Human
cccuggccuuggaacaagaua

SEQ ID NO: 387393 - RNA, 22 nt, Human
ccgccuugcuucagagccgccc

SEQ ID NO: 387394 - RNA, 22 nt, Human
ccugaagccaggacuucaagac

SEQ ID NO: 387395 - RNA, 20 nt, Human
ccugggugaagauggggcuc

SEQ ID NO: 387396 - RNA, 18 nt, Human
ccugugguccucccuacu

SEQ ID NO: 387397 - RNA, 22 nt, Human
cgaaaugggcagcuauugggua

SEQ ID NO: 387398 - RNA, 21 nt, Human
cgacagggcuuucucagggcu

SEQ ID NO: 387399 - RNA, 22 nt, Human
cgcccccaaccugcagguguuu

SEQ ID NO: 387400 - RNA, 19 nt, Human
cggcugacuacagaugcug

SEQ ID NO: 387401 - RNA, 22 nt, Human
cgggaggcugaggugagaggau

SEQ ID NO: 387402 - RNA, 21 nt, Human
cuaacucaagcgaauccacgg

SEQ ID NO: 387403 - RNA, 21 nt, Human
cuacccccuccuccccccacc

SEQ ID NO: 387404 - RNA, 21 nt, Human
cucacacacacacacacacac

SEQ ID NO: 387405 - RNA, 20 nt, Human
cucacaccugugguccuccc

SEQ ID NO: 387406 - RNA, 19 nt, Human
cucauaaaacccauccacc

SEQ ID NO: 387407 - RNA, 21 nt, Human
cuccacuccgccggaaagggg

SEQ ID NO: 387408 - RNA, 21 nt, Human
cuccccccacccgccuuaaaa

SEQ ID NO: 387409 - RNA, 26 nt, Human
cuccccccacccgccuuaaaaaaccc

SEQ ID NO: 387410 - RNA, 22 nt, Human
cugaagcccaccaucccagcag

SEQ ID NO: 387411 - RNA, 24 nt, Human
cugacaccugugaucccagugcuu

SEQ ID NO: 387412 - RNA, 19 nt, Human
cugcagcaucuggcaagcu

SEQ ID NO: 387413 - RNA, 20 nt, Human
cuggaggcaaaggcaggaga

SEQ ID NO: 387414 - RNA, 19 nt, Human
cuucaagaccagccugggc

SEQ ID NO: 387415 - RNA, 20 nt, Human
gaaacagaaaagccagcccc

SEQ ID NO: 387416 - RNA, 19 nt, Human
gaaaucacaaguacggcca

SEQ ID NO: 387417 - RNA, 22 nt, Human
gaaaucacaaguacggccagac

SEQ ID NO: 387418 - RNA, 27 nt, Human
gaaaucuucccgauacauccucacauu

SEQ ID NO: 387419 - RNA, 24 nt, Human
gaacauagaccagaccaucagcaa

SEQ ID NO: 387420 - RNA, 26 nt, Human
gagccgcccaauucucaccccaccug

SEQ ID NO: 387421 - RNA, 19 nt, Human
gagcugacaaccccagguc

SEQ ID NO: 387422 - RNA, 24 nt, Human
gaggugagaggauugcuugagccc

SEQ ID NO: 387423 - RNA, 22 nt, Human
gaguugaagcccacaugcccaa

SEQ ID NO: 387424 - RNA, 23 nt, Human
gauugcuugagcccagaguucaa

SEQ ID NO: 387425 - RNA, 22 nt, Human
gcagucaggcacaccggccuac

SEQ ID NO: 387426 - RNA, 20 nt, Human
gcauuaaaccaaccucccag

SEQ ID NO: 387427 - RNA, 18 nt, Human
gccagaaguuugaguucu

SEQ ID NO: 387428 - RNA, 22 nt, Human
gccagacccacccccaaaaggc

SEQ ID NO: 387429 - RNA, 19 nt, Human
gccaguguucccauaucuc

SEQ ID NO: 387430 - RNA, 21 nt, Human
gcuaagugaaugugcauaugu

SEQ ID NO: 387431 - RNA, 18 nt, Human
gcugacaccugugauccc

SEQ ID NO: 387432 - RNA, 18 nt, Human
gcugacuacagaugcugu

SEQ ID NO: 387433 - RNA, 22 nt, Human
ggaaaggagcagacauauucuc

SEQ ID NO: 387434 - RNA, 22 nt, Human
ggaaaggggcggaagccgagga

SEQ ID NO: 387435 - RNA, 25 nt, Human
ggacugagggaagagggaagaccgu

SEQ ID NO: 387436 - RNA, 18 nt, Human
ggagagagagaaaugggg

SEQ ID NO: 387437 - RNA, 23 nt, Human
ggaggcugaggugagaggauugc

SEQ ID NO: 387438 - RNA, 18 nt, Human
ggcaagagggagggagag

SEQ ID NO: 387439 - RNA, 22 nt, Human
ggccugggugaagauggggcuc

SEQ ID NO: 387440 - RNA, 22 nt, Human
ggcggaagccgaggaagaggau

SEQ ID NO: 387441 - RNA, 21 nt, Human
gggaggcugaggugagaggau

SEQ ID NO: 387442 - RNA, 23 nt, Human
gggaggcugaggugagaggauug

SEQ ID NO: 387443 - RNA, 21 nt, Human
gggcaagucuucagcagaggg

SEQ ID NO: 387444 - RNA, 21 nt, Human
gggggcuuuccagacagccac

SEQ ID NO: 387445 - RNA, 24 nt, Human
gggugcaauggcugacaccuguga

SEQ ID NO: 387446 - RNA, 24 nt, Human
gguaccuauaaauauggacagaag

SEQ ID NO: 387447 - RNA, 23 nt, Human
gguggcucacaccugugguccuc

SEQ ID NO: 387448 - RNA, 19 nt, Human
guacuccagccugagugac

SEQ ID NO: 387449 - RNA, 18 nt, Human
gugugguggcucacaccu

SEQ ID NO: 387450 - RNA, 23 nt, Human
uaaagagucacacacccacagug

SEQ ID NO: 387451 - RNA, 18 nt, Human
uaacucaggccaaagcgg

SEQ ID NO: 387452 - RNA, 19 nt, Human
uaagaaaaccacaucccac

SEQ ID NO: 387453 - RNA, 26 nt, Human
uacagaucuucuuuaguucuuacaaa

SEQ ID NO: 387454 - RNA, 21 nt, Human
uacggccagacccacccccaa

SEQ ID NO: 387455 - RNA, 20 nt, Human
uacuccagccugagugacag

SEQ ID NO: 387456 - RNA, 19 nt, Human
uacugguacaggaaacaga

SEQ ID NO: 387457 - RNA, 23 nt, Human
uagaagugaggcuggauccuggu

SEQ ID NO: 387458 - RNA, 19 nt, Human
uagaccagaccaucagcaa

SEQ ID NO: 387459 - RNA, 24 nt, Human
uaggaaggcaagucucauugggga

SEQ ID NO: 387460 - RNA, 22 nt, Human
uaggcugaagcccaaacuauaa

SEQ ID NO: 387461 - RNA, 25 nt, Human
uauagcaagacuccaucucuaccaa

SEQ ID NO: 387462 - RNA, 21 nt, Human
ucacacacacacacacacaca

SEQ ID NO: 387463 - RNA, 18 nt, Human
ucacucgccagcaugaac

SEQ ID NO: 387464 - RNA, 19 nt, Human
ucagccaggucuccggcug

SEQ ID NO: 387465 - RNA, 20 nt, Human
ucaggccaaagcgguuuaca

SEQ ID NO: 387466 - RNA, 19 nt, Human
ucauaaaacccauccaccc

SEQ ID NO: 387467 - RNA, 21 nt, Human
uccacaccauagcccuaggag

SEQ ID NO: 387468 - RNA, 25 nt, Human
uccacagccacaggcuuaggaaggc

SEQ ID NO: 387469 - RNA, 25 nt, Human
uccagacagccacagugaugaguuc

SEQ ID NO: 387470 - RNA, 18 nt, Human
uccagccugagugacaga

SEQ ID NO: 387471 - RNA, 22 nt, Human
uccaggccaaaagcagugacaa

SEQ ID NO: 387472 - RNA, 18 nt, Human
ucccaaacuccaggccaa

SEQ ID NO: 387473 - RNA, 18 nt, Human
ucccaaaguucagacauc

SEQ ID NO: 387474 - RNA, 20 nt, Human
ucccaaaguucagacaucca

SEQ ID NO: 387475 - RNA, 18 nt, Human
ucccauucaguccacacc

SEQ ID NO: 387476 - RNA, 20 nt, Human
ucccuuucucugccuucaca

SEQ ID NO: 387477 - RNA, 22 nt, Human
uccgccggaaaggggcggaagc

SEQ ID NO: 387478 - RNA, 19 nt, Human
uccucuacccccuccuccc

SEQ ID NO: 387479 - RNA, 23 nt, Human
uccucuacccccuccucccccca

SEQ ID NO: 387480 - RNA, 26 nt, Human
uccucuacccccuccuccccccaccc

SEQ ID NO: 387481 - RNA, 22 nt, Human
uccucuucugcagaaaaaugca

SEQ ID NO: 387482 - RNA, 19 nt, Human
ucgggaggcugaggugaga

SEQ ID NO: 387483 - RNA, 22 nt, Human
ucuagccagggccuggucucug

SEQ ID NO: 387484 - RNA, 21 nt, Human
ucucacacacacacacacaca

SEQ ID NO: 387485 - RNA, 28 nt, Human
ucucacacacacacacacacacacacaa

SEQ ID NO: 387486 - RNA, 22 nt, Human
ucucauaaaacccauccaccca

SEQ ID NO: 387487 - RNA, 22 nt, Human
ucucuaccaaaaaaaaaaaaaa

SEQ ID NO: 387488 - RNA, 19 nt, Human
ucugcagcaucuggcaagc

SEQ ID NO: 387489 - RNA, 21 nt, Human
ugaaagaagagggagccagaa

SEQ ID NO: 387490 - RNA, 22 nt, Human
ugaaagaagagggagccagaag

SEQ ID NO: 387491 - RNA, 22 nt, Human
ugaagcaaacagccuuagaucc

SEQ ID NO: 387492 - RNA, 20 nt, Human
ugaagcccacaugcccaaaa

SEQ ID NO: 387493 - RNA, 18 nt, Human
ugaauggagagccugagu

SEQ ID NO: 387494 - RNA, 22 nt, Human
ugacaaccccaggucuuaggaa

SEQ ID NO: 387495 - RNA, 24 nt, Human
ugagaggccugcaguuacgcugcg

SEQ ID NO: 387496 - RNA, 19 nt, Human
ugagauugagggaaaagaa

SEQ ID NO: 387497 - RNA, 22 nt, Human
ugagggaagagggaagaccgug

SEQ ID NO: 387498 - RNA, 21 nt, Human
ugaggugagaggauugcuuga

SEQ ID NO: 387499 - RNA, 22 nt, Human
ugaggugagaggauugcuugag

SEQ ID NO: 387500 - RNA, 24 nt, Human
ugaggugagaggauugcuugagcc

SEQ ID NO: 387501 - RNA, 19 nt, Human
ugauccccagggcaagaag

SEQ ID NO: 387502 - RNA, 24 nt, Human
ugaugucgaggaguugaagcccac

SEQ ID NO: 387503 - RNA, 21 nt, Human
ugauucccuucagugguuaug

SEQ ID NO: 387504 - RNA, 21 nt, Human
ugcagugguuauuucuuuaaa

SEQ ID NO: 387505 - RNA, 28 nt, Human
ugcccugaagcccaccaucccagcagcc

SEQ ID NO: 387506 - RNA, 22 nt, Human
ugccgcgcccaaagcgaguuuc

SEQ ID NO: 387507 - RNA, 24 nt, Human
ugcgcaucuacucagcaccagcgu

SEQ ID NO: 387508 - RNA, 24 nt, Human
ugcuuucccccuuuuucgcugaga

SEQ ID NO: 387509 - RNA, 20 nt, Human
uggaaaggaaccaacccuaa

SEQ ID NO: 387510 - RNA, 20 nt, Human
uggcaccacuguacuccagc

SEQ ID NO: 387511 - RNA, 23 nt, Human
uggcaggacagggccacaggcua

SEQ ID NO: 387512 - RNA, 22 nt, Human
uggccacacaggccaccccagc

SEQ ID NO: 387513 - RNA, 19 nt, Human
uggcucacaccuguggucc

SEQ ID NO: 387514 - RNA, 24 nt, Human
uggcugacaccugugaucccagug

SEQ ID NO: 387515 - RNA, 23 nt, Human
ugggaaggauuugggacugaggg

SEQ ID NO: 387516 - RNA, 18 nt, Human
ugggaggggcuaaaggca

SEQ ID NO: 387517 - RNA, 23 nt, Human
ugugguggcucacaccugugguc

SEQ ID NO: 387518 - RNA, 18 nt, Human
uguuuguuuucuaagcag

SEQ ID NO: 387519 - RNA, 23 nt, Human
uguuuuguuuuguuuuaccuuua

SEQ ID NO: 387520 - RNA, 23 nt, Human
uuacgcugcggugugguccuggg

SEQ ID NO: 387521 - RNA, 25 nt, Human
uucagagccgcccaauucucacccc

SEQ ID NO: 387522 - RNA, 24 nt, Human
uucaguguuuguuuucuaagcagg

SEQ ID NO: 387523 - RNA, 21 nt, Human
uucauggguaacaaggaagga

SEQ ID NO: 387524 - RNA, 22 nt, Human
uuccauucuuauuacugucccu

SEQ ID NO: 387525 - RNA, 21 nt, Human
uucccaaaguucagacaucca

SEQ ID NO: 387526 - RNA, 22 nt, Human
uugcuugagcccagaguucaag

SEQ ID NO: 387527 - RNA, 23 nt, Human
uugcuugagcccagaguucaagg

SEQ ID NO: 387528 - RNA, 25 nt, Human
uuggccucugggcuguacaaagguc

SEQ ID NO: 387529 - RNA, 18 nt, Human
uugggaaggauuugggac

SEQ ID NO: 387530 - RNA, 19 nt, Human
uugucccuuucucugccuu

SEQ ID NO: 387531 - RNA, 18 nt, Human
uuucugaucuccuacugg

SEQ ID NO: 387532 - RNA, 22 nt, Human
aaaauagcagacacugguagga

SEQ ID NO: 387533 - RNA, 19 nt, Human
aaacaacagauaaacgacu

SEQ ID NO: 387534 - RNA, 18 nt, Human
aaaggaucucugcagcag

SEQ ID NO: 387535 - RNA, 24 nt, Human
aaaggauguaagaaacaaaagaaa

SEQ ID NO: 387536 - RNA, 19 nt, Human
aacaacgggacuggagaga

SEQ ID NO: 387537 - RNA, 24 nt, Human
aacaugaggggaaggggcugggga

SEQ ID NO: 387538 - RNA, 20 nt, Human
aaccaaaggcuuugggcucc

SEQ ID NO: 387539 - RNA, 18 nt, Human
aacucaaagcaggaacag

SEQ ID NO: 387540 - RNA, 23 nt, Human
aacuccaccacuacgaccaccuu

SEQ ID NO: 387541 - RNA, 21 nt, Human
aagaaggaaaauauuuuaaaa

SEQ ID NO: 387542 - RNA, 24 nt, Human
aagaaggaaaauauuuuaaaauau

SEQ ID NO: 387543 - RNA, 21 nt, Human
aagaauuuugccagcucaaaa

SEQ ID NO: 387544 - RNA, 21 nt, Human
acaaaauacuccucaucacca

SEQ ID NO: 387545 - RNA, 23 nt, Human
acaacagauaaacgacugauggg

SEQ ID NO: 387546 - RNA, 26 nt, Human
acaccccaccccaccccaccucucca

SEQ ID NO: 387547 - RNA, 24 nt, Human
acagugugugcucugaaaaggauc

SEQ ID NO: 387548 - RNA, 23 nt, Human
accccaccucuccaccccaccaa

SEQ ID NO: 387549 - RNA, 23 nt, Human
agaaacaaaagaaauaguuagaa

SEQ ID NO: 387550 - RNA, 20 nt, Human
agaauuuugccagcucaaaa

SEQ ID NO: 387551 - RNA, 24 nt, Human
agacagaugggcuggaacagugug

SEQ ID NO: 387552 - RNA, 19 nt, Human
agagcagcagagcuuuucu

SEQ ID NO: 387553 - RNA, 20 nt, Human
agcagacacugguaggaaca

SEQ ID NO: 387554 - RNA, 24 nt, Human
aggcagaaaguuugucguggagcu

SEQ ID NO: 387555 - RNA, 25 nt, Human
aggugggaaagggaagauagaacuu

SEQ ID NO: 387556 - RNA, 20 nt, Human
agguguuggggaaggcagaa

SEQ ID NO: 387557 - RNA, 21 nt, Human
agugauagaagcacauggaga

SEQ ID NO: 387558 - RNA, 21 nt, Human
auccugaaaaaauaaauguug

SEQ ID NO: 387559 - RNA, 21 nt, Human
auuuugccagcucaaaauacu

SEQ ID NO: 387560 - RNA, 19 nt, Human
caacagauaaacgacugau

SEQ ID NO: 387561 - RNA, 24 nt, Human
caaccucauaggguuggggauaau

SEQ ID NO: 387562 - RNA, 23 nt, Human
caagaaaacaccauaugcaaagg

SEQ ID NO: 387563 - RNA, 25 nt, Human
caagaaaacaccauaugcaaaggca

SEQ ID NO: 387564 - RNA, 20 nt, Human
cacacaguguccaaaucucc

SEQ ID NO: 387565 - RNA, 20 nt, Human
cacaccccaccccaccccag

SEQ ID NO: 387566 - RNA, 22 nt, Human
caccacaccccaccccacccca

SEQ ID NO: 387567 - RNA, 23 nt, Human
caccacuacgaccaccuugggaa

SEQ ID NO: 387568 - RNA, 18 nt, Human
caccccaccacaccccac

SEQ ID NO: 387569 - RNA, 22 nt, Human
caccccaccacaccccacccca

SEQ ID NO: 387570 - RNA, 23 nt, Human
caccccaccacaccccaccccac

SEQ ID NO: 387571 - RNA, 24 nt, Human
caccccaccacaccccaccccacc

SEQ ID NO: 387572 - RNA, 26 nt, Human
caccccaccacaccccaccccacccc

SEQ ID NO: 387573 - RNA, 21 nt, Human
caccccaccccaccccaccuc

SEQ ID NO: 387574 - RNA, 28 nt, Human
caccccaccccaccccaccucuccaccu

SEQ ID NO: 387575 - RNA, 24 nt, Human
caccccaccucuccaccccaccaa

SEQ ID NO: 387576 - RNA, 18 nt, Human
caccugaaggaauuucca

SEQ ID NO: 387577 - RNA, 19 nt, Human
caccugaaggaauuuccag

SEQ ID NO: 387578 - RNA, 19 nt, Human
ccacaaaauacuccucauc

SEQ ID NO: 387579 - RNA, 23 nt, Human
ccaccaaaagcacacagugucca

SEQ ID NO: 387580 - RNA, 19 nt, Human
ccaccacaccccaccccag

SEQ ID NO: 387581 - RNA, 20 nt, Human
ccaccacuacgaccaccuug

SEQ ID NO: 387582 - RNA, 22 nt, Human
ccaccccaccacaccccacccc

SEQ ID NO: 387583 - RNA, 26 nt, Human
ccaccccaccucuccaccccaccaaa

SEQ ID NO: 387584 - RNA, 25 nt, Human
cccaccccaccacaccccaccccac

SEQ ID NO: 387585 - RNA, 22 nt, Human
cccaccccaccccaccucucca

SEQ ID NO: 387586 - RNA, 23 nt, Human
cccaccccaccucuccaccccac

SEQ ID NO: 387587 - RNA, 19 nt, Human
cccaccucuccaccccacc

SEQ ID NO: 387588 - RNA, 25 nt, Human
ccccaccacaccccaccccacccca

SEQ ID NO: 387589 - RNA, 24 nt, Human
ccccaccccaccccaccucuccac

SEQ ID NO: 387590 - RNA, 26 nt, Human
ccgcggcggggagaccgcagcuccgg

SEQ ID NO: 387591 - RNA, 26 nt, Human
ccgcggcggggagaccgcagcuccgg

SEQ ID NO: 387592 - RNA, 22 nt, Human
ccucccaccccaccacacccca

SEQ ID NO: 387593 - RNA, 24 nt, Human
cgcuccgucucucccaaccucgcu

SEQ ID NO: 387594 - RNA, 25 nt, Human
cgcuccgucucucccaaccucgcua

SEQ ID NO: 387595 - RNA, 23 nt, Human
cuccacuaugaauuagcccucgg

SEQ ID NO: 387596 - RNA, 19 nt, Human
cucccaccccaccacaccc

SEQ ID NO: 387597 - RNA, 23 nt, Human
cuccuggaagaccugaacccuga

SEQ ID NO: 387598 - RNA, 23 nt, Human
cucuauaaaugguagcuguuacc

SEQ ID NO: 387599 - RNA, 18 nt, Human
cucuccaccccaccaaaa

SEQ ID NO: 387600 - RNA, 21 nt, Human
gaaaacaccauaugcaaaggc

SEQ ID NO: 387601 - RNA, 23 nt, Human
gaaacucaaagcaggaacagcuc

SEQ ID NO: 387602 - RNA, 20 nt, Human
gaacagcucuggguccugga

SEQ ID NO: 387603 - RNA, 20 nt, Human
gaacuugaaaaucaggggcg

SEQ ID NO: 387604 - RNA, 23 nt, Human
gacagccucccaccccaccacac

SEQ ID NO: 387605 - RNA, 19 nt, Human
gacgccccugagaagaggg

SEQ ID NO: 387606 - RNA, 20 nt, Human
gagacagaugggcuggaaca

SEQ ID NO: 387607 - RNA, 21 nt, Human
gagaccgcagcuccggggacu

SEQ ID NO: 387608 - RNA, 21 nt, Human
gagaccgcagcuccggggacu

SEQ ID NO: 387609 - RNA, 26 nt, Human
gagcagaaaaugggcaagagggaccc

SEQ ID NO: 387610 - RNA, 23 nt, Human
gagcagcagagcuuuucuugaug

SEQ ID NO: 387611 - RNA, 19 nt, Human
gagcuggauacaacaggag

SEQ ID NO: 387612 - RNA, 24 nt, Human
gcacagcucuagggaaacucaaag

SEQ ID NO: 387613 - RNA, 20 nt, Human
gcucaaaauacugguuuaau

SEQ ID NO: 387614 - RNA, 19 nt, Human
ggaagauagaacuuuaaaa

SEQ ID NO: 387615 - RNA, 20 nt, Human
ggaaggggcuggggaagagg

SEQ ID NO: 387616 - RNA, 20 nt, Human
gggcuggggaagagggaaag

SEQ ID NO: 387617 - RNA, 18 nt, Human
ggggaaggggcuggggaa

SEQ ID NO: 387618 - RNA, 19 nt, Human
gugcuugcaacucaggaac

SEQ ID NO: 387619 - RNA, 21 nt, Human
guguaacaugaggggaagggg

SEQ ID NO: 387620 - RNA, 22 nt, Human
uaagucuugaacuugaaaauca

SEQ ID NO: 387621 - RNA, 25 nt, Human
uaaguuuccuggacacagacagccu

SEQ ID NO: 387622 - RNA, 27 nt, Human
uaauacaugaaaaacacuuagcauagc

SEQ ID NO: 387623 - RNA, 22 nt, Human
uacugguuuaauucuuucucag

SEQ ID NO: 387624 - RNA, 22 nt, Human
uagaaaaaugacuuugugaaga

SEQ ID NO: 387625 - RNA, 19 nt, Human
uagagcuaagagcagcaga

SEQ ID NO: 387626 - RNA, 21 nt, Human
uagcagauauaaagcuuaaua

SEQ ID NO: 387627 - RNA, 21 nt, Human
uauuaugccacaaaauacucc

SEQ ID NO: 387628 - RNA, 23 nt, Human
ucaguggugauugacgucucaaa

SEQ ID NO: 387629 - RNA, 23 nt, Human
ucaucaccaggcaaagcucuagu

SEQ ID NO: 387630 - RNA, 19 nt, Human
ucauugagccucuuugagc

SEQ ID NO: 387631 - RNA, 19 nt, Human
uccaacuccaccacuacga

SEQ ID NO: 387632 - RNA, 22 nt, Human
uccaacuccaccacuacgacca

SEQ ID NO: 387633 - RNA, 24 nt, Human
uccaacuccaccacuacgaccacc

SEQ ID NO: 387634 - RNA, 19 nt, Human
uccaccacuacgaccaccu

SEQ ID NO: 387635 - RNA, 20 nt, Human
uccaccacuacgaccaccuu

SEQ ID NO: 387636 - RNA, 20 nt, Human
uccaccccaccaaaagcaca

SEQ ID NO: 387637 - RNA, 20 nt, Human
uccaccccaccaaaagcaca

SEQ ID NO: 387638 - RNA, 19 nt, Human
uccuggacacagacagccu

SEQ ID NO: 387639 - RNA, 19 nt, Human
ucuaucucaaacaacagau

SEQ ID NO: 387640 - RNA, 26 nt, Human
ucucugcagcagggcuugagagcacc

SEQ ID NO: 387641 - RNA, 21 nt, Human
ucugcagcagggcuugagagc

SEQ ID NO: 387642 - RNA, 22 nt, Human
ugaaagagguaaccgcacagug

SEQ ID NO: 387643 - RNA, 26 nt, Human
ugaauauuuaugucauuuuugguuaa

SEQ ID NO: 387644 - RNA, 18 nt, Human
ugacacagaauuuagaaa

SEQ ID NO: 387645 - RNA, 25 nt, Human
ugagacagaugggcuggaacagugu

SEQ ID NO: 387646 - RNA, 21 nt, Human
ugauacgacuuugggauaggu

SEQ ID NO: 387647 - RNA, 19 nt, Human
ugcaaaggcacaaaggugu

SEQ ID NO: 387648 - RNA, 18 nt, Human
ugccaucaucguauguga

SEQ ID NO: 387649 - RNA, 22 nt, Human
uggaaggucaaaaaagguggga

SEQ ID NO: 387650 - RNA, 22 nt, Human
uggacacagacagccucccacc

SEQ ID NO: 387651 - RNA, 18 nt, Human
ugggaaagucauugagcc

SEQ ID NO: 387652 - RNA, 24 nt, Human
ugggucaggguguggacucuaggg

SEQ ID NO: 387653 - RNA, 20 nt, Human
uggguccuggagacgccccu

SEQ ID NO: 387654 - RNA, 21 nt, Human
ugguagagaaaccucucuggu

SEQ ID NO: 387655 - RNA, 23 nt, Human
uguaaaauggggauaauaaccaa

SEQ ID NO: 387656 - RNA, 18 nt, Human
uguccaaaucuccaucgu

SEQ ID NO: 387657 - RNA, 22 nt, Human
uguucucugucccuccagaccc

SEQ ID NO: 387658 - RNA, 22 nt, Human
uuaauugaaggaauuguacuag

SEQ ID NO: 387659 - RNA, 19 nt, Human
uuccgcccaggugcucaug

SEQ ID NO: 387660 - RNA, 23 nt, Human
uugagcuucaguuuccucaucug

SEQ ID NO: 387661 - RNA, 21 nt, Human
uuguacuuuuuuauauugucu

SEQ ID NO: 387662 - RNA, 26 nt, Human
uuuacuuuucuucuuuguacuuuuuu

SEQ ID NO: 387663 - RNA, 21 nt, Human
uuuccgcccaggugcucaugg

SEQ ID NO: 387664 - RNA, 28 nt, Human
uuugccagcucaaaauacugguuuaauu

SEQ ID NO: 387665 - RNA, 23 nt, Human
aaaaaaaaaaaaaaaggaaaaaa

SEQ ID NO: 387666 - RNA, 19 nt, Human
aaaaaagcauuucucgggc

SEQ ID NO: 387667 - RNA, 19 nt, Human
aaaaaaguuuuuugccuuc

SEQ ID NO: 387668 - RNA, 18 nt, Human
aaaaaggcauuccagcac

SEQ ID NO: 387669 - RNA, 22 nt, Human
aaaccccgucucuacuaaaaaa

SEQ ID NO: 387670 - RNA, 19 nt, Human
aacacggugaaaccccguc

SEQ ID NO: 387671 - RNA, 19 nt, Human
aacacggugaaaccccguc

SEQ ID NO: 387672 - RNA, 20 nt, Human
aacacggugaaaccccgucu

SEQ ID NO: 387673 - RNA, 20 nt, Human
aacacggugaaaccccgucu

SEQ ID NO: 387674 - RNA, 21 nt, Human
aacacggugaaaccccgucuc

SEQ ID NO: 387675 - RNA, 21 nt, Human
aacacggugaaaccccgucuc

SEQ ID NO: 387676 - RNA, 24 nt, Human
aacagagcgagacucugucucaga

SEQ ID NO: 387677 - RNA, 19 nt, Human
aacauggugaaaccccguc

SEQ ID NO: 387678 - RNA, 20 nt, Human
aacauggugaaaccccgucu

SEQ ID NO: 387679 - RNA, 21 nt, Human
aacauggugaaaccccgucuc

SEQ ID NO: 387680 - RNA, 25 nt, Human
aagaaaaaaaaaaaaggcauuccag

SEQ ID NO: 387681 - RNA, 24 nt, Human
aagaggugagcuccgucucaaaaa

SEQ ID NO: 387682 - RNA, 24 nt, Human
aauacuuuugggaggccgaggcgg

SEQ ID NO: 387683 - RNA, 20 nt, Human
aauugcuugaacccaggagg

SEQ ID NO: 387684 - RNA, 24 nt, Human
aauugcuugaacccaggaggcgga

SEQ ID NO: 387685 - RNA, 24 nt, Human
acagagcgagacucagucucaaaa

SEQ ID NO: 387686 - RNA, 21 nt, Human
acagagcgagacucugucuca

SEQ ID NO: 387687 - RNA, 24 nt, Human
acagagcgagacucugucucagaa

SEQ ID NO: 387688 - RNA, 24 nt, Human
acaggcauuuaacgacgacucaca

SEQ ID NO: 387689 - RNA, 24 nt, Human
acccacauacccaaaagcuuuuug

SEQ ID NO: 387690 - RNA, 25 nt, Human
accccgucucuacuaaaaaauacaa

SEQ ID NO: 387691 - RNA, 24 nt, Human
accccgucucuacuaaaaacacaa

SEQ ID NO: 387692 - RNA, 24 nt, Human
accccgucucuacuaaaaauacaa

SEQ ID NO: 387693 - RNA, 21 nt, Human
accuugaugauuuuuaagagu

SEQ ID NO: 387694 - RNA, 24 nt, Human
acuaaaaauacaaaaauucacugg

SEQ ID NO: 387695 - RNA, 24 nt, Human
acugcacuccagccugggcaacag

SEQ ID NO: 387696 - RNA, 24 nt, Human
acugcacuccagccugggcaacag

SEQ ID NO: 387697 - RNA, 24 nt, Human
acugcacuccagccugggcgacag

SEQ ID NO: 387698 - RNA, 26 nt, Human
acugcacuccagccugggcgacagag

SEQ ID NO: 387699 - RNA, 18 nt, Human
acugcacugcagccuggg

SEQ ID NO: 387700 - RNA, 19 nt, Human
acugcacugcagccugggc

SEQ ID NO: 387701 - RNA, 21 nt, Human
acugcacugcagccugggcgg

SEQ ID NO: 387702 - RNA, 26 nt, Human
acugcacugcagccugggcggaagag

SEQ ID NO: 387703 - RNA, 25 nt, Human
acugcagccugggcggaagagguga

SEQ ID NO: 387704 - RNA, 22 nt, Human
acugggugugguggcaugugcc

SEQ ID NO: 387705 - RNA, 21 nt, Human
acuuuugggaggccgaggcgg

SEQ ID NO: 387706 - RNA, 23 nt, Human
agaaaaaaaaaaaaggcauucca

SEQ ID NO: 387707 - RNA, 19 nt, Human
agaaagauuauuugcagcc

SEQ ID NO: 387708 - RNA, 22 nt, Human
agacaggccagucccuguccuc

SEQ ID NO: 387709 - RNA, 24 nt, Human
agagaugaugguggcuuccacagg

SEQ ID NO: 387710 - RNA, 24 nt, Human
agcacuuugggaggccgaggcggg

SEQ ID NO: 387711 - RNA, 24 nt, Human
agcacuuugggaggcugagguggg

SEQ ID NO: 387712 - RNA, 22 nt, Human
agccacagaauugcuugaaccc

SEQ ID NO: 387713 - RNA, 21 nt, Human
agccgggcgugguggcgggcc

SEQ ID NO: 387714 - RNA, 22 nt, Human
agccuggccaacauggugaaac

SEQ ID NO: 387715 - RNA, 24 nt, Human
agccuggccaacauggugaaaccc

SEQ ID NO: 387716 - RNA, 24 nt, Human
agccugggcaacagagcgagacuc

SEQ ID NO: 387717 - RNA, 24 nt, Human
agccugggcgacagagcgagacuc

SEQ ID NO: 387718 - RNA, 26 nt, Human
agcuugggccagagaugaugguggcu

SEQ ID NO: 387719 - RNA, 18 nt, Human
aggaggucuggcgagcac

SEQ ID NO: 387720 - RNA, 21 nt, Human
aggcaggagaauggcgugaac

SEQ ID NO: 387721 - RNA, 21 nt, Human
aggcaggagaauggcgugaac

SEQ ID NO: 387722 - RNA, 24 nt, Human
aggcaggagaauggcgugaacccg

SEQ ID NO: 387723 - RNA, 24 nt, Human
aggcaggagaauggcgugaacccg

SEQ ID NO: 387724 - RNA, 23 nt, Human
aggcaguggcuccagcgcggggc

SEQ ID NO: 387725 - RNA, 23 nt, Human
aggccgaggcgggcagaucacaa

SEQ ID NO: 387726 - RNA, 21 nt, Human
aggccgaggcgggcggaucac

SEQ ID NO: 387727 - RNA, 24 nt, Human
aggcggacggugccgugagccgag

SEQ ID NO: 387728 - RNA, 21 nt, Human
aggcggagcuugcagugagcc

SEQ ID NO: 387729 - RNA, 24 nt, Human
aggcggagcuugcagugagccgag

SEQ ID NO: 387730 - RNA, 19 nt, Human
aggcggagguugcaguaag

SEQ ID NO: 387731 - RNA, 24 nt, Human
aggcggagguugcaguaagccaag

SEQ ID NO: 387732 - RNA, 24 nt, Human
aggcgggcagaucacaaggucagg

SEQ ID NO: 387733 - RNA, 19 nt, Human
aggcgggcggaucaccagg

SEQ ID NO: 387734 - RNA, 19 nt, Human
aggcugaggcaggagaaug

SEQ ID NO: 387735 - RNA, 21 nt, Human
aggcugaggugggcagaucac

SEQ ID NO: 387736 - RNA, 22 nt, Human
aggguauuauuuuagggagcua

SEQ ID NO: 387737 - RNA, 22 nt, Human
aggugggcagaucaccugaggu

SEQ ID NO: 387738 - RNA, 26 nt, Human
aggugggcagaucaccugaggucagg

SEQ ID NO: 387739 - RNA, 24 nt, Human
aucaugccacugcacugcagccug

SEQ ID NO: 387740 - RNA, 24 nt, Human
aucgcgccacugcacuccagccug

SEQ ID NO: 387741 - RNA, 24 nt, Human
aucgugccacugcacuccagccug

SEQ ID NO: 387742 - RNA, 26 nt, Human
auuauuugcagccgggcgcgguggcu

SEQ ID NO: 387743 - RNA, 25 nt, Human
auuuaacgacgacucacacgaucac

SEQ ID NO: 387744 - RNA, 24 nt, Human
caacauggugaaaccccgucucua

SEQ ID NO: 387745 - RNA, 24 nt, Human
caagaccagccuggccaacauggu

SEQ ID NO: 387746 - RNA, 24 nt, Human
cacgccuguaaucccagcacuuug

SEQ ID NO: 387747 - RNA, 24 nt, Human
cacgccuguaaucccagcacuuug

SEQ ID NO: 387748 - RNA, 23 nt, Human
cacuccagccugggcaacagagc

SEQ ID NO: 387749 - RNA, 24 nt, Human
cacuccagccugggcaacagagcg

SEQ ID NO: 387750 - RNA, 23 nt, Human
cacuccagccugggcgacagagc

SEQ ID NO: 387751 - RNA, 24 nt, Human
cacuccagccugggcgacagagcg

SEQ ID NO: 387752 - RNA, 18 nt, Human
cacugcacuccagccugg

SEQ ID NO: 387753 - RNA, 19 nt, Human
cacugcacuccagccuggg

SEQ ID NO: 387754 - RNA, 19 nt, Human
cacugcacuccagccuggg

SEQ ID NO: 387755 - RNA, 20 nt, Human
cacugcacuccagccugggc

SEQ ID NO: 387756 - RNA, 21 nt, Human
cacugcacuccagccugggca

SEQ ID NO: 387757 - RNA, 23 nt, Human
cacugcacuccagccugggcaac

SEQ ID NO: 387758 - RNA, 24 nt, Human
cacugcacuccagccugggcaaca

SEQ ID NO: 387759 - RNA, 22 nt, Human
cacugcacuccagccugggcga

SEQ ID NO: 387760 - RNA, 23 nt, Human
cacugcacuccagccugggcgac

SEQ ID NO: 387761 - RNA, 24 nt, Human
cacugcacuccagccugggcgaca

SEQ ID NO: 387762 - RNA, 20 nt, Human
cacugcacugcagccugggc

SEQ ID NO: 387763 - RNA, 23 nt, Human
cacugcacugcagccugggcgga

SEQ ID NO: 387764 - RNA, 27 nt, Human
cagaucaccugaggucaggaauucaag

SEQ ID NO: 387765 - RNA, 20 nt, Human
cagcacucaguggagagaga

SEQ ID NO: 387766 - RNA, 24 nt, Human
cagcacuuugggaggccgaggcgg

SEQ ID NO: 387767 - RNA, 24 nt, Human
cagcacuuugggaggcugaggugg

SEQ ID NO: 387768 - RNA, 21 nt, Human
caggcauuuaacgacgacuca

SEQ ID NO: 387769 - RNA, 21 nt, Human
caguggacagacaggccaguc

SEQ ID NO: 387770 - RNA, 18 nt, Human
ccacugcacuccagccug

SEQ ID NO: 387771 - RNA, 20 nt, Human
ccacugcacuccagccuggg

SEQ ID NO: 387772 - RNA, 20 nt, Human
ccacugcacuccagccuggg

SEQ ID NO: 387773 - RNA, 20 nt, Human
ccacugcacuccagccuggg

SEQ ID NO: 387774 - RNA, 20 nt, Human
ccacugcacuccagccuggg

SEQ ID NO: 387775 - RNA, 21 nt, Human
ccacugcacuccagccugggc

SEQ ID NO: 387776 - RNA, 21 nt, Human
ccacugcacuccagccugggc

SEQ ID NO: 387777 - RNA, 21 nt, Human
ccacugcacuccagccugggc

SEQ ID NO: 387778 - RNA, 23 nt, Human
ccacugcacuccagccugggcaa

SEQ ID NO: 387779 - RNA, 24 nt, Human
ccacugcacuccagccugggcaac

SEQ ID NO: 387780 - RNA, 24 nt, Human
ccacugcacuccagccugggcgac

SEQ ID NO: 387781 - RNA, 20 nt, Human
ccacugcacugcagccuggg

SEQ ID NO: 387782 - RNA, 20 nt, Human
ccacugcacugcagccuggg

SEQ ID NO: 387783 - RNA, 21 nt, Human
ccacugcacugcagccugggc

SEQ ID NO: 387784 - RNA, 22 nt, Human
ccacugcacugcagccugggcg

SEQ ID NO: 387785 - RNA, 20 nt, Human
ccagcgcggggcgguggggg

SEQ ID NO: 387786 - RNA, 23 nt, Human
ccccuguagucccagcuacucgg

SEQ ID NO: 387787 - RNA, 24 nt, Human
ccccuguagucccagcuacucggg

SEQ ID NO: 387788 - RNA, 20 nt, Human
cccuguagucccagcuacuc

SEQ ID NO: 387789 - RNA, 23 nt, Human
cccuguaguccgagcuacuuggg

SEQ ID NO: 387790 - RNA, 18 nt, Human
ccgugagccgagaucgug

SEQ ID NO: 387791 - RNA, 23 nt, Human
ccuggccaacauggugaaacccc

SEQ ID NO: 387792 - RNA, 24 nt, Human
ccuggccaacauggugaaaccccg

SEQ ID NO: 387793 - RNA, 23 nt, Human
ccuggcuaacacggugaaacccc

SEQ ID NO: 387794 - RNA, 23 nt, Human
ccuggcuaacacggugaaacccc

SEQ ID NO: 387795 - RNA, 24 nt, Human
ccuggcuaacacggugaaaccccg

SEQ ID NO: 387796 - RNA, 24 nt, Human
ccuggcuaacacggugaaaccccg

SEQ ID NO: 387797 - RNA, 22 nt, Human
ccugggcaacagagcgagacuc

SEQ ID NO: 387798 - RNA, 22 nt, Human
ccugggcgacagagcgagacuc

SEQ ID NO: 387799 - RNA, 22 nt, Human
ccuguaaucccagcacuuuggg

SEQ ID NO: 387800 - RNA, 22 nt, Human
ccuguaaucccagcuacuccgg

SEQ ID NO: 387801 - RNA, 23 nt, Human
ccuguaaucccagcuacuccgga

SEQ ID NO: 387802 - RNA, 21 nt, Human
ccuguagucccagcuacucgg

SEQ ID NO: 387803 - RNA, 22 nt, Human
ccuguagucccagcuacucggg

SEQ ID NO: 387804 - RNA, 18 nt, Human
cgacccagggagggcaag

SEQ ID NO: 387805 - RNA, 24 nt, Human
cgagaccauccuggcuaacacggu

SEQ ID NO: 387806 - RNA, 24 nt, Human
cgagaccauccuggcuaacacggu

SEQ ID NO: 387807 - RNA, 23 nt, Human
cgagacucugucucagaaaaaaa

SEQ ID NO: 387808 - RNA, 24 nt, Human
cgagaucgcgccacugcacuccag

SEQ ID NO: 387809 - RNA, 24 nt, Human
cgagaucgugccacugcacuccag

SEQ ID NO: 387810 - RNA, 19 nt, Human
cgagcaccaucuagggcug

SEQ ID NO: 387811 - RNA, 26 nt, Human
cgccacugcacuccagccugggcgac

SEQ ID NO: 387812 - RNA, 23 nt, Human
cgccuguaaucccagcacuuugg

SEQ ID NO: 387813 - RNA, 24 nt, Human
cgccuguaaucccagcacuuuggg

SEQ ID NO: 387814 - RNA, 22 nt, Human
cgggcagaucacaaggucagga

SEQ ID NO: 387815 - RNA, 24 nt, Human
cggucgucacgccuguaaucccag

SEQ ID NO: 387816 - RNA, 22 nt, Human
cgucacgccuguaaucccagca

SEQ ID NO: 387817 - RNA, 22 nt, Human
cgucacgccuguaaucccagca

SEQ ID NO: 387818 - RNA, 23 nt, Human
cgugguggcgggccccuguaguc

SEQ ID NO: 387819 - RNA, 19 nt, Human
cuaaaaacacaaaaaguua

SEQ ID NO: 387820 - RNA, 18 nt, Human
cucaaaaaaaaaaaaaaa

SEQ ID NO: 387821 - RNA, 18 nt, Human
cucaaaaaaaaaaaaaaa

SEQ ID NO: 387822 - RNA, 24 nt, Human
cucagucucaaaaaaaaaaaaaaa

SEQ ID NO: 387823 - RNA, 19 nt, Human
cuccgucucaaaaaaaaaa

SEQ ID NO: 387824 - RNA, 20 nt, Human
cucuacuaaaaaauacaaaa

SEQ ID NO: 387825 - RNA, 18 nt, Human
cuggcuaacacggugaaa

SEQ ID NO: 387826 - RNA, 18 nt, Human
cuggcuaacacggugaaa

SEQ ID NO: 387827 - RNA, 19 nt, Human
cuugcagugagccgagauc

SEQ ID NO: 387828 - RNA, 21 nt, Human
cuugcagugagccgagaucgc

SEQ ID NO: 387829 - RNA, 23 nt, Human
cuuugggaggcugaggugggcag

SEQ ID NO: 387830 - RNA, 21 nt, Human
gaacccgggaggcggacggug

SEQ ID NO: 387831 - RNA, 19 nt, Human
gacucggagaucccugagc

SEQ ID NO: 387832 - RNA, 18 nt, Human
gacucugucucagaaaaa

SEQ ID NO: 387833 - RNA, 20 nt, Human
gacugggaccuggagguggg

SEQ ID NO: 387834 - RNA, 18 nt, Human
gagccagggcaagaagaa

SEQ ID NO: 387835 - RNA, 24 nt, Human
gagcuacuugggaggcugaggcag

SEQ ID NO: 387836 - RNA, 18 nt, Human
gagcuugcagugagccga

SEQ ID NO: 387837 - RNA, 23 nt, Human
gagcuugcagugagccgagaucg

SEQ ID NO: 387838 - RNA, 24 nt, Human
gaggcgggcagaucacaaggucag

SEQ ID NO: 387839 - RNA, 24 nt, Human
gaggcgggcggaucaccagguuag

SEQ ID NO: 387840 - RNA, 20 nt, Human
gagggcaaggguggaccagg

SEQ ID NO: 387841 - RNA, 18 nt, Human
gagguugcaguaagccaa

SEQ ID NO: 387842 - RNA, 22 nt, Human
gagguugcaguaagccaagauc

SEQ ID NO: 387843 - RNA, 24 nt, Human
gaucaccagguuaggagaucgaga

SEQ ID NO: 387844 - RNA, 18 nt, Human
gaucaccugaggucagga

SEQ ID NO: 387845 - RNA, 24 nt, Human
gaucaccugaggucaggaauucaa

SEQ ID NO: 387846 - RNA, 24 nt, Human
gcacuccagccugggcaacagagc

SEQ ID NO: 387847 - RNA, 24 nt, Human
gcacuccagccugggcgacagagc

SEQ ID NO: 387848 - RNA, 22 nt, Human
gcaugugccuguaaucccagcu

SEQ ID NO: 387849 - RNA, 24 nt, Human
gccaacauggugaaaccccgucuc

SEQ ID NO: 387850 - RNA, 20 nt, Human
gccaagaucaugccacugca

SEQ ID NO: 387851 - RNA, 22 nt, Human
gccacugcacuccagccugggc

SEQ ID NO: 387852 - RNA, 22 nt, Human
gccacugcacuccagccugggc

SEQ ID NO: 387853 - RNA, 24 nt, Human
gccacugcacuccagccugggcaa

SEQ ID NO: 387854 - RNA, 24 nt, Human
gccacugcacuccagccugggcga

SEQ ID NO: 387855 - RNA, 24 nt, Human
gccacugcacugcagccugggcgg

SEQ ID NO: 387856 - RNA, 18 nt, Human
gccaugaagccuccucuu

SEQ ID NO: 387857 - RNA, 20 nt, Human
gccgagaucgcgccacugca

SEQ ID NO: 387858 - RNA, 20 nt, Human
gccgagaucgugccacugca

SEQ ID NO: 387859 - RNA, 24 nt, Human
gcuaacacggugaaaccccgucuc

SEQ ID NO: 387860 - RNA, 24 nt, Human
gcuaacacggugaaaccccgucuc

SEQ ID NO: 387861 - RNA, 22 nt, Human
gcugaggcaggagaauggcgug

SEQ ID NO: 387862 - RNA, 22 nt, Human
gcugaggcaggagaauggcgug

SEQ ID NO: 387863 - RNA, 23 nt, Human
ggaacagaggacugggaccugga

SEQ ID NO: 387864 - RNA, 24 nt, Human
ggacggugccgugagccgagaucg

SEQ ID NO: 387865 - RNA, 24 nt, Human
ggagcuugcagugagccgagaucg

SEQ ID NO: 387866 - RNA, 21 nt, Human
ggagggcaaggguggaccagg

SEQ ID NO: 387867 - RNA, 20 nt, Human
ggagguugcaguaagccaag

SEQ ID NO: 387868 - RNA, 24 nt, Human
ggagguugcaguaagccaagauca

SEQ ID NO: 387869 - RNA, 22 nt, Human
ggaguuuuucagaagcuacauu

SEQ ID NO: 387870 - RNA, 21 nt, Human
ggcagaucacaaggucaggag

SEQ ID NO: 387871 - RNA, 24 nt, Human
ggccagagaugaugguggcuucca

SEQ ID NO: 387872 - RNA, 18 nt, Human
ggcgcgggguuacagcag

SEQ ID NO: 387873 - RNA, 22 nt, Human
ggcgcggucgucacgccuguaa

SEQ ID NO: 387874 - RNA, 23 nt, Human
ggcgcgguggcucacgcggguaa

SEQ ID NO: 387875 - RNA, 19 nt, Human
ggcugaagaacuaggcagu

SEQ ID NO: 387876 - RNA, 19 nt, Human
gggggggacaagugagcca

SEQ ID NO: 387877 - RNA, 23 nt, Human
ggucgucacgccuguaaucccag

SEQ ID NO: 387878 - RNA, 23 nt, Human
ggucgucacgccuguaaucccag

SEQ ID NO: 387879 - RNA, 24 nt, Human
gguggcaugugccuguaaucccag

SEQ ID NO: 387880 - RNA, 23 nt, Human
gguggcucacgcggguaauccca

SEQ ID NO: 387881 - RNA, 22 nt, Human
gguguggucgucacgccuguaa

SEQ ID NO: 387882 - RNA, 23 nt, Human
ggugugguggcaugugccuguaa

SEQ ID NO: 387883 - RNA, 24 nt, Human
gucgucacgccuguaaucccagca

SEQ ID NO: 387884 - RNA, 24 nt, Human
gucgucacgccuguaaucccagca

SEQ ID NO: 387885 - RNA, 21 nt, Human
gucucaaaaaaaaaaaaaaag

SEQ ID NO: 387886 - RNA, 23 nt, Human
guggcaugugccuguaaucccag

SEQ ID NO: 387887 - RNA, 25 nt, Human
gugggccuuaggucccuaugccggc

SEQ ID NO: 387888 - RNA, 21 nt, Human
uaaaaaagcauuucucgggcc

SEQ ID NO: 387889 - RNA, 22 nt, Human
uaacacggugaaaccccgucuc

SEQ ID NO: 387890 - RNA, 22 nt, Human
uaacacggugaaaccccgucuc

SEQ ID NO: 387891 - RNA, 24 nt, Human
uaacacggugaaaccccgucucua

SEQ ID NO: 387892 - RNA, 24 nt, Human
uaacacggugaaaccccgucucua

SEQ ID NO: 387893 - RNA, 21 nt, Human
uaacccacauacccaaaagcu

SEQ ID NO: 387894 - RNA, 23 nt, Human
uaaguguacaguggaguuuuuca

SEQ ID NO: 387895 - RNA, 21 nt, Human
uaccuugaugauuuuuaagag

SEQ ID NO: 387896 - RNA, 24 nt, Human
uaccuugaugauuuuuaagagucc

SEQ ID NO: 387897 - RNA, 18 nt, Human
uagagcuccaagaaggug

SEQ ID NO: 387898 - RNA, 18 nt, Human
uagccgggcgugguggcg

SEQ ID NO: 387899 - RNA, 21 nt, Human
uagcuauaacccacauaccca

SEQ ID NO: 387900 - RNA, 23 nt, Human
uaggcaguggcuccagcgcgggg

SEQ ID NO: 387901 - RNA, 24 nt, Human
uauaacccacauacccaaaagcuu

SEQ ID NO: 387902 - RNA, 19 nt, Human
ucaaaaaaaaaaaaaaagg

SEQ ID NO: 387903 - RNA, 18 nt, Human
ucacaaggucaggagauc

SEQ ID NO: 387904 - RNA, 24 nt, Human
ucacaaggucaggagaucgagacc

SEQ ID NO: 387905 - RNA, 24 nt, Human
ucaccagguuaggagaucgagacc

SEQ ID NO: 387906 - RNA, 23 nt, Human
ucacgccuguaaucccagcacuu

SEQ ID NO: 387907 - RNA, 23 nt, Human
ucacgccuguaaucccagcacuu

SEQ ID NO: 387908 - RNA, 25 nt, Human
ucagucucaaaaaaaaaaaaaaaaa

SEQ ID NO: 387909 - RNA, 20 nt, Human
ucaguggagagagauuggag

SEQ ID NO: 387910 - RNA, 20 nt, Human
uccacaggauggcagugagu

SEQ ID NO: 387911 - RNA, 23 nt, Human
uccagccugggcaacagagcgag

SEQ ID NO: 387912 - RNA, 24 nt, Human
uccagccugggcaacagagcgaga

SEQ ID NO: 387913 - RNA, 23 nt, Human
uccagccugggcgacagagcgag

SEQ ID NO: 387914 - RNA, 24 nt, Human
uccagccugggcgacagagcgaga

SEQ ID NO: 387915 - RNA, 22 nt, Human
ucccugagcugcgccgccgcuu

SEQ ID NO: 387916 - RNA, 23 nt, Human
uccgucucaaaaaaaaaaaaaaa

SEQ ID NO: 387917 - RNA, 22 nt, Human
uccucagccaugaagccuccuc

SEQ ID NO: 387918 - RNA, 23 nt, Human
ucgugccacugcacuccagccug

SEQ ID NO: 387919 - RNA, 22 nt, Human
ucuccaaauguaaccucggccc

SEQ ID NO: 387920 - RNA, 21 nt, Human
ucucuacuaaaaacacaaaaa

SEQ ID NO: 387921 - RNA, 21 nt, Human
ucucuacuaaaaauacaaaaa

SEQ ID NO: 387922 - RNA, 25 nt, Human
ucugucucagaaaaaaagaaaaaaa

SEQ ID NO: 387923 - RNA, 26 nt, Human
ucugucucagaaaaaaagaaaaaaag

SEQ ID NO: 387924 - RNA, 19 nt, Human
ugagagaaaaauugagaac

SEQ ID NO: 387925 - RNA, 24 nt, Human
ugagagaaaaauugagaaccacgu

SEQ ID NO: 387926 - RNA, 22 nt, Human
ugagccgagaucgcgccacugc

SEQ ID NO: 387927 - RNA, 22 nt, Human
ugagccgagaucgugccacugc

SEQ ID NO: 387928 - RNA, 24 nt, Human
ugaggcaggagaauggcgugaacc

SEQ ID NO: 387929 - RNA, 24 nt, Human
ugaggcaggagaauggcgugaacc

SEQ ID NO: 387930 - RNA, 25 nt, Human
ugaggcaggagaauggcgugaaccc

SEQ ID NO: 387931 - RNA, 25 nt, Human
ugaggcaggagaauggcgugaaccc

SEQ ID NO: 387932 - RNA, 20 nt, Human
ugaggugggcagaucaccug

SEQ ID NO: 387933 - RNA, 24 nt, Human
ugaggugggcagaucaccugaggu

SEQ ID NO: 387934 - RNA, 26 nt, Human
ugaggugggcagaucaccugagguca

SEQ ID NO: 387935 - RNA, 19 nt, Human
ugaugauuuuuaagagucc

SEQ ID NO: 387936 - RNA, 24 nt, Human
ugcagccgggcgcgguggcucacg

SEQ ID NO: 387937 - RNA, 24 nt, Human
ugccacugcacuccagccugggca

SEQ ID NO: 387938 - RNA, 23 nt, Human
ugccgugagccgagaucgugcca

SEQ ID NO: 387939 - RNA, 19 nt, Human
ugccuguaaucccagcuac

SEQ ID NO: 387940 - RNA, 24 nt, Human
ugccuguaaucccagcuacuccgg

SEQ ID NO: 387941 - RNA, 20 nt, Human
uggagagagauuggagggau

SEQ ID NO: 387942 - RNA, 19 nt, Human
uggaggugggcgggaggcg

SEQ ID NO: 387943 - RNA, 21 nt, Human
uggcaugugccuguaauccca

SEQ ID NO: 387944 - RNA, 24 nt, Human
uggccaacauggugaaaccccguc

SEQ ID NO: 387945 - RNA, 24 nt, Human
uggcuccagcgcggggcggugggg

SEQ ID NO: 387946 - RNA, 20 nt, Human
ugggaggccgaggcgggcag

SEQ ID NO: 387947 - RNA, 24 nt, Human
ugggaggccgaggcgggcagauca

SEQ ID NO: 387948 - RNA, 19 nt, Human
ugggaggccgaggcgggcg

SEQ ID NO: 387949 - RNA, 24 nt, Human
ugggaggccgaggcgggcggauca

SEQ ID NO: 387950 - RNA, 18 nt, Human
ugggaggcugaggcagga

SEQ ID NO: 387951 - RNA, 24 nt, Human
ugggaggcugaggcaggagaaugg

SEQ ID NO: 387952 - RNA, 20 nt, Human
ugggaggcugaggugggcag

SEQ ID NO: 387953 - RNA, 24 nt, Human
ugggaggcugaggugggcagauca

SEQ ID NO: 387954 - RNA, 24 nt, Human
ugggcagaucaccugaggucagga

SEQ ID NO: 387955 - RNA, 19 nt, Human
ugggccagagaugauggug

SEQ ID NO: 387956 - RNA, 18 nt, Human
ugggugugguggcaugug

SEQ ID NO: 387957 - RNA, 23 nt, Human
uggucgucacgccuguaauccca

SEQ ID NO: 387958 - RNA, 24 nt, Human
uggucgucacgccuguaaucccag

SEQ ID NO: 387959 - RNA, 24 nt, Human
ugguggcaugugccuguaauccca

SEQ ID NO: 387960 - RNA, 23 nt, Human
ugguggcgggccccuguaguccc

SEQ ID NO: 387961 - RNA, 24 nt, Human
ugguggcgggccccuguaguccca

SEQ ID NO: 387962 - RNA, 18 nt, Human
uuagccgggcgugguggc

SEQ ID NO: 387963 - RNA, 24 nt, Human
uugaacccaggaggcggagguugc

SEQ ID NO: 387964 - RNA, 18 nt, Human
uugcagugagccgagauc

SEQ ID NO: 387965 - RNA, 19 nt, Human
uugcagugagccgagaucg

SEQ ID NO: 387966 - RNA, 22 nt, Human
uugcagugagccgagaucgcgc

SEQ ID NO: 387967 - RNA, 24 nt, Human
uugcuugaacccaggaggcggagg

SEQ ID NO: 387968 - RNA, 24 nt, Human
uuggagggauuaggagcagaugau

SEQ ID NO: 387969 - RNA, 25 nt, Human
uugggaggccgaggcgggcagauca

SEQ ID NO: 387970 - RNA, 25 nt, Human
uugggaggccgaggcgggcggauca

SEQ ID NO: 387971 - RNA, 25 nt, Human
uugggaggcugaggugggcagauca

SEQ ID NO: 387972 - RNA, 25 nt, Human
uuuuuuuuuuuuuggaagcacugga

SEQ ID NO: 387973 - RNA, 18 nt, Human
uuuuuuuuuuuuuuuuug

SEQ ID NO: 387974 - RNA, 21 nt, Human
aaaagucugaacagcagcagc

SEQ ID NO: 387975 - RNA, 21 nt, Human
aauauguuuaaggcacauggc

SEQ ID NO: 387976 - RNA, 23 nt, Human
aggaagaauacaauuuaacaaaa

SEQ ID NO: 387977 - RNA, 24 nt, Human
caaauuaucacaauaaauuucaga

SEQ ID NO: 387978 - RNA, 20 nt, Human
caguucacuaaggaaggcac

SEQ ID NO: 387979 - RNA, 23 nt, Human
guccaaauaguuuuuuuuaaaaa

SEQ ID NO: 387980 - RNA, 22 nt, Human
uaaaaaagucugaacagcagca

SEQ ID NO: 387981 - RNA, 21 nt, Human
uaaaggggaaaauauauagua

SEQ ID NO: 387982 - RNA, 26 nt, Human
uaacaaaaaguguuuauuaaagggga

SEQ ID NO: 387983 - RNA, 23 nt, Human
uaaggcacauggcaaacuuuugg

SEQ ID NO: 387984 - RNA, 22 nt, Human
uauaguaauauguuuaaggcac

SEQ ID NO: 387985 - RNA, 24 nt, Human
ugcaagaaaaaagaaauacaaauu

SEQ ID NO: 387986 - RNA, 20 nt, Human
aagcccggagucgcggccgg

SEQ ID NO: 387987 - RNA, 19 nt, Human
acccagggagcccagggag

SEQ ID NO: 387988 - RNA, 19 nt, Human
accgucccgccuccuuccu

SEQ ID NO: 387989 - RNA, 18 nt, Human
acuccggcaaccgccagc

SEQ ID NO: 387990 - RNA, 21 nt, Human
acugggguagcagcugcugca

SEQ ID NO: 387991 - RNA, 18 nt, Human
agaaaacuacagaaccca

SEQ ID NO: 387992 - RNA, 18 nt, Human
agaaaacuacagaaccca

SEQ ID NO: 387993 - RNA, 18 nt, Human
agacagggggcugcaguu

SEQ ID NO: 387994 - RNA, 20 nt, Human
agcccggagucgcggcccca

SEQ ID NO: 387995 - RNA, 21 nt, Human
aggcaggcagucugugucaga

SEQ ID NO: 387996 - RNA, 21 nt, Human
aggcaggcagucugugucaga

SEQ ID NO: 387997 - RNA, 22 nt, Human
aggcagucugugucagagguag

SEQ ID NO: 387998 - RNA, 22 nt, Human
aggcagucugugucagagguag

SEQ ID NO: 387999 - RNA, 24 nt, Human
agggcccagggcacccagggagcc

SEQ ID NO: 388000 - RNA, 21 nt, Human
agggccggggccaagcccgga

SEQ ID NO: 388001 - RNA, 23 nt, Human
aucaccaauaaaaugaggacgga

SEQ ID NO: 388002 - RNA, 22 nt, Human
auggugaauucuuugcgguggg

SEQ ID NO: 388003 - RNA, 20 nt, Human
caacugcggagggacaggau

SEQ ID NO: 388004 - RNA, 21 nt, Human
caagcccggagucgcggccgg

SEQ ID NO: 388005 - RNA, 26 nt, Human
caauacacagccgacgagcuagggcu

SEQ ID NO: 388006 - RNA, 18 nt, Human
caccaauggagaaguggu

SEQ ID NO: 388007 - RNA, 19 nt, Human
caccaggcacuggcagagu

SEQ ID NO: 388008 - RNA, 22 nt, Human
cacccuacuucgugagccucca

SEQ ID NO: 388009 - RNA, 19 nt, Human
caccgugugcacucgaagc

SEQ ID NO: 388010 - RNA, 22 nt, Human
cacgcgccccaauacacagccg

SEQ ID NO: 388011 - RNA, 18 nt, Human
cagaaagagcagggagca

SEQ ID NO: 388012 - RNA, 18 nt, Human
cagaaagagcagggagca

SEQ ID NO: 388013 - RNA, 18 nt, Human
cagaggcagaaagagcag

SEQ ID NO: 388014 - RNA, 18 nt, Human
cagaggcagaaagagcag

SEQ ID NO: 388015 - RNA, 21 nt, Human
cagaggcagaaagagcaggga

SEQ ID NO: 388016 - RNA, 21 nt, Human
cagaggcagaaagagcaggga

SEQ ID NO: 388017 - RNA, 20 nt, Human
cagcaguaaaaaccggaaug

SEQ ID NO: 388018 - RNA, 21 nt, Human
cagcccccugauuucauuccc

SEQ ID NO: 388019 - RNA, 21 nt, Human
cagcccccugauuucauuccc

SEQ ID NO: 388020 - RNA, 21 nt, Human
cagcuggggcuucacuugcug

SEQ ID NO: 388021 - RNA, 20 nt, Human
caggcagggcccagggcacc

SEQ ID NO: 388022 - RNA, 23 nt, Human
cagggcacccagggagcccaggg

SEQ ID NO: 388023 - RNA, 24 nt, Human
caucaccaauaaaaugaggacgga

SEQ ID NO: 388024 - RNA, 24 nt, Human
caucaccaauaaaaugaggacgga

SEQ ID NO: 388025 - RNA, 21 nt, Human
caucugugucgcagcuggaga

SEQ ID NO: 388026 - RNA, 25 nt, Human
ccaauacacagccgacgagcuaggg

SEQ ID NO: 388027 - RNA, 24 nt, Human
ccauccaggcgggagcccacacca

SEQ ID NO: 388028 - RNA, 18 nt, Human
ccaucugugucgcagcug

SEQ ID NO: 388029 - RNA, 26 nt, Human
cccacaccaauggagaaguggucauc

SEQ ID NO: 388030 - RNA, 20 nt, Human
cccagaggcagaaagagcag

SEQ ID NO: 388031 - RNA, 20 nt, Human
cccagaggcagaaagagcag

SEQ ID NO: 388032 - RNA, 21 nt, Human
cccagggcacccagggagccc

SEQ ID NO: 388033 - RNA, 23 nt, Human
cccccgcccacccuacuucguga

SEQ ID NO: 388034 - RNA, 24 nt, Human
ccccugauuucauucccauucauc

SEQ ID NO: 388035 - RNA, 24 nt, Human
ccccugauuucauucccauucauc

SEQ ID NO: 388036 - RNA, 21 nt, Human
cccgccuccuuccuuccgcgc

SEQ ID NO: 388037 - RNA, 22 nt, Human
cccgcgggcgccaccgugacug

SEQ ID NO: 388038 - RNA, 20 nt, Human
cccuacuucgugagccucca

SEQ ID NO: 388039 - RNA, 23 nt, Human
ccgccuccuuccuuccgcgcccc

SEQ ID NO: 388040 - RNA, 20 nt, Human
ccgcgcccccucucucccgg

SEQ ID NO: 388041 - RNA, 18 nt, Human
ccgucccgccuccuuccu

SEQ ID NO: 388042 - RNA, 22 nt, Human
ccucaccacgggcugccucccu

SEQ ID NO: 388043 - RNA, 18 nt, Human
ccucccuggugguugcag

SEQ ID NO: 388044 - RNA, 23 nt, Human
ccucccuggugguugcagagcca

SEQ ID NO: 388045 - RNA, 18 nt, Human
ccugggccccgguuucga

SEQ ID NO: 388046 - RNA, 22 nt, Human
cgccccaauacacagccgacga

SEQ ID NO: 388047 - RNA, 18 nt, Human
cgcccccucucucccggu

SEQ ID NO: 388048 - RNA, 20 nt, Human
cgcccccucucucccggucc

SEQ ID NO: 388049 - RNA, 25 nt, Human
cggcagcaggcagggcccagggcac

SEQ ID NO: 388050 - RNA, 20 nt, Human
cgggcugccucccuggugga

SEQ ID NO: 388051 - RNA, 19 nt, Human
cucaaugaaacgcuccacu

SEQ ID NO: 388052 - RNA, 19 nt, Human
cucagagagcucacugagg

SEQ ID NO: 388053 - RNA, 26 nt, Human
cucccaaucucaaugaaacgcuccac

SEQ ID NO: 388054 - RNA, 20 nt, Human
cuccugggucacuguguacu

SEQ ID NO: 388055 - RNA, 22 nt, Human
cugcagggcacggcgggcagcc

SEQ ID NO: 388056 - RNA, 19 nt, Human
cugcgugcguggcucgccc

SEQ ID NO: 388057 - RNA, 20 nt, Human
cugcugcagcaguaaaaacc

SEQ ID NO: 388058 - RNA, 25 nt, Human
cuuccgcgcccccucucucccgguc

SEQ ID NO: 388059 - RNA, 20 nt, Human
cuucucgagaaggccguauu

SEQ ID NO: 388060 - RNA, 19 nt, Human
gacgugaaaggccugcucc

SEQ ID NO: 388061 - RNA, 20 nt, Human
gacugcagccuccacgcgcc

SEQ ID NO: 388062 - RNA, 24 nt, Human
gagaaaacuacagaacccaagagc

SEQ ID NO: 388063 - RNA, 24 nt, Human
gagaaaacuacagaacccaagagc

SEQ ID NO: 388064 - RNA, 20 nt, Human
gagguagagauggcacccac

SEQ ID NO: 388065 - RNA, 23 nt, Human
gcacggagccuuuuggaucgcga

SEQ ID NO: 388066 - RNA, 23 nt, Human
gcacggagccuuuuggaucgcga

SEQ ID NO: 388067 - RNA, 18 nt, Human
gcccagggagcaacugcg

SEQ ID NO: 388068 - RNA, 19 nt, Human
gcccagggagcaacugcgg

SEQ ID NO: 388069 - RNA, 21 nt, Human
gcccagggcacccagggagcc

SEQ ID NO: 388070 - RNA, 21 nt, Human
gccccaauacacagccgacga

SEQ ID NO: 388071 - RNA, 21 nt, Human
gccccgguuucgaagaccauc

SEQ ID NO: 388072 - RNA, 18 nt, Human
gcuggcugaggcucugug

SEQ ID NO: 388073 - RNA, 23 nt, Human
gcuguggacaugcguacuagcgg

SEQ ID NO: 388074 - RNA, 23 nt, Human
ggagucccccgcccacccuacuu

SEQ ID NO: 388075 - RNA, 19 nt, Human
ggcuggcugaggcucugug

SEQ ID NO: 388076 - RNA, 20 nt, Human
gucgcuucucgagaaggccg

SEQ ID NO: 388077 - RNA, 18 nt, Human
gugaaaggccugcuccuc

SEQ ID NO: 388078 - RNA, 22 nt, Human
gugcaaccugggccccgguuuc

SEQ ID NO: 388079 - RNA, 23 nt, Human
uacagaacccaagagcccgcgcg

SEQ ID NO: 388080 - RNA, 18 nt, Human
uagcggaggggaagccgc

SEQ ID NO: 388081 - RNA, 24 nt, Human
uccacgcgccccaauacacagccg

SEQ ID NO: 388082 - RNA, 24 nt, Human
uccaugggggggcuccugguuagg

SEQ ID NO: 388083 - RNA, 22 nt, Human
ucccaggugcaaccugggcccc

SEQ ID NO: 388084 - RNA, 24 nt, Human
ucccccgcccacccuacuucguga

SEQ ID NO: 388085 - RNA, 18 nt, Human
uccgcgcccccucucucc

SEQ ID NO: 388086 - RNA, 25 nt, Human
uccugguuaggacuacagauggaac

SEQ ID NO: 388087 - RNA, 18 nt, Human
ucugcaccaccagcuccu

SEQ ID NO: 388088 - RNA, 19 nt, Human
ucugugucagagguagaga

SEQ ID NO: 388089 - RNA, 19 nt, Human
ucugugucagagguagaga

SEQ ID NO: 388090 - RNA, 19 nt, Human
ugacugcagccuccacgcg

SEQ ID NO: 388091 - RNA, 21 nt, Human
ugccaauuuuuuggaagugcc

SEQ ID NO: 388092 - RNA, 23 nt, Human
ugcccugugccuucucagcuuca

SEQ ID NO: 388093 - RNA, 23 nt, Human
ugcccugugccuucucagcuuca

SEQ ID NO: 388094 - RNA, 18 nt, Human
ugcguggcucgcccgggc

SEQ ID NO: 388095 - RNA, 18 nt, Human
uggccggcuggguggaca

SEQ ID NO: 388096 - RNA, 19 nt, Human
uggccggcuggguggacag

SEQ ID NO: 388097 - RNA, 23 nt, Human
uggcugaggcucugugguccuug

SEQ ID NO: 388098 - RNA, 23 nt, Human
uggcugaggcucugugguccuug

SEQ ID NO: 388099 - RNA, 22 nt, Human
ugggcacggagccuuuuggauc

SEQ ID NO: 388100 - RNA, 22 nt, Human
ugggcacggagccuuuuggauc

SEQ ID NO: 388101 - RNA, 22 nt, Human
ugggcuggcccagacuccuggg

SEQ ID NO: 388102 - RNA, 24 nt, Human
uggguagggaggcgguaaggacuc

SEQ ID NO: 388103 - RNA, 24 nt, Human
ugugccuucucagcuucaaggcag

SEQ ID NO: 388104 - RNA, 24 nt, Human
ugugccuucucagcuucaaggcag

SEQ ID NO: 388105 - RNA, 18 nt, Human
uucugcaccaccagcucc

SEQ ID NO: 388106 - RNA, 21 nt, Human
aaaaacaaaacaaaagaacca

SEQ ID NO: 388107 - RNA, 19 nt, Human
aaaacaaaacaaaagaacc

SEQ ID NO: 388108 - RNA, 22 nt, Human
aaaagaaccaaacacugugaca

SEQ ID NO: 388109 - RNA, 19 nt, Human
aaaagcauccaagcacagg

SEQ ID NO: 388110 - RNA, 21 nt, Human
aaaagucuuccaacagaugug

SEQ ID NO: 388111 - RNA, 21 nt, Human
aaaauauccauuaugcaccac

SEQ ID NO: 388112 - RNA, 18 nt, Human
aaacaaaagaaccaaaca

SEQ ID NO: 388113 - RNA, 18 nt, Human
aaacauucguacauuauu

SEQ ID NO: 388114 - RNA, 18 nt, Human
aacagauguggauguccu

SEQ ID NO: 388115 - RNA, 19 nt, Human
aagcgcagcccagccaccg

SEQ ID NO: 388116 - RNA, 22 nt, Human
aaggaaaaaaauccauauggug

SEQ ID NO: 388117 - RNA, 19 nt, Human
acaaaacaaaagaaccaaa

SEQ ID NO: 388118 - RNA, 23 nt, Human
acagaagagaacacacaccauac

SEQ ID NO: 388119 - RNA, 22 nt, Human
acaggacacagaacugcagcaa

SEQ ID NO: 388120 - RNA, 19 nt, Human
accaagucucugcacgcgc

SEQ ID NO: 388121 - RNA, 20 nt, Human
accaagucucugcacgcgcu

SEQ ID NO: 388122 - RNA, 24 nt, Human
acggacccaagcgcagcccagcca

SEQ ID NO: 388123 - RNA, 27 nt, Human
aggggagacaaguguuaaaaaacaaaa

SEQ ID NO: 388124 - RNA, 23 nt, Human
agguuucaaaaguucagacagcc

SEQ ID NO: 388125 - RNA, 19 nt, Human
augaaggcuucauauugua

SEQ ID NO: 388126 - RNA, 24 nt, Human
auggcagaauauuuacagcacuac

SEQ ID NO: 388127 - RNA, 24 nt, Human
caaacagcauucuuauggguagcu

SEQ ID NO: 388128 - RNA, 19 nt, Human
caacagauguggauguccu

SEQ ID NO: 388129 - RNA, 23 nt, Human
caacagauguggauguccuuuga

SEQ ID NO: 388130 - RNA, 26 nt, Human
caaguaucauuucacuuaacacauuc

SEQ ID NO: 388131 - RNA, 20 nt, Human
cacaccacaagcucagucca

SEQ ID NO: 388132 - RNA, 18 nt, Human
cacagaacugcagcaaac

SEQ ID NO: 388133 - RNA, 23 nt, Human
caccaagucucugcacgcgcucu

SEQ ID NO: 388134 - RNA, 19 nt, Human
caccgcuucgcucccacaa

SEQ ID NO: 388135 - RNA, 23 nt, Human
cacugugacaccaugaucuccua

SEQ ID NO: 388136 - RNA, 21 nt, Human
cagaacugcagcaaacagcag

SEQ ID NO: 388137 - RNA, 21 nt, Human
cagcccagccaccgcuucgcu

SEQ ID NO: 388138 - RNA, 21 nt, Human
cagccuucugguuccauauca

SEQ ID NO: 388139 - RNA, 24 nt, Human
cagggauaaaauauuacaggagaa

SEQ ID NO: 388140 - RNA, 24 nt, Human
cauucguacauuauuugcuaucau

SEQ ID NO: 388141 - RNA, 22 nt, Human
ccaccgcuucgcucccacaaaa

SEQ ID NO: 388142 - RNA, 20 nt, Human
ccaugaguuuagaaaaauuu

SEQ ID NO: 388143 - RNA, 18 nt, Human
ccuccugcaaagcacacc

SEQ ID NO: 388144 - RNA, 22 nt, Human
cgcucucuccuuuucucgcuca

SEQ ID NO: 388145 - RNA, 18 nt, Human
cggacccaagcgcagccc

SEQ ID NO: 388146 - RNA, 18 nt, Human
cguacauuauuugcuauc

SEQ ID NO: 388147 - RNA, 19 nt, Human
cuaagaacaaaaacucacu

SEQ ID NO: 388148 - RNA, 19 nt, Human
cucugcacgcgcucucucc

SEQ ID NO: 388149 - RNA, 23 nt, Human
cugcacgcgcucucuccuuuucu

SEQ ID NO: 388150 - RNA, 22 nt, Human
gaauuuccaacaaugacaacuc

SEQ ID NO: 388151 - RNA, 21 nt, Human
gcaccaccaucaaucccacac

SEQ ID NO: 388152 - RNA, 18 nt, Human
gcuagggccgccuccucc

SEQ ID NO: 388153 - RNA, 23 nt, Human
gggauaaaauauuacaggagaaa

SEQ ID NO: 388154 - RNA, 24 nt, Human
gugggguucaaauuaaaacaaggg

SEQ ID NO: 388155 - RNA, 22 nt, Human
uaaaaaacaaaacaaaagaacc

SEQ ID NO: 388156 - RNA, 23 nt, Human
uaaaaaacaaaacaaaagaacca

SEQ ID NO: 388157 - RNA, 24 nt, Human
uaaaaaacaaaacaaaagaaccaa

SEQ ID NO: 388158 - RNA, 24 nt, Human
uaaaaaauauccauuaugcaccac

SEQ ID NO: 388159 - RNA, 18 nt, Human
uaaaaagcauccaagcac

SEQ ID NO: 388160 - RNA, 19 nt, Human
uaaaaagcauccaagcaca

SEQ ID NO: 388161 - RNA, 20 nt, Human
uaaaauuccuuuagcucuuc

SEQ ID NO: 388162 - RNA, 22 nt, Human
uacagcauucacagcaguugac

SEQ ID NO: 388163 - RNA, 25 nt, Human
uacagcauucacagcaguugacaaa

SEQ ID NO: 388164 - RNA, 21 nt, Human
uaccaaccaaccacaacccca

SEQ ID NO: 388165 - RNA, 21 nt, Human
uauaaaaagcauccaagcaca

SEQ ID NO: 388166 - RNA, 24 nt, Human
uauacuuaccaugaguuuagaaaa

SEQ ID NO: 388167 - RNA, 18 nt, Human
uaucauugcucucugcac

SEQ ID NO: 388168 - RNA, 18 nt, Human
uaucuaagaacaaaaacu

SEQ ID NO: 388169 - RNA, 19 nt, Human
uccagggauaaaauauuac

SEQ ID NO: 388170 - RNA, 22 nt, Human
uccuauggcagaauauuuacag

SEQ ID NO: 388171 - RNA, 20 nt, Human
ucuuugagacaccugagcuc

SEQ ID NO: 388172 - RNA, 18 nt, Human
ugcuucaaguccuccugc

SEQ ID NO: 388173 - RNA, 21 nt, Human
ugggacacccaccgucaaaga

SEQ ID NO: 388174 - RNA, 23 nt, Human
ugggacacccaccgucaaagacg

SEQ ID NO: 388175 - RNA, 21 nt, Human
uguuaaaaaacaaaacaaaag

SEQ ID NO: 388176 - RNA, 23 nt, Human
uguuaaaaaacaaaacaaaagaa

SEQ ID NO: 388177 - RNA, 26 nt, Human
uguuaaaaaacaaaacaaaagaacca

SEQ ID NO: 388178 - RNA, 24 nt, Human
uuaaaagucuuccaacagaugugg

SEQ ID NO: 388179 - RNA, 24 nt, Human
uuaccaugaguuuagaaaaauuug

SEQ ID NO: 388180 - RNA, 22 nt, Human
uucauguaacaaaacuuauaaa

SEQ ID NO: 388181 - RNA, 22 nt, Human
uuccaacagauguggauguccu

SEQ ID NO: 388182 - RNA, 21 nt, Human
uucucagcccaucagcuucag

SEQ ID NO: 388183 - RNA, 27 nt, Human
uugccacacuuacauaucaguaacaga

SEQ ID NO: 388184 - RNA, 26 nt, Human
uuuaagaauuuccaacaaugacaacu

SEQ ID NO: 388185 - RNA, 25 nt, Human
uuucacuuaacacauucaucuaaug

SEQ ID NO: 388186 - RNA, 23 nt, Human
uuugaauucccaccauucuauac

SEQ ID NO: 388187 - RNA, 19 nt, Human
aaaaaaaaaagaaaaacaa

SEQ ID NO: 388188 - RNA, 22 nt, Human
aaaaaaaaaagaaaaacaauaa

SEQ ID NO: 388189 - RNA, 21 nt, Human
aaaaaaagaaaaaaaagaaag

SEQ ID NO: 388190 - RNA, 19 nt, Human
aaaaaagaaaaacaauaau

SEQ ID NO: 388191 - RNA, 21 nt, Human
aaaaaagaaagccugaugcac

SEQ ID NO: 388192 - RNA, 26 nt, Human
aaaaaucaauaaaaaguucaaauagc

SEQ ID NO: 388193 - RNA, 23 nt, Human
aaaagcaggaacaaucuugaacc

SEQ ID NO: 388194 - RNA, 23 nt, Human
aaagaaagaaacaaagaaaagaa

SEQ ID NO: 388195 - RNA, 22 nt, Human
aaagaaagaaagaaacaaagaa

SEQ ID NO: 388196 - RNA, 19 nt, Human
aaagcucccuuagcucuuc

SEQ ID NO: 388197 - RNA, 28 nt, Human
aaauaaagaaagaaagaaacaaagaaaa

SEQ ID NO: 388198 - RNA, 22 nt, Human
aaauaauucuuuacucccccca

SEQ ID NO: 388199 - RNA, 19 nt, Human
aacauggugaaacccuguc

SEQ ID NO: 388200 - RNA, 20 nt, Human
aacauggugaaacccugucu

SEQ ID NO: 388201 - RNA, 21 nt, Human
aacauggugaaacccugucuc

SEQ ID NO: 388202 - RNA, 21 nt, Human
aagaaaaacaauaauuuaugc

SEQ ID NO: 388203 - RNA, 24 nt, Human
aagaaaagaaaagcuuauauugaa

SEQ ID NO: 388204 - RNA, 22 nt, Human
aagaaagaaacaaagaaaagaa

SEQ ID NO: 388205 - RNA, 23 nt, Human
aagaaagaaagaaacaaagaaaa

SEQ ID NO: 388206 - RNA, 20 nt, Human
aagaagccaaccccgaaagc

SEQ ID NO: 388207 - RNA, 20 nt, Human
aagcagccuccaagaagcca

SEQ ID NO: 388208 - RNA, 22 nt, Human
aaggagaaagcagccuccaaga

SEQ ID NO: 388209 - RNA, 20 nt, Human
aaguaaaggagaaagcagcc

SEQ ID NO: 388210 - RNA, 24 nt, Human
aaucgcuugaacccaggaggugga

SEQ ID NO: 388211 - RNA, 21 nt, Human
acacaguaguauuucuggaag

SEQ ID NO: 388212 - RNA, 24 nt, Human
acagagcaagacuccaucucaaaa

SEQ ID NO: 388213 - RNA, 24 nt, Human
acccaggagguggagguugcagug

SEQ ID NO: 388214 - RNA, 24 nt, Human
accccgaaagcucccuuagcucuu

SEQ ID NO: 388215 - RNA, 24 nt, Human
acccugucucuacuaaaaauacaa

SEQ ID NO: 388216 - RNA, 18 nt, Human
acugcacuccagcauggg

SEQ ID NO: 388217 - RNA, 24 nt, Human
acugcacuccagcaugggcgacag

SEQ ID NO: 388218 - RNA, 23 nt, Human
agaaaagaaaagcuuauauugaa

SEQ ID NO: 388219 - RNA, 19 nt, Human
agaccugccuggagagagc

SEQ ID NO: 388220 - RNA, 21 nt, Human
agagggaggcagauuaaugaa

SEQ ID NO: 388221 - RNA, 22 nt, Human
agauugccugaggucaggaguu

SEQ ID NO: 388222 - RNA, 23 nt, Human
agcaacuuuuccuaauguguuua

SEQ ID NO: 388223 - RNA, 24 nt, Human
agcaugggcgacagagcaagacuc

SEQ ID NO: 388224 - RNA, 21 nt, Human
agccgggcaugguggcucacg

SEQ ID NO: 388225 - RNA, 22 nt, Human
agccuggcuaacauggugaaac

SEQ ID NO: 388226 - RNA, 24 nt, Human
agccuggcuaacauggugaaaccc

SEQ ID NO: 388227 - RNA, 18 nt, Human
aggaaaugguugggggca

SEQ ID NO: 388228 - RNA, 22 nt, Human
aggagaaagcagccuccaagaa

SEQ ID NO: 388229 - RNA, 20 nt, Human
aggaguuugagaccagccug

SEQ ID NO: 388230 - RNA, 18 nt, Human
aggcaagagaaucgcuug

SEQ ID NO: 388231 - RNA, 24 nt, Human
aggcaagagaaucgcuugaaccca

SEQ ID NO: 388232 - RNA, 22 nt, Human
aggcgggcagauugccugaggu

SEQ ID NO: 388233 - RNA, 24 nt, Human
aggcgggcagauugccugagguca

SEQ ID NO: 388234 - RNA, 24 nt, Human
agguggagguugcagugagccgag

SEQ ID NO: 388235 - RNA, 24 nt, Human
agguugaggcaagagaaucgcuug

SEQ ID NO: 388236 - RNA, 23 nt, Human
aguaaaggagaaagcagccucca

SEQ ID NO: 388237 - RNA, 24 nt, Human
aucgcgccacugcacuccagcaug

SEQ ID NO: 388238 - RNA, 22 nt, Human
aucuuuuucuuuucccucaucc

SEQ ID NO: 388239 - RNA, 22 nt, Human
auuaaaaaaaaaaaaagaaaaa

SEQ ID NO: 388240 - RNA, 24 nt, Human
auugccugaggucaggaguuugag

SEQ ID NO: 388241 - RNA, 24 nt, Human
caaaauaauucuuuacucccccca

SEQ ID NO: 388242 - RNA, 18 nt, Human
caacuuuuccuaaugugu

SEQ ID NO: 388243 - RNA, 20 nt, Human
caccaaauacaugugucccc

SEQ ID NO: 388244 - RNA, 20 nt, Human
caccugagucccugaggagc

SEQ ID NO: 388245 - RNA, 23 nt, Human
cacgccuguaaucccaguacuuu

SEQ ID NO: 388246 - RNA, 23 nt, Human
cacuccagcaugggcgacagagc

SEQ ID NO: 388247 - RNA, 19 nt, Human
cacugcacuccagcauggg

SEQ ID NO: 388248 - RNA, 21 nt, Human
cacugcacuccagcaugggcg

SEQ ID NO: 388249 - RNA, 22 nt, Human
cacugcacuccagcaugggcga

SEQ ID NO: 388250 - RNA, 23 nt, Human
cacugcacuccagcaugggcgac

SEQ ID NO: 388251 - RNA, 24 nt, Human
cacugcacuccagcaugggcgaca

SEQ ID NO: 388252 - RNA, 24 nt, Human
cagauugccugaggucaggaguuu

SEQ ID NO: 388253 - RNA, 18 nt, Human
cagcaugggcgacagagc

SEQ ID NO: 388254 - RNA, 29 nt, Human
caggagguggagguugcagugacaacggu

SEQ ID NO: 388255 - RNA, 24 nt, Human
caggagguggagguugcagugagc

SEQ ID NO: 388256 - RNA, 24 nt, Human
caguacuuuaggagacccaggcgg

SEQ ID NO: 388257 - RNA, 23 nt, Human
ccaaccccgaaagcucccuuagc

SEQ ID NO: 388258 - RNA, 20 nt, Human
ccacugcacuccagcauggg

SEQ ID NO: 388259 - RNA, 20 nt, Human
ccacugcacuccagcauggg

SEQ ID NO: 388260 - RNA, 21 nt, Human
ccacugcacuccagcaugggc

SEQ ID NO: 388261 - RNA, 23 nt, Human
ccacugcacuccagcaugggcga

SEQ ID NO: 388262 - RNA, 24 nt, Human
ccacugcacuccagcaugggcgac

SEQ ID NO: 388263 - RNA, 21 nt, Human
cccaggagguggagguugcag

SEQ ID NO: 388264 - RNA, 21 nt, Human
ccccccaaaaaucaauaaaaa

SEQ ID NO: 388265 - RNA, 21 nt, Human
cccugaggagccgcaaggccu

SEQ ID NO: 388266 - RNA, 23 nt, Human
cccugaggagccgcaaggccuag

SEQ ID NO: 388267 - RNA, 18 nt, Human
ccuccaagaagccaaccc

SEQ ID NO: 388268 - RNA, 22 nt, Human
ccugaggucaggaguuugagac

SEQ ID NO: 388269 - RNA, 19 nt, Human
ccuggagagagcguguucu

SEQ ID NO: 388270 - RNA, 22 nt, Human
ccuggcuaacauggugaaaccc

SEQ ID NO: 388271 - RNA, 24 nt, Human
ccuggcuaacauggugaaacccug

SEQ ID NO: 388272 - RNA, 21 nt, Human
ccuguagucccaacugcuugg

SEQ ID NO: 388273 - RNA, 24 nt, Human
cgagaucgcgccacugcacuccag

SEQ ID NO: 388274 - RNA, 24 nt, Human
cgccuguaaucccaguacuuuagg

SEQ ID NO: 388275 - RNA, 23 nt, Human
cgccuguagucccaacugcuugg

SEQ ID NO: 388276 - RNA, 24 nt, Human
cgccuguagucccaacugcuuggg

SEQ ID NO: 388277 - RNA, 24 nt, Human
cgggcagauugccugaggucagga

SEQ ID NO: 388278 - RNA, 20 nt, Human
cucaaaauaaagaaagaaag

SEQ ID NO: 388279 - RNA, 22 nt, Human
cucaaaauaaagaaagaaagaa

SEQ ID NO: 388280 - RNA, 24 nt, Human
cucaaaauaaagaaagaaagaaac

SEQ ID NO: 388281 - RNA, 22 nt, Human
cucacgccuguaaucccaguac

SEQ ID NO: 388282 - RNA, 24 nt, Human
cucacgccuguaaucccaguacuu

SEQ ID NO: 388283 - RNA, 20 nt, Human
cucacgccuguagucccaac

SEQ ID NO: 388284 - RNA, 24 nt, Human
cucacgccuguagucccaacugcu

SEQ ID NO: 388285 - RNA, 24 nt, Human
cuggcuaacauggugaaacccugu

SEQ ID NO: 388286 - RNA, 21 nt, Human
cuuauauugaacuucucuaaa

SEQ ID NO: 388287 - RNA, 22 nt, Human
cuuuguucaccugguacuuuca

SEQ ID NO: 388288 - RNA, 20 nt, Human
gaaagcagccuccaagaagc

SEQ ID NO: 388289 - RNA, 23 nt, Human
gagaaucgcuugaacccaggagg

SEQ ID NO: 388290 - RNA, 18 nt, Human
gaggaucugagugugggu

SEQ ID NO: 388291 - RNA, 23 nt, Human
gagguugcagugagccgagaucg

SEQ ID NO: 388292 - RNA, 24 nt, Human
gauugccugaggucaggaguuuga

SEQ ID NO: 388293 - RNA, 22 nt, Human
gcaagagaaucgcuugaaccca

SEQ ID NO: 388294 - RNA, 23 nt, Human
gcagccuccaagaagccaacccc

SEQ ID NO: 388295 - RNA, 24 nt, Human
gccacugcacuccagcaugggcga

SEQ ID NO: 388296 - RNA, 20 nt, Human
gccgagaucgcgccacugca

SEQ ID NO: 388297 - RNA, 24 nt, Human
gccugaggucaggaguuugagacc

SEQ ID NO: 388298 - RNA, 23 nt, Human
gccuguagucccaacugcuuggg

SEQ ID NO: 388299 - RNA, 21 nt, Human
gcgcagagcaagggaguaauc

SEQ ID NO: 388300 - RNA, 24 nt, Human
gcuaacauggugaaacccugucuc

SEQ ID NO: 388301 - RNA, 23 nt, Human
ggaggaucugagugugggugugg

SEQ ID NO: 388302 - RNA, 20 nt, Human
ggagguugcagugagccgag

SEQ ID NO: 388303 - RNA, 22 nt, Human
ggagguugcagugagccgagau

SEQ ID NO: 388304 - RNA, 24 nt, Human
ggagguugcagugagccgagaucg

SEQ ID NO: 388305 - RNA, 21 nt, Human
ggcagauugccugaggucagg

SEQ ID NO: 388306 - RNA, 22 nt, Human
ggcaugguggcucacgccugua

SEQ ID NO: 388307 - RNA, 23 nt, Human
ggcgagguggcucacgccuguaa

SEQ ID NO: 388308 - RNA, 19 nt, Human
ggucaggaguuugagacca

SEQ ID NO: 388309 - RNA, 23 nt, Human
gguggcucacgccuguaauccca

SEQ ID NO: 388310 - RNA, 24 nt, Human
gguggcucacgccuguaaucccag

SEQ ID NO: 388311 - RNA, 18 nt, Human
gguggcucacgccuguag

SEQ ID NO: 388312 - RNA, 23 nt, Human
gguggcucacgccuguaguccca

SEQ ID NO: 388313 - RNA, 19 nt, Human
guaaaggagaaagcagccu

SEQ ID NO: 388314 - RNA, 21 nt, Human
gugaaacccugucucuacuaa

SEQ ID NO: 388315 - RNA, 22 nt, Human
gugaggcaauaagagaguugag

SEQ ID NO: 388316 - RNA, 22 nt, Human
uaacauggugaaacccugucuc

SEQ ID NO: 388317 - RNA, 24 nt, Human
uaacauggugaaacccugucucua

SEQ ID NO: 388318 - RNA, 18 nt, Human
uaagaaagccugaugccg

SEQ ID NO: 388319 - RNA, 22 nt, Human
uaggagacccaggcgggcagau

SEQ ID NO: 388320 - RNA, 23 nt, Human
uauaacaaugacaagugaagaua

SEQ ID NO: 388321 - RNA, 20 nt, Human
ucaagaaaaaaaagaaggaa

SEQ ID NO: 388322 - RNA, 24 nt, Human
ucaaucuuuuucuuuucccucauc

SEQ ID NO: 388323 - RNA, 22 nt, Human
ucacgccuguaaucccaguacu

SEQ ID NO: 388324 - RNA, 24 nt, Human
uccagcaugggcgacagagcaaga

SEQ ID NO: 388325 - RNA, 22 nt, Human
uccccccaaaaaucaauaaaaa

SEQ ID NO: 388326 - RNA, 27 nt, Human
ucccugaggagccgcaaggccuagucc

SEQ ID NO: 388327 - RNA, 21 nt, Human
ucccuuagcucuucuuugaca

SEQ ID NO: 388328 - RNA, 24 nt, Human
ucgcuugaacccaggagguggagg

SEQ ID NO: 388329 - RNA, 25 nt, Human
ucucuaaaaaaagaaaaaaaagaaa

SEQ ID NO: 388330 - RNA, 21 nt, Human
ucucuacuaaaaauacaaaaa

SEQ ID NO: 388331 - RNA, 22 nt, Human
ucuuuccaguuauaauucuauu

SEQ ID NO: 388332 - RNA, 19 nt, Human
ugaaaagauaauauauauu

SEQ ID NO: 388333 - RNA, 23 nt, Human
ugaacccuugacauggugcauuu

SEQ ID NO: 388334 - RNA, 26 nt, Human
ugaacuucucuaaaaaaagaaaaaaa

SEQ ID NO: 388335 - RNA, 23 nt, Human
ugagaccagccuggcuaacaugg

SEQ ID NO: 388336 - RNA, 22 nt, Human
ugagccgagaucgcgccacugc

SEQ ID NO: 388337 - RNA, 20 nt, Human
ugaggaaaugguugggggca

SEQ ID NO: 388338 - RNA, 18 nt, Human
ugaggaggaucugagugu

SEQ ID NO: 388339 - RNA, 20 nt, Human
ugaggcaagagaaucgcuug

SEQ ID NO: 388340 - RNA, 24 nt, Human
ugaggcaagagaaucgcuugaacc

SEQ ID NO: 388341 - RNA, 25 nt, Human
ugaggcaagagaaucgcuugaaccc

SEQ ID NO: 388342 - RNA, 18 nt, Human
ugaggucaggaguuugag

SEQ ID NO: 388343 - RNA, 22 nt, Human
ugcauuugaggccccucuccca

SEQ ID NO: 388344 - RNA, 23 nt, Human
ugccugaggucaggaguuugaga

SEQ ID NO: 388345 - RNA, 19 nt, Human
ugccuggagagagcguguu

SEQ ID NO: 388346 - RNA, 22 nt, Human
uggcucacgccuguaaucccag

SEQ ID NO: 388347 - RNA, 22 nt, Human
uggcucacgccuguaaucccag

SEQ ID NO: 388348 - RNA, 24 nt, Human
uggcucacgccuguaaucccagua

SEQ ID NO: 388349 - RNA, 21 nt, Human
uggcucacgccuguaguccca

SEQ ID NO: 388350 - RNA, 22 nt, Human
uggcucacgccuguagucccaa

SEQ ID NO: 388351 - RNA, 20 nt, Human
ugggagguugaggcaagaga

SEQ ID NO: 388352 - RNA, 24 nt, Human
ugguggcucacgccuguaguccca

SEQ ID NO: 388353 - RNA, 22 nt, Human
uguaaagugagguauaccugaa

SEQ ID NO: 388354 - RNA, 22 nt, Human
uuagaaaauguaugaaaagaua

SEQ ID NO: 388355 - RNA, 19 nt, Human
uuagagucugaggaaaugg

SEQ ID NO: 388356 - RNA, 18 nt, Human
uuagccgggcaugguggc

SEQ ID NO: 388357 - RNA, 22 nt, Human
uucaagaaaaaaaagaaggaaa

SEQ ID NO: 388358 - RNA, 18 nt, Human
uuccaaguaaaggagaaa

SEQ ID NO: 388359 - RNA, 21 nt, Human
uucuugucucaacugcuuucu

SEQ ID NO: 388360 - RNA, 24 nt, Human
uugaacccaggagguggagguugc

SEQ ID NO: 388361 - RNA, 20 nt, Human
uugaacccuugacauggugc

SEQ ID NO: 388362 - RNA, 18 nt, Human
uugcagugagccgagauc

SEQ ID NO: 388363 - RNA, 19 nt, Human
uugcagugagccgagaucg

SEQ ID NO: 388364 - RNA, 20 nt, Human
uugcagugagccgagaucgc

SEQ ID NO: 388365 - RNA, 22 nt, Human
uugcagugagccgagaucgcgc

SEQ ID NO: 388366 - RNA, 19 nt, Human
uuguacuuggggaaaagca

SEQ ID NO: 388367 - RNA, 23 nt, Human
uuuaagaaagccugaugccgcug

SEQ ID NO: 388368 - RNA, 23 nt, Human
uuuauuugcauccaaaauaauuc

SEQ ID NO: 388369 - RNA, 24 nt, Human
uuucaagaaaaaaaagaaggaaau

SEQ ID NO: 388370 - RNA, 23 nt, Human
uuucuggaaggucucugauuccu

SEQ ID NO: 388371 - RNA, 24 nt, Human
acaaggucaacagaaacuugugaa

SEQ ID NO: 388372 - RNA, 20 nt, Human
agacaguucugcaaacuagg

SEQ ID NO: 388373 - RNA, 18 nt, Human
auccgccaucagccgccg

SEQ ID NO: 388374 - RNA, 20 nt, Human
cagaaacuugugaauauucu

SEQ ID NO: 388375 - RNA, 19 nt, Human
caguggaaagacucccgga

SEQ ID NO: 388376 - RNA, 25 nt, Human
ccggaucaagggagaaaguuacgca

SEQ ID NO: 388377 - RNA, 20 nt, Human
cucccggaucaagggagaaa

SEQ ID NO: 388378 - RNA, 22 nt, Human
cuuccgauccugauccgccauc

SEQ ID NO: 388379 - RNA, 22 nt, Human
guuuuuuuuuuuuuuuuuuacu

SEQ ID NO: 388380 - RNA, 18 nt, Human
ucagacaguucugcaaac

SEQ ID NO: 388381 - RNA, 19 nt, Human
ucuauggucuccucagugg

SEQ ID NO: 388382 - RNA, 22 nt, Human
ucuauggucuccucaguggucu

SEQ ID NO: 388383 - RNA, 23 nt, Human
ugacaaaugcuuuuuauuacaua

SEQ ID NO: 388384 - RNA, 24 nt, Human
ugugguuuuuuuuuuuuuuuuuua

SEQ ID NO: 388385 - RNA, 25 nt, Human
uuuuuuuuuuuuuuuuuacugcuaa

SEQ ID NO: 388386 - RNA, 18 nt, Human
uuuuuuuuuuuuuuuuug

SEQ ID NO: 388387 - RNA, 23 nt, Human
uuuuuuuuuuuuuuuuuuguuau

SEQ ID NO: 388388 - RNA, 19 nt, Human
aaacaugaaaacccaggcc

SEQ ID NO: 388389 - RNA, 18 nt, Human
aagaauccagaaggcagc

SEQ ID NO: 388390 - RNA, 27 nt, Human
aagcauuugguacuacugucaucaaua

SEQ ID NO: 388391 - RNA, 19 nt, Human
aaguaacugccugugguca

SEQ ID NO: 388392 - RNA, 24 nt, Human
acagcucuggugggcccccugcuc

SEQ ID NO: 388393 - RNA, 19 nt, Human
acaucugaaggcaagaagg

SEQ ID NO: 388394 - RNA, 19 nt, Human
agaaggaagacguggccaa

SEQ ID NO: 388395 - RNA, 20 nt, Human
agagaacaucugaaggcaag

SEQ ID NO: 388396 - RNA, 23 nt, Human
agccauggggcagcagagaagaa

SEQ ID NO: 388397 - RNA, 19 nt, Human
aggaagcacggaggagcug

SEQ ID NO: 388398 - RNA, 26 nt, Human
aggcaagaaggaaagagaggggaccc

SEQ ID NO: 388399 - RNA, 19 nt, Human
aggcagaaggaagacgugg

SEQ ID NO: 388400 - RNA, 23 nt, Human
aggcgggcgcuggcaccccggcc

SEQ ID NO: 388401 - RNA, 22 nt, Human
auggaggcgggaaguggugcac

SEQ ID NO: 388402 - RNA, 21 nt, Human
caaaaccaggcaaugauuaaa

SEQ ID NO: 388403 - RNA, 26 nt, Human
cacaggccgugggcgcgcugcggaac

SEQ ID NO: 388404 - RNA, 22 nt, Human
cacucuaggcuccacguggcug

SEQ ID NO: 388405 - RNA, 20 nt, Human
cacuuuuuccaagaggccca

SEQ ID NO: 388406 - RNA, 21 nt, Human
cagcaugggggcaagcagcca

SEQ ID NO: 388407 - RNA, 21 nt, Human
cagccagaccucaggcccuca

SEQ ID NO: 388408 - RNA, 24 nt, Human
cagcgccccgggccggccuguggg

SEQ ID NO: 388409 - RNA, 20 nt, Human
caggccggagcagcgcccgg

SEQ ID NO: 388410 - RNA, 21 nt, Human
caggggacuggaccgaggucc

SEQ ID NO: 388411 - RNA, 22 nt, Human
caggucaggccggagcagcgcc

SEQ ID NO: 388412 - RNA, 24 nt, Human
caugaaaacccaggccgucagaga

SEQ ID NO: 388413 - RNA, 25 nt, Human
ccaccugaggccagaccuugccuga

SEQ ID NO: 388414 - RNA, 21 nt, Human
ccaggaaauguaaggucaugg

SEQ ID NO: 388415 - RNA, 18 nt, Human
cccacccggcccgcggcc

SEQ ID NO: 388416 - RNA, 19 nt, Human
cccaggcccuaggauucaa

SEQ ID NO: 388417 - RNA, 22 nt, Human
cccauaaagcuuagccaugggg

SEQ ID NO: 388418 - RNA, 20 nt, Human
ccccacccggcccgcggccg

SEQ ID NO: 388419 - RNA, 19 nt, Human
cccccugcuccccuagcca

SEQ ID NO: 388420 - RNA, 24 nt, Human
ccccgcucucucgucacuggggag

SEQ ID NO: 388421 - RNA, 26 nt, Human
cccggcccgcggccggcgcucccagc

SEQ ID NO: 388422 - RNA, 26 nt, Human
cccucagccccagcucugugcgggcc

SEQ ID NO: 388423 - RNA, 18 nt, Human
ccgacucugugccuggca

SEQ ID NO: 388424 - RNA, 20 nt, Human
ccugaggccagaccuugccu

SEQ ID NO: 388425 - RNA, 24 nt, Human
ccugcagacuugcucugcuccauc

SEQ ID NO: 388426 - RNA, 21 nt, Human
ccugccuaagcuucuuccucc

SEQ ID NO: 388427 - RNA, 21 nt, Human
ccugccuucuaugcucccucc

SEQ ID NO: 388428 - RNA, 19 nt, Human
cgagacacuggccccugac

SEQ ID NO: 388429 - RNA, 21 nt, Human
cgcacggacggacgggggcgc

SEQ ID NO: 388430 - RNA, 19 nt, Human
cgcaggagaagcccucgug

SEQ ID NO: 388431 - RNA, 19 nt, Human
cgcaggucaggccggagca

SEQ ID NO: 388432 - RNA, 20 nt, Human
cgccucuaggucugcgaccu

SEQ ID NO: 388433 - RNA, 22 nt, Human
cgcggccggcgcucccagcgcc

SEQ ID NO: 388434 - RNA, 18 nt, Human
cgcugcggaacgggagga

SEQ ID NO: 388435 - RNA, 26 nt, Human
cggcccaccugaggccagaccuugcc

SEQ ID NO: 388436 - RNA, 20 nt, Human
cuaaaagccacguuugagcu

SEQ ID NO: 388437 - RNA, 19 nt, Human
cuacugucaucaauacagu

SEQ ID NO: 388438 - RNA, 20 nt, Human
cuagugcugggcgaaaagga

SEQ ID NO: 388439 - RNA, 20 nt, Human
cuagugcugggcgaaaagga

SEQ ID NO: 388440 - RNA, 23 nt, Human
cucagccccagcucugugcgggc

SEQ ID NO: 388441 - RNA, 18 nt, Human
cucccagcgccccgggcc

SEQ ID NO: 388442 - RNA, 25 nt, Human
cucccagcgccccgggccggccugu

SEQ ID NO: 388443 - RNA, 18 nt, Human
cugcggcccaccugaggc

SEQ ID NO: 388444 - RNA, 20 nt, Human
cuucuaugcucccuccugaa

SEQ ID NO: 388445 - RNA, 20 nt, Human
gaacaaaucugucuaaaagc

SEQ ID NO: 388446 - RNA, 23 nt, Human
gacacaauucuguauaaucuguu

SEQ ID NO: 388447 - RNA, 24 nt, Human
gagaagcagcugagguccuuugug

SEQ ID NO: 388448 - RNA, 20 nt, Human
gaggaaacgggaaggcgggc

SEQ ID NO: 388449 - RNA, 21 nt, Human
gagggagcacgagucauggag

SEQ ID NO: 388450 - RNA, 21 nt, Human
gauguugagaggcagaaagga

SEQ ID NO: 388451 - RNA, 26 nt, Human
gcaacauaaaaaggagggagcacgag

SEQ ID NO: 388452 - RNA, 22 nt, Human
gcaagaaggaaagagagcccug

SEQ ID NO: 388453 - RNA, 19 nt, Human
gccugcggcccaccugagg

SEQ ID NO: 388454 - RNA, 24 nt, Human
gccuguggugggggggaagcucag

SEQ ID NO: 388455 - RNA, 18 nt, Human
gcgaaaaggaggcgcagg

SEQ ID NO: 388456 - RNA, 22 nt, Human
gcgcgcggcggccgccgucccg

SEQ ID NO: 388457 - RNA, 21 nt, Human
gcggccggcgcucccagcgcc

SEQ ID NO: 388458 - RNA, 19 nt, Human
gcugggcuugacuucuggc

SEQ ID NO: 388459 - RNA, 20 nt, Human
gcuuggcugacaaaucccga

SEQ ID NO: 388460 - RNA, 18 nt, Human
ggaaauguaaggucaugg

SEQ ID NO: 388461 - RNA, 21 nt, Human
ggaaguggugcaccugcagac

SEQ ID NO: 388462 - RNA, 26 nt, Human
ggacgggggcgcggcgcaacagggga

SEQ ID NO: 388463 - RNA, 21 nt, Human
ggagcagcgcccggccccgcu

SEQ ID NO: 388464 - RNA, 19 nt, Human
ggccaagggcugcuuuucc

SEQ ID NO: 388465 - RNA, 19 nt, Human
ggccuaaggcgcuagugcu

SEQ ID NO: 388466 - RNA, 18 nt, Human
gggcagcagagaagaaag

SEQ ID NO: 388467 - RNA, 19 nt, Human
gggcgaaaaggaggcgcag

SEQ ID NO: 388468 - RNA, 23 nt, Human
ggguaggagccaggccgaggagu

SEQ ID NO: 388469 - RNA, 20 nt, Human
ggucaggccggagcagcgcc

SEQ ID NO: 388470 - RNA, 19 nt, Human
ggucccuucgcaggucagg

SEQ ID NO: 388471 - RNA, 21 nt, Human
uagccauggggcagcagagaa

SEQ ID NO: 388472 - RNA, 21 nt, Human
uaugaacaaaucugucuaaaa

SEQ ID NO: 388473 - RNA, 24 nt, Human
ucaaaaacaugaaaacccaggccc

SEQ ID NO: 388474 - RNA, 19 nt, Human
ucaggccggagcagcgccc

SEQ ID NO: 388475 - RNA, 23 nt, Human
ucccucagccccagcucugugcg

SEQ ID NO: 388476 - RNA, 18 nt, Human
ucccugaggagguaguga

SEQ ID NO: 388477 - RNA, 20 nt, Human
ucccugaggagguagugagc

SEQ ID NO: 388478 - RNA, 21 nt, Human
ucgggugagucccgagauugc

SEQ ID NO: 388479 - RNA, 18 nt, Human
ugacuggcccgcgcacgg

SEQ ID NO: 388480 - RNA, 25 nt, Human
ugagagggucuaugaacaaaucugu

SEQ ID NO: 388481 - RNA, 19 nt, Human
ugagcgcgcggcggccgcc

SEQ ID NO: 388482 - RNA, 23 nt, Human
ugagcuaaaagcaucaguccaau

SEQ ID NO: 388483 - RNA, 18 nt, Human
ugaggaaagggccugugg

SEQ ID NO: 388484 - RNA, 20 nt, Human
ugccuucuaugcucccuccu

SEQ ID NO: 388485 - RNA, 21 nt, Human
ugcucugcuccaucacuuuuu

SEQ ID NO: 388486 - RNA, 21 nt, Human
uggaaugccuaccagcucgga

SEQ ID NO: 388487 - RNA, 21 nt, Human
uggccaagggcugcuuuuccc

SEQ ID NO: 388488 - RNA, 19 nt, Human
ugggagaagcagcugaggu

SEQ ID NO: 388489 - RNA, 23 nt, Human
ugggagaagcagcugagguccuu

SEQ ID NO: 388490 - RNA, 18 nt, Human
ugggggggaagcucaggc

SEQ ID NO: 388491 - RNA, 28 nt, Human
uggguaggagccaggccgaggagucuua

SEQ ID NO: 388492 - RNA, 23 nt, Human
ugucaucaauacaguuuuugaaa

SEQ ID NO: 388493 - RNA, 19 nt, Human
uguuggcgccagcaugggg

SEQ ID NO: 388494 - RNA, 18 nt, Human
uuaaagcauuugguacua

SEQ ID NO: 388495 - RNA, 21 nt, Human
uucccgccugcggcccaccug

SEQ ID NO: 388496 - RNA, 23 nt, Human
uucuguauaaucugucacaagaa

SEQ ID NO: 388497 - RNA, 23 nt, Human
uugagcuaaaagcaucaguccau

SEQ ID NO: 388498 - RNA, 21 nt, Human
uuguuggcgccagcauggggg

SEQ ID NO: 388499 - RNA, 24 nt, Human
uuuaugguuuaaaaucaauuggug

SEQ ID NO: 388500 - RNA, 18 nt, Human
uuuuuuuuuuuuuuuuug

SEQ ID NO: 388501 - RNA, 22 nt, Human
uuuuuuuuuuuuuuuuuggauu

SEQ ID NO: 388502 - RNA, 18 nt, Human
accccaagucaccagagc

SEQ ID NO: 388503 - RNA, 21 nt, Human
agacauccucaccaggcaggg

SEQ ID NO: 388504 - RNA, 21 nt, Human
aggaacaagacauccucacca

SEQ ID NO: 388505 - RNA, 20 nt, Human
aggaugagggaugaaaagga

SEQ ID NO: 388506 - RNA, 24 nt, Human
augaaggaugagggaugaaaagga

SEQ ID NO: 388507 - RNA, 18 nt, Human
caaggcuuuccacaccgg

SEQ ID NO: 388508 - RNA, 20 nt, Human
caaggcuuuccacaccggcc

SEQ ID NO: 388509 - RNA, 19 nt, Human
caccccaagucaccagagc

SEQ ID NO: 388510 - RNA, 20 nt, Human
cagcgcuacccuucaacagc

SEQ ID NO: 388511 - RNA, 21 nt, Human
cagcuagugccagccuccaag

SEQ ID NO: 388512 - RNA, 18 nt, Human
cccacuccgcuagagcgc

SEQ ID NO: 388513 - RNA, 23 nt, Human
ccgcgcccccgccucacguguuc

SEQ ID NO: 388514 - RNA, 19 nt, Human
cgcccccgccucacguguu

SEQ ID NO: 388515 - RNA, 22 nt, Human
cuccaagggccagcgcuacccu

SEQ ID NO: 388516 - RNA, 18 nt, Human
gaaaaggaggcgcccgcu

SEQ ID NO: 388517 - RNA, 22 nt, Human
gaaggaugagggaugaaaagga

SEQ ID NO: 388518 - RNA, 22 nt, Human
gaggaaaagcugucagcuagug

SEQ ID NO: 388519 - RNA, 24 nt, Human
gccucacguguucgcagaucccac

SEQ ID NO: 388520 - RNA, 24 nt, Human
gcuagagcgcgaaagccagggaug

SEQ ID NO: 388521 - RNA, 18 nt, Human
gggccagcgcuacccuuc

SEQ ID NO: 388522 - RNA, 21 nt, Human
uacccuucaacagcuggaggc

SEQ ID NO: 388523 - RNA, 18 nt, Human
ucaccagagcgcaggugc

SEQ ID NO: 388524 - RNA, 18 nt, Human
uguucaagugaaggcaga

SEQ ID NO: 388525 - RNA, 23 nt, Human
aaaaacagaaaagcaacaagaac

SEQ ID NO: 388526 - RNA, 19 nt, Human
aaaaaggccccccugcccu

SEQ ID NO: 388527 - RNA, 22 nt, Human
aaaacaugaaucacacaaagcu

SEQ ID NO: 388528 - RNA, 24 nt, Human
aaaauacucaucucagaaccagag

SEQ ID NO: 388529 - RNA, 21 nt, Human
aaacaaaaaaaaaaaaauccc

SEQ ID NO: 388530 - RNA, 25 nt, Human
aaacaaaaaaaaaaaaaucccaagg

SEQ ID NO: 388531 - RNA, 19 nt, Human
aaaccaauccacacgccuc

SEQ ID NO: 388532 - RNA, 21 nt, Human
aaaccacccaaugaacaaaga

SEQ ID NO: 388533 - RNA, 21 nt, Human
aaagcacuuacuacgcgccaa

SEQ ID NO: 388534 - RNA, 20 nt, Human
aaagccaggggcucccucag

SEQ ID NO: 388535 - RNA, 21 nt, Human
aaaggccccccugcccugccu

SEQ ID NO: 388536 - RNA, 18 nt, Human
aaaguguugggauuacaa

SEQ ID NO: 388537 - RNA, 18 nt, Human
aacaaacuguacucuaaa

SEQ ID NO: 388538 - RNA, 21 nt, Human
aaccacccaaugaacaaagaa

SEQ ID NO: 388539 - RNA, 24 nt, Human
aacuucagugaguggcggaaggaa

SEQ ID NO: 388540 - RNA, 21 nt, Human
aagagacaacaagcccaagac

SEQ ID NO: 388541 - RNA, 18 nt, Human
aagaggcccuuguccuuu

SEQ ID NO: 388542 - RNA, 19 nt, Human
aagaggcccuuguccuuug

SEQ ID NO: 388543 - RNA, 19 nt, Human
aaggccccccugcccugcc

SEQ ID NO: 388544 - RNA, 20 nt, Human
aaguguugggauuacaaagu

SEQ ID NO: 388545 - RNA, 18 nt, Human
aaucaucaccucauccag

SEQ ID NO: 388546 - RNA, 20 nt, Human
acacagacaauaaaaacugc

SEQ ID NO: 388547 - RNA, 20 nt, Human
acagaaaagcaacaagaaca

SEQ ID NO: 388548 - RNA, 22 nt, Human
acagaacacgaauaaaauacuc

SEQ ID NO: 388549 - RNA, 21 nt, Human
acagacaauaaaaacugcaca

SEQ ID NO: 388550 - RNA, 18 nt, Human
acaggcuggccuuugaca

SEQ ID NO: 388551 - RNA, 19 nt, Human
acauacccaaguggaggcc

SEQ ID NO: 388552 - RNA, 23 nt, Human
accuaacaauuccgacaugguuc

SEQ ID NO: 388553 - RNA, 21 nt, Human
acuucacuuggcuccaugauc

SEQ ID NO: 388554 - RNA, 21 nt, Human
agaaagcgagcgcgagcgcga

SEQ ID NO: 388555 - RNA, 18 nt, Human
agaaggaagagacaacaa

SEQ ID NO: 388556 - RNA, 21 nt, Human
agaaucggaaaaaugccaaua

SEQ ID NO: 388557 - RNA, 19 nt, Human
agacaacaagcccaagaca

SEQ ID NO: 388558 - RNA, 21 nt, Human
agacaacaagcccaagacagc

SEQ ID NO: 388559 - RNA, 19 nt, Human
agacaauaaaaacugcaca

SEQ ID NO: 388560 - RNA, 18 nt, Human
agacagggggaggggcag

SEQ ID NO: 388561 - RNA, 18 nt, Human
agagagggugaguagugg

SEQ ID NO: 388562 - RNA, 24 nt, Human
agagggcggaagggggaaagcugu

SEQ ID NO: 388563 - RNA, 21 nt, Human
agcagcagagagggugaguag

SEQ ID NO: 388564 - RNA, 18 nt, Human
agcagcgcaacuuguggc

SEQ ID NO: 388565 - RNA, 20 nt, Human
agcaucccuuucccaggugu

SEQ ID NO: 388566 - RNA, 20 nt, Human
agcauccggucauaaaaaug

SEQ ID NO: 388567 - RNA, 19 nt, Human
agccagggauggagccugg

SEQ ID NO: 388568 - RNA, 22 nt, Human
agccagggauggagccuggggu

SEQ ID NO: 388569 - RNA, 20 nt, Human
agccgacugaaaaaccaccc

SEQ ID NO: 388570 - RNA, 22 nt, Human
agcgcgcggaccccagccagga

SEQ ID NO: 388571 - RNA, 23 nt, Human
aggaagagacaacaagcccaaga

SEQ ID NO: 388572 - RNA, 23 nt, Human
aggaggaggguuuuucccccuuc

SEQ ID NO: 388573 - RNA, 23 nt, Human
aggccucccagcccagguuucua

SEQ ID NO: 388574 - RNA, 19 nt, Human
aggcuggggaagccaggga

SEQ ID NO: 388575 - RNA, 20 nt, Human
aggggucagaggguuucacc

SEQ ID NO: 388576 - RNA, 24 nt, Human
aguuguuacugguuugucaagcau

SEQ ID NO: 388577 - RNA, 20 nt, Human
augccaauagagaacauguc

SEQ ID NO: 388578 - RNA, 22 nt, Human
auggagccugggguccgaggcc

SEQ ID NO: 388579 - RNA, 23 nt, Human
auggagccugggguccgaggccu

SEQ ID NO: 388580 - RNA, 18 nt, Human
caacaagaacaaagcaga

SEQ ID NO: 388581 - RNA, 20 nt, Human
caacaagaacaaagcagacc

SEQ ID NO: 388582 - RNA, 23 nt, Human
caagcauaagccaugcccuaacg

SEQ ID NO: 388583 - RNA, 25 nt, Human
caagccagaaugcaaaacuucagug

SEQ ID NO: 388584 - RNA, 27 nt, Human
cacaauaacaccgucucacugcuggaa

SEQ ID NO: 388585 - RNA, 23 nt, Human
cacagaagcccugacccuucccc

SEQ ID NO: 388586 - RNA, 19 nt, Human
cagaaaagcaacaagaaca

SEQ ID NO: 388587 - RNA, 21 nt, Human
cagccgcgcgccgcccccggg

SEQ ID NO: 388588 - RNA, 20 nt, Human
cagccggcagccuccgaguc

SEQ ID NO: 388589 - RNA, 19 nt, Human
cagccuccgagucccggcc

SEQ ID NO: 388590 - RNA, 22 nt, Human
caucucagaaccagagcacuuu

SEQ ID NO: 388591 - RNA, 23 nt, Human
caucuuccucagcccuucugccc

SEQ ID NO: 388592 - RNA, 21 nt, Human
caugaaucacacaaagcucuc

SEQ ID NO: 388593 - RNA, 20 nt, Human
cauguuuuaagagcuguaaa

SEQ ID NO: 388594 - RNA, 21 nt, Human
cauuucuugauuacagggaug

SEQ ID NO: 388595 - RNA, 18 nt, Human
ccaaaaauacuccaggcu

SEQ ID NO: 388596 - RNA, 24 nt, Human
ccagccgacugaaaaaccacccaa

SEQ ID NO: 388597 - RNA, 19 nt, Human
cccaccaucgccaucccac

SEQ ID NO: 388598 - RNA, 25 nt, Human
cccagcauccggucauaaaaauggg

SEQ ID NO: 388599 - RNA, 24 nt, Human
ccccacgggcugggccaucuuccu

SEQ ID NO: 388600 - RNA, 24 nt, Human
ccccagaagauagaauuccagccu

SEQ ID NO: 388601 - RNA, 18 nt, Human
cccccgggccgcccccgc

SEQ ID NO: 388602 - RNA, 21 nt, Human
cccccugcccugccuucuuac

SEQ ID NO: 388603 - RNA, 28 nt, Human
ccccgccccgccgccgccgagucccgga

SEQ ID NO: 388604 - RNA, 19 nt, Human
ccccgccgccgccgagucc

SEQ ID NO: 388605 - RNA, 21 nt, Human
ccccgccgccggcccuccuca

SEQ ID NO: 388606 - RNA, 19 nt, Human
ccccggagcagccgcgcgc

SEQ ID NO: 388607 - RNA, 23 nt, Human
ccccggagcagccgcgcgccgcc

SEQ ID NO: 388608 - RNA, 20 nt, Human
cccuuggggcagcaucccuu

SEQ ID NO: 388609 - RNA, 23 nt, Human
ccgaggccucccagcccagguuu

SEQ ID NO: 388610 - RNA, 24 nt, Human
ccgaggccucccagcccagguuuc

SEQ ID NO: 388611 - RNA, 18 nt, Human
ccgccccgccgccggccc

SEQ ID NO: 388612 - RNA, 18 nt, Human
ccgccgccggcccuccuc

SEQ ID NO: 388613 - RNA, 22 nt, Human
ccuccgagucccggccgugcgg

SEQ ID NO: 388614 - RNA, 22 nt, Human
ccugaggcugaggggaaagccg

SEQ ID NO: 388615 - RNA, 22 nt, Human
ccuuauggugacuucauguaug

SEQ ID NO: 388616 - RNA, 21 nt, Human
ccuucugcccacaggaaaacc

SEQ ID NO: 388617 - RNA, 21 nt, Human
cgaauggcggccugagggcgc

SEQ ID NO: 388618 - RNA, 20 nt, Human
cgacugaaaaaccacccaau

SEQ ID NO: 388619 - RNA, 24 nt, Human
cgccaaagugcccuugagaccuaa

SEQ ID NO: 388620 - RNA, 21 nt, Human
cgcgcuccgaaccucccucca

SEQ ID NO: 388621 - RNA, 24 nt, Human
cggagagagcgcgggcgcuggaaa

SEQ ID NO: 388622 - RNA, 22 nt, Human
cggcauggcggggaccucccuc

SEQ ID NO: 388623 - RNA, 24 nt, Human
cgggagggacuggcacggacagug

SEQ ID NO: 388624 - RNA, 19 nt, Human
cguuauacgguugugggaa

SEQ ID NO: 388625 - RNA, 21 nt, Human
cucuaaacuucacagaguccu

SEQ ID NO: 388626 - RNA, 20 nt, Human
cugcacaagccagaaugcaa

SEQ ID NO: 388627 - RNA, 25 nt, Human
cugcaguaccuuaugguucugccaa

SEQ ID NO: 388628 - RNA, 19 nt, Human
cugcccugccuucuuacau

SEQ ID NO: 388629 - RNA, 19 nt, Human
cugcuggugacccagcagc

SEQ ID NO: 388630 - RNA, 24 nt, Human
cugcuggugacccagcagccccca

SEQ ID NO: 388631 - RNA, 23 nt, Human
gaacacacaccagauugcacccc

SEQ ID NO: 388632 - RNA, 24 nt, Human
gaauaaaauacucaucucagaacc

SEQ ID NO: 388633 - RNA, 21 nt, Human
gacagaguggaaagacagggg

SEQ ID NO: 388634 - RNA, 20 nt, Human
gagagagagagaaagagagc

SEQ ID NO: 388635 - RNA, 20 nt, Human
gagagagagagagaaagaga

SEQ ID NO: 388636 - RNA, 23 nt, Human
gagcaaucucgcugcugaccccg

SEQ ID NO: 388637 - RNA, 22 nt, Human
gagcuguaaacaacguugaaca

SEQ ID NO: 388638 - RNA, 19 nt, Human
gaggccucccagcccaggu

SEQ ID NO: 388639 - RNA, 24 nt, Human
gaggcgggcgcggcggcggcggcg

SEQ ID NO: 388640 - RNA, 22 nt, Human
gagggcgcugcggcggcggcgg

SEQ ID NO: 388641 - RNA, 21 nt, Human
gaggggaaagccaggggcucc

SEQ ID NO: 388642 - RNA, 24 nt, Human
gaggggcagggagcaacagaagga

SEQ ID NO: 388643 - RNA, 19 nt, Human
gccagaaugcaaaacuuca

SEQ ID NO: 388644 - RNA, 20 nt, Human
gcccugccuguggcuucuuc

SEQ ID NO: 388645 - RNA, 24 nt, Human
gccgacugaaaaaccacccaauga

SEQ ID NO: 388646 - RNA, 23 nt, Human
gccuggugcucugcgaggcaucu

SEQ ID NO: 388647 - RNA, 22 nt, Human
gcgcgagcgcgagcgcaagggg

SEQ ID NO: 388648 - RNA, 21 nt, Human
gcgcggagugggggcgcugag

SEQ ID NO: 388649 - RNA, 26 nt, Human
gcggaacaaaagguuaaaaaacagaa

SEQ ID NO: 388650 - RNA, 19 nt, Human
gcggcggcggcagcgggag

SEQ ID NO: 388651 - RNA, 24 nt, Human
gcggcggcggcggcggcggcaaca

SEQ ID NO: 388652 - RNA, 23 nt, Human
gcggcggcggcggcggcggcagc

SEQ ID NO: 388653 - RNA, 20 nt, Human
ggaacaaaagguuaaaaaac

SEQ ID NO: 388654 - RNA, 19 nt, Human
ggacagcgggagggacugg

SEQ ID NO: 388655 - RNA, 19 nt, Human
ggaccuguggaccagcagg

SEQ ID NO: 388656 - RNA, 21 nt, Human
ggaggagagggugggagaggg

SEQ ID NO: 388657 - RNA, 18 nt, Human
ggagugggggcgcugagg

SEQ ID NO: 388658 - RNA, 20 nt, Human
ggcgcggcggcggcggcggc

SEQ ID NO: 388659 - RNA, 20 nt, Human
ggcgcugcggcggcggcggg

SEQ ID NO: 388660 - RNA, 21 nt, Human
ggcugggccaucuuccucagc

SEQ ID NO: 388661 - RNA, 24 nt, Human
gggaagccagggauggagccuggg

SEQ ID NO: 388662 - RNA, 21 nt, Human
gggacagcgggagggacuggc

SEQ ID NO: 388663 - RNA, 27 nt, Human
gggauggagccugggguccgaggccuc

SEQ ID NO: 388664 - RNA, 24 nt, Human
gggcagcaucccuuucccaggugu

SEQ ID NO: 388665 - RNA, 23 nt, Human
gggcgcggcggcggcggcggcgg

SEQ ID NO: 388666 - RNA, 20 nt, Human
gggcgcugcggcggcggcga

SEQ ID NO: 388667 - RNA, 20 nt, Human
gggcucccucaggcccugcc

SEQ ID NO: 388668 - RNA, 20 nt, Human
gggcucccucaggcccugcc

SEQ ID NO: 388669 - RNA, 21 nt, Human
gggcucccucaggcccugccu

SEQ ID NO: 388670 - RNA, 24 nt, Human
ggggcgcuggcggcuccucgcucc

SEQ ID NO: 388671 - RNA, 22 nt, Human
gugagacaaagaaauuaugaag

SEQ ID NO: 388672 - RNA, 19 nt, Human
guggcggggggaaugaaaa

SEQ ID NO: 388673 - RNA, 25 nt, Human
uaaaaacagcaaaaagauuauuuaa

SEQ ID NO: 388674 - RNA, 23 nt, Human
uaaaaaugggaagccgucugcag

SEQ ID NO: 388675 - RNA, 24 nt, Human
uaauuuuuuaaaaacagcaaaaag

SEQ ID NO: 388676 - RNA, 22 nt, Human
uaccaacaugccagcagcagag

SEQ ID NO: 388677 - RNA, 25 nt, Human
uaccaacaugccagcagcagagagg

SEQ ID NO: 388678 - RNA, 19 nt, Human
uacuacgcgccaaagugcc

SEQ ID NO: 388679 - RNA, 28 nt, Human
uagccaacacgccuaauccccugaaagg

SEQ ID NO: 388680 - RNA, 23 nt, Human
uagggaaaacaaaaaaaaaaaaa

SEQ ID NO: 388681 - RNA, 21 nt, Human
uaucaaaauagagcaauuuau

SEQ ID NO: 388682 - RNA, 21 nt, Human
uaugagaaagguacagaggga

SEQ ID NO: 388683 - RNA, 22 nt, Human
uauggaccuguggaccagcagg

SEQ ID NO: 388684 - RNA, 22 nt, Human
uauucaagacacugaauaugau

SEQ ID NO: 388685 - RNA, 21 nt, Human
uccaaaaauacuccaggcucu

SEQ ID NO: 388686 - RNA, 20 nt, Human
uccacagaagcccugacccu

SEQ ID NO: 388687 - RNA, 22 nt, Human
uccacagaagcccugacccuuc

SEQ ID NO: 388688 - RNA, 19 nt, Human
uccagccagaguuuuccug

SEQ ID NO: 388689 - RNA, 22 nt, Human
uccagccgacugaaaaaccacc

SEQ ID NO: 388690 - RNA, 23 nt, Human
uccauucagccaucacagagccu

SEQ ID NO: 388691 - RNA, 24 nt, Human
uccccgauggcugggagugcguca

SEQ ID NO: 388692 - RNA, 20 nt, Human
ucccucaggcccugccuguc

SEQ ID NO: 388693 - RNA, 21 nt, Human
uccugcuggcugccaaggugc

SEQ ID NO: 388694 - RNA, 21 nt, Human
uccuugggacgggaaaucauc

SEQ ID NO: 388695 - RNA, 24 nt, Human
ucuccuagucuucugugagacaaa

SEQ ID NO: 388696 - RNA, 21 nt, Human
ucuccuguaaaaaggcccccc

SEQ ID NO: 388697 - RNA, 23 nt, Human
ucuuuuggaccccaacaaacugu

SEQ ID NO: 388698 - RNA, 21 nt, Human
ugaaaaaccacccaaugaaca

SEQ ID NO: 388699 - RNA, 22 nt, Human
ugaacccgaccaaacacucuag

SEQ ID NO: 388700 - RNA, 25 nt, Human
ugaauaauucacauacccaagugga

SEQ ID NO: 388701 - RNA, 32 nt, Human
ugacacagacaauaaaaacugcacaagccagg

SEQ ID NO: 388702 - RNA, 20 nt, Human
ugacccagcagcccccacgg

SEQ ID NO: 388703 - RNA, 20 nt, Human
ugacccagcagcccccacgg

SEQ ID NO: 388704 - RNA, 21 nt, Human
ugaggcugaggggaaagccag

SEQ ID NO: 388705 - RNA, 24 nt, Human
ugagggcgcugcggcggcggcggg

SEQ ID NO: 388706 - RNA, 21 nt, Human
ugauuugcuucuguuuuugcu

SEQ ID NO: 388707 - RNA, 22 nt, Human
ugcauacacaccaaaagaugcg

SEQ ID NO: 388708 - RNA, 21 nt, Human
ugcccugccuucuuacauaaa

SEQ ID NO: 388709 - RNA, 19 nt, Human
ugcggcggccgaagagggc

SEQ ID NO: 388710 - RNA, 19 nt, Human
uggaaaccauucuaucccc

SEQ ID NO: 388711 - RNA, 22 nt, Human
uggaaagacagggggaggggca

SEQ ID NO: 388712 - RNA, 22 nt, Human
uggaccccaacaaacuguacuc

SEQ ID NO: 388713 - RNA, 24 nt, Human
uggaggucaccagauucacugaaa

SEQ ID NO: 388714 - RNA, 24 nt, Human
uggcagaaauuauuagcgacguuc

SEQ ID NO: 388715 - RNA, 21 nt, Human
uggcggaaggaacauuucugc

SEQ ID NO: 388716 - RNA, 23 nt, Human
uggcggcgccgcgcgcccggccg

SEQ ID NO: 388717 - RNA, 21 nt, Human
uggcuccgcagaugaaugcca

SEQ ID NO: 388718 - RNA, 19 nt, Human
uggcugcagagcaaucucg

SEQ ID NO: 388719 - RNA, 22 nt, Human
uggcugcagagcaaucucgcug

SEQ ID NO: 388720 - RNA, 24 nt, Human
uggcuguacgucugacacagacaa

SEQ ID NO: 388721 - RNA, 18 nt, Human
ugggaagccgucugcagg

SEQ ID NO: 388722 - RNA, 20 nt, Human
ugggagagggcggaaggggg

SEQ ID NO: 388723 - RNA, 20 nt, Human
ugguuuugcuugcggccgca

SEQ ID NO: 388724 - RNA, 25 nt, Human
uguagccaacacgccuaauccagcc

SEQ ID NO: 388725 - RNA, 21 nt, Human
uguauggaccuguggaccagc

SEQ ID NO: 388726 - RNA, 23 nt, Human
uuaauuuuuuaaaaacagcaaaa

SEQ ID NO: 388727 - RNA, 18 nt, Human
uucacagaguccuuggga

SEQ ID NO: 388728 - RNA, 23 nt, Human
uuccagccgacugaaaaaccacc

SEQ ID NO: 388729 - RNA, 24 nt, Human
uugcuucuguuuuugcuugccuuu

SEQ ID NO: 388730 - RNA, 23 nt, Human
uuggucccccuuggggcagcauc

SEQ ID NO: 388731 - RNA, 27 nt, Human
uuuaaaaacuucuugaugaagauuacc

SEQ ID NO: 388732 - RNA, 23 nt, Human
uuuggucuucugggacaugaaua

SEQ ID NO: 388733 - RNA, 18 nt, Human
uuuuccaaaaauacucca

SEQ ID NO: 388734 - RNA, 18 nt, Human
uuuuccaaaaauacucca

SEQ ID NO: 388735 - RNA, 24 nt, Human
aaagauggcagcagcgccaugagg

SEQ ID NO: 388736 - RNA, 24 nt, Human
aaagauggcagcagcgccaugagg

SEQ ID NO: 388737 - RNA, 19 nt, Human
aaaggcuuccaccugggag

SEQ ID NO: 388738 - RNA, 24 nt, Human
aacagccgcaccgcccgguccccc

SEQ ID NO: 388739 - RNA, 22 nt, Human
aacugcugcuuaguacucaggu

SEQ ID NO: 388740 - RNA, 22 nt, Human
aacugcugcuuaguacucaggu

SEQ ID NO: 388741 - RNA, 23 nt, Human
aagaaaagcaccuuggccacuag

SEQ ID NO: 388742 - RNA, 23 nt, Human
aagaaaagcaccuuggccacuag

SEQ ID NO: 388743 - RNA, 26 nt, Human
aagaagagagagaccuaaguagacaa

SEQ ID NO: 388744 - RNA, 26 nt, Human
aagaagagagagaccuaaguagacaa

SEQ ID NO: 388745 - RNA, 25 nt, Human
aaggaaaucccuuagugucuuuuug

SEQ ID NO: 388746 - RNA, 25 nt, Human
aaggaaaucccuuagugucuuuuug

SEQ ID NO: 388747 - RNA, 25 nt, Human
acagccagcaagaagagagagaccu

SEQ ID NO: 388748 - RNA, 25 nt, Human
acagccagcaagaagagagagaccu

SEQ ID NO: 388749 - RNA, 19 nt, Human
acugggccugggaggaaga

SEQ ID NO: 388750 - RNA, 19 nt, Human
acugggccugggaggaaga

SEQ ID NO: 388751 - RNA, 21 nt, Human
agaagccauccuccgugaguc

SEQ ID NO: 388752 - RNA, 19 nt, Human
agacagcacuugacccuuc

SEQ ID NO: 388753 - RNA, 21 nt, Human
agcaagaagagagagaccuaa

SEQ ID NO: 388754 - RNA, 21 nt, Human
agcaagaagagagagaccuaa

SEQ ID NO: 388755 - RNA, 18 nt, Human
agccaggaggcggugggu

SEQ ID NO: 388756 - RNA, 24 nt, Human
aggaggccagaucccuccuccuca

SEQ ID NO: 388757 - RNA, 24 nt, Human
aggaggccagaucccuccuccuca

SEQ ID NO: 388758 - RNA, 25 nt, Human
aggccaagaccugggcguuggggga

SEQ ID NO: 388759 - RNA, 22 nt, Human
aggccagaucccuccuccucaa

SEQ ID NO: 388760 - RNA, 22 nt, Human
aggccagaucccuccuccucaa

SEQ ID NO: 388761 - RNA, 20 nt, Human
aggcccgcuucagguggccc

SEQ ID NO: 388762 - RNA, 23 nt, Human
aggcggugggugaaguuguguug

SEQ ID NO: 388763 - RNA, 19 nt, Human
auggaacacaguucuguga

SEQ ID NO: 388764 - RNA, 19 nt, Human
auggaacacaguucuguga

SEQ ID NO: 388765 - RNA, 19 nt, Human
auggaacacaguucuguga

SEQ ID NO: 388766 - RNA, 19 nt, Human
auggaacacaguucuguga

SEQ ID NO: 388767 - RNA, 18 nt, Human
auuugucagguggaaauc

SEQ ID NO: 388768 - RNA, 19 nt, Human
caaagcacuccuccuucuc

SEQ ID NO: 388769 - RNA, 19 nt, Human
cacauucucucucucucuc

SEQ ID NO: 388770 - RNA, 19 nt, Human
cacauucucucucucucuc

SEQ ID NO: 388771 - RNA, 21 nt, Human
cacccgccgccucuucaaagc

SEQ ID NO: 388772 - RNA, 25 nt, Human
cacccgccgccucuucaaagcggcc

SEQ ID NO: 388773 - RNA, 22 nt, Human
caccgcccgguccccacaggag

SEQ ID NO: 388774 - RNA, 22 nt, Human
caccuuggccacuagucaggga

SEQ ID NO: 388775 - RNA, 19 nt, Human
cacuccuccuucucgcccc

SEQ ID NO: 388776 - RNA, 18 nt, Human
cacuuuuaccacuuucau

SEQ ID NO: 388777 - RNA, 21 nt, Human
cagaucccuccuccucaaucc

SEQ ID NO: 388778 - RNA, 21 nt, Human
cagaucccuccuccucaaucc

SEQ ID NO: 388779 - RNA, 19 nt, Human
cagcaaguagggguccugc

SEQ ID NO: 388780 - RNA, 18 nt, Human
cagcagcgccaugaggag

SEQ ID NO: 388781 - RNA, 18 nt, Human
cagcagcgccaugaggag

SEQ ID NO: 388782 - RNA, 24 nt, Human
cagccagacgaugaaggcucugca

SEQ ID NO: 388783 - RNA, 21 nt, Human
cagcgccaugaggaggccaga

SEQ ID NO: 388784 - RNA, 21 nt, Human
cagcgccaugaggaggccaga

SEQ ID NO: 388785 - RNA, 24 nt, Human
caggagacuccuucugaaaggcuu

SEQ ID NO: 388786 - RNA, 20 nt, Human
ccacugggccugggaggaag

SEQ ID NO: 388787 - RNA, 20 nt, Human
ccacugggccugggaggaag

SEQ ID NO: 388788 - RNA, 21 nt, Human
ccagccagacgaugaaggcuc

SEQ ID NO: 388789 - RNA, 18 nt, Human
cccacuuuuaccacuuuc

SEQ ID NO: 388790 - RNA, 21 nt, Human
cccacuuuuaccacuuucaug

SEQ ID NO: 388791 - RNA, 22 nt, Human
cccgcacggcucugccgggccg

SEQ ID NO: 388792 - RNA, 24 nt, Human
cccgcacggcucugccgggccgcg

SEQ ID NO: 388793 - RNA, 20 nt, Human
cccucccagagucacuucuu

SEQ ID NO: 388794 - RNA, 23 nt, Human
ccgcgcacgcacgcgggggcgcg

SEQ ID NO: 388795 - RNA, 19 nt, Human
ccuccuggaacucccccuu

SEQ ID NO: 388796 - RNA, 20 nt, Human
cgccauggacccgcucaaag

SEQ ID NO: 388797 - RNA, 21 nt, Human
cgccauggacccgcucaaagc

SEQ ID NO: 388798 - RNA, 23 nt, Human
cgccgccucuucaaagcggccug

SEQ ID NO: 388799 - RNA, 22 nt, Human
cgcgcacgcacgcgggggcgcg

SEQ ID NO: 388800 - RNA, 19 nt, Human
cgcuuggucaucuugaaga

SEQ ID NO: 388801 - RNA, 19 nt, Human
cgcuuggucaucuugaaga

SEQ ID NO: 388802 - RNA, 20 nt, Human
cguuggaggcccgcuucagg

SEQ ID NO: 388803 - RNA, 22 nt, Human
cguugggggagagggccaggcg

SEQ ID NO: 388804 - RNA, 27 nt, Human
cuccucucuaccauucuccucagugcc

SEQ ID NO: 388805 - RNA, 27 nt, Human
cuccucucuaccauucuccucagugcc

SEQ ID NO: 388806 - RNA, 18 nt, Human
cucuccucuccucucuac

SEQ ID NO: 388807 - RNA, 21 nt, Human
cucuccucuccucucuaccau

SEQ ID NO: 388808 - RNA, 22 nt, Human
cucugcgccgggcccucccaga

SEQ ID NO: 388809 - RNA, 22 nt, Human
cucugcgccgggcccucccaga

SEQ ID NO: 388810 - RNA, 23 nt, Human
cucugcgccgggcccucccagag

SEQ ID NO: 388811 - RNA, 24 nt, Human
cucuucagagcugcagccaggagg

SEQ ID NO: 388812 - RNA, 24 nt, Human
cuuacaaauagaacugaggcccag

SEQ ID NO: 388813 - RNA, 24 nt, Human
cuuacaaauagaacugaggcccag

SEQ ID NO: 388814 - RNA, 20 nt, Human
cuugaugaacugaaaagagg

SEQ ID NO: 388815 - RNA, 22 nt, Human
gaaaggcuuccaccugggagga

SEQ ID NO: 388816 - RNA, 22 nt, Human
gaagguguagcccccauccucc

SEQ ID NO: 388817 - RNA, 24 nt, Human
gaccugggcguugggggagagggc

SEQ ID NO: 388818 - RNA, 21 nt, Human
gaggaggccagaucccuccuc

SEQ ID NO: 388819 - RNA, 21 nt, Human
gaggaggccagaucccuccuc

SEQ ID NO: 388820 - RNA, 22 nt, Human
gccagaucccuccuccucaauc

SEQ ID NO: 388821 - RNA, 22 nt, Human
gccgcaccgcccgguccccaca

SEQ ID NO: 388822 - RNA, 21 nt, Human
gccugggucagcugcugcugc

SEQ ID NO: 388823 - RNA, 24 nt, Human
gcgcggcacccgccgccucuucaa

SEQ ID NO: 388824 - RNA, 21 nt, Human
gcggaguggcccuuuaguucg

SEQ ID NO: 388825 - RNA, 21 nt, Human
gggcgcccgcacggcucugcc

SEQ ID NO: 388826 - RNA, 23 nt, Human
gguagccagguauuugccauugc

SEQ ID NO: 388827 - RNA, 20 nt, Human
ggugcucucgcugcaggaag

SEQ ID NO: 388828 - RNA, 22 nt, Human
guagccagguauuugccauugc

SEQ ID NO: 388829 - RNA, 20 nt, Human
guugggggagagggccaggc

SEQ ID NO: 388830 - RNA, 20 nt, Human
uaccacuuucaugacauugg

SEQ ID NO: 388831 - RNA, 20 nt, Human
uaccacuuucaugacauugg

SEQ ID NO: 388832 - RNA, 25 nt, Human
uagaacugaggcccagaaggaaauc

SEQ ID NO: 388833 - RNA, 25 nt, Human
uagaacugaggcccagaaggaaauc

SEQ ID NO: 388834 - RNA, 19 nt, Human
uauuccacaucuguguccc

SEQ ID NO: 388835 - RNA, 22 nt, Human
uauuugccauugcugcuaaagu

SEQ ID NO: 388836 - RNA, 18 nt, Human
ucaaagcacacugguucc

SEQ ID NO: 388837 - RNA, 18 nt, Human
ucaaagcacacugguucc

SEQ ID NO: 388838 - RNA, 22 nt, Human
ucaaauaucugaugaacuugau

SEQ ID NO: 388839 - RNA, 22 nt, Human
ucaaauaucugaugaacuugau

SEQ ID NO: 388840 - RNA, 26 nt, Human
ucaauccucugcgccgggcccuccca

SEQ ID NO: 388841 - RNA, 19 nt, Human
ucagagcugcagccaggag

SEQ ID NO: 388842 - RNA, 23 nt, Human
ucagggucucuugggccuggguc

SEQ ID NO: 388843 - RNA, 21 nt, Human
ucagguggcccugcaucuccu

SEQ ID NO: 388844 - RNA, 21 nt, Human
uccaaagcagacuucccaaac

SEQ ID NO: 388845 - RNA, 20 nt, Human
ucccagaaaacuuugccuuc

SEQ ID NO: 388846 - RNA, 20 nt, Human
ucccagaaaacuuugccuuc

SEQ ID NO: 388847 - RNA, 23 nt, Human
uccccagcucauauuuauuuggg

SEQ ID NO: 388848 - RNA, 23 nt, Human
uccccagcucauauuuauuuggg

SEQ ID NO: 388849 - RNA, 21 nt, Human
ucccgcuuggucaucuugaag

SEQ ID NO: 388850 - RNA, 22 nt, Human
uccuccgugagucguuggagaa

SEQ ID NO: 388851 - RNA, 18 nt, Human
uccuucugaaaggcuucc

SEQ ID NO: 388852 - RNA, 19 nt, Human
uccuucugaaaggcuucca

SEQ ID NO: 388853 - RNA, 19 nt, Human
uccuugcaaaacugcugcu

SEQ ID NO: 388854 - RNA, 19 nt, Human
uccuugcaaaacugcugcu

SEQ ID NO: 388855 - RNA, 22 nt, Human
ucuccucagugccaggugggga

SEQ ID NO: 388856 - RNA, 20 nt, Human
ucuccucucuaccauucucc

SEQ ID NO: 388857 - RNA, 20 nt, Human
ucuccucucuaccauucucc

SEQ ID NO: 388858 - RNA, 18 nt, Human
ucuccuuaaacaagauau

SEQ ID NO: 388859 - RNA, 22 nt, Human
ucucuccucuccucucuaccau

SEQ ID NO: 388860 - RNA, 19 nt, Human
ucugcagucagggcugaag

SEQ ID NO: 388861 - RNA, 18 nt, Human
ucugguugguguugaugg

SEQ ID NO: 388862 - RNA, 24 nt, Human
ucuucagagcugcagccaggaggc

SEQ ID NO: 388863 - RNA, 23 nt, Human
ucuucagggcacccaggcucuuc

SEQ ID NO: 388864 - RNA, 24 nt, Human
ucuucagggcacccaggcucuuca

SEQ ID NO: 388865 - RNA, 21 nt, Human
ucuuggaucccgaagauuugu

SEQ ID NO: 388866 - RNA, 18 nt, Human
ugaaacagccgcaccgcc

SEQ ID NO: 388867 - RNA, 18 nt, Human
ugacaggcgccuugugcu

SEQ ID NO: 388868 - RNA, 19 nt, Human
ugagaagucaacaucuguu

SEQ ID NO: 388869 - RNA, 24 nt, Human
ugaggaugugcugccacaaggcca

SEQ ID NO: 388870 - RNA, 24 nt, Human
ugaggaugugcugccacaaggcca

SEQ ID NO: 388871 - RNA, 21 nt, Human
ugauggaacacaguucuguga

SEQ ID NO: 388872 - RNA, 21 nt, Human
ugauggaacacaguucuguga

SEQ ID NO: 388873 - RNA, 19 nt, Human
ugaugggaagcuaucccag

SEQ ID NO: 388874 - RNA, 21 nt, Human
ugcaggaaguccuuggugcuc

SEQ ID NO: 388875 - RNA, 21 nt, Human
ugcagucagggcugaagcgca

SEQ ID NO: 388876 - RNA, 18 nt, Human
ugcaucuccuccaccaug

SEQ ID NO: 388877 - RNA, 21 nt, Human
ugccacagggagauacagcag

SEQ ID NO: 388878 - RNA, 20 nt, Human
ugcuuuuuagggaaguccuc

SEQ ID NO: 388879 - RNA, 18 nt, Human
uggaacucccccuucuuu

SEQ ID NO: 388880 - RNA, 21 nt, Human
uggaggcccgcuucagguggc

SEQ ID NO: 388881 - RNA, 21 nt, Human
uggcagcagcgccaugaggag

SEQ ID NO: 388882 - RNA, 21 nt, Human
uggcagcagcgccaugaggag

SEQ ID NO: 388883 - RNA, 24 nt, Human
uggccaggaguguugugaaacagc

SEQ ID NO: 388884 - RNA, 20 nt, Human
ugggaggaagaaaagcaccu

SEQ ID NO: 388885 - RNA, 20 nt, Human
ugggaggaagaaaagcaccu

SEQ ID NO: 388886 - RNA, 22 nt, Human
ugggaggaagaaaagcaccuug

SEQ ID NO: 388887 - RNA, 22 nt, Human
ugggaggaagaaaagcaccuug

SEQ ID NO: 388888 - RNA, 18 nt, Human
uggggacagauuccaccc

SEQ ID NO: 388889 - RNA, 18 nt, Human
uggggacagauuccaccc

SEQ ID NO: 388890 - RNA, 23 nt, Human
ugucaaaggacaaguuggcgaua

SEQ ID NO: 388891 - RNA, 18 nt, Human
ugugaagguguagccccc

SEQ ID NO: 388892 - RNA, 21 nt, Human
ugugaugggaagcuaucccag

SEQ ID NO: 388893 - RNA, 21 nt, Human
uguugaggcuucuccuuccga

SEQ ID NO: 388894 - RNA, 22 nt, Human
uucagagcugcagccaggaggc

SEQ ID NO: 388895 - RNA, 19 nt, Human
uucccaaggaauguguuuc

SEQ ID NO: 388896 - RNA, 19 nt, Human
uucccaaggaauguguuuc

SEQ ID NO: 388897 - RNA, 19 nt, Human
uucccgcuguggcucuuca

SEQ ID NO: 388898 - RNA, 25 nt, Human
uucuuuccaaagcagacuucccaaa

SEQ ID NO: 388899 - RNA, 25 nt, Human
uuugauggaacacaguucugugaug

SEQ ID NO: 388900 - RNA, 25 nt, Human
uuugauggaacacaguucugugaug

SEQ ID NO: 388901 - RNA, 19 nt, Human
uuugcuuuuuggccugaaa

SEQ ID NO: 388902 - RNA, 18 nt, Human
uuugucagguggaaaucc

SEQ ID NO: 388903 - RNA, 20 nt, Human
uuuuuuuuuaauccccagcu

SEQ ID NO: 388904 - RNA, 22 nt, Human
uuuuuuuuuuuaauccccagcu

SEQ ID NO: 388905 - RNA, 22 nt, Human
uuuuuuuuuuuaauccccagcu

SEQ ID NO: 388906 - RNA, 22 nt, Human
cagcugaaaccugcuagggucc

SEQ ID NO: 388907 - RNA, 19 nt, Human
ccgcuccagcugaaaccug

SEQ ID NO: 388908 - RNA, 22 nt, Human
ccugcuagggucccggcagcca

SEQ ID NO: 388909 - RNA, 20 nt, Human
gccgccgccgccgcuccagc

SEQ ID NO: 388910 - RNA, 21 nt, Human
ggguucaggauggacuggaga

SEQ ID NO: 388911 - RNA, 23 nt, Human
uagcaccgaacucuucacagaac

SEQ ID NO: 388912 - RNA, 19 nt, Human
ucacagaacgccacacucc

SEQ ID NO: 388913 - RNA, 21 nt, Human
uuauggguuuuccagggguuc

SEQ ID NO: 388914 - RNA, 19 nt, Human
uuuuuuuuuuuuuugccag

SEQ ID NO: 388915 - RNA, 22 nt, Human
uuuuuuuuuuuuuuuugccagg

SEQ ID NO: 388916 - RNA, 18 nt, Human
uuuuuuuuuuuuuuuuug

SEQ ID NO: 388917 - RNA, 22 nt, Human
uuuuuuuuuuuuuuuuugccag

SEQ ID NO: 388918 - RNA, 21 nt, Human
aaagaucacuaugggccagcg

SEQ ID NO: 388919 - RNA, 23 nt, Human
aacucaacauccaucuucucaca

SEQ ID NO: 388920 - RNA, 23 nt, Human
aagaaagaaaaaaauauguacag

SEQ ID NO: 388921 - RNA, 23 nt, Human
aagaagggggugggggaggcaag

SEQ ID NO: 388922 - RNA, 20 nt, Human
aagggggugggggaggcaag

SEQ ID NO: 388923 - RNA, 21 nt, Human
aagggggugggggaggcaagg

SEQ ID NO: 388924 - RNA, 19 nt, Human
acccugcaacucaacaucc

SEQ ID NO: 388925 - RNA, 25 nt, Human
agaagggggugggggaggcaagggu

SEQ ID NO: 388926 - RNA, 18 nt, Human
agcacacucuucucagca

SEQ ID NO: 388927 - RNA, 31 nt, Human
agggggugggggaggcaaggguacaugagaa

SEQ ID NO: 388928 - RNA, 23 nt, Human
auuaaaaaguccaaucaauuaua

SEQ ID NO: 388929 - RNA, 21 nt, Human
caacaccaccauuuaaaggua

SEQ ID NO: 388930 - RNA, 21 nt, Human
caaggguacaugagagccagu

SEQ ID NO: 388931 - RNA, 19 nt, Human
cacccugcaacucaacauc

SEQ ID NO: 388932 - RNA, 25 nt, Human
cacccugcaacucaacauccaucuu

SEQ ID NO: 388933 - RNA, 18 nt, Human
cacgccaagaaacaguga

SEQ ID NO: 388934 - RNA, 21 nt, Human
ccuugcgcuggaacucgucuc

SEQ ID NO: 388935 - RNA, 23 nt, Human
cgaaguuaaacagccggcggccc

SEQ ID NO: 388936 - RNA, 22 nt, Human
cgccaagaaacagugaugcugc

SEQ ID NO: 388937 - RNA, 23 nt, Human
cggcccaggcgcccgccacagcg

SEQ ID NO: 388938 - RNA, 22 nt, Human
cucaaaccaacuugucaacagc

SEQ ID NO: 388939 - RNA, 24 nt, Human
cucacagucacgcugcgcgguguu

SEQ ID NO: 388940 - RNA, 22 nt, Human
cugaagaaagaaaaaaauaugu

SEQ ID NO: 388941 - RNA, 28 nt, Human
cuuaaaguuuucucccucaaaccaacuu

SEQ ID NO: 388942 - RNA, 18 nt, Human
gaaauauaaaaacugugg

SEQ ID NO: 388943 - RNA, 18 nt, Human
gaagggggugggggaggc

SEQ ID NO: 388944 - RNA, 18 nt, Human
gaaguuaaacagccggcg

SEQ ID NO: 388945 - RNA, 22 nt, Human
gauuuguuuaaaaaaaaaaaaa

SEQ ID NO: 388946 - RNA, 24 nt, Human
ggggaaaaacauuaaaauuaaaaa

SEQ ID NO: 388947 - RNA, 20 nt, Human
uaaaaaaaaaaaaagaaggg

SEQ ID NO: 388948 - RNA, 23 nt, Human
uaaaaucuacauauaaauaaaug

SEQ ID NO: 388949 - RNA, 21 nt, Human
uaaagguaccaaaacaaacug

SEQ ID NO: 388950 - RNA, 19 nt, Human
uaaaugggcagcgcugccc

SEQ ID NO: 388951 - RNA, 24 nt, Human
uacagaguacucugaagaaagaaa

SEQ ID NO: 388952 - RNA, 19 nt, Human
ucccucaaaccaacuuguc

SEQ ID NO: 388953 - RNA, 25 nt, Human
ucccucaaaccaacuugucaacagc

SEQ ID NO: 388954 - RNA, 18 nt, Human
ucuggcacagaaauaacc

SEQ ID NO: 388955 - RNA, 20 nt, Human
ucuggcacagaaauaacccc

SEQ ID NO: 388956 - RNA, 22 nt, Human
ucuggcacagaaauaaccccua

SEQ ID NO: 388957 - RNA, 23 nt, Human
ucuguccugcaauacuggagagg

SEQ ID NO: 388958 - RNA, 21 nt, Human
ugagcaacucacagucacgcu

SEQ ID NO: 388959 - RNA, 18 nt, Human
ugaugcugcugggucacu

SEQ ID NO: 388960 - RNA, 19 nt, Human
ugcaaagaucacuaugggc

SEQ ID NO: 388961 - RNA, 21 nt, Human
ugccacacccugcaacucaac

SEQ ID NO: 388962 - RNA, 22 nt, Human
uggaaugugucuggcacagaaa

SEQ ID NO: 388963 - RNA, 23 nt, Human
uggagagguggaaugugucuggc

SEQ ID NO: 388964 - RNA, 22 nt, Human
uggcuuuaacacuuaaaguuuu

SEQ ID NO: 388965 - RNA, 19 nt, Human
ugggcagcgcugcccagau

SEQ ID NO: 388966 - RNA, 24 nt, Human
uggggaaaaacauuaaaauuaaaa

SEQ ID NO: 388967 - RNA, 23 nt, Human
uggugccacacccugcaacucaa

SEQ ID NO: 388968 - RNA, 22 nt, Human
uuaaacagccggcggcccaggc

SEQ ID NO: 388969 - RNA, 22 nt, Human
uucauggggaaaaacauuaaaa

SEQ ID NO: 388970 - RNA, 23 nt, Human
uucucccucaaaccaacuuguca

SEQ ID NO: 388971 - RNA, 21 nt, Human
uuuaaaaaaaaaaaaagaagg

SEQ ID NO: 388972 - RNA, 25 nt, Human
uuuaaaaaaaaaaaaagaagggggu

SEQ ID NO: 388973 - RNA, 20 nt, Human
aaagagagagaagagaaagu

SEQ ID NO: 388974 - RNA, 21 nt, Human
aaaguugaaggucggugagcu

SEQ ID NO: 388975 - RNA, 20 nt, Human
aagagaagacgagggggagg

SEQ ID NO: 388976 - RNA, 19 nt, Human
acuccacagaagaagagua

SEQ ID NO: 388977 - RNA, 19 nt, Human
agaaagaaaagcaaagaaa

SEQ ID NO: 388978 - RNA, 22 nt, Human
agaaagaaaagcaaagaaagga

SEQ ID NO: 388979 - RNA, 18 nt, Human
agacggccaucgaggguc

SEQ ID NO: 388980 - RNA, 23 nt, Human
agagaagacgagggggaggggaa

SEQ ID NO: 388981 - RNA, 23 nt, Human
agagaagagaaaguaugagagga

SEQ ID NO: 388982 - RNA, 21 nt, Human
agagagagaagagaaaguaug

SEQ ID NO: 388983 - RNA, 19 nt, Human
agcugugaggggcuggcug

SEQ ID NO: 388984 - RNA, 21 nt, Human
aggagagaaagaaaagcaaag

SEQ ID NO: 388985 - RNA, 22 nt, Human
aggagagaaagaaaagcaaaga

SEQ ID NO: 388986 - RNA, 22 nt, Human
agggccgagacuuggcggagga

SEQ ID NO: 388987 - RNA, 22 nt, Human
aggggcuggcuggggguccggg

SEQ ID NO: 388988 - RNA, 18 nt, Human
caaaguugaaggucggug

SEQ ID NO: 388989 - RNA, 22 nt, Human
ccauccauccauccauccacuc

SEQ ID NO: 388990 - RNA, 21 nt, Human
cccaggucuccuaaaggugaa

SEQ ID NO: 388991 - RNA, 21 nt, Human
cccaucacuacugaguauuuc

SEQ ID NO: 388992 - RNA, 21 nt, Human
ccuaugguuaauguggagggc

SEQ ID NO: 388993 - RNA, 23 nt, Human
cgcucggagaccugcacuuauuc

SEQ ID NO: 388994 - RNA, 18 nt, Human
cugcccaggucuccuaaa

SEQ ID NO: 388995 - RNA, 22 nt, Human
cugugcaaaaaagguuaaaauc

SEQ ID NO: 388996 - RNA, 23 nt, Human
cuugacgagaauaaaacaugcca

SEQ ID NO: 388997 - RNA, 20 nt, Human
gacgagaauaaaacaugcca

SEQ ID NO: 388998 - RNA, 25 nt, Human
gacgagggggaggggaauguaggag

SEQ ID NO: 388999 - RNA, 25 nt, Human
gagaaguaggagguaagagaagacg

SEQ ID NO: 389000 - RNA, 18 nt, Human
gaggagaagugggaaacc

SEQ ID NO: 389001 - RNA, 19 nt, Human
gaguguggggaggcggagc

SEQ ID NO: 389002 - RNA, 18 nt, Human
gcaaggaggagugugggg

SEQ ID NO: 389003 - RNA, 22 nt, Human
gcggaggaaucgcugcugccug

SEQ ID NO: 389004 - RNA, 19 nt, Human
gcucggagaccugcacuua

SEQ ID NO: 389005 - RNA, 18 nt, Human
ggcuggggguccgggccg

SEQ ID NO: 389006 - RNA, 19 nt, Human
gggaaacccaucacuacug

SEQ ID NO: 389007 - RNA, 21 nt, Human
gggccgcggcggggccgggcg

SEQ ID NO: 389008 - RNA, 19 nt, Human
ggggaggggaauguaggag

SEQ ID NO: 389009 - RNA, 21 nt, Human
ggggaggggaauguaggagga

SEQ ID NO: 389010 - RNA, 18 nt, Human
uaacuccacagaagaaga

SEQ ID NO: 389011 - RNA, 20 nt, Human
uaacuccacagaagaagagu

SEQ ID NO: 389012 - RNA, 21 nt, Human
uaagaaaggacgcgcugggug

SEQ ID NO: 389013 - RNA, 19 nt, Human
uaagagaagacgaggggga

SEQ ID NO: 389014 - RNA, 21 nt, Human
uaagagaagacgagggggagg

SEQ ID NO: 389015 - RNA, 23 nt, Human
uaggagguaagagaagacgaggg

SEQ ID NO: 389016 - RNA, 23 nt, Human
ugaggagaagugggaaacccauc

SEQ ID NO: 389017 - RNA, 19 nt, Human
ugagugggugcgcaaggag

SEQ ID NO: 389018 - RNA, 23 nt, Human
ugugaggggcuggcugggggucc

SEQ ID NO: 389019 - RNA, 21 nt, Human
uguggagggccgagacuuggc

SEQ ID NO: 389020 - RNA, 19 nt, Human
uguggggaggcggagcugg

SEQ ID NO: 389021 - RNA, 25 nt, Human
uuaaagguguuuggguggauucucc

SEQ ID NO: 389022 - RNA, 24 nt, Human
uuaagcaugaacugguuuugugcc

SEQ ID NO: 389023 - RNA, 23 nt, Human
uugaggagaagugggaaacccau

SEQ ID NO: 389024 - RNA, 21 nt, Human
aaggggagagccgcgguggcc

SEQ ID NO: 389025 - RNA, 24 nt, Human
acccaggcuggagugcaguggcau

SEQ ID NO: 389026 - RNA, 18 nt, Human
acucugucacccaggcug

SEQ ID NO: 389027 - RNA, 25 nt, Human
acucugucacccaggcuggagugca

SEQ ID NO: 389028 - RNA, 18 nt, Human
agaccagggacagugggg

SEQ ID NO: 389029 - RNA, 22 nt, Human
aggacccugagcccuggugggc

SEQ ID NO: 389030 - RNA, 23 nt, Human
aggacccugagcccuggugggcc

SEQ ID NO: 389031 - RNA, 22 nt, Human
aggcucaagugauccuccugcc

SEQ ID NO: 389032 - RNA, 19 nt, Human
aggcuggagugcaguggca

SEQ ID NO: 389033 - RNA, 25 nt, Human
agugauccuccugccucagccuccc

SEQ ID NO: 389034 - RNA, 21 nt, Human
agugcaguggcaugaucauag

SEQ ID NO: 389035 - RNA, 23 nt, Human
agugcaguggcaugaucauagcu

SEQ ID NO: 389036 - RNA, 24 nt, Human
agugcaguggcaugaucauagcuu

SEQ ID NO: 389037 - RNA, 21 nt, Human
auaaauaucacuuccuuccgc

SEQ ID NO: 389038 - RNA, 18 nt, Human
auagcuuacugcagccuc

SEQ ID NO: 389039 - RNA, 20 nt, Human
auggcuucgaggcuggggaa

SEQ ID NO: 389040 - RNA, 20 nt, Human
caagugauccuccugccuca

SEQ ID NO: 389041 - RNA, 22 nt, Human
caagugauccuccugccucagc

SEQ ID NO: 389042 - RNA, 18 nt, Human
cacccggucggaggaccc

SEQ ID NO: 389043 - RNA, 23 nt, Human
cacucugucacccaggcuggagu

SEQ ID NO: 389044 - RNA, 24 nt, Human
cacucugucacccaggcuggagug

SEQ ID NO: 389045 - RNA, 22 nt, Human
cacuuccuuccgccuccgaccc

SEQ ID NO: 389046 - RNA, 19 nt, Human
cagcagcacaucugucccc

SEQ ID NO: 389047 - RNA, 20 nt, Human
cagcagcacaucuguccccu

SEQ ID NO: 389048 - RNA, 23 nt, Human
cagccuccaacuaauaggcucaa

SEQ ID NO: 389049 - RNA, 19 nt, Human
caugugcccauggcccggc

SEQ ID NO: 389050 - RNA, 19 nt, Human
ccaugugcccauggcccgg

SEQ ID NO: 389051 - RNA, 18 nt, Human
cccuuccuccucgcuccc

SEQ ID NO: 389052 - RNA, 25 nt, Human
cccuuccuccucgcucccccugccg

SEQ ID NO: 389053 - RNA, 21 nt, Human
ccgccgccuccgcuggcccgg

SEQ ID NO: 389054 - RNA, 23 nt, Human
ccgggcgcuuuggcacuggcggg

SEQ ID NO: 389055 - RNA, 23 nt, Human
ccucuugcaugcacacuugaccu

SEQ ID NO: 389056 - RNA, 23 nt, Human
ccugccggggauccuggcagcca

SEQ ID NO: 389057 - RNA, 21 nt, Human
ccuuccuccucgcucccccug

SEQ ID NO: 389058 - RNA, 24 nt, Human
ccuuccuccucgcucccccugccg

SEQ ID NO: 389059 - RNA, 20 nt, Human
cgaggcuggggaaggggaga

SEQ ID NO: 389060 - RNA, 20 nt, Human
cggggcucucgggcugucua

SEQ ID NO: 389061 - RNA, 20 nt, Human
cucaagugauccuccugccu

SEQ ID NO: 389062 - RNA, 24 nt, Human
cucaagugauccuccugccucagc

SEQ ID NO: 389063 - RNA, 24 nt, Human
cucacucugucacccaggcuggag

SEQ ID NO: 389064 - RNA, 23 nt, Human
cugccucagccucccgaguaacu

SEQ ID NO: 389065 - RNA, 18 nt, Human
gacccugagcccuggugg

SEQ ID NO: 389066 - RNA, 19 nt, Human
gaucauagcuuacugcagc

SEQ ID NO: 389067 - RNA, 21 nt, Human
gcccaaggggcuggggguggc

SEQ ID NO: 389068 - RNA, 19 nt, Human
gccuuuaagugaacugcuu

SEQ ID NO: 389069 - RNA, 19 nt, Human
gcucaagugauccuccugc

SEQ ID NO: 389070 - RNA, 22 nt, Human
gcuccgccgccuccgcuggccc

SEQ ID NO: 389071 - RNA, 27 nt, Human
gcuccgccgccuccgcuggggccgcuc

SEQ ID NO: 389072 - RNA, 19 nt, Human
gcuggagugcaguggcaug

SEQ ID NO: 389073 - RNA, 21 nt, Human
gcuggcccggccgcgguuccc

SEQ ID NO: 389074 - RNA, 23 nt, Human
gcuggcccggccgcgguucccuu

SEQ ID NO: 389075 - RNA, 21 nt, Human
gggaaggggagagccgcggug

SEQ ID NO: 389076 - RNA, 22 nt, Human
gggccggggaaggacccgcggu

SEQ ID NO: 389077 - RNA, 18 nt, Human
ggggcaggguggccgggc

SEQ ID NO: 389078 - RNA, 24 nt, Human
gugauccuccugccucagccuccc

SEQ ID NO: 389079 - RNA, 21 nt, Human
guucccuuccuccucgcuccc

SEQ ID NO: 389080 - RNA, 18 nt, Human
uagcccaaggggcugggg

SEQ ID NO: 389081 - RNA, 24 nt, Human
uaggcucaagugauccuccugccu

SEQ ID NO: 389082 - RNA, 22 nt, Human
ucacccaggcuggagugcagug

SEQ ID NO: 389083 - RNA, 24 nt, Human
ucacucugucacccaggcuggagu

SEQ ID NO: 389084 - RNA, 22 nt, Human
ucagccucccgaguaacucaug

SEQ ID NO: 389085 - RNA, 21 nt, Human
uccaccauccagcugugcagg

SEQ ID NO: 389086 - RNA, 20 nt, Human
ucccgaguaacucauggccu

SEQ ID NO: 389087 - RNA, 18 nt, Human
uccgcuggcccggccgcg

SEQ ID NO: 389088 - RNA, 26 nt, Human
uccuccugccucagccucccgaguaa

SEQ ID NO: 389089 - RNA, 22 nt, Human
ucuacacugcaacugccggccg

SEQ ID NO: 389090 - RNA, 24 nt, Human
ucuacacugcaacugccggccggg

SEQ ID NO: 389091 - RNA, 19 nt, Human
ucuacaguaucuacaugua

SEQ ID NO: 389092 - RNA, 23 nt, Human
ucucacucugucacccaggcugg

SEQ ID NO: 389093 - RNA, 24 nt, Human
ucucacucugucacccaggcugga

SEQ ID NO: 389094 - RNA, 26 nt, Human
ucucacucugucacccaggcuggagu

SEQ ID NO: 389095 - RNA, 27 nt, Human
ucucacucugucacccaggcuggagug

SEQ ID NO: 389096 - RNA, 24 nt, Human
ucugucacccaggcuggagugcag

SEQ ID NO: 389097 - RNA, 19 nt, Human
ucuguccccugccaccucu

SEQ ID NO: 389098 - RNA, 22 nt, Human
ugcccuuggggcaggguggccg

SEQ ID NO: 389099 - RNA, 18 nt, Human
ugccggggauccuggcag

SEQ ID NO: 389100 - RNA, 19 nt, Human
ugccggggauccuggcagc

SEQ ID NO: 389101 - RNA, 23 nt, Human
ugccucagccucccgaguaacuc

SEQ ID NO: 389102 - RNA, 24 nt, Human
ugccucagccucccgaguaacuca

SEQ ID NO: 389103 - RNA, 25 nt, Human
ugccucagccucccgaguaacucau

SEQ ID NO: 389104 - RNA, 22 nt, Human
ugcuugcccuuggggcagggug

SEQ ID NO: 389105 - RNA, 19 nt, Human
uggagugcaguggcaugau

SEQ ID NO: 389106 - RNA, 19 nt, Human
uggagugcaguggcaugau

SEQ ID NO: 389107 - RNA, 21 nt, Human
uggagugcaguggcaugauca

SEQ ID NO: 389108 - RNA, 18 nt, Human
uggcaugaucauagcuua

SEQ ID NO: 389109 - RNA, 22 nt, Human
uggcuucgaggcuggggaaggg

SEQ ID NO: 389110 - RNA, 21 nt, Human
ugugcaggaccggggcgggag

SEQ ID NO: 389111 - RNA, 26 nt, Human
ugugcaggaccggggcgggggaacgc

SEQ ID NO: 389112 - RNA, 25 nt, Human
uguuuguuuuuucuuuuaagagacc

SEQ ID NO: 389113 - RNA, 22 nt, Human
uucaaacaugaaccaaagugaa

SEQ ID NO: 389114 - RNA, 22 nt, Human
uugcaugcacacuugaccuccu

SEQ ID NO: 389115 - RNA, 23 nt, Human
uugcuugcccuuggggcagggug

SEQ ID NO: 389116 - RNA, 18 nt, Human
uuggggcaggguggccgg

SEQ ID NO: 389117 - RNA, 23 nt, Human
uuuguuuguuuguuuuuucuuuu

SEQ ID NO: 389118 - RNA, 20 nt, Human
accccuggccccugcaccuu

SEQ ID NO: 389119 - RNA, 18 nt, Human
agggaagugucccaggcc

SEQ ID NO: 389120 - RNA, 20 nt, Human
auaaauacucauucugugcu

SEQ ID NO: 389121 - RNA, 18 nt, Human
caaggcagaagugccacu

SEQ ID NO: 389122 - RNA, 19 nt, Human
caaggcagaagugccacuc

SEQ ID NO: 389123 - RNA, 20 nt, Human
caccuucuggcuucugcagg

SEQ ID NO: 389124 - RNA, 25 nt, Human
cagcucaggucuacacugacuucag

SEQ ID NO: 389125 - RNA, 23 nt, Human
ccagcaucccucaacccaguuuu

SEQ ID NO: 389126 - RNA, 24 nt, Human
cccaagcagcaggggcaggcagcc

SEQ ID NO: 389127 - RNA, 21 nt, Human
cccagcagcucccaagugacu

SEQ ID NO: 389128 - RNA, 21 nt, Human
cccaggccccgacuugccaga

SEQ ID NO: 389129 - RNA, 22 nt, Human
ccccugcaccuucuggcuucug

SEQ ID NO: 389130 - RNA, 18 nt, Human
ccugcguggcaggggagc

SEQ ID NO: 389131 - RNA, 22 nt, Human
cucccaccucgcuggaagacca

SEQ ID NO: 389132 - RNA, 21 nt, Human
cucucaucgggacauccggcc

SEQ ID NO: 389133 - RNA, 20 nt, Human
cugcaccuucuggcuucugc

SEQ ID NO: 389134 - RNA, 21 nt, Human
cugcagggaccgcugggcccu

SEQ ID NO: 389135 - RNA, 23 nt, Human
cugcagggaccgcugggcccugg

SEQ ID NO: 389136 - RNA, 24 nt, Human
gacucccuccgaugcucccacccc

SEQ ID NO: 389137 - RNA, 19 nt, Human
gacuugccagacgaggcuc

SEQ ID NO: 389138 - RNA, 22 nt, Human
gaggggugccugucucuucagg

SEQ ID NO: 389139 - RNA, 24 nt, Human
ggcugggaggggugccugucucuu

SEQ ID NO: 389140 - RNA, 21 nt, Human
gggcaggcagcccggguggcc

SEQ ID NO: 389141 - RNA, 22 nt, Human
guggcaggggagcagcugggca

SEQ ID NO: 389142 - RNA, 27 nt, Human
uaacagguucccucccagcucaggucu

SEQ ID NO: 389143 - RNA, 21 nt, Human
uccagggcucugggacucccu

SEQ ID NO: 389144 - RNA, 24 nt, Human
ucccaagugacuguguuuccagca

SEQ ID NO: 389145 - RNA, 23 nt, Human
ucccaccucgcuggaagaccaga

SEQ ID NO: 389146 - RNA, 25 nt, Human
ucugcagggaccgcugggcccugga

SEQ ID NO: 389147 - RNA, 22 nt, Human
ucuggcuucugcagggaccgcu

SEQ ID NO: 389148 - RNA, 23 nt, Human
ugaggcccagggaagugucccag

SEQ ID NO: 389149 - RNA, 19 nt, Human
ugcucccaccccuggcccc

SEQ ID NO: 389150 - RNA, 22 nt, Human
caaagaaauacuguauuguaau

SEQ ID NO: 389151 - RNA, 19 nt, Human
cccuggagggggugaaggg

SEQ ID NO: 389152 - RNA, 18 nt, Human
cuucaagauuaaaugguc

SEQ ID NO: 389153 - RNA, 19 nt, Human
cuucacugcuuucaugaga

SEQ ID NO: 389154 - RNA, 22 nt, Human
gaaaaucccaucacuuagcauc

SEQ ID NO: 389155 - RNA, 21 nt, Human
uaaaaugcaguuaacguggug

SEQ ID NO: 389156 - RNA, 18 nt, Human
uaacaaagaaauacugua

SEQ ID NO: 389157 - RNA, 21 nt, Human
ucauuuuuaaaacugaaauug

SEQ ID NO: 389158 - RNA, 23 nt, Human
ucuuuaggcuacaaagauaaaua

SEQ ID NO: 389159 - RNA, 24 nt, Human
uguaaugaugcuuuuuaagcccaa

SEQ ID NO: 389160 - RNA, 22 nt, Human
ugucauugucaauguguaaaau

SEQ ID NO: 389161 - RNA, 25 nt, Human
uuaaaucuuuaaauguauaacaaag

SEQ ID NO: 389162 - RNA, 22 nt, Human
uuacauguaauuguucuagaaa

SEQ ID NO: 389163 - RNA, 20 nt, Human
uuaguaguuucuucaacagc

SEQ ID NO: 389164 - RNA, 18 nt, Human
uucaugagaauuacaucc

SEQ ID NO: 389165 - RNA, 23 nt, Human
uuguguuccuucaagauuaaaug

SEQ ID NO: 389166 - RNA, 21 nt, Human
uuuaaauguauaacaaagaaa

SEQ ID NO: 389167 - RNA, 22 nt, Human
aaaaagacacagauuuucuuaa

SEQ ID NO: 389168 - RNA, 18 nt, Human
aaaaagcaaaacaaaaaa

SEQ ID NO: 389169 - RNA, 19 nt, Human
aaaaagcaaaacaaaaaag

SEQ ID NO: 389170 - RNA, 18 nt, Human
aaaacaaaaauguugcag

SEQ ID NO: 389171 - RNA, 23 nt, Human
aaaagaaaacaaaaauguugcag

SEQ ID NO: 389172 - RNA, 31 nt, Human
aaaagaaagaaaaaagaaaaggaggcagaag

SEQ ID NO: 389173 - RNA, 23 nt, Human
aaaagcaaaacaaaaaagaaaga

SEQ ID NO: 389174 - RNA, 22 nt, Human
aaacaagaacacaaaaccugaa

SEQ ID NO: 389175 - RNA, 21 nt, Human
aaacagaaucauguuaaugug

SEQ ID NO: 389176 - RNA, 26 nt, Human
aaagaaaaaagaaaaggaggcagaag

SEQ ID NO: 389177 - RNA, 22 nt, Human
aacacaaaaccugacaguugca

SEQ ID NO: 389178 - RNA, 19 nt, Human
aaccgauaaugcaaguccc

SEQ ID NO: 389179 - RNA, 21 nt, Human
aacuccuacccccaguagcuc

SEQ ID NO: 389180 - RNA, 19 nt, Human
aagaaagaaaaaagaaaag

SEQ ID NO: 389181 - RNA, 20 nt, Human
aagaaagaaaaaagaaaaga

SEQ ID NO: 389182 - RNA, 21 nt, Human
aagaaagaaaaaagaaaagga

SEQ ID NO: 389183 - RNA, 18 nt, Human
aagaacacaaaaccugac

SEQ ID NO: 389184 - RNA, 23 nt, Human
aagcaaaacaaaaaagaaagaaa

SEQ ID NO: 389185 - RNA, 23 nt, Human
aaggaagggcuaacgccauggcg

SEQ ID NO: 389186 - RNA, 21 nt, Human
accacaaauacauuacugugg

SEQ ID NO: 389187 - RNA, 21 nt, Human
acgcaacugcaaaaggaaggg

SEQ ID NO: 389188 - RNA, 20 nt, Human
acgccauggcgggcccgugg

SEQ ID NO: 389189 - RNA, 23 nt, Human
acuggaaugaaaagacgugucug

SEQ ID NO: 389190 - RNA, 21 nt, Human
agagacccagaccagccuuuu

SEQ ID NO: 389191 - RNA, 19 nt, Human
agcaaaacaaaaaagaaag

SEQ ID NO: 389192 - RNA, 22 nt, Human
agcaaucucaguuauauuuuaa

SEQ ID NO: 389193 - RNA, 24 nt, Human
aggaaagagaaagaacugucaaag

SEQ ID NO: 389194 - RNA, 24 nt, Human
aggcggggcgcugggcuccagccg

SEQ ID NO: 389195 - RNA, 19 nt, Human
agggaggaggggaaguguc

SEQ ID NO: 389196 - RNA, 26 nt, Human
agggaggaggggaagugucuuuugga

SEQ ID NO: 389197 - RNA, 22 nt, Human
caacugcaaaaggaagggcuaa

SEQ ID NO: 389198 - RNA, 24 nt, Human
caagcguucaaaauaaaaaccaca

SEQ ID NO: 389199 - RNA, 18 nt, Human
caaggcgaaaaaucagca

SEQ ID NO: 389200 - RNA, 18 nt, Human
cagccugaacuggacugg

SEQ ID NO: 389201 - RNA, 19 nt, Human
caguaauuuauugagaacc

SEQ ID NO: 389202 - RNA, 18 nt, Human
cauuacuguggacaugca

SEQ ID NO: 389203 - RNA, 22 nt, Human
ccacuccuucccuuuaaauccc

SEQ ID NO: 389204 - RNA, 22 nt, Human
ccagacgcaacugcaaaaggaa

SEQ ID NO: 389205 - RNA, 24 nt, Human
ccagccggggacaaguccgcagcu

SEQ ID NO: 389206 - RNA, 18 nt, Human
ccaggcggggcgcugggc

SEQ ID NO: 389207 - RNA, 19 nt, Human
ccaggcggggcgcugggcu

SEQ ID NO: 389208 - RNA, 19 nt, Human
cccagacgcaacugcaaaa

SEQ ID NO: 389209 - RNA, 21 nt, Human
ccccaguagcucaaugcaacc

SEQ ID NO: 389210 - RNA, 20 nt, Human
cccccccucccuugggucac

SEQ ID NO: 389211 - RNA, 18 nt, Human
cccuuuaaaucccccccu

SEQ ID NO: 389212 - RNA, 23 nt, Human
ccuccccaaacaaagcugcucag

SEQ ID NO: 389213 - RNA, 27 nt, Human
ccuccccgccuggugggcagagacugg

SEQ ID NO: 389214 - RNA, 19 nt, Human
ccugacaguugcaauucua

SEQ ID NO: 389215 - RNA, 19 nt, Human
ccuugcuggaaguugcucu

SEQ ID NO: 389216 - RNA, 24 nt, Human
cgccaagaagacaggggcugucuc

SEQ ID NO: 389217 - RNA, 21 nt, Human
cgcugggcuccagccggggac

SEQ ID NO: 389218 - RNA, 20 nt, Human
cuaaugcacuucaaagggag

SEQ ID NO: 389219 - RNA, 21 nt, Human
cugauccagaucccggacaua

SEQ ID NO: 389220 - RNA, 19 nt, Human
cuggaaauaaacccaacua

SEQ ID NO: 389221 - RNA, 20 nt, Human
gaaaacaagaacacaaaacc

SEQ ID NO: 389222 - RNA, 19 nt, Human
gaaguggagcuggaaagug

SEQ ID NO: 389223 - RNA, 23 nt, Human
gaagugucuuuuggagaauggga

SEQ ID NO: 389224 - RNA, 20 nt, Human
gacaugaauccugcuacaga

SEQ ID NO: 389225 - RNA, 19 nt, Human
gcaaaacaaaaaagaaaga

SEQ ID NO: 389226 - RNA, 20 nt, Human
gcaaaacaaaaaagaaagaa

SEQ ID NO: 389227 - RNA, 20 nt, Human
gcaaggcgaaaaaucagcaa

SEQ ID NO: 389228 - RNA, 19 nt, Human
gcccacuccuucccuuuaa

SEQ ID NO: 389229 - RNA, 18 nt, Human
gccuugcuggaaguugcu

SEQ ID NO: 389230 - RNA, 20 nt, Human
gcugggcuccagccggggac

SEQ ID NO: 389231 - RNA, 22 nt, Human
ggaaaaagcaaaacaaaaaaga

SEQ ID NO: 389232 - RNA, 19 nt, Human
ggacauauaaaccacgcca

SEQ ID NO: 389233 - RNA, 19 nt, Human
gggaaaaagcaaaacaaaa

SEQ ID NO: 389234 - RNA, 23 nt, Human
gggaaaaagcaaaacaaaaaaga

SEQ ID NO: 389235 - RNA, 23 nt, Human
uaacagcagcacauaauucaaaa

SEQ ID NO: 389236 - RNA, 19 nt, Human
uaauauagacuaaacaagg

SEQ ID NO: 389237 - RNA, 18 nt, Human
uacacagagcuauguaca

SEQ ID NO: 389238 - RNA, 22 nt, Human
uacuuugucuaauagucucacu

SEQ ID NO: 389239 - RNA, 21 nt, Human
uauacaggaaagagaaagaac

SEQ ID NO: 389240 - RNA, 24 nt, Human
ucaaaaggggggaaaaagcaaaac

SEQ ID NO: 389241 - RNA, 18 nt, Human
ucaaagggaggaggggaa

SEQ ID NO: 389242 - RNA, 19 nt, Human
uccccgccuggugggcaga

SEQ ID NO: 389243 - RNA, 21 nt, Human
ucccuugggucacugauuuga

SEQ ID NO: 389244 - RNA, 20 nt, Human
ucccuuuaaaucccccccuc

SEQ ID NO: 389245 - RNA, 25 nt, Human
ucucuagcacauucucucggguucc

SEQ ID NO: 389246 - RNA, 21 nt, Human
ugaaaacaucacaagaauauu

SEQ ID NO: 389247 - RNA, 26 nt, Human
ugaaaacaucacaagaauauuaaaaa

SEQ ID NO: 389248 - RNA, 24 nt, Human
ugaaaauaggaaauagcacuuucc

SEQ ID NO: 389249 - RNA, 23 nt, Human
ugaauccugcuacagagcuuaga

SEQ ID NO: 389250 - RNA, 22 nt, Human
ugagaaccgauaaugcaagucc

SEQ ID NO: 389251 - RNA, 19 nt, Human
ugcaagaagagaccuacag

SEQ ID NO: 389252 - RNA, 19 nt, Human
ugcagacaacucuuuugaa

SEQ ID NO: 389253 - RNA, 22 nt, Human
uggaaauaaacccaacuaaagg

SEQ ID NO: 389254 - RNA, 24 nt, Human
uggagaaugggaggccgcuuuuaa

SEQ ID NO: 389255 - RNA, 21 nt, Human
uggcacuccuuccccaauuuu

SEQ ID NO: 389256 - RNA, 21 nt, Human
uguuuugcccacuccuucccu

SEQ ID NO: 389257 - RNA, 24 nt, Human
uguuuugcccacuccuucccuuua

SEQ ID NO: 389258 - RNA, 21 nt, Human
uucaaagggaggaggggaagu

SEQ ID NO: 389259 - RNA, 19 nt, Human
uuugaacaccuccccgccu

SEQ ID NO: 389260 - RNA, 23 nt, Human
uuuuguuguuguuuaacagcagc

SEQ ID NO: 389261 - RNA, 22 nt, Human
aagagaccucuuuaggccaggu

SEQ ID NO: 389262 - RNA, 21 nt, Human
aauaaagaggcaaccaggcga

SEQ ID NO: 389263 - RNA, 23 nt, Human
accccaguaaaauaaagaggcaa

SEQ ID NO: 389264 - RNA, 26 nt, Human
acuuugaaaaggaccaccaaaagaga

SEQ ID NO: 389265 - RNA, 23 nt, Human
agagcacguaccucccagcucaa

SEQ ID NO: 389266 - RNA, 21 nt, Human
agccacagguuccggacgucu

SEQ ID NO: 389267 - RNA, 20 nt, Human
agccaggagugcgccucgcu

SEQ ID NO: 389268 - RNA, 20 nt, Human
auuaccaggcauaccccagu

SEQ ID NO: 389269 - RNA, 19 nt, Human
caaccaggcgauagcgacu

SEQ ID NO: 389270 - RNA, 23 nt, Human
caagaagagcacguaccucccag

SEQ ID NO: 389271 - RNA, 21 nt, Human
cacaaauagagccaagaucga

SEQ ID NO: 389272 - RNA, 19 nt, Human
cacgcaaccggcccgcgcg

SEQ ID NO: 389273 - RNA, 20 nt, Human
cagcauccagcgaccuugag

SEQ ID NO: 389274 - RNA, 21 nt, Human
ccgggucugcgcagccacagg

SEQ ID NO: 389275 - RNA, 18 nt, Human
ccucucucucucucuuuc

SEQ ID NO: 389276 - RNA, 20 nt, Human
cgcaagguucugcucuccaa

SEQ ID NO: 389277 - RNA, 21 nt, Human
cgucuuggccccgggaauaaa

SEQ ID NO: 389278 - RNA, 21 nt, Human
cucaggugaagacuuugaaaa

SEQ ID NO: 389279 - RNA, 19 nt, Human
cuccuucucucucuuucuc

SEQ ID NO: 389280 - RNA, 26 nt, Human
cucucucucucucuuucucuaggaaa

SEQ ID NO: 389281 - RNA, 20 nt, Human
cucucucuuucuccucucuc

SEQ ID NO: 389282 - RNA, 21 nt, Human
cuguugugaagcaggccucac

SEQ ID NO: 389283 - RNA, 26 nt, Human
cuucuuuggagcgcaaaagccaggag

SEQ ID NO: 389284 - RNA, 20 nt, Human
cuuuaggccaggucuucuuc

SEQ ID NO: 389285 - RNA, 20 nt, Human
gaagagcacguaccucccag

SEQ ID NO: 389286 - RNA, 21 nt, Human
gaccucuuuaggccaggucuu

SEQ ID NO: 389287 - RNA, 22 nt, Human
gacuuugaaaaggaccaccaaa

SEQ ID NO: 389288 - RNA, 24 nt, Human
gaguccaccucagaccucuauugg

SEQ ID NO: 389289 - RNA, 18 nt, Human
ggaagggggagaggaggg

SEQ ID NO: 389290 - RNA, 22 nt, Human
ggggagaggagggaacucuuca

SEQ ID NO: 389291 - RNA, 23 nt, Human
gguucugcucuccaacuauccca

SEQ ID NO: 389292 - RNA, 21 nt, Human
uaaagacauaaaccaacccgg

SEQ ID NO: 389293 - RNA, 22 nt, Human
uaggaaaugucuguugugaagc

SEQ ID NO: 389294 - RNA, 19 nt, Human
ucagugccgggucugcgca

SEQ ID NO: 389295 - RNA, 18 nt, Human
uccgugggguucucuugg

SEQ ID NO: 389296 - RNA, 24 nt, Human
uccucucucucucucuuucucuaa

SEQ ID NO: 389297 - RNA, 26 nt, Human
ucucucuccuucucucucuuucuccu

SEQ ID NO: 389298 - RNA, 21 nt, Human
ucucucucuuucuccucucuc

SEQ ID NO: 389299 - RNA, 23 nt, Human
ucuucacgaagggaggugggagu

SEQ ID NO: 389300 - RNA, 19 nt, Human
ucuuggccccgggaauaaa

SEQ ID NO: 389301 - RNA, 23 nt, Human
ucuuuaggccaggucuucuucca

SEQ ID NO: 389302 - RNA, 18 nt, Human
ucuuucuccucucucucu

SEQ ID NO: 389303 - RNA, 24 nt, Human
ucuuuggagcgcaaaagccaggag

SEQ ID NO: 389304 - RNA, 22 nt, Human
ugagacaaaacaagaaagucaa

SEQ ID NO: 389305 - RNA, 27 nt, Human
ugcaccuauaggacuuggagacgucac

SEQ ID NO: 389306 - RNA, 22 nt, Human
ugcccgcgcaagguucugcucu

SEQ ID NO: 389307 - RNA, 20 nt, Human
uggcuggggggcagcggcgg

SEQ ID NO: 389308 - RNA, 22 nt, Human
ugucaagaagagcacguaccuc

SEQ ID NO: 389309 - RNA, 22 nt, Human
ugucuguugugaagcaggccuc

SEQ ID NO: 389310 - RNA, 22 nt, Human
uuauuaccaggcauaccccagu

SEQ ID NO: 389311 - RNA, 24 nt, Human
aagcagcgugaacagagggaaagu

SEQ ID NO: 389312 - RNA, 20 nt, Human
aaguaguugggauuacaggc

SEQ ID NO: 389313 - RNA, 26 nt, Human
aaguaguugggauuacaggcguuugc

SEQ ID NO: 389314 - RNA, 23 nt, Human
aauggcuuccuaacagaugacau

SEQ ID NO: 389315 - RNA, 20 nt, Human
acagcucagccccuuccaga

SEQ ID NO: 389316 - RNA, 21 nt, Human
acaggguuucaccauguuggc

SEQ ID NO: 389317 - RNA, 22 nt, Human
acaggguuucaccauguuggca

SEQ ID NO: 389318 - RNA, 23 nt, Human
acaggguuucaccauguuggcag

SEQ ID NO: 389319 - RNA, 23 nt, Human
accauguuggcaggcuggucucg

SEQ ID NO: 389320 - RNA, 26 nt, Human
accuggguacgguccccuccuccccu

SEQ ID NO: 389321 - RNA, 20 nt, Human
accuuggcgccccagaccuu

SEQ ID NO: 389322 - RNA, 24 nt, Human
acucuggucccagaacaacagacu

SEQ ID NO: 389323 - RNA, 24 nt, Human
agagauucuccugccucagccucc

SEQ ID NO: 389324 - RNA, 22 nt, Human
agcagagacaggguuucaccau

SEQ ID NO: 389325 - RNA, 24 nt, Human
agccccggcuagggauaagcuggg

SEQ ID NO: 389326 - RNA, 22 nt, Human
agcugauuucacagggcacucg

SEQ ID NO: 389327 - RNA, 18 nt, Human
agcuggacucccagcagc

SEQ ID NO: 389328 - RNA, 20 nt, Human
agcuggacucccagcagccu

SEQ ID NO: 389329 - RNA, 19 nt, Human
aggaggccgcagcccaguc

SEQ ID NO: 389330 - RNA, 18 nt, Human
agggauaagcuggggggc

SEQ ID NO: 389331 - RNA, 23 nt, Human
aggugagggggcuccagggcugg

SEQ ID NO: 389332 - RNA, 24 nt, Human
aggugaucugcccgccucagccuc

SEQ ID NO: 389333 - RNA, 18 nt, Human
agugcugggauuacaugc

SEQ ID NO: 389334 - RNA, 22 nt, Human
agugcugggauuacaugcguga

SEQ ID NO: 389335 - RNA, 22 nt, Human
aguuuucuuuucuuucuuuuuu

SEQ ID NO: 389336 - RNA, 24 nt, Human
auggggccgguggaggugaggggg

SEQ ID NO: 389337 - RNA, 20 nt, Human
caaccuccaccuccuggguu

SEQ ID NO: 389338 - RNA, 23 nt, Human
caaccuccaccuccuggguucaa

SEQ ID NO: 389339 - RNA, 22 nt, Human
caagagauucuccugccucagc

SEQ ID NO: 389340 - RNA, 18 nt, Human
cacagcucagccccuucc

SEQ ID NO: 389341 - RNA, 21 nt, Human
cacagcucagccccuuccaga

SEQ ID NO: 389342 - RNA, 21 nt, Human
cacagcucagccccuuccaga

SEQ ID NO: 389343 - RNA, 24 nt, Human
cacagcucagccccuuccagaucc

SEQ ID NO: 389344 - RNA, 24 nt, Human
caccaugccuggcuaauuuuugua

SEQ ID NO: 389345 - RNA, 23 nt, Human
caccauguuggcaggcuggucuc

SEQ ID NO: 389346 - RNA, 23 nt, Human
caccuggucucucuucucuuuag

SEQ ID NO: 389347 - RNA, 21 nt, Human
cacugcaaccuccaccuccug

SEQ ID NO: 389348 - RNA, 23 nt, Human
cacugcaaccuccaccuccuggg

SEQ ID NO: 389349 - RNA, 22 nt, Human
cagagacaggguuucaccaugu

SEQ ID NO: 389350 - RNA, 24 nt, Human
cagagugcugggauuacaugcgug

SEQ ID NO: 389351 - RNA, 18 nt, Human
cagcgugaacagagggaa

SEQ ID NO: 389352 - RNA, 23 nt, Human
caggguuucaccauguuggcagg

SEQ ID NO: 389353 - RNA, 19 nt, Human
caggugaccgcccuccgcc

SEQ ID NO: 389354 - RNA, 23 nt, Human
caggugaccgcccuccgcccccc

SEQ ID NO: 389355 - RNA, 21 nt, Human
caucacgagccaagccuccaa

SEQ ID NO: 389356 - RNA, 24 nt, Human
ccaaguaguugggauuacaggcgu

SEQ ID NO: 389357 - RNA, 20 nt, Human
ccagagugcugggauuacau

SEQ ID NO: 389358 - RNA, 22 nt, Human
ccagagugcugggauuacaugc

SEQ ID NO: 389359 - RNA, 24 nt, Human
ccagagugcugggauuacaugcgu

SEQ ID NO: 389360 - RNA, 18 nt, Human
ccagggccaaacacagga

SEQ ID NO: 389361 - RNA, 24 nt, Human
cccaaguaguugggauuacaggcg

SEQ ID NO: 389362 - RNA, 25 nt, Human
cccaaguaguugggauuacaggcgu

SEQ ID NO: 389363 - RNA, 21 nt, Human
ccccaugcuaaaaaaaccucc

SEQ ID NO: 389364 - RNA, 20 nt, Human
ccccauuuggccagcagagc

SEQ ID NO: 389365 - RNA, 22 nt, Human
cccccugcccccucauuacaua

SEQ ID NO: 389366 - RNA, 18 nt, Human
ccccucccuccccacccc

SEQ ID NO: 389367 - RNA, 19 nt, Human
ccccuggggccucgaaggg

SEQ ID NO: 389368 - RNA, 19 nt, Human
cccgagcaccguaguccuc

SEQ ID NO: 389369 - RNA, 18 nt, Human
cccuccccaccccgggag

SEQ ID NO: 389370 - RNA, 23 nt, Human
cccuccccucuuuggggcccugg

SEQ ID NO: 389371 - RNA, 24 nt, Human
ccgccucagccucccagagugcug

SEQ ID NO: 389372 - RNA, 19 nt, Human
ccgggaggcuucauuagcc

SEQ ID NO: 389373 - RNA, 21 nt, Human
ccguaguccucccuggucccc

SEQ ID NO: 389374 - RNA, 23 nt, Human
ccuaggcuggaaugcaauggcau

SEQ ID NO: 389375 - RNA, 22 nt, Human
ccucaggugaucugcccgccuc

SEQ ID NO: 389376 - RNA, 19 nt, Human
ccuccaccuccuggguuca

SEQ ID NO: 389377 - RNA, 22 nt, Human
ccuccuccccucccuccccacc

SEQ ID NO: 389378 - RNA, 24 nt, Human
ccuccuggguucaagagauucucc

SEQ ID NO: 389379 - RNA, 22 nt, Human
ccucgaagggguccgagagggg

SEQ ID NO: 389380 - RNA, 23 nt, Human
ccuggaaccuggacggagccaag

SEQ ID NO: 389381 - RNA, 18 nt, Human
ccuggaguugggcugggg

SEQ ID NO: 389382 - RNA, 20 nt, Human
ccuggaguugggcuggggug

SEQ ID NO: 389383 - RNA, 22 nt, Human
ccuggccucaggugaucugccc

SEQ ID NO: 389384 - RNA, 23 nt, Human
ccuggguucaagagauucuccug

SEQ ID NO: 389385 - RNA, 19 nt, Human
ccuugguuaggcuuugaag

SEQ ID NO: 389386 - RNA, 23 nt, Human
cgcccagggccaaacacaggagc

SEQ ID NO: 389387 - RNA, 21 nt, Human
cgcccuccgccccccuucacu

SEQ ID NO: 389388 - RNA, 19 nt, Human
cgguccccuccuccccucc

SEQ ID NO: 389389 - RNA, 24 nt, Human
cguguugccuaggcuggaaugcaa

SEQ ID NO: 389390 - RNA, 23 nt, Human
cucacagcucagccccuuccaga

SEQ ID NO: 389391 - RNA, 24 nt, Human
cucacugcaaccuccaccuccugg

SEQ ID NO: 389392 - RNA, 26 nt, Human
cucacugcaaccuccaccuccugggu

SEQ ID NO: 389393 - RNA, 23 nt, Human
cucagccucccaaguaguuggga

SEQ ID NO: 389394 - RNA, 21 nt, Human
cucccuccccaccccgggagg

SEQ ID NO: 389395 - RNA, 18 nt, Human
cuccgccccccuucacuu

SEQ ID NO: 389396 - RNA, 21 nt, Human
cuccuggguucaagagauucu

SEQ ID NO: 389397 - RNA, 20 nt, Human
cucguguugccuaggcugga

SEQ ID NO: 389398 - RNA, 18 nt, Human
cugcaaccuccaccuccu

SEQ ID NO: 389399 - RNA, 24 nt, Human
cugcaaccuccaccuccuggguuc

SEQ ID NO: 389400 - RNA, 21 nt, Human
cugcccgccucagccucccag

SEQ ID NO: 389401 - RNA, 21 nt, Human
cugccucagccucccaaguag

SEQ ID NO: 389402 - RNA, 24 nt, Human
cuggaaugcaauggcaugaucucg

SEQ ID NO: 389403 - RNA, 18 nt, Human
cugguccccaugcuaaaa

SEQ ID NO: 389404 - RNA, 20 nt, Human
cuuggaggccgggcccugga

SEQ ID NO: 389405 - RNA, 21 nt, Human
cuuggaggccgggcccuggag

SEQ ID NO: 389406 - RNA, 20 nt, Human
cuuuggggcccuggaguugg

SEQ ID NO: 389407 - RNA, 21 nt, Human
cuuuggggcccuggaguuggg

SEQ ID NO: 389408 - RNA, 19 nt, Human
gacccccugcccccucauu

SEQ ID NO: 389409 - RNA, 24 nt, Human
gagauucuccugccucagccuccc

SEQ ID NO: 389410 - RNA, 21 nt, Human
gagccccuuccauucacacgg

SEQ ID NO: 389411 - RNA, 20 nt, Human
gaggcagaggggcccagcag

SEQ ID NO: 389412 - RNA, 18 nt, Human
gauuacaggcguuugcca

SEQ ID NO: 389413 - RNA, 24 nt, Human
gauuacaggcguuugccaccaugc

SEQ ID NO: 389414 - RNA, 18 nt, Human
gauuacaugcgugagcca

SEQ ID NO: 389415 - RNA, 20 nt, Human
gcaggcuggucucgaacucc

SEQ ID NO: 389416 - RNA, 25 nt, Human
gccaaacacaggagcccaauguuuc

SEQ ID NO: 389417 - RNA, 23 nt, Human
gccucagccucccagagugcugg

SEQ ID NO: 389418 - RNA, 21 nt, Human
gcucguguugccuaggcugga

SEQ ID NO: 389419 - RNA, 19 nt, Human
gcuggaaugcaauggcaug

SEQ ID NO: 389420 - RNA, 21 nt, Human
gcugggauuacaugcgugagc

SEQ ID NO: 389421 - RNA, 23 nt, Human
gcuggucucgaacuccuggccuc

SEQ ID NO: 389422 - RNA, 21 nt, Human
gcuuuguuuguuuuaucucca

SEQ ID NO: 389423 - RNA, 23 nt, Human
ggaggcagaggggcccagcagug

SEQ ID NO: 389424 - RNA, 18 nt, Human
ggaggccgggcccuggag

SEQ ID NO: 389425 - RNA, 24 nt, Human
ggcccuggaguugggcuggggugg

SEQ ID NO: 389426 - RNA, 21 nt, Human
ggccgcgaggaggccgcagcc

SEQ ID NO: 389427 - RNA, 24 nt, Human
ggcuggucucgaacuccuggccuc

SEQ ID NO: 389428 - RNA, 20 nt, Human
gggacgcggccugagcugau

SEQ ID NO: 389429 - RNA, 19 nt, Human
gggcacucggggccgcgag

SEQ ID NO: 389430 - RNA, 22 nt, Human
gggcugggggaagggagcggga

SEQ ID NO: 389431 - RNA, 29 nt, Human
gggcugggguggagaccccuggggccucc

SEQ ID NO: 389432 - RNA, 18 nt, Human
ggggaugcuggucugugg

SEQ ID NO: 389433 - RNA, 22 nt, Human
ggggauggggccgguggaggug

SEQ ID NO: 389434 - RNA, 23 nt, Human
gggggcggggccuggaaccugga

SEQ ID NO: 389435 - RNA, 18 nt, Human
ggggggguggggauugag

SEQ ID NO: 389436 - RNA, 21 nt, Human
gggggugggagugaaaucaag

SEQ ID NO: 389437 - RNA, 19 nt, Human
gguggagaccccuggggcc

SEQ ID NO: 389438 - RNA, 18 nt, Human
guaaguggggaugcuggu

SEQ ID NO: 389439 - RNA, 19 nt, Human
guaguccucccuggucccc

SEQ ID NO: 389440 - RNA, 18 nt, Human
guaguugggauuacaggc

SEQ ID NO: 389441 - RNA, 20 nt, Human
guccucccugguccccaugc

SEQ ID NO: 389442 - RNA, 24 nt, Human
gugaaguugagggggugggugggc

SEQ ID NO: 389443 - RNA, 24 nt, Human
gugaucugcccgccucagccuccc

SEQ ID NO: 389444 - RNA, 24 nt, Human
gugggugggcaggcccaaggcggc

SEQ ID NO: 389445 - RNA, 27 nt, Human
uaaaaaaaccuccaucacgagccaagc

SEQ ID NO: 389446 - RNA, 18 nt, Human
uaacuccucggcuugacu

SEQ ID NO: 389447 - RNA, 20 nt, Human
uaacuccucggcuugacuga

SEQ ID NO: 389448 - RNA, 18 nt, Human
uaagcuggggggcggggc

SEQ ID NO: 389449 - RNA, 24 nt, Human
uaauuuuuguauuuuuagcagaga

SEQ ID NO: 389450 - RNA, 24 nt, Human
uacaugcgugagccaccacaccug

SEQ ID NO: 389451 - RNA, 23 nt, Human
uagaauggcuuccuaacagauga

SEQ ID NO: 389452 - RNA, 24 nt, Human
uagcagagacaggguuucaccaug

SEQ ID NO: 389453 - RNA, 26 nt, Human
uagcagagacaggguuucaccauguu

SEQ ID NO: 389454 - RNA, 18 nt, Human
uaggcuuugaagccagag

SEQ ID NO: 389455 - RNA, 24 nt, Human
ucacgagccaagccuccaaaguuc

SEQ ID NO: 389456 - RNA, 23 nt, Human
ucacugcaaccuccaccuccugg

SEQ ID NO: 389457 - RNA, 24 nt, Human
ucacugcaaccuccaccuccuggg

SEQ ID NO: 389458 - RNA, 25 nt, Human
ucacugcaaccuccaccuccugggu

SEQ ID NO: 389459 - RNA, 27 nt, Human
ucacugcaaccuccaccuccuggguuc

SEQ ID NO: 389460 - RNA, 20 nt, Human
ucagccccuuccagauccag

SEQ ID NO: 389461 - RNA, 19 nt, Human
uccagagcccauggggagg

SEQ ID NO: 389462 - RNA, 18 nt, Human
uccagcacggugccuggc

SEQ ID NO: 389463 - RNA, 22 nt, Human
uccagggcugggggaagggagc

SEQ ID NO: 389464 - RNA, 24 nt, Human
ucccaaguaguugggauuacaggc

SEQ ID NO: 389465 - RNA, 18 nt, Human
ucccagagugcugggauu

SEQ ID NO: 389466 - RNA, 24 nt, Human
ucccagagugcugggauuacaugc

SEQ ID NO: 389467 - RNA, 28 nt, Human
uccccaugcuaaaaaaaccuccaucacg

SEQ ID NO: 389468 - RNA, 23 nt, Human
uccccucccuccccaccccggga

SEQ ID NO: 389469 - RNA, 27 nt, Human
uccccuccuccccucccuccccacccc

SEQ ID NO: 389470 - RNA, 21 nt, Human
uccuggguucaagagauucuc

SEQ ID NO: 389471 - RNA, 24 nt, Human
uccuggguucaagagauucuccug

SEQ ID NO: 389472 - RNA, 23 nt, Human
ucgaagggguccgagaggggguc

SEQ ID NO: 389473 - RNA, 19 nt, Human
ucuccugccucagccuccc

SEQ ID NO: 389474 - RNA, 20 nt, Human
ucucgaacuccuggccucag

SEQ ID NO: 389475 - RNA, 21 nt, Human
ucugcccgccucagccuccca

SEQ ID NO: 389476 - RNA, 22 nt, Human
ucugcccgccucagccucccag

SEQ ID NO: 389477 - RNA, 19 nt, Human
ucugcuugucuacucuccc

SEQ ID NO: 389478 - RNA, 21 nt, Human
ucuuuggggcccuggaguugg

SEQ ID NO: 389479 - RNA, 18 nt, Human
ucuuuuuuuuuuuuuuuu

SEQ ID NO: 389480 - RNA, 18 nt, Human
ugaauguuuucacuuacc

SEQ ID NO: 389481 - RNA, 21 nt, Human
ugaccgcccuccgccccccuu

SEQ ID NO: 389482 - RNA, 20 nt, Human
ugagggggcuccagggcugg

SEQ ID NO: 389483 - RNA, 18 nt, Human
ugauggaggcagaggggc

SEQ ID NO: 389484 - RNA, 21 nt, Human
ugcaccagugugugugggggg

SEQ ID NO: 389485 - RNA, 22 nt, Human
ugcaccaguguguguggggggg

SEQ ID NO: 389486 - RNA, 21 nt, Human
ugccuaggcuggaaugcaaug

SEQ ID NO: 389487 - RNA, 24 nt, Human
ugccuaggcuggaaugcaauggca

SEQ ID NO: 389488 - RNA, 24 nt, Human
ugccucagccucccaaguaguugg

SEQ ID NO: 389489 - RNA, 20 nt, Human
ugcugagucagugaaugaaa

SEQ ID NO: 389490 - RNA, 24 nt, Human
ugcugggauuacaugcgugagcca

SEQ ID NO: 389491 - RNA, 24 nt, Human
ugcuggucuguggccccauuuggc

SEQ ID NO: 389492 - RNA, 21 nt, Human
ugcuuagggcccccggugcug

SEQ ID NO: 389493 - RNA, 24 nt, Human
ugcuuuguuuguuuuaucuccagu

SEQ ID NO: 389494 - RNA, 18 nt, Human
uggaaccuggacggagcc

SEQ ID NO: 389495 - RNA, 19 nt, Human
uggaaugcaauggcaugau

SEQ ID NO: 389496 - RNA, 23 nt, Human
uggaaugcaauggcaugaucucg

SEQ ID NO: 389497 - RNA, 18 nt, Human
uggacggagccaagaguc

SEQ ID NO: 389498 - RNA, 18 nt, Human
uggagaccccuggggccu

SEQ ID NO: 389499 - RNA, 22 nt, Human
uggaggcagaggggcccagcag

SEQ ID NO: 389500 - RNA, 18 nt, Human
uggaggccgggcccugga

SEQ ID NO: 389501 - RNA, 23 nt, Human
uggcacauagcagguacuauaua

SEQ ID NO: 389502 - RNA, 23 nt, Human
uggcaggcuggucucgaacuccu

SEQ ID NO: 389503 - RNA, 26 nt, Human
uggcaggugaccgcccuccgcccccc

SEQ ID NO: 389504 - RNA, 24 nt, Human
uggccagcagagccccuuccauuc

SEQ ID NO: 389505 - RNA, 20 nt, Human
uggccucaggugaucugccc

SEQ ID NO: 389506 - RNA, 24 nt, Human
uggccucaggugaucugcccgccu

SEQ ID NO: 389507 - RNA, 18 nt, Human
ugggauuacaggcguuug

SEQ ID NO: 389508 - RNA, 19 nt, Human
ugggauuacaggcguuugc

SEQ ID NO: 389509 - RNA, 21 nt, Human
ugggauuacaggcguuugcca

SEQ ID NO: 389510 - RNA, 22 nt, Human
ugggauuacaggcguuugccac

SEQ ID NO: 389511 - RNA, 24 nt, Human
ugggauuacaggcguuugccacca

SEQ ID NO: 389512 - RNA, 25 nt, Human
ugggauuacaggcguuugccaccau

SEQ ID NO: 389513 - RNA, 18 nt, Human
ugggauuacaugcgugag

SEQ ID NO: 389514 - RNA, 19 nt, Human
ugggauuacaugcgugagc

SEQ ID NO: 389515 - RNA, 22 nt, Human
ugggauuacaugcgugagccac

SEQ ID NO: 389516 - RNA, 23 nt, Human
ugggauuacaugcgugagccacc

SEQ ID NO: 389517 - RNA, 24 nt, Human
ugggauuacaugcgugagccacca

SEQ ID NO: 389518 - RNA, 18 nt, Human
uggggccucgaagggguc

SEQ ID NO: 389519 - RNA, 23 nt, Human
ugggggaagggagcgggagguuu

SEQ ID NO: 389520 - RNA, 24 nt, Human
ugggggauggggccgguggaggug

SEQ ID NO: 389521 - RNA, 19 nt, Human
ugggguggagaccccuggg

SEQ ID NO: 389522 - RNA, 19 nt, Human
ugggugggcaggcccaagg

SEQ ID NO: 389523 - RNA, 19 nt, Human
ugguaaguggggaugcugg

SEQ ID NO: 389524 - RNA, 18 nt, Human
ugugggggauggggccgg

SEQ ID NO: 389525 - RNA, 24 nt, Human
uuagcagagacaggguuucaccau

SEQ ID NO: 389526 - RNA, 18 nt, Human
uucaagagauucuccugc

SEQ ID NO: 389527 - RNA, 23 nt, Human
uucaagagauucuccugccucag

SEQ ID NO: 389528 - RNA, 21 nt, Human
uucaccauguuggcaggcugg

SEQ ID NO: 389529 - RNA, 29 nt, Human
uucuuucuuuuuuuuuuuuuuuuugagaa

SEQ ID NO: 389530 - RNA, 23 nt, Human
uugcucguguugccuaggcugga

SEQ ID NO: 389531 - RNA, 20 nt, Human
uuggaggccgggcccuggag

SEQ ID NO: 389532 - RNA, 21 nt, Human
uuggccagcagagccccuucc

SEQ ID NO: 389533 - RNA, 20 nt, Human
uuggugugggggauggggcc

SEQ ID NO: 389534 - RNA, 20 nt, Human
uuucaccauguuggcaggcu

SEQ ID NO: 389535 - RNA, 24 nt, Human
uuucuuuuuuuuuuuuuuuuuggg

SEQ ID NO: 389536 - RNA, 24 nt, Human
uuugcucguguugccuaggcugga

SEQ ID NO: 389537 - RNA, 24 nt, Human
uuuugcucguguugccuaggcugg

SEQ ID NO: 389538 - RNA, 22 nt, Human
uuuuguauuuuuagcagagaca

SEQ ID NO: 389539 - RNA, 24 nt, Human
uuuuuagcagagacaggguuucac

SEQ ID NO: 389540 - RNA, 20 nt, Human
uuuuuguauuuuuagcagag

SEQ ID NO: 389541 - RNA, 19 nt, Human
uuuuuuuuuuuuugagagg

SEQ ID NO: 389542 - RNA, 22 nt, Human
uuuuuuuuuuuuuuuugagagg

SEQ ID NO: 389543 - RNA, 21 nt, Human
aaaaaaaaaaaaaauggccag

SEQ ID NO: 389544 - RNA, 18 nt, Human
aaacaggagacuuuucca

SEQ ID NO: 389545 - RNA, 19 nt, Human
aacacggugaaaccccguc

SEQ ID NO: 389546 - RNA, 20 nt, Human
aacacggugaaaccccgucu

SEQ ID NO: 389547 - RNA, 21 nt, Human
aacacggugaaaccccgucuc

SEQ ID NO: 389548 - RNA, 19 nt, Human
aacuguaccccagcaagua

SEQ ID NO: 389549 - RNA, 18 nt, Human
aaucaccugaggucagga

SEQ ID NO: 389550 - RNA, 24 nt, Human
aaucaccugaggucaggaguucaa

SEQ ID NO: 389551 - RNA, 24 nt, Human
aaucgcuugaacccgggaggcgga

SEQ ID NO: 389552 - RNA, 24 nt, Human
aaucgcuugaacccgggaggugga

SEQ ID NO: 389553 - RNA, 22 nt, Human
acaaaauggaaauacacgcauc

SEQ ID NO: 389554 - RNA, 23 nt, Human
acagagcaagacuccgucuaaaa

SEQ ID NO: 389555 - RNA, 19 nt, Human
acagagugagacuccgucu

SEQ ID NO: 389556 - RNA, 23 nt, Human
acagagugagacuccgucuaaaa

SEQ ID NO: 389557 - RNA, 21 nt, Human
acaguaacuguggauccuucu

SEQ ID NO: 389558 - RNA, 24 nt, Human
accccgucucuacuaaaaauacaa

SEQ ID NO: 389559 - RNA, 24 nt, Human
accugaggucaggaguucaagacc

SEQ ID NO: 389560 - RNA, 23 nt, Human
acuccagccugggggacagagca

SEQ ID NO: 389561 - RNA, 24 nt, Human
acuccaggcugggccacagaguga

SEQ ID NO: 389562 - RNA, 18 nt, Human
acugcacuccagccuggg

SEQ ID NO: 389563 - RNA, 24 nt, Human
acugcacuccagccugggggacag

SEQ ID NO: 389564 - RNA, 24 nt, Human
acuguacuccaggcugggccacag

SEQ ID NO: 389565 - RNA, 22 nt, Human
agaaucgcuugaacccgggagg

SEQ ID NO: 389566 - RNA, 21 nt, Human
agagcaagacuccgucuaaaa

SEQ ID NO: 389567 - RNA, 21 nt, Human
agaugugcgggcgccgagggu

SEQ ID NO: 389568 - RNA, 24 nt, Human
agcacuuugggaggcugaggcugg

SEQ ID NO: 389569 - RNA, 23 nt, Human
agccgggcgugguggcgcgcgcc

SEQ ID NO: 389570 - RNA, 24 nt, Human
agccuggccaacacggugaaaccc

SEQ ID NO: 389571 - RNA, 24 nt, Human
agccugggggacagagcaagacuc

SEQ ID NO: 389572 - RNA, 18 nt, Human
agccuucccuguuggagg

SEQ ID NO: 389573 - RNA, 18 nt, Human
aggcacgagaaucgcuug

SEQ ID NO: 389574 - RNA, 24 nt, Human
aggcacgagaaucgcuugaacccg

SEQ ID NO: 389575 - RNA, 24 nt, Human
aggcaggagaaucgcuugaacccg

SEQ ID NO: 389576 - RNA, 21 nt, Human
aggcggagguugcagugagcc

SEQ ID NO: 389577 - RNA, 24 nt, Human
aggcggagguugcagugagccgag

SEQ ID NO: 389578 - RNA, 24 nt, Human
aggcugaggcacgagaaucgcuug

SEQ ID NO: 389579 - RNA, 20 nt, Human
aggcugaggcaggagaaucg

SEQ ID NO: 389580 - RNA, 24 nt, Human
aggcugaggcaggagaaucgcuug

SEQ ID NO: 389581 - RNA, 24 nt, Human
aggcugggccacagagugagacuc

SEQ ID NO: 389582 - RNA, 22 nt, Human
aggcuggugaaucaccugaggu

SEQ ID NO: 389583 - RNA, 26 nt, Human
aggcuggugaaucaccugaggucagg

SEQ ID NO: 389584 - RNA, 18 nt, Human
aggggccgaggaagggag

SEQ ID NO: 389585 - RNA, 25 nt, Human
agguggagguugcagugacaacggu

SEQ ID NO: 389586 - RNA, 24 nt, Human
agguggagguugcagugagcugag

SEQ ID NO: 389587 - RNA, 22 nt, Human
agucaccaccccaucaggccga

SEQ ID NO: 389588 - RNA, 24 nt, Human
aguggcuuacgccuguaaucccag

SEQ ID NO: 389589 - RNA, 19 nt, Human
auacacgcaucacagugac

SEQ ID NO: 389590 - RNA, 24 nt, Human
auugcgccacugcacuccagccug

SEQ ID NO: 389591 - RNA, 18 nt, Human
auuuacugugcugucugc

SEQ ID NO: 389592 - RNA, 21 nt, Human
caaaacaggagacuuuuccaa

SEQ ID NO: 389593 - RNA, 22 nt, Human
caaaacccugcugcugaugccc

SEQ ID NO: 389594 - RNA, 24 nt, Human
caacacggugaaaccccgucucua

SEQ ID NO: 389595 - RNA, 20 nt, Human
caacccaaaacccugcugcu

SEQ ID NO: 389596 - RNA, 18 nt, Human
caacuguaccccagcaag

SEQ ID NO: 389597 - RNA, 24 nt, Human
caaggccgggcgcaguggcuuacg

SEQ ID NO: 389598 - RNA, 23 nt, Human
cacagagugagacuccgucuaaa

SEQ ID NO: 389599 - RNA, 19 nt, Human
cacccccagccccugaauc

SEQ ID NO: 389600 - RNA, 23 nt, Human
caccugaggucaggaguucaaga

SEQ ID NO: 389601 - RNA, 18 nt, Human
cacugcacuccagccugg

SEQ ID NO: 389602 - RNA, 19 nt, Human
cacugcacuccagccuggg

SEQ ID NO: 389603 - RNA, 22 nt, Human
cacugcacuccagccuggggga

SEQ ID NO: 389604 - RNA, 24 nt, Human
cacugcacuccagccugggggaca

SEQ ID NO: 389605 - RNA, 25 nt, Human
cacugcacuccagccugggggacag

SEQ ID NO: 389606 - RNA, 20 nt, Human
cacuguacuccaggcugggc

SEQ ID NO: 389607 - RNA, 20 nt, Human
cagagaccucaucugcgggg

SEQ ID NO: 389608 - RNA, 23 nt, Human
cagcacuuugggaggcugaggcu

SEQ ID NO: 389609 - RNA, 25 nt, Human
cagcacuuugggaggcugaggcugg

SEQ ID NO: 389610 - RNA, 21 nt, Human
cagccccugaauccucagaac

SEQ ID NO: 389611 - RNA, 24 nt, Human
cagcuacucaggaggcugaggcag

SEQ ID NO: 389612 - RNA, 21 nt, Human
caggcuggcacugguucaggc

SEQ ID NO: 389613 - RNA, 22 nt, Human
caucaaagcaauaaaaucuaac

SEQ ID NO: 389614 - RNA, 18 nt, Human
caugcaaggccgggcgca

SEQ ID NO: 389615 - RNA, 24 nt, Human
caugccugugaucccagcacuuug

SEQ ID NO: 389616 - RNA, 24 nt, Human
ccaaaacccugcugcugaugccca

SEQ ID NO: 389617 - RNA, 22 nt, Human
ccaccagagaucaugcuuuaca

SEQ ID NO: 389618 - RNA, 19 nt, Human
ccacugcacuccagccugg

SEQ ID NO: 389619 - RNA, 20 nt, Human
ccacugcacuccagccuggg

SEQ ID NO: 389620 - RNA, 22 nt, Human
ccacugcacuccagccuggggg

SEQ ID NO: 389621 - RNA, 24 nt, Human
ccacugcacuccagccugggggac

SEQ ID NO: 389622 - RNA, 19 nt, Human
ccacuguacuccaggcugg

SEQ ID NO: 389623 - RNA, 23 nt, Human
ccagguacuaguuaauuauaguc

SEQ ID NO: 389624 - RNA, 19 nt, Human
ccaguccacgggaaaagga

SEQ ID NO: 389625 - RNA, 21 nt, Human
cccagccccugaauccucaga

SEQ ID NO: 389626 - RNA, 19 nt, Human
ccccagcaaguaggucaaa

SEQ ID NO: 389627 - RNA, 21 nt, Human
ccccugaauccucagaacagg

SEQ ID NO: 389628 - RNA, 26 nt, Human
ccccugggcacauuucuguauuucua

SEQ ID NO: 389629 - RNA, 21 nt, Human
cccgggagguggagguugcag

SEQ ID NO: 389630 - RNA, 19 nt, Human
cccugagggaucagucacc

SEQ ID NO: 389631 - RNA, 24 nt, Human
ccgcggaaaggcgcgggaggggcg

SEQ ID NO: 389632 - RNA, 21 nt, Human
ccuauagucccagcuacucag

SEQ ID NO: 389633 - RNA, 22 nt, Human
ccuauagucccagcuacucagg

SEQ ID NO: 389634 - RNA, 23 nt, Human
ccuggccaacacggugaaacccc

SEQ ID NO: 389635 - RNA, 24 nt, Human
ccuggccaacacggugaaaccccg

SEQ ID NO: 389636 - RNA, 22 nt, Human
ccugggggacagagcaagacuc

SEQ ID NO: 389637 - RNA, 19 nt, Human
ccuguaaucccagcugcuc

SEQ ID NO: 389638 - RNA, 21 nt, Human
ccuguaaucccagcugcucgg

SEQ ID NO: 389639 - RNA, 22 nt, Human
ccugugaucccagcacuuuggg

SEQ ID NO: 389640 - RNA, 19 nt, Human
ccuguuggagguucaaaag

SEQ ID NO: 389641 - RNA, 25 nt, Human
ccuugcuacagacucuccauuccua

SEQ ID NO: 389642 - RNA, 22 nt, Human
cgaggaagggagagugcuuggu

SEQ ID NO: 389643 - RNA, 26 nt, Human
cgccacugcacuccagccugggggac

SEQ ID NO: 389644 - RNA, 20 nt, Human
cgccgucuggagcugagcag

SEQ ID NO: 389645 - RNA, 18 nt, Human
cgccuauagucccagcua

SEQ ID NO: 389646 - RNA, 24 nt, Human
cgccuauagucccagcuacucagg

SEQ ID NO: 389647 - RNA, 24 nt, Human
cgccuguaaucccagcugcucggg

SEQ ID NO: 389648 - RNA, 24 nt, Human
cgggaggcggagguugcagugagc

SEQ ID NO: 389649 - RNA, 24 nt, Human
cgggagguggagguugcagugagc

SEQ ID NO: 389650 - RNA, 23 nt, Human
cgucuaaaaaaaaaaaaaaaaug

SEQ ID NO: 389651 - RNA, 21 nt, Human
cucgagcgggaccucccaggg

SEQ ID NO: 389652 - RNA, 23 nt, Human
cugaugcccacuguccauccagc

SEQ ID NO: 389653 - RNA, 24 nt, Human
cuggaucccgcgcccggggguccg

SEQ ID NO: 389654 - RNA, 18 nt, Human
cuggccaacacggugaaa

SEQ ID NO: 389655 - RNA, 18 nt, Human
cuguguugaccuucacau

SEQ ID NO: 389656 - RNA, 23 nt, Human
cuuacgccuguaaucccagcugc

SEQ ID NO: 389657 - RNA, 25 nt, Human
gaaucaccugaggucaggaguucaa

SEQ ID NO: 389658 - RNA, 20 nt, Human
gagaugaaccccugggcaca

SEQ ID NO: 389659 - RNA, 23 nt, Human
gagauugcgccacugcacuccag

SEQ ID NO: 389660 - RNA, 23 nt, Human
gagguugcagugagccgagaucg

SEQ ID NO: 389661 - RNA, 23 nt, Human
gagguugcagugagcugagauug

SEQ ID NO: 389662 - RNA, 20 nt, Human
gcacaccuucagagaccuca

SEQ ID NO: 389663 - RNA, 24 nt, Human
gcacuccagccugggggacagagc

SEQ ID NO: 389664 - RNA, 18 nt, Human
gcaguggcuuacgccugu

SEQ ID NO: 389665 - RNA, 24 nt, Human
gccaacacggugaaaccccgucuc

SEQ ID NO: 389666 - RNA, 20 nt, Human
gccacuguacuccaggcugg

SEQ ID NO: 389667 - RNA, 23 nt, Human
gccuguaaucccagcugcucggg

SEQ ID NO: 389668 - RNA, 20 nt, Human
gcgcaguggcuuacgccugu

SEQ ID NO: 389669 - RNA, 19 nt, Human
gcgccgucuggagcugagc

SEQ ID NO: 389670 - RNA, 19 nt, Human
gcugggggcgggcagaggg

SEQ ID NO: 389671 - RNA, 23 nt, Human
ggaaggacgggcucgagcgggga

SEQ ID NO: 389672 - RNA, 19 nt, Human
ggaggcugaggcuggugaa

SEQ ID NO: 389673 - RNA, 20 nt, Human
ggagguugcagugagccgag

SEQ ID NO: 389674 - RNA, 22 nt, Human
ggagguugcagugagccgagau

SEQ ID NO: 389675 - RNA, 24 nt, Human
ggagguugcagugagccgagaucg

SEQ ID NO: 389676 - RNA, 22 nt, Human
ggagguugcagugagcugagau

SEQ ID NO: 389677 - RNA, 24 nt, Human
ggagguugcagugagcugagauug

SEQ ID NO: 389678 - RNA, 23 nt, Human
ggaugggaaaaaggggccgagga

SEQ ID NO: 389679 - RNA, 24 nt, Human
ggcagagggaggggaaggacgggc

SEQ ID NO: 389680 - RNA, 18 nt, Human
ggcgcaguggcuuacgcc

SEQ ID NO: 389681 - RNA, 23 nt, Human
ggcgcaguggcuuacgccuguaa

SEQ ID NO: 389682 - RNA, 21 nt, Human
ggcgcgcgccuauagucccag

SEQ ID NO: 389683 - RNA, 22 nt, Human
ggcgugguggcgcgcgccuaua

SEQ ID NO: 389684 - RNA, 22 nt, Human
gggaggcugaggcacgagaauc

SEQ ID NO: 389685 - RNA, 22 nt, Human
gggcagagggaggggaaggacg

SEQ ID NO: 389686 - RNA, 24 nt, Human
gggcaggcuggcacugguucaggc

SEQ ID NO: 389687 - RNA, 21 nt, Human
gggcugggggcgggcagaggg

SEQ ID NO: 389688 - RNA, 24 nt, Human
ggggcgagggcugggugcuggagc

SEQ ID NO: 389689 - RNA, 22 nt, Human
ggguggggcgagggcugggggc

SEQ ID NO: 389690 - RNA, 19 nt, Human
gguggagguugcagugagc

SEQ ID NO: 389691 - RNA, 24 nt, Human
ggugguucaugccugugaucccag

SEQ ID NO: 389692 - RNA, 24 nt, Human
guacuccaggcugggccacagagu

SEQ ID NO: 389693 - RNA, 20 nt, Human
guggagguugcagugagcug

SEQ ID NO: 389694 - RNA, 19 nt, Human
guggauccuucucacaugg

SEQ ID NO: 389695 - RNA, 23 nt, Human
guggauccuucucacaugguggc

SEQ ID NO: 389696 - RNA, 22 nt, Human
guugcaaccaacuccacugacc

SEQ ID NO: 389697 - RNA, 21 nt, Human
guugcagugagcugagauugc

SEQ ID NO: 389698 - RNA, 23 nt, Human
uaaaaaaaaaaaaaaaauggcca

SEQ ID NO: 389699 - RNA, 21 nt, Human
uaaaaccaaaggcagagauau

SEQ ID NO: 389700 - RNA, 21 nt, Human
uacaaaauggaaauacacgca

SEQ ID NO: 389701 - RNA, 22 nt, Human
uacacgcaucacagugacugug

SEQ ID NO: 389702 - RNA, 20 nt, Human
uacgccuguaaucccagcug

SEQ ID NO: 389703 - RNA, 20 nt, Human
uacuccaggcugggccacag

SEQ ID NO: 389704 - RNA, 22 nt, Human
uacuccaggcugggccacagag

SEQ ID NO: 389705 - RNA, 24 nt, Human
uacuccaggcugggccacagagug

SEQ ID NO: 389706 - RNA, 21 nt, Human
uaggaagauaaaaaugaccac

SEQ ID NO: 389707 - RNA, 21 nt, Human
uagggagaugaaccccugggc

SEQ ID NO: 389708 - RNA, 21 nt, Human
uauauaccauugauacauaug

SEQ ID NO: 389709 - RNA, 23 nt, Human
ucaccugaggucaggaguucaag

SEQ ID NO: 389710 - RNA, 23 nt, Human
ucaugccugugaucccagcacuu

SEQ ID NO: 389711 - RNA, 19 nt, Human
uccgaggggccaagggcuc

SEQ ID NO: 389712 - RNA, 22 nt, Human
uccgucuaaaaaaaaaaaaaaa

SEQ ID NO: 389713 - RNA, 23 nt, Human
uccgucuaaaaaaaaaaaaaaaa

SEQ ID NO: 389714 - RNA, 24 nt, Human
ucgcuugaacccgggaggcggagg

SEQ ID NO: 389715 - RNA, 24 nt, Human
ucgcuugaacccgggagguggagg

SEQ ID NO: 389716 - RNA, 24 nt, Human
ucgggaggcugaggcacgagaauc

SEQ ID NO: 389717 - RNA, 20 nt, Human
ucuaaaaaaaaaaauagcaa

SEQ ID NO: 389718 - RNA, 23 nt, Human
ucucuacuaaaaauacaaaaauu

SEQ ID NO: 389719 - RNA, 24 nt, Human
ugaaucaccugaggucaggaguuc

SEQ ID NO: 389720 - RNA, 26 nt, Human
ugaaucaccugaggucaggaguucaa

SEQ ID NO: 389721 - RNA, 22 nt, Human
ugagccgagaucgugccacugu

SEQ ID NO: 389722 - RNA, 22 nt, Human
ugagcugagauugcgccacugc

SEQ ID NO: 389723 - RNA, 24 nt, Human
ugaggcacgagaaucgcuugaacc

SEQ ID NO: 389724 - RNA, 20 nt, Human
ugaggcaggagaaucgcuug

SEQ ID NO: 389725 - RNA, 24 nt, Human
ugaggcaggagaaucgcuugaacc

SEQ ID NO: 389726 - RNA, 25 nt, Human
ugaggcaggagaaucgcuugaaccc

SEQ ID NO: 389727 - RNA, 20 nt, Human
ugaggcuggugaaucaccug

SEQ ID NO: 389728 - RNA, 24 nt, Human
ugaggcuggugaaucaccugaggu

SEQ ID NO: 389729 - RNA, 26 nt, Human
ugaggcuggugaaucaccugagguca

SEQ ID NO: 389730 - RNA, 22 nt, Human
ugagucagucuggcugugacca

SEQ ID NO: 389731 - RNA, 23 nt, Human
ugccugugaucccagcacuuugg

SEQ ID NO: 389732 - RNA, 23 nt, Human
ugccugugaucccagcacuuugg

SEQ ID NO: 389733 - RNA, 22 nt, Human
ugcggggcucccaccuggcugg

SEQ ID NO: 389734 - RNA, 25 nt, Human
ugcuacagacucuccauuccuagga

SEQ ID NO: 389735 - RNA, 18 nt, Human
ugcugcagacagggcagg

SEQ ID NO: 389736 - RNA, 20 nt, Human
ugcugcugaugcccacuguc

SEQ ID NO: 389737 - RNA, 18 nt, Human
uggagcugagcaggcaga

SEQ ID NO: 389738 - RNA, 18 nt, Human
uggagguugcagugagcu

SEQ ID NO: 389739 - RNA, 19 nt, Human
uggcaagaaaagggggugc

SEQ ID NO: 389740 - RNA, 24 nt, Human
uggccagguguggugguucaugcc

SEQ ID NO: 389741 - RNA, 25 nt, Human
uggcugggaacagaggccgagacaa

SEQ ID NO: 389742 - RNA, 18 nt, Human
uggcugguuauuagggag

SEQ ID NO: 389743 - RNA, 20 nt, Human
uggcugugaccaggggcggg

SEQ ID NO: 389744 - RNA, 21 nt, Human
uggcuuacgccuguaauccca

SEQ ID NO: 389745 - RNA, 22 nt, Human
uggcuuacgccuguaaucccag

SEQ ID NO: 389746 - RNA, 19 nt, Human
ugggaacagaggccgagac

SEQ ID NO: 389747 - RNA, 19 nt, Human
ugggaggcugaggcuggug

SEQ ID NO: 389748 - RNA, 24 nt, Human
ugggaggcugaggcuggugaauca

SEQ ID NO: 389749 - RNA, 19 nt, Human
uggggucaacccaaaaccc

SEQ ID NO: 389750 - RNA, 24 nt, Human
uggggucaacccaaaacccugcug

SEQ ID NO: 389751 - RNA, 23 nt, Human
uggugaaucaccugaggucagga

SEQ ID NO: 389752 - RNA, 24 nt, Human
uggugguucaugccugugauccca

SEQ ID NO: 389753 - RNA, 24 nt, Human
ugguucaugccugugaucccagca

SEQ ID NO: 389754 - RNA, 21 nt, Human
ugucauaaucagcugaccaag

SEQ ID NO: 389755 - RNA, 18 nt, Human
uuaaagccacucaucaaa

SEQ ID NO: 389756 - RNA, 18 nt, Human
uuagccgggcgugguggc

SEQ ID NO: 389757 - RNA, 20 nt, Human
uuagccgggcgugguggcgc

SEQ ID NO: 389758 - RNA, 20 nt, Human
uuagccgggcgugguggcgc

SEQ ID NO: 389759 - RNA, 18 nt, Human
uucacauuggaggcccuu

SEQ ID NO: 389760 - RNA, 23 nt, Human
uucaugccugugaucccagcacu

SEQ ID NO: 389761 - RNA, 18 nt, Human
uuccuaggaugcuguugg

SEQ ID NO: 389762 - RNA, 24 nt, Human
uugaacccgggaggcggagguugc

SEQ ID NO: 389763 - RNA, 24 nt, Human
uugaacccgggagguggagguugc

SEQ ID NO: 389764 - RNA, 22 nt, Human
uugcagugagccgagaucgugc

SEQ ID NO: 389765 - RNA, 23 nt, Human
uugcagugagccgagaucgugcc

SEQ ID NO: 389766 - RNA, 19 nt, Human
uugcagugagcugagauug

SEQ ID NO: 389767 - RNA, 22 nt, Human
uugcagugagcugagauugcgc

SEQ ID NO: 389768 - RNA, 23 nt, Human
uugcgccacugcacuccagccug

SEQ ID NO: 389769 - RNA, 18 nt, Human
uuggaggcccuugcuaca

SEQ ID NO: 389770 - RNA, 20 nt, Human
uugggaggcugaggcuggug

SEQ ID NO: 389771 - RNA, 25 nt, Human
uugggaggcugaggcuggugaauca

SEQ ID NO: 389772 - RNA, 24 nt, Human
aacaggcaaccaagcaaacaucac

SEQ ID NO: 389773 - RNA, 22 nt, Human
aaccaagcaaacaucacaugga

SEQ ID NO: 389774 - RNA, 24 nt, Human
aaggaagaggagggcacaacaaag

SEQ ID NO: 389775 - RNA, 19 nt, Human
agaggaaggaagaggaggg

SEQ ID NO: 389776 - RNA, 21 nt, Human
agaggagggcacaacaaaggg

SEQ ID NO: 389777 - RNA, 25 nt, Human
caaugugcucuuucucagagugucu

SEQ ID NO: 389778 - RNA, 22 nt, Human
cagugacauuuuuccaaaauuc

SEQ ID NO: 389779 - RNA, 22 nt, Human
cagugacauuuuuccaaaauuc

SEQ ID NO: 389780 - RNA, 19 nt, Human
ccaagcaaacaucacaugg

SEQ ID NO: 389781 - RNA, 22 nt, Human
ccacccggcagccuucuguguc

SEQ ID NO: 389782 - RNA, 18 nt, Human
ccagagugguggucuucc

SEQ ID NO: 389783 - RNA, 21 nt, Human
cccuccccccacccggcagcc

SEQ ID NO: 389784 - RNA, 20 nt, Human
cccuuaugggaaccgugcuc

SEQ ID NO: 389785 - RNA, 20 nt, Human
ccuccccccacccggcagcc

SEQ ID NO: 389786 - RNA, 20 nt, Human
ccuccccccacccggcagcc

SEQ ID NO: 389787 - RNA, 20 nt, Human
ccuccccccacccggcagcc

SEQ ID NO: 389788 - RNA, 20 nt, Human
ccucugagaccccagagugg

SEQ ID NO: 389789 - RNA, 23 nt, Human
ccucugagaccccagaguggugg

SEQ ID NO: 389790 - RNA, 18 nt, Human
cggcagccuucuguguca

SEQ ID NO: 389791 - RNA, 21 nt, Human
cugcagguagaaaagggaaca

SEQ ID NO: 389792 - RNA, 23 nt, Human
gcccuuaugggaaccgugcucug

SEQ ID NO: 389793 - RNA, 28 nt, Human
ggaaggaagaggagggcacaacaaaggg

SEQ ID NO: 389794 - RNA, 18 nt, Human
gggaacaggcaaccaagc

SEQ ID NO: 389795 - RNA, 20 nt, Human
ggguuucaguguaaaggaau

SEQ ID NO: 389796 - RNA, 19 nt, Human
gguuucaguguaaaggaau

SEQ ID NO: 389797 - RNA, 18 nt, Human
uaaaggaaugaaucagca

SEQ ID NO: 389798 - RNA, 22 nt, Human
ucccuauaaagaggaaggaaga

SEQ ID NO: 389799 - RNA, 24 nt, Human
uccucugagaccccagaguggugg

SEQ ID NO: 389800 - RNA, 23 nt, Human
ucugcagguagaaaagggaacag

SEQ ID NO: 389801 - RNA, 18 nt, Human
ugagacaggaggcugauc

SEQ ID NO: 389802 - RNA, 22 nt, Human
ugauauagacaccauuuuuugg

SEQ ID NO: 389803 - RNA, 19 nt, Human
aacucugggcaaacuacaa

SEQ ID NO: 389804 - RNA, 18 nt, Human
aagggcccagcccagggc

SEQ ID NO: 389805 - RNA, 21 nt, Human
agauuccccucacauuuuccu

SEQ ID NO: 389806 - RNA, 25 nt, Human
agccaggaagggcccagcccagggc

SEQ ID NO: 389807 - RNA, 21 nt, Human
auccuugccucugcccuuuuc

SEQ ID NO: 389808 - RNA, 22 nt, Human
caaagcagccauggccagcagc

SEQ ID NO: 389809 - RNA, 24 nt, Human
cacagcggagcccaagucacaguc

SEQ ID NO: 389810 - RNA, 18 nt, Human
caccaguaccuuuugucc

SEQ ID NO: 389811 - RNA, 18 nt, Human
caccauccuugccucugc

SEQ ID NO: 389812 - RNA, 19 nt, Human
caccucccccucccuccca

SEQ ID NO: 389813 - RNA, 22 nt, Human
cagcagcuccccuccacagucc

SEQ ID NO: 389814 - RNA, 22 nt, Human
cagcccagggcgggcacagcgg

SEQ ID NO: 389815 - RNA, 20 nt, Human
cauccuugccucugcccuuu

SEQ ID NO: 389816 - RNA, 24 nt, Human
ccaacucugggcaaacuacaaagc

SEQ ID NO: 389817 - RNA, 24 nt, Human
ccagggcgggcacagcggagccca

SEQ ID NO: 389818 - RNA, 21 nt, Human
ccauggccagcagcuccccuc

SEQ ID NO: 389819 - RNA, 22 nt, Human
cccaccauccuugccucugccc

SEQ ID NO: 389820 - RNA, 19 nt, Human
ccccaccauccuugccucu

SEQ ID NO: 389821 - RNA, 24 nt, Human
ccccccuccccuagcccccaacuc

SEQ ID NO: 389822 - RNA, 23 nt, Human
cccccuccccuagcccccaacuc

SEQ ID NO: 389823 - RNA, 28 nt, Human
cccccuccccuagcccccaacucugggc

SEQ ID NO: 389824 - RNA, 18 nt, Human
ccccucccucccagcuuc

SEQ ID NO: 389825 - RNA, 19 nt, Human
ccucccagcuucuucugcc

SEQ ID NO: 389826 - RNA, 22 nt, Human
gccacccucccuuugggaacuc

SEQ ID NO: 389827 - RNA, 21 nt, Human
gcccacugucucugccacccu

SEQ ID NO: 389828 - RNA, 19 nt, Human
gcccuuuucaccucccccu

SEQ ID NO: 389829 - RNA, 28 nt, Human
gccucuggcuccccccuccccuagcccc

SEQ ID NO: 389830 - RNA, 21 nt, Human
ggaacucagggggcucaggca

SEQ ID NO: 389831 - RNA, 22 nt, Human
ggcuccccccuccccuagcccc

SEQ ID NO: 389832 - RNA, 19 nt, Human
gggccccaccauccuugcc

SEQ ID NO: 389833 - RNA, 21 nt, Human
ggugcugggggccccaccauc

SEQ ID NO: 389834 - RNA, 20 nt, Human
guccuagccaggaagggccc

SEQ ID NO: 389835 - RNA, 19 nt, Human
uccccccuccccuagcccc

SEQ ID NO: 389836 - RNA, 21 nt, Human
uccccuagcccccaacucugg

SEQ ID NO: 389837 - RNA, 22 nt, Human
ucccucccagcuucuucugccc

SEQ ID NO: 389838 - RNA, 30 nt, Human
uccuagccaggaagggcccagcccagggcc

SEQ ID NO: 389839 - RNA, 24 nt, Human
uccucagcugugcuggcccccaac

SEQ ID NO: 389840 - RNA, 25 nt, Human
ugcccuuuucaccucccccucccuc

SEQ ID NO: 389841 - RNA, 21 nt, Human
ugccucugcccuuuucaccuc

SEQ ID NO: 389842 - RNA, 21 nt, Human
uggcccccaacucuccacccu

SEQ ID NO: 389843 - RNA, 24 nt, Human
uggcuccccccuccccuagccccc

SEQ ID NO: 389844 - RNA, 27 nt, Human
uggcuccccccuccccuagcccccaac

SEQ ID NO: 389845 - RNA, 23 nt, Human
ugggaacucagggggcucaggca

SEQ ID NO: 389846 - RNA, 22 nt, Human
ugggcaaacuacaaagcagcca

SEQ ID NO: 389847 - RNA, 23 nt, Human
ugggggccccaccauccuugccu

SEQ ID NO: 389848 - RNA, 24 nt, Human
uuccuggaucagggccacuccucc

SEQ ID NO: 389849 - RNA, 18 nt, Human
aaaaacaaagucuaacuc

SEQ ID NO: 389850 - RNA, 19 nt, Human
aaacaaagucuaacucaag

SEQ ID NO: 389851 - RNA, 18 nt, Human
aaacagaaaaaaugguac

SEQ ID NO: 389852 - RNA, 26 nt, Human
aaacagaaaaaaugguacacacuuua

SEQ ID NO: 389853 - RNA, 26 nt, Human
aaacagguaaauuaacaggaaaacca

SEQ ID NO: 389854 - RNA, 20 nt, Human
aacaaaaucuucaacuauga

SEQ ID NO: 389855 - RNA, 21 nt, Human
aacuuacuuauaaaaacagaa

SEQ ID NO: 389856 - RNA, 23 nt, Human
aagaacaaguaauauacauguac

SEQ ID NO: 389857 - RNA, 21 nt, Human
aagacacagcaggagcgaccg

SEQ ID NO: 389858 - RNA, 19 nt, Human
aauagcuauacuacacuaa

SEQ ID NO: 389859 - RNA, 21 nt, Human
acacauuauaaagucaaacag

SEQ ID NO: 389860 - RNA, 22 nt, Human
acuaaaacacauuauaaaguca

SEQ ID NO: 389861 - RNA, 21 nt, Human
acuacacuaagaugcuaaaca

SEQ ID NO: 389862 - RNA, 18 nt, Human
agaaaaagucagcaaaua

SEQ ID NO: 389863 - RNA, 23 nt, Human
agaaagaagaaauauugccaaga

SEQ ID NO: 389864 - RNA, 21 nt, Human
aggucuuucuacgggugccug

SEQ ID NO: 389865 - RNA, 19 nt, Human
auauuugguaaaccuaaaa

SEQ ID NO: 389866 - RNA, 26 nt, Human
augcaauaagaaauuggaaaaaggga

SEQ ID NO: 389867 - RNA, 20 nt, Human
caacuaugaacugacaaaau

SEQ ID NO: 389868 - RNA, 20 nt, Human
caaguaauauacauguacaa

SEQ ID NO: 389869 - RNA, 19 nt, Human
cacagcaggagcgaccccc

SEQ ID NO: 389870 - RNA, 19 nt, Human
caccaccgcaggcccgggc

SEQ ID NO: 389871 - RNA, 18 nt, Human
caccgcaggcccgggccu

SEQ ID NO: 389872 - RNA, 24 nt, Human
cacuuuaacaaaagcaaaacuuaa

SEQ ID NO: 389873 - RNA, 21 nt, Human
caggaaaaccaaacugaucuc

SEQ ID NO: 389874 - RNA, 21 nt, Human
cauauuugguaaaccuaaaau

SEQ ID NO: 389875 - RNA, 20 nt, Human
cauuuuagauaagcugguca

SEQ ID NO: 389876 - RNA, 21 nt, Human
cccccaccaccgcaggcccgg

SEQ ID NO: 389877 - RNA, 22 nt, Human
ccgcgcccaccccgcuggcaag

SEQ ID NO: 389878 - RNA, 22 nt, Human
ccgcgcccaccccgcuggcaag

SEQ ID NO: 389879 - RNA, 22 nt, Human
cgaaucaaaaucuagucaugaa

SEQ ID NO: 389880 - RNA, 21 nt, Human
cggcaggucuucuccgcgccc

SEQ ID NO: 389881 - RNA, 18 nt, Human
cucaaguugcuuuaaaaa

SEQ ID NO: 389882 - RNA, 20 nt, Human
cucacaaacgaagcccgcgg

SEQ ID NO: 389883 - RNA, 19 nt, Human
cuccaaacagaaaaaaugg

SEQ ID NO: 389884 - RNA, 18 nt, Human
cuccggcaggucuucucc

SEQ ID NO: 389885 - RNA, 19 nt, Human
cuuaacauggacauuuaaa

SEQ ID NO: 389886 - RNA, 24 nt, Human
gaagacacagcaggagcgaccccc

SEQ ID NO: 389887 - RNA, 22 nt, Human
gacccccggcgcgcagcaaccc

SEQ ID NO: 389888 - RNA, 24 nt, Human
gacccccggcgcgcagcaaccccc

SEQ ID NO: 389889 - RNA, 18 nt, Human
ggaagacacagcaggagc

SEQ ID NO: 389890 - RNA, 21 nt, Human
ggcgcgcagcaacccccacca

SEQ ID NO: 389891 - RNA, 21 nt, Human
gggcgaagcuggagcggaaga

SEQ ID NO: 389892 - RNA, 21 nt, Human
guccuuaagauuaauccuugg

SEQ ID NO: 389893 - RNA, 23 nt, Human
uaaagcuaguuacaaaauccguu

SEQ ID NO: 389894 - RNA, 26 nt, Human
uaaagucuuguuuccaaaaaucuauu

SEQ ID NO: 389895 - RNA, 18 nt, Human
uaacagagaguaacagaa

SEQ ID NO: 389896 - RNA, 22 nt, Human
uaacauggacauuuaaaaaugc

SEQ ID NO: 389897 - RNA, 20 nt, Human
uaagaaagaagaaauauugc

SEQ ID NO: 389898 - RNA, 18 nt, Human
uaagaaauuggaaaaagg

SEQ ID NO: 389899 - RNA, 23 nt, Human
uacaugccaauauggaaaaaaaa

SEQ ID NO: 389900 - RNA, 19 nt, Human
uacauguacaagaaauuac

SEQ ID NO: 389901 - RNA, 23 nt, Human
uacauguacaagaaauuacaaga

SEQ ID NO: 389902 - RNA, 22 nt, Human
uaggucaaaaacaaagucuaac

SEQ ID NO: 389903 - RNA, 23 nt, Human
uagugggaaguucucaucuuugc

SEQ ID NO: 389904 - RNA, 24 nt, Human
ucaaaaacaaagucuaacucaagu

SEQ ID NO: 389905 - RNA, 21 nt, Human
ucacaguguaaaagaaaaaaa

SEQ ID NO: 389906 - RNA, 24 nt, Human
uccaaacagaaaaaaugguacaca

SEQ ID NO: 389907 - RNA, 21 nt, Human
ucccuacugaucugaaacuac

SEQ ID NO: 389908 - RNA, 23 nt, Human
ucccuacugaucugaaacuacag

SEQ ID NO: 389909 - RNA, 23 nt, Human
uccuuggucaguauagauuuccg

SEQ ID NO: 389910 - RNA, 20 nt, Human
ugcaaaacuaaaacacauua

SEQ ID NO: 389911 - RNA, 25 nt, Human
uggaaaaagggagcaaaggagagug

SEQ ID NO: 389912 - RNA, 22 nt, Human
uggaaagaccaccgcuuuaaug

SEQ ID NO: 389913 - RNA, 18 nt, Human
uggcaaggggaagugggc

SEQ ID NO: 389914 - RNA, 24 nt, Human
uguucaacaaucucacucauugac

SEQ ID NO: 389915 - RNA, 21 nt, Human
uuuaaaauggaucacuuaauu

SEQ ID NO: 389916 - RNA, 24 nt, Human
uuuccaaaaaucuauuaagaacaa

SEQ ID NO: 389917 - RNA, 20 nt, Human
aagagaaaaaccgaagacga

SEQ ID NO: 389918 - RNA, 23 nt, Human
aagaggauuaaaaauaaagaaaa

SEQ ID NO: 389919 - RNA, 18 nt, Human
agagaaaaaccgaagacg

SEQ ID NO: 389920 - RNA, 20 nt, Human
agagcaaagaaaaaagaaac

SEQ ID NO: 389921 - RNA, 25 nt, Human
caaaaaaccacaaacuggguaguaa

SEQ ID NO: 389922 - RNA, 20 nt, Human
caacucaugauaaagauaau

SEQ ID NO: 389923 - RNA, 22 nt, Human
cauacaggcuaaucaauacagu

SEQ ID NO: 389924 - RNA, 25 nt, Human
cgggaggcugacgagagccgggagg

SEQ ID NO: 389925 - RNA, 26 nt, Human
cucgagcuacaacuacacaugcaaug

SEQ ID NO: 389926 - RNA, 21 nt, Human
cuuucuggguuuuaccacaua

SEQ ID NO: 389927 - RNA, 20 nt, Human
gcgaaggaagagaaaaaccg

SEQ ID NO: 389928 - RNA, 23 nt, Human
guuacauuucucccaaaaaacca

SEQ ID NO: 389929 - RNA, 19 nt, Human
uaaaaagaugacaucccac

SEQ ID NO: 389930 - RNA, 19 nt, Human
uaaacagagcagugcaacu

SEQ ID NO: 389931 - RNA, 22 nt, Human
uaacugagucucuaggcaauau

SEQ ID NO: 389932 - RNA, 19 nt, Human
uaggcaauauauuuaaaac

SEQ ID NO: 389933 - RNA, 24 nt, Human
ucauacuagaagaaacuuggccgu

SEQ ID NO: 389934 - RNA, 20 nt, Human
ucucccaaaaaaccacaaac

SEQ ID NO: 389935 - RNA, 23 nt, Human
ugaaaguaucuugcauucaugau

SEQ ID NO: 389936 - RNA, 23 nt, Human
ugacugcaggaggcuggaagaca

SEQ ID NO: 389937 - RNA, 19 nt, Human
ugauggaugcuuucugggu

SEQ ID NO: 389938 - RNA, 22 nt, Human
ugcaaugaagggagcccugcua

SEQ ID NO: 389939 - RNA, 18 nt, Human
ugcuuuacaaaaaaggga

SEQ ID NO: 389940 - RNA, 24 nt, Human
uuagcgaaggaagagaaaaaccga

SEQ ID NO: 389941 - RNA, 21 nt, Human
uucagagcaaagaaaaaagaa

SEQ ID NO: 389942 - RNA, 22 nt, Human
uucagagcaaagaaaaaagaaa

SEQ ID NO: 389943 - RNA, 25 nt, Human
uucagagcaaagaaaaaagaaacuu

SEQ ID NO: 389944 - RNA, 20 nt, Human
uucuccacaugggaacacua

SEQ ID NO: 389945 - RNA, 27 nt, Human
uuuuuugcaaguuguuuuauuuucaau

SEQ ID NO: 389946 - RNA, 21 nt, Human
aaaauccucagugagacagag

SEQ ID NO: 389947 - RNA, 19 nt, Human
aaagugugcuccaggcagg

SEQ ID NO: 389948 - RNA, 20 nt, Human
aagaugcuaaugaacaacaa

SEQ ID NO: 389949 - RNA, 19 nt, Human
aaugaacaacaaaaguaua

SEQ ID NO: 389950 - RNA, 22 nt, Human
aauuccauuccccaacccccac

SEQ ID NO: 389951 - RNA, 18 nt, Human
agacucggagaccaaaag

SEQ ID NO: 389952 - RNA, 20 nt, Human
aggcagggaggcggggcugu

SEQ ID NO: 389953 - RNA, 19 nt, Human
aggcggggcuguggcacgc

SEQ ID NO: 389954 - RNA, 18 nt, Human
ccccaacccccacugucc

SEQ ID NO: 389955 - RNA, 22 nt, Human
ccccacuguccuuguauuccug

SEQ ID NO: 389956 - RNA, 24 nt, Human
ccccacuguccuuguauuccugcc

SEQ ID NO: 389957 - RNA, 24 nt, Human
cccccacuguccuuguauuccugc

SEQ ID NO: 389958 - RNA, 22 nt, Human
ccuuuaaaauccucagugagac

SEQ ID NO: 389959 - RNA, 23 nt, Human
cgucuuauaguuuacaaagauug

SEQ ID NO: 389960 - RNA, 23 nt, Human
cuaaugaacaacaaaaguauaaa

SEQ ID NO: 389961 - RNA, 24 nt, Human
gcuucacaucuucagaauucuaaa

SEQ ID NO: 389962 - RNA, 24 nt, Human
guagaauuccauuccccaaccccc

SEQ ID NO: 389963 - RNA, 24 nt, Human
uaauugaccuuuaaaauccucagu

SEQ ID NO: 389964 - RNA, 22 nt, Human
uagaauuccauuccccaacccc

SEQ ID NO: 389965 - RNA, 23 nt, Human
uagaauuccauuccccaaccccc

SEQ ID NO: 389966 - RNA, 22 nt, Human
ucacaucuucagaauucuaaag

SEQ ID NO: 389967 - RNA, 28 nt, Human
uccccaacccccacuguccuuguauucc

SEQ ID NO: 389968 - RNA, 20 nt, Human
uccucagugagacagaggcu

SEQ ID NO: 389969 - RNA, 24 nt, Human
uccucagugagacagaggcuucac

SEQ ID NO: 389970 - RNA, 20 nt, Human
ugaccuuuaaaauccucagu

SEQ ID NO: 389971 - RNA, 19 nt, Human
uuccugccuccccagauuc

SEQ ID NO: 389972 - RNA, 21 nt, Human
aaaaaccugaaaauuggcuca

SEQ ID NO: 389973 - RNA, 24 nt, Human
aaaaaucaaaacaaaacaaacccc

SEQ ID NO: 389974 - RNA, 19 nt, Human
aaacaaaacaaaccccaac

SEQ ID NO: 389975 - RNA, 23 nt, Human
aaacaggaguauaguuuacaaga

SEQ ID NO: 389976 - RNA, 20 nt, Human
aagguaaaaguauuguccau

SEQ ID NO: 389977 - RNA, 25 nt, Human
acaaagaaaagcauaaauauuucca

SEQ ID NO: 389978 - RNA, 20 nt, Human
acauaaaucuucucuuaggc

SEQ ID NO: 389979 - RNA, 27 nt, Human
agaaacacccagaaagguaagggaguc

SEQ ID NO: 389980 - RNA, 18 nt, Human
agaauauugauaaagauc

SEQ ID NO: 389981 - RNA, 20 nt, Human
aggaguauaguuuacaagaa

SEQ ID NO: 389982 - RNA, 18 nt, Human
agugaacaaauaaaacua

SEQ ID NO: 389983 - RNA, 21 nt, Human
aguuuacaagaaacacccaga

SEQ ID NO: 389984 - RNA, 24 nt, Human
aucuuuagagacaaagguaaaagu

SEQ ID NO: 389985 - RNA, 20 nt, Human
caaaacaaaacaaaccccaa

SEQ ID NO: 389986 - RNA, 22 nt, Human
caaaugcuucuccuucuguuug

SEQ ID NO: 389987 - RNA, 24 nt, Human
cacauauauguaaaaaccugaaaa

SEQ ID NO: 389988 - RNA, 20 nt, Human
ccacaccucauaaaaggaug

SEQ ID NO: 389989 - RNA, 21 nt, Human
cuaaacaacaagacucggucu

SEQ ID NO: 389990 - RNA, 18 nt, Human
cuuccacaccucauaaaa

SEQ ID NO: 389991 - RNA, 18 nt, Human
cuuccacaccucauaaaa

SEQ ID NO: 389992 - RNA, 28 nt, Human
uaaaaaaaaaaaaucaaaacaaaacaaa

SEQ ID NO: 389993 - RNA, 19 nt, Human
uacaagaaacacccagaaa

SEQ ID NO: 389994 - RNA, 23 nt, Human
uacaagaaacacccagaaaggua

SEQ ID NO: 389995 - RNA, 22 nt, Human
uauuaacacugcuaggaagaac

SEQ ID NO: 389996 - RNA, 21 nt, Human
ucaccaagucacugacuucca

SEQ ID NO: 389997 - RNA, 21 nt, Human
ugcacauauauguaaaaaccu

SEQ ID NO: 389998 - RNA, 21 nt, Human
ugcaucuggcaaguucaagcc

SEQ ID NO: 389999 - RNA, 19 nt, Human
uguaaaaaccugaaaauug

SEQ ID NO: 390000 - RNA, 23 nt, Human
uguuuucucuuuuacccgcuuua

SEQ ID NO: 390001 - RNA, 21 nt, Human
uugaauagaugccccuaugga

SEQ ID NO: 390002 - RNA, 21 nt, Human
aaagcuggaggucauggggcc

SEQ ID NO: 390003 - RNA, 24 nt, Human
aagcaggcaguacaggccccaggg

SEQ ID NO: 390004 - RNA, 24 nt, Human
accccaggccuuuuccugaauccc

SEQ ID NO: 390005 - RNA, 21 nt, Human
acgaagcagcgacagucccuc

SEQ ID NO: 390006 - RNA, 19 nt, Human
agagcccugccugccuucc

SEQ ID NO: 390007 - RNA, 18 nt, Human
agccccgaaguagccuuc

SEQ ID NO: 390008 - RNA, 21 nt, Human
agcuacuccugccccaaacaa

SEQ ID NO: 390009 - RNA, 18 nt, Human
agcugccccaccaggacc

SEQ ID NO: 390010 - RNA, 19 nt, Human
aggcaguacaggccccagg

SEQ ID NO: 390011 - RNA, 22 nt, Human
agggcagggucugcagggcgcu

SEQ ID NO: 390012 - RNA, 18 nt, Human
agguucucagcagcaggc

SEQ ID NO: 390013 - RNA, 20 nt, Human
auaaacgugccacucgcccc

SEQ ID NO: 390014 - RNA, 19 nt, Human
cacaggccuguguccugag

SEQ ID NO: 390015 - RNA, 20 nt, Human
cacaggcuccuuugucccuc

SEQ ID NO: 390016 - RNA, 21 nt, Human
caccccaggccuuuuccugaa

SEQ ID NO: 390017 - RNA, 25 nt, Human
cacgacccccuccugugcaccccga

SEQ ID NO: 390018 - RNA, 21 nt, Human
cagccccgaaguagccuuccc

SEQ ID NO: 390019 - RNA, 18 nt, Human
cagcuuggccaguucccc

SEQ ID NO: 390020 - RNA, 20 nt, Human
caggaaggaguggcccggug

SEQ ID NO: 390021 - RNA, 22 nt, Human
caggaguaaggacgacuuccca

SEQ ID NO: 390022 - RNA, 22 nt, Human
caggcuucugaguguuaguccu

SEQ ID NO: 390023 - RNA, 23 nt, Human
caguagaggcaggaggccaggcu

SEQ ID NO: 390024 - RNA, 18 nt, Human
caucagagcagagugggg

SEQ ID NO: 390025 - RNA, 23 nt, Human
ccaccaggaccuggacuuggcac

SEQ ID NO: 390026 - RNA, 21 nt, Human
ccaggaagggccacgguugcu

SEQ ID NO: 390027 - RNA, 22 nt, Human
ccagggcucuccauaggcccag

SEQ ID NO: 390028 - RNA, 21 nt, Human
ccaguuccccggcccugcuca

SEQ ID NO: 390029 - RNA, 25 nt, Human
ccaguuccccggcccugcucagcug

SEQ ID NO: 390030 - RNA, 23 nt, Human
ccccaaacaagggcagggucugc

SEQ ID NO: 390031 - RNA, 24 nt, Human
ccccaagcaggcaguacaggcccc

SEQ ID NO: 390032 - RNA, 21 nt, Human
ccccagggcccaggugccgug

SEQ ID NO: 390033 - RNA, 24 nt, Human
cccccaagcaggcaguacaggccc

SEQ ID NO: 390034 - RNA, 23 nt, Human
ccuccuggcagugcucaggaccu

SEQ ID NO: 390035 - RNA, 18 nt, Human
ccuccugugcaccccgag

SEQ ID NO: 390036 - RNA, 21 nt, Human
ccugugcaccccgagcagccu

SEQ ID NO: 390037 - RNA, 24 nt, Human
cgccccggcuggcuacaagcugca

SEQ ID NO: 390038 - RNA, 21 nt, Human
cgccucagagcccucccuuuc

SEQ ID NO: 390039 - RNA, 23 nt, Human
cucagcuuggccaguuccccggc

SEQ ID NO: 390040 - RNA, 23 nt, Human
cucaggaccucagacuccucagg

SEQ ID NO: 390041 - RNA, 21 nt, Human
cuccacggguuggggcgccuc

SEQ ID NO: 390042 - RNA, 19 nt, Human
cuccauaggcccaggcugg

SEQ ID NO: 390043 - RNA, 27 nt, Human
cuccuugacuuuacuaaaaguuaaaua

SEQ ID NO: 390044 - RNA, 21 nt, Human
cuuggcacggguugcgaggcu

SEQ ID NO: 390045 - RNA, 20 nt, Human
gacccccuccugugcacccc

SEQ ID NO: 390046 - RNA, 23 nt, Human
gaguguuaguccuguccacacag

SEQ ID NO: 390047 - RNA, 19 nt, Human
gauccagggccucucagag

SEQ ID NO: 390048 - RNA, 19 nt, Human
gaugcaucagagcagagug

SEQ ID NO: 390049 - RNA, 18 nt, Human
gcucccacaggaguaagg

SEQ ID NO: 390050 - RNA, 23 nt, Human
ggaguuggggcaggaaggagugg

SEQ ID NO: 390051 - RNA, 20 nt, Human
ggcaggaaggaguggcccgg

SEQ ID NO: 390052 - RNA, 19 nt, Human
ggcaggcucagguccucca

SEQ ID NO: 390053 - RNA, 18 nt, Human
gggaagaaauacaggaaa

SEQ ID NO: 390054 - RNA, 25 nt, Human
gggagagggaaucgcuggggauggg

SEQ ID NO: 390055 - RNA, 19 nt, Human
gggcucuccauaggcccag

SEQ ID NO: 390056 - RNA, 23 nt, Human
ggucauggggccugggagaggga

SEQ ID NO: 390057 - RNA, 21 nt, Human
guagcggucccagggcucucc

SEQ ID NO: 390058 - RNA, 21 nt, Human
guguagcggucccagggcucu

SEQ ID NO: 390059 - RNA, 21 nt, Human
uacuccugccccaaacaaggg

SEQ ID NO: 390060 - RNA, 24 nt, Human
uacuccugccccaaacaagggcug

SEQ ID NO: 390061 - RNA, 22 nt, Human
uagcuucggccucccugggcuc

SEQ ID NO: 390062 - RNA, 18 nt, Human
ucacagcuacacaggccu

SEQ ID NO: 390063 - RNA, 19 nt, Human
ucacagcuacacaggccug

SEQ ID NO: 390064 - RNA, 18 nt, Human
ucauaggccgcccccuuc

SEQ ID NO: 390065 - RNA, 21 nt, Human
uccacggguuggggcgccuca

SEQ ID NO: 390066 - RNA, 19 nt, Human
ucccagccccgaaguagcc

SEQ ID NO: 390067 - RNA, 20 nt, Human
uccugaaucccaggguagac

SEQ ID NO: 390068 - RNA, 22 nt, Human
uccugagaaguguggcugccag

SEQ ID NO: 390069 - RNA, 21 nt, Human
uccuggguucacaggcuccuu

SEQ ID NO: 390070 - RNA, 20 nt, Human
ucgcuggggaugggaagacc

SEQ ID NO: 390071 - RNA, 20 nt, Human
ucuccauaggcccaggcugg

SEQ ID NO: 390072 - RNA, 20 nt, Human
ucuccugggcaccucagcuu

SEQ ID NO: 390073 - RNA, 18 nt, Human
uggaaggaguuggggcag

SEQ ID NO: 390074 - RNA, 18 nt, Human
uggcaugugggucacuag

SEQ ID NO: 390075 - RNA, 20 nt, Human
uggcaugugggucacuagcu

SEQ ID NO: 390076 - RNA, 21 nt, Human
ugggaagaaauacaggaaagc

SEQ ID NO: 390077 - RNA, 25 nt, Human
uggggucaccucuuucuucuccugg

SEQ ID NO: 390078 - RNA, 19 nt, Human
uggguacauuggugacaga

SEQ ID NO: 390079 - RNA, 21 nt, Human
uguccacacagguagcuccug

SEQ ID NO: 390080 - RNA, 18 nt, Human
uguccuggguucacaggc

SEQ ID NO: 390081 - RNA, 24 nt, Human
uguguccugagaaguguggcugcc

SEQ ID NO: 390082 - RNA, 22 nt, Human
uuagagccccaggcucuggcac

SEQ ID NO: 390083 - RNA, 26 nt, Human
aaaaagacaacaagcucugaagaaaa

SEQ ID NO: 390084 - RNA, 18 nt, Human
aaaaagggccaggcagug

SEQ ID NO: 390085 - RNA, 23 nt, Human
aaaagacaacaagcucugaagaa

SEQ ID NO: 390086 - RNA, 23 nt, Human
aaagucuaauauagcgaaaaaga

SEQ ID NO: 390087 - RNA, 21 nt, Human
aacaucucaugggcugauguu

SEQ ID NO: 390088 - RNA, 18 nt, Human
aagaacaaggccacagau

SEQ ID NO: 390089 - RNA, 23 nt, Human
aagacuuuucccuuccuuuuuaa

SEQ ID NO: 390090 - RNA, 25 nt, Human
aauaaaaauaaaucaaaaaaugaga

SEQ ID NO: 390091 - RNA, 21 nt, Human
acaaagagaaaauaaaaauaa

SEQ ID NO: 390092 - RNA, 18 nt, Human
acagugaaaaauaagcca

SEQ ID NO: 390093 - RNA, 26 nt, Human
accaaaaaguccacuaaguucacaaa

SEQ ID NO: 390094 - RNA, 24 nt, Human
acugaaaugaagaacaaggccagu

SEQ ID NO: 390095 - RNA, 24 nt, Human
acuggguuuuguuauguucaccau

SEQ ID NO: 390096 - RNA, 22 nt, Human
agaauauaugcaaauuaaagua

SEQ ID NO: 390097 - RNA, 24 nt, Human
agagaucaaauauaacacccacaa

SEQ ID NO: 390098 - RNA, 23 nt, Human
agcauguuuuucucucccagggu

SEQ ID NO: 390099 - RNA, 19 nt, Human
aggaaauacgggugaccau

SEQ ID NO: 390100 - RNA, 24 nt, Human
aggauuacauuugaguuucuuggu

SEQ ID NO: 390101 - RNA, 18 nt, Human
agguaauuagccucagag

SEQ ID NO: 390102 - RNA, 21 nt, Human
agguaugccgggaaugcuaag

SEQ ID NO: 390103 - RNA, 18 nt, Human
aguuucuugguucaagug

SEQ ID NO: 390104 - RNA, 24 nt, Human
auuaacacugaaaugaagaacaag

SEQ ID NO: 390105 - RNA, 19 nt, Human
caaagcacacagggcugca

SEQ ID NO: 390106 - RNA, 24 nt, Human
caaagucuaauauagcgaaaaaga

SEQ ID NO: 390107 - RNA, 19 nt, Human
caagcucugaagaaaaaag

SEQ ID NO: 390108 - RNA, 21 nt, Human
cacagccugaaaaaaucgucu

SEQ ID NO: 390109 - RNA, 18 nt, Human
caccauaaucacagccug

SEQ ID NO: 390110 - RNA, 18 nt, Human
cacuaaguucacaaauga

SEQ ID NO: 390111 - RNA, 24 nt, Human
caggguuguugugguggaagacag

SEQ ID NO: 390112 - RNA, 21 nt, Human
cccacaaagagaaaauaaaaa

SEQ ID NO: 390113 - RNA, 20 nt, Human
ccgggaaugcuaagggccaa

SEQ ID NO: 390114 - RNA, 18 nt, Human
ccugccgccccgucuccg

SEQ ID NO: 390115 - RNA, 18 nt, Human
cggaggaggcuggacugu

SEQ ID NO: 390116 - RNA, 21 nt, Human
cucacacaucauaagcaacaa

SEQ ID NO: 390117 - RNA, 18 nt, Human
cucuggaacuggcugaug

SEQ ID NO: 390118 - RNA, 18 nt, Human
cugcuuuguucucugcac

SEQ ID NO: 390119 - RNA, 20 nt, Human
cuguugauauuggcuauaag

SEQ ID NO: 390120 - RNA, 23 nt, Human
cuucggccacuucuagcaggucc

SEQ ID NO: 390121 - RNA, 19 nt, Human
gaaguucaaagugauuaug

SEQ ID NO: 390122 - RNA, 22 nt, Human
gauuacauuugaguuucuuggu

SEQ ID NO: 390123 - RNA, 18 nt, Human
gcaaacaucucaugggcu

SEQ ID NO: 390124 - RNA, 25 nt, Human
gcaaagcacacagggcugcacggag

SEQ ID NO: 390125 - RNA, 18 nt, Human
gccaggcaguggcauaug

SEQ ID NO: 390126 - RNA, 21 nt, Human
gggcaacaaaagacuuuuccc

SEQ ID NO: 390127 - RNA, 21 nt, Human
gguccugccgccccgucuccg

SEQ ID NO: 390128 - RNA, 20 nt, Human
ggucugggagggggaggcgg

SEQ ID NO: 390129 - RNA, 18 nt, Human
gucaccuucuaucuagcc

SEQ ID NO: 390130 - RNA, 19 nt, Human
guucagauuuagagaucaa

SEQ ID NO: 390131 - RNA, 22 nt, Human
uaaaaugcuagcuaggcuaugg

SEQ ID NO: 390132 - RNA, 22 nt, Human
uaagauggacugacaaguacug

SEQ ID NO: 390133 - RNA, 23 nt, Human
uaagccaaauguuuuuuucuuuc

SEQ ID NO: 390134 - RNA, 21 nt, Human
uaaucuggcucaucauuuugg

SEQ ID NO: 390135 - RNA, 24 nt, Human
uaccagaaguucugucuuguuuuu

SEQ ID NO: 390136 - RNA, 21 nt, Human
uagaagcuugaaaagucuugg

SEQ ID NO: 390137 - RNA, 22 nt, Human
uagaguaccagaaguucugucu

SEQ ID NO: 390138 - RNA, 19 nt, Human
uagcauguuuuucucuccc

SEQ ID NO: 390139 - RNA, 25 nt, Human
uagccuacugauaacucuggaacug

SEQ ID NO: 390140 - RNA, 24 nt, Human
uaggauuacauuugaguuucuugg

SEQ ID NO: 390141 - RNA, 20 nt, Human
uauggcaagaggauaggaga

SEQ ID NO: 390142 - RNA, 21 nt, Human
uauggcaagaggauaggagag

SEQ ID NO: 390143 - RNA, 21 nt, Human
uaugucuuuuaaaacaacuuu

SEQ ID NO: 390144 - RNA, 22 nt, Human
uauguucaccauaaucacagcc

SEQ ID NO: 390145 - RNA, 22 nt, Human
uauuacaagcuuuccuaugaga

SEQ ID NO: 390146 - RNA, 18 nt, Human
ucaguuuaggcacaaggc

SEQ ID NO: 390147 - RNA, 18 nt, Human
uccacggugaguggagag

SEQ ID NO: 390148 - RNA, 24 nt, Human
ucccaggguuguugugguggaagg

SEQ ID NO: 390149 - RNA, 24 nt, Human
ugaaaugaagaacaaggccacaga

SEQ ID NO: 390150 - RNA, 23 nt, Human
ugacagagaaauaaaggcuagga

SEQ ID NO: 390151 - RNA, 18 nt, Human
ugagagcaagagaaaugc

SEQ ID NO: 390152 - RNA, 20 nt, Human
ugagaucuagaagcuugaaa

SEQ ID NO: 390153 - RNA, 19 nt, Human
ugauguucuaucugaugag

SEQ ID NO: 390154 - RNA, 19 nt, Human
ugauuuggguccuuuccuc

SEQ ID NO: 390155 - RNA, 23 nt, Human
ugauuuggguccuuuccucugug

SEQ ID NO: 390156 - RNA, 19 nt, Human
ugcaaagucuaauauagcg

SEQ ID NO: 390157 - RNA, 23 nt, Human
ugcaaagucuaauauagcgaaaa

SEQ ID NO: 390158 - RNA, 18 nt, Human
ugcuuggaaaacaaagcg

SEQ ID NO: 390159 - RNA, 19 nt, Human
ugcuuggaaaacaaagcga

SEQ ID NO: 390160 - RNA, 18 nt, Human
ugggagggggaggcggcu

SEQ ID NO: 390161 - RNA, 22 nt, Human
uguaguacuuacugcuuggaaa

SEQ ID NO: 390162 - RNA, 21 nt, Human
ugucuuguuuuuguucuuuca

SEQ ID NO: 390163 - RNA, 19 nt, Human
ugugcaaagcacacagggc

SEQ ID NO: 390164 - RNA, 22 nt, Human
uguuauguucaccauaaucaca

SEQ ID NO: 390165 - RNA, 24 nt, Human
uuagagacagagagugccuuaaug

SEQ ID NO: 390166 - RNA, 19 nt, Human
uuggguccuuuccucugug

SEQ ID NO: 390167 - RNA, 20 nt, Human
uuuauauguagaccuuacag

SEQ ID NO: 390168 - RNA, 19 nt, Human
uuugaucguaggauuacau

SEQ ID NO: 390169 - RNA, 20 nt, Human
uuuggccgggagaacgggcu

SEQ ID NO: 390170 - RNA, 24 nt, Human
uuuguuuuuucuucucccuccugu

SEQ ID NO: 390171 - RNA, 20 nt, Human
uuuuucuuucuauuuuauga

SEQ ID NO: 390172 - RNA, 22 nt, Human
acacacacacccugucaccaac

SEQ ID NO: 390173 - RNA, 19 nt, Human
acacacccugucaccaaca

SEQ ID NO: 390174 - RNA, 18 nt, Human
acccugucaccaacaguc

SEQ ID NO: 390175 - RNA, 20 nt, Human
agaugucccgagggcccugc

SEQ ID NO: 390176 - RNA, 20 nt, Human
agccaguggcuggcuccugg

SEQ ID NO: 390177 - RNA, 24 nt, Human
agccaguggcuggcuccuggccuc

SEQ ID NO: 390178 - RNA, 21 nt, Human
aggggugggcuuggcuccugg

SEQ ID NO: 390179 - RNA, 19 nt, Human
cacacacccugucaccaac

SEQ ID NO: 390180 - RNA, 19 nt, Human
cacccugucaccaacaguc

SEQ ID NO: 390181 - RNA, 21 nt, Human
cacccugucaccaacagucuu

SEQ ID NO: 390182 - RNA, 23 nt, Human
cacgcacagauacacacacaccc

SEQ ID NO: 390183 - RNA, 18 nt, Human
cagauacacacacacccu

SEQ ID NO: 390184 - RNA, 21 nt, Human
ccaauucucucucacacacac

SEQ ID NO: 390185 - RNA, 26 nt, Human
ccaguggcuggcuccuggccuccuuc

SEQ ID NO: 390186 - RNA, 19 nt, Human
cccgagggcccugcccaga

SEQ ID NO: 390187 - RNA, 19 nt, Human
ccuugucucugaccagcca

SEQ ID NO: 390188 - RNA, 20 nt, Human
cgagggcccugcccagagug

SEQ ID NO: 390189 - RNA, 24 nt, Human
cgccggccgcgucccuccgugcgc

SEQ ID NO: 390190 - RNA, 20 nt, Human
gcacagauacacacacaccc

SEQ ID NO: 390191 - RNA, 23 nt, Human
uccuggccuccuucuccaggguc

SEQ ID NO: 390192 - RNA, 23 nt, Human
ugaccagccagagcuggcaggcu

SEQ ID NO: 390193 - RNA, 18 nt, Human
uggcuccuggggucuucu

SEQ ID NO: 390194 - RNA, 22 nt, Human
uggcuccuggggucuucuuccc

SEQ ID NO: 390195 - RNA, 22 nt, Human
uggucccccggucccuacacaa

SEQ ID NO: 390196 - RNA, 24 nt, Human
aacacguccuauggcaccucacuu

SEQ ID NO: 390197 - RNA, 22 nt, Human
aaccuuaauuaccuguauuccu

SEQ ID NO: 390198 - RNA, 19 nt, Human
aacuuccagcucacuggca

SEQ ID NO: 390199 - RNA, 20 nt, Human
aagaacucccucuuacauuu

SEQ ID NO: 390200 - RNA, 24 nt, Human
aagaagaguaaaugcccaggagug

SEQ ID NO: 390201 - RNA, 19 nt, Human
aagaagccggggccaggag

SEQ ID NO: 390202 - RNA, 23 nt, Human
aagcaaagcugugaaaagccagg

SEQ ID NO: 390203 - RNA, 23 nt, Human
aagcaaggaauaucacagaccca

SEQ ID NO: 390204 - RNA, 21 nt, Human
aagcagccuaggacucaaugc

SEQ ID NO: 390205 - RNA, 20 nt, Human
aaucccaguuaccuuauuua

SEQ ID NO: 390206 - RNA, 19 nt, Human
acacuaccugaauagccca

SEQ ID NO: 390207 - RNA, 19 nt, Human
acacuaccugaauagccca

SEQ ID NO: 390208 - RNA, 23 nt, Human
acacugaaccaggccagcccagu

SEQ ID NO: 390209 - RNA, 24 nt, Human
agcacacuaccugaauagcccaaa

SEQ ID NO: 390210 - RNA, 21 nt, Human
agcagugccagccugugcggc

SEQ ID NO: 390211 - RNA, 20 nt, Human
agcccaaauucagagugcaa

SEQ ID NO: 390212 - RNA, 25 nt, Human
agguuuucccagaaugccuugggug

SEQ ID NO: 390213 - RNA, 18 nt, Human
aguaagcagguuuguauu

SEQ ID NO: 390214 - RNA, 21 nt, Human
auaaaucuucugcuaucuuug

SEQ ID NO: 390215 - RNA, 18 nt, Human
auagaacaggucaagaua

SEQ ID NO: 390216 - RNA, 20 nt, Human
auagaacaggucaagauaaa

SEQ ID NO: 390217 - RNA, 20 nt, Human
caagcacauucucccuggaa

SEQ ID NO: 390218 - RNA, 26 nt, Human
caauacgaacacaucaccucugugua

SEQ ID NO: 390219 - RNA, 20 nt, Human
caauagaucuguuuucccuu

SEQ ID NO: 390220 - RNA, 22 nt, Human
cacaucaauccauccuucuucc

SEQ ID NO: 390221 - RNA, 19 nt, Human
caccagggucugcuccagg

SEQ ID NO: 390222 - RNA, 19 nt, Human
cacccguggaguggagcug

SEQ ID NO: 390223 - RNA, 20 nt, Human
caccgcgcggcgcagucucc

SEQ ID NO: 390224 - RNA, 19 nt, Human
cacugaaccaggccagccc

SEQ ID NO: 390225 - RNA, 21 nt, Human
cacugaaccaggccagcccag

SEQ ID NO: 390226 - RNA, 20 nt, Human
cacuggcaauuuccuggagg

SEQ ID NO: 390227 - RNA, 21 nt, Human
cagcucacuggcaauuuccug

SEQ ID NO: 390228 - RNA, 24 nt, Human
caggcauggcuuuugcaacugaua

SEQ ID NO: 390229 - RNA, 18 nt, Human
caggcccuagguuuuccc

SEQ ID NO: 390230 - RNA, 19 nt, Human
caguaagcagguuuguauu

SEQ ID NO: 390231 - RNA, 20 nt, Human
caucacacugguaaacugcu

SEQ ID NO: 390232 - RNA, 18 nt, Human
ccacagaguagggaaguu

SEQ ID NO: 390233 - RNA, 20 nt, Human
ccagaaugccuugggugaug

SEQ ID NO: 390234 - RNA, 26 nt, Human
ccaucucuccccuuccccuaagauuc

SEQ ID NO: 390235 - RNA, 24 nt, Human
cccaguugcccucugcugugucca

SEQ ID NO: 390236 - RNA, 22 nt, Human
cccccucugcaccaccucuucc

SEQ ID NO: 390237 - RNA, 24 nt, Human
ccccuugggcuccucggcaggagc

SEQ ID NO: 390238 - RNA, 19 nt, Human
cccucugcaccaccucuuc

SEQ ID NO: 390239 - RNA, 18 nt, Human
ccuccaaucugcaaggca

SEQ ID NO: 390240 - RNA, 23 nt, Human
ccuccaaucugcaaggcaaggau

SEQ ID NO: 390241 - RNA, 26 nt, Human
ccuccagcucaacccauauauuugca

SEQ ID NO: 390242 - RNA, 21 nt, Human
ccuguagucauucccuccugg

SEQ ID NO: 390243 - RNA, 27 nt, Human
cgccccgaucuucuggccaaucccuca

SEQ ID NO: 390244 - RNA, 18 nt, Human
cgcugcugugucuacuca

SEQ ID NO: 390245 - RNA, 20 nt, Human
cucacuggcaauuuccugga

SEQ ID NO: 390246 - RNA, 24 nt, Human
cuccagcucaacccauauauuugc

SEQ ID NO: 390247 - RNA, 24 nt, Human
cuccagcucaacccauauauuugc

SEQ ID NO: 390248 - RNA, 18 nt, Human
cucccucuuacauuuucc

SEQ ID NO: 390249 - RNA, 19 nt, Human
cuccugggccacgcaccgc

SEQ ID NO: 390250 - RNA, 23 nt, Human
cucugcaccaccucuuccacuuc

SEQ ID NO: 390251 - RNA, 24 nt, Human
cugcaccaccucuuccacuucagg

SEQ ID NO: 390252 - RNA, 18 nt, Human
cuguuugacagccaagaa

SEQ ID NO: 390253 - RNA, 23 nt, Human
cuuaagaacucccucuuacauuu

SEQ ID NO: 390254 - RNA, 24 nt, Human
cuucugucuuggccaccagggucu

SEQ ID NO: 390255 - RNA, 19 nt, Human
cuugaguugugcuguaugc

SEQ ID NO: 390256 - RNA, 23 nt, Human
cuuggggagggaagggaaggggg

SEQ ID NO: 390257 - RNA, 18 nt, Human
gaacuuaaccaaauccca

SEQ ID NO: 390258 - RNA, 20 nt, Human
gaacuuccagcucacuggca

SEQ ID NO: 390259 - RNA, 23 nt, Human
gaagaguaaaugcccaggaguga

SEQ ID NO: 390260 - RNA, 18 nt, Human
gauuuuguuggcagcagg

SEQ ID NO: 390261 - RNA, 19 nt, Human
gcaauacgaacacaucacc

SEQ ID NO: 390262 - RNA, 21 nt, Human
gcauggcuuuugcaacugaua

SEQ ID NO: 390263 - RNA, 25 nt, Human
gcccaaauucagagugcaagcagcc

SEQ ID NO: 390264 - RNA, 20 nt, Human
gcccaguugcccucugcugu

SEQ ID NO: 390265 - RNA, 19 nt, Human
gcggggcgcggggaaggag

SEQ ID NO: 390266 - RNA, 18 nt, Human
gcgguuucaacuuugagc

SEQ ID NO: 390267 - RNA, 23 nt, Human
ggagugaaugaagcggcuugucc

SEQ ID NO: 390268 - RNA, 18 nt, Human
gggaagggaaggggggua

SEQ ID NO: 390269 - RNA, 22 nt, Human
ggggagggaagggaaggggggu

SEQ ID NO: 390270 - RNA, 22 nt, Human
gguggcggggcgcggggaagga

SEQ ID NO: 390271 - RNA, 22 nt, Human
gguguaaggcucacaaaagaaa

SEQ ID NO: 390272 - RNA, 20 nt, Human
gguuugauucacacugaacc

SEQ ID NO: 390273 - RNA, 26 nt, Human
gucuacgugcaauacgaacacaucac

SEQ ID NO: 390274 - RNA, 20 nt, Human
gugcccccucugcaccaccu

SEQ ID NO: 390275 - RNA, 19 nt, Human
guggagcugugucacagcc

SEQ ID NO: 390276 - RNA, 18 nt, Human
guguccacccguggagug

SEQ ID NO: 390277 - RNA, 19 nt, Human
guugcccucugcugugucc

SEQ ID NO: 390278 - RNA, 21 nt, Human
guuugauucacacugaaccag

SEQ ID NO: 390279 - RNA, 19 nt, Human
uacacacgucuacgugcaa

SEQ ID NO: 390280 - RNA, 20 nt, Human
uaccaggcuuucucuugccc

SEQ ID NO: 390281 - RNA, 21 nt, Human
uagucauucccuccuggggag

SEQ ID NO: 390282 - RNA, 21 nt, Human
uaguuuggcuugguguaaggc

SEQ ID NO: 390283 - RNA, 20 nt, Human
uauacacacgucuacgugca

SEQ ID NO: 390284 - RNA, 22 nt, Human
uauacacacgucuacgugcaau

SEQ ID NO: 390285 - RNA, 23 nt, Human
uaucacagacccacaagaagagu

SEQ ID NO: 390286 - RNA, 20 nt, Human
uauuuggggagccuccaauc

SEQ ID NO: 390287 - RNA, 19 nt, Human
ucaauccauccuucuuccc

SEQ ID NO: 390288 - RNA, 19 nt, Human
ucauucccucuuggggagg

SEQ ID NO: 390289 - RNA, 22 nt, Human
uccacaucaauccauccuucuu

SEQ ID NO: 390290 - RNA, 19 nt, Human
uccaucucuccccuucccc

SEQ ID NO: 390291 - RNA, 20 nt, Human
ucccagucugaugcaaacuu

SEQ ID NO: 390292 - RNA, 21 nt, Human
uccccuaagauucugaauuag

SEQ ID NO: 390293 - RNA, 20 nt, Human
ucccgggaccccuugggcuc

SEQ ID NO: 390294 - RNA, 24 nt, Human
ucccuguagucauucccuccuggg

SEQ ID NO: 390295 - RNA, 20 nt, Human
ucccuguagucauucccucu

SEQ ID NO: 390296 - RNA, 19 nt, Human
ucgggguggcggggcgcgg

SEQ ID NO: 390297 - RNA, 19 nt, Human
ucuccgugcaaugcaaacu

SEQ ID NO: 390298 - RNA, 25 nt, Human
ucuuacauuuuccaucgguugcagg

SEQ ID NO: 390299 - RNA, 20 nt, Human
ucuucaagcagugccagccu

SEQ ID NO: 390300 - RNA, 21 nt, Human
ugcaauacgaacacaucaccu

SEQ ID NO: 390301 - RNA, 22 nt, Human
ugcaaugcaaacucaggaacac

SEQ ID NO: 390302 - RNA, 19 nt, Human
ugccaagcacauucucccu

SEQ ID NO: 390303 - RNA, 19 nt, Human
ugccaagcacauucucccu

SEQ ID NO: 390304 - RNA, 23 nt, Human
ugccaagcacauucucccuggaa

SEQ ID NO: 390305 - RNA, 22 nt, Human
ugccaccaagaaccuuaagaac

SEQ ID NO: 390306 - RNA, 22 nt, Human
ugccaccaagaaccuuaagaag

SEQ ID NO: 390307 - RNA, 18 nt, Human
ugcccaggagugaaugaa

SEQ ID NO: 390308 - RNA, 18 nt, Human
ugcccccucugcaccacc

SEQ ID NO: 390309 - RNA, 18 nt, Human
ugcccccucugcaccacc

SEQ ID NO: 390310 - RNA, 21 nt, Human
ugcuccaggcccugaaugagu

SEQ ID NO: 390311 - RNA, 28 nt, Human
ugcuugccugcgccccgaucuucuggcc

SEQ ID NO: 390312 - RNA, 20 nt, Human
uggcaauuuccuggaggugg

SEQ ID NO: 390313 - RNA, 23 nt, Human
uggcagcaggacuagccacagag

SEQ ID NO: 390314 - RNA, 20 nt, Human
uggcaggaaaccaucucuuc

SEQ ID NO: 390315 - RNA, 21 nt, Human
uggggagggaagggaaggggg

SEQ ID NO: 390316 - RNA, 21 nt, Human
uggggagggaagggaaggggg

SEQ ID NO: 390317 - RNA, 21 nt, Human
uggggagggaagggaaggggg

SEQ ID NO: 390318 - RNA, 21 nt, Human
ugugaacuuaaccaaauccca

SEQ ID NO: 390319 - RNA, 18 nt, Human
uucuggccaaucccucac

SEQ ID NO: 390320 - RNA, 24 nt, Human
uugcaacugauaggugcucugacu

SEQ ID NO: 390321 - RNA, 21 nt, Human
uuggaaauaaaagcaaagcug

SEQ ID NO: 390322 - RNA, 18 nt, Human
uuggggagggaagggaag

SEQ ID NO: 390323 - RNA, 24 nt, Human
uuucccagaaugccuugggugaug

SEQ ID NO: 390324 - RNA, 25 nt, Human
uuugcaacugauaggugcucugacu

SEQ ID NO: 390325 - RNA, 19 nt, Human
uuugcaccuuuccaguaag

SEQ ID NO: 390326 - RNA, 24 nt, Human
aaaaaaaaaaaaaaaaagacagaa

SEQ ID NO: 390327 - RNA, 25 nt, Human
aaaaaaaaaaaaaaagacagaagaa

SEQ ID NO: 390328 - RNA, 20 nt, Human
aaaaaaaaaaagacagaaga

SEQ ID NO: 390329 - RNA, 23 nt, Human
aaaaaaaaaaagacagaagaaag

SEQ ID NO: 390330 - RNA, 20 nt, Human
aaaaagaagggggugagggg

SEQ ID NO: 390331 - RNA, 22 nt, Human
aaaacccaaauccaggaacccc

SEQ ID NO: 390332 - RNA, 26 nt, Human
aaaccaacgaccccguggugaccuca

SEQ ID NO: 390333 - RNA, 20 nt, Human
aaacccaaagcccacagcag

SEQ ID NO: 390334 - RNA, 20 nt, Human
aaacccccagcacuggcccc

SEQ ID NO: 390335 - RNA, 22 nt, Human
aaacccccagcacuggccccac

SEQ ID NO: 390336 - RNA, 25 nt, Human
aaagauccacaaagcccccaaacaa

SEQ ID NO: 390337 - RNA, 23 nt, Human
aaccacgcccccuguagcuccca

SEQ ID NO: 390338 - RNA, 24 nt, Human
aagaagagggaaggagacaaauag

SEQ ID NO: 390339 - RNA, 18 nt, Human
aagcacaaagggaggcua

SEQ ID NO: 390340 - RNA, 22 nt, Human
aagcagaagggcgggcacaauc

SEQ ID NO: 390341 - RNA, 21 nt, Human
aagcccccaaacaaaaccucc

SEQ ID NO: 390342 - RNA, 19 nt, Human
aaggacggaaaaagaaggg

SEQ ID NO: 390343 - RNA, 25 nt, Human
aagggcucccuggaagccgagugag

SEQ ID NO: 390344 - RNA, 25 nt, Human
aagugacugacccccaccaacccug

SEQ ID NO: 390345 - RNA, 18 nt, Human
acaaaaccuccaucugca

SEQ ID NO: 390346 - RNA, 21 nt, Human
acaaacccaaagcccacagca

SEQ ID NO: 390347 - RNA, 23 nt, Human
acaagcagaggccaccaacagag

SEQ ID NO: 390348 - RNA, 21 nt, Human
acaccgccauccuggcagccu

SEQ ID NO: 390349 - RNA, 22 nt, Human
acacucagagaaagagaagcca

SEQ ID NO: 390350 - RNA, 25 nt, Human
accaacgaccccguggugaccucag

SEQ ID NO: 390351 - RNA, 22 nt, Human
accacugcacuccagcucgggu

SEQ ID NO: 390352 - RNA, 22 nt, Human
acccaaagcccacagcagaggc

SEQ ID NO: 390353 - RNA, 18 nt, Human
acccaaauccaggaaccc

SEQ ID NO: 390354 - RNA, 22 nt, Human
acccaaauccaggaaccccucc

SEQ ID NO: 390355 - RNA, 20 nt, Human
accgcagaaagauccacaaa

SEQ ID NO: 390356 - RNA, 22 nt, Human
acggggaaugcccuggugugug

SEQ ID NO: 390357 - RNA, 18 nt, Human
acugcacuccagcucggg

SEQ ID NO: 390358 - RNA, 24 nt, Human
acugcacuccagcucgggugacag

SEQ ID NO: 390359 - RNA, 18 nt, Human
acugguacugcucagugc

SEQ ID NO: 390360 - RNA, 19 nt, Human
agaaagauccacaaagccc

SEQ ID NO: 390361 - RNA, 18 nt, Human
agaagaagagggaaggag

SEQ ID NO: 390362 - RNA, 24 nt, Human
agaagggcgggcacaaucucacaa

SEQ ID NO: 390363 - RNA, 24 nt, Human
agacagaagaaaggcagccacuga

SEQ ID NO: 390364 - RNA, 25 nt, Human
agaccaggaguucgaggcuguagug

SEQ ID NO: 390365 - RNA, 25 nt, Human
agagaagccagucccugggcuuggg

SEQ ID NO: 390366 - RNA, 20 nt, Human
agagaccaggaguucgaggc

SEQ ID NO: 390367 - RNA, 20 nt, Human
agagaggaggguggagggga

SEQ ID NO: 390368 - RNA, 21 nt, Human
agagaggaggguggaggggag

SEQ ID NO: 390369 - RNA, 19 nt, Human
agagggaaggagacaaaua

SEQ ID NO: 390370 - RNA, 20 nt, Human
agagguagaccugucucuca

SEQ ID NO: 390371 - RNA, 22 nt, Human
agccaguuucccugcccugggg

SEQ ID NO: 390372 - RNA, 23 nt, Human
agccaguuucccugcccuggggu

SEQ ID NO: 390373 - RNA, 24 nt, Human
agccuccagacaccuguuacuccc

SEQ ID NO: 390374 - RNA, 24 nt, Human
aggaaccccuccacccuucagccc

SEQ ID NO: 390375 - RNA, 25 nt, Human
aggaaccccuccacccuucagcccu

SEQ ID NO: 390376 - RNA, 18 nt, Human
aggaccgcaagagaccag

SEQ ID NO: 390377 - RNA, 24 nt, Human
aggaccgcaagagaccaggaguuc

SEQ ID NO: 390378 - RNA, 20 nt, Human
aggacggaaaaagaaggggg

SEQ ID NO: 390379 - RNA, 24 nt, Human
aggagcccagagugaaaauuaaag

SEQ ID NO: 390380 - RNA, 19 nt, Human
aggaggucguaggauucca

SEQ ID NO: 390381 - RNA, 22 nt, Human
aggaggucguaggauuccaucc

SEQ ID NO: 390382 - RNA, 27 nt, Human
aggaguucgaggcuguagugagccaag

SEQ ID NO: 390383 - RNA, 22 nt, Human
aggccagggccagcacacagga

SEQ ID NO: 390384 - RNA, 19 nt, Human
agggggugagggggugggu

SEQ ID NO: 390385 - RNA, 22 nt, Human
agggggugaggggguggguggg

SEQ ID NO: 390386 - RNA, 21 nt, Human
agggggugggugggugcgaga

SEQ ID NO: 390387 - RNA, 18 nt, Human
auacagggcagaggggag

SEQ ID NO: 390388 - RNA, 19 nt, Human
aucauuugggaugggggca

SEQ ID NO: 390389 - RNA, 25 nt, Human
auccugacaaacccaaagcccacag

SEQ ID NO: 390390 - RNA, 23 nt, Human
augccccuugccccaaccacgcc

SEQ ID NO: 390391 - RNA, 19 nt, Human
augugccauuugccucaga

SEQ ID NO: 390392 - RNA, 21 nt, Human
auugcugcaaagauuucaagu

SEQ ID NO: 390393 - RNA, 22 nt, Human
caaaacccaaauccaggaaccc

SEQ ID NO: 390394 - RNA, 29 nt, Human
caaaacccaaauccaggaaccccuccacc

SEQ ID NO: 390395 - RNA, 20 nt, Human
caaagcccccaaacaaaacc

SEQ ID NO: 390396 - RNA, 23 nt, Human
caaagcccccaaacaaaaccucc

SEQ ID NO: 390397 - RNA, 23 nt, Human
caaauuccuccaaauucuaacau

SEQ ID NO: 390398 - RNA, 18 nt, Human
caacaagcagaggccacc

SEQ ID NO: 390399 - RNA, 21 nt, Human
caagcagaggccaccaacaga

SEQ ID NO: 390400 - RNA, 20 nt, Human
caaggacggaaaaagaaggg

SEQ ID NO: 390401 - RNA, 22 nt, Human
cacaaagcccccaaacaaaacc

SEQ ID NO: 390402 - RNA, 24 nt, Human
cacaaagcccccaaacaaaaccuc

SEQ ID NO: 390403 - RNA, 22 nt, Human
cacaaagggaggcuaagacagg

SEQ ID NO: 390404 - RNA, 21 nt, Human
cacaagcaaaacccaaaucca

SEQ ID NO: 390405 - RNA, 22 nt, Human
cacaccgccauccuggcagccu

SEQ ID NO: 390406 - RNA, 21 nt, Human
cacagcccuugcuugucagaa

SEQ ID NO: 390407 - RNA, 27 nt, Human
caccacccagcugauggcuccgagccc

SEQ ID NO: 390408 - RNA, 26 nt, Human
caccacugcacuccagcucgggugac

SEQ ID NO: 390409 - RNA, 22 nt, Human
cacccuucagccuccagacacc

SEQ ID NO: 390410 - RNA, 19 nt, Human
cacggaagccaacaagcag

SEQ ID NO: 390411 - RNA, 22 nt, Human
cacuccagcucgggugacagag

SEQ ID NO: 390412 - RNA, 19 nt, Human
cacugcacuccagcucggg

SEQ ID NO: 390413 - RNA, 19 nt, Human
cacugcacuccagcucggg

SEQ ID NO: 390414 - RNA, 23 nt, Human
cacugcacuccagcucgggugac

SEQ ID NO: 390415 - RNA, 24 nt, Human
cacugcacuccagcucgggugaca

SEQ ID NO: 390416 - RNA, 24 nt, Human
cacugcacuccagcucgggugaca

SEQ ID NO: 390417 - RNA, 19 nt, Human
cacuuuggcaaaucacugc

SEQ ID NO: 390418 - RNA, 21 nt, Human
cagaaacccccagcacuggcc

SEQ ID NO: 390419 - RNA, 18 nt, Human
cagaagaaaggcagccac

SEQ ID NO: 390420 - RNA, 19 nt, Human
cagaagaaugaaggaccag

SEQ ID NO: 390421 - RNA, 18 nt, Human
cagaggccaccaacagag

SEQ ID NO: 390422 - RNA, 19 nt, Human
cagagguagaccugucucu

SEQ ID NO: 390423 - RNA, 21 nt, Human
cagcacagcagccaccucugu

SEQ ID NO: 390424 - RNA, 22 nt, Human
cagccacacagggagaagaaga

SEQ ID NO: 390425 - RNA, 18 nt, Human
cagccacugauaauauca

SEQ ID NO: 390426 - RNA, 20 nt, Human
cagcccucaggccuuucuca

SEQ ID NO: 390427 - RNA, 21 nt, Human
cagccggaccgagcgaggggc

SEQ ID NO: 390428 - RNA, 25 nt, Human
cagccuccagacaccuguuacuccc

SEQ ID NO: 390429 - RNA, 22 nt, Human
caggacguccgucagguaagca

SEQ ID NO: 390430 - RNA, 18 nt, Human
caggagcacucaaucaag

SEQ ID NO: 390431 - RNA, 20 nt, Human
cagggagaagaagagggaag

SEQ ID NO: 390432 - RNA, 19 nt, Human
cagggcagaggggagagga

SEQ ID NO: 390433 - RNA, 24 nt, Human
cagggccagcacacaggagcacuc

SEQ ID NO: 390434 - RNA, 21 nt, Human
caguccaagguaugcuguccc

SEQ ID NO: 390435 - RNA, 21 nt, Human
cagugcuaugggagggcacag

SEQ ID NO: 390436 - RNA, 23 nt, Human
cauaacuguugcuccagaaacag

SEQ ID NO: 390437 - RNA, 23 nt, Human
caucugcagcugguucuggggac

SEQ ID NO: 390438 - RNA, 23 nt, Human
caugcacccuguguggaaggucc

SEQ ID NO: 390439 - RNA, 22 nt, Human
caugugccauuugccucagaac

SEQ ID NO: 390440 - RNA, 23 nt, Human
cauucagccccuccagggaucca

SEQ ID NO: 390441 - RNA, 19 nt, Human
cauuugggaugggggcagg

SEQ ID NO: 390442 - RNA, 21 nt, Human
ccaaagcccacagcagaggca

SEQ ID NO: 390443 - RNA, 24 nt, Human
ccaagacuuucuuccuguguggcu

SEQ ID NO: 390444 - RNA, 18 nt, Human
ccaaggacggaaaaagaa

SEQ ID NO: 390445 - RNA, 20 nt, Human
ccacugcacuccagcucggg

SEQ ID NO: 390446 - RNA, 20 nt, Human
ccacugcacuccagcucggg

SEQ ID NO: 390447 - RNA, 20 nt, Human
ccacugcacuccagcucggg

SEQ ID NO: 390448 - RNA, 21 nt, Human
ccacugcacuccagcucgggu

SEQ ID NO: 390449 - RNA, 24 nt, Human
ccacugcacuccagcucgggugac

SEQ ID NO: 390450 - RNA, 20 nt, Human
ccagaagaaugaaggaccag

SEQ ID NO: 390451 - RNA, 21 nt, Human
ccagcccuagcucucuggguc

SEQ ID NO: 390452 - RNA, 23 nt, Human
ccagucuuugccuagggcuucuc

SEQ ID NO: 390453 - RNA, 18 nt, Human
ccauuuuguaggcaggaa

SEQ ID NO: 390454 - RNA, 22 nt, Human
cccagcaucgugcaucuaggca

SEQ ID NO: 390455 - RNA, 19 nt, Human
cccauaacuguugcuccag

SEQ ID NO: 390456 - RNA, 18 nt, Human
ccccaaaggcuacugagc

SEQ ID NO: 390457 - RNA, 24 nt, Human
ccccaaaggcuacugagcuucucc

SEQ ID NO: 390458 - RNA, 18 nt, Human
ccccagcaucgugcaucu

SEQ ID NO: 390459 - RNA, 18 nt, Human
ccccagcaucgugcaucu

SEQ ID NO: 390460 - RNA, 25 nt, Human
cccccaaacaaaaccuccaucugca

SEQ ID NO: 390461 - RNA, 19 nt, Human
cccggggucccggaggcuc

SEQ ID NO: 390462 - RNA, 21 nt, Human
cccucucuaauguuaagaguc

SEQ ID NO: 390463 - RNA, 21 nt, Human
cccuguagcucccagcuucag

SEQ ID NO: 390464 - RNA, 20 nt, Human
ccgcugagucagcagccacc

SEQ ID NO: 390465 - RNA, 23 nt, Human
ccuacagaaacccccagcacugg

SEQ ID NO: 390466 - RNA, 28 nt, Human
ccuacagaaacccccagcacuggccccc

SEQ ID NO: 390467 - RNA, 18 nt, Human
ccuggaagccgagugagc

SEQ ID NO: 390468 - RNA, 21 nt, Human
ccugucccuccagcccuagcc

SEQ ID NO: 390469 - RNA, 28 nt, Human
ccugucccuccagcccuagcucucuggg

SEQ ID NO: 390470 - RNA, 24 nt, Human
cgcagaaagauccacaaagccccc

SEQ ID NO: 390471 - RNA, 25 nt, Human
cgcagaaagauccacaaagccccca

SEQ ID NO: 390472 - RNA, 21 nt, Human
cggcucuacagacagaagcca

SEQ ID NO: 390473 - RNA, 22 nt, Human
cuaccagacaguaaccucccag

SEQ ID NO: 390474 - RNA, 20 nt, Human
cuaggcacagcacagcagcc

SEQ ID NO: 390475 - RNA, 23 nt, Human
cuccagcccuagcucucuggguc

SEQ ID NO: 390476 - RNA, 21 nt, Human
cuccagcucgggugacagagg

SEQ ID NO: 390477 - RNA, 18 nt, Human
cuccguggaucgcugugg

SEQ ID NO: 390478 - RNA, 23 nt, Human
cucguacaucacuagcauauccc

SEQ ID NO: 390479 - RNA, 23 nt, Human
cugacaaacccaaagcccacagc

SEQ ID NO: 390480 - RNA, 22 nt, Human
cugagaguggauugucugaggu

SEQ ID NO: 390481 - RNA, 19 nt, Human
cugaggugccagcaggacg

SEQ ID NO: 390482 - RNA, 19 nt, Human
cugcucagugccagccaug

SEQ ID NO: 390483 - RNA, 24 nt, Human
cugcugccugccagucuucucacu

SEQ ID NO: 390484 - RNA, 18 nt, Human
cuggccccaccuucaugc

SEQ ID NO: 390485 - RNA, 18 nt, Human
cugggcacugucaggcuc

SEQ ID NO: 390486 - RNA, 21 nt, Human
cugggcuucgggcugcgcucc

SEQ ID NO: 390487 - RNA, 22 nt, Human
cuguagugagccaagacugcac

SEQ ID NO: 390488 - RNA, 27 nt, Human
cuucaugcugggcacugucaggcuccc

SEQ ID NO: 390489 - RNA, 23 nt, Human
cuuccuaccagacaguaaccucc

SEQ ID NO: 390490 - RNA, 20 nt, Human
cuuuugaaauuuugacucug

SEQ ID NO: 390491 - RNA, 18 nt, Human
gaaaaagaagggggugag

SEQ ID NO: 390492 - RNA, 22 nt, Human
gaccccguggugaccucagcac

SEQ ID NO: 390493 - RNA, 29 nt, Human
gacggaaaaagaagggggugagggggugg

SEQ ID NO: 390494 - RNA, 18 nt, Human
gagaagaagagggaagga

SEQ ID NO: 390495 - RNA, 19 nt, Human
gagaggaggguggagggga

SEQ ID NO: 390496 - RNA, 19 nt, Human
gaggaccgcaagagaccag

SEQ ID NO: 390497 - RNA, 18 nt, Human
gaggcuguagugagccaa

SEQ ID NO: 390498 - RNA, 27 nt, Human
gaguauccgcuucccaugacacgcccu

SEQ ID NO: 390499 - RNA, 21 nt, Human
gaucaaaaagaaaaugauuuc

SEQ ID NO: 390500 - RNA, 26 nt, Human
gcagccacacagggagaagaagaggg

SEQ ID NO: 390501 - RNA, 18 nt, Human
gcagccaccucuguuucu

SEQ ID NO: 390502 - RNA, 21 nt, Human
gccauccuggcagccugaggc

SEQ ID NO: 390503 - RNA, 20 nt, Human
gcccccaaacaaaaccucca

SEQ ID NO: 390504 - RNA, 22 nt, Human
gcccuagcucucugggucuccu

SEQ ID NO: 390505 - RNA, 20 nt, Human
gcugcgcuccugagagugga

SEQ ID NO: 390506 - RNA, 18 nt, Human
ggaaccagcaggccagag

SEQ ID NO: 390507 - RNA, 23 nt, Human
ggaaccagcaggccagagcucua

SEQ ID NO: 390508 - RNA, 23 nt, Human
ggaaccccuccacccuucagccu

SEQ ID NO: 390509 - RNA, 20 nt, Human
ggagaagaagagggaaggag

SEQ ID NO: 390510 - RNA, 21 nt, Human
ggagcacucaaucaagcauga

SEQ ID NO: 390511 - RNA, 18 nt, Human
ggaggaaacugaucagag

SEQ ID NO: 390512 - RNA, 20 nt, Human
ggaugggggcaggggaggga

SEQ ID NO: 390513 - RNA, 20 nt, Human
ggcacugaggugggaagagu

SEQ ID NO: 390514 - RNA, 19 nt, Human
gggaaggagacaaauaggg

SEQ ID NO: 390515 - RNA, 21 nt, Human
gggagaagaagagggaaggag

SEQ ID NO: 390516 - RNA, 19 nt, Human
ggggugagggggugggugg

SEQ ID NO: 390517 - RNA, 20 nt, Human
ggguaaagggcucccuggaa

SEQ ID NO: 390518 - RNA, 20 nt, Human
ggugagggggugggugggug

SEQ ID NO: 390519 - RNA, 19 nt, Human
ggugggugcgagagaggag

SEQ ID NO: 390520 - RNA, 22 nt, Human
gguguggaaaacaggguccuug

SEQ ID NO: 390521 - RNA, 21 nt, Human
guaggcaggaaauucagacuc

SEQ ID NO: 390522 - RNA, 20 nt, Human
guccuuguuuucguaccauu

SEQ ID NO: 390523 - RNA, 21 nt, Human
gugccagcaggacguccguca

SEQ ID NO: 390524 - RNA, 22 nt, Human
gugcuggucaggucacugggcu

SEQ ID NO: 390525 - RNA, 21 nt, Human
guggaagguccuauuucucca

SEQ ID NO: 390526 - RNA, 23 nt, Human
gugggcaagcacacugguacugc

SEQ ID NO: 390527 - RNA, 28 nt, Human
uaaccucccagaggcaggacgcgcagcu

SEQ ID NO: 390528 - RNA, 25 nt, Human
uaagacaggaggaccgcaagagacc

SEQ ID NO: 390529 - RNA, 18 nt, Human
uaagcagggaccucucgc

SEQ ID NO: 390530 - RNA, 22 nt, Human
uacaaagaaaacuaauagacac

SEQ ID NO: 390531 - RNA, 22 nt, Human
uacagacagaagccaccccuga

SEQ ID NO: 390532 - RNA, 21 nt, Human
uagaaagaucagacuugagca

SEQ ID NO: 390533 - RNA, 21 nt, Human
uagcauaucccaggacuuggu

SEQ ID NO: 390534 - RNA, 20 nt, Human
uagugacccuaccuuggcug

SEQ ID NO: 390535 - RNA, 22 nt, Human
ucaaaaaaaaaaaaaaaaaaaa

SEQ ID NO: 390536 - RNA, 23 nt, Human
ucaaaaaaaaaaaaaaaaaaaaa

SEQ ID NO: 390537 - RNA, 28 nt, Human
ucaaucaagcaugauggagcagguacuc

SEQ ID NO: 390538 - RNA, 21 nt, Human
ucacagggcaauggcugaacc

SEQ ID NO: 390539 - RNA, 23 nt, Human
ucacagggcaauggcugaaccag

SEQ ID NO: 390540 - RNA, 20 nt, Human
ucagagaaagagaagccagu

SEQ ID NO: 390541 - RNA, 24 nt, Human
ucagagaaagagaagccagucccu

SEQ ID NO: 390542 - RNA, 19 nt, Human
uccaaggacggaaaaagaa

SEQ ID NO: 390543 - RNA, 23 nt, Human
uccaaggacggaaaaagaagggg

SEQ ID NO: 390544 - RNA, 23 nt, Human
uccaaggacggaaaaagaagggg

SEQ ID NO: 390545 - RNA, 21 nt, Human
uccacaaagcccccaaacaaa

SEQ ID NO: 390546 - RNA, 23 nt, Human
uccacaaagcccccaaacaaaac

SEQ ID NO: 390547 - RNA, 24 nt, Human
uccagcucgggugacagagguaga

SEQ ID NO: 390548 - RNA, 19 nt, Human
uccaggccagggccagcac

SEQ ID NO: 390549 - RNA, 25 nt, Human
uccaucugcagcugguucuggggac

SEQ ID NO: 390550 - RNA, 19 nt, Human
uccaugacagcugcccaga

SEQ ID NO: 390551 - RNA, 22 nt, Human
ucccaacucauugcugcaaaga

SEQ ID NO: 390552 - RNA, 23 nt, Human
ucccagaggcaggacgcgcagcu

SEQ ID NO: 390553 - RNA, 21 nt, Human
ucccauaacuguugcuccaga

SEQ ID NO: 390554 - RNA, 23 nt, Human
ucccaugacacgcccuuccuaga

SEQ ID NO: 390555 - RNA, 19 nt, Human
ucccugacuuuggugugga

SEQ ID NO: 390556 - RNA, 18 nt, Human
uccuuguuguugcgcacg

SEQ ID NO: 390557 - RNA, 25 nt, Human
ucggagguuccuugucucccaccuc

SEQ ID NO: 390558 - RNA, 21 nt, Human
ucucucaaaaaaaaaaaaaaa

SEQ ID NO: 390559 - RNA, 25 nt, Human
ucucucaaaaaaaaaaaaaaaaaaa

SEQ ID NO: 390560 - RNA, 23 nt, Human
ucugaggugccagcaggacgucc

SEQ ID NO: 390561 - RNA, 31 nt, Human
ucugcaaucaggccagucuuugccuagggcc

SEQ ID NO: 390562 - RNA, 19 nt, Human
ucuuaaguaaccaagacuu

SEQ ID NO: 390563 - RNA, 20 nt, Human
ugaaugcugggcuccagccu

SEQ ID NO: 390564 - RNA, 20 nt, Human
ugacaaacccaaagcccacc

SEQ ID NO: 390565 - RNA, 18 nt, Human
ugacaucgugggagaggc

SEQ ID NO: 390566 - RNA, 22 nt, Human
ugaccuuuacaaagaaaacuaa

SEQ ID NO: 390567 - RNA, 20 nt, Human
ugacucgggagcccugucac

SEQ ID NO: 390568 - RNA, 23 nt, Human
ugacucgggagcccugucacggg

SEQ ID NO: 390569 - RNA, 24 nt, Human
ugagaucaaaaagaaaaugauuuc

SEQ ID NO: 390570 - RNA, 20 nt, Human
ugagcuccuggcccacagga

SEQ ID NO: 390571 - RNA, 19 nt, Human
ugaggggagaggggacaga

SEQ ID NO: 390572 - RNA, 28 nt, Human
ugaggggagaggggacagaucacuuuug

SEQ ID NO: 390573 - RNA, 21 nt, Human
ugagggggugggugggugcga

SEQ ID NO: 390574 - RNA, 21 nt, Human
ugaggguaguauggguuaucg

SEQ ID NO: 390575 - RNA, 24 nt, Human
ugaggguaguauggguuaucggga

SEQ ID NO: 390576 - RNA, 24 nt, Human
ugccccaaccacgcccccuguagc

SEQ ID NO: 390577 - RNA, 21 nt, Human
ugcccugcucccugucccucc

SEQ ID NO: 390578 - RNA, 24 nt, Human
ugcccugcucccugucccuccagc

SEQ ID NO: 390579 - RNA, 27 nt, Human
ugcccugggguuucuuagggagugcac

SEQ ID NO: 390580 - RNA, 27 nt, Human
ugccuaaaccaacgaccccguggugac

SEQ ID NO: 390581 - RNA, 24 nt, Human
ugccugagucgaugacucgggagc

SEQ ID NO: 390582 - RNA, 23 nt, Human
ugcgagagaggaggguggagggg

SEQ ID NO: 390583 - RNA, 21 nt, Human
ugcucccugucccuccagccc

SEQ ID NO: 390584 - RNA, 21 nt, Human
uggagcaggcaggaggcugcu

SEQ ID NO: 390585 - RNA, 23 nt, Human
uggagcagguacucggucaguuu

SEQ ID NO: 390586 - RNA, 19 nt, Human
uggaggagguggccggagu

SEQ ID NO: 390587 - RNA, 19 nt, Human
uggcuuccaggcucccuga

SEQ ID NO: 390588 - RNA, 19 nt, Human
ugggagaggcauuguggca

SEQ ID NO: 390589 - RNA, 23 nt, Human
ugggugggugcgagagaggaggg

SEQ ID NO: 390590 - RNA, 25 nt, Human
ugggugggugcgagagaggagggug

SEQ ID NO: 390591 - RNA, 23 nt, Human
ugguagucaguccaagguaugcu

SEQ ID NO: 390592 - RNA, 18 nt, Human
ugguguggagaucacagg

SEQ ID NO: 390593 - RNA, 20 nt, Human
ugucacggcacaccgccauc

SEQ ID NO: 390594 - RNA, 19 nt, Human
uguccaggccucgcgggag

SEQ ID NO: 390595 - RNA, 24 nt, Human
ugugggcacugaggugggaagagu

SEQ ID NO: 390596 - RNA, 19 nt, Human
uuagaacccagauacauaa

SEQ ID NO: 390597 - RNA, 22 nt, Human
uuagaacccagauacauaacua

SEQ ID NO: 390598 - RNA, 24 nt, Human
uuauacauucacuccuuucauccu

SEQ ID NO: 390599 - RNA, 19 nt, Human
uucaagugacugacccccc

SEQ ID NO: 390600 - RNA, 22 nt, Human
uucacuucccacuuaggauguu

SEQ ID NO: 390601 - RNA, 18 nt, Human
uuccuccaaauucuaaca

SEQ ID NO: 390602 - RNA, 19 nt, Human
uuccuguguggcugagccu

SEQ ID NO: 390603 - RNA, 21 nt, Human
uucuugcuuccucuucggagg

SEQ ID NO: 390604 - RNA, 21 nt, Human
uuggagcaggcaggaggcugc

SEQ ID NO: 390605 - RNA, 21 nt, Human
uuggcugugggcacugaggug

SEQ ID NO: 390606 - RNA, 24 nt, Human
uugguuagugacccuaccuuggcu

SEQ ID NO: 390607 - RNA, 25 nt, Human
uuuacuucuuuaaaagaaaucucaa

SEQ ID NO: 390608 - RNA, 24 nt, Human
uuucacaagcccuuuucuuggagc

SEQ ID NO: 390609 - RNA, 20 nt, Human
uuucuaguuccagggccagg

SEQ ID NO: 390610 - RNA, 24 nt, Human
uuuggcuuuccuuucacaagcccu

SEQ ID NO: 390611 - RNA, 23 nt, Human
aaaaaugaaagcaaaaagaaaaa

SEQ ID NO: 390612 - RNA, 20 nt, Human
aaagggguuaaauggguguu

SEQ ID NO: 390613 - RNA, 23 nt, Human
aaauuaaaaaaaaaaaaccauaa

SEQ ID NO: 390614 - RNA, 21 nt, Human
aacaaaacaacacaacauaaa

SEQ ID NO: 390615 - RNA, 25 nt, Human
aagcaaaaagaaaaagggguuaagg

SEQ ID NO: 390616 - RNA, 24 nt, Human
aaugaaagcaaaaagaaaaagggg

SEQ ID NO: 390617 - RNA, 22 nt, Human
acaaagucuuuccagacuaaaa

SEQ ID NO: 390618 - RNA, 25 nt, Human
acaauuuacaaaacaaaacaacaca

SEQ ID NO: 390619 - RNA, 18 nt, Human
acuuuuuucuuuuuuuaa

SEQ ID NO: 390620 - RNA, 18 nt, Human
aggcacgcgggcggggcg

SEQ ID NO: 390621 - RNA, 19 nt, Human
auaaaaaugaaagcaaaaa

SEQ ID NO: 390622 - RNA, 23 nt, Human
aucaacgccacacacacaccccg

SEQ ID NO: 390623 - RNA, 26 nt, Human
aucaacgccacacacacaccccgguu

SEQ ID NO: 390624 - RNA, 18 nt, Human
aucccaccccuccccccu

SEQ ID NO: 390625 - RNA, 24 nt, Human
aucccaccccuccccccucccccc

SEQ ID NO: 390626 - RNA, 25 nt, Human
aucccuguauuucccccucccccaa

SEQ ID NO: 390627 - RNA, 22 nt, Human
auuccccccacccuuuccccau

SEQ ID NO: 390628 - RNA, 24 nt, Human
auuucacccccaaaaagaaaaaau

SEQ ID NO: 390629 - RNA, 21 nt, Human
caacacaggccuggaccuccu

SEQ ID NO: 390630 - RNA, 24 nt, Human
caacauaaagaaucacguagcaug

SEQ ID NO: 390631 - RNA, 21 nt, Human
cacacacacaccccguccuuc

SEQ ID NO: 390632 - RNA, 20 nt, Human
caccccuccccccucccccc

SEQ ID NO: 390633 - RNA, 21 nt, Human
cacccuuuccccaucauccca

SEQ ID NO: 390634 - RNA, 25 nt, Human
cagagugaccccugaaagaugcacu

SEQ ID NO: 390635 - RNA, 18 nt, Human
cagcuaugaccucaggca

SEQ ID NO: 390636 - RNA, 28 nt, Human
cagcucacacugccagcucuggcaacac

SEQ ID NO: 390637 - RNA, 21 nt, Human
cagucccuccccgucccugcc

SEQ ID NO: 390638 - RNA, 21 nt, Human
ccacagugacccaggacacag

SEQ ID NO: 390639 - RNA, 21 nt, Human
ccaccccuccccccucccccc

SEQ ID NO: 390640 - RNA, 20 nt, Human
ccauggaaacagccauucca

SEQ ID NO: 390641 - RNA, 22 nt, Human
cccaccccuccccccucccccc

SEQ ID NO: 390642 - RNA, 21 nt, Human
cccacucugaucacagcgaca

SEQ ID NO: 390643 - RNA, 27 nt, Human
ccccaaaaccuucccacuuugagacaa

SEQ ID NO: 390644 - RNA, 24 nt, Human
cccccaaaaagaaaaaauuaaaaa

SEQ ID NO: 390645 - RNA, 19 nt, Human
cccccaaaaccuucccacu

SEQ ID NO: 390646 - RNA, 20 nt, Human
cccccaaaaccuucccacuu

SEQ ID NO: 390647 - RNA, 18 nt, Human
ccccccacccuuucccca

SEQ ID NO: 390648 - RNA, 21 nt, Human
ccccccacccuuuccccauca

SEQ ID NO: 390649 - RNA, 22 nt, Human
cccuguauuucccccuccccca

SEQ ID NO: 390650 - RNA, 22 nt, Human
ccuacagcucacacugccagcu

SEQ ID NO: 390651 - RNA, 21 nt, Human
ccucaccagccacagugaccc

SEQ ID NO: 390652 - RNA, 22 nt, Human
cgcgggcggggcggggcggggc

SEQ ID NO: 390653 - RNA, 24 nt, Human
cguagcauggggcugccuaucuga

SEQ ID NO: 390654 - RNA, 23 nt, Human
cuauggagauuguguccauggaa

SEQ ID NO: 390655 - RNA, 25 nt, Human
cuccacagucucaccugugcuugcu

SEQ ID NO: 390656 - RNA, 24 nt, Human
gacagucccuccccgucccugccu

SEQ ID NO: 390657 - RNA, 24 nt, Human
gaguguccaccaccuucucaucuc

SEQ ID NO: 390658 - RNA, 20 nt, Human
gccugugcauuagaacccac

SEQ ID NO: 390659 - RNA, 21 nt, Human
gcgggcggggcggggcggggc

SEQ ID NO: 390660 - RNA, 18 nt, Human
gcggggcggggcggggca

SEQ ID NO: 390661 - RNA, 19 nt, Human
gcuguaauuggauuguguu

SEQ ID NO: 390662 - RNA, 22 nt, Human
ggaccuccucccauccccacgg

SEQ ID NO: 390663 - RNA, 23 nt, Human
ggauuguguuccauaagccugug

SEQ ID NO: 390664 - RNA, 18 nt, Human
ggcaggcacgcgggcggg

SEQ ID NO: 390665 - RNA, 20 nt, Human
ggcaggcacgcgggcggggc

SEQ ID NO: 390666 - RNA, 23 nt, Human
ggcaugggcaggcacgcgggcgg

SEQ ID NO: 390667 - RNA, 21 nt, Human
ggguuaaauggguguuccugg

SEQ ID NO: 390668 - RNA, 21 nt, Human
uaaaacucagauauuuaaaaa

SEQ ID NO: 390669 - RNA, 24 nt, Human
uaaacaaagucuuuccagacuaaa

SEQ ID NO: 390670 - RNA, 27 nt, Human
uaacugccaucauagcucuguccagac

SEQ ID NO: 390671 - RNA, 23 nt, Human
uaagccugugcauuagaacccac

SEQ ID NO: 390672 - RNA, 20 nt, Human
uacaaaacaaaacaacacaa

SEQ ID NO: 390673 - RNA, 24 nt, Human
uauauuuaucccucccuuuuaauu

SEQ ID NO: 390674 - RNA, 20 nt, Human
uauuuuauccccauggcaga

SEQ ID NO: 390675 - RNA, 18 nt, Human
ucaaucucacauuuaaau

SEQ ID NO: 390676 - RNA, 24 nt, Human
ucagauauuuaaaaauuauacaau

SEQ ID NO: 390677 - RNA, 23 nt, Human
uccaccaccuucucaucuccaca

SEQ ID NO: 390678 - RNA, 19 nt, Human
uccagacuaaaaauagauu

SEQ ID NO: 390679 - RNA, 23 nt, Human
uccagacuaaaaauagauuuaua

SEQ ID NO: 390680 - RNA, 19 nt, Human
uccccauggcagagugacc

SEQ ID NO: 390681 - RNA, 23 nt, Human
uccccauggcagagugaccccug

SEQ ID NO: 390682 - RNA, 23 nt, Human
ucccugccuacagcucacacugc

SEQ ID NO: 390683 - RNA, 20 nt, Human
ucccuguauuucccccuccc

SEQ ID NO: 390684 - RNA, 22 nt, Human
ucccuguauuucccccuccccc

SEQ ID NO: 390685 - RNA, 24 nt, Human
ucccuguauuucccccucccccaa

SEQ ID NO: 390686 - RNA, 23 nt, Human
ucccugugggucagggcacagcu

SEQ ID NO: 390687 - RNA, 23 nt, Human
ucccuugauuuugcugcugcugu

SEQ ID NO: 390688 - RNA, 20 nt, Human
uccuugagguccucaccagc

SEQ ID NO: 390689 - RNA, 19 nt, Human
ugacccaggacacagcuau

SEQ ID NO: 390690 - RNA, 22 nt, Human
ugagacaggcuaaagaucaacg

SEQ ID NO: 390691 - RNA, 20 nt, Human
ugccaucauagcucugucca

SEQ ID NO: 390692 - RNA, 19 nt, Human
ugccuggaaugugcugagg

SEQ ID NO: 390693 - RNA, 21 nt, Human
ugccuggaaugugcugaggac

SEQ ID NO: 390694 - RNA, 22 nt, Human
uggaaugugcugaggacagggg

SEQ ID NO: 390695 - RNA, 24 nt, Human
uggaaugugcugaggacagggggc

SEQ ID NO: 390696 - RNA, 24 nt, Human
uggagauuguguccauggaaacag

SEQ ID NO: 390697 - RNA, 23 nt, Human
uggauuguguuccauaagccugu

SEQ ID NO: 390698 - RNA, 19 nt, Human
uggcuaaaacgcuguggug

SEQ ID NO: 390699 - RNA, 25 nt, Human
ugugguuugcuuuuucaauccuggg

SEQ ID NO: 390700 - RNA, 24 nt, Human
uguguacacuugaugggguccuug

SEQ ID NO: 390701 - RNA, 21 nt, Human
uguguuccauaagccugugca

SEQ ID NO: 390702 - RNA, 24 nt, Human
uuaaaacagaaucaaaagggauag

SEQ ID NO: 390703 - RNA, 20 nt, Human
uuagaacccacauugugucc

SEQ ID NO: 390704 - RNA, 18 nt, Human
uucauacugagauccagc

SEQ ID NO: 390705 - RNA, 19 nt, Human
uuccccccacccuuucccc

SEQ ID NO: 390706 - RNA, 21 nt, Human
uuucccccucccccaaaaccu

SEQ ID NO: 390707 - RNA, 22 nt, Human
uuuuuugauuuuuuuuguuuuu

SEQ ID NO: 390708 - RNA, 21 nt, Human
uuuuuuuuguuuuuuguuuuu

SEQ ID NO: 390709 - RNA, 27 nt, Human
agacagagagacagagaaaggggaccc

SEQ ID NO: 390710 - RNA, 24 nt, Human
agacagagagacccugaaaccaag

SEQ ID NO: 390711 - RNA, 19 nt, Human
agacagagagcacugaggg

SEQ ID NO: 390712 - RNA, 23 nt, Human
agcgaggaagagggugagagaga

SEQ ID NO: 390713 - RNA, 21 nt, Human
aguggacgagggagagagaga

SEQ ID NO: 390714 - RNA, 21 nt, Human
auugcgagggggaagcagaga

SEQ ID NO: 390715 - RNA, 23 nt, Human
caagaggccucccgaauguugcg

SEQ ID NO: 390716 - RNA, 21 nt, Human
cagagagcacugagggcaggg

SEQ ID NO: 390717 - RNA, 21 nt, Human
cccagacucgcaccuccaagg

SEQ ID NO: 390718 - RNA, 22 nt, Human
ccccgggagcgcgccuuuccca

SEQ ID NO: 390719 - RNA, 21 nt, Human
cccgcuccccccgggagcgcg

SEQ ID NO: 390720 - RNA, 22 nt, Human
cccggggcccgcuccccccggg

SEQ ID NO: 390721 - RNA, 24 nt, Human
ccuucccggggcccgcuccccccg

SEQ ID NO: 390722 - RNA, 22 nt, Human
cgaggacuucugcagcagagga

SEQ ID NO: 390723 - RNA, 23 nt, Human
cuccugcugggagcuggaguugg

SEQ ID NO: 390724 - RNA, 19 nt, Human
cugaaaccaagaggccucc

SEQ ID NO: 390725 - RNA, 20 nt, Human
cugaaaccaagaggccuccc

SEQ ID NO: 390726 - RNA, 18 nt, Human
gacgagggagagagagag

SEQ ID NO: 390727 - RNA, 19 nt, Human
gagacagagaaagcgagga

SEQ ID NO: 390728 - RNA, 18 nt, Human
gagacagagagacagaga

SEQ ID NO: 390729 - RNA, 23 nt, Human
gagcauugcgagggggaagcaga

SEQ ID NO: 390730 - RNA, 19 nt, Human
gcagccaccuccugcuggg

SEQ ID NO: 390731 - RNA, 22 nt, Human
gccuucccggggcccgcucccc

SEQ ID NO: 390732 - RNA, 18 nt, Human
gcgagggggaagcagaga

SEQ ID NO: 390733 - RNA, 26 nt, Human
gggaagcagagacagagaagaaagau

SEQ ID NO: 390734 - RNA, 18 nt, Human
ggggaguggacgagggag

SEQ ID NO: 390735 - RNA, 21 nt, Human
ggugagagagagacagagaga

SEQ ID NO: 390736 - RNA, 18 nt, Human
ucccggggcccgcucccc

SEQ ID NO: 390737 - RNA, 19 nt, Human
ugagaaggaaccccgagga

SEQ ID NO: 390738 - RNA, 19 nt, Human
ugauaggcucuuaucuauu

SEQ ID NO: 390739 - RNA, 20 nt, Human
ugcgagggggaagcagagac

SEQ ID NO: 390740 - RNA, 19 nt, Human
ugucaaagucagcuauccu

SEQ ID NO: 390741 - RNA, 19 nt, Human
ugugacugucaaagucagc

SEQ ID NO: 390742 - RNA, 19 nt, Human
aaaaaaacaaaagacccgc

SEQ ID NO: 390743 - RNA, 22 nt, Human
aaaaaaccagagaccaaaggca

SEQ ID NO: 390744 - RNA, 23 nt, Human
aaaaaaccagagaccaaaggcag

SEQ ID NO: 390745 - RNA, 21 nt, Human
aaaacaagagggagaggcaag

SEQ ID NO: 390746 - RNA, 21 nt, Human
aaaagcuuaaaaaaaccagag

SEQ ID NO: 390747 - RNA, 20 nt, Human
aaaaugcuccugucagccca

SEQ ID NO: 390748 - RNA, 18 nt, Human
aaacccaagacagucccc

SEQ ID NO: 390749 - RNA, 24 nt, Human
aaggccucaaugcagggaggggca

SEQ ID NO: 390750 - RNA, 21 nt, Human
acagccagcccaggggucccc

SEQ ID NO: 390751 - RNA, 24 nt, Human
agaccuggagagaggccugggugg

SEQ ID NO: 390752 - RNA, 23 nt, Human
agagcagcuuaggggggccuggg

SEQ ID NO: 390753 - RNA, 20 nt, Human
agaggcuauggggccacugc

SEQ ID NO: 390754 - RNA, 21 nt, Human
agcagguguggccccaggccc

SEQ ID NO: 390755 - RNA, 27 nt, Human
agccaccuugcugacgucccuuccccc

SEQ ID NO: 390756 - RNA, 19 nt, Human
agcccaggcaacagggcca

SEQ ID NO: 390757 - RNA, 21 nt, Human
agcggguggcucgucccacgg

SEQ ID NO: 390758 - RNA, 21 nt, Human
aggcaacagggccaagaugca

SEQ ID NO: 390759 - RNA, 23 nt, Human
aggccagugagugguaggccagg

SEQ ID NO: 390760 - RNA, 24 nt, Human
agggcagcagguguggccccaggc

SEQ ID NO: 390761 - RNA, 21 nt, Human
aggggucacuggucccaacaa

SEQ ID NO: 390762 - RNA, 19 nt, Human
agggucagagccaccuugc

SEQ ID NO: 390763 - RNA, 21 nt, Human
agggugugguccccaugccag

SEQ ID NO: 390764 - RNA, 20 nt, Human
agguuuacacggggucuuuu

SEQ ID NO: 390765 - RNA, 22 nt, Human
agucucaggaguggcacggggg

SEQ ID NO: 390766 - RNA, 24 nt, Human
agugaaggacaggguguccaggag

SEQ ID NO: 390767 - RNA, 21 nt, Human
aguucagagcaugagccuggg

SEQ ID NO: 390768 - RNA, 18 nt, Human
aguucguguggaacugga

SEQ ID NO: 390769 - RNA, 20 nt, Human
auaaaaugucacguuuauug

SEQ ID NO: 390770 - RNA, 23 nt, Human
aucacaccccccaccccccauaa

SEQ ID NO: 390771 - RNA, 26 nt, Human
caaaaaaagcuuaaaaaaaccagaga

SEQ ID NO: 390772 - RNA, 19 nt, Human
caaaacaagagggagaggc

SEQ ID NO: 390773 - RNA, 19 nt, Human
caaaaccaagagaaccccc

SEQ ID NO: 390774 - RNA, 25 nt, Human
caagacaguccccagccagcuggga

SEQ ID NO: 390775 - RNA, 25 nt, Human
cacagcccaaggccuucguggggcu

SEQ ID NO: 390776 - RNA, 24 nt, Human
cacagcugcuuggcagagucaccu

SEQ ID NO: 390777 - RNA, 23 nt, Human
cacaugaaggcccccagcuagcc

SEQ ID NO: 390778 - RNA, 22 nt, Human
cacccagaccuaggggcagggc

SEQ ID NO: 390779 - RNA, 21 nt, Human
caccgggcuccaggguguggu

SEQ ID NO: 390780 - RNA, 20 nt, Human
cacgcaucacuuuccacaug

SEQ ID NO: 390781 - RNA, 26 nt, Human
cacgcaucacuuuccacaugacaaaa

SEQ ID NO: 390782 - RNA, 21 nt, Human
cacucagaucacaccccccac

SEQ ID NO: 390783 - RNA, 22 nt, Human
cagaucacaccccccacccccc

SEQ ID NO: 390784 - RNA, 20 nt, Human
cagcagaaauagcgagagaa

SEQ ID NO: 390785 - RNA, 21 nt, Human
cagcagaaauagcgagagaca

SEQ ID NO: 390786 - RNA, 23 nt, Human
cagcagaaauagcgagagacacg

SEQ ID NO: 390787 - RNA, 22 nt, Human
cagcagggucggacgcacagcc

SEQ ID NO: 390788 - RNA, 20 nt, Human
cagccagcugggaagagcug

SEQ ID NO: 390789 - RNA, 23 nt, Human
cagcccaaggccuucguggggcu

SEQ ID NO: 390790 - RNA, 23 nt, Human
cagcugggaagagcugguuaccc

SEQ ID NO: 390791 - RNA, 18 nt, Human
cagcuuaggggggccugg

SEQ ID NO: 390792 - RNA, 23 nt, Human
caggacaggucucugaauccacc

SEQ ID NO: 390793 - RNA, 22 nt, Human
caggauccaugggacaggucac

SEQ ID NO: 390794 - RNA, 21 nt, Human
caggguaggagacuugcaguu

SEQ ID NO: 390795 - RNA, 19 nt, Human
caucaaaaaaacaaaagac

SEQ ID NO: 390796 - RNA, 25 nt, Human
caugaagggcacaugaaggccccca

SEQ ID NO: 390797 - RNA, 19 nt, Human
ccacagugaccacugcccu

SEQ ID NO: 390798 - RNA, 23 nt, Human
ccaccgagaagggagaggcagcc

SEQ ID NO: 390799 - RNA, 19 nt, Human
ccaggcccacaccugggug

SEQ ID NO: 390800 - RNA, 20 nt, Human
ccauaauugugguucccagg

SEQ ID NO: 390801 - RNA, 19 nt, Human
cccaacaucaaaaaaacaa

SEQ ID NO: 390802 - RNA, 20 nt, Human
cccacgcaucacuuuccaca

SEQ ID NO: 390803 - RNA, 25 nt, Human
cccaggaacugcuguuucuuccucc

SEQ ID NO: 390804 - RNA, 21 nt, Human
ccccaagcccaggucaguccc

SEQ ID NO: 390805 - RNA, 18 nt, Human
ccccagcuagccaggccc

SEQ ID NO: 390806 - RNA, 20 nt, Human
ccccaggcccagggaugcuc

SEQ ID NO: 390807 - RNA, 20 nt, Human
ccccauaauugugguuccca

SEQ ID NO: 390808 - RNA, 20 nt, Human
cccccagcuagccaggcccc

SEQ ID NO: 390809 - RNA, 18 nt, Human
cccugggggccacagcug

SEQ ID NO: 390810 - RNA, 18 nt, Human
cccuuggaccacacagag

SEQ ID NO: 390811 - RNA, 19 nt, Human
ccgccgccuguccccguuc

SEQ ID NO: 390812 - RNA, 22 nt, Human
ccggggucucgaguggccguuc

SEQ ID NO: 390813 - RNA, 19 nt, Human
ccuaggggcagggccagga

SEQ ID NO: 390814 - RNA, 19 nt, Human
ccugaggggagaggaugcg

SEQ ID NO: 390815 - RNA, 23 nt, Human
ccuggacccagugucaccuuggc

SEQ ID NO: 390816 - RNA, 20 nt, Human
ccuugcugacgucccuuccc

SEQ ID NO: 390817 - RNA, 24 nt, Human
cgcccacgcaucacuuuccacaug

SEQ ID NO: 390818 - RNA, 18 nt, Human
cgucacgauggcccucug

SEQ ID NO: 390819 - RNA, 22 nt, Human
cguuuuaaagucccaaucaucc

SEQ ID NO: 390820 - RNA, 18 nt, Human
cuaccauggggcccaggc

SEQ ID NO: 390821 - RNA, 24 nt, Human
cucagaucacaccccccacccccc

SEQ ID NO: 390822 - RNA, 21 nt, Human
cuccugagcagcauccucuca

SEQ ID NO: 390823 - RNA, 18 nt, Human
cugcagcagggucggacg

SEQ ID NO: 390824 - RNA, 20 nt, Human
cuggggguaacggugggagu

SEQ ID NO: 390825 - RNA, 24 nt, Human
cugggugaaucucguuugaauucu

SEQ ID NO: 390826 - RNA, 20 nt, Human
cugggugccacagugaccac

SEQ ID NO: 390827 - RNA, 24 nt, Human
cuggucccaacaaaaugccccauu

SEQ ID NO: 390828 - RNA, 27 nt, Human
gaagccccaaggugccuucaucaggga

SEQ ID NO: 390829 - RNA, 23 nt, Human
gacaaaaccaagagaacccccaa

SEQ ID NO: 390830 - RNA, 18 nt, Human
gacccgccgccugucccc

SEQ ID NO: 390831 - RNA, 24 nt, Human
gaccuggagagaggccugggugcu

SEQ ID NO: 390832 - RNA, 25 nt, Human
gagcacagggcugaaagcggguggc

SEQ ID NO: 390833 - RNA, 19 nt, Human
gagcagcauccucucagcc

SEQ ID NO: 390834 - RNA, 23 nt, Human
gagcaugagccugggucccuggg

SEQ ID NO: 390835 - RNA, 21 nt, Human
gagggucagagccaccuugcu

SEQ ID NO: 390836 - RNA, 24 nt, Human
gcaaaaaaagcuuaaaaaaaccag

SEQ ID NO: 390837 - RNA, 20 nt, Human
gcaaaacaagagggagaggc

SEQ ID NO: 390838 - RNA, 22 nt, Human
gcacaguuccagaggcuauggg

SEQ ID NO: 390839 - RNA, 21 nt, Human
gcagcagaaauagcgagagac

SEQ ID NO: 390840 - RNA, 26 nt, Human
gcagcagaaauagcgagagacacggg

SEQ ID NO: 390841 - RNA, 19 nt, Human
gcagcuuaggggggccugg

SEQ ID NO: 390842 - RNA, 19 nt, Human
gcccggggucucgaguggc

SEQ ID NO: 390843 - RNA, 18 nt, Human
ggacugggggcagauacc

SEQ ID NO: 390844 - RNA, 19 nt, Human
ggagagaggccugggugcu

SEQ ID NO: 390845 - RNA, 18 nt, Human
ggagagcagcuuaggggg

SEQ ID NO: 390846 - RNA, 18 nt, Human
ggcagcagguguggcccc

SEQ ID NO: 390847 - RNA, 22 nt, Human
ggcagcagguguggccccaggc

SEQ ID NO: 390848 - RNA, 20 nt, Human
ggcauugagcuggccuugag

SEQ ID NO: 390849 - RNA, 25 nt, Human
ggccagagcacagggcugaaagcgg

SEQ ID NO: 390850 - RNA, 24 nt, Human
ggccagugagugguaggccagggc

SEQ ID NO: 390851 - RNA, 22 nt, Human
gggagagcagcuuaggggggcc

SEQ ID NO: 390852 - RNA, 18 nt, Human
gggccacugcccacccag

SEQ ID NO: 390853 - RNA, 22 nt, Human
gggccagagcacagggcugaaa

SEQ ID NO: 390854 - RNA, 24 nt, Human
gggccaggagcaaaacaagaggga

SEQ ID NO: 390855 - RNA, 22 nt, Human
ggggcucagaccagcacagucc

SEQ ID NO: 390856 - RNA, 22 nt, Human
ggggcucagguuuacacggggu

SEQ ID NO: 390857 - RNA, 21 nt, Human
ggggggacgggggggcucagg

SEQ ID NO: 390858 - RNA, 24 nt, Human
ggggggggggggggacgggggggc

SEQ ID NO: 390859 - RNA, 20 nt, Human
gggggguguccugugcuggc

SEQ ID NO: 390860 - RNA, 21 nt, Human
gggugugguccccaugccagg

SEQ ID NO: 390861 - RNA, 19 nt, Human
gguaggccagggccccagg

SEQ ID NO: 390862 - RNA, 24 nt, Human
ggucacagagugacacgguggcug

SEQ ID NO: 390863 - RNA, 18 nt, Human
gguuuccacagcaucccc

SEQ ID NO: 390864 - RNA, 24 nt, Human
guagcccugggggccacagcugcu

SEQ ID NO: 390865 - RNA, 19 nt, Human
gucucgaguggccguucug

SEQ ID NO: 390866 - RNA, 25 nt, Human
gucucgaguggccguucuggggcca

SEQ ID NO: 390867 - RNA, 21 nt, Human
gucuggggaggggagucaggc

SEQ ID NO: 390868 - RNA, 21 nt, Human
gugccuucaucagggaacgcc

SEQ ID NO: 390869 - RNA, 24 nt, Human
guucccaggaacugcuguuucuuc

SEQ ID NO: 390870 - RNA, 23 nt, Human
uaaaaaaaccagagaccaaaggc

SEQ ID NO: 390871 - RNA, 24 nt, Human
uaaaaaaaccagagaccaaaggca

SEQ ID NO: 390872 - RNA, 25 nt, Human
uaaaaaaaccagagaccaaaggcag

SEQ ID NO: 390873 - RNA, 25 nt, Human
uaaacccaagacaguccccagccag

SEQ ID NO: 390874 - RNA, 22 nt, Human
uaagagaucaaacucccagggc

SEQ ID NO: 390875 - RNA, 20 nt, Human
uaccaggcauugagcuggcc

SEQ ID NO: 390876 - RNA, 24 nt, Human
uagccaggcccacaccugggugcc

SEQ ID NO: 390877 - RNA, 19 nt, Human
uaggcacaauuugcuggug

SEQ ID NO: 390878 - RNA, 19 nt, Human
ucaagaaaugcaaugcuca

SEQ ID NO: 390879 - RNA, 19 nt, Human
ucacaccccccacccccca

SEQ ID NO: 390880 - RNA, 19 nt, Human
ucacuggucccaacaaaau

SEQ ID NO: 390881 - RNA, 19 nt, Human
ucagagccaccuugcugac

SEQ ID NO: 390882 - RNA, 23 nt, Human
uccacaugacaaaaccaagagaa

SEQ ID NO: 390883 - RNA, 25 nt, Human
ucccccaagcccaggucaguccccc

SEQ ID NO: 390884 - RNA, 22 nt, Human
ucccuggggcaaaggagugaag

SEQ ID NO: 390885 - RNA, 18 nt, Human
ucccuuaagagaucaaac

SEQ ID NO: 390886 - RNA, 19 nt, Human
uccugaggggagaggaugc

SEQ ID NO: 390887 - RNA, 18 nt, Human
uccuggacccagugucac

SEQ ID NO: 390888 - RNA, 20 nt, Human
ucuccuggggccagggcggg

SEQ ID NO: 390889 - RNA, 21 nt, Human
ucuggggccagagcacagggc

SEQ ID NO: 390890 - RNA, 21 nt, Human
ugaaggacaggguguccagga

SEQ ID NO: 390891 - RNA, 18 nt, Human
ugacaaaaccaagagaac

SEQ ID NO: 390892 - RNA, 19 nt, Human
ugcuccugucagcccaggc

SEQ ID NO: 390893 - RNA, 21 nt, Human
uggaacuggaugggaucccag

SEQ ID NO: 390894 - RNA, 20 nt, Human
uggcuccugagcagcauccu

SEQ ID NO: 390895 - RNA, 20 nt, Human
uggcucgaugcugacaacag

SEQ ID NO: 390896 - RNA, 20 nt, Human
uggggaggggagucaggcag

SEQ ID NO: 390897 - RNA, 23 nt, Human
uggggaggggagucaggcagucc

SEQ ID NO: 390898 - RNA, 19 nt, Human
uggggccagggcgggcacc

SEQ ID NO: 390899 - RNA, 19 nt, Human
uggggugggggguguccug

SEQ ID NO: 390900 - RNA, 20 nt, Human
uggugggguggggugggggg

SEQ ID NO: 390901 - RNA, 20 nt, Human
uggugggguggggugggggg

SEQ ID NO: 390902 - RNA, 21 nt, Human
uguccaggagguccccagcac

SEQ ID NO: 390903 - RNA, 23 nt, Human
uguccugugcuggcuccugagca

SEQ ID NO: 390904 - RNA, 24 nt, Human
uguggaugaagcccggggucucga

SEQ ID NO: 390905 - RNA, 18 nt, Human
uguguaggguagcccugg

SEQ ID NO: 390906 - RNA, 25 nt, Human
uguugcuugcuuucagguuuuguuu

SEQ ID NO: 390907 - RNA, 22 nt, Human
uuaaaaaaaauauuucgcuuag

SEQ ID NO: 390908 - RNA, 21 nt, Human
uuaaagucccaaucauccagc

SEQ ID NO: 390909 - RNA, 23 nt, Human
uucccaggaacugcuguuucuuc

SEQ ID NO: 390910 - RNA, 22 nt, Human
uuccugaggggagaggaugcgg

SEQ ID NO: 390911 - RNA, 19 nt, Human
uugguguuggcucgaugcu

SEQ ID NO: 390912 - RNA, 18 nt, Human
uuuaaacccaagacaguc

SEQ ID NO: 390913 - RNA, 23 nt, Human
uuuaaacccaagacaguccccag

SEQ ID NO: 390914 - RNA, 21 nt, Human
aagcaauguggcaacuuggac

SEQ ID NO: 390915 - RNA, 18 nt, Human
acacaaaccgcccgcgcg

SEQ ID NO: 390916 - RNA, 25 nt, Human
accgccgccgccaccgccgccgccu

SEQ ID NO: 390917 - RNA, 23 nt, Human
agacacacagccaagaucccccc

SEQ ID NO: 390918 - RNA, 23 nt, Human
aguugcacuuuuuucuuucuuuu

SEQ ID NO: 390919 - RNA, 18 nt, Human
cacagccaagaucccccc

SEQ ID NO: 390920 - RNA, 19 nt, Human
cacuuuuuucuuucuuuuu

SEQ ID NO: 390921 - RNA, 23 nt, Human
cagauccgcagacacacagccaa

SEQ ID NO: 390922 - RNA, 18 nt, Human
cagucucugggcuguguc

SEQ ID NO: 390923 - RNA, 19 nt, Human
ccccgccgccgccgccgcc

SEQ ID NO: 390924 - RNA, 22 nt, Human
cccgcgccugcugccuccccgc

SEQ ID NO: 390925 - RNA, 22 nt, Human
cccgcucccgcgccugcugccu

SEQ ID NO: 390926 - RNA, 20 nt, Human
ccgccgccaccgccgccgcc

SEQ ID NO: 390927 - RNA, 21 nt, Human
ccgccgccaccgccgccgccu

SEQ ID NO: 390928 - RNA, 22 nt, Human
ccgccgccaccgccgccgccug

SEQ ID NO: 390929 - RNA, 21 nt, Human
ccgccgccgccaccgccgccg

SEQ ID NO: 390930 - RNA, 23 nt, Human
ccgccgccgccaccgccgccgcc

SEQ ID NO: 390931 - RNA, 23 nt, Human
ccgccgccgccaccgccgccgcc

SEQ ID NO: 390932 - RNA, 18 nt, Human
ccgccgccgccgccgcca

SEQ ID NO: 390933 - RNA, 24 nt, Human
ccgccgccgccgccgccacuacag

SEQ ID NO: 390934 - RNA, 18 nt, Human
ccgccgccgccgccgccg

SEQ ID NO: 390935 - RNA, 18 nt, Human
ccgccgccgccgccgccg

SEQ ID NO: 390936 - RNA, 22 nt, Human
ccgccgccgccugcuccugcgc

SEQ ID NO: 390937 - RNA, 25 nt, Human
ccgccgccgccugcuccugcgcccg

SEQ ID NO: 390938 - RNA, 20 nt, Human
ccgccugcuccugcgcccgc

SEQ ID NO: 390939 - RNA, 22 nt, Human
ccgccugcuccugcgcccgcuc

SEQ ID NO: 390940 - RNA, 18 nt, Human
ccggcgccgaggcggcgu

SEQ ID NO: 390941 - RNA, 20 nt, Human
ccgugcaccgccggcgccga

SEQ ID NO: 390942 - RNA, 21 nt, Human
ccuccccgccgccgccgccgc

SEQ ID NO: 390943 - RNA, 24 nt, Human
cgcagacacacagccaagaucccc

SEQ ID NO: 390944 - RNA, 25 nt, Human
cgcagacacacagccaagauccccc

SEQ ID NO: 390945 - RNA, 21 nt, Human
cgccacuacagauccgcagac

SEQ ID NO: 390946 - RNA, 22 nt, Human
cgucugcgauucauaacuacuc

SEQ ID NO: 390947 - RNA, 27 nt, Human
cuccccgccgccgccgccgccgccgcc

SEQ ID NO: 390948 - RNA, 18 nt, Human
cuccgugcaccgccggcg

SEQ ID NO: 390949 - RNA, 22 nt, Human
cugcugccuccccgccgccgcc

SEQ ID NO: 390950 - RNA, 23 nt, Human
gacacacagccaagauccccccg

SEQ ID NO: 390951 - RNA, 19 nt, Human
gcacuuuuuucuuucuuuu

SEQ ID NO: 390952 - RNA, 20 nt, Human
gccgccacuacagauccgca

SEQ ID NO: 390953 - RNA, 21 nt, Human
gccuccccgccgccgccgccg

SEQ ID NO: 390954 - RNA, 20 nt, Human
gcugccuccccgccgccgcc

SEQ ID NO: 390955 - RNA, 18 nt, Human
uagcaaaaucacacaaac

SEQ ID NO: 390956 - RNA, 25 nt, Human
uccccgccgccgccgccgccgccgg

SEQ ID NO: 390957 - RNA, 24 nt, Human
uccgcagacacacagccaagaucc

SEQ ID NO: 390958 - RNA, 20 nt, Human
uccgugcaccgccggcgccg

SEQ ID NO: 390959 - RNA, 22 nt, Human
ucuaaccgccgccgccaccgcc

SEQ ID NO: 390960 - RNA, 19 nt, Human
ucucugggcugugucucag

SEQ ID NO: 390961 - RNA, 22 nt, Human
ucucugggcugugucucagccu

SEQ ID NO: 390962 - RNA, 25 nt, Human
ugucuuauauuacaaaaaugggggu

SEQ ID NO: 390963 - RNA, 24 nt, Human
uuuuucuuucuuuuuuuuguuuuu

SEQ ID NO: 390964 - RNA, 24 nt, Human
uuuuuuguuuuucuguuuuuugau

SEQ ID NO: 390965 - RNA, 22 nt, Human
uuuuuuuuguuuuucuguuuuu

SEQ ID NO: 390966 - RNA, 18 nt, Human
aaagacaggcucuggcug

SEQ ID NO: 390967 - RNA, 24 nt, Human
aaagugcugggauuacaggcguga

SEQ ID NO: 390968 - RNA, 18 nt, Human
aaauggaauugugaaaaa

SEQ ID NO: 390969 - RNA, 21 nt, Human
aacagagcuucuccauuuccu

SEQ ID NO: 390970 - RNA, 22 nt, Human
aaccuauuccauuccccuuccu

SEQ ID NO: 390971 - RNA, 19 nt, Human
aagugcugggauuacaggc

SEQ ID NO: 390972 - RNA, 19 nt, Human
aagugcugggauuacaggc

SEQ ID NO: 390973 - RNA, 24 nt, Human
acagcccuuuuuuuuuuuuuuuuu

SEQ ID NO: 390974 - RNA, 18 nt, Human
acaggguuucaccauguu

SEQ ID NO: 390975 - RNA, 21 nt, Human
acaggguuucaccauguuggc

SEQ ID NO: 390976 - RNA, 24 nt, Human
acaggguuucaccauguuggccag

SEQ ID NO: 390977 - RNA, 18 nt, Human
accauguuggccaggcug

SEQ ID NO: 390978 - RNA, 20 nt, Human
acuggagugcaauagcgcca

SEQ ID NO: 390979 - RNA, 24 nt, Human
acuuaaccuauuccauuccccuuc

SEQ ID NO: 390980 - RNA, 18 nt, Human
agagcacugucaucggaa

SEQ ID NO: 390981 - RNA, 24 nt, Human
agaucauaguaaggggcuuccucu

SEQ ID NO: 390982 - RNA, 21 nt, Human
agaugcagucucccuguuacc

SEQ ID NO: 390983 - RNA, 21 nt, Human
agcaguuugaaucgaugaccc

SEQ ID NO: 390984 - RNA, 22 nt, Human
agcaguuugaaucgaugacccc

SEQ ID NO: 390985 - RNA, 22 nt, Human
agcccuuuuuuuuuuuuuuuuu

SEQ ID NO: 390986 - RNA, 18 nt, Human
agccuggggccagagcuu

SEQ ID NO: 390987 - RNA, 20 nt, Human
agcggccuucuccggguaag

SEQ ID NO: 390988 - RNA, 21 nt, Human
agcuagggaggcagaggcuuc

SEQ ID NO: 390989 - RNA, 19 nt, Human
agcuggggacccggggcag

SEQ ID NO: 390990 - RNA, 18 nt, Human
aggaccccugccaguuuc

SEQ ID NO: 390991 - RNA, 24 nt, Human
aggcaaaaaacaaaaauuaaauua

SEQ ID NO: 390992 - RNA, 25 nt, Human
aggcagaggcuucuggcuggcaaga

SEQ ID NO: 390993 - RNA, 19 nt, Human
aggcggccagguguccugu

SEQ ID NO: 390994 - RNA, 23 nt, Human
agggaggcagaggcuucuggcug

SEQ ID NO: 390995 - RNA, 21 nt, Human
agggugaguccuggggagcug

SEQ ID NO: 390996 - RNA, 18 nt, Human
aggugauccaccugccuc

SEQ ID NO: 390997 - RNA, 22 nt, Human
aguagauacaggguuucaccau

SEQ ID NO: 390998 - RNA, 24 nt, Human
agucucccuguuacccagacugga

SEQ ID NO: 390999 - RNA, 24 nt, Human
agugauucuuccgccucagccucc

SEQ ID NO: 391000 - RNA, 22 nt, Human
aucuuuggauucugagaaacca

SEQ ID NO: 391001 - RNA, 27 nt, Human
auggacagcccuuuuuuuuuuuuuuuu

SEQ ID NO: 391002 - RNA, 24 nt, Human
caaagugcugggauuacaggcgug

SEQ ID NO: 391003 - RNA, 18 nt, Human
caagcugcccagaagcug

SEQ ID NO: 391004 - RNA, 20 nt, Human
caagugauucuuccgccuca

SEQ ID NO: 391005 - RNA, 22 nt, Human
caagugauucuuccgccucagc

SEQ ID NO: 391006 - RNA, 22 nt, Human
caccaccacguccggcuaauuu

SEQ ID NO: 391007 - RNA, 24 nt, Human
caccacguccggcuaauuuuugua

SEQ ID NO: 391008 - RNA, 21 nt, Human
caccauguuggccaggcuggu

SEQ ID NO: 391009 - RNA, 24 nt, Human
caccauguuggccaggcuggucuc

SEQ ID NO: 391010 - RNA, 20 nt, Human
cacccuccccuccccaauuu

SEQ ID NO: 391011 - RNA, 20 nt, Human
cacuacuggagguuuucugg

SEQ ID NO: 391012 - RNA, 22 nt, Human
cagccccauggggaaacuggag

SEQ ID NO: 391013 - RNA, 24 nt, Human
caggguuucaccauguuggccagg

SEQ ID NO: 391014 - RNA, 22 nt, Human
caggugauccaccugccucggc

SEQ ID NO: 391015 - RNA, 21 nt, Human
caucaagacagaucugauucc

SEQ ID NO: 391016 - RNA, 24 nt, Human
cauguuggccaggcuggucucaaa

SEQ ID NO: 391017 - RNA, 22 nt, Human
ccaaagugcugggauuacaggc

SEQ ID NO: 391018 - RNA, 22 nt, Human
ccaaagugcugggauuacaggc

SEQ ID NO: 391019 - RNA, 22 nt, Human
ccaaagugcugggauuacaggc

SEQ ID NO: 391020 - RNA, 24 nt, Human
ccaaagugcugggauuacaggcgu

SEQ ID NO: 391021 - RNA, 20 nt, Human
ccagguguccugugccugcu

SEQ ID NO: 391022 - RNA, 22 nt, Human
ccaugagaucugggucucuguc

SEQ ID NO: 391023 - RNA, 24 nt, Human
ccccagguucaggcagaaguucug

SEQ ID NO: 391024 - RNA, 21 nt, Human
cccgaguagcugggauuacau

SEQ ID NO: 391025 - RNA, 24 nt, Human
cccggguucaagugauucuucccc

SEQ ID NO: 391026 - RNA, 23 nt, Human
ccgccucagccucccgaguagcu

SEQ ID NO: 391027 - RNA, 24 nt, Human
ccgccucccggguucaagugauuc

SEQ ID NO: 391028 - RNA, 20 nt, Human
ccggcagcccuuuuucuuug

SEQ ID NO: 391029 - RNA, 23 nt, Human
ccugggguugggaggcugagagc

SEQ ID NO: 391030 - RNA, 24 nt, Human
ccuguuacccagacuggagugcaa

SEQ ID NO: 391031 - RNA, 25 nt, Human
ccuuuuuuuuuuuuuuuuuuuuuga

SEQ ID NO: 391032 - RNA, 24 nt, Human
cgccucagccucccgaguagcugg

SEQ ID NO: 391033 - RNA, 23 nt, Human
cgcgcaccaccacguccggcuaa

SEQ ID NO: 391034 - RNA, 24 nt, Human
cgucaggugauccaccugccucgg

SEQ ID NO: 391035 - RNA, 20 nt, Human
cuaaaguaggaacuaaaggc

SEQ ID NO: 391036 - RNA, 22 nt, Human
cucacuggaaccuccgccuccc

SEQ ID NO: 391037 - RNA, 24 nt, Human
cucacuggaaccuccgccucccgg

SEQ ID NO: 391038 - RNA, 23 nt, Human
cucagccucccgaguagcuggga

SEQ ID NO: 391039 - RNA, 20 nt, Human
cucccggguucaagugauuc

SEQ ID NO: 391040 - RNA, 23 nt, Human
cucccuguuacccagacuggagu

SEQ ID NO: 391041 - RNA, 20 nt, Human
cugaauggggaggguguggc

SEQ ID NO: 391042 - RNA, 20 nt, Human
cugacgucaggugauccacc

SEQ ID NO: 391043 - RNA, 24 nt, Human
cugcggggggccugugggggcccu

SEQ ID NO: 391044 - RNA, 22 nt, Human
cuggagcuucccaggcgacuga

SEQ ID NO: 391045 - RNA, 25 nt, Human
cuggggacccggggcagccuagagc

SEQ ID NO: 391046 - RNA, 19 nt, Human
cugggucucugucauuuuc

SEQ ID NO: 391047 - RNA, 21 nt, Human
cugugaauggggaggggugca

SEQ ID NO: 391048 - RNA, 19 nt, Human
cugugccugcuaggccacc

SEQ ID NO: 391049 - RNA, 21 nt, Human
cugugccugcuaggccaccug

SEQ ID NO: 391050 - RNA, 21 nt, Human
cugugggggcccugggguugg

SEQ ID NO: 391051 - RNA, 21 nt, Human
cuugcaagcuccugagaucau

SEQ ID NO: 391052 - RNA, 25 nt, Human
cuugugaccaugcucacauguuguu

SEQ ID NO: 391053 - RNA, 18 nt, Human
gaacuguugacugcagcu

SEQ ID NO: 391054 - RNA, 19 nt, Human
gaaggaacggggcuggggc

SEQ ID NO: 391055 - RNA, 24 nt, Human
gacgucaggugauccaccugccuc

SEQ ID NO: 391056 - RNA, 22 nt, Human
gagcaguuugaaucgaugaccc

SEQ ID NO: 391057 - RNA, 20 nt, Human
gaguagcugggauuacaugc

SEQ ID NO: 391058 - RNA, 21 nt, Human
gauuacaggcgugacgaccgc

SEQ ID NO: 391059 - RNA, 21 nt, Human
gccagguguccugugccugcu

SEQ ID NO: 391060 - RNA, 19 nt, Human
gccugugggggcccugggg

SEQ ID NO: 391061 - RNA, 22 nt, Human
gcggggcagcagaugguaugag

SEQ ID NO: 391062 - RNA, 18 nt, Human
gcuggggacccggggcag

SEQ ID NO: 391063 - RNA, 21 nt, Human
gcuggggcagcggccuucucc

SEQ ID NO: 391064 - RNA, 22 nt, Human
gcugguuuuguuuuuguuuuua

SEQ ID NO: 391065 - RNA, 22 nt, Human
gcuuuuuuugagggguguguga

SEQ ID NO: 391066 - RNA, 19 nt, Human
ggaaacuggagcuucccag

SEQ ID NO: 391067 - RNA, 18 nt, Human
ggagauggguagagaagg

SEQ ID NO: 391068 - RNA, 18 nt, Human
ggcagcagaugguaugag

SEQ ID NO: 391069 - RNA, 20 nt, Human
ggccugugggggcccugggg

SEQ ID NO: 391070 - RNA, 18 nt, Human
gggagauggguagagaag

SEQ ID NO: 391071 - RNA, 18 nt, Human
gggaggggugcacacugg

SEQ ID NO: 391072 - RNA, 20 nt, Human
gggcuggggcagcggccuuc

SEQ ID NO: 391073 - RNA, 21 nt, Human
ggggaugggggagauggguag

SEQ ID NO: 391074 - RNA, 22 nt, Human
ggguuucaccauguuggccagg

SEQ ID NO: 391075 - RNA, 22 nt, Human
gguagugucagauuauuucugu

SEQ ID NO: 391076 - RNA, 19 nt, Human
gguuuuguuuuuguuuuua

SEQ ID NO: 391077 - RNA, 21 nt, Human
guaggaacuaaaggcuuuuuu

SEQ ID NO: 391078 - RNA, 26 nt, Human
guccugugccugcuaggccaccuggu

SEQ ID NO: 391079 - RNA, 24 nt, Human
gugauccaccugccucggccugcc

SEQ ID NO: 391080 - RNA, 24 nt, Human
gugauucuuccgccucagccuccc

SEQ ID NO: 391081 - RNA, 19 nt, Human
uaaauuaaagacuuguuuu

SEQ ID NO: 391082 - RNA, 20 nt, Human
uaaccuauuccauuccccuu

SEQ ID NO: 391083 - RNA, 22 nt, Human
uaauuuuuguauuuuuaguaga

SEQ ID NO: 391084 - RNA, 18 nt, Human
uacaaagaauagaucgac

SEQ ID NO: 391085 - RNA, 27 nt, Human
uacacccuccccuccccaauuugcccc

SEQ ID NO: 391086 - RNA, 22 nt, Human
uagauacaggguuucaccaugu

SEQ ID NO: 391087 - RNA, 21 nt, Human
uagggaggcagaggcuucugg

SEQ ID NO: 391088 - RNA, 22 nt, Human
uagggaggcagaggcuucuggc

SEQ ID NO: 391089 - RNA, 25 nt, Human
uaguaagcaguucuguggggaagcg

SEQ ID NO: 391090 - RNA, 24 nt, Human
uaguagauacaggguuucaccaug

SEQ ID NO: 391091 - RNA, 19 nt, Human
uaugagggugaguccuggg

SEQ ID NO: 391092 - RNA, 19 nt, Human
ucaagugauucuuccgccu

SEQ ID NO: 391093 - RNA, 24 nt, Human
ucacuggaaccuccgccucccggg

SEQ ID NO: 391094 - RNA, 25 nt, Human
ucacuggaaccuccgccucccgggu

SEQ ID NO: 391095 - RNA, 19 nt, Human
ucagauuauuucuguugcu

SEQ ID NO: 391096 - RNA, 20 nt, Human
ucagccucccgaguagcugg

SEQ ID NO: 391097 - RNA, 20 nt, Human
uccaugagaucugggucucu

SEQ ID NO: 391098 - RNA, 21 nt, Human
uccaugagaucugggucucug

SEQ ID NO: 391099 - RNA, 18 nt, Human
ucccgaguagcugggauu

SEQ ID NO: 391100 - RNA, 20 nt, Human
ucccggguucaagugauucu

SEQ ID NO: 391101 - RNA, 24 nt, Human
ucccggguucaagugauucuuccg

SEQ ID NO: 391102 - RNA, 27 nt, Human
ucccuguuacccagacuggagugcaau

SEQ ID NO: 391103 - RNA, 20 nt, Human
ucucaagcugcccagaagcu

SEQ ID NO: 391104 - RNA, 21 nt, Human
ucuccauuuccuuagaagagc

SEQ ID NO: 391105 - RNA, 20 nt, Human
ucucccuguuacccagacug

SEQ ID NO: 391106 - RNA, 22 nt, Human
ucucccuguuacccagacugga

SEQ ID NO: 391107 - RNA, 24 nt, Human
ucucccuguuacccagacuggagu

SEQ ID NO: 391108 - RNA, 23 nt, Human
ucuccggguaaguaccgaaugca

SEQ ID NO: 391109 - RNA, 25 nt, Human
ucugaaaucuucagggucuggaccc

SEQ ID NO: 391110 - RNA, 20 nt, Human
ucugcagccucugaaaucuu

SEQ ID NO: 391111 - RNA, 18 nt, Human
ugaaagacaggcucuggc

SEQ ID NO: 391112 - RNA, 21 nt, Human
ugaaagacaggcucuggcugu

SEQ ID NO: 391113 - RNA, 22 nt, Human
ugaauacauggacagcccuuuu

SEQ ID NO: 391114 - RNA, 24 nt, Human
ugacgucaggugauccaccugccu

SEQ ID NO: 391115 - RNA, 19 nt, Human
ugacugcagcugcuaguga

SEQ ID NO: 391116 - RNA, 27 nt, Human
ugagagcaguggagagaccuggggaug

SEQ ID NO: 391117 - RNA, 28 nt, Human
ugagagcaguggagagaccuggggaugu

SEQ ID NO: 391118 - RNA, 21 nt, Human
ugagaucauaguaaggggcuu

SEQ ID NO: 391119 - RNA, 20 nt, Human
ugcacuccggggccuucagg

SEQ ID NO: 391120 - RNA, 23 nt, Human
ugcaguguuacacuagaauaugu

SEQ ID NO: 391121 - RNA, 18 nt, Human
ugccauagaugaacugga

SEQ ID NO: 391122 - RNA, 18 nt, Human
ugccucggccugccaaag

SEQ ID NO: 391123 - RNA, 23 nt, Human
ugcuagugacaagccuggggcca

SEQ ID NO: 391124 - RNA, 18 nt, Human
ugcugcggggggccugug

SEQ ID NO: 391125 - RNA, 20 nt, Human
ugcugggauuacaggcguga

SEQ ID NO: 391126 - RNA, 25 nt, Human
ugcuuagguugauaggccuaaacuu

SEQ ID NO: 391127 - RNA, 20 nt, Human
uggaauugugaaaaaggcuc

SEQ ID NO: 391128 - RNA, 21 nt, Human
uggaauugugaaaaaggcucu

SEQ ID NO: 391129 - RNA, 21 nt, Human
uggccaggcuggucucaaacu

SEQ ID NO: 391130 - RNA, 19 nt, Human
uggcuggacugccauagau

SEQ ID NO: 391131 - RNA, 24 nt, Human
uggcuggacugccauagaugaacu

SEQ ID NO: 391132 - RNA, 18 nt, Human
ugggauuacaggcgugac

SEQ ID NO: 391133 - RNA, 19 nt, Human
ugggauuacaggcgugacg

SEQ ID NO: 391134 - RNA, 20 nt, Human
ugggauuacaggcgugacga

SEQ ID NO: 391135 - RNA, 21 nt, Human
ugggauuacaggcgugacgac

SEQ ID NO: 391136 - RNA, 22 nt, Human
ugggauuacaggcgugacgacc

SEQ ID NO: 391137 - RNA, 23 nt, Human
ugggauuacaggcgugacgaccg

SEQ ID NO: 391138 - RNA, 24 nt, Human
ugggauuacaugcgcgcaccacca

SEQ ID NO: 391139 - RNA, 18 nt, Human
uggggaaacuggagcuuc

SEQ ID NO: 391140 - RNA, 21 nt, Human
uggggagcuggggacccgggg

SEQ ID NO: 391141 - RNA, 21 nt, Human
uggggaggggugcacacugga

SEQ ID NO: 391142 - RNA, 24 nt, Human
uggggaggggugcacacuggauuu

SEQ ID NO: 391143 - RNA, 26 nt, Human
ugggggaugggggagauggguagaga

SEQ ID NO: 391144 - RNA, 19 nt, Human
ugugaauggggaggggugc

SEQ ID NO: 391145 - RNA, 21 nt, Human
uguggggaagcggggcagcag

SEQ ID NO: 391146 - RNA, 20 nt, Human
uguuacccagacuggagugc

SEQ ID NO: 391147 - RNA, 21 nt, Human
uuaggcugguggguuucucag

SEQ ID NO: 391148 - RNA, 24 nt, Human
uuaguagauacaggguuucaccau

SEQ ID NO: 391149 - RNA, 23 nt, Human
uucaagugauucuuccgccucag

SEQ ID NO: 391150 - RNA, 24 nt, Human
uucaagugauucuuccgccucagc

SEQ ID NO: 391151 - RNA, 22 nt, Human
uucuuaggcugguggguuucuc

SEQ ID NO: 391152 - RNA, 23 nt, Human
uugaacacuacaauaaucuuuuu

SEQ ID NO: 391153 - RNA, 24 nt, Human
uuucaccauguuggccaggcuggu

SEQ ID NO: 391154 - RNA, 23 nt, Human
uuuggauuuaggcaaaaaacaaa

SEQ ID NO: 391155 - RNA, 19 nt, Human
uuuuggguuugcccucuca

SEQ ID NO: 391156 - RNA, 24 nt, Human
uuuuuaguagauacaggguuucac

SEQ ID NO: 391157 - RNA, 18 nt, Human
uuuuuguauuuuuaguag

SEQ ID NO: 391158 - RNA, 21 nt, Human
uuuuuguauuuuuaguagaua

SEQ ID NO: 391159 - RNA, 18 nt, Human
uuuuuuuuuuuuuuuuug

SEQ ID NO: 391160 - RNA, 22 nt, Human
aaaaccuuucaaggugggggug

SEQ ID NO: 391161 - RNA, 21 nt, Human
aaacaaaaccauaaacaaagc

SEQ ID NO: 391162 - RNA, 23 nt, Human
aaacagcuguugauaaaaauuuu

SEQ ID NO: 391163 - RNA, 31 nt, Human
aaaucacccccucaaaguuuugcccccccag

SEQ ID NO: 391164 - RNA, 21 nt, Human
aagaaaaagacgaguccaagg

SEQ ID NO: 391165 - RNA, 25 nt, Human
aagaaaaagacgaguccaaggugaa

SEQ ID NO: 391166 - RNA, 19 nt, Human
aagaaaagccaaaaaaaau

SEQ ID NO: 391167 - RNA, 19 nt, Human
aagggggguaaaaaaaaaa

SEQ ID NO: 391168 - RNA, 30 nt, Human
aaugaaggaggaagaaaagccaaaaaaaaa

SEQ ID NO: 391169 - RNA, 19 nt, Human
acaguuauguauauauaua

SEQ ID NO: 391170 - RNA, 19 nt, Human
agagggaggaggggagggg

SEQ ID NO: 391171 - RNA, 25 nt, Human
aggaagaaaagccaaaaaaaaucac

SEQ ID NO: 391172 - RNA, 23 nt, Human
aggaggaagaaaagccaaaaaaa

SEQ ID NO: 391173 - RNA, 20 nt, Human
aggaggggaggggaaggggg

SEQ ID NO: 391174 - RNA, 19 nt, Human
agggaggaggggaggggaa

SEQ ID NO: 391175 - RNA, 21 nt, Human
agggaggaggggaggggaagg

SEQ ID NO: 391176 - RNA, 18 nt, Human
aggggaaggggggggaga

SEQ ID NO: 391177 - RNA, 22 nt, Human
aggggaggggaaggggggggag

SEQ ID NO: 391178 - RNA, 20 nt, Human
agggggguaaaaaaaaaaaa

SEQ ID NO: 391179 - RNA, 22 nt, Human
agguggggguggggggcaaauu

SEQ ID NO: 391180 - RNA, 20 nt, Human
aguuauguauauauauauau

SEQ ID NO: 391181 - RNA, 21 nt, Human
caaaguuuugcccccccaaaa

SEQ ID NO: 391182 - RNA, 31 nt, Human
caaauuaagaaaagugaaacaaaaccauaaa

SEQ ID NO: 391183 - RNA, 24 nt, Human
caauuuuggaagaaaaaugaagga

SEQ ID NO: 391184 - RNA, 23 nt, Human
ccaaaaaaaaucacccccucaaa

SEQ ID NO: 391185 - RNA, 19 nt, Human
ccaaucaugagguucuucu

SEQ ID NO: 391186 - RNA, 20 nt, Human
ccacauggcacaaaauuaag

SEQ ID NO: 391187 - RNA, 20 nt, Human
ccaccagcagcaauuuugga

SEQ ID NO: 391188 - RNA, 21 nt, Human
cccaccagcagcaauuuugga

SEQ ID NO: 391189 - RNA, 23 nt, Human
ccccaaaaaauauugcaagaaaa

SEQ ID NO: 391190 - RNA, 26 nt, Human
ccccaaaaaauauugcaagaaaaaga

SEQ ID NO: 391191 - RNA, 26 nt, Human
cccccccaaaaaauauugcaagaaaa

SEQ ID NO: 391192 - RNA, 23 nt, Human
cccccucaaaguuuugccccccc

SEQ ID NO: 391193 - RNA, 26 nt, Human
cccccucaaaguuuugcccccccaaa

SEQ ID NO: 391194 - RNA, 23 nt, Human
ccucaaaguuuugcccccccaaa

SEQ ID NO: 391195 - RNA, 21 nt, Human
ccuggggaggggaaaagaggg

SEQ ID NO: 391196 - RNA, 26 nt, Human
cuauccgaacuacauaacaguuaugu

SEQ ID NO: 391197 - RNA, 28 nt, Human
cuggggaggggaaaagagggaggagggg

SEQ ID NO: 391198 - RNA, 23 nt, Human
cuuucaagguggggguggggggc

SEQ ID NO: 391199 - RNA, 20 nt, Human
gaggggaaaagagggaggag

SEQ ID NO: 391200 - RNA, 20 nt, Human
ggaggaggggaggggaaggg

SEQ ID NO: 391201 - RNA, 22 nt, Human
ggaggaggggaggggaaggggg

SEQ ID NO: 391202 - RNA, 23 nt, Human
ggaggaggggaggggaagggggg

SEQ ID NO: 391203 - RNA, 19 nt, Human
ggaggggaaaagagggagg

SEQ ID NO: 391204 - RNA, 29 nt, Human
ggaggggaaaagagggaggaggggagggg

SEQ ID NO: 391205 - RNA, 23 nt, Human
gggaaaagagggaggaggggagg

SEQ ID NO: 391206 - RNA, 22 nt, Human
ggggguggggggcaaauuaaga

SEQ ID NO: 391207 - RNA, 23 nt, Human
gugaaacaaaaccauaaacaaag

SEQ ID NO: 391208 - RNA, 21 nt, Human
uaagaaaagugaaacaaaacc

SEQ ID NO: 391209 - RNA, 22 nt, Human
uaagaaaagugaaacaaaacca

SEQ ID NO: 391210 - RNA, 23 nt, Human
uauguauauauauauauuuuuua

SEQ ID NO: 391211 - RNA, 21 nt, Human
ucaagguggggguggggggca

SEQ ID NO: 391212 - RNA, 21 nt, Human
ucugcuugggggucuuuuucu

SEQ ID NO: 391213 - RNA, 23 nt, Human
ugaaacaaaaccauaaacaaagc

SEQ ID NO: 391214 - RNA, 24 nt, Human
ugaaacaaaaccauaaacaaagca

SEQ ID NO: 391215 - RNA, 26 nt, Human
ugcaagaaaaagacgaguccaagguu

SEQ ID NO: 391216 - RNA, 18 nt, Human
ugcacgcgugaguuuggg

SEQ ID NO: 391217 - RNA, 19 nt, Human
uggaagaaaaaugaaggag

SEQ ID NO: 391218 - RNA, 23 nt, Human
uggcacaaaauuaagagaguaca

SEQ ID NO: 391219 - RNA, 21 nt, Human
uggggaggggaaaagagggag

SEQ ID NO: 391220 - RNA, 27 nt, Human
uggggaggggaaaagagggaggagggg

SEQ ID NO: 391221 - RNA, 25 nt, Human
uuaaacgcuacaaagacuuuaaaca

SEQ ID NO: 391222 - RNA, 18 nt, Human
uuucugcuugggggucuu

SEQ ID NO: 391223 - RNA, 23 nt, Human
aaaaaacaaguaaaacacgccuu

SEQ ID NO: 391224 - RNA, 21 nt, Human
aaaaagccuagguggggggug

SEQ ID NO: 391225 - RNA, 25 nt, Human
aaaacaaaaaccaccgugaaaguaa

SEQ ID NO: 391226 - RNA, 23 nt, Human
aaacaaguaaaacacgccuuuaa

SEQ ID NO: 391227 - RNA, 21 nt, Human
aaacacacaucacacacucuu

SEQ ID NO: 391228 - RNA, 20 nt, Human
aaacccaaaaagccuaggug

SEQ ID NO: 391229 - RNA, 23 nt, Human
aaagcagaaaucaggaaguggag

SEQ ID NO: 391230 - RNA, 24 nt, Human
aaagcagaaaucaggaaguggaga

SEQ ID NO: 391231 - RNA, 26 nt, Human
aagaaaaaacaaaaaccaccgugaaa

SEQ ID NO: 391232 - RNA, 24 nt, Human
aagaagccgaaguagcugaaggca

SEQ ID NO: 391233 - RNA, 21 nt, Human
aagggccgccccuuccugccg

SEQ ID NO: 391234 - RNA, 21 nt, Human
aagucaccucugcccucucug

SEQ ID NO: 391235 - RNA, 19 nt, Human
accaccgugaaaguaaagu

SEQ ID NO: 391236 - RNA, 18 nt, Human
agcaauaagaaaaaacaa

SEQ ID NO: 391237 - RNA, 21 nt, Human
agcaauaagaaaaaacaaaaa

SEQ ID NO: 391238 - RNA, 21 nt, Human
agcacugucaagaaaucuaca

SEQ ID NO: 391239 - RNA, 20 nt, Human
agcagcagcagcagcaggaa

SEQ ID NO: 391240 - RNA, 23 nt, Human
agcagcagcaggaaugggggcag

SEQ ID NO: 391241 - RNA, 18 nt, Human
agcaggaagaagcuucug

SEQ ID NO: 391242 - RNA, 20 nt, Human
agcaggaaugggggcagcca

SEQ ID NO: 391243 - RNA, 19 nt, Human
agcccccggugggcaccag

SEQ ID NO: 391244 - RNA, 23 nt, Human
agccuccaauauugcacaacuuc

SEQ ID NO: 391245 - RNA, 22 nt, Human
agcugaaaccuggaacacaaac

SEQ ID NO: 391246 - RNA, 19 nt, Human
aggaaugggggcagccagc

SEQ ID NO: 391247 - RNA, 18 nt, Human
aggcaagggccuggcugc

SEQ ID NO: 391248 - RNA, 23 nt, Human
agggguuuuguguuggaaucagu

SEQ ID NO: 391249 - RNA, 18 nt, Human
aggugggggguggggagg

SEQ ID NO: 391250 - RNA, 19 nt, Human
aggugggggguggggaggg

SEQ ID NO: 391251 - RNA, 19 nt, Human
aucuacaaaacacacauca

SEQ ID NO: 391252 - RNA, 23 nt, Human
augguaaaaaaaaaaacuaugua

SEQ ID NO: 391253 - RNA, 21 nt, Human
auugcacaacuucacccaagu

SEQ ID NO: 391254 - RNA, 22 nt, Human
cacacacucuuaaaaaaacaag

SEQ ID NO: 391255 - RNA, 22 nt, Human
cacacaguagugaacaggaauc

SEQ ID NO: 391256 - RNA, 19 nt, Human
cacagcaauaagaaaaaac

SEQ ID NO: 391257 - RNA, 20 nt, Human
cacaucacacacucuuaaaa

SEQ ID NO: 391258 - RNA, 24 nt, Human
caccagcaggccagggaugcagcc

SEQ ID NO: 391259 - RNA, 23 nt, Human
caccucugcccucucugagguuc

SEQ ID NO: 391260 - RNA, 25 nt, Human
caccugggcuggguuugggggcggg

SEQ ID NO: 391261 - RNA, 24 nt, Human
cagcaauaagaaaaaacaaaaacc

SEQ ID NO: 391262 - RNA, 23 nt, Human
cagcagcagcagcagcagcagga

SEQ ID NO: 391263 - RNA, 21 nt, Human
cagcagcagcggaaacgggag

SEQ ID NO: 391264 - RNA, 19 nt, Human
cagcagcaggaaugggggc

SEQ ID NO: 391265 - RNA, 25 nt, Human
cagcagcaggaaugggggcagccag

SEQ ID NO: 391266 - RNA, 18 nt, Human
cagcagcggaaacgggag

SEQ ID NO: 391267 - RNA, 22 nt, Human
cagcagcggaaacgggaggugc

SEQ ID NO: 391268 - RNA, 25 nt, Human
cagcaggaagaagcuucugggcuuc

SEQ ID NO: 391269 - RNA, 22 nt, Human
cagccacagagcagcagcagca

SEQ ID NO: 391270 - RNA, 23 nt, Human
caugagccaugagccugucuccc

SEQ ID NO: 391271 - RNA, 24 nt, Human
ccacagcaauaagaaaaaacaaaa

SEQ ID NO: 391272 - RNA, 21 nt, Human
ccagcaggccagggaugcagc

SEQ ID NO: 391273 - RNA, 21 nt, Human
ccccagcacuuugaagucacc

SEQ ID NO: 391274 - RNA, 18 nt, Human
ccccuuccugccgccucc

SEQ ID NO: 391275 - RNA, 19 nt, Human
cccgccuuuccccuuucuc

SEQ ID NO: 391276 - RNA, 20 nt, Human
cccucaggacggagucccca

SEQ ID NO: 391277 - RNA, 21 nt, Human
cccucaggacggaguccccag

SEQ ID NO: 391278 - RNA, 19 nt, Human
ccuacagucagccuccaau

SEQ ID NO: 391279 - RNA, 21 nt, Human
ccuccaccccagugcugaggg

SEQ ID NO: 391280 - RNA, 26 nt, Human
ccuccggacagccuuucgcccagucu

SEQ ID NO: 391281 - RNA, 19 nt, Human
ccucuguuuaacacugcag

SEQ ID NO: 391282 - RNA, 24 nt, Human
cgagggaagcugaaaccuggaaca

SEQ ID NO: 391283 - RNA, 19 nt, Human
cggcccagggcaggcaccg

SEQ ID NO: 391284 - RNA, 22 nt, Human
cuaggugggggguggggagggg

SEQ ID NO: 391285 - RNA, 25 nt, Human
cucaugauaacauaagagauaaagg

SEQ ID NO: 391286 - RNA, 20 nt, Human
cucugcggcaaggcaccugg

SEQ ID NO: 391287 - RNA, 18 nt, Human
cugaaaccuggaacacaa

SEQ ID NO: 391288 - RNA, 23 nt, Human
cuuaaaaacacugaccuaaaccu

SEQ ID NO: 391289 - RNA, 23 nt, Human
gaacaaaacccaaaaagccuagg

SEQ ID NO: 391290 - RNA, 18 nt, Human
gaagucaccucugcccuc

SEQ ID NO: 391291 - RNA, 21 nt, Human
gaugcagccuccugcacuggg

SEQ ID NO: 391292 - RNA, 25 nt, Human
gcagcagcagcaggaaugggggcag

SEQ ID NO: 391293 - RNA, 24 nt, Human
gccagcuuccugcggcccggcaca

SEQ ID NO: 391294 - RNA, 18 nt, Human
gcccuggggccccuuccu

SEQ ID NO: 391295 - RNA, 21 nt, Human
gccucccuacccucaaguaac

SEQ ID NO: 391296 - RNA, 20 nt, Human
gcuucugggcuuccgcaagg

SEQ ID NO: 391297 - RNA, 18 nt, Human
ggacucagggagcagcau

SEQ ID NO: 391298 - RNA, 25 nt, Human
ggagagaauuccuagaaucuguaga

SEQ ID NO: 391299 - RNA, 18 nt, Human
ggcccggcacaggcacag

SEQ ID NO: 391300 - RNA, 21 nt, Human
gggcaggcaccgcccugagcc

SEQ ID NO: 391301 - RNA, 19 nt, Human
gggcggggacuggacucag

SEQ ID NO: 391302 - RNA, 20 nt, Human
gggcggggacuggacucagg

SEQ ID NO: 391303 - RNA, 20 nt, Human
ggggcggggacuggacucag

SEQ ID NO: 391304 - RNA, 23 nt, Human
ggggguggggaggggggucccgg

SEQ ID NO: 391305 - RNA, 22 nt, Human
gguuacuguguuuccaugaaaa

SEQ ID NO: 391306 - RNA, 20 nt, Human
gugcgcccagaccugccagg

SEQ ID NO: 391307 - RNA, 25 nt, Human
uaaaaauacccgccuuuccccuuuc

SEQ ID NO: 391308 - RNA, 23 nt, Human
uaaaacacgccuuuaacguccuc

SEQ ID NO: 391309 - RNA, 22 nt, Human
uaaaccucucacuuuaccuucc

SEQ ID NO: 391310 - RNA, 25 nt, Human
uaaagaaauggauaguaaucaacug

SEQ ID NO: 391311 - RNA, 20 nt, Human
uaacaacaggagcgagggaa

SEQ ID NO: 391312 - RNA, 23 nt, Human
uaacuugggucaaucuuuggcuu

SEQ ID NO: 391313 - RNA, 20 nt, Human
uaagaaaaaaaagucuccag

SEQ ID NO: 391314 - RNA, 22 nt, Human
uaagaaaaaaaagucuccaggu

SEQ ID NO: 391315 - RNA, 23 nt, Human
uaaguagugucuaccuaucuccc

SEQ ID NO: 391316 - RNA, 20 nt, Human
uaccucuguaaaaaugaagg

SEQ ID NO: 391317 - RNA, 24 nt, Human
uaccuuccuugaacaaaacccaaa

SEQ ID NO: 391318 - RNA, 21 nt, Human
uagcugaaggcaccugggcug

SEQ ID NO: 391319 - RNA, 18 nt, Human
uaggugggggguggggag

SEQ ID NO: 391320 - RNA, 19 nt, Human
uaggugggggguggggagg

SEQ ID NO: 391321 - RNA, 26 nt, Human
uaguaaucaaugcacgcgcacacaca

SEQ ID NO: 391322 - RNA, 28 nt, Human
uaugguaaaaaaaaaaacuauguacauc

SEQ ID NO: 391323 - RNA, 22 nt, Human
ucaacuaaaauaagaaaaaaaa

SEQ ID NO: 391324 - RNA, 28 nt, Human
ucaacuaaaauaagaaaaaaaagucucc

SEQ ID NO: 391325 - RNA, 21 nt, Human
ucacaguuuuccuuaaagcag

SEQ ID NO: 391326 - RNA, 27 nt, Human
uccccagcacuuugaagucaccucugc

SEQ ID NO: 391327 - RNA, 21 nt, Human
uccgcaagggcacgcaggggc

SEQ ID NO: 391328 - RNA, 22 nt, Human
uccuccgcagaguccuggaaaa

SEQ ID NO: 391329 - RNA, 19 nt, Human
ucucccagcugcccagccc

SEQ ID NO: 391330 - RNA, 22 nt, Human
ucucccaucccaaaaacuucuu

SEQ ID NO: 391331 - RNA, 19 nt, Human
ucucugcggcaaggcaccu

SEQ ID NO: 391332 - RNA, 24 nt, Human
ucuguauuacagcacugucaagaa

SEQ ID NO: 391333 - RNA, 18 nt, Human
ugaaaugcauaaacguca

SEQ ID NO: 391334 - RNA, 22 nt, Human
ugaacaaaacccaaaaagccua

SEQ ID NO: 391335 - RNA, 20 nt, Human
ugccagguaagggccgcccc

SEQ ID NO: 391336 - RNA, 19 nt, Human
ugccgucuguauuacagca

SEQ ID NO: 391337 - RNA, 19 nt, Human
ugcgcccagaccugccagg

SEQ ID NO: 391338 - RNA, 23 nt, Human
ugcggcaaggcaccuggucugcc

SEQ ID NO: 391339 - RNA, 22 nt, Human
uggauucucucccaucccaaaa

SEQ ID NO: 391340 - RNA, 21 nt, Human
uggggaggggggucccggccc

SEQ ID NO: 391341 - RNA, 23 nt, Human
ugggggcagccagcuuccugcgg

SEQ ID NO: 391342 - RNA, 19 nt, Human
ugggggguggggagggggg

SEQ ID NO: 391343 - RNA, 21 nt, Human
ugucaagaaaucuacaaaaca

SEQ ID NO: 391344 - RNA, 24 nt, Human
ugucaagaaaucuacaaaacacac

SEQ ID NO: 391345 - RNA, 20 nt, Human
uuaaaaaggggaagggguuu

SEQ ID NO: 391346 - RNA, 26 nt, Human
uuaaagcagaaaucaggaaguggaga

SEQ ID NO: 391347 - RNA, 24 nt, Human
uuccacagcaauaagaaaaaacaa

SEQ ID NO: 391348 - RNA, 21 nt, Human
uuccucaaugcacaccugugc

SEQ ID NO: 391349 - RNA, 25 nt, Human
uuccugccguuccuccgcagagucc

SEQ ID NO: 391350 - RNA, 23 nt, Human
uucucaaugccucuguuuaacac

SEQ ID NO: 391351 - RNA, 20 nt, Human
uugaacaaaacccaaaaagc

SEQ ID NO: 391352 - RNA, 19 nt, Human
uugaucuauggcauuagaa

SEQ ID NO: 391353 - RNA, 18 nt, Human
uugggggcggggacugga

SEQ ID NO: 391354 - RNA, 26 nt, Human
uuuaaaaauacccgccuuuccccuuu

SEQ ID NO: 391355 - RNA, 19 nt, Human
uuugaaacagccacagagc

SEQ ID NO: 391356 - RNA, 19 nt, Human
uuugaagucaccucugccc

SEQ ID NO: 391357 - RNA, 24 nt, Human
aaaaacacaacgaaaccuguaaga

SEQ ID NO: 391358 - RNA, 21 nt, Human
aaaaagaaacagauuaggcaa

SEQ ID NO: 391359 - RNA, 27 nt, Human
aaagaaacagauuaggcaaagaucaga

SEQ ID NO: 391360 - RNA, 18 nt, Human
aagaacuaggggaaaagg

SEQ ID NO: 391361 - RNA, 20 nt, Human
acaaaggggagaagcaggga

SEQ ID NO: 391362 - RNA, 19 nt, Human
acgaaaccuguaagaacuu

SEQ ID NO: 391363 - RNA, 21 nt, Human
acggaacagcaagagccccaa

SEQ ID NO: 391364 - RNA, 18 nt, Human
agaagaaacggaacagca

SEQ ID NO: 391365 - RNA, 19 nt, Human
agcagggagaagaaacgga

SEQ ID NO: 391366 - RNA, 23 nt, Human
gaaaaagaaacagauuaggcaaa

SEQ ID NO: 391367 - RNA, 19 nt, Human
gaaaaggaaaaagaaacag

SEQ ID NO: 391368 - RNA, 21 nt, Human
gaaacggaacagcaagagccc

SEQ ID NO: 391369 - RNA, 23 nt, Human
gaugacaaaggggagaagcaggg

SEQ ID NO: 391370 - RNA, 24 nt, Human
gaugacaaaggggagaagcaggga

SEQ ID NO: 391371 - RNA, 21 nt, Human
gggcaggaaagaaguuucuga

SEQ ID NO: 391372 - RNA, 20 nt, Human
uagauuaaaaaacacaacga

SEQ ID NO: 391373 - RNA, 27 nt, Human
ucagggcaggaaagaaguuucugagga

SEQ ID NO: 391374 - RNA, 19 nt, Human
ugcgccgccaccugcagcc

SEQ ID NO: 391375 - RNA, 20 nt, Human
aaaacaaacaccgcggcucc

SEQ ID NO: 391376 - RNA, 19 nt, Human
aaacaaacaccgcggcucc

SEQ ID NO: 391377 - RNA, 19 nt, Human
aaaccaaacaccaaguaga

SEQ ID NO: 391378 - RNA, 21 nt, Human
aagagaccaaaacagaggaaa

SEQ ID NO: 391379 - RNA, 22 nt, Human
aagcagagcagucaggagacaa

SEQ ID NO: 391380 - RNA, 24 nt, Human
aaggugauggaauauggggugagg

SEQ ID NO: 391381 - RNA, 18 nt, Human
aaggugcccuuucacccu

SEQ ID NO: 391382 - RNA, 21 nt, Human
aauauggggugaggggaggaa

SEQ ID NO: 391383 - RNA, 19 nt, Human
aaugcaggcaacacugaga

SEQ ID NO: 391384 - RNA, 19 nt, Human
acaaugcuaaaggaaagcc

SEQ ID NO: 391385 - RNA, 22 nt, Human
acagaggaaaacaguuuccaaa

SEQ ID NO: 391386 - RNA, 24 nt, Human
acaggcagugcccagugccgaggu

SEQ ID NO: 391387 - RNA, 20 nt, Human
accccacccccaaguccugg

SEQ ID NO: 391388 - RNA, 20 nt, Human
agaagagugagaugucuugc

SEQ ID NO: 391389 - RNA, 21 nt, Human
agaagcuuucacaaaacaaac

SEQ ID NO: 391390 - RNA, 22 nt, Human
agagaccaaaacagaggaaaac

SEQ ID NO: 391391 - RNA, 18 nt, Human
agagaggaugagggcugg

SEQ ID NO: 391392 - RNA, 24 nt, Human
agagcagucaggagacaagcauaa

SEQ ID NO: 391393 - RNA, 18 nt, Human
agaggccaagauaugcuu

SEQ ID NO: 391394 - RNA, 21 nt, Human
agcuuucacaaaacaaacacc

SEQ ID NO: 391395 - RNA, 18 nt, Human
aggguagagagagguucc

SEQ ID NO: 391396 - RNA, 24 nt, Human
agucuaggcacaaggugcccuuuc

SEQ ID NO: 391397 - RNA, 22 nt, Human
agugcugcccaucugaaaacgg

SEQ ID NO: 391398 - RNA, 23 nt, Human
auguugcccaaacuugggccaaa

SEQ ID NO: 391399 - RNA, 24 nt, Human
caagagcaagaagcaguucuuugu

SEQ ID NO: 391400 - RNA, 22 nt, Human
cacaaaacaaacaccgcggcuc

SEQ ID NO: 391401 - RNA, 22 nt, Human
cacaauaucauaaacugacagg

SEQ ID NO: 391402 - RNA, 22 nt, Human
cacugagacaugggagaggcca

SEQ ID NO: 391403 - RNA, 18 nt, Human
cacuggcuaccuuguuuu

SEQ ID NO: 391404 - RNA, 22 nt, Human
cagaagcuuucacaaaacaaag

SEQ ID NO: 391405 - RNA, 25 nt, Human
cagagcagacgcccaucccaaggac

SEQ ID NO: 391406 - RNA, 23 nt, Human
caggacugguggggacugcagga

SEQ ID NO: 391407 - RNA, 19 nt, Human
caggagacaagcauaaacc

SEQ ID NO: 391408 - RNA, 20 nt, Human
caggcuacagagcugucuga

SEQ ID NO: 391409 - RNA, 25 nt, Human
ccaaaacagaggaaaacaguuucca

SEQ ID NO: 391410 - RNA, 22 nt, Human
ccaggagcccuuuuaaguaucu

SEQ ID NO: 391411 - RNA, 20 nt, Human
ccaggcagcccuagucuagg

SEQ ID NO: 391412 - RNA, 21 nt, Human
cccacccccaaguccugggag

SEQ ID NO: 391413 - RNA, 20 nt, Human
cccaccggaccggaaacggg

SEQ ID NO: 391414 - RNA, 23 nt, Human
cccacggucaggacuggugggga

SEQ ID NO: 391415 - RNA, 23 nt, Human
cccauacagcuacugccaaaaug

SEQ ID NO: 391416 - RNA, 22 nt, Human
ccccaaguccugggagaaaugc

SEQ ID NO: 391417 - RNA, 21 nt, Human
ccccacccccaaguccuggga

SEQ ID NO: 391418 - RNA, 20 nt, Human
cccugagauggccagaaagc

SEQ ID NO: 391419 - RNA, 19 nt, Human
cccuuggccucaccuggga

SEQ ID NO: 391420 - RNA, 19 nt, Human
ccucuggauagucaaaccu

SEQ ID NO: 391421 - RNA, 21 nt, Human
ccugagauggccagaaagccc

SEQ ID NO: 391422 - RNA, 23 nt, Human
ccuguggucuuauccuggugaca

SEQ ID NO: 391423 - RNA, 20 nt, Human
cucuuccuucuuugcuuccc

SEQ ID NO: 391424 - RNA, 18 nt, Human
cugguggggacugcagga

SEQ ID NO: 391425 - RNA, 24 nt, Human
cugguggggacugcaggaugucag

SEQ ID NO: 391426 - RNA, 23 nt, Human
cuucccuguggucuuauccuggu

SEQ ID NO: 391427 - RNA, 22 nt, Human
cuuggccucaccugggacugac

SEQ ID NO: 391428 - RNA, 18 nt, Human
gaaaaaccaaacaccaag

SEQ ID NO: 391429 - RNA, 24 nt, Human
gaccagugugagguguuguagucc

SEQ ID NO: 391430 - RNA, 20 nt, Human
gagaccaaaacagaggaaaa

SEQ ID NO: 391431 - RNA, 22 nt, Human
gagcagaaaucugaggcuugaa

SEQ ID NO: 391432 - RNA, 22 nt, Human
gagcauuuggagggcccacggc

SEQ ID NO: 391433 - RNA, 19 nt, Human
gcacuggcuaccuuguuuu

SEQ ID NO: 391434 - RNA, 21 nt, Human
gcagagcagucaggagacaag

SEQ ID NO: 391435 - RNA, 19 nt, Human
gcagcccuagucuaggcac

SEQ ID NO: 391436 - RNA, 20 nt, Human
gcaggagcucuuuggggugu

SEQ ID NO: 391437 - RNA, 19 nt, Human
gcugcccaucugaaaacgg

SEQ ID NO: 391438 - RNA, 19 nt, Human
gcuguguuauaccugccuc

SEQ ID NO: 391439 - RNA, 20 nt, Human
gcuuguguaccccaggagcc

SEQ ID NO: 391440 - RNA, 20 nt, Human
ggaugagggcugguggcugg

SEQ ID NO: 391441 - RNA, 21 nt, Human
gggcaggagcucuuuggggug

SEQ ID NO: 391442 - RNA, 23 nt, Human
uaaaacgagcauuuggagggccc

SEQ ID NO: 391443 - RNA, 22 nt, Human
uaugcuugacagaaagggugau

SEQ ID NO: 391444 - RNA, 27 nt, Human
ucaagggccucuuguuggcuguucucc

SEQ ID NO: 391445 - RNA, 18 nt, Human
ucaccccacccccaaguc

SEQ ID NO: 391446 - RNA, 21 nt, Human
ucacucaggaccugcugggcu

SEQ ID NO: 391447 - RNA, 22 nt, Human
uccauggaguggggggaaggcu

SEQ ID NO: 391448 - RNA, 21 nt, Human
ucccagaccccugaggggccc

SEQ ID NO: 391449 - RNA, 21 nt, Human
ucccauacagcuacugccaaa

SEQ ID NO: 391450 - RNA, 24 nt, Human
ucccugagauggccagaaagcccu

SEQ ID NO: 391451 - RNA, 18 nt, Human
ucccuguggucuuauccu

SEQ ID NO: 391452 - RNA, 23 nt, Human
ucccuguggucuuauccugguga

SEQ ID NO: 391453 - RNA, 22 nt, Human
uccgcugaagauaaaauggggc

SEQ ID NO: 391454 - RNA, 20 nt, Human
ugaagauaaaauggggcugg

SEQ ID NO: 391455 - RNA, 18 nt, Human
ugagagggcaggagcucu

SEQ ID NO: 391456 - RNA, 21 nt, Human
ugagagggcaggagcucuucc

SEQ ID NO: 391457 - RNA, 24 nt, Human
ugagaugucuugcacuggcuaccu

SEQ ID NO: 391458 - RNA, 21 nt, Human
ugaggaaggcagaagugaauu

SEQ ID NO: 391459 - RNA, 23 nt, Human
ugauggaauauggggugagggga

SEQ ID NO: 391460 - RNA, 23 nt, Human
ugcaauacuugaaggauacccca

SEQ ID NO: 391461 - RNA, 21 nt, Human
ugcagcaucauagccuguggg

SEQ ID NO: 391462 - RNA, 22 nt, Human
ugcaggaugucagaagagugag

SEQ ID NO: 391463 - RNA, 22 nt, Human
ugcccaaacuugggccaaaaau

SEQ ID NO: 391464 - RNA, 20 nt, Human
ugcccaagagaccaaaacag

SEQ ID NO: 391465 - RNA, 22 nt, Human
ugcuauaaaacgagcauuugga

SEQ ID NO: 391466 - RNA, 23 nt, Human
uggaacaaugcuaaaggaaagca

SEQ ID NO: 391467 - RNA, 23 nt, Human
ugggaaaaaccaaacaccaagua

SEQ ID NO: 391468 - RNA, 22 nt, Human
ugggacugaccaggcagcccua

SEQ ID NO: 391469 - RNA, 18 nt, Human
ugggagaggccaagauau

SEQ ID NO: 391470 - RNA, 25 nt, Human
ugggagaggccaagauaugcuugac

SEQ ID NO: 391471 - RNA, 20 nt, Human
ugggccaaauguugcccaaa

SEQ ID NO: 391472 - RNA, 23 nt, Human
uggggugaggggaggaaccuggu

SEQ ID NO: 391473 - RNA, 19 nt, Human
uggguagguuugaguuuua

SEQ ID NO: 391474 - RNA, 22 nt, Human
ugguggcuggggguagacccag

SEQ ID NO: 391475 - RNA, 22 nt, Human
uguuguaguccagucucccggg

SEQ ID NO: 391476 - RNA, 25 nt, Human
uuacaacgucacacucccagacccc

SEQ ID NO: 391477 - RNA, 18 nt, Human
uucacaaaacaaacaccg

SEQ ID NO: 391478 - RNA, 20 nt, Human
uuccucuuacucuuuuucuc

SEQ ID NO: 391479 - RNA, 18 nt, Human
uucucccauacagcuacu

SEQ ID NO: 391480 - RNA, 26 nt, Human
uuuaagcagagcagucaggagacaag

SEQ ID NO: 391481 - RNA, 18 nt, Human
uuucacaaaacaaacacc

SEQ ID NO: 391482 - RNA, 23 nt, Human
uuuccucuuacucuuuuucuccc

SEQ ID NO: 391483 - RNA, 18 nt, Human
uuuguuguuguuccugcu

SEQ ID NO: 391484 - RNA, 20 nt, Human
aagccgcggcaggcccuccg

SEQ ID NO: 391485 - RNA, 22 nt, Human
acucacuugacccucagguccu

SEQ ID NO: 391486 - RNA, 19 nt, Human
aggaccagaagaggagaac

SEQ ID NO: 391487 - RNA, 18 nt, Human
aggaggaggcggggccag

SEQ ID NO: 391488 - RNA, 29 nt, Human
aggccccccgggcaggacccugcccagga

SEQ ID NO: 391489 - RNA, 18 nt, Human
agggcuagggcuugggac

SEQ ID NO: 391490 - RNA, 24 nt, Human
caccaggccccccgggcaggaccc

SEQ ID NO: 391491 - RNA, 20 nt, Human
cacggggcugggcagggcuu

SEQ ID NO: 391492 - RNA, 18 nt, Human
cagaacugcacucccgcc

SEQ ID NO: 391493 - RNA, 23 nt, Human
cagcggcugcuccagcucccuga

SEQ ID NO: 391494 - RNA, 23 nt, Human
caggaccagaagaggagaacccc

SEQ ID NO: 391495 - RNA, 18 nt, Human
caggaccugcagugggcc

SEQ ID NO: 391496 - RNA, 25 nt, Human
ccaccaggccccccgggcaggaccc

SEQ ID NO: 391497 - RNA, 19 nt, Human
ccacggggcugggcagggc

SEQ ID NO: 391498 - RNA, 18 nt, Human
ccagcccagcgacuggcc

SEQ ID NO: 391499 - RNA, 21 nt, Human
cccccaccaggccccccgggc

SEQ ID NO: 391500 - RNA, 22 nt, Human
ccccccgggcaggacccugccc

SEQ ID NO: 391501 - RNA, 20 nt, Human
cccccgggcaggacccugcc

SEQ ID NO: 391502 - RNA, 21 nt, Human
ccccgcuccgcgcacgccggg

SEQ ID NO: 391503 - RNA, 20 nt, Human
ccccgggggccuggagcagg

SEQ ID NO: 391504 - RNA, 19 nt, Human
cccucagguccuggugcgg

SEQ ID NO: 391505 - RNA, 21 nt, Human
ccuagggcuagggcuugggac

SEQ ID NO: 391506 - RNA, 21 nt, Human
ccuccugcccugccuccccca

SEQ ID NO: 391507 - RNA, 27 nt, Human
ccuccugcccugccucccccaccaggc

SEQ ID NO: 391508 - RNA, 25 nt, Human
ccugccacaaagcuggcggccacgg

SEQ ID NO: 391509 - RNA, 18 nt, Human
ccuggcccagcccagcga

SEQ ID NO: 391510 - RNA, 23 nt, Human
ccuggcccagcccagcgacuggc

SEQ ID NO: 391511 - RNA, 26 nt, Human
cgccgcgccuccgcugcuggcugccc

SEQ ID NO: 391512 - RNA, 19 nt, Human
cgggcaggaccagaagagg

SEQ ID NO: 391513 - RNA, 22 nt, Human
cgggggccuggagcaggggcgu

SEQ ID NO: 391514 - RNA, 22 nt, Human
cuccugccucagaggucaggaa

SEQ ID NO: 391515 - RNA, 24 nt, Human
cucuccugccucagaggucaggaa

SEQ ID NO: 391516 - RNA, 22 nt, Human
cugcccugccucccccaccagg

SEQ ID NO: 391517 - RNA, 18 nt, Human
gacccugcccagcacggg

SEQ ID NO: 391518 - RNA, 23 nt, Human
gaggcggggccagccuggggaga

SEQ ID NO: 391519 - RNA, 24 nt, Human
gaggcggggccagccuggggagag

SEQ ID NO: 391520 - RNA, 20 nt, Human
gcacacuggcccugcccaca

SEQ ID NO: 391521 - RNA, 27 nt, Human
gcgccgcgccuccgcugcuggcugccc

SEQ ID NO: 391522 - RNA, 24 nt, Human
gcgccuccgcugcuggcugccccg

SEQ ID NO: 391523 - RNA, 20 nt, Human
gcgcgccgcgccuccgcugc

SEQ ID NO: 391524 - RNA, 30 nt, Human
gcuccaaccuccugcccugccucccccacu

SEQ ID NO: 391525 - RNA, 20 nt, Human
ggcagggcugcuccaaccuc

SEQ ID NO: 391526 - RNA, 18 nt, Human
ggcggaccgucuuuauuc

SEQ ID NO: 391527 - RNA, 19 nt, Human
gggcggaccgucuuuauuc

SEQ ID NO: 391528 - RNA, 22 nt, Human
gggcuagggcuugggacugugg

SEQ ID NO: 391529 - RNA, 23 nt, Human
gucaucccucacucacuugaccc

SEQ ID NO: 391530 - RNA, 22 nt, Human
uagggcuagggcuugggacugu

SEQ ID NO: 391531 - RNA, 20 nt, Human
ucagaggucaggaaggaggu

SEQ ID NO: 391532 - RNA, 18 nt, Human
uccacggcaccugccaca

SEQ ID NO: 391533 - RNA, 21 nt, Human
ucccgccagcccgggacuagg

SEQ ID NO: 391534 - RNA, 19 nt, Human
uccugcccugccuccccca

SEQ ID NO: 391535 - RNA, 25 nt, Human
ugccacaaagcuggcggccacgggg

SEQ ID NO: 391536 - RNA, 18 nt, Human
ugcccugccucccccacc

SEQ ID NO: 391537 - RNA, 18 nt, Human
uggccagaaagggcauga

SEQ ID NO: 391538 - RNA, 18 nt, Human
uggcggccacggggcugg

SEQ ID NO: 391539 - RNA, 19 nt, Human
uggcggccacggggcuggg

SEQ ID NO: 391540 - RNA, 23 nt, Human
uggggagagcacuggacaaggag

SEQ ID NO: 391541 - RNA, 22 nt, Human
uucacugccagggcggaccguc

SEQ ID NO: 391542 - RNA, 23 nt, Human
uucugggcuggccagaaagggca

SEQ ID NO: 391543 - RNA, 27 nt, Human
uuuuuuuuuuuuuuuucacugccaggg

SEQ ID NO: 391544 - RNA, 20 nt, Human
uuuuuuuuuuuuuuuuucac

SEQ ID NO: 391545 - RNA, 24 nt, Human
uuuuuuuuuuuuuuuuuuucacug

SEQ ID NO: 391546 - RNA, 23 nt, Human
aaacgaaggugaacagaagggac

SEQ ID NO: 391547 - RNA, 24 nt, Human
aagaagcucugccaaauggaaucc

SEQ ID NO: 391548 - RNA, 21 nt, Human
aagucaaggauagaagcugau

SEQ ID NO: 391549 - RNA, 21 nt, Human
agaagacacaggcauaguaaa

SEQ ID NO: 391550 - RNA, 22 nt, Human
aggcguagcaccaugugagacc

SEQ ID NO: 391551 - RNA, 18 nt, Human
agggacagaagggacaga

SEQ ID NO: 391552 - RNA, 21 nt, Human
auucucacuucucuccaccag

SEQ ID NO: 391553 - RNA, 21 nt, Human
caagccaaggguucugagggc

SEQ ID NO: 391554 - RNA, 21 nt, Human
cagaaagaggcugaagaccau

SEQ ID NO: 391555 - RNA, 24 nt, Human
cagcugagaaaagccgaggcacag

SEQ ID NO: 391556 - RNA, 21 nt, Human
ccaaggguucugagggcucau

SEQ ID NO: 391557 - RNA, 21 nt, Human
ccagaggcuucugaguccuga

SEQ ID NO: 391558 - RNA, 24 nt, Human
ccucccagaccccagcguggugga

SEQ ID NO: 391559 - RNA, 18 nt, Human
ccucuaucccuuuuccac

SEQ ID NO: 391560 - RNA, 22 nt, Human
ccugcaggcccuggguagagcu

SEQ ID NO: 391561 - RNA, 19 nt, Human
ccuggggugaaaggagaca

SEQ ID NO: 391562 - RNA, 23 nt, Human
cuuucaggccuuuccuugagcug

SEQ ID NO: 391563 - RNA, 21 nt, Human
gaacagaaacacaacaucccc

SEQ ID NO: 391564 - RNA, 19 nt, Human
gcaggcguguuuacaugca

SEQ ID NO: 391565 - RNA, 21 nt, Human
gccaggcucaggcccuggggu

SEQ ID NO: 391566 - RNA, 22 nt, Human
ggaaacccaaccucuaucccuu

SEQ ID NO: 391567 - RNA, 18 nt, Human
ggauguggaccacugacc

SEQ ID NO: 391568 - RNA, 20 nt, Human
ggcgagcagagugggcuaca

SEQ ID NO: 391569 - RNA, 22 nt, Human
guccauuccucccagaccccag

SEQ ID NO: 391570 - RNA, 21 nt, Human
gugggcaggcagcguuugcag

SEQ ID NO: 391571 - RNA, 21 nt, Human
uaacacccaggugcgugacca

SEQ ID NO: 391572 - RNA, 19 nt, Human
uaagaagcaagagccagag

SEQ ID NO: 391573 - RNA, 22 nt, Human
uacaaaaaguauucaugccaca

SEQ ID NO: 391574 - RNA, 20 nt, Human
uagcugggcaccuggaagaa

SEQ ID NO: 391575 - RNA, 25 nt, Human
ucaaggauagaagcugauugcgcac

SEQ ID NO: 391576 - RNA, 23 nt, Human
ucaggcccuggggugaaaggaga

SEQ ID NO: 391577 - RNA, 22 nt, Human
uccaugaauauuuuuuauuugg

SEQ ID NO: 391578 - RNA, 21 nt, Human
uccccauuguaggcuggccag

SEQ ID NO: 391579 - RNA, 22 nt, Human
uccugagcacagauaagggcuc

SEQ ID NO: 391580 - RNA, 23 nt, Human
uccuugagcugcacgugaaccug

SEQ ID NO: 391581 - RNA, 22 nt, Human
ucuguccauuccucccagaccc

SEQ ID NO: 391582 - RNA, 19 nt, Human
ugaaauacuagugcuguga

SEQ ID NO: 391583 - RNA, 23 nt, Human
ugaacagaaacacaacaucccca

SEQ ID NO: 391584 - RNA, 24 nt, Human
ugagcacagauaagggcuccuuuc

SEQ ID NO: 391585 - RNA, 18 nt, Human
ugagggcucauccacagg

SEQ ID NO: 391586 - RNA, 20 nt, Human
ugagggcucauccacagggc

SEQ ID NO: 391587 - RNA, 19 nt, Human
ugaguccugagcacagaua

SEQ ID NO: 391588 - RNA, 23 nt, Human
ugcaacaugaaauacuagugcug

SEQ ID NO: 391589 - RNA, 20 nt, Human
ugcugugagggacagaaggg

SEQ ID NO: 391590 - RNA, 20 nt, Human
ugcugugagggacagaaggg

SEQ ID NO: 391591 - RNA, 22 nt, Human
uggcaggagugguagugcuaag

SEQ ID NO: 391592 - RNA, 22 nt, Human
uggccaggcucaggcccugggg

SEQ ID NO: 391593 - RNA, 21 nt, Human
ugggcaggcagcguuugcagg

SEQ ID NO: 391594 - RNA, 22 nt, Human
uggguagagcucauccucuguc

SEQ ID NO: 391595 - RNA, 18 nt, Human
ugucuguccauuccuccc

SEQ ID NO: 391596 - RNA, 21 nt, Human
ugugagaccacugguccaggg

SEQ ID NO: 391597 - RNA, 22 nt, Human
uguggaccacugacccagaggc

SEQ ID NO: 391598 - RNA, 24 nt, Human
ugugggcaggcagcguuugcaggc

SEQ ID NO: 391599 - RNA, 21 nt, Human
uugcaggcguguuuacaugca

SEQ ID NO: 391600 - RNA, 23 nt, Human
uuugcaggcguguuuacaugcag

SEQ ID NO: 391601 - RNA, 21 nt, Human
aaacagaagagcagguacaug

SEQ ID NO: 391602 - RNA, 25 nt, Human
aaacccaucccuccaugcuccccac

SEQ ID NO: 391603 - RNA, 21 nt, Human
aacccaucccuccaugcuccc

SEQ ID NO: 391604 - RNA, 23 nt, Human
aacccaucccuccaugcucccca

SEQ ID NO: 391605 - RNA, 25 nt, Human
aacccaucccuccaugcuccccacu

SEQ ID NO: 391606 - RNA, 24 nt, Human
aagcacaggccaaacccaucccuc

SEQ ID NO: 391607 - RNA, 18 nt, Human
aagcagaagcacaggcca

SEQ ID NO: 391608 - RNA, 19 nt, Human
aagcagaagcacaggccaa

SEQ ID NO: 391609 - RNA, 24 nt, Human
aagcagaagcacaggccaaaccca

SEQ ID NO: 391610 - RNA, 22 nt, Human
acagacagggccccagugaagc

SEQ ID NO: 391611 - RNA, 20 nt, Human
agaaagaacccacagcuugc

SEQ ID NO: 391612 - RNA, 19 nt, Human
agaccugagugggacagga

SEQ ID NO: 391613 - RNA, 24 nt, Human
agcaugaggggcacagaggagaaa

SEQ ID NO: 391614 - RNA, 24 nt, Human
aggaaaacgagagaaaccgguacc

SEQ ID NO: 391615 - RNA, 23 nt, Human
aggagaaagaacccacagcuugc

SEQ ID NO: 391616 - RNA, 18 nt, Human
aggggauuugggaguggc

SEQ ID NO: 391617 - RNA, 21 nt, Human
aucuagaagaucagcaugagg

SEQ ID NO: 391618 - RNA, 21 nt, Human
cacaggccaaacccaucccuc

SEQ ID NO: 391619 - RNA, 18 nt, Human
cacugagggggcaugagg

SEQ ID NO: 391620 - RNA, 23 nt, Human
cacuggaucuauuucgggccaaa

SEQ ID NO: 391621 - RNA, 21 nt, Human
cagaugggcucacugaggcuc

SEQ ID NO: 391622 - RNA, 22 nt, Human
cagcacacagacagggccccag

SEQ ID NO: 391623 - RNA, 18 nt, Human
cagcaugaggggcacaga

SEQ ID NO: 391624 - RNA, 21 nt, Human
cauccaaguccacauccagac

SEQ ID NO: 391625 - RNA, 24 nt, Human
cauccagacugggcucccucuaau

SEQ ID NO: 391626 - RNA, 21 nt, Human
caucccuccaugcuccccacu

SEQ ID NO: 391627 - RNA, 22 nt, Human
caucccuuccgugagcugaagg

SEQ ID NO: 391628 - RNA, 22 nt, Human
ccauccaggccagcugcccuaa

SEQ ID NO: 391629 - RNA, 22 nt, Human
cccacagggcauccaaguccac

SEQ ID NO: 391630 - RNA, 24 nt, Human
cccucuaaugccaucucuuaaacc

SEQ ID NO: 391631 - RNA, 20 nt, Human
ccuccaugcuccccacugug

SEQ ID NO: 391632 - RNA, 18 nt, Human
cuaaggaaaacgagagaa

SEQ ID NO: 391633 - RNA, 19 nt, Human
cucagcacuggaucuauuu

SEQ ID NO: 391634 - RNA, 25 nt, Human
cuggcugggcacacauccugguggg

SEQ ID NO: 391635 - RNA, 24 nt, Human
gauaacuaaggaaaacgagagaaa

SEQ ID NO: 391636 - RNA, 20 nt, Human
gcacagaggagaaagaaccc

SEQ ID NO: 391637 - RNA, 22 nt, Human
gcagaacugauacccacagggc

SEQ ID NO: 391638 - RNA, 18 nt, Human
gcagaagcacaggccaaa

SEQ ID NO: 391639 - RNA, 23 nt, Human
gcagaagcacaggccaaacccag

SEQ ID NO: 391640 - RNA, 21 nt, Human
gcagccagcaggggaaacugg

SEQ ID NO: 391641 - RNA, 21 nt, Human
gcuaugcugggugugcaaaca

SEQ ID NO: 391642 - RNA, 21 nt, Human
ggaguggcaucuagaagauca

SEQ ID NO: 391643 - RNA, 21 nt, Human
ggcacagaggagaaagaaccc

SEQ ID NO: 391644 - RNA, 24 nt, Human
ggcacagaggagaaagaacccaca

SEQ ID NO: 391645 - RNA, 20 nt, Human
ggccagaagaggcagggcca

SEQ ID NO: 391646 - RNA, 27 nt, Human
gggcacagaggagaaagaacccacagc

SEQ ID NO: 391647 - RNA, 25 nt, Human
gggcucacugaggcuccgguguaca

SEQ ID NO: 391648 - RNA, 20 nt, Human
ggugcuggaggccuggcugg

SEQ ID NO: 391649 - RNA, 18 nt, Human
guuuaauuaaccaguacu

SEQ ID NO: 391650 - RNA, 19 nt, Human
uaaaccgaaccacugccug

SEQ ID NO: 391651 - RNA, 21 nt, Human
uacagaccugagugggacagg

SEQ ID NO: 391652 - RNA, 19 nt, Human
ucacugagggggcaugagg

SEQ ID NO: 391653 - RNA, 22 nt, Human
ucagcagaacugauacccacag

SEQ ID NO: 391654 - RNA, 19 nt, Human
uccaaguccacauccagac

SEQ ID NO: 391655 - RNA, 22 nt, Human
uccacauccagacugggcuccc

SEQ ID NO: 391656 - RNA, 24 nt, Human
ucccuccaugcuccccacugugca

SEQ ID NO: 391657 - RNA, 19 nt, Human
uccucacugagggggcaug

SEQ ID NO: 391658 - RNA, 19 nt, Human
ucuagaagaucagcaugaa

SEQ ID NO: 391659 - RNA, 23 nt, Human
ugaauaagcagaagcacaggcca

SEQ ID NO: 391660 - RNA, 19 nt, Human
uggcucagcacacagacag

SEQ ID NO: 391661 - RNA, 23 nt, Human
ugugcaaacagaagagcagguac

SEQ ID NO: 391662 - RNA, 22 nt, Human
ugugcagaugggcucacugagg

SEQ ID NO: 391663 - RNA, 22 nt, Human
uugacagugagcaauaaaguuu

SEQ ID NO: 391664 - RNA, 19 nt, Human
uugggaguggcaucuagaa

SEQ ID NO: 391665 - RNA, 22 nt, Human
uuuuuuuuuuuuuuuuugacag

SEQ ID NO: 391666 - RNA, 27 nt, Human
uuuuuuuuuuuuuuuuuuuuuuugggg

SEQ ID NO: 391667 - RNA, 21 nt, Human
aacauggaacuccacugcaaa

SEQ ID NO: 391668 - RNA, 19 nt, Human
aagaaggcauaaggacaau

SEQ ID NO: 391669 - RNA, 20 nt, Human
aaugaagaagaaggcauaag

SEQ ID NO: 391670 - RNA, 26 nt, Human
caauaaacauggaacuccacugcaaa

SEQ ID NO: 391671 - RNA, 18 nt, Human
guagagagagaaggggag

SEQ ID NO: 391672 - RNA, 19 nt, Human
aaccagcucggagcugcca

SEQ ID NO: 391673 - RNA, 24 nt, Human
aagacuccuggggcuggcccugcu

SEQ ID NO: 391674 - RNA, 25 nt, Human
agaaagacuucccagggaagaugcu

SEQ ID NO: 391675 - RNA, 21 nt, Human
agaggcaggcacugagcagcc

SEQ ID NO: 391676 - RNA, 22 nt, Human
agaggcaggcacugagcagccc

SEQ ID NO: 391677 - RNA, 23 nt, Human
agcagcaggugggugagcaguga

SEQ ID NO: 391678 - RNA, 18 nt, Human
aggaggccuucuugcagg

SEQ ID NO: 391679 - RNA, 19 nt, Human
aggcacugagcagcccugc

SEQ ID NO: 391680 - RNA, 22 nt, Human
aggcugcugggaugagggagcc

SEQ ID NO: 391681 - RNA, 18 nt, Human
agggaagaugcuuggcuc

SEQ ID NO: 391682 - RNA, 21 nt, Human
agguggcagcagggucaggcg

SEQ ID NO: 391683 - RNA, 22 nt, Human
agugagcaagaaucgggaaaga

SEQ ID NO: 391684 - RNA, 25 nt, Human
caaggugggccaugguauagggccc

SEQ ID NO: 391685 - RNA, 23 nt, Human
cagggccaggcuggccagacuug

SEQ ID NO: 391686 - RNA, 20 nt, Human
cagggucaggcgaguuccug

SEQ ID NO: 391687 - RNA, 22 nt, Human
cccagcuacugugccacaacca

SEQ ID NO: 391688 - RNA, 18 nt, Human
cccucgaagggcuugugg

SEQ ID NO: 391689 - RNA, 18 nt, Human
cccugcugaggcucuccu

SEQ ID NO: 391690 - RNA, 19 nt, Human
cccugcugaggucucccca

SEQ ID NO: 391691 - RNA, 19 nt, Human
cccugcugaggucucccca

SEQ ID NO: 391692 - RNA, 19 nt, Human
ccugaccacagcuggucac

SEQ ID NO: 391693 - RNA, 23 nt, Human
ccugcaaugcacggcuaagucug

SEQ ID NO: 391694 - RNA, 20 nt, Human
ccugcagggccaggcuggcc

SEQ ID NO: 391695 - RNA, 21 nt, Human
ccugcggccugcggacuccgu

SEQ ID NO: 391696 - RNA, 19 nt, Human
cugcggccugcggacuccg

SEQ ID NO: 391697 - RNA, 18 nt, Human
cuugcaggaccccaacca

SEQ ID NO: 391698 - RNA, 19 nt, Human
cuuggcucucugcuccaag

SEQ ID NO: 391699 - RNA, 20 nt, Human
gagcagugagcaagaaucgg

SEQ ID NO: 391700 - RNA, 22 nt, Human
gaggaggccuucuugcaggacc

SEQ ID NO: 391701 - RNA, 20 nt, Human
gagguggcagcagggucagg

SEQ ID NO: 391702 - RNA, 21 nt, Human
gcagcagcaggugggugagca

SEQ ID NO: 391703 - RNA, 19 nt, Human
gcccccgggcugaggaggc

SEQ ID NO: 391704 - RNA, 19 nt, Human
gccuagggagugugcgagg

SEQ ID NO: 391705 - RNA, 18 nt, Human
gcuuggcucucugcucca

SEQ ID NO: 391706 - RNA, 18 nt, Human
ggcuggcccugcugaggc

SEQ ID NO: 391707 - RNA, 23 nt, Human
ggcuggggugaucccagggggca

SEQ ID NO: 391708 - RNA, 24 nt, Human
gggucagggccauagcccccgggc

SEQ ID NO: 391709 - RNA, 18 nt, Human
ucacugauuaauccucca

SEQ ID NO: 391710 - RNA, 21 nt, Human
ucacugauuaauccuccaugc

SEQ ID NO: 391711 - RNA, 20 nt, Human
ucagggccauagcccccggg

SEQ ID NO: 391712 - RNA, 23 nt, Human
uccaugccugcaaugcacggcua

SEQ ID NO: 391713 - RNA, 22 nt, Human
ucccagggaagaugcuuggcuc

SEQ ID NO: 391714 - RNA, 18 nt, Human
uccgagagacgcagcuuc

SEQ ID NO: 391715 - RNA, 21 nt, Human
uccugaccacagcuggucacc

SEQ ID NO: 391716 - RNA, 23 nt, Human
ugaccacagcuggucaccgcucc

SEQ ID NO: 391717 - RNA, 19 nt, Human
uggccagaaagacuuccca

SEQ ID NO: 391718 - RNA, 20 nt, Human
uggccagaaagacuucccag

SEQ ID NO: 391719 - RNA, 21 nt, Human
uggccagaaagacuucccagg

SEQ ID NO: 391720 - RNA, 22 nt, Human
uggcccugcugaggcucuccug

SEQ ID NO: 391721 - RNA, 20 nt, Human
uggggugaucccagggggca

SEQ ID NO: 391722 - RNA, 22 nt, Human
uggggugaucccagggggcauu

SEQ ID NO: 391723 - RNA, 23 nt, Human
aaaaaaaaacaaaaaacacaacc

SEQ ID NO: 391724 - RNA, 25 nt, Human
aaaaaaaacaaaaaacacaaccaaa

SEQ ID NO: 391725 - RNA, 26 nt, Human
aaaaaaaacaaaaaacacaaccaaaa

SEQ ID NO: 391726 - RNA, 22 nt, Human
aaaaaacaaaaaacacaaccaa

SEQ ID NO: 391727 - RNA, 20 nt, Human
aaaaaacacaaccaaaagaa

SEQ ID NO: 391728 - RNA, 18 nt, Human
aaaacaaaaaacacaacc

SEQ ID NO: 391729 - RNA, 25 nt, Human
aaaacaaaaaacacaaccaaaagaa

SEQ ID NO: 391730 - RNA, 21 nt, Human
aaaacacaaccaaaagaacug

SEQ ID NO: 391731 - RNA, 21 nt, Human
aaacaaaaaacacaaccaaaa

SEQ ID NO: 391732 - RNA, 21 nt, Human
aaacacaaccaaaagaacuga

SEQ ID NO: 391733 - RNA, 23 nt, Human
aagaacugacgagaggaagacaa

SEQ ID NO: 391734 - RNA, 24 nt, Human
aagacaaagccucgggaucagcca

SEQ ID NO: 391735 - RNA, 19 nt, Human
agcaagguggugggaaguc

SEQ ID NO: 391736 - RNA, 21 nt, Human
auacauauacuguacacaucu

SEQ ID NO: 391737 - RNA, 25 nt, Human
caaaaaacacaaccaaaagaacuga

SEQ ID NO: 391738 - RNA, 26 nt, Human
caaaaaacacaaccaaaagaacugac

SEQ ID NO: 391739 - RNA, 19 nt, Human
caaccaaaagaacugacgg

SEQ ID NO: 391740 - RNA, 18 nt, Human
cacaaccaaaagaacuga

SEQ ID NO: 391741 - RNA, 19 nt, Human
cacaaccaaaagaacugac

SEQ ID NO: 391742 - RNA, 24 nt, Human
cacaggucaggccuagcuggaucu

SEQ ID NO: 391743 - RNA, 18 nt, Human
cacgggaugaggcacagg

SEQ ID NO: 391744 - RNA, 23 nt, Human
cauauacuguacacaucuauaug

SEQ ID NO: 391745 - RNA, 20 nt, Human
ccccgcccgccacuucccuc

SEQ ID NO: 391746 - RNA, 21 nt, Human
ccccgcccgccacuucccucg

SEQ ID NO: 391747 - RNA, 23 nt, Human
ccccugaagcuggcugucuucuu

SEQ ID NO: 391748 - RNA, 25 nt, Human
cccgcgacccccggccggccggcua

SEQ ID NO: 391749 - RNA, 19 nt, Human
cccugugccuggugcuggu

SEQ ID NO: 391750 - RNA, 21 nt, Human
ccggccggccggcuaccugca

SEQ ID NO: 391751 - RNA, 20 nt, Human
ccuuggaccagccuccccgc

SEQ ID NO: 391752 - RNA, 25 nt, Human
cuuugggcauguggggucuguggaa

SEQ ID NO: 391753 - RNA, 20 nt, Human
gagaggaagacaaagccucg

SEQ ID NO: 391754 - RNA, 22 nt, Human
gaggccuuugggcauguggggu

SEQ ID NO: 391755 - RNA, 18 nt, Human
gggcagaggucgguggag

SEQ ID NO: 391756 - RNA, 21 nt, Human
gggugaggucaugggagcugg

SEQ ID NO: 391757 - RNA, 25 nt, Human
uaaaaaaaaaacaaaaaacacaacc

SEQ ID NO: 391758 - RNA, 20 nt, Human
ucagccagagaccgagcggc

SEQ ID NO: 391759 - RNA, 23 nt, Human
ucccgaggccuuugggcaugugg

SEQ ID NO: 391760 - RNA, 22 nt, Human
ucccugugccuggugcuggugc

SEQ ID NO: 391761 - RNA, 18 nt, Human
ucuguggaaggagaggag

SEQ ID NO: 391762 - RNA, 19 nt, Human
ugaagcguccuguguuggg

SEQ ID NO: 391763 - RNA, 19 nt, Human
uggaaggagaggaggucac

SEQ ID NO: 391764 - RNA, 22 nt, Human
uggcuuggccagcacagggacc

SEQ ID NO: 391765 - RNA, 20 nt, Human
uggggauggccacugcucgg

SEQ ID NO: 391766 - RNA, 21 nt, Human
uggugggaagucccgaggccu

SEQ ID NO: 391767 - RNA, 18 nt, Human
uugggggaguggggugag

SEQ ID NO: 391768 - RNA, 24 nt, Human
uuuacccuuccuccaagucuuuua

SEQ ID NO: 391769 - RNA, 18 nt, Human
uuuauuuuuuuuuugagu

SEQ ID NO: 391770 - RNA, 24 nt, Human
uuuuacccuuccuccaagucuuuu

SEQ ID NO: 391771 - RNA, 21 nt, Human
uuuuuuuuuuacccuuccucc

SEQ ID NO: 391772 - RNA, 27 nt, Human
uuuuuuuuuuacccuuccuccaagucu

SEQ ID NO: 391773 - RNA, 23 nt, Human
uuuuuuuuuuuuuacccuuccuc

SEQ ID NO: 391774 - RNA, 23 nt, Human
uuuuuuuuuuuuuuuuuacccuu

SEQ ID NO: 391775 - RNA, 23 nt, Human
aauguguguucagagagaaugaa

SEQ ID NO: 391776 - RNA, 22 nt, Human
accaaaguacagauggaaacca

SEQ ID NO: 391777 - RNA, 23 nt, Human
agcccugugcauuggggguggga

SEQ ID NO: 391778 - RNA, 19 nt, Human
auggaaaccauuuccuaca

SEQ ID NO: 391779 - RNA, 20 nt, Human
caaaaacccaaguuuacagc

SEQ ID NO: 391780 - RNA, 25 nt, Human
caauaucugaaaucagaggaccaaa

SEQ ID NO: 391781 - RNA, 19 nt, Human
ccugugcauuggggguggg

SEQ ID NO: 391782 - RNA, 20 nt, Human
ggcagaagucgugguguugc

SEQ ID NO: 391783 - RNA, 19 nt, Human
uccuacaucacaaaaaccc

SEQ ID NO: 391784 - RNA, 19 nt, Human
ugacggcagcgauacacgu

SEQ ID NO: 391785 - RNA, 24 nt, Human
uggaaaccauuuccuacaucacaa

SEQ ID NO: 391786 - RNA, 18 nt, Human
ugggcagaagucguggug

SEQ ID NO: 391787 - RNA, 21 nt, Human
ugggggugggaugggaauagc

SEQ ID NO: 391788 - RNA, 21 nt, Human
uugaacaaccucaauuucuuu

SEQ ID NO: 391789 - RNA, 25 nt, Human
aaacaacaaagaaguaaguaacugg

SEQ ID NO: 391790 - RNA, 26 nt, Human
aaacaugaguacauaauggaaaaaaa

SEQ ID NO: 391791 - RNA, 19 nt, Human
aaauauugagggcuacaau

SEQ ID NO: 391792 - RNA, 18 nt, Human
aguacauaauggaaaaaa

SEQ ID NO: 391793 - RNA, 19 nt, Human
aucaaggagggugcagccu

SEQ ID NO: 391794 - RNA, 24 nt, Human
auuaccaaauauugagggcuacaa

SEQ ID NO: 391795 - RNA, 20 nt, Human
caaggcagaaauggccccug

SEQ ID NO: 391796 - RNA, 21 nt, Human
cacaaggcagaaauggccccu

SEQ ID NO: 391797 - RNA, 22 nt, Human
cacaaggcagaaauggccccug

SEQ ID NO: 391798 - RNA, 19 nt, Human
ccacagcuguccccaaguc

SEQ ID NO: 391799 - RNA, 19 nt, Human
ccccacagcuguccccaag

SEQ ID NO: 391800 - RNA, 21 nt, Human
cccuuggguguccuuguagug

SEQ ID NO: 391801 - RNA, 21 nt, Human
ccgccagucacuucugcuggg

SEQ ID NO: 391802 - RNA, 19 nt, Human
ccucuugucccagcgagga

SEQ ID NO: 391803 - RNA, 19 nt, Human
cucugcagagaccuccugg

SEQ ID NO: 391804 - RNA, 21 nt, Human
cugagcuucuauaauucugga

SEQ ID NO: 391805 - RNA, 18 nt, Human
cugcagagaccuccuggg

SEQ ID NO: 391806 - RNA, 20 nt, Human
gagucacuuuaaauagcauu

SEQ ID NO: 391807 - RNA, 21 nt, Human
gggaccagagcaucugggccg

SEQ ID NO: 391808 - RNA, 24 nt, Human
ggggagagaaugucuuuuccuuug

SEQ ID NO: 391809 - RNA, 18 nt, Human
guggccugcaaacaacaa

SEQ ID NO: 391810 - RNA, 22 nt, Human
guggccugcaaacaacaaagaa

SEQ ID NO: 391811 - RNA, 18 nt, Human
uaaaauaaucccuggccc

SEQ ID NO: 391812 - RNA, 21 nt, Human
uagguggccugcaaacaacaa

SEQ ID NO: 391813 - RNA, 20 nt, Human
uauuucauaaaaacaugagu

SEQ ID NO: 391814 - RNA, 18 nt, Human
uccccacagcugucccca

SEQ ID NO: 391815 - RNA, 21 nt, Human
ucuagaugacuuggguagucc

SEQ ID NO: 391816 - RNA, 22 nt, Human
ucugcagagaccuccugggucc

SEQ ID NO: 391817 - RNA, 23 nt, Human
ucugcagagaccuccugggucca

SEQ ID NO: 391818 - RNA, 24 nt, Human
ucugcagagaccuccuggguccau

SEQ ID NO: 391819 - RNA, 18 nt, Human
ucugcugggaccagagca

SEQ ID NO: 391820 - RNA, 23 nt, Human
ucuuuuccuuugcaauuucuaga

SEQ ID NO: 391821 - RNA, 19 nt, Human
ugaccagaggggagcaggc

SEQ ID NO: 391822 - RNA, 20 nt, Human
ugacuagaauugucucccuc

SEQ ID NO: 391823 - RNA, 19 nt, Human
ugccuggggugggccacac

SEQ ID NO: 391824 - RNA, 21 nt, Human
uggagcccugacucagacccc

SEQ ID NO: 391825 - RNA, 19 nt, Human
uggccugcaaacaacaaag

SEQ ID NO: 391826 - RNA, 19 nt, Human
uggguaguccuaaaguuuu

SEQ ID NO: 391827 - RNA, 23 nt, Human
ugucccagcgaggacagggguug

SEQ ID NO: 391828 - RNA, 20 nt, Human
ugucggugaccagaggggag

SEQ ID NO: 391829 - RNA, 21 nt, Human
ugucuuuuccuuugcaauuuc

SEQ ID NO: 391830 - RNA, 20 nt, Human
ugugagccuccuguucuccg

SEQ ID NO: 391831 - RNA, 20 nt, Human
ugugaugaucaaggagggug

SEQ ID NO: 391832 - RNA, 19 nt, Human
ugugcugcucuaaccaagu

SEQ ID NO: 391833 - RNA, 20 nt, Human
uuaccaaauauugagggcua

SEQ ID NO: 391834 - RNA, 23 nt, Human
uugcucugcagagaccuccuggg

SEQ ID NO: 391835 - RNA, 24 nt, Human
aaccagcagcgaccucauguggcc

SEQ ID NO: 391836 - RNA, 21 nt, Human
agaaaaaccaaucuaauucag

SEQ ID NO: 391837 - RNA, 18 nt, Human
agccgcaaagccucaauc

SEQ ID NO: 391838 - RNA, 20 nt, Human
cagcagcgaccucauguggc

SEQ ID NO: 391839 - RNA, 22 nt, Human
ccuacagccuugguguacuggc

SEQ ID NO: 391840 - RNA, 21 nt, Human
cuuggguccaagguaccaggg

SEQ ID NO: 391841 - RNA, 18 nt, Human
ggccugggauagaagcuc

SEQ ID NO: 391842 - RNA, 19 nt, Human
uaaccagcagcgaccucau

SEQ ID NO: 391843 - RNA, 19 nt, Human
uggcugcagggccugggau

SEQ ID NO: 391844 - RNA, 22 nt, Human
ugggauagaagcucacugucug

SEQ ID NO: 391845 - RNA, 18 nt, Human
uuuuuuuuuuucuucuug

SEQ ID NO: 391846 - RNA, 25 nt, Human
aaagcaaaaccagagauucagaaaa

SEQ ID NO: 391847 - RNA, 24 nt, Human
aaaguguugggauuacaggcguga

SEQ ID NO: 391848 - RNA, 26 nt, Human
aacacaaucucucuccuuaaggcacc

SEQ ID NO: 391849 - RNA, 22 nt, Human
aagccacauccucaguugagcc

SEQ ID NO: 391850 - RNA, 21 nt, Human
aaguguugggauuacaggcgu

SEQ ID NO: 391851 - RNA, 26 nt, Human
aaguguugggauuacaggcgugagcc

SEQ ID NO: 391852 - RNA, 21 nt, Human
aaucagcuuacccccaagaag

SEQ ID NO: 391853 - RNA, 22 nt, Human
acaaaccccagagcuggucaac

SEQ ID NO: 391854 - RNA, 21 nt, Human
accaacccugaacccccggcc

SEQ ID NO: 391855 - RNA, 24 nt, Human
accauguuggucaggcuggucucg

SEQ ID NO: 391856 - RNA, 18 nt, Human
acccugccuuauaccuga

SEQ ID NO: 391857 - RNA, 18 nt, Human
agacaaaagaacugaugg

SEQ ID NO: 391858 - RNA, 24 nt, Human
agaggcccagcccuguaggcacug

SEQ ID NO: 391859 - RNA, 20 nt, Human
agaugcuaguggggaggagc

SEQ ID NO: 391860 - RNA, 23 nt, Human
agcugggauuacuggugugugcc

SEQ ID NO: 391861 - RNA, 23 nt, Human
aggaaaagaaaccuaagacaaaa

SEQ ID NO: 391862 - RNA, 25 nt, Human
aggaagaacacaaucucucuccuua

SEQ ID NO: 391863 - RNA, 18 nt, Human
aggaaggaaguaggcagg

SEQ ID NO: 391864 - RNA, 20 nt, Human
aggaaggaaguaggcagggg

SEQ ID NO: 391865 - RNA, 26 nt, Human
aggagaaaacagaccugccuuacaaa

SEQ ID NO: 391866 - RNA, 22 nt, Human
aggaggcagguccagggcuaca

SEQ ID NO: 391867 - RNA, 23 nt, Human
aguagcugggauuacuggugugu

SEQ ID NO: 391868 - RNA, 18 nt, Human
agugggugggccaggggc

SEQ ID NO: 391869 - RNA, 22 nt, Human
auaggggcauuugccacccaca

SEQ ID NO: 391870 - RNA, 19 nt, Human
auuagugggugggccaggg

SEQ ID NO: 391871 - RNA, 24 nt, Human
auuuuuguauuuuuaguagagaug

SEQ ID NO: 391872 - RNA, 23 nt, Human
caaaagaacugauggucuuccca

SEQ ID NO: 391873 - RNA, 24 nt, Human
caaaguguugggauuacaggcgug

SEQ ID NO: 391874 - RNA, 19 nt, Human
caacaaagcaaaaccagag

SEQ ID NO: 391875 - RNA, 18 nt, Human
caacggcgcaaucuuggc

SEQ ID NO: 391876 - RNA, 22 nt, Human
caagcaaaucuccugcuucagc

SEQ ID NO: 391877 - RNA, 23 nt, Human
cacaaucucucuccuuaaggcac

SEQ ID NO: 391878 - RNA, 24 nt, Human
caccacacccggcuaauuuuugua

SEQ ID NO: 391879 - RNA, 18 nt, Human
caccacccugccuuauac

SEQ ID NO: 391880 - RNA, 24 nt, Human
caccacccugccuuauaccugaau

SEQ ID NO: 391881 - RNA, 20 nt, Human
caccaugccuggccaacucg

SEQ ID NO: 391882 - RNA, 21 nt, Human
caccauguuggucaggcuggu

SEQ ID NO: 391883 - RNA, 24 nt, Human
caccauguuggucaggcuggucuc

SEQ ID NO: 391884 - RNA, 21 nt, Human
cacccagauaagaguacaggc

SEQ ID NO: 391885 - RNA, 22 nt, Human
cacccgggguacugucaccccg

SEQ ID NO: 391886 - RNA, 22 nt, Human
caccuaaccccacccugcuugc

SEQ ID NO: 391887 - RNA, 18 nt, Human
cacugcaaccucugccuc

SEQ ID NO: 391888 - RNA, 21 nt, Human
cacugcaaccucugccuccca

SEQ ID NO: 391889 - RNA, 23 nt, Human
cagcagacccagugaugcccuug

SEQ ID NO: 391890 - RNA, 19 nt, Human
cagguacaccacccugccu

SEQ ID NO: 391891 - RNA, 21 nt, Human
cagguacaccacccugccuua

SEQ ID NO: 391892 - RNA, 23 nt, Human
cauuugccacccacaucuuugga

SEQ ID NO: 391893 - RNA, 22 nt, Human
ccaaaguguugggauuacaggc

SEQ ID NO: 391894 - RNA, 22 nt, Human
ccaaaguguugggauuacaggc

SEQ ID NO: 391895 - RNA, 24 nt, Human
ccaaaguguugggauuacaggcgu

SEQ ID NO: 391896 - RNA, 19 nt, Human
ccaacccugaacccccggc

SEQ ID NO: 391897 - RNA, 20 nt, Human
ccaccacacccggcuaauuu

SEQ ID NO: 391898 - RNA, 18 nt, Human
ccaccaugccuggccaac

SEQ ID NO: 391899 - RNA, 18 nt, Human
ccagugccugggugaggg

SEQ ID NO: 391900 - RNA, 18 nt, Human
cccaacccagaggcuucc

SEQ ID NO: 391901 - RNA, 23 nt, Human
cccagauaagaguacaggcaaac

SEQ ID NO: 391902 - RNA, 20 nt, Human
cccagguucaagcaaaucuc

SEQ ID NO: 391903 - RNA, 23 nt, Human
cccagguucaagcaaaucucccc

SEQ ID NO: 391904 - RNA, 23 nt, Human
cccagguucaagcaaaucuccug

SEQ ID NO: 391905 - RNA, 23 nt, Human
ccccucuaccacaaagauggcuu

SEQ ID NO: 391906 - RNA, 20 nt, Human
cccgaguagcugggauuacu

SEQ ID NO: 391907 - RNA, 25 nt, Human
cccugcuaccaacccugaacccccg

SEQ ID NO: 391908 - RNA, 18 nt, Human
ccuaugaggggacaaggu

SEQ ID NO: 391909 - RNA, 24 nt, Human
ccucccagguucaagcaaaucucc

SEQ ID NO: 391910 - RNA, 21 nt, Human
ccugaccucgugaucugccug

SEQ ID NO: 391911 - RNA, 19 nt, Human
cgagggaaggaggcagguc

SEQ ID NO: 391912 - RNA, 20 nt, Human
cgcacgcguaaacccagcca

SEQ ID NO: 391913 - RNA, 21 nt, Human
cgcgcacgcgcaccuaacccc

SEQ ID NO: 391914 - RNA, 23 nt, Human
cgggaccaggcccguuagugcgc

SEQ ID NO: 391915 - RNA, 24 nt, Human
cgugaucugccugccucagccucc

SEQ ID NO: 391916 - RNA, 19 nt, Human
cuaaaugcuugguaccauc

SEQ ID NO: 391917 - RNA, 23 nt, Human
cuaauuuuuguauuuuuaguaga

SEQ ID NO: 391918 - RNA, 24 nt, Human
cucacugcaaccucugccucccag

SEQ ID NO: 391919 - RNA, 24 nt, Human
cucacugcaaccucugccucccag

SEQ ID NO: 391920 - RNA, 24 nt, Human
cuccugaccucgugaucugccugc

SEQ ID NO: 391921 - RNA, 20 nt, Human
cucuguugcccaggcuggag

SEQ ID NO: 391922 - RNA, 29 nt, Human
cucuguugcccaggcuggaguacaacggg

SEQ ID NO: 391923 - RNA, 31 nt, Human
cugauggucuucccaacccagaggcuuccuu

SEQ ID NO: 391924 - RNA, 23 nt, Human
cugcaaccucugccucccagguu

SEQ ID NO: 391925 - RNA, 24 nt, Human
cugcaaccucugccucccagguuc

SEQ ID NO: 391926 - RNA, 18 nt, Human
cugccucagccucccaaa

SEQ ID NO: 391927 - RNA, 23 nt, Human
cugcuucagccucccgaguagcu

SEQ ID NO: 391928 - RNA, 23 nt, Human
cugugaauaacaucauccucagu

SEQ ID NO: 391929 - RNA, 23 nt, Human
cuucccaacccagaggcuuccug

SEQ ID NO: 391930 - RNA, 19 nt, Human
cuuccgggaccaggcccgu

SEQ ID NO: 391931 - RNA, 21 nt, Human
cuugcucuguugcccaggcug

SEQ ID NO: 391932 - RNA, 24 nt, Human
gaccucgugaucugccugccucag

SEQ ID NO: 391933 - RNA, 25 nt, Human
gagaugggguuuucaccauguuggu

SEQ ID NO: 391934 - RNA, 24 nt, Human
gaggcccagcccuguaggcacugg

SEQ ID NO: 391935 - RNA, 20 nt, Human
gauaggaggcuaccccaggg

SEQ ID NO: 391936 - RNA, 18 nt, Human
gauuacaggcgugagcca

SEQ ID NO: 391937 - RNA, 21 nt, Human
gauuacaggcgugagccacca

SEQ ID NO: 391938 - RNA, 24 nt, Human
gauuacaggcgugagccaccaugc

SEQ ID NO: 391939 - RNA, 18 nt, Human
gcaaacucuucacuugcc

SEQ ID NO: 391940 - RNA, 22 nt, Human
gcaaccucugccucccagguuc

SEQ ID NO: 391941 - RNA, 22 nt, Human
gccaacaaagcaaaaccagaga

SEQ ID NO: 391942 - RNA, 24 nt, Human
gccagcagguacaccacccugccu

SEQ ID NO: 391943 - RNA, 19 nt, Human
gcccaggcuggaguacaac

SEQ ID NO: 391944 - RNA, 20 nt, Human
gcccuuggagacccucugcu

SEQ ID NO: 391945 - RNA, 19 nt, Human
gccucagccucccaaagug

SEQ ID NO: 391946 - RNA, 21 nt, Human
gcucacugcaaccucugccuc

SEQ ID NO: 391947 - RNA, 19 nt, Human
gcuggaguacaacggcgca

SEQ ID NO: 391948 - RNA, 23 nt, Human
gcuggucucgaacuccugaccuc

SEQ ID NO: 391949 - RNA, 21 nt, Human
ggaaggaggcagguccagggc

SEQ ID NO: 391950 - RNA, 19 nt, Human
ggagaagucugguugggcc

SEQ ID NO: 391951 - RNA, 24 nt, Human
ggauuacaggcgugagccaccaug

SEQ ID NO: 391952 - RNA, 20 nt, Human
ggccuaggagaaaacagacc

SEQ ID NO: 391953 - RNA, 24 nt, Human
ggcuggucucgaacuccugaccuc

SEQ ID NO: 391954 - RNA, 23 nt, Human
gggaaaugaugaggcugcaggcu

SEQ ID NO: 391955 - RNA, 21 nt, Human
gggaaggaggcagguccaggg

SEQ ID NO: 391956 - RNA, 22 nt, Human
gggaaggaggcagguccagggc

SEQ ID NO: 391957 - RNA, 23 nt, Human
ggggaggagcugagccugugacg

SEQ ID NO: 391958 - RNA, 24 nt, Human
gggguuuucaccauguuggucagg

SEQ ID NO: 391959 - RNA, 22 nt, Human
ggguuuucaccauguuggucag

SEQ ID NO: 391960 - RNA, 23 nt, Human
ggguuuucaccauguuggucagg

SEQ ID NO: 391961 - RNA, 19 nt, Human
ggucucgaacuccugaccu

SEQ ID NO: 391962 - RNA, 21 nt, Human
ggugagggagcaggcuuaaga

SEQ ID NO: 391963 - RNA, 24 nt, Human
guagagaugggguuuucaccaugu

SEQ ID NO: 391964 - RNA, 25 nt, Human
guagcagaacccaguguagaagcca

SEQ ID NO: 391965 - RNA, 24 nt, Human
guagcugggauuacuggugugugc

SEQ ID NO: 391966 - RNA, 24 nt, Human
gucuugcucuguugcccaggcugg

SEQ ID NO: 391967 - RNA, 22 nt, Human
gugacauggcagggcugccugg

SEQ ID NO: 391968 - RNA, 24 nt, Human
gugaucugccugccucagccuccc

SEQ ID NO: 391969 - RNA, 18 nt, Human
gugcaguaguauuagugg

SEQ ID NO: 391970 - RNA, 20 nt, Human
guggcccagcagauggaaac

SEQ ID NO: 391971 - RNA, 20 nt, Human
uaacaucauccucaguacag

SEQ ID NO: 391972 - RNA, 22 nt, Human
uaacaucauccucaguacagcu

SEQ ID NO: 391973 - RNA, 24 nt, Human
uaacaucauccucaguacagcugc

SEQ ID NO: 391974 - RNA, 24 nt, Human
uaauuuuuguauuuuuaguagaga

SEQ ID NO: 391975 - RNA, 23 nt, Human
uacaacggcgcaaucuuggcuca

SEQ ID NO: 391976 - RNA, 24 nt, Human
uacaccacccugccuuauaccuga

SEQ ID NO: 391977 - RNA, 22 nt, Human
uacaggcgugagccaccaugcc

SEQ ID NO: 391978 - RNA, 23 nt, Human
uacaggcgugagccaccaugccu

SEQ ID NO: 391979 - RNA, 22 nt, Human
uacagugcuuucagguacuggu

SEQ ID NO: 391980 - RNA, 23 nt, Human
uaccacaaagauggcuuaagcaa

SEQ ID NO: 391981 - RNA, 24 nt, Human
uacuggugugugccaccacacccg

SEQ ID NO: 391982 - RNA, 23 nt, Human
uagcagaacccaguguagaagcc

SEQ ID NO: 391983 - RNA, 23 nt, Human
uagcugggauuacuggugugugc

SEQ ID NO: 391984 - RNA, 20 nt, Human
uaggacaguuggcagaugac

SEQ ID NO: 391985 - RNA, 23 nt, Human
uaggagaaaacagaccugccuua

SEQ ID NO: 391986 - RNA, 25 nt, Human
uaguagagaugggguuuucaccaug

SEQ ID NO: 391987 - RNA, 25 nt, Human
uauggccccgagggaaggaggcagg

SEQ ID NO: 391988 - RNA, 22 nt, Human
ucaccccugagagaggaagaac

SEQ ID NO: 391989 - RNA, 19 nt, Human
ucacugcaaccucugccuc

SEQ ID NO: 391990 - RNA, 23 nt, Human
ucacugcaaccucugccucccag

SEQ ID NO: 391991 - RNA, 24 nt, Human
ucacugcaaccucugccucccagg

SEQ ID NO: 391992 - RNA, 20 nt, Human
ucagaaaacucagggccuag

SEQ ID NO: 391993 - RNA, 20 nt, Human
ucagccucccgaguagcugg

SEQ ID NO: 391994 - RNA, 22 nt, Human
ucagccucccgaguagcuggga

SEQ ID NO: 391995 - RNA, 24 nt, Human
uccagggccccucuaccacaaaga

SEQ ID NO: 391996 - RNA, 24 nt, Human
ucccaaaguguugggauuacaggc

SEQ ID NO: 391997 - RNA, 25 nt, Human
ucccaacccagaggcuuccugaguu

SEQ ID NO: 391998 - RNA, 21 nt, Human
ucccagguucaagcaaaucuc

SEQ ID NO: 391999 - RNA, 24 nt, Human
ucccagguucaagcaaaucuccug

SEQ ID NO: 392000 - RNA, 18 nt, Human
ucccauaggcacuuaagc

SEQ ID NO: 392001 - RNA, 23 nt, Human
ucccgaguagcugggauuacugg

SEQ ID NO: 392002 - RNA, 24 nt, Human
ucccgaguagcugggauuacuggu

SEQ ID NO: 392003 - RNA, 19 nt, Human
ucucgaacuccugaccucg

SEQ ID NO: 392004 - RNA, 18 nt, Human
ucuguugcccaggcugga

SEQ ID NO: 392005 - RNA, 23 nt, Human
ucuugcucuguugcccaggcugg

SEQ ID NO: 392006 - RNA, 24 nt, Human
ucuugcucuguugcccaggcugga

SEQ ID NO: 392007 - RNA, 22 nt, Human
ugaacccccggcaguugucccu

SEQ ID NO: 392008 - RNA, 18 nt, Human
ugaagaguuggcaguucc

SEQ ID NO: 392009 - RNA, 18 nt, Human
ugaagguagagaagaugc

SEQ ID NO: 392010 - RNA, 23 nt, Human
ugacgugcauuuguaccaggucc

SEQ ID NO: 392011 - RNA, 21 nt, Human
ugagaugggucuugcucuguu

SEQ ID NO: 392012 - RNA, 24 nt, Human
ugauggucuucccaacccagaggc

SEQ ID NO: 392013 - RNA, 25 nt, Human
ugcagacccacauucccauaggcac

SEQ ID NO: 392014 - RNA, 21 nt, Human
ugcccaggcuggaguacaacg

SEQ ID NO: 392015 - RNA, 24 nt, Human
ugccucagccucccaaaguguugg

SEQ ID NO: 392016 - RNA, 21 nt, Human
ugccugggugagggagcaggc

SEQ ID NO: 392017 - RNA, 24 nt, Human
ugcuucagccucccgaguagcugg

SEQ ID NO: 392018 - RNA, 18 nt, Human
uggaaguaugauauccaa

SEQ ID NO: 392019 - RNA, 26 nt, Human
uggaaguaugauauccaacaggaagg

SEQ ID NO: 392020 - RNA, 24 nt, Human
uggaguacaacggcgcaaucuugg

SEQ ID NO: 392021 - RNA, 23 nt, Human
uggauaggaggcuaccccagggg

SEQ ID NO: 392022 - RNA, 19 nt, Human
uggcagaugacaauuuccu

SEQ ID NO: 392023 - RNA, 22 nt, Human
uggcccagcagauggaaacagg

SEQ ID NO: 392024 - RNA, 19 nt, Human
uggcugguggcccagcaga

SEQ ID NO: 392025 - RNA, 19 nt, Human
ugggaaaugaugaggcugc

SEQ ID NO: 392026 - RNA, 20 nt, Human
ugggaaaugaugaggcugca

SEQ ID NO: 392027 - RNA, 18 nt, Human
ugggauuacaggcgugag

SEQ ID NO: 392028 - RNA, 22 nt, Human
ugggauuacaggcgugagccac

SEQ ID NO: 392029 - RNA, 23 nt, Human
ugggauuacaggcgugagccacc

SEQ ID NO: 392030 - RNA, 24 nt, Human
ugggauuacaggcgugagccacca

SEQ ID NO: 392031 - RNA, 25 nt, Human
ugggauuacaggcgugagccaccau

SEQ ID NO: 392032 - RNA, 22 nt, Human
ugggauuacuggugugugccac

SEQ ID NO: 392033 - RNA, 24 nt, Human
ugggauuacuggugugugccacca

SEQ ID NO: 392034 - RNA, 21 nt, Human
ugggccagguauguggguguu

SEQ ID NO: 392035 - RNA, 21 nt, Human
uggggauggaagagggacagg

SEQ ID NO: 392036 - RNA, 24 nt, Human
ugggguuuucaccauguuggucag

SEQ ID NO: 392037 - RNA, 23 nt, Human
ugggucuugcucuguugcccagg

SEQ ID NO: 392038 - RNA, 24 nt, Human
uggucaggcuggucucgaacuccu

SEQ ID NO: 392039 - RNA, 21 nt, Human
ugguugggccagguauguggg

SEQ ID NO: 392040 - RNA, 21 nt, Human
ugguugggccagguauguggg

SEQ ID NO: 392041 - RNA, 24 nt, Human
uguagaagccagcagacccaguga

SEQ ID NO: 392042 - RNA, 21 nt, Human
uguauuuuuaguagagauggg

SEQ ID NO: 392043 - RNA, 21 nt, Human
ugugagauccugacucugugc

SEQ ID NO: 392044 - RNA, 18 nt, Human
uuaguagagaugggguuu

SEQ ID NO: 392045 - RNA, 18 nt, Human
uuaguagagaugggguuu

SEQ ID NO: 392046 - RNA, 25 nt, Human
uuaguagagaugggguuuucaccau

SEQ ID NO: 392047 - RNA, 19 nt, Human
uugaagguagagaagaugc

SEQ ID NO: 392048 - RNA, 20 nt, Human
uugagaugggucuugcucug

SEQ ID NO: 392049 - RNA, 19 nt, Human
uugcccagugccuggguga

SEQ ID NO: 392050 - RNA, 23 nt, Human
uugccuggcucacgggagaaguc

SEQ ID NO: 392051 - RNA, 24 nt, Human
uugcucuguugcccaggcuggagu

SEQ ID NO: 392052 - RNA, 24 nt, Human
uuucaccauguuggucaggcuggu

SEQ ID NO: 392053 - RNA, 21 nt, Human
uuugagaugggucuugcucug

SEQ ID NO: 392054 - RNA, 25 nt, Human
uuuuuaguagagaugggguuuucac

SEQ ID NO: 392055 - RNA, 20 nt, Human
uuuuuguauuuuuaguagag

SEQ ID NO: 392056 - RNA, 24 nt, Human
aaaaaacuuaaaaauguuagcuaa

SEQ ID NO: 392057 - RNA, 21 nt, Human
aaacaugcacauaguauuccu

SEQ ID NO: 392058 - RNA, 19 nt, Human
aaagcaauaagugcuuuuc

SEQ ID NO: 392059 - RNA, 23 nt, Human
aacugaacaauugcuaaaaggaa

SEQ ID NO: 392060 - RNA, 21 nt, Human
acagcacauugacaacuaugg

SEQ ID NO: 392061 - RNA, 22 nt, Human
acagcacauugacaacuauggu

SEQ ID NO: 392062 - RNA, 18 nt, Human
acccuaauuuuucaucua

SEQ ID NO: 392063 - RNA, 23 nt, Human
acgaugcuguauagaauaugagc

SEQ ID NO: 392064 - RNA, 19 nt, Human
acucaauuugaaccccaca

SEQ ID NO: 392065 - RNA, 21 nt, Human
agcgccggcucucccuggggc

SEQ ID NO: 392066 - RNA, 23 nt, Human
auugacaacuauggugcuuagca

SEQ ID NO: 392067 - RNA, 24 nt, Human
cagcauaaagaaacaugaauaaug

SEQ ID NO: 392068 - RNA, 24 nt, Human
ccccaucaccuuagguacaaaaua

SEQ ID NO: 392069 - RNA, 20 nt, Human
ccgguagagcaccgcggccg

SEQ ID NO: 392070 - RNA, 22 nt, Human
ccgguagagcaccgcggccgcg

SEQ ID NO: 392071 - RNA, 25 nt, Human
cuuaaacaacaauaauaaaaaacaa

SEQ ID NO: 392072 - RNA, 22 nt, Human
gcacaaaagccagcagcauaaa

SEQ ID NO: 392073 - RNA, 18 nt, Human
gcuuauuccucuccaaaa

SEQ ID NO: 392074 - RNA, 20 nt, Human
ggcaaaauaucaaacaugca

SEQ ID NO: 392075 - RNA, 19 nt, Human
gggcacaaaagccagcagc

SEQ ID NO: 392076 - RNA, 24 nt, Human
guuuucaggguuaaguagcagauu

SEQ ID NO: 392077 - RNA, 18 nt, Human
uaaagcaaugacaaaauu

SEQ ID NO: 392078 - RNA, 23 nt, Human
uaagugcuuuucauuuugcuuac

SEQ ID NO: 392079 - RNA, 22 nt, Human
uaauccucagaaaaaguaaaca

SEQ ID NO: 392080 - RNA, 21 nt, Human
uacccucaaguguaaauccaa

SEQ ID NO: 392081 - RNA, 22 nt, Human
uacgucuuccaacugaacaauu

SEQ ID NO: 392082 - RNA, 21 nt, Human
uagaauaugagcuaaucugcc

SEQ ID NO: 392083 - RNA, 24 nt, Human
uagcacacuaguaaacaacuauua

SEQ ID NO: 392084 - RNA, 21 nt, Human
uagcagagacauaugcccaua

SEQ ID NO: 392085 - RNA, 18 nt, Human
uaguguuagugguaauau

SEQ ID NO: 392086 - RNA, 26 nt, Human
uauagaauaugagcuaaucugccaaa

SEQ ID NO: 392087 - RNA, 21 nt, Human
uauuaguguuagugguaauau

SEQ ID NO: 392088 - RNA, 23 nt, Human
uauuuucuuaauaaauuuaauua

SEQ ID NO: 392089 - RNA, 21 nt, Human
ugagcuaaucugccaauuacu

SEQ ID NO: 392090 - RNA, 18 nt, Human
ugauauugcuugcuuaua

SEQ ID NO: 392091 - RNA, 27 nt, Human
ugcuuaaacaacaauaauaaaaaacaa

SEQ ID NO: 392092 - RNA, 20 nt, Human
uggcaaaauaucaaacaugc

SEQ ID NO: 392093 - RNA, 18 nt, Human
uguaaggcagcuguuuga

SEQ ID NO: 392094 - RNA, 21 nt, Human
uguguaaccagauucacuuuu

SEQ ID NO: 392095 - RNA, 24 nt, Human
uuaaguacaacuaagugaggggaa

SEQ ID NO: 392096 - RNA, 21 nt, Human
uuaauuacauuucauaagccc

SEQ ID NO: 392097 - RNA, 22 nt, Human
uucauaagcccugagauaacgu

SEQ ID NO: 392098 - RNA, 22 nt, Human
uuccuuccccaaauauuaauac

SEQ ID NO: 392099 - RNA, 23 nt, Human
uugcuaaaaggaacuuagcauuu

SEQ ID NO: 392100 - RNA, 20 nt, Human
uuuaaguuauuuacagaugg

SEQ ID NO: 392101 - RNA, 21 nt, Human
uuugcacagcacauugacaac

SEQ ID NO: 392102 - RNA, 22 nt, Human
acaaaacaaagagaaugagaaa

SEQ ID NO: 392103 - RNA, 21 nt, Human
acauugugaaagugccacaaa

SEQ ID NO: 392104 - RNA, 19 nt, Human
acuagcagauuucagauuu

SEQ ID NO: 392105 - RNA, 22 nt, Human
agacaaaaggagaaagggggac

SEQ ID NO: 392106 - RNA, 23 nt, Human
caaaacaaagagaaugagaaaag

SEQ ID NO: 392107 - RNA, 22 nt, Human
caaaaguauaaaguauggaaaa

SEQ ID NO: 392108 - RNA, 19 nt, Human
cacaaaacaaagagaauga

SEQ ID NO: 392109 - RNA, 26 nt, Human
caucacagugcggucauuugguuuuu

SEQ ID NO: 392110 - RNA, 24 nt, Human
ggaugaacuagagacaaaaggaga

SEQ ID NO: 392111 - RNA, 18 nt, Human
uacagggauacucaucug

SEQ ID NO: 392112 - RNA, 22 nt, Human
ugaaagugccacaaaacaaaga

SEQ ID NO: 392113 - RNA, 22 nt, Human
ugaccuacagggauacucaucu

SEQ ID NO: 392114 - RNA, 20 nt, Human
uucacaucacagugcgguca

SEQ ID NO: 392115 - RNA, 19 nt, Human
uugaaucauuucagagagu

SEQ ID NO: 392116 - RNA, 18 nt, Human
aaacuuaaaagguauaug

SEQ ID NO: 392117 - RNA, 24 nt, Human
aagcauucacuuaauauuuuaguu

SEQ ID NO: 392118 - RNA, 24 nt, Human
aguaaacauaauauacagauaaau

SEQ ID NO: 392119 - RNA, 22 nt, Human
cagcacagcuguaguucacuuu

SEQ ID NO: 392120 - RNA, 22 nt, Human
cagcuguaguucacuuuaaaca

SEQ ID NO: 392121 - RNA, 18 nt, Human
cagugauggagguggccg

SEQ ID NO: 392122 - RNA, 24 nt, Human
ccaaaguuaaaagaaccuacaggc

SEQ ID NO: 392123 - RNA, 24 nt, Human
ccagugauggagguggccgguccu

SEQ ID NO: 392124 - RNA, 20 nt, Human
cugccagcugagcucgugcc

SEQ ID NO: 392125 - RNA, 24 nt, Human
cuucugauauaaaccugcauacag

SEQ ID NO: 392126 - RNA, 23 nt, Human
ggagguggccgguccugaggcug

SEQ ID NO: 392127 - RNA, 22 nt, Human
uaaaggauacugcaauauaaau

SEQ ID NO: 392128 - RNA, 26 nt, Human
ucaaauauccaacauuuuccuaucuu

SEQ ID NO: 392129 - RNA, 20 nt, Human
ucaaucucaccuucugauau

SEQ ID NO: 392130 - RNA, 21 nt, Human
ucaaucucaccuucugauaua

SEQ ID NO: 392131 - RNA, 20 nt, Human
ugaaggagaccuuugugagu

SEQ ID NO: 392132 - RNA, 19 nt, Human
ugcaucaagcauuauucaa

SEQ ID NO: 392133 - RNA, 21 nt, Human
ugugaguuccagugguguccu

SEQ ID NO: 392134 - RNA, 22 nt, Human
uuaaaccaaaguuaaaagaacc

SEQ ID NO: 392135 - RNA, 24 nt, Human
aaaagugacucccaaaagaaaauc

SEQ ID NO: 392136 - RNA, 19 nt, Human
aaacugcagcauuuaagca

SEQ ID NO: 392137 - RNA, 18 nt, Human
aaagcacccgcacaaaac

SEQ ID NO: 392138 - RNA, 18 nt, Human
aacaauucuuaauaucuu

SEQ ID NO: 392139 - RNA, 20 nt, Human
aacacagaugaguggcaaaa

SEQ ID NO: 392140 - RNA, 21 nt, Human
aagacaaccccagagaccugg

SEQ ID NO: 392141 - RNA, 21 nt, Human
aagcagagcugagaagcacca

SEQ ID NO: 392142 - RNA, 22 nt, Human
aauuacaccacuagaguaaaau

SEQ ID NO: 392143 - RNA, 18 nt, Human
acaaaacagcaugcuccc

SEQ ID NO: 392144 - RNA, 23 nt, Human
acaaacagcaaugaugcagauaa

SEQ ID NO: 392145 - RNA, 24 nt, Human
acacagaagacaucagucaaacuc

SEQ ID NO: 392146 - RNA, 20 nt, Human
accgcacccagccagaagca

SEQ ID NO: 392147 - RNA, 21 nt, Human
accuuauaaccaaugcgacug

SEQ ID NO: 392148 - RNA, 20 nt, Human
acgggcagccggucucugua

SEQ ID NO: 392149 - RNA, 21 nt, Human
acucgauucucuggaaccugc

SEQ ID NO: 392150 - RNA, 21 nt, Human
agacaaccccagagaccuggg

SEQ ID NO: 392151 - RNA, 23 nt, Human
agccagaagcaaaccuuauaacc

SEQ ID NO: 392152 - RNA, 24 nt, Human
aggugguccgccugccuuggccuc

SEQ ID NO: 392153 - RNA, 19 nt, Human
aguuaagaaucaacuauaa

SEQ ID NO: 392154 - RNA, 23 nt, Human
augcaaggcacuucaaagcaccc

SEQ ID NO: 392155 - RNA, 23 nt, Human
caaaacagcaugcucccugggua

SEQ ID NO: 392156 - RNA, 22 nt, Human
caauguuggauuacaggcauga

SEQ ID NO: 392157 - RNA, 24 nt, Human
cacaaacaccacugguaaagcaaa

SEQ ID NO: 392158 - RNA, 25 nt, Human
cacacagaagacaucagucaaacuc

SEQ ID NO: 392159 - RNA, 23 nt, Human
cacacagggcugagcaggucaaa

SEQ ID NO: 392160 - RNA, 19 nt, Human
cacacgggcagccggucuc

SEQ ID NO: 392161 - RNA, 25 nt, Human
cacacuaccacacaacuguucuaca

SEQ ID NO: 392162 - RNA, 18 nt, Human
cacacucuuaaagccaag

SEQ ID NO: 392163 - RNA, 23 nt, Human
cacagcuugaccuaggaaaaaau

SEQ ID NO: 392164 - RNA, 18 nt, Human
caccgcacccagccagaa

SEQ ID NO: 392165 - RNA, 22 nt, Human
caccgcacccagccagaagcaa

SEQ ID NO: 392166 - RNA, 19 nt, Human
caccucaaccuuuccauga

SEQ ID NO: 392167 - RNA, 24 nt, Human
cagucaaacucaaguucgaaagcc

SEQ ID NO: 392168 - RNA, 21 nt, Human
cauagccacagcuaaaaagca

SEQ ID NO: 392169 - RNA, 26 nt, Human
cauagccacagcuaaaaagcauguua

SEQ ID NO: 392170 - RNA, 21 nt, Human
ccaauguuggauuacaggcau

SEQ ID NO: 392171 - RNA, 21 nt, Human
ccacacagaagacaucaguca

SEQ ID NO: 392172 - RNA, 22 nt, Human
cccaauguuggauuacaggcau

SEQ ID NO: 392173 - RNA, 23 nt, Human
cccgcugcguggcgcaggcaauu

SEQ ID NO: 392174 - RNA, 23 nt, Human
ccgcacccagccagaagcagugg

SEQ ID NO: 392175 - RNA, 21 nt, Human
ccugccuuggccucccaaugu

SEQ ID NO: 392176 - RNA, 22 nt, Human
ccugccuuggccucccaauguu

SEQ ID NO: 392177 - RNA, 21 nt, Human
cguggcgcaggcaauucuccc

SEQ ID NO: 392178 - RNA, 18 nt, Human
cuacuuagguucauacgg

SEQ ID NO: 392179 - RNA, 22 nt, Human
cucaaccuuuccaugagguuca

SEQ ID NO: 392180 - RNA, 26 nt, Human
cucccgacuucaggugguccgccugc

SEQ ID NO: 392181 - RNA, 18 nt, Human
cuccuaaucccugaugca

SEQ ID NO: 392182 - RNA, 18 nt, Human
gauuacaggcaugagcca

SEQ ID NO: 392183 - RNA, 22 nt, Human
gauuacaggcaugagccaccgc

SEQ ID NO: 392184 - RNA, 23 nt, Human
gauuacaggcaugagccaccgca

SEQ ID NO: 392185 - RNA, 22 nt, Human
gauuuagcggacaccacacaga

SEQ ID NO: 392186 - RNA, 25 nt, Human
gcaauucucccaaacggcuccacua

SEQ ID NO: 392187 - RNA, 18 nt, Human
gcuaguauacaaaaaccc

SEQ ID NO: 392188 - RNA, 24 nt, Human
ggaaaaaauaaaauccaucauagc

SEQ ID NO: 392189 - RNA, 21 nt, Human
ggauuacaggcaugagccacc

SEQ ID NO: 392190 - RNA, 22 nt, Human
ggauuacaggcaugagccaccg

SEQ ID NO: 392191 - RNA, 22 nt, Human
guaagacaaccccagagaccug

SEQ ID NO: 392192 - RNA, 22 nt, Human
guuagcaaacugagguucuacu

SEQ ID NO: 392193 - RNA, 19 nt, Human
uaaaacacagaugaguggc

SEQ ID NO: 392194 - RNA, 21 nt, Human
uaaaacacagaugaguggcaa

SEQ ID NO: 392195 - RNA, 22 nt, Human
uaaaacacagaugaguggcaaa

SEQ ID NO: 392196 - RNA, 24 nt, Human
uaaaacacagaugaguggcaaaag

SEQ ID NO: 392197 - RNA, 19 nt, Human
uaaaauuacagauuaaaag

SEQ ID NO: 392198 - RNA, 18 nt, Human
uaaagcaaagaggucuga

SEQ ID NO: 392199 - RNA, 23 nt, Human
uaaccaaugcgacugauccuaua

SEQ ID NO: 392200 - RNA, 24 nt, Human
uaagcagagcugagaagcaccauu

SEQ ID NO: 392201 - RNA, 21 nt, Human
uacaaaaacccuacuuuuucu

SEQ ID NO: 392202 - RNA, 23 nt, Human
uacaaaaacccuacuuuuucuuc

SEQ ID NO: 392203 - RNA, 25 nt, Human
uacaaaaacccuacuuuuucuucca

SEQ ID NO: 392204 - RNA, 24 nt, Human
uacaggcaugagccaccgcaccca

SEQ ID NO: 392205 - RNA, 23 nt, Human
uacaugucucaaguaaaacacag

SEQ ID NO: 392206 - RNA, 19 nt, Human
uacucaucugucauguuag

SEQ ID NO: 392207 - RNA, 20 nt, Human
uauaaaaagcuggaaugaua

SEQ ID NO: 392208 - RNA, 19 nt, Human
uauauaaaaagcuggaaug

SEQ ID NO: 392209 - RNA, 18 nt, Human
ucacaauaagaauuuguu

SEQ ID NO: 392210 - RNA, 19 nt, Human
ucacaauaagaauuuguuu

SEQ ID NO: 392211 - RNA, 22 nt, Human
ucacacugucauguauaggaua

SEQ ID NO: 392212 - RNA, 24 nt, Human
uccauggcacacucuuaaagccaa

SEQ ID NO: 392213 - RNA, 21 nt, Human
ucccaaacggcuccacugggc

SEQ ID NO: 392214 - RNA, 21 nt, Human
ucccaauguuggauuacaggc

SEQ ID NO: 392215 - RNA, 22 nt, Human
uccugggggugggggagaccuc

SEQ ID NO: 392216 - RNA, 22 nt, Human
ucucauguacauaaagcaccag

SEQ ID NO: 392217 - RNA, 18 nt, Human
ucucuggaaccugccacc

SEQ ID NO: 392218 - RNA, 23 nt, Human
ucucuggaaccugccaccccaga

SEQ ID NO: 392219 - RNA, 23 nt, Human
ucuuccaaacuacuuagguucau

SEQ ID NO: 392220 - RNA, 22 nt, Human
ugaauggagaaauucaguuccu

SEQ ID NO: 392221 - RNA, 23 nt, Human
ugaccuaggaaaaaauaaaaucc

SEQ ID NO: 392222 - RNA, 25 nt, Human
ugacucccaaaagaaaaucaauuuc

SEQ ID NO: 392223 - RNA, 19 nt, Human
ugagcaacucacaaacacc

SEQ ID NO: 392224 - RNA, 21 nt, Human
ugagcaacucacaaacaccac

SEQ ID NO: 392225 - RNA, 23 nt, Human
ugauaauuaauucaaauacaaaa

SEQ ID NO: 392226 - RNA, 24 nt, Human
ugccuuggccucccaauguuggau

SEQ ID NO: 392227 - RNA, 20 nt, Human
uggauuacaggcaugagcca

SEQ ID NO: 392228 - RNA, 23 nt, Human
uggauuacaggcaugagccaccg

SEQ ID NO: 392229 - RNA, 19 nt, Human
uggcacacucuuaaagcca

SEQ ID NO: 392230 - RNA, 26 nt, Human
uuagguucauacgguucacacuacca

SEQ ID NO: 392231 - RNA, 21 nt, Human
uucuauauuacuuauuuuagu

SEQ ID NO: 392232 - RNA, 22 nt, Human
uucucuggaaccugccacccca

SEQ ID NO: 392233 - RNA, 21 nt, Human
uucuuccaaacuacuuagguu

SEQ ID NO: 392234 - RNA, 22 nt, Human
uugcuccuaaucccugaugcaa

SEQ ID NO: 392235 - RNA, 18 nt, Human
uuggauuacaggcaugag

SEQ ID NO: 392236 - RNA, 22 nt, Human
uuggauuacaggcaugagccac

SEQ ID NO: 392237 - RNA, 24 nt, Human
uuggauuacaggcaugagccaccg

SEQ ID NO: 392238 - RNA, 21 nt, Human
uuguauuuuaaaauuacagau

SEQ ID NO: 392239 - RNA, 26 nt, Human
uuuaaaauuauuggcuuacuggauuu

SEQ ID NO: 392240 - RNA, 19 nt, Human
aaaaaaaaaaaagaaacac

SEQ ID NO: 392241 - RNA, 23 nt, Human
aaacagccaaaggaaaacauuca

SEQ ID NO: 392242 - RNA, 18 nt, Human
aacccauuuuguuuuuca

SEQ ID NO: 392243 - RNA, 21 nt, Human
aagaagaaaaugagaaauucg

SEQ ID NO: 392244 - RNA, 19 nt, Human
aagcaggagcaaggcgucc

SEQ ID NO: 392245 - RNA, 23 nt, Human
aagcaggagcaaggcguccaggg

SEQ ID NO: 392246 - RNA, 22 nt, Human
aauauggugaaacccccaucuc

SEQ ID NO: 392247 - RNA, 18 nt, Human
acaauauguaguuugauc

SEQ ID NO: 392248 - RNA, 23 nt, Human
acagagugagacuccgucucaaa

SEQ ID NO: 392249 - RNA, 24 nt, Human
acagagugagacuccgucucaaaa

SEQ ID NO: 392250 - RNA, 21 nt, Human
acuugcuucucuaccaccacc

SEQ ID NO: 392251 - RNA, 19 nt, Human
agaaguaguucuguaagga

SEQ ID NO: 392252 - RNA, 24 nt, Human
agacuggccaauauggugaaaccc

SEQ ID NO: 392253 - RNA, 22 nt, Human
agagaccauuuuggaaauugua

SEQ ID NO: 392254 - RNA, 23 nt, Human
agagucauugccaaaacagccaa

SEQ ID NO: 392255 - RNA, 24 nt, Human
agccugggugacagagugagacuc

SEQ ID NO: 392256 - RNA, 19 nt, Human
agccuuuuuacuugcuucu

SEQ ID NO: 392257 - RNA, 23 nt, Human
agcugggcauggugacacaugcc

SEQ ID NO: 392258 - RNA, 19 nt, Human
aggcacaauggagauaugg

SEQ ID NO: 392259 - RNA, 18 nt, Human
aggcaggagaauggcuug

SEQ ID NO: 392260 - RNA, 24 nt, Human
aggcuuaggcaggagaauggcuug

SEQ ID NO: 392261 - RNA, 22 nt, Human
agggcaaagaaguaagaaguag

SEQ ID NO: 392262 - RNA, 21 nt, Human
agucauugccaaaacagccaa

SEQ ID NO: 392263 - RNA, 24 nt, Human
aucacaaggucagaguucgagacc

SEQ ID NO: 392264 - RNA, 24 nt, Human
aucgcgucauugcaguccagccug

SEQ ID NO: 392265 - RNA, 18 nt, Human
auggugaaacccccaucu

SEQ ID NO: 392266 - RNA, 21 nt, Human
auggugaaacccccaucucua

SEQ ID NO: 392267 - RNA, 21 nt, Human
auuaagcaaucuuguugggga

SEQ ID NO: 392268 - RNA, 24 nt, Human
auugcaguccagccugggugacag

SEQ ID NO: 392269 - RNA, 19 nt, Human
caagaucgcgucauugcag

SEQ ID NO: 392270 - RNA, 23 nt, Human
cacguguguaaucucagcacucg

SEQ ID NO: 392271 - RNA, 22 nt, Human
caggagaauggcuugaaccccg

SEQ ID NO: 392272 - RNA, 23 nt, Human
caguccagccugggugacagagu

SEQ ID NO: 392273 - RNA, 24 nt, Human
caguccagccugggugacagagug

SEQ ID NO: 392274 - RNA, 21 nt, Human
cauacacauauauacaaugua

SEQ ID NO: 392275 - RNA, 24 nt, Human
caugccuguaaucccaguuacuug

SEQ ID NO: 392276 - RNA, 22 nt, Human
cauuagaauuagucuccaauaa

SEQ ID NO: 392277 - RNA, 19 nt, Human
cauugcaguccagccuggg

SEQ ID NO: 392278 - RNA, 19 nt, Human
cauugcaguccagccuggg

SEQ ID NO: 392279 - RNA, 21 nt, Human
cauugcaguccagccugggug

SEQ ID NO: 392280 - RNA, 22 nt, Human
cauugcaguccagccuggguga

SEQ ID NO: 392281 - RNA, 23 nt, Human
cauugcaguccagccugggugac

SEQ ID NO: 392282 - RNA, 24 nt, Human
cauugcaguccagccugggugaca

SEQ ID NO: 392283 - RNA, 25 nt, Human
cauugcaguccagccugggugacag

SEQ ID NO: 392284 - RNA, 22 nt, Human
cauugccaaaacagccaaagga

SEQ ID NO: 392285 - RNA, 18 nt, Human
cauuuagccuuuuuacuu

SEQ ID NO: 392286 - RNA, 21 nt, Human
cauuuagccuuuuuacuugcu

SEQ ID NO: 392287 - RNA, 22 nt, Human
ccagaaggucguagcagaagca

SEQ ID NO: 392288 - RNA, 20 nt, Human
cccggaugcggagguugcag

SEQ ID NO: 392289 - RNA, 22 nt, Human
ccugggugacagagugagacuc

SEQ ID NO: 392290 - RNA, 18 nt, Human
ccuguaaucccaguuacu

SEQ ID NO: 392291 - RNA, 21 nt, Human
ccuguaaucccaguuacuugg

SEQ ID NO: 392292 - RNA, 24 nt, Human
cgagaccagacuggccaauauggu

SEQ ID NO: 392293 - RNA, 18 nt, Human
cucaaaaaaaaaaaaaaa

SEQ ID NO: 392294 - RNA, 24 nt, Human
cucaaaaaaaaaaaaaaaaagaaa

SEQ ID NO: 392295 - RNA, 23 nt, Human
cucacguguguaaucucagcacu

SEQ ID NO: 392296 - RNA, 19 nt, Human
cuccgucucaaaaaaaaaa

SEQ ID NO: 392297 - RNA, 21 nt, Human
cucgagaggcugaucgaugga

SEQ ID NO: 392298 - RNA, 21 nt, Human
cuggagggcuuucggccuugg

SEQ ID NO: 392299 - RNA, 22 nt, Human
cuggccaauauggugaaacccc

SEQ ID NO: 392300 - RNA, 24 nt, Human
cugguuccuccccuuaaagauguu

SEQ ID NO: 392301 - RNA, 20 nt, Human
cuugaaccccggaugcggag

SEQ ID NO: 392302 - RNA, 21 nt, Human
gacagagugagacuccgucuc

SEQ ID NO: 392303 - RNA, 23 nt, Human
gacuuccauuccuucagcacucu

SEQ ID NO: 392304 - RNA, 18 nt, Human
gagggcuuucggccuugg

SEQ ID NO: 392305 - RNA, 18 nt, Human
gagguugcagugaaccaa

SEQ ID NO: 392306 - RNA, 23 nt, Human
gagguugcagugaaccaagaucg

SEQ ID NO: 392307 - RNA, 21 nt, Human
gaucgauggaucacaagguca

SEQ ID NO: 392308 - RNA, 23 nt, Human
gaucgauggaucacaaggucaga

SEQ ID NO: 392309 - RNA, 25 nt, Human
gccaauauggugaaacccccaucuc

SEQ ID NO: 392310 - RNA, 20 nt, Human
gccuguaaucccaguuacuu

SEQ ID NO: 392311 - RNA, 22 nt, Human
gcggagguugcagugaaccaag

SEQ ID NO: 392312 - RNA, 21 nt, Human
gcuucucuaccaccaccuaau

SEQ ID NO: 392313 - RNA, 23 nt, Human
ggaaaacauucaucuccuaaagc

SEQ ID NO: 392314 - RNA, 24 nt, Human
ggagguugcagugaaccaagaucg

SEQ ID NO: 392315 - RNA, 24 nt, Human
gggcauggugacacaugccuguaa

SEQ ID NO: 392316 - RNA, 24 nt, Human
ggugacacaugccuguaaucccag

SEQ ID NO: 392317 - RNA, 24 nt, Human
gucauugcaguccagccuggguga

SEQ ID NO: 392318 - RNA, 18 nt, Human
uaagaagaaaaugagaaa

SEQ ID NO: 392319 - RNA, 20 nt, Human
uaaggaaauguuagagacca

SEQ ID NO: 392320 - RNA, 24 nt, Human
uaaggaggcuucauucuuuuuaua

SEQ ID NO: 392321 - RNA, 23 nt, Human
uacugugcauacacauauauaca

SEQ ID NO: 392322 - RNA, 20 nt, Human
uagcagcagccuuuacuggu

SEQ ID NO: 392323 - RNA, 18 nt, Human
uaucaagaaacaccaggc

SEQ ID NO: 392324 - RNA, 20 nt, Human
uaucaagaaacaccaggccu

SEQ ID NO: 392325 - RNA, 23 nt, Human
ucacaaggucagaguucgagacc

SEQ ID NO: 392326 - RNA, 18 nt, Human
ucauugcaguccagccug

SEQ ID NO: 392327 - RNA, 21 nt, Human
ucauugcaguccagccugggu

SEQ ID NO: 392328 - RNA, 24 nt, Human
ucauugcaguccagccugggugac

SEQ ID NO: 392329 - RNA, 19 nt, Human
ucauugccaaaacagccaa

SEQ ID NO: 392330 - RNA, 24 nt, Human
uccacauuagaauuagucuccaau

SEQ ID NO: 392331 - RNA, 19 nt, Human
uccagccugggugacagag

SEQ ID NO: 392332 - RNA, 23 nt, Human
uccagccugggugacagagugag

SEQ ID NO: 392333 - RNA, 24 nt, Human
uccagccugggugacagagugaga

SEQ ID NO: 392334 - RNA, 23 nt, Human
uccgucucaaaaaaaaaaaaaaa

SEQ ID NO: 392335 - RNA, 20 nt, Human
uccuucagcacucugguucc

SEQ ID NO: 392336 - RNA, 23 nt, Human
ucgcgucauugcaguccagccug

SEQ ID NO: 392337 - RNA, 18 nt, Human
ucguagcagaagcaggag

SEQ ID NO: 392338 - RNA, 21 nt, Human
ucuaccaccaccuaaucacca

SEQ ID NO: 392339 - RNA, 21 nt, Human
ucucuacuaaaauacaaaaaa

SEQ ID NO: 392340 - RNA, 18 nt, Human
ucugaacauauaauucaa

SEQ ID NO: 392341 - RNA, 22 nt, Human
ugacacaugccuguaaucccag

SEQ ID NO: 392342 - RNA, 21 nt, Human
ugcacaguugcucacgugugu

SEQ ID NO: 392343 - RNA, 22 nt, Human
ugcaguccagccugggugacag

SEQ ID NO: 392344 - RNA, 24 nt, Human
ugcaguccagccugggugacagag

SEQ ID NO: 392345 - RNA, 21 nt, Human
ugccaaaacagccaaaggaaa

SEQ ID NO: 392346 - RNA, 24 nt, Human
ugccuguaaucccaguuacuuggg

SEQ ID NO: 392347 - RNA, 24 nt, Human
ugccuuugggaaaaaaaggggagu

SEQ ID NO: 392348 - RNA, 25 nt, Human
ugccuuugggaaaaaaaggggaguu

SEQ ID NO: 392349 - RNA, 18 nt, Human
uggccaauauggugaaac

SEQ ID NO: 392350 - RNA, 24 nt, Human
ugggagagggcagggcaaagaagu

SEQ ID NO: 392351 - RNA, 24 nt, Human
uggugacacaugccuguaauccca

SEQ ID NO: 392352 - RNA, 21 nt, Human
uguaucaagaaacaccaggcc

SEQ ID NO: 392353 - RNA, 24 nt, Human
ugugcauacacauauauacaaugu

SEQ ID NO: 392354 - RNA, 24 nt, Human
uuagcugggcauggugacacaugc

SEQ ID NO: 392355 - RNA, 24 nt, Human
uuaggcaggagaauggcuugaacc

SEQ ID NO: 392356 - RNA, 18 nt, Human
uugcaguccagccugggu

SEQ ID NO: 392357 - RNA, 22 nt, Human
uugcagugaaccaagaucgcgu

SEQ ID NO: 392358 - RNA, 21 nt, Human
uugcuucucuaccaccaccua

SEQ ID NO: 392359 - RNA, 24 nt, Human
uugugaacauuuugucuucuacaa

SEQ ID NO: 392360 - RNA, 20 nt, Human
uuuaagaagaaaaugagaaa

SEQ ID NO: 392361 - RNA, 18 nt, Human
uuugggagagggcagggc

SEQ ID NO: 392362 - RNA, 21 nt, Human
aaaaaauaggcugugaaacca

SEQ ID NO: 392363 - RNA, 21 nt, Human
aaggcacugucugagaagcac

SEQ ID NO: 392364 - RNA, 22 nt, Human
acugucugagaagcacggaggu

SEQ ID NO: 392365 - RNA, 21 nt, Human
agaauaauauaauguacugca

SEQ ID NO: 392366 - RNA, 26 nt, Human
aggcagaugcuaucauugaccuucuu

SEQ ID NO: 392367 - RNA, 24 nt, Human
aucaaauuguuucuagaauuaaau

SEQ ID NO: 392368 - RNA, 20 nt, Human
augcauacauauauucaaac

SEQ ID NO: 392369 - RNA, 20 nt, Human
caaacuguauuuaugaaaau

SEQ ID NO: 392370 - RNA, 22 nt, Human
gaaguuuacaaguuuauaaaga

SEQ ID NO: 392371 - RNA, 24 nt, Human
ugaaaaggcacugucugagaagca

SEQ ID NO: 392372 - RNA, 18 nt, Human
ugucugagaagcacggag

SEQ ID NO: 392373 - RNA, 20 nt, Human
uugaaauagaugaaguuuac

SEQ ID NO: 392374 - RNA, 20 nt, Human
uuuaauaggaaaacacccua

SEQ ID NO: 392375 - RNA, 22 nt, Human
uuuuuaauaggaaaacacccua

SEQ ID NO: 392376 - RNA, 18 nt, Human
uuuuuuuuuuuuuuuuug

SEQ ID NO: 392377 - RNA, 23 nt, Human
aaaaacagcagaagcauuaugac

SEQ ID NO: 392378 - RNA, 19 nt, Human
aaacaacaguaaggaaagg

SEQ ID NO: 392379 - RNA, 21 nt, Human
aaccucaggucauuaaaucac

SEQ ID NO: 392380 - RNA, 24 nt, Human
acaacaguaaggaaaggcuauuac

SEQ ID NO: 392381 - RNA, 21 nt, Human
acaaggaggaaacaagucaau

SEQ ID NO: 392382 - RNA, 19 nt, Human
acagaagaggcgaaaacau

SEQ ID NO: 392383 - RNA, 21 nt, Human
acaggaauauagucuuuuuca

SEQ ID NO: 392384 - RNA, 21 nt, Human
auucacagaaccaaacaacag

SEQ ID NO: 392385 - RNA, 24 nt, Human
caauagguuucacuccauuagcuc

SEQ ID NO: 392386 - RNA, 18 nt, Human
cacagaaccaaacaacag

SEQ ID NO: 392387 - RNA, 19 nt, Human
cacuccauuagcucuaucc

SEQ ID NO: 392388 - RNA, 23 nt, Human
cacuccauuagcucuauccugcc

SEQ ID NO: 392389 - RNA, 24 nt, Human
cagaagcauuaugaccaaaccuca

SEQ ID NO: 392390 - RNA, 19 nt, Human
cagauaaaccuacaaaaac

SEQ ID NO: 392391 - RNA, 25 nt, Human
cagauaaaccuacaaaaacagcaga

SEQ ID NO: 392392 - RNA, 21 nt, Human
caguagcaaaggaaaacgauc

SEQ ID NO: 392393 - RNA, 23 nt, Human
caugcacauuggccuuugcaguu

SEQ ID NO: 392394 - RNA, 21 nt, Human
cauucacagaaccaaacaaca

SEQ ID NO: 392395 - RNA, 19 nt, Human
gcagucccccugccggaau

SEQ ID NO: 392396 - RNA, 22 nt, Human
ggccuuugcagucccccugccg

SEQ ID NO: 392397 - RNA, 18 nt, Human
ggggguucaguuccauua

SEQ ID NO: 392398 - RNA, 21 nt, Human
gguuucacuccauuagcucua

SEQ ID NO: 392399 - RNA, 21 nt, Human
uaccccuggggguucaguucc

SEQ ID NO: 392400 - RNA, 18 nt, Human
ucaauguuccuguugagg

SEQ ID NO: 392401 - RNA, 18 nt, Human
ucacagaaccaaacaaca

SEQ ID NO: 392402 - RNA, 21 nt, Human
ucagauaaaccuacaaaaaca

SEQ ID NO: 392403 - RNA, 22 nt, Human
uccacauaucaauaacauaggc

SEQ ID NO: 392404 - RNA, 23 nt, Human
uccacauaucaauaacauaggca

SEQ ID NO: 392405 - RNA, 24 nt, Human
ugccaauaugccugaagauguccu

SEQ ID NO: 392406 - RNA, 19 nt, Human
ugccugaagauguccuauu

SEQ ID NO: 392407 - RNA, 19 nt, Human
ugcuccaauucccuucugc

SEQ ID NO: 392408 - RNA, 21 nt, Human
ugcugggauaacauuggcuac

SEQ ID NO: 392409 - RNA, 24 nt, Human
ugggauaacauuggcuacaaagca

SEQ ID NO: 392410 - RNA, 23 nt, Human
uuaacaggaauauagucuuuuuc

SEQ ID NO: 392411 - RNA, 24 nt, Human
uuggccuuugcagucccccugccg

SEQ ID NO: 392412 - RNA, 22 nt, Human
aaaauagcuuuauccucuguca

SEQ ID NO: 392413 - RNA, 23 nt, Human
aaagucaagacccuagcacccac

SEQ ID NO: 392414 - RNA, 18 nt, Human
aagcaugaggugagcugg

SEQ ID NO: 392415 - RNA, 22 nt, Human
aagcaugaggugagcuggagga

SEQ ID NO: 392416 - RNA, 23 nt, Human
aaguaaaggggacaagccaaugu

SEQ ID NO: 392417 - RNA, 22 nt, Human
acagcccucuccccaaauaaga

SEQ ID NO: 392418 - RNA, 21 nt, Human
acaucacagcccucuccccaa

SEQ ID NO: 392419 - RNA, 20 nt, Human
acuccuguccccacaauccc

SEQ ID NO: 392420 - RNA, 24 nt, Human
agaaaagccagugcuguaccuggg

SEQ ID NO: 392421 - RNA, 20 nt, Human
agaggaguggggguggccug

SEQ ID NO: 392422 - RNA, 26 nt, Human
aggaguggggguggccugucaggggc

SEQ ID NO: 392423 - RNA, 21 nt, Human
aggccucugaggucaaccccu

SEQ ID NO: 392424 - RNA, 24 nt, Human
aggucauggagugagggugguaga

SEQ ID NO: 392425 - RNA, 18 nt, Human
aucacagcccucucccca

SEQ ID NO: 392426 - RNA, 20 nt, Human
caaacaaacaaacuuugaga

SEQ ID NO: 392427 - RNA, 21 nt, Human
cacuuugugaucucacagguc

SEQ ID NO: 392428 - RNA, 20 nt, Human
cagaacacaaacaaacaaac

SEQ ID NO: 392429 - RNA, 20 nt, Human
cagcccucuccccaaauaag

SEQ ID NO: 392430 - RNA, 24 nt, Human
cagcccucuccccaaauaagaagc

SEQ ID NO: 392431 - RNA, 24 nt, Human
cagccuguucagcucuccaaccaa

SEQ ID NO: 392432 - RNA, 18 nt, Human
ccccuuuacaucacagcc

SEQ ID NO: 392433 - RNA, 18 nt, Human
ccucccggccuggggcug

SEQ ID NO: 392434 - RNA, 24 nt, Human
cuccaagacaugcagaggaguggg

SEQ ID NO: 392435 - RNA, 23 nt, Human
gaggggcagaaauuucaggggga

SEQ ID NO: 392436 - RNA, 23 nt, Human
gaucuguccuuucagacacccac

SEQ ID NO: 392437 - RNA, 18 nt, Human
gccuggggcuggggagcc

SEQ ID NO: 392438 - RNA, 20 nt, Human
gcugaaaagaaaagccagug

SEQ ID NO: 392439 - RNA, 22 nt, Human
ggaaaaaguaaaggggacaagc

SEQ ID NO: 392440 - RNA, 22 nt, Human
ggagugagggugguagagaggg

SEQ ID NO: 392441 - RNA, 23 nt, Human
gggcccaccuggcucugcuccug

SEQ ID NO: 392442 - RNA, 19 nt, Human
gggcggggcgcugcgaggg

SEQ ID NO: 392443 - RNA, 20 nt, Human
gggcugaaaagaaaagccag

SEQ ID NO: 392444 - RNA, 25 nt, Human
ggggcuggggagccgcgggcgggcg

SEQ ID NO: 392445 - RNA, 19 nt, Human
ggggggugagccaguuuug

SEQ ID NO: 392446 - RNA, 20 nt, Human
ggggguggccugucaggggc

SEQ ID NO: 392447 - RNA, 19 nt, Human
gggguuuauccuuuccuca

SEQ ID NO: 392448 - RNA, 21 nt, Human
gucaaccccuuuacaucacag

SEQ ID NO: 392449 - RNA, 22 nt, Human
guccccacaaucccugauacuc

SEQ ID NO: 392450 - RNA, 24 nt, Human
guggggguggccugucaggggcug

SEQ ID NO: 392451 - RNA, 22 nt, Human
uaaaaaaaaaaaaaauguccag

SEQ ID NO: 392452 - RNA, 25 nt, Human
uaaagucaagacccuagcacccacu

SEQ ID NO: 392453 - RNA, 18 nt, Human
uauccuuuccucaguccc

SEQ ID NO: 392454 - RNA, 22 nt, Human
ucaucuucacuuugugaucuca

SEQ ID NO: 392455 - RNA, 19 nt, Human
uccagggcccaccuggcuc

SEQ ID NO: 392456 - RNA, 21 nt, Human
uccccacaaucccugauacuc

SEQ ID NO: 392457 - RNA, 25 nt, Human
ucccugggaggaggguguucugggg

SEQ ID NO: 392458 - RNA, 20 nt, Human
uccucagucccagccuguuc

SEQ ID NO: 392459 - RNA, 19 nt, Human
uccuuucagacacccacug

SEQ ID NO: 392460 - RNA, 20 nt, Human
ugagcuggaggacccucccu

SEQ ID NO: 392461 - RNA, 21 nt, Human
ugagggugguagagaggggca

SEQ ID NO: 392462 - RNA, 23 nt, Human
ugaucuguccuuucagacaccca

SEQ ID NO: 392463 - RNA, 22 nt, Human
ugcagcggagauaaagucaaga

SEQ ID NO: 392464 - RNA, 20 nt, Human
ugcuguaccugggggguugu

SEQ ID NO: 392465 - RNA, 18 nt, Human
ugggaaaaaguaaagggg

SEQ ID NO: 392466 - RNA, 22 nt, Human
uucagggggagggguggcuggg

SEQ ID NO: 392467 - RNA, 23 nt, Human
uuuacaucacagcccucucccca

SEQ ID NO: 392468 - RNA, 20 nt, Human
uuuuuuuuuuuuuuuuuggu

SEQ ID NO: 392469 - RNA, 28 nt, Human
uuuuuuuuuuuuuuuuuuuuuuuggggg

SEQ ID NO: 392470 - RNA, 18 nt, Human
aaccugggcucuggggac

SEQ ID NO: 392471 - RNA, 19 nt, Human
aagcagcccuggaugagac

SEQ ID NO: 392472 - RNA, 20 nt, Human
aaggggggccggggaagggg

SEQ ID NO: 392473 - RNA, 18 nt, Human
aaggugcuggggggugcc

SEQ ID NO: 392474 - RNA, 18 nt, Human
accugcugugcucccuuc

SEQ ID NO: 392475 - RNA, 21 nt, Human
agaacaguggcagggagugug

SEQ ID NO: 392476 - RNA, 19 nt, Human
agagcagggugaugguggg

SEQ ID NO: 392477 - RNA, 23 nt, Human
aggcagguaaauugaggugggga

SEQ ID NO: 392478 - RNA, 21 nt, Human
agggaacagugcccaccaagg

SEQ ID NO: 392479 - RNA, 19 nt, Human
aggugcuccccuaacccag

SEQ ID NO: 392480 - RNA, 20 nt, Human
cagggucgggaugaagaagg

SEQ ID NO: 392481 - RNA, 22 nt, Human
cagugcccaccaaggguuuguc

SEQ ID NO: 392482 - RNA, 25 nt, Human
caguggcagggagugugugugcugg

SEQ ID NO: 392483 - RNA, 21 nt, Human
caguggccacacaugcuggag

SEQ ID NO: 392484 - RNA, 18 nt, Human
caucaugcucccccaagg

SEQ ID NO: 392485 - RNA, 24 nt, Human
ccacugggcggcugagccuggucc

SEQ ID NO: 392486 - RNA, 24 nt, Human
cccaccucucccugugggucccuc

SEQ ID NO: 392487 - RNA, 18 nt, Human
ccccaccucucugagguc

SEQ ID NO: 392488 - RNA, 24 nt, Human
ccccccaggggugccaggcaggug

SEQ ID NO: 392489 - RNA, 23 nt, Human
ccccgaccggacacucccagggc

SEQ ID NO: 392490 - RNA, 19 nt, Human
cccuaacccagcgccccuc

SEQ ID NO: 392491 - RNA, 19 nt, Human
cccuccucuccucucuucu

SEQ ID NO: 392492 - RNA, 23 nt, Human
cccuggaugagaacuccagcucu

SEQ ID NO: 392493 - RNA, 21 nt, Human
ccuaacccagcgccccucgau

SEQ ID NO: 392494 - RNA, 21 nt, Human
ccucaacuuccuggagccugg

SEQ ID NO: 392495 - RNA, 20 nt, Human
ccucaauccuggaccccccc

SEQ ID NO: 392496 - RNA, 23 nt, Human
ccucaauccuggacccccccagg

SEQ ID NO: 392497 - RNA, 21 nt, Human
ccugcccaucaugcuccccca

SEQ ID NO: 392498 - RNA, 21 nt, Human
ccuggguccugggccugaggc

SEQ ID NO: 392499 - RNA, 19 nt, Human
cgcagaacaguggcaggga

SEQ ID NO: 392500 - RNA, 18 nt, Human
cuccuggguccugggccu

SEQ ID NO: 392501 - RNA, 24 nt, Human
cugcuacucucucccucugggccu

SEQ ID NO: 392502 - RNA, 24 nt, Human
cuggacccccccaggggugccagg

SEQ ID NO: 392503 - RNA, 25 nt, Human
cugggguagguggggaggccuccug

SEQ ID NO: 392504 - RNA, 20 nt, Human
cuuccuggagccugggcacu

SEQ ID NO: 392505 - RNA, 18 nt, Human
cuuggucuccauccugcc

SEQ ID NO: 392506 - RNA, 22 nt, Human
gaacuccagcucugcccaccuc

SEQ ID NO: 392507 - RNA, 19 nt, Human
gagccugguccgagcucgc

SEQ ID NO: 392508 - RNA, 18 nt, Human
gagugugugugcuggggu

SEQ ID NO: 392509 - RNA, 19 nt, Human
gcagggugaugguggguca

SEQ ID NO: 392510 - RNA, 18 nt, Human
gccacacaugcuggaggc

SEQ ID NO: 392511 - RNA, 20 nt, Human
gccaugcaaggagucugggc

SEQ ID NO: 392512 - RNA, 23 nt, Human
gcccuccucuccucucuucuccc

SEQ ID NO: 392513 - RNA, 19 nt, Human
gcggaaugagccgggcugg

SEQ ID NO: 392514 - RNA, 19 nt, Human
gcucugcccaccucucccu

SEQ ID NO: 392515 - RNA, 27 nt, Human
gcuggggggugccccaucuuccugggc

SEQ ID NO: 392516 - RNA, 20 nt, Human
gcugguugcucugggcucug

SEQ ID NO: 392517 - RNA, 22 nt, Human
ggaaggggggucguggggaggg

SEQ ID NO: 392518 - RNA, 21 nt, Human
ggacacucccagggccucugc

SEQ ID NO: 392519 - RNA, 23 nt, Human
ggacacucccagggccucugcuc

SEQ ID NO: 392520 - RNA, 21 nt, Human
ggagaugcucacccugcaucc

SEQ ID NO: 392521 - RNA, 20 nt, Human
ggccugggacacaaaggggc

SEQ ID NO: 392522 - RNA, 19 nt, Human
ggccuuugagggccccugc

SEQ ID NO: 392523 - RNA, 20 nt, Human
gggccuuugagggccccugc

SEQ ID NO: 392524 - RNA, 18 nt, Human
gggcucuggggacaagca

SEQ ID NO: 392525 - RNA, 21 nt, Human
gggcucuggggacaagcagcc

SEQ ID NO: 392526 - RNA, 20 nt, Human
ggguggguggggguacagug

SEQ ID NO: 392527 - RNA, 20 nt, Human
gguagguggggaggccuccu

SEQ ID NO: 392528 - RNA, 20 nt, Human
ggugggguuuggagguggcc

SEQ ID NO: 392529 - RNA, 20 nt, Human
gguggguggggguacagugg

SEQ ID NO: 392530 - RNA, 19 nt, Human
gguguccccuauccccacc

SEQ ID NO: 392531 - RNA, 18 nt, Human
gguuuggagguggccuga

SEQ ID NO: 392532 - RNA, 23 nt, Human
gugcugguugcucugggcucugg

SEQ ID NO: 392533 - RNA, 20 nt, Human
gugggguuuggagguggccu

SEQ ID NO: 392534 - RNA, 23 nt, Human
uacaguggccacacaugcuggag

SEQ ID NO: 392535 - RNA, 22 nt, Human
uacccugcggccagcccccgcc

SEQ ID NO: 392536 - RNA, 23 nt, Human
ucauaugaaacucauaaauaccc

SEQ ID NO: 392537 - RNA, 22 nt, Human
uccacuccacacugcagagucu

SEQ ID NO: 392538 - RNA, 22 nt, Human
ucccccaagggugggugggggu

SEQ ID NO: 392539 - RNA, 18 nt, Human
ucugaaacccagagaccu

SEQ ID NO: 392540 - RNA, 22 nt, Human
ucuggggacaagcagcccugga

SEQ ID NO: 392541 - RNA, 20 nt, Human
ugaaacaggugcuccccuaa

SEQ ID NO: 392542 - RNA, 21 nt, Human
ugaagaagggaaggggcacag

SEQ ID NO: 392543 - RNA, 22 nt, Human
ugaagaagggaaggggcacagu

SEQ ID NO: 392544 - RNA, 21 nt, Human
ugaagguguccccuaucccca

SEQ ID NO: 392545 - RNA, 20 nt, Human
ugagccugguccgagcucgc

SEQ ID NO: 392546 - RNA, 18 nt, Human
ugaggaccacacaagcca

SEQ ID NO: 392547 - RNA, 22 nt, Human
ugagggccccugcuccaacccc

SEQ ID NO: 392548 - RNA, 24 nt, Human
ugcaaggagucugggcaccaggcc

SEQ ID NO: 392549 - RNA, 18 nt, Human
ugccaggcagguguggag

SEQ ID NO: 392550 - RNA, 25 nt, Human
ugcuccaaccccaagcugcauuuau

SEQ ID NO: 392551 - RNA, 28 nt, Human
ugcuggggggugccccaucuuccugggc

SEQ ID NO: 392552 - RNA, 18 nt, Human
uggaggcugaaggugucc

SEQ ID NO: 392553 - RNA, 24 nt, Human
ugggcggcugagccugguccgagg

SEQ ID NO: 392554 - RNA, 23 nt, Human
ugggcucuggggacaagcagccc

SEQ ID NO: 392555 - RNA, 22 nt, Human
ugggucagcgccccggacaggc

SEQ ID NO: 392556 - RNA, 25 nt, Human
ugggucccucaacuucccccuaggg

SEQ ID NO: 392557 - RNA, 21 nt, Human
uggguccugggccugaggccu

SEQ ID NO: 392558 - RNA, 22 nt, Human
uggguggggguacaguggccac

SEQ ID NO: 392559 - RNA, 21 nt, Human
uguccccuauccccaccucuc

SEQ ID NO: 392560 - RNA, 22 nt, Human
uuuuuuuuuuugaacaggaacu

SEQ ID NO: 392561 - RNA, 24 nt, Human
uuuuuuuuuuugaacaggaacugg

SEQ ID NO: 392562 - RNA, 22 nt, Human
uuuuuuuuuuuuuugaacagga

SEQ ID NO: 392563 - RNA, 23 nt, Human
uuuuuuuuuuuuuuuugaacagg

SEQ ID NO: 392564 - RNA, 18 nt, Human
uuuuuuuuuuuuuuuuug

SEQ ID NO: 392565 - RNA, 23 nt, Human
aaaagaauaaacacagccuucag

SEQ ID NO: 392566 - RNA, 23 nt, Human
aaacacagccuucaguggaugga

SEQ ID NO: 392567 - RNA, 22 nt, Human
aaggcaaaaaggaaggcccuaa

SEQ ID NO: 392568 - RNA, 21 nt, Human
aagucaaagggaaaaagaagg

SEQ ID NO: 392569 - RNA, 22 nt, Human
aagugcucaauaaauuaaaagc

SEQ ID NO: 392570 - RNA, 21 nt, Human
aaugcccauccuuccuugugc

SEQ ID NO: 392571 - RNA, 19 nt, Human
acaaggcaaaaaggaaggc

SEQ ID NO: 392572 - RNA, 22 nt, Human
acccaaguccaaccaggccucc

SEQ ID NO: 392573 - RNA, 22 nt, Human
accccaccaacagcaagaauaa

SEQ ID NO: 392574 - RNA, 20 nt, Human
acuacaggauuaaaaguuuc

SEQ ID NO: 392575 - RNA, 18 nt, Human
acucugggagauucuguc

SEQ ID NO: 392576 - RNA, 23 nt, Human
agcagaccaucguggccugcaga

SEQ ID NO: 392577 - RNA, 20 nt, Human
aggaacccaaguccaaccag

SEQ ID NO: 392578 - RNA, 23 nt, Human
aggaacccaaguccaaccaggcc

SEQ ID NO: 392579 - RNA, 21 nt, Human
aggaaugaauagaaaugagug

SEQ ID NO: 392580 - RNA, 21 nt, Human
auccaggaacccaaguccaac

SEQ ID NO: 392581 - RNA, 20 nt, Human
caaggcaaaaaggaaggccc

SEQ ID NO: 392582 - RNA, 20 nt, Human
cacaaggcaaaaaggaaggc

SEQ ID NO: 392583 - RNA, 23 nt, Human
cacacagugccugguaaacaacu

SEQ ID NO: 392584 - RNA, 20 nt, Human
cacagucuugacagcagggu

SEQ ID NO: 392585 - RNA, 19 nt, Human
caccaacagcaagaauaac

SEQ ID NO: 392586 - RNA, 23 nt, Human
caccauccaggaacccaagucca

SEQ ID NO: 392587 - RNA, 19 nt, Human
caccaugcuggcugcuucu

SEQ ID NO: 392588 - RNA, 21 nt, Human
caccugauccuucugccccag

SEQ ID NO: 392589 - RNA, 19 nt, Human
cagcucaggcugcuuccgg

SEQ ID NO: 392590 - RNA, 21 nt, Human
ccaaauacccuggccuucaac

SEQ ID NO: 392591 - RNA, 24 nt, Human
ccaaauacccuggccuucaacugg

SEQ ID NO: 392592 - RNA, 22 nt, Human
ccaccaacagcaagaauaacgu

SEQ ID NO: 392593 - RNA, 19 nt, Human
ccaggaacccaaguccaac

SEQ ID NO: 392594 - RNA, 19 nt, Human
ccauuaugaggggcacagg

SEQ ID NO: 392595 - RNA, 22 nt, Human
cccaaauacccuggccuucaac

SEQ ID NO: 392596 - RNA, 20 nt, Human
cccaccaacagcaagaauaa

SEQ ID NO: 392597 - RNA, 24 nt, Human
cccauccuuccuugugcuugggaa

SEQ ID NO: 392598 - RNA, 18 nt, Human
cccaugugugcaccccug

SEQ ID NO: 392599 - RNA, 18 nt, Human
ccccagagcucagcacuu

SEQ ID NO: 392600 - RNA, 25 nt, Human
ccccugaauggccaaacccuggggc

SEQ ID NO: 392601 - RNA, 21 nt, Human
ccuauacuacaggauuaaaag

SEQ ID NO: 392602 - RNA, 18 nt, Human
cuaauacccuuccccuuc

SEQ ID NO: 392603 - RNA, 19 nt, Human
cuaguccuaagaaggugaa

SEQ ID NO: 392604 - RNA, 22 nt, Human
cuccgucuucugauuacuccuc

SEQ ID NO: 392605 - RNA, 18 nt, Human
cugaagaucccaguauuc

SEQ ID NO: 392606 - RNA, 19 nt, Human
cugauuacuccuccugcca

SEQ ID NO: 392607 - RNA, 24 nt, Human
cuggauccuccgccacagcucagg

SEQ ID NO: 392608 - RNA, 27 nt, Human
cuguacaacaaucccaccauccaggaa

SEQ ID NO: 392609 - RNA, 21 nt, Human
cuuccuggauccuccgccaca

SEQ ID NO: 392610 - RNA, 21 nt, Human
gaccuggggagacugcgaggu

SEQ ID NO: 392611 - RNA, 21 nt, Human
gauuucuguagaagucaaagg

SEQ ID NO: 392612 - RNA, 18 nt, Human
gcaauaaacggucucugg

SEQ ID NO: 392613 - RNA, 24 nt, Human
gcucaauaaauuaaaagccacaaa

SEQ ID NO: 392614 - RNA, 23 nt, Human
gcugcuggcggaccuggggagac

SEQ ID NO: 392615 - RNA, 25 nt, Human
ggaggcacggaacaccaugcuggcu

SEQ ID NO: 392616 - RNA, 23 nt, Human
guccgggaggcacggaacaccau

SEQ ID NO: 392617 - RNA, 19 nt, Human
gugugcaccccugaauggc

SEQ ID NO: 392618 - RNA, 24 nt, Human
uaaaaguuucaauuaaaagacaau

SEQ ID NO: 392619 - RNA, 23 nt, Human
uacauaggccaaaugcacguggu

SEQ ID NO: 392620 - RNA, 18 nt, Human
uaccccaccaacagcaag

SEQ ID NO: 392621 - RNA, 19 nt, Human
uaccugagugaggaggggg

SEQ ID NO: 392622 - RNA, 22 nt, Human
uacuaagagcagucuugaaaac

SEQ ID NO: 392623 - RNA, 24 nt, Human
uagaagucaaagggaaaaagaagg

SEQ ID NO: 392624 - RNA, 19 nt, Human
uauauacagcauacaaaua

SEQ ID NO: 392625 - RNA, 18 nt, Human
uauuuauuuauccaagau

SEQ ID NO: 392626 - RNA, 23 nt, Human
ucacaaggcaaaaaggaaggccc

SEQ ID NO: 392627 - RNA, 19 nt, Human
uccacuguauaaguaaaau

SEQ ID NO: 392628 - RNA, 20 nt, Human
uccccagacacauuuaccug

SEQ ID NO: 392629 - RNA, 19 nt, Human
uccuaagaaggugaacucc

SEQ ID NO: 392630 - RNA, 21 nt, Human
uccuaagaaggugaacuccua

SEQ ID NO: 392631 - RNA, 23 nt, Human
ucucuggaugacugauacaguuu

SEQ ID NO: 392632 - RNA, 19 nt, Human
ucugauuagcugcggccac

SEQ ID NO: 392633 - RNA, 21 nt, Human
ugaaaacugagauguuuucaa

SEQ ID NO: 392634 - RNA, 21 nt, Human
ugaaggcgcugcccagagcag

SEQ ID NO: 392635 - RNA, 20 nt, Human
ugacucuaauacccuucccc

SEQ ID NO: 392636 - RNA, 23 nt, Human
ugagauguuuucaaaacaaaaga

SEQ ID NO: 392637 - RNA, 23 nt, Human
ugagugauuuuaaucaccauuuc

SEQ ID NO: 392638 - RNA, 20 nt, Human
ugcccagagcagccagccug

SEQ ID NO: 392639 - RNA, 19 nt, Human
uggauccuccgccacagcu

SEQ ID NO: 392640 - RNA, 25 nt, Human
uuaccccaccaacagcaagaauaac

SEQ ID NO: 392641 - RNA, 19 nt, Human
uuaccugagugaggagggg

SEQ ID NO: 392642 - RNA, 19 nt, Human
uuauuuauguguuuccacu

SEQ ID NO: 392643 - RNA, 19 nt, Human
uuccuuggcgcucacaagg

SEQ ID NO: 392644 - RNA, 24 nt, Human
uuccuugugcuugggaaucuggga

SEQ ID NO: 392645 - RNA, 24 nt, Human
uucuggcugaaccggcugcuggcg

SEQ ID NO: 392646 - RNA, 20 nt, Human
uugaaaacugagauguuuuc

SEQ ID NO: 392647 - RNA, 24 nt, Human
uuggcgcucacaaggcaaaaagga

SEQ ID NO: 392648 - RNA, 20 nt, Human
uugugcuugggaaucuggga

SEQ ID NO: 392649 - RNA, 20 nt, Human
aggcaguaccccgcccgggc

SEQ ID NO: 392650 - RNA, 19 nt, Human
ggugcaggcaguaccccgc

SEQ ID NO: 392651 - RNA, 23 nt, Human
ugccccggacucggcucgcgcac

SEQ ID NO: 392652 - RNA, 27 nt, Human
aaaaaaacaaaaacagggcaaguuuag

SEQ ID NO: 392653 - RNA, 23 nt, Human
aaaacucacggcccagucccaca

SEQ ID NO: 392654 - RNA, 23 nt, Human
aaacaaaaacagggcaaguuuag

SEQ ID NO: 392655 - RNA, 24 nt, Human
aaacaacaaugaggaaggaagggc

SEQ ID NO: 392656 - RNA, 18 nt, Human
aaacagguaacagaccaa

SEQ ID NO: 392657 - RNA, 19 nt, Human
aaacagguaacagaccaaa

SEQ ID NO: 392658 - RNA, 20 nt, Human
aaaguacaaaagcuuuucug

SEQ ID NO: 392659 - RNA, 21 nt, Human
aacaaacuaaaaaaacaaaaa

SEQ ID NO: 392660 - RNA, 20 nt, Human
aacuaaaaaaacaaaaacag

SEQ ID NO: 392661 - RNA, 26 nt, Human
aacuuagaaacaaaugauuucguagg

SEQ ID NO: 392662 - RNA, 25 nt, Human
aacuucuuuccaauggaaaacucac

SEQ ID NO: 392663 - RNA, 22 nt, Human
aagcaaaaagcacagaagggac

SEQ ID NO: 392664 - RNA, 22 nt, Human
aagcaaaaagcacagaaggugg

SEQ ID NO: 392665 - RNA, 18 nt, Human
aagcacagaagguggagu

SEQ ID NO: 392666 - RNA, 24 nt, Human
acacuugaagccacaaaacugcag

SEQ ID NO: 392667 - RNA, 22 nt, Human
acuaaaaaaacaaaaacagggc

SEQ ID NO: 392668 - RNA, 20 nt, Human
acuccauuaucccaagcaag

SEQ ID NO: 392669 - RNA, 20 nt, Human
acugguugugaauagggaga

SEQ ID NO: 392670 - RNA, 22 nt, Human
agaccaaaaacuaaagugcauc

SEQ ID NO: 392671 - RNA, 22 nt, Human
agagcagcucagagccacaacc

SEQ ID NO: 392672 - RNA, 19 nt, Human
agaggaagaggcuacagau

SEQ ID NO: 392673 - RNA, 22 nt, Human
agcccacaggaaggagcuggag

SEQ ID NO: 392674 - RNA, 23 nt, Human
agccuggugggaaagcggacucc

SEQ ID NO: 392675 - RNA, 18 nt, Human
agcucagagggagcaaag

SEQ ID NO: 392676 - RNA, 21 nt, Human
agcugucuguggcagcccaca

SEQ ID NO: 392677 - RNA, 20 nt, Human
aggaaaugagggguggaagg

SEQ ID NO: 392678 - RNA, 24 nt, Human
aggaagugccuuuaguaaguucuc

SEQ ID NO: 392679 - RNA, 20 nt, Human
agguccacugggugaaugaa

SEQ ID NO: 392680 - RNA, 19 nt, Human
auaaacacaacuuagaaac

SEQ ID NO: 392681 - RNA, 23 nt, Human
caaaaaggaaaugagggguggaa

SEQ ID NO: 392682 - RNA, 22 nt, Human
caaagcauccaccagaagaggc

SEQ ID NO: 392683 - RNA, 22 nt, Human
caaaguacaaaagcuuuucuga

SEQ ID NO: 392684 - RNA, 23 nt, Human
caaaugauuucguaggauagcac

SEQ ID NO: 392685 - RNA, 18 nt, Human
caagccagaggcuggagg

SEQ ID NO: 392686 - RNA, 23 nt, Human
cacaggaaggagcuggagauccc

SEQ ID NO: 392687 - RNA, 20 nt, Human
cagaacacaccaccuguaau

SEQ ID NO: 392688 - RNA, 23 nt, Human
cagcccacaggaaggagcuggag

SEQ ID NO: 392689 - RNA, 19 nt, Human
cagcucagagggagcaaag

SEQ ID NO: 392690 - RNA, 23 nt, Human
cauuaucacagaacacaccaccu

SEQ ID NO: 392691 - RNA, 21 nt, Human
cauucuuggcacuguuucuaa

SEQ ID NO: 392692 - RNA, 23 nt, Human
ccccacugccccaaacaggucug

SEQ ID NO: 392693 - RNA, 23 nt, Human
ccccuucccuauccuugcuuggg

SEQ ID NO: 392694 - RNA, 19 nt, Human
cccgaaucucuggcuugac

SEQ ID NO: 392695 - RNA, 20 nt, Human
cccucugcuggucccacuuc

SEQ ID NO: 392696 - RNA, 22 nt, Human
ccugaaguuggcgcccucugcu

SEQ ID NO: 392697 - RNA, 21 nt, Human
ccuuaucuagguuugcucccc

SEQ ID NO: 392698 - RNA, 19 nt, Human
cgaaucucuggcuugacac

SEQ ID NO: 392699 - RNA, 22 nt, Human
cgccuaaaaggccacaaauuuc

SEQ ID NO: 392700 - RNA, 20 nt, Human
cgggguggcaugucacucca

SEQ ID NO: 392701 - RNA, 20 nt, Human
cggguggcucuaccaaacag

SEQ ID NO: 392702 - RNA, 20 nt, Human
cucagagccacaaccacucc

SEQ ID NO: 392703 - RNA, 21 nt, Human
cucccgccuaaaaggccacaa

SEQ ID NO: 392704 - RNA, 18 nt, Human
cugaacuucuuuccaaug

SEQ ID NO: 392705 - RNA, 22 nt, Human
cuggggguagcugucuguggca

SEQ ID NO: 392706 - RNA, 19 nt, Human
cuugaagccacaaaacugc

SEQ ID NO: 392707 - RNA, 22 nt, Human
cuuuguagggccugacaguuga

SEQ ID NO: 392708 - RNA, 22 nt, Human
gaacugugcgcauaccaaacaa

SEQ ID NO: 392709 - RNA, 20 nt, Human
gaaggaagggccggguggcu

SEQ ID NO: 392710 - RNA, 19 nt, Human
gaagucuucccacccaugg

SEQ ID NO: 392711 - RNA, 21 nt, Human
gaagugccuuuaguaaguucu

SEQ ID NO: 392712 - RNA, 19 nt, Human
gagccacaaccacucccaa

SEQ ID NO: 392713 - RNA, 20 nt, Human
gaugggguugacaaaaaagg

SEQ ID NO: 392714 - RNA, 19 nt, Human
gcaaagcauccaccagaag

SEQ ID NO: 392715 - RNA, 18 nt, Human
gcuaaaucagaggacagc

SEQ ID NO: 392716 - RNA, 21 nt, Human
ggaaaacucacggcccagucc

SEQ ID NO: 392717 - RNA, 19 nt, Human
ggaaaugagggguggaagg

SEQ ID NO: 392718 - RNA, 25 nt, Human
gggaaagggaacacauuacuuuugu

SEQ ID NO: 392719 - RNA, 21 nt, Human
gggauaacaaacuaaaaaaac

SEQ ID NO: 392720 - RNA, 20 nt, Human
gggauuggggcucucacugg

SEQ ID NO: 392721 - RNA, 18 nt, Human
ggguggaaggagaggaag

SEQ ID NO: 392722 - RNA, 19 nt, Human
gguccacugggugaaugaa

SEQ ID NO: 392723 - RNA, 18 nt, Human
gucccacuucucaucgug

SEQ ID NO: 392724 - RNA, 19 nt, Human
guggcagcccacaggaagg

SEQ ID NO: 392725 - RNA, 21 nt, Human
uaaaaaaacaaaaacagggca

SEQ ID NO: 392726 - RNA, 19 nt, Human
uaaaaggccacaaauuucu

SEQ ID NO: 392727 - RNA, 23 nt, Human
uaacagggguuuaacaggaagga

SEQ ID NO: 392728 - RNA, 27 nt, Human
uaauaucuugucauucuuggcacuguu

SEQ ID NO: 392729 - RNA, 23 nt, Human
uaggccuagcagagaaucaccaa

SEQ ID NO: 392730 - RNA, 19 nt, Human
ucaagagauguuaacucaa

SEQ ID NO: 392731 - RNA, 23 nt, Human
ucacacugaagcucuguagagca

SEQ ID NO: 392732 - RNA, 18 nt, Human
ucagugaaagugagccau

SEQ ID NO: 392733 - RNA, 23 nt, Human
uccaaacuauauucugcuaauca

SEQ ID NO: 392734 - RNA, 19 nt, Human
uccacugggugaaugaagc

SEQ ID NO: 392735 - RNA, 20 nt, Human
ucccugcugccccaaacagg

SEQ ID NO: 392736 - RNA, 21 nt, Human
uccgugcagcagucuccacuc

SEQ ID NO: 392737 - RNA, 23 nt, Human
ucuaccaaacaguucagguccac

SEQ ID NO: 392738 - RNA, 19 nt, Human
ucucuggcuugacacuacc

SEQ ID NO: 392739 - RNA, 21 nt, Human
ugaaggcaaagcagaaaggug

SEQ ID NO: 392740 - RNA, 20 nt, Human
ugacaaaaaagggagugagg

SEQ ID NO: 392741 - RNA, 19 nt, Human
ugaggaacugcuugguugu

SEQ ID NO: 392742 - RNA, 23 nt, Human
ugaggaaggaagggccggguggc

SEQ ID NO: 392743 - RNA, 24 nt, Human
ugaggaaggaagggccggguggcu

SEQ ID NO: 392744 - RNA, 20 nt, Human
ugagggguggaaggagagga

SEQ ID NO: 392745 - RNA, 19 nt, Human
ugagggucaggcaaggggu

SEQ ID NO: 392746 - RNA, 21 nt, Human
ugcaaaaaggaaaugaggggu

SEQ ID NO: 392747 - RNA, 19 nt, Human
ugcacugugaaccugaggc

SEQ ID NO: 392748 - RNA, 24 nt, Human
ugccccgaaucucuggcuugacac

SEQ ID NO: 392749 - RNA, 20 nt, Human
uggaaaacagguaacagacc

SEQ ID NO: 392750 - RNA, 24 nt, Human
uggaaggagaggaagucuaauugg

SEQ ID NO: 392751 - RNA, 21 nt, Human
ugggaaagcggacuccugaag

SEQ ID NO: 392752 - RNA, 21 nt, Human
ugggguugacaaaaaagggag

SEQ ID NO: 392753 - RNA, 18 nt, Human
ugggugaaugaagccugg

SEQ ID NO: 392754 - RNA, 23 nt, Human
ugguguccaguuggagacagacu

SEQ ID NO: 392755 - RNA, 22 nt, Human
ugugaaggcaaagcagaaaggu

SEQ ID NO: 392756 - RNA, 18 nt, Human
ugugcaaaaaggaaauga

SEQ ID NO: 392757 - RNA, 22 nt, Human
ugugcaaaaaggaaaugagggg

SEQ ID NO: 392758 - RNA, 18 nt, Human
ugugcugaagucuuccca

SEQ ID NO: 392759 - RNA, 24 nt, Human
uuaucccaagcaaaaagcacagaa

SEQ ID NO: 392760 - RNA, 24 nt, Human
uucauuaucacagaacacaccacc

SEQ ID NO: 392761 - RNA, 23 nt, Human
uugacccuucuggggguagcugu

SEQ ID NO: 392762 - RNA, 24 nt, Human
uuuauggagaguuaacagggguuu

SEQ ID NO: 392763 - RNA, 23 nt, Human
uuugcuccccacugccccaaaca

SEQ ID NO: 392764 - RNA, 23 nt, Human
uuugcucccugcugccccaaaca

SEQ ID NO: 392765 - RNA, 24 nt, Human
aacagaggguauacagauguucug

SEQ ID NO: 392766 - RNA, 21 nt, Human
aagcaaugagauuuaagucua

SEQ ID NO: 392767 - RNA, 23 nt, Human
aaggauccuuucaaaaacccagc

SEQ ID NO: 392768 - RNA, 19 nt, Human
aagucaauauuaccagaga

SEQ ID NO: 392769 - RNA, 21 nt, Human
aaugucacccaggcuuucugu

SEQ ID NO: 392770 - RNA, 22 nt, Human
agaaaagaaaagaaaaucccau

SEQ ID NO: 392771 - RNA, 18 nt, Human
agacagaguggucacaug

SEQ ID NO: 392772 - RNA, 21 nt, Human
agagaaaagaaaagaaaaucc

SEQ ID NO: 392773 - RNA, 19 nt, Human
agcaaugagauuuaagucu

SEQ ID NO: 392774 - RNA, 23 nt, Human
aggcaagaaggaacagcacagaa

SEQ ID NO: 392775 - RNA, 22 nt, Human
aggcaagaaggaacagcacagg

SEQ ID NO: 392776 - RNA, 23 nt, Human
agggauaaaaugagagagaagaa

SEQ ID NO: 392777 - RNA, 23 nt, Human
cauauguacacuuauauaucaca

SEQ ID NO: 392778 - RNA, 21 nt, Human
caugccagugaaagggaaaca

SEQ ID NO: 392779 - RNA, 25 nt, Human
gaggucccaaggauccuuucaaaaa

SEQ ID NO: 392780 - RNA, 20 nt, Human
gcaagaaggaacagcacaga

SEQ ID NO: 392781 - RNA, 24 nt, Human
uaaaugucacaugucucccaaaug

SEQ ID NO: 392782 - RNA, 21 nt, Human
uacaaguuagaggcaagaagg

SEQ ID NO: 392783 - RNA, 24 nt, Human
uaccagagaaaagaaaagaaaauc

SEQ ID NO: 392784 - RNA, 26 nt, Human
uagaauuccagcacauauguacacuu

SEQ ID NO: 392785 - RNA, 24 nt, Human
uauaaaugucacaugucucccaaa

SEQ ID NO: 392786 - RNA, 24 nt, Human
uauguacacuuauauaucacaucc

SEQ ID NO: 392787 - RNA, 23 nt, Human
uauuaccagagaaaagaaaagaa

SEQ ID NO: 392788 - RNA, 20 nt, Human
ucaagggucucccaugccag

SEQ ID NO: 392789 - RNA, 23 nt, Human
ucagugcaaagugugccuacagu

SEQ ID NO: 392790 - RNA, 19 nt, Human
ucuccauccaguuuccaca

SEQ ID NO: 392791 - RNA, 21 nt, Human
ucuuaaauauuaaccuaugac

SEQ ID NO: 392792 - RNA, 23 nt, Human
ugaaacgggacuggcaugcuaca

SEQ ID NO: 392793 - RNA, 18 nt, Human
ugaaagggaaacagaggg

SEQ ID NO: 392794 - RNA, 19 nt, Human
ugaaagggaaacagagggu

SEQ ID NO: 392795 - RNA, 24 nt, Human
ugaguaggcaagacauuuauucac

SEQ ID NO: 392796 - RNA, 18 nt, Human
ugccuacaguauacaagg

SEQ ID NO: 392797 - RNA, 23 nt, Human
uguacacuuauauaucacauccu

SEQ ID NO: 392798 - RNA, 24 nt, Human
uucacucaugauauaucagugcaa

SEQ ID NO: 392799 - RNA, 23 nt, Human
uuccacaaaugugcaugaggucc

SEQ ID NO: 392800 - RNA, 21 nt, Human
uuggcagaggcauguuuucuc

SEQ ID NO: 392801 - RNA, 21 nt, Human
uuuucagugucuuaaauauua

SEQ ID NO: 392802 - RNA, 19 nt, Human
uuuuuuuuuuugaguaggc

SEQ ID NO: 392803 - RNA, 23 nt, Human
agccccaggauugcccugcccaa

SEQ ID NO: 392804 - RNA, 20 nt, Human
agcgcuccccuggcuguggc

SEQ ID NO: 392805 - RNA, 22 nt, Human
agggacuucauucccuucaucu

SEQ ID NO: 392806 - RNA, 20 nt, Human
agguggaggugaggaagcca

SEQ ID NO: 392807 - RNA, 27 nt, Human
augacacuccugcccccaguguccugg

SEQ ID NO: 392808 - RNA, 19 nt, Human
auuccauuuacaggggugg

SEQ ID NO: 392809 - RNA, 22 nt, Human
caauggcuguaauccugugggu

SEQ ID NO: 392810 - RNA, 20 nt, Human
cagugagggacuucauuccc

SEQ ID NO: 392811 - RNA, 22 nt, Human
caucgguaccgggugccuggag

SEQ ID NO: 392812 - RNA, 23 nt, Human
ccaaaagaugacacuccugcccc

SEQ ID NO: 392813 - RNA, 22 nt, Human
cccaaaagaugacacuccugcc

SEQ ID NO: 392814 - RNA, 22 nt, Human
cuaucggugccuggcuuccucu

SEQ ID NO: 392815 - RNA, 24 nt, Human
gacacuccugcccccaguguccug

SEQ ID NO: 392816 - RNA, 19 nt, Human
gaggaagccaccggcuuuc

SEQ ID NO: 392817 - RNA, 19 nt, Human
gccucccagccuucccaag

SEQ ID NO: 392818 - RNA, 19 nt, Human
gccuggaguccaccugccc

SEQ ID NO: 392819 - RNA, 18 nt, Human
gcugcuggggcccuaggc

SEQ ID NO: 392820 - RNA, 19 nt, Human
gcuguggcugcuggggccc

SEQ ID NO: 392821 - RNA, 19 nt, Human
ggguacagagucuggcugg

SEQ ID NO: 392822 - RNA, 21 nt, Human
uacagggguggggcugggugc

SEQ ID NO: 392823 - RNA, 24 nt, Human
uacagggguggggcugggugcucu

SEQ ID NO: 392824 - RNA, 19 nt, Human
uacagguggaggugaggaa

SEQ ID NO: 392825 - RNA, 18 nt, Human
uccugcugcucugcuggg

SEQ ID NO: 392826 - RNA, 18 nt, Human
uggcuguaauccuguggg

SEQ ID NO: 392827 - RNA, 18 nt, Human
uggcuguggcugcugggg

SEQ ID NO: 392828 - RNA, 21 nt, Human
uggguacagagucuggcuggg

SEQ ID NO: 392829 - RNA, 21 nt, Human
ugguaaauuccauuuacaggg

SEQ ID NO: 392830 - RNA, 22 nt, Human
uuuccugccucagcccauuuca

SEQ ID NO: 392831 - RNA, 19 nt, Human
aagaccccagcacccgccc

SEQ ID NO: 392832 - RNA, 21 nt, Human
agaagaccccagcacccgccc

SEQ ID NO: 392833 - RNA, 25 nt, Human
agcaggaagccaucuguccagcugg

SEQ ID NO: 392834 - RNA, 19 nt, Human
ccagcgccccauacuccau

SEQ ID NO: 392835 - RNA, 21 nt, Human
cccuggcugggccuggggagc

SEQ ID NO: 392836 - RNA, 22 nt, Human
cuggcugggccuggggagcagg

SEQ ID NO: 392837 - RNA, 18 nt, Human
gaggacccuggcugggcc

SEQ ID NO: 392838 - RNA, 27 nt, Human
gcacccgcccccugaggucuuaagggc

SEQ ID NO: 392839 - RNA, 21 nt, Human
gcccccugaggucuuaagggc

SEQ ID NO: 392840 - RNA, 21 nt, Human
gcgcugggccaggaagcagag

SEQ ID NO: 392841 - RNA, 19 nt, Human
ggggagcaggaagccaucu

SEQ ID NO: 392842 - RNA, 19 nt, Human
gucuuaagggcuuuggugu

SEQ ID NO: 392843 - RNA, 22 nt, Human
uguccagcugggcagcccccau

SEQ ID NO: 392844 - RNA, 23 nt, Human
uuuuuuuuuuuuuuuuuuuaagg

SEQ ID NO: 392845 - RNA, 26 nt, Human
aaaaacauguuuucuuuggcacuuuc

SEQ ID NO: 392846 - RNA, 19 nt, Human
aaacagcagccagcauaug

SEQ ID NO: 392847 - RNA, 18 nt, Human
aaagcuuuuuuuuuucuu

SEQ ID NO: 392848 - RNA, 19 nt, Human
aaaugauugggaugguucu

SEQ ID NO: 392849 - RNA, 24 nt, Human
aacugcuucuccaaacaccaccug

SEQ ID NO: 392850 - RNA, 22 nt, Human
aagcagcaccuugugacuuaac

SEQ ID NO: 392851 - RNA, 21 nt, Human
acggaggcaaggaagugcucu

SEQ ID NO: 392852 - RNA, 21 nt, Human
agacaccuuggagggccccga

SEQ ID NO: 392853 - RNA, 20 nt, Human
agacugggagggaacccuag

SEQ ID NO: 392854 - RNA, 18 nt, Human
agagggcagggaggaaag

SEQ ID NO: 392855 - RNA, 21 nt, Human
agcagccagcauauguggaag

SEQ ID NO: 392856 - RNA, 23 nt, Human
agcugccuuucacguggccccac

SEQ ID NO: 392857 - RNA, 24 nt, Human
aggcauaggccccucaugaccugc

SEQ ID NO: 392858 - RNA, 23 nt, Human
aggccuuccccguuccugggagg

SEQ ID NO: 392859 - RNA, 18 nt, Human
aggcggggugggaguacu

SEQ ID NO: 392860 - RNA, 21 nt, Human
aggcggggugggaguacuugg

SEQ ID NO: 392861 - RNA, 21 nt, Human
agggaccccagccacugccuc

SEQ ID NO: 392862 - RNA, 24 nt, Human
agggaccuaggaucuaggcagggg

SEQ ID NO: 392863 - RNA, 24 nt, Human
aggguguguaaacagcagccagca

SEQ ID NO: 392864 - RNA, 18 nt, Human
aggguucccucgguuucc

SEQ ID NO: 392865 - RNA, 20 nt, Human
aggguucccucgguuuccau

SEQ ID NO: 392866 - RNA, 23 nt, Human
agugaugugaagacugggaggga

SEQ ID NO: 392867 - RNA, 24 nt, Human
caagacccaggguucccucgguuu

SEQ ID NO: 392868 - RNA, 26 nt, Human
caccucugaacccugcugucugguuu

SEQ ID NO: 392869 - RNA, 19 nt, Human
cagcagccagcauaugugg

SEQ ID NO: 392870 - RNA, 19 nt, Human
cagcuuucuggggcaccau

SEQ ID NO: 392871 - RNA, 20 nt, Human
cagcuuucuggggcaccauu

SEQ ID NO: 392872 - RNA, 23 nt, Human
caggacccauuccaaggagugug

SEQ ID NO: 392873 - RNA, 23 nt, Human
ccaccucugaacccugcugucug

SEQ ID NO: 392874 - RNA, 19 nt, Human
ccacugccucugggcuugg

SEQ ID NO: 392875 - RNA, 20 nt, Human
cccacaggcaccuggcaguc

SEQ ID NO: 392876 - RNA, 24 nt, Human
cccccaggacugguugaugucuag

SEQ ID NO: 392877 - RNA, 19 nt, Human
cccccggcgcccaucaacc

SEQ ID NO: 392878 - RNA, 22 nt, Human
cccccggcgcccaucaacccau

SEQ ID NO: 392879 - RNA, 23 nt, Human
cccccggcgcccaucaacccauc

SEQ ID NO: 392880 - RNA, 21 nt, Human
ccccuguguccucugucaccu

SEQ ID NO: 392881 - RNA, 18 nt, Human
ccgccugugggcuuccuc

SEQ ID NO: 392882 - RNA, 21 nt, Human
ccggcgcccaucaacccaucg

SEQ ID NO: 392883 - RNA, 22 nt, Human
ccucaguucacccacaggcacc

SEQ ID NO: 392884 - RNA, 21 nt, Human
ccucucccucuacuccccuca

SEQ ID NO: 392885 - RNA, 19 nt, Human
ccugcagggaccccagcca

SEQ ID NO: 392886 - RNA, 18 nt, Human
ccuuccccguuccuggga

SEQ ID NO: 392887 - RNA, 22 nt, Human
ccuuggagggccccgaggagcg

SEQ ID NO: 392888 - RNA, 19 nt, Human
cgggaagcugguuugacau

SEQ ID NO: 392889 - RNA, 22 nt, Human
cucaucucugcuuugcugguga

SEQ ID NO: 392890 - RNA, 21 nt, Human
cuccccucccccaggacuggu

SEQ ID NO: 392891 - RNA, 21 nt, Human
cuccucugccuccaaccugcu

SEQ ID NO: 392892 - RNA, 22 nt, Human
cucucuacuguggagcuggaga

SEQ ID NO: 392893 - RNA, 18 nt, Human
cugaacccugcugucugg

SEQ ID NO: 392894 - RNA, 22 nt, Human
cugguuugacauuuuguagguu

SEQ ID NO: 392895 - RNA, 21 nt, Human
cugucugguuuaaguaccacu

SEQ ID NO: 392896 - RNA, 20 nt, Human
gaaagaacacaguucccacg

SEQ ID NO: 392897 - RNA, 20 nt, Human
gaagaauaauacaaagcuuu

SEQ ID NO: 392898 - RNA, 18 nt, Human
gaggaaaagggaccuagg

SEQ ID NO: 392899 - RNA, 19 nt, Human
gagggcaccgacagucaga

SEQ ID NO: 392900 - RNA, 19 nt, Human
gcagggaggaaagaacaca

SEQ ID NO: 392901 - RNA, 20 nt, Human
gcccccagugaggccgcaug

SEQ ID NO: 392902 - RNA, 19 nt, Human
gcuuggcuugagcuccugg

SEQ ID NO: 392903 - RNA, 23 nt, Human
ggaggccuuccccguuccuggga

SEQ ID NO: 392904 - RNA, 23 nt, Human
ggagggcaccgacagucagacug

SEQ ID NO: 392905 - RNA, 20 nt, Human
ggaguacuuggggagggugc

SEQ ID NO: 392906 - RNA, 21 nt, Human
ggcagggaggaaagaacacag

SEQ ID NO: 392907 - RNA, 22 nt, Human
ggcgcccaucaacccaucgccc

SEQ ID NO: 392908 - RNA, 20 nt, Human
gggaugguucuuccucuggc

SEQ ID NO: 392909 - RNA, 22 nt, Human
gggcagggaggaaagaacacag

SEQ ID NO: 392910 - RNA, 22 nt, Human
gggccucagcuuugucccggug

SEQ ID NO: 392911 - RNA, 22 nt, Human
ggggaacgagccgcguggccag

SEQ ID NO: 392912 - RNA, 27 nt, Human
guuguucuucccaagacccaggguucc

SEQ ID NO: 392913 - RNA, 20 nt, Human
uagcucaaagggcuuugcaa

SEQ ID NO: 392914 - RNA, 23 nt, Human
uagcucaaagggcuuugcaaaau

SEQ ID NO: 392915 - RNA, 23 nt, Human
uagguuucucucuacuguggagc

SEQ ID NO: 392916 - RNA, 22 nt, Human
uaguggaucugaaaagcagcac

SEQ ID NO: 392917 - RNA, 22 nt, Human
uccccagcauauugcaaaaagc

SEQ ID NO: 392918 - RNA, 19 nt, Human
ucccucccuccccuuuccc

SEQ ID NO: 392919 - RNA, 18 nt, Human
ucgggaggaaaagggacc

SEQ ID NO: 392920 - RNA, 18 nt, Human
ucugucgcuaccccagag

SEQ ID NO: 392921 - RNA, 24 nt, Human
ugaaaagcagcaccuugugacuua

SEQ ID NO: 392922 - RNA, 25 nt, Human
ugaggccgcauggacaguaggcggg

SEQ ID NO: 392923 - RNA, 24 nt, Human
ugaugaggccagagugaugugaag

SEQ ID NO: 392924 - RNA, 19 nt, Human
ugaugugaagacugggagg

SEQ ID NO: 392925 - RNA, 20 nt, Human
ugcagggccucagcuuuguc

SEQ ID NO: 392926 - RNA, 26 nt, Human
ugcccgguucccacuccccuccccca

SEQ ID NO: 392927 - RNA, 24 nt, Human
ugccucugggcuuggcuugagcuc

SEQ ID NO: 392928 - RNA, 21 nt, Human
ugcuaaggcauuggcagggug

SEQ ID NO: 392929 - RNA, 18 nt, Human
ugcugguguuuaaaagga

SEQ ID NO: 392930 - RNA, 20 nt, Human
uggcaggguguguaaacagc

SEQ ID NO: 392931 - RNA, 18 nt, Human
ugggagucgggaagcugg

SEQ ID NO: 392932 - RNA, 20 nt, Human
uggggagggugcaccuggga

SEQ ID NO: 392933 - RNA, 20 nt, Human
ugguugguuuuagguugggg

SEQ ID NO: 392934 - RNA, 23 nt, Human
uguagguuucucucuacugugga

SEQ ID NO: 392935 - RNA, 24 nt, Human
ugugaagacugggagggaacccua

SEQ ID NO: 392936 - RNA, 20 nt, Human
ugugcccgguucccacuccc

SEQ ID NO: 392937 - RNA, 24 nt, Human
ugugcccgguucccacuccccucc

SEQ ID NO: 392938 - RNA, 20 nt, Human
uucacguggccccacccucc

SEQ ID NO: 392939 - RNA, 27 nt, Human
uucauucccucccuccccuuuccccag

SEQ ID NO: 392940 - RNA, 19 nt, Human
uucccccuccccugugucc

SEQ ID NO: 392941 - RNA, 20 nt, Human
uucccucgguuuccauuugg

SEQ ID NO: 392942 - RNA, 20 nt, Human
uuccuccagccaucggcucc

SEQ ID NO: 392943 - RNA, 23 nt, Human
uugcauaguggaucugaaaagca

SEQ ID NO: 392944 - RNA, 22 nt, Human
uugguccuguagugaaaugcug

SEQ ID NO: 392945 - RNA, 20 nt, Human
uuggugaugaggccagagug

SEQ ID NO: 392946 - RNA, 21 nt, Human
uuugucccggugugccaccuc

SEQ ID NO: 392947 - RNA, 27 nt, Human
uuuuuuuuuuuuuuuuuuuuuuugggg

SEQ ID NO: 392948 - RNA, 21 nt, Human
aaaaaccgagaugcuagaggc

SEQ ID NO: 392949 - RNA, 21 nt, Human
aaaaaucacaccuggccaaug

SEQ ID NO: 392950 - RNA, 22 nt, Human
aaauucccccaaaccuuugacc

SEQ ID NO: 392951 - RNA, 23 nt, Human
aacagauucaagcaggaaaacca

SEQ ID NO: 392952 - RNA, 18 nt, Human
aacggcugucuccagggc

SEQ ID NO: 392953 - RNA, 22 nt, Human
aagaaacuuccuauaccagcuc

SEQ ID NO: 392954 - RNA, 25 nt, Human
aaggagcagcacaaagagggcugau

SEQ ID NO: 392955 - RNA, 21 nt, Human
aagggccugacuugcacaaac

SEQ ID NO: 392956 - RNA, 20 nt, Human
acaggagcuugugacaccag

SEQ ID NO: 392957 - RNA, 20 nt, Human
acaggcucuccccagcccag

SEQ ID NO: 392958 - RNA, 22 nt, Human
acauucccaaaccccagcuccc

SEQ ID NO: 392959 - RNA, 21 nt, Human
accauggugggguggcauggg

SEQ ID NO: 392960 - RNA, 22 nt, Human
acccccauccucacagcccauu

SEQ ID NO: 392961 - RNA, 19 nt, Human
acguucuuuuacugaguag

SEQ ID NO: 392962 - RNA, 20 nt, Human
acuuucaggaaaggccaauu

SEQ ID NO: 392963 - RNA, 21 nt, Human
agaaaagaagucauccacaau

SEQ ID NO: 392964 - RNA, 18 nt, Human
agaagggccugacuugca

SEQ ID NO: 392965 - RNA, 19 nt, Human
agacaaaaugccuggaaac

SEQ ID NO: 392966 - RNA, 20 nt, Human
agagcuggaagauccucuuu

SEQ ID NO: 392967 - RNA, 19 nt, Human
agcaggaaccccaaggugg

SEQ ID NO: 392968 - RNA, 22 nt, Human
aggaggcacagagcacucacca

SEQ ID NO: 392969 - RNA, 20 nt, Human
aggaucugcugaaaaugcca

SEQ ID NO: 392970 - RNA, 21 nt, Human
aggcauggcuucaugagggcc

SEQ ID NO: 392971 - RNA, 19 nt, Human
aggcugcagcauuugacac

SEQ ID NO: 392972 - RNA, 21 nt, Human
aucguggaaacuugcuuccuu

SEQ ID NO: 392973 - RNA, 20 nt, Human
caaagcacauucccaaaccc

SEQ ID NO: 392974 - RNA, 25 nt, Human
caaauucccccaaaccuuugaccac

SEQ ID NO: 392975 - RNA, 24 nt, Human
cacaaagcacauucccaaacccca

SEQ ID NO: 392976 - RNA, 24 nt, Human
cacagcccaucgcaaaggccccuc

SEQ ID NO: 392977 - RNA, 22 nt, Human
cacaugguccccagcaggaacc

SEQ ID NO: 392978 - RNA, 21 nt, Human
cacauucccaaaccccagcuc

SEQ ID NO: 392979 - RNA, 20 nt, Human
cacccccauccucacagccc

SEQ ID NO: 392980 - RNA, 25 nt, Human
caccuaggcugugagaggauggggc

SEQ ID NO: 392981 - RNA, 18 nt, Human
caccuuugggcggcaccg

SEQ ID NO: 392982 - RNA, 28 nt, Human
cacguuuaccuuguguaaaaaucacacc

SEQ ID NO: 392983 - RNA, 22 nt, Human
cagagcaccuaggcugugagag

SEQ ID NO: 392984 - RNA, 20 nt, Human
caguucgugaacucuccgca

SEQ ID NO: 392985 - RNA, 19 nt, Human
cauccucacagcccaucgc

SEQ ID NO: 392986 - RNA, 25 nt, Human
caugcccagcuucuucuacccaaaa

SEQ ID NO: 392987 - RNA, 18 nt, Human
cauggcagucacucggca

SEQ ID NO: 392988 - RNA, 21 nt, Human
ccaaggcaaacauuuggcaca

SEQ ID NO: 392989 - RNA, 19 nt, Human
ccagggucacaaauucccc

SEQ ID NO: 392990 - RNA, 18 nt, Human
ccauggggacccuagggg

SEQ ID NO: 392991 - RNA, 20 nt, Human
ccauggggacccuagggggu

SEQ ID NO: 392992 - RNA, 21 nt, Human
cccaaaccccagcucccugac

SEQ ID NO: 392993 - RNA, 20 nt, Human
cccacaguccacugcacacu

SEQ ID NO: 392994 - RNA, 22 nt, Human
cccacugugauuuggcugcuuc

SEQ ID NO: 392995 - RNA, 19 nt, Human
cccagcccagcucgcccag

SEQ ID NO: 392996 - RNA, 28 nt, Human
cccaugcccagcuucuucuacccaaaaa

SEQ ID NO: 392997 - RNA, 25 nt, Human
ccccagcccagcucgcccagcucgc

SEQ ID NO: 392998 - RNA, 22 nt, Human
cccccaaaccuuugaccacgaa

SEQ ID NO: 392999 - RNA, 23 nt, Human
cccccaaaccuuugaccacgaac

SEQ ID NO: 393000 - RNA, 20 nt, Human
ccuggaaacguuccuuuucc

SEQ ID NO: 393001 - RNA, 20 nt, Human
cgaccaaggcaaacauuugg

SEQ ID NO: 393002 - RNA, 19 nt, Human
cgcacacacacacaacacc

SEQ ID NO: 393003 - RNA, 19 nt, Human
cggcucgaugacgaugcag

SEQ ID NO: 393004 - RNA, 27 nt, Human
cguggccaauucuucccaccacccccc

SEQ ID NO: 393005 - RNA, 24 nt, Human
cucacacaugccacaaccacacau

SEQ ID NO: 393006 - RNA, 23 nt, Human
cucacccaacggcugucuccagg

SEQ ID NO: 393007 - RNA, 19 nt, Human
cucuccgcauuuacucccc

SEQ ID NO: 393008 - RNA, 23 nt, Human
cucugugauucccuggcaggcug

SEQ ID NO: 393009 - RNA, 24 nt, Human
cugacagucaugccaccgcaaguu

SEQ ID NO: 393010 - RNA, 19 nt, Human
cugcagagcaccuaggcug

SEQ ID NO: 393011 - RNA, 22 nt, Human
cuucugcucacacaugccacaa

SEQ ID NO: 393012 - RNA, 24 nt, Human
cuuuggguuaaacauggguagaga

SEQ ID NO: 393013 - RNA, 18 nt, Human
gaaaagaagucauccaca

SEQ ID NO: 393014 - RNA, 19 nt, Human
gacccuaggggguggggug

SEQ ID NO: 393015 - RNA, 18 nt, Human
gagggccaucgcgggcac

SEQ ID NO: 393016 - RNA, 21 nt, Human
gaugcugagcuuaaauccagg

SEQ ID NO: 393017 - RNA, 25 nt, Human
gaugcugagcuuaaauccaggaguu

SEQ ID NO: 393018 - RNA, 19 nt, Human
gcauggggucucuaacgug

SEQ ID NO: 393019 - RNA, 25 nt, Human
gcccagcucgcccagcucgcccagc

SEQ ID NO: 393020 - RNA, 20 nt, Human
gcuauaacaugcguugggca

SEQ ID NO: 393021 - RNA, 21 nt, Human
gcugcagcauuugacacuggu

SEQ ID NO: 393022 - RNA, 19 nt, Human
gcuuccugaaugccgucga

SEQ ID NO: 393023 - RNA, 20 nt, Human
gcuuccuuugguuccucaga

SEQ ID NO: 393024 - RNA, 21 nt, Human
ggagcaaauuccccgaugccc

SEQ ID NO: 393025 - RNA, 19 nt, Human
gggaccaccucguguucug

SEQ ID NO: 393026 - RNA, 22 nt, Human
ggugagggaaacccccggccuc

SEQ ID NO: 393027 - RNA, 19 nt, Human
ggugcagcuggacagaagc

SEQ ID NO: 393028 - RNA, 18 nt, Human
gucacaaauucccccaaa

SEQ ID NO: 393029 - RNA, 19 nt, Human
guggggugcacccaugccc

SEQ ID NO: 393030 - RNA, 18 nt, Human
uaaaaaucacaccuggcc

SEQ ID NO: 393031 - RNA, 19 nt, Human
uaaaugagcucucucaucc

SEQ ID NO: 393032 - RNA, 25 nt, Human
uaagaaugggggauuugacuuuuga

SEQ ID NO: 393033 - RNA, 22 nt, Human
uaaggagcagagaaaaugacua

SEQ ID NO: 393034 - RNA, 24 nt, Human
uaaguaaaauauaaauuacauaga

SEQ ID NO: 393035 - RNA, 24 nt, Human
uaaguaaaauauaaauuacauaga

SEQ ID NO: 393036 - RNA, 18 nt, Human
uacaguaucagaaaagua

SEQ ID NO: 393037 - RNA, 22 nt, Human
uacccaaaaagcauguggcuac

SEQ ID NO: 393038 - RNA, 22 nt, Human
uacugagacccuaguuugcucu

SEQ ID NO: 393039 - RNA, 20 nt, Human
uagaggccucugcuaaagac

SEQ ID NO: 393040 - RNA, 20 nt, Human
uaugggagacccacagucca

SEQ ID NO: 393041 - RNA, 21 nt, Human
ucagaaaagaagucauccaca

SEQ ID NO: 393042 - RNA, 23 nt, Human
ucaggaugaggaccucuugggga

SEQ ID NO: 393043 - RNA, 18 nt, Human
ucaugggccuggaauguc

SEQ ID NO: 393044 - RNA, 24 nt, Human
uccacaacgaccaaggcaaacauu

SEQ ID NO: 393045 - RNA, 23 nt, Human
uccacaaucggggaaaaacauuc

SEQ ID NO: 393046 - RNA, 27 nt, Human
uccacaaucggggaaaaaccggggucc

SEQ ID NO: 393047 - RNA, 24 nt, Human
ucccaaaccccagcucccugacag

SEQ ID NO: 393048 - RNA, 23 nt, Human
ucccaccacccccauccucacag

SEQ ID NO: 393049 - RNA, 24 nt, Human
uccccagcccagcucgcccagcuc

SEQ ID NO: 393050 - RNA, 24 nt, Human
ucccccaaaccuuugaccacgaac

SEQ ID NO: 393051 - RNA, 20 nt, Human
uccucuuuccccucaugggc

SEQ ID NO: 393052 - RNA, 20 nt, Human
ucgaugacgaugcagauccu

SEQ ID NO: 393053 - RNA, 24 nt, Human
ucgcaaucaggacagucagcaugc

SEQ ID NO: 393054 - RNA, 18 nt, Human
ucgcccagcucaccacag

SEQ ID NO: 393055 - RNA, 18 nt, Human
ucgcccagcucgcccagc

SEQ ID NO: 393056 - RNA, 18 nt, Human
ucgcccagcucgcccagc

SEQ ID NO: 393057 - RNA, 22 nt, Human
ucucgguccucacaggcucucc

SEQ ID NO: 393058 - RNA, 23 nt, Human
ucuucucuuuuuccucauccucc

SEQ ID NO: 393059 - RNA, 22 nt, Human
ugaaaaaccgagaugcuagagg

SEQ ID NO: 393060 - RNA, 18 nt, Human
ugacaggagcuugugaca

SEQ ID NO: 393061 - RNA, 21 nt, Human
ugacaggagcuugugacacca

SEQ ID NO: 393062 - RNA, 18 nt, Human
ugagcucucucauccuuc

SEQ ID NO: 393063 - RNA, 18 nt, Human
ugaggcacuugguuuggu

SEQ ID NO: 393064 - RNA, 20 nt, Human
ugagggaaacccccggccuc

SEQ ID NO: 393065 - RNA, 24 nt, Human
ugauguuguuuguucuuguuuuug

SEQ ID NO: 393066 - RNA, 22 nt, Human
ugcacaaaccuucgucaaacau

SEQ ID NO: 393067 - RNA, 19 nt, Human
ugcacacacgcacacacac

SEQ ID NO: 393068 - RNA, 20 nt, Human
ugcagagcuggaagauccuc

SEQ ID NO: 393069 - RNA, 22 nt, Human
ugccagggacauggggaccacc

SEQ ID NO: 393070 - RNA, 25 nt, Human
ugccagggacauggggaccaccucg

SEQ ID NO: 393071 - RNA, 22 nt, Human
ugcuguguuccagaagggccug

SEQ ID NO: 393072 - RNA, 19 nt, Human
ugcuuccaacucugccugu

SEQ ID NO: 393073 - RNA, 21 nt, Human
uggaaacuugcuuccuuuggu

SEQ ID NO: 393074 - RNA, 22 nt, Human
uggcaaacaguggcacucaaaa

SEQ ID NO: 393075 - RNA, 21 nt, Human
uggcauggggucucuaacgug

SEQ ID NO: 393076 - RNA, 23 nt, Human
uggcuacagagaugugucagaua

SEQ ID NO: 393077 - RNA, 20 nt, Human
uggcugcuuccaacucugcc

SEQ ID NO: 393078 - RNA, 18 nt, Human
ugggcggcaccgcauaug

SEQ ID NO: 393079 - RNA, 22 nt, Human
uggggacccuaggggguggggu

SEQ ID NO: 393080 - RNA, 23 nt, Human
ugggggaugcugagcuuaaaucc

SEQ ID NO: 393081 - RNA, 18 nt, Human
uggggugcacccaugccc

SEQ ID NO: 393082 - RNA, 25 nt, Human
ugguacaguauagcaauggcaaauu

SEQ ID NO: 393083 - RNA, 19 nt, Human
ugugggggaugcugagcuu

SEQ ID NO: 393084 - RNA, 20 nt, Human
uuagaugauggcaaacagug

SEQ ID NO: 393085 - RNA, 18 nt, Human
uuccccgaugcccuugac

SEQ ID NO: 393086 - RNA, 19 nt, Human
uuccugcaguggaugaaaa

SEQ ID NO: 393087 - RNA, 18 nt, Human
uuccuucuucucauuucu

SEQ ID NO: 393088 - RNA, 22 nt, Human
uucucaguuucguuagcaucuc

SEQ ID NO: 393089 - RNA, 20 nt, Human
uucuccucucgguccucaca

SEQ ID NO: 393090 - RNA, 21 nt, Human
uugucaguaccgggguuucuu

SEQ ID NO: 393091 - RNA, 22 nt, Human
aaaacacuuggacaaagucucc

SEQ ID NO: 393092 - RNA, 23 nt, Human
aaaauaccugugugugcauaucu

SEQ ID NO: 393093 - RNA, 18 nt, Human
aaacacacacacaaacau

SEQ ID NO: 393094 - RNA, 22 nt, Human
aaacacacacacaaacauacac

SEQ ID NO: 393095 - RNA, 18 nt, Human
aaacaggaugagauuagg

SEQ ID NO: 393096 - RNA, 19 nt, Human
aaagugcugggaguacagg

SEQ ID NO: 393097 - RNA, 24 nt, Human
aaagugcugggauuacaggcguga

SEQ ID NO: 393098 - RNA, 19 nt, Human
aaaguuccagaugccucgg

SEQ ID NO: 393099 - RNA, 18 nt, Human
aaccaccaucucaucuca

SEQ ID NO: 393100 - RNA, 23 nt, Human
aaccccugggcucaagcaacccu

SEQ ID NO: 393101 - RNA, 21 nt, Human
aagcugaagccugagcacagc

SEQ ID NO: 393102 - RNA, 21 nt, Human
aaggaagagcugaggguggag

SEQ ID NO: 393103 - RNA, 19 nt, Human
aagugcugggauuacaggc

SEQ ID NO: 393104 - RNA, 19 nt, Human
aagugcugggauuacaggc

SEQ ID NO: 393105 - RNA, 21 nt, Human
aaguugccaccaacuccccag

SEQ ID NO: 393106 - RNA, 20 nt, Human
aauagaaccaagcaucucau

SEQ ID NO: 393107 - RNA, 23 nt, Human
aauccuuugcacuuucuuuugca

SEQ ID NO: 393108 - RNA, 23 nt, Human
aaugcagugggaugaucauagcu

SEQ ID NO: 393109 - RNA, 24 nt, Human
aauuauguuggccaggcuggucuc

SEQ ID NO: 393110 - RNA, 19 nt, Human
acaaacacacacacaaaca

SEQ ID NO: 393111 - RNA, 23 nt, Human
acaaccgcagacaucuggacacc

SEQ ID NO: 393112 - RNA, 18 nt, Human
acacagugagacccuguc

SEQ ID NO: 393113 - RNA, 19 nt, Human
acacagugagacccugucu

SEQ ID NO: 393114 - RNA, 20 nt, Human
acacagugagacccugucuc

SEQ ID NO: 393115 - RNA, 24 nt, Human
acacagugagacccugucucaaaa

SEQ ID NO: 393116 - RNA, 21 nt, Human
acagcaccacucaucucacuc

SEQ ID NO: 393117 - RNA, 21 nt, Human
acagcccaccagcagagcauu

SEQ ID NO: 393118 - RNA, 19 nt, Human
acaggcacugacaucagaa

SEQ ID NO: 393119 - RNA, 19 nt, Human
acagggcagugaguaaacc

SEQ ID NO: 393120 - RNA, 19 nt, Human
accaacuccccagcucugu

SEQ ID NO: 393121 - RNA, 23 nt, Human
accagcaaggguccaggggaggu

SEQ ID NO: 393122 - RNA, 24 nt, Human
acccaggcuggaguacaguggcau

SEQ ID NO: 393123 - RNA, 19 nt, Human
acccaggcuggagugcagu

SEQ ID NO: 393124 - RNA, 21 nt, Human
acgccuccccaccccacaggc

SEQ ID NO: 393125 - RNA, 18 nt, Human
acucugucacccaggcug

SEQ ID NO: 393126 - RNA, 25 nt, Human
acugcuacagagcagaccauugacc

SEQ ID NO: 393127 - RNA, 25 nt, Human
agaaaaaggacagugcagcaaagag

SEQ ID NO: 393128 - RNA, 22 nt, Human
agaacagggcagugaguaaacc

SEQ ID NO: 393129 - RNA, 24 nt, Human
agacaguagauaaaaaugcauggg

SEQ ID NO: 393130 - RNA, 24 nt, Human
agagaacccuugcaucaaaacagg

SEQ ID NO: 393131 - RNA, 20 nt, Human
agcaacaaaauaccugugug

SEQ ID NO: 393132 - RNA, 25 nt, Human
agcauuucuuuuuccguucuuuuuu

SEQ ID NO: 393133 - RNA, 21 nt, Human
agccugagcacagcuacaacc

SEQ ID NO: 393134 - RNA, 21 nt, Human
agccuguaacugaguccaaau

SEQ ID NO: 393135 - RNA, 22 nt, Human
agcucacugcaaccucugccuc

SEQ ID NO: 393136 - RNA, 22 nt, Human
agcucuggagccauaaaccacc

SEQ ID NO: 393137 - RNA, 22 nt, Human
agcuugugagucuagggaaccu

SEQ ID NO: 393138 - RNA, 21 nt, Human
aggaaagggacuuuauuucgg

SEQ ID NO: 393139 - RNA, 19 nt, Human
aggagguagguacuucaca

SEQ ID NO: 393140 - RNA, 19 nt, Human
aggcaaggaagagcugagg

SEQ ID NO: 393141 - RNA, 25 nt, Human
aggcuggagugcaguggcacuaucu

SEQ ID NO: 393142 - RNA, 20 nt, Human
aggcugggcugcagguuggg

SEQ ID NO: 393143 - RNA, 19 nt, Human
agggaagcacagcccacca

SEQ ID NO: 393144 - RNA, 24 nt, Human
aggugauccgccugccucagccuc

SEQ ID NO: 393145 - RNA, 20 nt, Human
aguagaaagggcaagguaag

SEQ ID NO: 393146 - RNA, 23 nt, Human
agugcaguggcacuaucugagcu

SEQ ID NO: 393147 - RNA, 19 nt, Human
aguuccugcuguggccuga

SEQ ID NO: 393148 - RNA, 18 nt, Human
aguuggaaacguggggcc

SEQ ID NO: 393149 - RNA, 20 nt, Human
aucucaggcagccguagacc

SEQ ID NO: 393150 - RNA, 21 nt, Human
augagcagauagcuggaggcu

SEQ ID NO: 393151 - RNA, 21 nt, Human
auggagacaugggucuugugg

SEQ ID NO: 393152 - RNA, 20 nt, Human
auguuggccaggcuggucuc

SEQ ID NO: 393153 - RNA, 18 nt, Human
auuauguuggccaggcug

SEQ ID NO: 393154 - RNA, 24 nt, Human
auuccuauaaaucuuuaacaaaaa

SEQ ID NO: 393155 - RNA, 22 nt, Human
caaacauacacagauacacugu

SEQ ID NO: 393156 - RNA, 18 nt, Human
caaagccuaaaaaugcag

SEQ ID NO: 393157 - RNA, 22 nt, Human
caagacacagaagagaacccuu

SEQ ID NO: 393158 - RNA, 23 nt, Human
caagcgucaccacacccagcuaa

SEQ ID NO: 393159 - RNA, 21 nt, Human
caagcuggucucaaaccccug

SEQ ID NO: 393160 - RNA, 19 nt, Human
caaggagcccucuagccac

SEQ ID NO: 393161 - RNA, 22 nt, Human
caagugauucucgugucucagc

SEQ ID NO: 393162 - RNA, 24 nt, Human
cacacaaacauacacagauacacu

SEQ ID NO: 393163 - RNA, 25 nt, Human
cacacacaaacauacacagauacac

SEQ ID NO: 393164 - RNA, 20 nt, Human
cacccagggaaggcugggcu

SEQ ID NO: 393165 - RNA, 24 nt, Human
caccucagccucccaaagugcugg

SEQ ID NO: 393166 - RNA, 22 nt, Human
cacucugucacccaggcuggag

SEQ ID NO: 393167 - RNA, 23 nt, Human
cacucugucacccaggcuggagu

SEQ ID NO: 393168 - RNA, 18 nt, Human
cacugcaaccucugccuc

SEQ ID NO: 393169 - RNA, 21 nt, Human
cacugcaaccucugccuccca

SEQ ID NO: 393170 - RNA, 20 nt, Human
cacugcagccucaaccuccc

SEQ ID NO: 393171 - RNA, 21 nt, Human
cacugcagccucaaccucccg

SEQ ID NO: 393172 - RNA, 19 nt, Human
cagaaccaagguaugugug

SEQ ID NO: 393173 - RNA, 19 nt, Human
cagaauccaccugcaguuc

SEQ ID NO: 393174 - RNA, 18 nt, Human
cagccccugaucagugcu

SEQ ID NO: 393175 - RNA, 24 nt, Human
cagccucaaccucccgggcucaag

SEQ ID NO: 393176 - RNA, 26 nt, Human
cagcucugugagaaguuuuagggggg

SEQ ID NO: 393177 - RNA, 19 nt, Human
cagcugccugugucccaac

SEQ ID NO: 393178 - RNA, 20 nt, Human
cagcuuccugaguagcuggg

SEQ ID NO: 393179 - RNA, 22 nt, Human
caggugauccgccugccucagc

SEQ ID NO: 393180 - RNA, 18 nt, Human
caggugccucuccaaccu

SEQ ID NO: 393181 - RNA, 22 nt, Human
cagugggcuguaacagagcucu

SEQ ID NO: 393182 - RNA, 22 nt, Human
caucaggcuuggccaaauaagc

SEQ ID NO: 393183 - RNA, 19 nt, Human
ccaaagugcugggaguaca

SEQ ID NO: 393184 - RNA, 22 nt, Human
ccaaagugcugggauuacaggc

SEQ ID NO: 393185 - RNA, 22 nt, Human
ccaaagugcugggauuacaggc

SEQ ID NO: 393186 - RNA, 24 nt, Human
ccaaagugcugggauuacaggcgu

SEQ ID NO: 393187 - RNA, 23 nt, Human
ccaacucuauagccaugagguuc

SEQ ID NO: 393188 - RNA, 24 nt, Human
ccaaucucuuuagcaacaaaauac

SEQ ID NO: 393189 - RNA, 18 nt, Human
ccacugcaccuggccaag

SEQ ID NO: 393190 - RNA, 19 nt, Human
ccacugcaccuggccaagg

SEQ ID NO: 393191 - RNA, 20 nt, Human
ccacugcaccuggccaagga

SEQ ID NO: 393192 - RNA, 21 nt, Human
ccacugcaccuggccaaggac

SEQ ID NO: 393193 - RNA, 24 nt, Human
ccacugcagccucaaccucccggg

SEQ ID NO: 393194 - RNA, 31 nt, Human
ccagaguuaguuuugcaaacggcaugauucc

SEQ ID NO: 393195 - RNA, 24 nt, Human
cccaaguaccugggacuacaggcg

SEQ ID NO: 393196 - RNA, 20 nt, Human
cccagguucaagugauucuc

SEQ ID NO: 393197 - RNA, 20 nt, Human
cccagguucaagugauucuc

SEQ ID NO: 393198 - RNA, 21 nt, Human
cccaugauaacaugccccaag

SEQ ID NO: 393199 - RNA, 21 nt, Human
ccccaccccacaggcacaugc

SEQ ID NO: 393200 - RNA, 21 nt, Human
ccccagaguaaaaaauggcag

SEQ ID NO: 393201 - RNA, 18 nt, Human
ccccccacugcagccuca

SEQ ID NO: 393202 - RNA, 21 nt, Human
cccccggccugcuugcugccc

SEQ ID NO: 393203 - RNA, 19 nt, Human
ccccugggcucaagcaacc

SEQ ID NO: 393204 - RNA, 25 nt, Human
ccccugggcucaagcaacccuccca

SEQ ID NO: 393205 - RNA, 19 nt, Human
ccccuuaaacaaaaaugga

SEQ ID NO: 393206 - RNA, 21 nt, Human
cccgggcucaagugauccucc

SEQ ID NO: 393207 - RNA, 22 nt, Human
cccgggcucaagugauccuccu

SEQ ID NO: 393208 - RNA, 23 nt, Human
cccgggcucaagugauccuccug

SEQ ID NO: 393209 - RNA, 21 nt, Human
cccuggcucaggcugcggccg

SEQ ID NO: 393210 - RNA, 21 nt, Human
cccugggcucaagcaacccuc

SEQ ID NO: 393211 - RNA, 21 nt, Human
ccuaguagcugggacuacagg

SEQ ID NO: 393212 - RNA, 22 nt, Human
ccucccagguucaagugauucu

SEQ ID NO: 393213 - RNA, 23 nt, Human
ccucccaugauaacaugccccaa

SEQ ID NO: 393214 - RNA, 20 nt, Human
ccugagcucaagcaauccuc

SEQ ID NO: 393215 - RNA, 22 nt, Human
ccugaguagcugggauacaggc

SEQ ID NO: 393216 - RNA, 19 nt, Human
ccugauuccauggacagca

SEQ ID NO: 393217 - RNA, 24 nt, Human
ccugccucagccucccaaagugcu

SEQ ID NO: 393218 - RNA, 22 nt, Human
ccugcuguggccugauuccaug

SEQ ID NO: 393219 - RNA, 24 nt, Human
ccugcuugcugccccgguccugac

SEQ ID NO: 393220 - RNA, 22 nt, Human
ccugggcgacacagugagaccc

SEQ ID NO: 393221 - RNA, 23 nt, Human
ccuugaacuccugagcucaagca

SEQ ID NO: 393222 - RNA, 18 nt, Human
cgaagcgaacagcagcuc

SEQ ID NO: 393223 - RNA, 19 nt, Human
cgagggagggggcccuggc

SEQ ID NO: 393224 - RNA, 24 nt, Human
cgcucugucacccaggcuggagug

SEQ ID NO: 393225 - RNA, 22 nt, Human
cggagacagggucucacucugu

SEQ ID NO: 393226 - RNA, 23 nt, Human
cuaaaggacacagugggcuguaa

SEQ ID NO: 393227 - RNA, 23 nt, Human
cuaauuuuuuguauuuuuaguag

SEQ ID NO: 393228 - RNA, 24 nt, Human
cucaagcaacccucccaccucagc

SEQ ID NO: 393229 - RNA, 25 nt, Human
cucaagcaauccuccugccucaggc

SEQ ID NO: 393230 - RNA, 22 nt, Human
cucaaggagcccucuagccacc

SEQ ID NO: 393231 - RNA, 24 nt, Human
cucacucugucacccaggcuggag

SEQ ID NO: 393232 - RNA, 24 nt, Human
cucacugcaaccucugccucccag

SEQ ID NO: 393233 - RNA, 24 nt, Human
cucacugcaaccucugccucccag

SEQ ID NO: 393234 - RNA, 24 nt, Human
cucagccucccuaguagcugggac

SEQ ID NO: 393235 - RNA, 22 nt, Human
cucagcuuccugaguagcuggg

SEQ ID NO: 393236 - RNA, 23 nt, Human
cucagcuuccugaguagcuggga

SEQ ID NO: 393237 - RNA, 19 nt, Human
cuccaaaguuuagagcagg

SEQ ID NO: 393238 - RNA, 22 nt, Human
cuccaaccuggugucuuugggc

SEQ ID NO: 393239 - RNA, 19 nt, Human
cucccagguucaagugauu

SEQ ID NO: 393240 - RNA, 24 nt, Human
cucgcucugucacccaggcuggag

SEQ ID NO: 393241 - RNA, 19 nt, Human
cucuaaaguuauccuagcc

SEQ ID NO: 393242 - RNA, 18 nt, Human
cugacaucagaacagggc

SEQ ID NO: 393243 - RNA, 25 nt, Human
cugacccauaggaugucaguggcau

SEQ ID NO: 393244 - RNA, 20 nt, Human
cugacuucaggugauccgcc

SEQ ID NO: 393245 - RNA, 23 nt, Human
cugcaaccucugccucccagguu

SEQ ID NO: 393246 - RNA, 24 nt, Human
cugcaaccucugccucccagguuc

SEQ ID NO: 393247 - RNA, 23 nt, Human
cugcagccuugaacuccugagcu

SEQ ID NO: 393248 - RNA, 24 nt, Human
cugccucagccucccaaagugcug

SEQ ID NO: 393249 - RNA, 20 nt, Human
cugcgcauagcaagcucacc

SEQ ID NO: 393250 - RNA, 19 nt, Human
cuggcuaucuccagguagu

SEQ ID NO: 393251 - RNA, 18 nt, Human
cugggauacaggcaagcg

SEQ ID NO: 393252 - RNA, 19 nt, Human
cugucacccaggcuggagu

SEQ ID NO: 393253 - RNA, 18 nt, Human
cuguuucucuuggaggug

SEQ ID NO: 393254 - RNA, 22 nt, Human
cuugcaucaaaacaggaugaga

SEQ ID NO: 393255 - RNA, 23 nt, Human
cuuggaaaguugccaccaacucc

SEQ ID NO: 393256 - RNA, 22 nt, Human
gaaggcugggcugcagguuggg

SEQ ID NO: 393257 - RNA, 21 nt, Human
gacacagugagacccugucuc

SEQ ID NO: 393258 - RNA, 21 nt, Human
gaccagcuugugagucuaggg

SEQ ID NO: 393259 - RNA, 22 nt, Human
gaccccuacgccuccccacccc

SEQ ID NO: 393260 - RNA, 19 nt, Human
gacccugucucaaaaaaag

SEQ ID NO: 393261 - RNA, 18 nt, Human
gacuacaggcgugagcca

SEQ ID NO: 393262 - RNA, 22 nt, Human
gacuacaggcgugagccacugc

SEQ ID NO: 393263 - RNA, 23 nt, Human
gacuacaggcgugagccacugca

SEQ ID NO: 393264 - RNA, 24 nt, Human
gacuucaggugauccgccugccuc

SEQ ID NO: 393265 - RNA, 18 nt, Human
gagagacaaggaguugga

SEQ ID NO: 393266 - RNA, 21 nt, Human
gagagcaaagccuaaaaaugc

SEQ ID NO: 393267 - RNA, 19 nt, Human
gagcaaagccuaaaaaugc

SEQ ID NO: 393268 - RNA, 24 nt, Human
gagggggcccuggcucaggcugcg

SEQ ID NO: 393269 - RNA, 23 nt, Human
gaguagaaagggcaagguaagag

SEQ ID NO: 393270 - RNA, 18 nt, Human
gauuacaggcgugagcca

SEQ ID NO: 393271 - RNA, 22 nt, Human
gauuacaggcgugagccacugc

SEQ ID NO: 393272 - RNA, 23 nt, Human
gauuacaggcgugagccacugca

SEQ ID NO: 393273 - RNA, 21 nt, Human
gauucucgugucucagcuucc

SEQ ID NO: 393274 - RNA, 23 nt, Human
gcaacccucccaccucagccucc

SEQ ID NO: 393275 - RNA, 20 nt, Human
gcagaaguuauugguucuga

SEQ ID NO: 393276 - RNA, 22 nt, Human
gcagccucaaccucccgggcuc

SEQ ID NO: 393277 - RNA, 21 nt, Human
gcauccuugcccugggcgaca

SEQ ID NO: 393278 - RNA, 21 nt, Human
gccaggagcagggcaucuggc

SEQ ID NO: 393279 - RNA, 20 nt, Human
gccguagaccccuacgccuc

SEQ ID NO: 393280 - RNA, 18 nt, Human
gccucaaccucccgggcu

SEQ ID NO: 393281 - RNA, 23 nt, Human
gcgacacagugagacccugucuc

SEQ ID NO: 393282 - RNA, 21 nt, Human
gcgcauagcaagcucacccag

SEQ ID NO: 393283 - RNA, 18 nt, Human
gcucaaaacauuaaacaa

SEQ ID NO: 393284 - RNA, 18 nt, Human
gcucucugaaugagggaa

SEQ ID NO: 393285 - RNA, 26 nt, Human
gcugacccauaggaugucaguggcau

SEQ ID NO: 393286 - RNA, 20 nt, Human
gcugacgaagcgaacagcag

SEQ ID NO: 393287 - RNA, 19 nt, Human
gcuggaguacaguggcaug

SEQ ID NO: 393288 - RNA, 24 nt, Human
gcuggagugcaguggcacuaucug

SEQ ID NO: 393289 - RNA, 19 nt, Human
gcuuggcugaugguuuucc

SEQ ID NO: 393290 - RNA, 21 nt, Human
ggaagggguggugaugcggug

SEQ ID NO: 393291 - RNA, 20 nt, Human
ggacuacaggcgugagccac

SEQ ID NO: 393292 - RNA, 22 nt, Human
ggacuacaggcgugagccacug

SEQ ID NO: 393293 - RNA, 23 nt, Human
ggagagagagccuuagccuugcc

SEQ ID NO: 393294 - RNA, 18 nt, Human
ggcuuuaaagguggccag

SEQ ID NO: 393295 - RNA, 24 nt, Human
ggguuucuuuuuaggcuguuucuc

SEQ ID NO: 393296 - RNA, 24 nt, Human
ggugauccgccugccucagccucc

SEQ ID NO: 393297 - RNA, 19 nt, Human
guagguuuuuggagacaga

SEQ ID NO: 393298 - RNA, 24 nt, Human
guauacaaacacacacacaaacau

SEQ ID NO: 393299 - RNA, 22 nt, Human
gugaagccucugcugcuagccc

SEQ ID NO: 393300 - RNA, 18 nt, Human
gugauccgccugccucag

SEQ ID NO: 393301 - RNA, 24 nt, Human
gugauccgccugccucagccuccc

SEQ ID NO: 393302 - RNA, 24 nt, Human
gugauccuccuggcucagccuccc

SEQ ID NO: 393303 - RNA, 18 nt, Human
guggugaugcggugaagc

SEQ ID NO: 393304 - RNA, 27 nt, Human
guuuacacuaaacacaugaauacauug

SEQ ID NO: 393305 - RNA, 26 nt, Human
uaaaaugccaacucuauagccaugag

SEQ ID NO: 393306 - RNA, 19 nt, Human
uaaaggccccuuaaacaaa

SEQ ID NO: 393307 - RNA, 24 nt, Human
uaacagauggagagaauaccuucu

SEQ ID NO: 393308 - RNA, 20 nt, Human
uaaguguaagggaaucuggu

SEQ ID NO: 393309 - RNA, 24 nt, Human
uaauuuuuuguauuuuuaguagag

SEQ ID NO: 393310 - RNA, 25 nt, Human
uaauuuuuuguauuuuuaguagaga

SEQ ID NO: 393311 - RNA, 24 nt, Human
uacaggcaagcgucaccacaccca

SEQ ID NO: 393312 - RNA, 22 nt, Human
uacaggcgugagccacugcacc

SEQ ID NO: 393313 - RNA, 22 nt, Human
uacaggcgugagccacugcacc

SEQ ID NO: 393314 - RNA, 22 nt, Human
uacaggcgugagccacugcacc

SEQ ID NO: 393315 - RNA, 22 nt, Human
uacaggcgugagccacugcacc

SEQ ID NO: 393316 - RNA, 23 nt, Human
uacaggcgugagccacugcaccu

SEQ ID NO: 393317 - RNA, 23 nt, Human
uacaggcgugagccacugcaccu

SEQ ID NO: 393318 - RNA, 22 nt, Human
uacaggugcaccccaccacacc

SEQ ID NO: 393319 - RNA, 20 nt, Human
uacuguguuuaacagaugga

SEQ ID NO: 393320 - RNA, 19 nt, Human
uagaaggcugggugcccuc

SEQ ID NO: 393321 - RNA, 18 nt, Human
uagaguuaaugauugucu

SEQ ID NO: 393322 - RNA, 24 nt, Human
uagcucucugcagccuugaacucc

SEQ ID NO: 393323 - RNA, 23 nt, Human
uaggucgggggaaaggaaggggc

SEQ ID NO: 393324 - RNA, 19 nt, Human
uauccuuugugaagaugca

SEQ ID NO: 393325 - RNA, 19 nt, Human
uaugacaaaaaguacuaga

SEQ ID NO: 393326 - RNA, 22 nt, Human
uaugaccagauggagacauggg

SEQ ID NO: 393327 - RNA, 22 nt, Human
uauguuaguucuucugcuguuu

SEQ ID NO: 393328 - RNA, 23 nt, Human
uauguuggccaggcuggucucaa

SEQ ID NO: 393329 - RNA, 24 nt, Human
uauguuggccaggcuggucucaaa

SEQ ID NO: 393330 - RNA, 20 nt, Human
ucaaagcaagccuggcugac

SEQ ID NO: 393331 - RNA, 21 nt, Human
ucaaagcaagccuggcugacc

SEQ ID NO: 393332 - RNA, 24 nt, Human
ucaaagcaagccuggcugacccau

SEQ ID NO: 393333 - RNA, 21 nt, Human
ucaccaagagaggccuaugga

SEQ ID NO: 393334 - RNA, 24 nt, Human
ucacccaggcuggagugcaguggc

SEQ ID NO: 393335 - RNA, 25 nt, Human
ucacccagggaaggcugggcugcag

SEQ ID NO: 393336 - RNA, 19 nt, Human
ucacugcaaccucugccuc

SEQ ID NO: 393337 - RNA, 24 nt, Human
ucacugcaaccucugccucccagg

SEQ ID NO: 393338 - RNA, 25 nt, Human
ucacugcaaccucugccucccaggu

SEQ ID NO: 393339 - RNA, 20 nt, Human
ucagagcuacagaagcuggg

SEQ ID NO: 393340 - RNA, 18 nt, Human
ucagccucccaaagugcu

SEQ ID NO: 393341 - RNA, 20 nt, Human
ucagcuuccugaguagcugg

SEQ ID NO: 393342 - RNA, 22 nt, Human
ucaggugauccgccugccucag

SEQ ID NO: 393343 - RNA, 20 nt, Human
ucauaucugugacacugacu

SEQ ID NO: 393344 - RNA, 25 nt, Human
uccauggacagcaccacucaucucc

SEQ ID NO: 393345 - RNA, 22 nt, Human
ucccaaaaaaauagaaccaagc

SEQ ID NO: 393346 - RNA, 24 nt, Human
ucccaaagugcugggaguacaggc

SEQ ID NO: 393347 - RNA, 24 nt, Human
ucccaaagugcugggauuacaggc

SEQ ID NO: 393348 - RNA, 24 nt, Human
ucccaaguaccugggacuacaggc

SEQ ID NO: 393349 - RNA, 21 nt, Human
ucccagguucaagugauucuc

SEQ ID NO: 393350 - RNA, 21 nt, Human
ucccagguucaagugauucuc

SEQ ID NO: 393351 - RNA, 23 nt, Human
ucccagugaugaguuggggcugc

SEQ ID NO: 393352 - RNA, 22 nt, Human
ucccaugauaacaugccccaag

SEQ ID NO: 393353 - RNA, 21 nt, Human
ucccgggcucaagugauccuc

SEQ ID NO: 393354 - RNA, 24 nt, Human
ucccgggcucaagugauccuccug

SEQ ID NO: 393355 - RNA, 23 nt, Human
ucccuaguagcugggacuacagg

SEQ ID NO: 393356 - RNA, 20 nt, Human
ucccugaagggaaagaaugu

SEQ ID NO: 393357 - RNA, 23 nt, Human
uccugaguagcugggauacaggc

SEQ ID NO: 393358 - RNA, 24 nt, Human
ucgcucugucacccaggcuggagu

SEQ ID NO: 393359 - RNA, 24 nt, Human
ucggagagccagcaaaccaagaag

SEQ ID NO: 393360 - RNA, 19 nt, Human
ucuaaaggacacagugggc

SEQ ID NO: 393361 - RNA, 25 nt, Human
ucuauagccaugagguucugcuuug

SEQ ID NO: 393362 - RNA, 23 nt, Human
ucucacucugucacccaggcugg

SEQ ID NO: 393363 - RNA, 24 nt, Human
ucucacucugucacccaggcugga

SEQ ID NO: 393364 - RNA, 25 nt, Human
ucucacucugucacccaggcuggag

SEQ ID NO: 393365 - RNA, 26 nt, Human
ucucacucugucacccaggcuggagu

SEQ ID NO: 393366 - RNA, 19 nt, Human
ucucgcucugucacccagg

SEQ ID NO: 393367 - RNA, 23 nt, Human
ucucgcucugucacccaggcugg

SEQ ID NO: 393368 - RNA, 24 nt, Human
ucucgcucugucacccaggcugga

SEQ ID NO: 393369 - RNA, 26 nt, Human
ucucgcucugucacccaggcuggagu

SEQ ID NO: 393370 - RNA, 27 nt, Human
ucucgcucugucacccaggcuggagug

SEQ ID NO: 393371 - RNA, 19 nt, Human
ucucgugucucagcuuccu

SEQ ID NO: 393372 - RNA, 23 nt, Human
ucucugaaugagggaagcacagc

SEQ ID NO: 393373 - RNA, 22 nt, Human
ucucugcagccuugaacuccug

SEQ ID NO: 393374 - RNA, 18 nt, Human
ucugagugcagccccuga

SEQ ID NO: 393375 - RNA, 18 nt, Human
ucugucacccaggcugga

SEQ ID NO: 393376 - RNA, 24 nt, Human
ucugucacccaggcuggaguacag

SEQ ID NO: 393377 - RNA, 24 nt, Human
ucugucacccaggcuggagugcag

SEQ ID NO: 393378 - RNA, 21 nt, Human
ucuucggaaugccacuccaaa

SEQ ID NO: 393379 - RNA, 21 nt, Human
ucuuuagcaacaaaauaccug

SEQ ID NO: 393380 - RNA, 21 nt, Human
ucuuugggcauccuugcccug

SEQ ID NO: 393381 - RNA, 23 nt, Human
ucuuuuuuuuuuuuugagacgga

SEQ ID NO: 393382 - RNA, 26 nt, Human
ugaaggacuuucuaagcaagaccuug

SEQ ID NO: 393383 - RNA, 18 nt, Human
ugaccccccacugcagcc

SEQ ID NO: 393384 - RNA, 18 nt, Human
ugacuucaggugauccgc

SEQ ID NO: 393385 - RNA, 24 nt, Human
ugacuucaggugauccgccugccu

SEQ ID NO: 393386 - RNA, 23 nt, Human
ugagaaguuuuaggggcaggggg

SEQ ID NO: 393387 - RNA, 19 nt, Human
ugagagacaaggaguugga

SEQ ID NO: 393388 - RNA, 20 nt, Human
ugagcagauagcuggaggcu

SEQ ID NO: 393389 - RNA, 23 nt, Human
ugagcagauagcuggaggcuguu

SEQ ID NO: 393390 - RNA, 24 nt, Human
ugagcucaagcaauccuccugccu

SEQ ID NO: 393391 - RNA, 24 nt, Human
ugaggaaagcaccucugaugagca

SEQ ID NO: 393392 - RNA, 19 nt, Human
ugaggguggaguagggggg

SEQ ID NO: 393393 - RNA, 21 nt, Human
ugaggguggaguaggggggug

SEQ ID NO: 393394 - RNA, 18 nt, Human
ugaguagaaagggcaagg

SEQ ID NO: 393395 - RNA, 21 nt, Human
ugagucuagggaaccuggaau

SEQ ID NO: 393396 - RNA, 18 nt, Human
ugaugagcagauagcugg

SEQ ID NO: 393397 - RNA, 22 nt, Human
ugcaagugacaaucagaguugg

SEQ ID NO: 393398 - RNA, 21 nt, Human
ugcagaacuucuuuguccuug

SEQ ID NO: 393399 - RNA, 20 nt, Human
ugcagccuugaacuccugag

SEQ ID NO: 393400 - RNA, 19 nt, Human
ugcaguggcacuaucugag

SEQ ID NO: 393401 - RNA, 22 nt, Human
ugcccugggcgacacagugaga

SEQ ID NO: 393402 - RNA, 24 nt, Human
ugccucagccucccaaagugcugg

SEQ ID NO: 393403 - RNA, 21 nt, Human
ugccucaggcucccaaguacc

SEQ ID NO: 393404 - RNA, 24 nt, Human
ugccucaggcucccaaguaccugg

SEQ ID NO: 393405 - RNA, 23 nt, Human
ugccugugucccaaccacucagg

SEQ ID NO: 393406 - RNA, 25 nt, Human
ugccuuuggagguauguacaggcac

SEQ ID NO: 393407 - RNA, 24 nt, Human
ugcugggauuacaggcgugagcca

SEQ ID NO: 393408 - RNA, 19 nt, Human
uggaguacaguggcaugau

SEQ ID NO: 393409 - RNA, 21 nt, Human
uggagugcaguggcacuaucu

SEQ ID NO: 393410 - RNA, 24 nt, Human
uggcacuaucugagcucacugcaa

SEQ ID NO: 393411 - RNA, 23 nt, Human
uggcaggugccucuccaaccugg

SEQ ID NO: 393412 - RNA, 24 nt, Human
uggccaggcuggucucaaacuucu

SEQ ID NO: 393413 - RNA, 18 nt, Human
uggccuguuuguuuauga

SEQ ID NO: 393414 - RNA, 23 nt, Human
uggcggcagauggccuguuuguu

SEQ ID NO: 393415 - RNA, 24 nt, Human
uggcucagccucccuaguagcugg

SEQ ID NO: 393416 - RNA, 19 nt, Human
ugggacuacaggcgugagc

SEQ ID NO: 393417 - RNA, 22 nt, Human
ugggacuacaggcgugagccac

SEQ ID NO: 393418 - RNA, 22 nt, Human
ugggacuacaggcgugagccac

SEQ ID NO: 393419 - RNA, 24 nt, Human
ugggacuacaggcgugagccacug

SEQ ID NO: 393420 - RNA, 24 nt, Human
ugggacuacaggcgugagccacug

SEQ ID NO: 393421 - RNA, 24 nt, Human
ugggacuacaggugcaccccacca

SEQ ID NO: 393422 - RNA, 21 nt, Human
ugggaguacaggcacgagcca

SEQ ID NO: 393423 - RNA, 23 nt, Human
ugggaguacaggcacgagccauc

SEQ ID NO: 393424 - RNA, 24 nt, Human
ugggaguacaggcacgagccauca

SEQ ID NO: 393425 - RNA, 21 nt, Human
ugggauacaggcaagcgucac

SEQ ID NO: 393426 - RNA, 23 nt, Human
ugggauacaggcaagcgucacca

SEQ ID NO: 393427 - RNA, 19 nt, Human
ugggauuacaggcgugagc

SEQ ID NO: 393428 - RNA, 22 nt, Human
ugggauuacaggcgugagccac

SEQ ID NO: 393429 - RNA, 22 nt, Human
ugggauuacaggcgugagccac

SEQ ID NO: 393430 - RNA, 24 nt, Human
ugggauuacaggcgugagccacug

SEQ ID NO: 393431 - RNA, 24 nt, Human
ugggauuacaggcgugagccacug

SEQ ID NO: 393432 - RNA, 23 nt, Human
uggugcaggagguugaggaaagc

SEQ ID NO: 393433 - RNA, 19 nt, Human
uguaagcauuucuuuuucc

SEQ ID NO: 393434 - RNA, 21 nt, Human
ugucacccaggcuggagugca

SEQ ID NO: 393435 - RNA, 22 nt, Human
ugucaguggcauggggagugga

SEQ ID NO: 393436 - RNA, 22 nt, Human
ugucucagcuuccugaguagcu

SEQ ID NO: 393437 - RNA, 24 nt, Human
ugucucagcuuccugaguagcugg

SEQ ID NO: 393438 - RNA, 19 nt, Human
ugugucccaaccacucagg

SEQ ID NO: 393439 - RNA, 21 nt, Human
ugugugugcauaucuuauugc

SEQ ID NO: 393440 - RNA, 20 nt, Human
uguuagaucacagccucuuu

SEQ ID NO: 393441 - RNA, 22 nt, Human
uguugcccaagcuggucucaaa

SEQ ID NO: 393442 - RNA, 27 nt, Human
uuaacacugagaauccaugcagagagu

SEQ ID NO: 393443 - RNA, 22 nt, Human
uuauuauuaacacugagaaucc

SEQ ID NO: 393444 - RNA, 23 nt, Human
uucaagugauucucgugucucag

SEQ ID NO: 393445 - RNA, 25 nt, Human
uucacacacugugcacacccaucuc

SEQ ID NO: 393446 - RNA, 21 nt, Human
uucaggugauccgccugccuc

SEQ ID NO: 393447 - RNA, 23 nt, Human
uucaggugauccgccugccucag

SEQ ID NO: 393448 - RNA, 23 nt, Human
uugcagggggaguucuuucccag

SEQ ID NO: 393449 - RNA, 24 nt, Human
uuggcaggugccucuccaaccugg

SEQ ID NO: 393450 - RNA, 25 nt, Human
uuggcccccucuucaauauucgggg

SEQ ID NO: 393451 - RNA, 23 nt, Human
uuguugcccaagcuggucucaaa

SEQ ID NO: 393452 - RNA, 23 nt, Human
uuuagcaacaaaauaccugugug

SEQ ID NO: 393453 - RNA, 18 nt, Human
uuucucagauuuauugua

SEQ ID NO: 393454 - RNA, 24 nt, Human
uuugcagaacuucuuuguccuugg

SEQ ID NO: 393455 - RNA, 21 nt, Human
uuuguuguuguugcccaagcu

SEQ ID NO: 393456 - RNA, 21 nt, Human
uuuuguuguuguugcccaagc

SEQ ID NO: 393457 - RNA, 23 nt, Human
uuuuguuguuguugcccaagcug

SEQ ID NO: 393458 - RNA, 21 nt, Human
uuuuuguauuuuuaguagaga

SEQ ID NO: 393459 - RNA, 24 nt, Human
uuuuuuguauuuuuaguagagaca

SEQ ID NO: 393460 - RNA, 21 nt, Human
aacccugcaccuaagccaaaa

SEQ ID NO: 393461 - RNA, 19 nt, Human
agaaaucuugucuucuuca

SEQ ID NO: 393462 - RNA, 23 nt, Human
agacaucagagaacauuugaacc

SEQ ID NO: 393463 - RNA, 19 nt, Human
agccaaaagcauuauaauc

SEQ ID NO: 393464 - RNA, 25 nt, Human
auuuuagucuuaacaccuguaaacc

SEQ ID NO: 393465 - RNA, 22 nt, Human
caacccugcaccuaagccaaaa

SEQ ID NO: 393466 - RNA, 22 nt, Human
cccucaugaacuaaagcuuuau

SEQ ID NO: 393467 - RNA, 22 nt, Human
cccuuuguuuccugggcugagc

SEQ ID NO: 393468 - RNA, 23 nt, Human
ccugggcugagcuuguccagaaa

SEQ ID NO: 393469 - RNA, 21 nt, Human
ccuuuguuuccugggcugagc

SEQ ID NO: 393470 - RNA, 24 nt, Human
ccuuuguuuccugggcugagcuug

SEQ ID NO: 393471 - RNA, 21 nt, Human
cgaucccucaugaacuaaagc

SEQ ID NO: 393472 - RNA, 21 nt, Human
cuugucuucuucaggcuacag

SEQ ID NO: 393473 - RNA, 22 nt, Human
gaaaggguucaggcuuuggaaa

SEQ ID NO: 393474 - RNA, 25 nt, Human
gagcuuguccagaaaucuugucuuc

SEQ ID NO: 393475 - RNA, 23 nt, Human
ugggcugagcuuguccagaaauc

SEQ ID NO: 393476 - RNA, 23 nt, Human
ugggcuguuuuucuuagcaaucu

SEQ ID NO: 393477 - RNA, 22 nt, Human
uguaaaugguaucuuguauaag

SEQ ID NO: 393478 - RNA, 19 nt, Human
uuguuuacccuuuguuucc

SEQ ID NO: 393479 - RNA, 22 nt, Human
uuuagucuuaacaccuguaaac

SEQ ID NO: 393480 - RNA, 18 nt, Human
uuuuuuuuuuuuuuuuug

SEQ ID NO: 393481 - RNA, 23 nt, Human
aaaaaacaaacaaacaaaaaaaa

SEQ ID NO: 393482 - RNA, 20 nt, Human
aaaacaaacaaacaaaaaaa

SEQ ID NO: 393483 - RNA, 18 nt, Human
aaacaaaaaaaacuagug

SEQ ID NO: 393484 - RNA, 27 nt, Human
aaacaacaucuuguaacugcacugggc

SEQ ID NO: 393485 - RNA, 19 nt, Human
aaacuggcugaugcuccca

SEQ ID NO: 393486 - RNA, 24 nt, Human
aaagguauacauuuggaacuucaa

SEQ ID NO: 393487 - RNA, 19 nt, Human
aacaaaaaacaaacaaaca

SEQ ID NO: 393488 - RNA, 18 nt, Human
aacacaaauuuggcuuua

SEQ ID NO: 393489 - RNA, 18 nt, Human
aacagcaagugguggggg

SEQ ID NO: 393490 - RNA, 18 nt, Human
aacucacaaaaugaggac

SEQ ID NO: 393491 - RNA, 19 nt, Human
aacucacaaaaugaggacc

SEQ ID NO: 393492 - RNA, 18 nt, Human
aagaagaaaguuagaaga

SEQ ID NO: 393493 - RNA, 22 nt, Human
aagcuagagagagagauaauuu

SEQ ID NO: 393494 - RNA, 20 nt, Human
aauaaccggggaugacacac

SEQ ID NO: 393495 - RNA, 24 nt, Human
acaaaaugaggaccucucuuuuaa

SEQ ID NO: 393496 - RNA, 21 nt, Human
acagcaagugguggggggagu

SEQ ID NO: 393497 - RNA, 21 nt, Human
accacaccagggaccccagca

SEQ ID NO: 393498 - RNA, 20 nt, Human
acugagucgguuuaagaaca

SEQ ID NO: 393499 - RNA, 27 nt, Human
acuucauaccucaagugauuuaaacug

SEQ ID NO: 393500 - RNA, 19 nt, Human
agaaacuggcugaugcucc

SEQ ID NO: 393501 - RNA, 19 nt, Human
agagcaggguccgcuccuu

SEQ ID NO: 393502 - RNA, 20 nt, Human
agaggaaaagacugucuaga

SEQ ID NO: 393503 - RNA, 22 nt, Human
agauccagaaagaccuggauaa

SEQ ID NO: 393504 - RNA, 20 nt, Human
agaugagcaacuggagcugg

SEQ ID NO: 393505 - RNA, 26 nt, Human
agaugagcaacuggagcuggaagcac

SEQ ID NO: 393506 - RNA, 20 nt, Human
aggacaagcucagccccgcu

SEQ ID NO: 393507 - RNA, 20 nt, Human
agggagcaggcgguauucuc

SEQ ID NO: 393508 - RNA, 18 nt, Human
aggguuggggagaggcug

SEQ ID NO: 393509 - RNA, 21 nt, Human
aggguuggggagaggcugggg

SEQ ID NO: 393510 - RNA, 18 nt, Human
auccgcgggcccuuccuc

SEQ ID NO: 393511 - RNA, 28 nt, Human
augcucccaugaauacgccccugucuau

SEQ ID NO: 393512 - RNA, 19 nt, Human
auucauuaacagguugcuc

SEQ ID NO: 393513 - RNA, 24 nt, Human
auuucauauagcuauuuauugaau

SEQ ID NO: 393514 - RNA, 23 nt, Human
auuuucuucaaugaauaguuuua

SEQ ID NO: 393515 - RNA, 28 nt, Human
caaaaaacaaacaaacaaaaaaaacuag

SEQ ID NO: 393516 - RNA, 19 nt, Human
caaaacaguugugaugggc

SEQ ID NO: 393517 - RNA, 25 nt, Human
caaauccugcugagccuuuucaaaa

SEQ ID NO: 393518 - RNA, 18 nt, Human
caacuccccggaagcaau

SEQ ID NO: 393519 - RNA, 21 nt, Human
caagcucagccccgcuccuuc

SEQ ID NO: 393520 - RNA, 22 nt, Human
caaugucugccauggccacaaa

SEQ ID NO: 393521 - RNA, 24 nt, Human
caccagggaccccagcauuuccaa

SEQ ID NO: 393522 - RNA, 21 nt, Human
cacgggggcugaaaacaauaa

SEQ ID NO: 393523 - RNA, 23 nt, Human
cacucagugugcguaacuccagg

SEQ ID NO: 393524 - RNA, 22 nt, Human
cagaagucuguggugcauggcu

SEQ ID NO: 393525 - RNA, 24 nt, Human
cagcccaugggguugcaucuuccu

SEQ ID NO: 393526 - RNA, 19 nt, Human
cagcccggggagagcaggg

SEQ ID NO: 393527 - RNA, 18 nt, Human
caggacaagcucagcccc

SEQ ID NO: 393528 - RNA, 21 nt, Human
cagggguccagcaaugucacu

SEQ ID NO: 393529 - RNA, 23 nt, Human
caggguuggggagaggcuggggg

SEQ ID NO: 393530 - RNA, 21 nt, Human
cauaaucacaugucuccugcc

SEQ ID NO: 393531 - RNA, 23 nt, Human
caucaaaaugcuuugccgaaaca

SEQ ID NO: 393532 - RNA, 18 nt, Human
caucauuuguuuucuggc

SEQ ID NO: 393533 - RNA, 21 nt, Human
caucucggcuugaacuucuga

SEQ ID NO: 393534 - RNA, 21 nt, Human
caugggguggguggacuguuu

SEQ ID NO: 393535 - RNA, 22 nt, Human
caugguggaaauuucaggcaga

SEQ ID NO: 393536 - RNA, 19 nt, Human
cauuagggaugacauucuc

SEQ ID NO: 393537 - RNA, 19 nt, Human
ccagaaagaccuggauaaa

SEQ ID NO: 393538 - RNA, 20 nt, Human
ccagagcaggaacuuugggc

SEQ ID NO: 393539 - RNA, 21 nt, Human
ccagcaaugucacugcaggug

SEQ ID NO: 393540 - RNA, 18 nt, Human
cccacuaugaagauauca

SEQ ID NO: 393541 - RNA, 25 nt, Human
cccagaagaacauccuucugcauac

SEQ ID NO: 393542 - RNA, 22 nt, Human
cccauggccagauaucgaagac

SEQ ID NO: 393543 - RNA, 22 nt, Human
cccccaucugacauaguguuug

SEQ ID NO: 393544 - RNA, 24 nt, Human
ccgcgggcccuuccucgcgggucc

SEQ ID NO: 393545 - RNA, 24 nt, Human
ccuauaaugggagagaaccggggc

SEQ ID NO: 393546 - RNA, 19 nt, Human
ccucagggacgcgccaucc

SEQ ID NO: 393547 - RNA, 23 nt, Human
ccuccugauguuucuuuccaugu

SEQ ID NO: 393548 - RNA, 25 nt, Human
ccucgcucccucgcaacuccccgga

SEQ ID NO: 393549 - RNA, 22 nt, Human
ccucuagcugcugauggccugu

SEQ ID NO: 393550 - RNA, 19 nt, Human
ccugacuaaggcacucugc

SEQ ID NO: 393551 - RNA, 21 nt, Human
ccuuuauucccccucgcuccc

SEQ ID NO: 393552 - RNA, 19 nt, Human
cuccaccucaaaguugggu

SEQ ID NO: 393553 - RNA, 25 nt, Human
cuccaggccugucucugcccuccac

SEQ ID NO: 393554 - RNA, 25 nt, Human
cucccucgcaacuccccggaagcaa

SEQ ID NO: 393555 - RNA, 23 nt, Human
cucgcaacuccccggaagcaauu

SEQ ID NO: 393556 - RNA, 19 nt, Human
cugaaaacaauaauuuugu

SEQ ID NO: 393557 - RNA, 22 nt, Human
cuggaagcacuucuguggucaa

SEQ ID NO: 393558 - RNA, 21 nt, Human
cuggagcuggaagcacuucug

SEQ ID NO: 393559 - RNA, 24 nt, Human
cuuuaauaaaaaaaaaacaguuca

SEQ ID NO: 393560 - RNA, 24 nt, Human
cuuuuaugcccccuggcuuuccca

SEQ ID NO: 393561 - RNA, 22 nt, Human
gaaacaacaucuuguaacugca

SEQ ID NO: 393562 - RNA, 19 nt, Human
gaaauccuccaccucaaag

SEQ ID NO: 393563 - RNA, 21 nt, Human
gaacaaauccugcugagccuu

SEQ ID NO: 393564 - RNA, 19 nt, Human
gaacuacaugaaagaagaa

SEQ ID NO: 393565 - RNA, 18 nt, Human
gaacucgccacgacccuc

SEQ ID NO: 393566 - RNA, 19 nt, Human
gaacucgccacgacccuca

SEQ ID NO: 393567 - RNA, 22 nt, Human
gacaauaacacgggggcugaaa

SEQ ID NO: 393568 - RNA, 21 nt, Human
gacuguuuuagacugccagca

SEQ ID NO: 393569 - RNA, 22 nt, Human
gagccuggggaacccauucucc

SEQ ID NO: 393570 - RNA, 20 nt, Human
gaguagaggcaggaaggcag

SEQ ID NO: 393571 - RNA, 20 nt, Human
gaucauaaucacaugucucc

SEQ ID NO: 393572 - RNA, 19 nt, Human
gaucugauguauuuccccu

SEQ ID NO: 393573 - RNA, 19 nt, Human
gauuuguggaaagcuagag

SEQ ID NO: 393574 - RNA, 18 nt, Human
gccacgacccucagggac

SEQ ID NO: 393575 - RNA, 24 nt, Human
gcccggggagagcaggguccgcuu

SEQ ID NO: 393576 - RNA, 22 nt, Human
gcgggcccuuccucgcgggucc

SEQ ID NO: 393577 - RNA, 24 nt, Human
gcucccaacucacaaaaugaggac

SEQ ID NO: 393578 - RNA, 26 nt, Human
gcucccucgcaacuccccggaagcaa

SEQ ID NO: 393579 - RNA, 20 nt, Human
gcuccucucuccccguuuuc

SEQ ID NO: 393580 - RNA, 19 nt, Human
gcuuuaccaagaaaaaaaa

SEQ ID NO: 393581 - RNA, 20 nt, Human
ggaaagggaggaggauagaa

SEQ ID NO: 393582 - RNA, 20 nt, Human
ggaaauuucaggcagagcau

SEQ ID NO: 393583 - RNA, 22 nt, Human
ggacaagcucagccccgcuccu

SEQ ID NO: 393584 - RNA, 19 nt, Human
ggagguggaguagaggcag

SEQ ID NO: 393585 - RNA, 20 nt, Human
ggauuuguggaaagcuagag

SEQ ID NO: 393586 - RNA, 24 nt, Human
ggauuuguggaaagcuagagagag

SEQ ID NO: 393587 - RNA, 21 nt, Human
ggccuuuaauuuuaacaauuu

SEQ ID NO: 393588 - RNA, 21 nt, Human
ggcuccucucuccccguuuuc

SEQ ID NO: 393589 - RNA, 18 nt, Human
gggaacuagaggaaaaga

SEQ ID NO: 393590 - RNA, 19 nt, Human
gggagaaggcuaggguugg

SEQ ID NO: 393591 - RNA, 21 nt, Human
gggauuucuuucuuucuucuu

SEQ ID NO: 393592 - RNA, 20 nt, Human
ggguuggggagaggcugggg

SEQ ID NO: 393593 - RNA, 23 nt, Human
ggguuggggagaggcuggggggu

SEQ ID NO: 393594 - RNA, 18 nt, Human
guaaagugagugaaugaa

SEQ ID NO: 393595 - RNA, 18 nt, Human
guggguuuuagaaacugg

SEQ ID NO: 393596 - RNA, 20 nt, Human
guuccagaaaagaucugaga

SEQ ID NO: 393597 - RNA, 24 nt, Human
guuucuccuucuuaacuguaauuc

SEQ ID NO: 393598 - RNA, 19 nt, Human
uaaacugaagccaaaccuu

SEQ ID NO: 393599 - RNA, 28 nt, Human
uaaagugccuccaguaaggucuugaaaa

SEQ ID NO: 393600 - RNA, 24 nt, Human
uaacaagaaaaggcaauugguuag

SEQ ID NO: 393601 - RNA, 19 nt, Human
uaacaugauucauuaacag

SEQ ID NO: 393602 - RNA, 24 nt, Human
uaacuggguugacauugggcugaa

SEQ ID NO: 393603 - RNA, 21 nt, Human
uaagauagagauagcaaguag

SEQ ID NO: 393604 - RNA, 23 nt, Human
uaaugcugugcaaacaagggucu

SEQ ID NO: 393605 - RNA, 20 nt, Human
uaauggauuuuacccccauc

SEQ ID NO: 393606 - RNA, 25 nt, Human
uaauucuuuuaauuugguuaucugg

SEQ ID NO: 393607 - RNA, 19 nt, Human
uacaacuguucuuuuuauu

SEQ ID NO: 393608 - RNA, 22 nt, Human
uacacugugagccuggggaacc

SEQ ID NO: 393609 - RNA, 19 nt, Human
uacagucuuauagaaguuu

SEQ ID NO: 393610 - RNA, 19 nt, Human
uaccaagaaaaaaaacaaa

SEQ ID NO: 393611 - RNA, 30 nt, Human
uaccaagaaaaaaaacaaaaaacaaacaag

SEQ ID NO: 393612 - RNA, 21 nt, Human
uaccacaccagggaccccagc

SEQ ID NO: 393613 - RNA, 22 nt, Human
uagaacacuccauucccacagg

SEQ ID NO: 393614 - RNA, 23 nt, Human
uagaaguuucuccuucuuaacug

SEQ ID NO: 393615 - RNA, 22 nt, Human
uagcccacuaugaagauaucag

SEQ ID NO: 393616 - RNA, 21 nt, Human
uagcugcugauggccuguggg

SEQ ID NO: 393617 - RNA, 22 nt, Human
uaggcuccuaggccaagggucc

SEQ ID NO: 393618 - RNA, 21 nt, Human
uauauucugccuuguuccaga

SEQ ID NO: 393619 - RNA, 21 nt, Human
uaugucuuuauauaguuugca

SEQ ID NO: 393620 - RNA, 18 nt, Human
uauuaaggaggcagacag

SEQ ID NO: 393621 - RNA, 19 nt, Human
uauuuuauauucugccuug

SEQ ID NO: 393622 - RNA, 23 nt, Human
uauuuuauauucugccuuguucc

SEQ ID NO: 393623 - RNA, 20 nt, Human
ucaaagguauacauuuggaa

SEQ ID NO: 393624 - RNA, 20 nt, Human
ucacuuggaaacuggaagaa

SEQ ID NO: 393625 - RNA, 20 nt, Human
ucagccccgcuccuucauuc

SEQ ID NO: 393626 - RNA, 26 nt, Human
ucaggagugugcuguccggagggagc

SEQ ID NO: 393627 - RNA, 20 nt, Human
ucaggcaagaaacugugagc

SEQ ID NO: 393628 - RNA, 23 nt, Human
ucaggcagagcauuucuguguug

SEQ ID NO: 393629 - RNA, 18 nt, Human
ucaguaaauaaggaaagu

SEQ ID NO: 393630 - RNA, 19 nt, Human
uccaacucugcauuucacc

SEQ ID NO: 393631 - RNA, 21 nt, Human
uccaucaaaaugcuuugccga

SEQ ID NO: 393632 - RNA, 22 nt, Human
ucccucgcaacuccccggaagc

SEQ ID NO: 393633 - RNA, 20 nt, Human
ucgcucccucgcaacucccc

SEQ ID NO: 393634 - RNA, 19 nt, Human
ucuaacaucuccugaaguu

SEQ ID NO: 393635 - RNA, 23 nt, Human
ucucccuggaaacuccuguuugu

SEQ ID NO: 393636 - RNA, 21 nt, Human
ucuccugccuuuuacagggaa

SEQ ID NO: 393637 - RNA, 18 nt, Human
ucucucagcucugcccag

SEQ ID NO: 393638 - RNA, 23 nt, Human
ucucugagaaggcugggagacuc

SEQ ID NO: 393639 - RNA, 23 nt, Human
ucugauguugaguuucuuaccac

SEQ ID NO: 393640 - RNA, 20 nt, Human
ucugcucccaacucacaaaa

SEQ ID NO: 393641 - RNA, 20 nt, Human
ucuguggucaagcaggcagc

SEQ ID NO: 393642 - RNA, 18 nt, Human
ucuuucuuucuucuucuc

SEQ ID NO: 393643 - RNA, 21 nt, Human
ugaaagcaucucuugcuuggc

SEQ ID NO: 393644 - RNA, 22 nt, Human
ugaaauaucaucggcuuuauaa

SEQ ID NO: 393645 - RNA, 22 nt, Human
ugaaggaucuuuggagaccaua

SEQ ID NO: 393646 - RNA, 23 nt, Human
ugagacauaauccuguugagagc

SEQ ID NO: 393647 - RNA, 18 nt, Human
ugagcuggcugucaacag

SEQ ID NO: 393648 - RNA, 19 nt, Human
ugcaaggaaaagaugccau

SEQ ID NO: 393649 - RNA, 21 nt, Human
ugccauugucuguugauuuag

SEQ ID NO: 393650 - RNA, 24 nt, Human
ugccuccaguaaggucuugaaaac

SEQ ID NO: 393651 - RNA, 19 nt, Human
ugcugauggccuguggguu

SEQ ID NO: 393652 - RNA, 20 nt, Human
ugcugcuccuuucuguuuuc

SEQ ID NO: 393653 - RNA, 19 nt, Human
uggaaaacaggauaaacuu

SEQ ID NO: 393654 - RNA, 21 nt, Human
uggaagaauuugcaaggaaaa

SEQ ID NO: 393655 - RNA, 19 nt, Human
uggagguggaguagaggca

SEQ ID NO: 393656 - RNA, 22 nt, Human
uggaguagaggcaggaaggcag

SEQ ID NO: 393657 - RNA, 22 nt, Human
uggcuccucucuccccguuuuc

SEQ ID NO: 393658 - RNA, 19 nt, Human
ugggaaaaaccaacaagca

SEQ ID NO: 393659 - RNA, 19 nt, Human
uggguggugcacaggggug

SEQ ID NO: 393660 - RNA, 21 nt, Human
ugguggggggaguucucagau

SEQ ID NO: 393661 - RNA, 24 nt, Human
uguaccugcaaaucccagaagaac

SEQ ID NO: 393662 - RNA, 24 nt, Human
ugucaggaccauugucucucagcu

SEQ ID NO: 393663 - RNA, 18 nt, Human
ugucucugcccuccacuc

SEQ ID NO: 393664 - RNA, 18 nt, Human
ugugaagaaaucaguggg

SEQ ID NO: 393665 - RNA, 20 nt, Human
ugugcguaacuccaggccug

SEQ ID NO: 393666 - RNA, 19 nt, Human
ugugggaaagggaggagga

SEQ ID NO: 393667 - RNA, 18 nt, Human
ugugggagaaggcuaggg

SEQ ID NO: 393668 - RNA, 25 nt, Human
uguuuucuuuugugggaaagggagg

SEQ ID NO: 393669 - RNA, 21 nt, Human
uuaaugcugugcaaacaaggg

SEQ ID NO: 393670 - RNA, 31 nt, Human
uuaccaagaaaaaaaacaaaaaacaaacaag

SEQ ID NO: 393671 - RNA, 22 nt, Human
uucaaaauaaagaaacugugaa

SEQ ID NO: 393672 - RNA, 24 nt, Human
uugaagauccauaacuaucuucug

SEQ ID NO: 393673 - RNA, 20 nt, Human
uugcaguuucacugucucug

SEQ ID NO: 393674 - RNA, 23 nt, Human
uuggcuccucucuccccguuuuc

SEQ ID NO: 393675 - RNA, 25 nt, Human
uugggucugcaccaggauucugccu

SEQ ID NO: 393676 - RNA, 21 nt, Human
uuuaaacugaagccaaaccuu

SEQ ID NO: 393677 - RNA, 25 nt, Human
uuuccugucccuccugauguuucuu

SEQ ID NO: 393678 - RNA, 21 nt, Human
uuucuguuuucuuuuguggga

SEQ ID NO: 393679 - RNA, 27 nt, Human
uuucuuuccauguuggggcacucagug

SEQ ID NO: 393680 - RNA, 23 nt, Human
uuuuuuuuuuuuuuuuuugauuu

SEQ ID NO: 393681 - RNA, 27 nt, Human
uuuuuuuuuuuuuuuuuuuuuuugggg

SEQ ID NO: 393682 - RNA, 18 nt, Human
aaagugcugggauuacaa

SEQ ID NO: 393683 - RNA, 24 nt, Human
aaagugcugggauuacaagcguga

SEQ ID NO: 393684 - RNA, 21 nt, Human
aagaagagacacacauuagaa

SEQ ID NO: 393685 - RNA, 19 nt, Human
aagugcugggauuacaagc

SEQ ID NO: 393686 - RNA, 19 nt, Human
aagugcugggauuacaagc

SEQ ID NO: 393687 - RNA, 26 nt, Human
aagugcugggauuacaagcgugagcc

SEQ ID NO: 393688 - RNA, 18 nt, Human
acaggguuucacuauguu

SEQ ID NO: 393689 - RNA, 19 nt, Human
acaggguuucacuauguua

SEQ ID NO: 393690 - RNA, 20 nt, Human
acaggguuucacuauguuag

SEQ ID NO: 393691 - RNA, 24 nt, Human
acaggguuucacuauguuagccag

SEQ ID NO: 393692 - RNA, 20 nt, Human
acauauacauacacauagaa

SEQ ID NO: 393693 - RNA, 24 nt, Human
agugcugggauuacaagcgugagc

SEQ ID NO: 393694 - RNA, 19 nt, Human
auccacaugagaacacagg

SEQ ID NO: 393695 - RNA, 21 nt, Human
auguacauauacauacacaua

SEQ ID NO: 393696 - RNA, 24 nt, Human
caaagugcugggauuacaagcgug

SEQ ID NO: 393697 - RNA, 22 nt, Human
caccaugcccggccuccucugg

SEQ ID NO: 393698 - RNA, 24 nt, Human
caccucggccucccaaagugcugg

SEQ ID NO: 393699 - RNA, 18 nt, Human
cacuauguuagccaggau

SEQ ID NO: 393700 - RNA, 24 nt, Human
cacuauguuagccaggauggucuu

SEQ ID NO: 393701 - RNA, 24 nt, Human
caggguuucacuauguuagccagg

SEQ ID NO: 393702 - RNA, 24 nt, Human
cauuccuccuccuggcaagaaugg

SEQ ID NO: 393703 - RNA, 22 nt, Human
ccaaagugcugggauuacaagc

SEQ ID NO: 393704 - RNA, 24 nt, Human
ccaaagugcugggauuacaagcgu

SEQ ID NO: 393705 - RNA, 19 nt, Human
cccucccucauucuuuccc

SEQ ID NO: 393706 - RNA, 18 nt, Human
ccuccuguucuaaaucca

SEQ ID NO: 393707 - RNA, 18 nt, Human
ccuguucuaaauccacau

SEQ ID NO: 393708 - RNA, 19 nt, Human
cucauuccuccuccuggca

SEQ ID NO: 393709 - RNA, 22 nt, Human
cuccugaccucgugaucugccc

SEQ ID NO: 393710 - RNA, 24 nt, Human
cuccuggcaagaauggcauccuag

SEQ ID NO: 393711 - RNA, 22 nt, Human
cugaaacucagcuuguauaugc

SEQ ID NO: 393712 - RNA, 19 nt, Human
cugaaaggucuuccaugcu

SEQ ID NO: 393713 - RNA, 18 nt, Human
cuggcaagaauggcaucc

SEQ ID NO: 393714 - RNA, 22 nt, Human
gacacacauuagaauguacaua

SEQ ID NO: 393715 - RNA, 22 nt, Human
gaccucgugaucugcccaccuc

SEQ ID NO: 393716 - RNA, 22 nt, Human
gaccucgugaucugcccaccuc

SEQ ID NO: 393717 - RNA, 24 nt, Human
gaccucgugaucugcccaccucgg

SEQ ID NO: 393718 - RNA, 18 nt, Human
gauuacaagcgugagcca

SEQ ID NO: 393719 - RNA, 24 nt, Human
gauuacaagcgugagccaccaugc

SEQ ID NO: 393720 - RNA, 24 nt, Human
ggauuacaagcgugagccaccaug

SEQ ID NO: 393721 - RNA, 18 nt, Human
ggccuccucuggguaguu

SEQ ID NO: 393722 - RNA, 20 nt, Human
ggucuugaucuccugaccuc

SEQ ID NO: 393723 - RNA, 21 nt, Human
guaucauuauucccgaguggc

SEQ ID NO: 393724 - RNA, 24 nt, Human
gugaucugcccaccucggccuccc

SEQ ID NO: 393725 - RNA, 22 nt, Human
guucaaauugaauguuggccaa

SEQ ID NO: 393726 - RNA, 22 nt, Human
uaaaagcuaccagugucuucag

SEQ ID NO: 393727 - RNA, 22 nt, Human
uaaaugcccugaugcaugacug

SEQ ID NO: 393728 - RNA, 25 nt, Human
uaacuuuuuguauuuuuuaguagag

SEQ ID NO: 393729 - RNA, 26 nt, Human
uaacuuuuuguauuuuuuaguagaga

SEQ ID NO: 393730 - RNA, 19 nt, Human
uaagaagagacacacauua

SEQ ID NO: 393731 - RNA, 23 nt, Human
uacaagcgugagccaccaugccc

SEQ ID NO: 393732 - RNA, 22 nt, Human
uagagacaggguuucacuaugu

SEQ ID NO: 393733 - RNA, 24 nt, Human
uaguagagacaggguuucacuaug

SEQ ID NO: 393734 - RNA, 21 nt, Human
uauuaaaagcuaccagugucu

SEQ ID NO: 393735 - RNA, 22 nt, Human
ucaaaagaguaccuacuaaaga

SEQ ID NO: 393736 - RNA, 24 nt, Human
ucacuauguuagccaggauggucu

SEQ ID NO: 393737 - RNA, 18 nt, Human
ucccaaagugcugggauu

SEQ ID NO: 393738 - RNA, 24 nt, Human
ucccaaagugcugggauuacaagc

SEQ ID NO: 393739 - RNA, 18 nt, Human
ucggccucccaaagugcu

SEQ ID NO: 393740 - RNA, 22 nt, Human
ucuagcacaagggguaucaacu

SEQ ID NO: 393741 - RNA, 27 nt, Human
ucugugacagaaacauagccggggucc

SEQ ID NO: 393742 - RNA, 21 nt, Human
ucuugugguucuaguaaggau

SEQ ID NO: 393743 - RNA, 23 nt, Human
ugaaaggucuuccaugcucuguu

SEQ ID NO: 393744 - RNA, 21 nt, Human
ugacuuauucucccucccuca

SEQ ID NO: 393745 - RNA, 18 nt, Human
ugagaacacaggcaggcc

SEQ ID NO: 393746 - RNA, 24 nt, Human
ugaucugcccaccucggccuccca

SEQ ID NO: 393747 - RNA, 26 nt, Human
ugcccggccuccucuggguaguucug

SEQ ID NO: 393748 - RNA, 25 nt, Human
ugcugggauuacaagcgugagccac

SEQ ID NO: 393749 - RNA, 18 nt, Human
ugggauuacaagcgugag

SEQ ID NO: 393750 - RNA, 22 nt, Human
ugggauuacaagcgugagccac

SEQ ID NO: 393751 - RNA, 23 nt, Human
ugggauuacaagcgugagccacc

SEQ ID NO: 393752 - RNA, 24 nt, Human
ugggauuacaagcgugagccacca

SEQ ID NO: 393753 - RNA, 25 nt, Human
ugggauuacaagcgugagccaccau

SEQ ID NO: 393754 - RNA, 18 nt, Human
uguacauauacauacaca

SEQ ID NO: 393755 - RNA, 25 nt, Human
uguacauauacauacacauagaaua

SEQ ID NO: 393756 - RNA, 21 nt, Human
uuaguagagacaggguuucac

SEQ ID NO: 393757 - RNA, 24 nt, Human
uuaguagagacaggguuucacuau

SEQ ID NO: 393758 - RNA, 19 nt, Human
uuucacuauguuagccagg

SEQ ID NO: 393759 - RNA, 23 nt, Human
uuuuauaauuauuaaaagcuacc

SEQ ID NO: 393760 - RNA, 24 nt, Human
uuuuuaguagagacaggguuucac

SEQ ID NO: 393761 - RNA, 22 nt, Human
uuuuuguauuuuuuaguagaga

SEQ ID NO: 393762 - RNA, 24 nt, Human
uuuuuguauuuuuuaguagagaca

SEQ ID NO: 393763 - RNA, 23 nt, Human
uuuuuuaguagagacaggguuuc

SEQ ID NO: 393764 - RNA, 18 nt, Human
aaacaaaaugcagugauc

SEQ ID NO: 393765 - RNA, 22 nt, Human
aaacaaaaugcagugaucaaaa

SEQ ID NO: 393766 - RNA, 19 nt, Human
aauggguuacguuacaggg

SEQ ID NO: 393767 - RNA, 21 nt, Human
acagacacaaaauagguuaac

SEQ ID NO: 393768 - RNA, 21 nt, Human
acagagagaaacucugucuua

SEQ ID NO: 393769 - RNA, 24 nt, Human
acagagagaaacucugucuuaaaa

SEQ ID NO: 393770 - RNA, 24 nt, Human
accagcauggugaaaccccgccuc

SEQ ID NO: 393771 - RNA, 24 nt, Human
accccgccucuacuaaaaauacaa

SEQ ID NO: 393772 - RNA, 24 nt, Human
acugcacuccagccugggcaacag

SEQ ID NO: 393773 - RNA, 24 nt, Human
acugcacuccagccugggcaacag

SEQ ID NO: 393774 - RNA, 23 nt, Human
agaaucuuguauuuaggcaucag

SEQ ID NO: 393775 - RNA, 23 nt, Human
agagguucagugagcugaaauug

SEQ ID NO: 393776 - RNA, 24 nt, Human
agcacuuugggaggccgagguggg

SEQ ID NO: 393777 - RNA, 20 nt, Human
agcauggugaaaccccgccu

SEQ ID NO: 393778 - RNA, 24 nt, Human
agccugggcaacagagagaaacuc

SEQ ID NO: 393779 - RNA, 21 nt, Human
agcuggcugguggugugugcc

SEQ ID NO: 393780 - RNA, 18 nt, Human
aggcagagguucagugag

SEQ ID NO: 393781 - RNA, 22 nt, Human
aggcaggacgcaguggcucacg

SEQ ID NO: 393782 - RNA, 18 nt, Human
aggcaggagaaucacuug

SEQ ID NO: 393783 - RNA, 21 nt, Human
aggcaggagaaucacuugacc

SEQ ID NO: 393784 - RNA, 24 nt, Human
aggcaggagaaucacuugaccugg

SEQ ID NO: 393785 - RNA, 20 nt, Human
aggccgagguggguggauca

SEQ ID NO: 393786 - RNA, 24 nt, Human
aggcugaggcaggagaaucacuug

SEQ ID NO: 393787 - RNA, 23 nt, Human
agguauguaugaccuuguuuauu

SEQ ID NO: 393788 - RNA, 24 nt, Human
agguggguggaucaugaagucagg

SEQ ID NO: 393789 - RNA, 24 nt, Human
aguggcucacgucuguaaucucag

SEQ ID NO: 393790 - RNA, 24 nt, Human
agugucuauuauucccauggguac

SEQ ID NO: 393791 - RNA, 24 nt, Human
auugcgccacugcacuccagccug

SEQ ID NO: 393792 - RNA, 24 nt, Human
auuuuugucaaaguuuaaacacug

SEQ ID NO: 393793 - RNA, 18 nt, Human
caaaaugauucuugcuaa

SEQ ID NO: 393794 - RNA, 20 nt, Human
caaguuucaaacaaaaugca

SEQ ID NO: 393795 - RNA, 22 nt, Human
cacaaaaugauucuugcuaaua

SEQ ID NO: 393796 - RNA, 24 nt, Human
cacgucuguaaucucagcacuuug

SEQ ID NO: 393797 - RNA, 19 nt, Human
cacugcacuccagccuggg

SEQ ID NO: 393798 - RNA, 21 nt, Human
cacugcacuccagccugggca

SEQ ID NO: 393799 - RNA, 22 nt, Human
cacugcacuccagccugggcaa

SEQ ID NO: 393800 - RNA, 23 nt, Human
cacugcacuccagccugggcaac

SEQ ID NO: 393801 - RNA, 24 nt, Human
cacugcacuccagccugggcaaca

SEQ ID NO: 393802 - RNA, 24 nt, Human
cagcacuuugggaggccgaggugg

SEQ ID NO: 393803 - RNA, 20 nt, Human
cagcauggugaaaccccgcc

SEQ ID NO: 393804 - RNA, 22 nt, Human
cagccugggcaacagagagaaa

SEQ ID NO: 393805 - RNA, 18 nt, Human
cauggugaaaccccgccu

SEQ ID NO: 393806 - RNA, 19 nt, Human
cauggugaaaccccgccuc

SEQ ID NO: 393807 - RNA, 21 nt, Human
cauggugaaaccccgccucua

SEQ ID NO: 393808 - RNA, 20 nt, Human
ccacugcacuccagccuggg

SEQ ID NO: 393809 - RNA, 20 nt, Human
ccacugcacuccagccuggg

SEQ ID NO: 393810 - RNA, 21 nt, Human
ccacugcacuccagccugggc

SEQ ID NO: 393811 - RNA, 23 nt, Human
ccacugcacuccagccugggcaa

SEQ ID NO: 393812 - RNA, 24 nt, Human
ccacugcacuccagccugggcaac

SEQ ID NO: 393813 - RNA, 19 nt, Human
cccagugucuauuauuccc

SEQ ID NO: 393814 - RNA, 18 nt, Human
ccccacccuaccucccca

SEQ ID NO: 393815 - RNA, 18 nt, Human
cccuaccuccccaguguc

SEQ ID NO: 393816 - RNA, 22 nt, Human
ccugaccagcauggugaaaccc

SEQ ID NO: 393817 - RNA, 23 nt, Human
ccugaccagcauggugaaacccc

SEQ ID NO: 393818 - RNA, 24 nt, Human
ccugaccagcauggugaaaccccg

SEQ ID NO: 393819 - RNA, 24 nt, Human
ccugggaggcagagguucagugag

SEQ ID NO: 393820 - RNA, 21 nt, Human
ccuguaaucccagcuacucag

SEQ ID NO: 393821 - RNA, 22 nt, Human
ccuguaaucccagcuacucaga

SEQ ID NO: 393822 - RNA, 22 nt, Human
cgagguggguggaucaugaagu

SEQ ID NO: 393823 - RNA, 24 nt, Human
cgagguggguggaucaugaaguca

SEQ ID NO: 393824 - RNA, 24 nt, Human
cgccacugcacuccagccugggca

SEQ ID NO: 393825 - RNA, 22 nt, Human
cgcuccccacccuaccucccca

SEQ ID NO: 393826 - RNA, 24 nt, Human
cucacgucuguaaucucagcacuu

SEQ ID NO: 393827 - RNA, 20 nt, Human
cuccccacccuaccucccca

SEQ ID NO: 393828 - RNA, 20 nt, Human
cucuacuaaaaauacaaaaa

SEQ ID NO: 393829 - RNA, 21 nt, Human
cuguaaucucagcacuuuggg

SEQ ID NO: 393830 - RNA, 19 nt, Human
cuucgucccgcuccccacc

SEQ ID NO: 393831 - RNA, 21 nt, Human
gaaaauucauuuuaggcagga

SEQ ID NO: 393832 - RNA, 24 nt, Human
gaaucacuugaccugggaggcaga

SEQ ID NO: 393833 - RNA, 23 nt, Human
gacgcaguggcucacgucuguaa

SEQ ID NO: 393834 - RNA, 22 nt, Human
gagaaucacuugaccugggagg

SEQ ID NO: 393835 - RNA, 18 nt, Human
gauacuaaauguggcagg

SEQ ID NO: 393836 - RNA, 22 nt, Human
gaucauaguuaauaccaauuua

SEQ ID NO: 393837 - RNA, 24 nt, Human
gaucaugaagucaggaguuggaga

SEQ ID NO: 393838 - RNA, 22 nt, Human
gauuuggggguggggauacuaa

SEQ ID NO: 393839 - RNA, 23 nt, Human
gauuuuuauuuuagauucaggaa

SEQ ID NO: 393840 - RNA, 21 nt, Human
gcaggagaaucacuugaccug

SEQ ID NO: 393841 - RNA, 22 nt, Human
gccacugcacuccagccugggc

SEQ ID NO: 393842 - RNA, 24 nt, Human
gccacugcacuccagccugggcaa

SEQ ID NO: 393843 - RNA, 24 nt, Human
ggguggaucaugaagucaggaguu

SEQ ID NO: 393844 - RNA, 24 nt, Human
gguggugugugccuguaaucccag

SEQ ID NO: 393845 - RNA, 19 nt, Human
gucacagaaaaauacugua

SEQ ID NO: 393846 - RNA, 21 nt, Human
gugaaaccccgccucuacuaa

SEQ ID NO: 393847 - RNA, 24 nt, Human
guggugugugccuguaaucccagc

SEQ ID NO: 393848 - RNA, 22 nt, Human
uaauaguacaaauuuuguccca

SEQ ID NO: 393849 - RNA, 19 nt, Human
uacaugaaacuacugaaag

SEQ ID NO: 393850 - RNA, 22 nt, Human
uagcauaugcuuuaacucuggu

SEQ ID NO: 393851 - RNA, 23 nt, Human
ucaaacaaaaugcagugaucaaa

SEQ ID NO: 393852 - RNA, 21 nt, Human
ucacccagguagugagcacag

SEQ ID NO: 393853 - RNA, 23 nt, Human
ucacuugaccugggaggcagagg

SEQ ID NO: 393854 - RNA, 24 nt, Human
ucacuugaccugggaggcagaggu

SEQ ID NO: 393855 - RNA, 24 nt, Human
ucagaggcugaggcaggagaauca

SEQ ID NO: 393856 - RNA, 18 nt, Human
ucagugagcugaaauugc

SEQ ID NO: 393857 - RNA, 19 nt, Human
ucaugcuuauagguuacuc

SEQ ID NO: 393858 - RNA, 23 nt, Human
ucauuaauugauggucacagaaa

SEQ ID NO: 393859 - RNA, 24 nt, Human
ucccauggguacucagguauuacu

SEQ ID NO: 393860 - RNA, 24 nt, Human
uccccaguagguaaguuuuucagc

SEQ ID NO: 393861 - RNA, 22 nt, Human
uccccagugucuauuauuccca

SEQ ID NO: 393862 - RNA, 18 nt, Human
uccugucacccagguagu

SEQ ID NO: 393863 - RNA, 24 nt, Human
ugaaauugcgccacugcacuccag

SEQ ID NO: 393864 - RNA, 18 nt, Human
ugaccagcauggugaaac

SEQ ID NO: 393865 - RNA, 22 nt, Human
ugagcugaaauugcgccacugc

SEQ ID NO: 393866 - RNA, 20 nt, Human
ugaggcaggagaaucacuug

SEQ ID NO: 393867 - RNA, 19 nt, Human
ugccuguaaucccagcuac

SEQ ID NO: 393868 - RNA, 18 nt, Human
uggaauuuuuuuuuuuuc

SEQ ID NO: 393869 - RNA, 22 nt, Human
uggcucacgucuguaaucucag

SEQ ID NO: 393870 - RNA, 24 nt, Human
uggcucacgucuguaaucucagca

SEQ ID NO: 393871 - RNA, 23 nt, Human
ugggaggccgagguggguggauc

SEQ ID NO: 393872 - RNA, 24 nt, Human
ugggaggccgagguggguggauca

SEQ ID NO: 393873 - RNA, 20 nt, Human
uggggauacuaaauguggca

SEQ ID NO: 393874 - RNA, 24 nt, Human
ugggguacguaugauccugucacc

SEQ ID NO: 393875 - RNA, 23 nt, Human
uggguggaucaugaagucaggag

SEQ ID NO: 393876 - RNA, 24 nt, Human
ugguggugugugccuguaauccca

SEQ ID NO: 393877 - RNA, 21 nt, Human
uggugugugccuguaauccca

SEQ ID NO: 393878 - RNA, 22 nt, Human
uggugugugccuguaaucccag

SEQ ID NO: 393879 - RNA, 24 nt, Human
uggugugugccuguaaucccagcu

SEQ ID NO: 393880 - RNA, 21 nt, Human
ugucaaaguuuaaacacugga

SEQ ID NO: 393881 - RNA, 22 nt, Human
uuagcuggcugguggugugugc

SEQ ID NO: 393882 - RNA, 21 nt, Human
uucagugagcugaaauugcgc

SEQ ID NO: 393883 - RNA, 21 nt, Human
uugaggucagccuacagacac

SEQ ID NO: 393884 - RNA, 23 nt, Human
uugcgccacugcacuccagccug

SEQ ID NO: 393885 - RNA, 25 nt, Human
uugggaggccgagguggguggauca

SEQ ID NO: 393886 - RNA, 18 nt, Human
uuucaaacaaaaugcagu

SEQ ID NO: 393887 - RNA, 21 nt, Human
uuuggggguggggauacuaaa

SEQ ID NO: 393888 - RNA, 20 nt, Human
uuuuucuuuuuuaaaaaaau

SEQ ID NO: 393889 - RNA, 19 nt, Human
aaaaaaaaaaagaaaaaga

SEQ ID NO: 393890 - RNA, 24 nt, Human
aaaaaaaaaaagaaaaagaaagaa

SEQ ID NO: 393891 - RNA, 18 nt, Human
aacacaguacaaaaggag

SEQ ID NO: 393892 - RNA, 19 nt, Human
aacacggugaaaccccguc

SEQ ID NO: 393893 - RNA, 20 nt, Human
aacacggugaaaccccgucu

SEQ ID NO: 393894 - RNA, 21 nt, Human
aacacggugaaaccccgucuc

SEQ ID NO: 393895 - RNA, 18 nt, Human
aaccuggguucauaacag

SEQ ID NO: 393896 - RNA, 22 nt, Human
aagaaaaagaaagaaagagcag

SEQ ID NO: 393897 - RNA, 23 nt, Human
aagaaacagcagaugccaggcgc

SEQ ID NO: 393898 - RNA, 23 nt, Human
aagaggcaggggacagggggcag

SEQ ID NO: 393899 - RNA, 21 nt, Human
aagcaaccauuucacaaagaa

SEQ ID NO: 393900 - RNA, 22 nt, Human
acaacacaguacaaaaggagaa

SEQ ID NO: 393901 - RNA, 24 nt, Human
acagagcgagacucugucucaaaa

SEQ ID NO: 393902 - RNA, 24 nt, Human
accccgucucuacuaaaaauacaa

SEQ ID NO: 393903 - RNA, 18 nt, Human
acgccacugcacuccagc

SEQ ID NO: 393904 - RNA, 22 nt, Human
acgccacugcacuccagccugg

SEQ ID NO: 393905 - RNA, 24 nt, Human
acugcacuccagccugggugacag

SEQ ID NO: 393906 - RNA, 26 nt, Human
acugcacuccagccugggugacagag

SEQ ID NO: 393907 - RNA, 22 nt, Human
agaaguggaggauuaaccugcc

SEQ ID NO: 393908 - RNA, 20 nt, Human
agacacgaacacagcacaaa

SEQ ID NO: 393909 - RNA, 24 nt, Human
agacggaggucgcagugagccgag

SEQ ID NO: 393910 - RNA, 21 nt, Human
agaggcaggggacagggggca

SEQ ID NO: 393911 - RNA, 22 nt, Human
agaggcaggggacagggggcag

SEQ ID NO: 393912 - RNA, 24 nt, Human
agaugccaggcgcgguggcucaug

SEQ ID NO: 393913 - RNA, 24 nt, Human
agcacuuugggaggccgaguuggg

SEQ ID NO: 393914 - RNA, 24 nt, Human
agccugggugacagagcgagacuc

SEQ ID NO: 393915 - RNA, 21 nt, Human
agcuucugaaagaaacagcag

SEQ ID NO: 393916 - RNA, 24 nt, Human
aggcaggagaauggcgugagcccg

SEQ ID NO: 393917 - RNA, 22 nt, Human
aggcaggggacagggggcaggg

SEQ ID NO: 393918 - RNA, 23 nt, Human
aggcaggggacagggggcagggg

SEQ ID NO: 393919 - RNA, 21 nt, Human
aggccgaguuggguggaucac

SEQ ID NO: 393920 - RNA, 24 nt, Human
aggcgcgguggcucaugccuguaa

SEQ ID NO: 393921 - RNA, 19 nt, Human
aggcugaggcaggagaaug

SEQ ID NO: 393922 - RNA, 24 nt, Human
aguuggguggaucacgaggucagg

SEQ ID NO: 393923 - RNA, 22 nt, Human
aucaccauuuuaccaaaaaaca

SEQ ID NO: 393924 - RNA, 24 nt, Human
aucacgccacugcacuccagccug

SEQ ID NO: 393925 - RNA, 19 nt, Human
augccuguaaucccagcac

SEQ ID NO: 393926 - RNA, 20 nt, Human
auggcgugagcccgggagac

SEQ ID NO: 393927 - RNA, 24 nt, Human
caaaaaacacacugguucaaccac

SEQ ID NO: 393928 - RNA, 20 nt, Human
caaaugccaaggcagacagg

SEQ ID NO: 393929 - RNA, 19 nt, Human
caacacaguacaaaaggag

SEQ ID NO: 393930 - RNA, 22 nt, Human
cacaacacaguacaaaaggaga

SEQ ID NO: 393931 - RNA, 22 nt, Human
cacuccagccugggugacagag

SEQ ID NO: 393932 - RNA, 24 nt, Human
cacuccagccugggugacagagcg

SEQ ID NO: 393933 - RNA, 19 nt, Human
cacugcacuccagccuggg

SEQ ID NO: 393934 - RNA, 19 nt, Human
cacugcacuccagccuggg

SEQ ID NO: 393935 - RNA, 22 nt, Human
cacugcacuccagccuggguga

SEQ ID NO: 393936 - RNA, 23 nt, Human
cacugcacuccagccugggugac

SEQ ID NO: 393937 - RNA, 24 nt, Human
cacugcacuccagccugggugaca

SEQ ID NO: 393938 - RNA, 24 nt, Human
cacugcacuccagccugggugaca

SEQ ID NO: 393939 - RNA, 21 nt, Human
cagaaaacacuuuacugaaau

SEQ ID NO: 393940 - RNA, 20 nt, Human
cagcacuuugggaggccgag

SEQ ID NO: 393941 - RNA, 26 nt, Human
cagcacuuugggaggccgaguugggu

SEQ ID NO: 393942 - RNA, 24 nt, Human
cagcuacucgggaggcugaggcag

SEQ ID NO: 393943 - RNA, 20 nt, Human
ccacugcacuccagccuggg

SEQ ID NO: 393944 - RNA, 20 nt, Human
ccacugcacuccagccuggg

SEQ ID NO: 393945 - RNA, 21 nt, Human
ccacugcacuccagccugggu

SEQ ID NO: 393946 - RNA, 21 nt, Human
ccacugcacuccagccugggu

SEQ ID NO: 393947 - RNA, 23 nt, Human
ccacugcacuccagccuggguga

SEQ ID NO: 393948 - RNA, 23 nt, Human
ccacugcacuccagccuggguga

SEQ ID NO: 393949 - RNA, 24 nt, Human
ccacugcacuccagccugggugac

SEQ ID NO: 393950 - RNA, 18 nt, Human
ccagugcaagacacgaac

SEQ ID NO: 393951 - RNA, 20 nt, Human
ccgcccucccggccgggccg

SEQ ID NO: 393952 - RNA, 19 nt, Human
ccgcgcgcccuccccgccc

SEQ ID NO: 393953 - RNA, 22 nt, Human
ccgcgcgcccuccccgcccucc

SEQ ID NO: 393954 - RNA, 18 nt, Human
ccggaagcggggcccgcc

SEQ ID NO: 393955 - RNA, 23 nt, Human
ccuggcuaacacggugaaacccc

SEQ ID NO: 393956 - RNA, 24 nt, Human
ccuggcuaacacggugaaaccccg

SEQ ID NO: 393957 - RNA, 22 nt, Human
ccugggugacagagcgagacuc

SEQ ID NO: 393958 - RNA, 20 nt, Human
ccuguaaucccagcacuuug

SEQ ID NO: 393959 - RNA, 19 nt, Human
ccuguagucccagcuacuc

SEQ ID NO: 393960 - RNA, 21 nt, Human
ccuguagucccagcuacucgg

SEQ ID NO: 393961 - RNA, 22 nt, Human
ccuguagucccagcuacucggg

SEQ ID NO: 393962 - RNA, 24 nt, Human
cgagaccauccuggcuaacacggu

SEQ ID NO: 393963 - RNA, 24 nt, Human
cgagaucacgccacugcacuccag

SEQ ID NO: 393964 - RNA, 24 nt, Human
cgaguuggguggaucacgagguca

SEQ ID NO: 393965 - RNA, 19 nt, Human
cgcccgggccggaagcggg

SEQ ID NO: 393966 - RNA, 21 nt, Human
cgccgcgcgcccuccccgccc

SEQ ID NO: 393967 - RNA, 22 nt, Human
cgccgcgcgcccuccccgcccu

SEQ ID NO: 393968 - RNA, 22 nt, Human
cuaauagacuucaccauuuccu

SEQ ID NO: 393969 - RNA, 24 nt, Human
cuacaaucaccauuuuaccaaaaa

SEQ ID NO: 393970 - RNA, 18 nt, Human
cucaaaaaaaaaaaaaaa

SEQ ID NO: 393971 - RNA, 26 nt, Human
cucaaaaaaaaaaaaaaaagaaaaag

SEQ ID NO: 393972 - RNA, 24 nt, Human
cucaugccuguaaucccagcacuu

SEQ ID NO: 393973 - RNA, 19 nt, Human
cucugucucaaaaaaaaaa

SEQ ID NO: 393974 - RNA, 18 nt, Human
cuggcuaacacggugaaa

SEQ ID NO: 393975 - RNA, 22 nt, Human
gaacuaaucuuaucuacaauca

SEQ ID NO: 393976 - RNA, 24 nt, Human
gacagagcgagacucugucucaaa

SEQ ID NO: 393977 - RNA, 22 nt, Human
gaggucgcagugagccgagauc

SEQ ID NO: 393978 - RNA, 20 nt, Human
gaucgccgcgcgcccucccc

SEQ ID NO: 393979 - RNA, 24 nt, Human
gauggcgggcgccuguagucccag

SEQ ID NO: 393980 - RNA, 24 nt, Human
gcacuccagccugggugacagagc

SEQ ID NO: 393981 - RNA, 19 nt, Human
gccacugcacuccagccug

SEQ ID NO: 393982 - RNA, 24 nt, Human
gccacugcacuccagccuggguga

SEQ ID NO: 393983 - RNA, 20 nt, Human
gccgagaucacgccacugca

SEQ ID NO: 393984 - RNA, 23 nt, Human
gccuguagucccagcuacucggg

SEQ ID NO: 393985 - RNA, 24 nt, Human
gcuaacacggugaaaccccgucuc

SEQ ID NO: 393986 - RNA, 22 nt, Human
gcugaggcaggagaauggcgug

SEQ ID NO: 393987 - RNA, 21 nt, Human
ggaaaagaggcaggggacagg

SEQ ID NO: 393988 - RNA, 24 nt, Human
ggacagggggcaggggaucaggga

SEQ ID NO: 393989 - RNA, 22 nt, Human
ggaccucccccacgucgaagga

SEQ ID NO: 393990 - RNA, 18 nt, Human
ggaggucgcagugagccg

SEQ ID NO: 393991 - RNA, 24 nt, Human
ggaggucgcagugagccgagauca

SEQ ID NO: 393992 - RNA, 18 nt, Human
ggcgugauggcgggcgcc

SEQ ID NO: 393993 - RNA, 22 nt, Human
ggcgugauggcgggcgccugua

SEQ ID NO: 393994 - RNA, 24 nt, Human
gggacagggggcaggggaucaggg

SEQ ID NO: 393995 - RNA, 20 nt, Human
gggaggccgaguugggugga

SEQ ID NO: 393996 - RNA, 21 nt, Human
gguggaucacgaggucaggag

SEQ ID NO: 393997 - RNA, 23 nt, Human
gguggcucaugccuguaauccca

SEQ ID NO: 393998 - RNA, 24 nt, Human
gguggcucaugccuguaaucccag

SEQ ID NO: 393999 - RNA, 24 nt, Human
gugacagagcgagacucugucuca

SEQ ID NO: 394000 - RNA, 22 nt, Human
guggaggauuaaccugccuaca

SEQ ID NO: 394001 - RNA, 22 nt, Human
uaacacggugaaaccccgucuc

SEQ ID NO: 394002 - RNA, 24 nt, Human
uaacacggugaaaccccgucucua

SEQ ID NO: 394003 - RNA, 22 nt, Human
uaagcaaaccacuaaagaaggg

SEQ ID NO: 394004 - RNA, 24 nt, Human
uacucacauugcugguuuuaacag

SEQ ID NO: 394005 - RNA, 24 nt, Human
uagcccagcagauguugacagcaa

SEQ ID NO: 394006 - RNA, 22 nt, Human
ucaaaaaaaaaaaaaaaagaaa

SEQ ID NO: 394007 - RNA, 24 nt, Human
ucaaaaaaaaaaaaaaaagaaaaa

SEQ ID NO: 394008 - RNA, 18 nt, Human
ucacgaggucaggagauc

SEQ ID NO: 394009 - RNA, 24 nt, Human
ucacgaggucaggagaucgagacc

SEQ ID NO: 394010 - RNA, 23 nt, Human
ucacgccacugcacuccagccug

SEQ ID NO: 394011 - RNA, 22 nt, Human
ucaugccuguaaucccagcacu

SEQ ID NO: 394012 - RNA, 23 nt, Human
uccagccugggugacagagcgag

SEQ ID NO: 394013 - RNA, 24 nt, Human
uccagccugggugacagagcgaga

SEQ ID NO: 394014 - RNA, 24 nt, Human
uccgaucgccgcgcgcccuccccg

SEQ ID NO: 394015 - RNA, 20 nt, Human
ucgcagugagccgagaucac

SEQ ID NO: 394016 - RNA, 20 nt, Human
ucgccgcgcgcccuccccgc

SEQ ID NO: 394017 - RNA, 22 nt, Human
ucgccgcgcgcccuccccgccc

SEQ ID NO: 394018 - RNA, 18 nt, Human
ucucaaaaaaaaaaaaaa

SEQ ID NO: 394019 - RNA, 24 nt, Human
ucucuacuaaaaauacaaaacauu

SEQ ID NO: 394020 - RNA, 23 nt, Human
ucuggcacugcacaagcugugug

SEQ ID NO: 394021 - RNA, 23 nt, Human
ucugucucaaaaaaaaaaaaaaa

SEQ ID NO: 394022 - RNA, 18 nt, Human
ugacagcaaaugccaagg

SEQ ID NO: 394023 - RNA, 22 nt, Human
ugagccgagaucacgccacugc

SEQ ID NO: 394024 - RNA, 23 nt, Human
ugaggcaggagaauggcgugagc

SEQ ID NO: 394025 - RNA, 24 nt, Human
ugaggcaggagaauggcgugagcc

SEQ ID NO: 394026 - RNA, 25 nt, Human
ugaggcaggagaauggcgugagccc

SEQ ID NO: 394027 - RNA, 24 nt, Human
ugauggcgggcgccuguaguccca

SEQ ID NO: 394028 - RNA, 20 nt, Human
ugcaagacacgaacacagca

SEQ ID NO: 394029 - RNA, 19 nt, Human
ugccaaggcagacaggucu

SEQ ID NO: 394030 - RNA, 21 nt, Human
ugccaaggcagacaggucuag

SEQ ID NO: 394031 - RNA, 23 nt, Human
ugccuguaaucccagcacuuugg

SEQ ID NO: 394032 - RNA, 24 nt, Human
ugccuguaaucccagcacuuuggg

SEQ ID NO: 394033 - RNA, 24 nt, Human
ugcuccugugaauucuguggaaau

SEQ ID NO: 394034 - RNA, 18 nt, Human
uggaaaugggaccucccc

SEQ ID NO: 394035 - RNA, 22 nt, Human
uggcucaugccuguaaucccag

SEQ ID NO: 394036 - RNA, 24 nt, Human
uggcucaugccuguaaucccagca

SEQ ID NO: 394037 - RNA, 19 nt, Human
ugggaggccgaguugggug

SEQ ID NO: 394038 - RNA, 24 nt, Human
ugggaggccgaguuggguggauca

SEQ ID NO: 394039 - RNA, 23 nt, Human
uggguucauaacagacuaaguuc

SEQ ID NO: 394040 - RNA, 21 nt, Human
uuccucggcugugacgccgcu

SEQ ID NO: 394041 - RNA, 22 nt, Human
uuggcucugcuucuuagcucca

SEQ ID NO: 394042 - RNA, 20 nt, Human
uuuuuuuuuuaaaaaaagau

SEQ ID NO: 394043 - RNA, 23 nt, Human
uuuuuuuuuuuuaaaaaaagauu

SEQ ID NO: 394044 - RNA, 18 nt, Human
acagcaccuccccccaau

SEQ ID NO: 394045 - RNA, 25 nt, Human
acguagagcccggcgugacagggcu

SEQ ID NO: 394046 - RNA, 24 nt, Human
agcgccagccuguggggaagugaa

SEQ ID NO: 394047 - RNA, 19 nt, Human
aggcaaaggagggcagggc

SEQ ID NO: 394048 - RNA, 19 nt, Human
aucuggggauggacuauuc

SEQ ID NO: 394049 - RNA, 22 nt, Human
cagagcucccaggguccuucuc

SEQ ID NO: 394050 - RNA, 22 nt, Human
cagggcacaccuuuggucacuc

SEQ ID NO: 394051 - RNA, 21 nt, Human
cagggcgaggggugaacaaug

SEQ ID NO: 394052 - RNA, 18 nt, Human
cagggucuccaccuggau

SEQ ID NO: 394053 - RNA, 18 nt, Human
ccacagcaccucccccca

SEQ ID NO: 394054 - RNA, 19 nt, Human
ccacagggacccccaucca

SEQ ID NO: 394055 - RNA, 21 nt, Human
ccagcggugcgggccugggug

SEQ ID NO: 394056 - RNA, 20 nt, Human
ccagggcuucccacgugcgc

SEQ ID NO: 394057 - RNA, 23 nt, Human
ccaggguccuucucagggucucc

SEQ ID NO: 394058 - RNA, 18 nt, Human
cccacagcaccucccccc

SEQ ID NO: 394059 - RNA, 18 nt, Human
cccccauccaggugcagg

SEQ ID NO: 394060 - RNA, 21 nt, Human
ccgccccucccucccugggac

SEQ ID NO: 394061 - RNA, 21 nt, Human
ccucagccggacacucagccu

SEQ ID NO: 394062 - RNA, 18 nt, Human
ccuccccccaauuugacc

SEQ ID NO: 394063 - RNA, 22 nt, Human
cggccaaacacucacucaggcc

SEQ ID NO: 394064 - RNA, 19 nt, Human
cgggccugggugugggccg

SEQ ID NO: 394065 - RNA, 25 nt, Human
cucaggccucagccggacacucagc

SEQ ID NO: 394066 - RNA, 26 nt, Human
cucauauauucaguauuuuacuccca

SEQ ID NO: 394067 - RNA, 24 nt, Human
cucggccaaacacucacucaggcc

SEQ ID NO: 394068 - RNA, 20 nt, Human
cuggcccugggguggagccg

SEQ ID NO: 394069 - RNA, 18 nt, Human
gaaggcaaaggagggcag

SEQ ID NO: 394070 - RNA, 24 nt, Human
gaagugaagacggcaggugugcug

SEQ ID NO: 394071 - RNA, 24 nt, Human
gagccgagcgccagccugugggga

SEQ ID NO: 394072 - RNA, 24 nt, Human
gagggcagggcgaggggugaacaa

SEQ ID NO: 394073 - RNA, 20 nt, Human
gcacaccuuuggucacucca

SEQ ID NO: 394074 - RNA, 22 nt, Human
gccggacacucagccuucagcc

SEQ ID NO: 394075 - RNA, 20 nt, Human
gcugcuggugucugcucucg

SEQ ID NO: 394076 - RNA, 22 nt, Human
ggaaggcaaaggagggcagggc

SEQ ID NO: 394077 - RNA, 20 nt, Human
ggcgugacagggcugcuggu

SEQ ID NO: 394078 - RNA, 23 nt, Human
ggggaguggaagccgggcuccug

SEQ ID NO: 394079 - RNA, 19 nt, Human
gggguggaaggcaaaggag

SEQ ID NO: 394080 - RNA, 24 nt, Human
gucacuccaaauucccagagcucc

SEQ ID NO: 394081 - RNA, 25 nt, Human
uauguggggaguggaagccgggcuc

SEQ ID NO: 394082 - RNA, 26 nt, Human
uauuuuacucccacagcaccuccccc

SEQ ID NO: 394083 - RNA, 26 nt, Human
uccaggugcaggguccucgggccgac

SEQ ID NO: 394084 - RNA, 25 nt, Human
ucccagagcucccaggguccuucuc

SEQ ID NO: 394085 - RNA, 18 nt, Human
ucccagcggugcgggccu

SEQ ID NO: 394086 - RNA, 21 nt, Human
ucccagcggugcgggccuggg

SEQ ID NO: 394087 - RNA, 22 nt, Human
ugacccacagggacccccaucc

SEQ ID NO: 394088 - RNA, 19 nt, Human
ugaggaaaagcuggcccug

SEQ ID NO: 394089 - RNA, 22 nt, Human
ugaggaaaagcuggcccugggg

SEQ ID NO: 394090 - RNA, 25 nt, Human
ugaggaaaagcuggcccuggggugg

SEQ ID NO: 394091 - RNA, 23 nt, Human
uggugucugcucucggccuggcu

SEQ ID NO: 394092 - RNA, 22 nt, Human
ugugcuggacacucagcccuug

SEQ ID NO: 394093 - RNA, 30 nt, Human
aaaaaaauagagaaaugcaauaaagaaaaa

SEQ ID NO: 394094 - RNA, 22 nt, Human
aaaaaccaugcaaaaaaaaucu

SEQ ID NO: 394095 - RNA, 20 nt, Human
aaaagcaaauggguggcuug

SEQ ID NO: 394096 - RNA, 21 nt, Human
aaagugugugggucaggcaug

SEQ ID NO: 394097 - RNA, 23 nt, Human
aaauggaauagagacaugaaguu

SEQ ID NO: 394098 - RNA, 19 nt, Human
aacauggugaaaaccuguc

SEQ ID NO: 394099 - RNA, 20 nt, Human
aacauggugaaaaccugucu

SEQ ID NO: 394100 - RNA, 19 nt, Human
aacuaggaaugcucaucuu

SEQ ID NO: 394101 - RNA, 23 nt, Human
aagcuauggaaagauacaauuau

SEQ ID NO: 394102 - RNA, 25 nt, Human
aaggcaggcggaucaucugagguca

SEQ ID NO: 394103 - RNA, 24 nt, Human
aagugcaaucaauauaaaucauag

SEQ ID NO: 394104 - RNA, 23 nt, Human
aauugcucaaaauaaaaaaaaaa

SEQ ID NO: 394105 - RNA, 22 nt, Human
acaagugaagacauuugauaua

SEQ ID NO: 394106 - RNA, 23 nt, Human
acacugcauuucucuuugucaaa

SEQ ID NO: 394107 - RNA, 18 nt, Human
agagaaaugcaauaaaga

SEQ ID NO: 394108 - RNA, 22 nt, Human
agagaaaugcaauaaagaaaaa

SEQ ID NO: 394109 - RNA, 24 nt, Human
agccuggcuaacauggugaaaacc

SEQ ID NO: 394110 - RNA, 18 nt, Human
agcuauggaaagauacaa

SEQ ID NO: 394111 - RNA, 20 nt, Human
aggaaagaauaaaaaccaug

SEQ ID NO: 394112 - RNA, 20 nt, Human
aggaguuugagaccagccug

SEQ ID NO: 394113 - RNA, 19 nt, Human
aggcaggagaauugcucaa

SEQ ID NO: 394114 - RNA, 26 nt, Human
aggcaggcggaucaucugaggucagg

SEQ ID NO: 394115 - RNA, 20 nt, Human
aggcugaggcaggagaauug

SEQ ID NO: 394116 - RNA, 21 nt, Human
aggcugaggcaggagaauugc

SEQ ID NO: 394117 - RNA, 18 nt, Human
auaaaauauucaaggcca

SEQ ID NO: 394118 - RNA, 18 nt, Human
auccaagcuuccaaaaau

SEQ ID NO: 394119 - RNA, 24 nt, Human
auccgggaucccacggccggguuc

SEQ ID NO: 394120 - RNA, 24 nt, Human
aucugaggucaggaguuugagacc

SEQ ID NO: 394121 - RNA, 23 nt, Human
augaagaaaaaauggccaaaaaa

SEQ ID NO: 394122 - RNA, 24 nt, Human
augccaccucugccuaaaucagga

SEQ ID NO: 394123 - RNA, 24 nt, Human
caaggcaggcggaucaucugaggu

SEQ ID NO: 394124 - RNA, 24 nt, Human
cacaccuguaaucccagcacuuug

SEQ ID NO: 394125 - RNA, 19 nt, Human
caccuguaaucccagcacu

SEQ ID NO: 394126 - RNA, 24 nt, Human
caccuguaaucccagcacuuuggg

SEQ ID NO: 394127 - RNA, 22 nt, Human
caccuguaaucccagcuauuug

SEQ ID NO: 394128 - RNA, 23 nt, Human
caccuguaaucccagcuauuugg

SEQ ID NO: 394129 - RNA, 24 nt, Human
caccuguaaucccagcuauuuggg

SEQ ID NO: 394130 - RNA, 22 nt, Human
cacuguguaucauuacaaaggu

SEQ ID NO: 394131 - RNA, 24 nt, Human
cagcacuuugggaggccaaggcag

SEQ ID NO: 394132 - RNA, 25 nt, Human
cagcacuuugggaggccaaggcagg

SEQ ID NO: 394133 - RNA, 24 nt, Human
cagcuauuugggaggcugaggcag

SEQ ID NO: 394134 - RNA, 24 nt, Human
caggcggaucaucugaggucagga

SEQ ID NO: 394135 - RNA, 20 nt, Human
caguagaaaugcagaccacu

SEQ ID NO: 394136 - RNA, 23 nt, Human
caucugaggucaggaguuugaga

SEQ ID NO: 394137 - RNA, 19 nt, Human
ccacaccuguaaucccagc

SEQ ID NO: 394138 - RNA, 22 nt, Human
ccaccucugccuaaaucaggaa

SEQ ID NO: 394139 - RNA, 25 nt, Human
ccaugcaaaaaaaaucuuaucuaaa

SEQ ID NO: 394140 - RNA, 22 nt, Human
cccacaccuguaaucccagcac

SEQ ID NO: 394141 - RNA, 24 nt, Human
cccacaccuguaaucccagcacuu

SEQ ID NO: 394142 - RNA, 18 nt, Human
cccgcggcgccgcucaac

SEQ ID NO: 394143 - RNA, 19 nt, Human
cccgcggcgccgcucaaca

SEQ ID NO: 394144 - RNA, 23 nt, Human
cccgcggcgccgcucaacagcca

SEQ ID NO: 394145 - RNA, 18 nt, Human
ccuauggguccccuccuc

SEQ ID NO: 394146 - RNA, 22 nt, Human
ccuggcuaacauggugaaaacc

SEQ ID NO: 394147 - RNA, 24 nt, Human
ccuggcuaacauggugaaaaccug

SEQ ID NO: 394148 - RNA, 21 nt, Human
ccuguaaucccagcuauuugg

SEQ ID NO: 394149 - RNA, 22 nt, Human
ccugucucuacuaaaaauacaa

SEQ ID NO: 394150 - RNA, 23 nt, Human
cgaaaaaaaauugaugaagaaaa

SEQ ID NO: 394151 - RNA, 18 nt, Human
cgcguccuaugggucccc

SEQ ID NO: 394152 - RNA, 24 nt, Human
cggaucaucugaggucaggaguuu

SEQ ID NO: 394153 - RNA, 23 nt, Human
cucaaaauaaaaaaaaaaaaaua

SEQ ID NO: 394154 - RNA, 20 nt, Human
cuguaaucccagcuauuugg

SEQ ID NO: 394155 - RNA, 22 nt, Human
gaaaaaaaauugaugaagaaaa

SEQ ID NO: 394156 - RNA, 18 nt, Human
gaggcaauaaacguagcg

SEQ ID NO: 394157 - RNA, 24 nt, Human
gaucaucugaggucaggaguuuga

SEQ ID NO: 394158 - RNA, 20 nt, Human
gcaugguggcucccacaccu

SEQ ID NO: 394159 - RNA, 18 nt, Human
gccaccucugccuaaauc

SEQ ID NO: 394160 - RNA, 18 nt, Human
gcuaacauggugaaaacc

SEQ ID NO: 394161 - RNA, 24 nt, Human
gcuaacauggugaaaaccugucuc

SEQ ID NO: 394162 - RNA, 22 nt, Human
ggaaagaauaaaaaccaugcaa

SEQ ID NO: 394163 - RNA, 22 nt, Human
ggaaagaguaaaugcauaggca

SEQ ID NO: 394164 - RNA, 22 nt, Human
ggaucaucugaggucaggaguu

SEQ ID NO: 394165 - RNA, 22 nt, Human
ggaucaucugaggucaggaguu

SEQ ID NO: 394166 - RNA, 19 nt, Human
ggucaggaguuugagacca

SEQ ID NO: 394167 - RNA, 24 nt, Human
gguggcaugcaccuguaaucccag

SEQ ID NO: 394168 - RNA, 23 nt, Human
ggugugguggcaugcaccuguaa

SEQ ID NO: 394169 - RNA, 23 nt, Human
guguguggcacaaauggaauaga

SEQ ID NO: 394170 - RNA, 26 nt, Human
guuuccuuuacaguuucuuuuuuugc

SEQ ID NO: 394171 - RNA, 20 nt, Human
uaaaaaaauagagaaaugca

SEQ ID NO: 394172 - RNA, 19 nt, Human
uaacauggugaaaaccugu

SEQ ID NO: 394173 - RNA, 22 nt, Human
uaacauggugaaaaccugucuc

SEQ ID NO: 394174 - RNA, 24 nt, Human
uaacauggugaaaaccugucucua

SEQ ID NO: 394175 - RNA, 23 nt, Human
uaacgcguccuauggguccccuc

SEQ ID NO: 394176 - RNA, 24 nt, Human
uacacuaacuuuuaaguguguggc

SEQ ID NO: 394177 - RNA, 24 nt, Human
uacaguagaaaugcagaccacuuu

SEQ ID NO: 394178 - RNA, 22 nt, Human
uaccuagccaugaaaauauaca

SEQ ID NO: 394179 - RNA, 19 nt, Human
uacuucugggugcccuccu

SEQ ID NO: 394180 - RNA, 20 nt, Human
uagcugggugugguggcaug

SEQ ID NO: 394181 - RNA, 21 nt, Human
uaggaaagaauaaaaaccaug

SEQ ID NO: 394182 - RNA, 22 nt, Human
uauaaaacaggauccauuagga

SEQ ID NO: 394183 - RNA, 18 nt, Human
uauccgggaucccacggc

SEQ ID NO: 394184 - RNA, 20 nt, Human
ucaaaauaaaaaaaaaaaaa

SEQ ID NO: 394185 - RNA, 19 nt, Human
ucaucugaggucaggaguu

SEQ ID NO: 394186 - RNA, 22 nt, Human
uccaagcuuccaaaaaugauuu

SEQ ID NO: 394187 - RNA, 21 nt, Human
ucccacaccuguaaucccagc

SEQ ID NO: 394188 - RNA, 21 nt, Human
uccgcugcgaacacgggaaac

SEQ ID NO: 394189 - RNA, 21 nt, Human
uccuauggguccccuccuccu

SEQ ID NO: 394190 - RNA, 21 nt, Human
uccuccuauccgggaucccac

SEQ ID NO: 394191 - RNA, 23 nt, Human
ucucuacuaaaaauacaaaaauu

SEQ ID NO: 394192 - RNA, 22 nt, Human
ucugaggucaggaguuugagac

SEQ ID NO: 394193 - RNA, 23 nt, Human
ucugaggucaggaguuugagacc

SEQ ID NO: 394194 - RNA, 20 nt, Human
ucugcauacuacacugcauu

SEQ ID NO: 394195 - RNA, 23 nt, Human
ugagaccagccuggcuaacaugg

SEQ ID NO: 394196 - RNA, 20 nt, Human
ugaggcaggagaauugcucc

SEQ ID NO: 394197 - RNA, 18 nt, Human
ugaggucaggaguuugag

SEQ ID NO: 394198 - RNA, 18 nt, Human
uggaaguauuauaaaaca

SEQ ID NO: 394199 - RNA, 24 nt, Human
uggcucccacaccuguaaucccag

SEQ ID NO: 394200 - RNA, 24 nt, Human
uggcucccacaccuguaaucccuu

SEQ ID NO: 394201 - RNA, 24 nt, Human
ugggaggccaaggcaggcggauca

SEQ ID NO: 394202 - RNA, 19 nt, Human
ugggaggcugaggcaggag

SEQ ID NO: 394203 - RNA, 22 nt, Human
ugggaggcugaggcaggagaau

SEQ ID NO: 394204 - RNA, 21 nt, Human
uggguccccuccuccuccuau

SEQ ID NO: 394205 - RNA, 22 nt, Human
ugggugugguggcaugcaccug

SEQ ID NO: 394206 - RNA, 24 nt, Human
ugguggcaugcaccuguaauccca

SEQ ID NO: 394207 - RNA, 26 nt, Human
ugguggcucccacaccuguaauccca

SEQ ID NO: 394208 - RNA, 19 nt, Human
uguagaaguacacagggaa

SEQ ID NO: 394209 - RNA, 18 nt, Human
ugugguggcaugcaccug

SEQ ID NO: 394210 - RNA, 20 nt, Human
uuagcugggugugguggcau

SEQ ID NO: 394211 - RNA, 22 nt, Human
uuagcugggugugguggcaugc

SEQ ID NO: 394212 - RNA, 18 nt, Human
uucacuguguaucauuac

SEQ ID NO: 394213 - RNA, 23 nt, Human
uugggaggcugaggcaggagaau

SEQ ID NO: 394214 - RNA, 22 nt, Human
uuuaaugagauccaagcuucca

SEQ ID NO: 394215 - RNA, 21 nt, Human
uuuucauuuuacacaugaggg

SEQ ID NO: 394216 - RNA, 22 nt, Human
agaauggaagauccgccgaaga

SEQ ID NO: 394217 - RNA, 21 nt, Human
agccggggggucgacuggaag

SEQ ID NO: 394218 - RNA, 22 nt, Human
agccggucagcccaucuggaac

SEQ ID NO: 394219 - RNA, 21 nt, Human
aggcaguuuuauugaaaucuu

SEQ ID NO: 394220 - RNA, 19 nt, Human
cagggccugggcuugggcc

SEQ ID NO: 394221 - RNA, 21 nt, Human
caucuggaacuggcacugucc

SEQ ID NO: 394222 - RNA, 22 nt, Human
ccagggcccgggcaggccgcgc

SEQ ID NO: 394223 - RNA, 20 nt, Human
ccgcgccggcuggcugggcc

SEQ ID NO: 394224 - RNA, 21 nt, Human
ccugccucacauggcaggguc

SEQ ID NO: 394225 - RNA, 23 nt, Human
cgaagauccgccgaagauccugg

SEQ ID NO: 394226 - RNA, 20 nt, Human
cgcccggacuccggcucccg

SEQ ID NO: 394227 - RNA, 22 nt, Human
cggcccggagccagccaggcag

SEQ ID NO: 394228 - RNA, 19 nt, Human
cgggcccccagcccgggcc

SEQ ID NO: 394229 - RNA, 18 nt, Human
cuggaagugcucuguccc

SEQ ID NO: 394230 - RNA, 19 nt, Human
gcagggccugggcuugggc

SEQ ID NO: 394231 - RNA, 20 nt, Human
gcucccgcccugagaaugga

SEQ ID NO: 394232 - RNA, 21 nt, Human
gcuccgcgcagggccugggcu

SEQ ID NO: 394233 - RNA, 19 nt, Human
ggccugagaccacgggcuc

SEQ ID NO: 394234 - RNA, 18 nt, Human
gggcccccagcccgggcc

SEQ ID NO: 394235 - RNA, 19 nt, Human
gggcgcgggcccagcccga

SEQ ID NO: 394236 - RNA, 19 nt, Human
gggcuugggccuggaccag

SEQ ID NO: 394237 - RNA, 22 nt, Human
gggcuugggccuggaccaggcg

SEQ ID NO: 394238 - RNA, 20 nt, Human
gucagcccaucuggaacugg

SEQ ID NO: 394239 - RNA, 22 nt, Human
ucagcccaucuggaacuggcac

SEQ ID NO: 394240 - RNA, 24 nt, Human
ucccgggcgcccggacuccggcuc

SEQ ID NO: 394241 - RNA, 18 nt, Human
uccugaaggccaaaguug

SEQ ID NO: 394242 - RNA, 18 nt, Human
ugagaccacgggcuccac

SEQ ID NO: 394243 - RNA, 20 nt, Human
ugcucugucccuugagucca

SEQ ID NO: 394244 - RNA, 18 nt, Human
uggcugggcccgggugga

SEQ ID NO: 394245 - RNA, 18 nt, Human
ugggcgcgggcccagccc

SEQ ID NO: 394246 - RNA, 18 nt, Human
uguccugaaggccaaagu

SEQ ID NO: 394247 - RNA, 18 nt, Human
acaacaugaaaacagggu

SEQ ID NO: 394248 - RNA, 19 nt, Human
agcucaagagaaacucugg

SEQ ID NO: 394249 - RNA, 23 nt, Human
caaacagaaacaaaagcucaaga

SEQ ID NO: 394250 - RNA, 21 nt, Human
ucgggacaauguaucuucuuc

SEQ ID NO: 394251 - RNA, 23 nt, Human
ucugagcaaacagaaacaaaagc

SEQ ID NO: 394252 - RNA, 24 nt, Human
agcuacaaaguucgcgguaugggg

SEQ ID NO: 394253 - RNA, 21 nt, Human
cgaaggcaccagcuacaaagu

SEQ ID NO: 394254 - RNA, 24 nt, Human
uaaauucucagcuuauuucaagua

SEQ ID NO: 394255 - RNA, 18 nt, Human
uacaaaguucgcgguaug

SEQ ID NO: 394256 - RNA, 18 nt, Human
ugucauucuuucauuaua

SEQ ID NO: 394257 - RNA, 20 nt, Human
aggaaguacaggccaacccc

SEQ ID NO: 394258 - RNA, 24 nt, Human
aggccaaccccgcugucuuaacac

SEQ ID NO: 394259 - RNA, 18 nt, Human
cagccagggccagaggaa

SEQ ID NO: 394260 - RNA, 23 nt, Human
ccaaccccgcugucuuaacacgc

SEQ ID NO: 394261 - RNA, 21 nt, Human
ccagggccagaggaaguacag

SEQ ID NO: 394262 - RNA, 22 nt, Human
ccccgcugucuuaacacgcccg

SEQ ID NO: 394263 - RNA, 22 nt, Human
gaaguacaggccaaccccgcug

SEQ ID NO: 394264 - RNA, 19 nt, Human
ggccagaggaaguacaggc

SEQ ID NO: 394265 - RNA, 21 nt, Human
uacaggccaaccccgcugucu

SEQ ID NO: 394266 - RNA, 24 nt, Human
uuaacgguuucacuagcccucuuc

SEQ ID NO: 394267 - RNA, 20 nt, Human
aggaaguacaggccaacccc

SEQ ID NO: 394268 - RNA, 23 nt, Human
aggccaaccccgcugcuuaacac

SEQ ID NO: 394269 - RNA, 18 nt, Human
cagccagggccagaggaa

SEQ ID NO: 394270 - RNA, 22 nt, Human
ccaaccccgcugcuuaacacgc

SEQ ID NO: 394271 - RNA, 21 nt, Human
ccagaggaagcaauuuucccu

SEQ ID NO: 394272 - RNA, 21 nt, Human
ccagggccagaggaaguacag

SEQ ID NO: 394273 - RNA, 24 nt, Human
cccacagaggaagcaauuuucccu

SEQ ID NO: 394274 - RNA, 21 nt, Human
ccccgcugcuuaacacgccug

SEQ ID NO: 394275 - RNA, 20 nt, Human
cugaggcuuuugcagccaga

SEQ ID NO: 394276 - RNA, 22 nt, Human
cugaggcuuuugcagccagauu

SEQ ID NO: 394277 - RNA, 24 nt, Human
cugauggaguucggagucucuccu

SEQ ID NO: 394278 - RNA, 19 nt, Human
cuggaggucuucucugcug

SEQ ID NO: 394279 - RNA, 22 nt, Human
gaaguacaggccaaccccgcug

SEQ ID NO: 394280 - RNA, 22 nt, Human
ggccaaccccgcugcuuaacac

SEQ ID NO: 394281 - RNA, 19 nt, Human
ggccagaggaaguacaggc

SEQ ID NO: 394282 - RNA, 21 nt, Human
uacaggccaaccccgcugcuu

SEQ ID NO: 394283 - RNA, 25 nt, Human
uccccagaggaagcaauuuucccuc

SEQ ID NO: 394284 - RNA, 23 nt, Human
ucgccucccacagaggaagcaau

SEQ ID NO: 394285 - RNA, 22 nt, Human
ucgccuccccagaggaagcaau

SEQ ID NO: 394286 - RNA, 22 nt, Human
ucucuugggggcucuugagggu

SEQ ID NO: 394287 - RNA, 19 nt, Human
ugaaaaauucacagcuuua

SEQ ID NO: 394288 - RNA, 24 nt, Human
uuaacgguuucacuagcccucuuc

SEQ ID NO: 394289 - RNA, 24 nt, Human
uuacugaggcuuuugcagccguau

SEQ ID NO: 394290 - RNA, 21 nt, Human
uugcagccagauucgccuccc

SEQ ID NO: 394291 - RNA, 22 nt, Human
uugggggcucuugagggucuau

SEQ ID NO: 394292 - RNA, 25 nt, Human
aaaauuaacaucaacaaaaccaaag

SEQ ID NO: 394293 - RNA, 22 nt, Human
aaaccaaagccauucuaggcac

SEQ ID NO: 394294 - RNA, 26 nt, Human
aagcagaaagagaagaaaggggaccc

SEQ ID NO: 394295 - RNA, 23 nt, Human
acagcaacugaagcagaaagaga

SEQ ID NO: 394296 - RNA, 19 nt, Human
agaagaaaggagcuuacaa

SEQ ID NO: 394297 - RNA, 25 nt, Human
agcaacugaagcagaaagagaagaa

SEQ ID NO: 394298 - RNA, 19 nt, Human
caaaaccaaagccauucua

SEQ ID NO: 394299 - RNA, 18 nt, Human
cagaaaucugacugaaaa

SEQ ID NO: 394300 - RNA, 22 nt, Human
cagagagggccaaacgaugaug

SEQ ID NO: 394301 - RNA, 25 nt, Human
caggacacucaaacucaggccagga

SEQ ID NO: 394302 - RNA, 21 nt, Human
ccaaagccauucuaggcacaa

SEQ ID NO: 394303 - RNA, 23 nt, Human
gagcuuacaaccaggacacucaa

SEQ ID NO: 394304 - RNA, 23 nt, Human
uaacaauaucauaguaagguuuc

SEQ ID NO: 394305 - RNA, 18 nt, Human
uacaaccaggacacucaa

SEQ ID NO: 394306 - RNA, 25 nt, Human
uaggcacaaccaaaaauuuuuacua

SEQ ID NO: 394307 - RNA, 21 nt, Human
ucaaacucaggccaggagucc

SEQ ID NO: 394308 - RNA, 22 nt, Human
ugaacaaagugagacuuacaga

SEQ ID NO: 394309 - RNA, 21 nt, Human
uuacaaccaggacacucaaac

SEQ ID NO: 394310 - RNA, 18 nt, Human
aaaaaguuugcaaaagca

SEQ ID NO: 394311 - RNA, 30 nt, Human
aaacauaaaucaaauggcuguuauucauuu

SEQ ID NO: 394312 - RNA, 22 nt, Human
aaagaaacaauccuuaacuaga

SEQ ID NO: 394313 - RNA, 22 nt, Human
aaagugcuucauugccaauaua

SEQ ID NO: 394314 - RNA, 25 nt, Human
aaugccaucaacaauguauugaaaa

SEQ ID NO: 394315 - RNA, 21 nt, Human
aauugcuuccaacauaaacau

SEQ ID NO: 394316 - RNA, 18 nt, Human
acaaaguagaauuauagu

SEQ ID NO: 394317 - RNA, 23 nt, Human
acauaaacauuuaaaacaucucu

SEQ ID NO: 394318 - RNA, 22 nt, Human
agaaagguaauacaugaaaaga

SEQ ID NO: 394319 - RNA, 20 nt, Human
agaagcagcuuagguauucu

SEQ ID NO: 394320 - RNA, 22 nt, Human
agacaaugucaacagaaucuga

SEQ ID NO: 394321 - RNA, 21 nt, Human
agauguuagaaauugaugucc

SEQ ID NO: 394322 - RNA, 24 nt, Human
aggcauugaaagugcuucauugcc

SEQ ID NO: 394323 - RNA, 20 nt, Human
auggcucuuguagaaaaagg

SEQ ID NO: 394324 - RNA, 22 nt, Human
caaaagcacugaagcuuugcua

SEQ ID NO: 394325 - RNA, 20 nt, Human
caaacauaaaccaaaugacu

SEQ ID NO: 394326 - RNA, 19 nt, Human
caugaaaagagacagcuca

SEQ ID NO: 394327 - RNA, 27 nt, Human
caugaaaagagacagcucaagacuggu

SEQ ID NO: 394328 - RNA, 23 nt, Human
cauguuuuaauauucugucacgu

SEQ ID NO: 394329 - RNA, 23 nt, Human
cauuuaaaacaucucuacucaag

SEQ ID NO: 394330 - RNA, 22 nt, Human
ccugugccagauaacacaaaaa

SEQ ID NO: 394331 - RNA, 21 nt, Human
cugguauaucagauguuagaa

SEQ ID NO: 394332 - RNA, 23 nt, Human
cuugccauaaccaaacauaaacc

SEQ ID NO: 394333 - RNA, 18 nt, Human
gaaaagucuaugacaaga

SEQ ID NO: 394334 - RNA, 24 nt, Human
gaaaggucuauccaguugugaggg

SEQ ID NO: 394335 - RNA, 22 nt, Human
gccaaaccaauucucuugucac

SEQ ID NO: 394336 - RNA, 19 nt, Human
uaacugcauaagcauaaac

SEQ ID NO: 394337 - RNA, 21 nt, Human
uacagaaaacaggaauagcug

SEQ ID NO: 394338 - RNA, 21 nt, Human
uaugacaagagcaugaaaaaa

SEQ ID NO: 394339 - RNA, 23 nt, Human
uaugcaaaccaauuuuucuuauu

SEQ ID NO: 394340 - RNA, 21 nt, Human
ucaaaggccugugccagauaa

SEQ ID NO: 394341 - RNA, 23 nt, Human
uccaaaaacaaaauaaucuucug

SEQ ID NO: 394342 - RNA, 23 nt, Human
ucccuuuuuaaagaucucuaugu

SEQ ID NO: 394343 - RNA, 25 nt, Human
ugaaaaaaaauccugcuuucagcug

SEQ ID NO: 394344 - RNA, 22 nt, Human
ugaaaagagacagcucaagacu

SEQ ID NO: 394345 - RNA, 18 nt, Human
ugaaauaaaaauaccaca

SEQ ID NO: 394346 - RNA, 20 nt, Human
ugacuaaugaaaaaaaaucc

SEQ ID NO: 394347 - RNA, 23 nt, Human
ugccauaaccaaacauaaaccaa

SEQ ID NO: 394348 - RNA, 22 nt, Human
ugccaucaacaauguauugaaa

SEQ ID NO: 394349 - RNA, 19 nt, Human
uggaaauggcucuuguaga

SEQ ID NO: 394350 - RNA, 21 nt, Human
uuauagucuuuucaaaggccu

SEQ ID NO: 394351 - RNA, 25 nt, Human
uucaaaucucuuacuucuuucgguu

SEQ ID NO: 394352 - RNA, 20 nt, Human
uugaagaaauuugccauauc

SEQ ID NO: 394353 - RNA, 22 nt, Human
uugcagaagguuaaaaagaaaa

SEQ ID NO: 394354 - RNA, 18 nt, Human
uugcuaguuauuuguugu

SEQ ID NO: 394355 - RNA, 21 nt, Human
uuuagguaagucuuuaagaga

SEQ ID NO: 394356 - RNA, 18 nt, Human
uuuuuuuuuugaagcaaa

SEQ ID NO: 394357 - RNA, 18 nt, Human
uuuuuuuuuuuuuuuuug

SEQ ID NO: 394358 - RNA, 21 nt, Human
aaaccagggcaaacucaugga

SEQ ID NO: 394359 - RNA, 19 nt, Human
agcacacauggcaacacag

SEQ ID NO: 394360 - RNA, 20 nt, Human
agcagcgagcacagucggac

SEQ ID NO: 394361 - RNA, 24 nt, Human
caaaccacuugggccagugaaacc

SEQ ID NO: 394362 - RNA, 20 nt, Human
cacacauggcaacacagagc

SEQ ID NO: 394363 - RNA, 22 nt, Human
cuucaccuugguggcagcccua

SEQ ID NO: 394364 - RNA, 20 nt, Human
ggugcggcgcugagcagcga

SEQ ID NO: 394365 - RNA, 20 nt, Human
uagcacaaaccacuugggcc

SEQ ID NO: 394366 - RNA, 20 nt, Human
ucagcacacauggcaacaca

SEQ ID NO: 394367 - RNA, 21 nt, Human
ucugcguucccaucuucaccu

SEQ ID NO: 394368 - RNA, 21 nt, Human
ugaaaccagggcaaacucaug

SEQ ID NO: 394369 - RNA, 22 nt, Human
ugcggcgcugagcagcgagcac

SEQ ID NO: 394370 - RNA, 24 nt, Human
uggcaacacagagcugugaagaca

SEQ ID NO: 394371 - RNA, 22 nt, Human
uggcagcccuaccucugagauu

SEQ ID NO: 394372 - RNA, 24 nt, Human
uuuuuuguucagcacacauggcaa

SEQ ID NO: 394373 - RNA, 18 nt, Human
agcagcagcaggaagggu

SEQ ID NO: 394374 - RNA, 25 nt, Human
agcggguggggaggucgaggcgggu

SEQ ID NO: 394375 - RNA, 20 nt, Human
aggcgugggaggggcggggc

SEQ ID NO: 394376 - RNA, 25 nt, Human
agggcagcggcggcggcggcggcgg

SEQ ID NO: 394377 - RNA, 25 nt, Human
agggugggcgcgcggggggcuggug

SEQ ID NO: 394378 - RNA, 22 nt, Human
aggucgaggcgggugcagaguc

SEQ ID NO: 394379 - RNA, 18 nt, Human
cagagucggagaggcugc

SEQ ID NO: 394380 - RNA, 23 nt, Human
cagcagcaguagcagcagcagga

SEQ ID NO: 394381 - RNA, 23 nt, Human
cagcaggaaggguugcugauccc

SEQ ID NO: 394382 - RNA, 24 nt, Human
cagcaggaaggguugcugaucccg

SEQ ID NO: 394383 - RNA, 25 nt, Human
cggggggcuggugaggcgugggagg

SEQ ID NO: 394384 - RNA, 20 nt, Human
gcggcggcggcggcggcagc

SEQ ID NO: 394385 - RNA, 20 nt, Human
gcggcggcggcggcggcggc

SEQ ID NO: 394386 - RNA, 21 nt, Human
gcggcggcggcggcggcggca

SEQ ID NO: 394387 - RNA, 24 nt, Human
gcggcggcggcggcggcggcagca

SEQ ID NO: 394388 - RNA, 19 nt, Human
gcgugaacggauaugcccc

SEQ ID NO: 394389 - RNA, 18 nt, Human
gcugccccacugacaguc

SEQ ID NO: 394390 - RNA, 20 nt, Human
ggacccaagggcagcggcgg

SEQ ID NO: 394391 - RNA, 21 nt, Human
ggcggcagcagcagcagcagu

SEQ ID NO: 394392 - RNA, 21 nt, Human
ggcuggugaggcgugggaggg

SEQ ID NO: 394393 - RNA, 20 nt, Human
gggugugggagcgggugggg

SEQ ID NO: 394394 - RNA, 18 nt, Human
ugggagcggguggggagg

SEQ ID NO: 394395 - RNA, 24 nt, Human
ugggagcggguggggaggucgagg

SEQ ID NO: 394396 - RNA, 21 nt, Human
ugggaggggcggggcgggagg

SEQ ID NO: 394397 - RNA, 22 nt, Human
ugugggagcggguggggagguc

SEQ ID NO: 394398 - RNA, 19 nt, Human
ggcagccuggucucuagga

SEQ ID NO: 394399 - RNA, 18 nt, Human
ucucuaggaggugagugc

SEQ ID NO: 394400 - RNA, 24 nt, Human
uggcagccuggucucuaggaggug

SEQ ID NO: 394401 - RNA, 29 nt, Human
aaaaaaaaaaagcuuaaugaauaaagagg

SEQ ID NO: 394402 - RNA, 23 nt, Human
aaccauuaccuuaacacugaaaa

SEQ ID NO: 394403 - RNA, 22 nt, Human
aaccuuugccuccuaccagagg

SEQ ID NO: 394404 - RNA, 24 nt, Human
aagaaguccaggggcgggugaugc

SEQ ID NO: 394405 - RNA, 23 nt, Human
aagggaacaugucauuucaaaga

SEQ ID NO: 394406 - RNA, 20 nt, Human
aaguuuacucgaaacaucug

SEQ ID NO: 394407 - RNA, 31 nt, Human
acuuucaaaguuaaaaaaaaaaaaaaaaaaa

SEQ ID NO: 394408 - RNA, 21 nt, Human
agaacagagcccagcauccuc

SEQ ID NO: 394409 - RNA, 21 nt, Human
agaaucuuccaagccaagaac

SEQ ID NO: 394410 - RNA, 19 nt, Human
aguuauugcuuucugaaca

SEQ ID NO: 394411 - RNA, 20 nt, Human
auccaggauccccccagccc

SEQ ID NO: 394412 - RNA, 23 nt, Human
auucuaaaacuuauagcaccacu

SEQ ID NO: 394413 - RNA, 20 nt, Human
caagaacagagcccagcauc

SEQ ID NO: 394414 - RNA, 24 nt, Human
caagaacagagcccagcauccucc

SEQ ID NO: 394415 - RNA, 28 nt, Human
caagcagcaacaaauugcuucgugccua

SEQ ID NO: 394416 - RNA, 22 nt, Human
cacccacacacacuguacugca

SEQ ID NO: 394417 - RNA, 18 nt, Human
cagaaggcccccguuuga

SEQ ID NO: 394418 - RNA, 22 nt, Human
cagaaggcccccguuugaacac

SEQ ID NO: 394419 - RNA, 24 nt, Human
cagcccccaagcgguaaauccaaa

SEQ ID NO: 394420 - RNA, 18 nt, Human
caggauccccccagcccc

SEQ ID NO: 394421 - RNA, 21 nt, Human
ccaggccaggagggguuccca

SEQ ID NO: 394422 - RNA, 24 nt, Human
ccaggccaggagggguucccaguu

SEQ ID NO: 394423 - RNA, 20 nt, Human
cccacacacacuguacugca

SEQ ID NO: 394424 - RNA, 22 nt, Human
cccacacacacuguacugcaca

SEQ ID NO: 394425 - RNA, 25 nt, Human
cccagcccccaagcgguaaauccaa

SEQ ID NO: 394426 - RNA, 24 nt, Human
cccccaggccaggagggguuccca

SEQ ID NO: 394427 - RNA, 20 nt, Human
ccgccgcccccgccgcgcgc

SEQ ID NO: 394428 - RNA, 25 nt, Human
ccgccgcgcgcgggccuugcugucc

SEQ ID NO: 394429 - RNA, 19 nt, Human
ccgcgcgcgggccuugcug

SEQ ID NO: 394430 - RNA, 20 nt, Human
ccgcgcgcgggccuugcugu

SEQ ID NO: 394431 - RNA, 19 nt, Human
ccuaccagaggacuugauc

SEQ ID NO: 394432 - RNA, 24 nt, Human
ccuuaugauguguuauagauuacc

SEQ ID NO: 394433 - RNA, 23 nt, Human
cgccaguuaaauccaggaucccc

SEQ ID NO: 394434 - RNA, 18 nt, Human
cuaaaaccagaaggcccc

SEQ ID NO: 394435 - RNA, 19 nt, Human
cuaaaaccagaaggccccc

SEQ ID NO: 394436 - RNA, 19 nt, Human
cuaaaaccagaaggccccc

SEQ ID NO: 394437 - RNA, 21 nt, Human
cuacaaguuuccuaaaaccag

SEQ ID NO: 394438 - RNA, 19 nt, Human
cugccgccgcccccgccgc

SEQ ID NO: 394439 - RNA, 25 nt, Human
cuuccaagccaagaacagagcccag

SEQ ID NO: 394440 - RNA, 18 nt, Human
cuuuucaaguuuacucga

SEQ ID NO: 394441 - RNA, 22 nt, Human
gaauguauuuaaaagauucuaa

SEQ ID NO: 394442 - RNA, 22 nt, Human
gagggguucccagucugugcgg

SEQ ID NO: 394443 - RNA, 19 nt, Human
gcggacacaaaaaccaacc

SEQ ID NO: 394444 - RNA, 23 nt, Human
ggccaggagggguucccagucuu

SEQ ID NO: 394445 - RNA, 18 nt, Human
gggguucaaaaaaaaaaa

SEQ ID NO: 394446 - RNA, 24 nt, Human
ggugaccaggcgucugccgccgcc

SEQ ID NO: 394447 - RNA, 18 nt, Human
gguucccagucugugcgg

SEQ ID NO: 394448 - RNA, 18 nt, Human
gucauuucaaagagucuc

SEQ ID NO: 394449 - RNA, 23 nt, Human
gugaccaggcgucugccgccgcc

SEQ ID NO: 394450 - RNA, 23 nt, Human
gugugggucuguuggcccaggga

SEQ ID NO: 394451 - RNA, 21 nt, Human
uaaaagauucuaaaacuuaua

SEQ ID NO: 394452 - RNA, 24 nt, Human
uaaaauacagaaccuccacgggga

SEQ ID NO: 394453 - RNA, 24 nt, Human
uaaauagaaucuuccaagccaaga

SEQ ID NO: 394454 - RNA, 20 nt, Human
uacccuguauauauaugaau

SEQ ID NO: 394455 - RNA, 21 nt, Human
uagaaccuuugccuccuacca

SEQ ID NO: 394456 - RNA, 23 nt, Human
uagaaucuuccaagccaagaaca

SEQ ID NO: 394457 - RNA, 18 nt, Human
uagggcacaucaauuuga

SEQ ID NO: 394458 - RNA, 27 nt, Human
uaugcaaauaaagcuucaguaccuuaa

SEQ ID NO: 394459 - RNA, 22 nt, Human
uauuguugaucuguugaucuag

SEQ ID NO: 394460 - RNA, 26 nt, Human
ucaacgcacuguuucuuaaaauacag

SEQ ID NO: 394461 - RNA, 18 nt, Human
ucccuacucuccuaaccu

SEQ ID NO: 394462 - RNA, 22 nt, Human
uccgggucacuggacacgcauc

SEQ ID NO: 394463 - RNA, 22 nt, Human
ucuccauuucacccacacacac

SEQ ID NO: 394464 - RNA, 21 nt, Human
ugaauaaagagccaguacuug

SEQ ID NO: 394465 - RNA, 18 nt, Human
ugugcgguggagaaggau

SEQ ID NO: 394466 - RNA, 20 nt, Human
uuaaaaaaaaaaaaaaaaaa

SEQ ID NO: 394467 - RNA, 25 nt, Human
uuauuuggggaacauuuacaggcca

SEQ ID NO: 394468 - RNA, 23 nt, Human
uucaaaguuaaaaaaaaaaaaaa

SEQ ID NO: 394469 - RNA, 23 nt, Human
uucaagguaaauauuuagcggac

SEQ ID NO: 394470 - RNA, 20 nt, Human
uuccuaaaaccagaaggccc

SEQ ID NO: 394471 - RNA, 20 nt, Human
uugaucucugaagaagcuag

SEQ ID NO: 394472 - RNA, 20 nt, Human
uugggggugacaagcagcaa

SEQ ID NO: 394473 - RNA, 21 nt, Human
uuucaaaguuaaaaaaaaaaa

SEQ ID NO: 394474 - RNA, 23 nt, Human
aaaaaagaaaaacaaaacaaaaa

SEQ ID NO: 394475 - RNA, 27 nt, Human
aaaaaagaaaaacaaaacaaaaacaga

SEQ ID NO: 394476 - RNA, 22 nt, Human
aaaaacagaaagcaaaccaaaa

SEQ ID NO: 394477 - RNA, 26 nt, Human
aaaaacagaaagcaaaccaaaaagaa

SEQ ID NO: 394478 - RNA, 21 nt, Human
aaaaagaaauaaaaaaccaac

SEQ ID NO: 394479 - RNA, 26 nt, Human
aaaacaaaaacagaaagcaaaccaaa

SEQ ID NO: 394480 - RNA, 21 nt, Human
aaaacaaaacaaaaacagaaa

SEQ ID NO: 394481 - RNA, 22 nt, Human
aaaagaaaaacaaaacaaaaac

SEQ ID NO: 394482 - RNA, 26 nt, Human
aaaagaaaaacaaaacaaaaacagaa

SEQ ID NO: 394483 - RNA, 24 nt, Human
aaacaaaaacagaaagcaaaccaa

SEQ ID NO: 394484 - RNA, 26 nt, Human
aaacaaaaacagaaagcaaaccaaaa

SEQ ID NO: 394485 - RNA, 18 nt, Human
aaacaaaaagagagagac

SEQ ID NO: 394486 - RNA, 23 nt, Human
aaacaaaacaaaaacagaaagca

SEQ ID NO: 394487 - RNA, 24 nt, Human
aaacaaaacaaaaacagaaagcaa

SEQ ID NO: 394488 - RNA, 24 nt, Human
aaaccaaaaagaaauaaaaaacca

SEQ ID NO: 394489 - RNA, 21 nt, Human
aaaccaacaacaaacaaaaca

SEQ ID NO: 394490 - RNA, 20 nt, Human
aaagaagaaaacccaaaaag

SEQ ID NO: 394491 - RNA, 24 nt, Human
aacaaaaacagaaagcaaaccaaa

SEQ ID NO: 394492 - RNA, 24 nt, Human
aacaaaacaaaaagagagagacag

SEQ ID NO: 394493 - RNA, 24 nt, Human
aacaaacaaaacaaaaagagagag

SEQ ID NO: 394494 - RNA, 26 nt, Human
aagaaaaacaaaacaaaaacagaaag

SEQ ID NO: 394495 - RNA, 19 nt, Human
aagaaagaaaaaaaagaaa

SEQ ID NO: 394496 - RNA, 20 nt, Human
aagaaauaaaaaaccaacaa

SEQ ID NO: 394497 - RNA, 22 nt, Human
aagagacccaaaugacaucgua

SEQ ID NO: 394498 - RNA, 23 nt, Human
aaggcacgguggccucuugguuu

SEQ ID NO: 394499 - RNA, 22 nt, Human
acaaaacaaaaacagaaagcaa

SEQ ID NO: 394500 - RNA, 27 nt, Human
acaaaacaaaaacagaaagcaaaccaa

SEQ ID NO: 394501 - RNA, 28 nt, Human
acaaaacaaaaacagaaagcaaaccaaa

SEQ ID NO: 394502 - RNA, 22 nt, Human
accuggaggcagaggugggggc

SEQ ID NO: 394503 - RNA, 23 nt, Human
accuggaggcagaggugggggcu

SEQ ID NO: 394504 - RNA, 18 nt, Human
agaaaaaaaagaaaaaca

SEQ ID NO: 394505 - RNA, 25 nt, Human
agaaaaaaaagaaaaacaaaacaaa

SEQ ID NO: 394506 - RNA, 26 nt, Human
agaaaaaaaagaaaaacaaaacaaaa

SEQ ID NO: 394507 - RNA, 22 nt, Human
agaaaaacaaaacaaaaacaga

SEQ ID NO: 394508 - RNA, 18 nt, Human
agaaaacccaaaaagagg

SEQ ID NO: 394509 - RNA, 26 nt, Human
agaaagaagaaaacccaaaaagagga

SEQ ID NO: 394510 - RNA, 26 nt, Human
agaaagaagaaaacccaaaaagagga

SEQ ID NO: 394511 - RNA, 21 nt, Human
agaaagcaaaccaaaaagaaa

SEQ ID NO: 394512 - RNA, 19 nt, Human
agaaugccccagccuaguc

SEQ ID NO: 394513 - RNA, 18 nt, Human
agaccuccgggcccccag

SEQ ID NO: 394514 - RNA, 19 nt, Human
agaccuggaggcagaggug

SEQ ID NO: 394515 - RNA, 18 nt, Human
agaggaaggaaaggggau

SEQ ID NO: 394516 - RNA, 24 nt, Human
agaugcuggcggcggcggcggcgg

SEQ ID NO: 394517 - RNA, 27 nt, Human
agaugcuggcggcggcggcggcggcga

SEQ ID NO: 394518 - RNA, 20 nt, Human
aggagaaagaagaaaaccca

SEQ ID NO: 394519 - RNA, 23 nt, Human
aggagaaagaagaaaacccaaaa

SEQ ID NO: 394520 - RNA, 24 nt, Human
aggagaaagaagaaaacccaaaaa

SEQ ID NO: 394521 - RNA, 25 nt, Human
aggagaaagaagaaaacccaaaaag

SEQ ID NO: 394522 - RNA, 21 nt, Human
aggcagaggugggggcugggg

SEQ ID NO: 394523 - RNA, 22 nt, Human
aggcagaggugggggcuggggg

SEQ ID NO: 394524 - RNA, 24 nt, Human
aggcagaggugggggcuggggggu

SEQ ID NO: 394525 - RNA, 19 nt, Human
aggcuggcucugggcaggg

SEQ ID NO: 394526 - RNA, 23 nt, Human
agggagaggagggcugggggggu

SEQ ID NO: 394527 - RNA, 26 nt, Human
agggaggcgggcaugggaggggcggg

SEQ ID NO: 394528 - RNA, 22 nt, Human
aggugggggcugggggguggga

SEQ ID NO: 394529 - RNA, 22 nt, Human
augugugugugugugugugugu

SEQ ID NO: 394530 - RNA, 22 nt, Human
augugugugugugugugugugu

SEQ ID NO: 394531 - RNA, 22 nt, Human
auugaaaaagaggucauaaaag

SEQ ID NO: 394532 - RNA, 22 nt, Human
caaaacaaaaacagaaagcaaa

SEQ ID NO: 394533 - RNA, 23 nt, Human
caaaacaaaaacagaaagcaaac

SEQ ID NO: 394534 - RNA, 22 nt, Human
caacaaacaaaacaaaaagaga

SEQ ID NO: 394535 - RNA, 19 nt, Human
caacaacaaacaaaacaaa

SEQ ID NO: 394536 - RNA, 25 nt, Human
caacaacaaacaaaacaaaaagaga

SEQ ID NO: 394537 - RNA, 19 nt, Human
cagaggugggggcuggggg

SEQ ID NO: 394538 - RNA, 23 nt, Human
cagcaaaccccaaccaagaagca

SEQ ID NO: 394539 - RNA, 20 nt, Human
cagcccccagaagggagagg

SEQ ID NO: 394540 - RNA, 22 nt, Human
cagcccccggggccgaggcccc

SEQ ID NO: 394541 - RNA, 24 nt, Human
cagccuagucuuacccccaaccau

SEQ ID NO: 394542 - RNA, 23 nt, Human
caggucccgcgaucagccggaga

SEQ ID NO: 394543 - RNA, 22 nt, Human
caucuccgugucagcuuccucc

SEQ ID NO: 394544 - RNA, 22 nt, Human
ccaaaaagaggaaggaaagggg

SEQ ID NO: 394545 - RNA, 22 nt, Human
ccagcccccagaagggagagga

SEQ ID NO: 394546 - RNA, 18 nt, Human
ccagccccgggaccucgg

SEQ ID NO: 394547 - RNA, 18 nt, Human
ccaggcaucuccguguca

SEQ ID NO: 394548 - RNA, 22 nt, Human
cccagaaugccccagccuaguc

SEQ ID NO: 394549 - RNA, 18 nt, Human
ccccaaccaagaagcaac

SEQ ID NO: 394550 - RNA, 20 nt, Human
ccccaaccaagaagcaacgg

SEQ ID NO: 394551 - RNA, 18 nt, Human
ccccagccccgggaccuc

SEQ ID NO: 394552 - RNA, 22 nt, Human
cccccagaaugccccagccuag

SEQ ID NO: 394553 - RNA, 21 nt, Human
cccuguggcugccccggcucc

SEQ ID NO: 394554 - RNA, 25 nt, Human
ccuccagcccccggggccgaggccc

SEQ ID NO: 394555 - RNA, 18 nt, Human
ccuugaacacgaagaccu

SEQ ID NO: 394556 - RNA, 21 nt, Human
cggccccccuccucugcacga

SEQ ID NO: 394557 - RNA, 23 nt, Human
cggcggcggcgaggggagggagg

SEQ ID NO: 394558 - RNA, 28 nt, Human
cucaaaauuguaaaaaaaaaaaaaagaa

SEQ ID NO: 394559 - RNA, 22 nt, Human
cucccacagcucugcgacaccc

SEQ ID NO: 394560 - RNA, 19 nt, Human
cucccuccagcccccagaa

SEQ ID NO: 394561 - RNA, 20 nt, Human
cucccuguggcugccccggc

SEQ ID NO: 394562 - RNA, 18 nt, Human
cuggaggcagaggugggg

SEQ ID NO: 394563 - RNA, 21 nt, Human
gaagaugagaccuggaggcag

SEQ ID NO: 394564 - RNA, 21 nt, Human
gaccucggguugaguggcuuc

SEQ ID NO: 394565 - RNA, 21 nt, Human
gagaaagaagaaaacccaaaa

SEQ ID NO: 394566 - RNA, 23 nt, Human
gagaaagaagaaaacccaaaaag

SEQ ID NO: 394567 - RNA, 23 nt, Human
gcagaggugggggcuggggggug

SEQ ID NO: 394568 - RNA, 21 nt, Human
gcccaugucucucccuguggc

SEQ ID NO: 394569 - RNA, 21 nt, Human
gccccggcucccuccagcccc

SEQ ID NO: 394570 - RNA, 19 nt, Human
gcugccccggcucccucca

SEQ ID NO: 394571 - RNA, 21 nt, Human
gcuggcggcggcggcggcggc

SEQ ID NO: 394572 - RNA, 22 nt, Human
ggaaaaaaugcuuuuuggcaga

SEQ ID NO: 394573 - RNA, 25 nt, Human
ggagaaagaagaaaacccaaaaaga

SEQ ID NO: 394574 - RNA, 21 nt, Human
ggagaggagggcugggggggu

SEQ ID NO: 394575 - RNA, 20 nt, Human
ggagggaggcgggcauggga

SEQ ID NO: 394576 - RNA, 25 nt, Human
ggcagaggugggggcuggggggugg

SEQ ID NO: 394577 - RNA, 22 nt, Human
ggcaugggaggggcgggaggga

SEQ ID NO: 394578 - RNA, 24 nt, Human
ggcugccccggcucccuccagccc

SEQ ID NO: 394579 - RNA, 19 nt, Human
gggagggaggcgggcaugg

SEQ ID NO: 394580 - RNA, 25 nt, Human
gggcaugggaggggcgggagggagg

SEQ ID NO: 394581 - RNA, 23 nt, Human
gggcccccagaaugccccagccu

SEQ ID NO: 394582 - RNA, 20 nt, Human
ggggagggaggcgggcaugg

SEQ ID NO: 394583 - RNA, 26 nt, Human
ggggauugaaggcugacaaucccagg

SEQ ID NO: 394584 - RNA, 18 nt, Human
guguguaugugugugugu

SEQ ID NO: 394585 - RNA, 21 nt, Human
gugugugugugugugugugug

SEQ ID NO: 394586 - RNA, 21 nt, Human
gugugugugugugugugugug

SEQ ID NO: 394587 - RNA, 21 nt, Human
gugugugugugugugugugug

SEQ ID NO: 394588 - RNA, 21 nt, Human
gugugugugugugugugugug

SEQ ID NO: 394589 - RNA, 19 nt, Human
uaaaaaaccaacaacaaac

SEQ ID NO: 394590 - RNA, 24 nt, Human
uaaaaaaccaacaacaaacaaaac

SEQ ID NO: 394591 - RNA, 27 nt, Human
uaaaaaaccaacaacaaacaaaacaaa

SEQ ID NO: 394592 - RNA, 20 nt, Human
uaaaagagacccaaaugaca

SEQ ID NO: 394593 - RNA, 21 nt, Human
uacaguauugaaaaagagguc

SEQ ID NO: 394594 - RNA, 18 nt, Human
uaugugugugugugugug

SEQ ID NO: 394595 - RNA, 24 nt, Human
uaugugugugugugugugugugag

SEQ ID NO: 394596 - RNA, 23 nt, Human
uaugugugugugugugugugugu

SEQ ID NO: 394597 - RNA, 24 nt, Human
ucccagaugcuggcggcggcggcg

SEQ ID NO: 394598 - RNA, 22 nt, Human
ucccuguggcugccccggcucc

SEQ ID NO: 394599 - RNA, 21 nt, Human
ucugcgacaccccagccccgg

SEQ ID NO: 394600 - RNA, 21 nt, Human
ugccccggcucccuccagccc

SEQ ID NO: 394601 - RNA, 22 nt, Human
ugcccuggugcguguguaugug

SEQ ID NO: 394602 - RNA, 21 nt, Human
ugccgaugcucccacagcucu

SEQ ID NO: 394603 - RNA, 21 nt, Human
ugcguguguaugugugugugu

SEQ ID NO: 394604 - RNA, 27 nt, Human
ugcguguguaugugugugugugugugu

SEQ ID NO: 394605 - RNA, 18 nt, Human
ugcucccacagcucugcg

SEQ ID NO: 394606 - RNA, 22 nt, Human
uggaggcagaggugggggcugg

SEQ ID NO: 394607 - RNA, 24 nt, Human
uggaggcagaggugggggcugggg

SEQ ID NO: 394608 - RNA, 18 nt, Human
uggcagagagaggccagg

SEQ ID NO: 394609 - RNA, 20 nt, Human
uggcagagagaggccaggca

SEQ ID NO: 394610 - RNA, 24 nt, Human
uggccucuugguuuuuuuucuccc

SEQ ID NO: 394611 - RNA, 18 nt, Human
uggcggcggcggcggcgg

SEQ ID NO: 394612 - RNA, 25 nt, Human
uggcggcggcggcggcggcgagggg

SEQ ID NO: 394613 - RNA, 20 nt, Human
ugggaggggcgggagggagg

SEQ ID NO: 394614 - RNA, 21 nt, Human
ugggaggggcgggagggaggu

SEQ ID NO: 394615 - RNA, 18 nt, Human
ugggggcugggggguggg

SEQ ID NO: 394616 - RNA, 20 nt, Human
ugggggcuggggggugggag

SEQ ID NO: 394617 - RNA, 19 nt, Human
ugggguggaagaugagacc

SEQ ID NO: 394618 - RNA, 22 nt, Human
uggugcguguguaugugugugu

SEQ ID NO: 394619 - RNA, 24 nt, Human
uguggcugccccggcucccuccag

SEQ ID NO: 394620 - RNA, 20 nt, Human
uguguaugugugugugugug

SEQ ID NO: 394621 - RNA, 18 nt, Human
ugugugugugugugugug

SEQ ID NO: 394622 - RNA, 18 nt, Human
ugugugugugugugugug

SEQ ID NO: 394623 - RNA, 18 nt, Human
ugugugugugugugugug

SEQ ID NO: 394624 - RNA, 18 nt, Human
ugugugugugugugugug

SEQ ID NO: 394625 - RNA, 18 nt, Human
ugugugugugugugugug

SEQ ID NO: 394626 - RNA, 18 nt, Human
ugugugugugugugugug

SEQ ID NO: 394627 - RNA, 18 nt, Human
ugugugugugugugugug

SEQ ID NO: 394628 - RNA, 18 nt, Human
ugugugugugugugugug

SEQ ID NO: 394629 - RNA, 18 nt, Human
ugugugugugugugugug

SEQ ID NO: 394630 - RNA, 18 nt, Human
ugugugugugugugugug

SEQ ID NO: 394631 - RNA, 18 nt, Human
ugugugugugugugugug

SEQ ID NO: 394632 - RNA, 18 nt, Human
ugugugugugugugugug

SEQ ID NO: 394633 - RNA, 18 nt, Human
ugugugugugugugugug

SEQ ID NO: 394634 - RNA, 21 nt, Human
ugugugugugugugugugugu

SEQ ID NO: 394635 - RNA, 21 nt, Human
ugugugugugugugugugugu

SEQ ID NO: 394636 - RNA, 21 nt, Human
ugugugugugugugugugugu

SEQ ID NO: 394637 - RNA, 21 nt, Human
ugugugugugugugugugugu

SEQ ID NO: 394638 - RNA, 21 nt, Human
ugugugugugugugugugugu

SEQ ID NO: 394639 - RNA, 21 nt, Human
ugugugugugugugugugugu

SEQ ID NO: 394640 - RNA, 21 nt, Human
ugugugugugugugugugugu

SEQ ID NO: 394641 - RNA, 21 nt, Human
ugugugugugugugugugugu

SEQ ID NO: 394642 - RNA, 21 nt, Human
ugugugugugugugugugugu

SEQ ID NO: 394643 - RNA, 21 nt, Human
ugugugugugugugugugugu

SEQ ID NO: 394644 - RNA, 21 nt, Human
ugugugugugugugugugugu

SEQ ID NO: 394645 - RNA, 21 nt, Human
ugugugugugugugugugugu

SEQ ID NO: 394646 - RNA, 21 nt, Human
ugugugugugugugugugugu

SEQ ID NO: 394647 - RNA, 21 nt, Human
ugugugugugugugugugugu

SEQ ID NO: 394648 - RNA, 21 nt, Human
ugugugugugugugugugugu

SEQ ID NO: 394649 - RNA, 21 nt, Human
ugugugugugugugugugugu

SEQ ID NO: 394650 - RNA, 21 nt, Human
ugugugugugugugugugugu

SEQ ID NO: 394651 - RNA, 21 nt, Human
ugugugugugugugugugugu

SEQ ID NO: 394652 - RNA, 21 nt, Human
ugugugugugugugugugugu

SEQ ID NO: 394653 - RNA, 21 nt, Human
ugugugugugugugugugugu

SEQ ID NO: 394654 - RNA, 21 nt, Human
ugugugugugugugugugugu

SEQ ID NO: 394655 - RNA, 22 nt, Human
ugugugugugugugugugugug

SEQ ID NO: 394656 - RNA, 22 nt, Human
ugugugugugugugugugugug

SEQ ID NO: 394657 - RNA, 22 nt, Human
ugugugugugugugugugugug

SEQ ID NO: 394658 - RNA, 22 nt, Human
ugugugugugugugugugugug

SEQ ID NO: 394659 - RNA, 22 nt, Human
ugugugugugugugugugugug

SEQ ID NO: 394660 - RNA, 22 nt, Human
ugugugugugugugugugugug

SEQ ID NO: 394661 - RNA, 22 nt, Human
ugugugugugugugugugugug

SEQ ID NO: 394662 - RNA, 22 nt, Human
uuaaaaaacauauuuaaaggaa

SEQ ID NO: 394663 - RNA, 22 nt, Human
uuaaaggaaaaaaugcuuuuug

SEQ ID NO: 394664 - RNA, 22 nt, Human
uuuuguuuaauuuucccuguuc

SEQ ID NO: 394665 - RNA, 18 nt, Human
accucacccaggaccuuc

SEQ ID NO: 394666 - RNA, 20 nt, Human
agcaccauccaacccuaccu

SEQ ID NO: 394667 - RNA, 21 nt, Human
cauucuguaaagacaaaagag

SEQ ID NO: 394668 - RNA, 21 nt, Human
ccauccaacccuaccucaccc

SEQ ID NO: 394669 - RNA, 21 nt, Human
cuggucauuggcauuuguauc

SEQ ID NO: 394670 - RNA, 19 nt, Human
cuguauaguaaaaggaaaa

SEQ ID NO: 394671 - RNA, 20 nt, Human
uaguaaaaggaaaauaaguc

SEQ ID NO: 394672 - RNA, 21 nt, Human
uauaagaagcuccacguagug

SEQ ID NO: 394673 - RNA, 22 nt, Human
uauaguaaaaggaaaauaaguc

SEQ ID NO: 394674 - RNA, 19 nt, Human
ucacccaggaccuucaccu

SEQ ID NO: 394675 - RNA, 23 nt, Human
uccaacccuaccucacccaggac

SEQ ID NO: 394676 - RNA, 20 nt, Human
ugaugauauuuauuuucucu

SEQ ID NO: 394677 - RNA, 21 nt, Human
aaaauccccccugcccagcuc

SEQ ID NO: 394678 - RNA, 20 nt, Human
aagaaaacuacaaaccaagg

SEQ ID NO: 394679 - RNA, 21 nt, Human
acaaaccaagguuucccacgc

SEQ ID NO: 394680 - RNA, 20 nt, Human
acacagucagacgagucagg

SEQ ID NO: 394681 - RNA, 20 nt, Human
acccccaagcccgacuagca

SEQ ID NO: 394682 - RNA, 20 nt, Human
accccucccucccaggucuc

SEQ ID NO: 394683 - RNA, 21 nt, Human
agacuucccagaggcagcucu

SEQ ID NO: 394684 - RNA, 21 nt, Human
agagcuugggccaacacagag

SEQ ID NO: 394685 - RNA, 21 nt, Human
agccagcccggcgcucccacg

SEQ ID NO: 394686 - RNA, 20 nt, Human
aggaguaacgcaaaccaaga

SEQ ID NO: 394687 - RNA, 19 nt, Human
aguaacgcaaaccaagaaa

SEQ ID NO: 394688 - RNA, 21 nt, Human
caaaccaagaaaacuacaaac

SEQ ID NO: 394689 - RNA, 22 nt, Human
caaaccaagaaaacuacaaacc

SEQ ID NO: 394690 - RNA, 24 nt, Human
caaaccaagaaaacuacaaaccaa

SEQ ID NO: 394691 - RNA, 25 nt, Human
caacuacugcagacuucccagaggc

SEQ ID NO: 394692 - RNA, 22 nt, Human
caagguuucccacgcagugccc

SEQ ID NO: 394693 - RNA, 21 nt, Human
cacaacuaaucucccguaccc

SEQ ID NO: 394694 - RNA, 19 nt, Human
caccagccacccccaagcc

SEQ ID NO: 394695 - RNA, 23 nt, Human
cagcucuggacucccgcacuccc

SEQ ID NO: 394696 - RNA, 21 nt, Human
caggagacaccgugucuugua

SEQ ID NO: 394697 - RNA, 19 nt, Human
cagugcccaccagccaccc

SEQ ID NO: 394698 - RNA, 19 nt, Human
ccacaagagcuugggccaa

SEQ ID NO: 394699 - RNA, 23 nt, Human
ccacaagagcuugggccaacaca

SEQ ID NO: 394700 - RNA, 19 nt, Human
ccaccagccacccccaagc

SEQ ID NO: 394701 - RNA, 21 nt, Human
ccacgcagugcccaccagcca

SEQ ID NO: 394702 - RNA, 23 nt, Human
ccacugggcacgaaacgccgcac

SEQ ID NO: 394703 - RNA, 18 nt, Human
ccagaggcagcucuggac

SEQ ID NO: 394704 - RNA, 18 nt, Human
cccaccagccacccccaa

SEQ ID NO: 394705 - RNA, 21 nt, Human
cccaccagccacccccaagcc

SEQ ID NO: 394706 - RNA, 19 nt, Human
ccccaggagacaccguguc

SEQ ID NO: 394707 - RNA, 18 nt, Human
cccccaagcccgacuagc

SEQ ID NO: 394708 - RNA, 22 nt, Human
cccgccccuuucugcuggagga

SEQ ID NO: 394709 - RNA, 18 nt, Human
ccguacccuuggcugcuc

SEQ ID NO: 394710 - RNA, 19 nt, Human
ccucccaggucucgcucuc

SEQ ID NO: 394711 - RNA, 24 nt, Human
ccuucaaaucuccauucauauccc

SEQ ID NO: 394712 - RNA, 21 nt, Human
cgcaaaccaagaaaacuacaa

SEQ ID NO: 394713 - RNA, 19 nt, Human
cuagcacugcucugugcac

SEQ ID NO: 394714 - RNA, 21 nt, Human
cuccauucauaucccccuuca

SEQ ID NO: 394715 - RNA, 23 nt, Human
cucccgcacucccacuccucuug

SEQ ID NO: 394716 - RNA, 19 nt, Human
cuccuccacacacagucag

SEQ ID NO: 394717 - RNA, 27 nt, Human
cuccuccacacacagucagacgaguca

SEQ ID NO: 394718 - RNA, 21 nt, Human
cucugugcacaacuaaucucc

SEQ ID NO: 394719 - RNA, 24 nt, Human
cuugcagaccuucaaaucuccauu

SEQ ID NO: 394720 - RNA, 19 nt, Human
cuuucugcuggaggacccc

SEQ ID NO: 394721 - RNA, 22 nt, Human
gagcuugggccaacacagaggg

SEQ ID NO: 394722 - RNA, 19 nt, Human
gcaccuuuucccccgcccc

SEQ ID NO: 394723 - RNA, 20 nt, Human
gcuccuuccuugccccagga

SEQ ID NO: 394724 - RNA, 20 nt, Human
gcucuggacucccgcacucc

SEQ ID NO: 394725 - RNA, 21 nt, Human
uaacaacaacaagguccagaa

SEQ ID NO: 394726 - RNA, 25 nt, Human
uauaagaaaaaaauuacagggcucc

SEQ ID NO: 394727 - RNA, 19 nt, Human
uaucccccuucaagagggc

SEQ ID NO: 394728 - RNA, 18 nt, Human
uccaaaauccccccugcc

SEQ ID NO: 394729 - RNA, 18 nt, Human
ucccagaggcagcucugg

SEQ ID NO: 394730 - RNA, 20 nt, Human
ucccccgccccuuucugcug

SEQ ID NO: 394731 - RNA, 24 nt, Human
ucuggacucccgcacucccacucc

SEQ ID NO: 394732 - RNA, 21 nt, Human
ugaaggaaggagcagccacug

SEQ ID NO: 394733 - RNA, 21 nt, Human
ugcucguucuuggcugcccca

SEQ ID NO: 394734 - RNA, 23 nt, Human
uggacucccgcacucccacuccu

SEQ ID NO: 394735 - RNA, 19 nt, Human
uggccuggacuccuccaca

SEQ ID NO: 394736 - RNA, 19 nt, Human
ugguggcuugcugcuuccc

SEQ ID NO: 394737 - RNA, 26 nt, Human
ugugcacaacuaaucucccguacccu

SEQ ID NO: 394738 - RNA, 20 nt, Human
uuccaaaauccccccugccc

SEQ ID NO: 394739 - RNA, 21 nt, Human
uucccccgccccuuucugcug

SEQ ID NO: 394740 - RNA, 26 nt, Human
uucguagugguggcuugcugcuuccc

SEQ ID NO: 394741 - RNA, 26 nt, Human
uucugcuggaggaccccucccuccca

SEQ ID NO: 394742 - RNA, 20 nt, Human
uucuuggcugccccagguuc

SEQ ID NO: 394743 - RNA, 22 nt, Human
uuuaacaacaacaagguccaga

SEQ ID NO: 394744 - RNA, 18 nt, Human
aaacaaacaaacaaaagc

SEQ ID NO: 394745 - RNA, 27 nt, Human
aaacacaaaauccuaacaacuaaauaa

SEQ ID NO: 394746 - RNA, 19 nt, Human
aaagaaaaauagcaaauga

SEQ ID NO: 394747 - RNA, 22 nt, Human
aaggaaacagaaaacccacauu

SEQ ID NO: 394748 - RNA, 18 nt, Human
acaaacaaaagcacuucg

SEQ ID NO: 394749 - RNA, 20 nt, Human
acugguaucaaaacacacau

SEQ ID NO: 394750 - RNA, 22 nt, Human
agcaaaugaaaacacaaaaucc

SEQ ID NO: 394751 - RNA, 22 nt, Human
agcauggcaauaagcuuuaacc

SEQ ID NO: 394752 - RNA, 21 nt, Human
aggccaaaaggaaacagaaaa

SEQ ID NO: 394753 - RNA, 23 nt, Human
caaaacacacauccacagcacgu

SEQ ID NO: 394754 - RNA, 23 nt, Human
caaacgaaaacaaacaaacaaaa

SEQ ID NO: 394755 - RNA, 25 nt, Human
caauaagcuuuaaccaaacgaaaac

SEQ ID NO: 394756 - RNA, 19 nt, Human
caauccuugcuuaucagag

SEQ ID NO: 394757 - RNA, 20 nt, Human
cacacauccacagcacgucc

SEQ ID NO: 394758 - RNA, 22 nt, Human
cacugaacaaacuccacagagu

SEQ ID NO: 394759 - RNA, 22 nt, Human
cagacagucuccauagccgcac

SEQ ID NO: 394760 - RNA, 22 nt, Human
cccagagaagaaaaaugauuuu

SEQ ID NO: 394761 - RNA, 20 nt, Human
ccggccguggcggggucccu

SEQ ID NO: 394762 - RNA, 21 nt, Human
ccguggcggggucccugcccu

SEQ ID NO: 394763 - RNA, 24 nt, Human
cguggcggggucccugcccugggc

SEQ ID NO: 394764 - RNA, 22 nt, Human
cuaaacguuuuccugaagccga

SEQ ID NO: 394765 - RNA, 21 nt, Human
cugcuguuugcuuggggcugu

SEQ ID NO: 394766 - RNA, 23 nt, Human
gagggcgcggugcggagcgcggg

SEQ ID NO: 394767 - RNA, 20 nt, Human
gcaauaaaccauuccaagcc

SEQ ID NO: 394768 - RNA, 19 nt, Human
gcaccagcauggcaauaag

SEQ ID NO: 394769 - RNA, 22 nt, Human
gccagcaggggugccguccaaa

SEQ ID NO: 394770 - RNA, 20 nt, Human
gcgcgggcggggacgcggag

SEQ ID NO: 394771 - RNA, 18 nt, Human
gcgcgggcuggggccggg

SEQ ID NO: 394772 - RNA, 18 nt, Human
gcgcggggcggcgcggag

SEQ ID NO: 394773 - RNA, 18 nt, Human
gcgcggugcggagcgcgg

SEQ ID NO: 394774 - RNA, 18 nt, Human
gcgcggugcggagcgcgg

SEQ ID NO: 394775 - RNA, 19 nt, Human
gcggggacgcggagagggc

SEQ ID NO: 394776 - RNA, 18 nt, Human
gggcuggggccgggccgg

SEQ ID NO: 394777 - RNA, 24 nt, Human
uaccauaagcaauaaaccauucca

SEQ ID NO: 394778 - RNA, 26 nt, Human
uaucuaaauucaauagcuuaccaaua

SEQ ID NO: 394779 - RNA, 19 nt, Human
ucaaaacacacauccacag

SEQ ID NO: 394780 - RNA, 21 nt, Human
ucaaaacacacauccacagca

SEQ ID NO: 394781 - RNA, 26 nt, Human
ucaaaacacacauccacagcacgucc

SEQ ID NO: 394782 - RNA, 23 nt, Human
ucaauagcuuaccaauaucuucu

SEQ ID NO: 394783 - RNA, 23 nt, Human
ucagcaaaaacuuuucaggggca

SEQ ID NO: 394784 - RNA, 18 nt, Human
uccacaacaggagguguu

SEQ ID NO: 394785 - RNA, 21 nt, Human
ugaaaacacaaaauccuaaca

SEQ ID NO: 394786 - RNA, 23 nt, Human
ugaaauacaauuucuucagcaaa

SEQ ID NO: 394787 - RNA, 23 nt, Human
ugauagacuuauaaguauguaaa

SEQ ID NO: 394788 - RNA, 26 nt, Human
ugcaaaacagggagagaaaagagugu

SEQ ID NO: 394789 - RNA, 20 nt, Human
ugcccgguccggccgcgcgg

SEQ ID NO: 394790 - RNA, 18 nt, Human
ugcggagcgcggggcggc

SEQ ID NO: 394791 - RNA, 26 nt, Human
ugcugcaaaacagggagagaaaagag

SEQ ID NO: 394792 - RNA, 19 nt, Human
ugcuguuugcuuggggcug

SEQ ID NO: 394793 - RNA, 21 nt, Human
uggcggggucccugcccuggg

SEQ ID NO: 394794 - RNA, 18 nt, Human
uggggccgggccgggcgg

SEQ ID NO: 394795 - RNA, 21 nt, Human
uugcuauccgccagcaggggu

SEQ ID NO: 394796 - RNA, 18 nt, Human
uuuuuuuuuuuuuuuuug

SEQ ID NO: 394797 - RNA, 20 nt, Human
uuuuuuuuuuuuuuuuuguu

SEQ ID NO: 394798 - RNA, 22 nt, Human
aaaaguaaugacauuugguuca

SEQ ID NO: 394799 - RNA, 19 nt, Human
aaaaucccaccucacagaa

SEQ ID NO: 394800 - RNA, 24 nt, Human
aaacaaaggcaaagacugaagcaa

SEQ ID NO: 394801 - RNA, 20 nt, Human
aaacaagagcucacacuaca

SEQ ID NO: 394802 - RNA, 25 nt, Human
aaacuccagauuuaggaugcuggca

SEQ ID NO: 394803 - RNA, 27 nt, Human
aaagcaccucaucuagaccuccaacua

SEQ ID NO: 394804 - RNA, 23 nt, Human
aacaaaggcaaagacugaagcaa

SEQ ID NO: 394805 - RNA, 22 nt, Human
aacuuucaucucaaucaucuca

SEQ ID NO: 394806 - RNA, 21 nt, Human
aagcaccucaucuagaccucc

SEQ ID NO: 394807 - RNA, 24 nt, Human
aagcaccucaucuagaccuccaac

SEQ ID NO: 394808 - RNA, 19 nt, Human
acaaaggcaaagacugaag

SEQ ID NO: 394809 - RNA, 22 nt, Human
acaagagcucacacuacaaaca

SEQ ID NO: 394810 - RNA, 21 nt, Human
acacagugcaaacaaaggcaa

SEQ ID NO: 394811 - RNA, 20 nt, Human
acucacacugccaacucuuc

SEQ ID NO: 394812 - RNA, 22 nt, Human
acugaacacacagugcaaacaa

SEQ ID NO: 394813 - RNA, 21 nt, Human
acuuaaguacuuaagaaguag

SEQ ID NO: 394814 - RNA, 22 nt, Human
agagcucacacuacaaacacac

SEQ ID NO: 394815 - RNA, 23 nt, Human
auacaguuuccuucuugguaaaa

SEQ ID NO: 394816 - RNA, 23 nt, Human
auagacuuuucuuuaagacaaaa

SEQ ID NO: 394817 - RNA, 22 nt, Human
aucucaaucaucucagccuuca

SEQ ID NO: 394818 - RNA, 21 nt, Human
auuuccacaaauugcacacug

SEQ ID NO: 394819 - RNA, 21 nt, Human
caaacaaaggcaaagacugaa

SEQ ID NO: 394820 - RNA, 23 nt, Human
caaacaaaggcaaagacugaagc

SEQ ID NO: 394821 - RNA, 24 nt, Human
caagagcucacacuacaaacacac

SEQ ID NO: 394822 - RNA, 22 nt, Human
cacaaaaaucccaccucacaga

SEQ ID NO: 394823 - RNA, 20 nt, Human
cacacagugcaaacaaaggc

SEQ ID NO: 394824 - RNA, 20 nt, Human
cacuauguuaacuuucaucu

SEQ ID NO: 394825 - RNA, 18 nt, Human
cagcaguucaaucugugc

SEQ ID NO: 394826 - RNA, 20 nt, Human
cagcaguucaaucugugccc

SEQ ID NO: 394827 - RNA, 21 nt, Human
caucuagaccuccaacuaguu

SEQ ID NO: 394828 - RNA, 21 nt, Human
ccacugcuguccauauucuug

SEQ ID NO: 394829 - RNA, 21 nt, Human
ccagauuuaggaugcuggcaa

SEQ ID NO: 394830 - RNA, 23 nt, Human
ccucacuacacagcuccccucuc

SEQ ID NO: 394831 - RNA, 21 nt, Human
cugcuccguguagcaaucuca

SEQ ID NO: 394832 - RNA, 19 nt, Human
cuucuugguaaaacuccag

SEQ ID NO: 394833 - RNA, 22 nt, Human
gaagauaaaugaguuggacuca

SEQ ID NO: 394834 - RNA, 18 nt, Human
gagcaucacauauugaaa

SEQ ID NO: 394835 - RNA, 18 nt, Human
gaguuggacucacacugc

SEQ ID NO: 394836 - RNA, 19 nt, Human
gaguugguauuggaaacug

SEQ ID NO: 394837 - RNA, 20 nt, Human
gcucacacuacaaacacaca

SEQ ID NO: 394838 - RNA, 20 nt, Human
ggauuauccccacuaucucc

SEQ ID NO: 394839 - RNA, 22 nt, Human
ggcaagcaauuuggucauagga

SEQ ID NO: 394840 - RNA, 21 nt, Human
ggcuuccagaaguagcccuag

SEQ ID NO: 394841 - RNA, 21 nt, Human
ggugaguugguauuggaaacu

SEQ ID NO: 394842 - RNA, 19 nt, Human
gguggugagggaacacaaa

SEQ ID NO: 394843 - RNA, 21 nt, Human
uaaagcaccucaucuagaccu

SEQ ID NO: 394844 - RNA, 18 nt, Human
uaaauuaucuaaauguca

SEQ ID NO: 394845 - RNA, 20 nt, Human
uacaaacacacaugagcauc

SEQ ID NO: 394846 - RNA, 20 nt, Human
uagaccuccaacuaguucag

SEQ ID NO: 394847 - RNA, 26 nt, Human
uagaccuccaacuaguucagcaguuc

SEQ ID NO: 394848 - RNA, 18 nt, Human
uaggaugcuggcaaaggc

SEQ ID NO: 394849 - RNA, 24 nt, Human
ucacacuacaaacacacaugagca

SEQ ID NO: 394850 - RNA, 21 nt, Human
ucagcaguucaaucugugccc

SEQ ID NO: 394851 - RNA, 25 nt, Human
ucaguaucccucacuacacagcucc

SEQ ID NO: 394852 - RNA, 19 nt, Human
ucgcuccuuucuagaagcu

SEQ ID NO: 394853 - RNA, 21 nt, Human
ucuauugggggcuuccagaag

SEQ ID NO: 394854 - RNA, 20 nt, Human
ucuccuggggacuuuucaug

SEQ ID NO: 394855 - RNA, 22 nt, Human
ucuucagggauuauccccacua

SEQ ID NO: 394856 - RNA, 20 nt, Human
ugaaaaagcuauaugaaaug

SEQ ID NO: 394857 - RNA, 19 nt, Human
ugaacacacagugcaaaca

SEQ ID NO: 394858 - RNA, 22 nt, Human
ugagaucauacaauuacugcag

SEQ ID NO: 394859 - RNA, 19 nt, Human
ugaguuggacucacacugc

SEQ ID NO: 394860 - RNA, 19 nt, Human
ugcccucaguaucccucac

SEQ ID NO: 394861 - RNA, 18 nt, Human
uggguggugagggaacac

SEQ ID NO: 394862 - RNA, 19 nt, Human
uguuucucuaguuuucacu

SEQ ID NO: 394863 - RNA, 21 nt, Human
uucagcaguucaaucugugcc

SEQ ID NO: 394864 - RNA, 21 nt, Human
uucucuaguuuucacugaaca

SEQ ID NO: 394865 - RNA, 22 nt, Human
aaaaaaaucagauaaacaaaug

SEQ ID NO: 394866 - RNA, 18 nt, Human
aaagaauacugagguacu

SEQ ID NO: 394867 - RNA, 20 nt, Human
aacauccugacaucucccuu

SEQ ID NO: 394868 - RNA, 22 nt, Human
aacucagucccccacuaauacc

SEQ ID NO: 394869 - RNA, 23 nt, Human
aacugccccucaaggaagaaggc

SEQ ID NO: 394870 - RNA, 21 nt, Human
aaggaagaaggcaggacucug

SEQ ID NO: 394871 - RNA, 18 nt, Human
aaggcuuccaguuuuucc

SEQ ID NO: 394872 - RNA, 22 nt, Human
aauaagaguccccccucccccc

SEQ ID NO: 394873 - RNA, 22 nt, Human
acaaaugaggggguacaauaug

SEQ ID NO: 394874 - RNA, 18 nt, Human
accacuccucccugcagu

SEQ ID NO: 394875 - RNA, 22 nt, Human
acccccagggcugggaccucca

SEQ ID NO: 394876 - RNA, 24 nt, Human
accucauccugucuccuucccuca

SEQ ID NO: 394877 - RNA, 21 nt, Human
acucugcccaagggugggggc

SEQ ID NO: 394878 - RNA, 19 nt, Human
acuggugguuccaagacaa

SEQ ID NO: 394879 - RNA, 23 nt, Human
aggagaccuggcuaggacagucc

SEQ ID NO: 394880 - RNA, 21 nt, Human
aggauaccugggcagggcagu

SEQ ID NO: 394881 - RNA, 18 nt, Human
aggggcaggggugaggcu

SEQ ID NO: 394882 - RNA, 24 nt, Human
agggugggggaaaaggcggggccu

SEQ ID NO: 394883 - RNA, 19 nt, Human
aucacaucuccucuucccc

SEQ ID NO: 394884 - RNA, 18 nt, Human
auccugucuccuucccuc

SEQ ID NO: 394885 - RNA, 25 nt, Human
auguugcugagggacaagggugggg

SEQ ID NO: 394886 - RNA, 25 nt, Human
caaaauaagaguccccccucccccc

SEQ ID NO: 394887 - RNA, 26 nt, Human
caaaguuaaaagcgcaucaaacacgc

SEQ ID NO: 394888 - RNA, 24 nt, Human
caaccuaaccccggacgaccgccc

SEQ ID NO: 394889 - RNA, 18 nt, Human
caagacaaaggauggagc

SEQ ID NO: 394890 - RNA, 25 nt, Human
cacuaauacccaucaccuucccaaa

SEQ ID NO: 394891 - RNA, 18 nt, Human
cacugccgccuccuccgc

SEQ ID NO: 394892 - RNA, 19 nt, Human
cacugcgcgggcgggcggc

SEQ ID NO: 394893 - RNA, 24 nt, Human
caggggcaggggugaggcugugau

SEQ ID NO: 394894 - RNA, 20 nt, Human
cauguugaaaaagaauacuu

SEQ ID NO: 394895 - RNA, 19 nt, Human
ccacugccgccuccuccgc

SEQ ID NO: 394896 - RNA, 18 nt, Human
ccaggggaggggugaggc

SEQ ID NO: 394897 - RNA, 22 nt, Human
ccauuacuugacuccucuucug

SEQ ID NO: 394898 - RNA, 26 nt, Human
cccagcucgccacugccgccuccucc

SEQ ID NO: 394899 - RNA, 21 nt, Human
cccagguuaaggcaggggagc

SEQ ID NO: 394900 - RNA, 24 nt, Human
ccccacuaauacccaucaccuucc

SEQ ID NO: 394901 - RNA, 18 nt, Human
ccccagcaauccaaagcu

SEQ ID NO: 394902 - RNA, 18 nt, Human
cccccagcucgccacugc

SEQ ID NO: 394903 - RNA, 21 nt, Human
cccccuaacaaaauaagaguc

SEQ ID NO: 394904 - RNA, 19 nt, Human
ccccggacgaccgcccucc

SEQ ID NO: 394905 - RNA, 24 nt, Human
ccccuaacaaaauaagaguccccc

SEQ ID NO: 394906 - RNA, 19 nt, Human
ccccucaaccuaaccccgg

SEQ ID NO: 394907 - RNA, 19 nt, Human
ccccuuccuucauccucuu

SEQ ID NO: 394908 - RNA, 19 nt, Human
ccgggcgagcccugccagg

SEQ ID NO: 394909 - RNA, 19 nt, Human
ccucaucugacuccuccuc

SEQ ID NO: 394910 - RNA, 20 nt, Human
ccuccaagcuucugccuugc

SEQ ID NO: 394911 - RNA, 24 nt, Human
ccuccaagcuucugccuugcuggg

SEQ ID NO: 394912 - RNA, 20 nt, Human
ccuccauuccuagaaggcca

SEQ ID NO: 394913 - RNA, 25 nt, Human
ccuccuccaagcuucugccuugcug

SEQ ID NO: 394914 - RNA, 23 nt, Human
ccucuugcccuacauguugaaaa

SEQ ID NO: 394915 - RNA, 18 nt, Human
ccugaaauaccugugcug

SEQ ID NO: 394916 - RNA, 23 nt, Human
ccuggccccagcaauccaaagcu

SEQ ID NO: 394917 - RNA, 21 nt, Human
ccugggcagagcagggcaggg

SEQ ID NO: 394918 - RNA, 18 nt, Human
ccuuggguguagguauga

SEQ ID NO: 394919 - RNA, 19 nt, Human
ccuuggguguagguaugag

SEQ ID NO: 394920 - RNA, 22 nt, Human
ccuuuggggaaggugcagggcc

SEQ ID NO: 394921 - RNA, 21 nt, Human
cgagaccucauccugucuccu

SEQ ID NO: 394922 - RNA, 23 nt, Human
cggccccgggcgagcccugccag

SEQ ID NO: 394923 - RNA, 18 nt, Human
cuaaccccggacgaccgc

SEQ ID NO: 394924 - RNA, 21 nt, Human
cucaaccuaaccccggacgac

SEQ ID NO: 394925 - RNA, 18 nt, Human
cucagagcccuccuaggu

SEQ ID NO: 394926 - RNA, 19 nt, Human
cucauccugucuccuuccc

SEQ ID NO: 394927 - RNA, 19 nt, Human
cucauguccuucuccagcc

SEQ ID NO: 394928 - RNA, 19 nt, Human
cucggcccggucccccuaa

SEQ ID NO: 394929 - RNA, 23 nt, Human
cugggggaaggcuuccaguuuuu

SEQ ID NO: 394930 - RNA, 23 nt, Human
gaacggaccgacgcccccccuca

SEQ ID NO: 394931 - RNA, 20 nt, Human
gaagggguggggccuggcuc

SEQ ID NO: 394932 - RNA, 20 nt, Human
gacuggugguuccaagacaa

SEQ ID NO: 394933 - RNA, 22 nt, Human
gaucucauguccuucuccagcc

SEQ ID NO: 394934 - RNA, 21 nt, Human
ggaagggguggggccuggcuc

SEQ ID NO: 394935 - RNA, 26 nt, Human
ggagcaacauccugacaucucccuuu

SEQ ID NO: 394936 - RNA, 18 nt, Human
ggagcaauaaaaaaauca

SEQ ID NO: 394937 - RNA, 19 nt, Human
ggagggugggggaaaaggc

SEQ ID NO: 394938 - RNA, 20 nt, Human
ggcggcgucggggagauggg

SEQ ID NO: 394939 - RNA, 20 nt, Human
gggaaggggcagagcuuaaa

SEQ ID NO: 394940 - RNA, 18 nt, Human
gggaagggguggggccug

SEQ ID NO: 394941 - RNA, 19 nt, Human
gggaagggguggggccugg

SEQ ID NO: 394942 - RNA, 23 nt, Human
gggagugucucuugauaacucug

SEQ ID NO: 394943 - RNA, 19 nt, Human
gggcagagcagggcagggu

SEQ ID NO: 394944 - RNA, 18 nt, Human
gggcaggguucaugggga

SEQ ID NO: 394945 - RNA, 21 nt, Human
gggcugugaucuccacaagca

SEQ ID NO: 394946 - RNA, 18 nt, Human
ggucagguuggucccagg

SEQ ID NO: 394947 - RNA, 22 nt, Human
gguggggccuggcuccuccauu

SEQ ID NO: 394948 - RNA, 21 nt, Human
guccuucuccagccuucuccu

SEQ ID NO: 394949 - RNA, 20 nt, Human
gugggggaaaaggcggggcc

SEQ ID NO: 394950 - RNA, 24 nt, Human
uaaacccccagggcugggaccucc

SEQ ID NO: 394951 - RNA, 27 nt, Human
uaacaaaauaagaguccccccuccccc

SEQ ID NO: 394952 - RNA, 20 nt, Human
uaaccccggacgaccgcccu

SEQ ID NO: 394953 - RNA, 21 nt, Human
uaagaguccccccucccccca

SEQ ID NO: 394954 - RNA, 25 nt, Human
uaagaguccccccuccccccagcuc

SEQ ID NO: 394955 - RNA, 19 nt, Human
uaaucuguccccuucccca

SEQ ID NO: 394956 - RNA, 22 nt, Human
uagaccccucaguauacccucc

SEQ ID NO: 394957 - RNA, 19 nt, Human
uaggacagucccuagggga

SEQ ID NO: 394958 - RNA, 24 nt, Human
uaggucagguuggucccagguuaa

SEQ ID NO: 394959 - RNA, 23 nt, Human
uauagggaagggguggggccugg

SEQ ID NO: 394960 - RNA, 18 nt, Human
ucacaaaccuauagaccc

SEQ ID NO: 394961 - RNA, 21 nt, Human
ucacaucuccucuucccccag

SEQ ID NO: 394962 - RNA, 21 nt, Human
ucaguauacccuccauggggc

SEQ ID NO: 394963 - RNA, 18 nt, Human
ucauggggaaggggcaga

SEQ ID NO: 394964 - RNA, 22 nt, Human
uccaagacaaaggauggagcaa

SEQ ID NO: 394965 - RNA, 22 nt, Human
uccauuacuugacuccucuucu

SEQ ID NO: 394966 - RNA, 22 nt, Human
uccccaagagcaagguuggcuc

SEQ ID NO: 394967 - RNA, 24 nt, Human
uccccagggggcaggcccugaucu

SEQ ID NO: 394968 - RNA, 23 nt, Human
ucccccacuaauacccaucaccu

SEQ ID NO: 394969 - RNA, 25 nt, Human
uccccccagcucgccacugccgccu

SEQ ID NO: 394970 - RNA, 20 nt, Human
ucccccgcccagaacggacc

SEQ ID NO: 394971 - RNA, 20 nt, Human
ucccucaccugggcaaggau

SEQ ID NO: 394972 - RNA, 22 nt, Human
uccuauagggaagggguggggc

SEQ ID NO: 394973 - RNA, 20 nt, Human
uccuccgcuaagccauggag

SEQ ID NO: 394974 - RNA, 18 nt, Human
ucugaaauaccugcacug

SEQ ID NO: 394975 - RNA, 21 nt, Human
ucugaaauaccugcacugggc

SEQ ID NO: 394976 - RNA, 22 nt, Human
ugaaauggggugauuccuccaa

SEQ ID NO: 394977 - RNA, 22 nt, Human
ugaaauuucauaaucugucccc

SEQ ID NO: 394978 - RNA, 19 nt, Human
ugaggggguacaauaugcu

SEQ ID NO: 394979 - RNA, 18 nt, Human
ugaggggugggaauggag

SEQ ID NO: 394980 - RNA, 19 nt, Human
ugagucaucccccgcccag

SEQ ID NO: 394981 - RNA, 24 nt, Human
ugcagggccucaucugacuccucc

SEQ ID NO: 394982 - RNA, 18 nt, Human
ugccugggcagagcaggg

SEQ ID NO: 394983 - RNA, 21 nt, Human
ugccugggcagagcagggcag

SEQ ID NO: 394984 - RNA, 19 nt, Human
ugcugagggacaagggugg

SEQ ID NO: 394985 - RNA, 20 nt, Human
ugcuuuuacaacccuccucc

SEQ ID NO: 394986 - RNA, 23 nt, Human
uggccugguccuacugauucuuu

SEQ ID NO: 394987 - RNA, 20 nt, Human
ugggaaagucccaggggagg

SEQ ID NO: 394988 - RNA, 23 nt, Human
ugggaaagucccaggggaggggu

SEQ ID NO: 394989 - RNA, 22 nt, Human
ugggcaaggaugagucccacag

SEQ ID NO: 394990 - RNA, 18 nt, Human
uggggaaggggcagagcu

SEQ ID NO: 394991 - RNA, 19 nt, Human
uggggccuggcuccuccau

SEQ ID NO: 394992 - RNA, 20 nt, Human
ugguuccaagacaaaggaug

SEQ ID NO: 394993 - RNA, 20 nt, Human
uugcugagggacaagggugg

SEQ ID NO: 394994 - RNA, 22 nt, Human
uugcugagggacaagggugggg

SEQ ID NO: 394995 - RNA, 20 nt, Human
uuucccaggagaccuggcua

SEQ ID NO: 394996 - RNA, 24 nt, Human
uuuuuuuuuuuuuuuuuuucaaag

SEQ ID NO: 394997 - RNA, 23 nt, Human
aacucccacccuccgaucagagg

SEQ ID NO: 394998 - RNA, 24 nt, Human
aagcacaguguuuacuaaaggcac

SEQ ID NO: 394999 - RNA, 21 nt, Human
aagccaggccccaagugcuga

SEQ ID NO: 395000 - RNA, 18 nt, Human
aauuuccauggucaucuc

SEQ ID NO: 395001 - RNA, 18 nt, Human
acaaagcacaguguuuac

SEQ ID NO: 395002 - RNA, 18 nt, Human
agcaccaaaguggggggu

SEQ ID NO: 395003 - RNA, 22 nt, Human
agccgaggaccaggcugcgggg

SEQ ID NO: 395004 - RNA, 18 nt, Human
aggagggaggcagggcag

SEQ ID NO: 395005 - RNA, 19 nt, Human
aggggccaacggggaggag

SEQ ID NO: 395006 - RNA, 18 nt, Human
aggggcugaaggccucuu

SEQ ID NO: 395007 - RNA, 19 nt, Human
aguccucacaacagccugu

SEQ ID NO: 395008 - RNA, 23 nt, Human
aucuccaccaggcccucuucuca

SEQ ID NO: 395009 - RNA, 20 nt, Human
cacccugccccucccugccc

SEQ ID NO: 395010 - RNA, 24 nt, Human
cacccuuaguccucacaacagccu

SEQ ID NO: 395011 - RNA, 21 nt, Human
caccugugggagagccgagga

SEQ ID NO: 395012 - RNA, 23 nt, Human
cagacaggcacuaaguccaaaca

SEQ ID NO: 395013 - RNA, 21 nt, Human
cagccccaagccaggccccaa

SEQ ID NO: 395014 - RNA, 18 nt, Human
cagcccccaggccggccc

SEQ ID NO: 395015 - RNA, 19 nt, Human
cagcccccgcgcucacacc

SEQ ID NO: 395016 - RNA, 23 nt, Human
cagcccccgcgcucacaccaccu

SEQ ID NO: 395017 - RNA, 22 nt, Human
caggcugccagacaggcacuaa

SEQ ID NO: 395018 - RNA, 18 nt, Human
ccaccaggcccucuucuc

SEQ ID NO: 395019 - RNA, 20 nt, Human
ccagcccccaggccggcccc

SEQ ID NO: 395020 - RNA, 21 nt, Human
ccagcccccaggccggccccu

SEQ ID NO: 395021 - RNA, 19 nt, Human
ccaggccccaagugcugac

SEQ ID NO: 395022 - RNA, 20 nt, Human
ccagggcagccccaagccag

SEQ ID NO: 395023 - RNA, 18 nt, Human
ccauggucaucuccaggg

SEQ ID NO: 395024 - RNA, 21 nt, Human
cccagcccccaggccggcccc

SEQ ID NO: 395025 - RNA, 23 nt, Human
cccauguaccaggcacugccgca

SEQ ID NO: 395026 - RNA, 22 nt, Human
ccccaggccggccccuguuccc

SEQ ID NO: 395027 - RNA, 19 nt, Human
cccccaggaccaguugccu

SEQ ID NO: 395028 - RNA, 20 nt, Human
cccccgcgcucacaccaccu

SEQ ID NO: 395029 - RNA, 26 nt, Human
cccccgcgcucacaccaccuggugga

SEQ ID NO: 395030 - RNA, 22 nt, Human
ccccucccugccccgcgauucc

SEQ ID NO: 395031 - RNA, 20 nt, Human
ccccuggcccucccagcccc

SEQ ID NO: 395032 - RNA, 19 nt, Human
cccugaacucccacccucc

SEQ ID NO: 395033 - RNA, 21 nt, Human
ccugaagggugggagggaggu

SEQ ID NO: 395034 - RNA, 22 nt, Human
cgaucagaggaggccaacccaa

SEQ ID NO: 395035 - RNA, 23 nt, Human
cgaucagaggaggccaacccaau

SEQ ID NO: 395036 - RNA, 24 nt, Human
cggcagugaccccucccgcuucug

SEQ ID NO: 395037 - RNA, 25 nt, Human
cggcagugaccccucccgcuucugg

SEQ ID NO: 395038 - RNA, 21 nt, Human
cuagaacacccugccccuccc

SEQ ID NO: 395039 - RNA, 22 nt, Human
cucccagcccccaggccggccc

SEQ ID NO: 395040 - RNA, 20 nt, Human
cugagcacccccaggaccag

SEQ ID NO: 395041 - RNA, 18 nt, Human
cugagucccaaaaaggca

SEQ ID NO: 395042 - RNA, 21 nt, Human
gaggaggccaacccaauuucc

SEQ ID NO: 395043 - RNA, 21 nt, Human
gcagugaccccucccgcuucu

SEQ ID NO: 395044 - RNA, 18 nt, Human
gccccgcgauuccaucuc

SEQ ID NO: 395045 - RNA, 19 nt, Human
gccgaggaccaggcugcgg

SEQ ID NO: 395046 - RNA, 21 nt, Human
ggaacccugaacucccacccu

SEQ ID NO: 395047 - RNA, 24 nt, Human
ggagcuucccgaaccccucaagca

SEQ ID NO: 395048 - RNA, 20 nt, Human
ggaggagggaggcagggcag

SEQ ID NO: 395049 - RNA, 19 nt, Human
ggauccacacuguacaugc

SEQ ID NO: 395050 - RNA, 19 nt, Human
ggcacaggggcagccaggg

SEQ ID NO: 395051 - RNA, 22 nt, Human
ggcgcuggcucccauguaccag

SEQ ID NO: 395052 - RNA, 22 nt, Human
gggcagcugcucuuccggcagu

SEQ ID NO: 395053 - RNA, 18 nt, Human
gggcucagaagacaggga

SEQ ID NO: 395054 - RNA, 19 nt, Human
guggagagcuauuagcacc

SEQ ID NO: 395055 - RNA, 20 nt, Human
uacaugcauauauguucacu

SEQ ID NO: 395056 - RNA, 28 nt, Human
uaccaggcacugccgcacccuuaguccu

SEQ ID NO: 395057 - RNA, 18 nt, Human
ucaccucuagaacacccu

SEQ ID NO: 395058 - RNA, 18 nt, Human
uccauggucaucuccagg

SEQ ID NO: 395059 - RNA, 19 nt, Human
uccauggucaucuccaggg

SEQ ID NO: 395060 - RNA, 23 nt, Human
ucucccuccucucagaugaggau

SEQ ID NO: 395061 - RNA, 21 nt, Human
ucugagucccaaaaaggcagg

SEQ ID NO: 395062 - RNA, 22 nt, Human
ucugggaacccugaacucccac

SEQ ID NO: 395063 - RNA, 18 nt, Human
ugaccccacaggcugccu

SEQ ID NO: 395064 - RNA, 18 nt, Human
ugacugcccuccaucccc

SEQ ID NO: 395065 - RNA, 21 nt, Human
ugccccuggcccucccagccc

SEQ ID NO: 395066 - RNA, 22 nt, Human
ugccccuggcccucccagcccc

SEQ ID NO: 395067 - RNA, 22 nt, Human
ugcccugggggugcuucuccug

SEQ ID NO: 395068 - RNA, 23 nt, Human
uggcagcccccgcgcucacacca

SEQ ID NO: 395069 - RNA, 20 nt, Human
ugggagagccgaggaccagg

SEQ ID NO: 395070 - RNA, 20 nt, Human
ugggagggaggugccccugg

SEQ ID NO: 395071 - RNA, 21 nt, Human
ugggagggaggugccccugga

SEQ ID NO: 395072 - RNA, 22 nt, Human
uggggggugcccaccuguggga

SEQ ID NO: 395073 - RNA, 21 nt, Human
uguaccaggcacugccgcacc

SEQ ID NO: 395074 - RNA, 20 nt, Human
uuagcaccaaaguggggggu

SEQ ID NO: 395075 - RNA, 21 nt, Human
uuaguccucacaacagccugu

SEQ ID NO: 395076 - RNA, 21 nt, Human
aggaugcaggcagaucccugc

SEQ ID NO: 395077 - RNA, 23 nt, Human
cacagcugcagaagcgugucuga

SEQ ID NO: 395078 - RNA, 21 nt, Human
caccgugcuggggacggcacc

SEQ ID NO: 395079 - RNA, 20 nt, Human
caggaugcaggcagaucccu

SEQ ID NO: 395080 - RNA, 22 nt, Human
cgucaggaugcaggcagauccc

SEQ ID NO: 395081 - RNA, 21 nt, Human
ugagccgaggcacagcugcag

SEQ ID NO: 395082 - RNA, 21 nt, Human
uguccgguggagguggcagcc

SEQ ID NO: 395083 - RNA, 19 nt, Human
aaagaaacaaaacccaggg

SEQ ID NO: 395084 - RNA, 27 nt, Human
aagcacaaccucagaaagucucaggca

SEQ ID NO: 395085 - RNA, 19 nt, Human
aauguuuacuguacaaaga

SEQ ID NO: 395086 - RNA, 18 nt, Human
acagaaaagcugagauga

SEQ ID NO: 395087 - RNA, 20 nt, Human
acccucccgcccucucccac

SEQ ID NO: 395088 - RNA, 21 nt, Human
acugcagcuccuuagggaguc

SEQ ID NO: 395089 - RNA, 22 nt, Human
agaaaagcugagaugaacagug

SEQ ID NO: 395090 - RNA, 21 nt, Human
agaaagucucaggcacgaaga

SEQ ID NO: 395091 - RNA, 18 nt, Human
aggaagcggcacuuacag

SEQ ID NO: 395092 - RNA, 18 nt, Human
caaagaaacaaaacccag

SEQ ID NO: 395093 - RNA, 19 nt, Human
caccaagaaagacuuguga

SEQ ID NO: 395094 - RNA, 23 nt, Human
cacccucccgcccucucccacga

SEQ ID NO: 395095 - RNA, 21 nt, Human
cagacaguuuuucucucccaa

SEQ ID NO: 395096 - RNA, 23 nt, Human
cagacucuccccugacacccucc

SEQ ID NO: 395097 - RNA, 18 nt, Human
cagcaagcgguaagggcc

SEQ ID NO: 395098 - RNA, 18 nt, Human
cagcagaaauaaagcaca

SEQ ID NO: 395099 - RNA, 18 nt, Human
caguucagcccccacugu

SEQ ID NO: 395100 - RNA, 22 nt, Human
ccucccgcccucucccacgacg

SEQ ID NO: 395101 - RNA, 24 nt, Human
cgggcaagggugcuccgagccucg

SEQ ID NO: 395102 - RNA, 18 nt, Human
cucucccaaaggggagag

SEQ ID NO: 395103 - RNA, 26 nt, Human
cugacacccucccgcccucucccacg

SEQ ID NO: 395104 - RNA, 24 nt, Human
cuuugucaagcucccagacaguuu

SEQ ID NO: 395105 - RNA, 21 nt, Human
gacucuccccugacacccucc

SEQ ID NO: 395106 - RNA, 23 nt, Human
gacuugugauuuuugaaaacuuc

SEQ ID NO: 395107 - RNA, 23 nt, Human
gcacaaccucagaaagucucagg

SEQ ID NO: 395108 - RNA, 24 nt, Human
gcacaaccucagaaagucucaggc

SEQ ID NO: 395109 - RNA, 21 nt, Human
ggagaggucaguucagccccc

SEQ ID NO: 395110 - RNA, 23 nt, Human
ggccgggggcagcuggaggugcc

SEQ ID NO: 395111 - RNA, 18 nt, Human
ggguggagcaugggaccu

SEQ ID NO: 395112 - RNA, 18 nt, Human
guuccuaggcuuuccugu

SEQ ID NO: 395113 - RNA, 30 nt, Human
uagggagucuuuuccugcccuugaggccuu

SEQ ID NO: 395114 - RNA, 18 nt, Human
ucaagcucccagacaguu

SEQ ID NO: 395115 - RNA, 20 nt, Human
ucagcccccacuguuuuggc

SEQ ID NO: 395116 - RNA, 21 nt, Human
ugaaauaaaggaccacuuugg

SEQ ID NO: 395117 - RNA, 22 nt, Human
ugaacuuucagcagaagcgcuu

SEQ ID NO: 395118 - RNA, 18 nt, Human
ugacgugggugccagucu

SEQ ID NO: 395119 - RNA, 20 nt, Human
ugagaugaacagugccuggc

SEQ ID NO: 395120 - RNA, 23 nt, Human
uggaagacaguuuuauuggcuug

SEQ ID NO: 395121 - RNA, 21 nt, Human
uucaaaauauccuugcaugca

SEQ ID NO: 395122 - RNA, 21 nt, Human
aaaaaauguccuuucgccccu

SEQ ID NO: 395123 - RNA, 27 nt, Human
aaaaagccaaguaagauggugggcacc

SEQ ID NO: 395124 - RNA, 21 nt, Human
aagaacagaggcgggagcaag

SEQ ID NO: 395125 - RNA, 22 nt, Human
agaaagucaagucaaucacuuu

SEQ ID NO: 395126 - RNA, 22 nt, Human
auaaaaaaugcucugcuuuuaa

SEQ ID NO: 395127 - RNA, 18 nt, Human
caacaaugauaucauaaa

SEQ ID NO: 395128 - RNA, 22 nt, Human
caaguaagauggcuaaaccuca

SEQ ID NO: 395129 - RNA, 21 nt, Human
cccaacaagccuagcgagaac

SEQ ID NO: 395130 - RNA, 21 nt, Human
ccuagcauuuuaauauccucc

SEQ ID NO: 395131 - RNA, 20 nt, Human
cgggagcaagaaaaaaaaaa

SEQ ID NO: 395132 - RNA, 24 nt, Human
cgggagcaagaaaaaaaaaaaugu

SEQ ID NO: 395133 - RNA, 22 nt, Human
cuccggacaagggaagcuagaa

SEQ ID NO: 395134 - RNA, 22 nt, Human
gaacagaggcgggagcaagaaa

SEQ ID NO: 395135 - RNA, 21 nt, Human
gagcaagaaaaaaaaaaaugu

SEQ ID NO: 395136 - RNA, 19 nt, Human
gcccccucgguugcccuuc

SEQ ID NO: 395137 - RNA, 21 nt, Human
gcgaggccacuggacuggggc

SEQ ID NO: 395138 - RNA, 21 nt, Human
gcgggccccggccaaucgcgc

SEQ ID NO: 395139 - RNA, 19 nt, Human
gcucuguacguggcaggug

SEQ ID NO: 395140 - RNA, 23 nt, Human
ggaagaacagaggcgggagcaag

SEQ ID NO: 395141 - RNA, 22 nt, Human
ggacuggggcgucgcggggagg

SEQ ID NO: 395142 - RNA, 24 nt, Human
ggggaggcgguggucacggccccc

SEQ ID NO: 395143 - RNA, 24 nt, Human
guacuggagucuuuugggaggcca

SEQ ID NO: 395144 - RNA, 24 nt, Human
uaaaaagccaaguaagauggcuaa

SEQ ID NO: 395145 - RNA, 24 nt, Human
uaacaccaacaaugauaucauaaa

SEQ ID NO: 395146 - RNA, 20 nt, Human
uaacuaagaagcugcuacau

SEQ ID NO: 395147 - RNA, 18 nt, Human
uaagauggcuaaaccuca

SEQ ID NO: 395148 - RNA, 18 nt, Human
uagagaaagacggcuugc

SEQ ID NO: 395149 - RNA, 23 nt, Human
uagagaaagacggcuugcggagg

SEQ ID NO: 395150 - RNA, 22 nt, Human
uauuaaccuaucaucaguguua

SEQ ID NO: 395151 - RNA, 20 nt, Human
ucuuuugggaggccaauagc

SEQ ID NO: 395152 - RNA, 22 nt, Human
ugaaugggcggacgcgaggcca

SEQ ID NO: 395153 - RNA, 20 nt, Human
ugacccaacaagccuagcga

SEQ ID NO: 395154 - RNA, 22 nt, Human
ugacccaacaagccuagcgaga

SEQ ID NO: 395155 - RNA, 20 nt, Human
uggcuaaaccucacccuagc

SEQ ID NO: 395156 - RNA, 22 nt, Human
uggcuaaaccucacccuagcau

SEQ ID NO: 395157 - RNA, 22 nt, Human
ugggcucuguacguggcaggug

SEQ ID NO: 395158 - RNA, 21 nt, Human
uggggcgucgcggggaggcgg

SEQ ID NO: 395159 - RNA, 18 nt, Human
uuuuuuuuuuuuuuuuug

SEQ ID NO: 395160 - RNA, 20 nt, Human
uuuuuuuuuuuuuuuuuugg

SEQ ID NO: 395161 - RNA, 23 nt, Human
aaaucaggaauacgaccccaaga

SEQ ID NO: 395162 - RNA, 21 nt, Human
aaccauaaaggcaaauaagcc

SEQ ID NO: 395163 - RNA, 21 nt, Human
aagccauaaagacaaacaaga

SEQ ID NO: 395164 - RNA, 23 nt, Human
aagugacuuguauuaauaaaaac

SEQ ID NO: 395165 - RNA, 22 nt, Human
aauaagccauaaagacaaacaa

SEQ ID NO: 395166 - RNA, 22 nt, Human
aauucagucucacaaacaguug

SEQ ID NO: 395167 - RNA, 23 nt, Human
acaaccauaaaggcaaauaagcc

SEQ ID NO: 395168 - RNA, 20 nt, Human
accccaagaaaugagugagu

SEQ ID NO: 395169 - RNA, 20 nt, Human
agccauaaagacaaacaaga

SEQ ID NO: 395170 - RNA, 25 nt, Human
auaaaaacuggugaauaaaucacca

SEQ ID NO: 395171 - RNA, 21 nt, Human
caaccauaaaggcaaauaagc

SEQ ID NO: 395172 - RNA, 20 nt, Human
cucacaaacaguugaaccau

SEQ ID NO: 395173 - RNA, 21 nt, Human
uaaaggcaaauaagccauaaa

SEQ ID NO: 395174 - RNA, 20 nt, Human
uacgaccccaagaaaugagg

SEQ ID NO: 395175 - RNA, 21 nt, Human
ugaaaucaggaauacgacccc

SEQ ID NO: 395176 - RNA, 20 nt, Human
ugaauaaaucaccaaugaag

SEQ ID NO: 395177 - RNA, 22 nt, Human
ugauccucuucugaaaucagga

SEQ ID NO: 395178 - RNA, 23 nt, Human
ugauccucuucugaaaucaggaa

SEQ ID NO: 395179 - RNA, 23 nt, Human
ugauuuguuuccucaugcuguca

SEQ ID NO: 395180 - RNA, 19 nt, Human
ugguagacucacauuugaa

SEQ ID NO: 395181 - RNA, 24 nt, Human
aggagcucuugacugggggacggg

SEQ ID NO: 395182 - RNA, 23 nt, Human
cucugagccaccucccugacccu

SEQ ID NO: 395183 - RNA, 21 nt, Human
cuuguguccccuccugaagcc

SEQ ID NO: 395184 - RNA, 25 nt, Human
gaggagcucuugacugggggacggg

SEQ ID NO: 395185 - RNA, 23 nt, Human
gcucuugacugggggacggggau

SEQ ID NO: 395186 - RNA, 19 nt, Human
ucccugacccugaaucauu

SEQ ID NO: 395187 - RNA, 22 nt, Human
ucccugacccugaaucauucaa

SEQ ID NO: 395188 - RNA, 27 nt, Human
ugagagguggacucugagccaccuccc

SEQ ID NO: 395189 - RNA, 20 nt, Human
uggacucugagccaccuccc

SEQ ID NO: 395190 - RNA, 19 nt, Human
uucaagcgaggagcagagg

SEQ ID NO: 395191 - RNA, 21 nt, Human
uuguguccccuccugaagccu

SEQ ID NO: 395192 - RNA, 19 nt, Human
aaaagauagggaauuauag

SEQ ID NO: 395193 - RNA, 20 nt, Human
aaacugguucucuuucaaug

SEQ ID NO: 395194 - RNA, 19 nt, Human
aaaggacagaaagcucucc

SEQ ID NO: 395195 - RNA, 22 nt, Human
aacauuauaaauguaugcugcu

SEQ ID NO: 395196 - RNA, 23 nt, Human
aaccacuuacaaccuucagcaga

SEQ ID NO: 395197 - RNA, 22 nt, Human
aaccauaaagguaacaaaaacc

SEQ ID NO: 395198 - RNA, 21 nt, Human
aacugguuucugacauuuuca

SEQ ID NO: 395199 - RNA, 24 nt, Human
aagacaucucaagaccaggagcuu

SEQ ID NO: 395200 - RNA, 19 nt, Human
aagaugucauugcaugaag

SEQ ID NO: 395201 - RNA, 18 nt, Human
accacgaauggguaggca

SEQ ID NO: 395202 - RNA, 21 nt, Human
accacgaauggguaggcagac

SEQ ID NO: 395203 - RNA, 23 nt, Human
acccaaugcuuaaugaccacaaa

SEQ ID NO: 395204 - RNA, 22 nt, Human
acugcauuuaggaaaaccagca

SEQ ID NO: 395205 - RNA, 21 nt, Human
agaaacaaaaauaacaaagaa

SEQ ID NO: 395206 - RNA, 22 nt, Human
agacacugcucccgauaaugug

SEQ ID NO: 395207 - RNA, 19 nt, Human
agcccuuaggauucagaga

SEQ ID NO: 395208 - RNA, 20 nt, Human
aggaaagaggcaguucccau

SEQ ID NO: 395209 - RNA, 23 nt, Human
aggaggccguuuccaacugcccu

SEQ ID NO: 395210 - RNA, 23 nt, Human
aggcagacgugucagaccuucag

SEQ ID NO: 395211 - RNA, 21 nt, Human
aggcuuaugggggaagggaca

SEQ ID NO: 395212 - RNA, 19 nt, Human
aggggacucuccuucccca

SEQ ID NO: 395213 - RNA, 23 nt, Human
aguaacucaacccuaacuguaga

SEQ ID NO: 395214 - RNA, 23 nt, Human
agugguugaauuuacccacccaa

SEQ ID NO: 395215 - RNA, 21 nt, Human
augacaaacagcuguacuaca

SEQ ID NO: 395216 - RNA, 22 nt, Human
caaaguaagcgaaccacuuaca

SEQ ID NO: 395217 - RNA, 21 nt, Human
caacaggaaagaggcaguucc

SEQ ID NO: 395218 - RNA, 23 nt, Human
caagaccaggagcuugucacuag

SEQ ID NO: 395219 - RNA, 22 nt, Human
cacaaaauguuucugcaacuaa

SEQ ID NO: 395220 - RNA, 25 nt, Human
cacaagucuagaaaccagacuaccc

SEQ ID NO: 395221 - RNA, 21 nt, Human
cacucacacuagcgcguccuc

SEQ ID NO: 395222 - RNA, 18 nt, Human
cacugcauuuaggaaaac

SEQ ID NO: 395223 - RNA, 23 nt, Human
cacugcauuuaggaaaaccagca

SEQ ID NO: 395224 - RNA, 18 nt, Human
cacuuagcuacgcuaaau

SEQ ID NO: 395225 - RNA, 22 nt, Human
cagcacaagucuagaaaccaga

SEQ ID NO: 395226 - RNA, 20 nt, Human
cagugccaaaaggacagaaa

SEQ ID NO: 395227 - RNA, 21 nt, Human
caucauggacauuuuuuaagu

SEQ ID NO: 395228 - RNA, 20 nt, Human
caugaagaaaauuaugggaa

SEQ ID NO: 395229 - RNA, 28 nt, Human
cauuacaaagcacuuaaaauucuagaga

SEQ ID NO: 395230 - RNA, 18 nt, Human
ccaaaaggacagaaagcu

SEQ ID NO: 395231 - RNA, 22 nt, Human
ccaaaaggacagaaagcucucc

SEQ ID NO: 395232 - RNA, 21 nt, Human
ccaacugcccuaugacaaaca

SEQ ID NO: 395233 - RNA, 18 nt, Human
ccaaugcuuaaugaccac

SEQ ID NO: 395234 - RNA, 22 nt, Human
ccacagccccuuccccacaggc

SEQ ID NO: 395235 - RNA, 19 nt, Human
ccacaggcucgcggccccg

SEQ ID NO: 395236 - RNA, 19 nt, Human
ccauaaagguaacaaaaac

SEQ ID NO: 395237 - RNA, 21 nt, Human
ccccgccuggggccgcgaccg

SEQ ID NO: 395238 - RNA, 21 nt, Human
ccgcucgaggcgccgccacag

SEQ ID NO: 395239 - RNA, 22 nt, Human
ccuacauuuaauugaucaccac

SEQ ID NO: 395240 - RNA, 22 nt, Human
ccuacuccuuaacgagaagaca

SEQ ID NO: 395241 - RNA, 18 nt, Human
ccugcagccgcucgaggc

SEQ ID NO: 395242 - RNA, 21 nt, Human
cgagaagacaucucaagacca

SEQ ID NO: 395243 - RNA, 24 nt, Human
cgagaagacaucucaagaccagga

SEQ ID NO: 395244 - RNA, 21 nt, Human
cgaggcgccgccacagccccu

SEQ ID NO: 395245 - RNA, 19 nt, Human
cgccacagccccuucccca

SEQ ID NO: 395246 - RNA, 23 nt, Human
cgccacagccccuuccccacagg

SEQ ID NO: 395247 - RNA, 27 nt, Human
cgccgccacagccccuuccccacaggc

SEQ ID NO: 395248 - RNA, 23 nt, Human
cuccagccagccccgcaggauga

SEQ ID NO: 395249 - RNA, 20 nt, Human
cuccccgugcggcucccuaa

SEQ ID NO: 395250 - RNA, 24 nt, Human
cugccuaaagacaucuaguaguac

SEQ ID NO: 395251 - RNA, 20 nt, Human
gaaccugaagagacccuaug

SEQ ID NO: 395252 - RNA, 23 nt, Human
gaagaaacaaaaauaacaaagaa

SEQ ID NO: 395253 - RNA, 22 nt, Human
gagucugcaacuaaacaccuga

SEQ ID NO: 395254 - RNA, 18 nt, Human
gaucacucaaaguaagcg

SEQ ID NO: 395255 - RNA, 23 nt, Human
gcaagaaaacaagcccaucucuu

SEQ ID NO: 395256 - RNA, 20 nt, Human
gcaggaugaagggaggacac

SEQ ID NO: 395257 - RNA, 27 nt, Human
gcccccaaaccuucuauacaaaguccc

SEQ ID NO: 395258 - RNA, 22 nt, Human
gccgccacagccccuuccccac

SEQ ID NO: 395259 - RNA, 20 nt, Human
gcuucugguccccucuuuuc

SEQ ID NO: 395260 - RNA, 21 nt, Human
ggaaaagaaaauauacuaagu

SEQ ID NO: 395261 - RNA, 25 nt, Human
ggaccuggagaaaccauaaagguag

SEQ ID NO: 395262 - RNA, 22 nt, Human
gggacagaggaaaagaaaauau

SEQ ID NO: 395263 - RNA, 20 nt, Human
guaacaugcaaauaauguga

SEQ ID NO: 395264 - RNA, 20 nt, Human
guagaaaaggguuuucugaa

SEQ ID NO: 395265 - RNA, 23 nt, Human
guaguaccaagaugaugggaugg

SEQ ID NO: 395266 - RNA, 25 nt, Human
uaaagagacugugaguagugacaca

SEQ ID NO: 395267 - RNA, 18 nt, Human
uaacaacaacaggaaaga

SEQ ID NO: 395268 - RNA, 21 nt, Human
uaacacccgaaccaggaaucu

SEQ ID NO: 395269 - RNA, 19 nt, Human
uaagaaccugaagagaccc

SEQ ID NO: 395270 - RNA, 23 nt, Human
uacaaagcacuuaaaauucuaga

SEQ ID NO: 395271 - RNA, 23 nt, Human
uacuacacguuuauaugaugguu

SEQ ID NO: 395272 - RNA, 18 nt, Human
uaggaaguaacucaaccc

SEQ ID NO: 395273 - RNA, 22 nt, Human
uaggaaguaacucaacccuaac

SEQ ID NO: 395274 - RNA, 21 nt, Human
uauggaagacacugcucccga

SEQ ID NO: 395275 - RNA, 21 nt, Human
uauggaaggcacugcuuccga

SEQ ID NO: 395276 - RNA, 21 nt, Human
ucauggacauuuuuuaagugg

SEQ ID NO: 395277 - RNA, 19 nt, Human
uccaaaaggcccuacuccu

SEQ ID NO: 395278 - RNA, 18 nt, Human
uccaagauaaaagaggag

SEQ ID NO: 395279 - RNA, 21 nt, Human
uccaagauaaaagaggagauu

SEQ ID NO: 395280 - RNA, 22 nt, Human
ucccggccgccccgccuggggc

SEQ ID NO: 395281 - RNA, 24 nt, Human
ucccggccgccccgccuggggccg

SEQ ID NO: 395282 - RNA, 21 nt, Human
uccgcacuaaguuuauaggag

SEQ ID NO: 395283 - RNA, 21 nt, Human
uccuuccccacagcccccaaa

SEQ ID NO: 395284 - RNA, 22 nt, Human
ucugcaacuaaacaccugaaac

SEQ ID NO: 395285 - RNA, 22 nt, Human
ugaagagacucacugcugcaaa

SEQ ID NO: 395286 - RNA, 20 nt, Human
ugaagggaggacacgaggga

SEQ ID NO: 395287 - RNA, 21 nt, Human
ugagucugcaacuaaacaccu

SEQ ID NO: 395288 - RNA, 18 nt, Human
ugcuggacagcaccggag

SEQ ID NO: 395289 - RNA, 20 nt, Human
uggaaaggcuuagaucucau

SEQ ID NO: 395290 - RNA, 21 nt, Human
uggaagaaacaaaaauaacaa

SEQ ID NO: 395291 - RNA, 20 nt, Human
uggcaagaaaacaagcccau

SEQ ID NO: 395292 - RNA, 26 nt, Human
ugggauggaauuuuaacaucagguuu

SEQ ID NO: 395293 - RNA, 18 nt, Human
uguacuacacguuuauau

SEQ ID NO: 395294 - RNA, 24 nt, Human
uuagauacuaacgaucuucaagcu

SEQ ID NO: 395295 - RNA, 21 nt, Human
uuauggaaaggcuuagaucuu

SEQ ID NO: 395296 - RNA, 21 nt, Human
uucaaugugcuuuggaagaaa

SEQ ID NO: 395297 - RNA, 24 nt, Human
uucagaccucauuggcaagaaaac

SEQ ID NO: 395298 - RNA, 23 nt, Human
uuccaguaucuguuggguuuuau

SEQ ID NO: 395299 - RNA, 19 nt, Human
uucccgcuccccgugcggc

SEQ ID NO: 395300 - RNA, 24 nt, Human
uuggagaggucuuucaaccuggua

SEQ ID NO: 395301 - RNA, 23 nt, Human
uuggcuucugguccccucuuuuc

SEQ ID NO: 395302 - RNA, 20 nt, Human
uuucauaaaugacacugagg

SEQ ID NO: 395303 - RNA, 21 nt, Human
uuucccuaggaggccguuucc

SEQ ID NO: 395304 - RNA, 24 nt, Human
aaguggcuauuuuagagaaaaaga

SEQ ID NO: 395305 - RNA, 22 nt, Human
agagaaaaagaugaccauagug

SEQ ID NO: 395306 - RNA, 24 nt, Human
agguuuuuggggagcucaagggcu

SEQ ID NO: 395307 - RNA, 18 nt, Human
ggcagccucgggugaggu

SEQ ID NO: 395308 - RNA, 21 nt, Human
uagauacuuuauugaagguaa

SEQ ID NO: 395309 - RNA, 22 nt, Human
ugagguuuuuggggagcucaag

SEQ ID NO: 395310 - RNA, 19 nt, Human
uuuagagaaaaagaugacc

SEQ ID NO: 395311 - RNA, 18 nt, Human
agcgcgggcgcgggagag

SEQ ID NO: 395312 - RNA, 21 nt, Human
aggaagccgcucccacagucc

SEQ ID NO: 395313 - RNA, 22 nt, Human
aucucauaaggcaauuucuuuc

SEQ ID NO: 395314 - RNA, 26 nt, Human
caagcgcggaauccaaggaagccgcu

SEQ ID NO: 395315 - RNA, 23 nt, Human
ccggggccggaagcgcgggcgcg

SEQ ID NO: 395316 - RNA, 22 nt, Human
cgacgcagcgguuggccaaagc

SEQ ID NO: 395317 - RNA, 19 nt, Human
cgcgcgggcgcgccggggc

SEQ ID NO: 395318 - RNA, 23 nt, Human
gagagacgcggcgccaagggggu

SEQ ID NO: 395319 - RNA, 22 nt, Human
ggaauccaaggaagccgcuccc

SEQ ID NO: 395320 - RNA, 22 nt, Human
gggcccagggacgacgcagcgg

SEQ ID NO: 395321 - RNA, 25 nt, Human
uaaaagaaaaaaacaacuuaaaugc

SEQ ID NO: 395322 - RNA, 21 nt, Human
uaaaugcauacauacagaaua

SEQ ID NO: 395323 - RNA, 24 nt, Human
uacagaauagaauacacuuacuua

SEQ ID NO: 395324 - RNA, 20 nt, Human
ucccacaguccucgcgcggg

SEQ ID NO: 395325 - RNA, 23 nt, Human
ugcauacauacagaauagaauac

SEQ ID NO: 395326 - RNA, 21 nt, Human
uggccaaagcgcgacgccgag

SEQ ID NO: 395327 - RNA, 21 nt, Human
aaaaagcaacuggugacccau

SEQ ID NO: 395328 - RNA, 20 nt, Human
aaaaauccccaaauaagcca

SEQ ID NO: 395329 - RNA, 19 nt, Human
aaccaagcaacaaaaugga

SEQ ID NO: 395330 - RNA, 24 nt, Human
aagaaauauauagccuggaaucca

SEQ ID NO: 395331 - RNA, 19 nt, Human
aagacccacauaguggagg

SEQ ID NO: 395332 - RNA, 18 nt, Human
aagacuuuucccaagccu

SEQ ID NO: 395333 - RNA, 20 nt, Human
aagagaucaaagcccagaac

SEQ ID NO: 395334 - RNA, 21 nt, Human
aagcaacaaaccaaccaagca

SEQ ID NO: 395335 - RNA, 19 nt, Human
aaggcacuucuagggaggc

SEQ ID NO: 395336 - RNA, 22 nt, Human
aagugcuucagguguggcauug

SEQ ID NO: 395337 - RNA, 18 nt, Human
aauggaaaauaaaugacu

SEQ ID NO: 395338 - RNA, 19 nt, Human
acaaaccaaccaagcaaca

SEQ ID NO: 395339 - RNA, 21 nt, Human
acccagccucugguuccaucu

SEQ ID NO: 395340 - RNA, 19 nt, Human
accugcaaaacacaauccc

SEQ ID NO: 395341 - RNA, 26 nt, Human
agaaaucuccuguguugggcagaauu

SEQ ID NO: 395342 - RNA, 20 nt, Human
agaacauucacagacacuaa

SEQ ID NO: 395343 - RNA, 21 nt, Human
agaaccaacuagagggcaggg

SEQ ID NO: 395344 - RNA, 22 nt, Human
agacacacacacucuuccucuc

SEQ ID NO: 395345 - RNA, 26 nt, Human
agagggcaggggucuccugagcagga

SEQ ID NO: 395346 - RNA, 18 nt, Human
agaggucuaaaaaccagu

SEQ ID NO: 395347 - RNA, 20 nt, Human
agaucaaagcccagaaccaa

SEQ ID NO: 395348 - RNA, 21 nt, Human
agccggggcccugucuuccag

SEQ ID NO: 395349 - RNA, 18 nt, Human
aggaagacccacauagug

SEQ ID NO: 395350 - RNA, 27 nt, Human
aggcaaaugacagaaaacaagggaccc

SEQ ID NO: 395351 - RNA, 20 nt, Human
agggagcuugcagagaugga

SEQ ID NO: 395352 - RNA, 25 nt, Human
aucccaucuuuuucuccuuucucag

SEQ ID NO: 395353 - RNA, 19 nt, Human
augcauuuuuaacuugaaa

SEQ ID NO: 395354 - RNA, 22 nt, Human
augggggcuuuucauugucucc

SEQ ID NO: 395355 - RNA, 23 nt, Human
caaaauuaacuuaccacacaaaa

SEQ ID NO: 395356 - RNA, 23 nt, Human
caaaggacugacuuggaaggcac

SEQ ID NO: 395357 - RNA, 24 nt, Human
caauguguucuugguuuugggcau

SEQ ID NO: 395358 - RNA, 19 nt, Human
cacacucuuccucucuccc

SEQ ID NO: 395359 - RNA, 18 nt, Human
cacauaaggaguuuauau

SEQ ID NO: 395360 - RNA, 23 nt, Human
cacccuggaagacuuuucccaag

SEQ ID NO: 395361 - RNA, 25 nt, Human
cagaaccaacuagagggcagggguu

SEQ ID NO: 395362 - RNA, 19 nt, Human
cagugggaaaaauccaggc

SEQ ID NO: 395363 - RNA, 18 nt, Human
cauguguguuacaggcau

SEQ ID NO: 395364 - RNA, 21 nt, Human
cauuaaauggcagagggagcc

SEQ ID NO: 395365 - RNA, 28 nt, Human
ccaaccaagcaacaaaauggaaaauaaa

SEQ ID NO: 395366 - RNA, 23 nt, Human
ccagaagcacaaauucuccuccc

SEQ ID NO: 395367 - RNA, 18 nt, Human
ccagccucugguuccauc

SEQ ID NO: 395368 - RNA, 21 nt, Human
ccaucuguccagccucauucc

SEQ ID NO: 395369 - RNA, 26 nt, Human
cccaguaggcaaaugacagaaaacaa

SEQ ID NO: 395370 - RNA, 22 nt, Human
ccccaugggucagauggaccca

SEQ ID NO: 395371 - RNA, 20 nt, Human
ccccuccuucacuuucuucc

SEQ ID NO: 395372 - RNA, 21 nt, Human
ccggggcccugucuuccagau

SEQ ID NO: 395373 - RNA, 20 nt, Human
ccucucuccccaacagaggg

SEQ ID NO: 395374 - RNA, 22 nt, Human
ccuggccaaacuccuccucugg

SEQ ID NO: 395375 - RNA, 20 nt, Human
ccuggcuugguuccacgugu

SEQ ID NO: 395376 - RNA, 18 nt, Human
ccuuagcugucuugaaga

SEQ ID NO: 395377 - RNA, 20 nt, Human
ccuucucuugaggggaaagg

SEQ ID NO: 395378 - RNA, 20 nt, Human
cucaauaacaaugcacauua

SEQ ID NO: 395379 - RNA, 26 nt, Human
cuccagaagcacaaauucuccucccu

SEQ ID NO: 395380 - RNA, 20 nt, Human
cugaauaaccccaagcagac

SEQ ID NO: 395381 - RNA, 22 nt, Human
cugcggggacacaauggccagc

SEQ ID NO: 395382 - RNA, 21 nt, Human
cuggaagacuuuucccaagcc

SEQ ID NO: 395383 - RNA, 20 nt, Human
gagaucaaagcccagaacca

SEQ ID NO: 395384 - RNA, 23 nt, Human
gaggaagugaacccauuuaauca

SEQ ID NO: 395385 - RNA, 20 nt, Human
gcagaagacaacugcacaca

SEQ ID NO: 395386 - RNA, 20 nt, Human
ggagccaaugcuuaucaguc

SEQ ID NO: 395387 - RNA, 21 nt, Human
ggaugcuacagucaagccuca

SEQ ID NO: 395388 - RNA, 22 nt, Human
ggcacuggcaggugugacuugc

SEQ ID NO: 395389 - RNA, 22 nt, Human
ggcacuggcaggugugacuugc

SEQ ID NO: 395390 - RNA, 27 nt, Human
ggcacuggcaggugugacuugcuggga

SEQ ID NO: 395391 - RNA, 20 nt, Human
ggcagcuuaccaggucagga

SEQ ID NO: 395392 - RNA, 22 nt, Human
gggaaaaauccaggcuccauaa

SEQ ID NO: 395393 - RNA, 19 nt, Human
gggcacuggcaggugugac

SEQ ID NO: 395394 - RNA, 21 nt, Human
gggcacuggcaggugugacuu

SEQ ID NO: 395395 - RNA, 23 nt, Human
gggcacuggcaggugugacuugc

SEQ ID NO: 395396 - RNA, 22 nt, Human
ggugaacaggaguccgucucuu

SEQ ID NO: 395397 - RNA, 23 nt, Human
ggugaacaggaguccgucucuuu

SEQ ID NO: 395398 - RNA, 23 nt, Human
guacaguacaacucaauaacaau

SEQ ID NO: 395399 - RNA, 18 nt, Human
guccauggaagauguugg

SEQ ID NO: 395400 - RNA, 20 nt, Human
gucuccugagcaguguuaga

SEQ ID NO: 395401 - RNA, 19 nt, Human
guguccauggaagauguug

SEQ ID NO: 395402 - RNA, 19 nt, Human
guguguccagccggggccc

SEQ ID NO: 395403 - RNA, 23 nt, Human
uaaaaaccuggagcugugucaac

SEQ ID NO: 395404 - RNA, 21 nt, Human
uaaaaauaaagcaacaaacca

SEQ ID NO: 395405 - RNA, 30 nt, Human
uaaagcaacaaaccaaccaagcaacaaaag

SEQ ID NO: 395406 - RNA, 24 nt, Human
uaaauuauuaagacuaagaagagg

SEQ ID NO: 395407 - RNA, 24 nt, Human
uaacuuaccacacaaaauaaauua

SEQ ID NO: 395408 - RNA, 22 nt, Human
uagaacauucacagacacuaaa

SEQ ID NO: 395409 - RNA, 22 nt, Human
uaggggaagacaaaauucucug

SEQ ID NO: 395410 - RNA, 23 nt, Human
uauguuagaacauuuaaaaauau

SEQ ID NO: 395411 - RNA, 23 nt, Human
ucaaaauuaacuuaccacacaaa

SEQ ID NO: 395412 - RNA, 18 nt, Human
ucagcucugaacagaucc

SEQ ID NO: 395413 - RNA, 24 nt, Human
ucaguacucucucucucucugugu

SEQ ID NO: 395414 - RNA, 22 nt, Human
ucauugucuccugagccauugg

SEQ ID NO: 395415 - RNA, 19 nt, Human
ucccugcugauggauuugc

SEQ ID NO: 395416 - RNA, 18 nt, Human
uccgcugauuucuucucu

SEQ ID NO: 395417 - RNA, 19 nt, Human
uccgucucuuugcaguucu

SEQ ID NO: 395418 - RNA, 25 nt, Human
ucgaaaauaaauagcaaaguuaaac

SEQ ID NO: 395419 - RNA, 18 nt, Human
ucuccuguguugggcaga

SEQ ID NO: 395420 - RNA, 20 nt, Human
ucuccuuucucagggaaaag

SEQ ID NO: 395421 - RNA, 24 nt, Human
ucugaaccccuaccuuuauucccc

SEQ ID NO: 395422 - RNA, 21 nt, Human
ucugaauuauaaaaaaaaaau

SEQ ID NO: 395423 - RNA, 19 nt, Human
ucuguaccugcaaaacaca

SEQ ID NO: 395424 - RNA, 22 nt, Human
ucuuccagaucaggguuggcug

SEQ ID NO: 395425 - RNA, 21 nt, Human
ugaaaugccuauggcucgugg

SEQ ID NO: 395426 - RNA, 24 nt, Human
ugaauaaccccaagcagacggagu

SEQ ID NO: 395427 - RNA, 22 nt, Human
ugacugaaaaagcaacugguga

SEQ ID NO: 395428 - RNA, 19 nt, Human
ugacugggcagguuggaag

SEQ ID NO: 395429 - RNA, 20 nt, Human
ugagccauuggaaacagcga

SEQ ID NO: 395430 - RNA, 21 nt, Human
ugaggccucucacugcaugug

SEQ ID NO: 395431 - RNA, 22 nt, Human
ugagggcacuggcaggugugac

SEQ ID NO: 395432 - RNA, 21 nt, Human
ugauauuaaacaguuuccccu

SEQ ID NO: 395433 - RNA, 18 nt, Human
ugccaaaaaugaagacac

SEQ ID NO: 395434 - RNA, 18 nt, Human
ugcuagggggucagcucu

SEQ ID NO: 395435 - RNA, 19 nt, Human
ugcuagggggucagcucug

SEQ ID NO: 395436 - RNA, 22 nt, Human
uggaggccuuuuaaaaaauguu

SEQ ID NO: 395437 - RNA, 23 nt, Human
uggcagugcuguccugaagaagc

SEQ ID NO: 395438 - RNA, 23 nt, Human
uggccaaacuccuccucugggcu

SEQ ID NO: 395439 - RNA, 21 nt, Human
uggcgauagcuugggaugguc

SEQ ID NO: 395440 - RNA, 23 nt, Human
uggcgauagcuugggauggucuu

SEQ ID NO: 395441 - RNA, 19 nt, Human
ugggugggugaguggcaau

SEQ ID NO: 395442 - RNA, 23 nt, Human
ugguuccaucuccgcacccugga

SEQ ID NO: 395443 - RNA, 21 nt, Human
uguagaagucugaagggguuu

SEQ ID NO: 395444 - RNA, 19 nt, Human
uguggcacacccaggcauc

SEQ ID NO: 395445 - RNA, 19 nt, Human
uguguggcagcuuaccagg

SEQ ID NO: 395446 - RNA, 19 nt, Human
uguguggcagcuuaccagg

SEQ ID NO: 395447 - RNA, 24 nt, Human
uguuacaggcauaaggaugagggc

SEQ ID NO: 395448 - RNA, 18 nt, Human
uuacuggaauaguuuucc

SEQ ID NO: 395449 - RNA, 23 nt, Human
uuagagccucauuaguccauccc

SEQ ID NO: 395450 - RNA, 18 nt, Human
uuaggaaaaaaagguuca

SEQ ID NO: 395451 - RNA, 22 nt, Human
uucaaugucauguguccaugga

SEQ ID NO: 395452 - RNA, 23 nt, Human
uucauuuucuaaagggcaaggaa

SEQ ID NO: 395453 - RNA, 19 nt, Human
uuccuagggaugagcuauc

SEQ ID NO: 395454 - RNA, 21 nt, Human
uucuccuuuuaaaaauaaagc

SEQ ID NO: 395455 - RNA, 21 nt, Human
uugaagauaacaggcaguuuu

SEQ ID NO: 395456 - RNA, 23 nt, Human
uuuccccuccuucacuuucuucc

SEQ ID NO: 395457 - RNA, 19 nt, Human
aaagugcuaggauuacagg

SEQ ID NO: 395458 - RNA, 22 nt, Human
aaagugcuaggauuacaggcgu

SEQ ID NO: 395459 - RNA, 23 nt, Human
aaagugcuaggauuacaggcgug

SEQ ID NO: 395460 - RNA, 24 nt, Human
aaagugcuaggauuacaggcguga

SEQ ID NO: 395461 - RNA, 27 nt, Human
aagagguccccgcgccuccggcuccca

SEQ ID NO: 395462 - RNA, 25 nt, Human
aagugauccucccaccuuagccucc

SEQ ID NO: 395463 - RNA, 25 nt, Human
aagugauccucccaccuuagccucc

SEQ ID NO: 395464 - RNA, 19 nt, Human
accccgccuggccugaacu

SEQ ID NO: 395465 - RNA, 25 nt, Human
acuaucccccacuaaagcagguucc

SEQ ID NO: 395466 - RNA, 25 nt, Human
acuauguuacccaggcuggucucaa

SEQ ID NO: 395467 - RNA, 19 nt, Human
agaaagggucuaggaugcg

SEQ ID NO: 395468 - RNA, 21 nt, Human
agacaggcaggaggaggcaga

SEQ ID NO: 395469 - RNA, 20 nt, Human
agagagggagagagagggag

SEQ ID NO: 395470 - RNA, 18 nt, Human
agccuccagaguagcugg

SEQ ID NO: 395471 - RNA, 21 nt, Human
aggaacuccucccuuaaccuc

SEQ ID NO: 395472 - RNA, 18 nt, Human
aggcagcgggggcggggc

SEQ ID NO: 395473 - RNA, 24 nt, Human
aggcagcgggggcggggcggggug

SEQ ID NO: 395474 - RNA, 22 nt, Human
agggggcagggagggagcaagc

SEQ ID NO: 395475 - RNA, 21 nt, Human
aguauccucccaucucugccu

SEQ ID NO: 395476 - RNA, 21 nt, Human
agugguggaggggaggcuugg

SEQ ID NO: 395477 - RNA, 22 nt, Human
auccgcaguccucucuccaucu

SEQ ID NO: 395478 - RNA, 24 nt, Human
auccucccaucucugccucccaaa

SEQ ID NO: 395479 - RNA, 24 nt, Human
caaaagugcuaggauuacaggcgu

SEQ ID NO: 395480 - RNA, 20 nt, Human
caagagguccccgcgccucc

SEQ ID NO: 395481 - RNA, 24 nt, Human
caaguauccucccaucucugccuc

SEQ ID NO: 395482 - RNA, 24 nt, Human
cacuauguuacccaggcuggucuc

SEQ ID NO: 395483 - RNA, 23 nt, Human
cacuucaacagugcccaaggugc

SEQ ID NO: 395484 - RNA, 21 nt, Human
cagacaggcaggaggaggcag

SEQ ID NO: 395485 - RNA, 23 nt, Human
cagccuugaccucccaggaucaa

SEQ ID NO: 395486 - RNA, 18 nt, Human
cagcggcaacggaaaagu

SEQ ID NO: 395487 - RNA, 20 nt, Human
caggccggggaugaaggcgg

SEQ ID NO: 395488 - RNA, 22 nt, Human
caguaguguuccccacuggucc

SEQ ID NO: 395489 - RNA, 21 nt, Human
cagugguggaggggaggcuug

SEQ ID NO: 395490 - RNA, 22 nt, Human
cagugguggaggggaggcuugg

SEQ ID NO: 395491 - RNA, 22 nt, Human
ccagaguagcugggaccacagg

SEQ ID NO: 395492 - RNA, 25 nt, Human
ccagaguagcugggaccacaggugu

SEQ ID NO: 395493 - RNA, 21 nt, Human
ccaggugggcuuggggcacgg

SEQ ID NO: 395494 - RNA, 21 nt, Human
cccaaugacacagagauccgc

SEQ ID NO: 395495 - RNA, 23 nt, Human
cccaccuuagccuccagaguagc

SEQ ID NO: 395496 - RNA, 20 nt, Human
cccacuaaagcagguuccug

SEQ ID NO: 395497 - RNA, 21 nt, Human
cccaucucugccucccaaaag

SEQ ID NO: 395498 - RNA, 22 nt, Human
cccaugggcaaggcagcggggg

SEQ ID NO: 395499 - RNA, 24 nt, Human
cccaugggcaaggcagcgggggcg

SEQ ID NO: 395500 - RNA, 18 nt, Human
ccccaggugggcuugggg

SEQ ID NO: 395501 - RNA, 25 nt, Human
cccccaugggcaaggcagcgggggc

SEQ ID NO: 395502 - RNA, 18 nt, Human
cccccggccggggcccuc

SEQ ID NO: 395503 - RNA, 18 nt, Human
ccccgccccugcaggggc

SEQ ID NO: 395504 - RNA, 20 nt, Human
ccccugcaggggcugggggu

SEQ ID NO: 395505 - RNA, 25 nt, Human
cccgagggcugguccggaauggggg

SEQ ID NO: 395506 - RNA, 18 nt, Human
cccgcgggcggcucagag

SEQ ID NO: 395507 - RNA, 20 nt, Human
cccgcuccuccucccccucc

SEQ ID NO: 395508 - RNA, 19 nt, Human
cccugcccccggccggggc

SEQ ID NO: 395509 - RNA, 24 nt, Human
ccucccaccuuagccuccagagua

SEQ ID NO: 395510 - RNA, 19 nt, Human
ccucccaucucugccuccc

SEQ ID NO: 395511 - RNA, 22 nt, Human
ccucccaucucugccucccaaa

SEQ ID NO: 395512 - RNA, 18 nt, Human
ccucccccuccuccccgc

SEQ ID NO: 395513 - RNA, 21 nt, Human
ccuccccgcaguggcgggggc

SEQ ID NO: 395514 - RNA, 22 nt, Human
ccuggauucaaguauccuccca

SEQ ID NO: 395515 - RNA, 19 nt, Human
cgacuccuuccuccgcucc

SEQ ID NO: 395516 - RNA, 18 nt, Human
cgcgccuccggcucccag

SEQ ID NO: 395517 - RNA, 22 nt, Human
cggaaugggggcgccugaggga

SEQ ID NO: 395518 - RNA, 21 nt, Human
cggggcggggcggggcggggc

SEQ ID NO: 395519 - RNA, 24 nt, Human
cuccagaguagcugggaccacagg

SEQ ID NO: 395520 - RNA, 21 nt, Human
cucccuuaaccucucugggcu

SEQ ID NO: 395521 - RNA, 22 nt, Human
cucccuuaaccucucugggcuu

SEQ ID NO: 395522 - RNA, 19 nt, Human
cugcagccuugaccuccca

SEQ ID NO: 395523 - RNA, 24 nt, Human
cuuagccuccagaguagcugggac

SEQ ID NO: 395524 - RNA, 18 nt, Human
gagggaaagcugaggcuc

SEQ ID NO: 395525 - RNA, 24 nt, Human
gaguagcugggaccacagguguac

SEQ ID NO: 395526 - RNA, 23 nt, Human
gauuacaggcgugagcaccccgc

SEQ ID NO: 395527 - RNA, 20 nt, Human
gcagcgggggcggggcgggg

SEQ ID NO: 395528 - RNA, 21 nt, Human
gcccccaugggcaaggcagcg

SEQ ID NO: 395529 - RNA, 18 nt, Human
gcgcagugguggagggga

SEQ ID NO: 395530 - RNA, 19 nt, Human
gcgccaagagguccccgcg

SEQ ID NO: 395531 - RNA, 26 nt, Human
gcggcgugcagggggugcgcccgagg

SEQ ID NO: 395532 - RNA, 22 nt, Human
gcgggguggggccgggccugcc

SEQ ID NO: 395533 - RNA, 20 nt, Human
gcuccucggcgacuccuucc

SEQ ID NO: 395534 - RNA, 18 nt, Human
ggaaugggggcgccugag

SEQ ID NO: 395535 - RNA, 21 nt, Human
ggaaugggggcgccugaggga

SEQ ID NO: 395536 - RNA, 20 nt, Human
ggagagagagggagugggag

SEQ ID NO: 395537 - RNA, 18 nt, Human
ggaggcggcgccccccgg

SEQ ID NO: 395538 - RNA, 20 nt, Human
ggaggcuuggaccgggggug

SEQ ID NO: 395539 - RNA, 21 nt, Human
ggaggggaggcuuggaccggg

SEQ ID NO: 395540 - RNA, 21 nt, Human
ggauuacaggcgugagcaccc

SEQ ID NO: 395541 - RNA, 23 nt, Human
ggcagagagggagagagagggag

SEQ ID NO: 395542 - RNA, 21 nt, Human
ggcagcgggggcggggcgggg

SEQ ID NO: 395543 - RNA, 18 nt, Human
ggcagggagggagcaagc

SEQ ID NO: 395544 - RNA, 21 nt, Human
ggcuggugugguggggaggcc

SEQ ID NO: 395545 - RNA, 24 nt, Human
gggccgggccugccggggcggggc

SEQ ID NO: 395546 - RNA, 21 nt, Human
gggcgcagugguggaggggag

SEQ ID NO: 395547 - RNA, 18 nt, Human
gggcgggguggggccggg

SEQ ID NO: 395548 - RNA, 19 nt, Human
gggcuggugugguggggag

SEQ ID NO: 395549 - RNA, 21 nt, Human
ggggaugaaggcggcgugcag

SEQ ID NO: 395550 - RNA, 19 nt, Human
ggggcggggcggggugggg

SEQ ID NO: 395551 - RNA, 21 nt, Human
gggggcggggcgggguggggc

SEQ ID NO: 395552 - RNA, 19 nt, Human
gggggcucaggagacaggc

SEQ ID NO: 395553 - RNA, 22 nt, Human
ggggggggugccccggacgggg

SEQ ID NO: 395554 - RNA, 20 nt, Human
gguaccagaagguggguggu

SEQ ID NO: 395555 - RNA, 25 nt, Human
ggucggagagagauccgucuccugg

SEQ ID NO: 395556 - RNA, 19 nt, Human
ggucuggggaaaagucuuu

SEQ ID NO: 395557 - RNA, 19 nt, Human
gucugggguccccaagucc

SEQ ID NO: 395558 - RNA, 23 nt, Human
guggcgggggcggcggcggcucg

SEQ ID NO: 395559 - RNA, 18 nt, Human
uacagcccccaugggcaa

SEQ ID NO: 395560 - RNA, 20 nt, Human
uaccagaagguggguggucu

SEQ ID NO: 395561 - RNA, 22 nt, Human
uagagauagggucucacuaugu

SEQ ID NO: 395562 - RNA, 18 nt, Human
uaggauuacaggcgugag

SEQ ID NO: 395563 - RNA, 20 nt, Human
uaggauuacaggcgugagca

SEQ ID NO: 395564 - RNA, 22 nt, Human
uaggauuacaggcgugagcacc

SEQ ID NO: 395565 - RNA, 23 nt, Human
uaggauuacaggcgugagcaccc

SEQ ID NO: 395566 - RNA, 24 nt, Human
uagggucucacuauguuacccagg

SEQ ID NO: 395567 - RNA, 21 nt, Human
uaguguuccccacuggucccc

SEQ ID NO: 395568 - RNA, 23 nt, Human
uauccucccaucucugccuccca

SEQ ID NO: 395569 - RNA, 23 nt, Human
uauguuacccaggcuggucucaa

SEQ ID NO: 395570 - RNA, 24 nt, Human
uauguuacccaggcuggucucaaa

SEQ ID NO: 395571 - RNA, 23 nt, Human
ucaagugauccucccaccuuagc

SEQ ID NO: 395572 - RNA, 25 nt, Human
ucaagugauccucccaccuuagccu

SEQ ID NO: 395573 - RNA, 19 nt, Human
ucagagucccugccaucuc

SEQ ID NO: 395574 - RNA, 18 nt, Human
ucagggagaagggcgcag

SEQ ID NO: 395575 - RNA, 25 nt, Human
ucccaaaagugcuaggauuacaggc

SEQ ID NO: 395576 - RNA, 21 nt, Human
uccccgcgccuccggcuccca

SEQ ID NO: 395577 - RNA, 27 nt, Human
ucccgaccagcucgucccuccucccgc

SEQ ID NO: 395578 - RNA, 19 nt, Human
ucccgcuccuccucccccu

SEQ ID NO: 395579 - RNA, 19 nt, Human
ucccggcaaaagguaggag

SEQ ID NO: 395580 - RNA, 19 nt, Human
ucccuccucccgcuccucc

SEQ ID NO: 395581 - RNA, 19 nt, Human
uccuccucccccuccuccc

SEQ ID NO: 395582 - RNA, 18 nt, Human
uccuggaggagaaagggu

SEQ ID NO: 395583 - RNA, 22 nt, Human
uccuuaaauacagcccccaugg

SEQ ID NO: 395584 - RNA, 19 nt, Human
ucucacuauguuacccagg

SEQ ID NO: 395585 - RNA, 24 nt, Human
ucucacuauguuacccaggcuggu

SEQ ID NO: 395586 - RNA, 26 nt, Human
ucucacuauguuacccaggcuggucu

SEQ ID NO: 395587 - RNA, 27 nt, Human
ucucacuauguuacccaggcuggucuc

SEQ ID NO: 395588 - RNA, 18 nt, Human
ucucagacucuggggccu

SEQ ID NO: 395589 - RNA, 24 nt, Human
ucugggguccccaaguccugccuc

SEQ ID NO: 395590 - RNA, 18 nt, Human
ugagcaccccgccuggcc

SEQ ID NO: 395591 - RNA, 21 nt, Human
ugcagggggugcgcccgaggu

SEQ ID NO: 395592 - RNA, 18 nt, Human
ugccggggcggggcgggg

SEQ ID NO: 395593 - RNA, 23 nt, Human
ugcuaggauuacaggcgugagca

SEQ ID NO: 395594 - RNA, 18 nt, Human
uggcgggggcggcggcgg

SEQ ID NO: 395595 - RNA, 18 nt, Human
ugggaccacagguguaca

SEQ ID NO: 395596 - RNA, 19 nt, Human
ugggagugggggaacguca

SEQ ID NO: 395597 - RNA, 23 nt, Human
uggucuugaauaggggaucugug

SEQ ID NO: 395598 - RNA, 22 nt, Human
ugguggaggggaggcuuggacc

SEQ ID NO: 395599 - RNA, 21 nt, Human
uguacauuuuuuaaaaguguu

SEQ ID NO: 395600 - RNA, 24 nt, Human
uguagagauagggucucacuaugu

SEQ ID NO: 395601 - RNA, 20 nt, Human
ugucuucuucacuauccccc

SEQ ID NO: 395602 - RNA, 23 nt, Human
uucaaguauccucccaucucugc

SEQ ID NO: 395603 - RNA, 22 nt, Human
uuccuggugggcaggaacuccu

SEQ ID NO: 395604 - RNA, 24 nt, Human
uuguagagauagggucucacuaug

SEQ ID NO: 395605 - RNA, 18 nt, Human
uuuguagagauagggucu

SEQ ID NO: 395606 - RNA, 24 nt, Human
uuuguagagauagggucucacuau

SEQ ID NO: 395607 - RNA, 23 nt, Human
aaacagaacacaaacuuccaaag

SEQ ID NO: 395608 - RNA, 21 nt, Human
acagaacacaaacuuccaaag

SEQ ID NO: 395609 - RNA, 22 nt, Human
cagaacacaaacuuccaaagug

SEQ ID NO: 395610 - RNA, 24 nt, Human
ccaguuuuaacaaacagaacacaa

SEQ ID NO: 395611 - RNA, 19 nt, Human
cucaaaguauagaucaagg

SEQ ID NO: 395612 - RNA, 30 nt, Human
guuuuuuguuguuguuguuuguuuuugauu

SEQ ID NO: 395613 - RNA, 23 nt, Human
ucaaggagaguuguuugguuuuu

SEQ ID NO: 395614 - RNA, 21 nt, Human
ucaaugcccaacagaaaaacg

SEQ ID NO: 395615 - RNA, 19 nt, Human
aagaaagaaauguuccaaa

SEQ ID NO: 395616 - RNA, 23 nt, Human
aagaaagaaauguuccaaaagga

SEQ ID NO: 395617 - RNA, 21 nt, Human
aagaagcggacugugugccuu

SEQ ID NO: 395618 - RNA, 19 nt, Human
aagagaccccagcagacgu

SEQ ID NO: 395619 - RNA, 22 nt, Human
aagagaggccagggggacggca

SEQ ID NO: 395620 - RNA, 19 nt, Human
aagcgcuggcaacccugag

SEQ ID NO: 395621 - RNA, 25 nt, Human
acacaacaucucaacuuaccauccc

SEQ ID NO: 395622 - RNA, 27 nt, Human
accacaauccagaaaugugcauccuga

SEQ ID NO: 395623 - RNA, 18 nt, Human
accaccgugauucucaga

SEQ ID NO: 395624 - RNA, 18 nt, Human
acccugaggacgaagaag

SEQ ID NO: 395625 - RNA, 22 nt, Human
acccugaggacgaagaagcgga

SEQ ID NO: 395626 - RNA, 23 nt, Human
agaaggagggaggaaaaccaggc

SEQ ID NO: 395627 - RNA, 22 nt, Human
agaggagggacccagagggcag

SEQ ID NO: 395628 - RNA, 19 nt, Human
agaucccaaagacugaggc

SEQ ID NO: 395629 - RNA, 20 nt, Human
agcaagaaagaaauguucca

SEQ ID NO: 395630 - RNA, 22 nt, Human
agcaagaaagaaauguuccaaa

SEQ ID NO: 395631 - RNA, 27 nt, Human
agcaagaaagaaauguuccaaaaggaa

SEQ ID NO: 395632 - RNA, 20 nt, Human
aggaaaccuccaucucagcc

SEQ ID NO: 395633 - RNA, 20 nt, Human
auccaggaugccccaaaaau

SEQ ID NO: 395634 - RNA, 22 nt, Human
augcuugccuuguauaacauaa

SEQ ID NO: 395635 - RNA, 21 nt, Human
caaaaggaaaccuccaucuca

SEQ ID NO: 395636 - RNA, 23 nt, Human
caaauccaaccucagaucugaag

SEQ ID NO: 395637 - RNA, 22 nt, Human
cacuguguggcacaugugcagc

SEQ ID NO: 395638 - RNA, 22 nt, Human
cagaagaugaaaucauccagga

SEQ ID NO: 395639 - RNA, 20 nt, Human
cagaucccaaagacugaggg

SEQ ID NO: 395640 - RNA, 18 nt, Human
cagccauucucugcccuu

SEQ ID NO: 395641 - RNA, 19 nt, Human
cagccauucucugcccuuc

SEQ ID NO: 395642 - RNA, 22 nt, Human
cagcuuccccgaaugccucaca

SEQ ID NO: 395643 - RNA, 18 nt, Human
caggaugccccaaaaaua

SEQ ID NO: 395644 - RNA, 18 nt, Human
cagucaggcagugguggu

SEQ ID NO: 395645 - RNA, 19 nt, Human
cauaauccagauucccuag

SEQ ID NO: 395646 - RNA, 24 nt, Human
ccaaaaggaaaccuccaucucagc

SEQ ID NO: 395647 - RNA, 22 nt, Human
ccaaaucccauugccacacaac

SEQ ID NO: 395648 - RNA, 19 nt, Human
ccaucccuuuccucuaucc

SEQ ID NO: 395649 - RNA, 18 nt, Human
cccauaaugccccaaggc

SEQ ID NO: 395650 - RNA, 20 nt, Human
ccccaaggcugcauggaacc

SEQ ID NO: 395651 - RNA, 19 nt, Human
ccucacauguuguagcacc

SEQ ID NO: 395652 - RNA, 23 nt, Human
ccucacauguuguagcaccugcu

SEQ ID NO: 395653 - RNA, 21 nt, Human
ccucuauccccauccccucug

SEQ ID NO: 395654 - RNA, 20 nt, Human
ccugacccagccauucucug

SEQ ID NO: 395655 - RNA, 23 nt, Human
cggccuccccagaucccaaagac

SEQ ID NO: 395656 - RNA, 19 nt, Human
cucccuuuaggguagccca

SEQ ID NO: 395657 - RNA, 21 nt, Human
cucuaaccaaacccacacuuu

SEQ ID NO: 395658 - RNA, 19 nt, Human
cuggauuuucucccuguag

SEQ ID NO: 395659 - RNA, 20 nt, Human
cuggcaacccugaggacgaa

SEQ ID NO: 395660 - RNA, 23 nt, Human
cuuccaggaacaccaaaugaaca

SEQ ID NO: 395661 - RNA, 18 nt, Human
cuuuaaaaaaaaaaaugc

SEQ ID NO: 395662 - RNA, 19 nt, Human
gacggcaaggccuggagag

SEQ ID NO: 395663 - RNA, 25 nt, Human
gcaaauccaaccucagaucugaagu

SEQ ID NO: 395664 - RNA, 19 nt, Human
gcagacgugcagaaggagg

SEQ ID NO: 395665 - RNA, 24 nt, Human
gcagcuuccccgaaugccucacau

SEQ ID NO: 395666 - RNA, 18 nt, Human
gccauuugcccggagccg

SEQ ID NO: 395667 - RNA, 21 nt, Human
gccuccccagaucccaaagac

SEQ ID NO: 395668 - RNA, 23 nt, Human
ggacccagagggcagacaggaga

SEQ ID NO: 395669 - RNA, 22 nt, Human
ggacuuccaggaagcgcuggca

SEQ ID NO: 395670 - RNA, 22 nt, Human
ggcaagaaggugcaugaacucc

SEQ ID NO: 395671 - RNA, 21 nt, Human
gggcuccaggccucucaguga

SEQ ID NO: 395672 - RNA, 19 nt, Human
ggggacggcaaggccugga

SEQ ID NO: 395673 - RNA, 19 nt, Human
uagaggacaguuugcaaaa

SEQ ID NO: 395674 - RNA, 22 nt, Human
uagcaccugcuuccaggaacac

SEQ ID NO: 395675 - RNA, 19 nt, Human
uagcgcugggauuguuguc

SEQ ID NO: 395676 - RNA, 20 nt, Human
ucagcauauccaaaaggccc

SEQ ID NO: 395677 - RNA, 23 nt, Human
ucauacuugucuuuauaccucag

SEQ ID NO: 395678 - RNA, 20 nt, Human
uccagaagaugaaaucaucc

SEQ ID NO: 395679 - RNA, 22 nt, Human
uccaggaacaccaaaugaacac

SEQ ID NO: 395680 - RNA, 20 nt, Human
uccaucucagccauuugccc

SEQ ID NO: 395681 - RNA, 23 nt, Human
ucccauugccacacaacaucuca

SEQ ID NO: 395682 - RNA, 21 nt, Human
ucucagugagguuuguugcuu

SEQ ID NO: 395683 - RNA, 19 nt, Human
ucuccccucucucugucgc

SEQ ID NO: 395684 - RNA, 20 nt, Human
ucugcccuuccuucuccccc

SEQ ID NO: 395685 - RNA, 23 nt, Human
ucugcguucagcauauccaaaag

SEQ ID NO: 395686 - RNA, 20 nt, Human
ucuggcccugacccagccau

SEQ ID NO: 395687 - RNA, 23 nt, Human
ugaagaguucagccuuccucuaa

SEQ ID NO: 395688 - RNA, 19 nt, Human
ugaccuggauuuucucccu

SEQ ID NO: 395689 - RNA, 21 nt, Human
ugagaggagggacccagaggg

SEQ ID NO: 395690 - RNA, 19 nt, Human
ugagcugggaagagaggcc

SEQ ID NO: 395691 - RNA, 21 nt, Human
ugagcugggaagagaggccag

SEQ ID NO: 395692 - RNA, 20 nt, Human
ugaucgagggagaggugaga

SEQ ID NO: 395693 - RNA, 23 nt, Human
ugaucgagggagaggugagagga

SEQ ID NO: 395694 - RNA, 18 nt, Human
uggaggggaaguggggga

SEQ ID NO: 395695 - RNA, 24 nt, Human
ugggaagagaggccagggggacgg

SEQ ID NO: 395696 - RNA, 22 nt, Human
ugggacuuugucuucguaaccu

SEQ ID NO: 395697 - RNA, 21 nt, Human
ugggggaagacccauaaugcc

SEQ ID NO: 395698 - RNA, 18 nt, Human
uguggcacaugugcagcu

SEQ ID NO: 395699 - RNA, 20 nt, Human
uguuguagcaccugcuucca

SEQ ID NO: 395700 - RNA, 19 nt, Human
uuaaucccagacaguauga

SEQ ID NO: 395701 - RNA, 23 nt, Human
uuccaggaagcgcuggcaacccu

SEQ ID NO: 395702 - RNA, 22 nt, Human
uuguugcuuguguguuucccga

SEQ ID NO: 395703 - RNA, 22 nt, Human
uuuaggguagcccaaaucccau

SEQ ID NO: 395704 - RNA, 21 nt, Human
acaucucucucccuccucccc

SEQ ID NO: 395705 - RNA, 19 nt, Human
auacugaagcuccuuuucc

SEQ ID NO: 395706 - RNA, 22 nt, Human
aucucucucccuccucccccac

SEQ ID NO: 395707 - RNA, 21 nt, Human
augccauuucuccagcugugc

SEQ ID NO: 395708 - RNA, 18 nt, Human
caccauggcucugucaca

SEQ ID NO: 395709 - RNA, 19 nt, Human
caccauggcucugucacaa

SEQ ID NO: 395710 - RNA, 19 nt, Human
cagggccccauaaaagccu

SEQ ID NO: 395711 - RNA, 21 nt, Human
cauuaaagugugauacuuggu

SEQ ID NO: 395712 - RNA, 19 nt, Human
ccaagccacguguagaugg

SEQ ID NO: 395713 - RNA, 20 nt, Human
ccacaugcacaaggcucaca

SEQ ID NO: 395714 - RNA, 22 nt, Human
cccauaaaagccuccaagccac

SEQ ID NO: 395715 - RNA, 19 nt, Human
ccccauaaaagccuccaag

SEQ ID NO: 395716 - RNA, 18 nt, Human
cggagagcugccguggug

SEQ ID NO: 395717 - RNA, 23 nt, Human
cuccagcugugcaagggcuuuac

SEQ ID NO: 395718 - RNA, 22 nt, Human
cuuauaaugaugccauuucucc

SEQ ID NO: 395719 - RNA, 23 nt, Human
gccccauaaaagccuccaagcca

SEQ ID NO: 395720 - RNA, 20 nt, Human
ggacagggccccauaaaagc

SEQ ID NO: 395721 - RNA, 24 nt, Human
uaaaaaguacaucucucucccucc

SEQ ID NO: 395722 - RNA, 21 nt, Human
uacaaaaacugugccaggacu

SEQ ID NO: 395723 - RNA, 20 nt, Human
ucccaugaggcuggauugcu

SEQ ID NO: 395724 - RNA, 18 nt, Human
ucccccacaugcacaagg

SEQ ID NO: 395725 - RNA, 21 nt, Human
ucuuuucuaccuggacagggc

SEQ ID NO: 395726 - RNA, 18 nt, Human
ugaaaacauucaaacagu

SEQ ID NO: 395727 - RNA, 23 nt, Human
ugaaaacauucaaacagucucug

SEQ ID NO: 395728 - RNA, 19 nt, Human
ugccguggugcauuccucc

SEQ ID NO: 395729 - RNA, 20 nt, Human
ugccguggugcauuccuccu

SEQ ID NO: 395730 - RNA, 18 nt, Human
ugguuuuauuauuacaaa

SEQ ID NO: 395731 - RNA, 24 nt, Human
uuaaagugugauacuugguuuuga

SEQ ID NO: 395732 - RNA, 26 nt, Human
uuaugagccccacaauacugaagcuc

SEQ ID NO: 395733 - RNA, 21 nt, Human
uucuccagcugugcaagggcu

SEQ ID NO: 395734 - RNA, 22 nt, Human
uuuccagggacuuggcauaggc

SEQ ID NO: 395735 - RNA, 20 nt, Human
uuugguuuuauuauuacaaa

SEQ ID NO: 395736 - RNA, 28 nt, Human
aagcguucauagugcacagaaaggaccc

SEQ ID NO: 395737 - RNA, 21 nt, Human
aaggacccacauggcuguuuc

SEQ ID NO: 395738 - RNA, 21 nt, Human
accccagcaaaccucgccucg

SEQ ID NO: 395739 - RNA, 21 nt, Human
acuaaccaggaguaaaucacu

SEQ ID NO: 395740 - RNA, 23 nt, Human
agcacagcagaguuaccuaaagu

SEQ ID NO: 395741 - RNA, 23 nt, Human
agguagaacaacugaccucccaa

SEQ ID NO: 395742 - RNA, 21 nt, Human
agguagacuacacauuuucug

SEQ ID NO: 395743 - RNA, 22 nt, Human
auagugcacagaaaggacccac

SEQ ID NO: 395744 - RNA, 27 nt, Human
caacuccuuugcccuuaaagaugaucu

SEQ ID NO: 395745 - RNA, 21 nt, Human
cccaaauuaaaacccaggagc

SEQ ID NO: 395746 - RNA, 21 nt, Human
ccccagcaaaccucgccucgc

SEQ ID NO: 395747 - RNA, 24 nt, Human
ccgccgccaccgccuguggcccgg

SEQ ID NO: 395748 - RNA, 24 nt, Human
ccugggaaguuuuuaauugacuuu

SEQ ID NO: 395749 - RNA, 24 nt, Human
ccuguggcccggcccggcccggcc

SEQ ID NO: 395750 - RNA, 23 nt, Human
cuaaaguuaagaccagcaaucau

SEQ ID NO: 395751 - RNA, 19 nt, Human
cuagugguucagaauccuc

SEQ ID NO: 395752 - RNA, 18 nt, Human
cucccaaauuaaaaccca

SEQ ID NO: 395753 - RNA, 25 nt, Human
cuggguccaaagaaauccugggaag

SEQ ID NO: 395754 - RNA, 18 nt, Human
gaaagacacagaaguggc

SEQ ID NO: 395755 - RNA, 21 nt, Human
gcccggccgcgccgcugccuc

SEQ ID NO: 395756 - RNA, 18 nt, Human
gccgcugccucaccccag

SEQ ID NO: 395757 - RNA, 19 nt, Human
gcugccucaccccagcaaa

SEQ ID NO: 395758 - RNA, 23 nt, Human
ggcccggccgcgccgcugccuca

SEQ ID NO: 395759 - RNA, 18 nt, Human
guagaacaacugaccucc

SEQ ID NO: 395760 - RNA, 19 nt, Human
uacacugcugcaaaaggaa

SEQ ID NO: 395761 - RNA, 21 nt, Human
uagaaagacacagaaguggca

SEQ ID NO: 395762 - RNA, 19 nt, Human
uagguuuuaacauagagac

SEQ ID NO: 395763 - RNA, 23 nt, Human
uauacaaaauacaauugcaugaa

SEQ ID NO: 395764 - RNA, 19 nt, Human
uauccuucuguucccucuc

SEQ ID NO: 395765 - RNA, 20 nt, Human
uccaaagaaauccugggaag

SEQ ID NO: 395766 - RNA, 21 nt, Human
ucccaaauuaaaacccaggag

SEQ ID NO: 395767 - RNA, 20 nt, Human
uccuggguccaaagaaaucc

SEQ ID NO: 395768 - RNA, 23 nt, Human
ugaauuauguuccucacuacuau

SEQ ID NO: 395769 - RNA, 26 nt, Human
ugagguagaacaacugaccucccaaa

SEQ ID NO: 395770 - RNA, 19 nt, Human
uggcccggcccggcccggc

SEQ ID NO: 395771 - RNA, 22 nt, Human
ugggaaagaagcguucauagug

SEQ ID NO: 395772 - RNA, 19 nt, Human
uuaagaccagcaaucaucu

SEQ ID NO: 395773 - RNA, 20 nt, Human
uucaaagucugaaucaagga

SEQ ID NO: 395774 - RNA, 25 nt, Human
aaaaaaacauaaacaaaacaagcca

SEQ ID NO: 395775 - RNA, 21 nt, Human
aaaaaacauaaacaaaacaag

SEQ ID NO: 395776 - RNA, 24 nt, Human
aaaaacacaauaaauuacaugaca

SEQ ID NO: 395777 - RNA, 22 nt, Human
aaaaagaguauauagcauucac

SEQ ID NO: 395778 - RNA, 18 nt, Human
aaaacaaagauaucuaca

SEQ ID NO: 395779 - RNA, 21 nt, Human
aaaacaagccacaguauccuc

SEQ ID NO: 395780 - RNA, 22 nt, Human
aaagaugaaaaaaagaacaauu

SEQ ID NO: 395781 - RNA, 26 nt, Human
aaagcacuauuuuuucauuccaauua

SEQ ID NO: 395782 - RNA, 23 nt, Human
aaagcuucuuggaguaaagcacu

SEQ ID NO: 395783 - RNA, 24 nt, Human
aaaguaaacacgauaaagccuaga

SEQ ID NO: 395784 - RNA, 21 nt, Human
aaaugaucacuuugcaauuuu

SEQ ID NO: 395785 - RNA, 21 nt, Human
aaauguuaaaaaucgaagaga

SEQ ID NO: 395786 - RNA, 23 nt, Human
aacauaaaauguuaaaaaucgaa

SEQ ID NO: 395787 - RNA, 19 nt, Human
aacauaaacaaaacaagcc

SEQ ID NO: 395788 - RNA, 21 nt, Human
aacauaagugcaggggaaaga

SEQ ID NO: 395789 - RNA, 23 nt, Human
aaccaaaagauaauaccauaucu

SEQ ID NO: 395790 - RNA, 27 nt, Human
aaccacgaagcaaaauuagcaauaacc

SEQ ID NO: 395791 - RNA, 22 nt, Human
aagaacaguccaaaccuucagu

SEQ ID NO: 395792 - RNA, 21 nt, Human
aagacccuccacccaucccag

SEQ ID NO: 395793 - RNA, 19 nt, Human
aagagcuaauguuuacagu

SEQ ID NO: 395794 - RNA, 21 nt, Human
aagauggaacccauugguguu

SEQ ID NO: 395795 - RNA, 23 nt, Human
aagggccaaggugagcacuagca

SEQ ID NO: 395796 - RNA, 22 nt, Human
aaggggcuccccaaauauagca

SEQ ID NO: 395797 - RNA, 26 nt, Human
aauaagaaaaaaaaacauaaacaaaa

SEQ ID NO: 395798 - RNA, 19 nt, Human
aaucaggagcccagaaaga

SEQ ID NO: 395799 - RNA, 24 nt, Human
aauuauauaaaauagaucuuacua

SEQ ID NO: 395800 - RNA, 23 nt, Human
aauuuuggguuaagaguugaaaa

SEQ ID NO: 395801 - RNA, 23 nt, Human
acaaaacaagccacaguauccuc

SEQ ID NO: 395802 - RNA, 23 nt, Human
acaaacccuggugaaaccaaaag

SEQ ID NO: 395803 - RNA, 19 nt, Human
acagaauguuauuccuugg

SEQ ID NO: 395804 - RNA, 19 nt, Human
acauuucuuacaagggacc

SEQ ID NO: 395805 - RNA, 22 nt, Human
accaaaccacgaagcaaaauua

SEQ ID NO: 395806 - RNA, 21 nt, Human
accaagacccuccacccaucc

SEQ ID NO: 395807 - RNA, 28 nt, Human
acggcgccuuuuuuuuuuuuuuuuuuuc

SEQ ID NO: 395808 - RNA, 19 nt, Human
acugaggagggugccuaga

SEQ ID NO: 395809 - RNA, 21 nt, Human
agaaauaagggcacacaggaa

SEQ ID NO: 395810 - RNA, 21 nt, Human
agacaagaccaagacccucca

SEQ ID NO: 395811 - RNA, 23 nt, Human
agacaggaacuaaagggccaagg

SEQ ID NO: 395812 - RNA, 20 nt, Human
agaguugaaaaacuaaguua

SEQ ID NO: 395813 - RNA, 18 nt, Human
agaguuucuaaacuaggu

SEQ ID NO: 395814 - RNA, 24 nt, Human
agaugggguagaguuucuaaacua

SEQ ID NO: 395815 - RNA, 22 nt, Human
agcaaucaggagcccagaaaga

SEQ ID NO: 395816 - RNA, 21 nt, Human
aggccaaaagacaagaccaag

SEQ ID NO: 395817 - RNA, 23 nt, Human
aggccaacuucaaaucuuaacac

SEQ ID NO: 395818 - RNA, 19 nt, Human
agggcacacaggaaccccg

SEQ ID NO: 395819 - RNA, 21 nt, Human
aggucaaugggcaacagcuau

SEQ ID NO: 395820 - RNA, 24 nt, Human
aguaacauaagugcaggggaaaga

SEQ ID NO: 395821 - RNA, 22 nt, Human
agucccucucuaauauuccuau

SEQ ID NO: 395822 - RNA, 19 nt, Human
agugcaauguggucauagc

SEQ ID NO: 395823 - RNA, 23 nt, Human
auaacacaaagaaugcguuccac

SEQ ID NO: 395824 - RNA, 21 nt, Human
auagaaugcucuaugucaccc

SEQ ID NO: 395825 - RNA, 20 nt, Human
aucaggagcccagaaagaug

SEQ ID NO: 395826 - RNA, 24 nt, Human
aucuguucugauuuuucugcaacc

SEQ ID NO: 395827 - RNA, 25 nt, Human
augaaggcugggagcagagaauagu

SEQ ID NO: 395828 - RNA, 22 nt, Human
augagaccuuccaccauccaaa

SEQ ID NO: 395829 - RNA, 24 nt, Human
caaaagacaagaccaagacccucc

SEQ ID NO: 395830 - RNA, 22 nt, Human
caaaagcaagugcaaugugguc

SEQ ID NO: 395831 - RNA, 21 nt, Human
caaaccacgaagcaaaauuag

SEQ ID NO: 395832 - RNA, 24 nt, Human
caagaccaagacccuccacccauc

SEQ ID NO: 395833 - RNA, 21 nt, Human
caaggccaaaagacaagacca

SEQ ID NO: 395834 - RNA, 22 nt, Human
caaggccaaaagacaagaccaa

SEQ ID NO: 395835 - RNA, 23 nt, Human
caaggggcuccccaaauauagca

SEQ ID NO: 395836 - RNA, 19 nt, Human
cacaggaaccccgggaaca

SEQ ID NO: 395837 - RNA, 19 nt, Human
cacccacucccugcugcug

SEQ ID NO: 395838 - RNA, 20 nt, Human
cacugaggagggugccuaga

SEQ ID NO: 395839 - RNA, 20 nt, Human
cacuguacuuaguuccaugg

SEQ ID NO: 395840 - RNA, 19 nt, Human
cagaaaagcuaaagaggua

SEQ ID NO: 395841 - RNA, 18 nt, Human
cagaaagauggaacccau

SEQ ID NO: 395842 - RNA, 26 nt, Human
cagcuauugggaugguaucagcaugc

SEQ ID NO: 395843 - RNA, 19 nt, Human
cagcuuuguaagugucucc

SEQ ID NO: 395844 - RNA, 19 nt, Human
caggagaaauaagggcaca

SEQ ID NO: 395845 - RNA, 18 nt, Human
caggggcagcuuccugcu

SEQ ID NO: 395846 - RNA, 19 nt, Human
caggggcagcuuccugcug

SEQ ID NO: 395847 - RNA, 27 nt, Human
caguauagacaaggggcuccccaaaua

SEQ ID NO: 395848 - RNA, 24 nt, Human
cauaaacaaaacaagccacaguau

SEQ ID NO: 395849 - RNA, 23 nt, Human
ccagauuuuccugcaaaaucucc

SEQ ID NO: 395850 - RNA, 22 nt, Human
ccagucccucucuaauauuccu

SEQ ID NO: 395851 - RNA, 19 nt, Human
ccauaucuuccuaagcauc

SEQ ID NO: 395852 - RNA, 18 nt, Human
cccacucccugcugcugu

SEQ ID NO: 395853 - RNA, 24 nt, Human
cccaugaagguaaaaagugggguu

SEQ ID NO: 395854 - RNA, 20 nt, Human
cccuacggugcaaguggaau

SEQ ID NO: 395855 - RNA, 19 nt, Human
ccuccaugguaacucaauc

SEQ ID NO: 395856 - RNA, 19 nt, Human
ccucuguucuuuggugaga

SEQ ID NO: 395857 - RNA, 23 nt, Human
ccuuugcauguaucuuaaaaauc

SEQ ID NO: 395858 - RNA, 21 nt, Human
cgcugugcugaccaaacaaaa

SEQ ID NO: 395859 - RNA, 18 nt, Human
cguuccacugguaaaaca

SEQ ID NO: 395860 - RNA, 21 nt, Human
cuaaagggccaaggugagcac

SEQ ID NO: 395861 - RNA, 20 nt, Human
cuagaagaaauguuugggaa

SEQ ID NO: 395862 - RNA, 21 nt, Human
cuaucuauuaaagaaacaaaa

SEQ ID NO: 395863 - RNA, 23 nt, Human
cuaugcuacugcagccacacugu

SEQ ID NO: 395864 - RNA, 23 nt, Human
cucaaaaaugaaaaaaaaaaaaa

SEQ ID NO: 395865 - RNA, 18 nt, Human
cucucagcccacccacac

SEQ ID NO: 395866 - RNA, 23 nt, Human
cugaaaaccaucugcuauccuua

SEQ ID NO: 395867 - RNA, 21 nt, Human
cugaaaauguuacuuaaaaua

SEQ ID NO: 395868 - RNA, 24 nt, Human
cugguccucaaacagugccacugu

SEQ ID NO: 395869 - RNA, 25 nt, Human
cugguccucaaacagugccacugua

SEQ ID NO: 395870 - RNA, 21 nt, Human
cuucaaaucuuaacaccagau

SEQ ID NO: 395871 - RNA, 19 nt, Human
cuuguggacacaaauuuuc

SEQ ID NO: 395872 - RNA, 20 nt, Human
cuuuggugagaggggcagcc

SEQ ID NO: 395873 - RNA, 18 nt, Human
cuuugugucccacauuca

SEQ ID NO: 395874 - RNA, 23 nt, Human
cuuuuuuuuuuuuuuuuugacau

SEQ ID NO: 395875 - RNA, 24 nt, Human
cuuuuuuuuuuuuuuuuugacaug

SEQ ID NO: 395876 - RNA, 22 nt, Human
gaaaguaccuaaagucucaagg

SEQ ID NO: 395877 - RNA, 20 nt, Human
gaagaaagaacuagaagaaa

SEQ ID NO: 395878 - RNA, 22 nt, Human
gaauauuugauguuuuuccuug

SEQ ID NO: 395879 - RNA, 20 nt, Human
gaggcuuuucucugcuccau

SEQ ID NO: 395880 - RNA, 19 nt, Human
gccaaggugagcacuagca

SEQ ID NO: 395881 - RNA, 22 nt, Human
gccacuguacuuaguuccaugg

SEQ ID NO: 395882 - RNA, 22 nt, Human
ggacauggcccagccugcccca

SEQ ID NO: 395883 - RNA, 21 nt, Human
ggagcuuaaaugaaaagucca

SEQ ID NO: 395884 - RNA, 22 nt, Human
ggcgccuuuuuuuuuuuuuuuu

SEQ ID NO: 395885 - RNA, 19 nt, Human
ggcugugagacauggagcc

SEQ ID NO: 395886 - RNA, 19 nt, Human
gggaacacugguccucaaa

SEQ ID NO: 395887 - RNA, 21 nt, Human
gggucccuuccuucucugcuu

SEQ ID NO: 395888 - RNA, 20 nt, Human
ggugaaaccaaaagauaaua

SEQ ID NO: 395889 - RNA, 24 nt, Human
ggugagaggggcagccucuuugga

SEQ ID NO: 395890 - RNA, 23 nt, Human
guaaauaaccaaaccacgaagca

SEQ ID NO: 395891 - RNA, 20 nt, Human
gucauagaccgagcccccag

SEQ ID NO: 395892 - RNA, 18 nt, Human
gucauguuagccucugag

SEQ ID NO: 395893 - RNA, 20 nt, Human
gucuagacauauuggugggu

SEQ ID NO: 395894 - RNA, 22 nt, Human
guggaaagagcuaauguuuaca

SEQ ID NO: 395895 - RNA, 19 nt, Human
gugucuccacaccuucaca

SEQ ID NO: 395896 - RNA, 24 nt, Human
uaaaagacaaacaaugcauagaau

SEQ ID NO: 395897 - RNA, 21 nt, Human
uaaagccuagagugagaauuu

SEQ ID NO: 395898 - RNA, 19 nt, Human
uaaagucucaaggccaaaa

SEQ ID NO: 395899 - RNA, 26 nt, Human
uaaauuuucuucaucaaacuggaggc

SEQ ID NO: 395900 - RNA, 24 nt, Human
uaacucaaucucaaaaaugaaaaa

SEQ ID NO: 395901 - RNA, 23 nt, Human
uaacugagacccuuaaaggaguu

SEQ ID NO: 395902 - RNA, 25 nt, Human
uaaggacccaagcaaguagaaccag

SEQ ID NO: 395903 - RNA, 21 nt, Human
uaaguagcuucaaaaaguuuu

SEQ ID NO: 395904 - RNA, 26 nt, Human
uaagugucuccacaccuucacauuuu

SEQ ID NO: 395905 - RNA, 25 nt, Human
uacaugacauggaagaaagaacuag

SEQ ID NO: 395906 - RNA, 20 nt, Human
uaccaaguaauucaacacaa

SEQ ID NO: 395907 - RNA, 18 nt, Human
uacugcagccacacuguc

SEQ ID NO: 395908 - RNA, 19 nt, Human
uacuuuguucuuguccuug

SEQ ID NO: 395909 - RNA, 20 nt, Human
uagaaugcucuaugucaccc

SEQ ID NO: 395910 - RNA, 23 nt, Human
uagacaaggggcuccccaaauau

SEQ ID NO: 395911 - RNA, 21 nt, Human
uagcaauaacccaacacuagu

SEQ ID NO: 395912 - RNA, 18 nt, Human
uauagaaaacuagaaaau

SEQ ID NO: 395913 - RNA, 24 nt, Human
uauagauauauauauauauauaua

SEQ ID NO: 395914 - RNA, 18 nt, Human
uauagcagccauuuaaaa

SEQ ID NO: 395915 - RNA, 20 nt, Human
uauauagauauauauauaua

SEQ ID NO: 395916 - RNA, 20 nt, Human
uauauagauauauauauaua

SEQ ID NO: 395917 - RNA, 22 nt, Human
uauauagauauauauauauaua

SEQ ID NO: 395918 - RNA, 25 nt, Human
uauauagauauauauauauauauau

SEQ ID NO: 395919 - RNA, 19 nt, Human
uauauagcauucacauucc

SEQ ID NO: 395920 - RNA, 24 nt, Human
uauauauauauauauauaaaacau

SEQ ID NO: 395921 - RNA, 22 nt, Human
uaucaaaacaggcucaauggga

SEQ ID NO: 395922 - RNA, 20 nt, Human
uauccccacagcuuacaggg

SEQ ID NO: 395923 - RNA, 20 nt, Human
uaucuuuaaaccugcuaaca

SEQ ID NO: 395924 - RNA, 25 nt, Human
ucaagucaaguguaaugaaaaagua

SEQ ID NO: 395925 - RNA, 22 nt, Human
ucaaucucaaaaaugaaaaaaa

SEQ ID NO: 395926 - RNA, 23 nt, Human
ucaaugggcaacagcuauuggga

SEQ ID NO: 395927 - RNA, 20 nt, Human
uccacauuuuuaauguguga

SEQ ID NO: 395928 - RNA, 19 nt, Human
uccaccauccaaacagagc

SEQ ID NO: 395929 - RNA, 20 nt, Human
uccaccauccaaacagagcu

SEQ ID NO: 395930 - RNA, 23 nt, Human
uccaccauccaaacagagcugau

SEQ ID NO: 395931 - RNA, 22 nt, Human
uccauggccagaagagaagugc

SEQ ID NO: 395932 - RNA, 22 nt, Human
ucccacauucaaauccucucua

SEQ ID NO: 395933 - RNA, 24 nt, Human
ucccacauucaaauccucucuagu

SEQ ID NO: 395934 - RNA, 26 nt, Human
uccucaugcaaaguucacuguuuuac

SEQ ID NO: 395935 - RNA, 21 nt, Human
uccucugacacuacauuccag

SEQ ID NO: 395936 - RNA, 24 nt, Human
ucuaauauuccuauuuggcugaaa

SEQ ID NO: 395937 - RNA, 18 nt, Human
ucugcaaagguugagaag

SEQ ID NO: 395938 - RNA, 22 nt, Human
ucuuuggacauggcccagccuu

SEQ ID NO: 395939 - RNA, 19 nt, Human
ucuuuggugagaggggcag

SEQ ID NO: 395940 - RNA, 18 nt, Human
ugaaaaaaaaaaaaaagc

SEQ ID NO: 395941 - RNA, 19 nt, Human
ugacccaaaggaguggagc

SEQ ID NO: 395942 - RNA, 19 nt, Human
ugagaggggcagccucuuu

SEQ ID NO: 395943 - RNA, 18 nt, Human
ugaggagggugccuagag

SEQ ID NO: 395944 - RNA, 19 nt, Human
ugagucuagacauauuggu

SEQ ID NO: 395945 - RNA, 24 nt, Human
ugcaaaugggaccuuuguguccca

SEQ ID NO: 395946 - RNA, 22 nt, Human
uggaaaaacacaauaaauuaca

SEQ ID NO: 395947 - RNA, 19 nt, Human
uggcuggggcuguuuucug

SEQ ID NO: 395948 - RNA, 23 nt, Human
uggguauggaaaguaccuaaagu

SEQ ID NO: 395949 - RNA, 21 nt, Human
uguaaucaguauucacaaacc

SEQ ID NO: 395950 - RNA, 21 nt, Human
ugucacccacucccugcugcu

SEQ ID NO: 395951 - RNA, 19 nt, Human
ugugcugaccaaacaaaac

SEQ ID NO: 395952 - RNA, 25 nt, Human
uguguaguugaaauccucuucauca

SEQ ID NO: 395953 - RNA, 25 nt, Human
uguucuuucccuccaugguaacuca

SEQ ID NO: 395954 - RNA, 19 nt, Human
uguuuuacagucagagaac

SEQ ID NO: 395955 - RNA, 18 nt, Human
uuaaaaugucauacuuuu

SEQ ID NO: 395956 - RNA, 19 nt, Human
uuacaagggaccuugguua

SEQ ID NO: 395957 - RNA, 19 nt, Human
uuacagucagagaaccacu

SEQ ID NO: 395958 - RNA, 18 nt, Human
uuagacaggaacuaaagg

SEQ ID NO: 395959 - RNA, 19 nt, Human
uuccugggaauauuugaug

SEQ ID NO: 395960 - RNA, 21 nt, Human
uuuaaaaugucauacuuuuga

SEQ ID NO: 395961 - RNA, 18 nt, Human
uuuaacucucagcccacc

SEQ ID NO: 395962 - RNA, 21 nt, Human
uuuaugcugauaacccagaag

SEQ ID NO: 395963 - RNA, 18 nt, Human
uuuccaggaagcaucagu

SEQ ID NO: 395964 - RNA, 25 nt, Human
uuuccugcaaaaucuccaaauauuu

SEQ ID NO: 395965 - RNA, 24 nt, Human
uuugcaauuuuuaaaacaauauaa

SEQ ID NO: 395966 - RNA, 26 nt, Human
aaacaggaagcugauaagggggaccc

SEQ ID NO: 395967 - RNA, 19 nt, Human
aaacugccaccaaagacua

SEQ ID NO: 395968 - RNA, 21 nt, Human
aaggauucucugccgucccuc

SEQ ID NO: 395969 - RNA, 18 nt, Human
accaaagacuacacacaa

SEQ ID NO: 395970 - RNA, 18 nt, Human
agaaaaugaaugugccag

SEQ ID NO: 395971 - RNA, 18 nt, Human
agacaggaggaucgcuua

SEQ ID NO: 395972 - RNA, 19 nt, Human
agacaggaggaucgcuuag

SEQ ID NO: 395973 - RNA, 21 nt, Human
agaccccacagguuguggcag

SEQ ID NO: 395974 - RNA, 22 nt, Human
agccauugguccugcccuugga

SEQ ID NO: 395975 - RNA, 18 nt, Human
agcugagcugggcugggc

SEQ ID NO: 395976 - RNA, 18 nt, Human
agcugcaaaguggcauca

SEQ ID NO: 395977 - RNA, 25 nt, Human
aggcaagagaaguaaggcaauccaa

SEQ ID NO: 395978 - RNA, 21 nt, Human
aucagaccccacagguugugg

SEQ ID NO: 395979 - RNA, 23 nt, Human
aucgcuuagaaagccucaaagca

SEQ ID NO: 395980 - RNA, 20 nt, Human
caaagcagcauuuuaaaaac

SEQ ID NO: 395981 - RNA, 23 nt, Human
caacucuaaaagcauaaggacau

SEQ ID NO: 395982 - RNA, 18 nt, Human
caagccugugaggggcug

SEQ ID NO: 395983 - RNA, 22 nt, Human
caccucaagcccuuuuugacau

SEQ ID NO: 395984 - RNA, 18 nt, Human
cacugugcaaauucgucc

SEQ ID NO: 395985 - RNA, 18 nt, Human
caucagcauugguuuugg

SEQ ID NO: 395986 - RNA, 19 nt, Human
ccaucuuugcaaaucagaa

SEQ ID NO: 395987 - RNA, 19 nt, Human
cccaaggaaaaaaagcucc

SEQ ID NO: 395988 - RNA, 21 nt, Human
cccaaggaaaaaaagcuccuu

SEQ ID NO: 395989 - RNA, 20 nt, Human
cccagggcacaagcaaggaa

SEQ ID NO: 395990 - RNA, 23 nt, Human
ccuugcaauuuucaaacugccac

SEQ ID NO: 395991 - RNA, 19 nt, Human
cggguugggccuggguugg

SEQ ID NO: 395992 - RNA, 22 nt, Human
cucagcacugucuugguggaau

SEQ ID NO: 395993 - RNA, 26 nt, Human
cugagcugagcugggcugggcugggu

SEQ ID NO: 395994 - RNA, 20 nt, Human
cuuccugcacagccugaugu

SEQ ID NO: 395995 - RNA, 20 nt, Human
cuuucucacaugaauucuag

SEQ ID NO: 395996 - RNA, 20 nt, Human
gacucaauguugccagagcu

SEQ ID NO: 395997 - RNA, 19 nt, Human
gagaccgacagauuugcca

SEQ ID NO: 395998 - RNA, 18 nt, Human
gagguaucacugagcuua

SEQ ID NO: 395999 - RNA, 18 nt, Human
gcauccaucugcagauag

SEQ ID NO: 396000 - RNA, 18 nt, Human
gcugagcugggcugggcu

SEQ ID NO: 396001 - RNA, 28 nt, Human
gcugagcugggcugggcuggguuggggg

SEQ ID NO: 396002 - RNA, 18 nt, Human
gcugggcuggguugggcc

SEQ ID NO: 396003 - RNA, 21 nt, Human
ggaaacacucacccuaccaaa

SEQ ID NO: 396004 - RNA, 18 nt, Human
ggaaugggcacaaaucug

SEQ ID NO: 396005 - RNA, 25 nt, Human
ggcagcaaggucagaagagugcauc

SEQ ID NO: 396006 - RNA, 19 nt, Human
ggcugggcuggguugggcc

SEQ ID NO: 396007 - RNA, 19 nt, Human
gggccggguugggccuggg

SEQ ID NO: 396008 - RNA, 19 nt, Human
ggguugggccggguugggc

SEQ ID NO: 396009 - RNA, 18 nt, Human
gugacauauuauauacuu

SEQ ID NO: 396010 - RNA, 22 nt, Human
gugguuccugauuuuggucauu

SEQ ID NO: 396011 - RNA, 25 nt, Human
uagaaaacccccaagccugugaggg

SEQ ID NO: 396012 - RNA, 19 nt, Human
uagcugagcugagcugggc

SEQ ID NO: 396013 - RNA, 18 nt, Human
uauuaggaaugggcacaa

SEQ ID NO: 396014 - RNA, 22 nt, Human
ucacugagcuuauuuuagcugc

SEQ ID NO: 396015 - RNA, 26 nt, Human
ucagaaguagucuuaaagucccuccu

SEQ ID NO: 396016 - RNA, 21 nt, Human
ucuugggacacaucagacccc

SEQ ID NO: 396017 - RNA, 18 nt, Human
ucuuugcaaaucagaagu

SEQ ID NO: 396018 - RNA, 22 nt, Human
ucuuuggccgcaucuccucacu

SEQ ID NO: 396019 - RNA, 22 nt, Human
ugaaggcccaaggaaaaaaagc

SEQ ID NO: 396020 - RNA, 22 nt, Human
ugagaaaaugaaugugccaggu

SEQ ID NO: 396021 - RNA, 19 nt, Human
ugagcugggcugggcuggg

SEQ ID NO: 396022 - RNA, 22 nt, Human
ugauaaggucaucagcauuggu

SEQ ID NO: 396023 - RNA, 18 nt, Human
ugcaaauucguccuugac

SEQ ID NO: 396024 - RNA, 19 nt, Human
ugccagagcucugcuuccu

SEQ ID NO: 396025 - RNA, 22 nt, Human
ugcccuuggaguagcugagcug

SEQ ID NO: 396026 - RNA, 21 nt, Human
ugcgguucuuucaguuugaag

SEQ ID NO: 396027 - RNA, 19 nt, Human
uggaaacacucacccuacc

SEQ ID NO: 396028 - RNA, 19 nt, Human
uggcccagggcacaagcaa

SEQ ID NO: 396029 - RNA, 20 nt, Human
ugggcugggcuggguugggc

SEQ ID NO: 396030 - RNA, 19 nt, Human
ugggcuggguugggccggg

SEQ ID NO: 396031 - RNA, 20 nt, Human
ugggcuggguugggccgggu

SEQ ID NO: 396032 - RNA, 20 nt, Human
uggguugggccggguugggc

SEQ ID NO: 396033 - RNA, 21 nt, Human
ugguacagaagcccaggguca

SEQ ID NO: 396034 - RNA, 24 nt, Human
ugguacagaagcccagggucaugg

SEQ ID NO: 396035 - RNA, 19 nt, Human
uguacuugcauacacauag

SEQ ID NO: 396036 - RNA, 24 nt, Human
ugugguuccugauuuuggucauuu

SEQ ID NO: 396037 - RNA, 20 nt, Human
uguuaagaccaugcgccguc

SEQ ID NO: 396038 - RNA, 25 nt, Human
uucaguuugaaggcccaaggaaaaa

SEQ ID NO: 396039 - RNA, 23 nt, Human
uugggccggguugggccuggguu

SEQ ID NO: 396040 - RNA, 18 nt, Human
uugguccugcccuuggag

SEQ ID NO: 396041 - RNA, 19 nt, Human
uuucuuguuuuacaucuug

SEQ ID NO: 396042 - RNA, 20 nt, Human
uuucuuguuuuacaucuugg

SEQ ID NO: 396043 - RNA, 22 nt, Human
uuugaaggcccaaggaaaaaaa

SEQ ID NO: 396044 - RNA, 22 nt, Human
uuugccaugcauuugcaucuug

SEQ ID NO: 396045 - RNA, 25 nt, Human
uuuuuaugaaagggccuauuuuuuu

SEQ ID NO: 396046 - RNA, 22 nt, Human
aaaauaacaaaaaaagggaagg

SEQ ID NO: 396047 - RNA, 18 nt, Human
aacaaaaaaagggaaggg

SEQ ID NO: 396048 - RNA, 20 nt, Human
aacaaaaaaagggaagggga

SEQ ID NO: 396049 - RNA, 18 nt, Human
aaggggaggaaaaaaaaa

SEQ ID NO: 396050 - RNA, 20 nt, Human
aaguuuauaguucuuggaau

SEQ ID NO: 396051 - RNA, 18 nt, Human
acaguaugugggcauccu

SEQ ID NO: 396052 - RNA, 24 nt, Human
acagucugaaaaaauaacaaaaaa

SEQ ID NO: 396053 - RNA, 25 nt, Human
accaagaaacauuuaaaaaagaaaa

SEQ ID NO: 396054 - RNA, 24 nt, Human
agccguuauugcuaaacaggacgc

SEQ ID NO: 396055 - RNA, 18 nt, Human
agcuguuuuagcaauccc

SEQ ID NO: 396056 - RNA, 20 nt, Human
aggcgggggucuggaggggc

SEQ ID NO: 396057 - RNA, 24 nt, Human
aggggccaggagcggggacacagg

SEQ ID NO: 396058 - RNA, 23 nt, Human
caagugacacuugggcuuccucc

SEQ ID NO: 396059 - RNA, 19 nt, Human
cagucugaaaaaauaacaa

SEQ ID NO: 396060 - RNA, 19 nt, Human
cauccuguuccacauggga

SEQ ID NO: 396061 - RNA, 19 nt, Human
ccaacucucuccccucccc

SEQ ID NO: 396062 - RNA, 19 nt, Human
ccauugaagacaucucagu

SEQ ID NO: 396063 - RNA, 22 nt, Human
cccaacucucuccccuccccuc

SEQ ID NO: 396064 - RNA, 19 nt, Human
ccccuccccucuccgcucc

SEQ ID NO: 396065 - RNA, 22 nt, Human
ccccucuccgcuccuuuguucc

SEQ ID NO: 396066 - RNA, 24 nt, Human
cccuuuguuucuacaguagcuuua

SEQ ID NO: 396067 - RNA, 25 nt, Human
ccuccccucuccgcuccuuuguucc

SEQ ID NO: 396068 - RNA, 26 nt, Human
cuggcagccggccgggggcucucccu

SEQ ID NO: 396069 - RNA, 20 nt, Human
cuucuggcagccggccgggg

SEQ ID NO: 396070 - RNA, 18 nt, Human
gcccgcuccuugggugga

SEQ ID NO: 396071 - RNA, 24 nt, Human
gggaggaaaaaaaaaaaucacaug

SEQ ID NO: 396072 - RNA, 25 nt, Human
gggccaggagcggggacacagggga

SEQ ID NO: 396073 - RNA, 22 nt, Human
gucuggaggggccaggagcggg

SEQ ID NO: 396074 - RNA, 24 nt, Human
uaaaaaauauauaaaauaaugcaa

SEQ ID NO: 396075 - RNA, 18 nt, Human
uaacaaaaaaagggaagg

SEQ ID NO: 396076 - RNA, 19 nt, Human
uaacuuguaggacgugcuc

SEQ ID NO: 396077 - RNA, 18 nt, Human
uccacaugggaaugagaa

SEQ ID NO: 396078 - RNA, 26 nt, Human
ucuaccaagaaacauuuaaaaaagaa

SEQ ID NO: 396079 - RNA, 18 nt, Human
ucugaaaaaauaacaaaa

SEQ ID NO: 396080 - RNA, 19 nt, Human
ucuucuggcagccggccgg

SEQ ID NO: 396081 - RNA, 23 nt, Human
ugaaaaaauaacaaaaaaaggga

SEQ ID NO: 396082 - RNA, 24 nt, Human
ugaaaaaauaacaaaaaaagggaa

SEQ ID NO: 396083 - RNA, 22 nt, Human
ugauauugggaaccaucucaca

SEQ ID NO: 396084 - RNA, 23 nt, Human
ugcacagucugaaaaaauaacaa

SEQ ID NO: 396085 - RNA, 19 nt, Human
ugggcuuccucccgccagg

SEQ ID NO: 396086 - RNA, 21 nt, Human
uuauuaauuagacaguaugug

SEQ ID NO: 396087 - RNA, 20 nt, Human
uugggcuuccucccgccagg

SEQ ID NO: 396088 - RNA, 27 nt, Human
uuuuuuuuuuuuuuuuuacuuguuuga

SEQ ID NO: 396089 - RNA, 22 nt, Human
aacaguuuauuagcaucuguuc

SEQ ID NO: 396090 - RNA, 19 nt, Human
agcuccuggggagcugcuc

SEQ ID NO: 396091 - RNA, 22 nt, Human
caagugaagacugacucccucu

SEQ ID NO: 396092 - RNA, 23 nt, Human
cccuggacuccccaccugagcuc

SEQ ID NO: 396093 - RNA, 21 nt, Human
gaacaggucaggauggauggg

SEQ ID NO: 396094 - RNA, 19 nt, Human
gcaguacugaguccugggg

SEQ ID NO: 396095 - RNA, 18 nt, Human
gcuccuggggagcugcuc

SEQ ID NO: 396096 - RNA, 21 nt, Human
gcuccuggggagcugcucugu

SEQ ID NO: 396097 - RNA, 21 nt, Human
ggagcccuggacuccccaccu

SEQ ID NO: 396098 - RNA, 22 nt, Human
ggagcccuggacuccccaccug

SEQ ID NO: 396099 - RNA, 23 nt, Human
gggagcccuggacuccccaccug

SEQ ID NO: 396100 - RNA, 19 nt, Human
uaaaaaacaguuuauuagc

SEQ ID NO: 396101 - RNA, 20 nt, Human
ucccccagugcaagugaaga

SEQ ID NO: 396102 - RNA, 20 nt, Human
ucuccgggagcccuggacuc

SEQ ID NO: 396103 - RNA, 21 nt, Human
ugagcuccuggggagcugcuc

SEQ ID NO: 396104 - RNA, 18 nt, Human
ugaguccuggggcugaga

SEQ ID NO: 396105 - RNA, 21 nt, Human
uguccuugcucaucugacucc

SEQ ID NO: 396106 - RNA, 24 nt, Human
aacaaggaaacaaaggcccagaga

SEQ ID NO: 396107 - RNA, 18 nt, Human
aaggaaacaaaggcccag

SEQ ID NO: 396108 - RNA, 18 nt, Human
aaggauugggaucaaggu

SEQ ID NO: 396109 - RNA, 22 nt, Human
aaggauugggaucaaggugggg

SEQ ID NO: 396110 - RNA, 18 nt, Human
aagggccccuggagcugg

SEQ ID NO: 396111 - RNA, 20 nt, Human
aagggccccuggagcugggu

SEQ ID NO: 396112 - RNA, 22 nt, Human
acaaggaaacaaaggcccagag

SEQ ID NO: 396113 - RNA, 23 nt, Human
acagagcauuccucacagcaaag

SEQ ID NO: 396114 - RNA, 23 nt, Human
accaacaaggaaacaaaggccca

SEQ ID NO: 396115 - RNA, 25 nt, Human
accccagccccagucagcacagguc

SEQ ID NO: 396116 - RNA, 21 nt, Human
accugaacccagccagggcuc

SEQ ID NO: 396117 - RNA, 23 nt, Human
accuugggccuaucacugucccc

SEQ ID NO: 396118 - RNA, 21 nt, Human
agagcccccauaggcugccca

SEQ ID NO: 396119 - RNA, 21 nt, Human
agcuaugaaguagaucaaaca

SEQ ID NO: 396120 - RNA, 18 nt, Human
aggcagucgcuggccaga

SEQ ID NO: 396121 - RNA, 23 nt, Human
aggccccagacagccucugcgac

SEQ ID NO: 396122 - RNA, 26 nt, Human
aggcugcccacccugcccuggggucu

SEQ ID NO: 396123 - RNA, 18 nt, Human
aguccccucucuaccucc

SEQ ID NO: 396124 - RNA, 24 nt, Human
aguggacucagagucagaggccca

SEQ ID NO: 396125 - RNA, 22 nt, Human
auaaaggccccagacagccucu

SEQ ID NO: 396126 - RNA, 23 nt, Human
aucacuguccccacccagcucug

SEQ ID NO: 396127 - RNA, 18 nt, Human
augagcagguucaaucac

SEQ ID NO: 396128 - RNA, 23 nt, Human
caaacaauaugguggguggucaa

SEQ ID NO: 396129 - RNA, 25 nt, Human
caacaaggaaacaaaggcccagaga

SEQ ID NO: 396130 - RNA, 26 nt, Human
caauaugguggguggucaauggcuuu

SEQ ID NO: 396131 - RNA, 21 nt, Human
cacagcaaagggggugagugg

SEQ ID NO: 396132 - RNA, 25 nt, Human
cacaggcucaggaggcugagauggg

SEQ ID NO: 396133 - RNA, 19 nt, Human
cagcacaggucagggcucc

SEQ ID NO: 396134 - RNA, 23 nt, Human
cagccagggcucugacucccagu

SEQ ID NO: 396135 - RNA, 18 nt, Human
cagggcucugacucccag

SEQ ID NO: 396136 - RNA, 21 nt, Human
caguccccucucuaccuccuu

SEQ ID NO: 396137 - RNA, 18 nt, Human
ccaauaaggggcauauuu

SEQ ID NO: 396138 - RNA, 23 nt, Human
ccccagacagccucugcgacagu

SEQ ID NO: 396139 - RNA, 19 nt, Human
ccccauaggcugcccaccc

SEQ ID NO: 396140 - RNA, 20 nt, Human
ccccucucuaccuccuuguc

SEQ ID NO: 396141 - RNA, 18 nt, Human
cccugcccuggggucugg

SEQ ID NO: 396142 - RNA, 18 nt, Human
ccucucuaccuccuuguc

SEQ ID NO: 396143 - RNA, 21 nt, Human
ccugcccuggggucuggggcc

SEQ ID NO: 396144 - RNA, 18 nt, Human
cgagagcccccauaggcu

SEQ ID NO: 396145 - RNA, 23 nt, Human
cgagagcccccauaggcugccca

SEQ ID NO: 396146 - RNA, 18 nt, Human
cgcuggccagacguggga

SEQ ID NO: 396147 - RNA, 20 nt, Human
cgugagauuuaugcuuuaag

SEQ ID NO: 396148 - RNA, 21 nt, Human
cucugggugucccaagggccc

SEQ ID NO: 396149 - RNA, 23 nt, Human
cugaccaacaaggaaacaaaggc

SEQ ID NO: 396150 - RNA, 23 nt, Human
cuggagcugggugcagucauggg

SEQ ID NO: 396151 - RNA, 21 nt, Human
cuguccccacccagcucuggg

SEQ ID NO: 396152 - RNA, 19 nt, Human
cuuauaaccacgaggccac

SEQ ID NO: 396153 - RNA, 21 nt, Human
gagcugggugcagucauggga

SEQ ID NO: 396154 - RNA, 25 nt, Human
gaggcccagacucugcucuugggcc

SEQ ID NO: 396155 - RNA, 26 nt, Human
gaggcccagacucugcucuugggccu

SEQ ID NO: 396156 - RNA, 24 nt, Human
gaggcugagaugggccaggggcac

SEQ ID NO: 396157 - RNA, 18 nt, Human
gagggggcugccuccucu

SEQ ID NO: 396158 - RNA, 21 nt, Human
gaguggggacccacaggcuca

SEQ ID NO: 396159 - RNA, 23 nt, Human
gaguggggacccacaggcucagg

SEQ ID NO: 396160 - RNA, 19 nt, Human
gcagucuagggagcuggau

SEQ ID NO: 396161 - RNA, 19 nt, Human
gcccuggggucuggggccc

SEQ ID NO: 396162 - RNA, 21 nt, Human
gcgggggcgguggcuccuucc

SEQ ID NO: 396163 - RNA, 22 nt, Human
gcugcccacccugcccuggggu

SEQ ID NO: 396164 - RNA, 21 nt, Human
gcugucccuuuuuugccugcu

SEQ ID NO: 396165 - RNA, 23 nt, Human
gcuucacaauggugagguugagg

SEQ ID NO: 396166 - RNA, 21 nt, Human
ggagaaggcagucgcuggcca

SEQ ID NO: 396167 - RNA, 20 nt, Human
ggaugcagucuagggagcug

SEQ ID NO: 396168 - RNA, 23 nt, Human
ggcaggagagggaauguaggucu

SEQ ID NO: 396169 - RNA, 20 nt, Human
gggcugcugggauguggagg

SEQ ID NO: 396170 - RNA, 24 nt, Human
gggugaguggggacccacaggccg

SEQ ID NO: 396171 - RNA, 23 nt, Human
ggugggggcucucagcaggcugg

SEQ ID NO: 396172 - RNA, 24 nt, Human
gucucaggucaggcugggguuaua

SEQ ID NO: 396173 - RNA, 20 nt, Human
gugagguugagggggagggc

SEQ ID NO: 396174 - RNA, 21 nt, Human
guggacucagagucagaggcc

SEQ ID NO: 396175 - RNA, 18 nt, Human
uauugcaaacauggagug

SEQ ID NO: 396176 - RNA, 22 nt, Human
ucacuguccccacccagcucug

SEQ ID NO: 396177 - RNA, 21 nt, Human
ucagcaggcugggagcagggg

SEQ ID NO: 396178 - RNA, 20 nt, Human
ucccauggugauuaaauggg

SEQ ID NO: 396179 - RNA, 22 nt, Human
ucccccaguccccucucuaccu

SEQ ID NO: 396180 - RNA, 23 nt, Human
uccuugucuuggcugagucuuuu

SEQ ID NO: 396181 - RNA, 22 nt, Human
ugacucccagucccccaguccc

SEQ ID NO: 396182 - RNA, 24 nt, Human
ugacucccagucccccaguccccu

SEQ ID NO: 396183 - RNA, 21 nt, Human
uggaggccccgugagccccag

SEQ ID NO: 396184 - RNA, 19 nt, Human
ugggaagagguacgggaug

SEQ ID NO: 396185 - RNA, 22 nt, Human
ugggaagagguacgggaugcag

SEQ ID NO: 396186 - RNA, 23 nt, Human
ugggauaaggauugggaucaagg

SEQ ID NO: 396187 - RNA, 20 nt, Human
ugggauguggaggggaccuu

SEQ ID NO: 396188 - RNA, 23 nt, Human
ugggccuucacauuacccagccu

SEQ ID NO: 396189 - RNA, 20 nt, Human
uggggcccaauaaggggcau

SEQ ID NO: 396190 - RNA, 18 nt, Human
ugguggguggucaauggc

SEQ ID NO: 396191 - RNA, 21 nt, Human
ugguggguggucaauggcuuu

SEQ ID NO: 396192 - RNA, 20 nt, Human
ugguguggagggggcugccu

SEQ ID NO: 396193 - RNA, 22 nt, Human
ugguguggagggggcugccucc

SEQ ID NO: 396194 - RNA, 18 nt, Human
uguaggucuuuccucucu

SEQ ID NO: 396195 - RNA, 23 nt, Human
uguaggucuuuccucucucaccc

SEQ ID NO: 396196 - RNA, 18 nt, Human
uuccucacagcaaagggg

SEQ ID NO: 396197 - RNA, 19 nt, Human
uuccucacagcaaaggggg

SEQ ID NO: 396198 - RNA, 23 nt, Human
uuccucucucaccccagccccag

SEQ ID NO: 396199 - RNA, 21 nt, Human
uuggaggccccgugagcccca

SEQ ID NO: 396200 - RNA, 19 nt, Human
uuuugauaaaggccccaga

SEQ ID NO: 396201 - RNA, 20 nt, Human
aagucauaggacagggugga

SEQ ID NO: 396202 - RNA, 24 nt, Human
agaggagagggggaugugcuggag

SEQ ID NO: 396203 - RNA, 18 nt, Human
agagucccugggucaggg

SEQ ID NO: 396204 - RNA, 21 nt, Human
aucagcaaacagucuagacca

SEQ ID NO: 396205 - RNA, 20 nt, Human
cagcauugaagggcgugagg

SEQ ID NO: 396206 - RNA, 24 nt, Human
cagggcuguggggcucacagagca

SEQ ID NO: 396207 - RNA, 22 nt, Human
cauuuauuuugaguuagggugu

SEQ ID NO: 396208 - RNA, 18 nt, Human
ccccgugcagguugggga

SEQ ID NO: 396209 - RNA, 19 nt, Human
cccugggucaggggccagu

SEQ ID NO: 396210 - RNA, 19 nt, Human
ccggacagcaugggcgggg

SEQ ID NO: 396211 - RNA, 23 nt, Human
ccucuucucaggcuccucuaaag

SEQ ID NO: 396212 - RNA, 20 nt, Human
ccugggggagaggagagggg

SEQ ID NO: 396213 - RNA, 18 nt, Human
cugcccucugugguggcc

SEQ ID NO: 396214 - RNA, 22 nt, Human
cuggagcccggaguccaugucu

SEQ ID NO: 396215 - RNA, 18 nt, Human
gagaagcaggaaugcccc

SEQ ID NO: 396216 - RNA, 20 nt, Human
gaguccaugucuggcagccu

SEQ ID NO: 396217 - RNA, 21 nt, Human
gccuugggagauggagagggu

SEQ ID NO: 396218 - RNA, 23 nt, Human
gcucuggggagaaacggccaggg

SEQ ID NO: 396219 - RNA, 19 nt, Human
ggacagcaugggcgggggg

SEQ ID NO: 396220 - RNA, 21 nt, Human
ggagauggagaggguuuccca

SEQ ID NO: 396221 - RNA, 21 nt, Human
guggacccagccccaaccugg

SEQ ID NO: 396222 - RNA, 23 nt, Human
ucacagagcaggcagcucugggg

SEQ ID NO: 396223 - RNA, 22 nt, Human
uccauccugcagcauugaaggg

SEQ ID NO: 396224 - RNA, 19 nt, Human
ucccugcuccguguugucc

SEQ ID NO: 396225 - RNA, 19 nt, Human
ucccugggucaggggccag

SEQ ID NO: 396226 - RNA, 19 nt, Human
uccguguuguccaaguuug

SEQ ID NO: 396227 - RNA, 20 nt, Human
uccguguuguccaaguuugu

SEQ ID NO: 396228 - RNA, 23 nt, Human
uccugcagcauugaagggcguga

SEQ ID NO: 396229 - RNA, 20 nt, Human
ucugccucuucucaggcucc

SEQ ID NO: 396230 - RNA, 20 nt, Human
ucugccucuucucaggcucc

SEQ ID NO: 396231 - RNA, 19 nt, Human
ugagcucucccugcuccgu

SEQ ID NO: 396232 - RNA, 21 nt, Human
uggggcaggugacuaaccauc

SEQ ID NO: 396233 - RNA, 20 nt, Human
uggggcucacagagcaggca

SEQ ID NO: 396234 - RNA, 20 nt, Human
ugggggagaggagaggggga

SEQ ID NO: 396235 - RNA, 20 nt, Human
ugggggagaggagagggggg

SEQ ID NO: 396236 - RNA, 21 nt, Human
uguccaaguuuguacgggagg

SEQ ID NO: 396237 - RNA, 19 nt, Human
aacagaagcagccuugagu

SEQ ID NO: 396238 - RNA, 21 nt, Human
aacuaaggcuccacagcauca

SEQ ID NO: 396239 - RNA, 28 nt, Human
aagaaggagcaggcuucaguuaacagaa

SEQ ID NO: 396240 - RNA, 20 nt, Human
aagcacaagguaggaaaugc

SEQ ID NO: 396241 - RNA, 24 nt, Human
acuaaggcuccacagcaucagaca

SEQ ID NO: 396242 - RNA, 20 nt, Human
acuucuaucaggcccauccc

SEQ ID NO: 396243 - RNA, 18 nt, Human
agacaaugguggcccuga

SEQ ID NO: 396244 - RNA, 25 nt, Human
agcuuuagaauaagggaagaggauu

SEQ ID NO: 396245 - RNA, 19 nt, Human
aggccugaggacaggguug

SEQ ID NO: 396246 - RNA, 23 nt, Human
agggcagaacaagaaggagcagg

SEQ ID NO: 396247 - RNA, 24 nt, Human
aguggauggaauaccaaagaaaga

SEQ ID NO: 396248 - RNA, 21 nt, Human
aguuaacagaagcagccuuga

SEQ ID NO: 396249 - RNA, 20 nt, Human
aucaggcccaucccagugcu

SEQ ID NO: 396250 - RNA, 22 nt, Human
aucaggcccaucccagugcuga

SEQ ID NO: 396251 - RNA, 20 nt, Human
auggaauaccaaagaaagag

SEQ ID NO: 396252 - RNA, 20 nt, Human
augggucucuauggugaguu

SEQ ID NO: 396253 - RNA, 18 nt, Human
augguggcccugauuuuu

SEQ ID NO: 396254 - RNA, 21 nt, Human
cacaggaccuggccuuguggg

SEQ ID NO: 396255 - RNA, 23 nt, Human
cacauggcccuugagaaaugucc

SEQ ID NO: 396256 - RNA, 27 nt, Human
caccaggagagggacuuccuggauuuc

SEQ ID NO: 396257 - RNA, 19 nt, Human
caccagggaggaagcaaug

SEQ ID NO: 396258 - RNA, 21 nt, Human
cacuucuaucaggcccauccc

SEQ ID NO: 396259 - RNA, 18 nt, Human
cagggauagagagaggag

SEQ ID NO: 396260 - RNA, 25 nt, Human
cauccauaaucugaaagcuaagcac

SEQ ID NO: 396261 - RNA, 23 nt, Human
ccagggaggaagcaaugccuucu

SEQ ID NO: 396262 - RNA, 24 nt, Human
ccagugcugagagagcacuccagu

SEQ ID NO: 396263 - RNA, 18 nt, Human
ccugaggacaggguuguc

SEQ ID NO: 396264 - RNA, 22 nt, Human
ccuugagaaauguccuugcaga

SEQ ID NO: 396265 - RNA, 20 nt, Human
cucaacuaaggcuccacagc

SEQ ID NO: 396266 - RNA, 22 nt, Human
cugcaaugccagggaagacucu

SEQ ID NO: 396267 - RNA, 21 nt, Human
cuggcucuugaaucugcccuc

SEQ ID NO: 396268 - RNA, 22 nt, Human
cuuccuggauuucagggauaga

SEQ ID NO: 396269 - RNA, 18 nt, Human
gagaauggaggcaauagg

SEQ ID NO: 396270 - RNA, 19 nt, Human
gagaauggaggcaauagga

SEQ ID NO: 396271 - RNA, 24 nt, Human
gagaauggaggcaauaggaggaga

SEQ ID NO: 396272 - RNA, 19 nt, Human
gaggccaugacucaggaaa

SEQ ID NO: 396273 - RNA, 18 nt, Human
gagggcagaacaagaagg

SEQ ID NO: 396274 - RNA, 21 nt, Human
gcaaaucucuggagggcagaa

SEQ ID NO: 396275 - RNA, 18 nt, Human
ggagggcagaacaagaag

SEQ ID NO: 396276 - RNA, 27 nt, Human
ggauucuguggccucggcugguguuuc

SEQ ID NO: 396277 - RNA, 23 nt, Human
gugacccugugauagcacaggac

SEQ ID NO: 396278 - RNA, 22 nt, Human
uaaaagaggugacccugugaua

SEQ ID NO: 396279 - RNA, 21 nt, Human
uaagggaagaggauuugcugg

SEQ ID NO: 396280 - RNA, 19 nt, Human
uagcacaggaccuggccuu

SEQ ID NO: 396281 - RNA, 22 nt, Human
uaggaaaugcugaaaucucaac

SEQ ID NO: 396282 - RNA, 19 nt, Human
ucacaccagggaggaagca

SEQ ID NO: 396283 - RNA, 21 nt, Human
ucggcugguguuucuaacugu

SEQ ID NO: 396284 - RNA, 19 nt, Human
ucucaacuaaggcuccaca

SEQ ID NO: 396285 - RNA, 18 nt, Human
ugcaaaaccacauggccc

SEQ ID NO: 396286 - RNA, 22 nt, Human
ugcaaaaccacauggcccuuga

SEQ ID NO: 396287 - RNA, 19 nt, Human
uggaauaccaaagaaagag

SEQ ID NO: 396288 - RNA, 23 nt, Human
ugggucuggcugcuuaugguugu

SEQ ID NO: 396289 - RNA, 24 nt, Human
ugguuguguuggccuuuuugaccu

SEQ ID NO: 396290 - RNA, 20 nt, Human
uguccuugcagauugggcuu

SEQ ID NO: 396291 - RNA, 22 nt, Human
uucucaagggucgucagcaggu

SEQ ID NO: 396292 - RNA, 28 nt, Human
uugaaguagaguuuaauuuaaagcuuau

SEQ ID NO: 396293 - RNA, 18 nt, Human
uugaaucugcccucauau

SEQ ID NO: 396294 - RNA, 19 nt, Human
aaggagccagguggggcag

SEQ ID NO: 396295 - RNA, 23 nt, Human
aaggagccagguggggcaggggu

SEQ ID NO: 396296 - RNA, 24 nt, Human
agaaaggagccagguggggcaggg

SEQ ID NO: 396297 - RNA, 20 nt, Human
agaggacagagguggagcca

SEQ ID NO: 396298 - RNA, 23 nt, Human
aggaguagaaaggagccaggugg

SEQ ID NO: 396299 - RNA, 23 nt, Human
agggagggcagcuggagggcggg

SEQ ID NO: 396300 - RNA, 20 nt, Human
cacgguguuucuaacagagc

SEQ ID NO: 396301 - RNA, 23 nt, Human
caggcuagagagaggacagaggu

SEQ ID NO: 396302 - RNA, 21 nt, Human
ccaggcaggcuagagagagga

SEQ ID NO: 396303 - RNA, 24 nt, Human
cgacauagccaggaguagaaagga

SEQ ID NO: 396304 - RNA, 24 nt, Human
cuucccaaagcacacgguguuucu

SEQ ID NO: 396305 - RNA, 25 nt, Human
gcuagagagaggacagagguggagc

SEQ ID NO: 396306 - RNA, 20 nt, Human
ggcaggggugccagggaggg

SEQ ID NO: 396307 - RNA, 18 nt, Human
ugccagggagggcagcug

SEQ ID NO: 396308 - RNA, 23 nt, Human
aaaaaaaaaccuuucaaaaagga

SEQ ID NO: 396309 - RNA, 25 nt, Human
auaaaaaaaaaccuuucaaaaagga

SEQ ID NO: 396310 - RNA, 27 nt, Human
ccagccccucccucccuuccuuccucc

SEQ ID NO: 396311 - RNA, 23 nt, Human
ccccucccucccuuccuuccucc

SEQ ID NO: 396312 - RNA, 21 nt, Human
ccuuccucccucccucuccca

SEQ ID NO: 396313 - RNA, 22 nt, Human
ccuuccuuccucccucccucuc

SEQ ID NO: 396314 - RNA, 21 nt, Human
cucccucccuuccuuccuccc

SEQ ID NO: 396315 - RNA, 18 nt, Human
uccuuccucccucccucu

SEQ ID NO: 396316 - RNA, 19 nt, Human
uccuuccucccucccucuc

SEQ ID NO: 396317 - RNA, 19 nt, Human
aaagaagucauccaccucc

SEQ ID NO: 396318 - RNA, 21 nt, Human
aaaguugcacgaagucagagg

SEQ ID NO: 396319 - RNA, 21 nt, Human
acacuuucggauguaacugac

SEQ ID NO: 396320 - RNA, 18 nt, Human
agaaaacugaggucagcu

SEQ ID NO: 396321 - RNA, 22 nt, Human
aggaaaaguugcacgaagucag

SEQ ID NO: 396322 - RNA, 23 nt, Human
aggaaaaguugcacgaagucaga

SEQ ID NO: 396323 - RNA, 21 nt, Human
caacaggaaguacauaaccuc

SEQ ID NO: 396324 - RNA, 24 nt, Human
caacaggaaguacauaaccucgac

SEQ ID NO: 396325 - RNA, 19 nt, Human
caacggguucuggaauguu

SEQ ID NO: 396326 - RNA, 20 nt, Human
cagcaggugaaccauccuuc

SEQ ID NO: 396327 - RNA, 24 nt, Human
cagcuuggaaaggaguuccccgag

SEQ ID NO: 396328 - RNA, 24 nt, Human
caggaaguacauaaccucgacuca

SEQ ID NO: 396329 - RNA, 20 nt, Human
caggugaaccauccugucca

SEQ ID NO: 396330 - RNA, 24 nt, Human
ccaggauggggaggaaaaguugca

SEQ ID NO: 396331 - RNA, 22 nt, Human
cgacucagcaggugaaccaucc

SEQ ID NO: 396332 - RNA, 18 nt, Human
gagccucuuaaaacagcu

SEQ ID NO: 396333 - RNA, 20 nt, Human
gauggggaggaaaaguugca

SEQ ID NO: 396334 - RNA, 21 nt, Human
gcagugucuucuucaacucaa

SEQ ID NO: 396335 - RNA, 22 nt, Human
gcagugucuucuucaacucaag

SEQ ID NO: 396336 - RNA, 22 nt, Human
ggaaaggaguuccccgagugga

SEQ ID NO: 396337 - RNA, 19 nt, Human
ggauggggaggaaaaguug

SEQ ID NO: 396338 - RNA, 20 nt, Human
ggcccgcggcugacggccag

SEQ ID NO: 396339 - RNA, 23 nt, Human
uaacuggguucuugugagaaaac

SEQ ID NO: 396340 - RNA, 25 nt, Human
uccacaacggguucuggaauguucu

SEQ ID NO: 396341 - RNA, 22 nt, Human
uccuguccagcagugucuucuu

SEQ ID NO: 396342 - RNA, 19 nt, Human
ugacaaaauagcgaaugag

SEQ ID NO: 396343 - RNA, 20 nt, Human
ugacaaaauagcgaaugagu

SEQ ID NO: 396344 - RNA, 24 nt, Human
ugacaaaauagcgaaugagugaaa

SEQ ID NO: 396345 - RNA, 23 nt, Human
ugcacgaagucagagguauaagg

SEQ ID NO: 396346 - RNA, 18 nt, Human
ugcuccaucacguccagc

SEQ ID NO: 396347 - RNA, 23 nt, Human
ugcuucagcucuggaggaugcuc

SEQ ID NO: 396348 - RNA, 21 nt, Human
uggaaaggaguuccccgagug

SEQ ID NO: 396349 - RNA, 20 nt, Human
uggguucuugugagaaaacu

SEQ ID NO: 396350 - RNA, 24 nt, Human
uguccagcagugucuucuucaacu

SEQ ID NO: 396351 - RNA, 19 nt, Human
ugugagaaaacugagguca

SEQ ID NO: 396352 - RNA, 20 nt, Human
uuccccgaguggaguuccca

SEQ ID NO: 396353 - RNA, 21 nt, Human
uuuuuccacaacggguucugg

SEQ ID NO: 396354 - RNA, 19 nt, Human
uuuuuuuuuuuuuuuugcu

SEQ ID NO: 396355 - RNA, 21 nt, Human
uuuuuuuuuuuuuuuuugcuu

SEQ ID NO: 396356 - RNA, 27 nt, Human
uuuuuuuuuuuuuuuuuuuuuuugggg

SEQ ID NO: 396357 - RNA, 24 nt, Human
aaaaaaggaaauugcauaagaaga

SEQ ID NO: 396358 - RNA, 23 nt, Human
aaaaaggaaauugcauaagaaga

SEQ ID NO: 396359 - RNA, 20 nt, Human
aaaauuggaagcagucugga

SEQ ID NO: 396360 - RNA, 20 nt, Human
aaacagcuuggggggugcgg

SEQ ID NO: 396361 - RNA, 20 nt, Human
aacaaaggaaacaaacaaaa

SEQ ID NO: 396362 - RNA, 21 nt, Human
aacaaaggaaacaaacaaaaa

SEQ ID NO: 396363 - RNA, 22 nt, Human
aaccuucugaacauuuucaaca

SEQ ID NO: 396364 - RNA, 22 nt, Human
aaggaaacaaacaaaaaccuaa

SEQ ID NO: 396365 - RNA, 22 nt, Human
aaugugagagggcuaggaaaaa

SEQ ID NO: 396366 - RNA, 18 nt, Human
agaagaaaacagcuuggg

SEQ ID NO: 396367 - RNA, 21 nt, Human
agagcaaagcuacacaaagaa

SEQ ID NO: 396368 - RNA, 24 nt, Human
agagggcuaggaaaaaaaaauuca

SEQ ID NO: 396369 - RNA, 21 nt, Human
agauaaauaccucuuugggug

SEQ ID NO: 396370 - RNA, 23 nt, Human
aggggcaggcgccagggaaggcc

SEQ ID NO: 396371 - RNA, 18 nt, Human
aggggccacauuccaaaa

SEQ ID NO: 396372 - RNA, 20 nt, Human
agguagggugacucagguga

SEQ ID NO: 396373 - RNA, 22 nt, Human
aguaauaauaacaaaaaaggaa

SEQ ID NO: 396374 - RNA, 26 nt, Human
aucaccucgccgggaugaguaaaccc

SEQ ID NO: 396375 - RNA, 28 nt, Human
caaacaaaaaccuaaauacuuaaaaaaa

SEQ ID NO: 396376 - RNA, 18 nt, Human
caaagaccuugcagaccc

SEQ ID NO: 396377 - RNA, 19 nt, Human
caaaucaaaacagcaacaa

SEQ ID NO: 396378 - RNA, 24 nt, Human
cacagguagggugacucaggugag

SEQ ID NO: 396379 - RNA, 22 nt, Human
cacccccugcagaucuuguuaa

SEQ ID NO: 396380 - RNA, 21 nt, Human
cacuuccaaggaaagccugga

SEQ ID NO: 396381 - RNA, 20 nt, Human
cagccccugcgaggcagccu

SEQ ID NO: 396382 - RNA, 20 nt, Human
cagcccucuuucaucucuug

SEQ ID NO: 396383 - RNA, 23 nt, Human
caugacaagugggaguuuguaga

SEQ ID NO: 396384 - RNA, 24 nt, Human
cauucuccucccucuaaucacccc

SEQ ID NO: 396385 - RNA, 25 nt, Human
ccacgcgugcagcccucuuucaucu

SEQ ID NO: 396386 - RNA, 18 nt, Human
cccagaaggcugccgacc

SEQ ID NO: 396387 - RNA, 19 nt, Human
cccaggcgcgccgcgugca

SEQ ID NO: 396388 - RNA, 20 nt, Human
ccgaggcucauucuccuccc

SEQ ID NO: 396389 - RNA, 25 nt, Human
ccgguagugaggaccugggacaaag

SEQ ID NO: 396390 - RNA, 20 nt, Human
ccucaguuucuugaaaauaa

SEQ ID NO: 396391 - RNA, 20 nt, Human
ccuccaggauccauucccaa

SEQ ID NO: 396392 - RNA, 21 nt, Human
ccucgcgcaugggaucaccuc

SEQ ID NO: 396393 - RNA, 19 nt, Human
ccugcgcccgguagugagg

SEQ ID NO: 396394 - RNA, 22 nt, Human
ccuggacggagccaggcuccug

SEQ ID NO: 396395 - RNA, 19 nt, Human
cgaccaauaacgcucaccc

SEQ ID NO: 396396 - RNA, 21 nt, Human
cgccgcgugcaggcgccgggg

SEQ ID NO: 396397 - RNA, 18 nt, Human
cggagcagaggggcacag

SEQ ID NO: 396398 - RNA, 21 nt, Human
cgggcggggccgacaggggca

SEQ ID NO: 396399 - RNA, 26 nt, Human
cgugcaggcgccggggaaagcgcggg

SEQ ID NO: 396400 - RNA, 22 nt, Human
cuccuuucuuucuuuucauaca

SEQ ID NO: 396401 - RNA, 22 nt, Human
cucgggcccccacgcgugcagc

SEQ ID NO: 396402 - RNA, 22 nt, Human
cucgggcccccacgcgugcagc

SEQ ID NO: 396403 - RNA, 19 nt, Human
cuugguccuccuuucuuuc

SEQ ID NO: 396404 - RNA, 26 nt, Human
gaacauuuucaacacugucaaaaaua

SEQ ID NO: 396405 - RNA, 24 nt, Human
gaagugccuggugggaagggcuga

SEQ ID NO: 396406 - RNA, 26 nt, Human
gacaagugggaguuuguagagagaga

SEQ ID NO: 396407 - RNA, 21 nt, Human
gacccuguguggcagugucua

SEQ ID NO: 396408 - RNA, 25 nt, Human
gagagggcuaggaaaaaaaaauuca

SEQ ID NO: 396409 - RNA, 20 nt, Human
gcaaaucuggugaaaaagca

SEQ ID NO: 396410 - RNA, 22 nt, Human
gcacagguagggugacucaggu

SEQ ID NO: 396411 - RNA, 21 nt, Human
gcagacccuguguggcagugu

SEQ ID NO: 396412 - RNA, 20 nt, Human
gcccagugguccagugacgu

SEQ ID NO: 396413 - RNA, 24 nt, Human
gccgacaggggcaggcgccaggga

SEQ ID NO: 396414 - RNA, 19 nt, Human
gccggagcagaggggcaca

SEQ ID NO: 396415 - RNA, 23 nt, Human
ggaaaaccuuugucuuacaaaag

SEQ ID NO: 396416 - RNA, 23 nt, Human
ggaaacaaacaaaaaccuaaaua

SEQ ID NO: 396417 - RNA, 26 nt, Human
ggacgccgauggcgacagccucuccu

SEQ ID NO: 396418 - RNA, 21 nt, Human
ggacggagccaggcuccugga

SEQ ID NO: 396419 - RNA, 19 nt, Human
ggccugcuacuuauaacug

SEQ ID NO: 396420 - RNA, 22 nt, Human
gggaggagaaaacuaggaagaa

SEQ ID NO: 396421 - RNA, 19 nt, Human
gggcccccacgcgugcagc

SEQ ID NO: 396422 - RNA, 24 nt, Human
gggugcggggagggucuucuccag

SEQ ID NO: 396423 - RNA, 21 nt, Human
gugggaagggcugaugccgca

SEQ ID NO: 396424 - RNA, 22 nt, Human
uaagaacaaaggaaacaaacaa

SEQ ID NO: 396425 - RNA, 25 nt, Human
uaauuucuaugacaguccagcaaca

SEQ ID NO: 396426 - RNA, 23 nt, Human
uaccaaagagcaaagcuacacaa

SEQ ID NO: 396427 - RNA, 24 nt, Human
uaccaaagagcaaagcuacacaaa

SEQ ID NO: 396428 - RNA, 19 nt, Human
uacugagcagacacacccc

SEQ ID NO: 396429 - RNA, 22 nt, Human
uagaaauucucugaggaccuga

SEQ ID NO: 396430 - RNA, 23 nt, Human
uagaagaaaacagcuuggggggu

SEQ ID NO: 396431 - RNA, 20 nt, Human
uagggugacucaggugaguu

SEQ ID NO: 396432 - RNA, 23 nt, Human
ucccaugggcagggcagcuucca

SEQ ID NO: 396433 - RNA, 19 nt, Human
ucccucuaaucacccccuc

SEQ ID NO: 396434 - RNA, 19 nt, Human
uccuagcuuagcugaacca

SEQ ID NO: 396435 - RNA, 22 nt, Human
ucuagagcuguguaccuagccu

SEQ ID NO: 396436 - RNA, 25 nt, Human
ucuccagcuguaaugccagcuaagg

SEQ ID NO: 396437 - RNA, 18 nt, Human
ugaaauuucaggauaaau

SEQ ID NO: 396438 - RNA, 21 nt, Human
ugaaauuucaggauaaauuag

SEQ ID NO: 396439 - RNA, 24 nt, Human
ugaacugucuccugggagguguuu

SEQ ID NO: 396440 - RNA, 19 nt, Human
ugacaaggaacagugacag

SEQ ID NO: 396441 - RNA, 22 nt, Human
ugacaugcggaucggccagggc

SEQ ID NO: 396442 - RNA, 22 nt, Human
ugagagggcuaggaaaaaaaaa

SEQ ID NO: 396443 - RNA, 19 nt, Human
ugagcaaaagaaguagggu

SEQ ID NO: 396444 - RNA, 23 nt, Human
ugagcagacacacccccugcaga

SEQ ID NO: 396445 - RNA, 23 nt, Human
ugaggaccugauuaaggcuaggc

SEQ ID NO: 396446 - RNA, 19 nt, Human
ugaguuggcccaguuccug

SEQ ID NO: 396447 - RNA, 20 nt, Human
ugaguuggcccaguuccugg

SEQ ID NO: 396448 - RNA, 23 nt, Human
ugaguuggcccaguuccugggag

SEQ ID NO: 396449 - RNA, 23 nt, Human
ugccaucauugcccaguggucca

SEQ ID NO: 396450 - RNA, 24 nt, Human
ugccaucauugcccagugguccag

SEQ ID NO: 396451 - RNA, 18 nt, Human
ugcccagaaggcugccga

SEQ ID NO: 396452 - RNA, 20 nt, Human
ugccuggugggaagggcuga

SEQ ID NO: 396453 - RNA, 19 nt, Human
ugcggggagggucuucucc

SEQ ID NO: 396454 - RNA, 25 nt, Human
ugcggggagggucuucuccagcugu

SEQ ID NO: 396455 - RNA, 20 nt, Human
ugcuuugguagcaaagcugg

SEQ ID NO: 396456 - RNA, 22 nt, Human
ugcuuugguagcaaagcugggg

SEQ ID NO: 396457 - RNA, 21 nt, Human
uggaugggguggagccuagga

SEQ ID NO: 396458 - RNA, 18 nt, Human
uggcaugaaucaugcagu

SEQ ID NO: 396459 - RNA, 21 nt, Human
ugggaagggcugaugccgcau

SEQ ID NO: 396460 - RNA, 19 nt, Human
ugggaggagaaaacuagga

SEQ ID NO: 396461 - RNA, 23 nt, Human
uggggggugcggggagggucuuc

SEQ ID NO: 396462 - RNA, 24 nt, Human
uggggggugcggggagggucuucu

SEQ ID NO: 396463 - RNA, 25 nt, Human
ugggguggagccuaggauucugcau

SEQ ID NO: 396464 - RNA, 22 nt, Human
uggguguaauuucuaugacagu

SEQ ID NO: 396465 - RNA, 21 nt, Human
ugguccuccuuucuuucuuuu

SEQ ID NO: 396466 - RNA, 21 nt, Human
uggugaaaaagcaaauggcca

SEQ ID NO: 396467 - RNA, 19 nt, Human
uguagagagagagagaccg

SEQ ID NO: 396468 - RNA, 20 nt, Human
uguucuagauuaucuccaau

SEQ ID NO: 396469 - RNA, 21 nt, Human
uuagcugaaccaaagaccuug

SEQ ID NO: 396470 - RNA, 25 nt, Human
aaaaaaaaaaaaaaaaacaaaaaag

SEQ ID NO: 396471 - RNA, 23 nt, Human
aaaaaaaaaaaaaaaacaaaaaa

SEQ ID NO: 396472 - RNA, 22 nt, Human
aaaaaaaaaaaaaaacaaaaaa

SEQ ID NO: 396473 - RNA, 22 nt, Human
aaaaaaaagcacauuccuagaa

SEQ ID NO: 396474 - RNA, 28 nt, Human
aaaaaaagaaaaaaccaacaauucuuca

SEQ ID NO: 396475 - RNA, 23 nt, Human
aaaaaagcacauuccuagaaaaa

SEQ ID NO: 396476 - RNA, 23 nt, Human
aaaaauucuuuacucagucacac

SEQ ID NO: 396477 - RNA, 23 nt, Human
aaacaaaaaaaagaaaaaaccaa

SEQ ID NO: 396478 - RNA, 23 nt, Human
aaacagagaaaaaaggaauccca

SEQ ID NO: 396479 - RNA, 23 nt, Human
aagcaaguagaugcuuuuucaaa

SEQ ID NO: 396480 - RNA, 21 nt, Human
aaggagaagugauccuggggg

SEQ ID NO: 396481 - RNA, 25 nt, Human
aaggagaagugauccuggggguuuu

SEQ ID NO: 396482 - RNA, 20 nt, Human
aagugauccuggggguuuuc

SEQ ID NO: 396483 - RNA, 18 nt, Human
acaaaaaaaagaaaaaac

SEQ ID NO: 396484 - RNA, 21 nt, Human
acaaaaaaaagaaaaaaccaa

SEQ ID NO: 396485 - RNA, 23 nt, Human
acaaaaaaaagcacauuccuaga

SEQ ID NO: 396486 - RNA, 18 nt, Human
acacugguuugauucuga

SEQ ID NO: 396487 - RNA, 21 nt, Human
acaguuccuccauauuuucuu

SEQ ID NO: 396488 - RNA, 23 nt, Human
acaguuccuccauauuuucuuca

SEQ ID NO: 396489 - RNA, 23 nt, Human
accuaguaauuacggaaaaaaga

SEQ ID NO: 396490 - RNA, 18 nt, Human
acucucaacaaagaugac

SEQ ID NO: 396491 - RNA, 24 nt, Human
agaaaaaaaacauaacuuucagaa

SEQ ID NO: 396492 - RNA, 21 nt, Human
agaguggaaugggcaccuucc

SEQ ID NO: 396493 - RNA, 20 nt, Human
agauaaaacagagaaaaaag

SEQ ID NO: 396494 - RNA, 21 nt, Human
agcaaaaaaaaaaaaaaaaaa

SEQ ID NO: 396495 - RNA, 24 nt, Human
agcgguggcgagggcggcgagggc

SEQ ID NO: 396496 - RNA, 20 nt, Human
agucuuugucucccuuuccu

SEQ ID NO: 396497 - RNA, 21 nt, Human
auaagaaacaguaauauacaa

SEQ ID NO: 396498 - RNA, 25 nt, Human
auagaaaaaaaacauaacuuucaga

SEQ ID NO: 396499 - RNA, 23 nt, Human
caaaaaaaagcacauuccuagaa

SEQ ID NO: 396500 - RNA, 24 nt, Human
caaaaaaaagcacauuccuagaaa

SEQ ID NO: 396501 - RNA, 20 nt, Human
caaaaauucuuuacucaguc

SEQ ID NO: 396502 - RNA, 22 nt, Human
caauagcacccugcucugugac

SEQ ID NO: 396503 - RNA, 21 nt, Human
cagaauaaguaaaaaauaaau

SEQ ID NO: 396504 - RNA, 24 nt, Human
ccagaaggugcaauaccagcauug

SEQ ID NO: 396505 - RNA, 22 nt, Human
cccauaacauccacucugagca

SEQ ID NO: 396506 - RNA, 23 nt, Human
ccuagaaaaagguauuggcaaau

SEQ ID NO: 396507 - RNA, 21 nt, Human
ccuuuugucauuuuuuucucu

SEQ ID NO: 396508 - RNA, 22 nt, Human
cgagggcggcgagggcuggagg

SEQ ID NO: 396509 - RNA, 19 nt, Human
cggccgggagcgguggcga

SEQ ID NO: 396510 - RNA, 23 nt, Human
cuaaauuuccaggcagaacagag

SEQ ID NO: 396511 - RNA, 19 nt, Human
cucugugacaaaggcagag

SEQ ID NO: 396512 - RNA, 20 nt, Human
cucugugacaaaggcagagu

SEQ ID NO: 396513 - RNA, 18 nt, Human
cugaaugcugaugagucu

SEQ ID NO: 396514 - RNA, 19 nt, Human
cugaugcaagcacagaaaa

SEQ ID NO: 396515 - RNA, 20 nt, Human
gagaaaaggaauguuuuagu

SEQ ID NO: 396516 - RNA, 23 nt, Human
gcaaaaaaaaaaaaaaaaaaaaa

SEQ ID NO: 396517 - RNA, 20 nt, Human
gcaaauggauaaccaacuaa

SEQ ID NO: 396518 - RNA, 21 nt, Human
gcaauagucuuucaauccccu

SEQ ID NO: 396519 - RNA, 21 nt, Human
gcacagaaaagaaggaagcca

SEQ ID NO: 396520 - RNA, 23 nt, Human
gcgagggcuggaggggcgcgggg

SEQ ID NO: 396521 - RNA, 23 nt, Human
gggaggucaaaagcaaaaaaaaa

SEQ ID NO: 396522 - RNA, 22 nt, Human
guaaaacaguauugaagaccuc

SEQ ID NO: 396523 - RNA, 22 nt, Human
guccucccuucucugacaugcc

SEQ ID NO: 396524 - RNA, 20 nt, Human
gugacaaaggcagaguggaa

SEQ ID NO: 396525 - RNA, 24 nt, Human
uaaaacagagaaaaaaggaauccc

SEQ ID NO: 396526 - RNA, 27 nt, Human
uaaaacagagaaaaaaggaaucccauu

SEQ ID NO: 396527 - RNA, 23 nt, Human
uaaaacaguauugaagaccucau

SEQ ID NO: 396528 - RNA, 21 nt, Human
uaauucuagugaguccucccu

SEQ ID NO: 396529 - RNA, 23 nt, Human
uaccagcauugguuuaugaucag

SEQ ID NO: 396530 - RNA, 25 nt, Human
uagaaaaaaaacauaacuuucagaa

SEQ ID NO: 396531 - RNA, 21 nt, Human
uaguaaaaaugggaggucaaa

SEQ ID NO: 396532 - RNA, 22 nt, Human
uaguaaaaaugggaggucaaaa

SEQ ID NO: 396533 - RNA, 23 nt, Human
uauaccagaugauagaaaaaaaa

SEQ ID NO: 396534 - RNA, 23 nt, Human
ucaaaagcaaaaaaaaaaaaaaa

SEQ ID NO: 396535 - RNA, 18 nt, Human
ucacacaacaaaugaggu

SEQ ID NO: 396536 - RNA, 18 nt, Human
ucggguaugcgcccuccc

SEQ ID NO: 396537 - RNA, 25 nt, Human
ucuagaaugaagccaccaauuucaa

SEQ ID NO: 396538 - RNA, 26 nt, Human
ucuugcaagagauuugcugauaaaug

SEQ ID NO: 396539 - RNA, 24 nt, Human
ugaaaaugcuuuugaguccacugc

SEQ ID NO: 396540 - RNA, 18 nt, Human
ugaagcaaguagaugcuu

SEQ ID NO: 396541 - RNA, 20 nt, Human
ugaagcaaguagaugcuuuu

SEQ ID NO: 396542 - RNA, 23 nt, Human
ugaagcaaguagaugcuuuuuca

SEQ ID NO: 396543 - RNA, 18 nt, Human
ugaauaauccuucagcca

SEQ ID NO: 396544 - RNA, 22 nt, Human
ugacuuaguaccgaacauguaa

SEQ ID NO: 396545 - RNA, 25 nt, Human
ugacuuuuuagguacuacaguagcu

SEQ ID NO: 396546 - RNA, 23 nt, Human
ugagaaaauaauuuauaaaaaua

SEQ ID NO: 396547 - RNA, 22 nt, Human
ugauccuggggguuuucucaag

SEQ ID NO: 396548 - RNA, 24 nt, Human
ugcaagcacagaaaagaaggaagc

SEQ ID NO: 396549 - RNA, 24 nt, Human
ugccauuguaaccauaaaaauaua

SEQ ID NO: 396550 - RNA, 19 nt, Human
ugcucagagauggccucac

SEQ ID NO: 396551 - RNA, 18 nt, Human
uggaaugggcaccuuccc

SEQ ID NO: 396552 - RNA, 21 nt, Human
uggaggggcgcggggaaugcc

SEQ ID NO: 396553 - RNA, 22 nt, Human
uggcgagggcggcgagggcugg

SEQ ID NO: 396554 - RNA, 28 nt, Human
ugggaggcagcuggugcucacugagaug

SEQ ID NO: 396555 - RNA, 22 nt, Human
uguacaaaaaaaagcacauucc

SEQ ID NO: 396556 - RNA, 19 nt, Human
uguguacaaaaaaaagcac

SEQ ID NO: 396557 - RNA, 27 nt, Human
uuaaaacauuugcaaauggauaaccaa

SEQ ID NO: 396558 - RNA, 21 nt, Human
uucaaaaggaaaccaaagcaa

SEQ ID NO: 396559 - RNA, 22 nt, Human
uucagaaauuguauuuaacauu

SEQ ID NO: 396560 - RNA, 21 nt, Human
uuccagaauaaguaaaaaaua

SEQ ID NO: 396561 - RNA, 22 nt, Human
uuccuguuccaugaauaauccu

SEQ ID NO: 396562 - RNA, 19 nt, Human
uuguauguaaguuucaccu

SEQ ID NO: 396563 - RNA, 20 nt, Human
uuuauuguuguuccuuguac

SEQ ID NO: 396564 - RNA, 23 nt, Human
uuucagaaauuguauuuaacauu

SEQ ID NO: 396565 - RNA, 21 nt, Human
uuugucauuuuuuucucuuuu

SEQ ID NO: 396566 - RNA, 18 nt, Human
uuuuccugcuacaucugc

SEQ ID NO: 396567 - RNA, 23 nt, Human
uuuuccugcuacaucugcacaag

SEQ ID NO: 396568 - RNA, 26 nt, Human
aacacuuucagccauuacugaaaaua

SEQ ID NO: 396569 - RNA, 20 nt, Human
aagcaacaaguuaaaauaca

SEQ ID NO: 396570 - RNA, 21 nt, Human
aagcauuucagaauggaaaua

SEQ ID NO: 396571 - RNA, 24 nt, Human
caacaaguuaaaauacaguaaugc

SEQ ID NO: 396572 - RNA, 27 nt, Human
cagcacauugugcuaaaaguauggaac

SEQ ID NO: 396573 - RNA, 18 nt, Human
cuaaaaguauggaacagu

SEQ ID NO: 396574 - RNA, 18 nt, Human
cuugcuggaaaucucugu

SEQ ID NO: 396575 - RNA, 19 nt, Human
gaaauaaaaacugaaccca

SEQ ID NO: 396576 - RNA, 21 nt, Human
gcaauaaagcagguaacugaa

SEQ ID NO: 396577 - RNA, 20 nt, Human
gcccucuucauucuuaauuc

SEQ ID NO: 396578 - RNA, 22 nt, Human
ggaaaucucuguauguugaacu

SEQ ID NO: 396579 - RNA, 18 nt, Human
ggagaugcaaauggcccu

SEQ ID NO: 396580 - RNA, 20 nt, Human
ucaaacaauaaaaaggaagc

SEQ ID NO: 396581 - RNA, 20 nt, Human
uccacauggagcaauaaagc

SEQ ID NO: 396582 - RNA, 19 nt, Human
ugcuggaaaucucuguaug

SEQ ID NO: 396583 - RNA, 25 nt, Human
uggaaauaaaaacugaacccaggca

SEQ ID NO: 396584 - RNA, 18 nt, Human
ugugcuaaaaguauggaa

SEQ ID NO: 396585 - RNA, 26 nt, Human
uuaauuacaugauaugacaacucaua

SEQ ID NO: 396586 - RNA, 19 nt, Human
uuacugaaaauaaacaugu

SEQ ID NO: 396587 - RNA, 21 nt, Human
uucaaacaauaaaaaggaagc

SEQ ID NO: 396588 - RNA, 24 nt, Human
uucagaauggaaauaaaaacugaa

SEQ ID NO: 396589 - RNA, 21 nt, Human
aagacagccgcucagccaccc

SEQ ID NO: 396590 - RNA, 18 nt, Human
acagccgcucagccaccc

SEQ ID NO: 396591 - RNA, 22 nt, Human
accgccgccaccgccgccacgg

SEQ ID NO: 396592 - RNA, 19 nt, Human
agagaggagacguguuagu

SEQ ID NO: 396593 - RNA, 22 nt, Human
agccacgaaagcccuccagaug

SEQ ID NO: 396594 - RNA, 20 nt, Human
agccugccccauccugugcc

SEQ ID NO: 396595 - RNA, 22 nt, Human
aggcacugugccagagccugcc

SEQ ID NO: 396596 - RNA, 19 nt, Human
caaagaagagccgucuccu

SEQ ID NO: 396597 - RNA, 28 nt, Human
caacaaagaccaggcccuggcagccacg

SEQ ID NO: 396598 - RNA, 22 nt, Human
caagacagccgcucagccaccc

SEQ ID NO: 396599 - RNA, 22 nt, Human
caagaggcaagacagccgcuca

SEQ ID NO: 396600 - RNA, 22 nt, Human
cacccugccagucccaggcacu

SEQ ID NO: 396601 - RNA, 23 nt, Human
ccaccgccgccacggccgccuga

SEQ ID NO: 396602 - RNA, 21 nt, Human
ccccauccugugccgggggcu

SEQ ID NO: 396603 - RNA, 26 nt, Human
ccgccaccgccgccacggccgccuga

SEQ ID NO: 396604 - RNA, 24 nt, Human
ccgccgccaccgccgccacggccg

SEQ ID NO: 396605 - RNA, 20 nt, Human
ccgccgccacggccgccuga

SEQ ID NO: 396606 - RNA, 21 nt, Human
ccucccuccuuccaccugcua

SEQ ID NO: 396607 - RNA, 20 nt, Human
cucccuccuuccaccugcua

SEQ ID NO: 396608 - RNA, 22 nt, Human
cugacaagggacguuucccaga

SEQ ID NO: 396609 - RNA, 18 nt, Human
cugcgccugcggcucccu

SEQ ID NO: 396610 - RNA, 26 nt, Human
cugcggcucccucccuccuuccaccu

SEQ ID NO: 396611 - RNA, 22 nt, Human
cuggcagccacgaaagcccucc

SEQ ID NO: 396612 - RNA, 19 nt, Human
gccaccgccgccacggccg

SEQ ID NO: 396613 - RNA, 20 nt, Human
gccgccaccgccgccacggc

SEQ ID NO: 396614 - RNA, 20 nt, Human
gccgcccgcgcucccggggc

SEQ ID NO: 396615 - RNA, 21 nt, Human
ggccacgaccggguggggaca

SEQ ID NO: 396616 - RNA, 19 nt, Human
ggcuaaggcaccagggcgg

SEQ ID NO: 396617 - RNA, 18 nt, Human
gggcggcgggagcgcagg

SEQ ID NO: 396618 - RNA, 24 nt, Human
ggugggccacgaccggguggggaa

SEQ ID NO: 396619 - RNA, 18 nt, Human
uaaggcaccagggcggcg

SEQ ID NO: 396620 - RNA, 19 nt, Human
uaaggcaccagggcggcgg

SEQ ID NO: 396621 - RNA, 21 nt, Human
ucugcgccugcggcucccucc

SEQ ID NO: 396622 - RNA, 21 nt, Human
ugccagagccugccccauccu

SEQ ID NO: 396623 - RNA, 20 nt, Human
ugccccauccugugccgggg

SEQ ID NO: 396624 - RNA, 20 nt, Human
uguuuccuuuuaaugaccuc

SEQ ID NO: 396625 - RNA, 20 nt, Human
acagaaaaagagcauguaga

SEQ ID NO: 396626 - RNA, 25 nt, Human
acagugaaaaaugauucccuuuuca

SEQ ID NO: 396627 - RNA, 18 nt, Human
agaaaauagaccaaagag

SEQ ID NO: 396628 - RNA, 20 nt, Human
aggggaugggggcguuggaa

SEQ ID NO: 396629 - RNA, 20 nt, Human
agugcacagcaggcagcccu

SEQ ID NO: 396630 - RNA, 23 nt, Human
auccggguggagaagggcuccag

SEQ ID NO: 396631 - RNA, 19 nt, Human
aucuguuaagaauauggga

SEQ ID NO: 396632 - RNA, 22 nt, Human
caacugccaggccagcccaggc

SEQ ID NO: 396633 - RNA, 18 nt, Human
cagcaggcagcccucugg

SEQ ID NO: 396634 - RNA, 20 nt, Human
cagcccucuggggagcagau

SEQ ID NO: 396635 - RNA, 22 nt, Human
caggagaaaguaggaaaucuug

SEQ ID NO: 396636 - RNA, 24 nt, Human
ccaggccagcccaggccuuugcag

SEQ ID NO: 396637 - RNA, 22 nt, Human
cccaagugcacagcaggcagcc

SEQ ID NO: 396638 - RNA, 19 nt, Human
ccccugaauccuuccuggg

SEQ ID NO: 396639 - RNA, 24 nt, Human
ccucuccccugaauccuuccuggg

SEQ ID NO: 396640 - RNA, 24 nt, Human
cgggccaagggugaggaaucuauc

SEQ ID NO: 396641 - RNA, 19 nt, Human
cugggcagaguaggguggg

SEQ ID NO: 396642 - RNA, 18 nt, Human
gacccaagugcacagcag

SEQ ID NO: 396643 - RNA, 18 nt, Human
gcuggcguggcucccugu

SEQ ID NO: 396644 - RNA, 23 nt, Human
ggagaagggcuccaggacccaag

SEQ ID NO: 396645 - RNA, 24 nt, Human
ggaggcggcuuaggcucuugcacu

SEQ ID NO: 396646 - RNA, 23 nt, Human
ggcucuugcacuucugggcagag

SEQ ID NO: 396647 - RNA, 18 nt, Human
gggaucagagucccacug

SEQ ID NO: 396648 - RNA, 23 nt, Human
uacagugaaaaaugauucccuuu

SEQ ID NO: 396649 - RNA, 18 nt, Human
uacccuuucucuguuuuc

SEQ ID NO: 396650 - RNA, 25 nt, Human
uagcugcucugaugaguauugcuga

SEQ ID NO: 396651 - RNA, 24 nt, Human
ucaagaguaaagaucuguuaagaa

SEQ ID NO: 396652 - RNA, 18 nt, Human
ucacagaaaaagagcaug

SEQ ID NO: 396653 - RNA, 19 nt, Human
uccggguggagaagggcuc

SEQ ID NO: 396654 - RNA, 22 nt, Human
ugcagggaagggagcuguacau

SEQ ID NO: 396655 - RNA, 21 nt, Human
ugccaggccagcccaggccuu

SEQ ID NO: 396656 - RNA, 24 nt, Human
ugccaggccagcccaggccuuugc

SEQ ID NO: 396657 - RNA, 23 nt, Human
uggccggggugucuggcuggcgu

SEQ ID NO: 396658 - RNA, 23 nt, Human
uggcucccuguuuggggccucuc

SEQ ID NO: 396659 - RNA, 19 nt, Human
uggcuggcguggcucccug

SEQ ID NO: 396660 - RNA, 23 nt, Human
uggcuggcguggcucccuguuug

SEQ ID NO: 396661 - RNA, 19 nt, Human
ugggcagaguagggugggg

SEQ ID NO: 396662 - RNA, 19 nt, Human
uggggccucuccccugaau

SEQ ID NO: 396663 - RNA, 25 nt, Human
uguacaugagacaaugcugaugucg

SEQ ID NO: 396664 - RNA, 18 nt, Human
uucaggagaaaguaggaa

SEQ ID NO: 396665 - RNA, 21 nt, Human
uuucaguccuguguaucccuu

SEQ ID NO: 396666 - RNA, 19 nt, Human
uuuucaguccuguguaucc

SEQ ID NO: 396667 - RNA, 27 nt, Human
uuuuuuuuuuuuuuuuuuuuucugggg

SEQ ID NO: 396668 - RNA, 20 nt, Human
aaccaaggaagcacagacaa

SEQ ID NO: 396669 - RNA, 18 nt, Human
aacuacacagcaaaaagc

SEQ ID NO: 396670 - RNA, 18 nt, Human
aagagacuggggugggca

SEQ ID NO: 396671 - RNA, 22 nt, Human
acacagcaaaaagcaagggagu

SEQ ID NO: 396672 - RNA, 22 nt, Human
acacccacaggccacccacccc

SEQ ID NO: 396673 - RNA, 22 nt, Human
acucuaugccaggcccugcacc

SEQ ID NO: 396674 - RNA, 19 nt, Human
acuggggugggcacacugg

SEQ ID NO: 396675 - RNA, 26 nt, Human
acuucaauuccauccaggaugcccuc

SEQ ID NO: 396676 - RNA, 24 nt, Human
aggcccuagggcacagcacccaug

SEQ ID NO: 396677 - RNA, 19 nt, Human
cacaggccacccacccccu

SEQ ID NO: 396678 - RNA, 20 nt, Human
cacccacaggccacccaccc

SEQ ID NO: 396679 - RNA, 22 nt, Human
cacccacaggccacccaccccc

SEQ ID NO: 396680 - RNA, 20 nt, Human
cacccaugauacccgccuca

SEQ ID NO: 396681 - RNA, 18 nt, Human
cacccccugccacccagg

SEQ ID NO: 396682 - RNA, 21 nt, Human
cacuccuucuccuuccccauc

SEQ ID NO: 396683 - RNA, 23 nt, Human
caggcagagggaacuacacagca

SEQ ID NO: 396684 - RNA, 20 nt, Human
caggccacccacccccugcc

SEQ ID NO: 396685 - RNA, 24 nt, Human
caggccacccacccccugccaccc

SEQ ID NO: 396686 - RNA, 19 nt, Human
ccacaggccacccaccccc

SEQ ID NO: 396687 - RNA, 22 nt, Human
ccaggcagagaaagggggaagg

SEQ ID NO: 396688 - RNA, 20 nt, Human
ccaggcagagggaacuacac

SEQ ID NO: 396689 - RNA, 18 nt, Human
ccaggcccugcaccgggc

SEQ ID NO: 396690 - RNA, 20 nt, Human
cccacccccugccacccagg

SEQ ID NO: 396691 - RNA, 20 nt, Human
cccccugccacccaggcccu

SEQ ID NO: 396692 - RNA, 20 nt, Human
cccggcacacccacaggcca

SEQ ID NO: 396693 - RNA, 19 nt, Human
ccggcacacccacaggcca

SEQ ID NO: 396694 - RNA, 20 nt, Human
ccgggcugugugcuggggga

SEQ ID NO: 396695 - RNA, 18 nt, Human
ccuccugcucuuggggca

SEQ ID NO: 396696 - RNA, 23 nt, Human
ccuccugcucuuggggcagaggc

SEQ ID NO: 396697 - RNA, 24 nt, Human
ccugccacccaggcccuagggcac

SEQ ID NO: 396698 - RNA, 18 nt, Human
ccuucuccuuccccaucg

SEQ ID NO: 396699 - RNA, 22 nt, Human
cgcucccagcuuucaggcaccu

SEQ ID NO: 396700 - RNA, 24 nt, Human
cggcacacccacaggccacccacc

SEQ ID NO: 396701 - RNA, 23 nt, Human
cucagcacuuggccuuucacacc

SEQ ID NO: 396702 - RNA, 21 nt, Human
cucccagcuuucaggcaccuc

SEQ ID NO: 396703 - RNA, 18 nt, Human
cugcugagcccacgcucc

SEQ ID NO: 396704 - RNA, 24 nt, Human
cugggggagcuggggaaggaggug

SEQ ID NO: 396705 - RNA, 20 nt, Human
gaacuacacagcaaaaagca

SEQ ID NO: 396706 - RNA, 19 nt, Human
gagcuggggaaggagguga

SEQ ID NO: 396707 - RNA, 22 nt, Human
gagcuggggaaggaggugacac

SEQ ID NO: 396708 - RNA, 20 nt, Human
gcacuccuucuccuucccca

SEQ ID NO: 396709 - RNA, 22 nt, Human
gcacuuggccuuucacaccaug

SEQ ID NO: 396710 - RNA, 20 nt, Human
gccagggaguggcagguggg

SEQ ID NO: 396711 - RNA, 18 nt, Human
ggagggcugggggcaagc

SEQ ID NO: 396712 - RNA, 21 nt, Human
ggaguaccuacucuaugccag

SEQ ID NO: 396713 - RNA, 21 nt, Human
ggccagggaguggcagguggg

SEQ ID NO: 396714 - RNA, 25 nt, Human
ggcugugugcugggggagucgaggc

SEQ ID NO: 396715 - RNA, 25 nt, Human
gggaaggaggugacacuugaguugg

SEQ ID NO: 396716 - RNA, 19 nt, Human
gggcacuggggauacagac

SEQ ID NO: 396717 - RNA, 24 nt, Human
gggcacuggggauacagacaugau

SEQ ID NO: 396718 - RNA, 22 nt, Human
gggcugggggcaagcuggguuu

SEQ ID NO: 396719 - RNA, 20 nt, Human
gggggcgggcggugggaggg

SEQ ID NO: 396720 - RNA, 21 nt, Human
guccauggggggccggugggg

SEQ ID NO: 396721 - RNA, 22 nt, Human
uacacagcaaaaagcaagggag

SEQ ID NO: 396722 - RNA, 19 nt, Human
uacucuaugccaggcccug

SEQ ID NO: 396723 - RNA, 18 nt, Human
uagggcacagcacccaug

SEQ ID NO: 396724 - RNA, 24 nt, Human
uagggcacagcacccaugauaccc

SEQ ID NO: 396725 - RNA, 25 nt, Human
uauuucugccugggggagcugggga

SEQ ID NO: 396726 - RNA, 19 nt, Human
ucacaccaugcccugcgcc

SEQ ID NO: 396727 - RNA, 22 nt, Human
ugaaccaaggaagcacagacaa

SEQ ID NO: 396728 - RNA, 21 nt, Human
ugcugagcccacgcucccagc

SEQ ID NO: 396729 - RNA, 21 nt, Human
uggcacuccuucuccuucccc

SEQ ID NO: 396730 - RNA, 20 nt, Human
uggcaggugggagggcuggg

SEQ ID NO: 396731 - RNA, 21 nt, Human
ugggagggcugggggcaagcu

SEQ ID NO: 396732 - RNA, 24 nt, Human
ugggagggcugggggcaagcuggg

SEQ ID NO: 396733 - RNA, 19 nt, Human
ugggaggggccagggagug

SEQ ID NO: 396734 - RNA, 22 nt, Human
ugggaggggccagggaguggca

SEQ ID NO: 396735 - RNA, 20 nt, Human
ugggaggugaccagcccugc

SEQ ID NO: 396736 - RNA, 21 nt, Human
uggggauacagacaugauuca

SEQ ID NO: 396737 - RNA, 21 nt, Human
ugggggagcuggggaaggagg

SEQ ID NO: 396738 - RNA, 23 nt, Human
ugggggcaagcuggguuuguggg

SEQ ID NO: 396739 - RNA, 22 nt, Human
ugugggucccgggcugugugcu

SEQ ID NO: 396740 - RNA, 21 nt, Human
uuucacaccaugcccugcgcc

SEQ ID NO: 396741 - RNA, 21 nt, Human
aaauuaccagugcccuggagc

SEQ ID NO: 396742 - RNA, 22 nt, Human
agcaggaggucucuuuuccaag

SEQ ID NO: 396743 - RNA, 20 nt, Human
agcccgcggagcaggagguc

SEQ ID NO: 396744 - RNA, 27 nt, Human
caggaggucucuuuuccaagcgcacuc

SEQ ID NO: 396745 - RNA, 21 nt, Human
cagugcccuggagccgguugg

SEQ ID NO: 396746 - RNA, 18 nt, Human
cccgcugccuccgcgcgg

SEQ ID NO: 396747 - RNA, 22 nt, Human
cccgcugccuccgcgcgguccu

SEQ ID NO: 396748 - RNA, 25 nt, Human
cgcaggacagccaaccagaaggaaa

SEQ ID NO: 396749 - RNA, 23 nt, Human
gagcaggaggucucuuuuccaag

SEQ ID NO: 396750 - RNA, 18 nt, Human
gcccuggagccgguuggg

SEQ ID NO: 396751 - RNA, 22 nt, Human
gguccucuagccaaauuaccag

SEQ ID NO: 396752 - RNA, 26 nt, Human
guugagcgccccugcccggggaaggu

SEQ ID NO: 396753 - RNA, 18 nt, Human
uagccaaauuaccagugc

SEQ ID NO: 396754 - RNA, 20 nt, Human
uccgcgcgguccucuagcca

SEQ ID NO: 396755 - RNA, 21 nt, Human
ucuagccaaauuaccagugcc

SEQ ID NO: 396756 - RNA, 19 nt, Human
ugccccgagcccgcggagc

SEQ ID NO: 396757 - RNA, 25 nt, Human
ugcgggcucuugccccgagcccgcg

SEQ ID NO: 396758 - RNA, 23 nt, Human
uuaguaaucauucuggaucccuu

SEQ ID NO: 396759 - RNA, 25 nt, Human
uuaguaaucauucuggaucccuuuu

SEQ ID NO: 396760 - RNA, 21 nt, Human
uucacugacaucuccuucuua

SEQ ID NO: 396761 - RNA, 21 nt, Human
aaaaagacagccagaggugug

SEQ ID NO: 396762 - RNA, 24 nt, Human
aaaaccuaaauaaaccagacagaa

SEQ ID NO: 396763 - RNA, 24 nt, Human
aaguguccggcuccugggucucac

SEQ ID NO: 396764 - RNA, 24 nt, Human
acaaaaaguacaaaaagacagcca

SEQ ID NO: 396765 - RNA, 21 nt, Human
acagaacaggaagaaccaccg

SEQ ID NO: 396766 - RNA, 20 nt, Human
acagaagcagcucuggaaca

SEQ ID NO: 396767 - RNA, 25 nt, Human
acagucacagaacaggaagaaccac

SEQ ID NO: 396768 - RNA, 21 nt, Human
accaccgggugggggcugggg

SEQ ID NO: 396769 - RNA, 26 nt, Human
accacuccucauccaagucucuccca

SEQ ID NO: 396770 - RNA, 22 nt, Human
accccaccugacuuggaggcug

SEQ ID NO: 396771 - RNA, 24 nt, Human
agaaaaggaaggauaaaaccuaaa

SEQ ID NO: 396772 - RNA, 24 nt, Human
agacagccagaggugugcggagag

SEQ ID NO: 396773 - RNA, 22 nt, Human
agccagaggugugcggagaggg

SEQ ID NO: 396774 - RNA, 24 nt, Human
agccagaggugugcggagagggug

SEQ ID NO: 396775 - RNA, 18 nt, Human
aggaaggauaaaaccuaa

SEQ ID NO: 396776 - RNA, 20 nt, Human
aggcagggaggggcagcagg

SEQ ID NO: 396777 - RNA, 22 nt, Human
aggcagggaggggcagcagggc

SEQ ID NO: 396778 - RNA, 23 nt, Human
agguaggccacaaauucuuggug

SEQ ID NO: 396779 - RNA, 19 nt, Human
agugguaaggagggcugcc

SEQ ID NO: 396780 - RNA, 26 nt, Human
aucccacuaccccucacaugcucuca

SEQ ID NO: 396781 - RNA, 24 nt, Human
auccuuaccuccuucuccaacccu

SEQ ID NO: 396782 - RNA, 24 nt, Human
caaauucuugguggugcccucaca

SEQ ID NO: 396783 - RNA, 20 nt, Human
caaccacuccucauccaagu

SEQ ID NO: 396784 - RNA, 19 nt, Human
cacagcccaaccacuccuc

SEQ ID NO: 396785 - RNA, 20 nt, Human
caccagccagcaggggcugg

SEQ ID NO: 396786 - RNA, 19 nt, Human
cacuccucauccaagucuc

SEQ ID NO: 396787 - RNA, 23 nt, Human
cacuucuccucaagguuugaggg

SEQ ID NO: 396788 - RNA, 21 nt, Human
cagaacaggaagaaccaccgg

SEQ ID NO: 396789 - RNA, 21 nt, Human
cagcaggggcuggcacugaug

SEQ ID NO: 396790 - RNA, 23 nt, Human
cagcccaaccacuccucauccaa

SEQ ID NO: 396791 - RNA, 19 nt, Human
caggaagaaccaccgggug

SEQ ID NO: 396792 - RNA, 21 nt, Human
caguucucucccucacaaggu

SEQ ID NO: 396793 - RNA, 25 nt, Human
caguuuucuuuguccucaaugagau

SEQ ID NO: 396794 - RNA, 22 nt, Human
caugcagcacuggaacuccuga

SEQ ID NO: 396795 - RNA, 25 nt, Human
ccacuccucauccaagucucuccca

SEQ ID NO: 396796 - RNA, 25 nt, Human
ccagcaggggcuggcacugaugggc

SEQ ID NO: 396797 - RNA, 23 nt, Human
ccccaccaucccacuaccccuca

SEQ ID NO: 396798 - RNA, 20 nt, Human
ccccgcagaagucccugaga

SEQ ID NO: 396799 - RNA, 21 nt, Human
ccccuccaguggcugguaccc

SEQ ID NO: 396800 - RNA, 25 nt, Human
cccucauccuuaccuccuucuccaa

SEQ ID NO: 396801 - RNA, 24 nt, Human
ccucccuuagaaacuugggccaaa

SEQ ID NO: 396802 - RNA, 19 nt, Human
ccuccuucuccaacccucc

SEQ ID NO: 396803 - RNA, 22 nt, Human
ccucuccacuguggguggaggc

SEQ ID NO: 396804 - RNA, 20 nt, Human
ccugcggggcagggggcugu

SEQ ID NO: 396805 - RNA, 22 nt, Human
ccugcggggcagggggcugucc

SEQ ID NO: 396806 - RNA, 18 nt, Human
ccuuagaaacuugggcca

SEQ ID NO: 396807 - RNA, 24 nt, Human
cgaacucucaaagaaaaggaaggg

SEQ ID NO: 396808 - RNA, 24 nt, Human
cggcuccugggucucacuccaugg

SEQ ID NO: 396809 - RNA, 20 nt, Human
cucacaugcucucacucucc

SEQ ID NO: 396810 - RNA, 22 nt, Human
cucacucuccaucaggucccca

SEQ ID NO: 396811 - RNA, 23 nt, Human
cucccagguuucuggucccgaug

SEQ ID NO: 396812 - RNA, 24 nt, Human
cucugcacuggaacuugaggcuuc

SEQ ID NO: 396813 - RNA, 19 nt, Human
cucugggacuccaccccac

SEQ ID NO: 396814 - RNA, 21 nt, Human
cuggaacaaaaaguacaaaaa

SEQ ID NO: 396815 - RNA, 24 nt, Human
cuggaucuggacuggggucuuccg

SEQ ID NO: 396816 - RNA, 19 nt, Human
cuggggucuuccgcugcug

SEQ ID NO: 396817 - RNA, 20 nt, Human
cugugcagcucugggacucc

SEQ ID NO: 396818 - RNA, 23 nt, Human
cuuguccuccuuuguagcccucu

SEQ ID NO: 396819 - RNA, 24 nt, Human
gacagaccauguccgugcuaggcc

SEQ ID NO: 396820 - RNA, 23 nt, Human
gaggcuuccugucuccuccaugg

SEQ ID NO: 396821 - RNA, 18 nt, Human
gagggugagguggccgcg

SEQ ID NO: 396822 - RNA, 19 nt, Human
gcacuggaacuccugauga

SEQ ID NO: 396823 - RNA, 19 nt, Human
gccccaaggccucugaggg

SEQ ID NO: 396824 - RNA, 22 nt, Human
gcugucaggacagaccaugucc

SEQ ID NO: 396825 - RNA, 20 nt, Human
gcugugggucagagcucugg

SEQ ID NO: 396826 - RNA, 19 nt, Human
gcuugccucaggccccgca

SEQ ID NO: 396827 - RNA, 21 nt, Human
ggaaaagccauuuccugaggg

SEQ ID NO: 396828 - RNA, 24 nt, Human
ggacuggggucuuccgcugcugca

SEQ ID NO: 396829 - RNA, 21 nt, Human
ggaggcagggaggggcagcag

SEQ ID NO: 396830 - RNA, 22 nt, Human
ggcacagcccaaccacuccuca

SEQ ID NO: 396831 - RNA, 24 nt, Human
ggcaggccugcggggcagggggcu

SEQ ID NO: 396832 - RNA, 21 nt, Human
gggcuggggguugggaaaagc

SEQ ID NO: 396833 - RNA, 24 nt, Human
gggcuggggguugggaaaagccau

SEQ ID NO: 396834 - RNA, 18 nt, Human
ggggagggggucagcuga

SEQ ID NO: 396835 - RNA, 19 nt, Human
gggggcuggggguugggaa

SEQ ID NO: 396836 - RNA, 20 nt, Human
ggggucuucaggcaccagcc

SEQ ID NO: 396837 - RNA, 21 nt, Human
gggugggggcuggggguuggg

SEQ ID NO: 396838 - RNA, 22 nt, Human
gguggugcccucacaucugggg

SEQ ID NO: 396839 - RNA, 20 nt, Human
guccgugcuaggcccaggcc

SEQ ID NO: 396840 - RNA, 26 nt, Human
guccuccuuuguagcccucuccacug

SEQ ID NO: 396841 - RNA, 19 nt, Human
gugggggcuggggguuggg

SEQ ID NO: 396842 - RNA, 23 nt, Human
gugggggcuggggguugggaaaa

SEQ ID NO: 396843 - RNA, 18 nt, Human
guucugggaucucagucc

SEQ ID NO: 396844 - RNA, 21 nt, Human
uagaaacuugggccaaacccu

SEQ ID NO: 396845 - RNA, 21 nt, Human
uagcuuccuuaggcagggagg

SEQ ID NO: 396846 - RNA, 21 nt, Human
ucacucuccaucaggucccca

SEQ ID NO: 396847 - RNA, 18 nt, Human
uccacuguggguggaggc

SEQ ID NO: 396848 - RNA, 24 nt, Human
ucccagguuucuggucccgauggg

SEQ ID NO: 396849 - RNA, 23 nt, Human
ucccugagaaggcaggccugcgg

SEQ ID NO: 396850 - RNA, 24 nt, Human
ucccuuagaaacuugggccaaacc

SEQ ID NO: 396851 - RNA, 21 nt, Human
uccucauccaagucucuccca

SEQ ID NO: 396852 - RNA, 24 nt, Human
ucucacucuccaucagguccccaa

SEQ ID NO: 396853 - RNA, 19 nt, Human
ucugcacuggaacuugagg

SEQ ID NO: 396854 - RNA, 21 nt, Human
ucuuccgcugcugcagccucc

SEQ ID NO: 396855 - RNA, 23 nt, Human
ugacuuggaggcugugggucaga

SEQ ID NO: 396856 - RNA, 21 nt, Human
ugagaaguguccggcuccugg

SEQ ID NO: 396857 - RNA, 24 nt, Human
ugagaaguguccggcuccuggguc

SEQ ID NO: 396858 - RNA, 20 nt, Human
ugagaugccauaagcugugg

SEQ ID NO: 396859 - RNA, 21 nt, Human
ugagaugccauaagcuguggu

SEQ ID NO: 396860 - RNA, 21 nt, Human
ugaugaacccucauccuuacc

SEQ ID NO: 396861 - RNA, 19 nt, Human
ugccauaagcugugguggc

SEQ ID NO: 396862 - RNA, 22 nt, Human
ugccccaaggccucugagggac

SEQ ID NO: 396863 - RNA, 18 nt, Human
ugcggggagggggucagc

SEQ ID NO: 396864 - RNA, 18 nt, Human
ugcucaguucucucccuc

SEQ ID NO: 396865 - RNA, 22 nt, Human
ugcucucacucuccaucagguc

SEQ ID NO: 396866 - RNA, 24 nt, Human
uggaacaaaaaguacaaaaagaca

SEQ ID NO: 396867 - RNA, 24 nt, Human
uggaacuugaggcuuccugucucc

SEQ ID NO: 396868 - RNA, 23 nt, Human
uggacuggggucuuccgcugcug

SEQ ID NO: 396869 - RNA, 18 nt, Human
uggagaugcucaguucuc

SEQ ID NO: 396870 - RNA, 19 nt, Human
uggagaugcucaguucucu

SEQ ID NO: 396871 - RNA, 19 nt, Human
uggaucuggacuggggucu

SEQ ID NO: 396872 - RNA, 18 nt, Human
ugggaaaagccauuuccu

SEQ ID NO: 396873 - RNA, 23 nt, Human
ugggaaaagccauuuccugagaa

SEQ ID NO: 396874 - RNA, 24 nt, Human
ugggaaaagccauuuccugagaag

SEQ ID NO: 396875 - RNA, 19 nt, Human
ugggaucucaguccuggau

SEQ ID NO: 396876 - RNA, 19 nt, Human
ugggggcuggggguuggga

SEQ ID NO: 396877 - RNA, 18 nt, Human
ugggguccccacuucucc

SEQ ID NO: 396878 - RNA, 20 nt, Human
ugguaaggagggcugcccuu

SEQ ID NO: 396879 - RNA, 21 nt, Human
ugguaaggagggcugcccuuu

SEQ ID NO: 396880 - RNA, 22 nt, Human
uggucaaaccugcaucuucacu

SEQ ID NO: 396881 - RNA, 19 nt, Human
ugucugaggggcucaggca

SEQ ID NO: 396882 - RNA, 18 nt, Human
ugugcggagagggugagg

SEQ ID NO: 396883 - RNA, 23 nt, Human
uuagaaacuugggccaaacccug

SEQ ID NO: 396884 - RNA, 23 nt, Human
uuagauuccagaggcuugguuuu

SEQ ID NO: 396885 - RNA, 20 nt, Human
uucacugggucaugccccaa

SEQ ID NO: 396886 - RNA, 20 nt, Human
uuccugagaaguguccggcu

SEQ ID NO: 396887 - RNA, 20 nt, Human
uugggaaaagccauuuccug

SEQ ID NO: 396888 - RNA, 19 nt, Human
aaacccaaagggauaacag

SEQ ID NO: 396889 - RNA, 22 nt, Human
aaacuuuaucaaaaaagguaau

SEQ ID NO: 396890 - RNA, 20 nt, Human
aaaucauaucaggaaugcaa

SEQ ID NO: 396891 - RNA, 24 nt, Human
aagguaaugaaggcaaaaauuggc

SEQ ID NO: 396892 - RNA, 21 nt, Human
acaaaaaugauguaaacuaau

SEQ ID NO: 396893 - RNA, 22 nt, Human
acacuaaaccgcccggcccagc

SEQ ID NO: 396894 - RNA, 24 nt, Human
aucccugcauuuguguuugaaaca

SEQ ID NO: 396895 - RNA, 20 nt, Human
augaaggcaaaaauuggcag

SEQ ID NO: 396896 - RNA, 18 nt, Human
cagcaaucccugcauuug

SEQ ID NO: 396897 - RNA, 18 nt, Human
cagcaaucccugcauuug

SEQ ID NO: 396898 - RNA, 28 nt, Human
ccagagguuacuccgccuccuccuccgg

SEQ ID NO: 396899 - RNA, 18 nt, Human
cgcccggcccagcgggaa

SEQ ID NO: 396900 - RNA, 20 nt, Human
cgccuccagguccagcuccc

SEQ ID NO: 396901 - RNA, 24 nt, Human
cgccuccuccuccggcggcaauua

SEQ ID NO: 396902 - RNA, 22 nt, Human
gaacaucauuuuuuccauuuaa

SEQ ID NO: 396903 - RNA, 22 nt, Human
gauuuucacaugcaaacaacuu

SEQ ID NO: 396904 - RNA, 21 nt, Human
gcagcaaucccugcauuugug

SEQ ID NO: 396905 - RNA, 24 nt, Human
gcagcaaucccugcauuuguguuu

SEQ ID NO: 396906 - RNA, 20 nt, Human
ggcagacauccagcaucuug

SEQ ID NO: 396907 - RNA, 20 nt, Human
ggcggcaauuacacuaaacc

SEQ ID NO: 396908 - RNA, 23 nt, Human
ggcggcaauuacacuaaaccgcc

SEQ ID NO: 396909 - RNA, 21 nt, Human
gguaaugaaggcaaaaauugg

SEQ ID NO: 396910 - RNA, 25 nt, Human
gucaacucugcaugaugccuugaag

SEQ ID NO: 396911 - RNA, 24 nt, Human
uaaaugaacaucauuuuuuccauu

SEQ ID NO: 396912 - RNA, 19 nt, Human
uaaggcaagacaaauuugu

SEQ ID NO: 396913 - RNA, 22 nt, Human
uacaaaaaugauguaaacuaau

SEQ ID NO: 396914 - RNA, 30 nt, Human
ucaaacaaugccuuuuuuuaaccuaaaacc

SEQ ID NO: 396915 - RNA, 21 nt, Human
ucaaagacuaccaaaguaugu

SEQ ID NO: 396916 - RNA, 20 nt, Human
ugaaggaaaugacauacaaa

SEQ ID NO: 396917 - RNA, 18 nt, Human
ugaaggcaaaaauuggca

SEQ ID NO: 396918 - RNA, 24 nt, Human
ugauaaguaauuucaugauuaaaa

SEQ ID NO: 396919 - RNA, 22 nt, Human
ugcacaagcugaagaugacaaa

SEQ ID NO: 396920 - RNA, 24 nt, Human
ugcacacuacuucaguggaaaaaa

SEQ ID NO: 396921 - RNA, 21 nt, Human
ugcccuucacuaccucccaaa

SEQ ID NO: 396922 - RNA, 19 nt, Human
ugcugucgcggcggcgccu

SEQ ID NO: 396923 - RNA, 19 nt, Human
uggcagcaaucccugcauu

SEQ ID NO: 396924 - RNA, 23 nt, Human
ugguacacagcaaaguuuaucac

SEQ ID NO: 396925 - RNA, 22 nt, Human
ugucgcggcggcgccuccaggu

SEQ ID NO: 396926 - RNA, 18 nt, Human
uuaaacaaauccaacagg

SEQ ID NO: 396927 - RNA, 22 nt, Human
uuacauguuuuaaaucauauca

SEQ ID NO: 396928 - RNA, 20 nt, Human
uucugccucuuaauaguuaa

SEQ ID NO: 396929 - RNA, 20 nt, Human
uuuauaguuccugguacaca

SEQ ID NO: 396930 - RNA, 19 nt, Human
uuuuuguuuuuauaguucc

SEQ ID NO: 396931 - RNA, 23 nt, Human
aaggcagaacuagaagacacgug

SEQ ID NO: 396932 - RNA, 23 nt, Human
aaggcagaacuagaagacacgug

SEQ ID NO: 396933 - RNA, 24 nt, Human
acccacguaucuaggcucuaaaca

SEQ ID NO: 396934 - RNA, 19 nt, Human
agagaaaaacuaaguaagc

SEQ ID NO: 396935 - RNA, 22 nt, Human
aggaagagaaaaacuaaguaag

SEQ ID NO: 396936 - RNA, 22 nt, Human
aggcagaacuagaagacacgug

SEQ ID NO: 396937 - RNA, 22 nt, Human
aggcagaacuagaagacacgug

SEQ ID NO: 396938 - RNA, 23 nt, Human
aguuuauugggguggugacaccu

SEQ ID NO: 396939 - RNA, 19 nt, Human
auccacccauccaagcagc

SEQ ID NO: 396940 - RNA, 21 nt, Human
aucuacuccaaauccuuguug

SEQ ID NO: 396941 - RNA, 22 nt, Human
cacaucucuggaaagguuaccc

SEQ ID NO: 396942 - RNA, 21 nt, Human
caguuaauaccgcaaauaauc

SEQ ID NO: 396943 - RNA, 25 nt, Human
caugucuucagagugucacaggaaa

SEQ ID NO: 396944 - RNA, 27 nt, Human
caugucuucagagugucacaggaaaaa

SEQ ID NO: 396945 - RNA, 27 nt, Human
caugucuucagagugucacaggaaaaa

SEQ ID NO: 396946 - RNA, 19 nt, Human
ccacccauccaagcagcag

SEQ ID NO: 396947 - RNA, 23 nt, Human
ccacguaucuaggcucuaaacac

SEQ ID NO: 396948 - RNA, 19 nt, Human
cccacguaucuaggcucua

SEQ ID NO: 396949 - RNA, 21 nt, Human
cccauuugccauauacugucc

SEQ ID NO: 396950 - RNA, 27 nt, Human
cgaucccgggacaaggccgagggcagg

SEQ ID NO: 396951 - RNA, 25 nt, Human
cuccauaaggcgguacuugccaccc

SEQ ID NO: 396952 - RNA, 20 nt, Human
gaagacacguguccuucacc

SEQ ID NO: 396953 - RNA, 20 nt, Human
gaagacacguguccuucacc

SEQ ID NO: 396954 - RNA, 20 nt, Human
gagaaaaacuaaguaagcac

SEQ ID NO: 396955 - RNA, 19 nt, Human
gaggagcuuguccuugggg

SEQ ID NO: 396956 - RNA, 24 nt, Human
gcccguauacuccauaaggcggua

SEQ ID NO: 396957 - RNA, 19 nt, Human
gcgguacuugccacccauu

SEQ ID NO: 396958 - RNA, 18 nt, Human
gggaggagcuuguccuug

SEQ ID NO: 396959 - RNA, 19 nt, Human
gggaggagcuuguccuugg

SEQ ID NO: 396960 - RNA, 19 nt, Human
uaaaaaggcagaacuagaa

SEQ ID NO: 396961 - RNA, 19 nt, Human
uaaaaaggcagaacuagaa

SEQ ID NO: 396962 - RNA, 22 nt, Human
uaaaaaggcagaacuagaagac

SEQ ID NO: 396963 - RNA, 22 nt, Human
uaaaaaggcagaacuagaagac

SEQ ID NO: 396964 - RNA, 20 nt, Human
uaagaaacaccguauaugaa

SEQ ID NO: 396965 - RNA, 23 nt, Human
uaaggcgguacuugccacccauu

SEQ ID NO: 396966 - RNA, 22 nt, Human
uaaguaagcacccuuaugugaa

SEQ ID NO: 396967 - RNA, 28 nt, Human
uaaguaagcacccuuauguuguaaugac

SEQ ID NO: 396968 - RNA, 21 nt, Human
uaaguuuauugggguggugac

SEQ ID NO: 396969 - RNA, 21 nt, Human
uacacuuggcuccauuggccc

SEQ ID NO: 396970 - RNA, 21 nt, Human
uacagggggaggagcuugucc

SEQ ID NO: 396971 - RNA, 22 nt, Human
uacagggggaggagcuuguccu

SEQ ID NO: 396972 - RNA, 24 nt, Human
uacagggggaggagcuuguccuug

SEQ ID NO: 396973 - RNA, 21 nt, Human
uauacuguccauacuguugug

SEQ ID NO: 396974 - RNA, 18 nt, Human
uaugaagaaagaguggga

SEQ ID NO: 396975 - RNA, 21 nt, Human
ucacaggaaaucgaagccuau

SEQ ID NO: 396976 - RNA, 21 nt, Human
ucacaggaaaucgaagccuau

SEQ ID NO: 396977 - RNA, 21 nt, Human
ucaccaaagcaaaucugugcu

SEQ ID NO: 396978 - RNA, 21 nt, Human
ucaccaaagcaaaucugugcu

SEQ ID NO: 396979 - RNA, 25 nt, Human
ucagagugucacaggaaaucgaagc

SEQ ID NO: 396980 - RNA, 25 nt, Human
ucagagugucacaggaaaucgaagc

SEQ ID NO: 396981 - RNA, 22 nt, Human
uccauacuguuguggguuucca

SEQ ID NO: 396982 - RNA, 28 nt, Human
uccaucaugaacaaaaacuuaaaaaggc

SEQ ID NO: 396983 - RNA, 28 nt, Human
uccaucaugaacaaaaacuuaaaaaggc

SEQ ID NO: 396984 - RNA, 20 nt, Human
ugaaauacaaucaacugaaa

SEQ ID NO: 396985 - RNA, 19 nt, Human
ugacugaacaacugaagua

SEQ ID NO: 396986 - RNA, 18 nt, Human
ugucacaggaaaucgaag

SEQ ID NO: 396987 - RNA, 18 nt, Human
ugucacaggaaaucgaag

SEQ ID NO: 396988 - RNA, 23 nt, Human
uguccuucaccaaagcaaaucug

SEQ ID NO: 396989 - RNA, 23 nt, Human
uguccuucaccaaagcaaaucug

SEQ ID NO: 396990 - RNA, 24 nt, Human
ugugaaaagaaaguauuaagauuc

SEQ ID NO: 396991 - RNA, 29 nt, Human
uuacagggggaggagcuugucccguccgg

SEQ ID NO: 396992 - RNA, 21 nt, Human
uuccaugguugcccguauacu

SEQ ID NO: 396993 - RNA, 19 nt, Human
uucugaagauagaaccaua

SEQ ID NO: 396994 - RNA, 21 nt, Human
uugucuaaguuuauuggggug

SEQ ID NO: 396995 - RNA, 21 nt, Human
uuuacagaguuuccaaagcuu

SEQ ID NO: 396996 - RNA, 27 nt, Human
uuuauuguucauuuuacagaguuucca

SEQ ID NO: 396997 - RNA, 21 nt, Human
aaaaaccccauuggaaacaga

SEQ ID NO: 396998 - RNA, 23 nt, Human
aaacagaagaggcuuugucaaga

SEQ ID NO: 396999 - RNA, 25 nt, Human
aaccagccuccucuuccuccuccug

SEQ ID NO: 397000 - RNA, 22 nt, Human
aagagcgcgaccuaaggggaca

SEQ ID NO: 397001 - RNA, 24 nt, Human
acaaaguuggguggcuacauggcu

SEQ ID NO: 397002 - RNA, 24 nt, Human
accagccuccucuuccuccuccug

SEQ ID NO: 397003 - RNA, 18 nt, Human
agccuccucuuccuccuc

SEQ ID NO: 397004 - RNA, 24 nt, Human
agggcaggaaguaucuacacacag

SEQ ID NO: 397005 - RNA, 23 nt, Human
cacagugauucuaccauaugacc

SEQ ID NO: 397006 - RNA, 20 nt, Human
cagaaccaagucagcugcca

SEQ ID NO: 397007 - RNA, 20 nt, Human
cagaaccaagucagcugcca

SEQ ID NO: 397008 - RNA, 23 nt, Human
cagcccaacuugcuccaagagca

SEQ ID NO: 397009 - RNA, 19 nt, Human
cagccuccucuuccuccuc

SEQ ID NO: 397010 - RNA, 24 nt, Human
ccaugguaccaaccagccuccucu

SEQ ID NO: 397011 - RNA, 22 nt, Human
ccuccucuuccuccuccugggc

SEQ ID NO: 397012 - RNA, 24 nt, Human
cgccaaaaaccccauuggaaacag

SEQ ID NO: 397013 - RNA, 19 nt, Human
cgcgacggggccgggcacg

SEQ ID NO: 397014 - RNA, 24 nt, Human
cuuucugauguuguugaaaaugac

SEQ ID NO: 397015 - RNA, 20 nt, Human
ggucuuaaaaggcaacagug

SEQ ID NO: 397016 - RNA, 19 nt, Human
uaccauaugaccgucaggc

SEQ ID NO: 397017 - RNA, 18 nt, Human
ucaacccgcgacggucgu

SEQ ID NO: 397018 - RNA, 18 nt, Human
ucagaaccaagucagcug

SEQ ID NO: 397019 - RNA, 21 nt, Human
ucaguccacagugauucuacc

SEQ ID NO: 397020 - RNA, 21 nt, Human
ucucaguccacagugauucua

SEQ ID NO: 397021 - RNA, 19 nt, Human
ucugaucaauucuuucuga

SEQ ID NO: 397022 - RNA, 22 nt, Human
ugacaaaguuggguggcuacau

SEQ ID NO: 397023 - RNA, 22 nt, Human
ugagaaugcgccaaaaacccca

SEQ ID NO: 397024 - RNA, 24 nt, Human
ugcccaugguaccaaccagccucc

SEQ ID NO: 397025 - RNA, 25 nt, Human
ugcgccaaaaaccccauuggaaaca

SEQ ID NO: 397026 - RNA, 20 nt, Human
ugcuccaagagcacuguggc

SEQ ID NO: 397027 - RNA, 23 nt, Human
ugucuugucuuuuuugggcuuuu

SEQ ID NO: 397028 - RNA, 21 nt, Human
uugggcuuuuaguuagcuaau

SEQ ID NO: 397029 - RNA, 22 nt, Human
aaaagcugcccaggagugcccc

SEQ ID NO: 397030 - RNA, 19 nt, Human
gagugccccggacaucugc

SEQ ID NO: 397031 - RNA, 20 nt, Human
aacauuuauuuuuuucuggg

SEQ ID NO: 397032 - RNA, 19 nt, Human
acaaagcaugggaacccag

SEQ ID NO: 397033 - RNA, 25 nt, Human
acaaagcaugggaacccaguucccc

SEQ ID NO: 397034 - RNA, 20 nt, Human
aguagcugaacagggcaugu

SEQ ID NO: 397035 - RNA, 19 nt, Human
caccccauccccagauccc

SEQ ID NO: 397036 - RNA, 19 nt, Human
cccaccccauccccagauc

SEQ ID NO: 397037 - RNA, 18 nt, Human
ccccuaagcccaccccau

SEQ ID NO: 397038 - RNA, 19 nt, Human
ccccuaagcccaccccauc

SEQ ID NO: 397039 - RNA, 22 nt, Human
cgacccaggccagccaggacga

SEQ ID NO: 397040 - RNA, 22 nt, Human
gaguggggguuuguguuggggg

SEQ ID NO: 397041 - RNA, 19 nt, Human
gggaaacacaccugugggg

SEQ ID NO: 397042 - RNA, 20 nt, Human
guggggcagcugaacuagaa

SEQ ID NO: 397043 - RNA, 22 nt, Human
uaagcccaccccauccccagau

SEQ ID NO: 397044 - RNA, 21 nt, Human
uaaguuaaaaaaauuccuuga

SEQ ID NO: 397045 - RNA, 24 nt, Human
ucccuuuuuuucucccuuaaguua

SEQ ID NO: 397046 - RNA, 22 nt, Human
ugaacagggcauguuaguggug

SEQ ID NO: 397047 - RNA, 21 nt, Human
ugagacaccuacaaagcaugg

SEQ ID NO: 397048 - RNA, 19 nt, Human
ugcccaggauagcuaugag

SEQ ID NO: 397049 - RNA, 21 nt, Human
ugggaguagcugaacagggca

SEQ ID NO: 397050 - RNA, 19 nt, Human
uguguugggggagcagugg

SEQ ID NO: 397051 - RNA, 24 nt, Human
uuccuugaggcagcuuaagucaga

SEQ ID NO: 397052 - RNA, 19 nt, Human
uuuuuuggagcuuauuaga

SEQ ID NO: 397053 - RNA, 21 nt, Human
aaaaaaaucuaaaaaccagca

SEQ ID NO: 397054 - RNA, 24 nt, Human
aaaaaaaucuaaaaaccagcacaa

SEQ ID NO: 397055 - RNA, 24 nt, Human
aaacguccaaaacagagaugagaa

SEQ ID NO: 397056 - RNA, 20 nt, Human
aagcacacauccaaaccaca

SEQ ID NO: 397057 - RNA, 19 nt, Human
acgaccuccuccuccuccu

SEQ ID NO: 397058 - RNA, 25 nt, Human
agcaucuaaccuacccuucuguugc

SEQ ID NO: 397059 - RNA, 19 nt, Human
auccuuuuucuauccuccu

SEQ ID NO: 397060 - RNA, 24 nt, Human
aucuccuucuuuccuuucuuucuu

SEQ ID NO: 397061 - RNA, 19 nt, Human
cacacauccaaaccacaua

SEQ ID NO: 397062 - RNA, 24 nt, Human
ccaaaacagagaugagaauaguca

SEQ ID NO: 397063 - RNA, 23 nt, Human
cccgacgaccuccuccuccuccu

SEQ ID NO: 397064 - RNA, 21 nt, Human
cccgccgcccccgacgaccuc

SEQ ID NO: 397065 - RNA, 19 nt, Human
ccugcccuugccgccgccg

SEQ ID NO: 397066 - RNA, 22 nt, Human
cguccaaaacagagaugagaau

SEQ ID NO: 397067 - RNA, 19 nt, Human
cuccuucuuuccuuucuuu

SEQ ID NO: 397068 - RNA, 20 nt, Human
cuuccauccuuuuucuaucc

SEQ ID NO: 397069 - RNA, 19 nt, Human
cuuuccauuuucuuucuuc

SEQ ID NO: 397070 - RNA, 19 nt, Human
cuuuccuuucuuucuuagu

SEQ ID NO: 397071 - RNA, 22 nt, Human
gaaaacaaaaaaaucuaaaaac

SEQ ID NO: 397072 - RNA, 23 nt, Human
gaaaacaaaaaaaucuaaaaacc

SEQ ID NO: 397073 - RNA, 22 nt, Human
gucuuuguuuucaaugcuucuu

SEQ ID NO: 397074 - RNA, 23 nt, Human
uaagagguuaacagaaaugggcu

SEQ ID NO: 397075 - RNA, 20 nt, Human
ucagaggccgcucgguggac

SEQ ID NO: 397076 - RNA, 26 nt, Human
uccaaaacagagaugagaauagucac

SEQ ID NO: 397077 - RNA, 18 nt, Human
uccaagaagugggaagaa

SEQ ID NO: 397078 - RNA, 26 nt, Human
uccuccuuuuuuccuucuuuccauuu

SEQ ID NO: 397079 - RNA, 19 nt, Human
uccuuuuucuauccuccuu

SEQ ID NO: 397080 - RNA, 19 nt, Human
ucuacaguagcuaucacuc

SEQ ID NO: 397081 - RNA, 21 nt, Human
ucuuccauccuuuuucuaucc

SEQ ID NO: 397082 - RNA, 23 nt, Human
ucuuucuucuauucaucuccuuc

SEQ ID NO: 397083 - RNA, 28 nt, Human
ugaaaacaaaaaaaucuaaaaaccagca

SEQ ID NO: 397084 - RNA, 20 nt, Human
ugcccuugccgccgccgggg

SEQ ID NO: 397085 - RNA, 18 nt, Human
uguccugcccuugccgcc

SEQ ID NO: 397086 - RNA, 22 nt, Human
uuaaagcacacauccaaaccac

SEQ ID NO: 397087 - RNA, 22 nt, Human
uucaaugcuucuuucuuccauc

SEQ ID NO: 397088 - RNA, 27 nt, Human
uucuuccauccuuuuucuauccuccuu

SEQ ID NO: 397089 - RNA, 22 nt, Human
uugcaccguuuggccuccuggg

SEQ ID NO: 397090 - RNA, 24 nt, Human
uuucaaugcuucuuucuuccaucc

SEQ ID NO: 397091 - RNA, 20 nt, Human
uuuccuucuuuccauuuucu

SEQ ID NO: 397092 - RNA, 20 nt, Human
uuuggccuccugggauggaa

SEQ ID NO: 397093 - RNA, 24 nt, Human
uuuuuccuucuuuccauuuucuuu

SEQ ID NO: 397094 - RNA, 27 nt, Human
aaaaacaaaaagggaucaccgguaccc

SEQ ID NO: 397095 - RNA, 18 nt, Human
aaaaagacaaaacaccaa

SEQ ID NO: 397096 - RNA, 20 nt, Human
aaacaaaaagggaucacaga

SEQ ID NO: 397097 - RNA, 20 nt, Human
aaagaagggcuaugcacugg

SEQ ID NO: 397098 - RNA, 18 nt, Human
aacaaaaagggaucacag

SEQ ID NO: 397099 - RNA, 20 nt, Human
aacagagcaagacuccaucu

SEQ ID NO: 397100 - RNA, 20 nt, Human
aacauggugaaacccugucu

SEQ ID NO: 397101 - RNA, 21 nt, Human
aacauggugaaacccugucuc

SEQ ID NO: 397102 - RNA, 21 nt, Human
aagcaagacagaucaagccua

SEQ ID NO: 397103 - RNA, 26 nt, Human
aaucacaugagcaguagccgccccca

SEQ ID NO: 397104 - RNA, 22 nt, Human
aaucaugaggucaggaguuuga

SEQ ID NO: 397105 - RNA, 24 nt, Human
aaucaugaggucaggaguuugaga

SEQ ID NO: 397106 - RNA, 24 nt, Human
aaucgcuugaacccaggaggcgga

SEQ ID NO: 397107 - RNA, 21 nt, Human
aaucuucaagaucaagguaga

SEQ ID NO: 397108 - RNA, 22 nt, Human
acaagcaaaacuuggccaauac

SEQ ID NO: 397109 - RNA, 23 nt, Human
acaauaagcaagacagaucaagc

SEQ ID NO: 397110 - RNA, 24 nt, Human
acagagcaagacuccaucucaaaa

SEQ ID NO: 397111 - RNA, 24 nt, Human
acccugucucuacuaaaaauacaa

SEQ ID NO: 397112 - RNA, 24 nt, Human
acuggccaacauggugaaacccug

SEQ ID NO: 397113 - RNA, 21 nt, Human
agaaccuccaaaaccagucag

SEQ ID NO: 397114 - RNA, 25 nt, Human
agacaaaagaagggcuaugcacugg

SEQ ID NO: 397115 - RNA, 24 nt, Human
agccugggcaacagagcaagacuc

SEQ ID NO: 397116 - RNA, 23 nt, Human
agcugggcaugguggugcaugcc

SEQ ID NO: 397117 - RNA, 24 nt, Human
aggcaaaucaugaggucaggaguu

SEQ ID NO: 397118 - RNA, 23 nt, Human
aggcaggagaaucgcuugaaccc

SEQ ID NO: 397119 - RNA, 24 nt, Human
aggcaggagaaucgcuugaaccca

SEQ ID NO: 397120 - RNA, 24 nt, Human
aggcaggcaaaucaugaggucagg

SEQ ID NO: 397121 - RNA, 18 nt, Human
aggccgaggcaggcaaau

SEQ ID NO: 397122 - RNA, 23 nt, Human
aggccgaggcaggcaaaucauga

SEQ ID NO: 397123 - RNA, 21 nt, Human
aggcggagcuugcagugagcc

SEQ ID NO: 397124 - RNA, 24 nt, Human
aggcggagcuugcagugagccgag

SEQ ID NO: 397125 - RNA, 20 nt, Human
aggcugaggcaggagaaucg

SEQ ID NO: 397126 - RNA, 24 nt, Human
aggcugaggcaggagaaucgcuug

SEQ ID NO: 397127 - RNA, 18 nt, Human
agucagaggacaccucug

SEQ ID NO: 397128 - RNA, 24 nt, Human
agugcuuugggaggccgaggcagg

SEQ ID NO: 397129 - RNA, 21 nt, Human
auacaacaaauuagcugggca

SEQ ID NO: 397130 - RNA, 19 nt, Human
augaugugcccgaauuucc

SEQ ID NO: 397131 - RNA, 20 nt, Human
augccuguaaucccagccac

SEQ ID NO: 397132 - RNA, 24 nt, Human
auugcacuccagccugggcaacag

SEQ ID NO: 397133 - RNA, 24 nt, Human
auugugccauugcacuccagccug

SEQ ID NO: 397134 - RNA, 23 nt, Human
caaaaaacaaaaagggaucacag

SEQ ID NO: 397135 - RNA, 21 nt, Human
caaaacaccaagcucaaaaau

SEQ ID NO: 397136 - RNA, 24 nt, Human
caaaucaugaggucaggaguuuga

SEQ ID NO: 397137 - RNA, 22 nt, Human
caacaauaagcaagacagauca

SEQ ID NO: 397138 - RNA, 24 nt, Human
caacauggugaaacccugucucua

SEQ ID NO: 397139 - RNA, 20 nt, Human
caagcacacaacaagcaaaa

SEQ ID NO: 397140 - RNA, 19 nt, Human
caagggaaucuucaagauc

SEQ ID NO: 397141 - RNA, 26 nt, Human
caauacacaccaaucaaaugcacuuc

SEQ ID NO: 397142 - RNA, 23 nt, Human
cacacaacaagcaaaacuuggcc

SEQ ID NO: 397143 - RNA, 24 nt, Human
cacgccuguaaucccagugcuuug

SEQ ID NO: 397144 - RNA, 23 nt, Human
cagaggacaccucuguuaggcac

SEQ ID NO: 397145 - RNA, 24 nt, Human
cagccacucaggaggcugaggcag

SEQ ID NO: 397146 - RNA, 22 nt, Human
caggcaaaucaugaggucagga

SEQ ID NO: 397147 - RNA, 20 nt, Human
cagguagugcucaaauaagc

SEQ ID NO: 397148 - RNA, 25 nt, Human
caggugacacagcucauaguuucug

SEQ ID NO: 397149 - RNA, 24 nt, Human
cagugcuuugggaggccgaggcag

SEQ ID NO: 397150 - RNA, 25 nt, Human
cagugcuuugggaggccgaggcagg

SEQ ID NO: 397151 - RNA, 24 nt, Human
caugaggucaggaguuugagacca

SEQ ID NO: 397152 - RNA, 19 nt, Human
cauugcacuccagccuggg

SEQ ID NO: 397153 - RNA, 21 nt, Human
cauugcacuccagccugggca

SEQ ID NO: 397154 - RNA, 22 nt, Human
cauugcacuccagccugggcaa

SEQ ID NO: 397155 - RNA, 24 nt, Human
cauugcacuccagccugggcaaca

SEQ ID NO: 397156 - RNA, 26 nt, Human
cauugcacuccagccugggcaacaga

SEQ ID NO: 397157 - RNA, 22 nt, Human
ccaacugucuacuccacaauca

SEQ ID NO: 397158 - RNA, 18 nt, Human
ccagucaggugacacagc

SEQ ID NO: 397159 - RNA, 24 nt, Human
ccaucucaaaaacaaaaaacaaaa

SEQ ID NO: 397160 - RNA, 20 nt, Human
ccauugcacuccagccuggg

SEQ ID NO: 397161 - RNA, 21 nt, Human
ccauugcacuccagccugggc

SEQ ID NO: 397162 - RNA, 22 nt, Human
ccauugcacuccagccugggca

SEQ ID NO: 397163 - RNA, 23 nt, Human
ccauugcacuccagccugggcaa

SEQ ID NO: 397164 - RNA, 24 nt, Human
ccauugcacuccagccugggcaac

SEQ ID NO: 397165 - RNA, 19 nt, Human
cccagugcuuugggaggcc

SEQ ID NO: 397166 - RNA, 22 nt, Human
ccugggcaacagagcaagacuc

SEQ ID NO: 397167 - RNA, 19 nt, Human
ccuguaaucccagccacuc

SEQ ID NO: 397168 - RNA, 22 nt, Human
ccuguaaucccagugcuuuggg

SEQ ID NO: 397169 - RNA, 24 nt, Human
cgagauugugccauugcacuccag

SEQ ID NO: 397170 - RNA, 24 nt, Human
cgaggcaggcaaaucaugagguca

SEQ ID NO: 397171 - RNA, 23 nt, Human
cgucuugaaauuuaaguuuaggg

SEQ ID NO: 397172 - RNA, 19 nt, Human
cucacgccuguaaucccag

SEQ ID NO: 397173 - RNA, 24 nt, Human
cucacgccuguaaucccagugcuu

SEQ ID NO: 397174 - RNA, 28 nt, Human
cuccacaaucacaugagcaguagccgcc

SEQ ID NO: 397175 - RNA, 21 nt, Human
cuggccaacauggugaaaccc

SEQ ID NO: 397176 - RNA, 21 nt, Human
cuggccaacauggugaaaccc

SEQ ID NO: 397177 - RNA, 24 nt, Human
cuggccaacauggugaaacccugu

SEQ ID NO: 397178 - RNA, 23 nt, Human
cuggcuggaugugguggcucacg

SEQ ID NO: 397179 - RNA, 24 nt, Human
cuugcagugagccgagauugugcc

SEQ ID NO: 397180 - RNA, 23 nt, Human
gaaaaagacaaaacaccaagcuc

SEQ ID NO: 397181 - RNA, 19 nt, Human
gaaacccugucucuacuaa

SEQ ID NO: 397182 - RNA, 22 nt, Human
gacaaaacaccaagcucaaaaa

SEQ ID NO: 397183 - RNA, 23 nt, Human
gagaaucgcuugaacccaggagg

SEQ ID NO: 397184 - RNA, 23 nt, Human
gagcaagacuccaucucaaaaac

SEQ ID NO: 397185 - RNA, 18 nt, Human
gagcuugcagugagccga

SEQ ID NO: 397186 - RNA, 23 nt, Human
gagcuugcagugagccgagauug

SEQ ID NO: 397187 - RNA, 24 nt, Human
gcacuccagccugggcaacagagc

SEQ ID NO: 397188 - RNA, 24 nt, Human
gcacuggcacugacaguugggcag

SEQ ID NO: 397189 - RNA, 22 nt, Human
gcaggagaaucgcuugaaccca

SEQ ID NO: 397190 - RNA, 21 nt, Human
gcaguggacagaaccuccaaa

SEQ ID NO: 397191 - RNA, 24 nt, Human
gccaacauggugaaacccugucuc

SEQ ID NO: 397192 - RNA, 22 nt, Human
gccauugcacuccagccugggc

SEQ ID NO: 397193 - RNA, 24 nt, Human
gccauugcacuccagccugggcaa

SEQ ID NO: 397194 - RNA, 20 nt, Human
gcuuaaauacagaggcaaug

SEQ ID NO: 397195 - RNA, 24 nt, Human
ggagcuccugccacaucucagccc

SEQ ID NO: 397196 - RNA, 24 nt, Human
ggagcuugcagugagccgagauug

SEQ ID NO: 397197 - RNA, 24 nt, Human
ggaugugguggcucacgccuguaa

SEQ ID NO: 397198 - RNA, 23 nt, Human
ggcaggcaaaucaugaggucagg

SEQ ID NO: 397199 - RNA, 18 nt, Human
ggcagucuucauaaggga

SEQ ID NO: 397200 - RNA, 24 nt, Human
gggcaugguggugcaugccuguaa

SEQ ID NO: 397201 - RNA, 24 nt, Human
gguggcucacgccuguaaucccag

SEQ ID NO: 397202 - RNA, 24 nt, Human
gguggugcaugccuguaaucccag

SEQ ID NO: 397203 - RNA, 21 nt, Human
guggacagaaccuccaaaacc

SEQ ID NO: 397204 - RNA, 23 nt, Human
guggugcaugccuguaaucccag

SEQ ID NO: 397205 - RNA, 24 nt, Human
guuucauggacauaugaugugccc

SEQ ID NO: 397206 - RNA, 18 nt, Human
uaaggaucacuggcugga

SEQ ID NO: 397207 - RNA, 20 nt, Human
uacaacaaauuagcugggca

SEQ ID NO: 397208 - RNA, 21 nt, Human
ucaaauaagccuaaaucucaa

SEQ ID NO: 397209 - RNA, 22 nt, Human
ucacgccuguaaucccagugcu

SEQ ID NO: 397210 - RNA, 23 nt, Human
ucaguggccccuuuagacuuucu

SEQ ID NO: 397211 - RNA, 24 nt, Human
ucaugaggucaggaguuugagacc

SEQ ID NO: 397212 - RNA, 19 nt, Human
ucccuaguuuaucugaagu

SEQ ID NO: 397213 - RNA, 24 nt, Human
uccugccacaucucagcccugcag

SEQ ID NO: 397214 - RNA, 24 nt, Human
ucucuacuaaaaauacaacaaauu

SEQ ID NO: 397215 - RNA, 26 nt, Human
ucugaaaaagacaaaacaccaagcuc

SEQ ID NO: 397216 - RNA, 20 nt, Human
ugaaaaagacaaaacaccaa

SEQ ID NO: 397217 - RNA, 25 nt, Human
ugaaaaagacaaaacaccaagcuca

SEQ ID NO: 397218 - RNA, 18 nt, Human
ugaaaaugggaaaacucu

SEQ ID NO: 397219 - RNA, 20 nt, Human
ugacacagcucauaguuucu

SEQ ID NO: 397220 - RNA, 24 nt, Human
ugagaccacacuggccaacauggu

SEQ ID NO: 397221 - RNA, 22 nt, Human
ugagccgagauugugccauugc

SEQ ID NO: 397222 - RNA, 20 nt, Human
ugaggcaggagaaucgcuug

SEQ ID NO: 397223 - RNA, 24 nt, Human
ugaggcaggagaaucgcuugaacc

SEQ ID NO: 397224 - RNA, 25 nt, Human
ugaggcaggagaaucgcuugaaccc

SEQ ID NO: 397225 - RNA, 18 nt, Human
ugaggucaggaguuugag

SEQ ID NO: 397226 - RNA, 22 nt, Human
ugcacuccagccugggcaacag

SEQ ID NO: 397227 - RNA, 24 nt, Human
ugccuguaaucccagccacucagg

SEQ ID NO: 397228 - RNA, 24 nt, Human
uggccaacauggugaaacccuguc

SEQ ID NO: 397229 - RNA, 27 nt, Human
uggccaauacacaccaaucaaaugcac

SEQ ID NO: 397230 - RNA, 22 nt, Human
uggcucacgccuguaaucccag

SEQ ID NO: 397231 - RNA, 22 nt, Human
uggcucacgccuguaaucccag

SEQ ID NO: 397232 - RNA, 23 nt, Human
ugggaaaacucugcuccauagca

SEQ ID NO: 397233 - RNA, 19 nt, Human
ugggaggccgaggcaggca

SEQ ID NO: 397234 - RNA, 24 nt, Human
ugggaggccgaggcaggcaaauca

SEQ ID NO: 397235 - RNA, 18 nt, Human
uggguuggguaacucugu

SEQ ID NO: 397236 - RNA, 21 nt, Human
uggugcaugccuguaauccca

SEQ ID NO: 397237 - RNA, 24 nt, Human
ugguggcucacgccuguaauccca

SEQ ID NO: 397238 - RNA, 24 nt, Human
ugguggugcaugccuguaauccca

SEQ ID NO: 397239 - RNA, 21 nt, Human
ugucuacuccacaaucacaug

SEQ ID NO: 397240 - RNA, 20 nt, Human
ugugagucauuaucuucuga

SEQ ID NO: 397241 - RNA, 24 nt, Human
uuagcugggcaugguggugcaugc

SEQ ID NO: 397242 - RNA, 21 nt, Human
uucaagcacacaacaagcaaa

SEQ ID NO: 397243 - RNA, 20 nt, Human
uucugaaaaugggaaaacuc

SEQ ID NO: 397244 - RNA, 19 nt, Human
uugcagugagccgagauug

SEQ ID NO: 397245 - RNA, 22 nt, Human
uugcagugagccgagauugugc

SEQ ID NO: 397246 - RNA, 25 nt, Human
uugggaggccgaggcaggcaaauca

SEQ ID NO: 397247 - RNA, 23 nt, Human
uugugccauugcacuccagccug

SEQ ID NO: 397248 - RNA, 24 nt, Human
uuuaacucuccaaauggacugggu

SEQ ID NO: 397249 - RNA, 22 nt, Human
uuucauggacauaugaugugcc

SEQ ID NO: 397250 - RNA, 23 nt, Human
uuuuuuuuuuuuuuuuuuaacag

SEQ ID NO: 397251 - RNA, 20 nt, Human
aaaacugggagaaacaaaga

SEQ ID NO: 397252 - RNA, 21 nt, Human
aaaggaacagaccaauaaaag

SEQ ID NO: 397253 - RNA, 22 nt, Human
aagggguccggggugcuuucuc

SEQ ID NO: 397254 - RNA, 22 nt, Human
agaaggaaguggagaaacagga

SEQ ID NO: 397255 - RNA, 21 nt, Human
agacagaaaugaugaggcccg

SEQ ID NO: 397256 - RNA, 19 nt, Human
caaaaugaggacagaggca

SEQ ID NO: 397257 - RNA, 25 nt, Human
caaacacaaagcaaacacauucauc

SEQ ID NO: 397258 - RNA, 22 nt, Human
caacccuaucucaaaugcagga

SEQ ID NO: 397259 - RNA, 22 nt, Human
caccuccaagagaaagccaaag

SEQ ID NO: 397260 - RNA, 23 nt, Human
caccuccaagagaaagccaaagg

SEQ ID NO: 397261 - RNA, 26 nt, Human
cauaccgauaaaaacugggagaaaca

SEQ ID NO: 397262 - RNA, 19 nt, Human
caucaguggaccaaccaag

SEQ ID NO: 397263 - RNA, 21 nt, Human
ccaaaggaacagaccaauaaa

SEQ ID NO: 397264 - RNA, 23 nt, Human
ccagagagcugcuggggcauacc

SEQ ID NO: 397265 - RNA, 18 nt, Human
cgauaaaaacugggagaa

SEQ ID NO: 397266 - RNA, 23 nt, Human
cuaaaaacgugucuaucucuacc

SEQ ID NO: 397267 - RNA, 22 nt, Human
cuccaagagaaagccaaaggaa

SEQ ID NO: 397268 - RNA, 18 nt, Human
cuuucucuauuucacuca

SEQ ID NO: 397269 - RNA, 19 nt, Human
gaaguccaauacugcugcu

SEQ ID NO: 397270 - RNA, 18 nt, Human
gaaguggagaaacaggag

SEQ ID NO: 397271 - RNA, 19 nt, Human
gagaaacaggagacagaaa

SEQ ID NO: 397272 - RNA, 19 nt, Human
gagaaacaggagacagaaa

SEQ ID NO: 397273 - RNA, 24 nt, Human
gagaaagccaaaggaacagaccaa

SEQ ID NO: 397274 - RNA, 19 nt, Human
gccugggauucuacugcuc

SEQ ID NO: 397275 - RNA, 23 nt, Human
ggaaugggccucuaucugguauc

SEQ ID NO: 397276 - RNA, 18 nt, Human
uaaaagggguccggggug

SEQ ID NO: 397277 - RNA, 18 nt, Human
uaauaccaaacacaaagc

SEQ ID NO: 397278 - RNA, 21 nt, Human
uaccccuaggcuucuuagcuc

SEQ ID NO: 397279 - RNA, 19 nt, Human
uauuucacucacuccucuu

SEQ ID NO: 397280 - RNA, 23 nt, Human
uccaagagaaagccaaaggaaca

SEQ ID NO: 397281 - RNA, 19 nt, Human
uccaauaaccaaaagaaau

SEQ ID NO: 397282 - RNA, 18 nt, Human
ucccugcggguccucaga

SEQ ID NO: 397283 - RNA, 21 nt, Human
ucccugcggguccucagaagc

SEQ ID NO: 397284 - RNA, 25 nt, Human
ucuaucucuaccccuaggcuucuua

SEQ ID NO: 397285 - RNA, 23 nt, Human
ucucaaaugcaggaaugggccuc

SEQ ID NO: 397286 - RNA, 18 nt, Human
ucuccagagagcugcugg

SEQ ID NO: 397287 - RNA, 19 nt, Human
ugaaugcaccaucuaaaaa

SEQ ID NO: 397288 - RNA, 22 nt, Human
ugacagcagagaaguccaauac

SEQ ID NO: 397289 - RNA, 21 nt, Human
ugaggcccgcucccugcgggu

SEQ ID NO: 397290 - RNA, 19 nt, Human
uggagaaacaggagacaga

SEQ ID NO: 397291 - RNA, 21 nt, Human
uggagaaacaggagacagaaa

SEQ ID NO: 397292 - RNA, 24 nt, Human
ugggagaaacaaagacugacagca

SEQ ID NO: 397293 - RNA, 26 nt, Human
ugguaucuagaggaugaucauaggaa

SEQ ID NO: 397294 - RNA, 22 nt, Human
ugucauaaagcuccccaucugg

SEQ ID NO: 397295 - RNA, 21 nt, Human
uucaucaucuagaguacuaua

SEQ ID NO: 397296 - RNA, 27 nt, Human
uuuuuuuuuuuuuuuuuuuuuuugggg

SEQ ID NO: 397297 - RNA, 23 nt, Human
aaacacaaucaguaauuaaaugc

SEQ ID NO: 397298 - RNA, 23 nt, Human
aaacaguacauacuuuauuuuca

SEQ ID NO: 397299 - RNA, 18 nt, Human
aacacacaaaaccaggca

SEQ ID NO: 397300 - RNA, 23 nt, Human
aagcauacaagaaacacuaaacu

SEQ ID NO: 397301 - RNA, 21 nt, Human
aaugccuaccauauguauggc

SEQ ID NO: 397302 - RNA, 22 nt, Human
acacuaaacucuuccagugcca

SEQ ID NO: 397303 - RNA, 25 nt, Human
acagaacacacaaaaccaggcagag

SEQ ID NO: 397304 - RNA, 20 nt, Human
acaguacccacauggcuuug

SEQ ID NO: 397305 - RNA, 24 nt, Human
acucugcauaauucucagaaguca

SEQ ID NO: 397306 - RNA, 25 nt, Human
agaacacacaaaaccaggcagagaa

SEQ ID NO: 397307 - RNA, 24 nt, Human
agagaguuuuguauccaauauccu

SEQ ID NO: 397308 - RNA, 21 nt, Human
aggcccaaccagaccccaaaa

SEQ ID NO: 397309 - RNA, 23 nt, Human
auaacagaacacacaaaaccagg

SEQ ID NO: 397310 - RNA, 23 nt, Human
auuggaagcaaguuguuucuggu

SEQ ID NO: 397311 - RNA, 23 nt, Human
caaaugcaauucaagugugaaga

SEQ ID NO: 397312 - RNA, 21 nt, Human
caccuaugguuuuaaaaacag

SEQ ID NO: 397313 - RNA, 24 nt, Human
cagugccaguacacucuccaugaa

SEQ ID NO: 397314 - RNA, 20 nt, Human
caucucacugugaaaugauc

SEQ ID NO: 397315 - RNA, 22 nt, Human
ccaaaauacaucguuuaugcag

SEQ ID NO: 397316 - RNA, 26 nt, Human
ccauauccuucaauccauaaagcauc

SEQ ID NO: 397317 - RNA, 24 nt, Human
ccuauuggccauagcugucccacc

SEQ ID NO: 397318 - RNA, 19 nt, Human
gaaauccuucucgaaccac

SEQ ID NO: 397319 - RNA, 24 nt, Human
gaacacacaaaaccaggcagagaa

SEQ ID NO: 397320 - RNA, 22 nt, Human
gaucuucugaaauccuucucga

SEQ ID NO: 397321 - RNA, 18 nt, Human
gcauacaagaaacacuaa

SEQ ID NO: 397322 - RNA, 18 nt, Human
ggcuuuguucuccauuuc

SEQ ID NO: 397323 - RNA, 20 nt, Human
uaaacuauaaacauuuuacc

SEQ ID NO: 397324 - RNA, 21 nt, Human
uaaaugccuaccauauguaug

SEQ ID NO: 397325 - RNA, 29 nt, Human
uaacagaacacacaaaaccaggcagagaa

SEQ ID NO: 397326 - RNA, 21 nt, Human
uaccacagucgaaaauuccca

SEQ ID NO: 397327 - RNA, 20 nt, Human
uagaaaaaagugcuaaaugg

SEQ ID NO: 397328 - RNA, 19 nt, Human
ucaaaguaaacuauaaaca

SEQ ID NO: 397329 - RNA, 22 nt, Human
uccuauagggccacaugucacu

SEQ ID NO: 397330 - RNA, 24 nt, Human
ucuacaacuuaucuuaaaagaaag

SEQ ID NO: 397331 - RNA, 21 nt, Human
ucuucugaaauccuucucgaa

SEQ ID NO: 397332 - RNA, 23 nt, Human
ugaauaacagaacacacaaaacc

SEQ ID NO: 397333 - RNA, 20 nt, Human
uuccaggcccaaccagaccc

SEQ ID NO: 397334 - RNA, 20 nt, Human
uugguccuucaucuuucaag

SEQ ID NO: 397335 - RNA, 21 nt, Human
uuucaaaguaaacuauaaaca

SEQ ID NO: 397336 - RNA, 19 nt, Human
uuuggccuuuugguccuuc

SEQ ID NO: 397337 - RNA, 21 nt, Human
uuuuauguauauuuuaccaca

SEQ ID NO: 397338 - RNA, 27 nt, Human
uuuuccaggcccaaccagaccccaaaa

SEQ ID NO: 397339 - RNA, 24 nt, Human
uuuuuuuuuuuuuuuuuuaauaag

SEQ ID NO: 397340 - RNA, 20 nt, Human
agcuggggugccccaccccc

SEQ ID NO: 397341 - RNA, 19 nt, Human
cacucuuuuggagcuggag

SEQ ID NO: 397342 - RNA, 24 nt, Human
ccacccccacccugggacuaggga

SEQ ID NO: 397343 - RNA, 20 nt, Human
cccacccccacccugggacu

SEQ ID NO: 397344 - RNA, 21 nt, Human
cccaugguggcaguggcuucc

SEQ ID NO: 397345 - RNA, 23 nt, Human
ccucccuucgagguagaccaucg

SEQ ID NO: 397346 - RNA, 24 nt, Human
cugagagagaaaaaggggacccau

SEQ ID NO: 397347 - RNA, 18 nt, Human
gaagugcugcccucugcu

SEQ ID NO: 397348 - RNA, 19 nt, Human
gagccagcccucccuucga

SEQ ID NO: 397349 - RNA, 19 nt, Human
gagcuggggugagaacuuc

SEQ ID NO: 397350 - RNA, 25 nt, Human
gccacgcccccagcguagacgcaca

SEQ ID NO: 397351 - RNA, 23 nt, Human
gggugcccugagagagaaaaagg

SEQ ID NO: 397352 - RNA, 20 nt, Human
gugcccugagagagaaaaag

SEQ ID NO: 397353 - RNA, 21 nt, Human
uagaaacccucucuggagggu

SEQ ID NO: 397354 - RNA, 23 nt, Human
uagaccaucggggagggaaccga

SEQ ID NO: 397355 - RNA, 19 nt, Human
ucccagggcuaacugggag

SEQ ID NO: 397356 - RNA, 23 nt, Human
ucccagggcuaacugggagccag

SEQ ID NO: 397357 - RNA, 19 nt, Human
ucggagcuuuccgccugca

SEQ ID NO: 397358 - RNA, 26 nt, Human
ucuggagggucccagggcuaacuggg

SEQ ID NO: 397359 - RNA, 20 nt, Human
ugccacacaaaggagcuggg

SEQ ID NO: 397360 - RNA, 21 nt, Human
uggggugcccugagagagaaa

SEQ ID NO: 397361 - RNA, 18 nt, Human
uggggugggugcacucuu

SEQ ID NO: 397362 - RNA, 23 nt, Human
ugggugcacucuuuuggagcugg

SEQ ID NO: 397363 - RNA, 19 nt, Human
ugucagggcagcuggggug

SEQ ID NO: 397364 - RNA, 24 nt, Human
aaacuguccuuaauaaaaggaucc

SEQ ID NO: 397365 - RNA, 22 nt, Human
aaaugucagagguacacuuacu

SEQ ID NO: 397366 - RNA, 19 nt, Human
acaaaaauaacagcauaaa

SEQ ID NO: 397367 - RNA, 19 nt, Human
acuacugaaguguccucca

SEQ ID NO: 397368 - RNA, 21 nt, Human
agaaauaacucccaaacuguc

SEQ ID NO: 397369 - RNA, 20 nt, Human
aggagccagacagcagcaca

SEQ ID NO: 397370 - RNA, 22 nt, Human
aggccaaggcaggcggcuggga

SEQ ID NO: 397371 - RNA, 20 nt, Human
aggugcuccucacuucccag

SEQ ID NO: 397372 - RNA, 21 nt, Human
agguggagguuguagcuagcc

SEQ ID NO: 397373 - RNA, 20 nt, Human
auggguggccgggccaagac

SEQ ID NO: 397374 - RNA, 21 nt, Human
caccagcugggauugacacac

SEQ ID NO: 397375 - RNA, 21 nt, Human
cagagacgcuccucacuuccc

SEQ ID NO: 397376 - RNA, 22 nt, Human
cagcaaaccgagugguucccgc

SEQ ID NO: 397377 - RNA, 22 nt, Human
cauuccauggaaaagucagagg

SEQ ID NO: 397378 - RNA, 20 nt, Human
cccagacggggucgcggcca

SEQ ID NO: 397379 - RNA, 18 nt, Human
ccccgcguugccagcgcc

SEQ ID NO: 397380 - RNA, 19 nt, Human
cccgccgcugccucaagcc

SEQ ID NO: 397381 - RNA, 21 nt, Human
ccgcugccucaagccugggug

SEQ ID NO: 397382 - RNA, 22 nt, Human
ccgcugccucaagccugggugg

SEQ ID NO: 397383 - RNA, 23 nt, Human
ccgcugccucaagccuggguggu

SEQ ID NO: 397384 - RNA, 22 nt, Human
ccgggcagaggggcuccucaca

SEQ ID NO: 397385 - RNA, 18 nt, Human
ccucacuucccagacugg

SEQ ID NO: 397386 - RNA, 24 nt, Human
cgagugguucccgccgcugccuca

SEQ ID NO: 397387 - RNA, 25 nt, Human
cggcacuuugggaggccaaggcagg

SEQ ID NO: 397388 - RNA, 20 nt, Human
cggcugggagguggagguug

SEQ ID NO: 397389 - RNA, 18 nt, Human
cgggauggcagccgggaa

SEQ ID NO: 397390 - RNA, 18 nt, Human
cggggcagaggcgcuccc

SEQ ID NO: 397391 - RNA, 18 nt, Human
cuccucaauaacagcggg

SEQ ID NO: 397392 - RNA, 23 nt, Human
gaaguguccuccauucaugaguu

SEQ ID NO: 397393 - RNA, 22 nt, Human
gcacuuugggaggccaaggcag

SEQ ID NO: 397394 - RNA, 21 nt, Human
gccagacagcagcacacagaa

SEQ ID NO: 397395 - RNA, 21 nt, Human
gcggccaggcagaggcgcucc

SEQ ID NO: 397396 - RNA, 21 nt, Human
gcggggcagaggcgcuccccu

SEQ ID NO: 397397 - RNA, 21 nt, Human
ggcagaggcugcaaucucggc

SEQ ID NO: 397398 - RNA, 21 nt, Human
ggcugcaaucucggcacuuug

SEQ ID NO: 397399 - RNA, 25 nt, Human
ggcugggagguggagguuggggacc

SEQ ID NO: 397400 - RNA, 22 nt, Human
gggcagaggcugcaaucucggc

SEQ ID NO: 397401 - RNA, 23 nt, Human
gguaaccccgcguugccagcgcc

SEQ ID NO: 397402 - RNA, 21 nt, Human
guucaggagccagacagcagc

SEQ ID NO: 397403 - RNA, 24 nt, Human
uccaaagccaucucugacacuccc

SEQ ID NO: 397404 - RNA, 25 nt, Human
ucgcagcaaaccgagugguucccgc

SEQ ID NO: 397405 - RNA, 23 nt, Human
ugaggugaguaaacacaaaaaua

SEQ ID NO: 397406 - RNA, 27 nt, Human
ugaguaaacacaaaaauaacagcauug

SEQ ID NO: 397407 - RNA, 18 nt, Human
ugccuuuuguguagcuuc

SEQ ID NO: 397408 - RNA, 22 nt, Human
uggaaaagucagaggugguuaa

SEQ ID NO: 397409 - RNA, 21 nt, Human
ugggaggccaaggcaggcggc

SEQ ID NO: 397410 - RNA, 24 nt, Human
ugggagguggagguuguagcuagc

SEQ ID NO: 397411 - RNA, 21 nt, Human
ugggauugacacaccucuaca

SEQ ID NO: 397412 - RNA, 19 nt, Human
ugguucccgccgcugccuc

SEQ ID NO: 397413 - RNA, 23 nt, Human
ugucagagguacacuuacuaaua

SEQ ID NO: 397414 - RNA, 21 nt, Human
uuacuccucaauaacagcggg

SEQ ID NO: 397415 - RNA, 22 nt, Human
acccaggccggggcuaccuggc

SEQ ID NO: 397416 - RNA, 22 nt, Human
accccugcagggcagagcaaca

SEQ ID NO: 397417 - RNA, 23 nt, Human
acugugugaccugugugcacccc

SEQ ID NO: 397418 - RNA, 21 nt, Human
caaaucucaggcuuaugcaca

SEQ ID NO: 397419 - RNA, 19 nt, Human
caacagcccguuguccccu

SEQ ID NO: 397420 - RNA, 20 nt, Human
cagccguccuggcagagcug

SEQ ID NO: 397421 - RNA, 18 nt, Human
cccugggcccuggggccu

SEQ ID NO: 397422 - RNA, 19 nt, Human
cccugggcccuggggccuc

SEQ ID NO: 397423 - RNA, 20 nt, Human
cccugggcccuggggccucu

SEQ ID NO: 397424 - RNA, 22 nt, Human
ccgcgggucccgggucccaccc

SEQ ID NO: 397425 - RNA, 21 nt, Human
ccggggcuaccuggcuccggc

SEQ ID NO: 397426 - RNA, 23 nt, Human
ccugaugacccaggccggggcua

SEQ ID NO: 397427 - RNA, 21 nt, Human
cuggaguugccgcaggugguu

SEQ ID NO: 397428 - RNA, 20 nt, Human
cugggcccuggggccucuug

SEQ ID NO: 397429 - RNA, 25 nt, Human
gaguugccgcaggugguguugcggu

SEQ ID NO: 397430 - RNA, 20 nt, Human
gcccuggggccucuuggcac

SEQ ID NO: 397431 - RNA, 21 nt, Human
ggagucccugggcccuggggc

SEQ ID NO: 397432 - RNA, 19 nt, Human
ggcagggguuggcccugcg

SEQ ID NO: 397433 - RNA, 18 nt, Human
gggcagagcccgcagucu

SEQ ID NO: 397434 - RNA, 23 nt, Human
gggcagggguuggcccugcgggg

SEQ ID NO: 397435 - RNA, 24 nt, Human
gggggagucccugggcccuggggc

SEQ ID NO: 397436 - RNA, 19 nt, Human
gggucccgggucccacccu

SEQ ID NO: 397437 - RNA, 18 nt, Human
ggguuggcccugcggggg

SEQ ID NO: 397438 - RNA, 22 nt, Human
gugccugaugacccaggccggg

SEQ ID NO: 397439 - RNA, 18 nt, Human
guggggggagucccuggg

SEQ ID NO: 397440 - RNA, 20 nt, Human
guuguccccucccgggccag

SEQ ID NO: 397441 - RNA, 19 nt, Human
uagagccgcgcaagccuga

SEQ ID NO: 397442 - RNA, 22 nt, Human
uagagccgcgcaagccugagaa

SEQ ID NO: 397443 - RNA, 21 nt, Human
ucccagaggucuggaguugcc

SEQ ID NO: 397444 - RNA, 18 nt, Human
ucccugggcccuggggcc

SEQ ID NO: 397445 - RNA, 21 nt, Human
uccgccgcuucggccuagagc

SEQ ID NO: 397446 - RNA, 20 nt, Human
ucugcaauucgguguuuuau

SEQ ID NO: 397447 - RNA, 20 nt, Human
ucuggaguugccgcaggugg

SEQ ID NO: 397448 - RNA, 25 nt, Human
ucugugccugaugacccaggccggg

SEQ ID NO: 397449 - RNA, 23 nt, Human
ugaccugugugcaccccagguga

SEQ ID NO: 397450 - RNA, 18 nt, Human
ugagaaaagccgcuccag

SEQ ID NO: 397451 - RNA, 23 nt, Human
ugcagggcagagcaacagggcag

SEQ ID NO: 397452 - RNA, 21 nt, Human
ugccucugugccugaugaccc

SEQ ID NO: 397453 - RNA, 22 nt, Human
ugcuguggggggagucccuggg

SEQ ID NO: 397454 - RNA, 22 nt, Human
uggcagagcugggggcagagcc

SEQ ID NO: 397455 - RNA, 26 nt, Human
ugggggcagagcccgcagucuuguuc

SEQ ID NO: 397456 - RNA, 22 nt, Human
ugugugcaccccaggugaccag

SEQ ID NO: 397457 - RNA, 23 nt, Human
uguuuuauucuuuccaaaucuca

SEQ ID NO: 397458 - RNA, 23 nt, Human
aagaaugcaguaaauggaaucua

SEQ ID NO: 397459 - RNA, 25 nt, Human
aagaguaacaaaagaugggagccgg

SEQ ID NO: 397460 - RNA, 24 nt, Human
acacacaaaaaauuggucuuuguu

SEQ ID NO: 397461 - RNA, 18 nt, Human
acucucaggcugccuacc

SEQ ID NO: 397462 - RNA, 21 nt, Human
agcauuaaaaaauacaagcaa

SEQ ID NO: 397463 - RNA, 20 nt, Human
augucccaagaguaacaaaa

SEQ ID NO: 397464 - RNA, 24 nt, Human
caaggaucuccccugaaaucagaa

SEQ ID NO: 397465 - RNA, 22 nt, Human
cacuaacuaacauuaggcaugc

SEQ ID NO: 397466 - RNA, 20 nt, Human
cagcauugacaaucaaacac

SEQ ID NO: 397467 - RNA, 22 nt, Human
caggaugucccaagaguaacaa

SEQ ID NO: 397468 - RNA, 19 nt, Human
cauauaggaaagggagauc

SEQ ID NO: 397469 - RNA, 23 nt, Human
caucccaucaacagcucuucauu

SEQ ID NO: 397470 - RNA, 20 nt, Human
cauuaaaaaauacaagcaaa

SEQ ID NO: 397471 - RNA, 18 nt, Human
ccaaagagguaaugcuga

SEQ ID NO: 397472 - RNA, 25 nt, Human
ccaucaacagcucuucauuucuuga

SEQ ID NO: 397473 - RNA, 26 nt, Human
cccaucaacagcucuucauuucuuga

SEQ ID NO: 397474 - RNA, 19 nt, Human
ccugaaaucagaaaugacu

SEQ ID NO: 397475 - RNA, 25 nt, Human
cuccacacaaaugagagauuuuuac

SEQ ID NO: 397476 - RNA, 24 nt, Human
cuccccugaaaucagaaaugacuc

SEQ ID NO: 397477 - RNA, 18 nt, Human
cucuagacucucaggcug

SEQ ID NO: 397478 - RNA, 19 nt, Human
cucucaggcugccuacccu

SEQ ID NO: 397479 - RNA, 23 nt, Human
cuuaagcuucacacacaaaaaau

SEQ ID NO: 397480 - RNA, 25 nt, Human
cuuaauauggauauuuaagcaaauc

SEQ ID NO: 397481 - RNA, 20 nt, Human
gaaaugacuccacacaaaug

SEQ ID NO: 397482 - RNA, 22 nt, Human
gcauuaaaaaauacaagcaaac

SEQ ID NO: 397483 - RNA, 19 nt, Human
gggcuuugagaaaagcaua

SEQ ID NO: 397484 - RNA, 18 nt, Human
uaacaaaagaugggagcc

SEQ ID NO: 397485 - RNA, 28 nt, Human
uaacaaaagaugggagccaauccucuca

SEQ ID NO: 397486 - RNA, 21 nt, Human
uaagcaaaucaucauauagga

SEQ ID NO: 397487 - RNA, 22 nt, Human
uaccugaaacugcuguuagcuu

SEQ ID NO: 397488 - RNA, 26 nt, Human
uagcauuaaaaaauacaagcaaacau

SEQ ID NO: 397489 - RNA, 21 nt, Human
uauaggaaagggagaucaaga

SEQ ID NO: 397490 - RNA, 20 nt, Human
ucccaagaguaacaaaagau

SEQ ID NO: 397491 - RNA, 24 nt, Human
uccccuacuucugcccuuucugau

SEQ ID NO: 397492 - RNA, 18 nt, Human
uccuuuuccaaagaggua

SEQ ID NO: 397493 - RNA, 23 nt, Human
ucucaggcugccuacccuaccuu

SEQ ID NO: 397494 - RNA, 25 nt, Human
ucuccagcauugacaaucaaacacu

SEQ ID NO: 397495 - RNA, 20 nt, Human
ucuccccugaaaucagaaau

SEQ ID NO: 397496 - RNA, 21 nt, Human
ucugcccuuucugauaaacac

SEQ ID NO: 397497 - RNA, 18 nt, Human
ugagaaaagcauaguccc

SEQ ID NO: 397498 - RNA, 21 nt, Human
ugcaccucuaccugaaacugc

SEQ ID NO: 397499 - RNA, 19 nt, Human
uguggucccacuaucaaaa

SEQ ID NO: 397500 - RNA, 22 nt, Human
uuucagugaucagaagaaugca

SEQ ID NO: 397501 - RNA, 24 nt, Human
aacccuuggaggcuuuuuuugcag

SEQ ID NO: 397502 - RNA, 25 nt, Human
agagcuggaccagucgaaacccuug

SEQ ID NO: 397503 - RNA, 18 nt, Human
aggaagggaugucagagc

SEQ ID NO: 397504 - RNA, 18 nt, Human
augucagagcuggaccag

SEQ ID NO: 397505 - RNA, 21 nt, Human
ccacaggggcguuggaggccu

SEQ ID NO: 397506 - RNA, 21 nt, Human
gccacaggggcguuggaggcc

SEQ ID NO: 397507 - RNA, 19 nt, Human
gcuuuggcccugaucacuu

SEQ ID NO: 397508 - RNA, 19 nt, Human
uauucaugcuguuuccagg

SEQ ID NO: 397509 - RNA, 19 nt, Human
uuccagaguccacuuccuu

SEQ ID NO: 397510 - RNA, 25 nt, Human
aaaaaaaaaaaaaaacacaacagaa

SEQ ID NO: 397511 - RNA, 23 nt, Human
aaaaacacaacagaaacccuaca

SEQ ID NO: 397512 - RNA, 19 nt, Human
aaaaauuagcuuauguccc

SEQ ID NO: 397513 - RNA, 27 nt, Human
aaacagaguucuggguuggacauggug

SEQ ID NO: 397514 - RNA, 20 nt, Human
aaacaucaagucugggcuca

SEQ ID NO: 397515 - RNA, 19 nt, Human
aaacucaggcuuuccccag

SEQ ID NO: 397516 - RNA, 23 nt, Human
aaagagccaauuuggaaguuguu

SEQ ID NO: 397517 - RNA, 24 nt, Human
aaauguguauacaaacauaucccc

SEQ ID NO: 397518 - RNA, 20 nt, Human
aacacaaagcccuugccccc

SEQ ID NO: 397519 - RNA, 22 nt, Human
aacacccacccaccccagcagg

SEQ ID NO: 397520 - RNA, 23 nt, Human
aagaaaacaaaacagaguucugg

SEQ ID NO: 397521 - RNA, 22 nt, Human
aagaagccucuacccccaaagc

SEQ ID NO: 397522 - RNA, 19 nt, Human
aagcaaaaacuauucucca

SEQ ID NO: 397523 - RNA, 20 nt, Human
aagcaacacaaagcccuugc

SEQ ID NO: 397524 - RNA, 21 nt, Human
aagcucaaaaccgcccucuga

SEQ ID NO: 397525 - RNA, 23 nt, Human
aaggaucagcucuggggcaaguc

SEQ ID NO: 397526 - RNA, 24 nt, Human
aaggggcaggguggggccaggagg

SEQ ID NO: 397527 - RNA, 21 nt, Human
aaucauggcuucccaacugga

SEQ ID NO: 397528 - RNA, 22 nt, Human
acacugccucacaaagaaggcc

SEQ ID NO: 397529 - RNA, 20 nt, Human
acagaggagaaagacccaaa

SEQ ID NO: 397530 - RNA, 18 nt, Human
acaggguucgagaucucu

SEQ ID NO: 397531 - RNA, 20 nt, Human
acaugcagacacagacagac

SEQ ID NO: 397532 - RNA, 19 nt, Human
acaugcuggcaucagcuuc

SEQ ID NO: 397533 - RNA, 18 nt, Human
accaaagcguuuuccagg

SEQ ID NO: 397534 - RNA, 21 nt, Human
accaagcugucuccacaccca

SEQ ID NO: 397535 - RNA, 19 nt, Human
accacuuuacuguuuagaa

SEQ ID NO: 397536 - RNA, 19 nt, Human
acccaaaccagaaccaacu

SEQ ID NO: 397537 - RNA, 20 nt, Human
acccacccaccccagcagga

SEQ ID NO: 397538 - RNA, 20 nt, Human
acgcgagugggugggcuggg

SEQ ID NO: 397539 - RNA, 23 nt, Human
acuaguuccuucuauuuccccca

SEQ ID NO: 397540 - RNA, 24 nt, Human
agaaaacaggcacuaauuccaguc

SEQ ID NO: 397541 - RNA, 21 nt, Human
agaaccaacuaacacccaccc

SEQ ID NO: 397542 - RNA, 22 nt, Human
agaaccaacuaacacccaccca

SEQ ID NO: 397543 - RNA, 19 nt, Human
agaaggggcaggguggggc

SEQ ID NO: 397544 - RNA, 25 nt, Human
agaggugaggaucucaggagguggc

SEQ ID NO: 397545 - RNA, 18 nt, Human
agcaagaggaggaggaga

SEQ ID NO: 397546 - RNA, 22 nt, Human
agcaagaggaggaggagaagcc

SEQ ID NO: 397547 - RNA, 22 nt, Human
agccaaggcaggcaggacacuc

SEQ ID NO: 397548 - RNA, 21 nt, Human
agccauugggauuccaauagg

SEQ ID NO: 397549 - RNA, 23 nt, Human
agccgcauuaccucaucggcccu

SEQ ID NO: 397550 - RNA, 22 nt, Human
agcgcccgccgccugccugcug

SEQ ID NO: 397551 - RNA, 22 nt, Human
agcgggaagggagggaagugag

SEQ ID NO: 397552 - RNA, 22 nt, Human
aggaaaacuguaaacagugcua

SEQ ID NO: 397553 - RNA, 21 nt, Human
aggaaaaucauggcuucccaa

SEQ ID NO: 397554 - RNA, 21 nt, Human
aggagacggacaggggucaga

SEQ ID NO: 397555 - RNA, 24 nt, Human
aggcacagaggagaaagacccaaa

SEQ ID NO: 397556 - RNA, 21 nt, Human
aggcagaagagaugcccaaag

SEQ ID NO: 397557 - RNA, 22 nt, Human
aggcaggucuggaacgagggga

SEQ ID NO: 397558 - RNA, 19 nt, Human
aggcuggaggagucucagu

SEQ ID NO: 397559 - RNA, 24 nt, Human
agggaacuuguguagguuggucag

SEQ ID NO: 397560 - RNA, 20 nt, Human
agggagggaagugagguggg

SEQ ID NO: 397561 - RNA, 21 nt, Human
auaaaagaaagcuccuggcca

SEQ ID NO: 397562 - RNA, 21 nt, Human
auaaggacaaucccaaaacau

SEQ ID NO: 397563 - RNA, 19 nt, Human
auagaaagcucaaaaccgc

SEQ ID NO: 397564 - RNA, 21 nt, Human
auauagcgcugggcccccggg

SEQ ID NO: 397565 - RNA, 23 nt, Human
aucacugggcuggggaauugugu

SEQ ID NO: 397566 - RNA, 20 nt, Human
auggaggaaaacuguaaaca

SEQ ID NO: 397567 - RNA, 23 nt, Human
auggggaugugguucugcuaauu

SEQ ID NO: 397568 - RNA, 21 nt, Human
auuacaauccucaaauggagu

SEQ ID NO: 397569 - RNA, 26 nt, Human
caaacauaucccccuaggugagcuaa

SEQ ID NO: 397570 - RNA, 21 nt, Human
caaaccagaaccaacuaacac

SEQ ID NO: 397571 - RNA, 24 nt, Human
caaaccagaaccaacuaacaccca

SEQ ID NO: 397572 - RNA, 18 nt, Human
caacacaaagcccuugcc

SEQ ID NO: 397573 - RNA, 19 nt, Human
caacuaacacccacccacc

SEQ ID NO: 397574 - RNA, 24 nt, Human
caagaaaacaggcacuaauuucau

SEQ ID NO: 397575 - RNA, 20 nt, Human
caagcaacgacaacaaaaua

SEQ ID NO: 397576 - RNA, 21 nt, Human
caaggagacggacagggguca

SEQ ID NO: 397577 - RNA, 21 nt, Human
caaggcaggcaaauugccucc

SEQ ID NO: 397578 - RNA, 21 nt, Human
caagggguaacggggcggggc

SEQ ID NO: 397579 - RNA, 19 nt, Human
cacaaagaaggccaagccu

SEQ ID NO: 397580 - RNA, 23 nt, Human
cacaagauuuagcaaaaggacau

SEQ ID NO: 397581 - RNA, 18 nt, Human
cacacucagccuucaccc

SEQ ID NO: 397582 - RNA, 21 nt, Human
cacagaggagaaagacccaaa

SEQ ID NO: 397583 - RNA, 26 nt, Human
cacccacccaccccagcaggaccgcu

SEQ ID NO: 397584 - RNA, 18 nt, Human
cacccaccccagcaggac

SEQ ID NO: 397585 - RNA, 22 nt, Human
caccccagcaggaccgcuucca

SEQ ID NO: 397586 - RNA, 19 nt, Human
cacucugcagcucucccuc

SEQ ID NO: 397587 - RNA, 18 nt, Human
cagagcacuggcccgaga

SEQ ID NO: 397588 - RNA, 18 nt, Human
cagagcagagcacuggcc

SEQ ID NO: 397589 - RNA, 18 nt, Human
caggacacucugcagcuc

SEQ ID NO: 397590 - RNA, 22 nt, Human
caugacacaagauuuagcaaaa

SEQ ID NO: 397591 - RNA, 21 nt, Human
cauuccuucuagacaggguuc

SEQ ID NO: 397592 - RNA, 20 nt, Human
ccaaacaugaagcagggaca

SEQ ID NO: 397593 - RNA, 19 nt, Human
ccaaaccagaaccaacuaa

SEQ ID NO: 397594 - RNA, 24 nt, Human
ccaaaccagaaccaacuaacaccc

SEQ ID NO: 397595 - RNA, 22 nt, Human
ccaaacucucucucuuucucuc

SEQ ID NO: 397596 - RNA, 19 nt, Human
ccaaggccuaacagauggg

SEQ ID NO: 397597 - RNA, 21 nt, Human
ccacccaccccagcaggaccg

SEQ ID NO: 397598 - RNA, 21 nt, Human
ccagaaccaacuaacacccac

SEQ ID NO: 397599 - RNA, 20 nt, Human
ccaggagaggugucccucca

SEQ ID NO: 397600 - RNA, 22 nt, Human
ccaguauuaccuacccuggacc

SEQ ID NO: 397601 - RNA, 23 nt, Human
cccaaacucucucucuuucucuc

SEQ ID NO: 397602 - RNA, 18 nt, Human
cccaaaucuacuuggcua

SEQ ID NO: 397603 - RNA, 19 nt, Human
cccacgcccaccugggcca

SEQ ID NO: 397604 - RNA, 22 nt, Human
cccagcaggaccgcuuccacag

SEQ ID NO: 397605 - RNA, 19 nt, Human
cccagggccuccucaccaa

SEQ ID NO: 397606 - RNA, 23 nt, Human
cccaguauuaccuacccuggaca

SEQ ID NO: 397607 - RNA, 19 nt, Human
cccaugauagggaagagag

SEQ ID NO: 397608 - RNA, 25 nt, Human
ccccagugaccaacaauuuuaauuc

SEQ ID NO: 397609 - RNA, 18 nt, Human
cccccaaagcaaaaacua

SEQ ID NO: 397610 - RNA, 19 nt, Human
ccccgccucgggcuguugg

SEQ ID NO: 397611 - RNA, 25 nt, Human
ccccugccaaauggcaugaccacaa

SEQ ID NO: 397612 - RNA, 18 nt, Human
ccccuuccucucgccucc

SEQ ID NO: 397613 - RNA, 19 nt, Human
cccgccgccugccugcugc

SEQ ID NO: 397614 - RNA, 21 nt, Human
cccgccgccugccugcugccc

SEQ ID NO: 397615 - RNA, 20 nt, Human
cccuccaaaaagggggcggg

SEQ ID NO: 397616 - RNA, 20 nt, Human
ccgccgccugccugcugccc

SEQ ID NO: 397617 - RNA, 22 nt, Human
ccgccgcugccggggcugcugc

SEQ ID NO: 397618 - RNA, 19 nt, Human
ccgcugccggggcugcugc

SEQ ID NO: 397619 - RNA, 21 nt, Human
ccucacacucagccuucaccc

SEQ ID NO: 397620 - RNA, 23 nt, Human
ccuccagccaaggcaggcaggac

SEQ ID NO: 397621 - RNA, 21 nt, Human
ccucccauucucccccugcca

SEQ ID NO: 397622 - RNA, 23 nt, Human
ccucccggcgaaggagcaggagc

SEQ ID NO: 397623 - RNA, 19 nt, Human
ccuccgagugcccggcggg

SEQ ID NO: 397624 - RNA, 20 nt, Human
ccugccugcugcccgcucug

SEQ ID NO: 397625 - RNA, 19 nt, Human
cgaaggagcaggagcugga

SEQ ID NO: 397626 - RNA, 22 nt, Human
cgaaggagcaggagcuggagga

SEQ ID NO: 397627 - RNA, 20 nt, Human
cgcugggcccccggggaccc

SEQ ID NO: 397628 - RNA, 22 nt, Human
cgggaccggugcuugccgcugg

SEQ ID NO: 397629 - RNA, 25 nt, Human
cgggauggggcgcagcgaggcugcc

SEQ ID NO: 397630 - RNA, 29 nt, Human
cgggggcaagggguaacggggggaagucc

SEQ ID NO: 397631 - RNA, 19 nt, Human
cgugccccuucucgucugc

SEQ ID NO: 397632 - RNA, 21 nt, Human
cuacccccaaagcaaaaacua

SEQ ID NO: 397633 - RNA, 18 nt, Human
cuacgaaauuuagcaaca

SEQ ID NO: 397634 - RNA, 20 nt, Human
cuagagaccuugacugugcu

SEQ ID NO: 397635 - RNA, 19 nt, Human
cucacaaagaaggccaagc

SEQ ID NO: 397636 - RNA, 24 nt, Human
cucacagagaagacacugaugucc

SEQ ID NO: 397637 - RNA, 19 nt, Human
cuccaaguucuccccuucc

SEQ ID NO: 397638 - RNA, 22 nt, Human
cuccaggagccauugggauucc

SEQ ID NO: 397639 - RNA, 19 nt, Human
cuccggcgcgcugcccucc

SEQ ID NO: 397640 - RNA, 18 nt, Human
cucuuguaguuccuuccu

SEQ ID NO: 397641 - RNA, 27 nt, Human
cugccgccgcugccggggcugcugcuc

SEQ ID NO: 397642 - RNA, 20 nt, Human
cugcgcccuggccccacgcc

SEQ ID NO: 397643 - RNA, 21 nt, Human
cuggccccacgcccaccuggg

SEQ ID NO: 397644 - RNA, 19 nt, Human
cugggccacugggugucuc

SEQ ID NO: 397645 - RNA, 18 nt, Human
cugguucuuacucucugg

SEQ ID NO: 397646 - RNA, 18 nt, Human
cuguuuccuaaaguggaa

SEQ ID NO: 397647 - RNA, 18 nt, Human
cuuguugguuucucucca

SEQ ID NO: 397648 - RNA, 24 nt, Human
gaacagaauucuguguccuguaaa

SEQ ID NO: 397649 - RNA, 22 nt, Human
gaauugugugugugcugcauca

SEQ ID NO: 397650 - RNA, 19 nt, Human
gaccggugcuugccgcugg

SEQ ID NO: 397651 - RNA, 20 nt, Human
gacuggcuaaagggaaaggc

SEQ ID NO: 397652 - RNA, 20 nt, Human
gagaagacacugauguccac

SEQ ID NO: 397653 - RNA, 18 nt, Human
gagcaggagcuggaggag

SEQ ID NO: 397654 - RNA, 22 nt, Human
gagcaggagcuggaggagcaag

SEQ ID NO: 397655 - RNA, 22 nt, Human
gagcaggcacagaggagaaaga

SEQ ID NO: 397656 - RNA, 20 nt, Human
gaggagaagccgucugagcg

SEQ ID NO: 397657 - RNA, 22 nt, Human
gaggagcaagaggaggaggaga

SEQ ID NO: 397658 - RNA, 23 nt, Human
gaggaggaggagaagccgucuga

SEQ ID NO: 397659 - RNA, 21 nt, Human
gaggauaguucccaauaaacc

SEQ ID NO: 397660 - RNA, 19 nt, Human
gagggaagugagguggggc

SEQ ID NO: 397661 - RNA, 21 nt, Human
gagggaagugagguggggcag

SEQ ID NO: 397662 - RNA, 18 nt, Human
gaggguaaaagacaggag

SEQ ID NO: 397663 - RNA, 22 nt, Human
gagguggggaagaagcaagagg

SEQ ID NO: 397664 - RNA, 18 nt, Human
gcacagaggagaaagacc

SEQ ID NO: 397665 - RNA, 24 nt, Human
gcccagggccuccucaccaaggcc

SEQ ID NO: 397666 - RNA, 22 nt, Human
gccgcugcugccgccgcugccg

SEQ ID NO: 397667 - RNA, 18 nt, Human
gccggggcugcugcucgc

SEQ ID NO: 397668 - RNA, 19 nt, Human
gccugcugcccgcucugcg

SEQ ID NO: 397669 - RNA, 21 nt, Human
gcgaaggagcaggagcuggag

SEQ ID NO: 397670 - RNA, 19 nt, Human
gcgcaggacucggcgggcg

SEQ ID NO: 397671 - RNA, 18 nt, Human
gcggagcccucgugcccc

SEQ ID NO: 397672 - RNA, 20 nt, Human
gcugccgccgcugccggggc

SEQ ID NO: 397673 - RNA, 19 nt, Human
gcugcugcucgccucucca

SEQ ID NO: 397674 - RNA, 21 nt, Human
gcuggggaauugugugugugc

SEQ ID NO: 397675 - RNA, 20 nt, Human
gcuuuuuuuuuuuuucuucu

SEQ ID NO: 397676 - RNA, 19 nt, Human
ggaaauaguauccucuacc

SEQ ID NO: 397677 - RNA, 20 nt, Human
ggaaauaguauccucuaccc

SEQ ID NO: 397678 - RNA, 19 nt, Human
ggacaaucccaaaacauca

SEQ ID NO: 397679 - RNA, 22 nt, Human
ggacaggggucagaugacccau

SEQ ID NO: 397680 - RNA, 18 nt, Human
ggagaagccgucugagcg

SEQ ID NO: 397681 - RNA, 20 nt, Human
ggagauggugagguggggaa

SEQ ID NO: 397682 - RNA, 19 nt, Human
ggaggaagcgagaacuugg

SEQ ID NO: 397683 - RNA, 20 nt, Human
ggaggaagucuggugggaga

SEQ ID NO: 397684 - RNA, 19 nt, Human
ggaggagcaagaggaggag

SEQ ID NO: 397685 - RNA, 18 nt, Human
ggagggaagugagguggg

SEQ ID NO: 397686 - RNA, 22 nt, Human
ggaucucaggagguggcauuca

SEQ ID NO: 397687 - RNA, 22 nt, Human
ggccgagugacacagaacaaga

SEQ ID NO: 397688 - RNA, 18 nt, Human
ggccgugcggggcaaccu

SEQ ID NO: 397689 - RNA, 19 nt, Human
gggaagaagcaagaggggu

SEQ ID NO: 397690 - RNA, 21 nt, Human
gggaagcucagcgggaaggga

SEQ ID NO: 397691 - RNA, 18 nt, Human
gggagcuagggaaaggga

SEQ ID NO: 397692 - RNA, 25 nt, Human
gggcaaagggaagagggucugggag

SEQ ID NO: 397693 - RNA, 21 nt, Human
gggcaggguggggccaggagg

SEQ ID NO: 397694 - RNA, 22 nt, Human
gggcggggccgggggcaagggg

SEQ ID NO: 397695 - RNA, 20 nt, Human
gggcucaucccuucaaaacc

SEQ ID NO: 397696 - RNA, 20 nt, Human
ggggccaggaggauaguucc

SEQ ID NO: 397697 - RNA, 18 nt, Human
guauacaaacauaucccc

SEQ ID NO: 397698 - RNA, 24 nt, Human
guaucucccauggcccuggauucu

SEQ ID NO: 397699 - RNA, 19 nt, Human
gugaaguaaaugguagacu

SEQ ID NO: 397700 - RNA, 19 nt, Human
gugaugcuagggcuaugaa

SEQ ID NO: 397701 - RNA, 22 nt, Human
gugcggggcaaccuuggccucc

SEQ ID NO: 397702 - RNA, 23 nt, Human
guuucucuggagagagcaggcac

SEQ ID NO: 397703 - RNA, 21 nt, Human
uaaaauauacauuaucaccua

SEQ ID NO: 397704 - RNA, 18 nt, Human
uaaaauguucaugauaug

SEQ ID NO: 397705 - RNA, 24 nt, Human
uaacugcuaccccuccaguuucuc

SEQ ID NO: 397706 - RNA, 18 nt, Human
uaagcugaaaaaagagac

SEQ ID NO: 397707 - RNA, 19 nt, Human
uaagcugaaaaaagagaca

SEQ ID NO: 397708 - RNA, 20 nt, Human
uacacgguaaugaaauugau

SEQ ID NO: 397709 - RNA, 24 nt, Human
uacauuaucaccuacucucagcau

SEQ ID NO: 397710 - RNA, 25 nt, Human
uacauuaucaccuacucucagcauc

SEQ ID NO: 397711 - RNA, 21 nt, Human
uauaaaauucauaaauaacau

SEQ ID NO: 397712 - RNA, 20 nt, Human
uauacauuaucaccuacucu

SEQ ID NO: 397713 - RNA, 18 nt, Human
uauagaaagcucaaaacc

SEQ ID NO: 397714 - RNA, 19 nt, Human
uauagaaagcucaaaaccg

SEQ ID NO: 397715 - RNA, 28 nt, Human
uaucacgaagaagaggaauacagguucc

SEQ ID NO: 397716 - RNA, 26 nt, Human
uaugacagcauagaccuuucuuuaaa

SEQ ID NO: 397717 - RNA, 19 nt, Human
ucaaaaaaaaaaaaaaaaa

SEQ ID NO: 397718 - RNA, 23 nt, Human
ucaaaaaaaaaaaaaaaaacaca

SEQ ID NO: 397719 - RNA, 21 nt, Human
ucaccauccugccaaccccca

SEQ ID NO: 397720 - RNA, 23 nt, Human
uccacaggugagggguggccaug

SEQ ID NO: 397721 - RNA, 19 nt, Human
uccggcgcgcugcccuccg

SEQ ID NO: 397722 - RNA, 21 nt, Human
uccggcgcgcugcccuccgag

SEQ ID NO: 397723 - RNA, 21 nt, Human
uccuccuugugugagagaggc

SEQ ID NO: 397724 - RNA, 22 nt, Human
uccuggccaaaucuaccaaagc

SEQ ID NO: 397725 - RNA, 23 nt, Human
uccuugugugagagaggcugacc

SEQ ID NO: 397726 - RNA, 20 nt, Human
ucgugccccuucucgucugc

SEQ ID NO: 397727 - RNA, 20 nt, Human
ucuaagaagccucuaccccc

SEQ ID NO: 397728 - RNA, 20 nt, Human
ucuacccaaaucuacuuggc

SEQ ID NO: 397729 - RNA, 18 nt, Human
ucuagacaggguucgaga

SEQ ID NO: 397730 - RNA, 18 nt, Human
ucuaucugcuugcugccu

SEQ ID NO: 397731 - RNA, 19 nt, Human
ucucccagagcaaacgggg

SEQ ID NO: 397732 - RNA, 18 nt, Human
ucucugguucuuacucuc

SEQ ID NO: 397733 - RNA, 23 nt, Human
ucucugguucuuacucucuggga

SEQ ID NO: 397734 - RNA, 23 nt, Human
ucucuuguugguuucucuccauc

SEQ ID NO: 397735 - RNA, 18 nt, Human
ucugccaagcaccuugcc

SEQ ID NO: 397736 - RNA, 18 nt, Human
ucuguguccuuuauguau

SEQ ID NO: 397737 - RNA, 19 nt, Human
ucuuucucucucucucucc

SEQ ID NO: 397738 - RNA, 24 nt, Human
ugaaaaaaaaaugucaacuuggaa

SEQ ID NO: 397739 - RNA, 20 nt, Human
ugaaauaaacaaagcuauag

SEQ ID NO: 397740 - RNA, 21 nt, Human
ugaaaugguuggccuuucagc

SEQ ID NO: 397741 - RNA, 24 nt, Human
ugacaucgcuuugcgaaagacccu

SEQ ID NO: 397742 - RNA, 25 nt, Human
ugacaucgcuuugcgaaagacccuu

SEQ ID NO: 397743 - RNA, 23 nt, Human
ugacuacacucucaucugccauc

SEQ ID NO: 397744 - RNA, 24 nt, Human
ugacugugcuugguggaaccagcg

SEQ ID NO: 397745 - RNA, 19 nt, Human
ugagaaguggacaaagaca

SEQ ID NO: 397746 - RNA, 20 nt, Human
ugagaaguggacaaagacaa

SEQ ID NO: 397747 - RNA, 19 nt, Human
ugagcgcccgccgccugcc

SEQ ID NO: 397748 - RNA, 19 nt, Human
ugagggguggccauguccu

SEQ ID NO: 397749 - RNA, 20 nt, Human
ugagguggggaagaagcaag

SEQ ID NO: 397750 - RNA, 19 nt, Human
ugauagaaauaaaaccacu

SEQ ID NO: 397751 - RNA, 18 nt, Human
ugcccagggccuccucac

SEQ ID NO: 397752 - RNA, 27 nt, Human
ugccgcugcugccgccgcugccggggg

SEQ ID NO: 397753 - RNA, 23 nt, Human
ugccgguacucucuucccacucu

SEQ ID NO: 397754 - RNA, 20 nt, Human
ugccugcugcccgcucugcg

SEQ ID NO: 397755 - RNA, 19 nt, Human
ugccugggcacuugugugu

SEQ ID NO: 397756 - RNA, 20 nt, Human
ugcgauaguaagggaagggc

SEQ ID NO: 397757 - RNA, 23 nt, Human
ugcugccuuugacugauccugaa

SEQ ID NO: 397758 - RNA, 18 nt, Human
ugcugggagaaucuaaga

SEQ ID NO: 397759 - RNA, 21 nt, Human
ugcuuuuuuuuuuuuucuucu

SEQ ID NO: 397760 - RNA, 24 nt, Human
uggaaaugaaugaugucaaaacca

SEQ ID NO: 397761 - RNA, 22 nt, Human
uggaaccagcgggggaaugcua

SEQ ID NO: 397762 - RNA, 21 nt, Human
uggaaggguagugucuccugg

SEQ ID NO: 397763 - RNA, 19 nt, Human
uggaaugaacugaagauac

SEQ ID NO: 397764 - RNA, 24 nt, Human
uggaaugaacugaagauacaaaua

SEQ ID NO: 397765 - RNA, 20 nt, Human
uggaggagaagggcaaaggg

SEQ ID NO: 397766 - RNA, 25 nt, Human
uggccagaugccucacagagaagac

SEQ ID NO: 397767 - RNA, 21 nt, Human
uggccuccggcgcgcugcccu

SEQ ID NO: 397768 - RNA, 18 nt, Human
uggcgcaggacucggcgg

SEQ ID NO: 397769 - RNA, 18 nt, Human
ugggacaugcaguggcag

SEQ ID NO: 397770 - RNA, 20 nt, Human
ugggacaugcaguggcagcu

SEQ ID NO: 397771 - RNA, 18 nt, Human
ugggagaaucuaagaagc

SEQ ID NO: 397772 - RNA, 18 nt, Human
ugggcccccggggacccc

SEQ ID NO: 397773 - RNA, 22 nt, Human
uggggccaggaggauaguuccc

SEQ ID NO: 397774 - RNA, 19 nt, Human
uggguccucggagcggagc

SEQ ID NO: 397775 - RNA, 21 nt, Human
ugggugucucugacccaaacc

SEQ ID NO: 397776 - RNA, 22 nt, Human
uggguuggacaugacuggggag

SEQ ID NO: 397777 - RNA, 23 nt, Human
uggugagguggggaagaagcaag

SEQ ID NO: 397778 - RNA, 21 nt, Human
ugguuggccuuucagcaaguu

SEQ ID NO: 397779 - RNA, 24 nt, Human
uguacacauauuacagccuacaca

SEQ ID NO: 397780 - RNA, 23 nt, Human
uguauaacaucuuucacacaccu

SEQ ID NO: 397781 - RNA, 24 nt, Human
ugucacaugcaagacagaggucug

SEQ ID NO: 397782 - RNA, 19 nt, Human
uguccaagggaagcucagc

SEQ ID NO: 397783 - RNA, 22 nt, Human
uguggauaguguauggugugug

SEQ ID NO: 397784 - RNA, 24 nt, Human
uguggguauaugcaaauguguaua

SEQ ID NO: 397785 - RNA, 23 nt, Human
uguguauuuauccaauuuacaua

SEQ ID NO: 397786 - RNA, 21 nt, Human
uguuccaagugcuaaauuugc

SEQ ID NO: 397787 - RNA, 22 nt, Human
uguuuugcuuuugccaucagau

SEQ ID NO: 397788 - RNA, 27 nt, Human
uuaaacuauuggcauauuuaacagcaa

SEQ ID NO: 397789 - RNA, 21 nt, Human
uucaagaaccauguugccacc

SEQ ID NO: 397790 - RNA, 19 nt, Human
uucaaugucaccauccugc

SEQ ID NO: 397791 - RNA, 24 nt, Human
uucuggguuucaggacagcagacu

SEQ ID NO: 397792 - RNA, 20 nt, Human
uugaucccaaggaaacccga

SEQ ID NO: 397793 - RNA, 22 nt, Human
uugaucccaaggaaacccgaug

SEQ ID NO: 397794 - RNA, 21 nt, Human
uugccugggcacuugugugug

SEQ ID NO: 397795 - RNA, 21 nt, Human
uugcuccagacucaggaacau

SEQ ID NO: 397796 - RNA, 18 nt, Human
uugcugccuuugacugau

SEQ ID NO: 397797 - RNA, 20 nt, Human
uuucuucaaacaagcaacga

SEQ ID NO: 397798 - RNA, 21 nt, Human
uuugacacuaaaacuuaaaau

SEQ ID NO: 397799 - RNA, 18 nt, Human
uuugcccagggccuccuc

SEQ ID NO: 397800 - RNA, 24 nt, Human
uuugcgaaagacccuucuuugccc

SEQ ID NO: 397801 - RNA, 22 nt, Human
uuuuuuuuuucuucuucuguuu

SEQ ID NO: 397802 - RNA, 23 nt, Human
aacacuugcaguaacagcuacaa

SEQ ID NO: 397803 - RNA, 18 nt, Human
aagggaugugauggucac

SEQ ID NO: 397804 - RNA, 22 nt, Human
acaaaggaaaacacauauuccu

SEQ ID NO: 397805 - RNA, 23 nt, Human
agaaacacuugcaguaacagcua

SEQ ID NO: 397806 - RNA, 18 nt, Human
agggaugugauggucacu

SEQ ID NO: 397807 - RNA, 19 nt, Human
cagacuguccacuuggcac

SEQ ID NO: 397808 - RNA, 18 nt, Human
cagggcagaaaagucaug

SEQ ID NO: 397809 - RNA, 23 nt, Human
caguggccagacuguccacuugg

SEQ ID NO: 397810 - RNA, 21 nt, Human
caucucauguguaugacauuc

SEQ ID NO: 397811 - RNA, 20 nt, Human
cauggccccuucccugccuu

SEQ ID NO: 397812 - RNA, 21 nt, Human
ccagacuguccacuuggcacu

SEQ ID NO: 397813 - RNA, 22 nt, Human
cucugcagggaaggagaacugg

SEQ ID NO: 397814 - RNA, 18 nt, Human
cuucugauucuguacauc

SEQ ID NO: 397815 - RNA, 19 nt, Human
gaaaacacauauuccuggg

SEQ ID NO: 397816 - RNA, 18 nt, Human
gccuguuuaugaugcugu

SEQ ID NO: 397817 - RNA, 20 nt, Human
ggccaaagcucugcagggaa

SEQ ID NO: 397818 - RNA, 24 nt, Human
uagaaaacagacuaagccagaaga

SEQ ID NO: 397819 - RNA, 25 nt, Human
uagaaaacagacuaagccagaagaa

SEQ ID NO: 397820 - RNA, 18 nt, Human
uauaccaucucaugugua

SEQ ID NO: 397821 - RNA, 25 nt, Human
ucaggugguaauggccaaagcucuu

SEQ ID NO: 397822 - RNA, 21 nt, Human
ugagccugugaggucuggggg

SEQ ID NO: 397823 - RNA, 26 nt, Human
ugagccugugaggucugggggacugg

SEQ ID NO: 397824 - RNA, 20 nt, Human
ugaugcugucaaaccaccuu

SEQ ID NO: 397825 - RNA, 19 nt, Human
uggcagcaagaggucaggu

SEQ ID NO: 397826 - RNA, 19 nt, Human
ugggaggcagggcaacagg

SEQ ID NO: 397827 - RNA, 18 nt, Human
ugggguuugggaggcagg

SEQ ID NO: 397828 - RNA, 20 nt, Human
uuaagacaaaggaaaacaca

SEQ ID NO: 397829 - RNA, 21 nt, Human
uuagaaaacagacuaagccag

SEQ ID NO: 397830 - RNA, 22 nt, Human
uugaagggaugugauggucacu

SEQ ID NO: 397831 - RNA, 21 nt, Human
uuuuuuuuuuuuuuuuucauu

SEQ ID NO: 397832 - RNA, 26 nt, Human
aaacagauaaaguaaagggaggagac

SEQ ID NO: 397833 - RNA, 23 nt, Human
aaagaacaacaaaaacccaaaca

SEQ ID NO: 397834 - RNA, 24 nt, Human
aaagaacaacaaaaacccaaacaa

SEQ ID NO: 397835 - RNA, 26 nt, Human
aaagaacaacaaaaacccaaacaaaa

SEQ ID NO: 397836 - RNA, 19 nt, Human
aaagaccuaaauaugaaaa

SEQ ID NO: 397837 - RNA, 24 nt, Human
aacaacaaaaacccaaacaaaaaa

SEQ ID NO: 397838 - RNA, 27 nt, Human
aacaacaaaaacccaaacaaaaaaucc

SEQ ID NO: 397839 - RNA, 22 nt, Human
aacuagccccgugagaccaggc

SEQ ID NO: 397840 - RNA, 24 nt, Human
acaaaaacccaaacaaaaaaucca

SEQ ID NO: 397841 - RNA, 20 nt, Human
accagcacagggauacacaa

SEQ ID NO: 397842 - RNA, 23 nt, Human
agaacaacaaaaacccaaacaaa

SEQ ID NO: 397843 - RNA, 23 nt, Human
agaacccaguaacagccccccac

SEQ ID NO: 397844 - RNA, 18 nt, Human
agaagaaaacagauguag

SEQ ID NO: 397845 - RNA, 25 nt, Human
agaagugggugccaggcuucccaag

SEQ ID NO: 397846 - RNA, 21 nt, Human
agaggaacagaguagugugag

SEQ ID NO: 397847 - RNA, 20 nt, Human
agcacagggauacacaaaca

SEQ ID NO: 397848 - RNA, 21 nt, Human
agcagccaucaggguaugagc

SEQ ID NO: 397849 - RNA, 21 nt, Human
agccccgugagaccaggcauu

SEQ ID NO: 397850 - RNA, 23 nt, Human
agggcagcuggcaggcagcucuu

SEQ ID NO: 397851 - RNA, 20 nt, Human
agguggauuaaagaccuaaa

SEQ ID NO: 397852 - RNA, 20 nt, Human
aguaaagggaggagacugga

SEQ ID NO: 397853 - RNA, 24 nt, Human
augcccauuccaggguuuccccag

SEQ ID NO: 397854 - RNA, 19 nt, Human
augucccugauggcggaca

SEQ ID NO: 397855 - RNA, 20 nt, Human
auuggugaagggggaggagg

SEQ ID NO: 397856 - RNA, 25 nt, Human
cacaaaaagcacaaaguaaaaggua

SEQ ID NO: 397857 - RNA, 21 nt, Human
cacagggauacacaaacagau

SEQ ID NO: 397858 - RNA, 22 nt, Human
caccagcacagggauacacaaa

SEQ ID NO: 397859 - RNA, 24 nt, Human
cacgccuguaaucccagcacuuug

SEQ ID NO: 397860 - RNA, 20 nt, Human
cagagcaacuggcacagggc

SEQ ID NO: 397861 - RNA, 20 nt, Human
cagagcaacuggcacagggc

SEQ ID NO: 397862 - RNA, 26 nt, Human
cagaggaugucccugauggcggacac

SEQ ID NO: 397863 - RNA, 23 nt, Human
caggaagaauugacauacaaaug

SEQ ID NO: 397864 - RNA, 26 nt, Human
caggcauuggugaagggggaggaggg

SEQ ID NO: 397865 - RNA, 23 nt, Human
caggguuuccccaggcaacuagg

SEQ ID NO: 397866 - RNA, 20 nt, Human
cauuggugaagggggaggag

SEQ ID NO: 397867 - RNA, 25 nt, Human
ccaccuccaauuucuggcuuccuca

SEQ ID NO: 397868 - RNA, 18 nt, Human
ccacuuccuaccaccucc

SEQ ID NO: 397869 - RNA, 23 nt, Human
ccacuuccuaccaccuccaauuu

SEQ ID NO: 397870 - RNA, 25 nt, Human
ccagcacuuuggggugaaucgaugu

SEQ ID NO: 397871 - RNA, 18 nt, Human
ccucauggccuucuuggg

SEQ ID NO: 397872 - RNA, 22 nt, Human
ccuguaaucccagcacuuuggg

SEQ ID NO: 397873 - RNA, 23 nt, Human
cgccuguaaucccagcacuuugg

SEQ ID NO: 397874 - RNA, 24 nt, Human
cuaaagaacaacaaaaacccaaac

SEQ ID NO: 397875 - RNA, 22 nt, Human
cuggcacagggcugcuuucucu

SEQ ID NO: 397876 - RNA, 24 nt, Human
gaacaacaaaaacccaaacaaaaa

SEQ ID NO: 397877 - RNA, 20 nt, Human
gaacgaggcaguguggcacc

SEQ ID NO: 397878 - RNA, 19 nt, Human
gaagaggaacagaguagug

SEQ ID NO: 397879 - RNA, 20 nt, Human
gacccagucuugaccucaug

SEQ ID NO: 397880 - RNA, 18 nt, Human
gagacccagucuugaccu

SEQ ID NO: 397881 - RNA, 23 nt, Human
gagcagccaucaggguaugagcu

SEQ ID NO: 397882 - RNA, 18 nt, Human
gaguccugcuggccauca

SEQ ID NO: 397883 - RNA, 24 nt, Human
gauggauaagaagagcaggaagaa

SEQ ID NO: 397884 - RNA, 19 nt, Human
gcagagccugugggggcug

SEQ ID NO: 397885 - RNA, 18 nt, Human
gcagcuggcaggcagcuc

SEQ ID NO: 397886 - RNA, 19 nt, Human
gccauguucuuuucccacc

SEQ ID NO: 397887 - RNA, 18 nt, Human
gcgugggggucaaaacua

SEQ ID NO: 397888 - RNA, 20 nt, Human
gcuucacgccuguaauccca

SEQ ID NO: 397889 - RNA, 21 nt, Human
gcuucacgccuguaaucccag

SEQ ID NO: 397890 - RNA, 22 nt, Human
ggaagacagaagugggugccag

SEQ ID NO: 397891 - RNA, 23 nt, Human
ggcguggugcuucacgccuguaa

SEQ ID NO: 397892 - RNA, 21 nt, Human
gggaggagggaggagacccag

SEQ ID NO: 397893 - RNA, 23 nt, Human
gggcccaguugcgaugagggcug

SEQ ID NO: 397894 - RNA, 19 nt, Human
ggggaguccgaggcccugc

SEQ ID NO: 397895 - RNA, 21 nt, Human
ggguaugagcucagcaugacc

SEQ ID NO: 397896 - RNA, 24 nt, Human
ggugcuucacgccuguaaucccag

SEQ ID NO: 397897 - RNA, 22 nt, Human
guaaaacacaaaaagcacaaag

SEQ ID NO: 397898 - RNA, 26 nt, Human
guaaagggaggagacuggagaaccca

SEQ ID NO: 397899 - RNA, 20 nt, Human
guccaaugaaaauacuaaca

SEQ ID NO: 397900 - RNA, 22 nt, Human
gugaacgaggcaguguggcacc

SEQ ID NO: 397901 - RNA, 20 nt, Human
guugcuuucuccugaugccc

SEQ ID NO: 397902 - RNA, 21 nt, Human
uaaaacacaaaaagcacaaag

SEQ ID NO: 397903 - RNA, 21 nt, Human
uaaaguaaagggaggagacug

SEQ ID NO: 397904 - RNA, 23 nt, Human
uaaauagaaaaaagaauuggauc

SEQ ID NO: 397905 - RNA, 23 nt, Human
uaacaggcuuuuuccuggaaccu

SEQ ID NO: 397906 - RNA, 22 nt, Human
uacugaaauacacuuaaagaca

SEQ ID NO: 397907 - RNA, 20 nt, Human
uaggaagaccauccauggug

SEQ ID NO: 397908 - RNA, 19 nt, Human
uaggcaggagaugaguccu

SEQ ID NO: 397909 - RNA, 23 nt, Human
ucacgccuguaaucccagcacuu

SEQ ID NO: 397910 - RNA, 24 nt, Human
ucaggcugggcguggugcuucacg

SEQ ID NO: 397911 - RNA, 23 nt, Human
ucaguaccacuuccuaccaccuc

SEQ ID NO: 397912 - RNA, 20 nt, Human
ucauugaucaguaccacuuc

SEQ ID NO: 397913 - RNA, 24 nt, Human
ucuccugugaaaggcuggcagagc

SEQ ID NO: 397914 - RNA, 21 nt, Human
ucucugggaagaggaacagag

SEQ ID NO: 397915 - RNA, 24 nt, Human
ugaaaagauagaaagcuuuacuga

SEQ ID NO: 397916 - RNA, 21 nt, Human
ugaauaaacaauuuauaugga

SEQ ID NO: 397917 - RNA, 22 nt, Human
ugaauaaacaauuuauauggaa

SEQ ID NO: 397918 - RNA, 18 nt, Human
ugaccucauggagcagcc

SEQ ID NO: 397919 - RNA, 23 nt, Human
ugacuaaagaacaacaaaaaccc

SEQ ID NO: 397920 - RNA, 21 nt, Human
ugaguaaaacacaaaaagcac

SEQ ID NO: 397921 - RNA, 18 nt, Human
ugauggcggacacucuuu

SEQ ID NO: 397922 - RNA, 24 nt, Human
ugcuucacgccuguaaucccagca

SEQ ID NO: 397923 - RNA, 18 nt, Human
ugcuuucuccugaugccc

SEQ ID NO: 397924 - RNA, 20 nt, Human
uggagcagagccuguggggg

SEQ ID NO: 397925 - RNA, 23 nt, Human
ugggugccaggcuuccuguccag

SEQ ID NO: 397926 - RNA, 24 nt, Human
uggugcuucacgccuguaauccca

SEQ ID NO: 397927 - RNA, 24 nt, Human
ugguggaucugcgcgcgggcccag

SEQ ID NO: 397928 - RNA, 24 nt, Human
uguaggggaggacuuccugaggag

SEQ ID NO: 397929 - RNA, 25 nt, Human
uguggagcagagccugugggggcug

SEQ ID NO: 397930 - RNA, 21 nt, Human
uuauauggaagaguaaaggaa

SEQ ID NO: 397931 - RNA, 19 nt, Human
uucaaaaucuacaaauucc

SEQ ID NO: 397932 - RNA, 22 nt, Human
uuccauguaaguccaaugaaaa

SEQ ID NO: 397933 - RNA, 22 nt, Human
uucuuuucccaccguagugaca

SEQ ID NO: 397934 - RNA, 23 nt, Human
uugacuaaagaacaacaaaaacc

SEQ ID NO: 397935 - RNA, 25 nt, Human
uugguggaucugcgcgcgggcccag

SEQ ID NO: 397936 - RNA, 22 nt, Human
uuuccuggaaccugaugguuga

SEQ ID NO: 397937 - RNA, 27 nt, Human
uuuccuggaaccugaugguugaauaaa

SEQ ID NO: 397938 - RNA, 20 nt, Human
uuuuuuuuuuuuuuuuuugg

SEQ ID NO: 397939 - RNA, 23 nt, Human
aagcggugaggcagagcgcuggg

SEQ ID NO: 397940 - RNA, 18 nt, Human
agcagcgguggauggugg

SEQ ID NO: 397941 - RNA, 19 nt, Human
aggcagagcgcugggcuag

SEQ ID NO: 397942 - RNA, 22 nt, Human
aggcagagcgcugggcuagggc

SEQ ID NO: 397943 - RNA, 21 nt, Human
agggaagcggugaggcagagc

SEQ ID NO: 397944 - RNA, 19 nt, Human
gagcagcgguggauggugg

SEQ ID NO: 397945 - RNA, 22 nt, Human
gagggaagcggugaggcagagc

SEQ ID NO: 397946 - RNA, 20 nt, Human
gccuuugugguuuuuuuguu

SEQ ID NO: 397947 - RNA, 18 nt, Human
uccccggguaccgagcuc

SEQ ID NO: 397948 - RNA, 22 nt, Human
uguggcgggcaggagggaagcg

SEQ ID NO: 397949 - RNA, 24 nt, Human
uguggcgggcaggagggaagcggu

SEQ ID NO: 397950 - RNA, 24 nt, Human
aaaaaaaaaaaaaaaagaaaagaa

SEQ ID NO: 397951 - RNA, 23 nt, Human
aaaaaaaaaagaaaagaaaagaa

SEQ ID NO: 397952 - RNA, 25 nt, Human
aaaaaaagaaaagaaaagaaaagaa

SEQ ID NO: 397953 - RNA, 21 nt, Human
aaaagaaauucagucacaccu

SEQ ID NO: 397954 - RNA, 20 nt, Human
aaaauauccccaaaucacac

SEQ ID NO: 397955 - RNA, 19 nt, Human
aaaauuacaaaaaucacaa

SEQ ID NO: 397956 - RNA, 18 nt, Human
aaagaacagaaaaccacc

SEQ ID NO: 397957 - RNA, 20 nt, Human
aaagaacagaccucaaaugc

SEQ ID NO: 397958 - RNA, 21 nt, Human
aaagcaaaauaucuuugaacc

SEQ ID NO: 397959 - RNA, 21 nt, Human
aaauaaacaucucccgagagc

SEQ ID NO: 397960 - RNA, 21 nt, Human
aacacauuucugaaaccacca

SEQ ID NO: 397961 - RNA, 25 nt, Human
aaccucuagccaauaccaacagucc

SEQ ID NO: 397962 - RNA, 22 nt, Human
aagaauuaagaacaugagggua

SEQ ID NO: 397963 - RNA, 19 nt, Human
aaggcugcagugagcugag

SEQ ID NO: 397964 - RNA, 23 nt, Human
aaggcugcagugagcugagguug

SEQ ID NO: 397965 - RNA, 21 nt, Human
aauacaaagguagccuuuaga

SEQ ID NO: 397966 - RNA, 20 nt, Human
aauaucuuugaaccucuagc

SEQ ID NO: 397967 - RNA, 18 nt, Human
aauucagucacaccuaau

SEQ ID NO: 397968 - RNA, 25 nt, Human
acaaaagccauaaaaacuuaguaac

SEQ ID NO: 397969 - RNA, 20 nt, Human
acaaacaugcaguguguagc

SEQ ID NO: 397970 - RNA, 25 nt, Human
acaaagcaaaauaucuuugaaccuc

SEQ ID NO: 397971 - RNA, 22 nt, Human
acacauuucugaaaccaccaaa

SEQ ID NO: 397972 - RNA, 22 nt, Human
acauggacuccucagcaucucu

SEQ ID NO: 397973 - RNA, 24 nt, Human
acgccuucugcccuuggucucacu

SEQ ID NO: 397974 - RNA, 25 nt, Human
acggcaaaagaaauucagucacacc

SEQ ID NO: 397975 - RNA, 19 nt, Human
acugcacuccugccuggac

SEQ ID NO: 397976 - RNA, 24 nt, Human
acugcacuccugccuggaccacag

SEQ ID NO: 397977 - RNA, 19 nt, Human
agaaaagaaaagaaaagaa

SEQ ID NO: 397978 - RNA, 21 nt, Human
agacggccacgaccugggagc

SEQ ID NO: 397979 - RNA, 18 nt, Human
agcaggugagggugggga

SEQ ID NO: 397980 - RNA, 19 nt, Human
agccaauaccaacaguccc

SEQ ID NO: 397981 - RNA, 27 nt, Human
agccaauaccaacagucccgucaauca

SEQ ID NO: 397982 - RNA, 19 nt, Human
agccagaaagaacagaaaa

SEQ ID NO: 397983 - RNA, 27 nt, Human
agccggcgccggcaacucagcggccac

SEQ ID NO: 397984 - RNA, 28 nt, Human
agggggagggaauucaacucggacaaaa

SEQ ID NO: 397985 - RNA, 21 nt, Human
aggguggggaggaccuggggg

SEQ ID NO: 397986 - RNA, 24 nt, Human
aggucaaggcugcagugagcugag

SEQ ID NO: 397987 - RNA, 24 nt, Human
auagccagaaagaacagaaaacca

SEQ ID NO: 397988 - RNA, 21 nt, Human
auggaaccagucucacaugcu

SEQ ID NO: 397989 - RNA, 29 nt, Human
augugugcauauuacuucaugcauagugu

SEQ ID NO: 397990 - RNA, 20 nt, Human
auuaguaaaaaaauacacuu

SEQ ID NO: 397991 - RNA, 19 nt, Human
auugcugcagaggucaaag

SEQ ID NO: 397992 - RNA, 27 nt, Human
caacagucccgucaaucacaaacaugc

SEQ ID NO: 397993 - RNA, 20 nt, Human
caacucggacaaaaguccgg

SEQ ID NO: 397994 - RNA, 19 nt, Human
cacccacucggccucccgc

SEQ ID NO: 397995 - RNA, 21 nt, Human
caccucccuccgagcgcgguc

SEQ ID NO: 397996 - RNA, 24 nt, Human
cacugcacuccugccuggaccaca

SEQ ID NO: 397997 - RNA, 19 nt, Human
cagaaagaacagaaaacca

SEQ ID NO: 397998 - RNA, 21 nt, Human
cagaaagaacagaaaaccacc

SEQ ID NO: 397999 - RNA, 21 nt, Human
cagcaaaguggccgcgcagag

SEQ ID NO: 398000 - RNA, 19 nt, Human
ccacugcacuccugccugg

SEQ ID NO: 398001 - RNA, 19 nt, Human
ccacugcacuccugccugg

SEQ ID NO: 398002 - RNA, 20 nt, Human
ccacugcacuccugccugga

SEQ ID NO: 398003 - RNA, 21 nt, Human
ccacugcacuccugccuggac

SEQ ID NO: 398004 - RNA, 21 nt, Human
ccagcaaaguggccgcgcaga

SEQ ID NO: 398005 - RNA, 19 nt, Human
ccauaaaaacuuaguaaca

SEQ ID NO: 398006 - RNA, 19 nt, Human
ccccagcaacucccacgcc

SEQ ID NO: 398007 - RNA, 22 nt, Human
cccgcuccucacgccacagccc

SEQ ID NO: 398008 - RNA, 27 nt, Human
cccgcuccucacgccacagcccaaaua

SEQ ID NO: 398009 - RNA, 23 nt, Human
cccguggccucccggcgucuccu

SEQ ID NO: 398010 - RNA, 19 nt, Human
cccugcacauggacuccuc

SEQ ID NO: 398011 - RNA, 27 nt, Human
cccuugucaaaaaaaaaaaaaaaagaa

SEQ ID NO: 398012 - RNA, 20 nt, Human
ccgcagcucuggcggacauc

SEQ ID NO: 398013 - RNA, 23 nt, Human
ccgcagcucuggcggacaucuug

SEQ ID NO: 398014 - RNA, 18 nt, Human
ccgcagcuuucgcagccc

SEQ ID NO: 398015 - RNA, 23 nt, Human
ccggggaggucaaggcugcagug

SEQ ID NO: 398016 - RNA, 19 nt, Human
ccggucgcccgcccgucag

SEQ ID NO: 398017 - RNA, 19 nt, Human
ccucucccugacugccucu

SEQ ID NO: 398018 - RNA, 19 nt, Human
ccucucccuuucccucccc

SEQ ID NO: 398019 - RNA, 18 nt, Human
ccugcccacuucuucagu

SEQ ID NO: 398020 - RNA, 22 nt, Human
ccuugucaaaaaaaaaaaaaaa

SEQ ID NO: 398021 - RNA, 24 nt, Human
cgccuucugcccuuggucucacuc

SEQ ID NO: 398022 - RNA, 20 nt, Human
cgcuggcccgcccgcuccuc

SEQ ID NO: 398023 - RNA, 24 nt, Human
cgcuggcccgcccgcuccucacgc

SEQ ID NO: 398024 - RNA, 22 nt, Human
cggggccuuuccugaaagucuu

SEQ ID NO: 398025 - RNA, 19 nt, Human
cgucagcagcacccguggc

SEQ ID NO: 398026 - RNA, 19 nt, Human
cuaaugauuaacagaaugu

SEQ ID NO: 398027 - RNA, 21 nt, Human
cuagccaauaccaacaguccc

SEQ ID NO: 398028 - RNA, 23 nt, Human
cucagcggccacgcaaaccugcc

SEQ ID NO: 398029 - RNA, 24 nt, Human
cucagcuaggcuuccugagcucug

SEQ ID NO: 398030 - RNA, 20 nt, Human
cuccccugcacauggacucc

SEQ ID NO: 398031 - RNA, 25 nt, Human
cugagguugcaccacugcacuccug

SEQ ID NO: 398032 - RNA, 24 nt, Human
cugcacauggacuccucagcaucu

SEQ ID NO: 398033 - RNA, 19 nt, Human
cugcagugagcugagguug

SEQ ID NO: 398034 - RNA, 22 nt, Human
cugcagugagcugagguugcac

SEQ ID NO: 398035 - RNA, 19 nt, Human
cuuguuuauguauaaaaaa

SEQ ID NO: 398036 - RNA, 18 nt, Human
gaacagccaagccuccca

SEQ ID NO: 398037 - RNA, 21 nt, Human
gaaccggcggccgccaaggaa

SEQ ID NO: 398038 - RNA, 24 nt, Human
gaccucaaaugcacccccauuuac

SEQ ID NO: 398039 - RNA, 19 nt, Human
gagcagcaggugagggugg

SEQ ID NO: 398040 - RNA, 22 nt, Human
gagcagcaggugagggugggga

SEQ ID NO: 398041 - RNA, 26 nt, Human
gagcagcaggugaggguggggaggac

SEQ ID NO: 398042 - RNA, 22 nt, Human
gagcgcggucacccacucggcc

SEQ ID NO: 398043 - RNA, 18 nt, Human
gaggaccuggggcccugc

SEQ ID NO: 398044 - RNA, 20 nt, Human
gaggcuccucggacccgaaa

SEQ ID NO: 398045 - RNA, 19 nt, Human
gagugguuccauuuagauu

SEQ ID NO: 398046 - RNA, 23 nt, Human
gccagaaagaacagaaaaccacc

SEQ ID NO: 398047 - RNA, 19 nt, Human
gccauaaaaacuuaguaac

SEQ ID NO: 398048 - RNA, 20 nt, Human
gcggucacccacucggccuc

SEQ ID NO: 398049 - RNA, 20 nt, Human
gcucuuggcggccgcagcuc

SEQ ID NO: 398050 - RNA, 20 nt, Human
gcugcgaggacgggcugggg

SEQ ID NO: 398051 - RNA, 20 nt, Human
ggacccgaaacuccgcggcg

SEQ ID NO: 398052 - RNA, 23 nt, Human
ggacggaagggcccggcccaggg

SEQ ID NO: 398053 - RNA, 26 nt, Human
ggcccggcccagggggagggaauuca

SEQ ID NO: 398054 - RNA, 21 nt, Human
gggaagcgcccgccccgcccg

SEQ ID NO: 398055 - RNA, 23 nt, Human
gggagcagcaggugagggugacg

SEQ ID NO: 398056 - RNA, 21 nt, Human
ggguggggaggaccuggggcc

SEQ ID NO: 398057 - RNA, 21 nt, Human
ggguggggaggaccuggggcc

SEQ ID NO: 398058 - RNA, 20 nt, Human
gguggggaggaccuggggcc

SEQ ID NO: 398059 - RNA, 23 nt, Human
gugggcuguggaugauggggggc

SEQ ID NO: 398060 - RNA, 24 nt, Human
guugcaccacugcacuccugccug

SEQ ID NO: 398061 - RNA, 22 nt, Human
uaaaaaaauacacuuuagggca

SEQ ID NO: 398062 - RNA, 23 nt, Human
uaaaaaagguaaaguuuauaaaa

SEQ ID NO: 398063 - RNA, 21 nt, Human
uaaaacaucaaaauuuucaaa

SEQ ID NO: 398064 - RNA, 22 nt, Human
uaacacauuucugaaaccacca

SEQ ID NO: 398065 - RNA, 18 nt, Human
uaacuucccgggaaccgg

SEQ ID NO: 398066 - RNA, 21 nt, Human
uaagcagugacgauaaaaaaa

SEQ ID NO: 398067 - RNA, 19 nt, Human
uacaaaaaucacaaagcaa

SEQ ID NO: 398068 - RNA, 21 nt, Human
uacaguaucuagauaaugcac

SEQ ID NO: 398069 - RNA, 18 nt, Human
uaccaacagucccgucaa

SEQ ID NO: 398070 - RNA, 23 nt, Human
uagaaacgcugcuuuauugcugc

SEQ ID NO: 398071 - RNA, 18 nt, Human
uaguaaaaaaauacacuu

SEQ ID NO: 398072 - RNA, 22 nt, Human
ucaaaaaaaaaaaaaaaagaaa

SEQ ID NO: 398073 - RNA, 21 nt, Human
ucacaccuaaugauuaacaga

SEQ ID NO: 398074 - RNA, 25 nt, Human
ucccccaguuguaaaucuccuugcu

SEQ ID NO: 398075 - RNA, 18 nt, Human
uccuccagccgcugaaca

SEQ ID NO: 398076 - RNA, 24 nt, Human
ucgcccgcccgucagcagcacccg

SEQ ID NO: 398077 - RNA, 19 nt, Human
ucgcuugagcccggggagg

SEQ ID NO: 398078 - RNA, 23 nt, Human
ucuagccaauaccaacagucccg

SEQ ID NO: 398079 - RNA, 20 nt, Human
ucuccagcgccgcgcgaggc

SEQ ID NO: 398080 - RNA, 20 nt, Human
ucugaagaggccauggaacc

SEQ ID NO: 398081 - RNA, 20 nt, Human
ucuuugaaccucuagccaau

SEQ ID NO: 398082 - RNA, 21 nt, Human
ugaaaccaccaaaugcacaac

SEQ ID NO: 398083 - RNA, 21 nt, Human
ugaaccucuagccaauaccaa

SEQ ID NO: 398084 - RNA, 27 nt, Human
ugaaccucuagccaauaccaacagucc

SEQ ID NO: 398085 - RNA, 23 nt, Human
ugacugccucucccuuucccucc

SEQ ID NO: 398086 - RNA, 25 nt, Human
ugagcccggggaggucaaggcugca

SEQ ID NO: 398087 - RNA, 19 nt, Human
ugagcuaagaauuaagaac

SEQ ID NO: 398088 - RNA, 21 nt, Human
ugagcugagguugcaccacug

SEQ ID NO: 398089 - RNA, 22 nt, Human
ugagcugagguugcaccacugc

SEQ ID NO: 398090 - RNA, 22 nt, Human
ugaggguaaggcauuucugcug

SEQ ID NO: 398091 - RNA, 20 nt, Human
ugcagcacuuaaaaauguaa

SEQ ID NO: 398092 - RNA, 20 nt, Human
ugccccagcaacucccacgc

SEQ ID NO: 398093 - RNA, 24 nt, Human
ugcccuuggucucacucuaagccc

SEQ ID NO: 398094 - RNA, 22 nt, Human
ugccggcccggcccacugagca

SEQ ID NO: 398095 - RNA, 24 nt, Human
ugcucacucaucuuuaucaguuca

SEQ ID NO: 398096 - RNA, 22 nt, Human
uggaaagaacagaccucaaaug

SEQ ID NO: 398097 - RNA, 21 nt, Human
uggaagagcaagacggccacg

SEQ ID NO: 398098 - RNA, 19 nt, Human
uggccucccggcgucuccu

SEQ ID NO: 398099 - RNA, 18 nt, Human
uggcucagccggcgccgg

SEQ ID NO: 398100 - RNA, 18 nt, Human
uggggaggaccuggggcc

SEQ ID NO: 398101 - RNA, 24 nt, Human
ugggugggcuguggaugauggggg

SEQ ID NO: 398102 - RNA, 22 nt, Human
ugguaugcacgcauuauguaca

SEQ ID NO: 398103 - RNA, 19 nt, Human
uguaaaucuccuugcugua

SEQ ID NO: 398104 - RNA, 20 nt, Human
ugucaaaaaaaaaaaaaaaa

SEQ ID NO: 398105 - RNA, 21 nt, Human
uguccuucccuggcugcccca

SEQ ID NO: 398106 - RNA, 23 nt, Human
ugucuucacuucacccuccccca

SEQ ID NO: 398107 - RNA, 18 nt, Human
uguguuuucauguacagu

SEQ ID NO: 398108 - RNA, 23 nt, Human
uuaaucaaacuagagaauucuga

SEQ ID NO: 398109 - RNA, 21 nt, Human
uucgccacguaacuucccggg

SEQ ID NO: 398110 - RNA, 19 nt, Human
uuuggaaagaacagaccuc

SEQ ID NO: 398111 - RNA, 21 nt, Human
aaacaagagggcgugaaucca

SEQ ID NO: 398112 - RNA, 21 nt, Human
aaacaagagggcgugaauccg

SEQ ID NO: 398113 - RNA, 25 nt, Human
aggagggagcaugcggcaggugggg

SEQ ID NO: 398114 - RNA, 19 nt, Human
aggcucaaaggugcuggca

SEQ ID NO: 398115 - RNA, 20 nt, Human
agggagcaugcggcaggugg

SEQ ID NO: 398116 - RNA, 22 nt, Human
agggcgugaauccaggccaucc

SEQ ID NO: 398117 - RNA, 23 nt, Human
agguaggaagggcuuugagccca

SEQ ID NO: 398118 - RNA, 18 nt, Human
cagagaggccuaagccuc

SEQ ID NO: 398119 - RNA, 21 nt, Human
cagcguggggcucugucccuc

SEQ ID NO: 398120 - RNA, 20 nt, Human
caguggguaggagaggaggg

SEQ ID NO: 398121 - RNA, 25 nt, Human
caguggguaggagaggagggagcau

SEQ ID NO: 398122 - RNA, 20 nt, Human
cauccucaggggaggguggg

SEQ ID NO: 398123 - RNA, 18 nt, Human
ccaaggcucaaaggugcu

SEQ ID NO: 398124 - RNA, 20 nt, Human
ccaccaagcggggccagcuc

SEQ ID NO: 398125 - RNA, 19 nt, Human
ccagcagcugagagggaag

SEQ ID NO: 398126 - RNA, 18 nt, Human
ccagcuccagccugggcg

SEQ ID NO: 398127 - RNA, 19 nt, Human
ccucccgacuuccuccugg

SEQ ID NO: 398128 - RNA, 23 nt, Human
ccuccgggaaguucacgaacccg

SEQ ID NO: 398129 - RNA, 18 nt, Human
ccuguggaaaccaucacc

SEQ ID NO: 398130 - RNA, 20 nt, Human
cgaacccgaguacucuccaa

SEQ ID NO: 398131 - RNA, 24 nt, Human
cuuggugaaagaugcuguuguucc

SEQ ID NO: 398132 - RNA, 18 nt, Human
gaacccgaguacucucca

SEQ ID NO: 398133 - RNA, 23 nt, Human
gaccaguggguaggagaggaggg

SEQ ID NO: 398134 - RNA, 19 nt, Human
gacccugcccucuccacac

SEQ ID NO: 398135 - RNA, 22 nt, Human
gagcaugcggcagguggggcag

SEQ ID NO: 398136 - RNA, 21 nt, Human
gagggugggagcccaucccag

SEQ ID NO: 398137 - RNA, 18 nt, Human
gccagcuccagccugggc

SEQ ID NO: 398138 - RNA, 20 nt, Human
gcuccagccugggcgaucgu

SEQ ID NO: 398139 - RNA, 20 nt, Human
ggccaaggcucaaaggugcu

SEQ ID NO: 398140 - RNA, 18 nt, Human
guggggcagccacacaaa

SEQ ID NO: 398141 - RNA, 21 nt, Human
guggggcagccacacaaagga

SEQ ID NO: 398142 - RNA, 19 nt, Human
guuccuguggaaaccauca

SEQ ID NO: 398143 - RNA, 22 nt, Human
uaagccccugggauccaagucc

SEQ ID NO: 398144 - RNA, 19 nt, Human
ucaaaggugcuggcacagg

SEQ ID NO: 398145 - RNA, 23 nt, Human
ucacccuccacgccucccgacuu

SEQ ID NO: 398146 - RNA, 19 nt, Human
uccacgccucccgacuucc

SEQ ID NO: 398147 - RNA, 26 nt, Human
ucccaggccaccaagcggggccagcu

SEQ ID NO: 398148 - RNA, 19 nt, Human
ucccagggagaacagaaac

SEQ ID NO: 398149 - RNA, 19 nt, Human
ucccucaccccaaggagag

SEQ ID NO: 398150 - RNA, 24 nt, Human
ugaagagauaagccccugggaucc

SEQ ID NO: 398151 - RNA, 19 nt, Human
ugagcccaaaaggaaacaa

SEQ ID NO: 398152 - RNA, 22 nt, Human
ugcagggcagcguccaguaggc

SEQ ID NO: 398153 - RNA, 21 nt, Human
uggcaggaagggagcgggcgg

SEQ ID NO: 398154 - RNA, 22 nt, Human
uggguaggagaggagggagcau

SEQ ID NO: 398155 - RNA, 21 nt, Human
aaagagacaugagagccucca

SEQ ID NO: 398156 - RNA, 23 nt, Human
aacaggugcucuccccuaagggc

SEQ ID NO: 398157 - RNA, 19 nt, Human
aagaggcagggcggugggg

SEQ ID NO: 398158 - RNA, 21 nt, Human
aaggagacugagcacccuuca

SEQ ID NO: 398159 - RNA, 23 nt, Human
accaaaagcgacuucccugacau

SEQ ID NO: 398160 - RNA, 20 nt, Human
agagacgcaugacaaagaca

SEQ ID NO: 398161 - RNA, 18 nt, Human
aggaggaggcagcccagg

SEQ ID NO: 398162 - RNA, 22 nt, Human
aggaggaggcagcccagggcaa

SEQ ID NO: 398163 - RNA, 21 nt, Human
aggcagggcgguggggaacag

SEQ ID NO: 398164 - RNA, 26 nt, Human
aggcugugugaccucuggggagcccc

SEQ ID NO: 398165 - RNA, 22 nt, Human
agucuagaaaugcugacuguug

SEQ ID NO: 398166 - RNA, 23 nt, Human
augacaaagacacuagcaaagga

SEQ ID NO: 398167 - RNA, 25 nt, Human
augacaaagacacuagcaaaggaga

SEQ ID NO: 398168 - RNA, 19 nt, Human
augcagcauaauuuugugg

SEQ ID NO: 398169 - RNA, 25 nt, Human
auggaguuggcagcaguucaagcag

SEQ ID NO: 398170 - RNA, 22 nt, Human
caaagacacuagcaaaggagau

SEQ ID NO: 398171 - RNA, 20 nt, Human
caaagggcuuggcaaaccca

SEQ ID NO: 398172 - RNA, 18 nt, Human
caaaucccaacuuuccag

SEQ ID NO: 398173 - RNA, 24 nt, Human
caaaucccaacuuuccagacuauc

SEQ ID NO: 398174 - RNA, 20 nt, Human
caaauuccucaccugggaua

SEQ ID NO: 398175 - RNA, 19 nt, Human
cacacugccagcucucccc

SEQ ID NO: 398176 - RNA, 22 nt, Human
cacacugccagcucuccccaaa

SEQ ID NO: 398177 - RNA, 20 nt, Human
cacugcacacaggcugugug

SEQ ID NO: 398178 - RNA, 18 nt, Human
cagacacaaagcccuccu

SEQ ID NO: 398179 - RNA, 18 nt, Human
cagcaggcauuuuucaga

SEQ ID NO: 398180 - RNA, 24 nt, Human
cagcaguucaagcaggaccuuaau

SEQ ID NO: 398181 - RNA, 18 nt, Human
cagcccagggcaagggaa

SEQ ID NO: 398182 - RNA, 22 nt, Human
caugacaaagacacuagcaaag

SEQ ID NO: 398183 - RNA, 20 nt, Human
ccaaaagcgacuucccugac

SEQ ID NO: 398184 - RNA, 22 nt, Human
ccagagacgcaugacaaagaca

SEQ ID NO: 398185 - RNA, 18 nt, Human
ccagggcuggcugccccu

SEQ ID NO: 398186 - RNA, 23 nt, Human
cccaacuuuccagacuaucccca

SEQ ID NO: 398187 - RNA, 21 nt, Human
ccccucaaccuuucugagcuu

SEQ ID NO: 398188 - RNA, 26 nt, Human
ccccuugccccagcuuggcucugggc

SEQ ID NO: 398189 - RNA, 22 nt, Human
ccgcacacugccagcucucccc

SEQ ID NO: 398190 - RNA, 21 nt, Human
ccucuggggagccccucaacu

SEQ ID NO: 398191 - RNA, 18 nt, Human
ccuugccccagcuuggcu

SEQ ID NO: 398192 - RNA, 19 nt, Human
cggaagaggcagggcggug

SEQ ID NO: 398193 - RNA, 24 nt, Human
cgguggggaacagcucucaggagg

SEQ ID NO: 398194 - RNA, 21 nt, Human
cucaaccuuucugagcuucaa

SEQ ID NO: 398195 - RNA, 20 nt, Human
cuccgcacacugccagcucu

SEQ ID NO: 398196 - RNA, 23 nt, Human
cucuccccaaagagacaugagag

SEQ ID NO: 398197 - RNA, 19 nt, Human
cucuccccuaagggcuuca

SEQ ID NO: 398198 - RNA, 20 nt, Human
cuuucuuucucuuguuuucu

SEQ ID NO: 398199 - RNA, 18 nt, Human
gagcacccuucaggagcc

SEQ ID NO: 398200 - RNA, 22 nt, Human
gaguuggcagcaguucaagcag

SEQ ID NO: 398201 - RNA, 23 nt, Human
gaguuggcagcaguucaagcagg

SEQ ID NO: 398202 - RNA, 20 nt, Human
gauugcucccaauagcuaac

SEQ ID NO: 398203 - RNA, 19 nt, Human
gcagcccagggcaagggaa

SEQ ID NO: 398204 - RNA, 21 nt, Human
gcgaacagcaaagggcuuggc

SEQ ID NO: 398205 - RNA, 20 nt, Human
ggacacagacaguacgggag

SEQ ID NO: 398206 - RNA, 24 nt, Human
ggccacagacuuucaguaauucca

SEQ ID NO: 398207 - RNA, 24 nt, Human
ggccagagacgcaugacaaagaca

SEQ ID NO: 398208 - RNA, 19 nt, Human
gggaacugcucaauauugg

SEQ ID NO: 398209 - RNA, 24 nt, Human
gggaaugugagggcugcgaacagc

SEQ ID NO: 398210 - RNA, 21 nt, Human
gucuagaaaugcugacugucc

SEQ ID NO: 398211 - RNA, 18 nt, Human
guuuucugcuugauccaa

SEQ ID NO: 398212 - RNA, 21 nt, Human
guuuucugcuugauccaaggg

SEQ ID NO: 398213 - RNA, 21 nt, Human
uaagguauuuucugagccaaa

SEQ ID NO: 398214 - RNA, 26 nt, Human
uaccucggccuccuaaugaaggcuga

SEQ ID NO: 398215 - RNA, 22 nt, Human
uauacaaggacacagacaguac

SEQ ID NO: 398216 - RNA, 19 nt, Human
ucaaaaagacuuaaggcca

SEQ ID NO: 398217 - RNA, 19 nt, Human
ucaauguccacaugaagau

SEQ ID NO: 398218 - RNA, 23 nt, Human
ucaccugggauauaagacuccua

SEQ ID NO: 398219 - RNA, 20 nt, Human
ucaggcacacaacaggugcu

SEQ ID NO: 398220 - RNA, 23 nt, Human
uccccuaagggcuucaugagagc

SEQ ID NO: 398221 - RNA, 24 nt, Human
ucucaggaggaggcagcccagggc

SEQ ID NO: 398222 - RNA, 24 nt, Human
ucuccccuaagggcuucaugagag

SEQ ID NO: 398223 - RNA, 19 nt, Human
ucucuuguuuucugcuuga

SEQ ID NO: 398224 - RNA, 21 nt, Human
ugaaauaacacuucaaaaaga

SEQ ID NO: 398225 - RNA, 20 nt, Human
ugacauggaguuggcagcag

SEQ ID NO: 398226 - RNA, 22 nt, Human
ugacauggaguuggcagcaguu

SEQ ID NO: 398227 - RNA, 19 nt, Human
ugaccucuggggagccccu

SEQ ID NO: 398228 - RNA, 19 nt, Human
ugagagcgacucagcagca

SEQ ID NO: 398229 - RNA, 21 nt, Human
ugagggcugcgaacagcaaag

SEQ ID NO: 398230 - RNA, 20 nt, Human
uggaagccagggcuggcugc

SEQ ID NO: 398231 - RNA, 19 nt, Human
uggcucgaggcauuucccu

SEQ ID NO: 398232 - RNA, 25 nt, Human
ugugaccucuggggagccccucaac

SEQ ID NO: 398233 - RNA, 22 nt, Human
uucaagcaggaccuuaaucacc

SEQ ID NO: 398234 - RNA, 24 nt, Human
uuuccagauugcucccaauagcua

SEQ ID NO: 398235 - RNA, 22 nt, Human
uuuuuuuuuuuuuuuaaugcuu

SEQ ID NO: 398236 - RNA, 24 nt, Human
uuuuuuuuuuuuuuuuuuuuaaug

SEQ ID NO: 398237 - RNA, 24 nt, Human
agaaucucaggaauguauagaccc

SEQ ID NO: 398238 - RNA, 21 nt, Human
caaaacauauauuuaccccuc

SEQ ID NO: 398239 - RNA, 23 nt, Human
ccgccccacacuucauacccgcc

SEQ ID NO: 398240 - RNA, 19 nt, Human
gacccccgccccacacuuc

SEQ ID NO: 398241 - RNA, 25 nt, Human
ucaaaacauauauuuaccccuccuc

SEQ ID NO: 398242 - RNA, 21 nt, Human
ucuuugagcaccuuucccaga

SEQ ID NO: 398243 - RNA, 22 nt, Human
ugagcaccuuucccagaaucuc

SEQ ID NO: 398244 - RNA, 24 nt, Human
uuucauuuuucucaaaacauauau

SEQ ID NO: 398245 - RNA, 24 nt, Human
uuuuuuuuuuuuuuuuucauuuuu

SEQ ID NO: 398246 - RNA, 22 nt, Human
aaaagaccaaggcuaacagcua

SEQ ID NO: 398247 - RNA, 18 nt, Human
aaacuauuaccucuacca

SEQ ID NO: 398248 - RNA, 20 nt, Human
aagaacugcuacaugaugua

SEQ ID NO: 398249 - RNA, 18 nt, Human
aagaggccaaaagaccaa

SEQ ID NO: 398250 - RNA, 21 nt, Human
aagaggccaaaagaccaaggc

SEQ ID NO: 398251 - RNA, 23 nt, Human
aagaggccaaaagaccaaggcua

SEQ ID NO: 398252 - RNA, 24 nt, Human
aagcagcacaggacauccuaacaa

SEQ ID NO: 398253 - RNA, 27 nt, Human
aagcagcacaggacauccuaacaagcu

SEQ ID NO: 398254 - RNA, 20 nt, Human
aauuccagggcagcugcagg

SEQ ID NO: 398255 - RNA, 20 nt, Human
acacgaccucggcacauggu

SEQ ID NO: 398256 - RNA, 22 nt, Human
acgaaggaaacacuucggaaga

SEQ ID NO: 398257 - RNA, 18 nt, Human
agcgaagggaauuccagg

SEQ ID NO: 398258 - RNA, 24 nt, Human
aggugguuguuuuguuaccuauuu

SEQ ID NO: 398259 - RNA, 23 nt, Human
augaaggaaauacauugaaaaaa

SEQ ID NO: 398260 - RNA, 23 nt, Human
caaaagaccaaggcuaacagcua

SEQ ID NO: 398261 - RNA, 26 nt, Human
cacacagaaucccaaggugggaacag

SEQ ID NO: 398262 - RNA, 18 nt, Human
cacagaaucccaaggugg

SEQ ID NO: 398263 - RNA, 20 nt, Human
cacagaaucccaagguggga

SEQ ID NO: 398264 - RNA, 20 nt, Human
cagaaucccaaggugggaag

SEQ ID NO: 398265 - RNA, 21 nt, Human
cagcacaggacauccuaacaa

SEQ ID NO: 398266 - RNA, 18 nt, Human
cagcaguaggcgucaugg

SEQ ID NO: 398267 - RNA, 19 nt, Human
cagcaguaggcgucauggu

SEQ ID NO: 398268 - RNA, 21 nt, Human
caggugguuguuuuguuaccu

SEQ ID NO: 398269 - RNA, 24 nt, Human
caggugguuguuuuguuaccuauu

SEQ ID NO: 398270 - RNA, 22 nt, Human
caggugguuguuuuguuaccuc

SEQ ID NO: 398271 - RNA, 20 nt, Human
ccuagcacacgaccucggcc

SEQ ID NO: 398272 - RNA, 22 nt, Human
cuaggcuacuggaaucuauacu

SEQ ID NO: 398273 - RNA, 21 nt, Human
cuuccuagcacacgaccucgg

SEQ ID NO: 398274 - RNA, 22 nt, Human
cuugcauaugcagugacaguuu

SEQ ID NO: 398275 - RNA, 20 nt, Human
gaaggaaacacuucggaaga

SEQ ID NO: 398276 - RNA, 21 nt, Human
gaaggaaauacauugaaaaaa

SEQ ID NO: 398277 - RNA, 18 nt, Human
gccaaaagaccaaggcua

SEQ ID NO: 398278 - RNA, 26 nt, Human
ggagaugaaggcaaacagcgaaggga

SEQ ID NO: 398279 - RNA, 18 nt, Human
ggagggagaugaaggcaa

SEQ ID NO: 398280 - RNA, 22 nt, Human
gggcagcugcaggugggauggc

SEQ ID NO: 398281 - RNA, 20 nt, Human
guacaguguggaggcucuca

SEQ ID NO: 398282 - RNA, 23 nt, Human
guggcugaaagacagacaugaca

SEQ ID NO: 398283 - RNA, 22 nt, Human
uaacaagcuuucgcugcugccu

SEQ ID NO: 398284 - RNA, 18 nt, Human
uaccacuuaucuauaguc

SEQ ID NO: 398285 - RNA, 18 nt, Human
uaccucuaccaguuauuc

SEQ ID NO: 398286 - RNA, 22 nt, Human
uagcacacgaccucggcacaug

SEQ ID NO: 398287 - RNA, 25 nt, Human
ucacagcaacuggcuuccuagcaca

SEQ ID NO: 398288 - RNA, 21 nt, Human
ucagaagaacugcuacaugau

SEQ ID NO: 398289 - RNA, 22 nt, Human
ucagaagaacugcuacaugaug

SEQ ID NO: 398290 - RNA, 20 nt, Human
ucggcacauggucuccucau

SEQ ID NO: 398291 - RNA, 21 nt, Human
ugaaaaaacuauuaccucuac

SEQ ID NO: 398292 - RNA, 22 nt, Human
ugaaagacagacaugacacugg

SEQ ID NO: 398293 - RNA, 23 nt, Human
ugaaggaaauacauugaaaaaac

SEQ ID NO: 398294 - RNA, 21 nt, Human
ugacagccucucaaacgugga

SEQ ID NO: 398295 - RNA, 24 nt, Human
ugcagugacaguuuaaaggguaag

SEQ ID NO: 398296 - RNA, 18 nt, Human
uggaacaaacauaaacac

SEQ ID NO: 398297 - RNA, 20 nt, Human
uggaaucuauacuucaaucc

SEQ ID NO: 398298 - RNA, 23 nt, Human
uggcugaaagacagacaugacac

SEQ ID NO: 398299 - RNA, 21 nt, Human
uggcuuccuagcacacgaccu

SEQ ID NO: 398300 - RNA, 25 nt, Human
uuaaaugaugguuuuggaacaaaca

SEQ ID NO: 398301 - RNA, 19 nt, Human
uugauuaccucuaccacuu

SEQ ID NO: 398302 - RNA, 28 nt, Human
aaaaaaacauuucacaagaugcaaaacc

SEQ ID NO: 398303 - RNA, 24 nt, Human
aaauauauuuacaauuuauacaaa

SEQ ID NO: 398304 - RNA, 20 nt, Human
aaauucgaaacauuuuggcc

SEQ ID NO: 398305 - RNA, 18 nt, Human
acagaaagguaaucucac

SEQ ID NO: 398306 - RNA, 19 nt, Human
acugcaaggaacagaaagg

SEQ ID NO: 398307 - RNA, 18 nt, Human
agacaggugacuuucugc

SEQ ID NO: 398308 - RNA, 23 nt, Human
agcgcgcuggccacgcacgcgcg

SEQ ID NO: 398309 - RNA, 18 nt, Human
aggcgggggcgcggugac

SEQ ID NO: 398310 - RNA, 22 nt, Human
caacccccggccucagcugccc

SEQ ID NO: 398311 - RNA, 21 nt, Human
cagcugcccgggcggggagga

SEQ ID NO: 398312 - RNA, 21 nt, Human
cagguguuuguaauuuuuuuu

SEQ ID NO: 398313 - RNA, 23 nt, Human
cccccggccucagcugcccgggc

SEQ ID NO: 398314 - RNA, 18 nt, Human
ccccggccucagcugccc

SEQ ID NO: 398315 - RNA, 20 nt, Human
cccgcagcugcuccggcucc

SEQ ID NO: 398316 - RNA, 24 nt, Human
cccgcagcugcuccggcucccgcu

SEQ ID NO: 398317 - RNA, 20 nt, Human
ccuacaacccauggccccuc

SEQ ID NO: 398318 - RNA, 23 nt, Human
cgcacuccccucggcgauccgcg

SEQ ID NO: 398319 - RNA, 22 nt, Human
cgcuuggccuuggugcuccauu

SEQ ID NO: 398320 - RNA, 21 nt, Human
cggucaauuuccaacuuuaau

SEQ ID NO: 398321 - RNA, 19 nt, Human
cuccggucaauuuccaacu

SEQ ID NO: 398322 - RNA, 24 nt, Human
cuguccgcuuggccuuggugcucc

SEQ ID NO: 398323 - RNA, 24 nt, Human
cuuggccuuggugcuccauuuggu

SEQ ID NO: 398324 - RNA, 19 nt, Human
gacuccgaccgcacucccc

SEQ ID NO: 398325 - RNA, 18 nt, Human
gagacaccacugcucuac

SEQ ID NO: 398326 - RNA, 20 nt, Human
gcaccggccacucggcgccc

SEQ ID NO: 398327 - RNA, 20 nt, Human
gccacauuagugggcgcccc

SEQ ID NO: 398328 - RNA, 23 nt, Human
gcccagcugcuucaagaaccugc

SEQ ID NO: 398329 - RNA, 19 nt, Human
gccccaggcccagcugcuu

SEQ ID NO: 398330 - RNA, 18 nt, Human
gcccgggcggggaggcgg

SEQ ID NO: 398331 - RNA, 23 nt, Human
gcccgggcggggaggcgggggcg

SEQ ID NO: 398332 - RNA, 18 nt, Human
ggaaagccaagcagaagc

SEQ ID NO: 398333 - RNA, 21 nt, Human
gggcaaacaaauccagacgga

SEQ ID NO: 398334 - RNA, 20 nt, Human
gggcgccccaggcccagcug

SEQ ID NO: 398335 - RNA, 23 nt, Human
gguguuuguaauuuuuuuucucu

SEQ ID NO: 398336 - RNA, 28 nt, Human
guacuaaagccuuuacuguaauaaacca

SEQ ID NO: 398337 - RNA, 22 nt, Human
gucgccuccucuuuguagacuc

SEQ ID NO: 398338 - RNA, 18 nt, Human
uaagccggaaagccaagc

SEQ ID NO: 398339 - RNA, 18 nt, Human
uacaaaggacggaaagug

SEQ ID NO: 398340 - RNA, 19 nt, Human
uacaacccauggccccucu

SEQ ID NO: 398341 - RNA, 25 nt, Human
uacaacccauggccccucuguccgc

SEQ ID NO: 398342 - RNA, 18 nt, Human
uagugggcgccccaggcc

SEQ ID NO: 398343 - RNA, 19 nt, Human
ucauuggagacaccacugc

SEQ ID NO: 398344 - RNA, 21 nt, Human
uccccagaucacccagaaaga

SEQ ID NO: 398345 - RNA, 18 nt, Human
uccgcgugcgcggcgcca

SEQ ID NO: 398346 - RNA, 19 nt, Human
ucgaaacauuuuggcccaa

SEQ ID NO: 398347 - RNA, 21 nt, Human
ucggugcgggcuccggcccuc

SEQ ID NO: 398348 - RNA, 23 nt, Human
ucggugcgggcuccggcccucag

SEQ ID NO: 398349 - RNA, 24 nt, Human
ucucacacuugggcaaggcgugau

SEQ ID NO: 398350 - RNA, 23 nt, Human
ucuguccgcuuggccuuggugcu

SEQ ID NO: 398351 - RNA, 21 nt, Human
ugcccgggcggggaggcgggg

SEQ ID NO: 398352 - RNA, 24 nt, Human
uuccccggcaacucaauucuccgg

SEQ ID NO: 398353 - RNA, 21 nt, Human
uuuccaacuuuaaucccgccg

SEQ ID NO: 398354 - RNA, 19 nt, Human
agaaagagggaggagagag

SEQ ID NO: 398355 - RNA, 23 nt, Human
agagugggggaggcugaaguggg

SEQ ID NO: 398356 - RNA, 24 nt, Human
aggcagggcugggaggcggcugcu

SEQ ID NO: 398357 - RNA, 19 nt, Human
cccacaugcagcaggggaa

SEQ ID NO: 398358 - RNA, 21 nt, Human
cccacaugcagcaggggaagg

SEQ ID NO: 398359 - RNA, 20 nt, Human
cccccaggcgccaccagagc

SEQ ID NO: 398360 - RNA, 21 nt, Human
cccccaggcgccaccagagcu

SEQ ID NO: 398361 - RNA, 23 nt, Human
cccccaggcgccaccagagcuuu

SEQ ID NO: 398362 - RNA, 18 nt, Human
cccugcccaucggccccc

SEQ ID NO: 398363 - RNA, 19 nt, Human
ccgaaaagccccccaggcg

SEQ ID NO: 398364 - RNA, 21 nt, Human
cgauccgaaaagccccccagg

SEQ ID NO: 398365 - RNA, 19 nt, Human
cugaagugggguggugggg

SEQ ID NO: 398366 - RNA, 22 nt, Human
gaagaaagagggaggagagagc

SEQ ID NO: 398367 - RNA, 18 nt, Human
gacuucggguacaggaag

SEQ ID NO: 398368 - RNA, 19 nt, Human
gggaggcugaaguggggug

SEQ ID NO: 398369 - RNA, 25 nt, Human
ggggugguggggaggcugcccgaag

SEQ ID NO: 398370 - RNA, 25 nt, Human
ggugugaagccguuggccagagagc

SEQ ID NO: 398371 - RNA, 21 nt, Human
gucuggacuucggguacagga

SEQ ID NO: 398372 - RNA, 21 nt, Human
uccaccgagguccccugccca

SEQ ID NO: 398373 - RNA, 24 nt, Human
ucggcccccacaugcagcagggga

SEQ ID NO: 398374 - RNA, 18 nt, Human
uggccagagagcagaugg

SEQ ID NO: 398375 - RNA, 20 nt, Human
uggcugcugauuccccuggg

SEQ ID NO: 398376 - RNA, 23 nt, Human
ugggagucuggacuucggguaca

SEQ ID NO: 398377 - RNA, 20 nt, Human
ugggggaggcugaagugggg

SEQ ID NO: 398378 - RNA, 25 nt, Human
ugggggaggcugaagugggguggug

SEQ ID NO: 398379 - RNA, 19 nt, Human
uggggugguggggaggcug

SEQ ID NO: 398380 - RNA, 20 nt, Human
uggggugguggggaggcugc

SEQ ID NO: 398381 - RNA, 18 nt, Human
uguccuggcugcugauuc

SEQ ID NO: 398382 - RNA, 22 nt, Human
ugugaagccguuggccagagag

SEQ ID NO: 398383 - RNA, 19 nt, Human
uucggguacaggaaggggg

SEQ ID NO: 398384 - RNA, 19 nt, Human
uuuuuuuuuuuuuugcgga

SEQ ID NO: 398385 - RNA, 21 nt, Human
uuuuuuuuuuuuuuuuugcgg

SEQ ID NO: 398386 - RNA, 23 nt, Human
uuuuuuuuuuuuuuuuugcggau

SEQ ID NO: 398387 - RNA, 22 nt, Human
uuuuuuuuuuuuuuuuuugcgg

SEQ ID NO: 398388 - RNA, 19 nt, Human
aaaaauaugucuucucucc

SEQ ID NO: 398389 - RNA, 20 nt, Human
aaacugaaagaauacaccca

SEQ ID NO: 398390 - RNA, 27 nt, Human
aaauauccuuguaaugcugaugagggu

SEQ ID NO: 398391 - RNA, 24 nt, Human
aaaucacccucagaagacucccau

SEQ ID NO: 398392 - RNA, 18 nt, Human
aaaugcuaccagccauag

SEQ ID NO: 398393 - RNA, 25 nt, Human
aagaauccugcucacaccucuucgg

SEQ ID NO: 398394 - RNA, 23 nt, Human
aaggugcuauuucaaauggaauu

SEQ ID NO: 398395 - RNA, 23 nt, Human
acacauacacauggaaaguacaa

SEQ ID NO: 398396 - RNA, 21 nt, Human
agaauccugcucacaccucuu

SEQ ID NO: 398397 - RNA, 18 nt, Human
agacuuaaagaacugaug

SEQ ID NO: 398398 - RNA, 20 nt, Human
aggaagggacgggacccaga

SEQ ID NO: 398399 - RNA, 21 nt, Human
aggaagggacgggacccagaa

SEQ ID NO: 398400 - RNA, 18 nt, Human
aguaaucuauauugacau

SEQ ID NO: 398401 - RNA, 22 nt, Human
auagaguuucucuaaaggaaag

SEQ ID NO: 398402 - RNA, 21 nt, Human
aucccaguuuccaaacaccag

SEQ ID NO: 398403 - RNA, 21 nt, Human
augaaaccuaaggaaggugcu

SEQ ID NO: 398404 - RNA, 21 nt, Human
auggaucugguuuacacugua

SEQ ID NO: 398405 - RNA, 22 nt, Human
auuauccuaagacaaccaaaaa

SEQ ID NO: 398406 - RNA, 21 nt, Human
caaauugucaaaaagaacacu

SEQ ID NO: 398407 - RNA, 19 nt, Human
caacaauaacagaucgaca

SEQ ID NO: 398408 - RNA, 22 nt, Human
caacaauaacagaucgacaaca

SEQ ID NO: 398409 - RNA, 19 nt, Human
caccauaagaagucuuuca

SEQ ID NO: 398410 - RNA, 20 nt, Human
cagucgcagggagaaguugg

SEQ ID NO: 398411 - RNA, 19 nt, Human
cauacacauggaaaguaca

SEQ ID NO: 398412 - RNA, 23 nt, Human
caucaacaauaauaauacaacaa

SEQ ID NO: 398413 - RNA, 19 nt, Human
cauggaaaguacaaaucac

SEQ ID NO: 398414 - RNA, 25 nt, Human
cauuuucuacaaaaaaagcaggaca

SEQ ID NO: 398415 - RNA, 22 nt, Human
ccacccggaggcuccucggcgg

SEQ ID NO: 398416 - RNA, 18 nt, Human
ccggugcucuucucccca

SEQ ID NO: 398417 - RNA, 22 nt, Human
ccuugaaguauaugaugcccuu

SEQ ID NO: 398418 - RNA, 21 nt, Human
ccuuguaaugcugaugagggu

SEQ ID NO: 398419 - RNA, 23 nt, Human
cggaggcuccucggcgggaccgg

SEQ ID NO: 398420 - RNA, 24 nt, Human
cgggacaguagagagggcaagcac

SEQ ID NO: 398421 - RNA, 21 nt, Human
cugccuguuacccccagucgc

SEQ ID NO: 398422 - RNA, 20 nt, Human
cuggaaacuucucuuuuagu

SEQ ID NO: 398423 - RNA, 22 nt, Human
cugggcguuuucugagacuuaa

SEQ ID NO: 398424 - RNA, 19 nt, Human
cuucaaaugcuaccagcca

SEQ ID NO: 398425 - RNA, 19 nt, Human
cuucagggucacaguuccu

SEQ ID NO: 398426 - RNA, 19 nt, Human
cuuccaaaaaaaagaacua

SEQ ID NO: 398427 - RNA, 21 nt, Human
gaaggugcuauuucaaaugga

SEQ ID NO: 398428 - RNA, 21 nt, Human
gacaaauugucaaaaagaaca

SEQ ID NO: 398429 - RNA, 22 nt, Human
gacaaauugucaaaaagaacac

SEQ ID NO: 398430 - RNA, 25 nt, Human
gagaaaaaugaaagagaccgguacc

SEQ ID NO: 398431 - RNA, 21 nt, Human
gagaccuuucaguucucacaa

SEQ ID NO: 398432 - RNA, 19 nt, Human
gagccuuuuuuuaauggga

SEQ ID NO: 398433 - RNA, 18 nt, Human
gaggaucuguuugaucau

SEQ ID NO: 398434 - RNA, 21 nt, Human
gauacaaagucagcaauuauc

SEQ ID NO: 398435 - RNA, 27 nt, Human
ggacagguaacagacacaaagcuacuu

SEQ ID NO: 398436 - RNA, 21 nt, Human
ggacaguagagagggcaagca

SEQ ID NO: 398437 - RNA, 20 nt, Human
ggauugaucaaaauuagaag

SEQ ID NO: 398438 - RNA, 19 nt, Human
ggcagccgcgguccgcgcu

SEQ ID NO: 398439 - RNA, 19 nt, Human
ggcgggaccggggugcuca

SEQ ID NO: 398440 - RNA, 21 nt, Human
gggacaguagagagggcaagc

SEQ ID NO: 398441 - RNA, 18 nt, Human
ggugcucuucuccccacc

SEQ ID NO: 398442 - RNA, 24 nt, Human
gucuucucuccauuaugcacauuc

SEQ ID NO: 398443 - RNA, 24 nt, Human
uaaaaaauagauuaaccaugacaa

SEQ ID NO: 398444 - RNA, 19 nt, Human
uaaagcagaaaauucaucc

SEQ ID NO: 398445 - RNA, 18 nt, Human
uaaaguggucucaagauc

SEQ ID NO: 398446 - RNA, 18 nt, Human
uaacagacacaaagcuac

SEQ ID NO: 398447 - RNA, 22 nt, Human
uacaacaauaacagaucgacaa

SEQ ID NO: 398448 - RNA, 26 nt, Human
uacaacaauaacagaucgacaacaaa

SEQ ID NO: 398449 - RNA, 22 nt, Human
uaccagccauagggagacauuc

SEQ ID NO: 398450 - RNA, 21 nt, Human
uagcagcagcaguaacuugag

SEQ ID NO: 398451 - RNA, 24 nt, Human
uagcagcagcaguaacuugaguaa

SEQ ID NO: 398452 - RNA, 23 nt, Human
uaggaggaucuguuugaucaugu

SEQ ID NO: 398453 - RNA, 20 nt, Human
uauggaauagcaccauaaga

SEQ ID NO: 398454 - RNA, 19 nt, Human
ucaaaaagaacacuucagg

SEQ ID NO: 398455 - RNA, 20 nt, Human
ucacccucagaagacuccca

SEQ ID NO: 398456 - RNA, 23 nt, Human
uccaaacaccagacacacacaua

SEQ ID NO: 398457 - RNA, 18 nt, Human
ucccaguuuccaaacacc

SEQ ID NO: 398458 - RNA, 20 nt, Human
ucccaguuuccaaacaccag

SEQ ID NO: 398459 - RNA, 23 nt, Human
ucccaguuuccaaacaccagaca

SEQ ID NO: 398460 - RNA, 22 nt, Human
uccuuuguguucugacagaggu

SEQ ID NO: 398461 - RNA, 20 nt, Human
ucgacaacaaaggaaagaca

SEQ ID NO: 398462 - RNA, 22 nt, Human
ucuacaaaaaaagcaggacacc

SEQ ID NO: 398463 - RNA, 23 nt, Human
ucuuggauuuggugugaaaaggc

SEQ ID NO: 398464 - RNA, 24 nt, Human
ugaaaaggcagcacuuccaaaaaa

SEQ ID NO: 398465 - RNA, 31 nt, Human
ugaaaaggcagcacuuccaaaaaaaagaaag

SEQ ID NO: 398466 - RNA, 24 nt, Human
ugaugucuagaauuuaacugcaau

SEQ ID NO: 398467 - RNA, 23 nt, Human
ugcacauuccuuuguguucugac

SEQ ID NO: 398468 - RNA, 22 nt, Human
ugcuaccagccauagggagaca

SEQ ID NO: 398469 - RNA, 21 nt, Human
uggcucaaaggucaaaaacuu

SEQ ID NO: 398470 - RNA, 20 nt, Human
uguaaugcugaugaggguuu

SEQ ID NO: 398471 - RNA, 21 nt, Human
uguccggaaacauguggaugc

SEQ ID NO: 398472 - RNA, 22 nt, Human
ugugaaaaggcagcacuuccaa

SEQ ID NO: 398473 - RNA, 23 nt, Human
uguuuugaaaaaaugaaucccag

SEQ ID NO: 398474 - RNA, 22 nt, Human
uuaaaaaauagauuaaccauga

SEQ ID NO: 398475 - RNA, 22 nt, Human
uuaggcagccgcgguccgcgcu

SEQ ID NO: 398476 - RNA, 22 nt, Human
uuauaaguaguuguuccacagg

SEQ ID NO: 398477 - RNA, 21 nt, Human
uuccaaaaaaaagaacuaagu

SEQ ID NO: 398478 - RNA, 23 nt, Human
uucggaguuuucucauaagguuc

SEQ ID NO: 398479 - RNA, 23 nt, Human
uugaaaaaaaguuuauggaauag

SEQ ID NO: 398480 - RNA, 25 nt, Human
uugcuggaaacuucucuuuuaguac

SEQ ID NO: 398481 - RNA, 19 nt, Human
uuggcacauacauuuuaac

SEQ ID NO: 398482 - RNA, 21 nt, Human
uuguaguuucacucacucaga

SEQ ID NO: 398483 - RNA, 23 nt, Human
uuguguucugacagagguuuugg

SEQ ID NO: 398484 - RNA, 22 nt, Human
uuucaccagcuuuauuaauacc

SEQ ID NO: 398485 - RNA, 22 nt, Human
uuugcuggaaacuucucuuuua

SEQ ID NO: 398486 - RNA, 25 nt, Human
uuuuuuuuuuuuuuuuuuacaucug

SEQ ID NO: 398487 - RNA, 25 nt, Human
aaaacaaaacaaaacaaaaaaauuc

SEQ ID NO: 398488 - RNA, 19 nt, Human
aaacaaaacaaaacaaaaa

SEQ ID NO: 398489 - RNA, 24 nt, Human
aaacaggacuuacaguuauguaaa

SEQ ID NO: 398490 - RNA, 19 nt, Human
aacaaaacaaaaaaauucu

SEQ ID NO: 398491 - RNA, 22 nt, Human
aacaaaacaaaaaaauucucag

SEQ ID NO: 398492 - RNA, 19 nt, Human
aagaagcauagccggaaug

SEQ ID NO: 398493 - RNA, 20 nt, Human
aagaagcauagccggaaugg

SEQ ID NO: 398494 - RNA, 21 nt, Human
aaggugcuauuguuguuaaaa

SEQ ID NO: 398495 - RNA, 23 nt, Human
aaucuuuaacacuuuaacaguuc

SEQ ID NO: 398496 - RNA, 19 nt, Human
aaugccauucaaaacuacc

SEQ ID NO: 398497 - RNA, 24 nt, Human
acaaaacaaaacaaaaaaauucuc

SEQ ID NO: 398498 - RNA, 25 nt, Human
acaaaacaaaacaaaaaaauucuca

SEQ ID NO: 398499 - RNA, 24 nt, Human
acgugcuuggcugaggagccaaug

SEQ ID NO: 398500 - RNA, 22 nt, Human
acucugagaaauggcuuugugg

SEQ ID NO: 398501 - RNA, 25 nt, Human
agaaagaaaaugauuccagccaaag

SEQ ID NO: 398502 - RNA, 22 nt, Human
agacaggacucucgccagcaaa

SEQ ID NO: 398503 - RNA, 23 nt, Human
agagagaaagaaaaugauuccag

SEQ ID NO: 398504 - RNA, 21 nt, Human
aggagagugaaugacucugag

SEQ ID NO: 398505 - RNA, 24 nt, Human
agucacugauugacuuguuccaca

SEQ ID NO: 398506 - RNA, 21 nt, Human
auaggagcaagggacaacaag

SEQ ID NO: 398507 - RNA, 19 nt, Human
augcccaacauggacagaa

SEQ ID NO: 398508 - RNA, 21 nt, Human
auuaaggaaggggggaaacca

SEQ ID NO: 398509 - RNA, 19 nt, Human
caaaaacacucaugugccg

SEQ ID NO: 398510 - RNA, 22 nt, Human
caaaaacacucaugugccgccc

SEQ ID NO: 398511 - RNA, 26 nt, Human
caacauugcagacagaagcaaaagaa

SEQ ID NO: 398512 - RNA, 23 nt, Human
caagugccuccaaagcuaaaaga

SEQ ID NO: 398513 - RNA, 21 nt, Human
cacagggcugcugggcauggc

SEQ ID NO: 398514 - RNA, 21 nt, Human
cagaagacagccuggcaccuu

SEQ ID NO: 398515 - RNA, 25 nt, Human
cagcuuuuagcucauaaugcccaua

SEQ ID NO: 398516 - RNA, 22 nt, Human
caggaagcuagucacugauuga

SEQ ID NO: 398517 - RNA, 22 nt, Human
caguuucugucuuucaagaaca

SEQ ID NO: 398518 - RNA, 21 nt, Human
cauucuaguuuuugcucccag

SEQ ID NO: 398519 - RNA, 20 nt, Human
ccagucuucaacaguguuca

SEQ ID NO: 398520 - RNA, 18 nt, Human
ccccaaggcugaccuuuu

SEQ ID NO: 398521 - RNA, 21 nt, Human
ccccaaggcugaccuuuugcc

SEQ ID NO: 398522 - RNA, 19 nt, Human
cccccacugcaauuaagga

SEQ ID NO: 398523 - RNA, 22 nt, Human
cccccugucuucuucgaggcaa

SEQ ID NO: 398524 - RNA, 23 nt, Human
ccuugaagugcuaaaauuauguu

SEQ ID NO: 398525 - RNA, 23 nt, Human
cgagaggaaccgcagguucagac

SEQ ID NO: 398526 - RNA, 23 nt, Human
cgcccccugucuucuucgaggca

SEQ ID NO: 398527 - RNA, 21 nt, Human
cgcccugcguccaacaacaac

SEQ ID NO: 398528 - RNA, 22 nt, Human
cggcaagugccuccaaagcuaa

SEQ ID NO: 398529 - RNA, 20 nt, Human
cggccaaccccaaggcugac

SEQ ID NO: 398530 - RNA, 20 nt, Human
cggccgaggcugccuggguu

SEQ ID NO: 398531 - RNA, 21 nt, Human
cucauaaugcccauagaugcc

SEQ ID NO: 398532 - RNA, 20 nt, Human
cuguacacuguuuuagggca

SEQ ID NO: 398533 - RNA, 22 nt, Human
cuuacauaacuuauaauuaacc

SEQ ID NO: 398534 - RNA, 25 nt, Human
gaaacucccucugugcucacugcuc

SEQ ID NO: 398535 - RNA, 22 nt, Human
gaacaaaauuaccaacgcccuc

SEQ ID NO: 398536 - RNA, 21 nt, Human
gacacaguccucuggugccac

SEQ ID NO: 398537 - RNA, 21 nt, Human
gcagacagaagcaaaagaaca

SEQ ID NO: 398538 - RNA, 19 nt, Human
gcauggcucaggcgcggag

SEQ ID NO: 398539 - RNA, 25 nt, Human
gccacaauauugucuucucagcaga

SEQ ID NO: 398540 - RNA, 18 nt, Human
gcccauggaauuccaagc

SEQ ID NO: 398541 - RNA, 18 nt, Human
gccgaggcugccuggguu

SEQ ID NO: 398542 - RNA, 21 nt, Human
ggaauggucagugacuccaau

SEQ ID NO: 398543 - RNA, 18 nt, Human
gggaaaccaaagggacaa

SEQ ID NO: 398544 - RNA, 26 nt, Human
gugccuccaaagcuaaagauacaaua

SEQ ID NO: 398545 - RNA, 22 nt, Human
uaaaaugaugcugauucauccc

SEQ ID NO: 398546 - RNA, 25 nt, Human
uaacauaccacagcuuuuagcucau

SEQ ID NO: 398547 - RNA, 22 nt, Human
uaaccaaaaacacucaugugcc

SEQ ID NO: 398548 - RNA, 24 nt, Human
uaaccaaaaacacucaugugccgc

SEQ ID NO: 398549 - RNA, 21 nt, Human
uaacuuauaauuaaccagucu

SEQ ID NO: 398550 - RNA, 23 nt, Human
uaacuuauaauuaaccagucuuc

SEQ ID NO: 398551 - RNA, 21 nt, Human
uagaccgucgugagacagguu

SEQ ID NO: 398552 - RNA, 24 nt, Human
ucaaagucaaugaaugaaaaaaua

SEQ ID NO: 398553 - RNA, 19 nt, Human
ucauucaaauauauaccuc

SEQ ID NO: 398554 - RNA, 22 nt, Human
uccaaagcuaaaagaagaaaug

SEQ ID NO: 398555 - RNA, 23 nt, Human
uccaaagcuaaaagaagaaaugu

SEQ ID NO: 398556 - RNA, 23 nt, Human
uccaagcacagguggagucuucu

SEQ ID NO: 398557 - RNA, 18 nt, Human
uccaauccuaaucuuuaa

SEQ ID NO: 398558 - RNA, 20 nt, Human
ucccucugugcucacugcuc

SEQ ID NO: 398559 - RNA, 20 nt, Human
ucuacacuucucuagaacaa

SEQ ID NO: 398560 - RNA, 21 nt, Human
ugaagcccauggaauuccaag

SEQ ID NO: 398561 - RNA, 19 nt, Human
ugacaacauugcagacaga

SEQ ID NO: 398562 - RNA, 23 nt, Human
ugacaugucccuggcagagagaa

SEQ ID NO: 398563 - RNA, 24 nt, Human
ugacuccaauccuaaucuuuaaca

SEQ ID NO: 398564 - RNA, 18 nt, Human
ugacucugagaaauggcu

SEQ ID NO: 398565 - RNA, 24 nt, Human
ugagaaaaauacuguacacuguuu

SEQ ID NO: 398566 - RNA, 22 nt, Human
ugaucuguaaaaaauauaaccu

SEQ ID NO: 398567 - RNA, 19 nt, Human
ugcagacagaagcaaaaga

SEQ ID NO: 398568 - RNA, 18 nt, Human
uggcagagagaaagaaaa

SEQ ID NO: 398569 - RNA, 20 nt, Human
uggcagagagaaagaaaaug

SEQ ID NO: 398570 - RNA, 19 nt, Human
uggcucaggcgcggagcaa

SEQ ID NO: 398571 - RNA, 19 nt, Human
ugguaugaagaagcauagc

SEQ ID NO: 398572 - RNA, 18 nt, Human
uguuaaaaacaaaacaaa

SEQ ID NO: 398573 - RNA, 21 nt, Human
uguuaaaaacaaaacaaaaca

SEQ ID NO: 398574 - RNA, 23 nt, Human
uucaccuuuuacauauacuuugu

SEQ ID NO: 398575 - RNA, 22 nt, Human
uucagguuucuugguugacaug

SEQ ID NO: 398576 - RNA, 23 nt, Human
uuccggugcaugggagcuaucuu

SEQ ID NO: 398577 - RNA, 19 nt, Human
uugaagcccauggaauucc

SEQ ID NO: 398578 - RNA, 24 nt, Human
uuuaacacuuuaacaguucaugaa

SEQ ID NO: 398579 - RNA, 19 nt, Human
uuuaaccugauuggcuaca

SEQ ID NO: 398580 - RNA, 23 nt, Human
uuuaguccugacauccauccaua

SEQ ID NO: 398581 - RNA, 18 nt, Human
uuucagguuucuugguug

SEQ ID NO: 398582 - RNA, 27 nt, Human
uuuuuaguccugacauccauccauauu

SEQ ID NO: 398583 - RNA, 22 nt, Human
uuuuuuaguccugacauccauc

SEQ ID NO: 398584 - RNA, 19 nt, Human
uuuuuuuuuuuuaaagaaa

SEQ ID NO: 398585 - RNA, 22 nt, Human
aaaaacacaagagcugaacagc

SEQ ID NO: 398586 - RNA, 22 nt, Human
acaaaaacacaagagcugaaca

SEQ ID NO: 398587 - RNA, 19 nt, Human
acaagagcugaacagcagc

SEQ ID NO: 398588 - RNA, 20 nt, Human
accacauauaaauggugaac

SEQ ID NO: 398589 - RNA, 24 nt, Human
auauauuuuuaccuacaucauaca

SEQ ID NO: 398590 - RNA, 23 nt, Human
aucuaugcugaugcaaaauaaag

SEQ ID NO: 398591 - RNA, 20 nt, Human
auuguuggaacuuccaaaag

SEQ ID NO: 398592 - RNA, 21 nt, Human
caaaaacacaagagcugaaca

SEQ ID NO: 398593 - RNA, 18 nt, Human
cauacacucacaauugug

SEQ ID NO: 398594 - RNA, 19 nt, Human
cugacucauaucucauuuu

SEQ ID NO: 398595 - RNA, 25 nt, Human
cuggccacaaaaacacaagagcuga

SEQ ID NO: 398596 - RNA, 24 nt, Human
ggaacuuccaaaagcagcaauauc

SEQ ID NO: 398597 - RNA, 22 nt, Human
gggugcccaauauaccuuuguu

SEQ ID NO: 398598 - RNA, 18 nt, Human
uaacacaagacaaccugc

SEQ ID NO: 398599 - RNA, 18 nt, Human
uaacugacucauaucuca

SEQ ID NO: 398600 - RNA, 25 nt, Human
ucuucuaacaaggaagagggccugg

SEQ ID NO: 398601 - RNA, 22 nt, Human
uggaacuuccaaaagcagcaau

SEQ ID NO: 398602 - RNA, 19 nt, Human
ugucuguuccauuuggcag

SEQ ID NO: 398603 - RNA, 19 nt, Human
uguuggaacuuccaaaagc

SEQ ID NO: 398604 - RNA, 21 nt, Human
aagaucccaacuagacaaaga

SEQ ID NO: 398605 - RNA, 21 nt, Human
aucccaacuagacaaagacug

SEQ ID NO: 398606 - RNA, 23 nt, Human
cccacagguaccuucacuugguc

SEQ ID NO: 398607 - RNA, 24 nt, Human
gaaagcagugaaagagcaaugggc

SEQ ID NO: 398608 - RNA, 20 nt, Human
gaacuuaacuauaacuagug

SEQ ID NO: 398609 - RNA, 19 nt, Human
gagucacuauaggucuccu

SEQ ID NO: 398610 - RNA, 19 nt, Human
gcagugaaagagcaauggg

SEQ ID NO: 398611 - RNA, 21 nt, Human
gucacuaagagcuccugggag

SEQ ID NO: 398612 - RNA, 20 nt, Human
uauaggucuccuuuggaucc

SEQ ID NO: 398613 - RNA, 20 nt, Human
ugaaagagcaaugggcacaa

SEQ ID NO: 398614 - RNA, 18 nt, Human
ugaaagcagugaaagagc

SEQ ID NO: 398615 - RNA, 19 nt, Human
ugaaagcagugaaagagca

SEQ ID NO: 398616 - RNA, 19 nt, Human
ugcuucaacccacaacuac

SEQ ID NO: 398617 - RNA, 21 nt, Human
ugggcacaaugagccccacag

SEQ ID NO: 398618 - RNA, 22 nt, Human
ccuuuccuuuuuucuuuagucc

SEQ ID NO: 398619 - RNA, 22 nt, Human
uagaagagauguaauugugaua

SEQ ID NO: 398620 - RNA, 22 nt, Human
uauggaaaacuuaaauuugcca

SEQ ID NO: 398621 - RNA, 21 nt, Human
ucuuuaguccaaauccagaca

SEQ ID NO: 398622 - RNA, 19 nt, Human
uggaaaacuuaaauuugcc

SEQ ID NO: 398623 - RNA, 18 nt, Human
uggguaaaauuaagucaa

SEQ ID NO: 398624 - RNA, 23 nt, Human
uuggaugacugcuagccuuuccu

SEQ ID NO: 398625 - RNA, 22 nt, Human
aaacaaccuuauuuaugauauu

SEQ ID NO: 398626 - RNA, 21 nt, Human
aacaaccuuauuuaugauauu

SEQ ID NO: 398627 - RNA, 21 nt, Human
aagcacgucuuaaacaaccuu

SEQ ID NO: 398628 - RNA, 20 nt, Human
acgcagggcucccagcuuuc

SEQ ID NO: 398629 - RNA, 21 nt, Human
acuuugaaucuuguugcugga

SEQ ID NO: 398630 - RNA, 18 nt, Human
agauguccaauggggaag

SEQ ID NO: 398631 - RNA, 21 nt, Human
agcauuuauucccucugcacu

SEQ ID NO: 398632 - RNA, 19 nt, Human
aggaaaaagugaacaccca

SEQ ID NO: 398633 - RNA, 22 nt, Human
agggccaagucuccacgcaggg

SEQ ID NO: 398634 - RNA, 20 nt, Human
agucaaaacuaccaaaaugg

SEQ ID NO: 398635 - RNA, 24 nt, Human
agugagaaggguacaggggaggga

SEQ ID NO: 398636 - RNA, 18 nt, Human
aguucugggcuaaagggu

SEQ ID NO: 398637 - RNA, 19 nt, Human
aucagagucccagccaggc

SEQ ID NO: 398638 - RNA, 23 nt, Human
aucccacuuccuuccugccucua

SEQ ID NO: 398639 - RNA, 27 nt, Human
aucccacuuccuuccugccucuagccc

SEQ ID NO: 398640 - RNA, 21 nt, Human
aucggggugaagggcugaggc

SEQ ID NO: 398641 - RNA, 20 nt, Human
caagaaaugccucaggaggu

SEQ ID NO: 398642 - RNA, 20 nt, Human
caaguguuggacccagcugg

SEQ ID NO: 398643 - RNA, 23 nt, Human
cacaccuccacgcagggcuccca

SEQ ID NO: 398644 - RNA, 21 nt, Human
caccauggaauuacucacccu

SEQ ID NO: 398645 - RNA, 21 nt, Human
caccuccacgcagggcuccca

SEQ ID NO: 398646 - RNA, 24 nt, Human
cacgcagggcucccagcuuucugg

SEQ ID NO: 398647 - RNA, 21 nt, Human
cacgucuuaaacaaccuuauu

SEQ ID NO: 398648 - RNA, 19 nt, Human
cacugcuucugugagcagc

SEQ ID NO: 398649 - RNA, 22 nt, Human
cagaaaaggcucccagggcuaa

SEQ ID NO: 398650 - RNA, 22 nt, Human
cagucaaaacuaccaaaauggu

SEQ ID NO: 398651 - RNA, 23 nt, Human
caguggcccugugaaugcguggc

SEQ ID NO: 398652 - RNA, 24 nt, Human
caguggcccugugaaugcguggcu

SEQ ID NO: 398653 - RNA, 19 nt, Human
cauaaggccugacaugugg

SEQ ID NO: 398654 - RNA, 18 nt, Human
caucaggagccccuugac

SEQ ID NO: 398655 - RNA, 19 nt, Human
caucccacuuccuuccugc

SEQ ID NO: 398656 - RNA, 21 nt, Human
caugacagucauuacuuagua

SEQ ID NO: 398657 - RNA, 18 nt, Human
ccagccaucugugucucc

SEQ ID NO: 398658 - RNA, 19 nt, Human
ccaugauaagaccaggaag

SEQ ID NO: 398659 - RNA, 19 nt, Human
cccacuuccuuccugccuc

SEQ ID NO: 398660 - RNA, 21 nt, Human
cccacuuccuuccugccucua

SEQ ID NO: 398661 - RNA, 19 nt, Human
cccugugaaugcguggcuc

SEQ ID NO: 398662 - RNA, 24 nt, Human
ccuccacgcagggcucccagcuuu

SEQ ID NO: 398663 - RNA, 18 nt, Human
ccugcauaucuagugcac

SEQ ID NO: 398664 - RNA, 18 nt, Human
cucacugcuucugugagc

SEQ ID NO: 398665 - RNA, 22 nt, Human
cucaggaaaagaacaaugucuc

SEQ ID NO: 398666 - RNA, 21 nt, Human
cuccggagucugaaagcucug

SEQ ID NO: 398667 - RNA, 18 nt, Human
cucugcacuggaagcucc

SEQ ID NO: 398668 - RNA, 20 nt, Human
cugcaacucauuucaugagg

SEQ ID NO: 398669 - RNA, 21 nt, Human
cugcauaucuagugcaccaug

SEQ ID NO: 398670 - RNA, 18 nt, Human
cuggucucacgcaggaga

SEQ ID NO: 398671 - RNA, 19 nt, Human
cuggucucacgcaggagag

SEQ ID NO: 398672 - RNA, 22 nt, Human
gaaagcucuggguuucaugcca

SEQ ID NO: 398673 - RNA, 24 nt, Human
gacagaguguacuuuuccauacuu

SEQ ID NO: 398674 - RNA, 21 nt, Human
gagcagcaguggcccugugaa

SEQ ID NO: 398675 - RNA, 19 nt, Human
gauauuugaagcacgucuu

SEQ ID NO: 398676 - RNA, 19 nt, Human
gcacgucuuaaacaaccuu

SEQ ID NO: 398677 - RNA, 22 nt, Human
gcagggcucccagcuuucuggu

SEQ ID NO: 398678 - RNA, 25 nt, Human
gcagugagaaggguacaggggaggg

SEQ ID NO: 398679 - RNA, 20 nt, Human
gcccauauguuucuggaauc

SEQ ID NO: 398680 - RNA, 21 nt, Human
gcccugugaaugcguggcucg

SEQ ID NO: 398681 - RNA, 22 nt, Human
gcuccuugagauuagcagcccu

SEQ ID NO: 398682 - RNA, 26 nt, Human
gcucuggguuucaugccagcucuucu

SEQ ID NO: 398683 - RNA, 22 nt, Human
gcuggaaagguccaagugcucu

SEQ ID NO: 398684 - RNA, 18 nt, Human
ggaaaaagugaacaccca

SEQ ID NO: 398685 - RNA, 20 nt, Human
ggaaaaagugaacacccagu

SEQ ID NO: 398686 - RNA, 19 nt, Human
gggaucagagucccagccg

SEQ ID NO: 398687 - RNA, 19 nt, Human
ggggaaguucucuagagau

SEQ ID NO: 398688 - RNA, 21 nt, Human
uaaaaaauagaacaugcucga

SEQ ID NO: 398689 - RNA, 23 nt, Human
uaaaaaauagaacaugcucgaga

SEQ ID NO: 398690 - RNA, 20 nt, Human
uaagaccaggaagcggaaau

SEQ ID NO: 398691 - RNA, 21 nt, Human
uacuuugaaucuuguugcugg

SEQ ID NO: 398692 - RNA, 19 nt, Human
uagaacaugcucgagaaug

SEQ ID NO: 398693 - RNA, 22 nt, Human
ucaaaacuaccaaaaugguuuu

SEQ ID NO: 398694 - RNA, 23 nt, Human
ucaaucaaaaaggaaaaagugaa

SEQ ID NO: 398695 - RNA, 23 nt, Human
ucagauuagaaaaauacucaggu

SEQ ID NO: 398696 - RNA, 21 nt, Human
ucaggaaaagaacaaugucuc

SEQ ID NO: 398697 - RNA, 21 nt, Human
uccaugauaagaccaggaagc

SEQ ID NO: 398698 - RNA, 22 nt, Human
ucccacuuccuuccugccucua

SEQ ID NO: 398699 - RNA, 23 nt, Human
ucccagcuuucuggucucacgca

SEQ ID NO: 398700 - RNA, 24 nt, Human
ucccagcuuucuggucucacgcag

SEQ ID NO: 398701 - RNA, 19 nt, Human
ucccagggcuaaacucugg

SEQ ID NO: 398702 - RNA, 21 nt, Human
ucccucugcacuggaagcucc

SEQ ID NO: 398703 - RNA, 18 nt, Human
uccggagucugaaagcuc

SEQ ID NO: 398704 - RNA, 22 nt, Human
uccugaggucaucccacuuccu

SEQ ID NO: 398705 - RNA, 24 nt, Human
ucuccacgcagggcucccagcuuu

SEQ ID NO: 398706 - RNA, 19 nt, Human
ucucuuccucgagccgccc

SEQ ID NO: 398707 - RNA, 22 nt, Human
ucugaccgagcaguuucugagg

SEQ ID NO: 398708 - RNA, 22 nt, Human
ucugauaugccccaucuucaau

SEQ ID NO: 398709 - RNA, 19 nt, Human
ugaagcacgucuuaaacaa

SEQ ID NO: 398710 - RNA, 20 nt, Human
ugaccuccugaggucauccc

SEQ ID NO: 398711 - RNA, 20 nt, Human
ugagaaggguacaggggagg

SEQ ID NO: 398712 - RNA, 21 nt, Human
ugagaaggguacaggggaggg

SEQ ID NO: 398713 - RNA, 21 nt, Human
ugauaagaccaggaagcggaa

SEQ ID NO: 398714 - RNA, 21 nt, Human
ugccucuagcccaaauugucc

SEQ ID NO: 398715 - RNA, 23 nt, Human
uggaaucaagaaaaggugaccuc

SEQ ID NO: 398716 - RNA, 20 nt, Human
uggcagugagaaggguacag

SEQ ID NO: 398717 - RNA, 25 nt, Human
uggcagugagaaggguacaggggag

SEQ ID NO: 398718 - RNA, 27 nt, Human
uggcagugagaaggguacaggggaggg

SEQ ID NO: 398719 - RNA, 18 nt, Human
uggcuauaacauaauaca

SEQ ID NO: 398720 - RNA, 21 nt, Human
ugggaucagagucccagccag

SEQ ID NO: 398721 - RNA, 22 nt, Human
ugucauggguuccuugacugag

SEQ ID NO: 398722 - RNA, 18 nt, Human
ugugucucccuaaagaga

SEQ ID NO: 398723 - RNA, 19 nt, Human
uguguuaaucagguuuccu

SEQ ID NO: 398724 - RNA, 24 nt, Human
uucucugucuuuauucaacuugau

SEQ ID NO: 398725 - RNA, 23 nt, Human
uuuagggccaagucuccacgcag

SEQ ID NO: 398726 - RNA, 24 nt, Human
uuucuuugucauggguuccuugac

SEQ ID NO: 398727 - RNA, 18 nt, Human
uuugagauguccaauggg

SEQ ID NO: 398728 - RNA, 18 nt, Human
uuuuuuuuuuuuuuucug

SEQ ID NO: 398729 - RNA, 24 nt, Human
uuuuuuuuuuuuuuuuucuguuuu

SEQ ID NO: 398730 - RNA, 23 nt, Human
aaaaaaaaaaccuccagagagga

SEQ ID NO: 398731 - RNA, 23 nt, Human
aaaaaaaccuccagagaggaccu

SEQ ID NO: 398732 - RNA, 25 nt, Human
aaaaagaaaaaaaaaaccuccagag

SEQ ID NO: 398733 - RNA, 24 nt, Human
aaaagaaaaaaaaaaccuccagag

SEQ ID NO: 398734 - RNA, 22 nt, Human
aaaccuccagagaggaccccaa

SEQ ID NO: 398735 - RNA, 22 nt, Human
aagauaguuaugauucaaauac

SEQ ID NO: 398736 - RNA, 23 nt, Human
aagaugagaaagucccucaaaaa

SEQ ID NO: 398737 - RNA, 23 nt, Human
aagucaauugccaggaaagcugg

SEQ ID NO: 398738 - RNA, 18 nt, Human
aaucgcuugaacccugga

SEQ ID NO: 398739 - RNA, 23 nt, Human
aaucuguaaucccagcuacuugg

SEQ ID NO: 398740 - RNA, 21 nt, Human
acccuggaggcagugguugca

SEQ ID NO: 398741 - RNA, 21 nt, Human
acugcaguccagccugggcgg

SEQ ID NO: 398742 - RNA, 24 nt, Human
acugcaguccagccugggcggcag

SEQ ID NO: 398743 - RNA, 26 nt, Human
acugcaguccagccugggcggcagag

SEQ ID NO: 398744 - RNA, 23 nt, Human
agaaaaaaaaaaccuccagagag

SEQ ID NO: 398745 - RNA, 21 nt, Human
agaacuugaagaugagaaagu

SEQ ID NO: 398746 - RNA, 22 nt, Human
agaagagggaaaccccagagaa

SEQ ID NO: 398747 - RNA, 24 nt, Human
agagagaagagggaaaccccagag

SEQ ID NO: 398748 - RNA, 21 nt, Human
agcaaaaagaaaaaaaaaacc

SEQ ID NO: 398749 - RNA, 22 nt, Human
agcaaaaagaaaaaaaaaaccu

SEQ ID NO: 398750 - RNA, 23 nt, Human
agcaucccugguuuggugacugu

SEQ ID NO: 398751 - RNA, 20 nt, Human
agccgagauugugucacugc

SEQ ID NO: 398752 - RNA, 24 nt, Human
agccugggcggcagagugagacuc

SEQ ID NO: 398753 - RNA, 23 nt, Human
agcugggcaacuauaaggucagg

SEQ ID NO: 398754 - RNA, 18 nt, Human
aggcaagagaaucgcuug

SEQ ID NO: 398755 - RNA, 21 nt, Human
aggcagugguugcagucagcc

SEQ ID NO: 398756 - RNA, 24 nt, Human
aggcagugguugcagucagccgag

SEQ ID NO: 398757 - RNA, 24 nt, Human
aggcugaggcaagagaaucgcuug

SEQ ID NO: 398758 - RNA, 18 nt, Human
aggggcagagggucccug

SEQ ID NO: 398759 - RNA, 19 nt, Human
aggggcagagggucccugg

SEQ ID NO: 398760 - RNA, 19 nt, Human
aucucaucacagugauggu

SEQ ID NO: 398761 - RNA, 24 nt, Human
auugugucacugcaguccagccug

SEQ ID NO: 398762 - RNA, 18 nt, Human
caaucuguaaucccagcu

SEQ ID NO: 398763 - RNA, 21 nt, Human
cacaauauaugucugcaggag

SEQ ID NO: 398764 - RNA, 18 nt, Human
cacagugaugguagucag

SEQ ID NO: 398765 - RNA, 19 nt, Human
cacugcaguccagccuggg

SEQ ID NO: 398766 - RNA, 19 nt, Human
cacugcaguccagccuggg

SEQ ID NO: 398767 - RNA, 20 nt, Human
cacugcaguccagccugggc

SEQ ID NO: 398768 - RNA, 24 nt, Human
cacugcaguccagccugggcggca

SEQ ID NO: 398769 - RNA, 18 nt, Human
cagaagggacuucuagua

SEQ ID NO: 398770 - RNA, 22 nt, Human
cagagaggaccccaaaaugaua

SEQ ID NO: 398771 - RNA, 23 nt, Human
caguccagccugggcggcagagu

SEQ ID NO: 398772 - RNA, 20 nt, Human
cccucaaaaacaucccaaca

SEQ ID NO: 398773 - RNA, 18 nt, Human
ccucccggacgcaaaagc

SEQ ID NO: 398774 - RNA, 22 nt, Human
ccugggcggcagagugagacuc

SEQ ID NO: 398775 - RNA, 20 nt, Human
cuggagcagaugagaguagg

SEQ ID NO: 398776 - RNA, 18 nt, Human
cuguaaucccagcuacuu

SEQ ID NO: 398777 - RNA, 21 nt, Human
cuguaaucccagcuacuuggg

SEQ ID NO: 398778 - RNA, 27 nt, Human
cuuuaagacuuccucuucaucacaacc

SEQ ID NO: 398779 - RNA, 19 nt, Human
cuuuuuguuuuccugucuc

SEQ ID NO: 398780 - RNA, 19 nt, Human
gacucugggacgccucccc

SEQ ID NO: 398781 - RNA, 20 nt, Human
gagaggaccccaaaaugaua

SEQ ID NO: 398782 - RNA, 19 nt, Human
ggacagcgccaacauucuc

SEQ ID NO: 398783 - RNA, 18 nt, Human
ggagcagaugagaguagg

SEQ ID NO: 398784 - RNA, 23 nt, Human
ggcggcagagugagacucuggga

SEQ ID NO: 398785 - RNA, 21 nt, Human
gguugcagucagccgagauug

SEQ ID NO: 398786 - RNA, 24 nt, Human
guagcaaaaagaaaaaaaaaaccc

SEQ ID NO: 398787 - RNA, 24 nt, Human
gucacugcaguccagccugggcgg

SEQ ID NO: 398788 - RNA, 18 nt, Human
gugccaggaacaugaaca

SEQ ID NO: 398789 - RNA, 24 nt, Human
guugcagucagccgagauuguguc

SEQ ID NO: 398790 - RNA, 22 nt, Human
uacaaauacaucaggauuagga

SEQ ID NO: 398791 - RNA, 19 nt, Human
uacagaacuugaagaugag

SEQ ID NO: 398792 - RNA, 23 nt, Human
uagaaaauuaacaucugaggcuc

SEQ ID NO: 398793 - RNA, 22 nt, Human
uagcaaaaagaaaaaaaaaacc

SEQ ID NO: 398794 - RNA, 23 nt, Human
uagcaaaaagaaaaaaaaaaccu

SEQ ID NO: 398795 - RNA, 24 nt, Human
uagcaaaaagaaaaaaaaaaccuc

SEQ ID NO: 398796 - RNA, 28 nt, Human
uagcaaaaagaaaaaaaaaaccuccaga

SEQ ID NO: 398797 - RNA, 19 nt, Human
uaggggcagagggucccug

SEQ ID NO: 398798 - RNA, 25 nt, Human
uaguagcaaaaagaaaaaaaaaacc

SEQ ID NO: 398799 - RNA, 19 nt, Human
uaguauguucuuauucuag

SEQ ID NO: 398800 - RNA, 20 nt, Human
uauccaagacacuaagugau

SEQ ID NO: 398801 - RNA, 19 nt, Human
uauguuguuuucauaguag

SEQ ID NO: 398802 - RNA, 20 nt, Human
uauuuuauuuuuuggugaau

SEQ ID NO: 398803 - RNA, 18 nt, Human
ucacauucacaaaugaac

SEQ ID NO: 398804 - RNA, 21 nt, Human
ucacugcaguccagccugggc

SEQ ID NO: 398805 - RNA, 24 nt, Human
ucagagugacagugcauacaauga

SEQ ID NO: 398806 - RNA, 24 nt, Human
ucauaguagcaaaaagaaaaaaaa

SEQ ID NO: 398807 - RNA, 23 nt, Human
uccagccugggcggcagagugag

SEQ ID NO: 398808 - RNA, 24 nt, Human
uccagccugggcggcagagugaga

SEQ ID NO: 398809 - RNA, 18 nt, Human
ucccucaaaaacauccca

SEQ ID NO: 398810 - RNA, 19 nt, Human
ucccugguuuggugacugu

SEQ ID NO: 398811 - RNA, 18 nt, Human
ucgcuugaacccuggagg

SEQ ID NO: 398812 - RNA, 21 nt, Human
ucuguaaucccagcuacuugg

SEQ ID NO: 398813 - RNA, 22 nt, Human
ucuguaaucccagcuacuuggg

SEQ ID NO: 398814 - RNA, 18 nt, Human
ugacagugcauacaauga

SEQ ID NO: 398815 - RNA, 23 nt, Human
ugacuguggagaagccacguugu

SEQ ID NO: 398816 - RNA, 21 nt, Human
ugagaaagaacugucagccug

SEQ ID NO: 398817 - RNA, 21 nt, Human
ugagaaagaacugucagccug

SEQ ID NO: 398818 - RNA, 22 nt, Human
ugagaaagucccucaaaaacau

SEQ ID NO: 398819 - RNA, 20 nt, Human
ugaggcaagagaaucgcuug

SEQ ID NO: 398820 - RNA, 24 nt, Human
ugaggcaagagaaucgcuugaacc

SEQ ID NO: 398821 - RNA, 25 nt, Human
ugaggcaagagaaucgcuugaaccc

SEQ ID NO: 398822 - RNA, 23 nt, Human
ugcauacaaugaaaagggagaac

SEQ ID NO: 398823 - RNA, 19 nt, Human
ugccaggaacaugaacauc

SEQ ID NO: 398824 - RNA, 22 nt, Human
uggagaagccacguugucagua

SEQ ID NO: 398825 - RNA, 18 nt, Human
uggcuugagauaaguugg

SEQ ID NO: 398826 - RNA, 20 nt, Human
ugggaggcugaggcaagaga

SEQ ID NO: 398827 - RNA, 23 nt, Human
ugggaggcugaggcaagagaauc

SEQ ID NO: 398828 - RNA, 20 nt, Human
ugggcaaagucaauugccag

SEQ ID NO: 398829 - RNA, 21 nt, Human
ugggcggcagagugagacucu

SEQ ID NO: 398830 - RNA, 22 nt, Human
uguccuagcagaagggacuucu

SEQ ID NO: 398831 - RNA, 24 nt, Human
uguuuuccugucuccagguucgga

SEQ ID NO: 398832 - RNA, 26 nt, Human
uucauaguagcaaaaagaaaaaaaaa

SEQ ID NO: 398833 - RNA, 18 nt, Human
uucccuggaugcuaaauc

SEQ ID NO: 398834 - RNA, 23 nt, Human
uugagagauuuauguuguuuuca

SEQ ID NO: 398835 - RNA, 22 nt, Human
uugcagucagccgagauugugu

SEQ ID NO: 398836 - RNA, 24 nt, Human
uugggaggcugaggcaagagaauc

SEQ ID NO: 398837 - RNA, 23 nt, Human
uugugucacugcaguccagccug

SEQ ID NO: 398838 - RNA, 22 nt, Human
uuuguggcuugagauaaguugg

SEQ ID NO: 398839 - RNA, 23 nt, Human
uuuuccugucuccagguucggac

SEQ ID NO: 398840 - RNA, 22 nt, Human
aaacauaaugauuaaaccagaa

SEQ ID NO: 398841 - RNA, 19 nt, Human
aagcagaguggagaggagc

SEQ ID NO: 398842 - RNA, 24 nt, Human
acauaaugauuaaaccagaagaga

SEQ ID NO: 398843 - RNA, 19 nt, Human
acugggcugucucuaacuu

SEQ ID NO: 398844 - RNA, 23 nt, Human
agacugggcugucucuaacuggc

SEQ ID NO: 398845 - RNA, 21 nt, Human
aggcuaaccucaccgccuagc

SEQ ID NO: 398846 - RNA, 19 nt, Human
ccugaaggcaugaggauaa

SEQ ID NO: 398847 - RNA, 23 nt, Human
gaguggagaggagcugaaaaacu

SEQ ID NO: 398848 - RNA, 21 nt, Human
gauaauggaggcaccuccaga

SEQ ID NO: 398849 - RNA, 19 nt, Human
ggagcugaaaaacugagca

SEQ ID NO: 398850 - RNA, 23 nt, Human
ggagcugaaaaacugagcauuua

SEQ ID NO: 398851 - RNA, 20 nt, Human
uccauuugggaaagcagagu

SEQ ID NO: 398852 - RNA, 25 nt, Human
ugaaaaacugagcauuuacucaaaa

SEQ ID NO: 398853 - RNA, 23 nt, Human
uggagaggagcugaaaaacugag

SEQ ID NO: 398854 - RNA, 20 nt, Human
uuaaaccagaagagacuggg

SEQ ID NO: 398855 - RNA, 23 nt, Human
uucuucuucagagcaucuugaua

SEQ ID NO: 398856 - RNA, 22 nt, Human
acagccuacaucccaugagggc

SEQ ID NO: 398857 - RNA, 26 nt, Human
accccuuccucuuuccacuccccucu

SEQ ID NO: 398858 - RNA, 23 nt, Human
agacagccuacaucccaugaggg

SEQ ID NO: 398859 - RNA, 22 nt, Human
aggagcuaaggcccagagcuca

SEQ ID NO: 398860 - RNA, 18 nt, Human
aggaggcuaggcugcacc

SEQ ID NO: 398861 - RNA, 19 nt, Human
aggcaggcagaggugaggu

SEQ ID NO: 398862 - RNA, 19 nt, Human
aggcccagagcucaggcag

SEQ ID NO: 398863 - RNA, 21 nt, Human
agggagagaugggaauucugg

SEQ ID NO: 398864 - RNA, 23 nt, Human
aggguguagcuugagcaggaggc

SEQ ID NO: 398865 - RNA, 24 nt, Human
aguagcucccccuccacuccaccc

SEQ ID NO: 398866 - RNA, 18 nt, Human
auggcagacagcuccuuc

SEQ ID NO: 398867 - RNA, 19 nt, Human
cacaccuguccucuaccaa

SEQ ID NO: 398868 - RNA, 24 nt, Human
cacacucgaggucccuucccacag

SEQ ID NO: 398869 - RNA, 19 nt, Human
caccaguagcggguacacc

SEQ ID NO: 398870 - RNA, 18 nt, Human
caccugccuucaccacag

SEQ ID NO: 398871 - RNA, 18 nt, Human
cacuccacccugccccca

SEQ ID NO: 398872 - RNA, 24 nt, Human
cacuccccauucuaagaggacacu

SEQ ID NO: 398873 - RNA, 22 nt, Human
cacuccccucucagacagccua

SEQ ID NO: 398874 - RNA, 19 nt, Human
cagaguucugcagggccuc

SEQ ID NO: 398875 - RNA, 19 nt, Human
cagcagcuacagggaaggg

SEQ ID NO: 398876 - RNA, 26 nt, Human
caggcaggcagaggugaggugagugu

SEQ ID NO: 398877 - RNA, 22 nt, Human
caggggcagcagcggcucagag

SEQ ID NO: 398878 - RNA, 20 nt, Human
caggggcuucuccagagggu

SEQ ID NO: 398879 - RNA, 21 nt, Human
cagggucccaugagucaaagg

SEQ ID NO: 398880 - RNA, 22 nt, Human
ccacagccuugcaacaucuucc

SEQ ID NO: 398881 - RNA, 20 nt, Human
ccagagcucaggcagagagc

SEQ ID NO: 398882 - RNA, 19 nt, Human
ccccagugaggaggacagg

SEQ ID NO: 398883 - RNA, 25 nt, Human
cccccuccacuccacccugccccca

SEQ ID NO: 398884 - RNA, 18 nt, Human
ccccucucagacagccua

SEQ ID NO: 398885 - RNA, 21 nt, Human
ccccuuccucuuuccacuccc

SEQ ID NO: 398886 - RNA, 21 nt, Human
cccuuguaggcaccaucucca

SEQ ID NO: 398887 - RNA, 18 nt, Human
ccucuaccaagcccaggg

SEQ ID NO: 398888 - RNA, 22 nt, Human
ccugcaccacagcuggugcccu

SEQ ID NO: 398889 - RNA, 22 nt, Human
cucccccuccacuccacccugc

SEQ ID NO: 398890 - RNA, 21 nt, Human
cuucacacucgaggucccuuc

SEQ ID NO: 398891 - RNA, 23 nt, Human
cuuccacccucaggucuuggcuc

SEQ ID NO: 398892 - RNA, 18 nt, Human
cuugcugggcacucccca

SEQ ID NO: 398893 - RNA, 21 nt, Human
cuuguaggcaccaucuccaga

SEQ ID NO: 398894 - RNA, 26 nt, Human
ggaggagcuaaggcccagagcucagg

SEQ ID NO: 398895 - RNA, 21 nt, Human
ggagguggcaccgugcaggau

SEQ ID NO: 398896 - RNA, 23 nt, Human
gggcuucuccagagggucuggcg

SEQ ID NO: 398897 - RNA, 18 nt, Human
gggucagaccaggcaggc

SEQ ID NO: 398898 - RNA, 23 nt, Human
uaccaagcccagggaggagcuaa

SEQ ID NO: 398899 - RNA, 24 nt, Human
uagcaccaguagcggguacaccuu

SEQ ID NO: 398900 - RNA, 22 nt, Human
uaggcaccaucuccagaguucu

SEQ ID NO: 398901 - RNA, 25 nt, Human
uaguagcucccccuccacuccaccc

SEQ ID NO: 398902 - RNA, 21 nt, Human
ucaccccuuccucuuuccacu

SEQ ID NO: 398903 - RNA, 24 nt, Human
ucaccccuuccucuuuccacuccc

SEQ ID NO: 398904 - RNA, 22 nt, Human
ucagaccaggcaggcagaggug

SEQ ID NO: 398905 - RNA, 21 nt, Human
ucaggucuuggcuccugcacc

SEQ ID NO: 398906 - RNA, 19 nt, Human
uccacuccacccugccccc

SEQ ID NO: 398907 - RNA, 18 nt, Human
ucccaugagucaaaggcc

SEQ ID NO: 398908 - RNA, 20 nt, Human
ucccccuccacuccacccug

SEQ ID NO: 398909 - RNA, 18 nt, Human
ucccuucccacaggggca

SEQ ID NO: 398910 - RNA, 26 nt, Human
uccuucaccccuuccucuuuccacuc

SEQ ID NO: 398911 - RNA, 21 nt, Human
ucuaagaggacacuuccaccc

SEQ ID NO: 398912 - RNA, 18 nt, Human
ucugugucaggugugggg

SEQ ID NO: 398913 - RNA, 18 nt, Human
ugagcaggaggcuaggcu

SEQ ID NO: 398914 - RNA, 19 nt, Human
ugaguguggagguggcacc

SEQ ID NO: 398915 - RNA, 21 nt, Human
ugaguguggagguggcaccgu

SEQ ID NO: 398916 - RNA, 23 nt, Human
uggauagcaccaguagcggguac

SEQ ID NO: 398917 - RNA, 20 nt, Human
uggcagacagcuccuucacc

SEQ ID NO: 398918 - RNA, 19 nt, Human
uggcuccugcaccacagcu

SEQ ID NO: 398919 - RNA, 19 nt, Human
uuuauugagugccugcucu

SEQ ID NO: 398920 - RNA, 19 nt, Human
aaaaagcccggugcaagag

SEQ ID NO: 398921 - RNA, 20 nt, Human
aaaaagcccggugcaagaga

SEQ ID NO: 398922 - RNA, 21 nt, Human
aaaaagcccggugcaagagag

SEQ ID NO: 398923 - RNA, 20 nt, Human
aaaacacaggccuaugaaca

SEQ ID NO: 398924 - RNA, 25 nt, Human
aaacagaugcgucaagaaguaaaau

SEQ ID NO: 398925 - RNA, 23 nt, Human
aaacaggaagcgaccauucccag

SEQ ID NO: 398926 - RNA, 25 nt, Human
aaacaggaagcgaccauucccagag

SEQ ID NO: 398927 - RNA, 21 nt, Human
aacaccuuauaagugcauaaa

SEQ ID NO: 398928 - RNA, 22 nt, Human
aaccacccccccaacucagccu

SEQ ID NO: 398929 - RNA, 21 nt, Human
aagccgaggacagaugcagga

SEQ ID NO: 398930 - RNA, 18 nt, Human
aaggaguccagcccacaa

SEQ ID NO: 398931 - RNA, 21 nt, Human
aaggaguccagcccacaaggc

SEQ ID NO: 398932 - RNA, 26 nt, Human
aaggcgaggcuuaaaaggaaaaggga

SEQ ID NO: 398933 - RNA, 19 nt, Human
aaguguaaacacugugacc

SEQ ID NO: 398934 - RNA, 28 nt, Human
accccagaagcuccuccucccuuaccuc

SEQ ID NO: 398935 - RNA, 23 nt, Human
agacagacaaacccaaggagggu

SEQ ID NO: 398936 - RNA, 18 nt, Human
agacuuggaagcgaagug

SEQ ID NO: 398937 - RNA, 24 nt, Human
agacuuggaagcgaagugguaaaa

SEQ ID NO: 398938 - RNA, 20 nt, Human
agaugcaggagccagagaua

SEQ ID NO: 398939 - RNA, 22 nt, Human
agcaaccacccccccaacucag

SEQ ID NO: 398940 - RNA, 19 nt, Human
aggcaacagcggcuccugg

SEQ ID NO: 398941 - RNA, 18 nt, Human
aggccaggagggugggga

SEQ ID NO: 398942 - RNA, 20 nt, Human
aggggagggggagaggaagg

SEQ ID NO: 398943 - RNA, 22 nt, Human
aggggagggggagaggaaggcc

SEQ ID NO: 398944 - RNA, 19 nt, Human
aggggggcgcguguccuug

SEQ ID NO: 398945 - RNA, 24 nt, Human
aggguggggaggaguccugggucu

SEQ ID NO: 398946 - RNA, 18 nt, Human
aguucaggcuugcccuuc

SEQ ID NO: 398947 - RNA, 22 nt, Human
augcaggagccagagauagagg

SEQ ID NO: 398948 - RNA, 23 nt, Human
auucagaugacagcccuggggac

SEQ ID NO: 398949 - RNA, 21 nt, Human
caaaggaguccagcccacaag

SEQ ID NO: 398950 - RNA, 18 nt, Human
cacagggcagaaugggca

SEQ ID NO: 398951 - RNA, 19 nt, Human
caccaggagggacaguaac

SEQ ID NO: 398952 - RNA, 20 nt, Human
caccaggagggacaguaaca

SEQ ID NO: 398953 - RNA, 25 nt, Human
caccaggcgaaaaagcccggugcaa

SEQ ID NO: 398954 - RNA, 18 nt, Human
cacccccccaacucagcc

SEQ ID NO: 398955 - RNA, 18 nt, Human
cacccccccaacucagcc

SEQ ID NO: 398956 - RNA, 23 nt, Human
cagaugacagcccuggggacccc

SEQ ID NO: 398957 - RNA, 18 nt, Human
caggagccagagauagag

SEQ ID NO: 398958 - RNA, 21 nt, Human
caguguggccaugaccuugug

SEQ ID NO: 398959 - RNA, 25 nt, Human
ccacccccccaacucagccuucuua

SEQ ID NO: 398960 - RNA, 19 nt, Human
cccaacucagccuucuuag

SEQ ID NO: 398961 - RNA, 21 nt, Human
cccagagacggacagacagac

SEQ ID NO: 398962 - RNA, 25 nt, Human
cccaugccucaacauaccccuuugg

SEQ ID NO: 398963 - RNA, 18 nt, Human
ccccagaagcuccuccuc

SEQ ID NO: 398964 - RNA, 21 nt, Human
ccccagaagcuccuccucccu

SEQ ID NO: 398965 - RNA, 25 nt, Human
ccccagaagcuccuccucccuuacc

SEQ ID NO: 398966 - RNA, 24 nt, Human
ccccccaacucagccuucuuagac

SEQ ID NO: 398967 - RNA, 18 nt, Human
cccccccaccccucaaau

SEQ ID NO: 398968 - RNA, 20 nt, Human
ccccugagugggccuggggu

SEQ ID NO: 398969 - RNA, 24 nt, Human
cccuuuggggcgugcgagggcagu

SEQ ID NO: 398970 - RNA, 19 nt, Human
ccuaugaacaacugcuaua

SEQ ID NO: 398971 - RNA, 22 nt, Human
ccucacuuugaacugggccaaa

SEQ ID NO: 398972 - RNA, 20 nt, Human
ccuuguguuugugcuggacc

SEQ ID NO: 398973 - RNA, 24 nt, Human
cgaaggagaacagugucggcacaa

SEQ ID NO: 398974 - RNA, 21 nt, Human
cgaagugcgcagaaaggcuaa

SEQ ID NO: 398975 - RNA, 20 nt, Human
cggacagacagacaaaccca

SEQ ID NO: 398976 - RNA, 21 nt, Human
cggccuguuggagcccucccc

SEQ ID NO: 398977 - RNA, 22 nt, Human
cggcucggggggcagcuagcag

SEQ ID NO: 398978 - RNA, 20 nt, Human
cucuggggugacaccaggag

SEQ ID NO: 398979 - RNA, 22 nt, Human
cucugucugguugacacucucc

SEQ ID NO: 398980 - RNA, 18 nt, Human
cuggacccagugccaugc

SEQ ID NO: 398981 - RNA, 22 nt, Human
cuggcccuggccccaccggggg

SEQ ID NO: 398982 - RNA, 24 nt, Human
cuggcccuggccccaccggggggc

SEQ ID NO: 398983 - RNA, 22 nt, Human
cuguuggagcccuccccucacu

SEQ ID NO: 398984 - RNA, 18 nt, Human
gaaaaagcccggugcaag

SEQ ID NO: 398985 - RNA, 22 nt, Human
gaaggagaacagugucggcaca

SEQ ID NO: 398986 - RNA, 19 nt, Human
gagaagggguuucccaggg

SEQ ID NO: 398987 - RNA, 24 nt, Human
gagaaucuccuuaagggcucagcu

SEQ ID NO: 398988 - RNA, 19 nt, Human
gagggagagagggggcgcc

SEQ ID NO: 398989 - RNA, 18 nt, Human
gcagaaaggcuaaaguag

SEQ ID NO: 398990 - RNA, 19 nt, Human
gcagucugaggccaggagg

SEQ ID NO: 398991 - RNA, 20 nt, Human
gcccggugcaagagagcuuc

SEQ ID NO: 398992 - RNA, 19 nt, Human
gccgaggacagaugcagga

SEQ ID NO: 398993 - RNA, 22 nt, Human
gcgaaacacugucacucaacag

SEQ ID NO: 398994 - RNA, 21 nt, Human
gcgagggaggggaggggaggg

SEQ ID NO: 398995 - RNA, 19 nt, Human
ggaacaaggcgaggcuuaa

SEQ ID NO: 398996 - RNA, 18 nt, Human
ggacagacagacaaaccc

SEQ ID NO: 398997 - RNA, 20 nt, Human
ggagggacaguaacaccacc

SEQ ID NO: 398998 - RNA, 23 nt, Human
ggagggagagagggggcgccgua

SEQ ID NO: 398999 - RNA, 19 nt, Human
ggaggggagggagagaggg

SEQ ID NO: 399000 - RNA, 21 nt, Human
ggagggggagaggaaggccag

SEQ ID NO: 399001 - RNA, 18 nt, Human
ggcaguguuccccuccug

SEQ ID NO: 399002 - RNA, 25 nt, Human
ggcgaggcuuaaaaggaaaagggaa

SEQ ID NO: 399003 - RNA, 22 nt, Human
ggcggcggcgcucgcugcgcuc

SEQ ID NO: 399004 - RNA, 25 nt, Human
gggaaaacaggaagcgaccgguacc

SEQ ID NO: 399005 - RNA, 23 nt, Human
gggaggggagggagagagggggc

SEQ ID NO: 399006 - RNA, 23 nt, Human
gggauguguggugggggccuggc

SEQ ID NO: 399007 - RNA, 21 nt, Human
gggcaguguuccccuccuggg

SEQ ID NO: 399008 - RNA, 21 nt, Human
gggcugggauguguggugggg

SEQ ID NO: 399009 - RNA, 21 nt, Human
ggggaggggagggagagaggg

SEQ ID NO: 399010 - RNA, 23 nt, Human
ggggaggggagggggagaggaag

SEQ ID NO: 399011 - RNA, 24 nt, Human
ggggggcagcuagcaggggcuggg

SEQ ID NO: 399012 - RNA, 18 nt, Human
gggucugcugccagggug

SEQ ID NO: 399013 - RNA, 18 nt, Human
gggugaaugacagcgcga

SEQ ID NO: 399014 - RNA, 22 nt, Human
gggugcagucugaggccaggag

SEQ ID NO: 399015 - RNA, 20 nt, Human
ggguggggaggaguccuggg

SEQ ID NO: 399016 - RNA, 21 nt, Human
ggguggggaggaguccugggu

SEQ ID NO: 399017 - RNA, 20 nt, Human
ggguucuggagaaaugggcu

SEQ ID NO: 399018 - RNA, 24 nt, Human
ggucacagagaagggguuucccag

SEQ ID NO: 399019 - RNA, 19 nt, Human
gguggggaggaguccuggg

SEQ ID NO: 399020 - RNA, 21 nt, Human
guccugggucucaggccucag

SEQ ID NO: 399021 - RNA, 25 nt, Human
gugcuggacccagugccaugcuguu

SEQ ID NO: 399022 - RNA, 19 nt, Human
guguagugugucacagugu

SEQ ID NO: 399023 - RNA, 18 nt, Human
guucagacaggugcggga

SEQ ID NO: 399024 - RNA, 24 nt, Human
guuuggggucugcugccagggugc

SEQ ID NO: 399025 - RNA, 24 nt, Human
uaaaacacaggccuaugaacaacc

SEQ ID NO: 399026 - RNA, 22 nt, Human
uaaauaaacagaugcgucaaga

SEQ ID NO: 399027 - RNA, 23 nt, Human
uaaauuacacaagcacuuuauaa

SEQ ID NO: 399028 - RNA, 24 nt, Human
uaagguccaaaguguaaacacugu

SEQ ID NO: 399029 - RNA, 20 nt, Human
uagaugcccauguguggcuc

SEQ ID NO: 399030 - RNA, 19 nt, Human
uagcuguuggcuguugugu

SEQ ID NO: 399031 - RNA, 18 nt, Human
ucagacaggugcgggacg

SEQ ID NO: 399032 - RNA, 20 nt, Human
uccaaaguguaaacacugug

SEQ ID NO: 399033 - RNA, 22 nt, Human
ucccagagacggacagacagac

SEQ ID NO: 399034 - RNA, 23 nt, Human
ucccuuaccucccuugccuuucu

SEQ ID NO: 399035 - RNA, 18 nt, Human
uccugggucucaggccuc

SEQ ID NO: 399036 - RNA, 21 nt, Human
ucucuggcuucugcuuccccg

SEQ ID NO: 399037 - RNA, 25 nt, Human
ugaaggcaggcacaagucaagaggg

SEQ ID NO: 399038 - RNA, 19 nt, Human
ugaagucaacugucuuccc

SEQ ID NO: 399039 - RNA, 22 nt, Human
ugagugggccuggggucccaca

SEQ ID NO: 399040 - RNA, 21 nt, Human
ugccaugcuguucaggaugag

SEQ ID NO: 399041 - RNA, 27 nt, Human
ugcccaacugagaaucuccuuaagggc

SEQ ID NO: 399042 - RNA, 22 nt, Human
ugccucaacauaccccuuuggu

SEQ ID NO: 399043 - RNA, 23 nt, Human
ugggaggcaacagcggcuccugg

SEQ ID NO: 399044 - RNA, 21 nt, Human
ugggaggggggcgcguguccu

SEQ ID NO: 399045 - RNA, 24 nt, Human
ugggauguguggugggggccuggc

SEQ ID NO: 399046 - RNA, 21 nt, Human
ugggucacagagaagggguuu

SEQ ID NO: 399047 - RNA, 19 nt, Human
ugggugcagucugaggcca

SEQ ID NO: 399048 - RNA, 22 nt, Human
ugggugcagucugaggccagga

SEQ ID NO: 399049 - RNA, 18 nt, Human
ugguguagugugucacag

SEQ ID NO: 399050 - RNA, 23 nt, Human
uguccuugucccuugagcucuuc

SEQ ID NO: 399051 - RNA, 19 nt, Human
ugucggcacaaaugugggg

SEQ ID NO: 399052 - RNA, 18 nt, Human
ugugacccucugucuggu

SEQ ID NO: 399053 - RNA, 21 nt, Human
uguggcucuggggugacacca

SEQ ID NO: 399054 - RNA, 22 nt, Human
uguggcucuggggugacaccag

SEQ ID NO: 399055 - RNA, 18 nt, Human
ugugugaugagaaguggg

SEQ ID NO: 399056 - RNA, 18 nt, Human
uguuguagcuguuggcug

SEQ ID NO: 399057 - RNA, 23 nt, Human
uuaaaacacaggccuaugaacaa

SEQ ID NO: 399058 - RNA, 21 nt, Human
uuaacacccccccaccccuca

SEQ ID NO: 399059 - RNA, 19 nt, Human
uuccccuccugggugcagu

SEQ ID NO: 399060 - RNA, 18 nt, Human
uucccggccuguuggagc

SEQ ID NO: 399061 - RNA, 20 nt, Human
uuuauuuauuuuuuucacau

SEQ ID NO: 399062 - RNA, 20 nt, Human
uuugugcuggacccagugcc

SEQ ID NO: 399063 - RNA, 20 nt, Human
aaggaggccaccucaaguuc

SEQ ID NO: 399064 - RNA, 22 nt, Human
acaaaauggacacuacacguga

SEQ ID NO: 399065 - RNA, 22 nt, Human
agacagaggcauuauuuuugaa

SEQ ID NO: 399066 - RNA, 25 nt, Human
agagcuccggcggcggcggcggcgg

SEQ ID NO: 399067 - RNA, 24 nt, Human
aggcagccugaagaagguaggaaa

SEQ ID NO: 399068 - RNA, 21 nt, Human
auaucacaaauguucacaauu

SEQ ID NO: 399069 - RNA, 20 nt, Human
augagguccucaaugucuau

SEQ ID NO: 399070 - RNA, 22 nt, Human
caaaagaacagauaacuaucgu

SEQ ID NO: 399071 - RNA, 21 nt, Human
caaauguucacaauaucaaug

SEQ ID NO: 399072 - RNA, 22 nt, Human
caacugagaggcaaagaugcac

SEQ ID NO: 399073 - RNA, 23 nt, Human
caaugcaagaaaaaauacagaga

SEQ ID NO: 399074 - RNA, 24 nt, Human
cacaauagcaauuaauuggggaaa

SEQ ID NO: 399075 - RNA, 33 nt, Human
cacaauagcaauuaauuggggaaaaacaaaaag

SEQ ID NO: 399076 - RNA, 18 nt, Human
caccgaugaugaguugca

SEQ ID NO: 399077 - RNA, 22 nt, Human
cacucuguggcacaacagggcu

SEQ ID NO: 399078 - RNA, 22 nt, Human
cagagcuccggcggcggcggcg

SEQ ID NO: 399079 - RNA, 23 nt, Human
caugucuuaggcagccugaagaa

SEQ ID NO: 399080 - RNA, 25 nt, Human
caugucuuaggcagccugaagaagg

SEQ ID NO: 399081 - RNA, 19 nt, Human
ccaaaugagauuaagucaa

SEQ ID NO: 399082 - RNA, 23 nt, Human
ccaaguacagauggaggggcugg

SEQ ID NO: 399083 - RNA, 26 nt, Human
cccacacuacaugcagggcccaaagg

SEQ ID NO: 399084 - RNA, 19 nt, Human
cggcggcggcggcggcggc

SEQ ID NO: 399085 - RNA, 18 nt, Human
cggcgggcgggcgcgcgg

SEQ ID NO: 399086 - RNA, 18 nt, Human
cuacacucuguggcacaa

SEQ ID NO: 399087 - RNA, 22 nt, Human
cucccacacuacaugcagggcc

SEQ ID NO: 399088 - RNA, 19 nt, Human
cucuguggcacaacagggc

SEQ ID NO: 399089 - RNA, 18 nt, Human
gacuuguucccccuucac

SEQ ID NO: 399090 - RNA, 22 nt, Human
gacuuguucccccuucacacuc

SEQ ID NO: 399091 - RNA, 21 nt, Human
gcacguugugggguaaggggu

SEQ ID NO: 399092 - RNA, 21 nt, Human
gcaggcggcgggcgggcgcgc

SEQ ID NO: 399093 - RNA, 21 nt, Human
gcggcggcggcggcaggcggc

SEQ ID NO: 399094 - RNA, 28 nt, Human
gcggcggcggcggcaggcggcgggcgac

SEQ ID NO: 399095 - RNA, 21 nt, Human
gcggcggcggcggcggcaggc

SEQ ID NO: 399096 - RNA, 20 nt, Human
gcggcggcggcggcggcggc

SEQ ID NO: 399097 - RNA, 21 nt, Human
gcggcggcggcggcggcggca

SEQ ID NO: 399098 - RNA, 19 nt, Human
gcgggcgggcgcgcgggag

SEQ ID NO: 399099 - RNA, 21 nt, Human
gcgggcgggcgcgcgggaggg

SEQ ID NO: 399100 - RNA, 20 nt, Human
ggaccaaguacagauggagg

SEQ ID NO: 399101 - RNA, 21 nt, Human
ggaccaaguacagauggaggg

SEQ ID NO: 399102 - RNA, 22 nt, Human
ggccagcgauggugugauaacc

SEQ ID NO: 399103 - RNA, 20 nt, Human
ggcggcggcggcggcggcgg

SEQ ID NO: 399104 - RNA, 22 nt, Human
gggaaaaacaaaauaucauggc

SEQ ID NO: 399105 - RNA, 20 nt, Human
gggcccaaaggggccagcga

SEQ ID NO: 399106 - RNA, 20 nt, Human
guaacaagcaaggaggccac

SEQ ID NO: 399107 - RNA, 24 nt, Human
guggcacaacagggcuucacaaaa

SEQ ID NO: 399108 - RNA, 23 nt, Human
uaacaggagccucccacacuaca

SEQ ID NO: 399109 - RNA, 21 nt, Human
uacacauacccagguauguac

SEQ ID NO: 399110 - RNA, 21 nt, Human
uaccacagugaggagcuaaca

SEQ ID NO: 399111 - RNA, 22 nt, Human
uacccagguauguaacaagcaa

SEQ ID NO: 399112 - RNA, 25 nt, Human
uaucauggccuucacaagaagcaac

SEQ ID NO: 399113 - RNA, 23 nt, Human
uauuuugacuuguucccccuuca

SEQ ID NO: 399114 - RNA, 21 nt, Human
uccggcggcggcggcggcggc

SEQ ID NO: 399115 - RNA, 23 nt, Human
uccucauggacaauuauugaagu

SEQ ID NO: 399116 - RNA, 25 nt, Human
ucucuuauuccgucauucuugaaag

SEQ ID NO: 399117 - RNA, 18 nt, Human
ugacgugggcugaaaggu

SEQ ID NO: 399118 - RNA, 22 nt, Human
ugcacuaaacugccuacacaua

SEQ ID NO: 399119 - RNA, 19 nt, Human
ugcagggggaccuggcuac

SEQ ID NO: 399120 - RNA, 22 nt, Human
uggcacaacagggcuucacaaa

SEQ ID NO: 399121 - RNA, 24 nt, Human
uggcacaacagggcuucacaaaau

SEQ ID NO: 399122 - RNA, 20 nt, Human
uuuuuuuuuuuuuuuugcuu

SEQ ID NO: 399123 - RNA, 24 nt, Human
uuuuuuuuuuuuuuuugcuuguaa

SEQ ID NO: 399124 - RNA, 19 nt, Human
aaaaaaagacaacaaauaa

SEQ ID NO: 399125 - RNA, 23 nt, Human
aaaaauagcagaaccucgauggc

SEQ ID NO: 399126 - RNA, 25 nt, Human
aagcugguuggaaagaaggaauaac

SEQ ID NO: 399127 - RNA, 22 nt, Human
agaagaaguuuuaugaaaagaa

SEQ ID NO: 399128 - RNA, 24 nt, Human
agagaagaaguuuuaugaaaagaa

SEQ ID NO: 399129 - RNA, 23 nt, Human
agcaaggcagcaaaaaaagacaa

SEQ ID NO: 399130 - RNA, 21 nt, Human
caaaaaaagacaacaaauaac

SEQ ID NO: 399131 - RNA, 19 nt, Human
caaauaacaauacuuagga

SEQ ID NO: 399132 - RNA, 19 nt, Human
caagcaacucaagcaaggc

SEQ ID NO: 399133 - RNA, 28 nt, Human
caagcaaggcagcaaaaaaagacaacaa

SEQ ID NO: 399134 - RNA, 25 nt, Human
cagcaaaaaaagacaacaaauaaca

SEQ ID NO: 399135 - RNA, 19 nt, Human
cauaaaagaacccuagcca

SEQ ID NO: 399136 - RNA, 22 nt, Human
ccucuuaaaaacagaaauuggu

SEQ ID NO: 399137 - RNA, 18 nt, Human
cuggggugguacgacaca

SEQ ID NO: 399138 - RNA, 19 nt, Human
cuggggugguacgacacag

SEQ ID NO: 399139 - RNA, 18 nt, Human
gaaccaaauuucugugaa

SEQ ID NO: 399140 - RNA, 18 nt, Human
gcaaaaaaagacaacaaa

SEQ ID NO: 399141 - RNA, 21 nt, Human
gcaacucaagcaaggcagcaa

SEQ ID NO: 399142 - RNA, 21 nt, Human
guccuuguaauugucuccaau

SEQ ID NO: 399143 - RNA, 26 nt, Human
uaacaauacuuaggauacaucaauca

SEQ ID NO: 399144 - RNA, 22 nt, Human
uacgacacaggucagcaaucaa

SEQ ID NO: 399145 - RNA, 23 nt, Human
uauacauucucccugaccugaag

SEQ ID NO: 399146 - RNA, 23 nt, Human
uauggcaguacaugugacuuuau

SEQ ID NO: 399147 - RNA, 22 nt, Human
ucaaaagcuccucacugccucc

SEQ ID NO: 399148 - RNA, 21 nt, Human
ucacugccuccuucacggggc

SEQ ID NO: 399149 - RNA, 19 nt, Human
ucgauggcaauggacauuu

SEQ ID NO: 399150 - RNA, 18 nt, Human
ucucaaaaauagcagaac

SEQ ID NO: 399151 - RNA, 18 nt, Human
ugaaaauaacaaaauucu

SEQ ID NO: 399152 - RNA, 20 nt, Human
ugcuuucuuccuuugauuua

SEQ ID NO: 399153 - RNA, 20 nt, Human
uggaaagaaggaauaacugc

SEQ ID NO: 399154 - RNA, 21 nt, Human
uggaaagaaggaauaacugcc

SEQ ID NO: 399155 - RNA, 24 nt, Human
ugguuggaaagaaggaauaacugc

SEQ ID NO: 399156 - RNA, 23 nt, Human
uuauacauucucccugaccugaa

SEQ ID NO: 399157 - RNA, 23 nt, Human
uucaaggguuuuuggccagagag

SEQ ID NO: 399158 - RNA, 22 nt, Human
uuuauaaaucaaauuuguuaag

SEQ ID NO: 399159 - RNA, 20 nt, Human
agcguccaggaaggagcagg

SEQ ID NO: 399160 - RNA, 18 nt, Human
agggagugagcguccagg

SEQ ID NO: 399161 - RNA, 18 nt, Human
caggaaggacaggcggug

SEQ ID NO: 399162 - RNA, 18 nt, Human
uaacccggcggucagugg

SEQ ID NO: 399163 - RNA, 26 nt, Human
aaaccagauaaccuugacugggaagg

SEQ ID NO: 399164 - RNA, 18 nt, Human
aaauucacagugccuucc

SEQ ID NO: 399165 - RNA, 23 nt, Human
aagaaaaauaacagucaagagga

SEQ ID NO: 399166 - RNA, 20 nt, Human
acacuacaucaauagcaaag

SEQ ID NO: 399167 - RNA, 24 nt, Human
acucucugccugucagcagaacag

SEQ ID NO: 399168 - RNA, 20 nt, Human
agaacagagagucauaaaac

SEQ ID NO: 399169 - RNA, 24 nt, Human
aggcacaaacgaaaacuaagacuu

SEQ ID NO: 399170 - RNA, 19 nt, Human
caagagggaaaguaugaac

SEQ ID NO: 399171 - RNA, 21 nt, Human
caagcaacuuucuaauucaca

SEQ ID NO: 399172 - RNA, 22 nt, Human
cacaaacgaaaacuaagacuua

SEQ ID NO: 399173 - RNA, 21 nt, Human
cacagugccuuccaaaggccc

SEQ ID NO: 399174 - RNA, 23 nt, Human
cacagugccuuccaaaggccccc

SEQ ID NO: 399175 - RNA, 18 nt, Human
cagcagaacagagaguca

SEQ ID NO: 399176 - RNA, 20 nt, Human
ccagcagauuuucuacaagu

SEQ ID NO: 399177 - RNA, 19 nt, Human
ccagccaagcaacuuucua

SEQ ID NO: 399178 - RNA, 27 nt, Human
cccgagacccugcaccaccgcaccggg

SEQ ID NO: 399179 - RNA, 19 nt, Human
ccuaaggaaaauacaacaa

SEQ ID NO: 399180 - RNA, 21 nt, Human
ccucaauuuggaggcaaagaa

SEQ ID NO: 399181 - RNA, 24 nt, Human
cuaaaaacaguacucugaauagaa

SEQ ID NO: 399182 - RNA, 21 nt, Human
cuacaaguuaauuuaaacacg

SEQ ID NO: 399183 - RNA, 23 nt, Human
gcaccgggcgauuggaacacaga

SEQ ID NO: 399184 - RNA, 24 nt, Human
gccauggugguuugcugcaccuau

SEQ ID NO: 399185 - RNA, 19 nt, Human
ggauagaagguggacuuag

SEQ ID NO: 399186 - RNA, 21 nt, Human
guagagaggaauaggcccaca

SEQ ID NO: 399187 - RNA, 22 nt, Human
uaaauguccuuaaagguagaga

SEQ ID NO: 399188 - RNA, 20 nt, Human
uaaccuugacugggaaggag

SEQ ID NO: 399189 - RNA, 19 nt, Human
uacaaucaaaccagauaac

SEQ ID NO: 399190 - RNA, 27 nt, Human
uacacuguuaucaccaucuggcaaccc

SEQ ID NO: 399191 - RNA, 23 nt, Human
uacaucaauagcaaagucagagg

SEQ ID NO: 399192 - RNA, 23 nt, Human
uagcuuucucaguggaaaacaac

SEQ ID NO: 399193 - RNA, 23 nt, Human
ucaaaggcacaaacgaaaacuaa

SEQ ID NO: 399194 - RNA, 22 nt, Human
ucacaggggggacccuaaaugu

SEQ ID NO: 399195 - RNA, 24 nt, Human
ucauaauaaaugccucaauuugga

SEQ ID NO: 399196 - RNA, 21 nt, Human
uccccgagucuccccggaaac

SEQ ID NO: 399197 - RNA, 20 nt, Human
uccccggaaacugccgaaaa

SEQ ID NO: 399198 - RNA, 19 nt, Human
ucuaaaaacaguacucuga

SEQ ID NO: 399199 - RNA, 19 nt, Human
ucugaauagaaauguaggg

SEQ ID NO: 399200 - RNA, 18 nt, Human
uggacuuagaacauagca

SEQ ID NO: 399201 - RNA, 25 nt, Human
ugggaaggagccaguucagaggggu

SEQ ID NO: 399202 - RNA, 18 nt, Human
uguaguuuuuuggucuau

SEQ ID NO: 399203 - RNA, 19 nt, Human
uuacauagguauacaugug

SEQ ID NO: 399204 - RNA, 19 nt, Human
uuaucaccaucuggcaacc

SEQ ID NO: 399205 - RNA, 23 nt, Human
aacuguuucucaagaauuuccau

SEQ ID NO: 399206 - RNA, 21 nt, Human
acaauaccauauagcucacac

SEQ ID NO: 399207 - RNA, 19 nt, Human
acacaauaccauauagcuc

SEQ ID NO: 399208 - RNA, 20 nt, Human
aggaggaacaugaaguaaua

SEQ ID NO: 399209 - RNA, 21 nt, Human
caaaauaucaguaccaguaua

SEQ ID NO: 399210 - RNA, 20 nt, Human
cagccgccgcgccgcucgcc

SEQ ID NO: 399211 - RNA, 21 nt, Human
cauauucuuaaguacucacgu

SEQ ID NO: 399212 - RNA, 18 nt, Human
ccgccgcgccgcucgccc

SEQ ID NO: 399213 - RNA, 21 nt, Human
ccuucaaaaaaaauuuacaca

SEQ ID NO: 399214 - RNA, 20 nt, Human
cgccgcgccgcucgcccuuc

SEQ ID NO: 399215 - RNA, 18 nt, Human
gaaaggaggaacaugaag

SEQ ID NO: 399216 - RNA, 19 nt, Human
uacagugcagagcaagaau

SEQ ID NO: 399217 - RNA, 19 nt, Human
uaguaauuuagaaaggagg

SEQ ID NO: 399218 - RNA, 21 nt, Human
uccauuuuccuucaaaaaaaa

SEQ ID NO: 399219 - RNA, 22 nt, Human
uuuuuuuuuuuuuugagaugga

SEQ ID NO: 399220 - RNA, 18 nt, Human
uuuuuuuuuuuuuuuuug

SEQ ID NO: 399221 - RNA, 23 nt, Human
aaacacccaacccccgcuucccc

SEQ ID NO: 399222 - RNA, 28 nt, Human
aaacuaccauagccaagacuaaagacac

SEQ ID NO: 399223 - RNA, 19 nt, Human
aacccccgcuuccccaggu

SEQ ID NO: 399224 - RNA, 23 nt, Human
aaggguuuuuacugaaaggaucc

SEQ ID NO: 399225 - RNA, 21 nt, Human
acccaacccccgcuuccccag

SEQ ID NO: 399226 - RNA, 21 nt, Human
agcauggugacagugaaacua

SEQ ID NO: 399227 - RNA, 18 nt, Human
aggauccauggggggaug

SEQ ID NO: 399228 - RNA, 18 nt, Human
auagccaagacuaaagac

SEQ ID NO: 399229 - RNA, 20 nt, Human
cagguagggcugacugggca

SEQ ID NO: 399230 - RNA, 20 nt, Human
ccauagccaagacuaaagac

SEQ ID NO: 399231 - RNA, 22 nt, Human
ccauagccaagacuaaagacac

SEQ ID NO: 399232 - RNA, 19 nt, Human
cccgcacaaaggucgaccc

SEQ ID NO: 399233 - RNA, 22 nt, Human
cccgcugcgcccugggcaggcc

SEQ ID NO: 399234 - RNA, 20 nt, Human
ccgcugcgcccugggcaggc

SEQ ID NO: 399235 - RNA, 21 nt, Human
cguaaacagaguccugggucc

SEQ ID NO: 399236 - RNA, 23 nt, Human
gaaacuaccauagccaagacuaa

SEQ ID NO: 399237 - RNA, 23 nt, Human
gagcauggugacagugaaacuac

SEQ ID NO: 399238 - RNA, 18 nt, Human
gccaagacuaaagacacc

SEQ ID NO: 399239 - RNA, 19 nt, Human
ggggggaugauggguaagu

SEQ ID NO: 399240 - RNA, 19 nt, Human
guaaguucuggaaggggua

SEQ ID NO: 399241 - RNA, 20 nt, Human
uaaaacacccaacccccgcu

SEQ ID NO: 399242 - RNA, 23 nt, Human
uaaaacacccaacccccgcuucc

SEQ ID NO: 399243 - RNA, 24 nt, Human
uccuggguccugaguccacagcuc

SEQ ID NO: 399244 - RNA, 19 nt, Human
ucucuaaaacacccaaccc

SEQ ID NO: 399245 - RNA, 23 nt, Human
ugaaacuaccauagccaagacua

SEQ ID NO: 399246 - RNA, 22 nt, Human
uggaccccggcucagccccgac

SEQ ID NO: 399247 - RNA, 20 nt, Human
uggguccugaguccacagcu

SEQ ID NO: 399248 - RNA, 21 nt, Human
uggguccugaguccacagcuc

SEQ ID NO: 399249 - RNA, 25 nt, Human
aaaaaguuuaaauuauacccacuga

SEQ ID NO: 399250 - RNA, 20 nt, Human
aaaagucugugcaaacuaca

SEQ ID NO: 399251 - RNA, 24 nt, Human
aacauucucaagaaaaaaaaaccc

SEQ ID NO: 399252 - RNA, 18 nt, Human
aaccuacggccugaaccu

SEQ ID NO: 399253 - RNA, 23 nt, Human
aguaacauucucaagaaaaaaaa

SEQ ID NO: 399254 - RNA, 18 nt, Human
cacuaugcuuuucugaag

SEQ ID NO: 399255 - RNA, 19 nt, Human
ccauuggaaaccuguaaca

SEQ ID NO: 399256 - RNA, 24 nt, Human
ccgccgccgcccccgcgggggucu

SEQ ID NO: 399257 - RNA, 24 nt, Human
ccucuuuaguacuaaaauaagggu

SEQ ID NO: 399258 - RNA, 19 nt, Human
ccugaaccuuaaaaaaaaa

SEQ ID NO: 399259 - RNA, 25 nt, Human
ccugaaccuuaaaaaaaaaucucua

SEQ ID NO: 399260 - RNA, 22 nt, Human
ccuuacagucugcugcuuuacc

SEQ ID NO: 399261 - RNA, 23 nt, Human
cggccgccgccgcccccgcgggg

SEQ ID NO: 399262 - RNA, 25 nt, Human
cuaaaauaaggguuuaucagucuac

SEQ ID NO: 399263 - RNA, 22 nt, Human
gaaccuacggccugaaccuuaa

SEQ ID NO: 399264 - RNA, 19 nt, Human
gagugaccaucagugaccu

SEQ ID NO: 399265 - RNA, 21 nt, Human
gccauuggaaaccuguaacaa

SEQ ID NO: 399266 - RNA, 25 nt, Human
gccgcccccgcgggggucuccgcgc

SEQ ID NO: 399267 - RNA, 21 nt, Human
ggaauacuuuaguccaaaagc

SEQ ID NO: 399268 - RNA, 26 nt, Human
guugcaauuggcuaaguugucaacuu

SEQ ID NO: 399269 - RNA, 21 nt, Human
uaaggaaaagugcccuaaaaa

SEQ ID NO: 399270 - RNA, 23 nt, Human
uacagauuuucuuuaaaaaguuu

SEQ ID NO: 399271 - RNA, 22 nt, Human
uacauuagcgcccuacugaaag

SEQ ID NO: 399272 - RNA, 21 nt, Human
uagcgcccuacugaaaggaag

SEQ ID NO: 399273 - RNA, 21 nt, Human
uaggagucuaccaauguggca

SEQ ID NO: 399274 - RNA, 19 nt, Human
ucucaagaaaaaaaaaccc

SEQ ID NO: 399275 - RNA, 21 nt, Human
ucucuaaagaccuuacagucu

SEQ ID NO: 399276 - RNA, 18 nt, Human
ugaagcuuuucaucugag

SEQ ID NO: 399277 - RNA, 19 nt, Human
ugugcaaacuacaacauga

SEQ ID NO: 399278 - RNA, 21 nt, Human
uuaugcauaaaagucugugca

SEQ ID NO: 399279 - RNA, 22 nt, Human
uuggcuaaguugucaacuguau

SEQ ID NO: 399280 - RNA, 23 nt, Human
accaccucuucucugagguuguu

SEQ ID NO: 399281 - RNA, 19 nt, Human
acccgcuccagcucuccuu

SEQ ID NO: 399282 - RNA, 21 nt, Human
aggaaacacuguccgccccau

SEQ ID NO: 399283 - RNA, 21 nt, Human
cacaauagucagucaaggaaa

SEQ ID NO: 399284 - RNA, 21 nt, Human
cagcucuccuucgcuuagccu

SEQ ID NO: 399285 - RNA, 18 nt, Human
cccccgcucuuaguucac

SEQ ID NO: 399286 - RNA, 18 nt, Human
cccgggggccugaguggg

SEQ ID NO: 399287 - RNA, 18 nt, Human
ccuccgaauuccagcggg

SEQ ID NO: 399288 - RNA, 25 nt, Human
ccuugcucuaaaccaccucuucucu

SEQ ID NO: 399289 - RNA, 22 nt, Human
cgcuccagcucuccuucgcuua

SEQ ID NO: 399290 - RNA, 21 nt, Human
cuccgcuccgccggagagaga

SEQ ID NO: 399291 - RNA, 19 nt, Human
cucuaaaccaccucuucuc

SEQ ID NO: 399292 - RNA, 23 nt, Human
cucucugccccauuacccagggg

SEQ ID NO: 399293 - RNA, 20 nt, Human
gcccgggggccugagugggg

SEQ ID NO: 399294 - RNA, 22 nt, Human
ucgcuuagccuuugccccaggu

SEQ ID NO: 399295 - RNA, 22 nt, Human
ucucugccccauuacccagggg

SEQ ID NO: 399296 - RNA, 22 nt, Human
ugcucuaaaccaccucuucucu

SEQ ID NO: 399297 - RNA, 19 nt, Human
ugggggccauggucuccgc

SEQ ID NO: 399298 - RNA, 25 nt, Human
uuaguucacccgcuccagcucuccu

SEQ ID NO: 399299 - RNA, 21 nt, Human
uucacccgcuccagcucuccu

SEQ ID NO: 399300 - RNA, 19 nt, Human
uugcucuaaaccaccucuu

SEQ ID NO: 399301 - RNA, 18 nt, Human
uuugccccaggucccauc

SEQ ID NO: 399302 - RNA, 22 nt, Human
uuugccccaggucccaucucuc

SEQ ID NO: 399303 - RNA, 20 nt, Human
aaaaagaaacaccagugcuc

SEQ ID NO: 399304 - RNA, 18 nt, Human
aacuccaaagcugaggca

SEQ ID NO: 399305 - RNA, 22 nt, Human
aagggguuauaaaaagaaacac

SEQ ID NO: 399306 - RNA, 22 nt, Human
acaaucaaggcucacuguagcc

SEQ ID NO: 399307 - RNA, 18 nt, Human
agcugggaguaggcaugu

SEQ ID NO: 399308 - RNA, 21 nt, Human
agcugggaguaggcaugugcc

SEQ ID NO: 399309 - RNA, 23 nt, Human
aggcucaggugagagacuuguuu

SEQ ID NO: 399310 - RNA, 24 nt, Human
agggauccucccaucucagucucc

SEQ ID NO: 399311 - RNA, 24 nt, Human
agggucucugucacccaagcugga

SEQ ID NO: 399312 - RNA, 22 nt, Human
aguauugggauuacagguguga

SEQ ID NO: 399313 - RNA, 23 nt, Human
agucuccuugggagcugggagua

SEQ ID NO: 399314 - RNA, 21 nt, Human
auaauaaacucccuccgaaag

SEQ ID NO: 399315 - RNA, 21 nt, Human
aucaaaucccuaaaucuccaa

SEQ ID NO: 399316 - RNA, 23 nt, Human
cacaaucaaggcucacuguagcc

SEQ ID NO: 399317 - RNA, 22 nt, Human
caccaugucuggcuugcuucuc

SEQ ID NO: 399318 - RNA, 21 nt, Human
cacuccaggcaugaacuccaa

SEQ ID NO: 399319 - RNA, 23 nt, Human
cagggauccucccaucucagucu

SEQ ID NO: 399320 - RNA, 19 nt, Human
cagggcuccagggauccuc

SEQ ID NO: 399321 - RNA, 23 nt, Human
caguauugggauuacagguguga

SEQ ID NO: 399322 - RNA, 24 nt, Human
caguauugggauuacaggugugag

SEQ ID NO: 399323 - RNA, 27 nt, Human
caucucagucuccuugggagcugggag

SEQ ID NO: 399324 - RNA, 21 nt, Human
caugucggucucaaacuccug

SEQ ID NO: 399325 - RNA, 24 nt, Human
cauguugcccaugucggucucaaa

SEQ ID NO: 399326 - RNA, 27 nt, Human
ccagggauccucccaucucagucuccu

SEQ ID NO: 399327 - RNA, 19 nt, Human
ccaguauugggauuacagg

SEQ ID NO: 399328 - RNA, 23 nt, Human
cccaagcuggagugcagugacac

SEQ ID NO: 399329 - RNA, 23 nt, Human
cccaguauugggauuacaggugu

SEQ ID NO: 399330 - RNA, 21 nt, Human
cccuaaaucuccaaauacugu

SEQ ID NO: 399331 - RNA, 25 nt, Human
ccucccaucucagucuccuugggag

SEQ ID NO: 399332 - RNA, 22 nt, Human
ccugggcucaagcgauacuccc

SEQ ID NO: 399333 - RNA, 20 nt, Human
ccuugggagcugggaguagg

SEQ ID NO: 399334 - RNA, 24 nt, Human
cucaagcgauacucccaccuuggc

SEQ ID NO: 399335 - RNA, 21 nt, Human
cucaauaauaaacucccuccg

SEQ ID NO: 399336 - RNA, 21 nt, Human
cucagucuccuugggagcugg

SEQ ID NO: 399337 - RNA, 19 nt, Human
cucugucacccaagcugga

SEQ ID NO: 399338 - RNA, 23 nt, Human
cucugucacccaagcuggagugc

SEQ ID NO: 399339 - RNA, 20 nt, Human
gaaaaagccucccuaccacc

SEQ ID NO: 399340 - RNA, 20 nt, Human
gagauggggucuugucaugu

SEQ ID NO: 399341 - RNA, 18 nt, Human
gauuacaggugugagcca

SEQ ID NO: 399342 - RNA, 21 nt, Human
gauuacaggugugagccacca

SEQ ID NO: 399343 - RNA, 24 nt, Human
gauuacaggugugagccaccaugu

SEQ ID NO: 399344 - RNA, 24 nt, Human
gcaaagaacagauauauaugccug

SEQ ID NO: 399345 - RNA, 19 nt, Human
gcuggagugcagugacaca

SEQ ID NO: 399346 - RNA, 23 nt, Human
ggaaauaagaaaaagccucccua

SEQ ID NO: 399347 - RNA, 24 nt, Human
ggauuacaggugugagccaccaug

SEQ ID NO: 399348 - RNA, 25 nt, Human
ggccgggcugggcccacgccagggc

SEQ ID NO: 399349 - RNA, 22 nt, Human
guacacccuuaccauauaucaa

SEQ ID NO: 399350 - RNA, 22 nt, Human
guagagauggggucuugucaug

SEQ ID NO: 399351 - RNA, 20 nt, Human
uaagaaaaagccucccuacc

SEQ ID NO: 399352 - RNA, 27 nt, Human
uaauaaacucccuccgaaaguuuagac

SEQ ID NO: 399353 - RNA, 18 nt, Human
uacaggugugagccacca

SEQ ID NO: 399354 - RNA, 18 nt, Human
uacaggugugagccacca

SEQ ID NO: 399355 - RNA, 23 nt, Human
uacaggugugagccaccaugucu

SEQ ID NO: 399356 - RNA, 25 nt, Human
ucaauaauaaacucccuccgaaagu

SEQ ID NO: 399357 - RNA, 18 nt, Human
ucauagauuuguaaacca

SEQ ID NO: 399358 - RNA, 22 nt, Human
uccaaagcugaggcacacugac

SEQ ID NO: 399359 - RNA, 19 nt, Human
uccaggcaugaacuccaaa

SEQ ID NO: 399360 - RNA, 19 nt, Human
ucccaccuuggcuucccag

SEQ ID NO: 399361 - RNA, 21 nt, Human
ucccaguauugggauuacagg

SEQ ID NO: 399362 - RNA, 21 nt, Human
ucccaguauugggauuacagg

SEQ ID NO: 399363 - RNA, 19 nt, Human
uccgaaaguuuagacaggc

SEQ ID NO: 399364 - RNA, 21 nt, Human
uccugggcucaagcgauacuc

SEQ ID NO: 399365 - RNA, 24 nt, Human
uccugggcucaagcgauacuccca

SEQ ID NO: 399366 - RNA, 22 nt, Human
ucucaaacuccugggcucaagc

SEQ ID NO: 399367 - RNA, 19 nt, Human
ucuccuugggagcugggag

SEQ ID NO: 399368 - RNA, 24 nt, Human
ucugucacccaagcuggagugcag

SEQ ID NO: 399369 - RNA, 23 nt, Human
ugaaccacuccaggcaugaacuc

SEQ ID NO: 399370 - RNA, 20 nt, Human
ugacacaaucaaggcucacu

SEQ ID NO: 399371 - RNA, 21 nt, Human
ugaggcacacugaccaagccc

SEQ ID NO: 399372 - RNA, 19 nt, Human
ugccugggccgggcugggc

SEQ ID NO: 399373 - RNA, 22 nt, Human
ugccugggccgggcugggccca

SEQ ID NO: 399374 - RNA, 24 nt, Human
uggagugcagugacacaaucaagg

SEQ ID NO: 399375 - RNA, 21 nt, Human
ugggagcugggaguaggcaug

SEQ ID NO: 399376 - RNA, 18 nt, Human
ugggauuacaggugugag

SEQ ID NO: 399377 - RNA, 22 nt, Human
ugggauuacaggugugagccac

SEQ ID NO: 399378 - RNA, 23 nt, Human
ugggauuacaggugugagccacc

SEQ ID NO: 399379 - RNA, 24 nt, Human
ugggauuacaggugugagccacca

SEQ ID NO: 399380 - RNA, 25 nt, Human
ugggauuacaggugugagccaccau

SEQ ID NO: 399381 - RNA, 21 nt, Human
uggucaucuuucucauucucu

SEQ ID NO: 399382 - RNA, 24 nt, Human
uguagagauggggucuugucaugu

SEQ ID NO: 399383 - RNA, 21 nt, Human
ugugagccaccaugucuggcu

SEQ ID NO: 399384 - RNA, 21 nt, Human
uugggauuacaggugugagcc

SEQ ID NO: 399385 - RNA, 24 nt, Human
uuguagagauggggucuugucaug

SEQ ID NO: 399386 - RNA, 21 nt, Human
uuuaauuuuuuuaauguaucu

SEQ ID NO: 399387 - RNA, 23 nt, Human
uuuggucaucuuucucauucucu

SEQ ID NO: 399388 - RNA, 18 nt, Human
uuuguagagauggggucu

SEQ ID NO: 399389 - RNA, 24 nt, Human
uuuguagagauggggucuugucau

SEQ ID NO: 399390 - RNA, 27 nt, Human
uuuuaauuuuuuuaauguaucuauuua

SEQ ID NO: 399391 - RNA, 24 nt, Human
uuuuuuguagagauggggucuugu

SEQ ID NO: 399392 - RNA, 22 nt, Human
uuuuuuuguagagauggggucu

SEQ ID NO: 399393 - RNA, 22 nt, Human
aagcauucaccagaccacucca

SEQ ID NO: 399394 - RNA, 24 nt, Human
aaucacuugaaccugggaggcgga

SEQ ID NO: 399395 - RNA, 22 nt, Human
accacugcacuccagccugggc

SEQ ID NO: 399396 - RNA, 24 nt, Human
acugcaccacgcagacuaaaacag

SEQ ID NO: 399397 - RNA, 24 nt, Human
acugcacuccagccugggcaacag

SEQ ID NO: 399398 - RNA, 24 nt, Human
acugcacuccagccugggcaacag

SEQ ID NO: 399399 - RNA, 18 nt, Human
agaaacaguuucugacuu

SEQ ID NO: 399400 - RNA, 22 nt, Human
agaaucacuugaaccugggagg

SEQ ID NO: 399401 - RNA, 21 nt, Human
agccugggcaacagaguaaga

SEQ ID NO: 399402 - RNA, 23 nt, Human
aggaggccgaggcaggagaauca

SEQ ID NO: 399403 - RNA, 20 nt, Human
aggcaaaguguaccuuuucu

SEQ ID NO: 399404 - RNA, 22 nt, Human
aggcaggagaaucacuugaacc

SEQ ID NO: 399405 - RNA, 24 nt, Human
aggcaggagaaucacuugaaccug

SEQ ID NO: 399406 - RNA, 24 nt, Human
aggccgaggcaggagaaucacuug

SEQ ID NO: 399407 - RNA, 21 nt, Human
aggcggagguugcagagagcc

SEQ ID NO: 399408 - RNA, 24 nt, Human
aggcggagguugcagagagccgag

SEQ ID NO: 399409 - RNA, 21 nt, Human
aggggagagaguggcucugca

SEQ ID NO: 399410 - RNA, 24 nt, Human
aucgcaccacugcacuccagccug

SEQ ID NO: 399411 - RNA, 28 nt, Human
aucgcaccacugcacuccagccugggca

SEQ ID NO: 399412 - RNA, 19 nt, Human
caaaccgaggucuaucugu

SEQ ID NO: 399413 - RNA, 28 nt, Human
caccagaccacuccacguggacaguucc

SEQ ID NO: 399414 - RNA, 20 nt, Human
cacugcaccacgcagacuaa

SEQ ID NO: 399415 - RNA, 19 nt, Human
cacugcacuccagccuggg

SEQ ID NO: 399416 - RNA, 21 nt, Human
cacugcacuccagccugggca

SEQ ID NO: 399417 - RNA, 22 nt, Human
cacugcacuccagccugggcaa

SEQ ID NO: 399418 - RNA, 23 nt, Human
cacugcacuccagccugggcaac

SEQ ID NO: 399419 - RNA, 24 nt, Human
cacugcacuccagccugggcaaca

SEQ ID NO: 399420 - RNA, 25 nt, Human
cacugcacuccagccugggcaacaa

SEQ ID NO: 399421 - RNA, 27 nt, Human
cacugcacuccagccugggcaacagag

SEQ ID NO: 399422 - RNA, 21 nt, Human
cacuugaaccugggaggcgga

SEQ ID NO: 399423 - RNA, 21 nt, Human
cagaguaagaucccaucuggc

SEQ ID NO: 399424 - RNA, 24 nt, Human
cagcuacucaggaggccgaggcag

SEQ ID NO: 399425 - RNA, 22 nt, Human
caggggagagaguggcucugca

SEQ ID NO: 399426 - RNA, 26 nt, Human
caggggguuuuccauuuuugaggcuu

SEQ ID NO: 399427 - RNA, 23 nt, Human
caguagagcugagauucaaaccg

SEQ ID NO: 399428 - RNA, 26 nt, Human
cagugaucuuucauggccugaaaucc

SEQ ID NO: 399429 - RNA, 18 nt, Human
caguuccuuccccacagg

SEQ ID NO: 399430 - RNA, 21 nt, Human
ccacgcagacuaaaacaguga

SEQ ID NO: 399431 - RNA, 20 nt, Human
ccacugcacuccagccuggg

SEQ ID NO: 399432 - RNA, 21 nt, Human
ccacugcacuccagccugggc

SEQ ID NO: 399433 - RNA, 23 nt, Human
ccacugcacuccagccugggcaa

SEQ ID NO: 399434 - RNA, 24 nt, Human
ccacugcacuccagccugggcaac

SEQ ID NO: 399435 - RNA, 24 nt, Human
cgagaucgcaccacugcacuccag

SEQ ID NO: 399436 - RNA, 20 nt, Human
cgaggcaggagaaucacuug

SEQ ID NO: 399437 - RNA, 24 nt, Human
cgaggcaggagaaucacuugaacc

SEQ ID NO: 399438 - RNA, 21 nt, Human
cgcaccacugcacuccagccu

SEQ ID NO: 399439 - RNA, 22 nt, Human
cuaucuguuccacugcaccacg

SEQ ID NO: 399440 - RNA, 27 nt, Human
cucaauuuguuaaaaaaaaaaaaaaaa

SEQ ID NO: 399441 - RNA, 21 nt, Human
cuccacguggacaguuccuuc

SEQ ID NO: 399442 - RNA, 19 nt, Human
cuggcuaguuuggagaggg

SEQ ID NO: 399443 - RNA, 24 nt, Human
cuugaaaauccaucaaggguagaa

SEQ ID NO: 399444 - RNA, 23 nt, Human
gaaauggagcaggggagagagug

SEQ ID NO: 399445 - RNA, 20 nt, Human
gcaccacugcacuccagccu

SEQ ID NO: 399446 - RNA, 24 nt, Human
gcacuccagccugggcaacagagu

SEQ ID NO: 399447 - RNA, 23 nt, Human
gcaggagaaucacuugaaccugg

SEQ ID NO: 399448 - RNA, 19 nt, Human
gccgagaucgcaccacugc

SEQ ID NO: 399449 - RNA, 23 nt, Human
gccugaaaucccagcuacucagg

SEQ ID NO: 399450 - RNA, 24 nt, Human
ggagguugcagagagccgagaucg

SEQ ID NO: 399451 - RNA, 27 nt, Human
ggccgaggcaggagaaucacuugaacc

SEQ ID NO: 399452 - RNA, 18 nt, Human
gguucugcccucauaguu

SEQ ID NO: 399453 - RNA, 20 nt, Human
guuaaaaaaaaaaaaaaagu

SEQ ID NO: 399454 - RNA, 21 nt, Human
guugcagagagccgagaucgc

SEQ ID NO: 399455 - RNA, 22 nt, Human
uaaaaugaaaguucauaugagc

SEQ ID NO: 399456 - RNA, 19 nt, Human
uaacccaccaacuaaacca

SEQ ID NO: 399457 - RNA, 23 nt, Human
uaugagcaaauuuuuuuuaauua

SEQ ID NO: 399458 - RNA, 25 nt, Human
ucaauuuguuaaaaaaaaaaaaaaa

SEQ ID NO: 399459 - RNA, 24 nt, Human
ucacuugaaccugggaggcggagg

SEQ ID NO: 399460 - RNA, 25 nt, Human
ucacuugaaccugggaggcggaggu

SEQ ID NO: 399461 - RNA, 18 nt, Human
ucagaaggucucaguggc

SEQ ID NO: 399462 - RNA, 21 nt, Human
uccacguggacaguuccuucc

SEQ ID NO: 399463 - RNA, 20 nt, Human
uccauuuuugaggcuucugg

SEQ ID NO: 399464 - RNA, 23 nt, Human
ucgcaccacugcacuccagccug

SEQ ID NO: 399465 - RNA, 31 nt, Human
ucuaaacucaauuuguuaaaaaaaaaaaaag

SEQ ID NO: 399466 - RNA, 24 nt, Human
ugaaccugggaggcggagguugca

SEQ ID NO: 399467 - RNA, 25 nt, Human
ugauuccuaaauuucagcaacuccu

SEQ ID NO: 399468 - RNA, 27 nt, Human
ugauuccuaaauuucagcaacuccuuu

SEQ ID NO: 399469 - RNA, 18 nt, Human
uggauuacacucacuucu

SEQ ID NO: 399470 - RNA, 19 nt, Human
uggcucugcagaaacaguu

SEQ ID NO: 399471 - RNA, 24 nt, Human
ugggaggcggagguugcagagagc

SEQ ID NO: 399472 - RNA, 24 nt, Human
uuaaacagcaaggcaaaguguacc

SEQ ID NO: 399473 - RNA, 22 nt, Human
uuccauuuuugaggcuucuggc

SEQ ID NO: 399474 - RNA, 24 nt, Human
uugaaccugggaggcggagguugc

SEQ ID NO: 399475 - RNA, 22 nt, Human
uugcagagagccgagaucgcac

SEQ ID NO: 399476 - RNA, 18 nt, Human
uugcuggguucugcccuc

SEQ ID NO: 399477 - RNA, 21 nt, Human
uuucauggccugaaaucccag

SEQ ID NO: 399478 - RNA, 23 nt, Human
uuuggggcaaugauuccuaaauu

SEQ ID NO: 399479 - RNA, 21 nt, Human
uuuuaauuaacccaccaacua

SEQ ID NO: 399480 - RNA, 20 nt, Human
aagccacugucuuccuccuu

SEQ ID NO: 399481 - RNA, 22 nt, Human
acuccgaaaaucgggaggcaag

SEQ ID NO: 399482 - RNA, 18 nt, Human
agacagagcauguaugug

SEQ ID NO: 399483 - RNA, 22 nt, Human
aggcccuucuccaucccccucc

SEQ ID NO: 399484 - RNA, 21 nt, Human
caucccccuccugguuaggga

SEQ ID NO: 399485 - RNA, 22 nt, Human
caugcauuccaagagaggagac

SEQ ID NO: 399486 - RNA, 22 nt, Human
cauggcccuuccccaacuccga

SEQ ID NO: 399487 - RNA, 18 nt, Human
cccuagggucgaggcucc

SEQ ID NO: 399488 - RNA, 22 nt, Human
cccuuccccaacuccgaaaauc

SEQ ID NO: 399489 - RNA, 24 nt, Human
ccuccuucgguagcugacaagggc

SEQ ID NO: 399490 - RNA, 21 nt, Human
cugucuuccuccuucgguagc

SEQ ID NO: 399491 - RNA, 19 nt, Human
gagaggagacagagcaugu

SEQ ID NO: 399492 - RNA, 21 nt, Human
gcccuucuccaucccccuccu

SEQ ID NO: 399493 - RNA, 21 nt, Human
gcugacaagggccugaaggaa

SEQ ID NO: 399494 - RNA, 20 nt, Human
gggagagaaccuugguuugg

SEQ ID NO: 399495 - RNA, 23 nt, Human
gugaagccacugucuuccuccuu

SEQ ID NO: 399496 - RNA, 23 nt, Human
ucaugcauuccaagagaggagac

SEQ ID NO: 399497 - RNA, 21 nt, Human
ucauggcccuuccccaacucc

SEQ ID NO: 399498 - RNA, 19 nt, Human
ucccuaaaggacaggugaa

SEQ ID NO: 399499 - RNA, 21 nt, Human
ugaaggaaucaaaguucaugc

SEQ ID NO: 399500 - RNA, 19 nt, Human
ugagaggaaagaggggaga

SEQ ID NO: 399501 - RNA, 20 nt, Human
uggaaaaagucuacgagggu

SEQ ID NO: 399502 - RNA, 21 nt, Human
uggaaaaagucuacgagggug

SEQ ID NO: 399503 - RNA, 19 nt, Human
ugguaugugugaaacuggg

SEQ ID NO: 399504 - RNA, 27 nt, Human
ugucugaaccaagauauuugggagggc

SEQ ID NO: 399505 - RNA, 25 nt, Human
ugucuuccuccuucgguagcugaca

SEQ ID NO: 399506 - RNA, 22 nt, Human
aaaaaaagacauaauaaaugua

SEQ ID NO: 399507 - RNA, 21 nt, Human
aaaaaagacauaauaaaugua

SEQ ID NO: 399508 - RNA, 30 nt, Human
aauguacauacacauggucaguguacauag

SEQ ID NO: 399509 - RNA, 19 nt, Human
acacuauaaaauguccaaa

SEQ ID NO: 399510 - RNA, 23 nt, Human
acauaaaacaaagacuacuaaac

SEQ ID NO: 399511 - RNA, 27 nt, Human
caaagacuacuaaacaguccaaaacug

SEQ ID NO: 399512 - RNA, 21 nt, Human
cauacacauggucaguguaca

SEQ ID NO: 399513 - RNA, 20 nt, Human
ccauggguaaagaacaaguc

SEQ ID NO: 399514 - RNA, 23 nt, Human
ccccuguuauaguuaugugccug

SEQ ID NO: 399515 - RNA, 24 nt, Human
cugaggucaaagaucauaauuuau

SEQ ID NO: 399516 - RNA, 23 nt, Human
uaaaaaaagacauaauaaaugua

SEQ ID NO: 399517 - RNA, 20 nt, Human
uaaaacaaagacuacuaaac

SEQ ID NO: 399518 - RNA, 25 nt, Human
uacuacacuauaaaauguccaaaaa

SEQ ID NO: 399519 - RNA, 23 nt, Human
ucaaauaucgagccaacaguacu

SEQ ID NO: 399520 - RNA, 19 nt, Human
uggauaugacuuuauaacc

SEQ ID NO: 399521 - RNA, 23 nt, Human
uggucauuguggaagaaguggau

SEQ ID NO: 399522 - RNA, 18 nt, Human
uguuuuuuuuucuguuuu

SEQ ID NO: 399523 - RNA, 23 nt, Human
uuaugugccuguuuuaucuuccc

SEQ ID NO: 399524 - RNA, 23 nt, Human
uuggcauguacuauguuuuuuuu

SEQ ID NO: 399525 - RNA, 24 nt, Human
uugggucauuugcuguggucauug

SEQ ID NO: 399526 - RNA, 24 nt, Human
uuuucuguuuuuuuuuuuuuuuuu

SEQ ID NO: 399527 - RNA, 24 nt, Human
uuuuuuuuuuuuuuuuuaauuuuu

SEQ ID NO: 399528 - RNA, 24 nt, Human
aagaaaaaacuauauugugugaua

SEQ ID NO: 399529 - RNA, 18 nt, Human
aagcagcagccaaacccg

SEQ ID NO: 399530 - RNA, 24 nt, Human
aaggcgccccgcagcccggcagcc

SEQ ID NO: 399531 - RNA, 20 nt, Human
aauaguuuauuuacauuaca

SEQ ID NO: 399532 - RNA, 25 nt, Human
acagaaaaaacaucaagacaaugua

SEQ ID NO: 399533 - RNA, 20 nt, Human
agcagcagccaaacccgcgc

SEQ ID NO: 399534 - RNA, 18 nt, Human
agcgagagggucguccgc

SEQ ID NO: 399535 - RNA, 22 nt, Human
aggaggagacgggaguccaggg

SEQ ID NO: 399536 - RNA, 20 nt, Human
aggcaggguggagggagagu

SEQ ID NO: 399537 - RNA, 20 nt, Human
aggcggcggcgguggcaggg

SEQ ID NO: 399538 - RNA, 20 nt, Human
aggcggcggcgguggcagug

SEQ ID NO: 399539 - RNA, 22 nt, Human
aggcggcggcgguggcaguggc

SEQ ID NO: 399540 - RNA, 18 nt, Human
agggagcucugggaagcc

SEQ ID NO: 399541 - RNA, 21 nt, Human
aggggcagacgaguggagccc

SEQ ID NO: 399542 - RNA, 19 nt, Human
cagccgccucucgagcucu

SEQ ID NO: 399543 - RNA, 27 nt, Human
caucccgcggacggcggcagcagaggc

SEQ ID NO: 399544 - RNA, 22 nt, Human
cgcagcccggcagccgccucuc

SEQ ID NO: 399545 - RNA, 20 nt, Human
cgggcagcgggcuacugagc

SEQ ID NO: 399546 - RNA, 21 nt, Human
cucugcagcagcaaacggcuu

SEQ ID NO: 399547 - RNA, 18 nt, Human
gaagccggaggacaggag

SEQ ID NO: 399548 - RNA, 18 nt, Human
gcaacucugcagcagcaa

SEQ ID NO: 399549 - RNA, 20 nt, Human
gccccgcagcccggcagccg

SEQ ID NO: 399550 - RNA, 19 nt, Human
gcggcagcagaggcggcgg

SEQ ID NO: 399551 - RNA, 30 nt, Human
gcggcagcagaggcggcggcgguggcagug

SEQ ID NO: 399552 - RNA, 18 nt, Human
ggacaggaggagacggga

SEQ ID NO: 399553 - RNA, 19 nt, Human
ggcggcggcgguggcagug

SEQ ID NO: 399554 - RNA, 19 nt, Human
gggacugggcucagccccg

SEQ ID NO: 399555 - RNA, 23 nt, Human
uacagaaaaaacaucaagacaau

SEQ ID NO: 399556 - RNA, 24 nt, Human
uagcuguaguacauguuuucauug

SEQ ID NO: 399557 - RNA, 24 nt, Human
uauaacaaauacaugggaaagaaa

SEQ ID NO: 399558 - RNA, 24 nt, Human
uauauccauacauaaucaaauaua

SEQ ID NO: 399559 - RNA, 20 nt, Human
ucucuugucuuauucuuuug

SEQ ID NO: 399560 - RNA, 22 nt, Human
ucuuuugucuauaauacuguaa

SEQ ID NO: 399561 - RNA, 18 nt, Human
ugcgccggagacgcggga

SEQ ID NO: 399562 - RNA, 19 nt, Human
ugucuuauucuuuugucua

SEQ ID NO: 399563 - RNA, 26 nt, Human
aaaagacaacacagagaauacuggaa

SEQ ID NO: 399564 - RNA, 27 nt, Human
aaacaauaaacauccaauuacaguuac

SEQ ID NO: 399565 - RNA, 19 nt, Human
aaauggccuuccacgaaga

SEQ ID NO: 399566 - RNA, 21 nt, Human
aacauuaagaaaaaaaugacc

SEQ ID NO: 399567 - RNA, 21 nt, Human
aacccggugcuccuucucucc

SEQ ID NO: 399568 - RNA, 24 nt, Human
aagaaaaucaaacaguaauaaaug

SEQ ID NO: 399569 - RNA, 20 nt, Human
aagcaggaaucugagaucac

SEQ ID NO: 399570 - RNA, 23 nt, Human
aagcaggaaucugagaucacagg

SEQ ID NO: 399571 - RNA, 21 nt, Human
aagcauucauguaacauaguu

SEQ ID NO: 399572 - RNA, 25 nt, Human
aaugaaaaagacaggaggaaaaaaa

SEQ ID NO: 399573 - RNA, 18 nt, Human
aauuucuggaaaguuuaa

SEQ ID NO: 399574 - RNA, 23 nt, Human
acaccagcauggggacgggguga

SEQ ID NO: 399575 - RNA, 26 nt, Human
acagaaaaacaacauauuaaccccca

SEQ ID NO: 399576 - RNA, 19 nt, Human
acauuaagaaaaaaaugac

SEQ ID NO: 399577 - RNA, 21 nt, Human
accagaccaaaaacacacuga

SEQ ID NO: 399578 - RNA, 25 nt, Human
accagaccaaaaacacacugaggac

SEQ ID NO: 399579 - RNA, 24 nt, Human
acccggugcuccuucucuccacaa

SEQ ID NO: 399580 - RNA, 25 nt, Human
agaaacauuuaucccuaaaccaccu

SEQ ID NO: 399581 - RNA, 26 nt, Human
agacaggaggaaaaaaaaagggaccc

SEQ ID NO: 399582 - RNA, 20 nt, Human
agcugggaaguggcgugugu

SEQ ID NO: 399583 - RNA, 19 nt, Human
aggcagaagcauucaugua

SEQ ID NO: 399584 - RNA, 20 nt, Human
agggggagggaggccagggc

SEQ ID NO: 399585 - RNA, 20 nt, Human
agggggagggaggccagggc

SEQ ID NO: 399586 - RNA, 20 nt, Human
aguaccuuucacguggcucc

SEQ ID NO: 399587 - RNA, 25 nt, Human
agugucuaccugaaagacaaauggc

SEQ ID NO: 399588 - RNA, 24 nt, Human
augccccaccgccucccgcaagcu

SEQ ID NO: 399589 - RNA, 19 nt, Human
augggggaccacaggguuc

SEQ ID NO: 399590 - RNA, 22 nt, Human
auucacacgagggccacccacc

SEQ ID NO: 399591 - RNA, 20 nt, Human
auuuuauuuuccauuugaca

SEQ ID NO: 399592 - RNA, 24 nt, Human
caacaaaaccugcuugucucaaac

SEQ ID NO: 399593 - RNA, 26 nt, Human
caacacagagaauacuggaaaugacg

SEQ ID NO: 399594 - RNA, 21 nt, Human
cacaccuguaaaaacaaacac

SEQ ID NO: 399595 - RNA, 22 nt, Human
cacagagaauacuggaaaugac

SEQ ID NO: 399596 - RNA, 23 nt, Human
cacagauauuuguaaaacggcug

SEQ ID NO: 399597 - RNA, 19 nt, Human
caccuguaaaaacaaacac

SEQ ID NO: 399598 - RNA, 25 nt, Human
cagaaaaacaacauauuaaccccca

SEQ ID NO: 399599 - RNA, 22 nt, Human
cagaacucagcuggccagcugc

SEQ ID NO: 399600 - RNA, 18 nt, Human
cagcccaguuugcccuuu

SEQ ID NO: 399601 - RNA, 24 nt, Human
caggacuugaguccuucccuacaa

SEQ ID NO: 399602 - RNA, 21 nt, Human
cagugcugggcaggaacccgg

SEQ ID NO: 399603 - RNA, 21 nt, Human
caguugaaaguaaaacauuua

SEQ ID NO: 399604 - RNA, 23 nt, Human
cauaggacaucccaugaaauuca

SEQ ID NO: 399605 - RNA, 20 nt, Human
caugaaaacaacaacagaac

SEQ ID NO: 399606 - RNA, 26 nt, Human
caugccccaccgccucccgcaagcug

SEQ ID NO: 399607 - RNA, 20 nt, Human
cauuaagaaaaaaaugacaa

SEQ ID NO: 399608 - RNA, 21 nt, Human
cauuacaucaguuagucugua

SEQ ID NO: 399609 - RNA, 21 nt, Human
cauuuaucccuaaaccaccuc

SEQ ID NO: 399610 - RNA, 23 nt, Human
ccacccacugcuggacccgacuc

SEQ ID NO: 399611 - RNA, 19 nt, Human
ccacggggauucacacgag

SEQ ID NO: 399612 - RNA, 21 nt, Human
ccacggggauucacacgaggg

SEQ ID NO: 399613 - RNA, 22 nt, Human
ccacugaaggucuggcuggagc

SEQ ID NO: 399614 - RNA, 24 nt, Human
ccagaacggaagaguccagucaca

SEQ ID NO: 399615 - RNA, 21 nt, Human
ccccaccgccucccgcaagca

SEQ ID NO: 399616 - RNA, 18 nt, Human
ccccgaggccgcgccggg

SEQ ID NO: 399617 - RNA, 21 nt, Human
ccccgaggccgcgccgggccc

SEQ ID NO: 399618 - RNA, 21 nt, Human
cccgcccggccgcgccaggca

SEQ ID NO: 399619 - RNA, 23 nt, Human
cccggucugugccuccuuccucc

SEQ ID NO: 399620 - RNA, 20 nt, Human
cccggugcuccuucucucca

SEQ ID NO: 399621 - RNA, 23 nt, Human
cccucccccacccgccuccccua

SEQ ID NO: 399622 - RNA, 20 nt, Human
ccgcagcugccgcccgcugc

SEQ ID NO: 399623 - RNA, 18 nt, Human
ccuacaaccagaccaaaa

SEQ ID NO: 399624 - RNA, 26 nt, Human
ccucccccacccgccuccccuagaag

SEQ ID NO: 399625 - RNA, 21 nt, Human
ccuccuuccucccaugcccca

SEQ ID NO: 399626 - RNA, 23 nt, Human
ccugcuugucucaaacacauaca

SEQ ID NO: 399627 - RNA, 21 nt, Human
cgccgggcccagccggagccc

SEQ ID NO: 399628 - RNA, 21 nt, Human
cgccucccgcaagcacagugc

SEQ ID NO: 399629 - RNA, 22 nt, Human
cggcccggcccgccgcgcgcga

SEQ ID NO: 399630 - RNA, 22 nt, Human
cuacaaccagaccaaaaacaca

SEQ ID NO: 399631 - RNA, 21 nt, Human
cucaccgcugaggcgcuccuc

SEQ ID NO: 399632 - RNA, 20 nt, Human
cucccaucucuuuauucaca

SEQ ID NO: 399633 - RNA, 21 nt, Human
cucccucccccacccgccucc

SEQ ID NO: 399634 - RNA, 21 nt, Human
cugaaguucuaauuugcuaac

SEQ ID NO: 399635 - RNA, 23 nt, Human
cugcuggacccgacucuaucugc

SEQ ID NO: 399636 - RNA, 18 nt, Human
gaacagugugacugcaac

SEQ ID NO: 399637 - RNA, 23 nt, Human
gacacucucugauguccccacgg

SEQ ID NO: 399638 - RNA, 18 nt, Human
gagcagcgugugagguag

SEQ ID NO: 399639 - RNA, 23 nt, Human
gaggaccucucucauccucacga

SEQ ID NO: 399640 - RNA, 21 nt, Human
gagggaggccagggcucugag

SEQ ID NO: 399641 - RNA, 21 nt, Human
gauuauacagcuacaauuaca

SEQ ID NO: 399642 - RNA, 22 nt, Human
gcagcuccggagccgguugcgc

SEQ ID NO: 399643 - RNA, 21 nt, Human
gcgaugggcagccccgaggcc

SEQ ID NO: 399644 - RNA, 19 nt, Human
gcgcgaugggcagccccga

SEQ ID NO: 399645 - RNA, 21 nt, Human
ggaagaguccagucacagucc

SEQ ID NO: 399646 - RNA, 18 nt, Human
ggaccacaggguuccaga

SEQ ID NO: 399647 - RNA, 22 nt, Human
ggaggacauuccaggacuugag

SEQ ID NO: 399648 - RNA, 21 nt, Human
ggcaggaccacugaaggucug

SEQ ID NO: 399649 - RNA, 20 nt, Human
ggccacccacugcuggaccc

SEQ ID NO: 399650 - RNA, 20 nt, Human
gggccuccaggucccccagc

SEQ ID NO: 399651 - RNA, 23 nt, Human
gggccuccaggucccccagcucc

SEQ ID NO: 399652 - RNA, 24 nt, Human
ggugagaaaagcaggaaucugaga

SEQ ID NO: 399653 - RNA, 21 nt, Human
uaauaaaugaaacauucccuc

SEQ ID NO: 399654 - RNA, 27 nt, Human
uagaaaagcacaaugagaggaucugcg

SEQ ID NO: 399655 - RNA, 21 nt, Human
uagaaccagauacaagaaaau

SEQ ID NO: 399656 - RNA, 19 nt, Human
uaguauagcuuuucauuuu

SEQ ID NO: 399657 - RNA, 26 nt, Human
uaucaacaaaaccugcuugucucaaa

SEQ ID NO: 399658 - RNA, 22 nt, Human
uauuucaaguguacaaaaauac

SEQ ID NO: 399659 - RNA, 21 nt, Human
ucaaacaguaauaaaugaaac

SEQ ID NO: 399660 - RNA, 23 nt, Human
uccaagcacauuugcccaguaaa

SEQ ID NO: 399661 - RNA, 24 nt, Human
uccaagcacauuugcccaguaaau

SEQ ID NO: 399662 - RNA, 21 nt, Human
uccacggggauucacacgagg

SEQ ID NO: 399663 - RNA, 22 nt, Human
ucccuacaaccagaccaaaaac

SEQ ID NO: 399664 - RNA, 21 nt, Human
ucucccaucucuuuauucaca

SEQ ID NO: 399665 - RNA, 21 nt, Human
ucucucauccucacgauggaa

SEQ ID NO: 399666 - RNA, 22 nt, Human
ugagaaaagcaggaaucugaga

SEQ ID NO: 399667 - RNA, 19 nt, Human
ugagguagggggagggagg

SEQ ID NO: 399668 - RNA, 21 nt, Human
ugagguagggggagggaggcc

SEQ ID NO: 399669 - RNA, 22 nt, Human
ugagguagggggagggaggcca

SEQ ID NO: 399670 - RNA, 26 nt, Human
ugaucccucccucccccacccgccuc

SEQ ID NO: 399671 - RNA, 20 nt, Human
ugaugggccuccaggucccc

SEQ ID NO: 399672 - RNA, 24 nt, Human
ugcacauccacggggauucacacg

SEQ ID NO: 399673 - RNA, 20 nt, Human
uggaacagugugacugcaac

SEQ ID NO: 399674 - RNA, 18 nt, Human
uggagacagcgugggugg

SEQ ID NO: 399675 - RNA, 19 nt, Human
uggagacagcgugggugga

SEQ ID NO: 399676 - RNA, 20 nt, Human
uggcguguguucacccuggc

SEQ ID NO: 399677 - RNA, 21 nt, Human
ugggaaguggcguguguucac

SEQ ID NO: 399678 - RNA, 20 nt, Human
ugggccuccaggucccccag

SEQ ID NO: 399679 - RNA, 19 nt, Human
ugucucaaacacauacacc

SEQ ID NO: 399680 - RNA, 22 nt, Human
uuaaagaacacaguugaaagua

SEQ ID NO: 399681 - RNA, 23 nt, Human
uuaaagaacacaguugaaaguaa

SEQ ID NO: 399682 - RNA, 22 nt, Human
uuagauaaaaacaauaaacauc

SEQ ID NO: 399683 - RNA, 20 nt, Human
uuaucccuaaaccaccucac

SEQ ID NO: 399684 - RNA, 23 nt, Human
uugcgccgcagcugccgcccgcu

SEQ ID NO: 399685 - RNA, 24 nt, Human
aaaaaaaaaaaaaacaaaccagaa

SEQ ID NO: 399686 - RNA, 24 nt, Human
aaaaaaaaaaaacaaaccagaaaa

SEQ ID NO: 399687 - RNA, 22 nt, Human
aaaaaaaaaaacaaaccagggu

SEQ ID NO: 399688 - RNA, 21 nt, Human
aaaaaaacaaaccagaaaaca

SEQ ID NO: 399689 - RNA, 22 nt, Human
aaaaaaacaaaccagaaaacaa

SEQ ID NO: 399690 - RNA, 24 nt, Human
aaaaaacaaaccagaaaacaaaaa

SEQ ID NO: 399691 - RNA, 21 nt, Human
aaaaaacacacguaaagauau

SEQ ID NO: 399692 - RNA, 22 nt, Human
aaaaaacccaagugcaagagca

SEQ ID NO: 399693 - RNA, 21 nt, Human
aaaacaaaacaaaaaaggaaa

SEQ ID NO: 399694 - RNA, 23 nt, Human
aaaacaaaacaaaacaaaaaagg

SEQ ID NO: 399695 - RNA, 23 nt, Human
aaaacaaaacaaaacaaaacaaa

SEQ ID NO: 399696 - RNA, 22 nt, Human
aaaacaaaccagaaaacaaaaa

SEQ ID NO: 399697 - RNA, 18 nt, Human
aaacaaaaaaggaaauau

SEQ ID NO: 399698 - RNA, 22 nt, Human
aaacaaaaaaggaaauauucag

SEQ ID NO: 399699 - RNA, 19 nt, Human
aaacaaaacaaaacaaaaa

SEQ ID NO: 399700 - RNA, 22 nt, Human
aaacaaaacaaaacaaaacaaa

SEQ ID NO: 399701 - RNA, 23 nt, Human
aaacaaaccagaaaacaaaaaac

SEQ ID NO: 399702 - RNA, 18 nt, Human
aacaaaaaacccaagugc

SEQ ID NO: 399703 - RNA, 23 nt, Human
aacaaaacaaaacaaaaaaggaa

SEQ ID NO: 399704 - RNA, 23 nt, Human
aaccagaaaacaaaaaacuaacu

SEQ ID NO: 399705 - RNA, 23 nt, Human
aacucaggugccuacacagcggu

SEQ ID NO: 399706 - RNA, 24 nt, Human
aacugagcauuaaacuucaaguau

SEQ ID NO: 399707 - RNA, 23 nt, Human
acaaaaaaaaaaaaaacaaacca

SEQ ID NO: 399708 - RNA, 23 nt, Human
acaaaacaaaacaaaaaaggaaa

SEQ ID NO: 399709 - RNA, 22 nt, Human
acaaaacaaaacaaaacaaaaa

SEQ ID NO: 399710 - RNA, 25 nt, Human
acaaaccagaaaacaaaaaacuaac

SEQ ID NO: 399711 - RNA, 19 nt, Human
acaacguaaaggcauuuug

SEQ ID NO: 399712 - RNA, 18 nt, Human
acaauaacaaaaaaccca

SEQ ID NO: 399713 - RNA, 23 nt, Human
acacacacacacacacacacaca

SEQ ID NO: 399714 - RNA, 23 nt, Human
acacacacacacacacacacaca

SEQ ID NO: 399715 - RNA, 23 nt, Human
acacacacacacacacacacaca

SEQ ID NO: 399716 - RNA, 23 nt, Human
acacacacacacacacacacaca

SEQ ID NO: 399717 - RNA, 23 nt, Human
acacacacacacacacacacaca

SEQ ID NO: 399718 - RNA, 23 nt, Human
acacacacacacacacacacaca

SEQ ID NO: 399719 - RNA, 23 nt, Human
acacacacacacacacacacaca

SEQ ID NO: 399720 - RNA, 24 nt, Human
acacacacacacacacacacacag

SEQ ID NO: 399721 - RNA, 22 nt, Human
acacacacacacacacacacag

SEQ ID NO: 399722 - RNA, 23 nt, Human
acccaagugcaagagcaauacca

SEQ ID NO: 399723 - RNA, 18 nt, Human
acggagaggagucccugg

SEQ ID NO: 399724 - RNA, 21 nt, Human
agcacuuugagguagcauauu

SEQ ID NO: 399725 - RNA, 22 nt, Human
agccaccaagucaacugccacc

SEQ ID NO: 399726 - RNA, 26 nt, Human
aggcaaaaaagggcaugagcugggcc

SEQ ID NO: 399727 - RNA, 18 nt, Human
agguagcauauuuuguaa

SEQ ID NO: 399728 - RNA, 22 nt, Human
agugcaagagcaauaccaagaa

SEQ ID NO: 399729 - RNA, 19 nt, Human
auaaaacagaaaaaccaag

SEQ ID NO: 399730 - RNA, 22 nt, Human
auacaaaaaguaaaaacaggga

SEQ ID NO: 399731 - RNA, 23 nt, Human
auggucauuacaaaauacggggg

SEQ ID NO: 399732 - RNA, 21 nt, Human
caaaacaauaacaaaaaaccc

SEQ ID NO: 399733 - RNA, 18 nt, Human
caaaccagaaaacaaaaa

SEQ ID NO: 399734 - RNA, 21 nt, Human
caacuagaaggugcaugaagc

SEQ ID NO: 399735 - RNA, 19 nt, Human
caagagcaauaccaagaac

SEQ ID NO: 399736 - RNA, 20 nt, Human
cacaaaacaauaacaaaaaa

SEQ ID NO: 399737 - RNA, 20 nt, Human
cacacacacacacacacaca

SEQ ID NO: 399738 - RNA, 20 nt, Human
cacacacacacacacacaca

SEQ ID NO: 399739 - RNA, 20 nt, Human
cacacacacacacacacaca

SEQ ID NO: 399740 - RNA, 20 nt, Human
cacacacacacacacacaca

SEQ ID NO: 399741 - RNA, 20 nt, Human
cacacacacacacacacaca

SEQ ID NO: 399742 - RNA, 20 nt, Human
cacacacacacacacacaca

SEQ ID NO: 399743 - RNA, 20 nt, Human
cacacacacacacacacaca

SEQ ID NO: 399744 - RNA, 20 nt, Human
cacacacacacacacacaca

SEQ ID NO: 399745 - RNA, 20 nt, Human
cacacacacacacacacaca

SEQ ID NO: 399746 - RNA, 20 nt, Human
cacacacacacacacacaca

SEQ ID NO: 399747 - RNA, 22 nt, Human
cacacacacacacacacacaca

SEQ ID NO: 399748 - RNA, 22 nt, Human
cacacacacacacacacacaca

SEQ ID NO: 399749 - RNA, 26 nt, Human
cacacacacacacacacacacacaca

SEQ ID NO: 399750 - RNA, 26 nt, Human
cacacacacacacacacacacacaca

SEQ ID NO: 399751 - RNA, 26 nt, Human
cacacacacacacacacacacacaca

SEQ ID NO: 399752 - RNA, 26 nt, Human
cacacacacacacacacacacacaca

SEQ ID NO: 399753 - RNA, 28 nt, Human
cacacacacacacacacacacacacuca

SEQ ID NO: 399754 - RNA, 22 nt, Human
caccaagucaacugccacccga

SEQ ID NO: 399755 - RNA, 21 nt, Human
caccccauuauacaaaaagua

SEQ ID NO: 399756 - RNA, 18 nt, Human
cacccuuggccaucccuc

SEQ ID NO: 399757 - RNA, 18 nt, Human
cagcaggagacgcaugca

SEQ ID NO: 399758 - RNA, 27 nt, Human
cagccuuacaaauacaaacaacgucuu

SEQ ID NO: 399759 - RNA, 21 nt, Human
caggaaaacaaccuacuucuu

SEQ ID NO: 399760 - RNA, 20 nt, Human
caggcacugcugaacaugcc

SEQ ID NO: 399761 - RNA, 23 nt, Human
cagugucagccugaacacacuuu

SEQ ID NO: 399762 - RNA, 21 nt, Human
caguuucuccuggauacaaag

SEQ ID NO: 399763 - RNA, 20 nt, Human
cauaaaacacacacacacac

SEQ ID NO: 399764 - RNA, 22 nt, Human
cauagaaaauccucaaaggcug

SEQ ID NO: 399765 - RNA, 21 nt, Human
ccaaaucuuuaaagaaccaag

SEQ ID NO: 399766 - RNA, 27 nt, Human
ccaagaacagacuuccuuugugcaagu

SEQ ID NO: 399767 - RNA, 23 nt, Human
ccaccaagucaacugccacccga

SEQ ID NO: 399768 - RNA, 20 nt, Human
ccagaaaacaaaaaacuaac

SEQ ID NO: 399769 - RNA, 21 nt, Human
ccagugucagccugaacacac

SEQ ID NO: 399770 - RNA, 20 nt, Human
cccaccccauuauacaaaaa

SEQ ID NO: 399771 - RNA, 25 nt, Human
cccacuccaccccaccccauuauac

SEQ ID NO: 399772 - RNA, 26 nt, Human
cccacuccaccccaccccauuauaca

SEQ ID NO: 399773 - RNA, 19 nt, Human
ccccacuccaccccacccc

SEQ ID NO: 399774 - RNA, 22 nt, Human
ccccauucuguaucaaacugga

SEQ ID NO: 399775 - RNA, 26 nt, Human
ccuagaaagcgcuccuuuuuuuccuc

SEQ ID NO: 399776 - RNA, 25 nt, Human
ccucaggcugacucucagaagcccc

SEQ ID NO: 399777 - RNA, 24 nt, Human
ccucuaaagaccucaggcugacuc

SEQ ID NO: 399778 - RNA, 20 nt, Human
ccugaacacacuuucuacca

SEQ ID NO: 399779 - RNA, 24 nt, Human
cucagaagcccccacuccacccca

SEQ ID NO: 399780 - RNA, 24 nt, Human
cucaggugccuacacagcggucca

SEQ ID NO: 399781 - RNA, 25 nt, Human
cucucagaagcccccacuccacccc

SEQ ID NO: 399782 - RNA, 19 nt, Human
cuugccgcaugugauucac

SEQ ID NO: 399783 - RNA, 21 nt, Human
cuuuaacauuucauuaaguaa

SEQ ID NO: 399784 - RNA, 23 nt, Human
gaagcccccacuccaccccaccc

SEQ ID NO: 399785 - RNA, 20 nt, Human
gcacccuguggaaagggaag

SEQ ID NO: 399786 - RNA, 23 nt, Human
gccuacacagcgguccagggaga

SEQ ID NO: 399787 - RNA, 24 nt, Human
ggaaaacaaccuacuucuuaaaac

SEQ ID NO: 399788 - RNA, 19 nt, Human
ggagacgcaugcacccugu

SEQ ID NO: 399789 - RNA, 21 nt, Human
ggcagcaucccaggcugugga

SEQ ID NO: 399790 - RNA, 20 nt, Human
gguacggcagcaucccaggc

SEQ ID NO: 399791 - RNA, 33 nt, Human
gucauaaaacacacacacacacacacacacagu

SEQ ID NO: 399792 - RNA, 21 nt, Human
uaaaacaaaacaaaacaaaac

SEQ ID NO: 399793 - RNA, 20 nt, Human
uaaaacacacacacacacac

SEQ ID NO: 399794 - RNA, 20 nt, Human
uaaaacagaaaaaccaagug

SEQ ID NO: 399795 - RNA, 24 nt, Human
uaaagaaccaagcucuaaaaaaca

SEQ ID NO: 399796 - RNA, 19 nt, Human
uaacaaaaaacccaagugc

SEQ ID NO: 399797 - RNA, 23 nt, Human
uaacucaggugccuacacagcgg

SEQ ID NO: 399798 - RNA, 31 nt, Human
uaagucauaaaacacacacacacacacacag

SEQ ID NO: 399799 - RNA, 21 nt, Human
uaauuucaaacgcuuucuuuu

SEQ ID NO: 399800 - RNA, 24 nt, Human
uacaauagcugguccucuaaagac

SEQ ID NO: 399801 - RNA, 24 nt, Human
uacuucuuaaaacaaaacaaaaca

SEQ ID NO: 399802 - RNA, 22 nt, Human
uauaaaacagaaaaaccaagug

SEQ ID NO: 399803 - RNA, 24 nt, Human
uauacaaaaaaaaaaaaaacaaac

SEQ ID NO: 399804 - RNA, 24 nt, Human
uauauaaaacagaaaaaccaagug

SEQ ID NO: 399805 - RNA, 23 nt, Human
uauauaagugaauaaaaauagca

SEQ ID NO: 399806 - RNA, 21 nt, Human
uauccaaggugcuacaauagc

SEQ ID NO: 399807 - RNA, 19 nt, Human
uauucaguugagcucugca

SEQ ID NO: 399808 - RNA, 19 nt, Human
ucaaaagaggcuaaggauu

SEQ ID NO: 399809 - RNA, 18 nt, Human
ucacagggcugcucugca

SEQ ID NO: 399810 - RNA, 23 nt, Human
ucagacuuuugcugcaggaaaau

SEQ ID NO: 399811 - RNA, 21 nt, Human
uccaccccaccccauuauaca

SEQ ID NO: 399812 - RNA, 18 nt, Human
ucccaacagccucagacu

SEQ ID NO: 399813 - RNA, 22 nt, Human
ucccuggguguaaucauuuugg

SEQ ID NO: 399814 - RNA, 19 nt, Human
uccucaaaggcugcccaga

SEQ ID NO: 399815 - RNA, 23 nt, Human
ucuaccacccacccuuggccauc

SEQ ID NO: 399816 - RNA, 21 nt, Human
ucuaccacccacccuuggccu

SEQ ID NO: 399817 - RNA, 23 nt, Human
ucuccauggccaggaagccacuc

SEQ ID NO: 399818 - RNA, 19 nt, Human
ucucugaauacaccagccu

SEQ ID NO: 399819 - RNA, 24 nt, Human
ucugggauuuuccuggcaggaggg

SEQ ID NO: 399820 - RNA, 23 nt, Human
ucuuuccucuugguacggcagca

SEQ ID NO: 399821 - RNA, 25 nt, Human
ugaacagaaaagcuuuaaaaaaucc

SEQ ID NO: 399822 - RNA, 21 nt, Human
ugagcauuaaacuucaaguau

SEQ ID NO: 399823 - RNA, 20 nt, Human
ugauacaaguuuacgguuca

SEQ ID NO: 399824 - RNA, 20 nt, Human
ugcaagagcaauaccaagaa

SEQ ID NO: 399825 - RNA, 25 nt, Human
ugcccagaaacagggccccaggcac

SEQ ID NO: 399826 - RNA, 21 nt, Human
ugcucugcaguuucuccugga

SEQ ID NO: 399827 - RNA, 19 nt, Human
uggccaggaagccacucga

SEQ ID NO: 399828 - RNA, 20 nt, Human
ugggauuuuccuggcaggag

SEQ ID NO: 399829 - RNA, 23 nt, Human
ugggguaucauuaagcuuucugg

SEQ ID NO: 399830 - RNA, 20 nt, Human
ugucccaauauacuuccugu

SEQ ID NO: 399831 - RNA, 18 nt, Human
uugagguagcauauuuug

SEQ ID NO: 399832 - RNA, 20 nt, Human
uuguaaagucacagggcugc

SEQ ID NO: 399833 - RNA, 19 nt, Human
uuuguacaacuagaaggug

SEQ ID NO: 399834 - RNA, 25 nt, Human
aaacucucgcgcgaacaggcagcuu

SEQ ID NO: 399835 - RNA, 18 nt, Human
aacagcaaggaccccggu

SEQ ID NO: 399836 - RNA, 24 nt, Human
aacccgccccuccaaacucucgcg

SEQ ID NO: 399837 - RNA, 25 nt, Human
aacccgccccuccaaacucucgcgc

SEQ ID NO: 399838 - RNA, 23 nt, Human
aagcgcuggaagaccgcuggacu

SEQ ID NO: 399839 - RNA, 18 nt, Human
aauggggucgcuccaccu

SEQ ID NO: 399840 - RNA, 25 nt, Human
acagauccacgugaccaccaggggu

SEQ ID NO: 399841 - RNA, 19 nt, Human
accaggggucagccguaga

SEQ ID NO: 399842 - RNA, 19 nt, Human
accaggggucagccguaga

SEQ ID NO: 399843 - RNA, 18 nt, Human
accccaaacccgccccuc

SEQ ID NO: 399844 - RNA, 22 nt, Human
agggcuguccgggauucuccag

SEQ ID NO: 399845 - RNA, 23 nt, Human
caccgaccccaaacccgccccuc

SEQ ID NO: 399846 - RNA, 22 nt, Human
caccucugcucccagggccgcc

SEQ ID NO: 399847 - RNA, 19 nt, Human
cacuuuggccccaguggcu

SEQ ID NO: 399848 - RNA, 25 nt, Human
cauuuuccccuccugggggugaucc

SEQ ID NO: 399849 - RNA, 18 nt, Human
ccccaaacccgccccucc

SEQ ID NO: 399850 - RNA, 24 nt, Human
ccccaaacccgccccuccaaacuc

SEQ ID NO: 399851 - RNA, 21 nt, Human
ccgaccccaaacccgccccuc

SEQ ID NO: 399852 - RNA, 22 nt, Human
ccgaccccaaacccgccccucc

SEQ ID NO: 399853 - RNA, 21 nt, Human
ccuccaaacucucgcgcgaac

SEQ ID NO: 399854 - RNA, 24 nt, Human
ccuccaaacucucgcgcgaacagg

SEQ ID NO: 399855 - RNA, 22 nt, Human
ccugccacacacgggguguccc

SEQ ID NO: 399856 - RNA, 25 nt, Human
cguggcgaacagauccacgugacca

SEQ ID NO: 399857 - RNA, 24 nt, Human
cucccagggccgccgccguggccc

SEQ ID NO: 399858 - RNA, 24 nt, Human
cuccccugacgcuaacugguaccu

SEQ ID NO: 399859 - RNA, 19 nt, Human
cuggaagaccgcuggacuc

SEQ ID NO: 399860 - RNA, 20 nt, Human
gacccagcuccccugacgcu

SEQ ID NO: 399861 - RNA, 18 nt, Human
gcauugccaccauuuucc

SEQ ID NO: 399862 - RNA, 24 nt, Human
gccagugugggcugcuccaguggu

SEQ ID NO: 399863 - RNA, 21 nt, Human
gcccaagcgcuggaagaccgc

SEQ ID NO: 399864 - RNA, 18 nt, Human
gcuggacucucacuuugg

SEQ ID NO: 399865 - RNA, 19 nt, Human
ggcauugccaccauuuucc

SEQ ID NO: 399866 - RNA, 25 nt, Human
ggcugcagggagcagggcuguccgg

SEQ ID NO: 399867 - RNA, 22 nt, Human
uaggagaggcucccgaacagca

SEQ ID NO: 399868 - RNA, 19 nt, Human
ucccgaacagcaaggaccc

SEQ ID NO: 399869 - RNA, 19 nt, Human
ucccgaacagcaaggaccc

SEQ ID NO: 399870 - RNA, 23 nt, Human
ucucacuuuggccccaguggcuc

SEQ ID NO: 399871 - RNA, 22 nt, Human
ucuccagagcgcuucgccgccu

SEQ ID NO: 399872 - RNA, 20 nt, Human
ucucgcgcgaacaggcagcu

SEQ ID NO: 399873 - RNA, 27 nt, Human
ugacccagcuccccugacgcuaacugg

SEQ ID NO: 399874 - RNA, 19 nt, Human
ugcgagccccaaucagaca

SEQ ID NO: 399875 - RNA, 20 nt, Human
uggcucccgaaacuacaccu

SEQ ID NO: 399876 - RNA, 18 nt, Human
agucaggcauccaccgcc

SEQ ID NO: 399877 - RNA, 23 nt, Human
cggcggcguccgaggcaggccca

SEQ ID NO: 399878 - RNA, 20 nt, Human
ggaaagagaauccgcgacac

SEQ ID NO: 399879 - RNA, 18 nt, Human
ucaggcauccaccgccau

SEQ ID NO: 399880 - RNA, 21 nt, Human
uccagucaggcauccaccgcc

SEQ ID NO: 399881 - RNA, 18 nt, Human
aaaaaagaagaggaaaaa

SEQ ID NO: 399882 - RNA, 18 nt, Human
aaaaacaacaacaacgac

SEQ ID NO: 399883 - RNA, 24 nt, Human
aaaauacuccugcccucgcacaua

SEQ ID NO: 399884 - RNA, 20 nt, Human
aaaccuggagaacaagagcg

SEQ ID NO: 399885 - RNA, 24 nt, Human
aaagaauccucuucaagagagaaa

SEQ ID NO: 399886 - RNA, 23 nt, Human
aacaaaagaaaauaagcauucac

SEQ ID NO: 399887 - RNA, 18 nt, Human
aacaaauuuuaggcugac

SEQ ID NO: 399888 - RNA, 23 nt, Human
aacaacgacauuuucuuuccuua

SEQ ID NO: 399889 - RNA, 21 nt, Human
aacccggcucucccccagccc

SEQ ID NO: 399890 - RNA, 27 nt, Human
aagcauuggaaucagcacaacagccau

SEQ ID NO: 399891 - RNA, 21 nt, Human
aagccccaccccucaugcucu

SEQ ID NO: 399892 - RNA, 22 nt, Human
acaacagccauggaaucaggca

SEQ ID NO: 399893 - RNA, 22 nt, Human
acaaggcuagagaaagccacgc

SEQ ID NO: 399894 - RNA, 25 nt, Human
acacagcucaacaaagagggaacgc

SEQ ID NO: 399895 - RNA, 23 nt, Human
acaguuggaaaaaagaagaggaa

SEQ ID NO: 399896 - RNA, 24 nt, Human
acaguuuauuuucauuuuugggaa

SEQ ID NO: 399897 - RNA, 19 nt, Human
acauaaguuuaacuugaac

SEQ ID NO: 399898 - RNA, 25 nt, Human
accuacgcagccccagcccggcccc

SEQ ID NO: 399899 - RNA, 18 nt, Human
acgcagccccagcccggc

SEQ ID NO: 399900 - RNA, 19 nt, Human
acuagaaacaagaaagacu

SEQ ID NO: 399901 - RNA, 24 nt, Human
acuggaaaagagggccuccucagg

SEQ ID NO: 399902 - RNA, 22 nt, Human
agaaacccaggcuugucaccuu

SEQ ID NO: 399903 - RNA, 21 nt, Human
agaaagccacgcucggccuuc

SEQ ID NO: 399904 - RNA, 24 nt, Human
agaauucugcgcccgaagcucggg

SEQ ID NO: 399905 - RNA, 25 nt, Human
agagcaguucccacgccaggaacca

SEQ ID NO: 399906 - RNA, 23 nt, Human
agagcuugggaaauggggcugca

SEQ ID NO: 399907 - RNA, 18 nt, Human
agaucaacagacacacca

SEQ ID NO: 399908 - RNA, 23 nt, Human
agaucaacagacacaccagaagg

SEQ ID NO: 399909 - RNA, 20 nt, Human
agauguaaaugaaaacacag

SEQ ID NO: 399910 - RNA, 22 nt, Human
agcagcugggagucugcucuuc

SEQ ID NO: 399911 - RNA, 21 nt, Human
agccauucccacaaauccaga

SEQ ID NO: 399912 - RNA, 21 nt, Human
aggaggucagauugcgaauac

SEQ ID NO: 399913 - RNA, 18 nt, Human
aggcaggggaggacgggc

SEQ ID NO: 399914 - RNA, 21 nt, Human
aggcaggggaggacgggcugu

SEQ ID NO: 399915 - RNA, 18 nt, Human
aggcgcgccccggcucgc

SEQ ID NO: 399916 - RNA, 21 nt, Human
agggaaacagacaggaggagg

SEQ ID NO: 399917 - RNA, 21 nt, Human
agggaggggguagcagcugga

SEQ ID NO: 399918 - RNA, 18 nt, Human
auacaaaaauacuccugc

SEQ ID NO: 399919 - RNA, 20 nt, Human
auggaacggcagaccccuga

SEQ ID NO: 399920 - RNA, 21 nt, Human
caaaaaaagguuggaggagca

SEQ ID NO: 399921 - RNA, 19 nt, Human
caaaaauacuccugcccuc

SEQ ID NO: 399922 - RNA, 25 nt, Human
caaagccccaccccucaugcucucc

SEQ ID NO: 399923 - RNA, 19 nt, Human
caaagcgcccugcagagac

SEQ ID NO: 399924 - RNA, 20 nt, Human
caaaggagagcaguucccac

SEQ ID NO: 399925 - RNA, 23 nt, Human
caacaagcaguuucuucaggccu

SEQ ID NO: 399926 - RNA, 19 nt, Human
caaccaccaaagcgcccug

SEQ ID NO: 399927 - RNA, 22 nt, Human
caagacacagcucaacaaagaa

SEQ ID NO: 399928 - RNA, 18 nt, Human
caagcaagcacugacaua

SEQ ID NO: 399929 - RNA, 19 nt, Human
caagccggcugagggcagc

SEQ ID NO: 399930 - RNA, 20 nt, Human
cacaaauccagaccauacca

SEQ ID NO: 399931 - RNA, 19 nt, Human
cacagaucaacagacacac

SEQ ID NO: 399932 - RNA, 19 nt, Human
cacauaggaaaaaaaauuu

SEQ ID NO: 399933 - RNA, 22 nt, Human
cacaugccccuuccuguccuuc

SEQ ID NO: 399934 - RNA, 23 nt, Human
caccagaagggaagcguuguuuc

SEQ ID NO: 399935 - RNA, 21 nt, Human
caccaugcacacacacaaggu

SEQ ID NO: 399936 - RNA, 21 nt, Human
caccccucaugcucuccucug

SEQ ID NO: 399937 - RNA, 30 nt, Human
caccuacgcagccccagcccggccccccuu

SEQ ID NO: 399938 - RNA, 18 nt, Human
caccugcacgucaccagc

SEQ ID NO: 399939 - RNA, 19 nt, Human
caccugcacgucaccagca

SEQ ID NO: 399940 - RNA, 25 nt, Human
cacgcaaagccauucccacaaaucc

SEQ ID NO: 399941 - RNA, 21 nt, Human
cagaccccugaaacgaagcuu

SEQ ID NO: 399942 - RNA, 18 nt, Human
cagcacaacagccaugga

SEQ ID NO: 399943 - RNA, 19 nt, Human
cagcugaacaaccaccaaa

SEQ ID NO: 399944 - RNA, 21 nt, Human
cagcugggggcccucccaccc

SEQ ID NO: 399945 - RNA, 23 nt, Human
caggaggaggucagauugcgaau

SEQ ID NO: 399946 - RNA, 22 nt, Human
caguuggaaaaaagaagaggaa

SEQ ID NO: 399947 - RNA, 21 nt, Human
ccacaaauccagaccauacca

SEQ ID NO: 399948 - RNA, 24 nt, Human
ccacggggaccuucacaguuggaa

SEQ ID NO: 399949 - RNA, 19 nt, Human
cccacccccauggggagga

SEQ ID NO: 399950 - RNA, 20 nt, Human
cccagcccggccccccuggg

SEQ ID NO: 399951 - RNA, 24 nt, Human
cccagcccggccccccuggggacc

SEQ ID NO: 399952 - RNA, 21 nt, Human
ccccccggccuccccucggca

SEQ ID NO: 399953 - RNA, 21 nt, Human
cccccgccuuccucucacucc

SEQ ID NO: 399954 - RNA, 22 nt, Human
ccccgccuuccucucacuccuc

SEQ ID NO: 399955 - RNA, 23 nt, Human
ccccggccuccccucggcagccc

SEQ ID NO: 399956 - RNA, 23 nt, Human
ccccucgggaaagcccgccgcuc

SEQ ID NO: 399957 - RNA, 18 nt, Human
cccucgggaaagcccgcc

SEQ ID NO: 399958 - RNA, 20 nt, Human
cccugcagagacaagucauc

SEQ ID NO: 399959 - RNA, 19 nt, Human
ccgcugcgcccccccggcc

SEQ ID NO: 399960 - RNA, 21 nt, Human
ccggccuccccucggcagccc

SEQ ID NO: 399961 - RNA, 26 nt, Human
ccugaaacgaagcuuguccccuucca

SEQ ID NO: 399962 - RNA, 21 nt, Human
ccugggagaaacccaggcuug

SEQ ID NO: 399963 - RNA, 19 nt, Human
ccuucaagacacagcucaa

SEQ ID NO: 399964 - RNA, 22 nt, Human
cgaauaccuggggcuuccuagg

SEQ ID NO: 399965 - RNA, 27 nt, Human
cgacuucacggagaggcagguucugcu

SEQ ID NO: 399966 - RNA, 24 nt, Human
cgcaugccacggaaagcuuacaua

SEQ ID NO: 399967 - RNA, 23 nt, Human
cgccaggaaccaacgugaaagca

SEQ ID NO: 399968 - RNA, 22 nt, Human
cgcccggagcuggggccccgca

SEQ ID NO: 399969 - RNA, 21 nt, Human
cgcggcggcgcggcgcggggc

SEQ ID NO: 399970 - RNA, 23 nt, Human
cggcagaccccugaaacgaagcu

SEQ ID NO: 399971 - RNA, 23 nt, Human
cguugcugcgccccccgccuucc

SEQ ID NO: 399972 - RNA, 19 nt, Human
cucuauaguacagcaagau

SEQ ID NO: 399973 - RNA, 18 nt, Human
cucuccuccccuuucuca

SEQ ID NO: 399974 - RNA, 21 nt, Human
cuggccaaggccucucugcag

SEQ ID NO: 399975 - RNA, 19 nt, Human
cuugugcauucagaccaga

SEQ ID NO: 399976 - RNA, 20 nt, Human
gaaaggagauggaaagggga

SEQ ID NO: 399977 - RNA, 22 nt, Human
gaacuucugccauccacuggac

SEQ ID NO: 399978 - RNA, 18 nt, Human
gaagggaggggguagcag

SEQ ID NO: 399979 - RNA, 22 nt, Human
gaggcacuguccgggaacgucc

SEQ ID NO: 399980 - RNA, 20 nt, Human
gcacucaaaaauugccauuu

SEQ ID NO: 399981 - RNA, 24 nt, Human
gcaggggaggacgggcuguguccu

SEQ ID NO: 399982 - RNA, 19 nt, Human
gccacuucugagaaccccc

SEQ ID NO: 399983 - RNA, 20 nt, Human
gcccagccuuugagaggcca

SEQ ID NO: 399984 - RNA, 23 nt, Human
gccccagcccggccccccugggg

SEQ ID NO: 399985 - RNA, 18 nt, Human
gcgcggcgcggggcgcgg

SEQ ID NO: 399986 - RNA, 19 nt, Human
gcgcggcggcgcggcgcgg

SEQ ID NO: 399987 - RNA, 20 nt, Human
gcgcuccgcugcgccccccc

SEQ ID NO: 399988 - RNA, 20 nt, Human
gcggccggggggggcuccgg

SEQ ID NO: 399989 - RNA, 21 nt, Human
gcuccaccccacggggaccuu

SEQ ID NO: 399990 - RNA, 18 nt, Human
gcuccuggccaaggccuc

SEQ ID NO: 399991 - RNA, 22 nt, Human
gcucgggggcggccgggggggg

SEQ ID NO: 399992 - RNA, 20 nt, Human
gcugccgccggggcugagcc

SEQ ID NO: 399993 - RNA, 18 nt, Human
ggaaaggagauggaaagg

SEQ ID NO: 399994 - RNA, 21 nt, Human
ggaaaggagauggaaagggga

SEQ ID NO: 399995 - RNA, 23 nt, Human
ggaggcgcgcggcgggggaggcg

SEQ ID NO: 399996 - RNA, 20 nt, Human
ggaggggguagcagcuggga

SEQ ID NO: 399997 - RNA, 20 nt, Human
ggagucugcucuuccagcug

SEQ ID NO: 399998 - RNA, 25 nt, Human
ggccacuaccccaugaacuucugcc

SEQ ID NO: 399999 - RNA, 23 nt, Human
ggcgcggcggcgcggcgcggggc

SEQ ID NO: 400000 - RNA, 18 nt, Human
ggcgcggggcgcgggggg

SEQ ID NO: 400001 - RNA, 21 nt, Human
ggcucagugcgcgggaccgcc

SEQ ID NO: 400002 - RNA, 20 nt, Human
ggcugacgacuucacggaga

SEQ ID NO: 400003 - RNA, 21 nt, Human
gggaggggauaccagucccag

SEQ ID NO: 400004 - RNA, 19 nt, Human
gggaggggguagcagcugg

SEQ ID NO: 400005 - RNA, 22 nt, Human
gggagugucacugcuucuucag

SEQ ID NO: 400006 - RNA, 21 nt, Human
gggcgcggggggcucgggggc

SEQ ID NO: 400007 - RNA, 21 nt, Human
gggcucagugcgcgggaccgc

SEQ ID NO: 400008 - RNA, 21 nt, Human
gggcucgggggcggccggggg

SEQ ID NO: 400009 - RNA, 24 nt, Human
ggggacgugggugcgcgccccgca

SEQ ID NO: 400010 - RNA, 18 nt, Human
gggggcuccggccggcgc

SEQ ID NO: 400011 - RNA, 18 nt, Human
ggugaaccuuuagccagc

SEQ ID NO: 400012 - RNA, 21 nt, Human
gucaccuuuucauguuggguu

SEQ ID NO: 400013 - RNA, 19 nt, Human
guggugauugacaggcagg

SEQ ID NO: 400014 - RNA, 31 nt, Human
guugcugcgccccccgccuuccucucacucc

SEQ ID NO: 400015 - RNA, 18 nt, Human
guuuuuguuuuggaaguu

SEQ ID NO: 400016 - RNA, 23 nt, Human
uaaguauugcagcuuuucagaau

SEQ ID NO: 400017 - RNA, 22 nt, Human
uacaaaaauacuccugcccucg

SEQ ID NO: 400018 - RNA, 24 nt, Human
uaccccaugaacuucugccaucca

SEQ ID NO: 400019 - RNA, 18 nt, Human
uaccuggggcuuccuagg

SEQ ID NO: 400020 - RNA, 19 nt, Human
uagaaacaagaaagacuac

SEQ ID NO: 400021 - RNA, 21 nt, Human
uaggaaaaaaaauuucucuga

SEQ ID NO: 400022 - RNA, 22 nt, Human
uaggcugacgacuucacggaga

SEQ ID NO: 400023 - RNA, 18 nt, Human
uaggcuggcggcaugcag

SEQ ID NO: 400024 - RNA, 19 nt, Human
uaggcuggcggcaugcaga

SEQ ID NO: 400025 - RNA, 23 nt, Human
ucaaaaauugccauuuuuuuccu

SEQ ID NO: 400026 - RNA, 23 nt, Human
ucaaagauaacgugacaacuacc

SEQ ID NO: 400027 - RNA, 20 nt, Human
ucacgcaaagccauucccac

SEQ ID NO: 400028 - RNA, 19 nt, Human
ucagaccagacaucacaug

SEQ ID NO: 400029 - RNA, 19 nt, Human
ucagugcgcgggaccgcgc

SEQ ID NO: 400030 - RNA, 18 nt, Human
ucaugagagggacaggcu

SEQ ID NO: 400031 - RNA, 22 nt, Human
uccugggagaaacccaggcuug

SEQ ID NO: 400032 - RNA, 20 nt, Human
ucuucaggccuguggauugg

SEQ ID NO: 400033 - RNA, 22 nt, Human
ucuucaguaaggcacuagagac

SEQ ID NO: 400034 - RNA, 19 nt, Human
ucuugggaugcgcccagcc

SEQ ID NO: 400035 - RNA, 20 nt, Human
ucuugggaugcgcccagccu

SEQ ID NO: 400036 - RNA, 21 nt, Human
ugaaaacacagaucaacagac

SEQ ID NO: 400037 - RNA, 22 nt, Human
ugaaaacacagaucaacagaca

SEQ ID NO: 400038 - RNA, 24 nt, Human
ugaaaacacagaucaacagacaca

SEQ ID NO: 400039 - RNA, 19 nt, Human
ugaaagcauuggaaucagc

SEQ ID NO: 400040 - RNA, 19 nt, Human
ugaagcugaggacacuggg

SEQ ID NO: 400041 - RNA, 21 nt, Human
ugacaaggcuagagaaagcca

SEQ ID NO: 400042 - RNA, 18 nt, Human
ugacaggcagggagacag

SEQ ID NO: 400043 - RNA, 23 nt, Human
ugagaacacggacgguucuuagc

SEQ ID NO: 400044 - RNA, 22 nt, Human
ugagaacccccaucuaacuucc

SEQ ID NO: 400045 - RNA, 20 nt, Human
ugcaaaggagagcaguuccc

SEQ ID NO: 400046 - RNA, 23 nt, Human
ugcacacacacaagguccacuuc

SEQ ID NO: 400047 - RNA, 18 nt, Human
ugcagggacaguggcccc

SEQ ID NO: 400048 - RNA, 19 nt, Human
ugcaggggagauaauuuuc

SEQ ID NO: 400049 - RNA, 21 nt, Human
ugccaaugaacgagaacuuuc

SEQ ID NO: 400050 - RNA, 21 nt, Human
ugcucaacugcuuuacucauu

SEQ ID NO: 400051 - RNA, 21 nt, Human
uggaaaagagggccuccucag

SEQ ID NO: 400052 - RNA, 21 nt, Human
uggaaagccacucccauggga

SEQ ID NO: 400053 - RNA, 21 nt, Human
uggaaaggggaagagaaggug

SEQ ID NO: 400054 - RNA, 18 nt, Human
uggaacggcagaccccug

SEQ ID NO: 400055 - RNA, 21 nt, Human
uggaacggcagaccccugaaa

SEQ ID NO: 400056 - RNA, 21 nt, Human
uggaggagcaggaguaaccuc

SEQ ID NO: 400057 - RNA, 24 nt, Human
uggcaaaaaaagguuggaggagca

SEQ ID NO: 400058 - RNA, 18 nt, Human
uggcaugucccugguagc

SEQ ID NO: 400059 - RNA, 21 nt, Human
uggcugucuugggaugcgccc

SEQ ID NO: 400060 - RNA, 18 nt, Human
ugggaagggaggggguag

SEQ ID NO: 400061 - RNA, 20 nt, Human
uggggaggaaagacgucaag

SEQ ID NO: 400062 - RNA, 25 nt, Human
ugggggcccucccacccccaugggg

SEQ ID NO: 400063 - RNA, 19 nt, Human
ugggucaggggggaaaagg

SEQ ID NO: 400064 - RNA, 19 nt, Human
ugggucaggggggaaaagg

SEQ ID NO: 400065 - RNA, 22 nt, Human
ugggucccaaagccccaccccu

SEQ ID NO: 400066 - RNA, 18 nt, Human
ugguagagacagggugag

SEQ ID NO: 400067 - RNA, 18 nt, Human
ugucacugcuucuucagu

SEQ ID NO: 400068 - RNA, 23 nt, Human
ugucugaaaagcaggagcccuug

SEQ ID NO: 400069 - RNA, 22 nt, Human
uguggauuggcauccaaauaca

SEQ ID NO: 400070 - RNA, 18 nt, Human
uuaacccuuucaccuauc

SEQ ID NO: 400071 - RNA, 22 nt, Human
uugcaggggagauaauuuuccu

SEQ ID NO: 400072 - RNA, 27 nt, Human
uuggcaaaaaaagguuggaggagcagg

SEQ ID NO: 400073 - RNA, 23 nt, Human
aaacugggcuccuggggcuaagu

SEQ ID NO: 400074 - RNA, 24 nt, Human
aaacugggcuccuggggcuaaguc

SEQ ID NO: 400075 - RNA, 20 nt, Human
aaauaauaaccagauucaac

SEQ ID NO: 400076 - RNA, 22 nt, Human
aaaugcacuugaaacaccacac

SEQ ID NO: 400077 - RNA, 19 nt, Human
aacaccacacagcaaggcc

SEQ ID NO: 400078 - RNA, 18 nt, Human
aacuugucugugucuccu

SEQ ID NO: 400079 - RNA, 21 nt, Human
aaggagaagccaaauggggau

SEQ ID NO: 400080 - RNA, 20 nt, Human
aagggcauuguggcuuaagg

SEQ ID NO: 400081 - RNA, 23 nt, Human
acaaccacuagucaaccuaaaac

SEQ ID NO: 400082 - RNA, 22 nt, Human
acuacaaccacuagucaaccua

SEQ ID NO: 400083 - RNA, 18 nt, Human
aggcccuggccccgccuc

SEQ ID NO: 400084 - RNA, 21 nt, Human
aggcccuggccccgccuccag

SEQ ID NO: 400085 - RNA, 21 nt, Human
agguuuucaaaauuccaagga

SEQ ID NO: 400086 - RNA, 20 nt, Human
auaacucccaaaagcaacaa

SEQ ID NO: 400087 - RNA, 22 nt, Human
auagaacacauccaguucaaag

SEQ ID NO: 400088 - RNA, 25 nt, Human
auagaacacauccaguucaaaggca

SEQ ID NO: 400089 - RNA, 21 nt, Human
augcacuugaaacaccacaca

SEQ ID NO: 400090 - RNA, 23 nt, Human
caaaggcauggacuccaccgcca

SEQ ID NO: 400091 - RNA, 19 nt, Human
caaccuaaaaccuuagugc

SEQ ID NO: 400092 - RNA, 21 nt, Human
cacagcaaggccauugaaacu

SEQ ID NO: 400093 - RNA, 18 nt, Human
cacauaagccauuugccc

SEQ ID NO: 400094 - RNA, 20 nt, Human
cauaaaucccaaauguucuu

SEQ ID NO: 400095 - RNA, 23 nt, Human
cauuuuaaaugcacuugaaacac

SEQ ID NO: 400096 - RNA, 18 nt, Human
cauuuugccuucugguuu

SEQ ID NO: 400097 - RNA, 19 nt, Human
ccaagagacgcacaugaug

SEQ ID NO: 400098 - RNA, 21 nt, Human
ccacacagcaaggccauugaa

SEQ ID NO: 400099 - RNA, 20 nt, Human
ccacugugcaauauagaaag

SEQ ID NO: 400100 - RNA, 21 nt, Human
ccauagccauguugaucugga

SEQ ID NO: 400101 - RNA, 22 nt, Human
ccauugaaacugggcuccuggg

SEQ ID NO: 400102 - RNA, 24 nt, Human
ccauugaaacugggcuccuggggc

SEQ ID NO: 400103 - RNA, 20 nt, Human
cccuguacugcccacugccu

SEQ ID NO: 400104 - RNA, 25 nt, Human
cuacaaccacuagucaaccuaaaac

SEQ ID NO: 400105 - RNA, 19 nt, Human
cucacauaagccauuugcc

SEQ ID NO: 400106 - RNA, 24 nt, Human
cuuaacacuuuugcuggaucccaa

SEQ ID NO: 400107 - RNA, 28 nt, Human
cuuaacacuuuugcuggaucccaagaga

SEQ ID NO: 400108 - RNA, 22 nt, Human
cuucaccuuuucaucaccagcc

SEQ ID NO: 400109 - RNA, 18 nt, Human
gaaaauaacucccaaaag

SEQ ID NO: 400110 - RNA, 21 nt, Human
gauccaguaaucaauuuggca

SEQ ID NO: 400111 - RNA, 22 nt, Human
gaugguugucccugcaacaugg

SEQ ID NO: 400112 - RNA, 24 nt, Human
gcauaaagaacugaaccacaaaag

SEQ ID NO: 400113 - RNA, 20 nt, Human
gcccuggccccgccuccagu

SEQ ID NO: 400114 - RNA, 18 nt, Human
guggaagaacuugucugu

SEQ ID NO: 400115 - RNA, 22 nt, Human
uaaagaaaaacuucacauuaac

SEQ ID NO: 400116 - RNA, 23 nt, Human
uaaaucccaaauguucuuaaaga

SEQ ID NO: 400117 - RNA, 21 nt, Human
uaacucccaaaagcaacaaac

SEQ ID NO: 400118 - RNA, 18 nt, Human
uaaggagaagccaaaugg

SEQ ID NO: 400119 - RNA, 19 nt, Human
uaaggagaagccaaauggg

SEQ ID NO: 400120 - RNA, 25 nt, Human
uaauaaccagauucaacuucuguga

SEQ ID NO: 400121 - RNA, 20 nt, Human
uaccauagccauguugaucu

SEQ ID NO: 400122 - RNA, 19 nt, Human
uacugcccacugccuuaca

SEQ ID NO: 400123 - RNA, 22 nt, Human
uagccauguugaucuggaaauu

SEQ ID NO: 400124 - RNA, 21 nt, Human
uagcuaagacaaauuuguaau

SEQ ID NO: 400125 - RNA, 20 nt, Human
uauuuggccguagauuuuca

SEQ ID NO: 400126 - RNA, 21 nt, Human
ucauguugacuccuggcagag

SEQ ID NO: 400127 - RNA, 22 nt, Human
ucccaaaagcaacaaacaaaaa

SEQ ID NO: 400128 - RNA, 23 nt, Human
ucccaaaagcaacaaacaaaaau

SEQ ID NO: 400129 - RNA, 22 nt, Human
ucccugcaacauggugccacuc

SEQ ID NO: 400130 - RNA, 27 nt, Human
ucucugcucagugcucuggaguucuug

SEQ ID NO: 400131 - RNA, 27 nt, Human
ucugugacuaaagaaaaaccggggucc

SEQ ID NO: 400132 - RNA, 18 nt, Human
ugaaaauaacucccaaaa

SEQ ID NO: 400133 - RNA, 20 nt, Human
ugaaaauaacucccaaaagc

SEQ ID NO: 400134 - RNA, 22 nt, Human
ugacuaaagaaaaacuucacau

SEQ ID NO: 400135 - RNA, 19 nt, Human
ugaggcccuggccccgccu

SEQ ID NO: 400136 - RNA, 23 nt, Human
ugcacuugaaacaccacacagca

SEQ ID NO: 400137 - RNA, 20 nt, Human
ugcauauccagcaaaaggaa

SEQ ID NO: 400138 - RNA, 20 nt, Human
ugccagcauuuugccuucug

SEQ ID NO: 400139 - RNA, 18 nt, Human
ugcuggaucccaagagac

SEQ ID NO: 400140 - RNA, 23 nt, Human
uggauccaguaaucaauuuggca

SEQ ID NO: 400141 - RNA, 25 nt, Human
ugguuuccccugcagagcacagguc

SEQ ID NO: 400142 - RNA, 19 nt, Human
ugugcagccucaguggaca

SEQ ID NO: 400143 - RNA, 22 nt, Human
uuacuaaauaccauagccaugu

SEQ ID NO: 400144 - RNA, 21 nt, Human
uucaaaggcauggacuccacc

SEQ ID NO: 400145 - RNA, 24 nt, Human
uucacauccaucauaagguuggca

SEQ ID NO: 400146 - RNA, 19 nt, Human
uuugccuucugguuucccc

SEQ ID NO: 400147 - RNA, 23 nt, Human
uuuuauaaaauuuucaacuacaa

SEQ ID NO: 400148 - RNA, 27 nt, Human
aaaaaaacaaguucauguaagaaagca

SEQ ID NO: 400149 - RNA, 22 nt, Human
aagaaagcaagacaacccaaua

SEQ ID NO: 400150 - RNA, 23 nt, Human
aagcuaugcauguaaacagagau

SEQ ID NO: 400151 - RNA, 22 nt, Human
acacuacugaucuccaaucaac

SEQ ID NO: 400152 - RNA, 20 nt, Human
accaaucacaaccucaggca

SEQ ID NO: 400153 - RNA, 21 nt, Human
accacagugaaacuucacuuc

SEQ ID NO: 400154 - RNA, 21 nt, Human
aggcugcagucaccugcuuca

SEQ ID NO: 400155 - RNA, 26 nt, Human
caaaaaaugcaaucaucugcaucaga

SEQ ID NO: 400156 - RNA, 23 nt, Human
cacagugaaacuucacuucuccu

SEQ ID NO: 400157 - RNA, 23 nt, Human
cagaaugucaccaaucacaaccu

SEQ ID NO: 400158 - RNA, 25 nt, Human
cauuuuuacaccacuacauugaagg

SEQ ID NO: 400159 - RNA, 23 nt, Human
ccacagugaaacuucacuucucc

SEQ ID NO: 400160 - RNA, 20 nt, Human
cccaugagcaaauaaaacaa

SEQ ID NO: 400161 - RNA, 19 nt, Human
ccguccgugcgcucauccc

SEQ ID NO: 400162 - RNA, 24 nt, Human
cggggccaggaucccaguuccacc

SEQ ID NO: 400163 - RNA, 19 nt, Human
cuccugacguuugcaaaug

SEQ ID NO: 400164 - RNA, 24 nt, Human
cuugagccaaaggcugcagucacc

SEQ ID NO: 400165 - RNA, 22 nt, Human
gaaaaacuuuaaaacagcuuug

SEQ ID NO: 400166 - RNA, 22 nt, Human
gcugcagucaccugcuucauua

SEQ ID NO: 400167 - RNA, 20 nt, Human
gcuugaugcuacauuugugg

SEQ ID NO: 400168 - RNA, 23 nt, Human
guagaacacuucugauguauuua

SEQ ID NO: 400169 - RNA, 24 nt, Human
guugucuugcuuuaugaagaugac

SEQ ID NO: 400170 - RNA, 21 nt, Human
uaaaagcuucucucuuacuaa

SEQ ID NO: 400171 - RNA, 18 nt, Human
uaccacagugaaacuuca

SEQ ID NO: 400172 - RNA, 19 nt, Human
uaccacagugaaacuucaa

SEQ ID NO: 400173 - RNA, 18 nt, Human
uagauaauuaaccugaau

SEQ ID NO: 400174 - RNA, 22 nt, Human
uaggccucuaucauaagacccu

SEQ ID NO: 400175 - RNA, 23 nt, Human
ucaccaaucacaaccucaggcac

SEQ ID NO: 400176 - RNA, 20 nt, Human
ucagacagccuugauuaaga

SEQ ID NO: 400177 - RNA, 19 nt, Human
ucucaugggccaugcacau

SEQ ID NO: 400178 - RNA, 18 nt, Human
ucuggaacuaagagagaa

SEQ ID NO: 400179 - RNA, 25 nt, Human
ugccaaaaaaugcaaucaucugcau

SEQ ID NO: 400180 - RNA, 26 nt, Human
ugcuaaaaaagaauagcaauuaaauu

SEQ ID NO: 400181 - RNA, 19 nt, Human
ugcuaccugugagucuggc

SEQ ID NO: 400182 - RNA, 19 nt, Human
uggacaaaaaucuagauaa

SEQ ID NO: 400183 - RNA, 22 nt, Human
uggagcggggccaggaucccag

SEQ ID NO: 400184 - RNA, 22 nt, Human
uggcuugaugcuacauuugugg

SEQ ID NO: 400185 - RNA, 19 nt, Human
uggguuaauaaauagacuu

SEQ ID NO: 400186 - RNA, 23 nt, Human
uguaagaaagcaagacaacccaa

SEQ ID NO: 400187 - RNA, 27 nt, Human
uguguaauucauuuugcuaccugugag

SEQ ID NO: 400188 - RNA, 18 nt, Human
uguuaaagauucaauuua

SEQ ID NO: 400189 - RNA, 22 nt, Human
uuaaaagcuucucucuuacuaa

SEQ ID NO: 400190 - RNA, 23 nt, Human
uuagccuaacucaaagcuaugca

SEQ ID NO: 400191 - RNA, 18 nt, Human
uugaugcuacauuugugg

SEQ ID NO: 400192 - RNA, 21 nt, Human
uugccuugggcagugucagaa

SEQ ID NO: 400193 - RNA, 21 nt, Human
uuuaaaacagcuuuguaaaua

SEQ ID NO: 400194 - RNA, 19 nt, Human
uuuaaagugucauaauguu

SEQ ID NO: 400195 - RNA, 21 nt, Human
uuucacaggcuuuguccuuga

SEQ ID NO: 400196 - RNA, 23 nt, Human
uuuucuccugacguuugcaaaug

SEQ ID NO: 400197 - RNA, 19 nt, Human
aaaaaauggaaaacucucc

SEQ ID NO: 400198 - RNA, 24 nt, Human
aacaauucugauaccagcaacauc

SEQ ID NO: 400199 - RNA, 25 nt, Human
agcagaaaguagaaauguuucagaa

SEQ ID NO: 400200 - RNA, 18 nt, Human
aggaaggaaaacacuuaa

SEQ ID NO: 400201 - RNA, 20 nt, Human
augaagaauagcaguuuucc

SEQ ID NO: 400202 - RNA, 26 nt, Human
augaagcaauaacaauucugauacca

SEQ ID NO: 400203 - RNA, 21 nt, Human
caccaaguaauuuacauacau

SEQ ID NO: 400204 - RNA, 18 nt, Human
caguaaccaucaguuuaa

SEQ ID NO: 400205 - RNA, 23 nt, Human
cagucccucgugccgaaucuugg

SEQ ID NO: 400206 - RNA, 19 nt, Human
cagucuuuucccuucuacc

SEQ ID NO: 400207 - RNA, 30 nt, Human
caugagcccuuggugaucuucugaagucuu

SEQ ID NO: 400208 - RNA, 21 nt, Human
cauuuuguucucuugauaaag

SEQ ID NO: 400209 - RNA, 27 nt, Human
cauuuuguucucuugauaaagaaaaau

SEQ ID NO: 400210 - RNA, 22 nt, Human
ccaacugacuuacaguaaccau

SEQ ID NO: 400211 - RNA, 24 nt, Human
ccaacugacuuacaguaaccauca

SEQ ID NO: 400212 - RNA, 18 nt, Human
cugauaccagcaacaucc

SEQ ID NO: 400213 - RNA, 21 nt, Human
cuugguuggaagauuuguagc

SEQ ID NO: 400214 - RNA, 22 nt, Human
gaagucuuccaaagauuacacu

SEQ ID NO: 400215 - RNA, 21 nt, Human
gcauuuuguucucuugauaaa

SEQ ID NO: 400216 - RNA, 19 nt, Human
ggggagggagaccugcuuu

SEQ ID NO: 400217 - RNA, 19 nt, Human
ggggguggggagggagacc

SEQ ID NO: 400218 - RNA, 21 nt, Human
uaacaccaaguaauuuacaua

SEQ ID NO: 400219 - RNA, 23 nt, Human
uaacuguuuuaacauucuggcau

SEQ ID NO: 400220 - RNA, 24 nt, Human
uacccaggaaaauuuuacaugaug

SEQ ID NO: 400221 - RNA, 24 nt, Human
uagauuuaugaagaauagcaguuu

SEQ ID NO: 400222 - RNA, 20 nt, Human
uagcagaaaguagaaauguu

SEQ ID NO: 400223 - RNA, 25 nt, Human
uagcagaaaguagaaauguuucaga

SEQ ID NO: 400224 - RNA, 21 nt, Human
uagcaguuuuccuucuugguu

SEQ ID NO: 400225 - RNA, 20 nt, Human
uaugcaauucugcacugcac

SEQ ID NO: 400226 - RNA, 18 nt, Human
ucaccaacaugagcccuu

SEQ ID NO: 400227 - RNA, 24 nt, Human
ucuaucauauuuauuaucuuugau

SEQ ID NO: 400228 - RNA, 19 nt, Human
ugauaccagcaacaucccu

SEQ ID NO: 400229 - RNA, 23 nt, Human
ugcuuuuauuauagaaaugacuu

SEQ ID NO: 400230 - RNA, 18 nt, Human
ugggggguggggagggag

SEQ ID NO: 400231 - RNA, 21 nt, Human
uguuuaacaguuuucuuuuuu

SEQ ID NO: 400232 - RNA, 22 nt, Human
uugauaacaacuaaaaaaaaaa

SEQ ID NO: 400233 - RNA, 23 nt, Human
uuggugaucuucugaagucuucc

SEQ ID NO: 400234 - RNA, 22 nt, Human
uuuaaaaaauggaaaacucucc

SEQ ID NO: 400235 - RNA, 23 nt, Human
uuuuacaguuguauuuuuuugcc

SEQ ID NO: 400236 - RNA, 20 nt, Human
aggaaaggaggacagaugag

SEQ ID NO: 400237 - RNA, 22 nt, Human
cacugugugguacucacagagc

SEQ ID NO: 400238 - RNA, 21 nt, Human
cccccucccacugugugguac

SEQ ID NO: 400239 - RNA, 23 nt, Human
gaggacagaugaggauuuaagug

SEQ ID NO: 400240 - RNA, 23 nt, Human
gggcuuuuauuuacaggaaagga

SEQ ID NO: 400241 - RNA, 18 nt, Human
uccagugcucccagcgcu

SEQ ID NO: 400242 - RNA, 21 nt, Human
uccagugcucccagcgcuagu

SEQ ID NO: 400243 - RNA, 19 nt, Human
uccugguggucaccucccu

SEQ ID NO: 400244 - RNA, 20 nt, Human
ugguaaagggaaaugcagug

SEQ ID NO: 400245 - RNA, 24 nt, Human
uuuuuuuuuuuggauagaagggcu

SEQ ID NO: 400246 - RNA, 21 nt, Human
uuuuuuuuuuuuuuggauaga

SEQ ID NO: 400247 - RNA, 18 nt, Human
uuuuuuuuuuuuuuuuug

SEQ ID NO: 400248 - RNA, 18 nt, Human
uuuuuuuuuuuuuuuuug

SEQ ID NO: 400249 - RNA, 24 nt, Human
aaaagaaaacauaguccaaacaga

SEQ ID NO: 400250 - RNA, 20 nt, Human
aaacauaguccaaacagauc

SEQ ID NO: 400251 - RNA, 24 nt, Human
aaacauaguccaaacagaucacac

SEQ ID NO: 400252 - RNA, 24 nt, Human
aaagauaucaccagaagcuaugua

SEQ ID NO: 400253 - RNA, 21 nt, Human
aaggccucaaccgcgccggaa

SEQ ID NO: 400254 - RNA, 18 nt, Human
aauagaccuauuguugca

SEQ ID NO: 400255 - RNA, 20 nt, Human
aauagaccuauuguugcaaa

SEQ ID NO: 400256 - RNA, 29 nt, Human
acacaaaaaucuugguaaaagaacuagaa

SEQ ID NO: 400257 - RNA, 22 nt, Human
agaaaagaaaacauaguccaaa

SEQ ID NO: 400258 - RNA, 22 nt, Human
agaagaaaagaaaacauagucc

SEQ ID NO: 400259 - RNA, 21 nt, Human
agcaagugggagaagaaaaga

SEQ ID NO: 400260 - RNA, 22 nt, Human
aggacaaaugcugacuuuggca

SEQ ID NO: 400261 - RNA, 21 nt, Human
aggguaaagagaaaguuaagg

SEQ ID NO: 400262 - RNA, 21 nt, Human
aggguguuuucacaaggaaau

SEQ ID NO: 400263 - RNA, 23 nt, Human
caaaaccagucaaaauccuacca

SEQ ID NO: 400264 - RNA, 20 nt, Human
caaacagaucacacaaggga

SEQ ID NO: 400265 - RNA, 28 nt, Human
caaacagaucacacaagggaacccagga

SEQ ID NO: 400266 - RNA, 19 nt, Human
cacaagggaacccaggaca

SEQ ID NO: 400267 - RNA, 22 nt, Human
caccgaaggccucaaccgcgcc

SEQ ID NO: 400268 - RNA, 22 nt, Human
caugaaaagauaucaccagaag

SEQ ID NO: 400269 - RNA, 19 nt, Human
cauguccucccacaccaaa

SEQ ID NO: 400270 - RNA, 20 nt, Human
ccaccgaaggccucaaccuc

SEQ ID NO: 400271 - RNA, 23 nt, Human
ccauguccucccacaccaaaaga

SEQ ID NO: 400272 - RNA, 21 nt, Human
ccccauguccucccacaccaa

SEQ ID NO: 400273 - RNA, 22 nt, Human
ccccauguccucccacaccaaa

SEQ ID NO: 400274 - RNA, 18 nt, Human
ccgcgccggaaccggggc

SEQ ID NO: 400275 - RNA, 19 nt, Human
cugcuggcugagguacaag

SEQ ID NO: 400276 - RNA, 25 nt, Human
gaaaagaaaacauaguccaaacaga

SEQ ID NO: 400277 - RNA, 19 nt, Human
gaacccaggacaaaugcug

SEQ ID NO: 400278 - RNA, 21 nt, Human
gaagcccaagcugcugagcaa

SEQ ID NO: 400279 - RNA, 23 nt, Human
uacaguucaaagcucacuuuuau

SEQ ID NO: 400280 - RNA, 21 nt, Human
uaggugguaccccaugucccc

SEQ ID NO: 400281 - RNA, 18 nt, Human
ucacauccaucaccauuu

SEQ ID NO: 400282 - RNA, 19 nt, Human
uccaaacagaucacacaag

SEQ ID NO: 400283 - RNA, 22 nt, Human
ucccacaccaaaagagaucagu

SEQ ID NO: 400284 - RNA, 19 nt, Human
ugccuugauggugcuguug

SEQ ID NO: 400285 - RNA, 22 nt, Human
ugcuggcugagguacaaggugg

SEQ ID NO: 400286 - RNA, 22 nt, Human
uggaagcccaagcugcugagca

SEQ ID NO: 400287 - RNA, 21 nt, Human
uuaauugucuaaaaugacauu

SEQ ID NO: 400288 - RNA, 21 nt, Human
uucugcuggcugagguacaag

SEQ ID NO: 400289 - RNA, 20 nt, Human
uuuuuuuuuuuucaagcagu

SEQ ID NO: 400290 - RNA, 24 nt, Human
uuuuuuuuuuuuuuuuuuuucaag

SEQ ID NO: 400291 - RNA, 20 nt, Human
aaaagacaaguaguucuaca

SEQ ID NO: 400292 - RNA, 21 nt, Human
aaguaccugaaagauaagaua

SEQ ID NO: 400293 - RNA, 23 nt, Human
acaaaaacucgcggacacaaagc

SEQ ID NO: 400294 - RNA, 21 nt, Human
acuaaaacaaccuuaacagaa

SEQ ID NO: 400295 - RNA, 24 nt, Human
agacccggacacaaaagaccccag

SEQ ID NO: 400296 - RNA, 25 nt, Human
agccaagccagacccggacacaaaa

SEQ ID NO: 400297 - RNA, 22 nt, Human
caaaaacucgcggacacaaagc

SEQ ID NO: 400298 - RNA, 22 nt, Human
caaccuuaacagaaaagaaaau

SEQ ID NO: 400299 - RNA, 19 nt, Human
cacaaagccaagccagacc

SEQ ID NO: 400300 - RNA, 18 nt, Human
cauaaaguaccugaaaga

SEQ ID NO: 400301 - RNA, 23 nt, Human
cauaaaguaccugaaagauaaga

SEQ ID NO: 400302 - RNA, 19 nt, Human
ccaagccagacccggacac

SEQ ID NO: 400303 - RNA, 24 nt, Human
ccaagccagacccggacacaaaag

SEQ ID NO: 400304 - RNA, 20 nt, Human
ccagacccggacacaaaaga

SEQ ID NO: 400305 - RNA, 21 nt, Human
cccuccccacagccuuugccg

SEQ ID NO: 400306 - RNA, 24 nt, Human
ccgccuccgagccucacggcuccu

SEQ ID NO: 400307 - RNA, 23 nt, Human
ccgcgcugccgccuccgagccuc

SEQ ID NO: 400308 - RNA, 22 nt, Human
ccuccgagccucacggcuccug

SEQ ID NO: 400309 - RNA, 24 nt, Human
cgcugccgccuccgagccucacgg

SEQ ID NO: 400310 - RNA, 19 nt, Human
cgcugcggagcggaacaaa

SEQ ID NO: 400311 - RNA, 24 nt, Human
cggagcggaacaaaaacucgcgga

SEQ ID NO: 400312 - RNA, 24 nt, Human
cuccuggccggggaccgcgcugcc

SEQ ID NO: 400313 - RNA, 24 nt, Human
gacacaaaagaccccagagccgaa

SEQ ID NO: 400314 - RNA, 18 nt, Human
gaucugcgaagcccccuc

SEQ ID NO: 400315 - RNA, 19 nt, Human
gccgccgccgcucacgccg

SEQ ID NO: 400316 - RNA, 20 nt, Human
gccggcgcgcuugcuccugg

SEQ ID NO: 400317 - RNA, 21 nt, Human
gccuuugccgccgccgcucac

SEQ ID NO: 400318 - RNA, 20 nt, Human
gcuugcuccuggccggggac

SEQ ID NO: 400319 - RNA, 19 nt, Human
ggacacaaagccaagccag

SEQ ID NO: 400320 - RNA, 22 nt, Human
uaaaacaaccuuaacagaaaag

SEQ ID NO: 400321 - RNA, 19 nt, Human
uacacaggcaauuacuuuu

SEQ ID NO: 400322 - RNA, 23 nt, Human
uagaaaagacaaguaguucuaca

SEQ ID NO: 400323 - RNA, 26 nt, Human
uagcccuaucuggaaacuaaaacaac

SEQ ID NO: 400324 - RNA, 21 nt, Human
uaucuggaaacuaaaacaacc

SEQ ID NO: 400325 - RNA, 19 nt, Human
ucugcgaagcccccucccc

SEQ ID NO: 400326 - RNA, 20 nt, Human
ucugcgaagcccccucccca

SEQ ID NO: 400327 - RNA, 19 nt, Human
ugcccgggaagagcgcugc

SEQ ID NO: 400328 - RNA, 18 nt, Human
aaaacgacgucaaggacg

SEQ ID NO: 400329 - RNA, 25 nt, Human
aaaagggacccuuccccugguugga

SEQ ID NO: 400330 - RNA, 23 nt, Human
aaacauaacauggaaacagugua

SEQ ID NO: 400331 - RNA, 22 nt, Human
aacaaaacacaucuuucucuuc

SEQ ID NO: 400332 - RNA, 19 nt, Human
aagaaggggcaauaaagaa

SEQ ID NO: 400333 - RNA, 20 nt, Human
aauggcagagagugccaaag

SEQ ID NO: 400334 - RNA, 18 nt, Human
acacaucuuucucuucuu

SEQ ID NO: 400335 - RNA, 21 nt, Human
acuguuuccaaggucccuggg

SEQ ID NO: 400336 - RNA, 18 nt, Human
agagcaggcugggcaggg

SEQ ID NO: 400337 - RNA, 23 nt, Human
agggaccacagagaguccaaaac

SEQ ID NO: 400338 - RNA, 20 nt, Human
agggagagcaggcugggcag

SEQ ID NO: 400339 - RNA, 23 nt, Human
agggagagcaggcugggcagggg

SEQ ID NO: 400340 - RNA, 21 nt, Human
agggaggaugaggaggaaggc

SEQ ID NO: 400341 - RNA, 21 nt, Human
agggucagggaggaugaggag

SEQ ID NO: 400342 - RNA, 21 nt, Human
agggugcuaggagcaggguca

SEQ ID NO: 400343 - RNA, 21 nt, Human
aucaacagcaucgaguaauga

SEQ ID NO: 400344 - RNA, 24 nt, Human
caaaaaaagacaaacaguuguuca

SEQ ID NO: 400345 - RNA, 20 nt, Human
caaaauuggccccuggaaaa

SEQ ID NO: 400346 - RNA, 19 nt, Human
caaagcagcugaaauaggc

SEQ ID NO: 400347 - RNA, 21 nt, Human
caaagcagcugaaauaggcca

SEQ ID NO: 400348 - RNA, 22 nt, Human
caaagccagacaaguucacugu

SEQ ID NO: 400349 - RNA, 26 nt, Human
cacccaaugugcagguggagaccugc

SEQ ID NO: 400350 - RNA, 20 nt, Human
caccccucuccuccacacuu

SEQ ID NO: 400351 - RNA, 22 nt, Human
caccccucuccuccacacuuga

SEQ ID NO: 400352 - RNA, 23 nt, Human
caccuuacagugccaacuguuuc

SEQ ID NO: 400353 - RNA, 25 nt, Human
caccuuuuaggaugugucuugggga

SEQ ID NO: 400354 - RNA, 22 nt, Human
cagccgcugcaggugccaccug

SEQ ID NO: 400355 - RNA, 24 nt, Human
caggccugaagaggccaacauggu

SEQ ID NO: 400356 - RNA, 22 nt, Human
caggcggcgcuccccgccccuc

SEQ ID NO: 400357 - RNA, 21 nt, Human
caucucaagucauccagcagc

SEQ ID NO: 400358 - RNA, 22 nt, Human
caugcacggggaagcaaaacca

SEQ ID NO: 400359 - RNA, 19 nt, Human
cccacaaccagccggccau

SEQ ID NO: 400360 - RNA, 18 nt, Human
cccaugaagggcuggucc

SEQ ID NO: 400361 - RNA, 21 nt, Human
ccccauggaccucaauuucca

SEQ ID NO: 400362 - RNA, 20 nt, Human
ccccuggaaaggacucagca

SEQ ID NO: 400363 - RNA, 23 nt, Human
ccccuggaaaggacucagcaggg

SEQ ID NO: 400364 - RNA, 20 nt, Human
ccgccuccgccuccgccucc

SEQ ID NO: 400365 - RNA, 20 nt, Human
ccuccgccuccgccuccugc

SEQ ID NO: 400366 - RNA, 23 nt, Human
ccuuccccugguuggaaacccac

SEQ ID NO: 400367 - RNA, 23 nt, Human
cgcccuccgccuccgccuccgcc

SEQ ID NO: 400368 - RNA, 20 nt, Human
cgccuccgccuccugcuuag

SEQ ID NO: 400369 - RNA, 23 nt, Human
cgccuccgccuccugcuuagcuc

SEQ ID NO: 400370 - RNA, 20 nt, Human
cuccaggcggcgcuccccgc

SEQ ID NO: 400371 - RNA, 20 nt, Human
cuccccgccccucgcccucc

SEQ ID NO: 400372 - RNA, 20 nt, Human
cucuaagaguaaaucaugca

SEQ ID NO: 400373 - RNA, 21 nt, Human
cuggccaccauccagggcugc

SEQ ID NO: 400374 - RNA, 19 nt, Human
cuggucccuuuauuucugg

SEQ ID NO: 400375 - RNA, 19 nt, Human
gaccgccagugcccacaac

SEQ ID NO: 400376 - RNA, 19 nt, Human
gagagguaggcuggggaca

SEQ ID NO: 400377 - RNA, 21 nt, Human
gccuccaccccucuccuccac

SEQ ID NO: 400378 - RNA, 21 nt, Human
ggaagcaaaaccagccccauu

SEQ ID NO: 400379 - RNA, 24 nt, Human
ggagugcucagggcaaguuccuuu

SEQ ID NO: 400380 - RNA, 23 nt, Human
ggccaccacucuuacuuggcaaa

SEQ ID NO: 400381 - RNA, 28 nt, Human
ggcgcuccccgccccucgcccuccgccu

SEQ ID NO: 400382 - RNA, 18 nt, Human
gggaagcaaaaccagccc

SEQ ID NO: 400383 - RNA, 19 nt, Human
ggggcagccuccaccccuc

SEQ ID NO: 400384 - RNA, 19 nt, Human
ggguuagggagagcaggcu

SEQ ID NO: 400385 - RNA, 23 nt, Human
ggugcuaggagcagggucaggga

SEQ ID NO: 400386 - RNA, 19 nt, Human
gucccuuuauuucuggccc

SEQ ID NO: 400387 - RNA, 24 nt, Human
guccuagcuguagaaucauucauu

SEQ ID NO: 400388 - RNA, 22 nt, Human
gugccaaagccagacaaguuca

SEQ ID NO: 400389 - RNA, 21 nt, Human
uaaaaaugaagugaccucuga

SEQ ID NO: 400390 - RNA, 24 nt, Human
uaagaacccaucagcaaaaucccc

SEQ ID NO: 400391 - RNA, 20 nt, Human
uacaaaaaaagacaaacagu

SEQ ID NO: 400392 - RNA, 20 nt, Human
uaccaaguggccccagaggg

SEQ ID NO: 400393 - RNA, 23 nt, Human
uaucuggaauguucaauaugacc

SEQ ID NO: 400394 - RNA, 25 nt, Human
uaucuggaauguucaauaugaccug

SEQ ID NO: 400395 - RNA, 19 nt, Human
ucaggagccagucauuuug

SEQ ID NO: 400396 - RNA, 18 nt, Human
ucaugguuauggcacuug

SEQ ID NO: 400397 - RNA, 19 nt, Human
ucauucauuucauucuugc

SEQ ID NO: 400398 - RNA, 18 nt, Human
uccagggcugcuaaggcu

SEQ ID NO: 400399 - RNA, 18 nt, Human
uccccgccccucgcccuc

SEQ ID NO: 400400 - RNA, 24 nt, Human
ucucuacagaggcaugugcacaga

SEQ ID NO: 400401 - RNA, 18 nt, Human
ugaccucugaaucaucuc

SEQ ID NO: 400402 - RNA, 20 nt, Human
ugacuaccacgucaccaccc

SEQ ID NO: 400403 - RNA, 20 nt, Human
ugagcauccuugauuucccc

SEQ ID NO: 400404 - RNA, 18 nt, Human
ugaggaggaaggcugagu

SEQ ID NO: 400405 - RNA, 20 nt, Human
ugauuucccccauggaccuc

SEQ ID NO: 400406 - RNA, 19 nt, Human
ugccaccuggcugucuccc

SEQ ID NO: 400407 - RNA, 18 nt, Human
ugcuuugaaaaaaaaauc

SEQ ID NO: 400408 - RNA, 18 nt, Human
uggaaaggacucagcagg

SEQ ID NO: 400409 - RNA, 19 nt, Human
uggaauguucaauaugacc

SEQ ID NO: 400410 - RNA, 19 nt, Human
uggccaccauccagggcug

SEQ ID NO: 400411 - RNA, 22 nt, Human
uggccaccauccagggcugcua

SEQ ID NO: 400412 - RNA, 24 nt, Human
ugggcaggggagccacugcagccu

SEQ ID NO: 400413 - RNA, 19 nt, Human
ugucuauauucucacccca

SEQ ID NO: 400414 - RNA, 23 nt, Human
uuaucaacagcaucgaguaauga

SEQ ID NO: 400415 - RNA, 20 nt, Human
uuguggagagguaggcuggg

SEQ ID NO: 400416 - RNA, 18 nt, Human
uuuaauaaaaaugaagug

SEQ ID NO: 400417 - RNA, 21 nt, Human
uuucacaauugaacuuuacag

SEQ ID NO: 400418 - RNA, 22 nt, Human
uuucuggccaccauccagggcu

SEQ ID NO: 400419 - RNA, 27 nt, Human
uuuuuuuuuuuuuuuuuuuugcuuuga

SEQ ID NO: 400420 - RNA, 27 nt, Human
uuuuuuuuuuuuuuuuuuuuuuugggg

SEQ ID NO: 400421 - RNA, 21 nt, Human
aaaaaaacaaaaaacaaaaag

SEQ ID NO: 400422 - RNA, 23 nt, Human
aaaaacaaaaagcagcuugaagg

SEQ ID NO: 400423 - RNA, 20 nt, Human
aacagagcgagacuccaccu

SEQ ID NO: 400424 - RNA, 20 nt, Human
aacauggugaaacccugucu

SEQ ID NO: 400425 - RNA, 21 nt, Human
aacauggugaaacccugucuc

SEQ ID NO: 400426 - RNA, 23 nt, Human
aagaccccuggagagaaaaccag

SEQ ID NO: 400427 - RNA, 22 nt, Human
aagcaccaaaugcuacaaagaa

SEQ ID NO: 400428 - RNA, 22 nt, Human
aagcaggcacaucauuugaggu

SEQ ID NO: 400429 - RNA, 26 nt, Human
aagcaggcacaucauuugaggucagg

SEQ ID NO: 400430 - RNA, 21 nt, Human
aagucuuggaaguagaaaggg

SEQ ID NO: 400431 - RNA, 21 nt, Human
aaugagucauuagggugggcc

SEQ ID NO: 400432 - RNA, 24 nt, Human
acagagcgagacuccaccucaaaa

SEQ ID NO: 400433 - RNA, 24 nt, Human
accaaaugcuacaaagaaaucaug

SEQ ID NO: 400434 - RNA, 24 nt, Human
accagggaagcggaggcugcagug

SEQ ID NO: 400435 - RNA, 24 nt, Human
acccugucucuacuaaaaauacaa

SEQ ID NO: 400436 - RNA, 21 nt, Human
acggcauucugaccacccacc

SEQ ID NO: 400437 - RNA, 21 nt, Human
acggcauucugaccacccacc

SEQ ID NO: 400438 - RNA, 22 nt, Human
acucguccuccccgucuuugca

SEQ ID NO: 400439 - RNA, 22 nt, Human
acucguccuccccgucuuugca

SEQ ID NO: 400440 - RNA, 24 nt, Human
acugcacuccagccugggcaacag

SEQ ID NO: 400441 - RNA, 24 nt, Human
acugcacuccagccugggcaacag

SEQ ID NO: 400442 - RNA, 19 nt, Human
agaaagacacguugagguc

SEQ ID NO: 400443 - RNA, 21 nt, Human
agaaucgcuugaaccagggaa

SEQ ID NO: 400444 - RNA, 20 nt, Human
agcacugugggaggcugaag

SEQ ID NO: 400445 - RNA, 22 nt, Human
agccuggccaacauggugaaac

SEQ ID NO: 400446 - RNA, 24 nt, Human
agccuggccaacauggugaaaccc

SEQ ID NO: 400447 - RNA, 24 nt, Human
agccugggcaacagagcgagacuc

SEQ ID NO: 400448 - RNA, 21 nt, Human
agcuacuggggaagcugaggc

SEQ ID NO: 400449 - RNA, 20 nt, Human
agcugugaacaccuggagca

SEQ ID NO: 400450 - RNA, 23 nt, Human
aggaagagcagaaagccccagaa

SEQ ID NO: 400451 - RNA, 18 nt, Human
aggcaagagaaucgcuug

SEQ ID NO: 400452 - RNA, 21 nt, Human
aggcaggaauuaaccaacagc

SEQ ID NO: 400453 - RNA, 24 nt, Human
aggcgugguggcccaugccuguaa

SEQ ID NO: 400454 - RNA, 22 nt, Human
aggcuaggcgugguggcccaug

SEQ ID NO: 400455 - RNA, 24 nt, Human
agggaaagggccacccaccaaggg

SEQ ID NO: 400456 - RNA, 24 nt, Human
agggauuucgccacugcacuccag

SEQ ID NO: 400457 - RNA, 20 nt, Human
agguuccuacacgggagucc

SEQ ID NO: 400458 - RNA, 19 nt, Human
aguguuacuggcuucccau

SEQ ID NO: 400459 - RNA, 22 nt, Human
auaaucaacugaugccaacacc

SEQ ID NO: 400460 - RNA, 18 nt, Human
aucaaugcaaugauccca

SEQ ID NO: 400461 - RNA, 18 nt, Human
aucaaugcaaugauccca

SEQ ID NO: 400462 - RNA, 20 nt, Human
aucauuugaggucagggguu

SEQ ID NO: 400463 - RNA, 23 nt, Human
aucauuugaggucagggguuuga

SEQ ID NO: 400464 - RNA, 24 nt, Human
aucauuugaggucagggguuugag

SEQ ID NO: 400465 - RNA, 18 nt, Human
auccuuucccccuccccu

SEQ ID NO: 400466 - RNA, 19 nt, Human
augccuguaaucccagcac

SEQ ID NO: 400467 - RNA, 24 nt, Human
auuucgccacugcacuccagccug

SEQ ID NO: 400468 - RNA, 24 nt, Human
caaaugcuacaaagaaaucaugaa

SEQ ID NO: 400469 - RNA, 23 nt, Human
caacagagcgagacuccaccuca

SEQ ID NO: 400470 - RNA, 24 nt, Human
caacauggugaaacccugucucua

SEQ ID NO: 400471 - RNA, 19 nt, Human
caacugaugccaacaccaa

SEQ ID NO: 400472 - RNA, 21 nt, Human
caagcaccaaaugcuacaaag

SEQ ID NO: 400473 - RNA, 22 nt, Human
cacagcgguacucguccucccc

SEQ ID NO: 400474 - RNA, 24 nt, Human
cacaucauuugaggucagggguuu

SEQ ID NO: 400475 - RNA, 22 nt, Human
caccaaaugcuacaaagaaauc

SEQ ID NO: 400476 - RNA, 21 nt, Human
caccucaaaaaaacaaaaaac

SEQ ID NO: 400477 - RNA, 24 nt, Human
caccucaaaaaaacaaaaaacaaa

SEQ ID NO: 400478 - RNA, 20 nt, Human
caccuguggucccagcuacu

SEQ ID NO: 400479 - RNA, 23 nt, Human
caccuguggucccagcuacuggg

SEQ ID NO: 400480 - RNA, 22 nt, Human
cacgggaguccaggggaggauc

SEQ ID NO: 400481 - RNA, 19 nt, Human
cacuaacaacugucccccu

SEQ ID NO: 400482 - RNA, 24 nt, Human
cacuccagccugggcaacagagcg

SEQ ID NO: 400483 - RNA, 18 nt, Human
cacugcacuccagccugg

SEQ ID NO: 400484 - RNA, 19 nt, Human
cacugcacuccagccuggg

SEQ ID NO: 400485 - RNA, 21 nt, Human
cacugcacuccagccugggca

SEQ ID NO: 400486 - RNA, 22 nt, Human
cacugcacuccagccugggcaa

SEQ ID NO: 400487 - RNA, 23 nt, Human
cacugcacuccagccugggcaac

SEQ ID NO: 400488 - RNA, 24 nt, Human
cacugcacuccagccugggcaaca

SEQ ID NO: 400489 - RNA, 19 nt, Human
cagaaccugacuuggagug

SEQ ID NO: 400490 - RNA, 22 nt, Human
cagaaccugacuuggagugcca

SEQ ID NO: 400491 - RNA, 23 nt, Human
cagaaccugacuuggagugccau

SEQ ID NO: 400492 - RNA, 19 nt, Human
cagauggaagggugccucu

SEQ ID NO: 400493 - RNA, 18 nt, Human
cagcacugugggaggcug

SEQ ID NO: 400494 - RNA, 24 nt, Human
cagcacugugggaggcugaagcag

SEQ ID NO: 400495 - RNA, 20 nt, Human
cagcagugacaggaucugug

SEQ ID NO: 400496 - RNA, 21 nt, Human
cagcugugaacaccuggagca

SEQ ID NO: 400497 - RNA, 24 nt, Human
cagcugugaacaccuggagcacgg

SEQ ID NO: 400498 - RNA, 24 nt, Human
cagcugugaacaccuggagcacgg

SEQ ID NO: 400499 - RNA, 19 nt, Human
cagguggcuacuugucccc

SEQ ID NO: 400500 - RNA, 24 nt, Human
caucauuugaggucagggguuuga

SEQ ID NO: 400501 - RNA, 20 nt, Human
caugccuguaaucccagcac

SEQ ID NO: 400502 - RNA, 22 nt, Human
caugccuguaaucccagcacug

SEQ ID NO: 400503 - RNA, 23 nt, Human
ccaaaugcuacaaagaaaucaug

SEQ ID NO: 400504 - RNA, 23 nt, Human
ccaacagcucuuucagagugcaa

SEQ ID NO: 400505 - RNA, 20 nt, Human
ccaagggugucugcucgugu

SEQ ID NO: 400506 - RNA, 22 nt, Human
ccaccucaaaaaaacaaaaaac

SEQ ID NO: 400507 - RNA, 20 nt, Human
ccacugcacuccagccuggg

SEQ ID NO: 400508 - RNA, 21 nt, Human
ccacugcacuccagccugggc

SEQ ID NO: 400509 - RNA, 22 nt, Human
ccacugcacuccagccugggca

SEQ ID NO: 400510 - RNA, 23 nt, Human
ccacugcacuccagccugggcaa

SEQ ID NO: 400511 - RNA, 24 nt, Human
ccacugcacuccagccugggcaac

SEQ ID NO: 400512 - RNA, 22 nt, Human
ccagaccaauggccagugcuaa

SEQ ID NO: 400513 - RNA, 19 nt, Human
ccaggggaggaucgggcug

SEQ ID NO: 400514 - RNA, 18 nt, Human
ccaugccuguaaucccag

SEQ ID NO: 400515 - RNA, 19 nt, Human
cccacaugugaaaauaagu

SEQ ID NO: 400516 - RNA, 23 nt, Human
cccaugccuguaaucccagcacu

SEQ ID NO: 400517 - RNA, 20 nt, Human
cccccagaaagacacguuga

SEQ ID NO: 400518 - RNA, 21 nt, Human
cccccagaaagacacguugag

SEQ ID NO: 400519 - RNA, 19 nt, Human
cccgagccguccggugccc

SEQ ID NO: 400520 - RNA, 20 nt, Human
cccugagcagucgaagugga

SEQ ID NO: 400521 - RNA, 21 nt, Human
cccuugcaaguugcugcuucu

SEQ ID NO: 400522 - RNA, 19 nt, Human
ccuacacgggaguccaggg

SEQ ID NO: 400523 - RNA, 22 nt, Human
ccuggccaacauggugaaaccc

SEQ ID NO: 400524 - RNA, 24 nt, Human
ccuggccaacauggugaaacccug

SEQ ID NO: 400525 - RNA, 22 nt, Human
ccugggcaacagagcgagacuc

SEQ ID NO: 400526 - RNA, 21 nt, Human
ccuguaaucccagcacugugg

SEQ ID NO: 400527 - RNA, 22 nt, Human
ccuguaaucccagcacuguggg

SEQ ID NO: 400528 - RNA, 22 nt, Human
ccuguggucccagcuacugggg

SEQ ID NO: 400529 - RNA, 18 nt, Human
ccuuaauuagggaaaggg

SEQ ID NO: 400530 - RNA, 20 nt, Human
ccuuucccccuccccucuuu

SEQ ID NO: 400531 - RNA, 26 nt, Human
cgaaguggaugcccagaccaauggcc

SEQ ID NO: 400532 - RNA, 20 nt, Human
cgccacugcacuccagccug

SEQ ID NO: 400533 - RNA, 24 nt, Human
cgccacugcacuccagccugggca

SEQ ID NO: 400534 - RNA, 25 nt, Human
cgccuccaccucuaccucauaauuc

SEQ ID NO: 400535 - RNA, 21 nt, Human
cgggcaccuguggucccagcu

SEQ ID NO: 400536 - RNA, 18 nt, Human
cgggccugcuacuggugc

SEQ ID NO: 400537 - RNA, 21 nt, Human
cgucaagcaccaaaugcuaca

SEQ ID NO: 400538 - RNA, 19 nt, Human
cgucaggaauuuugcaaga

SEQ ID NO: 400539 - RNA, 19 nt, Human
cugaugccaacaccaacau

SEQ ID NO: 400540 - RNA, 24 nt, Human
cuggccaacauggugaaacccugu

SEQ ID NO: 400541 - RNA, 21 nt, Human
cuugaagguugugcuggaauc

SEQ ID NO: 400542 - RNA, 19 nt, Human
gaaaagggaggaaggcagg

SEQ ID NO: 400543 - RNA, 19 nt, Human
gaaacccugucucuacuaa

SEQ ID NO: 400544 - RNA, 25 nt, Human
gaaagggccacccaccaaggggcac

SEQ ID NO: 400545 - RNA, 19 nt, Human
gaagguugugcuggaauca

SEQ ID NO: 400546 - RNA, 21 nt, Human
gacuccaccucaaaaaaacaa

SEQ ID NO: 400547 - RNA, 22 nt, Human
gagaaucgcuugaaccagggaa

SEQ ID NO: 400548 - RNA, 23 nt, Human
gagagcagccuggccaacauggu

SEQ ID NO: 400549 - RNA, 18 nt, Human
gagucauuccuagauuaa

SEQ ID NO: 400550 - RNA, 23 nt, Human
gauaaucaacugaugccaacacc

SEQ ID NO: 400551 - RNA, 24 nt, Human
gcacuccagccugggcaacagagc

SEQ ID NO: 400552 - RNA, 24 nt, Human
gccaacauggugaaacccugucuc

SEQ ID NO: 400553 - RNA, 22 nt, Human
gccacugcacuccagccugggc

SEQ ID NO: 400554 - RNA, 24 nt, Human
gccacugcacuccagccugggcaa

SEQ ID NO: 400555 - RNA, 20 nt, Human
gcccaaagaaaggugccuua

SEQ ID NO: 400556 - RNA, 21 nt, Human
gccccagaaccugacuuggag

SEQ ID NO: 400557 - RNA, 21 nt, Human
gcccuugcaaguugcugcuuc

SEQ ID NO: 400558 - RNA, 19 nt, Human
gccggaacucagagcucca

SEQ ID NO: 400559 - RNA, 24 nt, Human
gccuccaccucuaccucauaauuc

SEQ ID NO: 400560 - RNA, 19 nt, Human
gccuuaauuagggaaaggg

SEQ ID NO: 400561 - RNA, 22 nt, Human
gcgggcaccuguggucccagcu

SEQ ID NO: 400562 - RNA, 19 nt, Human
gcgucuuuucugaguggcu

SEQ ID NO: 400563 - RNA, 23 nt, Human
ggaggcugcagugagcagggauu

SEQ ID NO: 400564 - RNA, 19 nt, Human
ggccacaguguuacuggcu

SEQ ID NO: 400565 - RNA, 19 nt, Human
gggaagcugaggcaagaga

SEQ ID NO: 400566 - RNA, 23 nt, Human
gggauuucgccacugcacuccag

SEQ ID NO: 400567 - RNA, 24 nt, Human
gguggcccaugccuguaaucccag

SEQ ID NO: 400568 - RNA, 21 nt, Human
gugggaggcugaagcaggcac

SEQ ID NO: 400569 - RNA, 31 nt, Human
uaaccagaaaaaggaagagcagaaagccccc

SEQ ID NO: 400570 - RNA, 22 nt, Human
uacaaagaaaucaugaaaauag

SEQ ID NO: 400571 - RNA, 23 nt, Human
uacaaagaaaucaugaaaauagg

SEQ ID NO: 400572 - RNA, 20 nt, Human
ucaaaggacaauaauacguc

SEQ ID NO: 400573 - RNA, 18 nt, Human
ucagcccaaagaaaggug

SEQ ID NO: 400574 - RNA, 20 nt, Human
ucagcccaaagaaaggugcc

SEQ ID NO: 400575 - RNA, 22 nt, Human
ucagcccaaagaaaggugccuu

SEQ ID NO: 400576 - RNA, 21 nt, Human
ucaggaacucagguggcuacu

SEQ ID NO: 400577 - RNA, 20 nt, Human
ucaguccuaccugcuccacc

SEQ ID NO: 400578 - RNA, 22 nt, Human
ucauaauucccgagucccaaaa

SEQ ID NO: 400579 - RNA, 24 nt, Human
uccaagggugucugcucgggcgca

SEQ ID NO: 400580 - RNA, 18 nt, Human
uccaccucaaaaaaacaa

SEQ ID NO: 400581 - RNA, 19 nt, Human
uccacgaagcagcugugaa

SEQ ID NO: 400582 - RNA, 19 nt, Human
uccacgaagcagcugugaa

SEQ ID NO: 400583 - RNA, 23 nt, Human
uccagccugggcaacagagcgag

SEQ ID NO: 400584 - RNA, 24 nt, Human
uccagccugggcaacagagcgaga

SEQ ID NO: 400585 - RNA, 22 nt, Human
ucccaaaaauguagauggcacc

SEQ ID NO: 400586 - RNA, 25 nt, Human
ucccaaaaauguagauggcaccucg

SEQ ID NO: 400587 - RNA, 18 nt, Human
ucccauaaacacagcccu

SEQ ID NO: 400588 - RNA, 19 nt, Human
ucccgagucccaaaaaugu

SEQ ID NO: 400589 - RNA, 21 nt, Human
ucccugagcagucgaagugga

SEQ ID NO: 400590 - RNA, 21 nt, Human
ucucuacuaaaaauacaaaaa

SEQ ID NO: 400591 - RNA, 19 nt, Human
ucuggucccuagagaugaa

SEQ ID NO: 400592 - RNA, 21 nt, Human
ugaaccagggaagcggaggcu

SEQ ID NO: 400593 - RNA, 26 nt, Human
ugaagcaggcacaucauuugagguca

SEQ ID NO: 400594 - RNA, 20 nt, Human
ugacaaggauuauaaagcag

SEQ ID NO: 400595 - RNA, 19 nt, Human
ugacccgguuauuccaugg

SEQ ID NO: 400596 - RNA, 24 nt, Human
ugagagcagccuggccaacauggu

SEQ ID NO: 400597 - RNA, 18 nt, Human
ugagcagucgaaguggac

SEQ ID NO: 400598 - RNA, 20 nt, Human
ugaggcaagagaaucgcuug

SEQ ID NO: 400599 - RNA, 24 nt, Human
ugaggcaagagaaucgcuugaacc

SEQ ID NO: 400600 - RNA, 24 nt, Human
ugaggcuaggcgugguggcccaug

SEQ ID NO: 400601 - RNA, 24 nt, Human
ugagggaaggaaacauauuauuug

SEQ ID NO: 400602 - RNA, 19 nt, Human
ugaggggaugugcuauggg

SEQ ID NO: 400603 - RNA, 18 nt, Human
ugaggucagggguuugag

SEQ ID NO: 400604 - RNA, 22 nt, Human
ugcccagaccaauggccagugc

SEQ ID NO: 400605 - RNA, 23 nt, Human
ugccuguaaucccagcacugugg

SEQ ID NO: 400606 - RNA, 23 nt, Human
ugccuguaaucccagcacugugg

SEQ ID NO: 400607 - RNA, 24 nt, Human
ugccuguaaucccagcacuguggg

SEQ ID NO: 400608 - RNA, 20 nt, Human
ugcuggaaucagauggaagg

SEQ ID NO: 400609 - RNA, 20 nt, Human
uggaaaaaacuucaauggca

SEQ ID NO: 400610 - RNA, 21 nt, Human
uggaaaaaacuucaauggcag

SEQ ID NO: 400611 - RNA, 19 nt, Human
uggaaucaaaggacaauaa

SEQ ID NO: 400612 - RNA, 22 nt, Human
uggaaucagauggaagggugcc

SEQ ID NO: 400613 - RNA, 24 nt, Human
uggccaacauggugaaacccuguc

SEQ ID NO: 400614 - RNA, 21 nt, Human
uggcccaugccuguaauccca

SEQ ID NO: 400615 - RNA, 22 nt, Human
uggcccaugccuguaaucccag

SEQ ID NO: 400616 - RNA, 24 nt, Human
uggcccaugccuguaaucccagca

SEQ ID NO: 400617 - RNA, 21 nt, Human
uggccuggagagucuuuacag

SEQ ID NO: 400618 - RNA, 24 nt, Human
uggcgggcaccuguggucccagcu

SEQ ID NO: 400619 - RNA, 24 nt, Human
ugggaggcugaagcaggcacauca

SEQ ID NO: 400620 - RNA, 24 nt, Human
ugguggcccaugccuguaauccca

SEQ ID NO: 400621 - RNA, 24 nt, Human
ugguggcgggcaccugugguccca

SEQ ID NO: 400622 - RNA, 22 nt, Human
ugugcagguuccuacacgggag

SEQ ID NO: 400623 - RNA, 23 nt, Human
ugugguggcgggcaccugugguc

SEQ ID NO: 400624 - RNA, 18 nt, Human
uuaguugggugugguggc

SEQ ID NO: 400625 - RNA, 24 nt, Human
uuaguugggugugguggcgggcac

SEQ ID NO: 400626 - RNA, 24 nt, Human
uucccccuccccucuuugcagaga

SEQ ID NO: 400627 - RNA, 20 nt, Human
uuccuagauuaaccucccca

SEQ ID NO: 400628 - RNA, 21 nt, Human
uucugaguggcuguugguggc

SEQ ID NO: 400629 - RNA, 19 nt, Human
uugaauaguaucccccaga

SEQ ID NO: 400630 - RNA, 21 nt, Human
uuggaaguagaaagggugggu

SEQ ID NO: 400631 - RNA, 19 nt, Human
uuuaaugagaaaagauaau

SEQ ID NO: 400632 - RNA, 21 nt, Human
uuuggaaucaaaggacaauaa

SEQ ID NO: 400633 - RNA, 21 nt, Human
uuuuuuuuuuuaggagcauca

SEQ ID NO: 400634 - RNA, 18 nt, Human
uuuuuuuuuuuuaggagc

SEQ ID NO: 400635 - RNA, 19 nt, Human
uuuuuuuuuuuuugaggga

SEQ ID NO: 400636 - RNA, 22 nt, Human
uuuuuuuuuuuuuuuuugaggg

SEQ ID NO: 400637 - RNA, 21 nt, Human
uuuuuuuuuuuuuuuuuuagg

SEQ ID NO: 400638 - RNA, 28 nt, Human
uuuuuuuuuuuuuuuuuuuuuuugaggg

SEQ ID NO: 400639 - RNA, 21 nt, Human
aagucccuggucagcacuggc

SEQ ID NO: 400640 - RNA, 20 nt, Human
acacagcucuuuaauaauag

SEQ ID NO: 400641 - RNA, 24 nt, Human
accccugagaccuuguucaguggg

SEQ ID NO: 400642 - RNA, 20 nt, Human
acccuuuccuucuccucucc

SEQ ID NO: 400643 - RNA, 21 nt, Human
accuuguucagugggcugugu

SEQ ID NO: 400644 - RNA, 22 nt, Human
agauugucaccccaaggcagca

SEQ ID NO: 400645 - RNA, 21 nt, Human
agggcaggaaggaagcggcuc

SEQ ID NO: 400646 - RNA, 25 nt, Human
augacaacaguagguaacgguaguc

SEQ ID NO: 400647 - RNA, 24 nt, Human
cagcccacagugaucugggcuuuu

SEQ ID NO: 400648 - RNA, 18 nt, Human
ccacacagguccuggcug

SEQ ID NO: 400649 - RNA, 23 nt, Human
cccacacagguccuggcuggcca

SEQ ID NO: 400650 - RNA, 18 nt, Human
cccacagugaucugggcu

SEQ ID NO: 400651 - RNA, 22 nt, Human
ccgcugagcaagcugcugccuc

SEQ ID NO: 400652 - RNA, 23 nt, Human
ccucugggcgccucugggcugcg

SEQ ID NO: 400653 - RNA, 23 nt, Human
ccugagaccuuguucagugggcu

SEQ ID NO: 400654 - RNA, 18 nt, Human
ccuucuccucuccagccc

SEQ ID NO: 400655 - RNA, 21 nt, Human
cuagggcugcugacuuccucu

SEQ ID NO: 400656 - RNA, 25 nt, Human
cuccaagaaaugcugaggcuguggg

SEQ ID NO: 400657 - RNA, 24 nt, Human
cuccagcccacagugaucugggcu

SEQ ID NO: 400658 - RNA, 23 nt, Human
ggcagagggguguacccaagggg

SEQ ID NO: 400659 - RNA, 21 nt, Human
gggcaggaaggaagcggcucc

SEQ ID NO: 400660 - RNA, 23 nt, Human
gggcaggaaggaagcggcuccca

SEQ ID NO: 400661 - RNA, 20 nt, Human
uacaagacagccugcuucca

SEQ ID NO: 400662 - RNA, 18 nt, Human
uagcaauaccccugagac

SEQ ID NO: 400663 - RNA, 21 nt, Human
uagggcagugcauuuuauauu

SEQ ID NO: 400664 - RNA, 19 nt, Human
uagugugggaaaguuccuu

SEQ ID NO: 400665 - RNA, 24 nt, Human
ucagaagucccuggucagcacugg

SEQ ID NO: 400666 - RNA, 25 nt, Human
ucaguagugugggaaaguuccuucu

SEQ ID NO: 400667 - RNA, 21 nt, Human
ucagugggcugugucucuccc

SEQ ID NO: 400668 - RNA, 20 nt, Human
uccgcugagcaagcugcugc

SEQ ID NO: 400669 - RNA, 19 nt, Human
ucucuuacaggaauugagg

SEQ ID NO: 400670 - RNA, 22 nt, Human
ucugugauccucccggucuccc

SEQ ID NO: 400671 - RNA, 18 nt, Human
ucuugcucugugucugac

SEQ ID NO: 400672 - RNA, 22 nt, Human
ucuugcucugugucugacuuug

SEQ ID NO: 400673 - RNA, 23 nt, Human
ucuugcucugugucugacuuugg

SEQ ID NO: 400674 - RNA, 24 nt, Human
ucuugcucugugucugacuuuggg

SEQ ID NO: 400675 - RNA, 18 nt, Human
ucuuuaauaauaguggcc

SEQ ID NO: 400676 - RNA, 18 nt, Human
ugacuuccucugggcgcc

SEQ ID NO: 400677 - RNA, 19 nt, Human
ugauccucccggucucccu

SEQ ID NO: 400678 - RNA, 19 nt, Human
ugcuccaagaaaugcugag

SEQ ID NO: 400679 - RNA, 18 nt, Human
ugcugaggcugugggcag

SEQ ID NO: 400680 - RNA, 24 nt, Human
uggagcugagauugucaccccaag

SEQ ID NO: 400681 - RNA, 21 nt, Human
uggccagcaggucagaagucc

SEQ ID NO: 400682 - RNA, 18 nt, Human
uggcgcagacccuuuccu

SEQ ID NO: 400683 - RNA, 21 nt, Human
uggcucugugauccucccggu

SEQ ID NO: 400684 - RNA, 20 nt, Human
uggcuggaggaggcccgagu

SEQ ID NO: 400685 - RNA, 19 nt, Human
ugggaaaguuccuucuugg

SEQ ID NO: 400686 - RNA, 18 nt, Human
ugggagcaccaagugugg

SEQ ID NO: 400687 - RNA, 21 nt, Human
ugggagcaccaaguguggccg

SEQ ID NO: 400688 - RNA, 19 nt, Human
ugggaugcugggagcacca

SEQ ID NO: 400689 - RNA, 25 nt, Human
ugggaugcugggagcaccaaguguc

SEQ ID NO: 400690 - RNA, 20 nt, Human
ugggcagggcaggaaggaag

SEQ ID NO: 400691 - RNA, 21 nt, Human
ugggcuuuuacaagacagccu

SEQ ID NO: 400692 - RNA, 24 nt, Human
ugggugaagacggacagggcuggc

SEQ ID NO: 400693 - RNA, 23 nt, Human
uuaauaauaguggccauagcuuu

SEQ ID NO: 400694 - RNA, 19 nt, Human
uucuccucuccagcccaca

SEQ ID NO: 400695 - RNA, 20 nt, Human
uuuauauuacaacugguuuc

SEQ ID NO: 400696 - RNA, 23 nt, Human
uuuauauuacaacugguuucuug

SEQ ID NO: 400697 - RNA, 18 nt, Human
uuuuuuuuuuuuuuuuug

SEQ ID NO: 400698 - RNA, 20 nt, Human
aaaagcacuuccauuuugua

SEQ ID NO: 400699 - RNA, 23 nt, Human
aaaagcacuuccauuuuguagcc

SEQ ID NO: 400700 - RNA, 19 nt, Human
aaagcccuucucgcccucc

SEQ ID NO: 400701 - RNA, 22 nt, Human
aggaagccguagggagcaaucc

SEQ ID NO: 400702 - RNA, 21 nt, Human
aggcggaggcugcagcuggag

SEQ ID NO: 400703 - RNA, 22 nt, Human
aggcggaggcugcagcuggagg

SEQ ID NO: 400704 - RNA, 24 nt, Human
agugagcgugagaaacagccaccu

SEQ ID NO: 400705 - RNA, 19 nt, Human
auccaaagugagcgugaga

SEQ ID NO: 400706 - RNA, 21 nt, Human
augggagaagcaggcguggcc

SEQ ID NO: 400707 - RNA, 21 nt, Human
cacuccgcuaagucuuucacc

SEQ ID NO: 400708 - RNA, 25 nt, Human
cacuuccgcguucaagugguuaaaa

SEQ ID NO: 400709 - RNA, 22 nt, Human
cagcccgcagagccgucugagg

SEQ ID NO: 400710 - RNA, 21 nt, Human
cagcgcagcgccgccgcugcc

SEQ ID NO: 400711 - RNA, 19 nt, Human
cagcgccgccgcugccagg

SEQ ID NO: 400712 - RNA, 21 nt, Human
caggucgcaaaagcacuucca

SEQ ID NO: 400713 - RNA, 19 nt, Human
caggucuuugaugucaaaa

SEQ ID NO: 400714 - RNA, 24 nt, Human
ccaaagugagcgugagaaacagcc

SEQ ID NO: 400715 - RNA, 27 nt, Human
ccacacugcagcccagcacacaaagcg

SEQ ID NO: 400716 - RNA, 19 nt, Human
ccacagaaaaagaggcgac

SEQ ID NO: 400717 - RNA, 20 nt, Human
cccgcaaccugagaaagccc

SEQ ID NO: 400718 - RNA, 19 nt, Human
cccgcaaccugagaaagcu

SEQ ID NO: 400719 - RNA, 19 nt, Human
cccgcgccacacugcagcc

SEQ ID NO: 400720 - RNA, 22 nt, Human
cccgcgccacacugcagcccag

SEQ ID NO: 400721 - RNA, 18 nt, Human
cccuccguccccugcugu

SEQ ID NO: 400722 - RNA, 20 nt, Human
cccuccguccccugcuguuu

SEQ ID NO: 400723 - RNA, 23 nt, Human
cgacccgcaaccugagaaagccc

SEQ ID NO: 400724 - RNA, 23 nt, Human
cgcaaccugagaaagcccuucuc

SEQ ID NO: 400725 - RNA, 20 nt, Human
cuaaaauggagcccaggucu

SEQ ID NO: 400726 - RNA, 22 nt, Human
cuaccaguucuucgcccgcgcc

SEQ ID NO: 400727 - RNA, 18 nt, Human
cucgcccuccguccccug

SEQ ID NO: 400728 - RNA, 21 nt, Human
cugagaaagcccuucucgccc

SEQ ID NO: 400729 - RNA, 18 nt, Human
cugaggcugggagacggc

SEQ ID NO: 400730 - RNA, 23 nt, Human
cugcagcuggagcuugcgacaac

SEQ ID NO: 400731 - RNA, 23 nt, Human
gagcuuccucuuuccacagaaaa

SEQ ID NO: 400732 - RNA, 19 nt, Human
gcagcccagcacacaaagc

SEQ ID NO: 400733 - RNA, 18 nt, Human
gccacacugcagcccagc

SEQ ID NO: 400734 - RNA, 21 nt, Human
gccacacugcagcccagcaca

SEQ ID NO: 400735 - RNA, 26 nt, Human
gccuccauugucagcaggucuuugau

SEQ ID NO: 400736 - RNA, 18 nt, Human
gcgcccgcuuucuagucu

SEQ ID NO: 400737 - RNA, 19 nt, Human
gcgugagaaacagccaccu

SEQ ID NO: 400738 - RNA, 21 nt, Human
ggagacggcucggggcucggg

SEQ ID NO: 400739 - RNA, 21 nt, Human
ggcaagaauuccuaaaaugga

SEQ ID NO: 400740 - RNA, 22 nt, Human
ggcaucccuagcacacaugccu

SEQ ID NO: 400741 - RNA, 19 nt, Human
ggcccggaagcuaguccug

SEQ ID NO: 400742 - RNA, 23 nt, Human
uaaaauggagcccaggucgcaaa

SEQ ID NO: 400743 - RNA, 24 nt, Human
uaagucuuucaccaacauucaagc

SEQ ID NO: 400744 - RNA, 23 nt, Human
uaccaguucuucgcccgcgccac

SEQ ID NO: 400745 - RNA, 24 nt, Human
ucacguaggcggaggcugcagcug

SEQ ID NO: 400746 - RNA, 19 nt, Human
uccaaagugagcgugagaa

SEQ ID NO: 400747 - RNA, 19 nt, Human
uccacagaaaaagaggcga

SEQ ID NO: 400748 - RNA, 23 nt, Human
uccacagaaaaagaggcgacacc

SEQ ID NO: 400749 - RNA, 19 nt, Human
ucccugccagccagacagg

SEQ ID NO: 400750 - RNA, 19 nt, Human
uccgcuaagucuuucacca

SEQ ID NO: 400751 - RNA, 18 nt, Human
uccgggucucuguacugg

SEQ ID NO: 400752 - RNA, 18 nt, Human
ucucacguaggcggaggc

SEQ ID NO: 400753 - RNA, 20 nt, Human
ugagaaagcccuucucgccc

SEQ ID NO: 400754 - RNA, 21 nt, Human
ugagcuuccucuuuccacaga

SEQ ID NO: 400755 - RNA, 20 nt, Human
uggaagagaauaggaaagcu

SEQ ID NO: 400756 - RNA, 20 nt, Human
uggaauguuccggaauaaag

SEQ ID NO: 400757 - RNA, 22 nt, Human
uggagcccaggucgcaaaagca

SEQ ID NO: 400758 - RNA, 18 nt, Human
ugggagaagcaggcgugg

SEQ ID NO: 400759 - RNA, 24 nt, Human
ugggagaagcaggcguggccucca

SEQ ID NO: 400760 - RNA, 19 nt, Human
uguccgggucucuguacug

SEQ ID NO: 400761 - RNA, 23 nt, Human
uucaagcuauuuuccuucccugc

SEQ ID NO: 400762 - RNA, 26 nt, Human
uuccacagaaaaagaggcgacaccuu

SEQ ID NO: 400763 - RNA, 22 nt, Human
acgcagugagcagccacggccc

SEQ ID NO: 400764 - RNA, 22 nt, Human
aggccccccacggcccccgccc

SEQ ID NO: 400765 - RNA, 19 nt, Human
caggccccccacggccccc

SEQ ID NO: 400766 - RNA, 19 nt, Human
cccacccuccucccggccu

SEQ ID NO: 400767 - RNA, 19 nt, Human
cccccacggcccccgcccc

SEQ ID NO: 400768 - RNA, 21 nt, Human
cccccacggcccccgccccgc

SEQ ID NO: 400769 - RNA, 20 nt, Human
ccuccaggccccccacggcc

SEQ ID NO: 400770 - RNA, 22 nt, Human
ccucccgcggcuccugcccucc

SEQ ID NO: 400771 - RNA, 20 nt, Human
ccuccuccaggccccccacg

SEQ ID NO: 400772 - RNA, 21 nt, Human
cgcagugagcagccacggccc

SEQ ID NO: 400773 - RNA, 27 nt, Human
cggcuccugcccuccuccaggcccccc

SEQ ID NO: 400774 - RNA, 22 nt, Human
cgggggcugcugcugccugcag

SEQ ID NO: 400775 - RNA, 20 nt, Human
cuccaggccccccacggccc

SEQ ID NO: 400776 - RNA, 19 nt, Human
cuccugcccuccuccaggc

SEQ ID NO: 400777 - RNA, 18 nt, Human
cugcugcugccugcagcg

SEQ ID NO: 400778 - RNA, 21 nt, Human
gcaagguccccacccuccucc

SEQ ID NO: 400779 - RNA, 21 nt, Human
gcccuccuccaggccccccac

SEQ ID NO: 400780 - RNA, 22 nt, Human
ucccgcggcuccugcccuccuc

SEQ ID NO: 400781 - RNA, 23 nt, Human
uccgaacgcagugagcagccacg

SEQ ID NO: 400782 - RNA, 19 nt, Human
ugcaaaaagaggcuccaag

SEQ ID NO: 400783 - RNA, 24 nt, Human
ugcugcugccugcagcgggucugg

SEQ ID NO: 400784 - RNA, 18 nt, Human
uuuuuuuccucuccgcga

SEQ ID NO: 400785 - RNA, 22 nt, Human
aaacuaccccuguacauccuac

SEQ ID NO: 400786 - RNA, 21 nt, Human
aaagaaagaaaucacagagga

SEQ ID NO: 400787 - RNA, 23 nt, Human
aaauacaaucagguacuguccag

SEQ ID NO: 400788 - RNA, 19 nt, Human
aagaaagaaaucacagagg

SEQ ID NO: 400789 - RNA, 19 nt, Human
aauguaaaaaaagggaugg

SEQ ID NO: 400790 - RNA, 23 nt, Human
agaaaucacagaggaggugaggc

SEQ ID NO: 400791 - RNA, 23 nt, Human
auccuaccccucucccaucccag

SEQ ID NO: 400792 - RNA, 25 nt, Human
auuauuauauuaauaauauuaauca

SEQ ID NO: 400793 - RNA, 20 nt, Human
caaaucaguugucccugauc

SEQ ID NO: 400794 - RNA, 25 nt, Human
caacaaaacagaaacauguuggaga

SEQ ID NO: 400795 - RNA, 21 nt, Human
cacuuucagcagaauugggga

SEQ ID NO: 400796 - RNA, 18 nt, Human
cagcgcugccuuugugcc

SEQ ID NO: 400797 - RNA, 19 nt, Human
cagguacuguccagaaaug

SEQ ID NO: 400798 - RNA, 20 nt, Human
caucccagagccaccuaaga

SEQ ID NO: 400799 - RNA, 26 nt, Human
ccacgugcgcguucccccgaguuccc

SEQ ID NO: 400800 - RNA, 24 nt, Human
ccagguguggaccgaugguugggc

SEQ ID NO: 400801 - RNA, 22 nt, Human
ccccagcagcgcugccuuugug

SEQ ID NO: 400802 - RNA, 24 nt, Human
ccccagcagcgcugccuuugugcc

SEQ ID NO: 400803 - RNA, 22 nt, Human
ccccagggauccauggucagcu

SEQ ID NO: 400804 - RNA, 19 nt, Human
ccccgaguuccccagcagc

SEQ ID NO: 400805 - RNA, 20 nt, Human
cccuguacauccuaccccuc

SEQ ID NO: 400806 - RNA, 25 nt, Human
ccuuugugcccacggaggcgggggc

SEQ ID NO: 400807 - RNA, 22 nt, Human
cgagagaccuagguccuuggaa

SEQ ID NO: 400808 - RNA, 20 nt, Human
cgcucugggccgccuuauuc

SEQ ID NO: 400809 - RNA, 23 nt, Human
cuguugccguuggccccagggau

SEQ ID NO: 400810 - RNA, 23 nt, Human
gaaguaccuggaguguggagcug

SEQ ID NO: 400811 - RNA, 20 nt, Human
gaggugaggcccaugcuguu

SEQ ID NO: 400812 - RNA, 18 nt, Human
gagguggguuuggcuggg

SEQ ID NO: 400813 - RNA, 19 nt, Human
gcagcgcugccuuugugcc

SEQ ID NO: 400814 - RNA, 19 nt, Human
gcccacggaggcgggggcg

SEQ ID NO: 400815 - RNA, 18 nt, Human
gccuuauuccucucucac

SEQ ID NO: 400816 - RNA, 21 nt, Human
gccuuauuccucucucaccca

SEQ ID NO: 400817 - RNA, 19 nt, Human
gcugcuggggcucuagggc

SEQ ID NO: 400818 - RNA, 20 nt, Human
gcugcuggggcucuagggcu

SEQ ID NO: 400819 - RNA, 18 nt, Human
gcugggugcugcuggggc

SEQ ID NO: 400820 - RNA, 23 nt, Human
ggaagaaguaccuggagugugga

SEQ ID NO: 400821 - RNA, 19 nt, Human
ggaccgaugguugggcugg

SEQ ID NO: 400822 - RNA, 21 nt, Human
ggaggugaggcccaugcuguu

SEQ ID NO: 400823 - RNA, 26 nt, Human
ggagguggguuuggcuggggggaucc

SEQ ID NO: 400824 - RNA, 23 nt, Human
ggagguggguuuggcugggugcu

SEQ ID NO: 400825 - RNA, 19 nt, Human
guggagcugcggcgguucc

SEQ ID NO: 400826 - RNA, 25 nt, Human
uaacaaaaauaaugacaauuaauua

SEQ ID NO: 400827 - RNA, 19 nt, Human
uagggcucuagggauucac

SEQ ID NO: 400828 - RNA, 19 nt, Human
ucaguugucccugaucuuc

SEQ ID NO: 400829 - RNA, 22 nt, Human
ucccacgugcgcguucccccga

SEQ ID NO: 400830 - RNA, 24 nt, Human
ucccaucccagagccaccuaagag

SEQ ID NO: 400831 - RNA, 20 nt, Human
uccuaccccucucccauccc

SEQ ID NO: 400832 - RNA, 20 nt, Human
uccuuggaagaaguaccugg

SEQ ID NO: 400833 - RNA, 24 nt, Human
ugaaucaaacaacaaaacagaaac

SEQ ID NO: 400834 - RNA, 21 nt, Human
ugccguuggccccagggaucc

SEQ ID NO: 400835 - RNA, 23 nt, Human
ugccguuggccccagggauccau

SEQ ID NO: 400836 - RNA, 19 nt, Human
ugcgcgcgggagaggcggg

SEQ ID NO: 400837 - RNA, 21 nt, Human
ugcggcgguucccacgugcgc

SEQ ID NO: 400838 - RNA, 22 nt, Human
ugcugaaucaaacaacaaaaca

SEQ ID NO: 400839 - RNA, 20 nt, Human
uggaagaaguaccuggagug

SEQ ID NO: 400840 - RNA, 19 nt, Human
uggagguggguuuggcugg

SEQ ID NO: 400841 - RNA, 18 nt, Human
uggggcucuagggcucua

SEQ ID NO: 400842 - RNA, 21 nt, Human
uguaaaaaaagggauggcuuc

SEQ ID NO: 400843 - RNA, 24 nt, Human
uguaaaaaaagggauggcuuccaa

SEQ ID NO: 400844 - RNA, 19 nt, Human
uguccagaaauguuuugga

SEQ ID NO: 400845 - RNA, 21 nt, Human
uguccagaaauguuuuggaaa

SEQ ID NO: 400846 - RNA, 22 nt, Human
uuggaagaaguaccuggagugu

SEQ ID NO: 400847 - RNA, 20 nt, Human
aaaaaacauaaucaaaagaa

SEQ ID NO: 400848 - RNA, 24 nt, Human
aaaacauaaucaaaagaaggcaca

SEQ ID NO: 400849 - RNA, 22 nt, Human
aagaaggcacagaggccagggg

SEQ ID NO: 400850 - RNA, 19 nt, Human
aagcccccaauucucuuuu

SEQ ID NO: 400851 - RNA, 26 nt, Human
aagcuguaggccccagugaguucugg

SEQ ID NO: 400852 - RNA, 22 nt, Human
aaggaggggguaauaaagggau

SEQ ID NO: 400853 - RNA, 20 nt, Human
acccuaagcccccaauucuc

SEQ ID NO: 400854 - RNA, 27 nt, Human
agaggccagggggcuacaugggaacag

SEQ ID NO: 400855 - RNA, 19 nt, Human
agaugucagggaucaaagc

SEQ ID NO: 400856 - RNA, 20 nt, Human
agcauucuggccagaaccaa

SEQ ID NO: 400857 - RNA, 18 nt, Human
aggaaggccuaaggucca

SEQ ID NO: 400858 - RNA, 24 nt, Human
agggagcuggcuccauggggaggg

SEQ ID NO: 400859 - RNA, 18 nt, Human
aggggagagaggguggag

SEQ ID NO: 400860 - RNA, 23 nt, Human
aggggguaauaaagggauugggg

SEQ ID NO: 400861 - RNA, 22 nt, Human
auaguagggcgauuacagacac

SEQ ID NO: 400862 - RNA, 23 nt, Human
caaacauaaauagagggagcugg

SEQ ID NO: 400863 - RNA, 18 nt, Human
cacacauuccugaauccc

SEQ ID NO: 400864 - RNA, 22 nt, Human
cacggaaaacaugucugagcca

SEQ ID NO: 400865 - RNA, 19 nt, Human
ccagugaguucuggaggcc

SEQ ID NO: 400866 - RNA, 24 nt, Human
ccccaggauaccccggucucccaa

SEQ ID NO: 400867 - RNA, 19 nt, Human
cccccaggauaccccgguc

SEQ ID NO: 400868 - RNA, 19 nt, Human
cccuaagcccccaauucuc

SEQ ID NO: 400869 - RNA, 23 nt, Human
ccugcagcauucuggccagaacc

SEQ ID NO: 400870 - RNA, 21 nt, Human
cuccccuggggagcagaggcu

SEQ ID NO: 400871 - RNA, 18 nt, Human
gagaggaagagaaccugc

SEQ ID NO: 400872 - RNA, 20 nt, Human
gauuacagacacaacucccc

SEQ ID NO: 400873 - RNA, 20 nt, Human
gcauucuggccagaaccaaa

SEQ ID NO: 400874 - RNA, 23 nt, Human
ggagcuggcuccauggggagggc

SEQ ID NO: 400875 - RNA, 23 nt, Human
ggcucccuggucuccagauucca

SEQ ID NO: 400876 - RNA, 18 nt, Human
ggcugggcuccgugucuc

SEQ ID NO: 400877 - RNA, 22 nt, Human
gggguaauaaagggauuggggc

SEQ ID NO: 400878 - RNA, 23 nt, Human
guguccuuuccaggggagagagg

SEQ ID NO: 400879 - RNA, 20 nt, Human
uaagcccccaauucucuuuu

SEQ ID NO: 400880 - RNA, 21 nt, Human
uacauugggucccccaggaua

SEQ ID NO: 400881 - RNA, 25 nt, Human
ucaauuucuaggugaggucuucuca

SEQ ID NO: 400882 - RNA, 19 nt, Human
uccaggggagagagggugg

SEQ ID NO: 400883 - RNA, 22 nt, Human
ucugagccaaggcagcuccuac

SEQ ID NO: 400884 - RNA, 19 nt, Human
ugagaggaagagaaccugc

SEQ ID NO: 400885 - RNA, 21 nt, Human
ugagccagaagagguugaggg

SEQ ID NO: 400886 - RNA, 22 nt, Human
uggagagaggaaggccuaaggu

SEQ ID NO: 400887 - RNA, 24 nt, Human
uggggcaggggaggcguucugagu

SEQ ID NO: 400888 - RNA, 20 nt, Human
ugguugccagcacuucacug

SEQ ID NO: 400889 - RNA, 21 nt, Human
ugucagggaucaaagcuguag

SEQ ID NO: 400890 - RNA, 18 nt, Human
ugucugaaggagggggua

SEQ ID NO: 400891 - RNA, 24 nt, Human
aaaauucuuuccugcccaggaccu

SEQ ID NO: 400892 - RNA, 21 nt, Human
aaacaaaaaggaaugaaaacc

SEQ ID NO: 400893 - RNA, 25 nt, Human
aaacaaaaaggaaugaaaaccaaag

SEQ ID NO: 400894 - RNA, 26 nt, Human
aaacugacaagaaaaucugaccuuca

SEQ ID NO: 400895 - RNA, 19 nt, Human
aaaugcccagucccagacu

SEQ ID NO: 400896 - RNA, 19 nt, Human
aaccaaacuuaucaagccu

SEQ ID NO: 400897 - RNA, 21 nt, Human
aagaaacagaucccacaggca

SEQ ID NO: 400898 - RNA, 23 nt, Human
aagcagcuccgucgggcaggaag

SEQ ID NO: 400899 - RNA, 27 nt, Human
aagcaucacaacaccucaguggggagc

SEQ ID NO: 400900 - RNA, 23 nt, Human
aagccaaacaaaaaggaaugaaa

SEQ ID NO: 400901 - RNA, 28 nt, Human
aagccaaagccugaauuuggccaaagaa

SEQ ID NO: 400902 - RNA, 24 nt, Human
aauaacaguacaaagugcuuuaaa

SEQ ID NO: 400903 - RNA, 22 nt, Human
acaccaugcagugcccacgggc

SEQ ID NO: 400904 - RNA, 22 nt, Human
acauucaagacugugacuaaca

SEQ ID NO: 400905 - RNA, 22 nt, Human
acccaacaaggagugaaggccu

SEQ ID NO: 400906 - RNA, 18 nt, Human
agagacccaggcagcagc

SEQ ID NO: 400907 - RNA, 21 nt, Human
agaugaacuugauaaccugug

SEQ ID NO: 400908 - RNA, 23 nt, Human
agcagggccugucaugccucugg

SEQ ID NO: 400909 - RNA, 21 nt, Human
agccagcaccaaccaagagca

SEQ ID NO: 400910 - RNA, 19 nt, Human
aggaaaaaagacgucccac

SEQ ID NO: 400911 - RNA, 24 nt, Human
aggaacucaccuccuggcuagugc

SEQ ID NO: 400912 - RNA, 21 nt, Human
aggaaugaaaaccaaagcccu

SEQ ID NO: 400913 - RNA, 22 nt, Human
aggcagcagcagcauggggugg

SEQ ID NO: 400914 - RNA, 20 nt, Human
agggaaguggggauuagggg

SEQ ID NO: 400915 - RNA, 21 nt, Human
agggcaaaagaaaugcucagu

SEQ ID NO: 400916 - RNA, 21 nt, Human
aggggaauguggucccuccuc

SEQ ID NO: 400917 - RNA, 22 nt, Human
aggggauggggaggucaaaagg

SEQ ID NO: 400918 - RNA, 20 nt, Human
auaggccaguggucucaggc

SEQ ID NO: 400919 - RNA, 22 nt, Human
caaagcccuaaagaggaacuca

SEQ ID NO: 400920 - RNA, 19 nt, Human
caaaguaguaagcagggac

SEQ ID NO: 400921 - RNA, 19 nt, Human
caagguaccugaccugaga

SEQ ID NO: 400922 - RNA, 19 nt, Human
caccagaacugccuuuccc

SEQ ID NO: 400923 - RNA, 24 nt, Human
caccuuaggaaaaaagacguccca

SEQ ID NO: 400924 - RNA, 23 nt, Human
cagaucccacaggcauggagagg

SEQ ID NO: 400925 - RNA, 19 nt, Human
cagcaggcugccagguuuc

SEQ ID NO: 400926 - RNA, 22 nt, Human
caguagccuucugcacagggcc

SEQ ID NO: 400927 - RNA, 21 nt, Human
cagucccagacuacugugcuu

SEQ ID NO: 400928 - RNA, 21 nt, Human
caucacaacaccucagugggg

SEQ ID NO: 400929 - RNA, 18 nt, Human
cauccuuuaggccgaccu

SEQ ID NO: 400930 - RNA, 24 nt, Human
caucuccauggcugaguuacccaa

SEQ ID NO: 400931 - RNA, 23 nt, Human
caugccagccaacaccaugcagu

SEQ ID NO: 400932 - RNA, 19 nt, Human
caugugccaccucuguagg

SEQ ID NO: 400933 - RNA, 22 nt, Human
cauguuucuggcccaugugaca

SEQ ID NO: 400934 - RNA, 22 nt, Human
ccaaagccugaauuuggccaaa

SEQ ID NO: 400935 - RNA, 22 nt, Human
ccaaauauuacaguuaugugau

SEQ ID NO: 400936 - RNA, 20 nt, Human
ccagagccucauaaucucag

SEQ ID NO: 400937 - RNA, 23 nt, Human
ccagccaacaccaugcagugccc

SEQ ID NO: 400938 - RNA, 24 nt, Human
ccagccaacaccaugcagugccca

SEQ ID NO: 400939 - RNA, 25 nt, Human
cccaauacuggccuguguuguuaac

SEQ ID NO: 400940 - RNA, 23 nt, Human
cccccagcugaggccuaaggggc

SEQ ID NO: 400941 - RNA, 18 nt, Human
ccccgggggcgccucucc

SEQ ID NO: 400942 - RNA, 21 nt, Human
cccgugcccugacucccugag

SEQ ID NO: 400943 - RNA, 18 nt, Human
ccucccugacagcauucc

SEQ ID NO: 400944 - RNA, 23 nt, Human
ccucuacagcaccagaacugccu

SEQ ID NO: 400945 - RNA, 19 nt, Human
ccuguguuguuaacagcag

SEQ ID NO: 400946 - RNA, 18 nt, Human
cggcaaaaaagacugaga

SEQ ID NO: 400947 - RNA, 19 nt, Human
cuaacccugggucuggcau

SEQ ID NO: 400948 - RNA, 22 nt, Human
cucagaaacugacaagaaaauc

SEQ ID NO: 400949 - RNA, 22 nt, Human
cucaguuuccucauuacuagau

SEQ ID NO: 400950 - RNA, 23 nt, Human
cucccugacagcauuccuuugga

SEQ ID NO: 400951 - RNA, 19 nt, Human
cucggcaaaaaagacugag

SEQ ID NO: 400952 - RNA, 23 nt, Human
cucugcccagacccucugaccuc

SEQ ID NO: 400953 - RNA, 20 nt, Human
cugaccucugagcagggccu

SEQ ID NO: 400954 - RNA, 22 nt, Human
cugagcaaccaaauauuacagu

SEQ ID NO: 400955 - RNA, 21 nt, Human
cugcagguagaucaccacacg

SEQ ID NO: 400956 - RNA, 26 nt, Human
cuggaaacuuucaaagaaaaccccca

SEQ ID NO: 400957 - RNA, 19 nt, Human
cuggcccaugugacagcuc

SEQ ID NO: 400958 - RNA, 21 nt, Human
cuuaccccugggcugcuugga

SEQ ID NO: 400959 - RNA, 22 nt, Human
cuuucccccagcugaggccuaa

SEQ ID NO: 400960 - RNA, 23 nt, Human
gaaacagaucccacaggcaugga

SEQ ID NO: 400961 - RNA, 18 nt, Human
gaaaugcucaguuuccuc

SEQ ID NO: 400962 - RNA, 21 nt, Human
gaagguucucagcaggaggug

SEQ ID NO: 400963 - RNA, 22 nt, Human
gaggucaaaaggcaagcaucac

SEQ ID NO: 400964 - RNA, 22 nt, Human
gaucaccaagguaccugaccug

SEQ ID NO: 400965 - RNA, 19 nt, Human
gcaaccaaauauuacaguu

SEQ ID NO: 400966 - RNA, 20 nt, Human
gcagaacagucccucccuga

SEQ ID NO: 400967 - RNA, 21 nt, Human
gcagaagcagcuccgucgggc

SEQ ID NO: 400968 - RNA, 20 nt, Human
gcaugccagccaacaccaug

SEQ ID NO: 400969 - RNA, 18 nt, Human
gcuggaagccaaggguac

SEQ ID NO: 400970 - RNA, 19 nt, Human
ggaagccaaggguacucaa

SEQ ID NO: 400971 - RNA, 19 nt, Human
ggaggucaaaaggcaagca

SEQ ID NO: 400972 - RNA, 22 nt, Human
gggcaaaagaaaugcucaguuu

SEQ ID NO: 400973 - RNA, 22 nt, Human
gggcggguuccacaggauggga

SEQ ID NO: 400974 - RNA, 19 nt, Human
gggucuuggcacccuggag

SEQ ID NO: 400975 - RNA, 18 nt, Human
ggucuuggcacccuggag

SEQ ID NO: 400976 - RNA, 22 nt, Human
guggauuugucuuuaucuuguu

SEQ ID NO: 400977 - RNA, 23 nt, Human
gugucuaacccugggucuggcau

SEQ ID NO: 400978 - RNA, 23 nt, Human
uaaagaaacagaucccacaggca

SEQ ID NO: 400979 - RNA, 19 nt, Human
uaaagaggaacucaccucc

SEQ ID NO: 400980 - RNA, 19 nt, Human
uacuggccuguguuguuaa

SEQ ID NO: 400981 - RNA, 18 nt, Human
uacuuuguuuacuuaccc

SEQ ID NO: 400982 - RNA, 21 nt, Human
uagggucuuggcacccuggag

SEQ ID NO: 400983 - RNA, 19 nt, Human
uaucaaccuccugaauaac

SEQ ID NO: 400984 - RNA, 19 nt, Human
uaugauguggggguaaaau

SEQ ID NO: 400985 - RNA, 22 nt, Human
uaugugaggacagcauggcugg

SEQ ID NO: 400986 - RNA, 19 nt, Human
ucaaagaaaacccccaaac

SEQ ID NO: 400987 - RNA, 20 nt, Human
ucaaagaaaacccccaaacu

SEQ ID NO: 400988 - RNA, 22 nt, Human
uccaaagagcagaaagugggua

SEQ ID NO: 400989 - RNA, 23 nt, Human
uccaaagagcagaaaguggguac

SEQ ID NO: 400990 - RNA, 18 nt, Human
uccacggucuuccugccg

SEQ ID NO: 400991 - RNA, 18 nt, Human
ucuccaaagagcagaaag

SEQ ID NO: 400992 - RNA, 19 nt, Human
ucuccauggcugaguuacc

SEQ ID NO: 400993 - RNA, 18 nt, Human
ucugcccagacccucuga

SEQ ID NO: 400994 - RNA, 24 nt, Human
ugaauaacaguacaaagugcuuua

SEQ ID NO: 400995 - RNA, 21 nt, Human
ugagcagggccugucaugccu

SEQ ID NO: 400996 - RNA, 21 nt, Human
ugcacagggccuaggggaagg

SEQ ID NO: 400997 - RNA, 22 nt, Human
ugcaccagggccucuacagcac

SEQ ID NO: 400998 - RNA, 18 nt, Human
ugccagguuucucagaaa

SEQ ID NO: 400999 - RNA, 22 nt, Human
ugccccagggagcagaagcagc

SEQ ID NO: 401000 - RNA, 20 nt, Human
uggaaaauaauucagauaag

SEQ ID NO: 401001 - RNA, 18 nt, Human
uggccaguggaggccaga

SEQ ID NO: 401002 - RNA, 19 nt, Human
uggcucauguuucuggccc

SEQ ID NO: 401003 - RNA, 18 nt, Human
uggggaggucaaaaggca

SEQ ID NO: 401004 - RNA, 23 nt, Human
uggggcggguuccacaggauggg

SEQ ID NO: 401005 - RNA, 19 nt, Human
uggucccuccucugcccag

SEQ ID NO: 401006 - RNA, 19 nt, Human
ugugaggacagcauggcug

SEQ ID NO: 401007 - RNA, 21 nt, Human
uguggccaagcaugugccacc

SEQ ID NO: 401008 - RNA, 19 nt, Human
uuaaagaaacagaucccac

SEQ ID NO: 401009 - RNA, 18 nt, Human
uuagccauccuucccucc

SEQ ID NO: 401010 - RNA, 19 nt, Human
uuaguguuugcuuccauca

SEQ ID NO: 401011 - RNA, 18 nt, Human
uuccacaggaugggagau

SEQ ID NO: 401012 - RNA, 26 nt, Human
uuccacaggaugggagauagggccuc

SEQ ID NO: 401013 - RNA, 20 nt, Human
uugcuuccaucacuuaugcu

SEQ ID NO: 401014 - RNA, 22 nt, Human
uuggaguugaaaaaugcacaca

SEQ ID NO: 401015 - RNA, 19 nt, Human
uuggcacccuggagggcaa

SEQ ID NO: 401016 - RNA, 20 nt, Human
uuggccaagccaaacaaaaa

SEQ ID NO: 401017 - RNA, 21 nt, Human
uuuaaagaaacagaucccaca

SEQ ID NO: 401018 - RNA, 20 nt, Human
uuuaggccgaccuuggucac

SEQ ID NO: 401019 - RNA, 21 nt, Human
uuucucggcaaaaaagacuga

SEQ ID NO: 401020 - RNA, 24 nt, Human
aaaaaaaaaaaaagugguggaggg

SEQ ID NO: 401021 - RNA, 25 nt, Human
aaaaagauucaacuacccacagcug

SEQ ID NO: 401022 - RNA, 22 nt, Human
aaagugguggagggaggcagga

SEQ ID NO: 401023 - RNA, 20 nt, Human
aaaguugcagauggaacuaa

SEQ ID NO: 401024 - RNA, 20 nt, Human
aacacagcaagacccugucu

SEQ ID NO: 401025 - RNA, 21 nt, Human
aacacagcaagacccugucuc

SEQ ID NO: 401026 - RNA, 24 nt, Human
aaccaggagguccaggcugcagug

SEQ ID NO: 401027 - RNA, 22 nt, Human
aagaggaucacuugaaccagga

SEQ ID NO: 401028 - RNA, 21 nt, Human
aagcaguacucuaaaaaauaa

SEQ ID NO: 401029 - RNA, 21 nt, Human
aagccccugccagacgagagc

SEQ ID NO: 401030 - RNA, 20 nt, Human
aagcuugcccugccccugcc

SEQ ID NO: 401031 - RNA, 21 nt, Human
aaugaaaaggccagaaaugaa

SEQ ID NO: 401032 - RNA, 24 nt, Human
acacagcaagacccugucucaaaa

SEQ ID NO: 401033 - RNA, 24 nt, Human
accaggccacugcacuccagccug

SEQ ID NO: 401034 - RNA, 28 nt, Human
acccugucucaaaaaaaaaaaaaaaaaa

SEQ ID NO: 401035 - RNA, 18 nt, Human
acggcaauaggaaacaaa

SEQ ID NO: 401036 - RNA, 18 nt, Human
acugcacuccagccuggg

SEQ ID NO: 401037 - RNA, 23 nt, Human
acugcacuccagccugggcaaca

SEQ ID NO: 401038 - RNA, 20 nt, Human
agaaagacgaccuggguucu

SEQ ID NO: 401039 - RNA, 21 nt, Human
agacccaagagagccggcccc

SEQ ID NO: 401040 - RNA, 19 nt, Human
agacccgggaggaaccgag

SEQ ID NO: 401041 - RNA, 27 nt, Human
agagcucaucuuuuccuucaggggccu

SEQ ID NO: 401042 - RNA, 22 nt, Human
agcacaggagacccgggaggaa

SEQ ID NO: 401043 - RNA, 20 nt, Human
agcacuuuaggaggcuaagg

SEQ ID NO: 401044 - RNA, 27 nt, Human
agccagacuucuggguggcagggccca

SEQ ID NO: 401045 - RNA, 24 nt, Human
agccugggcaacacagcaagaccc

SEQ ID NO: 401046 - RNA, 18 nt, Human
aggaaacaaauacagagg

SEQ ID NO: 401047 - RNA, 19 nt, Human
aggaaacaaauacagaggc

SEQ ID NO: 401048 - RNA, 23 nt, Human
aggaaacaaauacagaggccaaa

SEQ ID NO: 401049 - RNA, 21 nt, Human
aggagugcaggacugccgaca

SEQ ID NO: 401050 - RNA, 21 nt, Human
aggaucacuugaaccaggagg

SEQ ID NO: 401051 - RNA, 19 nt, Human
aggcagaaguagcaucaga

SEQ ID NO: 401052 - RNA, 19 nt, Human
aggcaggagaggggaggcc

SEQ ID NO: 401053 - RNA, 20 nt, Human
aggcaggucaggccacagga

SEQ ID NO: 401054 - RNA, 18 nt, Human
aggcccagggaggagcag

SEQ ID NO: 401055 - RNA, 23 nt, Human
aggggccguggggccaccuggau

SEQ ID NO: 401056 - RNA, 24 nt, Human
agugacucaugccuauaaucccag

SEQ ID NO: 401057 - RNA, 23 nt, Human
aucuuuuccuucuuucucuucca

SEQ ID NO: 401058 - RNA, 19 nt, Human
augccuauaaucccagcac

SEQ ID NO: 401059 - RNA, 22 nt, Human
caacacagcaagacccugucuc

SEQ ID NO: 401060 - RNA, 20 nt, Human
caacuacccacagcuggcuc

SEQ ID NO: 401061 - RNA, 26 nt, Human
cacagcaagacccugucucaaaaaaa

SEQ ID NO: 401062 - RNA, 24 nt, Human
cacagcucgccacaggacccuaaa

SEQ ID NO: 401063 - RNA, 18 nt, Human
cacaggacccuaaaagcc

SEQ ID NO: 401064 - RNA, 19 nt, Human
cacugcacuccagccuggg

SEQ ID NO: 401065 - RNA, 21 nt, Human
cacugcacuccagccugggca

SEQ ID NO: 401066 - RNA, 22 nt, Human
cacugcacuccagccugggcaa

SEQ ID NO: 401067 - RNA, 23 nt, Human
cacugcacuccagccugggcaac

SEQ ID NO: 401068 - RNA, 24 nt, Human
cacugcacuccagccugggcaaca

SEQ ID NO: 401069 - RNA, 25 nt, Human
cacugcacuccagccugggcaacac

SEQ ID NO: 401070 - RNA, 20 nt, Human
cacugcacuccagccugggg

SEQ ID NO: 401071 - RNA, 27 nt, Human
cagaauaacggccucccaaagaugucc

SEQ ID NO: 401072 - RNA, 19 nt, Human
cagcacugcagaggcauca

SEQ ID NO: 401073 - RNA, 20 nt, Human
cagcacugcagaggcaucag

SEQ ID NO: 401074 - RNA, 20 nt, Human
cagcacuuuaggaggcuaag

SEQ ID NO: 401075 - RNA, 21 nt, Human
cagcacuuuaggaggcuaagg

SEQ ID NO: 401076 - RNA, 20 nt, Human
cagccucuaaaaaugaaaag

SEQ ID NO: 401077 - RNA, 18 nt, Human
caggacccuaaaagcccc

SEQ ID NO: 401078 - RNA, 18 nt, Human
caggaugggagcuccugc

SEQ ID NO: 401079 - RNA, 24 nt, Human
caggccggguacgagugacucaug

SEQ ID NO: 401080 - RNA, 24 nt, Human
caggggacugagacaagaggauca

SEQ ID NO: 401081 - RNA, 22 nt, Human
caguaccugggaaaaggggaca

SEQ ID NO: 401082 - RNA, 23 nt, Human
caugccuauaaucccagcacuuu

SEQ ID NO: 401083 - RNA, 18 nt, Human
ccacgaggaggacaguca

SEQ ID NO: 401084 - RNA, 20 nt, Human
ccacugcacuccagccuggg

SEQ ID NO: 401085 - RNA, 21 nt, Human
ccacugcacuccagccugggc

SEQ ID NO: 401086 - RNA, 23 nt, Human
ccacugcacuccagccugggcaa

SEQ ID NO: 401087 - RNA, 24 nt, Human
ccacugcacuccagccugggcaac

SEQ ID NO: 401088 - RNA, 20 nt, Human
cccacgguggcacccccagg

SEQ ID NO: 401089 - RNA, 22 nt, Human
cccacgguggcacccccagggc

SEQ ID NO: 401090 - RNA, 23 nt, Human
cccaggucagccuucugacccgc

SEQ ID NO: 401091 - RNA, 21 nt, Human
cccccagggccugucccugcc

SEQ ID NO: 401092 - RNA, 20 nt, Human
ccccucucaggcugagaagg

SEQ ID NO: 401093 - RNA, 19 nt, Human
cccugcccagaccucagcc

SEQ ID NO: 401094 - RNA, 19 nt, Human
cccugucucaaaaaaaaaa

SEQ ID NO: 401095 - RNA, 20 nt, Human
ccgacacccagauuugagcc

SEQ ID NO: 401096 - RNA, 19 nt, Human
ccggccccaaauccugacu

SEQ ID NO: 401097 - RNA, 20 nt, Human
ccuaaaagccccugccagac

SEQ ID NO: 401098 - RNA, 18 nt, Human
ccucagccagacuucugg

SEQ ID NO: 401099 - RNA, 20 nt, Human
ccuccugguucuuuccuugc

SEQ ID NO: 401100 - RNA, 21 nt, Human
ccucugacucugccucugaug

SEQ ID NO: 401101 - RNA, 19 nt, Human
ccugcaccuccgccagggc

SEQ ID NO: 401102 - RNA, 20 nt, Human
ccuggcugcacucucccucc

SEQ ID NO: 401103 - RNA, 22 nt, Human
ccuggcugcacucucccuccug

SEQ ID NO: 401104 - RNA, 22 nt, Human
ccugggcaacacagcaagaccc

SEQ ID NO: 401105 - RNA, 22 nt, Human
ccugggguagagcgaggugccc

SEQ ID NO: 401106 - RNA, 20 nt, Human
ccuggguucucuggguaggc

SEQ ID NO: 401107 - RNA, 23 nt, Human
ccugucucaaaaaaaaaaaaaaa

SEQ ID NO: 401108 - RNA, 19 nt, Human
cgccacaggacccuaaaag

SEQ ID NO: 401109 - RNA, 19 nt, Human
cgccagggcuaggcagaag

SEQ ID NO: 401110 - RNA, 20 nt, Human
cgugacaguccccagagccu

SEQ ID NO: 401111 - RNA, 19 nt, Human
cuaaaagccccugccagac

SEQ ID NO: 401112 - RNA, 18 nt, Human
cucaaaaaaaaaaaaaaa

SEQ ID NO: 401113 - RNA, 24 nt, Human
cucacauuuuccugggguagagcg

SEQ ID NO: 401114 - RNA, 24 nt, Human
cucaugccuauaaucccagcacuu

SEQ ID NO: 401115 - RNA, 26 nt, Human
cugcacucucccuccugguucuuucc

SEQ ID NO: 401116 - RNA, 19 nt, Human
cuggaagaccucguuuuga

SEQ ID NO: 401117 - RNA, 21 nt, Human
cuggaagaccucguuuugauc

SEQ ID NO: 401118 - RNA, 20 nt, Human
cuggcucugaagauggagga

SEQ ID NO: 401119 - RNA, 23 nt, Human
cuguaggggccguggggccaccu

SEQ ID NO: 401120 - RNA, 23 nt, Human
cugucccugccuuggggaagggg

SEQ ID NO: 401121 - RNA, 21 nt, Human
cuuccaguucugucuuccauu

SEQ ID NO: 401122 - RNA, 18 nt, Human
cuuuauaccggccacuuc

SEQ ID NO: 401123 - RNA, 18 nt, Human
gaagagggagggcucagg

SEQ ID NO: 401124 - RNA, 21 nt, Human
gaccaggccacugcacuccag

SEQ ID NO: 401125 - RNA, 24 nt, Human
gaggacccaggaggucuugggccc

SEQ ID NO: 401126 - RNA, 23 nt, Human
gaggagcagagccuuagggggag

SEQ ID NO: 401127 - RNA, 19 nt, Human
gaggugcccggcagggcag

SEQ ID NO: 401128 - RNA, 19 nt, Human
gcacaggagacccgggagg

SEQ ID NO: 401129 - RNA, 20 nt, Human
gcaguaccugggaaaagggg

SEQ ID NO: 401130 - RNA, 22 nt, Human
gccacugcacuccagccugggc

SEQ ID NO: 401131 - RNA, 24 nt, Human
gccacugcacuccagccugggcaa

SEQ ID NO: 401132 - RNA, 21 nt, Human
gccuuggggaagggggagccu

SEQ ID NO: 401133 - RNA, 19 nt, Human
gcuaacuccuacacacgua

SEQ ID NO: 401134 - RNA, 24 nt, Human
gcucacggcggcccugggcugcag

SEQ ID NO: 401135 - RNA, 27 nt, Human
gcucagggccccauugcagggccagcc

SEQ ID NO: 401136 - RNA, 18 nt, Human
gcucuagaggccuuggaa

SEQ ID NO: 401137 - RNA, 21 nt, Human
gcucugaagauggaggagccu

SEQ ID NO: 401138 - RNA, 19 nt, Human
ggaggccucugacucugcc

SEQ ID NO: 401139 - RNA, 18 nt, Human
ggagggaggcaggagagg

SEQ ID NO: 401140 - RNA, 18 nt, Human
ggagggaggcaggagagg

SEQ ID NO: 401141 - RNA, 20 nt, Human
ggagugcaggacugccgaca

SEQ ID NO: 401142 - RNA, 21 nt, Human
ggcagaauaacggccucccaa

SEQ ID NO: 401143 - RNA, 21 nt, Human
ggcagaugggugaggcucggc

SEQ ID NO: 401144 - RNA, 19 nt, Human
ggcaggggaugaacggagg

SEQ ID NO: 401145 - RNA, 23 nt, Human
ggcaggggaugaacggagggugc

SEQ ID NO: 401146 - RNA, 24 nt, Human
ggccacugcacuccagccugggca

SEQ ID NO: 401147 - RNA, 21 nt, Human
ggccccaaauccugacucagc

SEQ ID NO: 401148 - RNA, 21 nt, Human
ggucuugggcccuucgguagu

SEQ ID NO: 401149 - RNA, 23 nt, Human
guccacgugacaguccccagagc

SEQ ID NO: 401150 - RNA, 20 nt, Human
guggagggaggcaggagagg

SEQ ID NO: 401151 - RNA, 24 nt, Human
guugaggccuugggggaugaagag

SEQ ID NO: 401152 - RNA, 22 nt, Human
uaacggccucccaaagaugucc

SEQ ID NO: 401153 - RNA, 19 nt, Human
uaagguggcuaaucagcug

SEQ ID NO: 401154 - RNA, 19 nt, Human
uaccggccacuuccuggcc

SEQ ID NO: 401155 - RNA, 21 nt, Human
uaggaggcuaaggcuacaaga

SEQ ID NO: 401156 - RNA, 20 nt, Human
uauaccggccacuuccuggc

SEQ ID NO: 401157 - RNA, 20 nt, Human
uauauuaacaauaucaaaca

SEQ ID NO: 401158 - RNA, 19 nt, Human
uauguagcugggcgugggg

SEQ ID NO: 401159 - RNA, 22 nt, Human
ucaugccuauaaucccagcacu

SEQ ID NO: 401160 - RNA, 23 nt, Human
uccagaaggagugcaggacugcc

SEQ ID NO: 401161 - RNA, 22 nt, Human
ucccgcucacggcggcccuggg

SEQ ID NO: 401162 - RNA, 22 nt, Human
ucccugagccuggcugcacucu

SEQ ID NO: 401163 - RNA, 24 nt, Human
ucccuugagcccaggaguuccaga

SEQ ID NO: 401164 - RNA, 23 nt, Human
uccuucuuucucuuccaguucug

SEQ ID NO: 401165 - RNA, 23 nt, Human
ucuggacagagguguccggggau

SEQ ID NO: 401166 - RNA, 24 nt, Human
ucuuccaguucugucuuccauucc

SEQ ID NO: 401167 - RNA, 24 nt, Human
ugacucaugccuauaaucccagca

SEQ ID NO: 401168 - RNA, 20 nt, Human
ugagacaagaggaucacuug

SEQ ID NO: 401169 - RNA, 24 nt, Human
ugagacaagaggaucacuugaacc

SEQ ID NO: 401170 - RNA, 23 nt, Human
ugagaggacccaggaggucuugg

SEQ ID NO: 401171 - RNA, 20 nt, Human
ugagccuugaugccaugacc

SEQ ID NO: 401172 - RNA, 20 nt, Human
ugauguggacugcaacuuuu

SEQ ID NO: 401173 - RNA, 23 nt, Human
ugcagauggaacuaagguggcua

SEQ ID NO: 401174 - RNA, 21 nt, Human
ugcccaaggcuugcugggcac

SEQ ID NO: 401175 - RNA, 18 nt, Human
ugcccagaccucagccag

SEQ ID NO: 401176 - RNA, 25 nt, Human
ugcccagaccucagccagacuucug

SEQ ID NO: 401177 - RNA, 21 nt, Human
ugcccaggaugggagcuccug

SEQ ID NO: 401178 - RNA, 26 nt, Human
ugcccugccccugcccagaccucagc

SEQ ID NO: 401179 - RNA, 21 nt, Human
ugccgagcaggaaaacgagcu

SEQ ID NO: 401180 - RNA, 18 nt, Human
ugccugagaucgaagggc

SEQ ID NO: 401181 - RNA, 21 nt, Human
ugccugguuggcugcccagga

SEQ ID NO: 401182 - RNA, 23 nt, Human
ugccugguuggcugcccaggaug

SEQ ID NO: 401183 - RNA, 19 nt, Human
ugccuuggggaagggggag

SEQ ID NO: 401184 - RNA, 23 nt, Human
ugccuuggggaagggggagccug

SEQ ID NO: 401185 - RNA, 23 nt, Human
ugguggagggaggcaggagaggg

SEQ ID NO: 401186 - RNA, 24 nt, Human
ugguggagggaggcaggagagggg

SEQ ID NO: 401187 - RNA, 18 nt, Human
uucuggguggcagggccc

SEQ ID NO: 401188 - RNA, 22 nt, Human
uuucucuuccaguucugucuuc

SEQ ID NO: 401189 - RNA, 19 nt, Human
uuuguggaaaccugucacc

SEQ ID NO: 401190 - RNA, 19 nt, Human
aaagugaugggauuacagg

SEQ ID NO: 401191 - RNA, 21 nt, Human
aaguaacagccuguuaggggc

SEQ ID NO: 401192 - RNA, 23 nt, Human
agagauccucugccucggccuuc

SEQ ID NO: 401193 - RNA, 24 nt, Human
agagauccucugccucggccuucc

SEQ ID NO: 401194 - RNA, 19 nt, Human
agauccucugccucggccu

SEQ ID NO: 401195 - RNA, 21 nt, Human
aggucuugcuauguugcccag

SEQ ID NO: 401196 - RNA, 22 nt, Human
aucuugcuucugaggccuucca

SEQ ID NO: 401197 - RNA, 24 nt, Human
caaagugaugggauuacaggagug

SEQ ID NO: 401198 - RNA, 23 nt, Human
cagagaucuugcuucugaggccu

SEQ ID NO: 401199 - RNA, 19 nt, Human
caggagugagccacugcgc

SEQ ID NO: 401200 - RNA, 19 nt, Human
ccaaagugaugggauuaca

SEQ ID NO: 401201 - RNA, 20 nt, Human
ccugagcucaagagauccuc

SEQ ID NO: 401202 - RNA, 19 nt, Human
cucugccucggccuuccaa

SEQ ID NO: 401203 - RNA, 22 nt, Human
gagcucaagagauccucugccu

SEQ ID NO: 401204 - RNA, 18 nt, Human
gauuacaggagugagcca

SEQ ID NO: 401205 - RNA, 22 nt, Human
gauuacaggagugagccacugc

SEQ ID NO: 401206 - RNA, 22 nt, Human
gauuacaggagugagccacugc

SEQ ID NO: 401207 - RNA, 18 nt, Human
gcccagccugguuuugaa

SEQ ID NO: 401208 - RNA, 22 nt, Human
ggcaagagggaagauggaagga

SEQ ID NO: 401209 - RNA, 28 nt, Human
gugaaguaacagccuguuaggggccaga

SEQ ID NO: 401210 - RNA, 19 nt, Human
uacaggagugagccacugc

SEQ ID NO: 401211 - RNA, 23 nt, Human
uacaggagugagccacugcgccc

SEQ ID NO: 401212 - RNA, 22 nt, Human
uagagaugaggucuugcuaugu

SEQ ID NO: 401213 - RNA, 24 nt, Human
uauguugcccagccugguuuugaa

SEQ ID NO: 401214 - RNA, 24 nt, Human
ucauagagaugaggucuugcuaug

SEQ ID NO: 401215 - RNA, 23 nt, Human
uccaaagugaugggauuacagga

SEQ ID NO: 401216 - RNA, 18 nt, Human
ucuugcuauguugcccag

SEQ ID NO: 401217 - RNA, 23 nt, Human
ucuugcuauguugcccagccugg

SEQ ID NO: 401218 - RNA, 24 nt, Human
ucuugcuauguugcccagccuggu

SEQ ID NO: 401219 - RNA, 25 nt, Human
ugaacuccugagcucaagagauccu

SEQ ID NO: 401220 - RNA, 22 nt, Human
ugaaguaacagccuguuaggga

SEQ ID NO: 401221 - RNA, 23 nt, Human
ugaggucuugcuauguugcccag

SEQ ID NO: 401222 - RNA, 24 nt, Human
ugcccagccugguuuugaacuccu

SEQ ID NO: 401223 - RNA, 19 nt, Human
ugggauuacaggagugagc

SEQ ID NO: 401224 - RNA, 22 nt, Human
ugggauuacaggagugagccac

SEQ ID NO: 401225 - RNA, 22 nt, Human
ugggauuacaggagugagccac

SEQ ID NO: 401226 - RNA, 24 nt, Human
ugggauuacaggagugagccacug

SEQ ID NO: 401227 - RNA, 23 nt, Human
uuuugaacuccugagcucaagag

SEQ ID NO: 401228 - RNA, 26 nt, Human
aaaaaaaaaaaaccuaauauguauua

SEQ ID NO: 401229 - RNA, 24 nt, Human
aaagugcugggauuacaggcauga

SEQ ID NO: 401230 - RNA, 24 nt, Human
aagugauccacccgccucagccuc

SEQ ID NO: 401231 - RNA, 19 nt, Human
aagugcugggauuacaggc

SEQ ID NO: 401232 - RNA, 21 nt, Human
aagugcugggauuacaggcau

SEQ ID NO: 401233 - RNA, 26 nt, Human
aagugcugggauuacaggcaugagcc

SEQ ID NO: 401234 - RNA, 25 nt, Human
acccgccucagccucccaaagugcu

SEQ ID NO: 401235 - RNA, 24 nt, Human
acgauguuggucaggcuggucuug

SEQ ID NO: 401236 - RNA, 25 nt, Human
acuuuguauacauguuaaaaaaaaa

SEQ ID NO: 401237 - RNA, 18 nt, Human
agugcugggauuacaggc

SEQ ID NO: 401238 - RNA, 24 nt, Human
caaagugcugggauuacaggcaug

SEQ ID NO: 401239 - RNA, 23 nt, Human
cacccgccucagccucccaaagu

SEQ ID NO: 401240 - RNA, 21 nt, Human
cacgauguuggucaggcuggu

SEQ ID NO: 401241 - RNA, 24 nt, Human
cacgauguuggucaggcuggucuu

SEQ ID NO: 401242 - RNA, 23 nt, Human
ccaaagugcugggauuacaggca

SEQ ID NO: 401243 - RNA, 24 nt, Human
ccaaagugcugggauuacaggcau

SEQ ID NO: 401244 - RNA, 26 nt, Human
ccacccgccucagccucccaaagugc

SEQ ID NO: 401245 - RNA, 19 nt, Human
ccaggucaauccaagaagc

SEQ ID NO: 401246 - RNA, 24 nt, Human
cccaaagugcugggauuacaggca

SEQ ID NO: 401247 - RNA, 24 nt, Human
ccgccucagccucccaaagugcug

SEQ ID NO: 401248 - RNA, 22 nt, Human
ccuggcuaagaauuuacuuugu

SEQ ID NO: 401249 - RNA, 21 nt, Human
cugaccucaagugauccaccc

SEQ ID NO: 401250 - RNA, 29 nt, Human
cugccaggucaauccaagaagcagcgugc

SEQ ID NO: 401251 - RNA, 24 nt, Human
gaccucaagugauccacccgccuc

SEQ ID NO: 401252 - RNA, 24 nt, Human
gauguuggucaggcuggucuugaa

SEQ ID NO: 401253 - RNA, 18 nt, Human
gauuacaggcaugagcca

SEQ ID NO: 401254 - RNA, 21 nt, Human
gauuacaggcaugagccacua

SEQ ID NO: 401255 - RNA, 22 nt, Human
gauuacaggcaugagccacuac

SEQ ID NO: 401256 - RNA, 23 nt, Human
gccucagccucccaaagugcugg

SEQ ID NO: 401257 - RNA, 19 nt, Human
gcuaagaauuuacuuugua

SEQ ID NO: 401258 - RNA, 19 nt, Human
ggauuacaggcaugagcca

SEQ ID NO: 401259 - RNA, 24 nt, Human
ggcuggucuugaacuucugaccuc

SEQ ID NO: 401260 - RNA, 19 nt, Human
ggucuugaacuucugaccu

SEQ ID NO: 401261 - RNA, 24 nt, Human
gugauccacccgccucagccuccc

SEQ ID NO: 401262 - RNA, 19 nt, Human
uaagaggaaaccucuggua

SEQ ID NO: 401263 - RNA, 25 nt, Human
uaauuuuuguauuuuuuuguaaaga

SEQ ID NO: 401264 - RNA, 22 nt, Human
uacaggcaugagccacuacacc

SEQ ID NO: 401265 - RNA, 21 nt, Human
uccacccgccucagccuccca

SEQ ID NO: 401266 - RNA, 24 nt, Human
ucccaaagugcugggauuacaggc

SEQ ID NO: 401267 - RNA, 24 nt, Human
ugaccucaagugauccacccgccu

SEQ ID NO: 401268 - RNA, 18 nt, Human
ugggauuacaggcaugag

SEQ ID NO: 401269 - RNA, 19 nt, Human
ugggauuacaggcaugagc

SEQ ID NO: 401270 - RNA, 21 nt, Human
ugggauuacaggcaugagcca

SEQ ID NO: 401271 - RNA, 22 nt, Human
ugggauuacaggcaugagccac

SEQ ID NO: 401272 - RNA, 22 nt, Human
ugggauuacaggcaugagccac

SEQ ID NO: 401273 - RNA, 23 nt, Human
ugggauuacaggcaugagccacu

SEQ ID NO: 401274 - RNA, 24 nt, Human
ugggauuacaggcaugagccacua

SEQ ID NO: 401275 - RNA, 24 nt, Human
ugggauuacaggcaugagccacua

SEQ ID NO: 401276 - RNA, 24 nt, Human
uggucaggcuggucuugaacuucu

SEQ ID NO: 401277 - RNA, 22 nt, Human
uucacgauguuggucaggcuga

SEQ ID NO: 401278 - RNA, 24 nt, Human
uuuuuguauuuuuuuguaaagacg

SEQ ID NO: 401279 - RNA, 24 nt, Human
aaaacccccaauuauuucaugucg

SEQ ID NO: 401280 - RNA, 22 nt, Human
aaacaacaaaacccccaauuau

SEQ ID NO: 401281 - RNA, 19 nt, Human
aacauggugaaaccccguc

SEQ ID NO: 401282 - RNA, 20 nt, Human
aacauggugaaaccccgucu

SEQ ID NO: 401283 - RNA, 21 nt, Human
aacauggugaaaccccgucuc

SEQ ID NO: 401284 - RNA, 22 nt, Human
aacugccccgcaccccccaccc

SEQ ID NO: 401285 - RNA, 24 nt, Human
aagaaaaccuuaaugcgucagcca

SEQ ID NO: 401286 - RNA, 18 nt, Human
aagaccagaaaggucacc

SEQ ID NO: 401287 - RNA, 22 nt, Human
aagcaccaucuacucuuccccc

SEQ ID NO: 401288 - RNA, 24 nt, Human
aaggacaccaaccacgagugacac

SEQ ID NO: 401289 - RNA, 22 nt, Human
aaggcagcucaugggcucaggg

SEQ ID NO: 401290 - RNA, 27 nt, Human
aaggcccagcaaaggcaaagaccagga

SEQ ID NO: 401291 - RNA, 23 nt, Human
aaggcuauagugagccaagauug

SEQ ID NO: 401292 - RNA, 24 nt, Human
aagguggaucaccugaggucagga

SEQ ID NO: 401293 - RNA, 26 nt, Human
aaucauugaagccaaaguacaucuga

SEQ ID NO: 401294 - RNA, 24 nt, Human
aaucgcuugaacccaggaggcgga

SEQ ID NO: 401295 - RNA, 24 nt, Human
accaacauggugaaaccccgucuc

SEQ ID NO: 401296 - RNA, 24 nt, Human
accccgucucuacuaaaaauacaa

SEQ ID NO: 401297 - RNA, 21 nt, Human
acccugagcaacauagagagc

SEQ ID NO: 401298 - RNA, 26 nt, Human
acccugagcaacauagagagccccua

SEQ ID NO: 401299 - RNA, 22 nt, Human
accguugcacuccagccugggc

SEQ ID NO: 401300 - RNA, 24 nt, Human
accugaggucaggaguucgagacc

SEQ ID NO: 401301 - RNA, 23 nt, Human
acuauggagaaggguuugcugga

SEQ ID NO: 401302 - RNA, 24 nt, Human
acuccagccugggagacagaguga

SEQ ID NO: 401303 - RNA, 24 nt, Human
acuccagccugggcgagagaguga

SEQ ID NO: 401304 - RNA, 21 nt, Human
acugcccagguagggaccagc

SEQ ID NO: 401305 - RNA, 19 nt, Human
acuggcaccuucugagccc

SEQ ID NO: 401306 - RNA, 19 nt, Human
acuuucggaggccaaggug

SEQ ID NO: 401307 - RNA, 24 nt, Human
agagagugagauucugucucaaaa

SEQ ID NO: 401308 - RNA, 21 nt, Human
agagugagauucugucucaaa

SEQ ID NO: 401309 - RNA, 18 nt, Human
agaguuucuuccaguacc

SEQ ID NO: 401310 - RNA, 23 nt, Human
agccaggcgugguggcgggugcc

SEQ ID NO: 401311 - RNA, 24 nt, Human
agccugaccaacauggugaaaccc

SEQ ID NO: 401312 - RNA, 24 nt, Human
agccugggcgagagagugagauuc

SEQ ID NO: 401313 - RNA, 24 nt, Human
agcuauuuggauggcugagguggg

SEQ ID NO: 401314 - RNA, 18 nt, Human
agcuuggccuggcuggug

SEQ ID NO: 401315 - RNA, 18 nt, Human
aggaaggccucuguggaa

SEQ ID NO: 401316 - RNA, 24 nt, Human
aggaauucgagaccacccugagca

SEQ ID NO: 401317 - RNA, 24 nt, Human
aggaggcggagguugcacugagcc

SEQ ID NO: 401318 - RNA, 24 nt, Human
aggcaaagaccaggaggcagcagc

SEQ ID NO: 401319 - RNA, 18 nt, Human
aggcacgagaaucgcuug

SEQ ID NO: 401320 - RNA, 19 nt, Human
aggcagcucaugggcucag

SEQ ID NO: 401321 - RNA, 24 nt, Human
aggccaagguggaucaccugaggu

SEQ ID NO: 401322 - RNA, 19 nt, Human
aggcggagguugcacugag

SEQ ID NO: 401323 - RNA, 24 nt, Human
aggcggagguugcacugagccaag

SEQ ID NO: 401324 - RNA, 28 nt, Human
aggcuauagugagccaagauugcaccau

SEQ ID NO: 401325 - RNA, 24 nt, Human
aggcugaggcacgagaaucgcuug

SEQ ID NO: 401326 - RNA, 21 nt, Human
agggaccugggaccggacugg

SEQ ID NO: 401327 - RNA, 22 nt, Human
agguggaucaccugaggucagg

SEQ ID NO: 401328 - RNA, 24 nt, Human
aggugggagaaucgcuugagccug

SEQ ID NO: 401329 - RNA, 21 nt, Human
agucugaggugggcagacugc

SEQ ID NO: 401330 - RNA, 20 nt, Human
agugaacugccccgcacccc

SEQ ID NO: 401331 - RNA, 24 nt, Human
aucguaccguugcacuccagccug

SEQ ID NO: 401332 - RNA, 18 nt, Human
aucuacucuucccccuug

SEQ ID NO: 401333 - RNA, 24 nt, Human
auugcaccauugcacuccagccug

SEQ ID NO: 401334 - RNA, 18 nt, Human
auugcacuccagccuggg

SEQ ID NO: 401335 - RNA, 24 nt, Human
auugcacuccagccugggagacag

SEQ ID NO: 401336 - RNA, 21 nt, Human
caaagaccagaaaggucaccg

SEQ ID NO: 401337 - RNA, 24 nt, Human
caacauggugaaaccccgucucua

SEQ ID NO: 401338 - RNA, 21 nt, Human
caacgacuguguagauggauc

SEQ ID NO: 401339 - RNA, 21 nt, Human
caagcauggggcucacgccuc

SEQ ID NO: 401340 - RNA, 22 nt, Human
caagguggaucaccugagguca

SEQ ID NO: 401341 - RNA, 21 nt, Human
cacaaacggaaugauccagac

SEQ ID NO: 401342 - RNA, 24 nt, Human
cacaccuguggucccagcuauuug

SEQ ID NO: 401343 - RNA, 22 nt, Human
cacagaaggcccagcaaaggca

SEQ ID NO: 401344 - RNA, 19 nt, Human
cacaugcuauuuggccugg

SEQ ID NO: 401345 - RNA, 26 nt, Human
caccauugcacuccagccugggagac

SEQ ID NO: 401346 - RNA, 21 nt, Human
cacccaaaaaagguucauauc

SEQ ID NO: 401347 - RNA, 24 nt, Human
caccgcuuugggagucugaggugg

SEQ ID NO: 401348 - RNA, 23 nt, Human
caccugaggucaggaguucgaga

SEQ ID NO: 401349 - RNA, 23 nt, Human
caccuguggucccagcuauuugg

SEQ ID NO: 401350 - RNA, 23 nt, Human
cacgccuguaaucccagcacuuu

SEQ ID NO: 401351 - RNA, 22 nt, Human
cacuccagccugggagacagag

SEQ ID NO: 401352 - RNA, 23 nt, Human
cacuccagccugggagacagagu

SEQ ID NO: 401353 - RNA, 24 nt, Human
cacuccagccugggagacagagug

SEQ ID NO: 401354 - RNA, 22 nt, Human
cacuccagccugggcgagagag

SEQ ID NO: 401355 - RNA, 23 nt, Human
cacuccagccugggcgagagagu

SEQ ID NO: 401356 - RNA, 24 nt, Human
cacuccagccugggcgagagagug

SEQ ID NO: 401357 - RNA, 23 nt, Human
cacuccuaaaacuccacagacac

SEQ ID NO: 401358 - RNA, 20 nt, Human
cagaaaagaccaaaaacucc

SEQ ID NO: 401359 - RNA, 20 nt, Human
cagaaggcccagcaaaggca

SEQ ID NO: 401360 - RNA, 24 nt, Human
cagcacuuucggaggccaaggugg

SEQ ID NO: 401361 - RNA, 22 nt, Human
cagcagcacccugugccuucca

SEQ ID NO: 401362 - RNA, 25 nt, Human
cagcagcacccugugccuuccagaa

SEQ ID NO: 401363 - RNA, 22 nt, Human
cagggcucaaguucacuuggga

SEQ ID NO: 401364 - RNA, 18 nt, Human
cauugcacuccagccugg

SEQ ID NO: 401365 - RNA, 19 nt, Human
cauugcacuccagccuggg

SEQ ID NO: 401366 - RNA, 22 nt, Human
cauugcacuccagccugggaga

SEQ ID NO: 401367 - RNA, 23 nt, Human
cauugcacuccagccugggagac

SEQ ID NO: 401368 - RNA, 24 nt, Human
cauugcacuccagccugggagaca

SEQ ID NO: 401369 - RNA, 25 nt, Human
cauugcacuccagccugggagacag

SEQ ID NO: 401370 - RNA, 27 nt, Human
ccaaacagggcucaaguucacuuggga

SEQ ID NO: 401371 - RNA, 21 nt, Human
ccacacacaggacuucacgug

SEQ ID NO: 401372 - RNA, 24 nt, Human
ccacccaaaccagucccggaacaa

SEQ ID NO: 401373 - RNA, 23 nt, Human
ccacuccuaaaacuccacagaca

SEQ ID NO: 401374 - RNA, 20 nt, Human
ccagaaaggucaccccccac

SEQ ID NO: 401375 - RNA, 22 nt, Human
ccagcaaaggcaaagaccagga

SEQ ID NO: 401376 - RNA, 26 nt, Human
ccagucccggaacaaaacacacaaug

SEQ ID NO: 401377 - RNA, 19 nt, Human
ccauugcacuccagccugg

SEQ ID NO: 401378 - RNA, 20 nt, Human
ccauugcacuccagccugga

SEQ ID NO: 401379 - RNA, 21 nt, Human
ccauugcacuccagccuggga

SEQ ID NO: 401380 - RNA, 22 nt, Human
ccauugcacuccagccugggag

SEQ ID NO: 401381 - RNA, 24 nt, Human
ccauugcacuccagccugggagac

SEQ ID NO: 401382 - RNA, 25 nt, Human
ccauugcacuccagccugggagaca

SEQ ID NO: 401383 - RNA, 22 nt, Human
ccccacuccuaaaacuccacag

SEQ ID NO: 401384 - RNA, 18 nt, Human
ccccccacccaaaaaagg

SEQ ID NO: 401385 - RNA, 18 nt, Human
ccccgcaccccccaccca

SEQ ID NO: 401386 - RNA, 19 nt, Human
cccgcaccccccacccaaa

SEQ ID NO: 401387 - RNA, 21 nt, Human
cccgcaccccccacccaaaaa

SEQ ID NO: 401388 - RNA, 22 nt, Human
cccugagcaacauagagagccc

SEQ ID NO: 401389 - RNA, 20 nt, Human
ccguugcacuccagccuggg

SEQ ID NO: 401390 - RNA, 21 nt, Human
ccguugcacuccagccugggc

SEQ ID NO: 401391 - RNA, 23 nt, Human
ccguugcacuccagccugggcga

SEQ ID NO: 401392 - RNA, 24 nt, Human
ccguugcacuccagccugggcgag

SEQ ID NO: 401393 - RNA, 22 nt, Human
ccuauaucuagacaaaauacaa

SEQ ID NO: 401394 - RNA, 23 nt, Human
ccugaccaacauggugaaacccc

SEQ ID NO: 401395 - RNA, 24 nt, Human
ccugaccaacauggugaaaccccg

SEQ ID NO: 401396 - RNA, 22 nt, Human
ccugaggucaggaguucgagac

SEQ ID NO: 401397 - RNA, 21 nt, Human
ccugcaaucccagcuacuccg

SEQ ID NO: 401398 - RNA, 22 nt, Human
ccugcaaucccagcuacuccgg

SEQ ID NO: 401399 - RNA, 23 nt, Human
ccugcaaucccagcuacuccgga

SEQ ID NO: 401400 - RNA, 18 nt, Human
ccugcacagaaggcccag

SEQ ID NO: 401401 - RNA, 20 nt, Human
ccuggcugguggcucacgcc

SEQ ID NO: 401402 - RNA, 22 nt, Human
ccugggcgagagagugagauuc

SEQ ID NO: 401403 - RNA, 21 nt, Human
ccuguggucccagcuauuugg

SEQ ID NO: 401404 - RNA, 24 nt, Human
cgagaccagccugaccaacauggu

SEQ ID NO: 401405 - RNA, 24 nt, Human
cgccuguaaucccagcacuuucgg

SEQ ID NO: 401406 - RNA, 20 nt, Human
cguugcacuccagccugggc

SEQ ID NO: 401407 - RNA, 21 nt, Human
cguugcacuccagccugggcg

SEQ ID NO: 401408 - RNA, 22 nt, Human
cguugcacuccagccugggcga

SEQ ID NO: 401409 - RNA, 21 nt, Human
cucaaguaggcaaucuguacc

SEQ ID NO: 401410 - RNA, 22 nt, Human
cucacgccucuaauuccaccgc

SEQ ID NO: 401411 - RNA, 24 nt, Human
cucacgccuguaaucccagcacuu

SEQ ID NO: 401412 - RNA, 25 nt, Human
cucacgccuguaaucccagcacuuu

SEQ ID NO: 401413 - RNA, 23 nt, Human
cucagggugacagauaaccagaa

SEQ ID NO: 401414 - RNA, 19 nt, Human
cugcccagguagggaccag

SEQ ID NO: 401415 - RNA, 24 nt, Human
cuggcaccuucugagcccugaggc

SEQ ID NO: 401416 - RNA, 25 nt, Human
cuuaaaacaauaauagaacaggaca

SEQ ID NO: 401417 - RNA, 20 nt, Human
cuuugggagucugagguggg

SEQ ID NO: 401418 - RNA, 23 nt, Human
gaaggucugacuuccugaagaga

SEQ ID NO: 401419 - RNA, 22 nt, Human
gaccagaaaggucaccccccac

SEQ ID NO: 401420 - RNA, 20 nt, Human
gaccugggaccggacuggca

SEQ ID NO: 401421 - RNA, 23 nt, Human
gagguugcacugagccaagaucg

SEQ ID NO: 401422 - RNA, 24 nt, Human
gaucaccugaggucaggaguucga

SEQ ID NO: 401423 - RNA, 18 nt, Human
gauggaagugggagagga

SEQ ID NO: 401424 - RNA, 20 nt, Human
gcacaccuguggucccagcu

SEQ ID NO: 401425 - RNA, 20 nt, Human
gcacccugugccuuccagaa

SEQ ID NO: 401426 - RNA, 24 nt, Human
gcacuccagccugggagacagagu

SEQ ID NO: 401427 - RNA, 18 nt, Human
gcagcagcacccugugcc

SEQ ID NO: 401428 - RNA, 22 nt, Human
gccuggggauauagcaaagccu

SEQ ID NO: 401429 - RNA, 24 nt, Human
gcgagagagugagauucugucuca

SEQ ID NO: 401430 - RNA, 24 nt, Human
gcgugguggugcacaccugugguc

SEQ ID NO: 401431 - RNA, 18 nt, Human
ggaacaaaacacacaaug

SEQ ID NO: 401432 - RNA, 24 nt, Human
ggagguugcacugagccaagaucg

SEQ ID NO: 401433 - RNA, 20 nt, Human
ggaucaccugaggucaggaa

SEQ ID NO: 401434 - RNA, 22 nt, Human
ggaucaccugaggucaggaguu

SEQ ID NO: 401435 - RNA, 23 nt, Human
ggcugaggugggagaaucgcuug

SEQ ID NO: 401436 - RNA, 22 nt, Human
ggcugguggcucacgccuguaa

SEQ ID NO: 401437 - RNA, 24 nt, Human
gggcgugguggugcacaccugugg

SEQ ID NO: 401438 - RNA, 24 nt, Human
gguggcucacgccuguaaucccag

SEQ ID NO: 401439 - RNA, 24 nt, Human
gguggugcacaccuguggucccag

SEQ ID NO: 401440 - RNA, 23 nt, Human
gucaccccccacuccuaaaacuc

SEQ ID NO: 401441 - RNA, 18 nt, Human
gugcagugaaaaguuaca

SEQ ID NO: 401442 - RNA, 20 nt, Human
guggaucaccugaggucagg

SEQ ID NO: 401443 - RNA, 21 nt, Human
guggaucaccugaggucagga

SEQ ID NO: 401444 - RNA, 23 nt, Human
guggcucacgccuguaaucccag

SEQ ID NO: 401445 - RNA, 22 nt, Human
guugcacuccagccugggcgag

SEQ ID NO: 401446 - RNA, 21 nt, Human
uaaaaauacaaaaauuagcca

SEQ ID NO: 401447 - RNA, 23 nt, Human
uaacuaaacaacaaaacccccaa

SEQ ID NO: 401448 - RNA, 18 nt, Human
uaccguugcacuccagcc

SEQ ID NO: 401449 - RNA, 20 nt, Human
uaccuauaaauaauacucau

SEQ ID NO: 401450 - RNA, 22 nt, Human
uagacaaaauacaaaaaauuag

SEQ ID NO: 401451 - RNA, 19 nt, Human
uaggaaggccucuguggaa

SEQ ID NO: 401452 - RNA, 23 nt, Human
uauagcaaagccuaauguaacua

SEQ ID NO: 401453 - RNA, 24 nt, Human
uaucuagacaaaauacaaaaaauu

SEQ ID NO: 401454 - RNA, 25 nt, Human
uauguaaacaacuaccuauaaauaa

SEQ ID NO: 401455 - RNA, 21 nt, Human
uauuucaugucgucaggaagc

SEQ ID NO: 401456 - RNA, 25 nt, Human
ucaaggcuauagugagccaagauug

SEQ ID NO: 401457 - RNA, 20 nt, Human
ucaaguaggcaaucuguacc

SEQ ID NO: 401458 - RNA, 20 nt, Human
ucaccugaggucaggaguuc

SEQ ID NO: 401459 - RNA, 24 nt, Human
ucagaugcuuacagagcggccaag

SEQ ID NO: 401460 - RNA, 21 nt, Human
ucaugugacaauuguggcacu

SEQ ID NO: 401461 - RNA, 19 nt, Human
uccacagacacaacagucu

SEQ ID NO: 401462 - RNA, 19 nt, Human
uccagaaaaaagguaaacc

SEQ ID NO: 401463 - RNA, 23 nt, Human
uccagccugggcgagagagugag

SEQ ID NO: 401464 - RNA, 24 nt, Human
uccagccugggcgagagagugaga

SEQ ID NO: 401465 - RNA, 22 nt, Human
ucccagccuguccauagauggg

SEQ ID NO: 401466 - RNA, 21 nt, Human
uccugagcccaaacagggcuc

SEQ ID NO: 401467 - RNA, 21 nt, Human
uccugugucacaugcuauuug

SEQ ID NO: 401468 - RNA, 23 nt, Human
ucgagaccacccugagcaacaua

SEQ ID NO: 401469 - RNA, 24 nt, Human
ucgagaccacccugagcaacauag

SEQ ID NO: 401470 - RNA, 24 nt, Human
ucgcuugaacccaggaggcggagg

SEQ ID NO: 401471 - RNA, 24 nt, Human
ucgcuugagccugagaggucaagg

SEQ ID NO: 401472 - RNA, 23 nt, Human
ucguaccguugcacuccagccug

SEQ ID NO: 401473 - RNA, 21 nt, Human
ucuaucuccugagcccaaaca

SEQ ID NO: 401474 - RNA, 24 nt, Human
ucucaggcccguggguuucagccc

SEQ ID NO: 401475 - RNA, 21 nt, Human
ucucuacuaaaaauacaaaaa

SEQ ID NO: 401476 - RNA, 18 nt, Human
ucuuuggucccgacucau

SEQ ID NO: 401477 - RNA, 18 nt, Human
ugaacugccccgcacccc

SEQ ID NO: 401478 - RNA, 19 nt, Human
ugaacugccccgcaccccc

SEQ ID NO: 401479 - RNA, 24 nt, Human
ugaacugccccgcaccccccaccc

SEQ ID NO: 401480 - RNA, 24 nt, Human
ugaccaacauggugaaaccccguc

SEQ ID NO: 401481 - RNA, 24 nt, Human
ugacuuccugaagagaaucacacc

SEQ ID NO: 401482 - RNA, 24 nt, Human
ugagacagaaaagaccaaaaacca

SEQ ID NO: 401483 - RNA, 23 nt, Human
ugagauggcaaccauuucacacc

SEQ ID NO: 401484 - RNA, 22 nt, Human
ugagcccaaacagggcucaagu

SEQ ID NO: 401485 - RNA, 24 nt, Human
ugaggcacgagaaucgcuugaacc

SEQ ID NO: 401486 - RNA, 24 nt, Human
ugaggugggagaaucgcuugagcc

SEQ ID NO: 401487 - RNA, 25 nt, Human
ugaggugggcagacugcuugagucc

SEQ ID NO: 401488 - RNA, 21 nt, Human
ugcaccauugcacuccagccu

SEQ ID NO: 401489 - RNA, 22 nt, Human
ugcacuccagccugggagacag

SEQ ID NO: 401490 - RNA, 22 nt, Human
ugcacuccagccugggcgagag

SEQ ID NO: 401491 - RNA, 22 nt, Human
ugccaaucauugaagccaaagu

SEQ ID NO: 401492 - RNA, 24 nt, Human
ugccugcaaucccagcuacuccgg

SEQ ID NO: 401493 - RNA, 25 nt, Human
ugcuuccuuguuuguauuauaacac

SEQ ID NO: 401494 - RNA, 20 nt, Human
uggaacccagacagugacau

SEQ ID NO: 401495 - RNA, 24 nt, Human
uggaucaccugaggucaggaguuc

SEQ ID NO: 401496 - RNA, 27 nt, Human
uggaucaccugaggucaggaguucgag

SEQ ID NO: 401497 - RNA, 18 nt, Human
uggauggcugagguggga

SEQ ID NO: 401498 - RNA, 24 nt, Human
uggcgggugccugcaaucccagcu

SEQ ID NO: 401499 - RNA, 24 nt, Human
uggcucacgccuguaaucccagca

SEQ ID NO: 401500 - RNA, 19 nt, Human
ugggcagacugcuugaguc

SEQ ID NO: 401501 - RNA, 22 nt, Human
uggugcacaccuguggucccag

SEQ ID NO: 401502 - RNA, 24 nt, Human
ugguggcucacgccuguaauccca

SEQ ID NO: 401503 - RNA, 24 nt, Human
ugguggugcacaccugugguccca

SEQ ID NO: 401504 - RNA, 18 nt, Human
ugucacaugcuauuuggc

SEQ ID NO: 401505 - RNA, 23 nt, Human
uguuuaucuaaucuauucacaua

SEQ ID NO: 401506 - RNA, 22 nt, Human
uuaaacacugauaaggcugaca

SEQ ID NO: 401507 - RNA, 20 nt, Human
uuagccgggcgugguggugc

SEQ ID NO: 401508 - RNA, 22 nt, Human
uuagccgggcgugguggugcac

SEQ ID NO: 401509 - RNA, 24 nt, Human
uugaacccaggaggcggagguugc

SEQ ID NO: 401510 - RNA, 23 nt, Human
uugcaccauugcacuccagccug

SEQ ID NO: 401511 - RNA, 18 nt, Human
uugcacuccagccugggc

SEQ ID NO: 401512 - RNA, 20 nt, Human
uugcacuccagccugggcga

SEQ ID NO: 401513 - RNA, 21 nt, Human
uugcacuccagccugggcgag

SEQ ID NO: 401514 - RNA, 22 nt, Human
uugcacugagccaagaucguac

SEQ ID NO: 401515 - RNA, 24 nt, Human
uuggauggcugaggugggagaauc

SEQ ID NO: 401516 - RNA, 19 nt, Human
uuguaugucuccuccuuuu

SEQ ID NO: 401517 - RNA, 22 nt, Human
uuucacaccauucucaagcacc

SEQ ID NO: 401518 - RNA, 20 nt, Human
uuugugggcgcagagauugc

SEQ ID NO: 401519 - RNA, 21 nt, Human
uuuugugggcgcagagauugc

SEQ ID NO: 401520 - RNA, 26 nt, Human
uuuuuuuuuuuuuuuuuuauauaagg

SEQ ID NO: 401521 - RNA, 20 nt, Human
aaaucccgugaccacuucuc

SEQ ID NO: 401522 - RNA, 20 nt, Human
aaggcugaauaaaucccgug

SEQ ID NO: 401523 - RNA, 22 nt, Human
acuggcccugcccucuuggacu

SEQ ID NO: 401524 - RNA, 20 nt, Human
agacaccaggacuuggggca

SEQ ID NO: 401525 - RNA, 19 nt, Human
agagggaggcagggcagag

SEQ ID NO: 401526 - RNA, 23 nt, Human
agaguguccagcgccccccgccc

SEQ ID NO: 401527 - RNA, 22 nt, Human
aggagccgacugcccccugccu

SEQ ID NO: 401528 - RNA, 24 nt, Human
aggaggaagauagagccaggcugg

SEQ ID NO: 401529 - RNA, 21 nt, Human
aggcuggagacaccaggacuu

SEQ ID NO: 401530 - RNA, 24 nt, Human
augagaccaggguccuggggggug

SEQ ID NO: 401531 - RNA, 27 nt, Human
auuaaagaucuuuuuuuuuuuuuuuuu

SEQ ID NO: 401532 - RNA, 23 nt, Human
cacccuugucacccaguugagga

SEQ ID NO: 401533 - RNA, 21 nt, Human
cagccagcgccuaccugaacc

SEQ ID NO: 401534 - RNA, 22 nt, Human
cagggcagagaguguccagcgc

SEQ ID NO: 401535 - RNA, 21 nt, Human
ccaggcuggagacaccaggac

SEQ ID NO: 401536 - RNA, 20 nt, Human
ccccccgcccucagccagcc

SEQ ID NO: 401537 - RNA, 24 nt, Human
ccccccgcccucagccagcgccua

SEQ ID NO: 401538 - RNA, 26 nt, Human
ccucacccuugucacccaguugagga

SEQ ID NO: 401539 - RNA, 18 nt, Human
ccuggggggugcacggga

SEQ ID NO: 401540 - RNA, 24 nt, Human
cgggauguggggaugggacgauca

SEQ ID NO: 401541 - RNA, 23 nt, Human
cugaauaaaucccgugaccacuu

SEQ ID NO: 401542 - RNA, 21 nt, Human
cuggcugggccugaagauggg

SEQ ID NO: 401543 - RNA, 19 nt, Human
gaccaggguccuggggggu

SEQ ID NO: 401544 - RNA, 20 nt, Human
gaucuuuuuuuuuuuuuuuu

SEQ ID NO: 401545 - RNA, 20 nt, Human
gccuggcugggccugaagau

SEQ ID NO: 401546 - RNA, 23 nt, Human
gcuccaggagagggacugaugag

SEQ ID NO: 401547 - RNA, 18 nt, Human
ggaggaagauagagccag

SEQ ID NO: 401548 - RNA, 23 nt, Human
ggaggcagggcagagagugucca

SEQ ID NO: 401549 - RNA, 22 nt, Human
gggcaggggcaggcguuucugu

SEQ ID NO: 401550 - RNA, 19 nt, Human
guccuggggggugcacggg

SEQ ID NO: 401551 - RNA, 20 nt, Human
ugaagaugggaggaacuggc

SEQ ID NO: 401552 - RNA, 22 nt, Human
ugagaccaggguccuggggggu

SEQ ID NO: 401553 - RNA, 19 nt, Human
ugaugagaccaggguccug

SEQ ID NO: 401554 - RNA, 20 nt, Human
ugccuggcugggccugaaga

SEQ ID NO: 401555 - RNA, 24 nt, Human
ugggaggaacuggcccugcccucu

SEQ ID NO: 401556 - RNA, 23 nt, Human
uggggggugcacgggaugugggg

SEQ ID NO: 401557 - RNA, 24 nt, Human
uguguggacccccagcuccaggag

SEQ ID NO: 401558 - RNA, 18 nt, Human
uugaggagccgacugccc

SEQ ID NO: 401559 - RNA, 23 nt, Human
uuucugcucugaccaaggcugaa

SEQ ID NO: 401560 - RNA, 18 nt, Human
uuuuuuuuuuuuuuucug

SEQ ID NO: 401561 - RNA, 20 nt, Human
uuuuuuuuuuuuuuucugcu

SEQ ID NO: 401562 - RNA, 23 nt, Human
aaacucccgagcucaagcaaucc

SEQ ID NO: 401563 - RNA, 24 nt, Human
aaagugcugggauuacaggcauga

SEQ ID NO: 401564 - RNA, 18 nt, Human
aacuaugcagccaagaau

SEQ ID NO: 401565 - RNA, 18 nt, Human
aagcaauccaccugccuc

SEQ ID NO: 401566 - RNA, 19 nt, Human
aagcagaaaaaaagacuug

SEQ ID NO: 401567 - RNA, 20 nt, Human
aagcgccaaaaaucaaucag

SEQ ID NO: 401568 - RNA, 19 nt, Human
aagugcugggauuacaggc

SEQ ID NO: 401569 - RNA, 21 nt, Human
aagugcugggauuacaggcau

SEQ ID NO: 401570 - RNA, 26 nt, Human
aagugcugggauuacaggcaugagcc

SEQ ID NO: 401571 - RNA, 22 nt, Human
aaucugauauaaauuucucccg

SEQ ID NO: 401572 - RNA, 23 nt, Human
acuguuucuuccaggcugcuucc

SEQ ID NO: 401573 - RNA, 21 nt, Human
agaaaaaaagacuugucucau

SEQ ID NO: 401574 - RNA, 18 nt, Human
agaagggaggagggugga

SEQ ID NO: 401575 - RNA, 21 nt, Human
agcaauccaccugccucagcc

SEQ ID NO: 401576 - RNA, 18 nt, Human
agugcugggauuacaggc

SEQ ID NO: 401577 - RNA, 20 nt, Human
augaugaagaacugcaaaga

SEQ ID NO: 401578 - RNA, 19 nt, Human
auggaguuucacuguguug

SEQ ID NO: 401579 - RNA, 21 nt, Human
caaagugcugggauuacaggc

SEQ ID NO: 401580 - RNA, 23 nt, Human
caaagugcugggauuacaggcau

SEQ ID NO: 401581 - RNA, 24 nt, Human
caaagugcugggauuacaggcaug

SEQ ID NO: 401582 - RNA, 22 nt, Human
caaaguucuaggaccauuggua

SEQ ID NO: 401583 - RNA, 23 nt, Human
caccugccucagccuaucaaagu

SEQ ID NO: 401584 - RNA, 21 nt, Human
cacuguguugaugaggcuggu

SEQ ID NO: 401585 - RNA, 24 nt, Human
cacuguguugaugaggcuggucuc

SEQ ID NO: 401586 - RNA, 19 nt, Human
cauguggccuaaaacgacc

SEQ ID NO: 401587 - RNA, 26 nt, Human
ccacuuuuuuucuuuuuaaauugaga

SEQ ID NO: 401588 - RNA, 23 nt, Human
cgcauguggccuaaaacgacccu

SEQ ID NO: 401589 - RNA, 18 nt, Human
cuuccaggcugcuucccu

SEQ ID NO: 401590 - RNA, 21 nt, Human
cuuccaggcugcuucccuuug

SEQ ID NO: 401591 - RNA, 22 nt, Human
cuuccaggcugcuucccuuugu

SEQ ID NO: 401592 - RNA, 18 nt, Human
gagauggaguuucacugu

SEQ ID NO: 401593 - RNA, 24 nt, Human
gagcucaagcaauccaccugccuc

SEQ ID NO: 401594 - RNA, 18 nt, Human
gauuacaggcaugagcca

SEQ ID NO: 401595 - RNA, 23 nt, Human
gauuacaggcaugagccaccgca

SEQ ID NO: 401596 - RNA, 25 nt, Human
gauuacaggcaugagccaccgcaug

SEQ ID NO: 401597 - RNA, 23 nt, Human
gcaauauaagaagcagaaaaaaa

SEQ ID NO: 401598 - RNA, 18 nt, Human
gcaauccaccugccucag

SEQ ID NO: 401599 - RNA, 24 nt, Human
gcucaagcaauccaccugccucag

SEQ ID NO: 401600 - RNA, 25 nt, Human
ggauuacaggcaugagccaccgcau

SEQ ID NO: 401601 - RNA, 18 nt, Human
uaagaagcagaaaaaaag

SEQ ID NO: 401602 - RNA, 20 nt, Human
uacaggcaugagccaccgca

SEQ ID NO: 401603 - RNA, 22 nt, Human
uaggagaaaagguaaaugagga

SEQ ID NO: 401604 - RNA, 23 nt, Human
uaggagaaaagguaaaugaggga

SEQ ID NO: 401605 - RNA, 22 nt, Human
ucaaagugcugggauuacaggc

SEQ ID NO: 401606 - RNA, 23 nt, Human
ucaaagugcugggauuacaggca

SEQ ID NO: 401607 - RNA, 24 nt, Human
ucaaagugcugggauuacaggcau

SEQ ID NO: 401608 - RNA, 22 nt, Human
ucacuguguugaugaggcuggu

SEQ ID NO: 401609 - RNA, 23 nt, Human
uccuaaaaccacuuuuuuucuuu

SEQ ID NO: 401610 - RNA, 23 nt, Human
ugagauggaguuucacuguguug

SEQ ID NO: 401611 - RNA, 24 nt, Human
uggaguuucacuguguugaugagg

SEQ ID NO: 401612 - RNA, 18 nt, Human
ugggauuacaggcaugag

SEQ ID NO: 401613 - RNA, 19 nt, Human
ugggauuacaggcaugagc

SEQ ID NO: 401614 - RNA, 21 nt, Human
ugggauuacaggcaugagcca

SEQ ID NO: 401615 - RNA, 22 nt, Human
ugggauuacaggcaugagccac

SEQ ID NO: 401616 - RNA, 23 nt, Human
ugggauuacaggcaugagccacc

SEQ ID NO: 401617 - RNA, 24 nt, Human
ugggauuacaggcaugagccaccg

SEQ ID NO: 401618 - RNA, 24 nt, Human
ugggauuacaggcaugagccaccg

SEQ ID NO: 401619 - RNA, 26 nt, Human
uguuucuuccaggcugcuucccuuug

SEQ ID NO: 401620 - RNA, 21 nt, Human
uuucuuuuuaaauugagaugg

SEQ ID NO: 401621 - RNA, 19 nt, Human
aaaaaaaaaaggaaaagag

SEQ ID NO: 401622 - RNA, 21 nt, Human
aaaaaaagaaaaaaaaaagga

SEQ ID NO: 401623 - RNA, 22 nt, Human
aaaaaaggaaaagagaaaagaa

SEQ ID NO: 401624 - RNA, 21 nt, Human
aaaaaggaaaagagaaaagaa

SEQ ID NO: 401625 - RNA, 24 nt, Human
aaaagaaaaaaaaaaggaaaagag

SEQ ID NO: 401626 - RNA, 19 nt, Human
aaacauagacccccccccc

SEQ ID NO: 401627 - RNA, 18 nt, Human
aaagagacccucaccuuu

SEQ ID NO: 401628 - RNA, 21 nt, Human
aaagucccaccacauguuccu

SEQ ID NO: 401629 - RNA, 19 nt, Human
aaauuugcuuaccaaguac

SEQ ID NO: 401630 - RNA, 21 nt, Human
aacauggugggaccgugucuc

SEQ ID NO: 401631 - RNA, 20 nt, Human
aacuuagcaacuaucuccag

SEQ ID NO: 401632 - RNA, 21 nt, Human
aagaaaaaaaaaaggaaaaga

SEQ ID NO: 401633 - RNA, 22 nt, Human
aagaaaaaaaaaaggaaaagag

SEQ ID NO: 401634 - RNA, 19 nt, Human
aagaaaaguuaugaaaagg

SEQ ID NO: 401635 - RNA, 18 nt, Human
aagaaugccaagcugcag

SEQ ID NO: 401636 - RNA, 18 nt, Human
aagcaggccagcgugggg

SEQ ID NO: 401637 - RNA, 18 nt, Human
aagcugcagcaacuugga

SEQ ID NO: 401638 - RNA, 21 nt, Human
aaggaauacaaauaugggggg

SEQ ID NO: 401639 - RNA, 19 nt, Human
acugcacucuagccugggc

SEQ ID NO: 401640 - RNA, 22 nt, Human
acugcacucuagccugggccag

SEQ ID NO: 401641 - RNA, 24 nt, Human
acugcacucuagccugggccagag

SEQ ID NO: 401642 - RNA, 25 nt, Human
agaaaaaaaaaaggaaaagagaaaa

SEQ ID NO: 401643 - RNA, 21 nt, Human
agaaaagaaagagacccucac

SEQ ID NO: 401644 - RNA, 23 nt, Human
agcgugggggcucacgccuguaa

SEQ ID NO: 401645 - RNA, 24 nt, Human
agcuacuccgaagguugagguggg

SEQ ID NO: 401646 - RNA, 19 nt, Human
aggaaagauaucaagaaaa

SEQ ID NO: 401647 - RNA, 24 nt, Human
aggaguuagaggcugcaccgggcu

SEQ ID NO: 401648 - RNA, 18 nt, Human
aggugggaggaucacuug

SEQ ID NO: 401649 - RNA, 23 nt, Human
aggugggaggaucacuuggauug

SEQ ID NO: 401650 - RNA, 24 nt, Human
agguugaggugggaggaucacuug

SEQ ID NO: 401651 - RNA, 24 nt, Human
aguacuuugggaggccgaggcugg

SEQ ID NO: 401652 - RNA, 22 nt, Human
aucaauucacuuccugaaaagc

SEQ ID NO: 401653 - RNA, 24 nt, Human
aucgcaccacugcacucuagccug

SEQ ID NO: 401654 - RNA, 24 nt, Human
cacaaaagaaaauacguaaagcag

SEQ ID NO: 401655 - RNA, 24 nt, Human
cacgccuguaaucccaguacuuug

SEQ ID NO: 401656 - RNA, 18 nt, Human
cacugcacucuagccugg

SEQ ID NO: 401657 - RNA, 19 nt, Human
cacugcacucuagccuggg

SEQ ID NO: 401658 - RNA, 20 nt, Human
cacugcacucuagccugggc

SEQ ID NO: 401659 - RNA, 22 nt, Human
cacugcacucuagccugggcca

SEQ ID NO: 401660 - RNA, 23 nt, Human
cagaauaugaaagucccaccaca

SEQ ID NO: 401661 - RNA, 19 nt, Human
cagcauggauaaauuaacc

SEQ ID NO: 401662 - RNA, 19 nt, Human
cagcugugaucccagcuac

SEQ ID NO: 401663 - RNA, 24 nt, Human
cagcugugaucccagcuacuccga

SEQ ID NO: 401664 - RNA, 19 nt, Human
caggagccccauguccugu

SEQ ID NO: 401665 - RNA, 25 nt, Human
caguacuuugggaggccgaggcugg

SEQ ID NO: 401666 - RNA, 22 nt, Human
cauguuuagcccuuucccaaaa

SEQ ID NO: 401667 - RNA, 23 nt, Human
ccaaaaguguuuacaaugaacac

SEQ ID NO: 401668 - RNA, 20 nt, Human
ccacugcacucuagccuggg

SEQ ID NO: 401669 - RNA, 21 nt, Human
ccacugcacucuagccugggc

SEQ ID NO: 401670 - RNA, 21 nt, Human
ccacugcacucuagccugggc

SEQ ID NO: 401671 - RNA, 24 nt, Human
ccacugcacucuagccugggccag

SEQ ID NO: 401672 - RNA, 26 nt, Human
ccagguugccaaaaaaagaaaaaaaa

SEQ ID NO: 401673 - RNA, 21 nt, Human
cccacagaacaggauagucau

SEQ ID NO: 401674 - RNA, 19 nt, Human
ccccagugcggcgggcugc

SEQ ID NO: 401675 - RNA, 26 nt, Human
ccccccacagaacaggauagucauaa

SEQ ID NO: 401676 - RNA, 18 nt, Human
ccgggcccuuucuuucca

SEQ ID NO: 401677 - RNA, 24 nt, Human
ccgggcuauaaucgcaccacugca

SEQ ID NO: 401678 - RNA, 19 nt, Human
ccgugggcauggggacagu

SEQ ID NO: 401679 - RNA, 20 nt, Human
ccucgcgagcccuggcuccg

SEQ ID NO: 401680 - RNA, 20 nt, Human
ccugcagcugugaucccagc

SEQ ID NO: 401681 - RNA, 19 nt, Human
ccuugaacuucccgggccc

SEQ ID NO: 401682 - RNA, 24 nt, Human
cgccuguaaucccaguacuuuggg

SEQ ID NO: 401683 - RNA, 22 nt, Human
cucacgccuguaaucccaguac

SEQ ID NO: 401684 - RNA, 24 nt, Human
cucacgccuguaaucccaguacuu

SEQ ID NO: 401685 - RNA, 19 nt, Human
cuccgaagguugagguggg

SEQ ID NO: 401686 - RNA, 21 nt, Human
cucuaaaacacugugagcagg

SEQ ID NO: 401687 - RNA, 18 nt, Human
cugagugccucugccagc

SEQ ID NO: 401688 - RNA, 21 nt, Human
cugggccagagccagguugcc

SEQ ID NO: 401689 - RNA, 22 nt, Human
gacaggcuggcgggcgccggac

SEQ ID NO: 401690 - RNA, 23 nt, Human
gacaggcuggcgggcgccggacc

SEQ ID NO: 401691 - RNA, 18 nt, Human
gaucacuuggauugcuug

SEQ ID NO: 401692 - RNA, 19 nt, Human
gaucccagcuacuccgaag

SEQ ID NO: 401693 - RNA, 23 nt, Human
gcccuuucccaaaaguguuuaca

SEQ ID NO: 401694 - RNA, 21 nt, Human
gccggggcuggggcagaggcu

SEQ ID NO: 401695 - RNA, 19 nt, Human
gcugcaccgggcuauaauc

SEQ ID NO: 401696 - RNA, 22 nt, Human
ggaaaacauagacccccccccc

SEQ ID NO: 401697 - RNA, 20 nt, Human
ggaacgacacaaacuuaaaa

SEQ ID NO: 401698 - RNA, 18 nt, Human
ggccggggcuggggcaga

SEQ ID NO: 401699 - RNA, 22 nt, Human
ggccggggcuggggcagaggcu

SEQ ID NO: 401700 - RNA, 18 nt, Human
ggccugcagcugugaucc

SEQ ID NO: 401701 - RNA, 20 nt, Human
ggcucacgccuguaauccca

SEQ ID NO: 401702 - RNA, 21 nt, Human
ggcucacgccuguaaucccag

SEQ ID NO: 401703 - RNA, 19 nt, Human
ggcugcggugcugcccucg

SEQ ID NO: 401704 - RNA, 24 nt, Human
ggcuggggcagaggcugcggugcu

SEQ ID NO: 401705 - RNA, 21 nt, Human
gggaaaacauagacccccccc

SEQ ID NO: 401706 - RNA, 25 nt, Human
gggaaaacauagaccccccccccac

SEQ ID NO: 401707 - RNA, 19 nt, Human
gggcagagaaugccgggug

SEQ ID NO: 401708 - RNA, 20 nt, Human
gggcagaggcugcggugcug

SEQ ID NO: 401709 - RNA, 24 nt, Human
gggccagagccagguugccaaaaa

SEQ ID NO: 401710 - RNA, 24 nt, Human
gggcucacgccuguaaucccagua

SEQ ID NO: 401711 - RNA, 28 nt, Human
ggggaaaacauagaccccccccccaauu

SEQ ID NO: 401712 - RNA, 24 nt, Human
gggggcucacgccuguaaucccag

SEQ ID NO: 401713 - RNA, 23 nt, Human
gguugccaaaaaaagaaaaaaaa

SEQ ID NO: 401714 - RNA, 21 nt, Human
gugaucccagcuacuccgaag

SEQ ID NO: 401715 - RNA, 24 nt, Human
uaaaaauagcugucauagugccac

SEQ ID NO: 401716 - RNA, 22 nt, Human
uaaagcaggccagcgugggggc

SEQ ID NO: 401717 - RNA, 23 nt, Human
uaacauggugggaccgugucucu

SEQ ID NO: 401718 - RNA, 24 nt, Human
uaacauggugggaccgugucucug

SEQ ID NO: 401719 - RNA, 24 nt, Human
uaagaagaaugccaagcugcagca

SEQ ID NO: 401720 - RNA, 22 nt, Human
uacaaugaacacacacugggaa

SEQ ID NO: 401721 - RNA, 22 nt, Human
uaccaaguaccugagugccucu

SEQ ID NO: 401722 - RNA, 18 nt, Human
uaccugagugccucugcc

SEQ ID NO: 401723 - RNA, 18 nt, Human
uagaauaagaagaaugcc

SEQ ID NO: 401724 - RNA, 21 nt, Human
uagaccccccccccacagaac

SEQ ID NO: 401725 - RNA, 18 nt, Human
uagcccuuucccaaaagu

SEQ ID NO: 401726 - RNA, 23 nt, Human
ucaauucacuuccugaaaagccc

SEQ ID NO: 401727 - RNA, 24 nt, Human
ucacauguuuagcccuuucccaaa

SEQ ID NO: 401728 - RNA, 22 nt, Human
ucacgccuguaaucccaguacu

SEQ ID NO: 401729 - RNA, 19 nt, Human
ucagaauaugaaaguccca

SEQ ID NO: 401730 - RNA, 19 nt, Human
ucaggagaaauaaaucggg

SEQ ID NO: 401731 - RNA, 19 nt, Human
ucccaccacauguuccuag

SEQ ID NO: 401732 - RNA, 20 nt, Human
ucccuggguggccggggcug

SEQ ID NO: 401733 - RNA, 18 nt, Human
ugaaaagcccauuuccug

SEQ ID NO: 401734 - RNA, 22 nt, Human
ugaaaaggaauacaaauauggg

SEQ ID NO: 401735 - RNA, 23 nt, Human
ugaaaaggaauacaaauaugggg

SEQ ID NO: 401736 - RNA, 18 nt, Human
ugaggaguggcaggggag

SEQ ID NO: 401737 - RNA, 19 nt, Human
ugaggugggaggaucacuu

SEQ ID NO: 401738 - RNA, 20 nt, Human
ugaggugggaggaucacuug

SEQ ID NO: 401739 - RNA, 21 nt, Human
ugaggugggaggaucacuugg

SEQ ID NO: 401740 - RNA, 23 nt, Human
ugaggugggaggaucacuuggau

SEQ ID NO: 401741 - RNA, 21 nt, Human
ugcaccgggcuauaaucgcac

SEQ ID NO: 401742 - RNA, 20 nt, Human
ugccaaaaaaagaaaaaaaa

SEQ ID NO: 401743 - RNA, 25 nt, Human
ugccaaaaaaagaaaaaaaaaagga

SEQ ID NO: 401744 - RNA, 29 nt, Human
uggaggacugcuuuagcuggggaguuucc

SEQ ID NO: 401745 - RNA, 22 nt, Human
uggcgggcgccgcggccucagc

SEQ ID NO: 401746 - RNA, 25 nt, Human
uggcuccgagcuucgggcucccucc

SEQ ID NO: 401747 - RNA, 22 nt, Human
ugggaggccgaggcuggaggac

SEQ ID NO: 401748 - RNA, 19 nt, Human
ugggcagagaaugccgggu

SEQ ID NO: 401749 - RNA, 21 nt, Human
ugggcagagaaugccgggugg

SEQ ID NO: 401750 - RNA, 23 nt, Human
uggggaguuugagaccaggcugg

SEQ ID NO: 401751 - RNA, 24 nt, Human
ugggggcucacgccuguaauccca

SEQ ID NO: 401752 - RNA, 23 nt, Human
uggggggggggagucggggggag

SEQ ID NO: 401753 - RNA, 25 nt, Human
uguccuguucauuuucuccaucuuu

SEQ ID NO: 401754 - RNA, 24 nt, Human
uuacugcugcgaguuugaggagug

SEQ ID NO: 401755 - RNA, 19 nt, Human
uuccuugaacuucccgggc

SEQ ID NO: 401756 - RNA, 24 nt, Human
uugcuugagcccaggaguuagagg

SEQ ID NO: 401757 - RNA, 22 nt, Human
uuuaggagaauuuuugagaaaa

SEQ ID NO: 401758 - RNA, 23 nt, Human
uuuccuggaaggcaaagugggca

SEQ ID NO: 401759 - RNA, 18 nt, Human
aucauccaugggaucucg

SEQ ID NO: 401760 - RNA, 24 nt, Human
cguacgcucaucacguuauauaua

SEQ ID NO: 401761 - RNA, 20 nt, Human
ugaggaaacagcucaauggc

SEQ ID NO: 401762 - RNA, 21 nt, Human
ugaggaaacagcucaauggcc

SEQ ID NO: 401763 - RNA, 18 nt, Human
aaaaugucuacacgcaua

SEQ ID NO: 401764 - RNA, 22 nt, Human
aaugucuacacgcauaaguaac

SEQ ID NO: 401765 - RNA, 24 nt, Human
cagccaaacuccggccgagaaguu

SEQ ID NO: 401766 - RNA, 22 nt, Human
ccuuggcuggagcgauaggggc

SEQ ID NO: 401767 - RNA, 21 nt, Human
cggcuccgugcucucugcccg

SEQ ID NO: 401768 - RNA, 19 nt, Human
cucugcccgucgugguucc

SEQ ID NO: 401769 - RNA, 18 nt, Human
cuucacccccucucgaca

SEQ ID NO: 401770 - RNA, 20 nt, Human
gagcagggguggggccggcu

SEQ ID NO: 401771 - RNA, 22 nt, Human
gagcgauaggggcgagcagggg

SEQ ID NO: 401772 - RNA, 20 nt, Human
gcuucuucgccuuggcugga

SEQ ID NO: 401773 - RNA, 20 nt, Human
ggcuccgugcucucugcccg

SEQ ID NO: 401774 - RNA, 18 nt, Human
gggcgagcaggggugggg

SEQ ID NO: 401775 - RNA, 22 nt, Human
gggcgcccaggggcuucccggc

SEQ ID NO: 401776 - RNA, 19 nt, Human
guacuuagggcuucugcaa

SEQ ID NO: 401777 - RNA, 18 nt, Human
uaaguaaccguacuuagg

SEQ ID NO: 401778 - RNA, 20 nt, Human
uaaguaaccguacuuagggc

SEQ ID NO: 401779 - RNA, 20 nt, Human
uaccgcgaucucagccaaac

SEQ ID NO: 401780 - RNA, 22 nt, Human
ucuacacgcauaaguaaccgua

SEQ ID NO: 401781 - RNA, 21 nt, Human
ucucugcccgucgugguuccg

SEQ ID NO: 401782 - RNA, 20 nt, Human
uuaauaccgcgaucucagcu

SEQ ID NO: 401783 - RNA, 26 nt, Human
uucgccuuggcuggagcgauaggggc

SEQ ID NO: 401784 - RNA, 20 nt, Human
uuggcuggagcgauaggggc

SEQ ID NO: 401785 - RNA, 18 nt, Human
uuuuuuuuuuuuguuuuc

SEQ ID NO: 401786 - RNA, 24 nt, Human
uuuuuuuuuuuuuuuuuuuguuuu

SEQ ID NO: 401787 - RNA, 27 nt, Human
uuuuuuuuuuuuuuuuuuuuuuugggg

SEQ ID NO: 401788 - RNA, 23 nt, Human
aagccaaaggcaagcacaccaaa

SEQ ID NO: 401789 - RNA, 20 nt, Human
aggcaagcacaccaaacucc

SEQ ID NO: 401790 - RNA, 20 nt, Human
auggugccuuccccauuuua

SEQ ID NO: 401791 - RNA, 19 nt, Human
caaaggcaagcacaccaaa

SEQ ID NO: 401792 - RNA, 23 nt, Human
caagcacaccaaacuccaugggg

SEQ ID NO: 401793 - RNA, 22 nt, Human
caagccccuggcugggggucca

SEQ ID NO: 401794 - RNA, 25 nt, Human
cacaccaaacuccaugggggcugaa

SEQ ID NO: 401795 - RNA, 20 nt, Human
caggaacaggagcugggcua

SEQ ID NO: 401796 - RNA, 19 nt, Human
ccaagccccuggcuggggg

SEQ ID NO: 401797 - RNA, 19 nt, Human
ccuggcuggggguccagag

SEQ ID NO: 401798 - RNA, 26 nt, Human
ccuuuugaaggcacaggaacaggagc

SEQ ID NO: 401799 - RNA, 18 nt, Human
gaaggcacaggaacagga

SEQ ID NO: 401800 - RNA, 19 nt, Human
ucugcagguuagccugguc

SEQ ID NO: 401801 - RNA, 18 nt, Human
ugaaggcacaggaacagg

SEQ ID NO: 401802 - RNA, 19 nt, Human
ugaaggcacaggaacagga

SEQ ID NO: 401803 - RNA, 19 nt, Human
ugccccagccuuuugaagg

SEQ ID NO: 401804 - RNA, 24 nt, Human
uggcuggggguccagagggagggc

SEQ ID NO: 401805 - RNA, 21 nt, Human
uggcuuaauggugccuucccc

SEQ ID NO: 401806 - RNA, 18 nt, Human
ugggggcugaaugcugug

SEQ ID NO: 401807 - RNA, 19 nt, Human
ugggggcugaaugcugugg

SEQ ID NO: 401808 - RNA, 20 nt, Human
uggggguccagagggagggc

SEQ ID NO: 401809 - RNA, 23 nt, Human
uggugaggucugaagccaaaggc

SEQ ID NO: 401810 - RNA, 19 nt, Human
uucauuuuggcuuaauggu

SEQ ID NO: 401811 - RNA, 21 nt, Human
aaacaccacacugcagccaac

SEQ ID NO: 401812 - RNA, 20 nt, Human
aagccgaggggaagggccgg

SEQ ID NO: 401813 - RNA, 19 nt, Human
acagaggccccaggcccuc

SEQ ID NO: 401814 - RNA, 18 nt, Human
agaacagaggccccaggc

SEQ ID NO: 401815 - RNA, 24 nt, Human
agacaggaccggaauucaaaucca

SEQ ID NO: 401816 - RNA, 19 nt, Human
agagaaagagaaagagaau

SEQ ID NO: 401817 - RNA, 25 nt, Human
agaggaacucagcgccauugcugcg

SEQ ID NO: 401818 - RNA, 20 nt, Human
agcagaggaacucagcgcca

SEQ ID NO: 401819 - RNA, 21 nt, Human
aggagggcugggugugugguc

SEQ ID NO: 401820 - RNA, 22 nt, Human
aggccugcuggguggagcggcg

SEQ ID NO: 401821 - RNA, 19 nt, Human
agugggcagcagggggugu

SEQ ID NO: 401822 - RNA, 25 nt, Human
agugggcagcagggggugucuggca

SEQ ID NO: 401823 - RNA, 22 nt, Human
caaagccgaggggaagggccgg

SEQ ID NO: 401824 - RNA, 18 nt, Human
caagcugugccucagaac

SEQ ID NO: 401825 - RNA, 21 nt, Human
caccucucccuccacuggagg

SEQ ID NO: 401826 - RNA, 22 nt, Human
cacuaaacaccacacugcagcc

SEQ ID NO: 401827 - RNA, 20 nt, Human
cacugcagccaacccagucc

SEQ ID NO: 401828 - RNA, 21 nt, Human
cagaacagaggccccaggccc

SEQ ID NO: 401829 - RNA, 21 nt, Human
cagaacccgagcagcaggaga

SEQ ID NO: 401830 - RNA, 23 nt, Human
cagcagagaggggcucaggccug

SEQ ID NO: 401831 - RNA, 19 nt, Human
cagcaggggccccaccucu

SEQ ID NO: 401832 - RNA, 19 nt, Human
cagcagggggugucuggca

SEQ ID NO: 401833 - RNA, 23 nt, Human
cagcucgggaacccagcuagcag

SEQ ID NO: 401834 - RNA, 20 nt, Human
caggaccggaauucaaaucc

SEQ ID NO: 401835 - RNA, 22 nt, Human
caggaccggaauucaaauccaa

SEQ ID NO: 401836 - RNA, 28 nt, Human
ccacuaaacaccacacugcagccaaccc

SEQ ID NO: 401837 - RNA, 21 nt, Human
ccaguccagccuuggcuguga

SEQ ID NO: 401838 - RNA, 27 nt, Human
ccccaaauacacuguuucaugacaaau

SEQ ID NO: 401839 - RNA, 18 nt, Human
ccccaagccuccgggcuc

SEQ ID NO: 401840 - RNA, 22 nt, Human
cccccaagccuccgggcuccgg

SEQ ID NO: 401841 - RNA, 20 nt, Human
cccucugggcuggcccagga

SEQ ID NO: 401842 - RNA, 26 nt, Human
ccucaggcucagaccggcagcucggg

SEQ ID NO: 401843 - RNA, 24 nt, Human
ccuguccugcugaggccacaagag

SEQ ID NO: 401844 - RNA, 19 nt, Human
cucagaacccgagcagcag

SEQ ID NO: 401845 - RNA, 23 nt, Human
cucaggacucuggggagcucagg

SEQ ID NO: 401846 - RNA, 22 nt, Human
cuggcccaggagggcugggugu

SEQ ID NO: 401847 - RNA, 19 nt, Human
cuggguggagcggcgcugg

SEQ ID NO: 401848 - RNA, 20 nt, Human
gagaaacaagauauuuacau

SEQ ID NO: 401849 - RNA, 20 nt, Human
gagcagcaggagagugggca

SEQ ID NO: 401850 - RNA, 18 nt, Human
gagcucaggccacagcag

SEQ ID NO: 401851 - RNA, 18 nt, Human
gaggcaggagcuguccag

SEQ ID NO: 401852 - RNA, 19 nt, Human
gcagcaggagagugggcag

SEQ ID NO: 401853 - RNA, 22 nt, Human
gccaacccaguccagccuuggc

SEQ ID NO: 401854 - RNA, 19 nt, Human
gcccaugggaauggcacgu

SEQ ID NO: 401855 - RNA, 18 nt, Human
gccccaccucucccucca

SEQ ID NO: 401856 - RNA, 22 nt, Human
gccgaggggaagggccgguaug

SEQ ID NO: 401857 - RNA, 20 nt, Human
gcugggggacacaggugggc

SEQ ID NO: 401858 - RNA, 20 nt, Human
ggacagccucuuucagcagc

SEQ ID NO: 401859 - RNA, 20 nt, Human
ggccccaggcccucacuggc

SEQ ID NO: 401860 - RNA, 19 nt, Human
ggccuguccugcugaggcc

SEQ ID NO: 401861 - RNA, 18 nt, Human
gggaacccagcuagcagg

SEQ ID NO: 401862 - RNA, 22 nt, Human
gggcagcagggggugucuggca

SEQ ID NO: 401863 - RNA, 22 nt, Human
gggcccugcgggaggcaggagc

SEQ ID NO: 401864 - RNA, 25 nt, Human
gggcggagcccccaagccuccgggc

SEQ ID NO: 401865 - RNA, 21 nt, Human
ggggccuguccugcugaggcc

SEQ ID NO: 401866 - RNA, 23 nt, Human
gguggagcggcgcugggggacac

SEQ ID NO: 401867 - RNA, 20 nt, Human
ggugucuggcagcagagagg

SEQ ID NO: 401868 - RNA, 20 nt, Human
guggcguccccagcucuacc

SEQ ID NO: 401869 - RNA, 22 nt, Human
gugggccagaagagaaagagaa

SEQ ID NO: 401870 - RNA, 19 nt, Human
uagcaggaugaacuccagc

SEQ ID NO: 401871 - RNA, 21 nt, Human
uccacuggaggagacggaagc

SEQ ID NO: 401872 - RNA, 20 nt, Human
ucccacagcaucuccccaaa

SEQ ID NO: 401873 - RNA, 21 nt, Human
uccccaaauacacuguuucau

SEQ ID NO: 401874 - RNA, 21 nt, Human
uccucccacagcaucucccca

SEQ ID NO: 401875 - RNA, 23 nt, Human
ucgccagguggacagccucuuuc

SEQ ID NO: 401876 - RNA, 22 nt, Human
ucuggcgucggggugcagaguc

SEQ ID NO: 401877 - RNA, 23 nt, Human
ugaggcagugcccggggccuguc

SEQ ID NO: 401878 - RNA, 20 nt, Human
ugccucagaacccgagcagc

SEQ ID NO: 401879 - RNA, 22 nt, Human
ugccucagaacccgagcagcag

SEQ ID NO: 401880 - RNA, 21 nt, Human
ugcuggguggagcggcgcugg

SEQ ID NO: 401881 - RNA, 23 nt, Human
uggcagcagagaggggcucaggg

SEQ ID NO: 401882 - RNA, 18 nt, Human
ugggaauggcacguggcg

SEQ ID NO: 401883 - RNA, 19 nt, Human
ugggcuggcccaggagggc

SEQ ID NO: 401884 - RNA, 22 nt, Human
ugugacaagcugugccucagaa

SEQ ID NO: 401885 - RNA, 18 nt, Human
uuuuuuuuuuuuuuuuug

SEQ ID NO: 401886 - RNA, 21 nt, Human
uuuuuuuuuuuuuuuuugagg

SEQ ID NO: 401887 - RNA, 26 nt, Human
aaaaagaaaacaagggagcuacagaa

SEQ ID NO: 401888 - RNA, 21 nt, Human
acaaaaagaaaacaagggagc

SEQ ID NO: 401889 - RNA, 21 nt, Human
acaguuagaggacaaaaagcu

SEQ ID NO: 401890 - RNA, 18 nt, Human
agaaagaacagccuggaa

SEQ ID NO: 401891 - RNA, 20 nt, Human
agccuggaaggacaaguaau

SEQ ID NO: 401892 - RNA, 21 nt, Human
aggaaguuucuaccauuaagc

SEQ ID NO: 401893 - RNA, 27 nt, Human
caaaaagaaaacaagggagcuacagaa

SEQ ID NO: 401894 - RNA, 23 nt, Human
caaaaagcuguaucggcaacuga

SEQ ID NO: 401895 - RNA, 22 nt, Human
caaguuucuaaguuugagucuu

SEQ ID NO: 401896 - RNA, 24 nt, Human
ccagagcaaaugcagcaagagcag

SEQ ID NO: 401897 - RNA, 25 nt, Human
gaaaacaagggagcuacagaaagaa

SEQ ID NO: 401898 - RNA, 25 nt, Human
gcaaaugcagcaagagcagcuagaa

SEQ ID NO: 401899 - RNA, 26 nt, Human
ggaaaaaaaaagacuuuaaucaugaa

SEQ ID NO: 401900 - RNA, 26 nt, Human
ggaaggacaaguaauaucucuacaag

SEQ ID NO: 401901 - RNA, 19 nt, Human
ggggcugucugugucuucg

SEQ ID NO: 401902 - RNA, 18 nt, Human
uaagcucccaacaguaac

SEQ ID NO: 401903 - RNA, 31 nt, Human
uaccauuaagcucccaacaguaaccuagagg

SEQ ID NO: 401904 - RNA, 20 nt, Human
uaucucuacaagaauuccag

SEQ ID NO: 401905 - RNA, 23 nt, Human
uccacaguuagaggacaaaaagc

SEQ ID NO: 401906 - RNA, 19 nt, Human
ucuucgcggcacguaagga

SEQ ID NO: 401907 - RNA, 19 nt, Human
ugaaaccaaggaaguuucu

SEQ ID NO: 401908 - RNA, 21 nt, Human
uggcacugcucgagucgaaau

SEQ ID NO: 401909 - RNA, 24 nt, Human
uuucuaccauuaagcucccaacag

SEQ ID NO: 401910 - RNA, 26 nt, Human
aaaaaaaacugcuuaugcacugugaa

SEQ ID NO: 401911 - RNA, 21 nt, Human
aaaaacaaaaaaaacugcuua

SEQ ID NO: 401912 - RNA, 20 nt, Human
aaaacaaaacaaaacaaaaa

SEQ ID NO: 401913 - RNA, 24 nt, Human
aaacaaaaacaaaaaaaacugcuu

SEQ ID NO: 401914 - RNA, 22 nt, Human
aaacaaaacaaaaacaaaaaaa

SEQ ID NO: 401915 - RNA, 23 nt, Human
aaacaaaacaaaacaaaaacaaa

SEQ ID NO: 401916 - RNA, 22 nt, Human
aaacaaaacaaaacaaaacaaa

SEQ ID NO: 401917 - RNA, 21 nt, Human
aacaaaaacaaaaaaaacugc

SEQ ID NO: 401918 - RNA, 19 nt, Human
aagugggguuggaaggcga

SEQ ID NO: 401919 - RNA, 21 nt, Human
acaaaaacaaaaaaaacugcu

SEQ ID NO: 401920 - RNA, 19 nt, Human
acaaaacaaaaacaaaaaa

SEQ ID NO: 401921 - RNA, 26 nt, Human
acaaaacaaaaacaaaaaaaacugcu

SEQ ID NO: 401922 - RNA, 24 nt, Human
acaaaacaaaacaaaaacaaaaaa

SEQ ID NO: 401923 - RNA, 23 nt, Human
acaaaacaaaacaaaacaaaaac

SEQ ID NO: 401924 - RNA, 19 nt, Human
acacccaaaacgggcauga

SEQ ID NO: 401925 - RNA, 18 nt, Human
aggcauagcgucccucau

SEQ ID NO: 401926 - RNA, 20 nt, Human
aggcauagcgucccucaucc

SEQ ID NO: 401927 - RNA, 25 nt, Human
caaaaacaaaaaaaacugcuuaugc

SEQ ID NO: 401928 - RNA, 25 nt, Human
caaaacaaaaacaaaaaaaacugcu

SEQ ID NO: 401929 - RNA, 24 nt, Human
caaaacaaaacaaaaacaaaaaaa

SEQ ID NO: 401930 - RNA, 25 nt, Human
caaaacaaaacaaaaacaaaaaaaa

SEQ ID NO: 401931 - RNA, 22 nt, Human
caaaacaaaacaaaacaaaaac

SEQ ID NO: 401932 - RNA, 19 nt, Human
caaguaggcggcugcuagc

SEQ ID NO: 401933 - RNA, 20 nt, Human
cacagcuccagcugaaggcc

SEQ ID NO: 401934 - RNA, 20 nt, Human
cacccaaaacgggcaugagg

SEQ ID NO: 401935 - RNA, 21 nt, Human
cagcugagaaaagcuauguac

SEQ ID NO: 401936 - RNA, 24 nt, Human
caggggcccccgagcagccuugcu

SEQ ID NO: 401937 - RNA, 21 nt, Human
ccaaaacgggcaugaggcaua

SEQ ID NO: 401938 - RNA, 21 nt, Human
cccccgagcagccuugcuggu

SEQ ID NO: 401939 - RNA, 22 nt, Human
ccccuccucucugcuuuaauuu

SEQ ID NO: 401940 - RNA, 24 nt, Human
cccucauccucgcaaaccacccac

SEQ ID NO: 401941 - RNA, 20 nt, Human
cccuccucucugcuuuaauu

SEQ ID NO: 401942 - RNA, 22 nt, Human
ccugcaggaccccuccuuucca

SEQ ID NO: 401943 - RNA, 22 nt, Human
ccuggucccagugaucucuccc

SEQ ID NO: 401944 - RNA, 25 nt, Human
cgagcagccuugcuggugaggacac

SEQ ID NO: 401945 - RNA, 23 nt, Human
cgccccugccuuaggacaguuca

SEQ ID NO: 401946 - RNA, 18 nt, Human
cuccagcugaaggcccca

SEQ ID NO: 401947 - RNA, 20 nt, Human
cuuuccagaaaaaagugggg

SEQ ID NO: 401948 - RNA, 23 nt, Human
gagaaaagcuauguacaucgagg

SEQ ID NO: 401949 - RNA, 20 nt, Human
gagcccacggcgcaccucuc

SEQ ID NO: 401950 - RNA, 20 nt, Human
gcucagggcaguguggcagc

SEQ ID NO: 401951 - RNA, 19 nt, Human
ggcaguguggcagcggcag

SEQ ID NO: 401952 - RNA, 25 nt, Human
gggcaguguggcagcggccgggccc

SEQ ID NO: 401953 - RNA, 19 nt, Human
gggcauagagaucacggcc

SEQ ID NO: 401954 - RNA, 24 nt, Human
gggcucagggcaguguggcagcgg

SEQ ID NO: 401955 - RNA, 23 nt, Human
gugcuggggcuucccgggacucg

SEQ ID NO: 401956 - RNA, 24 nt, Human
uaaaaacaaaacaaaacaaaacaa

SEQ ID NO: 401957 - RNA, 25 nt, Human
uacaaaaguccacagcuccagcuga

SEQ ID NO: 401958 - RNA, 18 nt, Human
ucacggccuggucccagu

SEQ ID NO: 401959 - RNA, 28 nt, Human
ucccagugaucucuccccuccucucugc

SEQ ID NO: 401960 - RNA, 18 nt, Human
uccgugcucgccccugcc

SEQ ID NO: 401961 - RNA, 20 nt, Human
uccucgcaaaccacccacuc

SEQ ID NO: 401962 - RNA, 23 nt, Human
ucucuggacugaggcuccaguuc

SEQ ID NO: 401963 - RNA, 26 nt, Human
ucuggccuuugggguucaagaucacu

SEQ ID NO: 401964 - RNA, 19 nt, Human
ugccuuaggacaguucagc

SEQ ID NO: 401965 - RNA, 21 nt, Human
ugccuuggggugacaguugag

SEQ ID NO: 401966 - RNA, 19 nt, Human
ugggguuggaaggcgaucu

SEQ ID NO: 401967 - RNA, 22 nt, Human
uguccaggacgucccaagugcc

SEQ ID NO: 401968 - RNA, 20 nt, Human
uguggcagcggcagugcugg

SEQ ID NO: 401969 - RNA, 26 nt, Human
uuaaaaacaaaacaaaacaaaacaaa

SEQ ID NO: 401970 - RNA, 24 nt, Human
uuaguguaacaugauugauuuaaa

SEQ ID NO: 401971 - RNA, 19 nt, Human
uugccccugcaggaccccu

SEQ ID NO: 401972 - RNA, 25 nt, Human
aaaacccaagggcuccagaagccag

SEQ ID NO: 401973 - RNA, 20 nt, Human
aaaaggacaaguuagcauuu

SEQ ID NO: 401974 - RNA, 22 nt, Human
aaacaaacaaacaaaaaaccca

SEQ ID NO: 401975 - RNA, 19 nt, Human
aaacaaacaaacaaacaaa

SEQ ID NO: 401976 - RNA, 24 nt, Human
aaagugcugggaucauaggcguga

SEQ ID NO: 401977 - RNA, 23 nt, Human
aacaaacaaacaaacaaacaaac

SEQ ID NO: 401978 - RNA, 23 nt, Human
aacaaacaaacaaacaaacaaac

SEQ ID NO: 401979 - RNA, 18 nt, Human
aacagguuuauugauaag

SEQ ID NO: 401980 - RNA, 20 nt, Human
aacccaagggcuccagaagc

SEQ ID NO: 401981 - RNA, 24 nt, Human
aaccucaggugauccacccgccuc

SEQ ID NO: 401982 - RNA, 19 nt, Human
aaccuggccagucccagca

SEQ ID NO: 401983 - RNA, 29 nt, Human
aagccagagcugggcagagcccaggggga

SEQ ID NO: 401984 - RNA, 21 nt, Human
aaggccccacagagucuccaa

SEQ ID NO: 401985 - RNA, 19 nt, Human
aagugcugggaucauaggc

SEQ ID NO: 401986 - RNA, 26 nt, Human
aagugcugggaucauaggcgugagcc

SEQ ID NO: 401987 - RNA, 24 nt, Human
acaaacaaacaaaaaacccaaggg

SEQ ID NO: 401988 - RNA, 24 nt, Human
acaaacaaacaaacaaacaaaaaa

SEQ ID NO: 401989 - RNA, 22 nt, Human
acacagacgcagacacaagacu

SEQ ID NO: 401990 - RNA, 18 nt, Human
acagcccacaccggccug

SEQ ID NO: 401991 - RNA, 23 nt, Human
accaaaguggcagggcagcccgg

SEQ ID NO: 401992 - RNA, 20 nt, Human
accauguuggccaggcuggu

SEQ ID NO: 401993 - RNA, 23 nt, Human
accauguuggccaggcuggucuc

SEQ ID NO: 401994 - RNA, 24 nt, Human
accauguuggccaggcuggucucg

SEQ ID NO: 401995 - RNA, 25 nt, Human
acccgccucagccucccaaagugcu

SEQ ID NO: 401996 - RNA, 25 nt, Human
acucuguugcucaggcuggagugua

SEQ ID NO: 401997 - RNA, 21 nt, Human
agagacagggucucacucugu

SEQ ID NO: 401998 - RNA, 23 nt, Human
agcaaggaaggaggcgcggggcc

SEQ ID NO: 401999 - RNA, 22 nt, Human
agcagucugacuuuuuuuuucu

SEQ ID NO: 402000 - RNA, 22 nt, Human
agccagagcugggcagagccca

SEQ ID NO: 402001 - RNA, 19 nt, Human
agccaggcuggcaggugca

SEQ ID NO: 402002 - RNA, 23 nt, Human
agccucaggcuucugaguagcug

SEQ ID NO: 402003 - RNA, 21 nt, Human
agcuaacuugaaggacccccu

SEQ ID NO: 402004 - RNA, 22 nt, Human
aggaacuuggcccagaaagagc

SEQ ID NO: 402005 - RNA, 21 nt, Human
aggaagccugagguucuccca

SEQ ID NO: 402006 - RNA, 21 nt, Human
aggaauugaagguggggagug

SEQ ID NO: 402007 - RNA, 25 nt, Human
aggaccccguucccuacagggcugc

SEQ ID NO: 402008 - RNA, 19 nt, Human
aggcgugagccacugcacc

SEQ ID NO: 402009 - RNA, 22 nt, Human
aggcugcggcuguggagggcac

SEQ ID NO: 402010 - RNA, 25 nt, Human
aggcuggagugcaguggcgugaucu

SEQ ID NO: 402011 - RNA, 19 nt, Human
aggcuggcaggugcagcug

SEQ ID NO: 402012 - RNA, 24 nt, Human
agggggagaaacaaacaaacaaac

SEQ ID NO: 402013 - RNA, 24 nt, Human
aggugauccacccgccucagccuc

SEQ ID NO: 402014 - RNA, 20 nt, Human
aggugcccgccaccacgccc

SEQ ID NO: 402015 - RNA, 21 nt, Human
aggugcccgccaccacgcccg

SEQ ID NO: 402016 - RNA, 18 nt, Human
agguggggaguggggaag

SEQ ID NO: 402017 - RNA, 22 nt, Human
agguggggaguggggaagagga

SEQ ID NO: 402018 - RNA, 18 nt, Human
aguagcugggacuauagg

SEQ ID NO: 402019 - RNA, 19 nt, Human
agugcaguggcgugaucuc

SEQ ID NO: 402020 - RNA, 20 nt, Human
agugcaguggcgugaucucg

SEQ ID NO: 402021 - RNA, 23 nt, Human
agugcaguggcgugaucucggcu

SEQ ID NO: 402022 - RNA, 24 nt, Human
agugcaguggcgugaucucggcuc

SEQ ID NO: 402023 - RNA, 21 nt, Human
aguguaguggcgcgaucauag

SEQ ID NO: 402024 - RNA, 24 nt, Human
aguguaguggcgcgaucauagcuc

SEQ ID NO: 402025 - RNA, 18 nt, Human
auagcucgcugcagccuc

SEQ ID NO: 402026 - RNA, 18 nt, Human
aucauagcucgcugcagc

SEQ ID NO: 402027 - RNA, 23 nt, Human
augcuccugagacugagccuuuc

SEQ ID NO: 402028 - RNA, 24 nt, Human
augcuccugagacugagccuuucc

SEQ ID NO: 402029 - RNA, 23 nt, Human
augggguuuuaccauguuggcca

SEQ ID NO: 402030 - RNA, 24 nt, Human
augggguuuuaccauguuggccag

SEQ ID NO: 402031 - RNA, 21 nt, Human
caaaaaacccaagggcuccag

SEQ ID NO: 402032 - RNA, 30 nt, Human
caaacuccugggcuccagugauccucccuc

SEQ ID NO: 402033 - RNA, 24 nt, Human
caaagugcugggaucauaggcgug

SEQ ID NO: 402034 - RNA, 19 nt, Human
caacaauuuaucacccugc

SEQ ID NO: 402035 - RNA, 23 nt, Human
cacacacccacgacacgcaacac

SEQ ID NO: 402036 - RNA, 21 nt, Human
cacagagccccaggaccaucc

SEQ ID NO: 402037 - RNA, 22 nt, Human
cacagagccccaggaccauccc

SEQ ID NO: 402038 - RNA, 18 nt, Human
caccauggcagcagaggc

SEQ ID NO: 402039 - RNA, 20 nt, Human
caccaugguacaaaaggaca

SEQ ID NO: 402040 - RNA, 23 nt, Human
cacccgccucagccucccaaagu

SEQ ID NO: 402041 - RNA, 22 nt, Human
caccuccucccuacacagagcc

SEQ ID NO: 402042 - RNA, 22 nt, Human
cacgacacgcaacacagacgca

SEQ ID NO: 402043 - RNA, 24 nt, Human
cacucuguugcucaggcuggagug

SEQ ID NO: 402044 - RNA, 24 nt, Human
cagagcugggcagagcccaggggg

SEQ ID NO: 402045 - RNA, 26 nt, Human
cagagucuccaaauucaucgcuuccc

SEQ ID NO: 402046 - RNA, 23 nt, Human
cagccucaaacuccugggcucca

SEQ ID NO: 402047 - RNA, 18 nt, Human
cagccuccugaguacagg

SEQ ID NO: 402048 - RNA, 22 nt, Human
caggagccccucaaccugcuuc

SEQ ID NO: 402049 - RNA, 22 nt, Human
cagggcucagcccaccuuggcu

SEQ ID NO: 402050 - RNA, 24 nt, Human
cagggcucagcccaccuuggcuac

SEQ ID NO: 402051 - RNA, 21 nt, Human
caggucacagagagucaggga

SEQ ID NO: 402052 - RNA, 25 nt, Human
cagucugacuuuuuuuuucuuuaag

SEQ ID NO: 402053 - RNA, 24 nt, Human
cauguuggccaggcuggucucgaa

SEQ ID NO: 402054 - RNA, 22 nt, Human
ccaaagugcugggaucauaggc

SEQ ID NO: 402055 - RNA, 24 nt, Human
ccaaagugcugggaucauaggcgu

SEQ ID NO: 402056 - RNA, 26 nt, Human
ccacccgccucagccucccaaagugc

SEQ ID NO: 402057 - RNA, 19 nt, Human
ccacugcaccuggccugag

SEQ ID NO: 402058 - RNA, 19 nt, Human
ccacugcaccuggccugag

SEQ ID NO: 402059 - RNA, 21 nt, Human
ccacugcaccuggccugaggu

SEQ ID NO: 402060 - RNA, 23 nt, Human
ccacugcaccuggccugagguga

SEQ ID NO: 402061 - RNA, 25 nt, Human
ccaggagccccucaaccugcuuccu

SEQ ID NO: 402062 - RNA, 23 nt, Human
ccagggcucagcccaccuuggcu

SEQ ID NO: 402063 - RNA, 25 nt, Human
ccagugauccuccccucagccuccu

SEQ ID NO: 402064 - RNA, 21 nt, Human
cccacagagucuccaaauuca

SEQ ID NO: 402065 - RNA, 19 nt, Human
cccagcaugccccgaacgu

SEQ ID NO: 402066 - RNA, 18 nt, Human
ccccacagagucuccaaa

SEQ ID NO: 402067 - RNA, 23 nt, Human
ccccacagagucuccaaauucau

SEQ ID NO: 402068 - RNA, 21 nt, Human
cccccugcccucgcgcccucg

SEQ ID NO: 402069 - RNA, 18 nt, Human
cccucgcagcccagcgcc

SEQ ID NO: 402070 - RNA, 24 nt, Human
cccucgcagcccagcgccuucucu

SEQ ID NO: 402071 - RNA, 24 nt, Human
ccgccucagccucccaaagugcug

SEQ ID NO: 402072 - RNA, 18 nt, Human
ccggagugaaggcggagg

SEQ ID NO: 402073 - RNA, 22 nt, Human
ccuaaccucaggugauccaccc

SEQ ID NO: 402074 - RNA, 23 nt, Human
ccuaaccucaggugauccacccg

SEQ ID NO: 402075 - RNA, 19 nt, Human
ccucagaguccuaguggug

SEQ ID NO: 402076 - RNA, 20 nt, Human
ccucagccuccugaguacag

SEQ ID NO: 402077 - RNA, 22 nt, Human
ccugcaaccuccgcuucccggg

SEQ ID NO: 402078 - RNA, 20 nt, Human
ccugggcuccagugauccuc

SEQ ID NO: 402079 - RNA, 22 nt, Human
ccugggcuccagugauccuccc

SEQ ID NO: 402080 - RNA, 24 nt, Human
cgcccaggcuggagugcaguggcg

SEQ ID NO: 402081 - RNA, 22 nt, Human
cgcccucgcgcccucgcagccc

SEQ ID NO: 402082 - RNA, 20 nt, Human
cgcuccaucauguccucaug

SEQ ID NO: 402083 - RNA, 25 nt, Human
cggagggugcaaauggcaggugggg

SEQ ID NO: 402084 - RNA, 24 nt, Human
cggggcugcaggcacaccggagug

SEQ ID NO: 402085 - RNA, 19 nt, Human
cgguugcccccugcccucg

SEQ ID NO: 402086 - RNA, 18 nt, Human
cuaggacagcaaggaagg

SEQ ID NO: 402087 - RNA, 23 nt, Human
cucaaacuccugggcuccaguga

SEQ ID NO: 402088 - RNA, 24 nt, Human
cucacucuguugcucaggcuggag

SEQ ID NO: 402089 - RNA, 19 nt, Human
cuccaauaguucagcugcc

SEQ ID NO: 402090 - RNA, 18 nt, Human
cucccaggacuguccacc

SEQ ID NO: 402091 - RNA, 19 nt, Human
cucccaggacuguccacca

SEQ ID NO: 402092 - RNA, 19 nt, Human
cuccucccuacacagagcc

SEQ ID NO: 402093 - RNA, 23 nt, Human
cuccucccuacacagagccccag

SEQ ID NO: 402094 - RNA, 28 nt, Human
cuccucuccagaaagccccucugcagaa

SEQ ID NO: 402095 - RNA, 20 nt, Human
cuccugagcuaacuugaagg

SEQ ID NO: 402096 - RNA, 23 nt, Human
cuccugggcuccagugauccucc

SEQ ID NO: 402097 - RNA, 24 nt, Human
cucgcucugucgcccaggcuggag

SEQ ID NO: 402098 - RNA, 21 nt, Human
cucgcugcagccucaaacucc

SEQ ID NO: 402099 - RNA, 20 nt, Human
cucugucgcccaggcuggag

SEQ ID NO: 402100 - RNA, 23 nt, Human
cugcaaccuccgcuucccggguu

SEQ ID NO: 402101 - RNA, 24 nt, Human
cugcaaccuccgcuucccggguuc

SEQ ID NO: 402102 - RNA, 23 nt, Human
cugcagccucaaacuccugggcu

SEQ ID NO: 402103 - RNA, 18 nt, Human
cugggcagagcccagggg

SEQ ID NO: 402104 - RNA, 19 nt, Human
cugggcccucugggcaucu

SEQ ID NO: 402105 - RNA, 23 nt, Human
cuguauuuuuaguagagaugggg

SEQ ID NO: 402106 - RNA, 19 nt, Human
cuguugcucaggcuggagu

SEQ ID NO: 402107 - RNA, 20 nt, Human
cuuggcuacacacacccacg

SEQ ID NO: 402108 - RNA, 18 nt, Human
gagaugggguuuuaccau

SEQ ID NO: 402109 - RNA, 18 nt, Human
gaucauaggcgugagcca

SEQ ID NO: 402110 - RNA, 22 nt, Human
gaucauaggcgugagccacugc

SEQ ID NO: 402111 - RNA, 23 nt, Human
gaucauaggcgugagccacugca

SEQ ID NO: 402112 - RNA, 20 nt, Human
gaugccaaggaagccugagg

SEQ ID NO: 402113 - RNA, 23 nt, Human
gauuucccagccucaggcuucug

SEQ ID NO: 402114 - RNA, 23 nt, Human
gcacuagaggaacuuggcccaga

SEQ ID NO: 402115 - RNA, 22 nt, Human
gcaucugacuuucacaccaugg

SEQ ID NO: 402116 - RNA, 19 nt, Human
gcccagcgccuucucucca

SEQ ID NO: 402117 - RNA, 20 nt, Human
gcccaggcuggagugcagug

SEQ ID NO: 402118 - RNA, 24 nt, Human
gcccaggcuggagugcaguggcgu

SEQ ID NO: 402119 - RNA, 25 nt, Human
gccccaggaccaucccgcagucuca

SEQ ID NO: 402120 - RNA, 23 nt, Human
gccucagccucccaaagugcugg

SEQ ID NO: 402121 - RNA, 24 nt, Human
gcggggcugcaggcacaccggagu

SEQ ID NO: 402122 - RNA, 20 nt, Human
gcucagcccaccuuggcuac

SEQ ID NO: 402123 - RNA, 25 nt, Human
gcucugucgcccaggcuggagugca

SEQ ID NO: 402124 - RNA, 19 nt, Human
gcugcagccucaaacuccu

SEQ ID NO: 402125 - RNA, 30 nt, Human
gcugcagccucaaacuccugggcuccaguu

SEQ ID NO: 402126 - RNA, 18 nt, Human
gcugccaagcucaagucc

SEQ ID NO: 402127 - RNA, 19 nt, Human
gcuggagugcaguggcgug

SEQ ID NO: 402128 - RNA, 23 nt, Human
gcuggucucgaacuccuaaccuc

SEQ ID NO: 402129 - RNA, 22 nt, Human
ggaagccugagguucucccagg

SEQ ID NO: 402130 - RNA, 18 nt, Human
ggagccccucaaccugcu

SEQ ID NO: 402131 - RNA, 19 nt, Human
ggaggaggagggucuaggc

SEQ ID NO: 402132 - RNA, 27 nt, Human
ggaggcggugcuuuuuuuuuuuucuuu

SEQ ID NO: 402133 - RNA, 23 nt, Human
ggaguggggaagaggaacccacc

SEQ ID NO: 402134 - RNA, 23 nt, Human
ggaucacacuggccauguaccaa

SEQ ID NO: 402135 - RNA, 19 nt, Human
ggcagcagaggcuuucccc

SEQ ID NO: 402136 - RNA, 21 nt, Human
ggcccagaaagagccucagag

SEQ ID NO: 402137 - RNA, 22 nt, Human
ggcuggagugcaguggcgugau

SEQ ID NO: 402138 - RNA, 23 nt, Human
gggcacuagaggaacuuggccca

SEQ ID NO: 402139 - RNA, 18 nt, Human
gggcagaaaccuggccag

SEQ ID NO: 402140 - RNA, 24 nt, Human
gggcaucugacuuucacaccaugg

SEQ ID NO: 402141 - RNA, 21 nt, Human
gggggaggaggagggucuagg

SEQ ID NO: 402142 - RNA, 22 nt, Human
gggguuuuaccauguuggccag

SEQ ID NO: 402143 - RNA, 21 nt, Human
ggguccgguugcccccugccc

SEQ ID NO: 402144 - RNA, 24 nt, Human
ggucagagggaggcugcggcugug

SEQ ID NO: 402145 - RNA, 22 nt, Human
gguuuccccucugcagggcccu

SEQ ID NO: 402146 - RNA, 23 nt, Human
guagagaugggguuuuaccaugu

SEQ ID NO: 402147 - RNA, 21 nt, Human
gucuccaugguaauggcuggg

SEQ ID NO: 402148 - RNA, 24 nt, Human
gugauccacccgccucagccuccc

SEQ ID NO: 402149 - RNA, 21 nt, Human
gugauccuccccucagccucc

SEQ ID NO: 402150 - RNA, 19 nt, Human
gugcacgucacugcagcca

SEQ ID NO: 402151 - RNA, 21 nt, Human
guggccuaggacagcaaggaa

SEQ ID NO: 402152 - RNA, 26 nt, Human
uaaaacaaacagguuuauugauaagc

SEQ ID NO: 402153 - RNA, 24 nt, Human
uaaccucaggugauccacccgccu

SEQ ID NO: 402154 - RNA, 24 nt, Human
uaauuucuguauuuuuaguagaga

SEQ ID NO: 402155 - RNA, 21 nt, Human
uacacacacccacgacacgca

SEQ ID NO: 402156 - RNA, 21 nt, Human
uaccauguuggccaggcuggu

SEQ ID NO: 402157 - RNA, 24 nt, Human
uaccauguuggccaggcuggucuc

SEQ ID NO: 402158 - RNA, 27 nt, Human
uaccauguuggccaggcuggucucgaa

SEQ ID NO: 402159 - RNA, 18 nt, Human
uacgacacagcccacacc

SEQ ID NO: 402160 - RNA, 23 nt, Human
uacgacacagcccacaccggccu

SEQ ID NO: 402161 - RNA, 22 nt, Human
uagagaugggguuuuaccaugu

SEQ ID NO: 402162 - RNA, 24 nt, Human
uagcucgcugcagccucaaacucc

SEQ ID NO: 402163 - RNA, 19 nt, Human
uaggugcccgccaccacgc

SEQ ID NO: 402164 - RNA, 21 nt, Human
uaggugcccgccaccacgccc

SEQ ID NO: 402165 - RNA, 24 nt, Human
uaguagagaugggguuuuaccaug

SEQ ID NO: 402166 - RNA, 26 nt, Human
uaucuugcccaggccacagcacugaa

SEQ ID NO: 402167 - RNA, 22 nt, Human
ucaacacacacacacaagggaa

SEQ ID NO: 402168 - RNA, 21 nt, Human
ucacaccaugguacaaaagga

SEQ ID NO: 402169 - RNA, 23 nt, Human
ucacagagagucagggacuugcc

SEQ ID NO: 402170 - RNA, 18 nt, Human
ucacugcagccagccagu

SEQ ID NO: 402171 - RNA, 19 nt, Human
ucagccuccugaguacagg

SEQ ID NO: 402172 - RNA, 25 nt, Human
ucaugccuucuccuuuauccccccu

SEQ ID NO: 402173 - RNA, 22 nt, Human
uccaagccuccugagcuaacuu

SEQ ID NO: 402174 - RNA, 21 nt, Human
uccacccgccucagccuccca

SEQ ID NO: 402175 - RNA, 24 nt, Human
ucccaaagugcugggaucauaggc

SEQ ID NO: 402176 - RNA, 21 nt, Human
ucccagaauccgggcaaggcu

SEQ ID NO: 402177 - RNA, 19 nt, Human
ucccagccucaggcuucug

SEQ ID NO: 402178 - RNA, 26 nt, Human
ucccgcagucucagccucaggagacu

SEQ ID NO: 402179 - RNA, 18 nt, Human
ucccggguucaaacgauu

SEQ ID NO: 402180 - RNA, 19 nt, Human
ucccggguucaaacgauuu

SEQ ID NO: 402181 - RNA, 20 nt, Human
ucccuacagggcugccaccu

SEQ ID NO: 402182 - RNA, 23 nt, Human
ucccugaaaggagaugguguggc

SEQ ID NO: 402183 - RNA, 24 nt, Human
ucccugaaaggagaugguguggcc

SEQ ID NO: 402184 - RNA, 21 nt, Human
ucccugcaaccuccgcuuccc

SEQ ID NO: 402185 - RNA, 24 nt, Human
ucccugcaaccuccgcuucccggg

SEQ ID NO: 402186 - RNA, 25 nt, Human
ucccugcaaccuccgcuucccgggu

SEQ ID NO: 402187 - RNA, 23 nt, Human
uccugagcuaacuugaaggaccc

SEQ ID NO: 402188 - RNA, 24 nt, Human
uccugagcuaacuugaaggacccc

SEQ ID NO: 402189 - RNA, 21 nt, Human
uccugggcuccagugauccuc

SEQ ID NO: 402190 - RNA, 24 nt, Human
ucgcccaggcuggagugcaguggc

SEQ ID NO: 402191 - RNA, 24 nt, Human
ucgcucugucgcccaggcuggagu

SEQ ID NO: 402192 - RNA, 24 nt, Human
ucgcugcagccucaaacuccuggg

SEQ ID NO: 402193 - RNA, 19 nt, Human
ucucacucuguugcucagg

SEQ ID NO: 402194 - RNA, 23 nt, Human
ucucacucuguugcucaggcugg

SEQ ID NO: 402195 - RNA, 24 nt, Human
ucucacucuguugcucaggcugga

SEQ ID NO: 402196 - RNA, 19 nt, Human
ucucgcucugucgcccagg

SEQ ID NO: 402197 - RNA, 23 nt, Human
ucucgcucugucgcccaggcugg

SEQ ID NO: 402198 - RNA, 24 nt, Human
ucucgcucugucgcccaggcugga

SEQ ID NO: 402199 - RNA, 26 nt, Human
ucucgcucugucgcccaggcuggagu

SEQ ID NO: 402200 - RNA, 27 nt, Human
ucucgcucugucgcccaggcuggagug

SEQ ID NO: 402201 - RNA, 22 nt, Human
ucugaguagcugggacuauagg

SEQ ID NO: 402202 - RNA, 24 nt, Human
ucugaguagcugggacuauaggug

SEQ ID NO: 402203 - RNA, 25 nt, Human
ucugcagaaaaggaugcugggguuu

SEQ ID NO: 402204 - RNA, 24 nt, Human
ucugucgcccaggcuggagugcag

SEQ ID NO: 402205 - RNA, 24 nt, Human
ucuguugcucaggcuggaguguag

SEQ ID NO: 402206 - RNA, 22 nt, Human
ugagacagacucucgcucuguc

SEQ ID NO: 402207 - RNA, 22 nt, Human
ugagcuaacuugaaggaccccg

SEQ ID NO: 402208 - RNA, 20 nt, Human
ugaguacaggugcacgucac

SEQ ID NO: 402209 - RNA, 21 nt, Human
ugcaaacuuucauugucuugg

SEQ ID NO: 402210 - RNA, 22 nt, Human
ugcaguggcgugaucucggcuc

SEQ ID NO: 402211 - RNA, 20 nt, Human
ugcccaggccacagcacuga

SEQ ID NO: 402212 - RNA, 22 nt, Human
ugcccccugcccucgcgcccuc

SEQ ID NO: 402213 - RNA, 24 nt, Human
ugcgcuccaucauguccucaugug

SEQ ID NO: 402214 - RNA, 20 nt, Human
ugcucaggcuggaguguagu

SEQ ID NO: 402215 - RNA, 22 nt, Human
ugcucaggcuggaguguagugg

SEQ ID NO: 402216 - RNA, 24 nt, Human
ugcucaggcuggaguguaguggcg

SEQ ID NO: 402217 - RNA, 22 nt, Human
uggaagccagagcugggcagag

SEQ ID NO: 402218 - RNA, 19 nt, Human
uggagugcaguggcgugau

SEQ ID NO: 402219 - RNA, 23 nt, Human
uggagugcaguggcgugaucucg

SEQ ID NO: 402220 - RNA, 24 nt, Human
uggagugcaguggcgugaucucgg

SEQ ID NO: 402221 - RNA, 21 nt, Human
uggcaggugggggguuggaug

SEQ ID NO: 402222 - RNA, 24 nt, Human
uggccaggcuggucucgaacuccu

SEQ ID NO: 402223 - RNA, 20 nt, Human
uggcccagaaagagccucag

SEQ ID NO: 402224 - RNA, 20 nt, Human
uggccugccugggcccucug

SEQ ID NO: 402225 - RNA, 23 nt, Human
uggcuggcagaguuuggcuuugu

SEQ ID NO: 402226 - RNA, 21 nt, Human
ugggacuauaggugcccgcca

SEQ ID NO: 402227 - RNA, 22 nt, Human
ugggacuauaggugcccgccac

SEQ ID NO: 402228 - RNA, 24 nt, Human
ugggacuauaggugcccgccacca

SEQ ID NO: 402229 - RNA, 19 nt, Human
ugggaucauaggcgugagc

SEQ ID NO: 402230 - RNA, 21 nt, Human
ugggaucauaggcgugagcca

SEQ ID NO: 402231 - RNA, 22 nt, Human
ugggaucauaggcgugagccac

SEQ ID NO: 402232 - RNA, 22 nt, Human
ugggaucauaggcgugagccac

SEQ ID NO: 402233 - RNA, 24 nt, Human
ugggaucauaggcgugagccacug

SEQ ID NO: 402234 - RNA, 19 nt, Human
ugggggaggaggagggucu

SEQ ID NO: 402235 - RNA, 24 nt, Human
ugggguuuuaccauguuggccagg

SEQ ID NO: 402236 - RNA, 18 nt, Human
uuaguagagaugggguuu

SEQ ID NO: 402237 - RNA, 22 nt, Human
uuaguagagaugggguuuuacc

SEQ ID NO: 402238 - RNA, 24 nt, Human
uuaguagagaugggguuuuaccau

SEQ ID NO: 402239 - RNA, 24 nt, Human
uucuaguuagaagugcguuaucuu

SEQ ID NO: 402240 - RNA, 19 nt, Human
uucuccuuuauccccaugc

SEQ ID NO: 402241 - RNA, 21 nt, Human
uucuccuuuauccccaugcuc

SEQ ID NO: 402242 - RNA, 20 nt, Human
uucuguauuuuuaguagaga

SEQ ID NO: 402243 - RNA, 24 nt, Human
uugcucaggcuggaguguaguggc

SEQ ID NO: 402244 - RNA, 18 nt, Human
uuuccaagccuccugagc

SEQ ID NO: 402245 - RNA, 20 nt, Human
uuucuguauuuuuaguagag

SEQ ID NO: 402246 - RNA, 21 nt, Human
uuuuuaguagagaugggguuu

SEQ ID NO: 402247 - RNA, 25 nt, Human
uuuuuuucuuuugagacagacucuc

SEQ ID NO: 402248 - RNA, 29 nt, Human
uuuuuuuucuuuaagagacagggucucaa

SEQ ID NO: 402249 - RNA, 24 nt, Human
uuuuuuuuucuuuaagagacaggg

SEQ ID NO: 402250 - RNA, 18 nt, Human
uuuuuuuuuuuucuuuug

SEQ ID NO: 402251 - RNA, 23 nt, Human
aaacagcaaguacugugggucug

SEQ ID NO: 402252 - RNA, 27 nt, Human
aagaguaguggggggaaaccgguaccc

SEQ ID NO: 402253 - RNA, 21 nt, Human
acauacagugccgccaccagc

SEQ ID NO: 402254 - RNA, 21 nt, Human
accugaaggguacaucuuaac

SEQ ID NO: 402255 - RNA, 21 nt, Human
agaguaguggggggaaacagg

SEQ ID NO: 402256 - RNA, 20 nt, Human
aggaaaucaaggaccuaaaa

SEQ ID NO: 402257 - RNA, 21 nt, Human
aggaaaucaaggaccuaaaac

SEQ ID NO: 402258 - RNA, 18 nt, Human
caagguggacgcugggcc

SEQ ID NO: 402259 - RNA, 26 nt, Human
cacccuggccaagaucugaccugggc

SEQ ID NO: 402260 - RNA, 18 nt, Human
cagcccccugagcccugu

SEQ ID NO: 402261 - RNA, 22 nt, Human
ccagcccccugagcccugucuc

SEQ ID NO: 402262 - RNA, 20 nt, Human
ccccacuccacccuggccaa

SEQ ID NO: 402263 - RNA, 20 nt, Human
cccccugagcccugucucca

SEQ ID NO: 402264 - RNA, 20 nt, Human
ccccgcccagcagacccucc

SEQ ID NO: 402265 - RNA, 21 nt, Human
ccgaagucauggccgucaugc

SEQ ID NO: 402266 - RNA, 24 nt, Human
ccgaagucauggccgucaugccca

SEQ ID NO: 402267 - RNA, 22 nt, Human
ccugucuccacaaauuuggaag

SEQ ID NO: 402268 - RNA, 24 nt, Human
cgcugggccccgcccagcagaccc

SEQ ID NO: 402269 - RNA, 25 nt, Human
cggggcccagcguccaccuuggugg

SEQ ID NO: 402270 - RNA, 25 nt, Human
cugggcccaccaagguggacgcugg

SEQ ID NO: 402271 - RNA, 19 nt, Human
gacgcugggccccgcccag

SEQ ID NO: 402272 - RNA, 19 nt, Human
gcugggccccacuccaccc

SEQ ID NO: 402273 - RNA, 21 nt, Human
gggcuccagccuggcggggcc

SEQ ID NO: 402274 - RNA, 21 nt, Human
ggggcccagcguccaccuugg

SEQ ID NO: 402275 - RNA, 21 nt, Human
uacugugggucugauaccagg

SEQ ID NO: 402276 - RNA, 22 nt, Human
uacugugggucugauaccaggu

SEQ ID NO: 402277 - RNA, 21 nt, Human
ucagaaagaucaggaaaucaa

SEQ ID NO: 402278 - RNA, 21 nt, Human
uccgcacugggcgaugcaaag

SEQ ID NO: 402279 - RNA, 20 nt, Human
ucuccacaaauuuggaagag

SEQ ID NO: 402280 - RNA, 21 nt, Human
uggacgcugggccccgcccag

SEQ ID NO: 402281 - RNA, 21 nt, Human
uggcggggcccagcguccacc

SEQ ID NO: 402282 - RNA, 21 nt, Human
uggggggaaacagggcucagg

SEQ ID NO: 402283 - RNA, 28 nt, Human
uggggggaaacagggcucagggggcugg

SEQ ID NO: 402284 - RNA, 26 nt, Human
uuaacagcauccagaaggcuuucuuu

SEQ ID NO: 402285 - RNA, 25 nt, Human
uucagaaagaucaggaaaucaagga

SEQ ID NO: 402286 - RNA, 18 nt, Human
uucucaaacagcaaguac

SEQ ID NO: 402287 - RNA, 20 nt, Human
uuuggaagaguagugggggg

SEQ ID NO: 402288 - RNA, 21 nt, Human
uuuggaagaguagugggggga

SEQ ID NO: 402289 - RNA, 25 nt, Human
uuuuuuuuugaccuuuuuguuuuuu

SEQ ID NO: 402290 - RNA, 24 nt, Human
caaggugaacuguuucugcaucca

SEQ ID NO: 402291 - RNA, 18 nt, Human
cccacguggccacacucc

SEQ ID NO: 402292 - RNA, 24 nt, Human
cgcccgagcgaggccucugcugac

SEQ ID NO: 402293 - RNA, 20 nt, Human
cugccuguuugcccacgugg

SEQ ID NO: 402294 - RNA, 18 nt, Human
gagcuaugcccagucagu

SEQ ID NO: 402295 - RNA, 21 nt, Human
gaggugagaccaggcggcagg

SEQ ID NO: 402296 - RNA, 21 nt, Human
gagguucuucaaggugaacug

SEQ ID NO: 402297 - RNA, 23 nt, Human
gcagcagcaccaggcucucuggc

SEQ ID NO: 402298 - RNA, 19 nt, Human
gccacagcagcagcagcac

SEQ ID NO: 402299 - RNA, 22 nt, Human
ggggagcuaugcccagucagug

SEQ ID NO: 402300 - RNA, 24 nt, Human
ggggugcaggcagaagcggggagc

SEQ ID NO: 402301 - RNA, 22 nt, Human
guggccacacuccugggugggu

SEQ ID NO: 402302 - RNA, 23 nt, Human
ugcaggggugcaggcagaagcgg

SEQ ID NO: 402303 - RNA, 25 nt, Human
uuuuuuuucugccucugucuuuaau

SEQ ID NO: 402304 - RNA, 18 nt, Human
uuuuuuuuuuuuuuucug

SEQ ID NO: 402305 - RNA, 21 nt, Human
uuuuuuuuuuuuuuucugccu

SEQ ID NO: 402306 - RNA, 23 nt, Human
aaacacaaggggcaaaaaaaucc

SEQ ID NO: 402307 - RNA, 21 nt, Human
aaccaagcaguauuuacagcc

SEQ ID NO: 402308 - RNA, 18 nt, Human
aagagcaauuccuaaauc

SEQ ID NO: 402309 - RNA, 21 nt, Human
aagcugccauuuguagcaggu

SEQ ID NO: 402310 - RNA, 18 nt, Human
aaggaagccucgcugggg

SEQ ID NO: 402311 - RNA, 21 nt, Human
aaguuuguuuucccaacuaga

SEQ ID NO: 402312 - RNA, 19 nt, Human
aauacucuccugcucaaaa

SEQ ID NO: 402313 - RNA, 20 nt, Human
acucguaaaccgcuucccuc

SEQ ID NO: 402314 - RNA, 21 nt, Human
acucguaaaccgcuucccuca

SEQ ID NO: 402315 - RNA, 22 nt, Human
agccuuauuuaaauucugcacu

SEQ ID NO: 402316 - RNA, 22 nt, Human
aggcaaaaauggagagguggca

SEQ ID NO: 402317 - RNA, 25 nt, Human
aggcaaaaauggagagguggcaaag

SEQ ID NO: 402318 - RNA, 20 nt, Human
aguagguaguuuugagccag

SEQ ID NO: 402319 - RNA, 21 nt, Human
aguagguaguuuugagccagu

SEQ ID NO: 402320 - RNA, 18 nt, Human
auagacauuuguacuaac

SEQ ID NO: 402321 - RNA, 22 nt, Human
caaagcucuaguaauacucucc

SEQ ID NO: 402322 - RNA, 22 nt, Human
cacucuugcgcgagaucagaga

SEQ ID NO: 402323 - RNA, 23 nt, Human
ccaaaccaggcuagaauuucuaa

SEQ ID NO: 402324 - RNA, 22 nt, Human
ccugggcagccagggcuggccu

SEQ ID NO: 402325 - RNA, 20 nt, Human
cgccugggcagccagggcug

SEQ ID NO: 402326 - RNA, 22 nt, Human
cgguggucaggaggaugggaag

SEQ ID NO: 402327 - RNA, 22 nt, Human
cuaauaaaugauaaaauguacc

SEQ ID NO: 402328 - RNA, 20 nt, Human
cuuaaaucuuagaaacuugg

SEQ ID NO: 402329 - RNA, 23 nt, Human
gaaguuuguuuucccaacuagau

SEQ ID NO: 402330 - RNA, 23 nt, Human
gacaagagcaauuccuaaaucca

SEQ ID NO: 402331 - RNA, 20 nt, Human
gggaacgcccggguugggga

SEQ ID NO: 402332 - RNA, 25 nt, Human
gggcagccagggcuggccucagggu

SEQ ID NO: 402333 - RNA, 21 nt, Human
gggggugggggaaaaauaaga

SEQ ID NO: 402334 - RNA, 22 nt, Human
guaaaaugcauacacauauaua

SEQ ID NO: 402335 - RNA, 21 nt, Human
guaauacucuccugcucaaaa

SEQ ID NO: 402336 - RNA, 22 nt, Human
guagagccuuauuuaaauucug

SEQ ID NO: 402337 - RNA, 19 nt, Human
uaaaaucucuagaauuauc

SEQ ID NO: 402338 - RNA, 23 nt, Human
uaagaugagcaccaaggcaaaaa

SEQ ID NO: 402339 - RNA, 24 nt, Human
uaagggcagucuugccuuuuggug

SEQ ID NO: 402340 - RNA, 21 nt, Human
uaggugguuccagguaucugc

SEQ ID NO: 402341 - RNA, 24 nt, Human
uaguaaggagaaucuuaaaucuua

SEQ ID NO: 402342 - RNA, 24 nt, Human
uaguaguaaggagaaucuuaaauc

SEQ ID NO: 402343 - RNA, 21 nt, Human
ucagcgcuaauaaaugauaaa

SEQ ID NO: 402344 - RNA, 22 nt, Human
uccaccaacccgcgggagaaga

SEQ ID NO: 402345 - RNA, 18 nt, Human
ucuaagggcagucuugcc

SEQ ID NO: 402346 - RNA, 21 nt, Human
ugaaagagcuuccccaacucc

SEQ ID NO: 402347 - RNA, 22 nt, Human
ugacaccaauaaacugugcaaa

SEQ ID NO: 402348 - RNA, 23 nt, Human
ugauaaaauguacccaguaaaaa

SEQ ID NO: 402349 - RNA, 22 nt, Human
ugcccgccccugaggcuccagc

SEQ ID NO: 402350 - RNA, 19 nt, Human
ugcucaaaaugcuuuugau

SEQ ID NO: 402351 - RNA, 20 nt, Human
uggccugccuguucaguaac

SEQ ID NO: 402352 - RNA, 23 nt, Human
ugggggaaaaauaagaaucuauu

SEQ ID NO: 402353 - RNA, 20 nt, Human
uggguacuuagcaugccacu

SEQ ID NO: 402354 - RNA, 24 nt, Human
uggguacuuagcaugccacugcau

SEQ ID NO: 402355 - RNA, 25 nt, Human
ugucacaaagcuacuuucucugaga

SEQ ID NO: 402356 - RNA, 20 nt, Human
uuaauacaaacuuucaaaga

SEQ ID NO: 402357 - RNA, 22 nt, Human
uucacauuuaauacaaacuuuc

SEQ ID NO: 402358 - RNA, 21 nt, Human
uuggguacuuagcaugccacu

SEQ ID NO: 402359 - RNA, 23 nt, Human
uuuuuggugauauuuccauguuu

SEQ ID NO: 402360 - RNA, 22 nt, Human
uuuuuuuuuuuuuuuuuaccaa

SEQ ID NO: 402361 - RNA, 20 nt, Human
aaacccaccccagaccccaa

SEQ ID NO: 402362 - RNA, 21 nt, Human
aaacccaccccagaccccaag

SEQ ID NO: 402363 - RNA, 18 nt, Human
aagaaaccucauuucuuc

SEQ ID NO: 402364 - RNA, 18 nt, Human
aagaaaccucauuucuuc

SEQ ID NO: 402365 - RNA, 21 nt, Human
aagaccugcaugacgcucugc

SEQ ID NO: 402366 - RNA, 21 nt, Human
aagaccugcaugacgcucugc

SEQ ID NO: 402367 - RNA, 24 nt, Human
aagcacuuucccagaaacccaccc

SEQ ID NO: 402368 - RNA, 24 nt, Human
aagcacuuucccagaaacccaccc

SEQ ID NO: 402369 - RNA, 26 nt, Human
aagcagaaaccagcgugcgcgaagaa

SEQ ID NO: 402370 - RNA, 23 nt, Human
aagccucuccuccuggggucccg

SEQ ID NO: 402371 - RNA, 22 nt, Human
acaaccaguuuuaugaaaaagc

SEQ ID NO: 402372 - RNA, 20 nt, Human
acaugccaccuccuuugccc

SEQ ID NO: 402373 - RNA, 22 nt, Human
acaugccaccuccuuugccccc

SEQ ID NO: 402374 - RNA, 18 nt, Human
acaugcugaaccugugca

SEQ ID NO: 402375 - RNA, 22 nt, Human
acccaccccagaccccaaggua

SEQ ID NO: 402376 - RNA, 22 nt, Human
acccaccccagaccccaaggua

SEQ ID NO: 402377 - RNA, 22 nt, Human
accccagaccccaagguagcuc

SEQ ID NO: 402378 - RNA, 20 nt, Human
accccgaguagccggagagg

SEQ ID NO: 402379 - RNA, 22 nt, Human
acgcagcuucagcugcaaggcc

SEQ ID NO: 402380 - RNA, 24 nt, Human
acgcuccgcuccagcccgggcauc

SEQ ID NO: 402381 - RNA, 26 nt, Human
acgcuccgcuccagcccgggcauccu

SEQ ID NO: 402382 - RNA, 18 nt, Human
acuuccgccccccacuuc

SEQ ID NO: 402383 - RNA, 19 nt, Human
agaaacccaccccagaccc

SEQ ID NO: 402384 - RNA, 19 nt, Human
agaaacccaccccagaccc

SEQ ID NO: 402385 - RNA, 22 nt, Human
agagcguggcugaggggcaggc

SEQ ID NO: 402386 - RNA, 23 nt, Human
agaggcaggcccagauccggucc

SEQ ID NO: 402387 - RNA, 24 nt, Human
agaggcaggcccagauccgguccc

SEQ ID NO: 402388 - RNA, 24 nt, Human
agcagggggaaguccucuggcuuu

SEQ ID NO: 402389 - RNA, 21 nt, Human
agccagugcagcuggugcaca

SEQ ID NO: 402390 - RNA, 25 nt, Human
agccggugcggcagcggcaggcacg

SEQ ID NO: 402391 - RNA, 21 nt, Human
agcugcacgggccuccucccc

SEQ ID NO: 402392 - RNA, 19 nt, Human
agcuggggugccccugugg

SEQ ID NO: 402393 - RNA, 19 nt, Human
agcuggggugccccugugg

SEQ ID NO: 402394 - RNA, 27 nt, Human
aggaaggacgagaucuugcucuggguc

SEQ ID NO: 402395 - RNA, 18 nt, Human
aggcacgguugugggugg

SEQ ID NO: 402396 - RNA, 21 nt, Human
aggcagaaaucuggggucccg

SEQ ID NO: 402397 - RNA, 25 nt, Human
aggccaggagccagggaaguucugg

SEQ ID NO: 402398 - RNA, 18 nt, Human
aggcccagggccgugcag

SEQ ID NO: 402399 - RNA, 19 nt, Human
agggaaguucuggggaagc

SEQ ID NO: 402400 - RNA, 19 nt, Human
agggaaguucuggggaagc

SEQ ID NO: 402401 - RNA, 20 nt, Human
aggggccugguuggggagcc

SEQ ID NO: 402402 - RNA, 20 nt, Human
aggggcucagcuggggugcc

SEQ ID NO: 402403 - RNA, 20 nt, Human
aggggcucagcuggggugcc

SEQ ID NO: 402404 - RNA, 19 nt, Human
agggggaaguccucuggcu

SEQ ID NO: 402405 - RNA, 18 nt, Human
agggugucaugggaggaa

SEQ ID NO: 402406 - RNA, 24 nt, Human
agguagcucagggcuucucagagg

SEQ ID NO: 402407 - RNA, 24 nt, Human
agguagcucagggcuucucagagg

SEQ ID NO: 402408 - RNA, 20 nt, Human
augacgcucugcuuccugga

SEQ ID NO: 402409 - RNA, 20 nt, Human
augacgcucugcuuccugga

SEQ ID NO: 402410 - RNA, 19 nt, Human
caagguagcucagggcuuc

SEQ ID NO: 402411 - RNA, 19 nt, Human
caagguagcucagggcuuc

SEQ ID NO: 402412 - RNA, 24 nt, Human
cacacuccucagcuccugguaccc

SEQ ID NO: 402413 - RNA, 19 nt, Human
cacaggacccugcugugcc

SEQ ID NO: 402414 - RNA, 23 nt, Human
caccccagaccccaagguagcuc

SEQ ID NO: 402415 - RNA, 23 nt, Human
caccccagaccccaagguagcuc

SEQ ID NO: 402416 - RNA, 26 nt, Human
caccgcccgcccccacagucccugcu

SEQ ID NO: 402417 - RNA, 19 nt, Human
caccuccuuugcccccggu

SEQ ID NO: 402418 - RNA, 20 nt, Human
cacgggccuccuccccagag

SEQ ID NO: 402419 - RNA, 25 nt, Human
cacgggccuccuccccagaggcauc

SEQ ID NO: 402420 - RNA, 19 nt, Human
cacugcacuuccgcccccc

SEQ ID NO: 402421 - RNA, 21 nt, Human
cacugcacuuccgccccccac

SEQ ID NO: 402422 - RNA, 19 nt, Human
cacuggcuggcagcagggc

SEQ ID NO: 402423 - RNA, 21 nt, Human
cagaccccaagguagcucagg

SEQ ID NO: 402424 - RNA, 21 nt, Human
cagaccccaagguagcucagg

SEQ ID NO: 402425 - RNA, 22 nt, Human
cagaccccaagguagcucaggg

SEQ ID NO: 402426 - RNA, 22 nt, Human
cagaccccaagguagcucaggg

SEQ ID NO: 402427 - RNA, 22 nt, Human
cagcagccgcugcagccucuug

SEQ ID NO: 402428 - RNA, 18 nt, Human
cagcagcgccccguccug

SEQ ID NO: 402429 - RNA, 18 nt, Human
cagcgccugcagcagccg

SEQ ID NO: 402430 - RNA, 19 nt, Human
cagcgcggacacaggaccc

SEQ ID NO: 402431 - RNA, 18 nt, Human
cagcuuuauuagagagcu

SEQ ID NO: 402432 - RNA, 20 nt, Human
caggagccagggaaguucug

SEQ ID NO: 402433 - RNA, 20 nt, Human
caggagccagggaaguucug

SEQ ID NO: 402434 - RNA, 20 nt, Human
caggaucagugcacagggag

SEQ ID NO: 402435 - RNA, 24 nt, Human
cagugaaccucacuuccaucgccc

SEQ ID NO: 402436 - RNA, 23 nt, Human
cauggccaaaguugucauacacc

SEQ ID NO: 402437 - RNA, 20 nt, Human
ccacucacaggccaggagcu

SEQ ID NO: 402438 - RNA, 20 nt, Human
ccacucacaggccaggagcu

SEQ ID NO: 402439 - RNA, 20 nt, Human
ccacugcacuuccgcccccc

SEQ ID NO: 402440 - RNA, 22 nt, Human
ccacugcacuuccgccccccac

SEQ ID NO: 402441 - RNA, 21 nt, Human
ccagcacccggcacuggcugg

SEQ ID NO: 402442 - RNA, 21 nt, Human
ccaggagccagggaaguucug

SEQ ID NO: 402443 - RNA, 26 nt, Human
ccaugggccccgccugccugaggccu

SEQ ID NO: 402444 - RNA, 26 nt, Human
ccaugggccccgccugccugaggccu

SEQ ID NO: 402445 - RNA, 19 nt, Human
cccacugcacuuccgcccc

SEQ ID NO: 402446 - RNA, 21 nt, Human
ccccagaccccaagguagcuc

SEQ ID NO: 402447 - RNA, 24 nt, Human
ccccagaccccaagguagcucagg

SEQ ID NO: 402448 - RNA, 24 nt, Human
ccccagaccccaagguagcucagg

SEQ ID NO: 402449 - RNA, 22 nt, Human
ccccguccugcgcccccaggag

SEQ ID NO: 402450 - RNA, 24 nt, Human
ccccguccugcgcccccaggagcu

SEQ ID NO: 402451 - RNA, 18 nt, Human
ccccucuccuuccucucc

SEQ ID NO: 402452 - RNA, 18 nt, Human
ccccugauuaaaagugga

SEQ ID NO: 402453 - RNA, 24 nt, Human
ccccuguggcaccacucacaggcc

SEQ ID NO: 402454 - RNA, 24 nt, Human
ccccuguggcaccacucacaggcc

SEQ ID NO: 402455 - RNA, 19 nt, Human
cccgaguagccggagaggc

SEQ ID NO: 402456 - RNA, 24 nt, Human
cccgcaguggucccggcgggccuc

SEQ ID NO: 402457 - RNA, 19 nt, Human
cccgcccccacagucccug

SEQ ID NO: 402458 - RNA, 19 nt, Human
cccgcggaggggguccgcc

SEQ ID NO: 402459 - RNA, 22 nt, Human
cccggcuccugagagcccugac

SEQ ID NO: 402460 - RNA, 21 nt, Human
cccguccugcgcccccaggag

SEQ ID NO: 402461 - RNA, 19 nt, Human
cccugaguccccagcaccc

SEQ ID NO: 402462 - RNA, 18 nt, Human
ccgcaccagcagcgcccc

SEQ ID NO: 402463 - RNA, 24 nt, Human
ccgcaccagcagcgccccguccug

SEQ ID NO: 402464 - RNA, 24 nt, Human
ccgcagggaccaaccaugggcccc

SEQ ID NO: 402465 - RNA, 24 nt, Human
ccgcagggaccaaccaugggcccc

SEQ ID NO: 402466 - RNA, 20 nt, Human
ccgccccccacuuccggucc

SEQ ID NO: 402467 - RNA, 19 nt, Human
ccgcccgcccccacagucc

SEQ ID NO: 402468 - RNA, 24 nt, Human
ccgccgacgcagcuucagcugcaa

SEQ ID NO: 402469 - RNA, 19 nt, Human
ccggggccucgagggccug

SEQ ID NO: 402470 - RNA, 22 nt, Human
ccuauggcacagacugcucacu

SEQ ID NO: 402471 - RNA, 24 nt, Human
ccucaggaacucaaccgacuccag

SEQ ID NO: 402472 - RNA, 21 nt, Human
ccuccaggccuacacggcguu

SEQ ID NO: 402473 - RNA, 22 nt, Human
ccucccugaguccccagcaccc

SEQ ID NO: 402474 - RNA, 18 nt, Human
ccuccggggccucgaggg

SEQ ID NO: 402475 - RNA, 19 nt, Human
ccuccggggccucgagggc

SEQ ID NO: 402476 - RNA, 19 nt, Human
ccucuccuuccucuccugc

SEQ ID NO: 402477 - RNA, 22 nt, Human
ccugaaaauuugaaaacggcug

SEQ ID NO: 402478 - RNA, 22 nt, Human
ccugaccgcccccucuccuucc

SEQ ID NO: 402479 - RNA, 19 nt, Human
ccugaggccugcagcgggc

SEQ ID NO: 402480 - RNA, 19 nt, Human
ccugaggccugcagcgggc

SEQ ID NO: 402481 - RNA, 20 nt, Human
ccugcagcagccgcugcagc

SEQ ID NO: 402482 - RNA, 23 nt, Human
ccugcauccucaccgcccgcccc

SEQ ID NO: 402483 - RNA, 19 nt, Human
ccuggggggcacggcuggc

SEQ ID NO: 402484 - RNA, 19 nt, Human
ccuggggucccgguggcuc

SEQ ID NO: 402485 - RNA, 26 nt, Human
ccuugcuggagcagggagagcgcggc

SEQ ID NO: 402486 - RNA, 23 nt, Human
cgaagugaagacccucaucugcu

SEQ ID NO: 402487 - RNA, 20 nt, Human
cgccggcaccagguggacac

SEQ ID NO: 402488 - RNA, 23 nt, Human
cggcaacacggaagaacugggcc

SEQ ID NO: 402489 - RNA, 25 nt, Human
cggcaagccucuccuccuggggucc

SEQ ID NO: 402490 - RNA, 19 nt, Human
cggcucagcgcggacacag

SEQ ID NO: 402491 - RNA, 21 nt, Human
cgguccguugcuuugugcucc

SEQ ID NO: 402492 - RNA, 19 nt, Human
cgguuguggguggcguggc

SEQ ID NO: 402493 - RNA, 19 nt, Human
cgugcaguugcgguggggc

SEQ ID NO: 402494 - RNA, 21 nt, Human
cguuuugcgcguucugugucc

SEQ ID NO: 402495 - RNA, 20 nt, Human
cucacaggccaggagccagg

SEQ ID NO: 402496 - RNA, 20 nt, Human
cucacaggccaggagccagg

SEQ ID NO: 402497 - RNA, 26 nt, Human
cuccagcccgggcauccuggccacgc

SEQ ID NO: 402498 - RNA, 21 nt, Human
cuccugagagcccugaccgcc

SEQ ID NO: 402499 - RNA, 20 nt, Human
cuccuggggucccgguggcu

SEQ ID NO: 402500 - RNA, 19 nt, Human
cucuugcgucggcaaaggc

SEQ ID NO: 402501 - RNA, 21 nt, Human
cugaccccgaguagccggaga

SEQ ID NO: 402502 - RNA, 20 nt, Human
cugcacgggccuccucccca

SEQ ID NO: 402503 - RNA, 20 nt, Human
cugcagccucuugauggaga

SEQ ID NO: 402504 - RNA, 21 nt, Human
cugcccacagccgcuucaagg

SEQ ID NO: 402505 - RNA, 19 nt, Human
cugcugcccugcccacagc

SEQ ID NO: 402506 - RNA, 18 nt, Human
cuggugcugagggggaag

SEQ ID NO: 402507 - RNA, 19 nt, Human
cugucagccagcucagagu

SEQ ID NO: 402508 - RNA, 20 nt, Human
cugugcacgucugugagaag

SEQ ID NO: 402509 - RNA, 18 nt, Human
cuuccagaaccggggucc

SEQ ID NO: 402510 - RNA, 21 nt, Human
cuucccggugaggggcucagc

SEQ ID NO: 402511 - RNA, 21 nt, Human
cuucccggugaggggcucagc

SEQ ID NO: 402512 - RNA, 24 nt, Human
cuuccgguccguugcuuugugcuc

SEQ ID NO: 402513 - RNA, 19 nt, Human
cuucuauuuaaaaaaaagc

SEQ ID NO: 402514 - RNA, 19 nt, Human
cuucuauuuaaaaaaaagc

SEQ ID NO: 402515 - RNA, 20 nt, Human
gaaaaaaccacuccgaacau

SEQ ID NO: 402516 - RNA, 26 nt, Human
gaaaaaaccacuccgaacaucuuagg

SEQ ID NO: 402517 - RNA, 22 nt, Human
gaaccugugcagcagggggaag

SEQ ID NO: 402518 - RNA, 18 nt, Human
gaagaagccggugcggca

SEQ ID NO: 402519 - RNA, 24 nt, Human
gaagcacuuucccagaaacccacc

SEQ ID NO: 402520 - RNA, 24 nt, Human
gaagcacuuucccagaaacccacc

SEQ ID NO: 402521 - RNA, 20 nt, Human
gagcgcggcucagcgcggac

SEQ ID NO: 402522 - RNA, 20 nt, Human
gagggcaguugggcucuugc

SEQ ID NO: 402523 - RNA, 21 nt, Human
gaggggcucagcuggggugcc

SEQ ID NO: 402524 - RNA, 23 nt, Human
gcaguggucccggcgggccuccc

SEQ ID NO: 402525 - RNA, 21 nt, Human
gcauccucaccgcccgccccc

SEQ ID NO: 402526 - RNA, 22 nt, Human
gccaccuccuuugcccccgguc

SEQ ID NO: 402527 - RNA, 23 nt, Human
gccaggagccagggaaguucugg

SEQ ID NO: 402528 - RNA, 23 nt, Human
gccaggagccagggaaguucugg

SEQ ID NO: 402529 - RNA, 20 nt, Human
gcccacgggggucuccuccu

SEQ ID NO: 402530 - RNA, 20 nt, Human
gcccacgggggucuccuccu

SEQ ID NO: 402531 - RNA, 25 nt, Human
gccccgccugccugaggccugcagc

SEQ ID NO: 402532 - RNA, 25 nt, Human
gccccgccugccugaggccugcagc

SEQ ID NO: 402533 - RNA, 20 nt, Human
gcguuccacuaccgccucuc

SEQ ID NO: 402534 - RNA, 21 nt, Human
ggaggggguccgccugcucuu

SEQ ID NO: 402535 - RNA, 18 nt, Human
ggcacgcucacacuccuc

SEQ ID NO: 402536 - RNA, 24 nt, Human
ggcccguggggagguccugaggac

SEQ ID NO: 402537 - RNA, 18 nt, Human
ggccugcagcagccgcug

SEQ ID NO: 402538 - RNA, 23 nt, Human
ggccugcagcagccgcugcagcc

SEQ ID NO: 402539 - RNA, 20 nt, Human
ggccugguuggggagcccug

SEQ ID NO: 402540 - RNA, 22 nt, Human
ggccugguuggggagcccugug

SEQ ID NO: 402541 - RNA, 23 nt, Human
gggccaggaucagugcacaggga

SEQ ID NO: 402542 - RNA, 18 nt, Human
gggcuggcacugcucuga

SEQ ID NO: 402543 - RNA, 23 nt, Human
ggggcuccggccagaagaccugc

SEQ ID NO: 402544 - RNA, 20 nt, Human
ggggucccgcccgucuccuc

SEQ ID NO: 402545 - RNA, 23 nt, Human
gggucugcguuccacuaccgccu

SEQ ID NO: 402546 - RNA, 19 nt, Human
gggugugcugggggccucc

SEQ ID NO: 402547 - RNA, 19 nt, Human
gggugugcugggggccucc

SEQ ID NO: 402548 - RNA, 19 nt, Human
gguggggcuggcacugcuc

SEQ ID NO: 402549 - RNA, 18 nt, Human
gucuccucccuugauguc

SEQ ID NO: 402550 - RNA, 23 nt, Human
gugcaguugcgguggggcuggca

SEQ ID NO: 402551 - RNA, 19 nt, Human
gugugcugggggccuccgu

SEQ ID NO: 402552 - RNA, 19 nt, Human
gugugcugggggccuccgu

SEQ ID NO: 402553 - RNA, 25 nt, Human
uauuagagagcccuguccccugauu

SEQ ID NO: 402554 - RNA, 26 nt, Human
uauuagagagcccuguccccugauua

SEQ ID NO: 402555 - RNA, 23 nt, Human
ucagcgcggacacaggacccugc

SEQ ID NO: 402556 - RNA, 19 nt, Human
ucccagaaacccaccccag

SEQ ID NO: 402557 - RNA, 19 nt, Human
ucccagaaacccaccccag

SEQ ID NO: 402558 - RNA, 22 nt, Human
ucccagaaacccaccccagacc

SEQ ID NO: 402559 - RNA, 22 nt, Human
ucccagaaacccaccccagacc

SEQ ID NO: 402560 - RNA, 21 nt, Human
ucccccgcggaggggguccgc

SEQ ID NO: 402561 - RNA, 19 nt, Human
uccccugauuaaaagugga

SEQ ID NO: 402562 - RNA, 18 nt, Human
ucccgcccgucuccuccc

SEQ ID NO: 402563 - RNA, 21 nt, Human
ucccggugaggggcucagcug

SEQ ID NO: 402564 - RNA, 21 nt, Human
ucccggugaggggcucagcug

SEQ ID NO: 402565 - RNA, 21 nt, Human
ucccuauggcacagacugcuc

SEQ ID NO: 402566 - RNA, 18 nt, Human
ucccugcuggccucuguc

SEQ ID NO: 402567 - RNA, 22 nt, Human
uccgcggcgaaccuuccagaac

SEQ ID NO: 402568 - RNA, 22 nt, Human
uccgcuccagcccgggcauccu

SEQ ID NO: 402569 - RNA, 20 nt, Human
uccucagcuccugguacccu

SEQ ID NO: 402570 - RNA, 26 nt, Human
uccuccccagaggcaucuuuuuacug

SEQ ID NO: 402571 - RNA, 21 nt, Human
uccuggaaagccacaaagucg

SEQ ID NO: 402572 - RNA, 25 nt, Human
ucgcccacaggcagaaaucuggggu

SEQ ID NO: 402573 - RNA, 24 nt, Human
ucugugcgaaaaaaccacuccgaa

SEQ ID NO: 402574 - RNA, 25 nt, Human
ucuguguccggcuccgcugacagug

SEQ ID NO: 402575 - RNA, 20 nt, Human
ugagaaggugccuggggggc

SEQ ID NO: 402576 - RNA, 21 nt, Human
ugagaaggugccuggggggca

SEQ ID NO: 402577 - RNA, 20 nt, Human
ugaguccccagcacccggca

SEQ ID NO: 402578 - RNA, 24 nt, Human
ugcacgggccuccuccccagaggc

SEQ ID NO: 402579 - RNA, 24 nt, Human
ugccaaggauguagaauaaauaag

SEQ ID NO: 402580 - RNA, 24 nt, Human
ugccaaggauguagaauaaauaag

SEQ ID NO: 402581 - RNA, 25 nt, Human
ugcccaggacccggcuccugagagc

SEQ ID NO: 402582 - RNA, 21 nt, Human
ugcccggggcaaucacgccgg

SEQ ID NO: 402583 - RNA, 22 nt, Human
ugcccugcccacagccgcuuca

SEQ ID NO: 402584 - RNA, 22 nt, Human
ugcucggcucacugucccgcag

SEQ ID NO: 402585 - RNA, 27 nt, Human
ugcucggcucacugucccgcagugguc

SEQ ID NO: 402586 - RNA, 23 nt, Human
ugcugggggccuccgugggcacu

SEQ ID NO: 402587 - RNA, 20 nt, Human
ugcuuugugcucccggcgga

SEQ ID NO: 402588 - RNA, 24 nt, Human
uggacacgugcccacgggggucuc

SEQ ID NO: 402589 - RNA, 24 nt, Human
uggacacgugcccacgggggucuc

SEQ ID NO: 402590 - RNA, 23 nt, Human
uggcaugggcuggccuauucugu

SEQ ID NO: 402591 - RNA, 22 nt, Human
ugggcacauccuagaggcccca

SEQ ID NO: 402592 - RNA, 24 nt, Human
uguccuggaaagccacaaagucga

SEQ ID NO: 402593 - RNA, 23 nt, Human
ugugagccgaccgcuuuccugaa

SEQ ID NO: 402594 - RNA, 19 nt, Human
uucaaggguucaguucacc

SEQ ID NO: 402595 - RNA, 19 nt, Human
uuccuggaggcgguguggc

SEQ ID NO: 402596 - RNA, 19 nt, Human
uuccuggaggcgguguggc

SEQ ID NO: 402597 - RNA, 24 nt, Human
uucggcuccuccaggccuacacgg

SEQ ID NO: 402598 - RNA, 20 nt, Human
uucucggaccgugaggggcc

SEQ ID NO: 402599 - RNA, 21 nt, Human
uucuggggaagcacuuuccca

SEQ ID NO: 402600 - RNA, 21 nt, Human
uucuggggaagcacuuuccca

SEQ ID NO: 402601 - RNA, 20 nt, Human
uugcccccgguccgccugcg

SEQ ID NO: 402602 - RNA, 19 nt, Human
uuggggagcccugugggua

SEQ ID NO: 402603 - RNA, 22 nt, Human
uuucccagaaacccaccccaga

SEQ ID NO: 402604 - RNA, 22 nt, Human
uuucccagaaacccaccccaga

SEQ ID NO: 402605 - RNA, 22 nt, Human
uuuuuuuuuuuuuuuuccuggg

SEQ ID NO: 402606 - RNA, 22 nt, Human
acaaccagagcccccgcccucc

SEQ ID NO: 402607 - RNA, 20 nt, Human
auuuguccucgucccugcca

SEQ ID NO: 402608 - RNA, 26 nt, Human
cagcgcaggcgcagcugaccccuugg

SEQ ID NO: 402609 - RNA, 21 nt, Human
caggcgcagcuggcugggcuu

SEQ ID NO: 402610 - RNA, 20 nt, Human
caguggcugcuucagguggc

SEQ ID NO: 402611 - RNA, 21 nt, Human
ccagagcccccgcccuccugc

SEQ ID NO: 402612 - RNA, 22 nt, Human
ccagagcccccgcccuccugca

SEQ ID NO: 402613 - RNA, 22 nt, Human
cccccugggcaguggcugcuuc

SEQ ID NO: 402614 - RNA, 22 nt, Human
ccuccugcagcgcaggcgcagc

SEQ ID NO: 402615 - RNA, 25 nt, Human
ccuccugcagcgcaggcgcagcugg

SEQ ID NO: 402616 - RNA, 21 nt, Human
ccugcccaggcggcuccuuuc

SEQ ID NO: 402617 - RNA, 25 nt, Human
cgggguggggguggaggccagggcu

SEQ ID NO: 402618 - RNA, 24 nt, Human
cuauuguggcuguuuuuuuuuuuc

SEQ ID NO: 402619 - RNA, 18 nt, Human
cuccaagcugggcgcugc

SEQ ID NO: 402620 - RNA, 20 nt, Human
cugggcuccugcuucccacu

SEQ ID NO: 402621 - RNA, 21 nt, Human
cugucucuucuuugcaccccc

SEQ ID NO: 402622 - RNA, 18 nt, Human
cuuugcacccccugggca

SEQ ID NO: 402623 - RNA, 20 nt, Human
cuuugcacccccugggcagu

SEQ ID NO: 402624 - RNA, 22 nt, Human
gacugcaguuguggcugccagg

SEQ ID NO: 402625 - RNA, 19 nt, Human
gcccugacaagaggauggg

SEQ ID NO: 402626 - RNA, 18 nt, Human
gcgcaggcgcagcuggcu

SEQ ID NO: 402627 - RNA, 22 nt, Human
gcuccugcuucccacucuccac

SEQ ID NO: 402628 - RNA, 22 nt, Human
ggaguuagcaccuccaagcugg

SEQ ID NO: 402629 - RNA, 20 nt, Human
ggcgcugcugucucuucuuu

SEQ ID NO: 402630 - RNA, 22 nt, Human
gggcaguggcugcuucaggugg

SEQ ID NO: 402631 - RNA, 23 nt, Human
guggcuguuuuuuuuuuucucuc

SEQ ID NO: 402632 - RNA, 20 nt, Human
uacaaccagagcccccgccc

SEQ ID NO: 402633 - RNA, 19 nt, Human
ucacucucccuuggauggu

SEQ ID NO: 402634 - RNA, 24 nt, Human
ucuccaccucauccauauuugucc

SEQ ID NO: 402635 - RNA, 20 nt, Human
ucuuugcacccccugggcag

SEQ ID NO: 402636 - RNA, 23 nt, Human
ugacaagaggaugggacugcagu

SEQ ID NO: 402637 - RNA, 22 nt, Human
ugcagcuaccgcaggugcuggc

SEQ ID NO: 402638 - RNA, 21 nt, Human
ugcccaggcggcuccuuucug

SEQ ID NO: 402639 - RNA, 21 nt, Human
uggccucuggaguuagcaccu

SEQ ID NO: 402640 - RNA, 23 nt, Human
uggcugggcuccugcuucccacu

SEQ ID NO: 402641 - RNA, 20 nt, Human
uggcuguuuuuuuuuuucuc

SEQ ID NO: 402642 - RNA, 26 nt, Human
uggggguggaggccagggcuguagug

SEQ ID NO: 402643 - RNA, 20 nt, Human
uguccucgucccugccaguc

SEQ ID NO: 402644 - RNA, 18 nt, Human
ugucucuucuuugcaccc

SEQ ID NO: 402645 - RNA, 19 nt, Human
ugucucuucuuugcacccc

SEQ ID NO: 402646 - RNA, 21 nt, Human
uguuuuuuuuuuucucucuca

SEQ ID NO: 402647 - RNA, 19 nt, Human
uuuuuuuuuuuugcagggu

SEQ ID NO: 402648 - RNA, 22 nt, Human
uuuuuuuuuuuuuugcagggug

SEQ ID NO: 402649 - RNA, 23 nt, Human
uuuuuuuuuuuuuuuuugcaggg

SEQ ID NO: 402650 - RNA, 24 nt, Human
uuuuuuuuuuuuuuuuuugcaggg

SEQ ID NO: 402651 - RNA, 20 nt, Human
aaacaaccacaggcacuggc

SEQ ID NO: 402652 - RNA, 23 nt, Human
aaacagcagccuucccgggccug

SEQ ID NO: 402653 - RNA, 22 nt, Human
aaacccaaaauccugaugaaac

SEQ ID NO: 402654 - RNA, 21 nt, Human
aacaucacugcugggauccag

SEQ ID NO: 402655 - RNA, 25 nt, Human
aaccacaggcacuggcuccaugccc

SEQ ID NO: 402656 - RNA, 24 nt, Human
aaccaggugguggggucggugcua

SEQ ID NO: 402657 - RNA, 19 nt, Human
aagucacuucaaaaguggu

SEQ ID NO: 402658 - RNA, 23 nt, Human
aagugguuguuccuccgagguuu

SEQ ID NO: 402659 - RNA, 25 nt, Human
acccugcugcccuccuagccccagc

SEQ ID NO: 402660 - RNA, 18 nt, Human
accucggugccaacagug

SEQ ID NO: 402661 - RNA, 19 nt, Human
agaaacaaccacaggcacu

SEQ ID NO: 402662 - RNA, 22 nt, Human
agaguacaguguggccgcugca

SEQ ID NO: 402663 - RNA, 21 nt, Human
agaugcuucuucauuucccag

SEQ ID NO: 402664 - RNA, 19 nt, Human
aggggccccgggagcuggc

SEQ ID NO: 402665 - RNA, 19 nt, Human
aggggcggucugcagcugc

SEQ ID NO: 402666 - RNA, 18 nt, Human
aguacaguguggccgcug

SEQ ID NO: 402667 - RNA, 21 nt, Human
augcuguucucggcagugccc

SEQ ID NO: 402668 - RNA, 18 nt, Human
caacagugccauccuggc

SEQ ID NO: 402669 - RNA, 25 nt, Human
caagcagagaccaccagaccccugc

SEQ ID NO: 402670 - RNA, 21 nt, Human
cacaccccaaagcgugcagag

SEQ ID NO: 402671 - RNA, 21 nt, Human
cacaggcacuggcuccaugcc

SEQ ID NO: 402672 - RNA, 21 nt, Human
caccagaccccugcagugacc

SEQ ID NO: 402673 - RNA, 21 nt, Human
cacccugcugcccuccuagcc

SEQ ID NO: 402674 - RNA, 23 nt, Human
cacccugcugcccuccuagcccc

SEQ ID NO: 402675 - RNA, 21 nt, Human
cagaaacuaucacuuccucca

SEQ ID NO: 402676 - RNA, 24 nt, Human
cagcagagacagugccagcugacg

SEQ ID NO: 402677 - RNA, 18 nt, Human
cagcugcggcugugggug

SEQ ID NO: 402678 - RNA, 22 nt, Human
cagcugcggcugugggugaugc

SEQ ID NO: 402679 - RNA, 19 nt, Human
cagggcccgaaguucccca

SEQ ID NO: 402680 - RNA, 25 nt, Human
cagugcccauccugccaucuguuug

SEQ ID NO: 402681 - RNA, 21 nt, Human
ccacagagagcggucaaggac

SEQ ID NO: 402682 - RNA, 24 nt, Human
ccagcacacucccgccggggccac

SEQ ID NO: 402683 - RNA, 26 nt, Human
ccaggacagaguggguggggcccaca

SEQ ID NO: 402684 - RNA, 18 nt, Human
cccaaccucggugccaac

SEQ ID NO: 402685 - RNA, 25 nt, Human
cccagaggccacccugcugcccucc

SEQ ID NO: 402686 - RNA, 22 nt, Human
cccauguucacauggggaggaa

SEQ ID NO: 402687 - RNA, 19 nt, Human
ccccggauccccuaggcuc

SEQ ID NO: 402688 - RNA, 21 nt, Human
ccccgggagcuggccucacga

SEQ ID NO: 402689 - RNA, 19 nt, Human
ccccuaggcccugggccca

SEQ ID NO: 402690 - RNA, 21 nt, Human
ccccuaggcccugggcccacc

SEQ ID NO: 402691 - RNA, 21 nt, Human
ccgcacccaacgcacgccgcg

SEQ ID NO: 402692 - RNA, 23 nt, Human
ccuagccccagcccagcccaggc

SEQ ID NO: 402693 - RNA, 19 nt, Human
ccuaugguccagaguaaag

SEQ ID NO: 402694 - RNA, 22 nt, Human
ccuccuagccccagcccagccc

SEQ ID NO: 402695 - RNA, 26 nt, Human
ccuccuagccccagcccagcccaggc

SEQ ID NO: 402696 - RNA, 18 nt, Human
ccucugagguccagggag

SEQ ID NO: 402697 - RNA, 18 nt, Human
ccuuacagcugcggcugu

SEQ ID NO: 402698 - RNA, 21 nt, Human
cgccagacugcccugccuggc

SEQ ID NO: 402699 - RNA, 18 nt, Human
cggaagggcccaaugggu

SEQ ID NO: 402700 - RNA, 19 nt, Human
cggaagggcccaaugggug

SEQ ID NO: 402701 - RNA, 22 nt, Human
cggcgcccacgugcggucccgg

SEQ ID NO: 402702 - RNA, 20 nt, Human
cggggccggacgugaggugg

SEQ ID NO: 402703 - RNA, 23 nt, Human
cuaggcccugggcccaccgaggg

SEQ ID NO: 402704 - RNA, 20 nt, Human
cuaguccgcacccaacgcac

SEQ ID NO: 402705 - RNA, 26 nt, Human
cuccuagccccagcccagcccaggcc

SEQ ID NO: 402706 - RNA, 20 nt, Human
cugcagcugcugagggcugc

SEQ ID NO: 402707 - RNA, 18 nt, Human
cugcccgcaacuccaaga

SEQ ID NO: 402708 - RNA, 21 nt, Human
cuggagccucaguucaggcca

SEQ ID NO: 402709 - RNA, 19 nt, Human
cuggcuccaugcccacugg

SEQ ID NO: 402710 - RNA, 23 nt, Human
cugggcccaccgagggggcuaca

SEQ ID NO: 402711 - RNA, 19 nt, Human
cugggcugugggccuggug

SEQ ID NO: 402712 - RNA, 22 nt, Human
cugggucaggggacagcuaagu

SEQ ID NO: 402713 - RNA, 23 nt, Human
cuugcacaaacacugggcaaaca

SEQ ID NO: 402714 - RNA, 26 nt, Human
gaaggugggcagcaccaggagggucc

SEQ ID NO: 402715 - RNA, 23 nt, Human
gagggucccacaguccaggcagg

SEQ ID NO: 402716 - RNA, 23 nt, Human
gagguggccuggcggccggcgcc

SEQ ID NO: 402717 - RNA, 24 nt, Human
gagucuccaggcugcccgcaacuc

SEQ ID NO: 402718 - RNA, 20 nt, Human
gccccagcccagcccaggcc

SEQ ID NO: 402719 - RNA, 18 nt, Human
gccccggauccccuaggc

SEQ ID NO: 402720 - RNA, 21 nt, Human
gcccgaaguuccccauguuca

SEQ ID NO: 402721 - RNA, 22 nt, Human
gccuuacagcugcggcuguggg

SEQ ID NO: 402722 - RNA, 18 nt, Human
gcuacaggacagggaagg

SEQ ID NO: 402723 - RNA, 22 nt, Human
gcuccagcacacucccgccggg

SEQ ID NO: 402724 - RNA, 20 nt, Human
ggaaggugggcagcaccagg

SEQ ID NO: 402725 - RNA, 21 nt, Human
ggaaggugggcagcaccagga

SEQ ID NO: 402726 - RNA, 21 nt, Human
ggccacauuuacaguaacugg

SEQ ID NO: 402727 - RNA, 21 nt, Human
ggcgguaaguccacgagucuc

SEQ ID NO: 402728 - RNA, 21 nt, Human
gggaaggugggcagcaccagg

SEQ ID NO: 402729 - RNA, 18 nt, Human
gggccaccuaguccgcac

SEQ ID NO: 402730 - RNA, 21 nt, Human
gggcccaaugggugucaccuc

SEQ ID NO: 402731 - RNA, 19 nt, Human
gugaugcagagacacccac

SEQ ID NO: 402732 - RNA, 20 nt, Human
uaaagcagaugccuggguga

SEQ ID NO: 402733 - RNA, 26 nt, Human
ucacauggggaggaagucccugggca

SEQ ID NO: 402734 - RNA, 19 nt, Human
ucaggccagaugggccucu

SEQ ID NO: 402735 - RNA, 21 nt, Human
uccacaccccaaagcgugcag

SEQ ID NO: 402736 - RNA, 21 nt, Human
uccaccacuagaugcuggagc

SEQ ID NO: 402737 - RNA, 23 nt, Human
uccaugcccacugggggccacaa

SEQ ID NO: 402738 - RNA, 22 nt, Human
ucccagaggccacccugcugcc

SEQ ID NO: 402739 - RNA, 22 nt, Human
uccccuaggcucugggucaggg

SEQ ID NO: 402740 - RNA, 23 nt, Human
ucccucgacuucccuuuugacuc

SEQ ID NO: 402741 - RNA, 30 nt, Human
ucccugggcaaaguaaagcagguucucugg

SEQ ID NO: 402742 - RNA, 25 nt, Human
uccgcacccaacgcacgccgcgaag

SEQ ID NO: 402743 - RNA, 20 nt, Human
uccuagccccagcccagccc

SEQ ID NO: 402744 - RNA, 20 nt, Human
uccuccagagagcacguggc

SEQ ID NO: 402745 - RNA, 18 nt, Human
uccugggccccuaggccc

SEQ ID NO: 402746 - RNA, 25 nt, Human
uccugggccccuaggcccugggccc

SEQ ID NO: 402747 - RNA, 23 nt, Human
ucuccaacuuuccccaaaacauc

SEQ ID NO: 402748 - RNA, 24 nt, Human
ucuccaggcugcccgcaacuccaa

SEQ ID NO: 402749 - RNA, 19 nt, Human
ucugcagcugcugagggcu

SEQ ID NO: 402750 - RNA, 18 nt, Human
ucuggagaaacaaccaca

SEQ ID NO: 402751 - RNA, 18 nt, Human
ucuggccaauguccaggu

SEQ ID NO: 402752 - RNA, 19 nt, Human
ucugggaccaaugcuguuc

SEQ ID NO: 402753 - RNA, 27 nt, Human
ucuucuggccaauguccagguucuggg

SEQ ID NO: 402754 - RNA, 24 nt, Human
ugaaaaacccaaaauccugaugaa

SEQ ID NO: 402755 - RNA, 24 nt, Human
ugacucuggagaaacaaccacagg

SEQ ID NO: 402756 - RNA, 22 nt, Human
ugacuugauccugggccccuag

SEQ ID NO: 402757 - RNA, 20 nt, Human
ugagggcugcagacaucugg

SEQ ID NO: 402758 - RNA, 20 nt, Human
ugaggggcggucugcagcug

SEQ ID NO: 402759 - RNA, 22 nt, Human
ugauccugggccccuaggcccu

SEQ ID NO: 402760 - RNA, 20 nt, Human
ugcccgcaacuccaagacuc

SEQ ID NO: 402761 - RNA, 19 nt, Human
uggccagccgaccggaagu

SEQ ID NO: 402762 - RNA, 19 nt, Human
uggcuccaugcccacuggg

SEQ ID NO: 402763 - RNA, 18 nt, Human
ugggauccaguccccuuu

SEQ ID NO: 402764 - RNA, 20 nt, Human
ugggcaaacagugucugccc

SEQ ID NO: 402765 - RNA, 22 nt, Human
ugggccccuaggcccugggccc

SEQ ID NO: 402766 - RNA, 18 nt, Human
ugggccucugcccccaac

SEQ ID NO: 402767 - RNA, 20 nt, Human
ugggcugugggccugguggu

SEQ ID NO: 402768 - RNA, 19 nt, Human
ugguggggucggugcuagu

SEQ ID NO: 402769 - RNA, 20 nt, Human
ugucucuucuguacaagccc

SEQ ID NO: 402770 - RNA, 21 nt, Human
ugugaaaaacccaaaauccug

SEQ ID NO: 402771 - RNA, 20 nt, Human
uucagaaacuaucacuuccu

SEQ ID NO: 402772 - RNA, 23 nt, Human
uuccuccgagguuucagccuuag

SEQ ID NO: 402773 - RNA, 23 nt, Human
uugcauacacgucugaaggcccu

SEQ ID NO: 402774 - RNA, 18 nt, Human
aaaaaacaaaaaaguuag

SEQ ID NO: 402775 - RNA, 20 nt, Human
aacaaaaaacaaaaaaguua

SEQ ID NO: 402776 - RNA, 21 nt, Human
aacagcccuauugacuuccau

SEQ ID NO: 402777 - RNA, 20 nt, Human
aacauggugaaaugccaucu

SEQ ID NO: 402778 - RNA, 20 nt, Human
aagaaagucccaacagcccu

SEQ ID NO: 402779 - RNA, 19 nt, Human
acaaaaaaguuagucaggu

SEQ ID NO: 402780 - RNA, 18 nt, Human
acagagugagacccuguc

SEQ ID NO: 402781 - RNA, 22 nt, Human
acagagugagacccugucaaaa

SEQ ID NO: 402782 - RNA, 21 nt, Human
acccuaaacucaggcacucug

SEQ ID NO: 402783 - RNA, 24 nt, Human
acuccagccugggugacagaguga

SEQ ID NO: 402784 - RNA, 24 nt, Human
acugcacuccagccugggugacag

SEQ ID NO: 402785 - RNA, 26 nt, Human
acugcacuccagccugggugacagag

SEQ ID NO: 402786 - RNA, 21 nt, Human
agaacuuuccacuccccucgu

SEQ ID NO: 402787 - RNA, 24 nt, Human
agacugaggcaggaggaucacuug

SEQ ID NO: 402788 - RNA, 18 nt, Human
agcaaagcugauuccaag

SEQ ID NO: 402789 - RNA, 22 nt, Human
agccugggugacagagugagac

SEQ ID NO: 402790 - RNA, 20 nt, Human
aggaguuugagaccagccug

SEQ ID NO: 402791 - RNA, 18 nt, Human
aggcaggaggaucacuug

SEQ ID NO: 402792 - RNA, 19 nt, Human
aggcaggaggaucacuuga

SEQ ID NO: 402793 - RNA, 22 nt, Human
aucccagcacuuugggaggcca

SEQ ID NO: 402794 - RNA, 19 nt, Human
augucuguaaucccagcac

SEQ ID NO: 402795 - RNA, 24 nt, Human
caaaaaacaaaaaaguuagucagg

SEQ ID NO: 402796 - RNA, 21 nt, Human
caaaaaacaaaccugcauuga

SEQ ID NO: 402797 - RNA, 22 nt, Human
caaaacuuccuccaggccugag

SEQ ID NO: 402798 - RNA, 21 nt, Human
caacauggugaaaugccaucu

SEQ ID NO: 402799 - RNA, 24 nt, Human
caacauggugaaaugccaucuuua

SEQ ID NO: 402800 - RNA, 22 nt, Human
caccaaaaaacaaaccugcauu

SEQ ID NO: 402801 - RNA, 25 nt, Human
caccucguggcuuauugucauaugu

SEQ ID NO: 402802 - RNA, 22 nt, Human
cacuccagccugggugacagag

SEQ ID NO: 402803 - RNA, 24 nt, Human
cacuccagccugggugacagagug

SEQ ID NO: 402804 - RNA, 19 nt, Human
cacugcacuccagccuggg

SEQ ID NO: 402805 - RNA, 21 nt, Human
cacugcacuccagccugggug

SEQ ID NO: 402806 - RNA, 22 nt, Human
cacugcacuccagccuggguga

SEQ ID NO: 402807 - RNA, 23 nt, Human
cacugcacuccagccugggugac

SEQ ID NO: 402808 - RNA, 24 nt, Human
cacugcacuccagccugggugaca

SEQ ID NO: 402809 - RNA, 24 nt, Human
cacugcacuccagccugggugaca

SEQ ID NO: 402810 - RNA, 18 nt, Human
cacuggacuauguaauug

SEQ ID NO: 402811 - RNA, 24 nt, Human
cagaggucaaggcugcagagagcc

SEQ ID NO: 402812 - RNA, 21 nt, Human
cagcacuuugggaggccaaag

SEQ ID NO: 402813 - RNA, 24 nt, Human
caggagacugaggcaggaggauca

SEQ ID NO: 402814 - RNA, 24 nt, Human
caguucaugucuguaaucccagca

SEQ ID NO: 402815 - RNA, 20 nt, Human
caugucuguaaucccagcac

SEQ ID NO: 402816 - RNA, 24 nt, Human
caugucuguaaucccagcacuuug

SEQ ID NO: 402817 - RNA, 23 nt, Human
ccaaaacuuccuccaggccugag

SEQ ID NO: 402818 - RNA, 20 nt, Human
ccacugcacuccagccuggg

SEQ ID NO: 402819 - RNA, 20 nt, Human
ccacugcacuccagccuggg

SEQ ID NO: 402820 - RNA, 21 nt, Human
ccacugcacuccagccugggu

SEQ ID NO: 402821 - RNA, 21 nt, Human
ccacugcacuccagccugggu

SEQ ID NO: 402822 - RNA, 24 nt, Human
ccacugcacuccagccugggugac

SEQ ID NO: 402823 - RNA, 22 nt, Human
cccaacagcccuauugacuucc

SEQ ID NO: 402824 - RNA, 20 nt, Human
ccugggugacagagugagac

SEQ ID NO: 402825 - RNA, 27 nt, Human
ccugucaaaaaaaaaaaaaaaguggug

SEQ ID NO: 402826 - RNA, 23 nt, Human
cggaaacuuuagucggguacuua

SEQ ID NO: 402827 - RNA, 22 nt, Human
cguguuacaugacagaacccac

SEQ ID NO: 402828 - RNA, 22 nt, Human
cucugcucauacuccccccuga

SEQ ID NO: 402829 - RNA, 20 nt, Human
cugucaaaaaaaaaaaaaaa

SEQ ID NO: 402830 - RNA, 19 nt, Human
cuugacccuaaacucaggc

SEQ ID NO: 402831 - RNA, 18 nt, Human
cuugagaucucagggcug

SEQ ID NO: 402832 - RNA, 20 nt, Human
gaaaaugcuuuuuuuuuuuu

SEQ ID NO: 402833 - RNA, 24 nt, Human
gaaaaugcuuuuuuuuuuuuuuuu

SEQ ID NO: 402834 - RNA, 25 nt, Human
gaacguguguugggggaauccuggg

SEQ ID NO: 402835 - RNA, 23 nt, Human
gaacucuuuccaaaacuuccucc

SEQ ID NO: 402836 - RNA, 24 nt, Human
gcacuccagccugggugacagagu

SEQ ID NO: 402837 - RNA, 23 nt, Human
gcaguucaugucuguaaucccag

SEQ ID NO: 402838 - RNA, 19 nt, Human
gccacugcacuccagccug

SEQ ID NO: 402839 - RNA, 24 nt, Human
gccacugcacuccagccuggguga

SEQ ID NO: 402840 - RNA, 21 nt, Human
gcugcagagagccaugguggu

SEQ ID NO: 402841 - RNA, 20 nt, Human
ggcacagguaugauacuagc

SEQ ID NO: 402842 - RNA, 24 nt, Human
ggcaguucaugucuguaaucccag

SEQ ID NO: 402843 - RNA, 24 nt, Human
guggugccacugcacuccagccug

SEQ ID NO: 402844 - RNA, 21 nt, Human
guguuacaugacagaacccac

SEQ ID NO: 402845 - RNA, 23 nt, Human
uaaaagggagcaggacaaaggca

SEQ ID NO: 402846 - RNA, 22 nt, Human
uagaauguaaccuggcuuaaaa

SEQ ID NO: 402847 - RNA, 22 nt, Human
uagcaaagcugauuccaagaga

SEQ ID NO: 402848 - RNA, 23 nt, Human
uagcaccaaaaaacaaaccugca

SEQ ID NO: 402849 - RNA, 19 nt, Human
uauuggcuuugguauaaaa

SEQ ID NO: 402850 - RNA, 19 nt, Human
ucaaaaaaaaaaaaaaagu

SEQ ID NO: 402851 - RNA, 22 nt, Human
ucaugucuguaaucccagcacu

SEQ ID NO: 402852 - RNA, 23 nt, Human
ucaugucuguaaucccagcacuu

SEQ ID NO: 402853 - RNA, 23 nt, Human
uccagccugggugacagagugag

SEQ ID NO: 402854 - RNA, 24 nt, Human
uccagccugggugacagagugaga

SEQ ID NO: 402855 - RNA, 24 nt, Human
uccuuguaguuccagcuacucagg

SEQ ID NO: 402856 - RNA, 24 nt, Human
ucuugagaucucagggcugccgga

SEQ ID NO: 402857 - RNA, 20 nt, Human
ugaaaugccaucuuuaccaa

SEQ ID NO: 402858 - RNA, 22 nt, Human
ugaaaugccaucuuuaccaaac

SEQ ID NO: 402859 - RNA, 23 nt, Human
ugaaccuaggaguuugagaccag

SEQ ID NO: 402860 - RNA, 18 nt, Human
ugacagaacccacggaaa

SEQ ID NO: 402861 - RNA, 23 nt, Human
ugagaucucagggcugccggaga

SEQ ID NO: 402862 - RNA, 20 nt, Human
ugaggcaggaggaucacuug

SEQ ID NO: 402863 - RNA, 21 nt, Human
ugaggcaggaggaucacuuga

SEQ ID NO: 402864 - RNA, 24 nt, Human
ugaggcaggaggaucacuugagcu

SEQ ID NO: 402865 - RNA, 24 nt, Human
ugaggcaggaggaucacuugagcu

SEQ ID NO: 402866 - RNA, 27 nt, Human
ugcuuuugaaagcugugauagcggaug

SEQ ID NO: 402867 - RNA, 24 nt, Human
uggcaguucaugucuguaauccca

SEQ ID NO: 402868 - RNA, 22 nt, Human
uggccgggccuggcaguucaug

SEQ ID NO: 402869 - RNA, 24 nt, Human
uggccgggccuggcaguucauguc

SEQ ID NO: 402870 - RNA, 18 nt, Human
ugggaggccaaagugaac

SEQ ID NO: 402871 - RNA, 21 nt, Human
ugggugacagagugagacccu

SEQ ID NO: 402872 - RNA, 23 nt, Human
ugguggcccuuccuuguaguucc

SEQ ID NO: 402873 - RNA, 22 nt, Human
ugguggugccacugcacuccag

SEQ ID NO: 402874 - RNA, 25 nt, Human
ugucaaaaaaaaaaaaaaaguggug

SEQ ID NO: 402875 - RNA, 19 nt, Human
uguccuugacccuaaacuc

SEQ ID NO: 402876 - RNA, 23 nt, Human
ugucuguaaucccagcacuuugg

SEQ ID NO: 402877 - RNA, 23 nt, Human
ugucuguaaucccagcacuuugg

SEQ ID NO: 402878 - RNA, 24 nt, Human
ugucuguaaucccagcacuuuggg

SEQ ID NO: 402879 - RNA, 18 nt, Human
ugugaggauggagaagac

SEQ ID NO: 402880 - RNA, 20 nt, Human
uguguugggggaauccuggg

SEQ ID NO: 402881 - RNA, 22 nt, Human
uguuacaugacagaacccacgg

SEQ ID NO: 402882 - RNA, 19 nt, Human
uuauguuaaaaguuaagaa

SEQ ID NO: 402883 - RNA, 22 nt, Human
uucaagaaagucccaacagccc

SEQ ID NO: 402884 - RNA, 22 nt, Human
uuccaaaacuuccuccaggccu

SEQ ID NO: 402885 - RNA, 23 nt, Human
uuuagucggguacuuacugcacc

SEQ ID NO: 402886 - RNA, 26 nt, Human
uuuuuuuuuaucaccagcucuguccu

SEQ ID NO: 402887 - RNA, 24 nt, Human
aaaauguugggauuacagguguga

SEQ ID NO: 402888 - RNA, 19 nt, Human
aaacaucuucauaguguau

SEQ ID NO: 402889 - RNA, 24 nt, Human
aaacaucuucauaguguaucaucc

SEQ ID NO: 402890 - RNA, 26 nt, Human
aaauguugggauuacaggugugagcc

SEQ ID NO: 402891 - RNA, 24 nt, Human
aacgauucuccugccucagccucu

SEQ ID NO: 402892 - RNA, 20 nt, Human
aaguagcugggacuacaggc

SEQ ID NO: 402893 - RNA, 24 nt, Human
aaguagcugggacuacaggcaugu

SEQ ID NO: 402894 - RNA, 25 nt, Human
aaguagcugggacuacaggcaugug

SEQ ID NO: 402895 - RNA, 24 nt, Human
acacugcaaccucugccucccggg

SEQ ID NO: 402896 - RNA, 25 nt, Human
acacugcaaccucugccucccgggu

SEQ ID NO: 402897 - RNA, 24 nt, Human
acuauguuggucacuauggucuug

SEQ ID NO: 402898 - RNA, 21 nt, Human
aggaaaccuggaggcuacuac

SEQ ID NO: 402899 - RNA, 19 nt, Human
aggcagccggucacugaag

SEQ ID NO: 402900 - RNA, 23 nt, Human
agugagucacuuucagaacagug

SEQ ID NO: 402901 - RNA, 19 nt, Human
aguguaguggcaugaucuc

SEQ ID NO: 402902 - RNA, 20 nt, Human
augggguuucacuauguugg

SEQ ID NO: 402903 - RNA, 23 nt, Human
augggguuucacuauguugguca

SEQ ID NO: 402904 - RNA, 18 nt, Human
auuauaaagacagaagau

SEQ ID NO: 402905 - RNA, 24 nt, Human
caaaauguugggauuacaggugug

SEQ ID NO: 402906 - RNA, 20 nt, Human
caaacgauucuccugccuca

SEQ ID NO: 402907 - RNA, 22 nt, Human
caaacgauucuccugccucagc

SEQ ID NO: 402908 - RNA, 22 nt, Human
caaguagcugggacuacaggca

SEQ ID NO: 402909 - RNA, 24 nt, Human
cacacugcaaccucugccucccgg

SEQ ID NO: 402910 - RNA, 25 nt, Human
cacacugcaaccucugccucccggg

SEQ ID NO: 402911 - RNA, 21 nt, Human
cacugcaaccucugccucccg

SEQ ID NO: 402912 - RNA, 23 nt, Human
cacugcaaccucugccucccggg

SEQ ID NO: 402913 - RNA, 24 nt, Human
cacugcaaccucugccucccgggg

SEQ ID NO: 402914 - RNA, 20 nt, Human
cacugcaccaggcaaacugc

SEQ ID NO: 402915 - RNA, 18 nt, Human
cagccggucacugaagcc

SEQ ID NO: 402916 - RNA, 24 nt, Human
caguagagaugggguuucacuaug

SEQ ID NO: 402917 - RNA, 21 nt, Human
ccaaaauguugggauuacagg

SEQ ID NO: 402918 - RNA, 21 nt, Human
ccaaaauguugggauuacagg

SEQ ID NO: 402919 - RNA, 24 nt, Human
ccaaaauguugggauuacaggugu

SEQ ID NO: 402920 - RNA, 23 nt, Human
cccggguucaaacgauucuccug

SEQ ID NO: 402921 - RNA, 24 nt, Human
ccucccggguucaaacgauucucc

SEQ ID NO: 402922 - RNA, 19 nt, Human
ccuuccuucucuauucuuu

SEQ ID NO: 402923 - RNA, 24 nt, Human
cgccaggcuggaguguaguggcau

SEQ ID NO: 402924 - RNA, 23 nt, Human
cgcucugucgccaggcuggagug

SEQ ID NO: 402925 - RNA, 23 nt, Human
cucaaguagcugggacuacaggc

SEQ ID NO: 402926 - RNA, 24 nt, Human
cucagccucucaaguagcugggac

SEQ ID NO: 402927 - RNA, 20 nt, Human
cucgcucugucgccaggcug

SEQ ID NO: 402928 - RNA, 23 nt, Human
cucgcucugucgccaggcuggag

SEQ ID NO: 402929 - RNA, 18 nt, Human
cucgugaucuacccaccu

SEQ ID NO: 402930 - RNA, 18 nt, Human
cucuugaucucgugaucu

SEQ ID NO: 402931 - RNA, 19 nt, Human
cugcaaccucugccucccg

SEQ ID NO: 402932 - RNA, 23 nt, Human
cugcaaccucugccucccggguu

SEQ ID NO: 402933 - RNA, 24 nt, Human
cugcaaccucugccucccggguuc

SEQ ID NO: 402934 - RNA, 23 nt, Human
cugccucagccucucaaguagcu

SEQ ID NO: 402935 - RNA, 24 nt, Human
cuggaguguaguggcaugaucuca

SEQ ID NO: 402936 - RNA, 24 nt, Human
cuuucaguagagaugggguuucac

SEQ ID NO: 402937 - RNA, 20 nt, Human
gaacaguguguguuguagaa

SEQ ID NO: 402938 - RNA, 24 nt, Human
gagaugggguuucacuauguuggu

SEQ ID NO: 402939 - RNA, 21 nt, Human
gaucucgugaucuacccaccu

SEQ ID NO: 402940 - RNA, 24 nt, Human
gaucucgugaucuacccaccuugg

SEQ ID NO: 402941 - RNA, 18 nt, Human
gauuacaggugugagcca

SEQ ID NO: 402942 - RNA, 19 nt, Human
gauuacaggugugagccac

SEQ ID NO: 402943 - RNA, 23 nt, Human
gauuacaggugugagccacugca

SEQ ID NO: 402944 - RNA, 22 nt, Human
gcaaccucugccucccggguuc

SEQ ID NO: 402945 - RNA, 21 nt, Human
gcaccaggcaaacugcgaucu

SEQ ID NO: 402946 - RNA, 23 nt, Human
gcaccaggcaaacugcgaucuuu

SEQ ID NO: 402947 - RNA, 19 nt, Human
ggacuacaggcaugugcca

SEQ ID NO: 402948 - RNA, 23 nt, Human
ggguucaaacgauucuccugccu

SEQ ID NO: 402949 - RNA, 24 nt, Human
gucucgcucugucgccaggcugga

SEQ ID NO: 402950 - RNA, 24 nt, Human
gugaucuacccaccuuggguuccc

SEQ ID NO: 402951 - RNA, 26 nt, Human
guuuuuuuuuuuuuuuuuuuuugggg

SEQ ID NO: 402952 - RNA, 18 nt, Human
uaaccauugcauuaaugu

SEQ ID NO: 402953 - RNA, 19 nt, Human
uacaggugugagccacugc

SEQ ID NO: 402954 - RNA, 22 nt, Human
uacaggugugagccacugcacc

SEQ ID NO: 402955 - RNA, 22 nt, Human
uacccaccuuggguucccaaaa

SEQ ID NO: 402956 - RNA, 22 nt, Human
uagagaugggguuucacuaugu

SEQ ID NO: 402957 - RNA, 26 nt, Human
uaguggugccucuucucucuuuugac

SEQ ID NO: 402958 - RNA, 19 nt, Human
ucaaacgauucuccugccu

SEQ ID NO: 402959 - RNA, 30 nt, Human
ucaccacacugcaaccucugccucccgggg

SEQ ID NO: 402960 - RNA, 22 nt, Human
ucacuauguuggucacuauggu

SEQ ID NO: 402961 - RNA, 18 nt, Human
ucacuuucagaacagugu

SEQ ID NO: 402962 - RNA, 18 nt, Human
ucaguagagaugggguuu

SEQ ID NO: 402963 - RNA, 21 nt, Human
ucaguagagaugggguuucac

SEQ ID NO: 402964 - RNA, 24 nt, Human
ucaguagagaugggguuucacuau

SEQ ID NO: 402965 - RNA, 23 nt, Human
ucccaaaauguugggauuacagg

SEQ ID NO: 402966 - RNA, 21 nt, Human
ucccggguucaaacgauucuc

SEQ ID NO: 402967 - RNA, 24 nt, Human
ucccggguucaaacgauucuccug

SEQ ID NO: 402968 - RNA, 19 nt, Human
ucgugaucuacccaccuug

SEQ ID NO: 402969 - RNA, 24 nt, Human
ucucaaguagcugggacuacaggc

SEQ ID NO: 402970 - RNA, 26 nt, Human
ucuccugccucagccucucaaguagc

SEQ ID NO: 402971 - RNA, 21 nt, Human
ucucgcucugucgccaggcug

SEQ ID NO: 402972 - RNA, 22 nt, Human
ucucgcucugucgccaggcugg

SEQ ID NO: 402973 - RNA, 23 nt, Human
ucucgcucugucgccaggcugga

SEQ ID NO: 402974 - RNA, 18 nt, Human
ucugucgccaggcuggag

SEQ ID NO: 402975 - RNA, 21 nt, Human
ucugucgccaggcuggagugu

SEQ ID NO: 402976 - RNA, 23 nt, Human
ucugucgccaggcuggaguguag

SEQ ID NO: 402977 - RNA, 22 nt, Human
ugagguagaguccugaaagauc

SEQ ID NO: 402978 - RNA, 21 nt, Human
ugauaugagguagaguccuga

SEQ ID NO: 402979 - RNA, 24 nt, Human
ugccucagccucucaaguagcugg

SEQ ID NO: 402980 - RNA, 22 nt, Human
uggaagcugacagucuucuaga

SEQ ID NO: 402981 - RNA, 23 nt, Human
uggaguguaguggcaugaucuca

SEQ ID NO: 402982 - RNA, 24 nt, Human
uggcaugaucucaccacacugcaa

SEQ ID NO: 402983 - RNA, 18 nt, Human
ugggacuacaggcaugug

SEQ ID NO: 402984 - RNA, 21 nt, Human
ugggacuacaggcaugugcca

SEQ ID NO: 402985 - RNA, 26 nt, Human
ugggacuacaggcaugugccaacaca

SEQ ID NO: 402986 - RNA, 18 nt, Human
ugggauuacaggugugag

SEQ ID NO: 402987 - RNA, 19 nt, Human
ugggauuacaggugugagc

SEQ ID NO: 402988 - RNA, 22 nt, Human
ugggauuacaggugugagccac

SEQ ID NO: 402989 - RNA, 22 nt, Human
ugggauuacaggugugagccac

SEQ ID NO: 402990 - RNA, 24 nt, Human
ugggauuacaggugugagccacug

SEQ ID NO: 402991 - RNA, 30 nt, Human
ugggauuacaggugugagccacugcaccaa

SEQ ID NO: 402992 - RNA, 23 nt, Human
ugggguuucacuauguuggucac

SEQ ID NO: 402993 - RNA, 22 nt, Human
ugucccuuaaggaaaccuggaa

SEQ ID NO: 402994 - RNA, 22 nt, Human
ugucccuuaaggaaaccuggag

SEQ ID NO: 402995 - RNA, 24 nt, Human
uucaaacgauucuccugccucagc

SEQ ID NO: 402996 - RNA, 21 nt, Human
uucucuauucuuuuauaguca

SEQ ID NO: 402997 - RNA, 21 nt, Human
uugggauuacaggugugagcc

SEQ ID NO: 402998 - RNA, 24 nt, Human
uuucugcuagcaaacugauaugag

SEQ ID NO: 402999 - RNA, 28 nt, Human
uuucuguuuguuuguuuuggucagauuu

SEQ ID NO: 403000 - RNA, 23 nt, Human
uuuuuuuuuugaaaccaagucuc

SEQ ID NO: 403001 - RNA, 20 nt, Human
uuuuuuuuuuuuuuuuuugg

SEQ ID NO: 403002 - RNA, 20 nt, Human
aaaaaaaagguacaauuugc

SEQ ID NO: 403003 - RNA, 21 nt, Human
aaacaaaaaagguacaauuug

SEQ ID NO: 403004 - RNA, 22 nt, Human
aaagguacaauuugcggcacuu

SEQ ID NO: 403005 - RNA, 23 nt, Human
aaggcaccugguggccaacaucc

SEQ ID NO: 403006 - RNA, 23 nt, Human
accaaccccucccauagcccaca

SEQ ID NO: 403007 - RNA, 20 nt, Human
agcccggcuuuggcuccugg

SEQ ID NO: 403008 - RNA, 25 nt, Human
aggaaauacauaacacuccaaaaac

SEQ ID NO: 403009 - RNA, 25 nt, Human
agguuccagcaugauguaacaauuc

SEQ ID NO: 403010 - RNA, 18 nt, Human
auaagauaacauuuacua

SEQ ID NO: 403011 - RNA, 18 nt, Human
auauacaucuuucuuggc

SEQ ID NO: 403012 - RNA, 22 nt, Human
augacacccucuccacuucagc

SEQ ID NO: 403013 - RNA, 20 nt, Human
augcaguuucucauaagguc

SEQ ID NO: 403014 - RNA, 19 nt, Human
cacuuguggaaaaacaccu

SEQ ID NO: 403015 - RNA, 21 nt, Human
cagggaccaaccccucccaua

SEQ ID NO: 403016 - RNA, 24 nt, Human
caucugaaauauaacuuuagauau

SEQ ID NO: 403017 - RNA, 22 nt, Human
caugccucuuaguagucucaca

SEQ ID NO: 403018 - RNA, 18 nt, Human
cauucaaaggcaauguuu

SEQ ID NO: 403019 - RNA, 24 nt, Human
ccaaacauccaggaaauacauaac

SEQ ID NO: 403020 - RNA, 25 nt, Human
ccaaccccucccauagcccacaugc

SEQ ID NO: 403021 - RNA, 24 nt, Human
cccacaugcaguuucucauaaggu

SEQ ID NO: 403022 - RNA, 23 nt, Human
cccguaauugcuccaaucugguu

SEQ ID NO: 403023 - RNA, 19 nt, Human
ccgcucccuccccuucuug

SEQ ID NO: 403024 - RNA, 20 nt, Human
ccuuagcugcaaguuuuccc

SEQ ID NO: 403025 - RNA, 20 nt, Human
cuccucccucucccgcuccc

SEQ ID NO: 403026 - RNA, 22 nt, Human
cucuccucccucucccgcuccc

SEQ ID NO: 403027 - RNA, 21 nt, Human
cugaaauauaacuuuagauau

SEQ ID NO: 403028 - RNA, 20 nt, Human
cugcggccaacuccggaggc

SEQ ID NO: 403029 - RNA, 25 nt, Human
cuuuuuggcaaugucagcuuucuaa

SEQ ID NO: 403030 - RNA, 19 nt, Human
gaagaaauauacugcauuu

SEQ ID NO: 403031 - RNA, 26 nt, Human
gacacccucuccacuucagggcacuc

SEQ ID NO: 403032 - RNA, 23 nt, Human
gcaaagaaaacauuacaucugaa

SEQ ID NO: 403033 - RNA, 20 nt, Human
gcaccugguggccaacaucc

SEQ ID NO: 403034 - RNA, 21 nt, Human
gcauccauuuuaauuuuuuug

SEQ ID NO: 403035 - RNA, 20 nt, Human
gcauggauacugagucgugu

SEQ ID NO: 403036 - RNA, 20 nt, Human
gcccucucgcuucggagcuc

SEQ ID NO: 403037 - RNA, 23 nt, Human
ggccaugccucuuaguagucuca

SEQ ID NO: 403038 - RNA, 19 nt, Human
uaaaaagaacgaagaaaua

SEQ ID NO: 403039 - RNA, 22 nt, Human
uaaaccacuaauaacuuuucua

SEQ ID NO: 403040 - RNA, 23 nt, Human
uaaggucaacccguaauugcucc

SEQ ID NO: 403041 - RNA, 24 nt, Human
uacaaaauuuaaaaaccauugugu

SEQ ID NO: 403042 - RNA, 25 nt, Human
uacaaaauuuaaaaaccauugugua

SEQ ID NO: 403043 - RNA, 21 nt, Human
uacaucugaaauauaacuuua

SEQ ID NO: 403044 - RNA, 22 nt, Human
uacaucuuucuuggcuuguuuu

SEQ ID NO: 403045 - RNA, 22 nt, Human
uauuguacaguauaagauaaca

SEQ ID NO: 403046 - RNA, 23 nt, Human
ucaauugcgcuagaugacacccu

SEQ ID NO: 403047 - RNA, 22 nt, Human
uccaggaaauacauaacacucc

SEQ ID NO: 403048 - RNA, 20 nt, Human
uccccuucuugucugcggcc

SEQ ID NO: 403049 - RNA, 19 nt, Human
ucuuugguggcuucuaagu

SEQ ID NO: 403050 - RNA, 21 nt, Human
ucuuugguggcuucuaagugu

SEQ ID NO: 403051 - RNA, 24 nt, Human
ugauaaaccacuaauaacuuuucu

SEQ ID NO: 403052 - RNA, 21 nt, Human
uggggcgccgacuuggagccc

SEQ ID NO: 403053 - RNA, 21 nt, Human
uggggcgcgcggacgcguggg

SEQ ID NO: 403054 - RNA, 18 nt, Human
uguaacacaccaugaguc

SEQ ID NO: 403055 - RNA, 18 nt, Human
uuagaaaaaguauuuuuu

SEQ ID NO: 403056 - RNA, 19 nt, Human
uucaacaauuauauaacua

SEQ ID NO: 403057 - RNA, 21 nt, Human
uucagaugauccuucaauugc

SEQ ID NO: 403058 - RNA, 20 nt, Human
uugguggcuucuaaguguug

SEQ ID NO: 403059 - RNA, 23 nt, Human
uuugauauuaggaaacaacauuu

SEQ ID NO: 403060 - RNA, 18 nt, Human
uuugcacaggcuugacaa

SEQ ID NO: 403061 - RNA, 23 nt, Human
uuuuuuuuguuuuuuuuuucagg

SEQ ID NO: 403062 - RNA, 23 nt, Human
uuuuuuuuuuuuuuucagguuuu

SEQ ID NO: 403063 - RNA, 23 nt, Human
uuuuuuuuuuuuuuuuuuucagg

SEQ ID NO: 403064 - RNA, 18 nt, Human
agcggcugaggguggggc

SEQ ID NO: 403065 - RNA, 22 nt, Human
agguggagagugggcggugggg

SEQ ID NO: 403066 - RNA, 22 nt, Human
agugaacacaaugcccuggggg

SEQ ID NO: 403067 - RNA, 20 nt, Human
auaauaauaaaaauaauauc

SEQ ID NO: 403068 - RNA, 19 nt, Human
cagaguacagugaacacaa

SEQ ID NO: 403069 - RNA, 21 nt, Human
cagaguacagugaacacaaug

SEQ ID NO: 403070 - RNA, 20 nt, Human
cccacagaguacagugaaca

SEQ ID NO: 403071 - RNA, 21 nt, Human
cccucacauuugggaacuccu

SEQ ID NO: 403072 - RNA, 20 nt, Human
ccucuagagggaggggcagg

SEQ ID NO: 403073 - RNA, 25 nt, Human
ccucuuagugccugaaguggggucu

SEQ ID NO: 403074 - RNA, 19 nt, Human
gaggguggggcagagggga

SEQ ID NO: 403075 - RNA, 24 nt, Human
gcccugggggucuguggccagggg

SEQ ID NO: 403076 - RNA, 19 nt, Human
ggacccauccuugcccaca

SEQ ID NO: 403077 - RNA, 22 nt, Human
gggcggugggggaguuguaaga

SEQ ID NO: 403078 - RNA, 24 nt, Human
uauccauuuaucaacauuuuguca

SEQ ID NO: 403079 - RNA, 19 nt, Human
uccugccgccagguccagc

SEQ ID NO: 403080 - RNA, 18 nt, Human
ucuagagggaggggcagg

SEQ ID NO: 403081 - RNA, 25 nt, Human
ugaaguggggucuucuggacccauc

SEQ ID NO: 403082 - RNA, 22 nt, Human
ugaggguggggcagaggggacc

SEQ ID NO: 403083 - RNA, 19 nt, Human
ugagguggagagugggcgg

SEQ ID NO: 403084 - RNA, 21 nt, Human
ugagguggagagugggcggug

SEQ ID NO: 403085 - RNA, 18 nt, Human
ugcccugggggucugugg

SEQ ID NO: 403086 - RNA, 21 nt, Human
uggagagugggcgguggggga

SEQ ID NO: 403087 - RNA, 24 nt, Human
uggccuaggcccagucucuuuggc

SEQ ID NO: 403088 - RNA, 18 nt, Human
uggcuuccugccgccagg

SEQ ID NO: 403089 - RNA, 20 nt, Human
ugggcggugggggaguugua

SEQ ID NO: 403090 - RNA, 20 nt, Human
ugucuuguuucucgccccuc

SEQ ID NO: 403091 - RNA, 21 nt, Human
ugugggauggaaaacacguga

SEQ ID NO: 403092 - RNA, 19 nt, Human
uuggcuuccugccgccagg

SEQ ID NO: 403093 - RNA, 21 nt, Human
uuucucgccccucacauuugg

SEQ ID NO: 403094 - RNA, 21 nt, Human
agaaagggaggaaaauagcua

SEQ ID NO: 403095 - RNA, 21 nt, Human
cuuucugcaucucuaccccuc

SEQ ID NO: 403096 - RNA, 19 nt, Human
gguacagagaaagggagga

SEQ ID NO: 403097 - RNA, 19 nt, Human
uguguuuguugauguccug

SEQ ID NO: 403098 - RNA, 22 nt, Human
uguguuuguugauguccugcca

SEQ ID NO: 403099 - RNA, 23 nt, Human
uugaacuuugaagguuggggccu

SEQ ID NO: 403100 - RNA, 18 nt, Human
uuuuuuuuuuuuuuucug

SEQ ID NO: 403101 - RNA, 22 nt, Human
uuuuuuuuuuuuuuuuucuguu

SEQ ID NO: 403102 - RNA, 24 nt, Human
uuuuuuuuuuuuuuuuuuucuguu

SEQ ID NO: 403103 - RNA, 24 nt, Human
uuuuuuuuuuuuuuuuuuuuucuu

SEQ ID NO: 403104 - RNA, 19 nt, Human
aaagugcugggauuacagg

SEQ ID NO: 403105 - RNA, 20 nt, Human
aaagugcugggauuacaggc

SEQ ID NO: 403106 - RNA, 22 nt, Human
aaagugcugggauuacaggcga

SEQ ID NO: 403107 - RNA, 18 nt, Human
aagugcugggauuacagg

SEQ ID NO: 403108 - RNA, 19 nt, Human
aagugcugggauuacaggc

SEQ ID NO: 403109 - RNA, 26 nt, Human
aagugcugggauuacaggcgagagcc

SEQ ID NO: 403110 - RNA, 19 nt, Human
acaggcgagagccaccacg

SEQ ID NO: 403111 - RNA, 19 nt, Human
aggcaggcaccaccacguc

SEQ ID NO: 403112 - RNA, 24 nt, Human
aggugauccgccugccuuggccuc

SEQ ID NO: 403113 - RNA, 25 nt, Human
agguuggagugcaguggugugaucu

SEQ ID NO: 403114 - RNA, 22 nt, Human
aguagagaugggguuuugccau

SEQ ID NO: 403115 - RNA, 19 nt, Human
agugcaguggugugaucuc

SEQ ID NO: 403116 - RNA, 20 nt, Human
agugcaguggugugaucucg

SEQ ID NO: 403117 - RNA, 23 nt, Human
agugcaguggugugaucucggcu

SEQ ID NO: 403118 - RNA, 24 nt, Human
agugcaguggugugaucucggcuc

SEQ ID NO: 403119 - RNA, 18 nt, Human
agugcugggauuacaggc

SEQ ID NO: 403120 - RNA, 20 nt, Human
augggguuuugccauguuag

SEQ ID NO: 403121 - RNA, 24 nt, Human
augggguuuugccauguuagccag

SEQ ID NO: 403122 - RNA, 26 nt, Human
caaagugcugggauuacaggcgagag

SEQ ID NO: 403123 - RNA, 24 nt, Human
caccacguccggcuaauuuuugua

SEQ ID NO: 403124 - RNA, 21 nt, Human
cacugcaaccuccgccucccg

SEQ ID NO: 403125 - RNA, 23 nt, Human
cacugcaaccuccgccucccggg

SEQ ID NO: 403126 - RNA, 19 nt, Human
cagccuccugaguagcugg

SEQ ID NO: 403127 - RNA, 23 nt, Human
caggcaccaccacguccggcuaa

SEQ ID NO: 403128 - RNA, 21 nt, Human
cauguuagccaggcuggucuc

SEQ ID NO: 403129 - RNA, 24 nt, Human
cauguuagccaggcuggucucgaa

SEQ ID NO: 403130 - RNA, 19 nt, Human
ccaaagugcugggauuaca

SEQ ID NO: 403131 - RNA, 20 nt, Human
ccaaagugcugggauuacag

SEQ ID NO: 403132 - RNA, 22 nt, Human
ccaaagugcugggauuacaggc

SEQ ID NO: 403133 - RNA, 23 nt, Human
ccaaagugcugggauuacaggcg

SEQ ID NO: 403134 - RNA, 21 nt, Human
ccagccucugcuucgugaguu

SEQ ID NO: 403135 - RNA, 19 nt, Human
ccauguuagccaggcuggu

SEQ ID NO: 403136 - RNA, 22 nt, Human
ccauguuagccaggcuggucuc

SEQ ID NO: 403137 - RNA, 23 nt, Human
ccauguuagccaggcuggucucg

SEQ ID NO: 403138 - RNA, 22 nt, Human
cccagguuggagugcaguggug

SEQ ID NO: 403139 - RNA, 25 nt, Human
cccggguuuaagcaaaauuauccug

SEQ ID NO: 403140 - RNA, 22 nt, Human
ccucugaguucuccacguguca

SEQ ID NO: 403141 - RNA, 18 nt, Human
ccugaccucaggugaucc

SEQ ID NO: 403142 - RNA, 21 nt, Human
ccugaccucaggugauccgcc

SEQ ID NO: 403143 - RNA, 23 nt, Human
ccugaccucaggugauccgccug

SEQ ID NO: 403144 - RNA, 22 nt, Human
ccugaguagcuggauuacaggc

SEQ ID NO: 403145 - RNA, 23 nt, Human
ccugccucagccuccugaguagc

SEQ ID NO: 403146 - RNA, 22 nt, Human
ccugccuuggccucccaaagug

SEQ ID NO: 403147 - RNA, 24 nt, Human
cucacugcaaccuccgccucccgg

SEQ ID NO: 403148 - RNA, 26 nt, Human
cuccugaccucaggugauccgccugc

SEQ ID NO: 403149 - RNA, 23 nt, Human
cugcaaccuccgccucccggguu

SEQ ID NO: 403150 - RNA, 24 nt, Human
cugcaaccuccgccucccggguuu

SEQ ID NO: 403151 - RNA, 23 nt, Human
cugccucagccuccugaguagcu

SEQ ID NO: 403152 - RNA, 23 nt, Human
cugccuuggccucccaaagugcu

SEQ ID NO: 403153 - RNA, 24 nt, Human
gaccucaggugauccgccugccuu

SEQ ID NO: 403154 - RNA, 20 nt, Human
gagaugggguuuugccaugu

SEQ ID NO: 403155 - RNA, 18 nt, Human
gauuacaggcgagagcca

SEQ ID NO: 403156 - RNA, 20 nt, Human
gccauguuagccaggcuggu

SEQ ID NO: 403157 - RNA, 22 nt, Human
gccuuggccucccaaagugcug

SEQ ID NO: 403158 - RNA, 21 nt, Human
gcguuucccagguuggagugc

SEQ ID NO: 403159 - RNA, 23 nt, Human
gcuggucucgaacuccugaccuc

SEQ ID NO: 403160 - RNA, 22 nt, Human
ggauuacaggcaggcaccacca

SEQ ID NO: 403161 - RNA, 19 nt, Human
ggauuacaggcgagagcca

SEQ ID NO: 403162 - RNA, 24 nt, Human
ggcuggucucgaacuccugaccuc

SEQ ID NO: 403163 - RNA, 22 nt, Human
gggguuuugccauguuagccag

SEQ ID NO: 403164 - RNA, 23 nt, Human
gggguuuugccauguuagccagg

SEQ ID NO: 403165 - RNA, 22 nt, Human
ggguuuugccauguuagccagg

SEQ ID NO: 403166 - RNA, 19 nt, Human
ggucucgaacuccugaccu

SEQ ID NO: 403167 - RNA, 21 nt, Human
ggucucuggagcagggcugac

SEQ ID NO: 403168 - RNA, 22 nt, Human
gguuggagugcaguggugugau

SEQ ID NO: 403169 - RNA, 23 nt, Human
guagagaugggguuuugccaugu

SEQ ID NO: 403170 - RNA, 24 nt, Human
uaauuuuuguauuuuuaguagaga

SEQ ID NO: 403171 - RNA, 23 nt, Human
uacaggcaggcaccaccacgucc

SEQ ID NO: 403172 - RNA, 24 nt, Human
uacaggcgagagccaccacgccca

SEQ ID NO: 403173 - RNA, 22 nt, Human
uagagaugggguuuugccaugu

SEQ ID NO: 403174 - RNA, 24 nt, Human
uagccaggcuggucucgaacuccu

SEQ ID NO: 403175 - RNA, 24 nt, Human
uaguagagaugggguuuugccaug

SEQ ID NO: 403176 - RNA, 23 nt, Human
ucacugcaaccuccgccucccgg

SEQ ID NO: 403177 - RNA, 24 nt, Human
ucacugcaaccuccgccucccggg

SEQ ID NO: 403178 - RNA, 25 nt, Human
ucacugcaaccuccgccucccgggu

SEQ ID NO: 403179 - RNA, 27 nt, Human
ucacugcaaccuccgccucccggguuu

SEQ ID NO: 403180 - RNA, 26 nt, Human
ucacugcguuucccaggucgaacggu

SEQ ID NO: 403181 - RNA, 21 nt, Human
ucagccuccugaguagcugga

SEQ ID NO: 403182 - RNA, 24 nt, Human
ucccaaagugcugggauuacaggc

SEQ ID NO: 403183 - RNA, 23 nt, Human
uccugaguagcuggauuacaggc

SEQ ID NO: 403184 - RNA, 24 nt, Human
uccugaguagcuggauuacaggca

SEQ ID NO: 403185 - RNA, 20 nt, Human
ucgugaguuuucuuuccccu

SEQ ID NO: 403186 - RNA, 26 nt, Human
ucucacugcguuucccagguuggagu

SEQ ID NO: 403187 - RNA, 23 nt, Human
ucucgaacuccugaccucaggug

SEQ ID NO: 403188 - RNA, 18 nt, Human
ugaccucaggugauccgc

SEQ ID NO: 403189 - RNA, 24 nt, Human
ugaccucaggugauccgccugccu

SEQ ID NO: 403190 - RNA, 22 nt, Human
ugcaguggugugaucucggcuc

SEQ ID NO: 403191 - RNA, 24 nt, Human
ugccauguuagccaggcuggucuc

SEQ ID NO: 403192 - RNA, 27 nt, Human
ugccauguuagccaggcuggucucgaa

SEQ ID NO: 403193 - RNA, 24 nt, Human
ugccucagccuccugaguagcugg

SEQ ID NO: 403194 - RNA, 24 nt, Human
ugcguuucccagguuggagugcag

SEQ ID NO: 403195 - RNA, 24 nt, Human
ugcugggauuacaggcgagagcca

SEQ ID NO: 403196 - RNA, 19 nt, Human
uggagugcaguggugugau

SEQ ID NO: 403197 - RNA, 23 nt, Human
uggagugcaguggugugaucucg

SEQ ID NO: 403198 - RNA, 24 nt, Human
uggagugcaguggugugaucucgg

SEQ ID NO: 403199 - RNA, 19 nt, Human
uggauuacaggcaggcacc

SEQ ID NO: 403200 - RNA, 23 nt, Human
uggauuacaggcaggcaccacca

SEQ ID NO: 403201 - RNA, 18 nt, Human
ugggauuacaggcgagag

SEQ ID NO: 403202 - RNA, 19 nt, Human
ugggauuacaggcgagagc

SEQ ID NO: 403203 - RNA, 21 nt, Human
ugggauuacaggcgagagcca

SEQ ID NO: 403204 - RNA, 22 nt, Human
ugggauuacaggcgagagccac

SEQ ID NO: 403205 - RNA, 23 nt, Human
ugggauuacaggcgagagccacc

SEQ ID NO: 403206 - RNA, 24 nt, Human
ugggauuacaggcgagagccacca

SEQ ID NO: 403207 - RNA, 24 nt, Human
ugggguuuugccauguuagccagg

SEQ ID NO: 403208 - RNA, 18 nt, Human
uuaguagagaugggguuu

SEQ ID NO: 403209 - RNA, 22 nt, Human
uuaguagagaugggguuuugcc

SEQ ID NO: 403210 - RNA, 24 nt, Human
uuaguagagaugggguuuugccau

SEQ ID NO: 403211 - RNA, 24 nt, Human
uucccagguuggagugcaguggug

SEQ ID NO: 403212 - RNA, 24 nt, Human
uugccauguuagccaggcuggucu

SEQ ID NO: 403213 - RNA, 18 nt, Human
uuggccucccaaagugcu

SEQ ID NO: 403214 - RNA, 23 nt, Human
uuguauuuuuaguagagaugggg

SEQ ID NO: 403215 - RNA, 24 nt, Human
uuucccagguuggagugcaguggu

SEQ ID NO: 403216 - RNA, 23 nt, Human
uuuugccauguuagccaggcugg

SEQ ID NO: 403217 - RNA, 20 nt, Human
uuuuguauuuuuaguagaga

SEQ ID NO: 403218 - RNA, 21 nt, Human
uuuuuaguagagaugggguuu

SEQ ID NO: 403219 - RNA, 21 nt, Human
uuuuuaguagagaugggguuu

SEQ ID NO: 403220 - RNA, 20 nt, Human
uuuuuguauuuuuaguagag

SEQ ID NO: 403221 - RNA, 20 nt, Human
uuuuuuuuuuuugaggcaca

SEQ ID NO: 403222 - RNA, 27 nt, Human
uuuuuuuuuuuuugaggcacagucuca

SEQ ID NO: 403223 - RNA, 18 nt, Human
uuuuuuuuuuuuuuuuug

SEQ ID NO: 403224 - RNA, 21 nt, Human
uuuuuuuuuuuuuuuuugagg

SEQ ID NO: 403225 - RNA, 19 nt, Human
aaaaauuggugaaggauuu

SEQ ID NO: 403226 - RNA, 23 nt, Human
aaacucuacugaauacaagcaac

SEQ ID NO: 403227 - RNA, 24 nt, Human
aaaguguugggauuacagguguga

SEQ ID NO: 403228 - RNA, 21 nt, Human
aacucgccaauccuccaaccc

SEQ ID NO: 403229 - RNA, 21 nt, Human
aaguguugggauuacaggugu

SEQ ID NO: 403230 - RNA, 26 nt, Human
aaguguugggauuacaggugugagcc

SEQ ID NO: 403231 - RNA, 18 nt, Human
aaugcccccuacucccgg

SEQ ID NO: 403232 - RNA, 24 nt, Human
aauuuuguauuuuuaguagagaug

SEQ ID NO: 403233 - RNA, 18 nt, Human
accacgcccggcuaauuu

SEQ ID NO: 403234 - RNA, 19 nt, Human
acccaggcuggagugcaau

SEQ ID NO: 403235 - RNA, 24 nt, Human
agaugauccacccaccuuggccuc

SEQ ID NO: 403236 - RNA, 23 nt, Human
aggauuacagccaugcgcuacca

SEQ ID NO: 403237 - RNA, 19 nt, Human
agugcaauggcgcgaucug

SEQ ID NO: 403238 - RNA, 24 nt, Human
augauccacccaccuuggccuccc

SEQ ID NO: 403239 - RNA, 20 nt, Human
augggguuucuccacguugg

SEQ ID NO: 403240 - RNA, 21 nt, Human
augggguuucuccacguuggu

SEQ ID NO: 403241 - RNA, 24 nt, Human
augggguuucuccacguuggucag

SEQ ID NO: 403242 - RNA, 24 nt, Human
auuugcucucuucagccuuuuucc

SEQ ID NO: 403243 - RNA, 22 nt, Human
caaaauaggugggcaagaaaac

SEQ ID NO: 403244 - RNA, 24 nt, Human
caaaguguugggauuacaggugug

SEQ ID NO: 403245 - RNA, 22 nt, Human
caagcaauucuucugccucggc

SEQ ID NO: 403246 - RNA, 22 nt, Human
cacccaccuuggccucccaaag

SEQ ID NO: 403247 - RNA, 23 nt, Human
cacccaccuuggccucccaaagu

SEQ ID NO: 403248 - RNA, 21 nt, Human
cacugcgccuggccaagacug

SEQ ID NO: 403249 - RNA, 18 nt, Human
cagaggacuuucauauaa

SEQ ID NO: 403250 - RNA, 20 nt, Human
cagaggacuuucauauaaug

SEQ ID NO: 403251 - RNA, 20 nt, Human
cauagcuaaaccguuguccc

SEQ ID NO: 403252 - RNA, 18 nt, Human
cauuguauagcaggaggu

SEQ ID NO: 403253 - RNA, 20 nt, Human
cauuguauagcaggaggugu

SEQ ID NO: 403254 - RNA, 21 nt, Human
ccaaaguguugggauuacagg

SEQ ID NO: 403255 - RNA, 21 nt, Human
ccaaaguguugggauuacagg

SEQ ID NO: 403256 - RNA, 24 nt, Human
ccaaaguguugggauuacaggugu

SEQ ID NO: 403257 - RNA, 19 nt, Human
ccacguuggucaggcuggu

SEQ ID NO: 403258 - RNA, 19 nt, Human
ccccaaauuucauagcuaa

SEQ ID NO: 403259 - RNA, 24 nt, Human
ccccuacucccggccccaagaaaa

SEQ ID NO: 403260 - RNA, 24 nt, Human
cccggccuuagaugauccacccac

SEQ ID NO: 403261 - RNA, 24 nt, Human
ccgcaaccucugccuccccaguuc

SEQ ID NO: 403262 - RNA, 23 nt, Human
ccuguggaaugcccccuacuccc

SEQ ID NO: 403263 - RNA, 19 nt, Human
cgcaaccucugccucccca

SEQ ID NO: 403264 - RNA, 19 nt, Human
cggccccaagaaaaccccu

SEQ ID NO: 403265 - RNA, 19 nt, Human
cggccuccugaguagccag

SEQ ID NO: 403266 - RNA, 22 nt, Human
cguuggucaggcuggucuugaa

SEQ ID NO: 403267 - RNA, 24 nt, Human
cuaauuuuguauuuuuaguagaga

SEQ ID NO: 403268 - RNA, 25 nt, Human
cucaccgcaaccucugccuccccag

SEQ ID NO: 403269 - RNA, 24 nt, Human
cuccacguuggucaggcuggucuu

SEQ ID NO: 403270 - RNA, 18 nt, Human
cucccggccccaagaaaa

SEQ ID NO: 403271 - RNA, 21 nt, Human
cucccggccccaagaaaaccc

SEQ ID NO: 403272 - RNA, 27 nt, Human
cucccggccuuagaugauccacccacc

SEQ ID NO: 403273 - RNA, 22 nt, Human
cugccucggccuccugaguagc

SEQ ID NO: 403274 - RNA, 24 nt, Human
cuuagaugauccacccaccuuggc

SEQ ID NO: 403275 - RNA, 24 nt, Human
cuuguuacccaggcuggagugcaa

SEQ ID NO: 403276 - RNA, 20 nt, Human
gagaugggguuucuccacgu

SEQ ID NO: 403277 - RNA, 24 nt, Human
gagaugggguuucuccacguuggu

SEQ ID NO: 403278 - RNA, 24 nt, Human
gaguagccaggauuacagccaugc

SEQ ID NO: 403279 - RNA, 18 nt, Human
gauuacaggugugagcca

SEQ ID NO: 403280 - RNA, 19 nt, Human
gauuacaggugugagccac

SEQ ID NO: 403281 - RNA, 22 nt, Human
gauuacaggugugagccacugc

SEQ ID NO: 403282 - RNA, 21 nt, Human
gcucaccgcaaccucugccuc

SEQ ID NO: 403283 - RNA, 20 nt, Human
gcucuuguuacccaggcugg

SEQ ID NO: 403284 - RNA, 21 nt, Human
gcucuuguuacccaggcugga

SEQ ID NO: 403285 - RNA, 24 nt, Human
gcucuuguuacccaggcuggagug

SEQ ID NO: 403286 - RNA, 24 nt, Human
gcuggagugcaauggcgcgaucug

SEQ ID NO: 403287 - RNA, 24 nt, Human
ggccuuagaugauccacccaccuu

SEQ ID NO: 403288 - RNA, 23 nt, Human
ggcuggucuugaacucccggccu

SEQ ID NO: 403289 - RNA, 22 nt, Human
gggguuucuccacguuggucag

SEQ ID NO: 403290 - RNA, 22 nt, Human
ggguuucuccacguuggucagg

SEQ ID NO: 403291 - RNA, 20 nt, Human
guggaaugcccccuacuccc

SEQ ID NO: 403292 - RNA, 22 nt, Human
uacagccaugcgcuaccacgcc

SEQ ID NO: 403293 - RNA, 22 nt, Human
uacaggugugagccacugcgcc

SEQ ID NO: 403294 - RNA, 23 nt, Human
uacaggugugagccacugcgccu

SEQ ID NO: 403295 - RNA, 21 nt, Human
uacccaggcuggagugcaaug

SEQ ID NO: 403296 - RNA, 24 nt, Human
uacccaggcuggagugcaauggcg

SEQ ID NO: 403297 - RNA, 18 nt, Human
uaguagagaugggguuuc

SEQ ID NO: 403298 - RNA, 19 nt, Human
uaguagagaugggguuucu

SEQ ID NO: 403299 - RNA, 24 nt, Human
uaguagagaugggguuucuccacg

SEQ ID NO: 403300 - RNA, 25 nt, Human
ucaauccugacccgaguagaucauc

SEQ ID NO: 403301 - RNA, 19 nt, Human
ucaccgcaaccucugccuc

SEQ ID NO: 403302 - RNA, 27 nt, Human
ucaccgcaaccucugccuccccaguuc

SEQ ID NO: 403303 - RNA, 24 nt, Human
uccacguuggucaggcuggucuug

SEQ ID NO: 403304 - RNA, 23 nt, Human
ucccaaaguguugggauuacagg

SEQ ID NO: 403305 - RNA, 24 nt, Human
uccccaguucaagcaauucuucug

SEQ ID NO: 403306 - RNA, 23 nt, Human
ucccuguggaaugcccccuacuc

SEQ ID NO: 403307 - RNA, 19 nt, Human
uccugaguagccaggauua

SEQ ID NO: 403308 - RNA, 24 nt, Human
ucuagagcuuuccuuggacuuccu

SEQ ID NO: 403309 - RNA, 18 nt, Human
ucuuguuacccaggcugg

SEQ ID NO: 403310 - RNA, 19 nt, Human
ucuuguuacccaggcugga

SEQ ID NO: 403311 - RNA, 24 nt, Human
ugauccacccaccuuggccuccca

SEQ ID NO: 403312 - RNA, 22 nt, Human
ugccucggccuccugaguagcc

SEQ ID NO: 403313 - RNA, 23 nt, Human
ugccucggccuccugaguagcca

SEQ ID NO: 403314 - RNA, 24 nt, Human
ugccucggccuccugaguagccag

SEQ ID NO: 403315 - RNA, 21 nt, Human
ugcucuuguuacccaggcugg

SEQ ID NO: 403316 - RNA, 24 nt, Human
ugcucuuguuacccaggcuggagu

SEQ ID NO: 403317 - RNA, 23 nt, Human
uggagugcaauggcgcgaucugg

SEQ ID NO: 403318 - RNA, 18 nt, Human
ugggauuacaggugugag

SEQ ID NO: 403319 - RNA, 19 nt, Human
ugggauuacaggugugagc

SEQ ID NO: 403320 - RNA, 21 nt, Human
ugggauuacaggugugagcca

SEQ ID NO: 403321 - RNA, 22 nt, Human
ugggauuacaggugugagccac

SEQ ID NO: 403322 - RNA, 22 nt, Human
ugggauuacaggugugagccac

SEQ ID NO: 403323 - RNA, 24 nt, Human
ugggauuacaggugugagccacug

SEQ ID NO: 403324 - RNA, 24 nt, Human
ugggguuucuccacguuggucagg

SEQ ID NO: 403325 - RNA, 23 nt, Human
uggucaggcuggucuugaacucc

SEQ ID NO: 403326 - RNA, 21 nt, Human
uguauuuuuaguagagauggg

SEQ ID NO: 403327 - RNA, 25 nt, Human
uguguacauaaucaaaagaaaggua

SEQ ID NO: 403328 - RNA, 25 nt, Human
ugugugaacauucaugagacauacc

SEQ ID NO: 403329 - RNA, 20 nt, Human
uguuacccaggcuggagugc

SEQ ID NO: 403330 - RNA, 18 nt, Human
uuacccaggcuggagugc

SEQ ID NO: 403331 - RNA, 18 nt, Human
uuaguagagaugggguuu

SEQ ID NO: 403332 - RNA, 24 nt, Human
uucaagcaauucuucugccucggc

SEQ ID NO: 403333 - RNA, 24 nt, Human
uuccuuggacuuccuucaaagcuc

SEQ ID NO: 403334 - RNA, 23 nt, Human
uugcucuuguuacccaggcugga

SEQ ID NO: 403335 - RNA, 21 nt, Human
uugggauuacaggugugagcc

SEQ ID NO: 403336 - RNA, 21 nt, Human
uuugauauacaugugaaacuc

SEQ ID NO: 403337 - RNA, 24 nt, Human
uuugcucuuguuacccaggcugga

SEQ ID NO: 403338 - RNA, 24 nt, Human
uuuugcucuuguuacccaggcugg

SEQ ID NO: 403339 - RNA, 19 nt, Human
uuuuguauuuuuaguagag

SEQ ID NO: 403340 - RNA, 20 nt, Human
uuuuguauuuuuaguagaga

SEQ ID NO: 403341 - RNA, 22 nt, Human
uuuuuaguagagaugggguuuc

SEQ ID NO: 403342 - RNA, 21 nt, Human
uuuuuuuuuuuggacagaguu

SEQ ID NO: 403343 - RNA, 18 nt, Human
uuuuuuuuuuuuuuuuug

SEQ ID NO: 403344 - RNA, 20 nt, Human
aaacaggaaaaaaaaaucca

SEQ ID NO: 403345 - RNA, 21 nt, Human
aaacaggaaaaaaaaauccaa

SEQ ID NO: 403346 - RNA, 22 nt, Human
aaagaaaagcaagacccagaaa

SEQ ID NO: 403347 - RNA, 24 nt, Human
aaauacauaucucaaaaauuuaug

SEQ ID NO: 403348 - RNA, 25 nt, Human
aacacagaaucauccagaaagauuc

SEQ ID NO: 403349 - RNA, 20 nt, Human
aacuauguuuggaggcuggg

SEQ ID NO: 403350 - RNA, 19 nt, Human
aagaaaagcaagacccaga

SEQ ID NO: 403351 - RNA, 21 nt, Human
aagaggaaauagaaaacagga

SEQ ID NO: 403352 - RNA, 27 nt, Human
aagcaaaaugguaaagaaaagggaccc

SEQ ID NO: 403353 - RNA, 24 nt, Human
aagggcgaacagcccuccaccuuu

SEQ ID NO: 403354 - RNA, 20 nt, Human
aauaaguuaucucacucucc

SEQ ID NO: 403355 - RNA, 20 nt, Human
acaacauauacuuaggccug

SEQ ID NO: 403356 - RNA, 24 nt, Human
acaagaaaaucucucuuaagucac

SEQ ID NO: 403357 - RNA, 25 nt, Human
acacacacacacaaacacacacaca

SEQ ID NO: 403358 - RNA, 26 nt, Human
acacacacacacacaaacacacacaa

SEQ ID NO: 403359 - RNA, 21 nt, Human
acacacacacacacacacaca

SEQ ID NO: 403360 - RNA, 24 nt, Human
acacagaaucauccagaaagauuc

SEQ ID NO: 403361 - RNA, 24 nt, Human
acagaaagaaaagcaagacccaga

SEQ ID NO: 403362 - RNA, 21 nt, Human
acagcgccauaagcauaacac

SEQ ID NO: 403363 - RNA, 21 nt, Human
acccagaaaugggaaaugacu

SEQ ID NO: 403364 - RNA, 19 nt, Human
accccacuccuucacuccu

SEQ ID NO: 403365 - RNA, 21 nt, Human
accuuggagaggccgcuuugg

SEQ ID NO: 403366 - RNA, 22 nt, Human
agaaaacaggaaaaaaaaaucc

SEQ ID NO: 403367 - RNA, 25 nt, Human
agacaaacacacacaacauauacuu

SEQ ID NO: 403368 - RNA, 20 nt, Human
agacggcucucuucaagucc

SEQ ID NO: 403369 - RNA, 21 nt, Human
agaggccgcuuuggcuuccag

SEQ ID NO: 403370 - RNA, 20 nt, Human
agauucauaaccccacuccu

SEQ ID NO: 403371 - RNA, 20 nt, Human
agcaggccaggugcacccaa

SEQ ID NO: 403372 - RNA, 22 nt, Human
aggcaauaugcaaacugcaauc

SEQ ID NO: 403373 - RNA, 21 nt, Human
aggcaggaggaugagcaugug

SEQ ID NO: 403374 - RNA, 20 nt, Human
agggcgaacagcccuccacc

SEQ ID NO: 403375 - RNA, 20 nt, Human
auaacacuguaagcauaaga

SEQ ID NO: 403376 - RNA, 23 nt, Human
auaaccccacuccuucacuccuu

SEQ ID NO: 403377 - RNA, 20 nt, Human
auagacauuuaauaugugca

SEQ ID NO: 403378 - RNA, 19 nt, Human
aucauccagaaagauucug

SEQ ID NO: 403379 - RNA, 18 nt, Human
augcccuguccaccccca

SEQ ID NO: 403380 - RNA, 23 nt, Human
augcccuguccacccccagcuug

SEQ ID NO: 403381 - RNA, 23 nt, Human
caaaaugguaaagaaaaaaagca

SEQ ID NO: 403382 - RNA, 22 nt, Human
cacacaaacacacacacaaucu

SEQ ID NO: 403383 - RNA, 21 nt, Human
cacacacaaacacacacacaa

SEQ ID NO: 403384 - RNA, 28 nt, Human
cacacacacacacacaaacacacacaca

SEQ ID NO: 403385 - RNA, 20 nt, Human
cacacacacacacacacaca

SEQ ID NO: 403386 - RNA, 19 nt, Human
cacugcacaucugugagaa

SEQ ID NO: 403387 - RNA, 22 nt, Human
caggaaagcacuaaauacaaaa

SEQ ID NO: 403388 - RNA, 20 nt, Human
caggaucugcuucuugucac

SEQ ID NO: 403389 - RNA, 20 nt, Human
cagggaaacaugugcuacaa

SEQ ID NO: 403390 - RNA, 18 nt, Human
cagggacugagacacaca

SEQ ID NO: 403391 - RNA, 19 nt, Human
cauauacuuaggccugcau

SEQ ID NO: 403392 - RNA, 21 nt, Human
caucacauccccagacaguuc

SEQ ID NO: 403393 - RNA, 24 nt, Human
ccaauagaaacaaugcaucuugaa

SEQ ID NO: 403394 - RNA, 25 nt, Human
ccagcuugguguucaugcuggugcc

SEQ ID NO: 403395 - RNA, 22 nt, Human
ccaggcuauuaaaauccguacu

SEQ ID NO: 403396 - RNA, 18 nt, Human
cccagacaguucuuugaa

SEQ ID NO: 403397 - RNA, 18 nt, Human
cccugaggggugggggcg

SEQ ID NO: 403398 - RNA, 18 nt, Human
cccuguauacaagaaaau

SEQ ID NO: 403399 - RNA, 21 nt, Human
ccugcccaguauacuuaagaa

SEQ ID NO: 403400 - RNA, 20 nt, Human
cuccuugcuccucuucauuu

SEQ ID NO: 403401 - RNA, 19 nt, Human
cugaggaagauguaagcuu

SEQ ID NO: 403402 - RNA, 24 nt, Human
cuggugccugguuuuagauauugc

SEQ ID NO: 403403 - RNA, 18 nt, Human
cuucacuccuugcuccuc

SEQ ID NO: 403404 - RNA, 18 nt, Human
cuugaagaagaggcaucu

SEQ ID NO: 403405 - RNA, 21 nt, Human
gaaaaaaaaauccaacugaga

SEQ ID NO: 403406 - RNA, 19 nt, Human
gaaaagcaagacccagaaa

SEQ ID NO: 403407 - RNA, 19 nt, Human
gaagguggagugaggcugg

SEQ ID NO: 403408 - RNA, 20 nt, Human
gaagguggagugaggcuggu

SEQ ID NO: 403409 - RNA, 19 nt, Human
gaaguguacacuccuugac

SEQ ID NO: 403410 - RNA, 21 nt, Human
gagcaccuaagagaggggacc

SEQ ID NO: 403411 - RNA, 22 nt, Human
gauucuucuuuugaacccccac

SEQ ID NO: 403412 - RNA, 18 nt, Human
gcagauucauaaccccac

SEQ ID NO: 403413 - RNA, 21 nt, Human
gcauaggcaggaggaugagca

SEQ ID NO: 403414 - RNA, 18 nt, Human
gcuugguguucaugcugg

SEQ ID NO: 403415 - RNA, 19 nt, Human
ggaccugcccaguauacuu

SEQ ID NO: 403416 - RNA, 19 nt, Human
gggcgggagggccaggauc

SEQ ID NO: 403417 - RNA, 21 nt, Human
ggggaccugcccaguauacuu

SEQ ID NO: 403418 - RNA, 18 nt, Human
ggggugggggcgggaggg

SEQ ID NO: 403419 - RNA, 23 nt, Human
ggugcacccaaagcgagugagca

SEQ ID NO: 403420 - RNA, 23 nt, Human
gugaagccagauaucauugaaua

SEQ ID NO: 403421 - RNA, 19 nt, Human
gugguauuucuuagacggc

SEQ ID NO: 403422 - RNA, 23 nt, Human
uaacacuguaagcauaagauucu

SEQ ID NO: 403423 - RNA, 25 nt, Human
uaacagaaagaaaagcaagacccag

SEQ ID NO: 403424 - RNA, 26 nt, Human
uaacagaaagaaaagcaagacccaga

SEQ ID NO: 403425 - RNA, 20 nt, Human
uacacacacacacacacaca

SEQ ID NO: 403426 - RNA, 19 nt, Human
uacuauuccauugaagccc

SEQ ID NO: 403427 - RNA, 19 nt, Human
uacuuaggccugcaugugc

SEQ ID NO: 403428 - RNA, 20 nt, Human
uaugacaauugccugaccaa

SEQ ID NO: 403429 - RNA, 22 nt, Human
uauggucuaugguauuucuaga

SEQ ID NO: 403430 - RNA, 21 nt, Human
uauuuuuucuuucucacaaag

SEQ ID NO: 403431 - RNA, 24 nt, Human
ucaaagacaaacacacacaacaua

SEQ ID NO: 403432 - RNA, 20 nt, Human
ucauuuaacagaaagaaaag

SEQ ID NO: 403433 - RNA, 21 nt, Human
uccagaaaaaaauacauucaa

SEQ ID NO: 403434 - RNA, 20 nt, Human
uccagcaaaugguagucagg

SEQ ID NO: 403435 - RNA, 23 nt, Human
uccagcaaaugguagucagguac

SEQ ID NO: 403436 - RNA, 19 nt, Human
ucccugaggggugggggcg

SEQ ID NO: 403437 - RNA, 20 nt, Human
ucccugaggggugggggcgg

SEQ ID NO: 403438 - RNA, 19 nt, Human
ucccugugugguugcagag

SEQ ID NO: 403439 - RNA, 19 nt, Human
ucugcuucuugucacaucc

SEQ ID NO: 403440 - RNA, 19 nt, Human
ucuuaaauauuaccuauag

SEQ ID NO: 403441 - RNA, 23 nt, Human
ucuuggggugugacggcuccacc

SEQ ID NO: 403442 - RNA, 20 nt, Human
ugaaauacacacacacacac

SEQ ID NO: 403443 - RNA, 27 nt, Human
ugaaggacucacaaagauggcugagga

SEQ ID NO: 403444 - RNA, 23 nt, Human
ugacuuucccaagguuacauggc

SEQ ID NO: 403445 - RNA, 19 nt, Human
ugaggggugggggcgggag

SEQ ID NO: 403446 - RNA, 22 nt, Human
ugaggggugggggcgggagggc

SEQ ID NO: 403447 - RNA, 19 nt, Human
ugccugaccaauagaaaca

SEQ ID NO: 403448 - RNA, 18 nt, Human
ugcuucuugucacauccc

SEQ ID NO: 403449 - RNA, 20 nt, Human
uggaaggaagguggagugag

SEQ ID NO: 403450 - RNA, 24 nt, Human
uggaaggaagguggagugaggcug

SEQ ID NO: 403451 - RNA, 25 nt, Human
uggaaggaagguggagugaggcugg

SEQ ID NO: 403452 - RNA, 20 nt, Human
uggcugaggaagauguaagc

SEQ ID NO: 403453 - RNA, 19 nt, Human
uggggugugacggcuaggc

SEQ ID NO: 403454 - RNA, 19 nt, Human
ugugugguugcagaggcca

SEQ ID NO: 403455 - RNA, 23 nt, Human
uguuagauauuuaacauuccucu

SEQ ID NO: 403456 - RNA, 21 nt, Human
uucacaaucuggguagaggga

SEQ ID NO: 403457 - RNA, 22 nt, Human
uugaaaaugucagggaaacaug

SEQ ID NO: 403458 - RNA, 20 nt, Human
uugaagaagaggcaucuauu

SEQ ID NO: 403459 - RNA, 21 nt, Human
uugaaggacucacaaagaugg

SEQ ID NO: 403460 - RNA, 22 nt, Human
uuucccacaaaacucugccaug

SEQ ID NO: 403461 - RNA, 22 nt, Human
uuuggcagauucauaaccccac

SEQ ID NO: 403462 - RNA, 19 nt, Human
aaagagaaugaauaacugu

SEQ ID NO: 403463 - RNA, 24 nt, Human
aaauacagucauuucguaaugagg

SEQ ID NO: 403464 - RNA, 22 nt, Human
aacagggggugggcuuaaccgc

SEQ ID NO: 403465 - RNA, 18 nt, Human
agagacugggggagggaa

SEQ ID NO: 403466 - RNA, 25 nt, Human
agagauagggacaggguggaaagaa

SEQ ID NO: 403467 - RNA, 23 nt, Human
agagauugaaagagaaugaauaa

SEQ ID NO: 403468 - RNA, 18 nt, Human
aggaacccagagucaacc

SEQ ID NO: 403469 - RNA, 21 nt, Human
agggacaggguggaaagaaga

SEQ ID NO: 403470 - RNA, 23 nt, Human
aguuaucugcuguuuacucagaa

SEQ ID NO: 403471 - RNA, 20 nt, Human
auccauggaaagacacugca

SEQ ID NO: 403472 - RNA, 23 nt, Human
auggagcagggcccguuuugguu

SEQ ID NO: 403473 - RNA, 20 nt, Human
cacugcacgcaaagaaacaa

SEQ ID NO: 403474 - RNA, 22 nt, Human
cacugcacgcaaagaaacaaaa

SEQ ID NO: 403475 - RNA, 27 nt, Human
cagcuccaccacagccugcaaggugac

SEQ ID NO: 403476 - RNA, 20 nt, Human
cagggcccguuuugguuuca

SEQ ID NO: 403477 - RNA, 20 nt, Human
ccccauuucccuucugcauc

SEQ ID NO: 403478 - RNA, 22 nt, Human
ccuccaacaaggccauaggaac

SEQ ID NO: 403479 - RNA, 24 nt, Human
cuccccauuucccuucugcaucuu

SEQ ID NO: 403480 - RNA, 19 nt, Human
cugcacgcaaagaaacaaa

SEQ ID NO: 403481 - RNA, 24 nt, Human
cuggaugucugcaucagugggguu

SEQ ID NO: 403482 - RNA, 18 nt, Human
cuggcccccuccaacaag

SEQ ID NO: 403483 - RNA, 19 nt, Human
cuggcccccuccaacaagg

SEQ ID NO: 403484 - RNA, 24 nt, Human
cuggcccccuccaacaaggccaua

SEQ ID NO: 403485 - RNA, 20 nt, Human
gacaaagggaaacagagaga

SEQ ID NO: 403486 - RNA, 20 nt, Human
gaggagugggcaggcucagg

SEQ ID NO: 403487 - RNA, 20 nt, Human
gagggaagagacugacaaag

SEQ ID NO: 403488 - RNA, 22 nt, Human
ggacaggguggaaagaagagaa

SEQ ID NO: 403489 - RNA, 24 nt, Human
gggaaacagagagauugagaaaga

SEQ ID NO: 403490 - RNA, 24 nt, Human
gggagggaagagacugacaaaggg

SEQ ID NO: 403491 - RNA, 24 nt, Human
ggggagggaagagacugacaaagg

SEQ ID NO: 403492 - RNA, 25 nt, Human
ggguggcgggggggggggggggggu

SEQ ID NO: 403493 - RNA, 20 nt, Human
gugagcugaggcuccccauu

SEQ ID NO: 403494 - RNA, 23 nt, Human
guggcgggggggggggggggggu

SEQ ID NO: 403495 - RNA, 21 nt, Human
gugugugugugugugugugug

SEQ ID NO: 403496 - RNA, 21 nt, Human
gugugugugugugugugugug

SEQ ID NO: 403497 - RNA, 21 nt, Human
gugugugugugugugugugug

SEQ ID NO: 403498 - RNA, 21 nt, Human
gugugugugugugugugugug

SEQ ID NO: 403499 - RNA, 21 nt, Human
gugugugugugugugugugug

SEQ ID NO: 403500 - RNA, 21 nt, Human
gugugugugugugugugugug

SEQ ID NO: 403501 - RNA, 21 nt, Human
gugugugugugugugugugug

SEQ ID NO: 403502 - RNA, 21 nt, Human
gugugugugugugugugugug

SEQ ID NO: 403503 - RNA, 19 nt, Human
uaacaagauaauuacaagu

SEQ ID NO: 403504 - RNA, 19 nt, Human
uaagcucuuauggagcagg

SEQ ID NO: 403505 - RNA, 18 nt, Human
uaggaacccagagucaac

SEQ ID NO: 403506 - RNA, 20 nt, Human
uaggacucucuggaugucug

SEQ ID NO: 403507 - RNA, 21 nt, Human
uaggcaguuaacagggggugg

SEQ ID NO: 403508 - RNA, 21 nt, Human
uauagugguagagauagggac

SEQ ID NO: 403509 - RNA, 21 nt, Human
ucagcuccaccacagccugca

SEQ ID NO: 403510 - RNA, 23 nt, Human
ucagugggguugcugcuucagau

SEQ ID NO: 403511 - RNA, 21 nt, Human
uccaccacagccugcaaggug

SEQ ID NO: 403512 - RNA, 19 nt, Human
uccgagaggguggcggggg

SEQ ID NO: 403513 - RNA, 20 nt, Human
ucuauagugguagagauagg

SEQ ID NO: 403514 - RNA, 21 nt, Human
ucuggaaacaauggagacugc

SEQ ID NO: 403515 - RNA, 24 nt, Human
ucugugugugugugugugugugug

SEQ ID NO: 403516 - RNA, 26 nt, Human
ugacucugugugugugugugugugug

SEQ ID NO: 403517 - RNA, 21 nt, Human
ugagaagagagacugggggag

SEQ ID NO: 403518 - RNA, 19 nt, Human
uggaaacaauggagacugc

SEQ ID NO: 403519 - RNA, 23 nt, Human
uggaaagacacugcacgcaaaga

SEQ ID NO: 403520 - RNA, 24 nt, Human
uggaugucugcaucagugggguug

SEQ ID NO: 403521 - RNA, 18 nt, Human
ugugugugugugugugug

SEQ ID NO: 403522 - RNA, 18 nt, Human
ugugugugugugugugug

SEQ ID NO: 403523 - RNA, 18 nt, Human
ugugugugugugugugug

SEQ ID NO: 403524 - RNA, 18 nt, Human
ugugugugugugugugug

SEQ ID NO: 403525 - RNA, 18 nt, Human
ugugugugugugugugug

SEQ ID NO: 403526 - RNA, 18 nt, Human
ugugugugugugugugug

SEQ ID NO: 403527 - RNA, 18 nt, Human
ugugugugugugugugug

SEQ ID NO: 403528 - RNA, 18 nt, Human
ugugugugugugugugug

SEQ ID NO: 403529 - RNA, 18 nt, Human
ugugugugugugugugug

SEQ ID NO: 403530 - RNA, 18 nt, Human
ugugugugugugugugug

SEQ ID NO: 403531 - RNA, 18 nt, Human
ugugugugugugugugug

SEQ ID NO: 403532 - RNA, 18 nt, Human
ugugugugugugugugug

SEQ ID NO: 403533 - RNA, 18 nt, Human
ugugugugugugugugug

SEQ ID NO: 403534 - RNA, 18 nt, Human
ugugugugugugugugug

SEQ ID NO: 403535 - RNA, 18 nt, Human
ugugugugugugugugug

SEQ ID NO: 403536 - RNA, 18 nt, Human
ugugugugugugugugug

SEQ ID NO: 403537 - RNA, 18 nt, Human
ugugugugugugugugug

SEQ ID NO: 403538 - RNA, 18 nt, Human
ugugugugugugugugug

SEQ ID NO: 403539 - RNA, 18 nt, Human
ugugugugugugugugug

SEQ ID NO: 403540 - RNA, 18 nt, Human
ugugugugugugugugug

SEQ ID NO: 403541 - RNA, 18 nt, Human
ugugugugugugugugug

SEQ ID NO: 403542 - RNA, 18 nt, Human
ugugugugugugugugug

SEQ ID NO: 403543 - RNA, 18 nt, Human
ugugugugugugugugug

SEQ ID NO: 403544 - RNA, 18 nt, Human
ugugugugugugugugug

SEQ ID NO: 403545 - RNA, 21 nt, Human
ugugugugugugugugugugu

SEQ ID NO: 403546 - RNA, 21 nt, Human
ugugugugugugugugugugu

SEQ ID NO: 403547 - RNA, 21 nt, Human
ugugugugugugugugugugu

SEQ ID NO: 403548 - RNA, 21 nt, Human
ugugugugugugugugugugu

SEQ ID NO: 403549 - RNA, 21 nt, Human
ugugugugugugugugugugu

SEQ ID NO: 403550 - RNA, 21 nt, Human
ugugugugugugugugugugu

SEQ ID NO: 403551 - RNA, 21 nt, Human
ugugugugugugugugugugu

SEQ ID NO: 403552 - RNA, 21 nt, Human
ugugugugugugugugugugu

SEQ ID NO: 403553 - RNA, 21 nt, Human
ugugugugugugugugugugu

SEQ ID NO: 403554 - RNA, 21 nt, Human
ugugugugugugugugugugu

SEQ ID NO: 403555 - RNA, 21 nt, Human
ugugugugugugugugugugu

SEQ ID NO: 403556 - RNA, 21 nt, Human
ugugugugugugugugugugu

SEQ ID NO: 403557 - RNA, 21 nt, Human
ugugugugugugugugugugu

SEQ ID NO: 403558 - RNA, 21 nt, Human
ugugugugugugugugugugu

SEQ ID NO: 403559 - RNA, 21 nt, Human
ugugugugugugugugugugu

SEQ ID NO: 403560 - RNA, 21 nt, Human
ugugugugugugugugugugu

SEQ ID NO: 403561 - RNA, 21 nt, Human
ugugugugugugugugugugu

SEQ ID NO: 403562 - RNA, 21 nt, Human
ugugugugugugugugugugu

SEQ ID NO: 403563 - RNA, 21 nt, Human
ugugugugugugugugugugu

SEQ ID NO: 403564 - RNA, 21 nt, Human
ugugugugugugugugugugu

SEQ ID NO: 403565 - RNA, 21 nt, Human
ugugugugugugugugugugu

SEQ ID NO: 403566 - RNA, 21 nt, Human
ugugugugugugugugugugu

SEQ ID NO: 403567 - RNA, 21 nt, Human
ugugugugugugugugugugu

SEQ ID NO: 403568 - RNA, 21 nt, Human
ugugugugugugugugugugu

SEQ ID NO: 403569 - RNA, 21 nt, Human
ugugugugugugugugugugu

SEQ ID NO: 403570 - RNA, 21 nt, Human
ugugugugugugugugugugu

SEQ ID NO: 403571 - RNA, 21 nt, Human
ugugugugugugugugugugu

SEQ ID NO: 403572 - RNA, 21 nt, Human
ugugugugugugugugugugu

SEQ ID NO: 403573 - RNA, 21 nt, Human
ugugugugugugugugugugu

SEQ ID NO: 403574 - RNA, 21 nt, Human
ugugugugugugugugugugu

SEQ ID NO: 403575 - RNA, 21 nt, Human
ugugugugugugugugugugu

SEQ ID NO: 403576 - RNA, 21 nt, Human
ugugugugugugugugugugu

SEQ ID NO: 403577 - RNA, 21 nt, Human
ugugugugugugugugugugu

SEQ ID NO: 403578 - RNA, 21 nt, Human
ugugugugugugugugugugu

SEQ ID NO: 403579 - RNA, 21 nt, Human
ugugugugugugugugugugu

SEQ ID NO: 403580 - RNA, 21 nt, Human
ugugugugugugugugugugu

SEQ ID NO: 403581 - RNA, 21 nt, Human
ugugugugugugugugugugu

SEQ ID NO: 403582 - RNA, 21 nt, Human
ugugugugugugugugugugu

SEQ ID NO: 403583 - RNA, 21 nt, Human
ugugugugugugugugugugu

SEQ ID NO: 403584 - RNA, 21 nt, Human
ugugugugugugugugugugu

SEQ ID NO: 403585 - RNA, 21 nt, Human
ugugugugugugugugugugu

SEQ ID NO: 403586 - RNA, 21 nt, Human
ugugugugugugugugugugu

SEQ ID NO: 403587 - RNA, 21 nt, Human
ugugugugugugugugugugu

SEQ ID NO: 403588 - RNA, 21 nt, Human
ugugugugugugugugugugu

SEQ ID NO: 403589 - RNA, 21 nt, Human
ugugugugugugugugugugu

SEQ ID NO: 403590 - RNA, 22 nt, Human
ugugugugugugugugugugug

SEQ ID NO: 403591 - RNA, 22 nt, Human
ugugugugugugugugugugug

SEQ ID NO: 403592 - RNA, 22 nt, Human
ugugugugugugugugugugug

SEQ ID NO: 403593 - RNA, 22 nt, Human
ugugugugugugugugugugug

SEQ ID NO: 403594 - RNA, 22 nt, Human
ugugugugugugugugugugug

SEQ ID NO: 403595 - RNA, 22 nt, Human
ugugugugugugugugugugug

SEQ ID NO: 403596 - RNA, 22 nt, Human
ugugugugugugugugugugug

SEQ ID NO: 403597 - RNA, 22 nt, Human
ugugugugugugugugugugug

SEQ ID NO: 403598 - RNA, 22 nt, Human
ugugugugugugugugugugug

SEQ ID NO: 403599 - RNA, 22 nt, Human
ugugugugugugugugugugug

SEQ ID NO: 403600 - RNA, 22 nt, Human
ugugugugugugugugugugug

SEQ ID NO: 403601 - RNA, 22 nt, Human
ugugugugugugugugugugug

SEQ ID NO: 403602 - RNA, 22 nt, Human
ugugugugugugugugugugug

SEQ ID NO: 403603 - RNA, 20 nt, Human
uguguguguguguguguuag

SEQ ID NO: 403604 - RNA, 18 nt, Human
uguguuagaaagggggau

SEQ ID NO: 403605 - RNA, 19 nt, Human
uuaaauacagucauuucgu

SEQ ID NO: 403606 - RNA, 22 nt, Human
aaaugcaacccauauuuuccua

SEQ ID NO: 403607 - RNA, 19 nt, Human
aagcauucaaaaucuugac

SEQ ID NO: 403608 - RNA, 18 nt, Human
aauugcacuggaaauaca

SEQ ID NO: 403609 - RNA, 23 nt, Human
acacacacacacacacacacaca

SEQ ID NO: 403610 - RNA, 23 nt, Human
acacacacacacacacacacaca

SEQ ID NO: 403611 - RNA, 29 nt, Human
acacacacacacacacacacacaccccua

SEQ ID NO: 403612 - RNA, 23 nt, Human
accuugagaggugaguuaaaagg

SEQ ID NO: 403613 - RNA, 20 nt, Human
agaaucccaaagugcuucuc

SEQ ID NO: 403614 - RNA, 21 nt, Human
agcuacagacauuuugaaccc

SEQ ID NO: 403615 - RNA, 23 nt, Human
auacacacacacacacacacaca

SEQ ID NO: 403616 - RNA, 21 nt, Human
auuauauuauaggaaaacauc

SEQ ID NO: 403617 - RNA, 23 nt, Human
caaaugcaacccauauuuuccua

SEQ ID NO: 403618 - RNA, 21 nt, Human
caaucaaugauuuuuaagcac

SEQ ID NO: 403619 - RNA, 20 nt, Human
cacacacacacacacacaca

SEQ ID NO: 403620 - RNA, 20 nt, Human
cacacacacacacacacaca

SEQ ID NO: 403621 - RNA, 20 nt, Human
cacacacacacacacacaca

SEQ ID NO: 403622 - RNA, 20 nt, Human
cacacacacacacacacaca

SEQ ID NO: 403623 - RNA, 20 nt, Human
cacacacacacacacacaca

SEQ ID NO: 403624 - RNA, 20 nt, Human
cacacacacacacacacaca

SEQ ID NO: 403625 - RNA, 22 nt, Human
cacacacacacacacacacaca

SEQ ID NO: 403626 - RNA, 22 nt, Human
cacacacacacacacacacaca

SEQ ID NO: 403627 - RNA, 22 nt, Human
cacacacacacacacacacaca

SEQ ID NO: 403628 - RNA, 26 nt, Human
cacacacacacacacacacacacaca

SEQ ID NO: 403629 - RNA, 26 nt, Human
cacacacacacacacacacacacaca

SEQ ID NO: 403630 - RNA, 26 nt, Human
cacacacacacacacacacacacaca

SEQ ID NO: 403631 - RNA, 22 nt, Human
cacacacacacacacacacccu

SEQ ID NO: 403632 - RNA, 21 nt, Human
cacaccccuacaauugcacug

SEQ ID NO: 403633 - RNA, 21 nt, Human
cauuggccucuuucagccucu

SEQ ID NO: 403634 - RNA, 24 nt, Human
ccagcaaacgguuuuacuucuucu

SEQ ID NO: 403635 - RNA, 18 nt, Human
ccaguggggcauuggccu

SEQ ID NO: 403636 - RNA, 19 nt, Human
cuacagacauuuugaaccc

SEQ ID NO: 403637 - RNA, 30 nt, Human
cucuuuagucauacacacacacacacagug

SEQ ID NO: 403638 - RNA, 20 nt, Human
cugaaagacagucccccuug

SEQ ID NO: 403639 - RNA, 18 nt, Human
cugcucaagaggaggcaa

SEQ ID NO: 403640 - RNA, 18 nt, Human
gaagaugcugccaguggg

SEQ ID NO: 403641 - RNA, 21 nt, Human
gaagugaagaugcugccagug

SEQ ID NO: 403642 - RNA, 24 nt, Human
gaugcugccaguggggcauuggcc

SEQ ID NO: 403643 - RNA, 18 nt, Human
gcaagccucuagucuucc

SEQ ID NO: 403644 - RNA, 22 nt, Human
gcucaagaggaggcaagcugga

SEQ ID NO: 403645 - RNA, 25 nt, Human
gucauacacacacacacacacacag

SEQ ID NO: 403646 - RNA, 18 nt, Human
guuaguuucaccgauggc

SEQ ID NO: 403647 - RNA, 27 nt, Human
uaagaagacccucacugaauacaacag

SEQ ID NO: 403648 - RNA, 22 nt, Human
uaagaugaguguagaacaccug

SEQ ID NO: 403649 - RNA, 25 nt, Human
uaauauguacuucacaauaucuaca

SEQ ID NO: 403650 - RNA, 20 nt, Human
uacacacacacacacacaca

SEQ ID NO: 403651 - RNA, 25 nt, Human
uacacacacacacacacacacacac

SEQ ID NO: 403652 - RNA, 23 nt, Human
uaucugaaagacagucccccuug

SEQ ID NO: 403653 - RNA, 24 nt, Human
uccauagcuaagggaaaccggggc

SEQ ID NO: 403654 - RNA, 21 nt, Human
uccaucccuuaaauccucagg

SEQ ID NO: 403655 - RNA, 21 nt, Human
uccccaaaacaucucucuugc

SEQ ID NO: 403656 - RNA, 18 nt, Human
uccucaggucacaaccau

SEQ ID NO: 403657 - RNA, 20 nt, Human
ucucaggcacuaagaugagu

SEQ ID NO: 403658 - RNA, 25 nt, Human
ucuuauagaguuuccauagcuaagg

SEQ ID NO: 403659 - RNA, 22 nt, Human
ucuugcuuaucuguuaguuuca

SEQ ID NO: 403660 - RNA, 21 nt, Human
ugccuaaauacucucaggcac

SEQ ID NO: 403661 - RNA, 19 nt, Human
uggaaagaaucccaaagug

SEQ ID NO: 403662 - RNA, 20 nt, Human
ugucaaggacgggacccugu

SEQ ID NO: 403663 - RNA, 18 nt, Human
uguguuaggaaugaaaug

SEQ ID NO: 403664 - RNA, 20 nt, Human
uguguuaggaaugaaaugag

SEQ ID NO: 403665 - RNA, 19 nt, Human
uucaaucugccuaaauacu

SEQ ID NO: 403666 - RNA, 22 nt, Human
uucaugcuucucccucuucaca

SEQ ID NO: 403667 - RNA, 20 nt, Human
uucucaguccuguagaggcu

SEQ ID NO: 403668 - RNA, 18 nt, Human
uugagguagcaaggccca

SEQ ID NO: 403669 - RNA, 31 nt, Human
uuuagucauacacacacacacacacacacag

SEQ ID NO: 403670 - RNA, 18 nt, Human
uuuuuuuuuuuuuuuuug

SEQ ID NO: 403671 - RNA, 19 nt, Human
uuuuuuuuuuuuuuuuugu

SEQ ID NO: 403672 - RNA, 18 nt, Human
aaaaaacccuaaucagca

SEQ ID NO: 403673 - RNA, 19 nt, Human
aagaaaaagcucaaugccu

SEQ ID NO: 403674 - RNA, 18 nt, Human
accacacucccaccccaa

SEQ ID NO: 403675 - RNA, 22 nt, Human
acuaccccccaccacacuccca

SEQ ID NO: 403676 - RNA, 21 nt, Human
acucccaccccaaccccgggu

SEQ ID NO: 403677 - RNA, 18 nt, Human
agcgcaggaggggcgaug

SEQ ID NO: 403678 - RNA, 19 nt, Human
cacacucccaccccaaccc

SEQ ID NO: 403679 - RNA, 20 nt, Human
caccacacucccaccccaac

SEQ ID NO: 403680 - RNA, 22 nt, Human
caccacacucccaccccaaccc

SEQ ID NO: 403681 - RNA, 21 nt, Human
caccccaaccccggguggccc

SEQ ID NO: 403682 - RNA, 24 nt, Human
cacuaccccccaccacacucccac

SEQ ID NO: 403683 - RNA, 21 nt, Human
cacucccaccccaaccccggg

SEQ ID NO: 403684 - RNA, 23 nt, Human
cacucccaccccaaccccgggug

SEQ ID NO: 403685 - RNA, 20 nt, Human
caggaggggcgaugggggcg

SEQ ID NO: 403686 - RNA, 19 nt, Human
ccaccacacucccacccca

SEQ ID NO: 403687 - RNA, 26 nt, Human
ccacuaccccccaccacacucccacc

SEQ ID NO: 403688 - RNA, 21 nt, Human
cccaccacacucccaccccaa

SEQ ID NO: 403689 - RNA, 22 nt, Human
cccaccacacucccaccccaac

SEQ ID NO: 403690 - RNA, 21 nt, Human
cccaccccaaccccggguggc

SEQ ID NO: 403691 - RNA, 19 nt, Human
ccccaaccccggguggccc

SEQ ID NO: 403692 - RNA, 20 nt, Human
ccccaccacacucccacccc

SEQ ID NO: 403693 - RNA, 21 nt, Human
ccccaccacacucccacccca

SEQ ID NO: 403694 - RNA, 23 nt, Human
ccccaccacacucccaccccaac

SEQ ID NO: 403695 - RNA, 26 nt, Human
cccccaccacacucccaccccaaccc

SEQ ID NO: 403696 - RNA, 23 nt, Human
cuaccccccaccacacucccacc

SEQ ID NO: 403697 - RNA, 21 nt, Human
cucccaccccaaccccgggug

SEQ ID NO: 403698 - RNA, 19 nt, Human
gaaaaagcucaaugccuuc

SEQ ID NO: 403699 - RNA, 21 nt, Human
gccaccacuaccccccaccac

SEQ ID NO: 403700 - RNA, 24 nt, Human
ggcgcggagcgcugccgagaagga

SEQ ID NO: 403701 - RNA, 19 nt, Human
gggcgaugggggcgcggag

SEQ ID NO: 403702 - RNA, 21 nt, Human
uaccccccaccacacucccac

SEQ ID NO: 403703 - RNA, 22 nt, Human
uaccccccaccacacucccacc

SEQ ID NO: 403704 - RNA, 18 nt, Human
ucccggggcuccugggcg

SEQ ID NO: 403705 - RNA, 18 nt, Human
ucucuuguccugccacca

SEQ ID NO: 403706 - RNA, 19 nt, Human
ugaaagaaaaagcucaaug

SEQ ID NO: 403707 - RNA, 26 nt, Human
ugaaagaaaaagcucaaugccuucuc

SEQ ID NO: 403708 - RNA, 27 nt, Human
ugaaagaaaaagcucaaugccuucucu

SEQ ID NO: 403709 - RNA, 23 nt, Human
uguccugccaccacuacccccca

SEQ ID NO: 403710 - RNA, 25 nt, Human
uuguccugccaccacuaccccccac

SEQ ID NO: 403711 - RNA, 21 nt, Human
aaacacucacacccagcuccc

SEQ ID NO: 403712 - RNA, 21 nt, Human
aaacagaagaaauagaucaag

SEQ ID NO: 403713 - RNA, 24 nt, Human
aaacucucuuuuuaacccuggagc

SEQ ID NO: 403714 - RNA, 19 nt, Human
aaguguaucugccaguaua

SEQ ID NO: 403715 - RNA, 20 nt, Human
agaagaaauagaucaagacc

SEQ ID NO: 403716 - RNA, 20 nt, Human
agggguggggucauauggag

SEQ ID NO: 403717 - RNA, 18 nt, Human
aguguaaacacucacacc

SEQ ID NO: 403718 - RNA, 20 nt, Human
aguucugggcccaucucugu

SEQ ID NO: 403719 - RNA, 25 nt, Human
auacagugaauuagugguugggcug

SEQ ID NO: 403720 - RNA, 18 nt, Human
aucucucuucaucugauu

SEQ ID NO: 403721 - RNA, 18 nt, Human
auggguuucugguucuau

SEQ ID NO: 403722 - RNA, 23 nt, Human
caccucuggccagagacaagaac

SEQ ID NO: 403723 - RNA, 19 nt, Human
cacuacauugcuucccugc

SEQ ID NO: 403724 - RNA, 21 nt, Human
cacuacauugcuucccugccu

SEQ ID NO: 403725 - RNA, 24 nt, Human
cacuacauugcuucccugccugcu

SEQ ID NO: 403726 - RNA, 24 nt, Human
cagaagaaauagaucaagaccaua

SEQ ID NO: 403727 - RNA, 18 nt, Human
cagacagaccauucaggc

SEQ ID NO: 403728 - RNA, 19 nt, Human
cagccuccuagugccagag

SEQ ID NO: 403729 - RNA, 23 nt, Human
cagccuccuagugccagagugac

SEQ ID NO: 403730 - RNA, 21 nt, Human
cagggggcuguccgagccugg

SEQ ID NO: 403731 - RNA, 21 nt, Human
cauuugccagugaauugagag

SEQ ID NO: 403732 - RNA, 21 nt, Human
ccacacuacauugcuucccug

SEQ ID NO: 403733 - RNA, 23 nt, Human
ccccugaauccugaaucauguga

SEQ ID NO: 403734 - RNA, 20 nt, Human
cccuggggguuccuaggggu

SEQ ID NO: 403735 - RNA, 23 nt, Human
cccuggggguuccuagggguggg

SEQ ID NO: 403736 - RNA, 18 nt, Human
cccuugauauggguuucu

SEQ ID NO: 403737 - RNA, 18 nt, Human
ccugccugcuaucugaaa

SEQ ID NO: 403738 - RNA, 23 nt, Human
ccuucauuucccauuagggcaga

SEQ ID NO: 403739 - RNA, 18 nt, Human
ccuuggcaaccauuuugu

SEQ ID NO: 403740 - RNA, 23 nt, Human
cucaaaacagaagaaauagauca

SEQ ID NO: 403741 - RNA, 26 nt, Human
cucaaaacagaagaaauagaucaaga

SEQ ID NO: 403742 - RNA, 20 nt, Human
cucaggaacagggggcuguc

SEQ ID NO: 403743 - RNA, 22 nt, Human
cuugcugucucugucugacuuc

SEQ ID NO: 403744 - RNA, 22 nt, Human
cuuuccaucucaggaacagggg

SEQ ID NO: 403745 - RNA, 22 nt, Human
gagaaggaggacugcccuucag

SEQ ID NO: 403746 - RNA, 24 nt, Human
gagcuguaucuuuccaagagacag

SEQ ID NO: 403747 - RNA, 22 nt, Human
gcauaaacugggcaugguucag

SEQ ID NO: 403748 - RNA, 20 nt, Human
gcccaucucuguuccaagaa

SEQ ID NO: 403749 - RNA, 19 nt, Human
guugccuuggcaaccauuu

SEQ ID NO: 403750 - RNA, 23 nt, Human
uacguuguuaacugucuugcugu

SEQ ID NO: 403751 - RNA, 18 nt, Human
uauaccacaccucuggcc

SEQ ID NO: 403752 - RNA, 19 nt, Human
uaucugaaagauacuucac

SEQ ID NO: 403753 - RNA, 18 nt, Human
ucacaaguguaucugcca

SEQ ID NO: 403754 - RNA, 21 nt, Human
ucagacaggcauaaacugggc

SEQ ID NO: 403755 - RNA, 24 nt, Human
ucagacaggcauaaacugggcaug

SEQ ID NO: 403756 - RNA, 21 nt, Human
ucccuggggguuccuaggggu

SEQ ID NO: 403757 - RNA, 19 nt, Human
uccugugugagagaguccu

SEQ ID NO: 403758 - RNA, 21 nt, Human
ucuaaaguuuucuuuuugccc

SEQ ID NO: 403759 - RNA, 25 nt, Human
ucuauaccacaccucuggccagaga

SEQ ID NO: 403760 - RNA, 25 nt, Human
ucugcagauaaaagaaguaucccgu

SEQ ID NO: 403761 - RNA, 20 nt, Human
ucuuauaauuuuauguugcc

SEQ ID NO: 403762 - RNA, 19 nt, Human
ugaagggcacaguguaaac

SEQ ID NO: 403763 - RNA, 20 nt, Human
ugcucugguacugaagcccc

SEQ ID NO: 403764 - RNA, 20 nt, Human
uggccagagacaagaacuua

SEQ ID NO: 403765 - RNA, 19 nt, Human
ugggacauccauucauccc

SEQ ID NO: 403766 - RNA, 23 nt, Human
uggugguguauuaaauuugugcu

SEQ ID NO: 403767 - RNA, 19 nt, Human
uguaaacacucacacccag

SEQ ID NO: 403768 - RNA, 21 nt, Human
ugucuuggucuaaaguuuucu

SEQ ID NO: 403769 - RNA, 22 nt, Human
uguugccuuggcaaccauuuug

SEQ ID NO: 403770 - RNA, 23 nt, Human
uuauauagucuuccccacaucac

SEQ ID NO: 403771 - RNA, 20 nt, Human
uuccuagggguggggucaua

SEQ ID NO: 403772 - RNA, 22 nt, Human
uucuauaccacaccucuggcca

SEQ ID NO: 403773 - RNA, 20 nt, Human
uucugggcccaucucuguuc

SEQ ID NO: 403774 - RNA, 20 nt, Human
uugcuuccuucagacagacc

SEQ ID NO: 403775 - RNA, 25 nt, Human
uuuccugugugagagaguccuugau

SEQ ID NO: 403776 - RNA, 24 nt, Human
uuucugguucuauaccacaccuua

SEQ ID NO: 403777 - RNA, 18 nt, Human
aaaaaagcuagcccccaa

SEQ ID NO: 403778 - RNA, 24 nt, Human
aaaaagcuagcccccaaguaucac

SEQ ID NO: 403779 - RNA, 23 nt, Human
aaacaacuccucuaaaaaagucc

SEQ ID NO: 403780 - RNA, 23 nt, Human
aaagaaagaaagaaaaaagcuag

SEQ ID NO: 403781 - RNA, 19 nt, Human
aaaguccauucacaaacuc

SEQ ID NO: 403782 - RNA, 20 nt, Human
aagaaaaaagcuagccccca

SEQ ID NO: 403783 - RNA, 19 nt, Human
aagcagcagggacccagca

SEQ ID NO: 403784 - RNA, 24 nt, Human
aaggaugaaucccaguugcuuggg

SEQ ID NO: 403785 - RNA, 24 nt, Human
acccagcaccaggggucuccauga

SEQ ID NO: 403786 - RNA, 18 nt, Human
accgcugcauucuagccu

SEQ ID NO: 403787 - RNA, 20 nt, Human
agaaaaaagcuagcccccaa

SEQ ID NO: 403788 - RNA, 21 nt, Human
agaaagcagcagggacccagc

SEQ ID NO: 403789 - RNA, 23 nt, Human
agaaagcagcagggacccagcac

SEQ ID NO: 403790 - RNA, 18 nt, Human
agaaaggaugaaucccag

SEQ ID NO: 403791 - RNA, 22 nt, Human
agaacaagaccaucucaaaaaa

SEQ ID NO: 403792 - RNA, 18 nt, Human
agaugggaggaucaccug

SEQ ID NO: 403793 - RNA, 21 nt, Human
aggaguucaagaccagccucg

SEQ ID NO: 403794 - RNA, 23 nt, Human
aggaguucaagaccagccucggc

SEQ ID NO: 403795 - RNA, 24 nt, Human
aggaucgucuaaguccaggaguuc

SEQ ID NO: 403796 - RNA, 19 nt, Human
aggcaggaggaucgucuaa

SEQ ID NO: 403797 - RNA, 20 nt, Human
aggcaggaggaucgucuaag

SEQ ID NO: 403798 - RNA, 24 nt, Human
aggcaggaggaucgucuaagucca

SEQ ID NO: 403799 - RNA, 24 nt, Human
aggcugagaugggaggaucaccug

SEQ ID NO: 403800 - RNA, 20 nt, Human
aggcugaggcaggaggaucg

SEQ ID NO: 403801 - RNA, 20 nt, Human
aggcugaggcaggaggaucg

SEQ ID NO: 403802 - RNA, 18 nt, Human
aggcuggggaugagucuu

SEQ ID NO: 403803 - RNA, 20 nt, Human
agguggaggcuggggaugag

SEQ ID NO: 403804 - RNA, 19 nt, Human
aguccaggaguucaagacc

SEQ ID NO: 403805 - RNA, 21 nt, Human
augucgaagacccccccccca

SEQ ID NO: 403806 - RNA, 21 nt, Human
caaaaaaaagaaagaaagaaa

SEQ ID NO: 403807 - RNA, 22 nt, Human
caacuguggucccagcuacucg

SEQ ID NO: 403808 - RNA, 23 nt, Human
caacuguggucccagcuacucga

SEQ ID NO: 403809 - RNA, 22 nt, Human
caaguaucacacaggaggugga

SEQ ID NO: 403810 - RNA, 21 nt, Human
cacacaaauaggcaaauaagu

SEQ ID NO: 403811 - RNA, 18 nt, Human
cagaacaagaccaucuca

SEQ ID NO: 403812 - RNA, 22 nt, Human
cagcaccaggggucuccaugaa

SEQ ID NO: 403813 - RNA, 22 nt, Human
cagcagcagggaccccugccaa

SEQ ID NO: 403814 - RNA, 19 nt, Human
caggagguggaggcugggg

SEQ ID NO: 403815 - RNA, 24 nt, Human
caguugcuugggaggcugaggcag

SEQ ID NO: 403816 - RNA, 23 nt, Human
cauguaaacaaccuuggcaacau

SEQ ID NO: 403817 - RNA, 23 nt, Human
cauucuagccugguugacagaac

SEQ ID NO: 403818 - RNA, 18 nt, Human
ccagcaccaggggucucc

SEQ ID NO: 403819 - RNA, 21 nt, Human
cccaaaacaacuccucuaaaa

SEQ ID NO: 403820 - RNA, 20 nt, Human
ccccaaaacaacuccucuaa

SEQ ID NO: 403821 - RNA, 20 nt, Human
cccccaaaacaacuccucua

SEQ ID NO: 403822 - RNA, 26 nt, Human
cccccaaguaucacacaggaggugga

SEQ ID NO: 403823 - RNA, 25 nt, Human
ccccccccaaaacaacuccucuaaa

SEQ ID NO: 403824 - RNA, 26 nt, Human
ccccccccaaaacaacuccucuaaaa

SEQ ID NO: 403825 - RNA, 19 nt, Human
ccccccccccaaaacaacu

SEQ ID NO: 403826 - RNA, 19 nt, Human
ccgcugcauucuagccugg

SEQ ID NO: 403827 - RNA, 20 nt, Human
ccgcugcauucuagccuggu

SEQ ID NO: 403828 - RNA, 18 nt, Human
ccucgggaggucgaggcu

SEQ ID NO: 403829 - RNA, 19 nt, Human
ccucgggaggucgaggcug

SEQ ID NO: 403830 - RNA, 25 nt, Human
cgcugcauucuagccugguugacag

SEQ ID NO: 403831 - RNA, 19 nt, Human
cuaaguccaggaguucaag

SEQ ID NO: 403832 - RNA, 18 nt, Human
cuggcauguaaacaaccu

SEQ ID NO: 403833 - RNA, 27 nt, Human
gaacaagaccaucucaaaaaaaagaaa

SEQ ID NO: 403834 - RNA, 20 nt, Human
ggaaggagugggugaggagg

SEQ ID NO: 403835 - RNA, 20 nt, Human
ggaggcuggggaugagucuu

SEQ ID NO: 403836 - RNA, 23 nt, Human
ggaucgucuaaguccaggaguuc

SEQ ID NO: 403837 - RNA, 21 nt, Human
gggaaggagugggugaggagg

SEQ ID NO: 403838 - RNA, 23 nt, Human
gggaaggagugggugaggagggu

SEQ ID NO: 403839 - RNA, 19 nt, Human
gggaggucagcagcaggga

SEQ ID NO: 403840 - RNA, 24 nt, Human
ggggaaggagugggugaggagggu

SEQ ID NO: 403841 - RNA, 24 nt, Human
uagccugguugacagaacaagacc

SEQ ID NO: 403842 - RNA, 21 nt, Human
ucaagguccaacuuggggaag

SEQ ID NO: 403843 - RNA, 20 nt, Human
ucaauacacacaaauaggca

SEQ ID NO: 403844 - RNA, 24 nt, Human
ucaccugagccucgggaggucgag

SEQ ID NO: 403845 - RNA, 22 nt, Human
ucacguauuaccauaacucaga

SEQ ID NO: 403846 - RNA, 22 nt, Human
uccucuaaaaaaguccauucac

SEQ ID NO: 403847 - RNA, 22 nt, Human
ucgaagaccccccccccaaaac

SEQ ID NO: 403848 - RNA, 23 nt, Human
ucgaagaccccccccccaaaaca

SEQ ID NO: 403849 - RNA, 23 nt, Human
ucuaaguccaggaguucaagacc

SEQ ID NO: 403850 - RNA, 20 nt, Human
ugagaugggaggaucaccug

SEQ ID NO: 403851 - RNA, 21 nt, Human
ugagaugggaggaucaccuga

SEQ ID NO: 403852 - RNA, 24 nt, Human
ugagaugggaggaucaccugagcc

SEQ ID NO: 403853 - RNA, 18 nt, Human
uggaggcuggggaugagu

SEQ ID NO: 403854 - RNA, 22 nt, Human
uggaggcuggggaugagucuuu

SEQ ID NO: 403855 - RNA, 23 nt, Human
uggaguaggauucggacucuguc

SEQ ID NO: 403856 - RNA, 23 nt, Human
uggcaacauagcaauaccgucuc

SEQ ID NO: 403857 - RNA, 21 nt, Human
uggcacacaacugugguccca

SEQ ID NO: 403858 - RNA, 24 nt, Human
uggcacacaacuguggucccagcu

SEQ ID NO: 403859 - RNA, 21 nt, Human
uggcauguaaacaaccuuggc

SEQ ID NO: 403860 - RNA, 22 nt, Human
ugggaggaucaccugagccucg

SEQ ID NO: 403861 - RNA, 20 nt, Human
ugggaggcugaggcaggagg

SEQ ID NO: 403862 - RNA, 23 nt, Human
ugggaggcugaggcaggaggauc

SEQ ID NO: 403863 - RNA, 24 nt, Human
uggucccagcuacucgagaggcug

SEQ ID NO: 403864 - RNA, 24 nt, Human
uugggaggcugaggcaggaggauc

SEQ ID NO: 403865 - RNA, 22 nt, Human
aaacagcuuauuucuaggcugu

SEQ ID NO: 403866 - RNA, 21 nt, Human
ugaucuggccuucaccagcag

SEQ ID NO: 403867 - RNA, 22 nt, Human
acccccuccccaaccccaggac

SEQ ID NO: 403868 - RNA, 25 nt, Human
accccgacccccuccccaaccccag

SEQ ID NO: 403869 - RNA, 25 nt, Human
acucagcuggaguuggaggcugggc

SEQ ID NO: 403870 - RNA, 21 nt, Human
aggcagcucugggugaagguc

SEQ ID NO: 403871 - RNA, 21 nt, Human
caggcucagguccugggaccc

SEQ ID NO: 403872 - RNA, 21 nt, Human
cccccuccccaaccccaggac

SEQ ID NO: 403873 - RNA, 21 nt, Human
ccccgacccccuccccaaccc

SEQ ID NO: 403874 - RNA, 19 nt, Human
cccgacccccuccccaacc

SEQ ID NO: 403875 - RNA, 23 nt, Human
ccgacccccuccccaaccccagg

SEQ ID NO: 403876 - RNA, 23 nt, Human
ccugggaccccgacccccucccc

SEQ ID NO: 403877 - RNA, 24 nt, Human
ccugggaccccgacccccucccca

SEQ ID NO: 403878 - RNA, 19 nt, Human
cgacccccuccccaacccc

SEQ ID NO: 403879 - RNA, 18 nt, Human
gacccccuccccaacccc

SEQ ID NO: 403880 - RNA, 24 nt, Human
gaccccgacccccuccccaacccc

SEQ ID NO: 403881 - RNA, 18 nt, Human
ggggagggagucggggga

SEQ ID NO: 403882 - RNA, 18 nt, Human
gguugaggacauggccag

SEQ ID NO: 403883 - RNA, 18 nt, Human
uccccaaccccaggacuc

SEQ ID NO: 403884 - RNA, 22 nt, Human
uggaguuggaggcugggcauag

SEQ ID NO: 403885 - RNA, 23 nt, Human
ugggaccccgacccccuccccaa

SEQ ID NO: 403886 - RNA, 18 nt, Human
uggggagggagucggggg

SEQ ID NO: 403887 - RNA, 18 nt, Human
ugggguugaggacauggc

SEQ ID NO: 403888 - RNA, 20 nt, Human
aaggggccgcgccucccugg

SEQ ID NO: 403889 - RNA, 28 nt, Human
caaagacccacaaggggccgcgccuccc

SEQ ID NO: 403890 - RNA, 19 nt, Human
cagacaaagacccacaagg

SEQ ID NO: 403891 - RNA, 20 nt, Human
ccggcagggcggagucuccc

SEQ ID NO: 403892 - RNA, 21 nt, Human
cuguugcaggucgccuccuuu

SEQ ID NO: 403893 - RNA, 21 nt, Human
gggacuccucuguugcagguc

SEQ ID NO: 403894 - RNA, 21 nt, Human
uccagacaaagacccacaagg

SEQ ID NO: 403895 - RNA, 21 nt, Human
ugcacuccaccacccaaagau

SEQ ID NO: 403896 - RNA, 18 nt, Human
uugcaggucgccuccuuu

SEQ ID NO: 403897 - RNA, 21 nt, Human
gagcugggcuggccagugccu

SEQ ID NO: 403898 - RNA, 21 nt, Human
gggcuggccagugccucgccg

SEQ ID NO: 403899 - RNA, 19 nt, Human
aggccagcccucccuggca

SEQ ID NO: 403900 - RNA, 22 nt, Human
aucucccuaguauguucugcug

SEQ ID NO: 403901 - RNA, 21 nt, Human
caggcucugggugcaucuccc

SEQ ID NO: 403902 - RNA, 22 nt, Human
ccagcccucccuggcaggcucu

SEQ ID NO: 403903 - RNA, 18 nt, Human
cucccuggcaggcucugg

SEQ ID NO: 403904 - RNA, 21 nt, Human
cugcugggagccgggcaccgg

SEQ ID NO: 403905 - RNA, 22 nt, Human
gacggugguggugaggccagcc

SEQ ID NO: 403906 - RNA, 23 nt, Human
ugcugggagccgggcaccggggc

SEQ ID NO: 403907 - RNA, 20 nt, Human
aaccaucugggugcugacca

SEQ ID NO: 403908 - RNA, 19 nt, Human
agccccuagucagccacag

SEQ ID NO: 403909 - RNA, 18 nt, Human
caaccugacuuuggaagu

SEQ ID NO: 403910 - RNA, 19 nt, Human
cacaacuugcuuuacuuga

SEQ ID NO: 403911 - RNA, 20 nt, Human
caccccagccccuagucagc

SEQ ID NO: 403912 - RNA, 18 nt, Human
cacccuuuauccuccaaa

SEQ ID NO: 403913 - RNA, 18 nt, Human
cagaaguggaauuuggaa

SEQ ID NO: 403914 - RNA, 24 nt, Human
cagcggguucucauccuacaaccu

SEQ ID NO: 403915 - RNA, 20 nt, Human
ccacagggugccugggaaca

SEQ ID NO: 403916 - RNA, 22 nt, Human
ccauagaaucucagaaauggaa

SEQ ID NO: 403917 - RNA, 20 nt, Human
ccccagccccuagucagccu

SEQ ID NO: 403918 - RNA, 21 nt, Human
ccccuagucagccacagggug

SEQ ID NO: 403919 - RNA, 20 nt, Human
ccuccaaauaucccgggacg

SEQ ID NO: 403920 - RNA, 19 nt, Human
cggguucucauccuacaac

SEQ ID NO: 403921 - RNA, 18 nt, Human
ggguucucauccuacaac

SEQ ID NO: 403922 - RNA, 21 nt, Human
guggcggguacugagugggaa

SEQ ID NO: 403923 - RNA, 19 nt, Human
uaccaacacucccggggug

SEQ ID NO: 403924 - RNA, 24 nt, Human
ucagugucagauccuaggcugggc

SEQ ID NO: 403925 - RNA, 20 nt, Human
ucuagaauucuaggaauaga

SEQ ID NO: 403926 - RNA, 19 nt, Human
ugacuuuggaaguuggaga

SEQ ID NO: 403927 - RNA, 22 nt, Human
uggaauuuggaauucugagaga

SEQ ID NO: 403928 - RNA, 24 nt, Human
ugggcuuagagccucagaagugga

SEQ ID NO: 403929 - RNA, 19 nt, Human
ugguggacacaacuugcuu

SEQ ID NO: 403930 - RNA, 19 nt, Human
uuacuugaaccaucugggu

SEQ ID NO: 403931 - RNA, 18 nt, Human
uugguggacacaacuugc

SEQ ID NO: 403932 - RNA, 21 nt, Human
uuuuuuuuuuugguggacaca

SEQ ID NO: 403933 - RNA, 20 nt, Human
uuuuuuuuuuuuuuggugga

SEQ ID NO: 403934 - RNA, 18 nt, Human
accuaggcugcgucugag

SEQ ID NO: 403935 - RNA, 23 nt, Human
caaacacucccaggcuucccagg

SEQ ID NO: 403936 - RNA, 24 nt, Human
cccccucagcacagcuguccucuu

SEQ ID NO: 403937 - RNA, 20 nt, Human
ccugcccccucagcacagcu

SEQ ID NO: 403938 - RNA, 21 nt, Human
ccugcccccucagcacagcug

SEQ ID NO: 403939 - RNA, 21 nt, Human
cuaccgaugggacaaacacuc

SEQ ID NO: 403940 - RNA, 23 nt, Human
cugcccccucagcacagcugucc

SEQ ID NO: 403941 - RNA, 23 nt, Human
cugcccccucagcacagcugucc

SEQ ID NO: 403942 - RNA, 21 nt, Human
gcggccuugguaggugugguc

SEQ ID NO: 403943 - RNA, 21 nt, Human
gugguccuggcacagccagga

SEQ ID NO: 403944 - RNA, 21 nt, Human
uaccgaugggacaaacacucc

SEQ ID NO: 403945 - RNA, 18 nt, Human
ucccaggugccacugucc

SEQ ID NO: 403946 - RNA, 19 nt, Human
uuuuuuuuuugagugucug

SEQ ID NO: 403947 - RNA, 21 nt, Human
uuuuuuuuuuugagugucuga

SEQ ID NO: 403948 - RNA, 18 nt, Human
uuuuuuuuuuuuuuuuug

SEQ ID NO: 403949 - RNA, 22 nt, Human
aaggagaaaaaagucagugcag

SEQ ID NO: 403950 - RNA, 20 nt, Human
aggagugguggcucccaccu

SEQ ID NO: 403951 - RNA, 21 nt, Human
ccuaggccagcuccccauuuc

SEQ ID NO: 403952 - RNA, 20 nt, Human
gagcugccuggggugcccag

SEQ ID NO: 403953 - RNA, 20 nt, Human
gcaggcaggagugguggcuc

SEQ ID NO: 403954 - RNA, 19 nt, Human
gcaggccggaggcaggugc

SEQ ID NO: 403955 - RNA, 21 nt, Human
gccagcuccccauuuccaaac

SEQ ID NO: 403956 - RNA, 24 nt, Human
gcgaggagcagaucuuuggugaag

SEQ ID NO: 403957 - RNA, 22 nt, Human
ggagcagaucuuuggugaagga

SEQ ID NO: 403958 - RNA, 19 nt, Human
ggugcgagcgaggagcaga

SEQ ID NO: 403959 - RNA, 24 nt, Human
ggugcgagcgaggagcagaucuuu

SEQ ID NO: 403960 - RNA, 19 nt, Human
ggugugggggcaggcagga

SEQ ID NO: 403961 - RNA, 22 nt, Human
guggcuuuuuauuacuggugug

SEQ ID NO: 403962 - RNA, 18 nt, Human
uauuacugguguggagug

SEQ ID NO: 403963 - RNA, 20 nt, Human
ucagugugugguggcuuuuu

SEQ ID NO: 403964 - RNA, 21 nt, Human
uccccauuuccaaacaggagc

SEQ ID NO: 403965 - RNA, 19 nt, Human
ucccuccaaaaggagaaaa

SEQ ID NO: 403966 - RNA, 18 nt, Human
ucugcucucccuccaaaa

SEQ ID NO: 403967 - RNA, 21 nt, Human
ugggggcaggcaggaguggug

SEQ ID NO: 403968 - RNA, 21 nt, Human
aggacacagacgcgggggacg

SEQ ID NO: 403969 - RNA, 21 nt, Human
caaggacacagacgcggggga

SEQ ID NO: 403970 - RNA, 21 nt, Human
ccccaggacgucagggagacc

SEQ ID NO: 403971 - RNA, 22 nt, Human
ccccugacaggauugugggggc

SEQ ID NO: 403972 - RNA, 23 nt, Human
cgcgggggacgccccgggauggc

SEQ ID NO: 403973 - RNA, 21 nt, Human
cuggaggauguggagucccac

SEQ ID NO: 403974 - RNA, 22 nt, Human
gccccaggggaugaaggcagca

SEQ ID NO: 403975 - RNA, 21 nt, Human
gccccgggauggccucucccc

SEQ ID NO: 403976 - RNA, 19 nt, Human
gggaugaaggcagcaagga

SEQ ID NO: 403977 - RNA, 21 nt, Human
ggggguucugcagcuuuauuc

SEQ ID NO: 403978 - RNA, 20 nt, Human
gggguucugcagcuuuauuc

SEQ ID NO: 403979 - RNA, 22 nt, Human
ggguucugcagcuuuauucaca

SEQ ID NO: 403980 - RNA, 22 nt, Human
ucugcagcuuuauucacaggcc

SEQ ID NO: 403981 - RNA, 24 nt, Human
ugugggggcuggaggauguggagu

SEQ ID NO: 403982 - RNA, 18 nt, Human
uucugcagcuuuauucac

SEQ ID NO: 403983 - RNA, 20 nt, Human
ccuucugcuguucuuguugc

SEQ ID NO: 403984 - RNA, 21 nt, Human
gaaaaacagccaacauauaca

SEQ ID NO: 403985 - RNA, 20 nt, Human
gauguuggggaaaaacagcc

SEQ ID NO: 403986 - RNA, 19 nt, Human
ggcaguuccccuucugcug

SEQ ID NO: 403987 - RNA, 19 nt, Human
gucacaacuggcauuugau

SEQ ID NO: 403988 - RNA, 26 nt, Human
gugaagcgcaccagggcagagccccc

SEQ ID NO: 403989 - RNA, 23 nt, Human
uaacaucaggucuccuuggcagu

SEQ ID NO: 403990 - RNA, 23 nt, Human
ucaaaguuuuauugagauguugg

SEQ ID NO: 403991 - RNA, 25 nt, Human
ucaggucuccuuggcaguuccccuu

SEQ ID NO: 403992 - RNA, 20 nt, Human
uccuuggcaguuccccuucu

SEQ ID NO: 403993 - RNA, 25 nt, Human
ucucuggcuuugaucuaacaucuua

SEQ ID NO: 403994 - RNA, 19 nt, Human
ugcuguucuuguugcugcu

SEQ ID NO: 403995 - RNA, 22 nt, Human
uggcaguuccccuucugcuguu

SEQ ID NO: 403996 - RNA, 18 nt, Human
uuguugcugcuuggugcu

SEQ ID NO: 403997 - RNA, 24 nt, Human
aaagcccccuaccccuuacccuca

SEQ ID NO: 403998 - RNA, 24 nt, Human
aggcccccaaaacacauaacaccu

SEQ ID NO: 403999 - RNA, 24 nt, Human
auccuagcauuuucuccuuugggu

SEQ ID NO: 404000 - RNA, 23 nt, Human
auuucugccccugugcaggcccc

SEQ ID NO: 404001 - RNA, 21 nt, Human
caaagcccccuaccccuuacc

SEQ ID NO: 404002 - RNA, 21 nt, Human
caagacaaagcccccuacccc

SEQ ID NO: 404003 - RNA, 20 nt, Human
cagaggcccuggcaggccca

SEQ ID NO: 404004 - RNA, 23 nt, Human
cagaggcccuggcaggcccaccu

SEQ ID NO: 404005 - RNA, 22 nt, Human
cagccaagacaaagcccccuac

SEQ ID NO: 404006 - RNA, 18 nt, Human
cccaggcuggggcagcuc

SEQ ID NO: 404007 - RNA, 18 nt, Human
ccccaaaacacauaacac

SEQ ID NO: 404008 - RNA, 20 nt, Human
cccccuaccccuuacccuca

SEQ ID NO: 404009 - RNA, 21 nt, Human
ccccuuacccucaccccaggc

SEQ ID NO: 404010 - RNA, 23 nt, Human
ccuagcuuuacagaggcccuggc

SEQ ID NO: 404011 - RNA, 20 nt, Human
ccugugcaggcccccaaaac

SEQ ID NO: 404012 - RNA, 19 nt, Human
gacaaagcccccuaccccu

SEQ ID NO: 404013 - RNA, 18 nt, Human
uacaagcuuuaauuagug

SEQ ID NO: 404014 - RNA, 22 nt, Human
uacccuggggauagucccagcu

SEQ ID NO: 404015 - RNA, 21 nt, Human
uagaaaucaccauaguaacau

SEQ ID NO: 404016 - RNA, 18 nt, Human
uaugaugcccaggccaca

SEQ ID NO: 404017 - RNA, 27 nt, Human
uaugaugcccaggccacagggguguga

SEQ ID NO: 404018 - RNA, 20 nt, Human
ucucccagcaggccuagcuu

SEQ ID NO: 404019 - RNA, 26 nt, Human
ugaaacacgcaggaacaagccaagga

SEQ ID NO: 404020 - RNA, 18 nt, Human
ugagggcagggccuccuc

SEQ ID NO: 404021 - RNA, 22 nt, Human
ugagggcagggccuccuccuca

SEQ ID NO: 404022 - RNA, 18 nt, Human
ugcguagaaaucaccaua

SEQ ID NO: 404023 - RNA, 22 nt, Human
ugugcaggcccccaaaacacau

SEQ ID NO: 404024 - RNA, 24 nt, Human
uuacagaggcccuggcaggcccac

SEQ ID NO: 404025 - RNA, 26 nt, Human
uucuuggcauccuacccccauucauu

SEQ ID NO: 404026 - RNA, 21 nt, Human
aaagaaccuggguuguuggga

SEQ ID NO: 404027 - RNA, 21 nt, Human
aacuuccuacuucuccuccuu

SEQ ID NO: 404028 - RNA, 18 nt, Human
aagaaggaagggaggaag

SEQ ID NO: 404029 - RNA, 18 nt, Human
aaggaagggaggaaggaa

SEQ ID NO: 404030 - RNA, 18 nt, Human
acauugcuauuacccucc

SEQ ID NO: 404031 - RNA, 22 nt, Human
agaaaacuuccuacuucuccuc

SEQ ID NO: 404032 - RNA, 20 nt, Human
agaaaauauugguuggcuug

SEQ ID NO: 404033 - RNA, 23 nt, Human
aggaaggaaggaaaagaaccugg

SEQ ID NO: 404034 - RNA, 21 nt, Human
aggaaggaaggaaggaaggaa

SEQ ID NO: 404035 - RNA, 21 nt, Human
aggaagggaggaaggaaggaa

SEQ ID NO: 404036 - RNA, 26 nt, Human
aggcaggaaagaaggaagggggaccc

SEQ ID NO: 404037 - RNA, 21 nt, Human
agggaggaaggaaggaaggaa

SEQ ID NO: 404038 - RNA, 23 nt, Human
auacaaacaaaugacagaaaaua

SEQ ID NO: 404039 - RNA, 24 nt, Human
caaacaaaugacagaaaggaguuc

SEQ ID NO: 404040 - RNA, 20 nt, Human
cacaaauaccuggaaggcaa

SEQ ID NO: 404041 - RNA, 19 nt, Human
cacauugcuauuacccucc

SEQ ID NO: 404042 - RNA, 22 nt, Human
caccauaacaaucugcacccca

SEQ ID NO: 404043 - RNA, 21 nt, Human
cagcggauuccugcgacaucc

SEQ ID NO: 404044 - RNA, 18 nt, Human
cucagaagaaggguagaa

SEQ ID NO: 404045 - RNA, 22 nt, Human
gcugaggcucuuuucucugggc

SEQ ID NO: 404046 - RNA, 24 nt, Human
ggagacugagggucaggcuccagg

SEQ ID NO: 404047 - RNA, 23 nt, Human
uaagaaaacuuccuacuucuccu

SEQ ID NO: 404048 - RNA, 21 nt, Human
uaauauguugcaaaacacauu

SEQ ID NO: 404049 - RNA, 22 nt, Human
uccagggcagcagaaaccaaga

SEQ ID NO: 404050 - RNA, 20 nt, Human
uccuuggugggaaaggaggu

SEQ ID NO: 404051 - RNA, 22 nt, Human
uccuuggugggaaaggagguga

SEQ ID NO: 404052 - RNA, 22 nt, Human
ugacaaaaucacaaauaccugg

SEQ ID NO: 404053 - RNA, 21 nt, Human
ugccugucaccauaacaaucu

SEQ ID NO: 404054 - RNA, 20 nt, Human
ugggaaaggaggugaagguu

SEQ ID NO: 404055 - RNA, 20 nt, Human
uggguaggagggagaaugga

SEQ ID NO: 404056 - RNA, 24 nt, Human
uucauauuauaaaauacaaacaaa

SEQ ID NO: 404057 - RNA, 18 nt, Human
uucucugggccaguguga

SEQ ID NO: 404058 - RNA, 24 nt, Human
uuggcaaaacucucuugcugaggc

SEQ ID NO: 404059 - RNA, 22 nt, Human
uuggugggaaaggaggugaagg

SEQ ID NO: 404060 - RNA, 20 nt, Human
aacaaggcugagagguggga

SEQ ID NO: 404061 - RNA, 21 nt, Human
aagacucaauccccagccccc

SEQ ID NO: 404062 - RNA, 19 nt, Human
aagcaaacaaguucuucca

SEQ ID NO: 404063 - RNA, 19 nt, Human
aagccagacccuaaaacac

SEQ ID NO: 404064 - RNA, 18 nt, Human
aagcuccaggcuucuggc

SEQ ID NO: 404065 - RNA, 22 nt, Human
aaguucuuccacuugauguccc

SEQ ID NO: 404066 - RNA, 24 nt, Human
acagagcuuuuccauucccccaaa

SEQ ID NO: 404067 - RNA, 23 nt, Human
acagcaaagagaccugaggugcc

SEQ ID NO: 404068 - RNA, 18 nt, Human
acauaucucuaccuccuc

SEQ ID NO: 404069 - RNA, 20 nt, Human
acccagggucacuagagugc

SEQ ID NO: 404070 - RNA, 24 nt, Human
acuagagugcaggugcaggcacca

SEQ ID NO: 404071 - RNA, 22 nt, Human
agaaaaagauucucccagcuug

SEQ ID NO: 404072 - RNA, 21 nt, Human
agaauagaacagggcugggca

SEQ ID NO: 404073 - RNA, 25 nt, Human
agacacacacccacacgacaauaua

SEQ ID NO: 404074 - RNA, 19 nt, Human
agacucaauccccagcccc

SEQ ID NO: 404075 - RNA, 23 nt, Human
agcagaaaguagguuccccaggg

SEQ ID NO: 404076 - RNA, 22 nt, Human
agcaguugaguuagggagacag

SEQ ID NO: 404077 - RNA, 25 nt, Human
aggaacgcagggggcagccgguacc

SEQ ID NO: 404078 - RNA, 25 nt, Human
aggcacagcaaagagaccugaggug

SEQ ID NO: 404079 - RNA, 21 nt, Human
aggcagaaagggugacaguga

SEQ ID NO: 404080 - RNA, 22 nt, Human
aggcagaaagggugacagugag

SEQ ID NO: 404081 - RNA, 18 nt, Human
aggcagcagcuguggcug

SEQ ID NO: 404082 - RNA, 19 nt, Human
aggcagcagcuguggcugg

SEQ ID NO: 404083 - RNA, 21 nt, Human
aggcagggagcggggugcaag

SEQ ID NO: 404084 - RNA, 23 nt, Human
aggcuuaagaauggaguccuggu

SEQ ID NO: 404085 - RNA, 18 nt, Human
aggcuuuggcauuguagg

SEQ ID NO: 404086 - RNA, 19 nt, Human
aggggagggaggggguguu

SEQ ID NO: 404087 - RNA, 21 nt, Human
aggggcgguggccaguggcgg

SEQ ID NO: 404088 - RNA, 20 nt, Human
agguuuguuccuucucuuuu

SEQ ID NO: 404089 - RNA, 19 nt, Human
aguccuuaaauggugguca

SEQ ID NO: 404090 - RNA, 19 nt, Human
auucacuucccucucccca

SEQ ID NO: 404091 - RNA, 22 nt, Human
caaaagccagacccuaaaacac

SEQ ID NO: 404092 - RNA, 23 nt, Human
caagaagcugguuucccccagaa

SEQ ID NO: 404093 - RNA, 22 nt, Human
caagacucaauccccagccccc

SEQ ID NO: 404094 - RNA, 18 nt, Human
caauccccagcccccaaa

SEQ ID NO: 404095 - RNA, 18 nt, Human
caaugugugaggaugugg

SEQ ID NO: 404096 - RNA, 22 nt, Human
cacacacccacacgacaauaua

SEQ ID NO: 404097 - RNA, 22 nt, Human
caccaggagagagccucuguca

SEQ ID NO: 404098 - RNA, 24 nt, Human
cacuggcccugggcaaggggcagg

SEQ ID NO: 404099 - RNA, 22 nt, Human
cagacccuaaaacacuuacaga

SEQ ID NO: 404100 - RNA, 22 nt, Human
cagagcuuuuccauucccccaa

SEQ ID NO: 404101 - RNA, 24 nt, Human
cagcaggagcaacuugccuuucuu

SEQ ID NO: 404102 - RNA, 19 nt, Human
cagcaggcccaggagcucu

SEQ ID NO: 404103 - RNA, 19 nt, Human
caggacaggggcgguggcc

SEQ ID NO: 404104 - RNA, 20 nt, Human
cauagcuugguuguuugucc

SEQ ID NO: 404105 - RNA, 23 nt, Human
ccaacacagggacccugcagaau

SEQ ID NO: 404106 - RNA, 21 nt, Human
ccaaggcagaaagggugacag

SEQ ID NO: 404107 - RNA, 22 nt, Human
ccaggcagggagcggggugcaa

SEQ ID NO: 404108 - RNA, 23 nt, Human
ccauggcacuggcccugggcaag

SEQ ID NO: 404109 - RNA, 22 nt, Human
cccacacgacaauauaguggag

SEQ ID NO: 404110 - RNA, 22 nt, Human
cccauggcacuggcccugggca

SEQ ID NO: 404111 - RNA, 19 nt, Human
ccccacaagccccuucccc

SEQ ID NO: 404112 - RNA, 20 nt, Human
ccccacguugcacuuucuuc

SEQ ID NO: 404113 - RNA, 22 nt, Human
ccccagcccccaaaaaggcauc

SEQ ID NO: 404114 - RNA, 20 nt, Human
ccccauggcacuggcccugg

SEQ ID NO: 404115 - RNA, 23 nt, Human
ccccauggcacuggcccugggca

SEQ ID NO: 404116 - RNA, 23 nt, Human
cccccaaaaaauguggauuccca

SEQ ID NO: 404117 - RNA, 23 nt, Human
cccccaaaaaggcaucaugcagg

SEQ ID NO: 404118 - RNA, 20 nt, Human
ccccgagcucaacagcugcc

SEQ ID NO: 404119 - RNA, 22 nt, Human
cccucugcaauucacuucccuc

SEQ ID NO: 404120 - RNA, 18 nt, Human
cccugggcaaggggcagg

SEQ ID NO: 404121 - RNA, 28 nt, Human
ccuccaucuuucucucucuccucugaag

SEQ ID NO: 404122 - RNA, 23 nt, Human
ccuccccacaagccccuucccca

SEQ ID NO: 404123 - RNA, 23 nt, Human
ccuccuucuggguucaagagugg

SEQ ID NO: 404124 - RNA, 25 nt, Human
cucaaaccaaagcuccaggcuucug

SEQ ID NO: 404125 - RNA, 25 nt, Human
cucuccccacguugcacuuucuucu

SEQ ID NO: 404126 - RNA, 23 nt, Human
cucuccuccgaaauuggcccaaa

SEQ ID NO: 404127 - RNA, 23 nt, Human
cucucucucucucucucucuuuu

SEQ ID NO: 404128 - RNA, 27 nt, Human
cugcacugccaccaccaacccuaaucu

SEQ ID NO: 404129 - RNA, 21 nt, Human
cugcugcaugggcagcguggc

SEQ ID NO: 404130 - RNA, 23 nt, Human
cuggcaagaagcugguuuccccc

SEQ ID NO: 404131 - RNA, 20 nt, Human
cuggcccugggcaaggggca

SEQ ID NO: 404132 - RNA, 21 nt, Human
cuugaugucccacgguggcuc

SEQ ID NO: 404133 - RNA, 20 nt, Human
cuugggucugagauacuuuc

SEQ ID NO: 404134 - RNA, 22 nt, Human
gaaaaagauucucccagcuuga

SEQ ID NO: 404135 - RNA, 18 nt, Human
gacccugcagaauagaac

SEQ ID NO: 404136 - RNA, 20 nt, Human
gauucauggguccccucccc

SEQ ID NO: 404137 - RNA, 18 nt, Human
gcacuggcccugggcaag

SEQ ID NO: 404138 - RNA, 20 nt, Human
gcagaaagggugacagugag

SEQ ID NO: 404139 - RNA, 23 nt, Human
gcagacacacacccacacgacaa

SEQ ID NO: 404140 - RNA, 20 nt, Human
gcagaggagccacuaaguca

SEQ ID NO: 404141 - RNA, 18 nt, Human
gcagcgagugagccugug

SEQ ID NO: 404142 - RNA, 20 nt, Human
gccaaggcaggacagggcga

SEQ ID NO: 404143 - RNA, 20 nt, Human
gccaccuuuccugcagagga

SEQ ID NO: 404144 - RNA, 18 nt, Human
ggacuccagguuucuggc

SEQ ID NO: 404145 - RNA, 23 nt, Human
ggagguggggcuggacacucggg

SEQ ID NO: 404146 - RNA, 20 nt, Human
ggcccaaaguccuccuucug

SEQ ID NO: 404147 - RNA, 21 nt, Human
gggccccagcaggagcaacuu

SEQ ID NO: 404148 - RNA, 24 nt, Human
ggugcauucucaguggugaugggc

SEQ ID NO: 404149 - RNA, 20 nt, Human
gugccuugggucugagauac

SEQ ID NO: 404150 - RNA, 22 nt, Human
gugggugcagacacacacccac

SEQ ID NO: 404151 - RNA, 21 nt, Human
guuguuugucccuccccugcu

SEQ ID NO: 404152 - RNA, 18 nt, Human
uaaggcugguccaggggc

SEQ ID NO: 404153 - RNA, 22 nt, Human
uaagucaggugggugucugggc

SEQ ID NO: 404154 - RNA, 23 nt, Human
uacccuacagguggccagaaaaa

SEQ ID NO: 404155 - RNA, 22 nt, Human
uaccuccucaaaccaaagcucc

SEQ ID NO: 404156 - RNA, 20 nt, Human
uacuuucaagcaaacaaguu

SEQ ID NO: 404157 - RNA, 19 nt, Human
uagaagagaagggucuggc

SEQ ID NO: 404158 - RNA, 21 nt, Human
uagcuugguuguuugucccuc

SEQ ID NO: 404159 - RNA, 25 nt, Human
uaguggaggcacagcaaagagaccu

SEQ ID NO: 404160 - RNA, 23 nt, Human
uaucucuaccuccucaaaccaaa

SEQ ID NO: 404161 - RNA, 18 nt, Human
ucaggugggugucugggc

SEQ ID NO: 404162 - RNA, 18 nt, Human
ucaguggugaugggcacc

SEQ ID NO: 404163 - RNA, 21 nt, Human
uccaucuucuuaggggaggga

SEQ ID NO: 404164 - RNA, 21 nt, Human
ucccaaggagguuuguuccuu

SEQ ID NO: 404165 - RNA, 22 nt, Human
ucccaaggagguuuguuccuuc

SEQ ID NO: 404166 - RNA, 18 nt, Human
uccccauggcacuggccc

SEQ ID NO: 404167 - RNA, 21 nt, Human
uccccuccccacaagccccuu

SEQ ID NO: 404168 - RNA, 25 nt, Human
uccuauggauacacauaucucuacc

SEQ ID NO: 404169 - RNA, 19 nt, Human
ucggggugacccuggugga

SEQ ID NO: 404170 - RNA, 21 nt, Human
ucucuaccuccucaaaccaaa

SEQ ID NO: 404171 - RNA, 23 nt, Human
ucucucucuuuucccccuccccu

SEQ ID NO: 404172 - RNA, 20 nt, Human
ucugaugggcuggagguggg

SEQ ID NO: 404173 - RNA, 19 nt, Human
ucugcaauucacuucccuc

SEQ ID NO: 404174 - RNA, 19 nt, Human
ucuggccggagccucacug

SEQ ID NO: 404175 - RNA, 24 nt, Human
ucugggccaagggacucccaggac

SEQ ID NO: 404176 - RNA, 23 nt, Human
ugaaacccaauaacaaggcuggu

SEQ ID NO: 404177 - RNA, 22 nt, Human
ugagcagaaaguagguucccca

SEQ ID NO: 404178 - RNA, 23 nt, Human
ugagccuguguccaggcagggag

SEQ ID NO: 404179 - RNA, 24 nt, Human
ugaggugccuugggucugagauac

SEQ ID NO: 404180 - RNA, 23 nt, Human
ugaguuagggagacagagcuuuu

SEQ ID NO: 404181 - RNA, 25 nt, Human
ugaguuagggagacagagcuuuucc

SEQ ID NO: 404182 - RNA, 21 nt, Human
ugaugggcuggagguggggcu

SEQ ID NO: 404183 - RNA, 20 nt, Human
ugcagacacacacccacacg

SEQ ID NO: 404184 - RNA, 23 nt, Human
ugcaugugugucuacaaacacau

SEQ ID NO: 404185 - RNA, 19 nt, Human
ugccugcaaaagccagacc

SEQ ID NO: 404186 - RNA, 20 nt, Human
ugccuuucuugcugcugagc

SEQ ID NO: 404187 - RNA, 22 nt, Human
uggaguccuggugaauuuucca

SEQ ID NO: 404188 - RNA, 21 nt, Human
uggcaagaagcugguuucccc

SEQ ID NO: 404189 - RNA, 23 nt, Human
uggcaagaagcugguuuccccca

SEQ ID NO: 404190 - RNA, 25 nt, Human
uggcaagaagcugguuuccggaagc

SEQ ID NO: 404191 - RNA, 23 nt, Human
uggccagaaaaagauucucccag

SEQ ID NO: 404192 - RNA, 22 nt, Human
uggcccaagugcaagccuucug

SEQ ID NO: 404193 - RNA, 24 nt, Human
uggcggaggcagcagcuguggcug

SEQ ID NO: 404194 - RNA, 23 nt, Human
uggcucagcuagggaaaccaagg

SEQ ID NO: 404195 - RNA, 18 nt, Human
ugggcuggagguggggcu

SEQ ID NO: 404196 - RNA, 19 nt, Human
uggguucaagaguggucag

SEQ ID NO: 404197 - RNA, 20 nt, Human
ugguuguuugucccuccccu

SEQ ID NO: 404198 - RNA, 19 nt, Human
ugucuacaaacacauggga

SEQ ID NO: 404199 - RNA, 22 nt, Human
uguggugugcaggcagcaggag

SEQ ID NO: 404200 - RNA, 22 nt, Human
ugugucuacaaacacaugggac

SEQ ID NO: 404201 - RNA, 19 nt, Human
uucauggguccccucccca

SEQ ID NO: 404202 - RNA, 19 nt, Human
uuggcccaagugcaagccu

SEQ ID NO: 404203 - RNA, 23 nt, Human
uuguuugucccuccccugcugca

SEQ ID NO: 404204 - RNA, 20 nt, Human
uuuggcccaagugcaagccu

SEQ ID NO: 404205 - RNA, 24 nt, Human
acagugcugcgagaucgcuggcaa

SEQ ID NO: 404206 - RNA, 19 nt, Human
acccuggcucuucucucga

SEQ ID NO: 404207 - RNA, 21 nt, Human
accugcucuguccccaacccc

SEQ ID NO: 404208 - RNA, 20 nt, Human
acuccggccugcccacuccu

SEQ ID NO: 404209 - RNA, 20 nt, Human
agcagcugcagugccucugc

SEQ ID NO: 404210 - RNA, 24 nt, Human
aggagccuguaccacaaaugcagc

SEQ ID NO: 404211 - RNA, 20 nt, Human
aggcucuggccccacccaug

SEQ ID NO: 404212 - RNA, 23 nt, Human
aggcuuggcccaaggcugaggug

SEQ ID NO: 404213 - RNA, 20 nt, Human
agggcgccccacuccggccu

SEQ ID NO: 404214 - RNA, 21 nt, Human
agggcgccccacuccggccug

SEQ ID NO: 404215 - RNA, 19 nt, Human
aggggccucuggggcuaac

SEQ ID NO: 404216 - RNA, 18 nt, Human
caccagccgugccguggu

SEQ ID NO: 404217 - RNA, 21 nt, Human
caccagccgugccguggucag

SEQ ID NO: 404218 - RNA, 19 nt, Human
cagcgacagugaggaggga

SEQ ID NO: 404219 - RNA, 20 nt, Human
cagcgagcucuggaagagga

SEQ ID NO: 404220 - RNA, 22 nt, Human
cagcugcagugccucugcaccu

SEQ ID NO: 404221 - RNA, 24 nt, Human
cagggcaggacagggaagucuccc

SEQ ID NO: 404222 - RNA, 21 nt, Human
cagggcgccccacuccggccu

SEQ ID NO: 404223 - RNA, 22 nt, Human
cagucaucuuugucuucagccc

SEQ ID NO: 404224 - RNA, 24 nt, Human
cagugcugcgagaucgcuggcaga

SEQ ID NO: 404225 - RNA, 22 nt, Human
caguggcagugacggggcagag

SEQ ID NO: 404226 - RNA, 24 nt, Human
ccaaggcugaggugggaaguuuau

SEQ ID NO: 404227 - RNA, 25 nt, Human
cccaugccgggauacauucacugag

SEQ ID NO: 404228 - RNA, 21 nt, Human
ccccacuccggccugcccacu

SEQ ID NO: 404229 - RNA, 27 nt, Human
cccccuguaaacacagugcugcgagau

SEQ ID NO: 404230 - RNA, 23 nt, Human
cccccuuccacaccccggugucc

SEQ ID NO: 404231 - RNA, 19 nt, Human
cccucagugcucggcaguc

SEQ ID NO: 404232 - RNA, 22 nt, Human
cccuucugagagaagcugaggg

SEQ ID NO: 404233 - RNA, 22 nt, Human
ccuccuccuuccuggggacagg

SEQ ID NO: 404234 - RNA, 25 nt, Human
ccuucugagagaagcugagggugga

SEQ ID NO: 404235 - RNA, 23 nt, Human
cgacagcagccccagcgaguaau

SEQ ID NO: 404236 - RNA, 22 nt, Human
cgccccacuccggccugcccac

SEQ ID NO: 404237 - RNA, 19 nt, Human
cggcagcgacagugaggag

SEQ ID NO: 404238 - RNA, 21 nt, Human
cggcagcgacagugaggaggg

SEQ ID NO: 404239 - RNA, 22 nt, Human
cggcagcgacagugaggaggga

SEQ ID NO: 404240 - RNA, 22 nt, Human
cuccagcggcuggguggugaag

SEQ ID NO: 404241 - RNA, 22 nt, Human
cucuucucucggggcgaccccu

SEQ ID NO: 404242 - RNA, 19 nt, Human
cugagagaagcugagggug

SEQ ID NO: 404243 - RNA, 18 nt, Human
cugagccacaaccgacug

SEQ ID NO: 404244 - RNA, 23 nt, Human
cugcaacaggggcugagccacaa

SEQ ID NO: 404245 - RNA, 25 nt, Human
cugcaccugcucuguccccaacccc

SEQ ID NO: 404246 - RNA, 24 nt, Human
cugcagucaucuuugucuucagcc

SEQ ID NO: 404247 - RNA, 23 nt, Human
cuggcaaaucccaccagccgugc

SEQ ID NO: 404248 - RNA, 21 nt, Human
cuggggcugguguguccucuu

SEQ ID NO: 404249 - RNA, 18 nt, Human
cuuccaggcuuggcccaa

SEQ ID NO: 404250 - RNA, 24 nt, Human
cuucugagagaagcugagggugga

SEQ ID NO: 404251 - RNA, 22 nt, Human
gagaaucugagugaggggcgcc

SEQ ID NO: 404252 - RNA, 23 nt, Human
gagcaguggcagugacggggcag

SEQ ID NO: 404253 - RNA, 19 nt, Human
gagccacaaccgacugugg

SEQ ID NO: 404254 - RNA, 22 nt, Human
gcaaccgagcagcugcagugcc

SEQ ID NO: 404255 - RNA, 19 nt, Human
gcagcgacagugaggaggg

SEQ ID NO: 404256 - RNA, 18 nt, Human
gcaguggcagugacgggg

SEQ ID NO: 404257 - RNA, 18 nt, Human
gcccagucagacaaugaa

SEQ ID NO: 404258 - RNA, 20 nt, Human
gccucuggggcuaacucugg

SEQ ID NO: 404259 - RNA, 19 nt, Human
gcgacagugaggagggagu

SEQ ID NO: 404260 - RNA, 21 nt, Human
gcgaguaaugaggagcagugg

SEQ ID NO: 404261 - RNA, 24 nt, Human
gcugcagugccucugcaccugauc

SEQ ID NO: 404262 - RNA, 24 nt, Human
gcugggagauuagagagccccucc

SEQ ID NO: 404263 - RNA, 23 nt, Human
gcuuggcccaaggcugagguggg

SEQ ID NO: 404264 - RNA, 28 nt, Human
ggacaggccagggcgccccacuccggcc

SEQ ID NO: 404265 - RNA, 24 nt, Human
ggagcaguggcagugacggggcag

SEQ ID NO: 404266 - RNA, 23 nt, Human
ggcaaccgagcagcugcagugcc

SEQ ID NO: 404267 - RNA, 18 nt, Human
gggagggcggcgucucag

SEQ ID NO: 404268 - RNA, 22 nt, Human
gggcgccccacuccggccugcc

SEQ ID NO: 404269 - RNA, 24 nt, Human
ggggcucuucaggaggcucagggg

SEQ ID NO: 404270 - RNA, 26 nt, Human
ggggcugguguguccucuucuggggc

SEQ ID NO: 404271 - RNA, 19 nt, Human
guggccucgugacuccugc

SEQ ID NO: 404272 - RNA, 19 nt, Human
guguguccucuucuggggc

SEQ ID NO: 404273 - RNA, 23 nt, Human
uccaggcuuggcccaaggcugag

SEQ ID NO: 404274 - RNA, 24 nt, Human
uccccaaccccgggagggcggcgu

SEQ ID NO: 404275 - RNA, 22 nt, Human
uccccugcaacaggggcugagc

SEQ ID NO: 404276 - RNA, 24 nt, Human
uccugacucauccacggcagggag

SEQ ID NO: 404277 - RNA, 23 nt, Human
uccuuuauugcuccuguacgaac

SEQ ID NO: 404278 - RNA, 24 nt, Human
ucgcuggcagagaaggcuuccucc

SEQ ID NO: 404279 - RNA, 18 nt, Human
ucggggaggcgacagcag

SEQ ID NO: 404280 - RNA, 26 nt, Human
ucugaggugggcaucagcgagcucug

SEQ ID NO: 404281 - RNA, 28 nt, Human
ucuggacaaggccacccuucggggaggc

SEQ ID NO: 404282 - RNA, 20 nt, Human
ucuggacuccuugauggaug

SEQ ID NO: 404283 - RNA, 18 nt, Human
ugacuccugcgagcuccc

SEQ ID NO: 404284 - RNA, 19 nt, Human
ugacuccugcgagcucccu

SEQ ID NO: 404285 - RNA, 18 nt, Human
ugagagaagcugagggug

SEQ ID NO: 404286 - RNA, 18 nt, Human
ugaggguggaacuggcug

SEQ ID NO: 404287 - RNA, 23 nt, Human
ugaggugggaaguuuauaggucc

SEQ ID NO: 404288 - RNA, 20 nt, Human
ugagucaggugcucgcuucc

SEQ ID NO: 404289 - RNA, 19 nt, Human
ugagugaggggcgccaugg

SEQ ID NO: 404290 - RNA, 19 nt, Human
ugcagacuccuccuccuuc

SEQ ID NO: 404291 - RNA, 19 nt, Human
ugcuccauuuuuaucuucc

SEQ ID NO: 404292 - RNA, 19 nt, Human
uggcccaaggcugaggugg

SEQ ID NO: 404293 - RNA, 26 nt, Human
uggcccaaggcugaggugggaaguuu

SEQ ID NO: 404294 - RNA, 19 nt, Human
ugggagaagcccaggggag

SEQ ID NO: 404295 - RNA, 25 nt, Human
uggggcuaacucuggggcuggugug

SEQ ID NO: 404296 - RNA, 23 nt, Human
uggggcugguguguccucuucug

SEQ ID NO: 404297 - RNA, 23 nt, Human
uggggugcgagagaggugggcag

SEQ ID NO: 404298 - RNA, 23 nt, Human
uggguggugaaggacccuggcuc

SEQ ID NO: 404299 - RNA, 24 nt, Human
uguguccccgcucauuuuguuuuc

SEQ ID NO: 404300 - RNA, 24 nt, Human
uuccaggcuuggcccaaggcugag

SEQ ID NO: 404301 - RNA, 19 nt, Human
uuccuggggacaggccagg

SEQ ID NO: 404302 - RNA, 21 nt, Human
uugaagcccacagggcugcag

SEQ ID NO: 404303 - RNA, 19 nt, Human
uugaggugacuggcaaauc

SEQ ID NO: 404304 - RNA, 20 nt, Human
uugaggugacuggcaaaucc

SEQ ID NO: 404305 - RNA, 24 nt, Human
aaaaaaaaaucccccuugggcccg

SEQ ID NO: 404306 - RNA, 24 nt, Human
aaaaaaaauucucaaggaggugaa

SEQ ID NO: 404307 - RNA, 20 nt, Human
aaaaaucccccuugggcccg

SEQ ID NO: 404308 - RNA, 20 nt, Human
aaacccacuuauuagugcca

SEQ ID NO: 404309 - RNA, 23 nt, Human
aaaucuuuaaacuuuuaacagaa

SEQ ID NO: 404310 - RNA, 19 nt, Human
acagucaguauaaaauaac

SEQ ID NO: 404311 - RNA, 22 nt, Human
cacuguaguaaaaagauauaaa

SEQ ID NO: 404312 - RNA, 20 nt, Human
cuuacuauaagcuuaaaaaa

SEQ ID NO: 404313 - RNA, 18 nt, Human
gaagcugcugcugucaca

SEQ ID NO: 404314 - RNA, 19 nt, Human
gacacugacucaaaauacu

SEQ ID NO: 404315 - RNA, 25 nt, Human
uaaaaaaaaaucagccauguccuug

SEQ ID NO: 404316 - RNA, 21 nt, Human
uaaaaagauauaaaugcaaua

SEQ ID NO: 404317 - RNA, 21 nt, Human
uaaacccacuuauuagugcca

SEQ ID NO: 404318 - RNA, 20 nt, Human
uacaauuagaaaagaccaau

SEQ ID NO: 404319 - RNA, 19 nt, Human
uagaaaagaccaauaaacc

SEQ ID NO: 404320 - RNA, 23 nt, Human
uagaaaagaccaauaaacccacu

SEQ ID NO: 404321 - RNA, 20 nt, Human
uauugcacaauauagguaca

SEQ ID NO: 404322 - RNA, 24 nt, Human
uauuuuacaaacuuuguacuaaau

SEQ ID NO: 404323 - RNA, 21 nt, Human
uguaagacacugacucaaaau

SEQ ID NO: 404324 - RNA, 21 nt, Human
uuuaaacuuuuaacagaaaau

SEQ ID NO: 404325 - RNA, 25 nt, Human
uuuaagauggauauuuuacaauuuc

SEQ ID NO: 404326 - RNA, 24 nt, Human
aaaaaaaaaauccaaauuaucagc

SEQ ID NO: 404327 - RNA, 20 nt, Human
aaaaaaaacagucguuaaug

SEQ ID NO: 404328 - RNA, 22 nt, Human
aaacacacacacaggucuaaca

SEQ ID NO: 404329 - RNA, 21 nt, Human
aaguuaaaaaaaaaaaaaucc

SEQ ID NO: 404330 - RNA, 18 nt, Human
aauacaaaaagugagcac

SEQ ID NO: 404331 - RNA, 20 nt, Human
agacaauguggggauaauuc

SEQ ID NO: 404332 - RNA, 20 nt, Human
agcugcagccugccucccuc

SEQ ID NO: 404333 - RNA, 18 nt, Human
aggagcaauuuggugaaa

SEQ ID NO: 404334 - RNA, 19 nt, Human
aguugcaaguugagucuuu

SEQ ID NO: 404335 - RNA, 21 nt, Human
cacacacaggucuaacagcca

SEQ ID NO: 404336 - RNA, 20 nt, Human
cacacaggucuaacagccaa

SEQ ID NO: 404337 - RNA, 23 nt, Human
ccaaaguuaaaaaaaaaaaaauc

SEQ ID NO: 404338 - RNA, 20 nt, Human
ccacaaggggaaagugagau

SEQ ID NO: 404339 - RNA, 24 nt, Human
ccccaacaacuccauucuuuaaaa

SEQ ID NO: 404340 - RNA, 19 nt, Human
cugaagcugcagccugccu

SEQ ID NO: 404341 - RNA, 24 nt, Human
gacagcucaaacagcaauaacaau

SEQ ID NO: 404342 - RNA, 18 nt, Human
gagcacugacuucucuuu

SEQ ID NO: 404343 - RNA, 21 nt, Human
gagucgggugaccagagcugg

SEQ ID NO: 404344 - RNA, 22 nt, Human
gccaaaguuaaaaaaaaaaaaa

SEQ ID NO: 404345 - RNA, 19 nt, Human
gcugcagccugccucccuc

SEQ ID NO: 404346 - RNA, 21 nt, Human
gcugcagccugccucccuccu

SEQ ID NO: 404347 - RNA, 21 nt, Human
uaucagaguggagacagaagu

SEQ ID NO: 404348 - RNA, 19 nt, Human
ucaggggcacaucccuccc

SEQ ID NO: 404349 - RNA, 27 nt, Human
uccauucuuuaaaaaaaaaaaaaaaaa

SEQ ID NO: 404350 - RNA, 19 nt, Human
ucuguggcugaagcugcag

SEQ ID NO: 404351 - RNA, 20 nt, Human
ucuuuaaaaaaaaaaaaaaa

SEQ ID NO: 404352 - RNA, 18 nt, Human
ugccaaaguuaaaaaaaa

SEQ ID NO: 404353 - RNA, 25 nt, Human
ugccaaaguuaaaaaaaaaaaaauc

SEQ ID NO: 404354 - RNA, 18 nt, Human
uggcugaagcugcagccu

SEQ ID NO: 404355 - RNA, 18 nt, Human
ugugcagaggaaaugagc

SEQ ID NO: 404356 - RNA, 24 nt, Human
ugugccaaaguuaaaaaaaaaaaa

SEQ ID NO: 404357 - RNA, 21 nt, Human
uuacacuacagguguaaugca

SEQ ID NO: 404358 - RNA, 18 nt, Human
uugugugcaugucccgcc

SEQ ID NO: 404359 - RNA, 27 nt, Human
uugugugcaugucccgccccaacaacu

SEQ ID NO: 404360 - RNA, 24 nt, Human
uuuucaguuggaaucauuuuuaau

SEQ ID NO: 404361 - RNA, 21 nt, Human
uuuuuuuuuuuuucaguugga

SEQ ID NO: 404362 - RNA, 21 nt, Human
uuuuuuuuuuuuuuuuuucag

SEQ ID NO: 404363 - RNA, 21 nt, Human
aaaaaggaacacucaagucag

SEQ ID NO: 404364 - RNA, 19 nt, Human
aaaacacugccaaagccac

SEQ ID NO: 404365 - RNA, 24 nt, Human
aaaacacugccaaagccacgacug

SEQ ID NO: 404366 - RNA, 23 nt, Human
aaaauaaaaacaaaauucaaaac

SEQ ID NO: 404367 - RNA, 24 nt, Human
aaaaugucuucacauuaaaauucu

SEQ ID NO: 404368 - RNA, 23 nt, Human
aaaggaacacucaagucaggaaa

SEQ ID NO: 404369 - RNA, 21 nt, Human
aaccaaaacacugccaaagcc

SEQ ID NO: 404370 - RNA, 21 nt, Human
aagcggcggugacugugggcc

SEQ ID NO: 404371 - RNA, 19 nt, Human
aaggaugaugggaaaaugg

SEQ ID NO: 404372 - RNA, 19 nt, Human
acagaccccagcaguugug

SEQ ID NO: 404373 - RNA, 19 nt, Human
acuaacaaugccucuaaaa

SEQ ID NO: 404374 - RNA, 22 nt, Human
acuccggaggcucgaggaggcg

SEQ ID NO: 404375 - RNA, 21 nt, Human
agaaacggcugaggcugcuac

SEQ ID NO: 404376 - RNA, 26 nt, Human
agaccccagcaguuguguaacagccu

SEQ ID NO: 404377 - RNA, 19 nt, Human
aggcacgagggcaagugag

SEQ ID NO: 404378 - RNA, 24 nt, Human
auaggacaacuggcucagcucucc

SEQ ID NO: 404379 - RNA, 25 nt, Human
augacaauagagagugacgacucua

SEQ ID NO: 404380 - RNA, 21 nt, Human
auugcaaaacccuaacuguaa

SEQ ID NO: 404381 - RNA, 21 nt, Human
caaaagaaaaaauaaaagccc

SEQ ID NO: 404382 - RNA, 24 nt, Human
caaguuuaaugaaaauugaucccc

SEQ ID NO: 404383 - RNA, 26 nt, Human
cacacuaaacuaacaaugccucuaaa

SEQ ID NO: 404384 - RNA, 21 nt, Human
cacuaaacuaacaaugccucu

SEQ ID NO: 404385 - RNA, 21 nt, Human
caguagcuaagagaauccaaa

SEQ ID NO: 404386 - RNA, 22 nt, Human
caguagcuaagagaauccaaac

SEQ ID NO: 404387 - RNA, 24 nt, Human
cauacaguagcuaagagaauccaa

SEQ ID NO: 404388 - RNA, 20 nt, Human
ccaaaacacugccaaagcca

SEQ ID NO: 404389 - RNA, 21 nt, Human
ccaaaacacugccaaagccac

SEQ ID NO: 404390 - RNA, 23 nt, Human
ccaaaacacugccaaagccacga

SEQ ID NO: 404391 - RNA, 20 nt, Human
ccaaaccacacuguuccucu

SEQ ID NO: 404392 - RNA, 22 nt, Human
ccaugacaauagagagugacga

SEQ ID NO: 404393 - RNA, 22 nt, Human
cccauccacuugcccucuugaa

SEQ ID NO: 404394 - RNA, 20 nt, Human
ccggagggacgagcgcggcg

SEQ ID NO: 404395 - RNA, 24 nt, Human
cgagacuccagaaacggcugaggg

SEQ ID NO: 404396 - RNA, 26 nt, Human
cggcccggagggacgagcgcggcggg

SEQ ID NO: 404397 - RNA, 22 nt, Human
cucagaacaaaggaugauggga

SEQ ID NO: 404398 - RNA, 21 nt, Human
cucgcccuucaucccucccca

SEQ ID NO: 404399 - RNA, 23 nt, Human
cuugcccucuugaaaauaaaaac

SEQ ID NO: 404400 - RNA, 23 nt, Human
cuuucccaaaccacacuguuccu

SEQ ID NO: 404401 - RNA, 22 nt, Human
gaaaugggagagagggaaggga

SEQ ID NO: 404402 - RNA, 20 nt, Human
gacuugcugccucucucccc

SEQ ID NO: 404403 - RNA, 18 nt, Human
gagacgcagacggcgaac

SEQ ID NO: 404404 - RNA, 24 nt, Human
gagcgcggcggcaggcgaggcggc

SEQ ID NO: 404405 - RNA, 28 nt, Human
gaucuuuaagaucaagaaaaagguuuaa

SEQ ID NO: 404406 - RNA, 23 nt, Human
gcccuucaucccuccccaacccc

SEQ ID NO: 404407 - RNA, 20 nt, Human
gcgugggggagacgcagacg

SEQ ID NO: 404408 - RNA, 23 nt, Human
ggagggacgagcgcggcggcagg

SEQ ID NO: 404409 - RNA, 19 nt, Human
ggcaggcgaggcggcgugg

SEQ ID NO: 404410 - RNA, 21 nt, Human
ggcccgagacuccagaaacgg

SEQ ID NO: 404411 - RNA, 22 nt, Human
guagaacgcugacaaauuccca

SEQ ID NO: 404412 - RNA, 20 nt, Human
uaaaagcccuaaaaucuuga

SEQ ID NO: 404413 - RNA, 23 nt, Human
uaaauaaccuacaguugauuaaa

SEQ ID NO: 404414 - RNA, 24 nt, Human
uaagagaauccaaacauuucagug

SEQ ID NO: 404415 - RNA, 18 nt, Human
uacacaauuacaaaagaa

SEQ ID NO: 404416 - RNA, 20 nt, Human
uagaacgcugacaaauuccc

SEQ ID NO: 404417 - RNA, 21 nt, Human
uagaagauacuugaggaaaga

SEQ ID NO: 404418 - RNA, 20 nt, Human
uagcuaagagaauccaaaca

SEQ ID NO: 404419 - RNA, 20 nt, Human
ucaguuuauccaucuuuccc

SEQ ID NO: 404420 - RNA, 19 nt, Human
ucccauccacuugcccucu

SEQ ID NO: 404421 - RNA, 23 nt, Human
ucccccaggcacgagggcaagug

SEQ ID NO: 404422 - RNA, 18 nt, Human
uccucuaaguuuauugac

SEQ ID NO: 404423 - RNA, 22 nt, Human
ucgcccuucaucccuccccaac

SEQ ID NO: 404424 - RNA, 24 nt, Human
ucugaaccaaaacacugccaaagc

SEQ ID NO: 404425 - RNA, 21 nt, Human
ucugcacacacacuaaacuaa

SEQ ID NO: 404426 - RNA, 23 nt, Human
ucugcacacacacuaaacuaaca

SEQ ID NO: 404427 - RNA, 25 nt, Human
ugaaaauaaaaacaaaauucaaaac

SEQ ID NO: 404428 - RNA, 19 nt, Human
ugaaaugggagagagggaa

SEQ ID NO: 404429 - RNA, 18 nt, Human
ugauaaaaauagaagaua

SEQ ID NO: 404430 - RNA, 22 nt, Human
ugcccucuugaaaauaaaaaca

SEQ ID NO: 404431 - RNA, 20 nt, Human
ugccucucucccccaggcac

SEQ ID NO: 404432 - RNA, 20 nt, Human
ugccugguagaacgcugaca

SEQ ID NO: 404433 - RNA, 20 nt, Human
ugcucagaacaaaggaugau

SEQ ID NO: 404434 - RNA, 19 nt, Human
ugugaacaggugucugaac

SEQ ID NO: 404435 - RNA, 22 nt, Human
uuaaauuccugaaaugggagag

SEQ ID NO: 404436 - RNA, 23 nt, Human
uuauccaucuuucccaaaccaca

SEQ ID NO: 404437 - RNA, 20 nt, Human
uucaucccuccccaacccca

SEQ ID NO: 404438 - RNA, 22 nt, Human
uuuauccaucuuucccaaacca

SEQ ID NO: 404439 - RNA, 20 nt, Human
uuuucugugaacaggugucu

SEQ ID NO: 404440 - RNA, 22 nt, Human
uuuuuuguucuacuuaauuuua

SEQ ID NO: 404441 - RNA, 19 nt, Human
aaaauuccccaguacugcu

SEQ ID NO: 404442 - RNA, 20 nt, Human
cacacacacauacaaaagaa

SEQ ID NO: 404443 - RNA, 20 nt, Human
uaauagugaaaaaaacacac

SEQ ID NO: 404444 - RNA, 22 nt, Human
uaauagugaaaaaaacacacac

SEQ ID NO: 404445 - RNA, 22 nt, Human
ugaaaaaaacacacacacauac

SEQ ID NO: 404446 - RNA, 24 nt, Human
ugaaaaaaacacacacacauacaa

SEQ ID NO: 404447 - RNA, 27 nt, Human
ugaaaaaaacacacacacauacaaaag

SEQ ID NO: 404448 - RNA, 19 nt, Human
aaaagaaagcagacucaaa

SEQ ID NO: 404449 - RNA, 30 nt, Human
aaaagaaagcagacucaaaacacagacaaa

SEQ ID NO: 404450 - RNA, 22 nt, Human
aacccugaaagcgacuaaacag

SEQ ID NO: 404451 - RNA, 18 nt, Human
aagaaagcagacucaaaa

SEQ ID NO: 404452 - RNA, 20 nt, Human
aagcagacucaaaacacaga

SEQ ID NO: 404453 - RNA, 24 nt, Human
aagcagagaagaaaacaaugccca

SEQ ID NO: 404454 - RNA, 22 nt, Human
aaguagaaaaggaggaagagga

SEQ ID NO: 404455 - RNA, 21 nt, Human
acaaagcagagaagaaaacaa

SEQ ID NO: 404456 - RNA, 21 nt, Human
acacagacaaagcagagaaga

SEQ ID NO: 404457 - RNA, 23 nt, Human
accccacgagaccacccccgacc

SEQ ID NO: 404458 - RNA, 25 nt, Human
acccccgaccaagccgcuucuccac

SEQ ID NO: 404459 - RNA, 19 nt, Human
acccugaaagcgacuaaac

SEQ ID NO: 404460 - RNA, 22 nt, Human
agaagaaaacaaugcccaugaa

SEQ ID NO: 404461 - RNA, 20 nt, Human
agaagaacuuaaaaaucagg

SEQ ID NO: 404462 - RNA, 18 nt, Human
agacaaaagaaagcagac

SEQ ID NO: 404463 - RNA, 22 nt, Human
agacaaagcagagaagaaaaca

SEQ ID NO: 404464 - RNA, 19 nt, Human
agacucaaaacacagacaa

SEQ ID NO: 404465 - RNA, 21 nt, Human
agaggggaggaaguuaagagc

SEQ ID NO: 404466 - RNA, 18 nt, Human
agaguaucuguacuagaa

SEQ ID NO: 404467 - RNA, 23 nt, Human
agucacacacauauaacaaugua

SEQ ID NO: 404468 - RNA, 21 nt, Human
aucacauaacuacucuaauuu

SEQ ID NO: 404469 - RNA, 23 nt, Human
caaaagaaagcagacucaaaaca

SEQ ID NO: 404470 - RNA, 21 nt, Human
caaauguuguccccgagucuu

SEQ ID NO: 404471 - RNA, 22 nt, Human
caagaacccugaaagcgacuaa

SEQ ID NO: 404472 - RNA, 21 nt, Human
cagacaaagcagagaagaaaa

SEQ ID NO: 404473 - RNA, 23 nt, Human
caggaccccacgagaccaccccc

SEQ ID NO: 404474 - RNA, 19 nt, Human
cagguuuuaaagacaaaag

SEQ ID NO: 404475 - RNA, 21 nt, Human
cauaagaggcugaguguagua

SEQ ID NO: 404476 - RNA, 20 nt, Human
ccccgaccaagccgcuucuc

SEQ ID NO: 404477 - RNA, 21 nt, Human
ccccgaccaagccgcuucucc

SEQ ID NO: 404478 - RNA, 24 nt, Human
cuagaaccauaaaguucuaucuga

SEQ ID NO: 404479 - RNA, 20 nt, Human
cucauugcuuaaagaaaaac

SEQ ID NO: 404480 - RNA, 19 nt, Human
gaccccacgagaccacccc

SEQ ID NO: 404481 - RNA, 26 nt, Human
gacuaaacaggcaggaccccacgaga

SEQ ID NO: 404482 - RNA, 21 nt, Human
gagaccacccccgaccaagcc

SEQ ID NO: 404483 - RNA, 21 nt, Human
gagucuucugcaauccagucc

SEQ ID NO: 404484 - RNA, 24 nt, Human
gguuaggagagcuccacuugaacc

SEQ ID NO: 404485 - RNA, 21 nt, Human
gucgguuaggagagcuccacu

SEQ ID NO: 404486 - RNA, 20 nt, Human
uaaaaacaccuuccccaaac

SEQ ID NO: 404487 - RNA, 23 nt, Human
uaaaaacaccuuccccaaacuaa

SEQ ID NO: 404488 - RNA, 19 nt, Human
uaaacaggcaggaccccac

SEQ ID NO: 404489 - RNA, 19 nt, Human
uaacaauguagacaggucu

SEQ ID NO: 404490 - RNA, 21 nt, Human
uacugaaaguagaaaaggagg

SEQ ID NO: 404491 - RNA, 21 nt, Human
uagcuaauagaaaaacauagu

SEQ ID NO: 404492 - RNA, 21 nt, Human
ucaaguuauagacacagccaa

SEQ ID NO: 404493 - RNA, 24 nt, Human
ucagguuuuaaagacaaaagaaag

SEQ ID NO: 404494 - RNA, 24 nt, Human
uccccaaacuaaauucagagggga

SEQ ID NO: 404495 - RNA, 21 nt, Human
ucuuguacuaaaaacaccuuc

SEQ ID NO: 404496 - RNA, 18 nt, Human
ucuuugggagauucagac

SEQ ID NO: 404497 - RNA, 23 nt, Human
ugaaaguagaaaaggaggaagag

SEQ ID NO: 404498 - RNA, 20 nt, Human
ugacacuuuuaaaucaaacu

SEQ ID NO: 404499 - RNA, 18 nt, Human
ugguuucucucuuuggga

SEQ ID NO: 404500 - RNA, 24 nt, Human
uuggaucaaauguuguccccgagu

SEQ ID NO: 404501 - RNA, 23 nt, Human
uuggcacauaagaggcugagugu

SEQ ID NO: 404502 - RNA, 23 nt, Human
uugguaagauaauuacuuaaaau

SEQ ID NO: 404503 - RNA, 22 nt, Human
uugguuucucucuuugggagau

SEQ ID NO: 404504 - RNA, 22 nt, Human
aaaaaagagcauaaaacuguau

SEQ ID NO: 404505 - RNA, 19 nt, Human
aaagagcauaaaacuguau

SEQ ID NO: 404506 - RNA, 23 nt, Human
aacuguauguguaagaacaaaau

SEQ ID NO: 404507 - RNA, 22 nt, Human
acaaaagucugagacagagaag

SEQ ID NO: 404508 - RNA, 22 nt, Human
agaagacaaaaggacaacacaa

SEQ ID NO: 404509 - RNA, 21 nt, Human
agacaaaaggacaacacaaga

SEQ ID NO: 404510 - RNA, 23 nt, Human
caauaauaaaaaaccgucaauua

SEQ ID NO: 404511 - RNA, 18 nt, Human
cauuucaaaaagcagguc

SEQ ID NO: 404512 - RNA, 20 nt, Human
gacaaaaggacaacacaaga

SEQ ID NO: 404513 - RNA, 21 nt, Human
gagacagagaagacaaaagga

SEQ ID NO: 404514 - RNA, 18 nt, Human
uaaaaaaccgucaauuac

SEQ ID NO: 404515 - RNA, 18 nt, Human
uaaccaugacaauuaaaa

SEQ ID NO: 404516 - RNA, 23 nt, Human
uacaucaucacauuaaaauaagc

SEQ ID NO: 404517 - RNA, 19 nt, Human
uaccacaauaauaaaaaac

SEQ ID NO: 404518 - RNA, 23 nt, Human
ucaucacauuaaaauaagccaga

SEQ ID NO: 404519 - RNA, 20 nt, Human
uguauguguaagaacaaaau

SEQ ID NO: 404520 - RNA, 27 nt, Human
uuaaaauaagccagauguacaaaaguc

SEQ ID NO: 404521 - RNA, 23 nt, Human
aaacacaaaggggacaggucuga

SEQ ID NO: 404522 - RNA, 19 nt, Human
aacuuccgcccgccuucuc

SEQ ID NO: 404523 - RNA, 19 nt, Human
aauucuggauguccuggcu

SEQ ID NO: 404524 - RNA, 21 nt, Human
acaagaaggcccgacuccaaa

SEQ ID NO: 404525 - RNA, 24 nt, Human
acacaaaggggacaggucugagaa

SEQ ID NO: 404526 - RNA, 22 nt, Human
acagugggcuucagcugggacu

SEQ ID NO: 404527 - RNA, 20 nt, Human
accacagccauuuccuugca

SEQ ID NO: 404528 - RNA, 22 nt, Human
accacagccauuuccuugcauu

SEQ ID NO: 404529 - RNA, 19 nt, Human
accagccugcuggccuuug

SEQ ID NO: 404530 - RNA, 18 nt, Human
acugcaccaauccucugc

SEQ ID NO: 404531 - RNA, 27 nt, Human
agagggaaugaagcuucuucugaagga

SEQ ID NO: 404532 - RNA, 23 nt, Human
agcccugggagcuucuuccuuug

SEQ ID NO: 404533 - RNA, 19 nt, Human
aggacgucuaugagaagcc

SEQ ID NO: 404534 - RNA, 26 nt, Human
aggccaacacuguccucuaacagggg

SEQ ID NO: 404535 - RNA, 20 nt, Human
auccuugggggguccgaggg

SEQ ID NO: 404536 - RNA, 24 nt, Human
caaaggccaacacuguccucuaag

SEQ ID NO: 404537 - RNA, 19 nt, Human
caagaaggcccgacuccaa

SEQ ID NO: 404538 - RNA, 19 nt, Human
cacaagaaggcccgacucc

SEQ ID NO: 404539 - RNA, 20 nt, Human
cacaagaaggcccgacucca

SEQ ID NO: 404540 - RNA, 18 nt, Human
cacacagugggcuucagc

SEQ ID NO: 404541 - RNA, 23 nt, Human
caccgaaagggaaccagagccuc

SEQ ID NO: 404542 - RNA, 21 nt, Human
cacguccccaccagccugcug

SEQ ID NO: 404543 - RNA, 23 nt, Human
cacuugguccugguuaacucauu

SEQ ID NO: 404544 - RNA, 21 nt, Human
ccaauccucugcuaacagcaa

SEQ ID NO: 404545 - RNA, 24 nt, Human
cccgugccgcagccgccgccucag

SEQ ID NO: 404546 - RNA, 21 nt, Human
cccugggcagccuggacaggg

SEQ ID NO: 404547 - RNA, 20 nt, Human
cccuuaacacaagaaggccc

SEQ ID NO: 404548 - RNA, 22 nt, Human
ccgcagccgccgccucagcacc

SEQ ID NO: 404549 - RNA, 19 nt, Human
ccgugccgcagccgccgcc

SEQ ID NO: 404550 - RNA, 23 nt, Human
ccucgcgcccggagccgcucccc

SEQ ID NO: 404551 - RNA, 18 nt, Human
ccugggaagagggucacu

SEQ ID NO: 404552 - RNA, 24 nt, Human
ccuugggggguccgagggagcagc

SEQ ID NO: 404553 - RNA, 24 nt, Human
cgagggagcagcugcgugacuuuu

SEQ ID NO: 404554 - RNA, 24 nt, Human
cgcccggagccgcuccccggcugc

SEQ ID NO: 404555 - RNA, 23 nt, Human
cgccucagcaccgaauccaguau

SEQ ID NO: 404556 - RNA, 21 nt, Human
cggcugccggcgcauccuggg

SEQ ID NO: 404557 - RNA, 24 nt, Human
cgucuaugagaagcccugggcagc

SEQ ID NO: 404558 - RNA, 18 nt, Human
cuauggucacuccugagg

SEQ ID NO: 404559 - RNA, 24 nt, Human
cuccaaaggccaacacuguccucu

SEQ ID NO: 404560 - RNA, 21 nt, Human
cugggcagccuggacagggac

SEQ ID NO: 404561 - RNA, 20 nt, Human
gaccuugugccccuuaacac

SEQ ID NO: 404562 - RNA, 18 nt, Human
gacuccaaaggccaacag

SEQ ID NO: 404563 - RNA, 23 nt, Human
gccaacacuguccucuaacaggg

SEQ ID NO: 404564 - RNA, 20 nt, Human
gcccaccgaaagggaaccag

SEQ ID NO: 404565 - RNA, 20 nt, Human
gcugcgugacuuuucagcag

SEQ ID NO: 404566 - RNA, 21 nt, Human
ggaaugaagcuucuucugaag

SEQ ID NO: 404567 - RNA, 18 nt, Human
ggacugccccaugagugc

SEQ ID NO: 404568 - RNA, 18 nt, Human
ggcguucucuacccuacc

SEQ ID NO: 404569 - RNA, 24 nt, Human
gggaagccagagaugaggcucaaa

SEQ ID NO: 404570 - RNA, 22 nt, Human
ggugaaggaagcagcccuggga

SEQ ID NO: 404571 - RNA, 19 nt, Human
uaagagggaaugaagcuuc

SEQ ID NO: 404572 - RNA, 19 nt, Human
uaccacagccauuuccuug

SEQ ID NO: 404573 - RNA, 21 nt, Human
uauuaaagcaaugaauucugg

SEQ ID NO: 404574 - RNA, 20 nt, Human
ucacugagccuuucccgugc

SEQ ID NO: 404575 - RNA, 21 nt, Human
uccagcagagcuggccugcuc

SEQ ID NO: 404576 - RNA, 23 nt, Human
ucuggaccuugugccccuuaaca

SEQ ID NO: 404577 - RNA, 18 nt, Human
ugaaggaagcagcccugg

SEQ ID NO: 404578 - RNA, 22 nt, Human
ugagaaaguggcguucucuacc

SEQ ID NO: 404579 - RNA, 20 nt, Human
ugcgugacuuuucagcagug

SEQ ID NO: 404580 - RNA, 20 nt, Human
ugggcagccuggacagggac

SEQ ID NO: 404581 - RNA, 23 nt, Human
uucccgugccgcagccgccgccu

SEQ ID NO: 404582 - RNA, 24 nt, Human
uuccuugcauuacaccguccuucu

SEQ ID NO: 404583 - RNA, 18 nt, Human
aacaagaaugcagagccc

SEQ ID NO: 404584 - RNA, 22 nt, Human
aagaggcaacaagaaugcagag

SEQ ID NO: 404585 - RNA, 18 nt, Human
acaagaaugcagagcccg

SEQ ID NO: 404586 - RNA, 19 nt, Human
acccuaaagagcuguggga

SEQ ID NO: 404587 - RNA, 22 nt, Human
acccuaaagagcugugggaggg

SEQ ID NO: 404588 - RNA, 22 nt, Human
aggaaacaagccagaaaaaugc

SEQ ID NO: 404589 - RNA, 21 nt, Human
aggcaacaagaaugcagagcc

SEQ ID NO: 404590 - RNA, 24 nt, Human
aucuccaccucccugaacccccac

SEQ ID NO: 404591 - RNA, 21 nt, Human
auggcacugcagccuggguga

SEQ ID NO: 404592 - RNA, 19 nt, Human
cacauggcgggcccaucuc

SEQ ID NO: 404593 - RNA, 26 nt, Human
cacccacagccgcaccgcggaucccc

SEQ ID NO: 404594 - RNA, 24 nt, Human
cacccccgccagggaagaggcaac

SEQ ID NO: 404595 - RNA, 19 nt, Human
cagagcccggcccgggcgc

SEQ ID NO: 404596 - RNA, 24 nt, Human
cagcacagcacuauuaccaaugcu

SEQ ID NO: 404597 - RNA, 19 nt, Human
cauggcacugcagccuggg

SEQ ID NO: 404598 - RNA, 19 nt, Human
cauggcacugcagccuggg

SEQ ID NO: 404599 - RNA, 24 nt, Human
cauggcacugcagccugggugagg

SEQ ID NO: 404600 - RNA, 19 nt, Human
cccacagcaagccccgcgg

SEQ ID NO: 404601 - RNA, 23 nt, Human
cccacagcaagccccgcgggaga

SEQ ID NO: 404602 - RNA, 23 nt, Human
cccccacagcaagccccgcggga

SEQ ID NO: 404603 - RNA, 21 nt, Human
cccgccgcucacccacagccg

SEQ ID NO: 404604 - RNA, 23 nt, Human
cccgccgcucacccacagccgca

SEQ ID NO: 404605 - RNA, 23 nt, Human
cccugaacccccacagcaagccc

SEQ ID NO: 404606 - RNA, 24 nt, Human
cccugaacccccacagcaagcccc

SEQ ID NO: 404607 - RNA, 23 nt, Human
ccgcaccgcggauccccucgugc

SEQ ID NO: 404608 - RNA, 23 nt, Human
ccgggcgcucucccgagcucgcg

SEQ ID NO: 404609 - RNA, 21 nt, Human
ccugcaggcacauggcgggcc

SEQ ID NO: 404610 - RNA, 18 nt, Human
ccugcucccugcaggcac

SEQ ID NO: 404611 - RNA, 23 nt, Human
cgagcucgcggguccuccgccgg

SEQ ID NO: 404612 - RNA, 23 nt, Human
cgcucacccacagccgcaccgcg

SEQ ID NO: 404613 - RNA, 21 nt, Human
cuccaccucccugaaccccca

SEQ ID NO: 404614 - RNA, 19 nt, Human
gcacugcagccugggugag

SEQ ID NO: 404615 - RNA, 19 nt, Human
gcgccugcucccugcaggc

SEQ ID NO: 404616 - RNA, 19 nt, Human
ggcgcucucccgagcucgc

SEQ ID NO: 404617 - RNA, 24 nt, Human
gggaagaggcaacaagaaugcaga

SEQ ID NO: 404618 - RNA, 20 nt, Human
ggggcacuggcaaugaaaaa

SEQ ID NO: 404619 - RNA, 20 nt, Human
uccaguuucggggcacuggc

SEQ ID NO: 404620 - RNA, 20 nt, Human
ucccugaacccccacagcaa

SEQ ID NO: 404621 - RNA, 19 nt, Human
ucccugcaggcacauggcg

SEQ ID NO: 404622 - RNA, 21 nt, Human
ugaacccccacagcaagcccc

SEQ ID NO: 404623 - RNA, 19 nt, Human
ugaggugucugcauggcac

SEQ ID NO: 404624 - RNA, 21 nt, Human
ugcucccugcaggcacauggc

SEQ ID NO: 404625 - RNA, 22 nt, Human
ugggaggguucgaagaagaaaa

SEQ ID NO: 404626 - RNA, 21 nt, Human
ugguacagcagaucucacccu

SEQ ID NO: 404627 - RNA, 21 nt, Human
ugucucgguccuucacacucc

SEQ ID NO: 404628 - RNA, 23 nt, Human
uugaagugccaugaggugucugc

SEQ ID NO: 404629 - RNA, 21 nt, Human
uuuuuuuuuuuuuuuuuuaag

SEQ ID NO: 404630 - RNA, 19 nt, Human
aaaaaaaaaaaaaaagagg

SEQ ID NO: 404631 - RNA, 19 nt, Human
aaaaaaaaaaaaagagggg

SEQ ID NO: 404632 - RNA, 25 nt, Human
aaaaaaccaacauaaaaucugaaug

SEQ ID NO: 404633 - RNA, 27 nt, Human
aaaaaccaacauaaaaucugaaugguc

SEQ ID NO: 404634 - RNA, 18 nt, Human
aaaaccaauggaaaaucc

SEQ ID NO: 404635 - RNA, 19 nt, Human
aaacaacacggcacugugc

SEQ ID NO: 404636 - RNA, 22 nt, Human
aaacacccauuaugaaaaccaa

SEQ ID NO: 404637 - RNA, 24 nt, Human
aaacaccuuccuucccucacaucc

SEQ ID NO: 404638 - RNA, 20 nt, Human
aaagacagcaagaaucucaa

SEQ ID NO: 404639 - RNA, 20 nt, Human
aaagcaauccauggugaaaa

SEQ ID NO: 404640 - RNA, 24 nt, Human
aaagcgcucaacucucccccaagc

SEQ ID NO: 404641 - RNA, 22 nt, Human
aagaaacaauaagacagagcca

SEQ ID NO: 404642 - RNA, 21 nt, Human
aagaagaaaaacaauguccau

SEQ ID NO: 404643 - RNA, 27 nt, Human
aagaagaaaaacaauguccauaaagga

SEQ ID NO: 404644 - RNA, 21 nt, Human
aagaauccucuuggaagaccc

SEQ ID NO: 404645 - RNA, 26 nt, Human
aagaggaaaaaaaaaaaaaaaagagg

SEQ ID NO: 404646 - RNA, 21 nt, Human
aagcugcucauucuccuccca

SEQ ID NO: 404647 - RNA, 22 nt, Human
aagcuguaaacaacacggcacu

SEQ ID NO: 404648 - RNA, 18 nt, Human
aaguaaccuuuuuaagac

SEQ ID NO: 404649 - RNA, 19 nt, Human
aaguguucagcaaaacaag

SEQ ID NO: 404650 - RNA, 24 nt, Human
aauacagacacaguaugaagaaac

SEQ ID NO: 404651 - RNA, 22 nt, Human
acacucucuacccuggucgcac

SEQ ID NO: 404652 - RNA, 21 nt, Human
acagcaaaaaaccaacauaaa

SEQ ID NO: 404653 - RNA, 20 nt, Human
acuguauuugguauugaauu

SEQ ID NO: 404654 - RNA, 20 nt, Human
acuucacagcaaaaaaccaa

SEQ ID NO: 404655 - RNA, 23 nt, Human
acuuguauuuucuaauaaaaugg

SEQ ID NO: 404656 - RNA, 22 nt, Human
agaaaaacaauguccauaaagg

SEQ ID NO: 404657 - RNA, 22 nt, Human
agaaccagcugagaaccaagaa

SEQ ID NO: 404658 - RNA, 20 nt, Human
agacaaacaauaaacuguga

SEQ ID NO: 404659 - RNA, 23 nt, Human
agacagcaagaaucucaauuucu

SEQ ID NO: 404660 - RNA, 24 nt, Human
agaggaaaaaaaaaaaaaaaagag

SEQ ID NO: 404661 - RNA, 22 nt, Human
agcaaaacaagcuuagacggaa

SEQ ID NO: 404662 - RNA, 21 nt, Human
agcaaaaguuaaaacaucaaa

SEQ ID NO: 404663 - RNA, 18 nt, Human
agcaauuuuucugcagua

SEQ ID NO: 404664 - RNA, 23 nt, Human
agcugcucuagaaaagcuguaaa

SEQ ID NO: 404665 - RNA, 21 nt, Human
aggaauucuggaaugaguagu

SEQ ID NO: 404666 - RNA, 22 nt, Human
aguaaaagaaacaccuuccuuc

SEQ ID NO: 404667 - RNA, 23 nt, Human
aguaauuaccuucucaguuuaga

SEQ ID NO: 404668 - RNA, 22 nt, Human
auaaaauggagaacugccuuga

SEQ ID NO: 404669 - RNA, 21 nt, Human
augaaaagcagguuuggcuuu

SEQ ID NO: 404670 - RNA, 22 nt, Human
auggagaacugccuugacugua

SEQ ID NO: 404671 - RNA, 22 nt, Human
caagaaguaaccuuuuuaagac

SEQ ID NO: 404672 - RNA, 20 nt, Human
caagacaggaaaauuagagc

SEQ ID NO: 404673 - RNA, 24 nt, Human
cacaaaaagugauacaaaaaagca

SEQ ID NO: 404674 - RNA, 21 nt, Human
cacaaaagacagcaagaaucu

SEQ ID NO: 404675 - RNA, 23 nt, Human
cacagcaaaaaaccaacauaaaa

SEQ ID NO: 404676 - RNA, 22 nt, Human
cacuucacagcaaaaaaccaac

SEQ ID NO: 404677 - RNA, 23 nt, Human
cacuucacagcaaaaaaccaaca

SEQ ID NO: 404678 - RNA, 22 nt, Human
cagagccauauguaaaaguugu

SEQ ID NO: 404679 - RNA, 24 nt, Human
cagcaaaaaaccaacauaaaaucu

SEQ ID NO: 404680 - RNA, 23 nt, Human
cagcaaaacaagcuuagacggaa

SEQ ID NO: 404681 - RNA, 20 nt, Human
cauaaaaggacuuaaaugac

SEQ ID NO: 404682 - RNA, 22 nt, Human
cauaaauaggcgcaacagguuc

SEQ ID NO: 404683 - RNA, 19 nt, Human
cauauaaacacccauuaug

SEQ ID NO: 404684 - RNA, 21 nt, Human
cauauaaacacccauuaugaa

SEQ ID NO: 404685 - RNA, 19 nt, Human
caucaagccauuuaaaaag

SEQ ID NO: 404686 - RNA, 20 nt, Human
ccaaagaaaugcagaaauaa

SEQ ID NO: 404687 - RNA, 21 nt, Human
ccaagaaagagacaucagcca

SEQ ID NO: 404688 - RNA, 18 nt, Human
cccaagccgcggcgcgca

SEQ ID NO: 404689 - RNA, 21 nt, Human
cccuuucacuucuuccagccc

SEQ ID NO: 404690 - RNA, 20 nt, Human
gaaaaaaaaaaaaaaaagag

SEQ ID NO: 404691 - RNA, 21 nt, Human
gaaaugcagaaauaaggacug

SEQ ID NO: 404692 - RNA, 19 nt, Human
gagccaguuucaauuacaa

SEQ ID NO: 404693 - RNA, 21 nt, Human
gcaaaaguuaaaacaucaaag

SEQ ID NO: 404694 - RNA, 25 nt, Human
guucccuagcaaaucucugguaccu

SEQ ID NO: 404695 - RNA, 24 nt, Human
guuguaauuuagcuguuuccaauc

SEQ ID NO: 404696 - RNA, 24 nt, Human
uaaaaaaauaauaaagaagcauga

SEQ ID NO: 404697 - RNA, 24 nt, Human
uaaaagaaacaccuuccuucccuc

SEQ ID NO: 404698 - RNA, 25 nt, Human
uaaccauuacacaaaaagugauaca

SEQ ID NO: 404699 - RNA, 19 nt, Human
uacaaagcaauccauggug

SEQ ID NO: 404700 - RNA, 25 nt, Human
uacaaagcaauccauggugaaaaca

SEQ ID NO: 404701 - RNA, 18 nt, Human
uacacaaugcauauauuu

SEQ ID NO: 404702 - RNA, 24 nt, Human
uacuuuuuugcggggggcgggggg

SEQ ID NO: 404703 - RNA, 22 nt, Human
uaggcgcaacagguuccauaaa

SEQ ID NO: 404704 - RNA, 23 nt, Human
uauaaacacccauuaugaaaacc

SEQ ID NO: 404705 - RNA, 24 nt, Human
uauaaacacccauuaugaaaacca

SEQ ID NO: 404706 - RNA, 21 nt, Human
ucaaauacuaacaaauuuacu

SEQ ID NO: 404707 - RNA, 21 nt, Human
ucaauaaacuggaaugagcca

SEQ ID NO: 404708 - RNA, 22 nt, Human
ucaguggaaagaagagguguuc

SEQ ID NO: 404709 - RNA, 23 nt, Human
ucauauaaacacccauuaugaaa

SEQ ID NO: 404710 - RNA, 18 nt, Human
ucccaguaauuaccuucu

SEQ ID NO: 404711 - RNA, 23 nt, Human
ucccuuucacuucuuccagcccc

SEQ ID NO: 404712 - RNA, 18 nt, Human
ucccuuuucuuuugcuau

SEQ ID NO: 404713 - RNA, 19 nt, Human
uccuuuucuuuuuccuuuu

SEQ ID NO: 404714 - RNA, 23 nt, Human
ucuaaaauacuaaacagacaaac

SEQ ID NO: 404715 - RNA, 22 nt, Human
ugaaaacacuucccugaauucc

SEQ ID NO: 404716 - RNA, 18 nt, Human
ugaaaagcaugcagcuug

SEQ ID NO: 404717 - RNA, 21 nt, Human
ugaaguaaaaauaugaauguu

SEQ ID NO: 404718 - RNA, 26 nt, Human
ugcaucaaccaaagaaaugcagaaau

SEQ ID NO: 404719 - RNA, 18 nt, Human
ugcggggggcggggggug

SEQ ID NO: 404720 - RNA, 22 nt, Human
uggaagacccaggaauucugga

SEQ ID NO: 404721 - RNA, 23 nt, Human
uggaagacccaggaauucuggaa

SEQ ID NO: 404722 - RNA, 22 nt, Human
ugggaauacuuuuuauuuucaa

SEQ ID NO: 404723 - RNA, 24 nt, Human
ugugaaaucaauaaacuggaauga

SEQ ID NO: 404724 - RNA, 22 nt, Human
uguuuucuuuuauuuacauuug

SEQ ID NO: 404725 - RNA, 18 nt, Human
uuacaauuuagcuacaaa

SEQ ID NO: 404726 - RNA, 21 nt, Human
uuagagcucucagcuacaguc

SEQ ID NO: 404727 - RNA, 20 nt, Human
uuauccgagacaucuacagu

SEQ ID NO: 404728 - RNA, 21 nt, Human
uucaagguuguacaaugccua

SEQ ID NO: 404729 - RNA, 18 nt, Human
uucacagcaaaaaaccaa

SEQ ID NO: 404730 - RNA, 19 nt, Human
uucccuagcaaaucucugg

SEQ ID NO: 404731 - RNA, 23 nt, Human
uucccuuucacuucuuccagccc

SEQ ID NO: 404732 - RNA, 20 nt, Human
uuccugcacaaaccgccugu

SEQ ID NO: 404733 - RNA, 20 nt, Human
uucuuuuuuuaaugugaaag

SEQ ID NO: 404734 - RNA, 24 nt, Human
uugacuguacaaagcaauccaugg

SEQ ID NO: 404735 - RNA, 18 nt, Human
uugcggggggcggggggu

SEQ ID NO: 404736 - RNA, 22 nt, Human
uugugguuuguuuaagaagaag

SEQ ID NO: 404737 - RNA, 18 nt, Human
uuuaaugugaaagcuaug

SEQ ID NO: 404738 - RNA, 22 nt, Human
uuuacaaacuugcuaugacugc

SEQ ID NO: 404739 - RNA, 22 nt, Human
uuuacuuuuuugcggggggcgg

SEQ ID NO: 404740 - RNA, 18 nt, Human
uuuagacuuaaugcaagu

SEQ ID NO: 404741 - RNA, 23 nt, Human
uuuagacuuaaugcaagugaaau

SEQ ID NO: 404742 - RNA, 24 nt, Human
uuugccaauuuaaccccuauugug

SEQ ID NO: 404743 - RNA, 24 nt, Human
uuuucuuuuuuuaaugugaaagcu

SEQ ID NO: 404744 - RNA, 24 nt, Human
uuuugugaaaagcaugcagcuuga

SEQ ID NO: 404745 - RNA, 19 nt, Human
aaaaaaaaaaaaaaaaaga

SEQ ID NO: 404746 - RNA, 19 nt, Human
aaaaaaaaaaaaaagaaaa

SEQ ID NO: 404747 - RNA, 20 nt, Human
aaaaagaaaaaagaaauuga

SEQ ID NO: 404748 - RNA, 26 nt, Human
aaaaccccaaucccaucaaccccugc

SEQ ID NO: 404749 - RNA, 22 nt, Human
aaaaggugguuucaaggccaga

SEQ ID NO: 404750 - RNA, 24 nt, Human
aaacccaaaauggcaggggaggga

SEQ ID NO: 404751 - RNA, 21 nt, Human
aaacuaccaacccaccagcca

SEQ ID NO: 404752 - RNA, 19 nt, Human
aacacugugagaccccauc

SEQ ID NO: 404753 - RNA, 20 nt, Human
aacacugugagaccccaucu

SEQ ID NO: 404754 - RNA, 21 nt, Human
aacacugugagaccccaucuc

SEQ ID NO: 404755 - RNA, 23 nt, Human
aaccccugcgaggcuccuggcac

SEQ ID NO: 404756 - RNA, 24 nt, Human
aaccuguggucccagcuacuccgg

SEQ ID NO: 404757 - RNA, 21 nt, Human
aagaaaaaagaaauugacccu

SEQ ID NO: 404758 - RNA, 25 nt, Human
aagcaaggguucaaagacccaaaac

SEQ ID NO: 404759 - RNA, 18 nt, Human
aaggcugcaguaagccaa

SEQ ID NO: 404760 - RNA, 21 nt, Human
aaggguucaaagacccaaaac

SEQ ID NO: 404761 - RNA, 19 nt, Human
aaugggauauaaaaaggga

SEQ ID NO: 404762 - RNA, 24 nt, Human
acaaagcgagacccagucucaaag

SEQ ID NO: 404763 - RNA, 20 nt, Human
accaacccaccagccaacag

SEQ ID NO: 404764 - RNA, 23 nt, Human
accccauguaauaaaaggugguu

SEQ ID NO: 404765 - RNA, 22 nt, Human
accuguggucccagcuacuccg

SEQ ID NO: 404766 - RNA, 18 nt, Human
acuccacuccagccuggg

SEQ ID NO: 404767 - RNA, 23 nt, Human
acuccacuccagccugggcaaca

SEQ ID NO: 404768 - RNA, 18 nt, Human
acuccggaggcugaggca

SEQ ID NO: 404769 - RNA, 23 nt, Human
agaaaaaaaaaaaaaaaaaagaa

SEQ ID NO: 404770 - RNA, 22 nt, Human
agaaacuaccaacccaccagcc

SEQ ID NO: 404771 - RNA, 19 nt, Human
agcacucugggaggcugag

SEQ ID NO: 404772 - RNA, 22 nt, Human
agccggggaggcaaaggcugca

SEQ ID NO: 404773 - RNA, 19 nt, Human
agcgccagucuugagcaca

SEQ ID NO: 404774 - RNA, 23 nt, Human
agcugguauguccuacuccccau

SEQ ID NO: 404775 - RNA, 20 nt, Human
aggaguuugagaccagccug

SEQ ID NO: 404776 - RNA, 18 nt, Human
agggaagcgugucaccgu

SEQ ID NO: 404777 - RNA, 18 nt, Human
agggagagaugggggugg

SEQ ID NO: 404778 - RNA, 22 nt, Human
agggagagggagagggaacagg

SEQ ID NO: 404779 - RNA, 19 nt, Human
aggguucaaagacccaaaa

SEQ ID NO: 404780 - RNA, 25 nt, Human
auacaagagaugaaauccuccaggg

SEQ ID NO: 404781 - RNA, 24 nt, Human
aucacgccacuccacuccagccug

SEQ ID NO: 404782 - RNA, 26 nt, Human
auggcaggggagggagagaugggggu

SEQ ID NO: 404783 - RNA, 24 nt, Human
augggggugggaggcugucagugg

SEQ ID NO: 404784 - RNA, 25 nt, Human
auuucauuaacccucacaaugcacu

SEQ ID NO: 404785 - RNA, 20 nt, Human
caaagacccaaaacccaaaa

SEQ ID NO: 404786 - RNA, 24 nt, Human
caaaggcugcaguaagccaagauc

SEQ ID NO: 404787 - RNA, 25 nt, Human
caacaaagcgagacccagucucagu

SEQ ID NO: 404788 - RNA, 22 nt, Human
caagaacauuucuuacaucucc

SEQ ID NO: 404789 - RNA, 23 nt, Human
caauuguaaucccagcacucugg

SEQ ID NO: 404790 - RNA, 24 nt, Human
caauuguaaucccagcacucuggg

SEQ ID NO: 404791 - RNA, 21 nt, Human
cacaacaaaacaccagugcag

SEQ ID NO: 404792 - RNA, 24 nt, Human
cacaauuguaaucccagcacucug

SEQ ID NO: 404793 - RNA, 24 nt, Human
cacuccacuccagccugggcaaca

SEQ ID NO: 404794 - RNA, 21 nt, Human
cagaugugcuugcagaaugua

SEQ ID NO: 404795 - RNA, 24 nt, Human
cagcacucugggaggcugagacag

SEQ ID NO: 404796 - RNA, 26 nt, Human
cagcacucugggaggcugagacaggu

SEQ ID NO: 404797 - RNA, 20 nt, Human
caggcacccucaaggggguc

SEQ ID NO: 404798 - RNA, 21 nt, Human
caucauauacaagagaugaaa

SEQ ID NO: 404799 - RNA, 21 nt, Human
cauccuccuccccacaacaaa

SEQ ID NO: 404800 - RNA, 21 nt, Human
cauuucacagauaugggccuu

SEQ ID NO: 404801 - RNA, 27 nt, Human
ccaaacaucccucacaguaaaaaccuu

SEQ ID NO: 404802 - RNA, 18 nt, Human
ccaccagccaacagggag

SEQ ID NO: 404803 - RNA, 21 nt, Human
ccacuccacuccagccugggc

SEQ ID NO: 404804 - RNA, 23 nt, Human
ccacuccacuccagccugggcaa

SEQ ID NO: 404805 - RNA, 24 nt, Human
ccacuccacuccagccugggcaac

SEQ ID NO: 404806 - RNA, 23 nt, Human
ccagcuccacgugguggcucaca

SEQ ID NO: 404807 - RNA, 21 nt, Human
ccagucuugagcacaugggag

SEQ ID NO: 404808 - RNA, 21 nt, Human
ccauccuccuccccacaacaa

SEQ ID NO: 404809 - RNA, 18 nt, Human
cccacaacaaaacaccag

SEQ ID NO: 404810 - RNA, 23 nt, Human
cccaccagccaacagggagaggg

SEQ ID NO: 404811 - RNA, 27 nt, Human
cccagucucaaagaaaaagaaaaaaaa

SEQ ID NO: 404812 - RNA, 18 nt, Human
ccccaaucccaucaaccc

SEQ ID NO: 404813 - RNA, 19 nt, Human
ccccacaacaaaacaccag

SEQ ID NO: 404814 - RNA, 24 nt, Human
ccccggagcccagcagcuaccugc

SEQ ID NO: 404815 - RNA, 21 nt, Human
cccggaaggcagucuggcugc

SEQ ID NO: 404816 - RNA, 19 nt, Human
ccgaacgcaaagugucccc

SEQ ID NO: 404817 - RNA, 26 nt, Human
ccuauugcaagcaaggguucaaagac

SEQ ID NO: 404818 - RNA, 18 nt, Human
ccucaagggggucaaguu

SEQ ID NO: 404819 - RNA, 19 nt, Human
ccuccagggugugggaugg

SEQ ID NO: 404820 - RNA, 20 nt, Human
ccuccagggugugggauggg

SEQ ID NO: 404821 - RNA, 19 nt, Human
ccuccccacaacaaaacac

SEQ ID NO: 404822 - RNA, 22 nt, Human
ccuguggucccagcuacuccgg

SEQ ID NO: 404823 - RNA, 23 nt, Human
ccuguggucccagcuacuccgga

SEQ ID NO: 404824 - RNA, 23 nt, Human
cgagacccagucucaaagaaaaa

SEQ ID NO: 404825 - RNA, 20 nt, Human
cgccacuccacuccagccug

SEQ ID NO: 404826 - RNA, 24 nt, Human
cgccacuccacuccagccugggca

SEQ ID NO: 404827 - RNA, 19 nt, Human
cugguuaguacggugaagu

SEQ ID NO: 404828 - RNA, 20 nt, Human
cuugacaacucccucuaccu

SEQ ID NO: 404829 - RNA, 21 nt, Human
gaaggaggggaaggguggggu

SEQ ID NO: 404830 - RNA, 24 nt, Human
gacuuuugagaagcucaaaacuuu

SEQ ID NO: 404831 - RNA, 20 nt, Human
gaucgauauaaaaaugggau

SEQ ID NO: 404832 - RNA, 24 nt, Human
gaucgccugagcccaggaguuuga

SEQ ID NO: 404833 - RNA, 19 nt, Human
gcaaggguucaaagaccca

SEQ ID NO: 404834 - RNA, 23 nt, Human
gccaacagggagagggagaggga

SEQ ID NO: 404835 - RNA, 22 nt, Human
gccacuccacuccagccugggc

SEQ ID NO: 404836 - RNA, 21 nt, Human
gccagcaagacuugacaacuc

SEQ ID NO: 404837 - RNA, 19 nt, Human
gcccaacuguagaaacuac

SEQ ID NO: 404838 - RNA, 22 nt, Human
gcccaggaguuugagaccagcc

SEQ ID NO: 404839 - RNA, 22 nt, Human
gcccgaacgcaaaguguccccg

SEQ ID NO: 404840 - RNA, 21 nt, Human
ggaaaaccccaaucccaucaa

SEQ ID NO: 404841 - RNA, 24 nt, Human
ggaaaaccccaaucccaucaaccc

SEQ ID NO: 404842 - RNA, 21 nt, Human
ggagaaggaggggaagggugg

SEQ ID NO: 404843 - RNA, 18 nt, Human
ggagccccgggacaaagc

SEQ ID NO: 404844 - RNA, 19 nt, Human
ggagggagagaugggggug

SEQ ID NO: 404845 - RNA, 19 nt, Human
gggaaaaccccaaucccau

SEQ ID NO: 404846 - RNA, 25 nt, Human
gggagagaugggggugggaggcugu

SEQ ID NO: 404847 - RNA, 22 nt, Human
gggagggagagauggggguggg

SEQ ID NO: 404848 - RNA, 19 nt, Human
ggggaaggguggggugaaa

SEQ ID NO: 404849 - RNA, 19 nt, Human
ggggagggagagauggggg

SEQ ID NO: 404850 - RNA, 18 nt, Human
gggggugggaggcuguca

SEQ ID NO: 404851 - RNA, 24 nt, Human
gguggcucacaauuguaaucccag

SEQ ID NO: 404852 - RNA, 19 nt, Human
guggggaacaagaagugga

SEQ ID NO: 404853 - RNA, 19 nt, Human
uaaaaaccuuaaaaucuaa

SEQ ID NO: 404854 - RNA, 18 nt, Human
uacauuauuucauuaacc

SEQ ID NO: 404855 - RNA, 20 nt, Human
uacauuauuucauuaacccu

SEQ ID NO: 404856 - RNA, 20 nt, Human
uaccaacccaccagccaaca

SEQ ID NO: 404857 - RNA, 22 nt, Human
uaccuaccuagaauguggcuga

SEQ ID NO: 404858 - RNA, 20 nt, Human
uaccuagaauguggcugauu

SEQ ID NO: 404859 - RNA, 19 nt, Human
uagaaacuaccaacccacc

SEQ ID NO: 404860 - RNA, 24 nt, Human
uccagccugggcaacaaagcgaga

SEQ ID NO: 404861 - RNA, 21 nt, Human
uccccauccuccuccccacaa

SEQ ID NO: 404862 - RNA, 22 nt, Human
uccccauccuccuccccacaac

SEQ ID NO: 404863 - RNA, 23 nt, Human
ucgccugagcccaggaguuugag

SEQ ID NO: 404864 - RNA, 22 nt, Human
ucucuacaaaacaugcaaaagu

SEQ ID NO: 404865 - RNA, 19 nt, Human
ucuggcugccaauccaggg

SEQ ID NO: 404866 - RNA, 22 nt, Human
ucuuacaucucccaaacauccc

SEQ ID NO: 404867 - RNA, 20 nt, Human
ugagacagguggaucgccug

SEQ ID NO: 404868 - RNA, 21 nt, Human
ugagcccaggaguuugagacc

SEQ ID NO: 404869 - RNA, 23 nt, Human
ugagcccaggaguuugagaccag

SEQ ID NO: 404870 - RNA, 19 nt, Human
ugauuguaaacuaacccuu

SEQ ID NO: 404871 - RNA, 26 nt, Human
ugcaagcaaggguucaaagacccaaa

SEQ ID NO: 404872 - RNA, 22 nt, Human
uggaaagcacgcucccagcccg

SEQ ID NO: 404873 - RNA, 23 nt, Human
uggaucgccugagcccaggaguu

SEQ ID NO: 404874 - RNA, 24 nt, Human
uggaucgccugagcccaggaguuu

SEQ ID NO: 404875 - RNA, 18 nt, Human
uggcacaaagcuggacag

SEQ ID NO: 404876 - RNA, 24 nt, Human
uggcaugaaccuguggucccagcu

SEQ ID NO: 404877 - RNA, 22 nt, Human
uggcucacaauuguaaucccag

SEQ ID NO: 404878 - RNA, 24 nt, Human
uggcucacaauuguaaucccagca

SEQ ID NO: 404879 - RNA, 23 nt, Human
ugggaggcugagacagguggauc

SEQ ID NO: 404880 - RNA, 20 nt, Human
ugggauggggugagauuucc

SEQ ID NO: 404881 - RNA, 22 nt, Human
ugggcaacacugugagacccca

SEQ ID NO: 404882 - RNA, 25 nt, Human
ugggccagcaagacuugacaacucc

SEQ ID NO: 404883 - RNA, 24 nt, Human
ugguggcucacaauuguaauccca

SEQ ID NO: 404884 - RNA, 21 nt, Human
ugguuucaaggccagauguac

SEQ ID NO: 404885 - RNA, 20 nt, Human
uguccccggagcccagcagc

SEQ ID NO: 404886 - RNA, 22 nt, Human
uugacccugagcauaaaacaag

SEQ ID NO: 404887 - RNA, 23 nt, Human
uugcaagcaaggguucaaagacc

SEQ ID NO: 404888 - RNA, 19 nt, Human
aaaaaaaaaaacacgccaa

SEQ ID NO: 404889 - RNA, 20 nt, Human
aaaaaaaaaaacacgccaaa

SEQ ID NO: 404890 - RNA, 24 nt, Human
aaaaaacaaaaaaaaaaacacgcc

SEQ ID NO: 404891 - RNA, 23 nt, Human
aaaacaaaaaaaaaaacacgcca

SEQ ID NO: 404892 - RNA, 23 nt, Human
acaaaaaaaaaaacacgccaaac

SEQ ID NO: 404893 - RNA, 21 nt, Human
agagcacucccagggcccggg

SEQ ID NO: 404894 - RNA, 22 nt, Human
caauacugcgcagccuuccaga

SEQ ID NO: 404895 - RNA, 18 nt, Human
caggacccaggcaggcag

SEQ ID NO: 404896 - RNA, 19 nt, Human
caggcagugacaaaaaaca

SEQ ID NO: 404897 - RNA, 27 nt, Human
caggcagugacaaaaaacaaaaaaaaa

SEQ ID NO: 404898 - RNA, 26 nt, Human
cauucuguccccuccaauacugcgca

SEQ ID NO: 404899 - RNA, 23 nt, Human
cuacaaccaaagagauucaacca

SEQ ID NO: 404900 - RNA, 19 nt, Human
cugguuaaaacacaaucuc

SEQ ID NO: 404901 - RNA, 19 nt, Human
gauagcagggaauaaaacc

SEQ ID NO: 404902 - RNA, 23 nt, Human
gauagcagggaauaaaaccagua

SEQ ID NO: 404903 - RNA, 23 nt, Human
gcaaggaauccaguuacacacaa

SEQ ID NO: 404904 - RNA, 23 nt, Human
ggaauccaguuacacacaagaca

SEQ ID NO: 404905 - RNA, 22 nt, Human
uaaaacacaaucuccacgauag

SEQ ID NO: 404906 - RNA, 20 nt, Human
uacaaccaaagagauucaac

SEQ ID NO: 404907 - RNA, 18 nt, Human
uacaagauccaugcaagg

SEQ ID NO: 404908 - RNA, 21 nt, Human
uacugcgcagccuuccagagc

SEQ ID NO: 404909 - RNA, 24 nt, Human
uagcagggaauaaaaccaguaaga

SEQ ID NO: 404910 - RNA, 21 nt, Human
uccagagcacucccagggccc

SEQ ID NO: 404911 - RNA, 22 nt, Human
ugacaaaaaacaaaaaaaaaaa

SEQ ID NO: 404912 - RNA, 25 nt, Human
ugacaaaaaacaaaaaaaaaaacac

SEQ ID NO: 404913 - RNA, 19 nt, Human
ugcgcagccuuccagagca

SEQ ID NO: 404914 - RNA, 22 nt, Human
aaaagacaauaaauacagauua

SEQ ID NO: 404915 - RNA, 22 nt, Human
aacuucguuccucugacuucca

SEQ ID NO: 404916 - RNA, 19 nt, Human
aagaagcgaacuucguucc

SEQ ID NO: 404917 - RNA, 23 nt, Human
acaagccccgggcucccccgccc

SEQ ID NO: 404918 - RNA, 19 nt, Human
acaugaugaaacucuaucu

SEQ ID NO: 404919 - RNA, 22 nt, Human
accacacuucagccaaauggga

SEQ ID NO: 404920 - RNA, 24 nt, Human
acuguuuuuaaagucagcuaugau

SEQ ID NO: 404921 - RNA, 24 nt, Human
agcacuuugggaggccgaggcagg

SEQ ID NO: 404922 - RNA, 21 nt, Human
agccccgggcucccccgcccc

SEQ ID NO: 404923 - RNA, 20 nt, Human
aggcaggcggaucacaaggu

SEQ ID NO: 404924 - RNA, 24 nt, Human
aggcaggcggaucacaaggucagg

SEQ ID NO: 404925 - RNA, 25 nt, Human
aggcaggcggaucacaaggucagga

SEQ ID NO: 404926 - RNA, 21 nt, Human
aggccgaggcaggcggaucac

SEQ ID NO: 404927 - RNA, 23 nt, Human
aggccgaggcaggcggaucacaa

SEQ ID NO: 404928 - RNA, 24 nt, Human
aggcggaucacaaggucaggagau

SEQ ID NO: 404929 - RNA, 24 nt, Human
aggcggcggcggcggcagcggcgg

SEQ ID NO: 404930 - RNA, 21 nt, Human
auccuggccaacaugaugaaa

SEQ ID NO: 404931 - RNA, 21 nt, Human
augacgaaggaagaagcgaac

SEQ ID NO: 404932 - RNA, 19 nt, Human
auggccugcugacguagau

SEQ ID NO: 404933 - RNA, 21 nt, Human
caaaagacaauaaauacagau

SEQ ID NO: 404934 - RNA, 19 nt, Human
caaccaacuaacguucuuc

SEQ ID NO: 404935 - RNA, 26 nt, Human
caacuaacguucuucacugacaauau

SEQ ID NO: 404936 - RNA, 21 nt, Human
caccaacaagccccgggcucc

SEQ ID NO: 404937 - RNA, 19 nt, Human
caccguucuccuuucuucg

SEQ ID NO: 404938 - RNA, 18 nt, Human
caccuguaauccagcacu

SEQ ID NO: 404939 - RNA, 23 nt, Human
caccuguaauccagcacuuuggg

SEQ ID NO: 404940 - RNA, 26 nt, Human
caccuguaauccagcacuuugggagg

SEQ ID NO: 404941 - RNA, 27 nt, Human
caccuuugccccaacacaguauggccu

SEQ ID NO: 404942 - RNA, 25 nt, Human
cagagccacaccacacuucagccaa

SEQ ID NO: 404943 - RNA, 24 nt, Human
cagcacuuugggaggccgaggcag

SEQ ID NO: 404944 - RNA, 26 nt, Human
cagcacuuugggaggccgaggcaggc

SEQ ID NO: 404945 - RNA, 23 nt, Human
cagccuacaaacaagauucuaca

SEQ ID NO: 404946 - RNA, 18 nt, Human
ccaaggccugcuggugcc

SEQ ID NO: 404947 - RNA, 18 nt, Human
ccaggaacuuuuacacca

SEQ ID NO: 404948 - RNA, 19 nt, Human
ccccaacacaguauggccu

SEQ ID NO: 404949 - RNA, 25 nt, Human
ccccgccccggccgggcccccugac

SEQ ID NO: 404950 - RNA, 18 nt, Human
ccccgggcucccccgccc

SEQ ID NO: 404951 - RNA, 18 nt, Human
ccgccccggccgggcccc

SEQ ID NO: 404952 - RNA, 20 nt, Human
ccuggccaacaugaugaaac

SEQ ID NO: 404953 - RNA, 24 nt, Human
ccuggccaacaugaugaaacucua

SEQ ID NO: 404954 - RNA, 24 nt, Human
cgagaccauccuggccaacaugau

SEQ ID NO: 404955 - RNA, 26 nt, Human
cgaggcaggcggaucacaaggucagg

SEQ ID NO: 404956 - RNA, 18 nt, Human
cgaggccgcccggaccug

SEQ ID NO: 404957 - RNA, 18 nt, Human
cgguaagaaacaucggca

SEQ ID NO: 404958 - RNA, 23 nt, Human
cucacaccuguaauccagcacuu

SEQ ID NO: 404959 - RNA, 22 nt, Human
gaaaacacucaacaggacagag

SEQ ID NO: 404960 - RNA, 19 nt, Human
gacccgaaccgcauggaag

SEQ ID NO: 404961 - RNA, 25 nt, Human
gagagcgaggccgcccggaccuguu

SEQ ID NO: 404962 - RNA, 21 nt, Human
gagccccaaggccugcuggug

SEQ ID NO: 404963 - RNA, 21 nt, Human
gaggcugaucgugguggcuca

SEQ ID NO: 404964 - RNA, 18 nt, Human
gcagcggcggcgcgcggg

SEQ ID NO: 404965 - RNA, 19 nt, Human
gcccggaccuguugcgagg

SEQ ID NO: 404966 - RNA, 24 nt, Human
gcccggaccuguugcgaggcggcg

SEQ ID NO: 404967 - RNA, 22 nt, Human
gcgaggcggcggcggcggcagc

SEQ ID NO: 404968 - RNA, 22 nt, Human
gcggcgcgcggguccgaagggc

SEQ ID NO: 404969 - RNA, 20 nt, Human
gcggcggcggcagcggcggc

SEQ ID NO: 404970 - RNA, 22 nt, Human
gcguucaugacgaaggaagaag

SEQ ID NO: 404971 - RNA, 19 nt, Human
ggcagcggcggcgcgcggg

SEQ ID NO: 404972 - RNA, 19 nt, Human
ggugccggggacaaucaga

SEQ ID NO: 404973 - RNA, 23 nt, Human
gguggcucacaccuguaauccag

SEQ ID NO: 404974 - RNA, 18 nt, Human
gugaagugcugcucauug

SEQ ID NO: 404975 - RNA, 22 nt, Human
uaaagucagcuaugaucuugac

SEQ ID NO: 404976 - RNA, 22 nt, Human
uaggagcagcugcugaaaacac

SEQ ID NO: 404977 - RNA, 18 nt, Human
ucacaaggucaggagauc

SEQ ID NO: 404978 - RNA, 24 nt, Human
ucacaaggucaggagaucgagacc

SEQ ID NO: 404979 - RNA, 24 nt, Human
ucacaccuguaauccagcacuuug

SEQ ID NO: 404980 - RNA, 20 nt, Human
ucagagacagcgaugugacg

SEQ ID NO: 404981 - RNA, 18 nt, Human
ucagugagccccaaggcc

SEQ ID NO: 404982 - RNA, 18 nt, Human
uccgcgcgggcuggggca

SEQ ID NO: 404983 - RNA, 21 nt, Human
uccgcgcgggcuggggcacca

SEQ ID NO: 404984 - RNA, 21 nt, Human
ucguauuacuucuucuuaaca

SEQ ID NO: 404985 - RNA, 21 nt, Human
ucucgccggguucuuugcaca

SEQ ID NO: 404986 - RNA, 24 nt, Human
ucuucuagagacauucuucaucgc

SEQ ID NO: 404987 - RNA, 20 nt, Human
ugaaaacacucaacaggacu

SEQ ID NO: 404988 - RNA, 19 nt, Human
ugaagaacaucaaacauuc

SEQ ID NO: 404989 - RNA, 18 nt, Human
ugacgcggcuuugucucu

SEQ ID NO: 404990 - RNA, 20 nt, Human
ugagccccaaggccugcugg

SEQ ID NO: 404991 - RNA, 24 nt, Human
ugagccccaaggccugcuggugcc

SEQ ID NO: 404992 - RNA, 24 nt, Human
ugccccaacacaguauggccugcu

SEQ ID NO: 404993 - RNA, 18 nt, Human
ugccuucgagccuucagu

SEQ ID NO: 404994 - RNA, 18 nt, Human
ugcgggggaggggagcgg

SEQ ID NO: 404995 - RNA, 19 nt, Human
uggaagcggguggccagac

SEQ ID NO: 404996 - RNA, 23 nt, Human
uggaagcggguggccagacugcg

SEQ ID NO: 404997 - RNA, 21 nt, Human
uggccagacugcggccccggc

SEQ ID NO: 404998 - RNA, 19 nt, Human
uggcucacaccuguaaucc

SEQ ID NO: 404999 - RNA, 23 nt, Human
uggcucacaccuguaauccagca

SEQ ID NO: 405000 - RNA, 20 nt, Human
ugggaggccgaggcaggcgg

SEQ ID NO: 405001 - RNA, 24 nt, Human
ugggaggccgaggcaggcggauca

SEQ ID NO: 405002 - RNA, 19 nt, Human
uggugaauucuucaauccu

SEQ ID NO: 405003 - RNA, 19 nt, Human
uggugaauucuucaauccu

SEQ ID NO: 405004 - RNA, 22 nt, Human
uggugaauucuucaauccuuca

SEQ ID NO: 405005 - RNA, 18 nt, Human
uuaaaauucagccuacaa

SEQ ID NO: 405006 - RNA, 21 nt, Human
uuaagaugcuacaaaaacuca

SEQ ID NO: 405007 - RNA, 20 nt, Human
uucaucacgcuaaauguccu

SEQ ID NO: 405008 - RNA, 26 nt, Human
uucuucgauauucaccaggaacuuuu

SEQ ID NO: 405009 - RNA, 18 nt, Human
uuggauccugagaucuug

SEQ ID NO: 405010 - RNA, 21 nt, Human
uuggauccugagaucuugguu

SEQ ID NO: 405011 - RNA, 25 nt, Human
uugggaggccgaggcaggcggauca

SEQ ID NO: 405012 - RNA, 22 nt, Human
aaaacuuugaaaucaaggacuc

SEQ ID NO: 405013 - RNA, 24 nt, Human
aaaagcccauaacagaaaguacca

SEQ ID NO: 405014 - RNA, 26 nt, Human
aaacaaaaacuuuucaauucuucagc

SEQ ID NO: 405015 - RNA, 21 nt, Human
aaacaaaaagagauuguaggg

SEQ ID NO: 405016 - RNA, 23 nt, Human
aaacaauacucaaugccccccac

SEQ ID NO: 405017 - RNA, 27 nt, Human
aaacgucuccaaacaaaaacuuuucaa

SEQ ID NO: 405018 - RNA, 27 nt, Human
aaagaaacauuuaccaaacaaaagaaa

SEQ ID NO: 405019 - RNA, 22 nt, Human
aaagcugcaugcuuguugcaga

SEQ ID NO: 405020 - RNA, 20 nt, Human
aaaguaccagaagacaagca

SEQ ID NO: 405021 - RNA, 26 nt, Human
aaauaucccuuuaacauucaauaucc

SEQ ID NO: 405022 - RNA, 21 nt, Human
aaaucccacuaucccaagaag

SEQ ID NO: 405023 - RNA, 18 nt, Human
aaaucucugcagcuuaag

SEQ ID NO: 405024 - RNA, 27 nt, Human
aacaaaagaaacauuuaccaaacaaua

SEQ ID NO: 405025 - RNA, 20 nt, Human
aacaauacucaaugcccccc

SEQ ID NO: 405026 - RNA, 20 nt, Human
aacgucuccaaacaaaaacu

SEQ ID NO: 405027 - RNA, 21 nt, Human
aagaaaaaaaaaagguaaaag

SEQ ID NO: 405028 - RNA, 23 nt, Human
aagaaaaaaaaaagguaaaagga

SEQ ID NO: 405029 - RNA, 23 nt, Human
aagaaaaugauacagugaugcaa

SEQ ID NO: 405030 - RNA, 19 nt, Human
aagaagaaaaaaaaaauaa

SEQ ID NO: 405031 - RNA, 21 nt, Human
aagaggaaggggaggagcuag

SEQ ID NO: 405032 - RNA, 23 nt, Human
aagcaacagcagccaugaaagac

SEQ ID NO: 405033 - RNA, 25 nt, Human
aagcugcaugcuuguugcagaaguu

SEQ ID NO: 405034 - RNA, 22 nt, Human
aagggugccucgcuuuggcuag

SEQ ID NO: 405035 - RNA, 28 nt, Human
aaucaccacuccuauuguaaaccuuaga

SEQ ID NO: 405036 - RNA, 22 nt, Human
acaaaagaaacauuuaccaaac

SEQ ID NO: 405037 - RNA, 21 nt, Human
acaauacucaaugccccccac

SEQ ID NO: 405038 - RNA, 20 nt, Human
accagaagacaagcaacuga

SEQ ID NO: 405039 - RNA, 21 nt, Human
agaaaaaaaaaagguaaaagg

SEQ ID NO: 405040 - RNA, 22 nt, Human
agaaaaaaaaaagguaaaagga

SEQ ID NO: 405041 - RNA, 24 nt, Human
agaagaaaaaaaaaauaaucaaaa

SEQ ID NO: 405042 - RNA, 23 nt, Human
agaagacaagcaacugaagcuua

SEQ ID NO: 405043 - RNA, 22 nt, Human
agacaagcaacugaagcuuaaa

SEQ ID NO: 405044 - RNA, 18 nt, Human
agaggaaggggaggagcu

SEQ ID NO: 405045 - RNA, 24 nt, Human
agaggaaggggaggagcuagggag

SEQ ID NO: 405046 - RNA, 18 nt, Human
agauaccuaucaccauac

SEQ ID NO: 405047 - RNA, 18 nt, Human
agcaaaguaagggaagca

SEQ ID NO: 405048 - RNA, 21 nt, Human
agcaaaguaagggaagcaguu

SEQ ID NO: 405049 - RNA, 18 nt, Human
agccauggcagcuacagu

SEQ ID NO: 405050 - RNA, 23 nt, Human
agcuacaguucugcaagcuauag

SEQ ID NO: 405051 - RNA, 18 nt, Human
agcuagggagaaggcuuu

SEQ ID NO: 405052 - RNA, 23 nt, Human
aggagcuagggagaaggcuuuga

SEQ ID NO: 405053 - RNA, 21 nt, Human
agggagauggacgggaaacug

SEQ ID NO: 405054 - RNA, 24 nt, Human
aggggguuacugauaugcucaaau

SEQ ID NO: 405055 - RNA, 19 nt, Human
aguacagacucaacauuuc

SEQ ID NO: 405056 - RNA, 24 nt, Human
aguuacuuuccaacaaacugaaac

SEQ ID NO: 405057 - RNA, 18 nt, Human
aguuuuauagaauaggag

SEQ ID NO: 405058 - RNA, 20 nt, Human
caacaguagcaaauguguaa

SEQ ID NO: 405059 - RNA, 21 nt, Human
caaccaaaaacuaaagaggac

SEQ ID NO: 405060 - RNA, 20 nt, Human
caaccaaaaacuaaagaggg

SEQ ID NO: 405061 - RNA, 21 nt, Human
caagccauccaaaacaaguaa

SEQ ID NO: 405062 - RNA, 24 nt, Human
caaucaauauuguaagauaaggua

SEQ ID NO: 405063 - RNA, 18 nt, Human
cacccaacucuuuuuugc

SEQ ID NO: 405064 - RNA, 22 nt, Human
cagaaucagaauuagaugccag

SEQ ID NO: 405065 - RNA, 23 nt, Human
cagccaugaaagacuuaucucuu

SEQ ID NO: 405066 - RNA, 21 nt, Human
caucgucacucacauguagca

SEQ ID NO: 405067 - RNA, 21 nt, Human
ccacaggaaaaccaaucucau

SEQ ID NO: 405068 - RNA, 21 nt, Human
cccaagaagaaaaaaaaaaua

SEQ ID NO: 405069 - RNA, 25 nt, Human
cccacuaucccaagaagaaaaaaaa

SEQ ID NO: 405070 - RNA, 25 nt, Human
cccccacccaaaaaucuauacugua

SEQ ID NO: 405071 - RNA, 20 nt, Human
ccgguuaaaaaagaaaauga

SEQ ID NO: 405072 - RNA, 20 nt, Human
ccuuaauggguuugcaaagc

SEQ ID NO: 405073 - RNA, 22 nt, Human
cucaaugccccccacccaaaaa

SEQ ID NO: 405074 - RNA, 24 nt, Human
cugaaugauuccuauuuacccuga

SEQ ID NO: 405075 - RNA, 20 nt, Human
cuggauuaaaucaccccaac

SEQ ID NO: 405076 - RNA, 20 nt, Human
cuucuggcuccccaaaagcc

SEQ ID NO: 405077 - RNA, 18 nt, Human
gacacaguacaggaauuu

SEQ ID NO: 405078 - RNA, 20 nt, Human
gaggagcuagggagaaggcu

SEQ ID NO: 405079 - RNA, 24 nt, Human
gaguauagacaagccauccaaaac

SEQ ID NO: 405080 - RNA, 23 nt, Human
gcccacuuucuagugguuucuau

SEQ ID NO: 405081 - RNA, 18 nt, Human
gccccccacccaaaaauc

SEQ ID NO: 405082 - RNA, 19 nt, Human
gccccccacccaaaaaucu

SEQ ID NO: 405083 - RNA, 22 nt, Human
gccccccacccaaaaaucuaua

SEQ ID NO: 405084 - RNA, 23 nt, Human
gcuuaugugcaaugacagcccuu

SEQ ID NO: 405085 - RNA, 19 nt, Human
ggaaggggaggagcuaggg

SEQ ID NO: 405086 - RNA, 21 nt, Human
ggaccaaggaacagcuuucau

SEQ ID NO: 405087 - RNA, 24 nt, Human
gggaggagcuagggagaaggcuuu

SEQ ID NO: 405088 - RNA, 23 nt, Human
ggggauuaccaagaaaaaaaaaa

SEQ ID NO: 405089 - RNA, 19 nt, Human
gguuacugauaugcucaaa

SEQ ID NO: 405090 - RNA, 20 nt, Human
guauuugaguuagucaaucu

SEQ ID NO: 405091 - RNA, 25 nt, Human
uaaaagaaacauuuaccaaacaaaa

SEQ ID NO: 405092 - RNA, 18 nt, Human
uaaacaagccucuacaug

SEQ ID NO: 405093 - RNA, 22 nt, Human
uaaacaauacucaaugcccccc

SEQ ID NO: 405094 - RNA, 21 nt, Human
uaacauguuuucccaaaguuu

SEQ ID NO: 405095 - RNA, 21 nt, Human
uaacuggauuaaaucacccca

SEQ ID NO: 405096 - RNA, 22 nt, Human
uaacuggauuaaaucaccccaa

SEQ ID NO: 405097 - RNA, 21 nt, Human
uaagaaaucagacaagaggaa

SEQ ID NO: 405098 - RNA, 19 nt, Human
uaagcaacagcagccauga

SEQ ID NO: 405099 - RNA, 21 nt, Human
uaagggagauggacgggaaac

SEQ ID NO: 405100 - RNA, 23 nt, Human
uaauggcagcaaauguuuuccca

SEQ ID NO: 405101 - RNA, 20 nt, Human
uaccaagaaaaaaaaaaggu

SEQ ID NO: 405102 - RNA, 21 nt, Human
uaccaagaaaaaaaaaaggua

SEQ ID NO: 405103 - RNA, 20 nt, Human
uaccuagccauggcagcucc

SEQ ID NO: 405104 - RNA, 19 nt, Human
uaccugaauaguacugaca

SEQ ID NO: 405105 - RNA, 24 nt, Human
uacuuuccaacaaacugaaacucu

SEQ ID NO: 405106 - RNA, 19 nt, Human
uagcaaauguguauuugag

SEQ ID NO: 405107 - RNA, 24 nt, Human
uagcauuaagcucuagauaccuau

SEQ ID NO: 405108 - RNA, 23 nt, Human
uaggaagagcucacauggugagg

SEQ ID NO: 405109 - RNA, 23 nt, Human
uauaaacgucuccaaacaaaaac

SEQ ID NO: 405110 - RNA, 24 nt, Human
uauaaacgucuccaaacaaaaacu

SEQ ID NO: 405111 - RNA, 20 nt, Human
uauagaauaggagggucuuu

SEQ ID NO: 405112 - RNA, 18 nt, Human
uauagacaagccauccaa

SEQ ID NO: 405113 - RNA, 19 nt, Human
uaugccacaggaaaaccaa

SEQ ID NO: 405114 - RNA, 20 nt, Human
uauucaaacccucagcaaag

SEQ ID NO: 405115 - RNA, 24 nt, Human
ucaaugccccccacccaaaaaucu

SEQ ID NO: 405116 - RNA, 19 nt, Human
ucagagcucauuugcaugc

SEQ ID NO: 405117 - RNA, 20 nt, Human
uccaaagaacugaaagaauc

SEQ ID NO: 405118 - RNA, 22 nt, Human
uccacacauuaccuuuuagagc

SEQ ID NO: 405119 - RNA, 22 nt, Human
uccccaaaagcccauaacagaa

SEQ ID NO: 405120 - RNA, 21 nt, Human
ucuaugcuucaaaagauuuuu

SEQ ID NO: 405121 - RNA, 23 nt, Human
ucuauggguagucccuaagggag

SEQ ID NO: 405122 - RNA, 25 nt, Human
ucugcagcuuaaggagaccgggguc

SEQ ID NO: 405123 - RNA, 21 nt, Human
ucuggaaaucccacuaucccc

SEQ ID NO: 405124 - RNA, 23 nt, Human
ucuguaauggcagcaaauguuuu

SEQ ID NO: 405125 - RNA, 24 nt, Human
ucuugcucuguggggaccuuucau

SEQ ID NO: 405126 - RNA, 18 nt, Human
ugaaggcuuaaagccaga

SEQ ID NO: 405127 - RNA, 24 nt, Human
ugcaaugacagcccuugaccagaa

SEQ ID NO: 405128 - RNA, 19 nt, Human
ugcaugcaugcaaaaaaau

SEQ ID NO: 405129 - RNA, 23 nt, Human
ugcaugggaagauuucagagcuc

SEQ ID NO: 405130 - RNA, 23 nt, Human
ugccacaggaaaaccaaucucau

SEQ ID NO: 405131 - RNA, 19 nt, Human
uggacgggaaacuggguuc

SEQ ID NO: 405132 - RNA, 24 nt, Human
uggcuucuggcuccccaaaagccc

SEQ ID NO: 405133 - RNA, 18 nt, Human
uguauuuagaauccaaag

SEQ ID NO: 405134 - RNA, 19 nt, Human
ugugcaaugacagcccuug

SEQ ID NO: 405135 - RNA, 23 nt, Human
uguggggaccuuucaugucuaug

SEQ ID NO: 405136 - RNA, 19 nt, Human
ugugguucuggaaauccca

SEQ ID NO: 405137 - RNA, 20 nt, Human
uguuuauaaacgucuccaaa

SEQ ID NO: 405138 - RNA, 24 nt, Human
uuagagccacgcuggcccuuuugc

SEQ ID NO: 405139 - RNA, 24 nt, Human
uuaguacagacucaacauuuccuc

SEQ ID NO: 405140 - RNA, 22 nt, Human
uucacacaaaauauauacacac

SEQ ID NO: 405141 - RNA, 18 nt, Human
uuccaaggcccuaguguu

SEQ ID NO: 405142 - RNA, 22 nt, Human
uucccuucccuccccucuuaaa

SEQ ID NO: 405143 - RNA, 22 nt, Human
uuuaagaauuuuccucauuccc

SEQ ID NO: 405144 - RNA, 22 nt, Human
uuuaagcaacagcagccaugaa

SEQ ID NO: 405145 - RNA, 18 nt, Human
uuuauaaaagucaaugag

SEQ ID NO: 405146 - RNA, 23 nt, Human
uuuucagaggcaauccacacauu

SEQ ID NO: 405147 - RNA, 23 nt, Human
uuuucaugaaaauacaaaaacga

SEQ ID NO: 405148 - RNA, 21 nt, Human
agaggggaggcagcuugggaa

SEQ ID NO: 405149 - RNA, 21 nt, Human
aggaaggagaggggaggcagc

SEQ ID NO: 405150 - RNA, 25 nt, Human
aggagaggggaggcagcuugggucu

SEQ ID NO: 405151 - RNA, 19 nt, Human
cacaggaaggagaggggag

SEQ ID NO: 405152 - RNA, 22 nt, Human
cagcccgaagguccugccuccu

SEQ ID NO: 405153 - RNA, 24 nt, Human
cccgaagguccugccuccugaggc

SEQ ID NO: 405154 - RNA, 21 nt, Human
ccgggcacagcccgaaggucc

SEQ ID NO: 405155 - RNA, 20 nt, Human
ccuggggccugugaggugcc

SEQ ID NO: 405156 - RNA, 23 nt, Human
cugcaggugacucaggcugucca

SEQ ID NO: 405157 - RNA, 22 nt, Human
gaccuugccuuuccccgggcac

SEQ ID NO: 405158 - RNA, 23 nt, Human
gaggcagcuugggucucugggcg

SEQ ID NO: 405159 - RNA, 22 nt, Human
gccugugaggugccuggggaug

SEQ ID NO: 405160 - RNA, 19 nt, Human
ggcggcuucgguggcuggg

SEQ ID NO: 405161 - RNA, 22 nt, Human
ggcgguggcgcaggcugcagcc

SEQ ID NO: 405162 - RNA, 25 nt, Human
gggccugugaggugccuggggaugg

SEQ ID NO: 405163 - RNA, 21 nt, Human
gucgcagccccgggcaucggc

SEQ ID NO: 405164 - RNA, 19 nt, Human
uccccgggcacagcccgaa

SEQ ID NO: 405165 - RNA, 19 nt, Human
uccuggggccugugaggug

SEQ ID NO: 405166 - RNA, 25 nt, Human
ucgguggcugggccuuuccuggggc

SEQ ID NO: 405167 - RNA, 18 nt, Human
ucugcagccgucgcagcc

SEQ ID NO: 405168 - RNA, 19 nt, Human
ugacucaggcuguccacag

SEQ ID NO: 405169 - RNA, 19 nt, Human
ugccuuuccccgggcacag

SEQ ID NO: 405170 - RNA, 19 nt, Human
uggcgcgggccccgguuuc

SEQ ID NO: 405171 - RNA, 23 nt, Human
ugugaggugccuggggaugggcc

SEQ ID NO: 405172 - RNA, 21 nt, Human
uucgguggcugggccuuuccu

SEQ ID NO: 405173 - RNA, 20 nt, Human
aacccuccgcccuguccacu

SEQ ID NO: 405174 - RNA, 19 nt, Human
aacccuggacgaagggcac

SEQ ID NO: 405175 - RNA, 24 nt, Human
aaccugccuucucaccacacccca

SEQ ID NO: 405176 - RNA, 24 nt, Human
acagcaagcaggaggguuggaguc

SEQ ID NO: 405177 - RNA, 18 nt, Human
accccuaggaaggacagc

SEQ ID NO: 405178 - RNA, 19 nt, Human
acccgcacaaccugccuuc

SEQ ID NO: 405179 - RNA, 18 nt, Human
agagccacuaaggcacag

SEQ ID NO: 405180 - RNA, 19 nt, Human
agcagcccuuccccucccg

SEQ ID NO: 405181 - RNA, 21 nt, Human
aggaggaggaagaagucagaa

SEQ ID NO: 405182 - RNA, 20 nt, Human
aggcagcugcugagggucag

SEQ ID NO: 405183 - RNA, 20 nt, Human
agggucaguuuccuuucugg

SEQ ID NO: 405184 - RNA, 21 nt, Human
auucuuucaaacccuccgccc

SEQ ID NO: 405185 - RNA, 18 nt, Human
caaccugccuucucacca

SEQ ID NO: 405186 - RNA, 23 nt, Human
cacacaaugcucacaaccauuaa

SEQ ID NO: 405187 - RNA, 19 nt, Human
caccacaggcaggcccuca

SEQ ID NO: 405188 - RNA, 19 nt, Human
cacugcauuuaaaaaauaa

SEQ ID NO: 405189 - RNA, 19 nt, Human
cagcaagcaggaggguugg

SEQ ID NO: 405190 - RNA, 22 nt, Human
cagcaagcaggaggguuggagu

SEQ ID NO: 405191 - RNA, 23 nt, Human
cagcuugaguccaaagaaauaau

SEQ ID NO: 405192 - RNA, 23 nt, Human
caggccagguguaaaauuccaca

SEQ ID NO: 405193 - RNA, 20 nt, Human
ccacgcaggccagguguaaa

SEQ ID NO: 405194 - RNA, 20 nt, Human
ccacgguugagaagagaagc

SEQ ID NO: 405195 - RNA, 26 nt, Human
ccaggcccaugcaaaggcagcacuga

SEQ ID NO: 405196 - RNA, 18 nt, Human
cccacccuccaccugacc

SEQ ID NO: 405197 - RNA, 19 nt, Human
cccacgccccacccuccac

SEQ ID NO: 405198 - RNA, 22 nt, Human
cccaugcaaaggcagcacugag

SEQ ID NO: 405199 - RNA, 23 nt, Human
cccgcacaaccugccuucucacc

SEQ ID NO: 405200 - RNA, 20 nt, Human
ccgcccuggcuggcugcucc

SEQ ID NO: 405201 - RNA, 27 nt, Human
ccucccauucccagaggcucaagagcc

SEQ ID NO: 405202 - RNA, 18 nt, Human
ccuugagcugagcagccc

SEQ ID NO: 405203 - RNA, 23 nt, Human
cgaaugugagccgggccaggccc

SEQ ID NO: 405204 - RNA, 18 nt, Human
cgagagaggcugcugggg

SEQ ID NO: 405205 - RNA, 25 nt, Human
cgcccuggcuggcugcuccgcugaa

SEQ ID NO: 405206 - RNA, 24 nt, Human
cgcugggcuucccuggccccugca

SEQ ID NO: 405207 - RNA, 22 nt, Human
cggcugugaugcugaggcuggg

SEQ ID NO: 405208 - RNA, 18 nt, Human
cgggagaagcucgccgcg

SEQ ID NO: 405209 - RNA, 19 nt, Human
cugggugauugcauuccuu

SEQ ID NO: 405210 - RNA, 18 nt, Human
cuuagaacucuucaaucc

SEQ ID NO: 405211 - RNA, 19 nt, Human
gagagaggcugcuggggug

SEQ ID NO: 405212 - RNA, 18 nt, Human
gagcagcccuuccccucc

SEQ ID NO: 405213 - RNA, 20 nt, Human
gagcagcccuuccccucccg

SEQ ID NO: 405214 - RNA, 19 nt, Human
gagccgagcgggcggcgcc

SEQ ID NO: 405215 - RNA, 22 nt, Human
gagccgagcgggcggcgccggg

SEQ ID NO: 405216 - RNA, 20 nt, Human
gaggguuggagucacugacg

SEQ ID NO: 405217 - RNA, 19 nt, Human
gccccugcaucucugucgu

SEQ ID NO: 405218 - RNA, 23 nt, Human
gcccuguccacuuccugcacccc

SEQ ID NO: 405219 - RNA, 18 nt, Human
gcgcugggcuucccuggc

SEQ ID NO: 405220 - RNA, 19 nt, Human
ggccagguguaaaauucca

SEQ ID NO: 405221 - RNA, 22 nt, Human
gggcaggacuguccucagggcc

SEQ ID NO: 405222 - RNA, 18 nt, Human
gggucucagaaaauggac

SEQ ID NO: 405223 - RNA, 21 nt, Human
gggugucugaacuguccgggg

SEQ ID NO: 405224 - RNA, 21 nt, Human
ggguuggagucacugacgaau

SEQ ID NO: 405225 - RNA, 20 nt, Human
gucagggaaggaggaggaga

SEQ ID NO: 405226 - RNA, 21 nt, Human
uaaaacaccucaacuggaaga

SEQ ID NO: 405227 - RNA, 20 nt, Human
uaacagguaggacuugcugg

SEQ ID NO: 405228 - RNA, 22 nt, Human
uaacaugauucccaaagggaag

SEQ ID NO: 405229 - RNA, 18 nt, Human
uaggaaggacagcacagu

SEQ ID NO: 405230 - RNA, 19 nt, Human
uaggaaggacagcacagug

SEQ ID NO: 405231 - RNA, 24 nt, Human
uaggagccagcgggagcugccacg

SEQ ID NO: 405232 - RNA, 25 nt, Human
ucaacacccgcacaaccugccuucu

SEQ ID NO: 405233 - RNA, 22 nt, Human
ucagaaaaugccacuuauuuua

SEQ ID NO: 405234 - RNA, 23 nt, Human
ucagggaaggaggaggaggaaga

SEQ ID NO: 405235 - RNA, 22 nt, Human
ucaucccaaguacagcaagcag

SEQ ID NO: 405236 - RNA, 21 nt, Human
uccacacaaugcucacaacca

SEQ ID NO: 405237 - RNA, 18 nt, Human
ucccaaagggagccuggg

SEQ ID NO: 405238 - RNA, 20 nt, Human
ucccaaagggagccugggcu

SEQ ID NO: 405239 - RNA, 21 nt, Human
ucccagaggcucaagagccuc

SEQ ID NO: 405240 - RNA, 23 nt, Human
ugaacagagcugcggcugugaug

SEQ ID NO: 405241 - RNA, 27 nt, Human
ugacauaaaacaccucaacuggaagag

SEQ ID NO: 405242 - RNA, 21 nt, Human
ugagaaggggggcacaguucu

SEQ ID NO: 405243 - RNA, 21 nt, Human
ugagaaggggggcacaguucu

SEQ ID NO: 405244 - RNA, 25 nt, Human
ugagcugagcagcccuuccccuccc

SEQ ID NO: 405245 - RNA, 22 nt, Human
ugaguguaaaacaucuguguac

SEQ ID NO: 405246 - RNA, 18 nt, Human
ugcucugcagcgggugaa

SEQ ID NO: 405247 - RNA, 19 nt, Human
ugcugggugauugcauucc

SEQ ID NO: 405248 - RNA, 21 nt, Human
ugcugggugauugcauuccuu

SEQ ID NO: 405249 - RNA, 20 nt, Human
uggagugccauccccaaggg

SEQ ID NO: 405250 - RNA, 21 nt, Human
ugggggucucagaaaauggac

SEQ ID NO: 405251 - RNA, 18 nt, Human
ugggugauugcauuccuu

SEQ ID NO: 405252 - RNA, 19 nt, Human
uguagcuccugagaaaaag

SEQ ID NO: 405253 - RNA, 19 nt, Human
ugucgcgggcgcuauggga

SEQ ID NO: 405254 - RNA, 18 nt, Human
ugucugaacuguccgggg

SEQ ID NO: 405255 - RNA, 18 nt, Human
uguggagugccaucccca

SEQ ID NO: 405256 - RNA, 18 nt, Human
uuaaagggugcuaaagac

SEQ ID NO: 405257 - RNA, 26 nt, Human
uucaaacccuccgcccuguccacuuc

SEQ ID NO: 405258 - RNA, 20 nt, Human
uucagcuugaguccaaagaa

SEQ ID NO: 405259 - RNA, 21 nt, Human
uuccacacaaugcucacaacc

SEQ ID NO: 405260 - RNA, 18 nt, Human
uuccccucccgggagugg

SEQ ID NO: 405261 - RNA, 19 nt, Human
uuccuuucugggggucuca

SEQ ID NO: 405262 - RNA, 18 nt, Human
uuuccuucucuuggcccc

SEQ ID NO: 405263 - RNA, 21 nt, Human
uuuguagcuccugagaaaaag

SEQ ID NO: 405264 - RNA, 20 nt, Human
uuuuaugcuuagaacucuuc

SEQ ID NO: 405265 - RNA, 22 nt, Human
uuuuccuucucuuggccccucc

SEQ ID NO: 405266 - RNA, 24 nt, Human
aaaaaaaaaaacugagacuaguuc

SEQ ID NO: 405267 - RNA, 19 nt, Human
aaaucccaccacgccuucc

SEQ ID NO: 405268 - RNA, 20 nt, Human
aacaagaaugcucgcgccac

SEQ ID NO: 405269 - RNA, 18 nt, Human
aagaagggagaggauggu

SEQ ID NO: 405270 - RNA, 19 nt, Human
aagaggaauaagcagaccu

SEQ ID NO: 405271 - RNA, 21 nt, Human
aaggagaagccaccuugguga

SEQ ID NO: 405272 - RNA, 22 nt, Human
aaggagcagaugacaccaucag

SEQ ID NO: 405273 - RNA, 21 nt, Human
acagcacagaggcacgggcac

SEQ ID NO: 405274 - RNA, 22 nt, Human
acagcacagaggcacgggcacc

SEQ ID NO: 405275 - RNA, 25 nt, Human
accaugggagagggcagcacuccug

SEQ ID NO: 405276 - RNA, 19 nt, Human
accuaaaaaaaaaaaaaaa

SEQ ID NO: 405277 - RNA, 20 nt, Human
acugggcuucugggcugcuu

SEQ ID NO: 405278 - RNA, 24 nt, Human
agaagccugugauggugaagagga

SEQ ID NO: 405279 - RNA, 23 nt, Human
agacugugggcguggagccggca

SEQ ID NO: 405280 - RNA, 22 nt, Human
agagcuccugagcccccugccc

SEQ ID NO: 405281 - RNA, 18 nt, Human
agcaucagacacaugauc

SEQ ID NO: 405282 - RNA, 25 nt, Human
agcccaauaacuugaaggcccgcaa

SEQ ID NO: 405283 - RNA, 24 nt, Human
agccugugauggugaagaggaagc

SEQ ID NO: 405284 - RNA, 22 nt, Human
aggaagauacaguuuggaugag

SEQ ID NO: 405285 - RNA, 24 nt, Human
aggaagcggacccgccccaccaag

SEQ ID NO: 405286 - RNA, 22 nt, Human
aggcgcugaaggucaggucgcc

SEQ ID NO: 405287 - RNA, 23 nt, Human
aguuacugggcuucugggcugcu

SEQ ID NO: 405288 - RNA, 21 nt, Human
augauccgcaagaacaaguac

SEQ ID NO: 405289 - RNA, 21 nt, Human
auuggccuggucccaaccauu

SEQ ID NO: 405290 - RNA, 19 nt, Human
caaccauuauaguaagugg

SEQ ID NO: 405291 - RNA, 18 nt, Human
caacggacugauucaccg

SEQ ID NO: 405292 - RNA, 19 nt, Human
caacggacugauucaccgc

SEQ ID NO: 405293 - RNA, 23 nt, Human
cacauacacagcacagaggcacg

SEQ ID NO: 405294 - RNA, 25 nt, Human
cacaugauccgcaagaacaaguacc

SEQ ID NO: 405295 - RNA, 21 nt, Human
caccaagagcuccugagcccc

SEQ ID NO: 405296 - RNA, 18 nt, Human
caccaucaacaagaaugc

SEQ ID NO: 405297 - RNA, 18 nt, Human
caccgcaagacugugggc

SEQ ID NO: 405298 - RNA, 18 nt, Human
cagaagccugugauggug

SEQ ID NO: 405299 - RNA, 20 nt, Human
cagaagccugugauggugaa

SEQ ID NO: 405300 - RNA, 18 nt, Human
cagcuggcuuucucaccu

SEQ ID NO: 405301 - RNA, 19 nt, Human
caggagcaaaucccaccac

SEQ ID NO: 405302 - RNA, 20 nt, Human
cagggccagcgccauccugc

SEQ ID NO: 405303 - RNA, 19 nt, Human
caucagacacaugauccgc

SEQ ID NO: 405304 - RNA, 19 nt, Human
ccacgcucagcagcaucag

SEQ ID NO: 405305 - RNA, 22 nt, Human
ccacgcucagcagcaucagaca

SEQ ID NO: 405306 - RNA, 22 nt, Human
ccauccugcgcagccagaagcc

SEQ ID NO: 405307 - RNA, 22 nt, Human
ccccaccaagagcuccugagcc

SEQ ID NO: 405308 - RNA, 19 nt, Human
cccuggcuuggcaggaagg

SEQ ID NO: 405309 - RNA, 21 nt, Human
ccgcaauuccuuccgcuacaa

SEQ ID NO: 405310 - RNA, 24 nt, Human
ccgccccaccaagagcuccugagc

SEQ ID NO: 405311 - RNA, 23 nt, Human
ccgccgccaugucugcgcaucug

SEQ ID NO: 405312 - RNA, 18 nt, Human
ccggccagcggaagccug

SEQ ID NO: 405313 - RNA, 20 nt, Human
ccugagcccccugcccccag

SEQ ID NO: 405314 - RNA, 21 nt, Human
ccugagcccccugcccccaga

SEQ ID NO: 405315 - RNA, 23 nt, Human
cgaccugcgcauggcagccaucc

SEQ ID NO: 405316 - RNA, 19 nt, Human
cgcucagcagcaucagaca

SEQ ID NO: 405317 - RNA, 23 nt, Human
cggacccgccccaccaagagcuc

SEQ ID NO: 405318 - RNA, 24 nt, Human
cggcaaaggugucgugguggucau

SEQ ID NO: 405319 - RNA, 26 nt, Human
cguggagccggcagccgaccaggucu

SEQ ID NO: 405320 - RNA, 18 nt, Human
cugagcccccugccccca

SEQ ID NO: 405321 - RNA, 20 nt, Human
cugagcccccugcccccaga

SEQ ID NO: 405322 - RNA, 20 nt, Human
cugcuccaguuuccugauca

SEQ ID NO: 405323 - RNA, 21 nt, Human
cuuccaucucucagccaagga

SEQ ID NO: 405324 - RNA, 20 nt, Human
gaacccaggagcaaauccca

SEQ ID NO: 405325 - RNA, 25 nt, Human
gagcaaaucccaccacgccuuccau

SEQ ID NO: 405326 - RNA, 23 nt, Human
gagcuccugagcccccugccccc

SEQ ID NO: 405327 - RNA, 20 nt, Human
gcgcagccagaagccuguga

SEQ ID NO: 405328 - RNA, 20 nt, Human
gcuccaguuuccugaucaag

SEQ ID NO: 405329 - RNA, 25 nt, Human
ggagcaaaucccaccacgccuucca

SEQ ID NO: 405330 - RNA, 21 nt, Human
ggccacaggaaggagcagaug

SEQ ID NO: 405331 - RNA, 23 nt, Human
gggcuucugggcugcuuaguccc

SEQ ID NO: 405332 - RNA, 21 nt, Human
gguagggaagauggauggggc

SEQ ID NO: 405333 - RNA, 21 nt, Human
uaaacaguaaaggaagauaca

SEQ ID NO: 405334 - RNA, 20 nt, Human
uaaagucagcuggcuuucuc

SEQ ID NO: 405335 - RNA, 18 nt, Human
uaagaagggagaggaugg

SEQ ID NO: 405336 - RNA, 19 nt, Human
uaagcagaccuacagcacu

SEQ ID NO: 405337 - RNA, 21 nt, Human
uaagcagaccuacagcacuga

SEQ ID NO: 405338 - RNA, 22 nt, Human
ucaccuaaaaaaaaaaaaaaaa

SEQ ID NO: 405339 - RNA, 23 nt, Human
uccgcaagaacaaguaccgcccc

SEQ ID NO: 405340 - RNA, 24 nt, Human
uccgcuacaacggacugauucacc

SEQ ID NO: 405341 - RNA, 19 nt, Human
uccugagcccccugccccc

SEQ ID NO: 405342 - RNA, 23 nt, Human
ucucaccuaaaaaaaaaaaaaaa

SEQ ID NO: 405343 - RNA, 18 nt, Human
ugaagauauaaacaguaa

SEQ ID NO: 405344 - RNA, 19 nt, Human
ugaaggucaggucgccgcu

SEQ ID NO: 405345 - RNA, 22 nt, Human
ugaaggucaggucgccgcugcg

SEQ ID NO: 405346 - RNA, 24 nt, Human
ugaggggaucuuggccucacggug

SEQ ID NO: 405347 - RNA, 23 nt, Human
uggcaggaaggguagggaagaug

SEQ ID NO: 405348 - RNA, 23 nt, Human
uggccuggucccaaccauuacag

SEQ ID NO: 405349 - RNA, 23 nt, Human
ugugauggugaagaggaagcgga

SEQ ID NO: 405350 - RNA, 24 nt, Human
ugugauggugaagaggaagcggac

SEQ ID NO: 405351 - RNA, 18 nt, Human
uuagucccuggcuuggca

SEQ ID NO: 405352 - RNA, 23 nt, Human
uucugaggggaucuuggccucac

SEQ ID NO: 405353 - RNA, 28 nt, Human
uuucucaccuaaaaaaaaaaaaaaaaaa

SEQ ID NO: 405354 - RNA, 23 nt, Human
uuuggaugaggccacaggaagga

SEQ ID NO: 405355 - RNA, 18 nt, Human
uuuuuuuuuuuuuuaccu

SEQ ID NO: 405356 - RNA, 23 nt, Human
aaaacagagaaagguggaaagaa

SEQ ID NO: 405357 - RNA, 20 nt, Human
aaaacaguuacuuucacuuu

SEQ ID NO: 405358 - RNA, 20 nt, Human
aaaaugccacagucacaugg

SEQ ID NO: 405359 - RNA, 21 nt, Human
aaccucagacaccaucagucc

SEQ ID NO: 405360 - RNA, 19 nt, Human
aagauggaaacauagcuaa

SEQ ID NO: 405361 - RNA, 26 nt, Human
aagcagaaaguaaugaaaagggaccc

SEQ ID NO: 405362 - RNA, 20 nt, Human
aaugugugaguagggcucca

SEQ ID NO: 405363 - RNA, 23 nt, Human
acugcuccuuaaaugccacaauc

SEQ ID NO: 405364 - RNA, 22 nt, Human
agaacaugcauucuuugguagc

SEQ ID NO: 405365 - RNA, 19 nt, Human
agguagcccuuguuguuag

SEQ ID NO: 405366 - RNA, 26 nt, Human
aguauccauuuauuaacacugguaac

SEQ ID NO: 405367 - RNA, 24 nt, Human
auagggauuuguguacauaaaaca

SEQ ID NO: 405368 - RNA, 22 nt, Human
auggaaacauagcuaagccuca

SEQ ID NO: 405369 - RNA, 21 nt, Human
caaauuaaaaacaauuuucua

SEQ ID NO: 405370 - RNA, 26 nt, Human
caccaagaagaaaacaguuacuuuca

SEQ ID NO: 405371 - RNA, 18 nt, Human
caccaucaguccaaccgc

SEQ ID NO: 405372 - RNA, 19 nt, Human
cacuacuauaaaauugaga

SEQ ID NO: 405373 - RNA, 22 nt, Human
cacugcuccuuucauucucuac

SEQ ID NO: 405374 - RNA, 21 nt, Human
cagguucuccuucaaucaugg

SEQ ID NO: 405375 - RNA, 24 nt, Human
ccaaagacaguaauaaggucagag

SEQ ID NO: 405376 - RNA, 22 nt, Human
cuaauacuaaaagguacucaga

SEQ ID NO: 405377 - RNA, 19 nt, Human
cuccaagaggaaccucaac

SEQ ID NO: 405378 - RNA, 22 nt, Human
cuggugcacuucuaacacccca

SEQ ID NO: 405379 - RNA, 21 nt, Human
cuuccauuuuacagcuaagga

SEQ ID NO: 405380 - RNA, 22 nt, Human
cuucuggaugaaccaacaguuu

SEQ ID NO: 405381 - RNA, 23 nt, Human
gacuguuacccccucuagacuuu

SEQ ID NO: 405382 - RNA, 21 nt, Human
ggaaccucaacaguuuucucu

SEQ ID NO: 405383 - RNA, 20 nt, Human
gguuccaaccgaauauaaua

SEQ ID NO: 405384 - RNA, 24 nt, Human
gucauagcaccaagaagaaaacag

SEQ ID NO: 405385 - RNA, 24 nt, Human
guccaaccgcuuccauuuuacagc

SEQ ID NO: 405386 - RNA, 22 nt, Human
uaacuagucuucagaaacugaa

SEQ ID NO: 405387 - RNA, 21 nt, Human
uaagacaauaccaaagacagu

SEQ ID NO: 405388 - RNA, 22 nt, Human
uacagaaaacuaauacuaaaag

SEQ ID NO: 405389 - RNA, 19 nt, Human
uaccaaagacaguaauaag

SEQ ID NO: 405390 - RNA, 21 nt, Human
uagcaccaagaagaaaacagu

SEQ ID NO: 405391 - RNA, 19 nt, Human
uaggagccacagacuggag

SEQ ID NO: 405392 - RNA, 22 nt, Human
uauuuagaauuucaguguggga

SEQ ID NO: 405393 - RNA, 21 nt, Human
ucagucuaagguaugucagaa

SEQ ID NO: 405394 - RNA, 23 nt, Human
ucauuuaucuuucacaucauuuc

SEQ ID NO: 405395 - RNA, 24 nt, Human
uccaaccgaauauaauagagcuua

SEQ ID NO: 405396 - RNA, 19 nt, Human
ucuacagacaaccugaguc

SEQ ID NO: 405397 - RNA, 20 nt, Human
ucucacacugucauagcacc

SEQ ID NO: 405398 - RNA, 21 nt, Human
ugaaaagugccgaaaaugccc

SEQ ID NO: 405399 - RNA, 19 nt, Human
uggaaugauucccauuagg

SEQ ID NO: 405400 - RNA, 19 nt, Human
ugugaugaugaugcagacu

SEQ ID NO: 405401 - RNA, 18 nt, Human
uuagguuccaaccgaaua

SEQ ID NO: 405402 - RNA, 18 nt, Human
uucacuuuucuuauagca

SEQ ID NO: 405403 - RNA, 19 nt, Human
uugguuucauaaaacagag

SEQ ID NO: 405404 - RNA, 21 nt, Human
uuuaugcuuaaguuuccucug

SEQ ID NO: 405405 - RNA, 18 nt, Human
uuuuuuuuuuuuuuuucg

SEQ ID NO: 405406 - RNA, 22 nt, Human
aaacaaaacaaaacaaaacaaa

SEQ ID NO: 405407 - RNA, 23 nt, Human
aaacaaaacaaaacaaaaugaaa

SEQ ID NO: 405408 - RNA, 21 nt, Human
aauggcacauuugaaccagga

SEQ ID NO: 405409 - RNA, 22 nt, Human
aauggcacauuugaaccaggau

SEQ ID NO: 405410 - RNA, 21 nt, Human
acaaaacaaaacaaaacaaaa

SEQ ID NO: 405411 - RNA, 23 nt, Human
acaaaacaaaacaaaaugaaaga

SEQ ID NO: 405412 - RNA, 19 nt, Human
acaaaacaaaaugaaagaa

SEQ ID NO: 405413 - RNA, 22 nt, Human
accaauccacaccugauugugu

SEQ ID NO: 405414 - RNA, 21 nt, Human
acuaagcacacuguguugcua

SEQ ID NO: 405415 - RNA, 22 nt, Human
acuucuugagguacaaaaacug

SEQ ID NO: 405416 - RNA, 20 nt, Human
caaaacaaaacaaaaugaaa

SEQ ID NO: 405417 - RNA, 23 nt, Human
caaaaugaaagaauguggucgca

SEQ ID NO: 405418 - RNA, 22 nt, Human
caaaguagcaccaauccacacc

SEQ ID NO: 405419 - RNA, 23 nt, Human
cacacuguguugcuaaacucucu

SEQ ID NO: 405420 - RNA, 22 nt, Human
cacauuugaaccaggaucgccc

SEQ ID NO: 405421 - RNA, 19 nt, Human
cagaggcugagagauccug

SEQ ID NO: 405422 - RNA, 20 nt, Human
cauuugaaccaggaucgccc

SEQ ID NO: 405423 - RNA, 22 nt, Human
ccacaccugauuguguuuccaa

SEQ ID NO: 405424 - RNA, 24 nt, Human
cgagcgcgcggucggcggaggccg

SEQ ID NO: 405425 - RNA, 18 nt, Human
cgcggucggcggaggccg

SEQ ID NO: 405426 - RNA, 20 nt, Human
cucaucuuguaguaaaacuc

SEQ ID NO: 405427 - RNA, 18 nt, Human
gaggggcccuggggcugc

SEQ ID NO: 405428 - RNA, 20 nt, Human
gcggcggcgaggggcccugg

SEQ ID NO: 405429 - RNA, 21 nt, Human
ggcggcgaggggcccuggggc

SEQ ID NO: 405430 - RNA, 24 nt, Human
gguaaaaguaaauaaauugcauuu

SEQ ID NO: 405431 - RNA, 24 nt, Human
uaaaaacaaaacaaaacaaaacaa

SEQ ID NO: 405432 - RNA, 23 nt, Human
uaacacagaggcugagagauccc

SEQ ID NO: 405433 - RNA, 23 nt, Human
uccaacauuaaccuuccuuguug

SEQ ID NO: 405434 - RNA, 20 nt, Human
ugaacaaaagaccacagggg

SEQ ID NO: 405435 - RNA, 21 nt, Human
ugaauggaacuucuccugcuu

SEQ ID NO: 405436 - RNA, 22 nt, Human
ugaccuagcugguaucuugugg

SEQ ID NO: 405437 - RNA, 22 nt, Human
uggcggcggcgaggggcccugg

SEQ ID NO: 405438 - RNA, 23 nt, Human
uggcggcggcgaggggcccuggg

SEQ ID NO: 405439 - RNA, 25 nt, Human
ugguaucuuguggauguuucuguga

SEQ ID NO: 405440 - RNA, 18 nt, Human
uggucgcagcuaaggagg

SEQ ID NO: 405441 - RNA, 23 nt, Human
ugugacagugguaaaaguaaaua

SEQ ID NO: 405442 - RNA, 23 nt, Human
uguuagaaaugcccucgguaaca

SEQ ID NO: 405443 - RNA, 26 nt, Human
uuaaaaacaaaacaaaacaaaacaaa

SEQ ID NO: 405444 - RNA, 22 nt, Human
uuguauguguuuuccccacccc

SEQ ID NO: 405445 - RNA, 20 nt, Human
uuuuccccacccccugaccu

SEQ ID NO: 405446 - RNA, 21 nt, Human
cggcaggcggugaggaccgga

SEQ ID NO: 405447 - RNA, 23 nt, Human
cugggugagcggacugggugcca

SEQ ID NO: 405448 - RNA, 18 nt, Human
gcugggugagcggacugg

SEQ ID NO: 405449 - RNA, 19 nt, Human
ggcugggugagcggacugg

SEQ ID NO: 405450 - RNA, 23 nt, Human
ggcugggugagcggacugggugc

SEQ ID NO: 405451 - RNA, 19 nt, Human
uagccuggcuggggguggg

SEQ ID NO: 405452 - RNA, 22 nt, Human
ugggcugggugagcggacuggg

SEQ ID NO: 405453 - RNA, 20 nt, Human
aaaagaacaucacaucaagg

SEQ ID NO: 405454 - RNA, 23 nt, Human
aaacgcucccggccagggaacaa

SEQ ID NO: 405455 - RNA, 23 nt, Human
aaagcuucuccgauacaaaauau

SEQ ID NO: 405456 - RNA, 22 nt, Human
aaaguguugggauuacaggcga

SEQ ID NO: 405457 - RNA, 20 nt, Human
aaauccucaauuugcuguuc

SEQ ID NO: 405458 - RNA, 22 nt, Human
aagcaaacgcucccggccaggg

SEQ ID NO: 405459 - RNA, 18 nt, Human
aaguguugggauuacagg

SEQ ID NO: 405460 - RNA, 19 nt, Human
aaguguugggauuacaggc

SEQ ID NO: 405461 - RNA, 18 nt, Human
aauaagagagcugaaaaa

SEQ ID NO: 405462 - RNA, 19 nt, Human
acaaaaggaacuucuuaca

SEQ ID NO: 405463 - RNA, 23 nt, Human
acaauagccacccccggcccccc

SEQ ID NO: 405464 - RNA, 24 nt, Human
acaugguuucgccauguuggcugg

SEQ ID NO: 405465 - RNA, 22 nt, Human
acccugccuaccuuaggaauaa

SEQ ID NO: 405466 - RNA, 27 nt, Human
acucugucgaccaggcuggagcgcugu

SEQ ID NO: 405467 - RNA, 21 nt, Human
agaaagacccacggagcucca

SEQ ID NO: 405468 - RNA, 19 nt, Human
agagcugaaaaagcuggug

SEQ ID NO: 405469 - RNA, 24 nt, Human
agcgaagauggcaauaacaaaagg

SEQ ID NO: 405470 - RNA, 18 nt, Human
aguagcugggacuacagg

SEQ ID NO: 405471 - RNA, 19 nt, Human
aguagcugggacuacaggc

SEQ ID NO: 405472 - RNA, 23 nt, Human
aguugacccaaaagguuaugguc

SEQ ID NO: 405473 - RNA, 24 nt, Human
aguugacccaaaagguuauggucu

SEQ ID NO: 405474 - RNA, 24 nt, Human
auuuuuguauuuuuaguagagaca

SEQ ID NO: 405475 - RNA, 23 nt, Human
caaaauauuuggucauguauuca

SEQ ID NO: 405476 - RNA, 22 nt, Human
caaaguguugggauuacaggcg

SEQ ID NO: 405477 - RNA, 21 nt, Human
caagagaagagaaagacccac

SEQ ID NO: 405478 - RNA, 20 nt, Human
caagcgauccuccugccuca

SEQ ID NO: 405479 - RNA, 22 nt, Human
caagcgauccuccugccucagc

SEQ ID NO: 405480 - RNA, 27 nt, Human
caagcgauccuccugccucagccuccc

SEQ ID NO: 405481 - RNA, 18 nt, Human
caauuugcuguucccuga

SEQ ID NO: 405482 - RNA, 22 nt, Human
cacccccggcccccaccagucc

SEQ ID NO: 405483 - RNA, 24 nt, Human
cacucugucgaccaggcuggagcg

SEQ ID NO: 405484 - RNA, 19 nt, Human
caggaaccaaauggccucc

SEQ ID NO: 405485 - RNA, 19 nt, Human
ccaaaguguugggauuaca

SEQ ID NO: 405486 - RNA, 22 nt, Human
ccaaaguguugggauuacaggc

SEQ ID NO: 405487 - RNA, 23 nt, Human
ccaaaguguugggauuacaggcg

SEQ ID NO: 405488 - RNA, 23 nt, Human
ccaccaguccuuuuauuggcucu

SEQ ID NO: 405489 - RNA, 19 nt, Human
ccagcaaagcgaagauggc

SEQ ID NO: 405490 - RNA, 19 nt, Human
ccauguuggcugggcuggu

SEQ ID NO: 405491 - RNA, 22 nt, Human
ccauguuggcugggcuggucuc

SEQ ID NO: 405492 - RNA, 23 nt, Human
ccauguuggcugggcuggucucg

SEQ ID NO: 405493 - RNA, 24 nt, Human
cccacaauagccacccccggcccc

SEQ ID NO: 405494 - RNA, 23 nt, Human
cccgaguagcugggacuacaggc

SEQ ID NO: 405495 - RNA, 24 nt, Human
cccgaguagcugggacuacaggca

SEQ ID NO: 405496 - RNA, 23 nt, Human
ccucaagugaucuguccuggccu

SEQ ID NO: 405497 - RNA, 24 nt, Human
ccuccugccucagccucccgagua

SEQ ID NO: 405498 - RNA, 19 nt, Human
ccugaccucaagugaucug

SEQ ID NO: 405499 - RNA, 23 nt, Human
ccugcaugguggagaguggagaa

SEQ ID NO: 405500 - RNA, 24 nt, Human
ccugccucagccucccgaguagcu

SEQ ID NO: 405501 - RNA, 20 nt, Human
ccuggguucaagcgauccuc

SEQ ID NO: 405502 - RNA, 23 nt, Human
ccuggguucaagcgauccuccug

SEQ ID NO: 405503 - RNA, 18 nt, Human
cgaccaggcuggagcgcu

SEQ ID NO: 405504 - RNA, 21 nt, Human
cgcuguggugcgauaucggcu

SEQ ID NO: 405505 - RNA, 23 nt, Human
cggccagggaacaacuuuagaau

SEQ ID NO: 405506 - RNA, 23 nt, Human
cggcggacgcucggcugggcucc

SEQ ID NO: 405507 - RNA, 24 nt, Human
cucacucugucgaccaggcuggag

SEQ ID NO: 405508 - RNA, 24 nt, Human
cucacugcagucuccacuuccugg

SEQ ID NO: 405509 - RNA, 24 nt, Human
cucagccucccgaguagcugggac

SEQ ID NO: 405510 - RNA, 20 nt, Human
cugagugggucauuacugga

SEQ ID NO: 405511 - RNA, 19 nt, Human
cugcagucuccacuuccug

SEQ ID NO: 405512 - RNA, 20 nt, Human
cuggugccauuugaaaaaaa

SEQ ID NO: 405513 - RNA, 24 nt, Human
cuuccuggguucaagcgauccucc

SEQ ID NO: 405514 - RNA, 26 nt, Human
gaccucaagugaucuguccuggccuc

SEQ ID NO: 405515 - RNA, 27 nt, Human
gaguagcugggacuacaggcaggcguc

SEQ ID NO: 405516 - RNA, 19 nt, Human
gcagcggcggacgcucggc

SEQ ID NO: 405517 - RNA, 20 nt, Human
gccucagccucccgaguagc

SEQ ID NO: 405518 - RNA, 24 nt, Human
gcgauccuccugccucagccuccc

SEQ ID NO: 405519 - RNA, 18 nt, Human
gcggagcgcagaggcgca

SEQ ID NO: 405520 - RNA, 22 nt, Human
gcucccggccagggaacaacuu

SEQ ID NO: 405521 - RNA, 23 nt, Human
gcuggucucgaacuccugaccuc

SEQ ID NO: 405522 - RNA, 23 nt, Human
ggaaauaugcaaaagaacaucac

SEQ ID NO: 405523 - RNA, 19 nt, Human
ggagaagggccaggauucu

SEQ ID NO: 405524 - RNA, 25 nt, Human
ggcaauaacaaaaggaaccgguacc

SEQ ID NO: 405525 - RNA, 20 nt, Human
ggcagcggcggacgcucggc

SEQ ID NO: 405526 - RNA, 24 nt, Human
ggcuggucucgaacuccugaccuc

SEQ ID NO: 405527 - RNA, 21 nt, Human
gggcagcggcggacgcucggc

SEQ ID NO: 405528 - RNA, 24 nt, Human
gggccaggauucuuagguugaucu

SEQ ID NO: 405529 - RNA, 20 nt, Human
gggcuggucucgaacuccug

SEQ ID NO: 405530 - RNA, 19 nt, Human
ggucucgaacuccugaccu

SEQ ID NO: 405531 - RNA, 21 nt, Human
gguuucgccauguuggcuggg

SEQ ID NO: 405532 - RNA, 21 nt, Human
guccuggccucccaaaguguu

SEQ ID NO: 405533 - RNA, 19 nt, Human
gucgaccaggcuggagcgc

SEQ ID NO: 405534 - RNA, 23 nt, Human
uaagagagcugaaaaagcuggug

SEQ ID NO: 405535 - RNA, 24 nt, Human
uaauuuuuguauuuuuaguagaga

SEQ ID NO: 405536 - RNA, 22 nt, Human
uacaggcgaaagcaaacgcucc

SEQ ID NO: 405537 - RNA, 22 nt, Human
uagagacaugguuucgccaugu

SEQ ID NO: 405538 - RNA, 24 nt, Human
uaguagagacaugguuucgccaug

SEQ ID NO: 405539 - RNA, 21 nt, Human
uaguuugaccaacaguugacc

SEQ ID NO: 405540 - RNA, 19 nt, Human
ucaagcgauccuccugccu

SEQ ID NO: 405541 - RNA, 24 nt, Human
ucacugcagucuccacuuccuggg

SEQ ID NO: 405542 - RNA, 23 nt, Human
ucagccucccgaguagcugggac

SEQ ID NO: 405543 - RNA, 22 nt, Human
uccagcaaagcgaagauggcaa

SEQ ID NO: 405544 - RNA, 24 nt, Human
ucccaaaguguugggauuacaggc

SEQ ID NO: 405545 - RNA, 24 nt, Human
ucccgaguagcugggacuacaggc

SEQ ID NO: 405546 - RNA, 21 nt, Human
ucccugaaguauggaaaugaa

SEQ ID NO: 405547 - RNA, 21 nt, Human
uccuggguucaagcgauccuc

SEQ ID NO: 405548 - RNA, 24 nt, Human
uccuggguucaagcgauccuccug

SEQ ID NO: 405549 - RNA, 22 nt, Human
ucgccauguuggcugggcuggu

SEQ ID NO: 405550 - RNA, 24 nt, Human
ucgccauguuggcugggcuggucu

SEQ ID NO: 405551 - RNA, 24 nt, Human
ucucacucugucgaccaggcugga

SEQ ID NO: 405552 - RNA, 21 nt, Human
ucucgaacuccugaccucaag

SEQ ID NO: 405553 - RNA, 18 nt, Human
ugaaaaaaaaagggaagg

SEQ ID NO: 405554 - RNA, 18 nt, Human
ugaaggaaauaugcaaaa

SEQ ID NO: 405555 - RNA, 19 nt, Human
ugaccucaagugaucuguc

SEQ ID NO: 405556 - RNA, 20 nt, Human
ugaccucaagugaucugucc

SEQ ID NO: 405557 - RNA, 21 nt, Human
ugaccucaagugaucuguccu

SEQ ID NO: 405558 - RNA, 22 nt, Human
ugacuucccacaauagccaccc

SEQ ID NO: 405559 - RNA, 24 nt, Human
ugacuucccacaauagccaccccc

SEQ ID NO: 405560 - RNA, 22 nt, Human
ugagauggagucucacucuguc

SEQ ID NO: 405561 - RNA, 23 nt, Human
ugccuauucucccaggaaccaaa

SEQ ID NO: 405562 - RNA, 24 nt, Human
ugccucagccucccgaguagcugg

SEQ ID NO: 405563 - RNA, 24 nt, Human
uggauggaaaaucccuacccaugu

SEQ ID NO: 405564 - RNA, 21 nt, Human
uggcucuggauggaaaauccc

SEQ ID NO: 405565 - RNA, 24 nt, Human
uggcugggcuggucucgaacuccu

SEQ ID NO: 405566 - RNA, 22 nt, Human
ugggacuacaggcaggcgucac

SEQ ID NO: 405567 - RNA, 24 nt, Human
ugggacuacaggcaggcgucacca

SEQ ID NO: 405568 - RNA, 19 nt, Human
ugggauuacaggcgaaagc

SEQ ID NO: 405569 - RNA, 25 nt, Human
ugggccaguuuuuaaucucugcugc

SEQ ID NO: 405570 - RNA, 23 nt, Human
uggguucaagcgauccuccugcc

SEQ ID NO: 405571 - RNA, 24 nt, Human
uggugcgauaucggcucacugcag

SEQ ID NO: 405572 - RNA, 19 nt, Human
uguccugcaugguggagag

SEQ ID NO: 405573 - RNA, 21 nt, Human
ugucgaccaggcuggagcgcu

SEQ ID NO: 405574 - RNA, 20 nt, Human
uguugggauuacaggcgaaa

SEQ ID NO: 405575 - RNA, 20 nt, Human
uuaccaucuauuaauuacua

SEQ ID NO: 405576 - RNA, 24 nt, Human
uuaguagagacaugguuucgccau

SEQ ID NO: 405577 - RNA, 21 nt, Human
uuauuggcucuggauggaaaa

SEQ ID NO: 405578 - RNA, 21 nt, Human
uucaagcgauccuccugccuc

SEQ ID NO: 405579 - RNA, 24 nt, Human
uucaagcgauccuccugccucagc

SEQ ID NO: 405580 - RNA, 22 nt, Human
uucauaauuugcuugacauuuc

SEQ ID NO: 405581 - RNA, 24 nt, Human
uuucgccauguuggcugggcuggu

SEQ ID NO: 405582 - RNA, 27 nt, Human
uuuuauuuuuucuugagauggagucuu

SEQ ID NO: 405583 - RNA, 22 nt, Human
uuuuuaguagagacaugguuuc

SEQ ID NO: 405584 - RNA, 20 nt, Human
uuuuuguauuuuuaguagag

SEQ ID NO: 405585 - RNA, 22 nt, Human
aaacagccaugaauccagcucu

SEQ ID NO: 405586 - RNA, 19 nt, Human
aacauggugaaaccccguc

SEQ ID NO: 405587 - RNA, 20 nt, Human
aacauggugaaaccccgucu

SEQ ID NO: 405588 - RNA, 21 nt, Human
aacauggugaaaccccgucuc

SEQ ID NO: 405589 - RNA, 24 nt, Human
aaccacccgaacccgggaggcaga

SEQ ID NO: 405590 - RNA, 19 nt, Human
aaccuugcauuaacaaccu

SEQ ID NO: 405591 - RNA, 21 nt, Human
aagcagcugggaccacaggca

SEQ ID NO: 405592 - RNA, 24 nt, Human
aagcagcugggaccacaggcacgc

SEQ ID NO: 405593 - RNA, 20 nt, Human
aaucuccucuccaaaggagc

SEQ ID NO: 405594 - RNA, 21 nt, Human
aauggcucauaccuguaaucc

SEQ ID NO: 405595 - RNA, 24 nt, Human
aauggcucauaccuguaauccuag

SEQ ID NO: 405596 - RNA, 20 nt, Human
acaagaacgaaacuccaucu

SEQ ID NO: 405597 - RNA, 21 nt, Human
acaagaacgaaacuccaucuc

SEQ ID NO: 405598 - RNA, 20 nt, Human
acaccugcaaucccagccac

SEQ ID NO: 405599 - RNA, 24 nt, Human
accaacauggugaaaccccgucuc

SEQ ID NO: 405600 - RNA, 22 nt, Human
accacugcacuccagguugggc

SEQ ID NO: 405601 - RNA, 25 nt, Human
accacugcacuccagguugggcaac

SEQ ID NO: 405602 - RNA, 18 nt, Human
accccgucuccacuaaaa

SEQ ID NO: 405603 - RNA, 23 nt, Human
acccugucucuacauaaaaguaa

SEQ ID NO: 405604 - RNA, 18 nt, Human
accuguaauccuagcacu

SEQ ID NO: 405605 - RNA, 21 nt, Human
accuguaauccuagcacuuug

SEQ ID NO: 405606 - RNA, 23 nt, Human
accuguaauccuagcacuuuggg

SEQ ID NO: 405607 - RNA, 26 nt, Human
acgaaacuccaucucaaaaaaauaaa

SEQ ID NO: 405608 - RNA, 19 nt, Human
acugcaaccuccgcccccc

SEQ ID NO: 405609 - RNA, 21 nt, Human
acugcacuccagguugggcaa

SEQ ID NO: 405610 - RNA, 25 nt, Human
acugcacuccagguugggcaacaag

SEQ ID NO: 405611 - RNA, 25 nt, Human
agaagcaagaaucacugugagcaag

SEQ ID NO: 405612 - RNA, 22 nt, Human
agacaggaggacugcuugaggc

SEQ ID NO: 405613 - RNA, 18 nt, Human
agagguugcagugagccg

SEQ ID NO: 405614 - RNA, 24 nt, Human
agagguugcagugagccgagaccg

SEQ ID NO: 405615 - RNA, 24 nt, Human
agcacuuugggaggccgagguggg

SEQ ID NO: 405616 - RNA, 24 nt, Human
agccugaccaacauggugaaaccc

SEQ ID NO: 405617 - RNA, 21 nt, Human
aggcagagguugcagugagcc

SEQ ID NO: 405618 - RNA, 24 nt, Human
aggcagagguugcagugagccgag

SEQ ID NO: 405619 - RNA, 18 nt, Human
aggcaggagaaccacccg

SEQ ID NO: 405620 - RNA, 24 nt, Human
aggcaggagaaccacccgaacccg

SEQ ID NO: 405621 - RNA, 21 nt, Human
aggccgagguggguagaucac

SEQ ID NO: 405622 - RNA, 24 nt, Human
aggugcaguggcucacgccuguaa

SEQ ID NO: 405623 - RNA, 22 nt, Human
agguggguagaucaccugaggu

SEQ ID NO: 405624 - RNA, 19 nt, Human
aguacagaguuauagagga

SEQ ID NO: 405625 - RNA, 24 nt, Human
aguggcucacgccuguaaucccag

SEQ ID NO: 405626 - RNA, 21 nt, Human
auaaaaaacaacaauugccaa

SEQ ID NO: 405627 - RNA, 20 nt, Human
auaaaacaaaauaaaugcca

SEQ ID NO: 405628 - RNA, 26 nt, Human
augcgugcacacacacacguaacucg

SEQ ID NO: 405629 - RNA, 22 nt, Human
caacaaagugagacccugucuc

SEQ ID NO: 405630 - RNA, 24 nt, Human
caacauggugaaaccccgucucca

SEQ ID NO: 405631 - RNA, 24 nt, Human
caaccuccgccccccagguccaag

SEQ ID NO: 405632 - RNA, 25 nt, Human
caagacaggaggacugcuugaggcc

SEQ ID NO: 405633 - RNA, 22 nt, Human
caagugauucucccgccucagc

SEQ ID NO: 405634 - RNA, 27 nt, Human
caagugauucucccgccucagcccccc

SEQ ID NO: 405635 - RNA, 25 nt, Human
cacaaaaaacuagccgggcguggug

SEQ ID NO: 405636 - RNA, 18 nt, Human
cacaccugcaaucccagc

SEQ ID NO: 405637 - RNA, 23 nt, Human
cacaggcacgcgccaccacgccc

SEQ ID NO: 405638 - RNA, 21 nt, Human
cacaucauaaucuccucucca

SEQ ID NO: 405639 - RNA, 24 nt, Human
caccacugcacuccagguugggca

SEQ ID NO: 405640 - RNA, 19 nt, Human
caccuuugucucacaagca

SEQ ID NO: 405641 - RNA, 24 nt, Human
cacgccuguaaucccagcacuuug

SEQ ID NO: 405642 - RNA, 20 nt, Human
cacugcaaccuccgcccccc

SEQ ID NO: 405643 - RNA, 18 nt, Human
cacugcacuccagguugg

SEQ ID NO: 405644 - RNA, 19 nt, Human
cacugcacuccagguuggg

SEQ ID NO: 405645 - RNA, 23 nt, Human
cacugcacuccagguugggcaac

SEQ ID NO: 405646 - RNA, 24 nt, Human
cacugcacuccagguugggcaaca

SEQ ID NO: 405647 - RNA, 24 nt, Human
cagagucuugcucuguugcccagg

SEQ ID NO: 405648 - RNA, 30 nt, Human
cagcacaugugcgugcaugcgugcacacag

SEQ ID NO: 405649 - RNA, 24 nt, Human
cagcacuuugggaggccgaggugg

SEQ ID NO: 405650 - RNA, 24 nt, Human
cagccacucaggaggccgaggcag

SEQ ID NO: 405651 - RNA, 25 nt, Human
cagccaugaauccagcucuaaguac

SEQ ID NO: 405652 - RNA, 18 nt, Human
cagcgugggcaacaaagu

SEQ ID NO: 405653 - RNA, 24 nt, Human
caggaggccgaggcaggagaacca

SEQ ID NO: 405654 - RNA, 21 nt, Human
caguagagacgggguugcuuu

SEQ ID NO: 405655 - RNA, 25 nt, Human
caguagagacgggguugcuuuucua

SEQ ID NO: 405656 - RNA, 24 nt, Human
caguguuaaaggggaccccaaacc

SEQ ID NO: 405657 - RNA, 23 nt, Human
cauaaaaguaaaaucaaaagucu

SEQ ID NO: 405658 - RNA, 22 nt, Human
cauaauaaacagccaugaaucc

SEQ ID NO: 405659 - RNA, 20 nt, Human
caucauaaucuccucuccaa

SEQ ID NO: 405660 - RNA, 19 nt, Human
ccaagugauucucccgccu

SEQ ID NO: 405661 - RNA, 20 nt, Human
ccacugcacuccagguuggg

SEQ ID NO: 405662 - RNA, 21 nt, Human
ccacugcacuccagguugggc

SEQ ID NO: 405663 - RNA, 19 nt, Human
ccccaaaccuugcauuaac

SEQ ID NO: 405664 - RNA, 21 nt, Human
ccccagguccaagugauucuc

SEQ ID NO: 405665 - RNA, 24 nt, Human
ccccccagguccaagugauucucc

SEQ ID NO: 405666 - RNA, 21 nt, Human
cccgucuccacuaaaaacaca

SEQ ID NO: 405667 - RNA, 24 nt, Human
ccgccccccagguccaagugauuc

SEQ ID NO: 405668 - RNA, 23 nt, Human
ccugaccaacauggugaaacccc

SEQ ID NO: 405669 - RNA, 24 nt, Human
ccugaccaacauggugaaaccccg

SEQ ID NO: 405670 - RNA, 24 nt, Human
cgagaucagccugaccaacauggu

SEQ ID NO: 405671 - RNA, 24 nt, Human
cgaggcaggagaaccacccgaacc

SEQ ID NO: 405672 - RNA, 20 nt, Human
cgagguggguagaucaccug

SEQ ID NO: 405673 - RNA, 24 nt, Human
cgagguggguagaucaccugaggu

SEQ ID NO: 405674 - RNA, 26 nt, Human
cgagguggguagaucaccugagguca

SEQ ID NO: 405675 - RNA, 22 nt, Human
cgccccccagguccaagugauu

SEQ ID NO: 405676 - RNA, 21 nt, Human
cgccucagccccccaagcagc

SEQ ID NO: 405677 - RNA, 24 nt, Human
cgccucagccccccaagcagcugg

SEQ ID NO: 405678 - RNA, 23 nt, Human
cgccuguaaucccagcacuuugg

SEQ ID NO: 405679 - RNA, 24 nt, Human
cgccuguaaucccagcacuuuggg

SEQ ID NO: 405680 - RNA, 24 nt, Human
cgggaggcagagguugcagugagc

SEQ ID NO: 405681 - RNA, 22 nt, Human
cuaaaaacacaaaaaacuagcc

SEQ ID NO: 405682 - RNA, 22 nt, Human
cucacgccuguaaucccagcac

SEQ ID NO: 405683 - RNA, 24 nt, Human
cucacgccuguaaucccagcacuu

SEQ ID NO: 405684 - RNA, 24 nt, Human
cucacugcaaccuccgccccccag

SEQ ID NO: 405685 - RNA, 24 nt, Human
cucauaccuguaauccuagcacuu

SEQ ID NO: 405686 - RNA, 22 nt, Human
cucccgccucagccccccaagc

SEQ ID NO: 405687 - RNA, 24 nt, Human
cucccgccucagccccccaagcag

SEQ ID NO: 405688 - RNA, 20 nt, Human
cuccgccccccagguccaag

SEQ ID NO: 405689 - RNA, 26 nt, Human
cuccucuccaaaggagcuacuuuaaa

SEQ ID NO: 405690 - RNA, 23 nt, Human
cugcaaccuccgccccccagguc

SEQ ID NO: 405691 - RNA, 18 nt, Human
gaagcaagaaucacugug

SEQ ID NO: 405692 - RNA, 23 nt, Human
gagaccgcaccacugcacuccag

SEQ ID NO: 405693 - RNA, 22 nt, Human
gagcaggucucagagaagcaag

SEQ ID NO: 405694 - RNA, 20 nt, Human
gaggcaggagaaccacccga

SEQ ID NO: 405695 - RNA, 23 nt, Human
gagguggguagaucaccugaggu

SEQ ID NO: 405696 - RNA, 18 nt, Human
gaucaccugaggucagga

SEQ ID NO: 405697 - RNA, 24 nt, Human
gaucaccugaggucaggagcucga

SEQ ID NO: 405698 - RNA, 22 nt, Human
gcaggagaaccacccgaacccg

SEQ ID NO: 405699 - RNA, 19 nt, Human
gcauaaucuuucacaucau

SEQ ID NO: 405700 - RNA, 18 nt, Human
gccagcgcaauggcucau

SEQ ID NO: 405701 - RNA, 21 nt, Human
gccccccaagcagcugggacc

SEQ ID NO: 405702 - RNA, 20 nt, Human
gccgagaccgcaccacugca

SEQ ID NO: 405703 - RNA, 25 nt, Human
gcucuguugcccaggcuggcgugca

SEQ ID NO: 405704 - RNA, 21 nt, Human
ggagaaccacccgaacccggg

SEQ ID NO: 405705 - RNA, 23 nt, Human
ggagcaggucucagagaagcaag

SEQ ID NO: 405706 - RNA, 27 nt, Human
ggccgaggcaggagaaccacccgaacc

SEQ ID NO: 405707 - RNA, 21 nt, Human
ggcgugguggcgcacaccugc

SEQ ID NO: 405708 - RNA, 21 nt, Human
gguagaucaccugaggucagg

SEQ ID NO: 405709 - RNA, 24 nt, Human
gucuugcucuguugcccaggcugg

SEQ ID NO: 405710 - RNA, 21 nt, Human
gugauucucccgccucagccc

SEQ ID NO: 405711 - RNA, 23 nt, Human
gugcaguggcacgaucucagcuc

SEQ ID NO: 405712 - RNA, 19 nt, Human
guugcagugagccgagacc

SEQ ID NO: 405713 - RNA, 25 nt, Human
uaaaaacacaaaaaacuagccgggc

SEQ ID NO: 405714 - RNA, 22 nt, Human
uaaacagccaugaauccagcuc

SEQ ID NO: 405715 - RNA, 18 nt, Human
uacauggagaaaccaugu

SEQ ID NO: 405716 - RNA, 24 nt, Human
uagaucaccugaggucaggagcuc

SEQ ID NO: 405717 - RNA, 26 nt, Human
uagaucaccugaggucaggagcucga

SEQ ID NO: 405718 - RNA, 20 nt, Human
uagcacuuuggguggccaag

SEQ ID NO: 405719 - RNA, 18 nt, Human
uagccgggcgugguggcg

SEQ ID NO: 405720 - RNA, 23 nt, Human
uauauacauggagaaaccaugug

SEQ ID NO: 405721 - RNA, 19 nt, Human
ucaccugaggucaggagcu

SEQ ID NO: 405722 - RNA, 18 nt, Human
ucacugcaaccuccgccc

SEQ ID NO: 405723 - RNA, 24 nt, Human
ucacugcaaccuccgccccccagg

SEQ ID NO: 405724 - RNA, 27 nt, Human
ucacugcaaccuccgccccccaggucc

SEQ ID NO: 405725 - RNA, 18 nt, Human
ucagccccccaagcagcu

SEQ ID NO: 405726 - RNA, 20 nt, Human
ucagccccccaagcagcugg

SEQ ID NO: 405727 - RNA, 20 nt, Human
ucagccugaccaacauggug

SEQ ID NO: 405728 - RNA, 27 nt, Human
ucagcucacugcaaccuccgcccccca

SEQ ID NO: 405729 - RNA, 26 nt, Human
ucaggccaggugcaguggcucacgcc

SEQ ID NO: 405730 - RNA, 20 nt, Human
ucaguagagacgggguugcu

SEQ ID NO: 405731 - RNA, 23 nt, Human
uccaagugauucucccgccucag

SEQ ID NO: 405732 - RNA, 24 nt, Human
uccaagugauucucccgccucagc

SEQ ID NO: 405733 - RNA, 25 nt, Human
ucucuggagagaauuguguuggucc

SEQ ID NO: 405734 - RNA, 24 nt, Human
ucuguugcccaggcuggcgugcag

SEQ ID NO: 405735 - RNA, 18 nt, Human
ucuugcucuguugcccag

SEQ ID NO: 405736 - RNA, 19 nt, Human
ucuugcucuguugcccagg

SEQ ID NO: 405737 - RNA, 23 nt, Human
ucuugcucuguugcccaggcugg

SEQ ID NO: 405738 - RNA, 27 nt, Human
ucuugcucuguugcccaggcuggcgug

SEQ ID NO: 405739 - RNA, 22 nt, Human
ugaaaccccgucuccacuaaaa

SEQ ID NO: 405740 - RNA, 22 nt, Human
ugacaagacauaucucugggga

SEQ ID NO: 405741 - RNA, 24 nt, Human
ugaccaacauggugaaaccccguc

SEQ ID NO: 405742 - RNA, 18 nt, Human
ugagacagagucuugcuc

SEQ ID NO: 405743 - RNA, 22 nt, Human
ugagacagagucuugcucuguu

SEQ ID NO: 405744 - RNA, 24 nt, Human
ugaguaaaagacaaggguuuauag

SEQ ID NO: 405745 - RNA, 19 nt, Human
ugauacaggcagaguuggg

SEQ ID NO: 405746 - RNA, 21 nt, Human
ugcaugcgugcacacacacac

SEQ ID NO: 405747 - RNA, 21 nt, Human
ugcauugcauuuugaaauauu

SEQ ID NO: 405748 - RNA, 18 nt, Human
ugcccaggcuggcgugca

SEQ ID NO: 405749 - RNA, 26 nt, Human
ugcgugcaugcgugcacacacacacg

SEQ ID NO: 405750 - RNA, 22 nt, Human
ugcucuguugcccaggcuggcg

SEQ ID NO: 405751 - RNA, 19 nt, Human
uggagaaaccaugugaaaa

SEQ ID NO: 405752 - RNA, 24 nt, Human
uggcacgaucucagcucacugcaa

SEQ ID NO: 405753 - RNA, 22 nt, Human
uggcgcacaccugcaaucccag

SEQ ID NO: 405754 - RNA, 24 nt, Human
uggcgugcaguggcacgaucucag

SEQ ID NO: 405755 - RNA, 24 nt, Human
uggcucacgccuguaaucccagca

SEQ ID NO: 405756 - RNA, 19 nt, Human
uggcucauaccuguaaucc

SEQ ID NO: 405757 - RNA, 24 nt, Human
uggcucauaccuguaauccuagca

SEQ ID NO: 405758 - RNA, 20 nt, Human
uggcuucugaagcccacagu

SEQ ID NO: 405759 - RNA, 20 nt, Human
ugggaauguuuguuccauau

SEQ ID NO: 405760 - RNA, 22 nt, Human
ugggaauguuuguuccauauag

SEQ ID NO: 405761 - RNA, 21 nt, Human
ugggaccacaggcacgcgcca

SEQ ID NO: 405762 - RNA, 24 nt, Human
ugggaccacaggcacgcgccacca

SEQ ID NO: 405763 - RNA, 20 nt, Human
ugggaggccgagguggguag

SEQ ID NO: 405764 - RNA, 24 nt, Human
ugggaggccgagguggguagauca

SEQ ID NO: 405765 - RNA, 24 nt, Human
ugggcaacaaagugagacccuguc

SEQ ID NO: 405766 - RNA, 24 nt, Human
uggguagaucaccugaggucagga

SEQ ID NO: 405767 - RNA, 18 nt, Human
uguuggguaguacagagu

SEQ ID NO: 405768 - RNA, 24 nt, Human
uuaguuguuggguaguacagaguu

SEQ ID NO: 405769 - RNA, 25 nt, Human
uucuaaauuucauaaagaaugucag

SEQ ID NO: 405770 - RNA, 18 nt, Human
uucucccgccucagcccc

SEQ ID NO: 405771 - RNA, 21 nt, Human
uugaacccuacugaaauguua

SEQ ID NO: 405772 - RNA, 18 nt, Human
uugcagugagccgagacc

SEQ ID NO: 405773 - RNA, 18 nt, Human
uugcagugagccgagacc

SEQ ID NO: 405774 - RNA, 20 nt, Human
uugcagugagccgagaccgc

SEQ ID NO: 405775 - RNA, 18 nt, Human
uugcccaggcuggcgugc

SEQ ID NO: 405776 - RNA, 25 nt, Human
uugggaggccgagguggguagauca

SEQ ID NO: 405777 - RNA, 21 nt, Human
agcuauaacauuuauucaucc

SEQ ID NO: 405778 - RNA, 24 nt, Human
agcuguucugcaguguccugccac

SEQ ID NO: 405779 - RNA, 19 nt, Human
ucguccugcugauuuccga

SEQ ID NO: 405780 - RNA, 20 nt, Human
uggaaaagagucguacggug

SEQ ID NO: 405781 - RNA, 21 nt, Human
ugggaacaugaagcuguucug

SEQ ID NO: 405782 - RNA, 19 nt, Human
uuugggaacaugaagcugu

SEQ ID NO: 405783 - RNA, 22 nt, Human
aaaaaaaaauucuggaaaugaa

SEQ ID NO: 405784 - RNA, 18 nt, Human
aagaagcuucaauauuca

SEQ ID NO: 405785 - RNA, 24 nt, Human
aauguaaacauuugccaaaaaaaa

SEQ ID NO: 405786 - RNA, 22 nt, Human
acaauaccugauaaagauucag

SEQ ID NO: 405787 - RNA, 19 nt, Human
accucaagaggaugugaaa

SEQ ID NO: 405788 - RNA, 21 nt, Human
auacaauugaaaaaaauuaaa

SEQ ID NO: 405789 - RNA, 21 nt, Human
caaaaccuaucaugcauguca

SEQ ID NO: 405790 - RNA, 24 nt, Human
cauuugccaaaaaaaaaaaaaaaa

SEQ ID NO: 405791 - RNA, 23 nt, Human
ccaaaaaaaaaaaaaaaaaaaaa

SEQ ID NO: 405792 - RNA, 21 nt, Human
ccuaggugcuggcaggcaggg

SEQ ID NO: 405793 - RNA, 24 nt, Human
cuuccaaaaccuaucaugcauguc

SEQ ID NO: 405794 - RNA, 24 nt, Human
gaauguaaacauuugccaaaaaaa

SEQ ID NO: 405795 - RNA, 18 nt, Human
gagcacguuaaaacccug

SEQ ID NO: 405796 - RNA, 21 nt, Human
gccaaaaaaaaaaaaaaaaaa

SEQ ID NO: 405797 - RNA, 21 nt, Human
ggcauuaagaaaacaccauga

SEQ ID NO: 405798 - RNA, 23 nt, Human
ggugcuggcaggcagggcacauc

SEQ ID NO: 405799 - RNA, 23 nt, Human
uaaaaaugccacaaauuuguuuu

SEQ ID NO: 405800 - RNA, 31 nt, Human
uaaacauuugccaaaaaaaaaaaaaaaaaaa

SEQ ID NO: 405801 - RNA, 25 nt, Human
uaagaaaacaccaugaugucagagg

SEQ ID NO: 405802 - RNA, 20 nt, Human
uacacauguauucauagagu

SEQ ID NO: 405803 - RNA, 24 nt, Human
ucauaagcugcaacccaacucgaa

SEQ ID NO: 405804 - RNA, 18 nt, Human
ucuagauuuacauguauu

SEQ ID NO: 405805 - RNA, 27 nt, Human
ugaaaacaugcauuagacuaaaaaugc

SEQ ID NO: 405806 - RNA, 18 nt, Human
ugaauguaaacauuugcc

SEQ ID NO: 405807 - RNA, 21 nt, Human
ugacuugccuguaauuacccc

SEQ ID NO: 405808 - RNA, 19 nt, Human
ugccaaaaaaaaaaaaaaa

SEQ ID NO: 405809 - RNA, 18 nt, Human
uggaugaaaacaugcauu

SEQ ID NO: 405810 - RNA, 24 nt, Human
uggcaggcagggcacauccccucu

SEQ ID NO: 405811 - RNA, 21 nt, Human
ugugaaaaugacuugccugua

SEQ ID NO: 405812 - RNA, 21 nt, Human
uuuaaggccuucauacaauug

SEQ ID NO: 405813 - RNA, 21 nt, Human
aaacagauuugauaaucuuau

SEQ ID NO: 405814 - RNA, 19 nt, Human
aaucgaguccacccucagc

SEQ ID NO: 405815 - RNA, 20 nt, Human
accagcaggacccagacgcc

SEQ ID NO: 405816 - RNA, 18 nt, Human
aucgaguccacccucagc

SEQ ID NO: 405817 - RNA, 24 nt, Human
caacagcaccucaccgcccgcgac

SEQ ID NO: 405818 - RNA, 26 nt, Human
caacagcaccucaccgcccgcgaccg

SEQ ID NO: 405819 - RNA, 28 nt, Human
caacagcaccucaccgcccgcgacuggu

SEQ ID NO: 405820 - RNA, 24 nt, Human
cagcaccucaccgcccgcgaccga

SEQ ID NO: 405821 - RNA, 22 nt, Human
caguggcagcggccgacggggu

SEQ ID NO: 405822 - RNA, 22 nt, Human
cccgagcucagaggcuaucccu

SEQ ID NO: 405823 - RNA, 24 nt, Human
ccgacgggguagaagcggagaaga

SEQ ID NO: 405824 - RNA, 20 nt, Human
ccgccgccucuaucaccucg

SEQ ID NO: 405825 - RNA, 27 nt, Human
ccucgcucgguggcucgcgcgcgcccg

SEQ ID NO: 405826 - RNA, 21 nt, Human
cgccggagacucccgcggcgg

SEQ ID NO: 405827 - RNA, 19 nt, Human
cggcgggacccugggaaau

SEQ ID NO: 405828 - RNA, 24 nt, Human
gagaagaaaggcgaagaccagcag

SEQ ID NO: 405829 - RNA, 18 nt, Human
gcccgccggagacucccg

SEQ ID NO: 405830 - RNA, 21 nt, Human
gcucagaggcuaucccugauc

SEQ ID NO: 405831 - RNA, 23 nt, Human
ggcgaagaccagcaggacccaga

SEQ ID NO: 405832 - RNA, 21 nt, Human
gggaccccaguggcagcggcc

SEQ ID NO: 405833 - RNA, 19 nt, Human
gggacccugggaaaucgag

SEQ ID NO: 405834 - RNA, 20 nt, Human
gggguagaagcggagaagaa

SEQ ID NO: 405835 - RNA, 21 nt, Human
ucgcgcgcgcccgcccgccgg

SEQ ID NO: 405836 - RNA, 22 nt, Human
ugaguauaccaguuuauauaua

SEQ ID NO: 405837 - RNA, 26 nt, Human
uucagcaacagcaccucaccgcccgc

SEQ ID NO: 405838 - RNA, 23 nt, Human
agagagcagggggcuuaggacag

SEQ ID NO: 405839 - RNA, 22 nt, Human
agagcagggggcuuaggacagg

SEQ ID NO: 405840 - RNA, 23 nt, Human
aggacagggaagggggcucagga

SEQ ID NO: 405841 - RNA, 22 nt, Human
aggaggggcuggcucuccagug

SEQ ID NO: 405842 - RNA, 19 nt, Human
aggggagggccggagggcc

SEQ ID NO: 405843 - RNA, 21 nt, Human
agggggcuuaggacaggaagg

SEQ ID NO: 405844 - RNA, 19 nt, Human
caccccaggccugacucac

SEQ ID NO: 405845 - RNA, 21 nt, Human
caccuggguaggaagcagugg

SEQ ID NO: 405846 - RNA, 18 nt, Human
caggacggggcagggaag

SEQ ID NO: 405847 - RNA, 18 nt, Human
caugagucccuccgggug

SEQ ID NO: 405848 - RNA, 18 nt, Human
ccaccaccagcugccugg

SEQ ID NO: 405849 - RNA, 19 nt, Human
ccacgcccgccugcagcca

SEQ ID NO: 405850 - RNA, 21 nt, Human
ccacgcccgccugcagccagg

SEQ ID NO: 405851 - RNA, 23 nt, Human
ccacgcccgccugcagccaggug

SEQ ID NO: 405852 - RNA, 22 nt, Human
cccaccaccagcugccugggca

SEQ ID NO: 405853 - RNA, 19 nt, Human
cccguguaggcgccaaggu

SEQ ID NO: 405854 - RNA, 22 nt, Human
ccucaggacaggggaaggggcu

SEQ ID NO: 405855 - RNA, 22 nt, Human
ccuugcacaccaggggcccucc

SEQ ID NO: 405856 - RNA, 19 nt, Human
cgcccuggcaugagucccu

SEQ ID NO: 405857 - RNA, 22 nt, Human
cuccagugacccagguggacac

SEQ ID NO: 405858 - RNA, 18 nt, Human
gccccagcugaccacgcc

SEQ ID NO: 405859 - RNA, 20 nt, Human
gcuuuuuggggacauagugg

SEQ ID NO: 405860 - RNA, 20 nt, Human
ggcaggggagggccggaggg

SEQ ID NO: 405861 - RNA, 22 nt, Human
gggcagggaagguguggggggc

SEQ ID NO: 405862 - RNA, 18 nt, Human
gggcucagaagagagcag

SEQ ID NO: 405863 - RNA, 18 nt, Human
ggggaaggguccucagga

SEQ ID NO: 405864 - RNA, 21 nt, Human
ggggaccuucaccugcuucag

SEQ ID NO: 405865 - RNA, 25 nt, Human
ggggcagggaagguguggggggcag

SEQ ID NO: 405866 - RNA, 24 nt, Human
gggggcuuaggacaggaaggggca

SEQ ID NO: 405867 - RNA, 24 nt, Human
ggguaggaagcagugguguuuuga

SEQ ID NO: 405868 - RNA, 19 nt, Human
ucagaagagagcagggggc

SEQ ID NO: 405869 - RNA, 24 nt, Human
uccaaguaguaggugacacgggug

SEQ ID NO: 405870 - RNA, 24 nt, Human
ucucccguguaggcgccaaggugg

SEQ ID NO: 405871 - RNA, 21 nt, Human
ugcagccaggugccauucacc

SEQ ID NO: 405872 - RNA, 18 nt, Human
ugccugggcaggggaggg

SEQ ID NO: 405873 - RNA, 20 nt, Human
ugccugggcaggggagggcc

SEQ ID NO: 405874 - RNA, 19 nt, Human
ugggcugggcacagcccuc

SEQ ID NO: 405875 - RNA, 23 nt, Human
agagagcagggggcuuaggacag

SEQ ID NO: 405876 - RNA, 22 nt, Human
agagcagggggcuuaggacagg

SEQ ID NO: 405877 - RNA, 23 nt, Human
aggacagggaagggggcucagga

SEQ ID NO: 405878 - RNA, 21 nt, Human
agggggcuuaggacaggaagg

SEQ ID NO: 405879 - RNA, 21 nt, Human
caccuggguaggaagcagugg

SEQ ID NO: 405880 - RNA, 18 nt, Human
caggacggggcagggaag

SEQ ID NO: 405881 - RNA, 25 nt, Human
ccagugggcucuccccuccccauuu

SEQ ID NO: 405882 - RNA, 22 nt, Human
cccaccaccagcuaucugggca

SEQ ID NO: 405883 - RNA, 22 nt, Human
ccucaggacaggggaaggggcu

SEQ ID NO: 405884 - RNA, 24 nt, Human
gaagggggcucaggauagggaagg

SEQ ID NO: 405885 - RNA, 20 nt, Human
gcuuaggacaggaaggggca

SEQ ID NO: 405886 - RNA, 20 nt, Human
ggcaggggagggcuggaggg

SEQ ID NO: 405887 - RNA, 22 nt, Human
gggcagggaagguguggggggc

SEQ ID NO: 405888 - RNA, 18 nt, Human
gggcucagaagagagcag

SEQ ID NO: 405889 - RNA, 25 nt, Human
ggggcagggaagguguggggggcag

SEQ ID NO: 405890 - RNA, 24 nt, Human
ggguaggaagcagugguguuuugg

SEQ ID NO: 405891 - RNA, 19 nt, Human
ucagaagagagcagggggc

SEQ ID NO: 405892 - RNA, 25 nt, Human
ucccuguuccuucuacccagugggc

SEQ ID NO: 405893 - RNA, 21 nt, Human
uggacagcagggguugguccu

SEQ ID NO: 405894 - RNA, 19 nt, Human
ugguccuccagugacccag

SEQ ID NO: 405895 - RNA, 24 nt, Human
ugguguuuuggacagcagggguug

SEQ ID NO: 405896 - RNA, 19 nt, Human
uuuuggacagcagggguug

SEQ ID NO: 405897 - RNA, 22 nt, Human
aaagauaaccaacaucugggau

SEQ ID NO: 405898 - RNA, 19 nt, Human
aacuucucagaaacaauac

SEQ ID NO: 405899 - RNA, 21 nt, Human
aagcgccggcagcugccagcc

SEQ ID NO: 405900 - RNA, 19 nt, Human
aauccuaggaauuucccuu

SEQ ID NO: 405901 - RNA, 18 nt, Human
agaaaagagaacaagagg

SEQ ID NO: 405902 - RNA, 19 nt, Human
agaaagauaaccaacaucu

SEQ ID NO: 405903 - RNA, 22 nt, Human
agccuggaccggccccgcagag

SEQ ID NO: 405904 - RNA, 20 nt, Human
auaauguaagaaaagagaac

SEQ ID NO: 405905 - RNA, 19 nt, Human
caacuucucagaaacaaua

SEQ ID NO: 405906 - RNA, 26 nt, Human
caacuucucagaaacaauacaaugaa

SEQ ID NO: 405907 - RNA, 19 nt, Human
cacaucaauacacuuaaac

SEQ ID NO: 405908 - RNA, 21 nt, Human
cacaucaauacacuuaaacag

SEQ ID NO: 405909 - RNA, 19 nt, Human
cagcagcgucucccgcggc

SEQ ID NO: 405910 - RNA, 23 nt, Human
caggcacacguguucuacaaaac

SEQ ID NO: 405911 - RNA, 21 nt, Human
ccaaggugcagacgcuccacc

SEQ ID NO: 405912 - RNA, 19 nt, Human
cccaacuucucagaaacaa

SEQ ID NO: 405913 - RNA, 23 nt, Human
cccgcaaccgaagccgccucagc

SEQ ID NO: 405914 - RNA, 25 nt, Human
cccgcaaccgaagccgccucagcag

SEQ ID NO: 405915 - RNA, 23 nt, Human
ccgcccucaccgccaagcgccgg

SEQ ID NO: 405916 - RNA, 20 nt, Human
ccuggacggcauccuggccu

SEQ ID NO: 405917 - RNA, 24 nt, Human
ccuggacggcauccuggccucagc

SEQ ID NO: 405918 - RNA, 18 nt, Human
ccuggccucagccgcugg

SEQ ID NO: 405919 - RNA, 23 nt, Human
ccuggccucagccgcugguccca

SEQ ID NO: 405920 - RNA, 19 nt, Human
ccuucugggcuccuuacug

SEQ ID NO: 405921 - RNA, 22 nt, Human
cgacccgcaaccgaagccgccu

SEQ ID NO: 405922 - RNA, 26 nt, Human
cucaccgccaagcgccggcagcugcc

SEQ ID NO: 405923 - RNA, 23 nt, Human
cugaaaaggcagcaaucuuuccu

SEQ ID NO: 405924 - RNA, 24 nt, Human
gacccgcaaccgaagccgccucag

SEQ ID NO: 405925 - RNA, 24 nt, Human
gcagaucccucacgaggcccaaag

SEQ ID NO: 405926 - RNA, 21 nt, Human
gccuggaccggccccgcagag

SEQ ID NO: 405927 - RNA, 18 nt, Human
gcggacaccuccauccuc

SEQ ID NO: 405928 - RNA, 26 nt, Human
ggaaacacauguuccuucugggcucc

SEQ ID NO: 405929 - RNA, 21 nt, Human
ggccucagccgcuggucccac

SEQ ID NO: 405930 - RNA, 24 nt, Human
uaaacccucuccuugaaaacaaac

SEQ ID NO: 405931 - RNA, 19 nt, Human
uaggaauuucccuucugcu

SEQ ID NO: 405932 - RNA, 21 nt, Human
ucacgaggcccaaagcugugc

SEQ ID NO: 405933 - RNA, 19 nt, Human
uccaccaagcuuggcaggg

SEQ ID NO: 405934 - RNA, 21 nt, Human
ugaaaucgggaucaagagcuc

SEQ ID NO: 405935 - RNA, 20 nt, Human
ugcggacaccuccauccucu

SEQ ID NO: 405936 - RNA, 19 nt, Human
uggcaaaugcacaggcggc

SEQ ID NO: 405937 - RNA, 19 nt, Human
uggcaggggacagccaauc

SEQ ID NO: 405938 - RNA, 20 nt, Human
ugggaggaaacuggcaaaug

SEQ ID NO: 405939 - RNA, 20 nt, Human
uggggggccacucgggagcc

SEQ ID NO: 405940 - RNA, 20 nt, Human
uucacauugaaagcuuuuau

SEQ ID NO: 405941 - RNA, 21 nt, Human
uucaggccauggacagucuac

SEQ ID NO: 405942 - RNA, 20 nt, Human
uuuuuuuuuuuuuuuugcuu

SEQ ID NO: 405943 - RNA, 21 nt, Human
aaagccaccaaggcaguccug

SEQ ID NO: 405944 - RNA, 22 nt, Human
aaagugaggcacaaacaaauga

SEQ ID NO: 405945 - RNA, 19 nt, Human
aacaaagccaccaaggcag

SEQ ID NO: 405946 - RNA, 19 nt, Human
aaguuucaaaagccggacu

SEQ ID NO: 405947 - RNA, 23 nt, Human
acccuggaguguccagagauaga

SEQ ID NO: 405948 - RNA, 21 nt, Human
aguauuuuuuuccucugugaa

SEQ ID NO: 405949 - RNA, 20 nt, Human
caaacaaagccaccaaggca

SEQ ID NO: 405950 - RNA, 27 nt, Human
caagcaauaugcuuggauuagaggucc

SEQ ID NO: 405951 - RNA, 25 nt, Human
ccaaggcaguccugcaaauuaagga

SEQ ID NO: 405952 - RNA, 21 nt, Human
ccagcaaacaaagccaccaag

SEQ ID NO: 405953 - RNA, 23 nt, Human
cccguggcgagacgcggcgaggc

SEQ ID NO: 405954 - RNA, 18 nt, Human
ccugugugccaaggcugu

SEQ ID NO: 405955 - RNA, 19 nt, Human
ccugugugccaaggcuguc

SEQ ID NO: 405956 - RNA, 24 nt, Human
ccuugggcacucucaucucugggc

SEQ ID NO: 405957 - RNA, 22 nt, Human
cuucagcgacagguuagcgggc

SEQ ID NO: 405958 - RNA, 23 nt, Human
cuucuuggcaaugaagucauuug

SEQ ID NO: 405959 - RNA, 24 nt, Human
gaggaggaaucaaagaaagccuca

SEQ ID NO: 405960 - RNA, 18 nt, Human
gaggauggcaaaucuguc

SEQ ID NO: 405961 - RNA, 19 nt, Human
gaggcagccccacgcaccc

SEQ ID NO: 405962 - RNA, 20 nt, Human
gcggcgaggcagccccacgc

SEQ ID NO: 405963 - RNA, 20 nt, Human
ggaggauggcaaaucugucu

SEQ ID NO: 405964 - RNA, 18 nt, Human
ggcaggguaggccuggcc

SEQ ID NO: 405965 - RNA, 22 nt, Human
ggccggaggcaggguaggccug

SEQ ID NO: 405966 - RNA, 22 nt, Human
ggguaggccuggccugagggcc

SEQ ID NO: 405967 - RNA, 20 nt, Human
ucauauauuaaacucuuaaa

SEQ ID NO: 405968 - RNA, 24 nt, Human
ucauucucuacccuggagugucca

SEQ ID NO: 405969 - RNA, 22 nt, Human
ucuacccuggaguguccagaga

SEQ ID NO: 405970 - RNA, 23 nt, Human
ugaggaggaaucaaagaaagccu

SEQ ID NO: 405971 - RNA, 23 nt, Human
ugaggcacaaacaaaugagccuc

SEQ ID NO: 405972 - RNA, 24 nt, Human
ugggcacucucaucucugggcucc

SEQ ID NO: 405973 - RNA, 19 nt, Human
uguaaagugaggcacaaac

SEQ ID NO: 405974 - RNA, 21 nt, Human
ugugaaacuagguagaacuga

SEQ ID NO: 405975 - RNA, 21 nt, Human
uucaaaagccggacuacuucc

SEQ ID NO: 405976 - RNA, 25 nt, Human
uuccauacccuucauucucuacccu

SEQ ID NO: 405977 - RNA, 19 nt, Human
uuggcaaugaagucauuug

SEQ ID NO: 405978 - RNA, 18 nt, Human
aagcaaacaaaguguauu

SEQ ID NO: 405979 - RNA, 22 nt, Human
aagcaaacaaaguguauuccac

SEQ ID NO: 405980 - RNA, 19 nt, Human
acuagaaugacagauucag

SEQ ID NO: 405981 - RNA, 19 nt, Human
cacauauaaccaucaagau

SEQ ID NO: 405982 - RNA, 22 nt, Human
cacauauaaccaucaagauacc

SEQ ID NO: 405983 - RNA, 19 nt, Human
ccacauauaaccaucaaga

SEQ ID NO: 405984 - RNA, 21 nt, Human
ccacauauaaccaucaagaua

SEQ ID NO: 405985 - RNA, 24 nt, Human
cggcagggcggcggcuccgccucu

SEQ ID NO: 405986 - RNA, 23 nt, Human
gaaaaaacuuuugcaauaaaaaa

SEQ ID NO: 405987 - RNA, 23 nt, Human
uaaacaauaccacauauaaccau

SEQ ID NO: 405988 - RNA, 19 nt, Human
uagaaugacagauucaggu

SEQ ID NO: 405989 - RNA, 19 nt, Human
ucuuuaggcacagucuggu

SEQ ID NO: 405990 - RNA, 22 nt, Human
ugaagcaaacaaaguguauucc

SEQ ID NO: 405991 - RNA, 21 nt, Human
ugcacaugaagcaaacaaagu

SEQ ID NO: 405992 - RNA, 23 nt, Human
ugccagaaagaacagaaagaguu

SEQ ID NO: 405993 - RNA, 18 nt, Human
ugcccaucaauaaguuug

SEQ ID NO: 405994 - RNA, 18 nt, Human
uguguaauggccuuacau

SEQ ID NO: 405995 - RNA, 21 nt, Human
uguguaauggccuuacaugug

SEQ ID NO: 405996 - RNA, 24 nt, Human
uuaaaaugauuuuugguuaucugc

SEQ ID NO: 405997 - RNA, 19 nt, Human
aaacaaugccuccacucca

SEQ ID NO: 405998 - RNA, 21 nt, Human
aaacucggagcgagcgcggug

SEQ ID NO: 405999 - RNA, 23 nt, Human
aaauaaaucacagucaaaauaaa

SEQ ID NO: 406000 - RNA, 18 nt, Human
acaugacauguuuuucuu

SEQ ID NO: 406001 - RNA, 21 nt, Human
agcacgagccugaaacucgga

SEQ ID NO: 406002 - RNA, 21 nt, Human
cacgagccugaaacucggagc

SEQ ID NO: 406003 - RNA, 19 nt, Human
cagccggagcggcgcucgg

SEQ ID NO: 406004 - RNA, 19 nt, Human
ccggagcggcgcucggggg

SEQ ID NO: 406005 - RNA, 18 nt, Human
cgcggugcagccggagcg

SEQ ID NO: 406006 - RNA, 22 nt, Human
cucaagaugacaucagucccau

SEQ ID NO: 406007 - RNA, 24 nt, Human
gucccauuugucuuaaguccuggu

SEQ ID NO: 406008 - RNA, 21 nt, Human
uaaaaacaaugccuccacucc

SEQ ID NO: 406009 - RNA, 25 nt, Human
uaaaucacagucaaaauaaaugaag

SEQ ID NO: 406010 - RNA, 24 nt, Human
uaaaugcauuuuauuuuuagacaa

SEQ ID NO: 406011 - RNA, 21 nt, Human
uagauccaaaauaauugccac

SEQ ID NO: 406012 - RNA, 18 nt, Human
ucaaaauaaaugaagagc

SEQ ID NO: 406013 - RNA, 21 nt, Human
ugacaucagucccauuugucu

SEQ ID NO: 406014 - RNA, 19 nt, Human
uuuagacaaccuacaugac

SEQ ID NO: 406015 - RNA, 24 nt, Human
aacucuauacaccagacugcuucc

SEQ ID NO: 406016 - RNA, 18 nt, Human
agaagagccuggggugug

SEQ ID NO: 406017 - RNA, 18 nt, Human
agagccgccggggcgcag

SEQ ID NO: 406018 - RNA, 23 nt, Human
aggcgccgggggucccuagagcc

SEQ ID NO: 406019 - RNA, 21 nt, Human
caccagacugcuuccagagcc

SEQ ID NO: 406020 - RNA, 24 nt, Human
cauguauaaacauauauaaacaua

SEQ ID NO: 406021 - RNA, 19 nt, Human
ccucuggguucacuccuga

SEQ ID NO: 406022 - RNA, 20 nt, Human
cuucaagggaacauuuagga

SEQ ID NO: 406023 - RNA, 20 nt, Human
gagccgccggggcgcagcga

SEQ ID NO: 406024 - RNA, 22 nt, Human
gcugcuagaauaacacaagucu

SEQ ID NO: 406025 - RNA, 21 nt, Human
gcuguugugcccuccccgcgg

SEQ ID NO: 406026 - RNA, 24 nt, Human
gguagcagcuguugugcccucccc

SEQ ID NO: 406027 - RNA, 23 nt, Human
ggucagaagagccuggggugugu

SEQ ID NO: 406028 - RNA, 21 nt, Human
guucagcugcuagaauaacac

SEQ ID NO: 406029 - RNA, 18 nt, Human
uaaguguaggcgccgggg

SEQ ID NO: 406030 - RNA, 18 nt, Human
uacaccagacugcuucca

SEQ ID NO: 406031 - RNA, 19 nt, Human
uagauuuauugaagaacau

SEQ ID NO: 406032 - RNA, 18 nt, Human
ucagaagagccuggggug

SEQ ID NO: 406033 - RNA, 23 nt, Human
ucagguagcagcuguugugcccu

SEQ ID NO: 406034 - RNA, 23 nt, Human
ucuauacaccagacugcuuccag

SEQ ID NO: 406035 - RNA, 18 nt, Human
ucuugugucgucggucca

SEQ ID NO: 406036 - RNA, 19 nt, Human
ucuugugucgucgguccaa

SEQ ID NO: 406037 - RNA, 27 nt, Human
ugccucuggguucacuccugauaauuc

SEQ ID NO: 406038 - RNA, 28 nt, Human
uggaaagaacauaauucuuucccagaag

SEQ ID NO: 406039 - RNA, 18 nt, Human
ugggguguguucagcugc

SEQ ID NO: 406040 - RNA, 23 nt, Human
uggguaacuguugggucagaaac

SEQ ID NO: 406041 - RNA, 22 nt, Human
uugaagaacauguauaaacaua

SEQ ID NO: 406042 - RNA, 20 nt, Human
aaagcuuugaauuuauuguu

SEQ ID NO: 406043 - RNA, 21 nt, Human
acugugcucuuucuugcaggu

SEQ ID NO: 406044 - RNA, 18 nt, Human
agagcacagaccuuccug

SEQ ID NO: 406045 - RNA, 26 nt, Human
auggcaaugauguuacagucuucuuc

SEQ ID NO: 406046 - RNA, 22 nt, Human
caggaaauacguaaugcaccau

SEQ ID NO: 406047 - RNA, 23 nt, Human
ccagagcacagaccuuccugcag

SEQ ID NO: 406048 - RNA, 21 nt, Human
cugcugcgcgccccucucacc

SEQ ID NO: 406049 - RNA, 24 nt, Human
gaucugggggagaagaugcauugc

SEQ ID NO: 406050 - RNA, 25 nt, Human
ggccaugguguauaauuuuauaacc

SEQ ID NO: 406051 - RNA, 25 nt, Human
uaaaucauugccugaaagugauuuc

SEQ ID NO: 406052 - RNA, 19 nt, Human
uaagaucaggaugacaugg

SEQ ID NO: 406053 - RNA, 20 nt, Human
uaagaucaggaugacauggu

SEQ ID NO: 406054 - RNA, 25 nt, Human
uacccuggcuccagagcacagaccu

SEQ ID NO: 406055 - RNA, 24 nt, Human
uauaaccauuuacccuggcuccag

SEQ ID NO: 406056 - RNA, 24 nt, Human
uauccaugcagucuugcacaaugc

SEQ ID NO: 406057 - RNA, 21 nt, Human
ucaggaugacaugguuuuccu

SEQ ID NO: 406058 - RNA, 19 nt, Human
uccaugcagucuugcacaa

SEQ ID NO: 406059 - RNA, 18 nt, Human
uccuaugguuauacaguu

SEQ ID NO: 406060 - RNA, 21 nt, Human
ugaccuaaauccuaugguuau

SEQ ID NO: 406061 - RNA, 21 nt, Human
ugcacaaugcucacuagguaa

SEQ ID NO: 406062 - RNA, 18 nt, Human
ugcuggaaauguugguuu

SEQ ID NO: 406063 - RNA, 24 nt, Human
ugcuggaaauguugguuuucugag

SEQ ID NO: 406064 - RNA, 18 nt, Human
ugguuuucugagcaggau

SEQ ID NO: 406065 - RNA, 27 nt, Human
uuaauggugaaguacugugcucuuucu

SEQ ID NO: 406066 - RNA, 22 nt, Human
uucaaaauccucaaccugauuc

SEQ ID NO: 406067 - RNA, 25 nt, Human
uucaaaauccucaaccugauucagu

SEQ ID NO: 406068 - RNA, 24 nt, Human
uugaaaucaaauuugucacuaaca

SEQ ID NO: 406069 - RNA, 23 nt, Human
uuuuuuuuugcagauguaaagcu

SEQ ID NO: 406070 - RNA, 23 nt, Human
uuuuuuuuuuuuuuuuugcagau

SEQ ID NO: 406071 - RNA, 23 nt, Human
uuuuuuuuuuuuuuuuuuuuggg

SEQ ID NO: 406072 - RNA, 20 nt, Human
aaaccgaaacgcaggcggcu

SEQ ID NO: 406073 - RNA, 18 nt, Human
aacaauagcgaccagaaa

SEQ ID NO: 406074 - RNA, 25 nt, Human
aagaaaagagaugacuaacccuaca

SEQ ID NO: 406075 - RNA, 21 nt, Human
aagcagucccacugcuucucg

SEQ ID NO: 406076 - RNA, 18 nt, Human
aaggaagcagucccacug

SEQ ID NO: 406077 - RNA, 18 nt, Human
acaaggagaacuaaacag

SEQ ID NO: 406078 - RNA, 19 nt, Human
acagcagcccacagacacu

SEQ ID NO: 406079 - RNA, 24 nt, Human
acagcagcccacagacacuguuca

SEQ ID NO: 406080 - RNA, 24 nt, Human
acuuaggugaauggugccacucaa

SEQ ID NO: 406081 - RNA, 22 nt, Human
agaaaagaguucuuucacccga

SEQ ID NO: 406082 - RNA, 19 nt, Human
agaaaagcuaacuuaggug

SEQ ID NO: 406083 - RNA, 19 nt, Human
agaccacaaggcagaugcc

SEQ ID NO: 406084 - RNA, 22 nt, Human
agaguucuuucacccgaguacu

SEQ ID NO: 406085 - RNA, 22 nt, Human
agcccacagcagcccacagaca

SEQ ID NO: 406086 - RNA, 22 nt, Human
agcggcgguugggggcaucgcc

SEQ ID NO: 406087 - RNA, 22 nt, Human
aggaagcagucccacugcuucu

SEQ ID NO: 406088 - RNA, 20 nt, Human
aggcagaugcccacugcugu

SEQ ID NO: 406089 - RNA, 23 nt, Human
auccaaaugcagcccacagcagc

SEQ ID NO: 406090 - RNA, 23 nt, Human
caaaaaagaaaagagaugacuaa

SEQ ID NO: 406091 - RNA, 22 nt, Human
caaggagaacuaaacagcagca

SEQ ID NO: 406092 - RNA, 18 nt, Human
cacaaggcagaugcccac

SEQ ID NO: 406093 - RNA, 18 nt, Human
cacagcagcccacagaca

SEQ ID NO: 406094 - RNA, 19 nt, Human
cacccgaguacuaugggga

SEQ ID NO: 406095 - RNA, 19 nt, Human
cagaaaagcuaacuuaggu

SEQ ID NO: 406096 - RNA, 21 nt, Human
cagagcagcugucaugagcac

SEQ ID NO: 406097 - RNA, 21 nt, Human
cagaugcccacugcuguccuc

SEQ ID NO: 406098 - RNA, 21 nt, Human
ccaccuacaugcacuuuauuc

SEQ ID NO: 406099 - RNA, 19 nt, Human
ccacugcuucucgcuguca

SEQ ID NO: 406100 - RNA, 18 nt, Human
cccaucaucaacuugauc

SEQ ID NO: 406101 - RNA, 19 nt, Human
cccggccgggccugcucac

SEQ ID NO: 406102 - RNA, 20 nt, Human
cgaaacgcaggcggcugcgg

SEQ ID NO: 406103 - RNA, 22 nt, Human
cgacaggcgggcacggcgcccc

SEQ ID NO: 406104 - RNA, 19 nt, Human
cgagagucagccuuggcuc

SEQ ID NO: 406105 - RNA, 19 nt, Human
cgcccgccuuucccggccc

SEQ ID NO: 406106 - RNA, 21 nt, Human
cgcgccccucggacauggccc

SEQ ID NO: 406107 - RNA, 21 nt, Human
cggcccgggcgacugcggcgg

SEQ ID NO: 406108 - RNA, 18 nt, Human
cgggccugcucacaaacc

SEQ ID NO: 406109 - RNA, 23 nt, Human
cugcucacaaaccgaaacgcagg

SEQ ID NO: 406110 - RNA, 25 nt, Human
cuugaacccuggccccaucaucaac

SEQ ID NO: 406111 - RNA, 21 nt, Human
cuugucuacuuucucaucuaa

SEQ ID NO: 406112 - RNA, 26 nt, Human
gagcaugugugaauucuaggcccacu

SEQ ID NO: 406113 - RNA, 22 nt, Human
gaucaaguuccaagacauuaca

SEQ ID NO: 406114 - RNA, 20 nt, Human
gcacaugaaaggccuccaga

SEQ ID NO: 406115 - RNA, 23 nt, Human
gcacaugaaaggccuccagaacc

SEQ ID NO: 406116 - RNA, 19 nt, Human
gcggcugcggcgccgggac

SEQ ID NO: 406117 - RNA, 22 nt, Human
ggcccggccgggccugcucaac

SEQ ID NO: 406118 - RNA, 21 nt, Human
uaaaaacaauagcgaccagaa

SEQ ID NO: 406119 - RNA, 24 nt, Human
uaaaaacaauagcgaccagaaaag

SEQ ID NO: 406120 - RNA, 18 nt, Human
uacuuucucaucuaagug

SEQ ID NO: 406121 - RNA, 23 nt, Human
uagaaaaccacuacuuuauagca

SEQ ID NO: 406122 - RNA, 18 nt, Human
uaugccaaaucuuccuga

SEQ ID NO: 406123 - RNA, 22 nt, Human
uauuucacagauaaauuaguua

SEQ ID NO: 406124 - RNA, 19 nt, Human
ucacagaaacaacaaagca

SEQ ID NO: 406125 - RNA, 18 nt, Human
ucagcaagaccacaaggc

SEQ ID NO: 406126 - RNA, 20 nt, Human
uccaagacauuacauucgac

SEQ ID NO: 406127 - RNA, 22 nt, Human
uccaagcuaaggcgucaaggaa

SEQ ID NO: 406128 - RNA, 22 nt, Human
ucccugaguaacagagcagcug

SEQ ID NO: 406129 - RNA, 19 nt, Human
ucucgcugucagcaagacc

SEQ ID NO: 406130 - RNA, 19 nt, Human
ucuuugagagaaaugagaa

SEQ ID NO: 406131 - RNA, 24 nt, Human
ugacagcacuucuugaacccuggc

SEQ ID NO: 406132 - RNA, 22 nt, Human
ugagagaaaugagaauaugaca

SEQ ID NO: 406133 - RNA, 21 nt, Human
ugagcaugugugaauucuagg

SEQ ID NO: 406134 - RNA, 25 nt, Human
ugccucaaaaaagaaaagagaugac

SEQ ID NO: 406135 - RNA, 18 nt, Human
ugccuggaaaguuugguc

SEQ ID NO: 406136 - RNA, 19 nt, Human
uggggacaguagcucuugc

SEQ ID NO: 406137 - RNA, 18 nt, Human
ugugagggugaagcauga

SEQ ID NO: 406138 - RNA, 18 nt, Human
accuccagccgcgcgguc

SEQ ID NO: 406139 - RNA, 19 nt, Human
agccgccuccaccccccac

SEQ ID NO: 406140 - RNA, 21 nt, Human
agccgccuccaccccccaccc

SEQ ID NO: 406141 - RNA, 19 nt, Human
auccaaaacaagucucucc

SEQ ID NO: 406142 - RNA, 21 nt, Human
augacaagauuuuacaucaag

SEQ ID NO: 406143 - RNA, 21 nt, Human
ccaccccuggguucggauccu

SEQ ID NO: 406144 - RNA, 18 nt, Human
cccaaaaagaaaugaugu

SEQ ID NO: 406145 - RNA, 21 nt, Human
ccgccuccaccccccaccccu

SEQ ID NO: 406146 - RNA, 21 nt, Human
ccuccagccgcgcgguccgcc

SEQ ID NO: 406147 - RNA, 22 nt, Human
cuccaccccccaccccuggguu

SEQ ID NO: 406148 - RNA, 19 nt, Human
gccuccaccccccaccccu

SEQ ID NO: 406149 - RNA, 21 nt, Human
gccuccaccccccaccccugg

SEQ ID NO: 406150 - RNA, 23 nt, Human
ggagccgccuccaccccccaccc

SEQ ID NO: 406151 - RNA, 23 nt, Human
uauacacaugacaagauuuuaca

SEQ ID NO: 406152 - RNA, 25 nt, Human
ucacauucccucuccacacaggauc

SEQ ID NO: 406153 - RNA, 21 nt, Human
uccccuucgaucgcaggagcu

SEQ ID NO: 406154 - RNA, 18 nt, Human
uccucacaccuccagccg

SEQ ID NO: 406155 - RNA, 19 nt, Human
ugggaucuuuuuuauuuuu

SEQ ID NO: 406156 - RNA, 19 nt, Human
uuucacauucccucuccac

SEQ ID NO: 406157 - RNA, 21 nt, Human
acgcugagugugagcuggggg

SEQ ID NO: 406158 - RNA, 26 nt, Human
agaauccccaaugaugcacccccccu

SEQ ID NO: 406159 - RNA, 18 nt, Human
agauaggccaaguggagu

SEQ ID NO: 406160 - RNA, 21 nt, Human
caaaagcuggcugcaccccug

SEQ ID NO: 406161 - RNA, 23 nt, Human
caauagccgcagaaggaacccua

SEQ ID NO: 406162 - RNA, 19 nt, Human
cacacucuaucaaaguacc

SEQ ID NO: 406163 - RNA, 23 nt, Human
caccccacacucuaucaaaguac

SEQ ID NO: 406164 - RNA, 20 nt, Human
cagaaggaacccuaaggcca

SEQ ID NO: 406165 - RNA, 18 nt, Human
cagaauccccaaugaugc

SEQ ID NO: 406166 - RNA, 20 nt, Human
caggacaccaaagaucaagg

SEQ ID NO: 406167 - RNA, 27 nt, Human
caggaugaaguccaggacaccaaagau

SEQ ID NO: 406168 - RNA, 20 nt, Human
cauccagguucuccaaaagc

SEQ ID NO: 406169 - RNA, 19 nt, Human
cauucggggucccacgcug

SEQ ID NO: 406170 - RNA, 22 nt, Human
ccaggaugaaguccaggacacc

SEQ ID NO: 406171 - RNA, 22 nt, Human
cccaaugaugcacccccagugg

SEQ ID NO: 406172 - RNA, 23 nt, Human
cccacgcugagugugagcugggg

SEQ ID NO: 406173 - RNA, 25 nt, Human
cuccaaaagcuggcugcaccccugg

SEQ ID NO: 406174 - RNA, 24 nt, Human
cuccaaagcaggucccccccaccc

SEQ ID NO: 406175 - RNA, 18 nt, Human
cuguaagccccgcuucug

SEQ ID NO: 406176 - RNA, 19 nt, Human
gaauccccaaugaugcacc

SEQ ID NO: 406177 - RNA, 21 nt, Human
gcagaaggaacccuaaggcca

SEQ ID NO: 406178 - RNA, 18 nt, Human
gccucggcggggccuggg

SEQ ID NO: 406179 - RNA, 19 nt, Human
guucccacgcccgccaggc

SEQ ID NO: 406180 - RNA, 20 nt, Human
uaccugaggcagaaucccca

SEQ ID NO: 406181 - RNA, 27 nt, Human
uaccugaggcagaauccccaaugauua

SEQ ID NO: 406182 - RNA, 22 nt, Human
uacuuuauuaucauugcuuaac

SEQ ID NO: 406183 - RNA, 21 nt, Human
uagccgcagaaggaacccuaa

SEQ ID NO: 406184 - RNA, 26 nt, Human
ucacugcaguaucugcagcacccagg

SEQ ID NO: 406185 - RNA, 19 nt, Human
uccaaaagcuggcugcacc

SEQ ID NO: 406186 - RNA, 21 nt, Human
uccaaagcaggucccccccac

SEQ ID NO: 406187 - RNA, 22 nt, Human
uccuguuuuacuucacugcagu

SEQ ID NO: 406188 - RNA, 19 nt, Human
ugaggcugaucuccaaagc

SEQ ID NO: 406189 - RNA, 23 nt, Human
ugcacccccaguggucuggcucc

SEQ ID NO: 406190 - RNA, 23 nt, Human
uggcuguaagccccgcuucuggg

SEQ ID NO: 406191 - RNA, 20 nt, Human
ugggaugggagaaggugagg

SEQ ID NO: 406192 - RNA, 18 nt, Human
uguaagggcuggcuguaa

SEQ ID NO: 406193 - RNA, 18 nt, Human
uuuuuuuuuuuuuuuccg

SEQ ID NO: 406194 - RNA, 21 nt, Human
uuuuuuuuuuuuuuuuuccgu

SEQ ID NO: 406195 - RNA, 24 nt, Human
aaaaagagagcaggccugugucca

SEQ ID NO: 406196 - RNA, 21 nt, Human
aaagucuucaaauccaacccc

SEQ ID NO: 406197 - RNA, 23 nt, Human
aagucgaccccucagucuugcuu

SEQ ID NO: 406198 - RNA, 21 nt, Human
aaucagguguuacgggauucu

SEQ ID NO: 406199 - RNA, 23 nt, Human
agagggccuguuuaaguugcucc

SEQ ID NO: 406200 - RNA, 18 nt, Human
agcccgagagcuucucug

SEQ ID NO: 406201 - RNA, 23 nt, Human
agccuucacccaucuuugugccc

SEQ ID NO: 406202 - RNA, 20 nt, Human
agcucugccugucuccuucu

SEQ ID NO: 406203 - RNA, 19 nt, Human
aggacucaccugggccagg

SEQ ID NO: 406204 - RNA, 19 nt, Human
aggagcugggaggacagga

SEQ ID NO: 406205 - RNA, 18 nt, Human
aggucaguccaguggggg

SEQ ID NO: 406206 - RNA, 18 nt, Human
aggugagugaggagcugg

SEQ ID NO: 406207 - RNA, 19 nt, Human
aggugagugaggagcuggg

SEQ ID NO: 406208 - RNA, 21 nt, Human
caaacuggcaccccaucccuu

SEQ ID NO: 406209 - RNA, 23 nt, Human
caaauccaacccccaauuugaag

SEQ ID NO: 406210 - RNA, 20 nt, Human
caccuccaaugacgagccug

SEQ ID NO: 406211 - RNA, 22 nt, Human
cagcccgaagucgaccccucag

SEQ ID NO: 406212 - RNA, 20 nt, Human
ccagaaccccuguagcucua

SEQ ID NO: 406213 - RNA, 21 nt, Human
ccagaaccccuguagcucuag

SEQ ID NO: 406214 - RNA, 22 nt, Human
ccccucuucuucuugaggugcc

SEQ ID NO: 406215 - RNA, 25 nt, Human
ccccuguagcucuaggacucaccug

SEQ ID NO: 406216 - RNA, 18 nt, Human
cccgagagcuucucugcu

SEQ ID NO: 406217 - RNA, 19 nt, Human
cccucaggagccccgccca

SEQ ID NO: 406218 - RNA, 19 nt, Human
ccucccagugucgcauggu

SEQ ID NO: 406219 - RNA, 22 nt, Human
ccugccauccuaaccagauggc

SEQ ID NO: 406220 - RNA, 25 nt, Human
ccuuccacccgguccuguuucugac

SEQ ID NO: 406221 - RNA, 30 nt, Human
cgagccuggacagacugcauucaaacuggg

SEQ ID NO: 406222 - RNA, 19 nt, Human
cucaguggcuuggaggucc

SEQ ID NO: 406223 - RNA, 20 nt, Human
cuccagggcaggggaccagc

SEQ ID NO: 406224 - RNA, 22 nt, Human
cuccagggcaggggaccagccu

SEQ ID NO: 406225 - RNA, 19 nt, Human
cucugcuuggguccuacgg

SEQ ID NO: 406226 - RNA, 23 nt, Human
cugcaccugggagcucacaguga

SEQ ID NO: 406227 - RNA, 19 nt, Human
cugcagagaucuuccuagc

SEQ ID NO: 406228 - RNA, 18 nt, Human
cuguuucugacccuggag

SEQ ID NO: 406229 - RNA, 19 nt, Human
cuucucauuuggugagagu

SEQ ID NO: 406230 - RNA, 21 nt, Human
gaccccucagucuugcuugga

SEQ ID NO: 406231 - RNA, 19 nt, Human
gagggccuguuuaaguugc

SEQ ID NO: 406232 - RNA, 20 nt, Human
gccagcccgaagucgacccc

SEQ ID NO: 406233 - RNA, 19 nt, Human
gccuagaaugagagacuuu

SEQ ID NO: 406234 - RNA, 20 nt, Human
gcugggugugcuccugcgug

SEQ ID NO: 406235 - RNA, 24 nt, Human
ggaaaacuucgaaagagauucuaa

SEQ ID NO: 406236 - RNA, 24 nt, Human
ggagcucccucaggagccccgccc

SEQ ID NO: 406237 - RNA, 20 nt, Human
ggcagggcaucacaguccuc

SEQ ID NO: 406238 - RNA, 19 nt, Human
ggcccagcccacguccugc

SEQ ID NO: 406239 - RNA, 23 nt, Human
ggcuagcucccuucugaguugga

SEQ ID NO: 406240 - RNA, 19 nt, Human
ggggcugggugugcuccug

SEQ ID NO: 406241 - RNA, 21 nt, Human
guccucuggcuagcucccuuc

SEQ ID NO: 406242 - RNA, 24 nt, Human
uaaaagucuucaaauccaaccccc

SEQ ID NO: 406243 - RNA, 19 nt, Human
uagcugauggaggcacagg

SEQ ID NO: 406244 - RNA, 22 nt, Human
ucccuggcggcccugcagagau

SEQ ID NO: 406245 - RNA, 19 nt, Human
ucccuuccacccgguccug

SEQ ID NO: 406246 - RNA, 23 nt, Human
uccucuggcuagcucccuucuga

SEQ ID NO: 406247 - RNA, 25 nt, Human
ucugggcuggaaggaaaccgggguc

SEQ ID NO: 406248 - RNA, 21 nt, Human
ugaaguccuaguggagcccuc

SEQ ID NO: 406249 - RNA, 18 nt, Human
ugaggagcugggaggaca

SEQ ID NO: 406250 - RNA, 26 nt, Human
ugauggaggcacaggaugugggggcc

SEQ ID NO: 406251 - RNA, 22 nt, Human
ugccaagggcagggcaucacag

SEQ ID NO: 406252 - RNA, 20 nt, Human
ugcccugaggucuugggugc

SEQ ID NO: 406253 - RNA, 21 nt, Human
ugccucaguuaaucagguguu

SEQ ID NO: 406254 - RNA, 18 nt, Human
uggaggcacaggaugugg

SEQ ID NO: 406255 - RNA, 20 nt, Human
uggcaggugcccuguggacc

SEQ ID NO: 406256 - RNA, 19 nt, Human
uggcucacuggccucccag

SEQ ID NO: 406257 - RNA, 20 nt, Human
uggcucacuggccucccagu

SEQ ID NO: 406258 - RNA, 18 nt, Human
ugggcuggaaggaaacuu

SEQ ID NO: 406259 - RNA, 22 nt, Human
uggugagaguccaccucaacau

SEQ ID NO: 406260 - RNA, 18 nt, Human
uguuggggaagcugagcu

SEQ ID NO: 406261 - RNA, 18 nt, Human
uuaaaagucuucaaaucc

SEQ ID NO: 406262 - RNA, 21 nt, Human
uuaaaagucuucaaauccaac

SEQ ID NO: 406263 - RNA, 21 nt, Human
uuccaggcuggccagagggcc

SEQ ID NO: 406264 - RNA, 18 nt, Human
uucucugcuuggguccua

SEQ ID NO: 406265 - RNA, 22 nt, Human
uucuuugggguuauacauugcu

SEQ ID NO: 406266 - RNA, 21 nt, Human
uugcuuguucaccuccaauga

SEQ ID NO: 406267 - RNA, 22 nt, Human
uuuaggaaaacuucgaaagaga

SEQ ID NO: 406268 - RNA, 20 nt, Human
uuugggguuauacauugcuc

SEQ ID NO: 406269 - RNA, 22 nt, Human
aaaacaaacauacagagcaccu

SEQ ID NO: 406270 - RNA, 19 nt, Human
aaacaaacauacagagcac

SEQ ID NO: 406271 - RNA, 20 nt, Human
aaacaaacauacagagcacc

SEQ ID NO: 406272 - RNA, 21 nt, Human
aaacauuuucaacugggauuc

SEQ ID NO: 406273 - RNA, 24 nt, Human
aaacgccccaaaaacuucaagaaa

SEQ ID NO: 406274 - RNA, 19 nt, Human
aaagcaugcuucuauaggg

SEQ ID NO: 406275 - RNA, 23 nt, Human
aaauguaaaaagacagcacuuca

SEQ ID NO: 406276 - RNA, 22 nt, Human
aacaaaaucugaacuuuagcua

SEQ ID NO: 406277 - RNA, 20 nt, Human
aacauggcaaaacuccgucu

SEQ ID NO: 406278 - RNA, 21 nt, Human
aacauggcaaaacuccgucuc

SEQ ID NO: 406279 - RNA, 21 nt, Human
aacuccuaagcaaaccaugcc

SEQ ID NO: 406280 - RNA, 19 nt, Human
aacucugaacuccuaagca

SEQ ID NO: 406281 - RNA, 22 nt, Human
aaucaaaugugcucuccuccac

SEQ ID NO: 406282 - RNA, 24 nt, Human
aaucacuugaauucgggaggcaga

SEQ ID NO: 406283 - RNA, 21 nt, Human
aaugcccauuugcauagcagc

SEQ ID NO: 406284 - RNA, 18 nt, Human
acaaugaaacucugucuc

SEQ ID NO: 406285 - RNA, 22 nt, Human
acaaugaaacucugucucaaaa

SEQ ID NO: 406286 - RNA, 19 nt, Human
acacucauauaaagcaugc

SEQ ID NO: 406287 - RNA, 31 nt, Human
acuacaucacccacuucuuaacuggaacagg

SEQ ID NO: 406288 - RNA, 24 nt, Human
acuccgucucuacuaaaaauacaa

SEQ ID NO: 406289 - RNA, 18 nt, Human
acuguacuccagccuggg

SEQ ID NO: 406290 - RNA, 23 nt, Human
acuguacuccagccugggugaca

SEQ ID NO: 406291 - RNA, 24 nt, Human
acuugaggucaggaguuugagauc

SEQ ID NO: 406292 - RNA, 19 nt, Human
agaguaaaauguaaaaaga

SEQ ID NO: 406293 - RNA, 18 nt, Human
agaguuugcagugagcug

SEQ ID NO: 406294 - RNA, 24 nt, Human
agaguuugcagugagcugagauca

SEQ ID NO: 406295 - RNA, 22 nt, Human
agaucacuugaggucaggaguu

SEQ ID NO: 406296 - RNA, 24 nt, Human
agcacuuugggaggccgaggcggg

SEQ ID NO: 406297 - RNA, 22 nt, Human
agcauuuugaaaaucccacaga

SEQ ID NO: 406298 - RNA, 20 nt, Human
agccugggugacaaugaaac

SEQ ID NO: 406299 - RNA, 22 nt, Human
agccugggugacaaugaaacuc

SEQ ID NO: 406300 - RNA, 24 nt, Human
agcuuggccaacauggcaaaacuc

SEQ ID NO: 406301 - RNA, 23 nt, Human
aggaaaaaggcaaauacaaaugu

SEQ ID NO: 406302 - RNA, 24 nt, Human
aggaagaaugaaaaugcuuacccc

SEQ ID NO: 406303 - RNA, 21 nt, Human
aggaaggggucgggaggaggc

SEQ ID NO: 406304 - RNA, 23 nt, Human
aggaguuugagaucagcuuggcc

SEQ ID NO: 406305 - RNA, 20 nt, Human
aggcagaguuugcagugagc

SEQ ID NO: 406306 - RNA, 24 nt, Human
aggcagaguuugcagugagcugag

SEQ ID NO: 406307 - RNA, 18 nt, Human
aggcaggagaaucacuug

SEQ ID NO: 406308 - RNA, 24 nt, Human
aggcaggagaaucacuugaauucg

SEQ ID NO: 406309 - RNA, 22 nt, Human
aggcgcggcugcugcuccuggc

SEQ ID NO: 406310 - RNA, 22 nt, Human
aggcgggcagaucacuugaggu

SEQ ID NO: 406311 - RNA, 23 nt, Human
aggcgggcagaucacuugagguc

SEQ ID NO: 406312 - RNA, 26 nt, Human
aggcgggcagaucacuugaggucagg

SEQ ID NO: 406313 - RNA, 24 nt, Human
aggcugaggcaggagaaucacuug

SEQ ID NO: 406314 - RNA, 25 nt, Human
auauuaaaaacaaacauacagagca

SEQ ID NO: 406315 - RNA, 20 nt, Human
aucacuugaggucaggaguu

SEQ ID NO: 406316 - RNA, 24 nt, Human
aucaugccacuguacuccagccug

SEQ ID NO: 406317 - RNA, 22 nt, Human
augccacuguacuccagccugg

SEQ ID NO: 406318 - RNA, 19 nt, Human
augccuguaaucucagcac

SEQ ID NO: 406319 - RNA, 21 nt, Human
auguauguguguguguauaua

SEQ ID NO: 406320 - RNA, 24 nt, Human
caacauggcaaaacuccgucucua

SEQ ID NO: 406321 - RNA, 19 nt, Human
cacuguacuccagccuggg

SEQ ID NO: 406322 - RNA, 19 nt, Human
cacuguacuccagccuggg

SEQ ID NO: 406323 - RNA, 21 nt, Human
cacuguacuccagccugggug

SEQ ID NO: 406324 - RNA, 22 nt, Human
cacuguacuccagccuggguga

SEQ ID NO: 406325 - RNA, 23 nt, Human
cacuguacuccagccugggugac

SEQ ID NO: 406326 - RNA, 24 nt, Human
cacuguacuccagccugggugaca

SEQ ID NO: 406327 - RNA, 25 nt, Human
cacuguacuccagccugggugacaa

SEQ ID NO: 406328 - RNA, 23 nt, Human
cacuugaggucaggaguuugaga

SEQ ID NO: 406329 - RNA, 25 nt, Human
cagaguaaaauguaaaaagacagca

SEQ ID NO: 406330 - RNA, 24 nt, Human
cagaucacuugaggucaggaguuu

SEQ ID NO: 406331 - RNA, 27 nt, Human
cagaucacuugaggucaggaguuugag

SEQ ID NO: 406332 - RNA, 24 nt, Human
cagcacuuugggaggccgaggcgg

SEQ ID NO: 406333 - RNA, 24 nt, Human
cagcuacucaggaggcugaggcag

SEQ ID NO: 406334 - RNA, 24 nt, Human
cagcuuggccaacauggcaaaacu

SEQ ID NO: 406335 - RNA, 24 nt, Human
caggaggcugaggcaggagaauca

SEQ ID NO: 406336 - RNA, 23 nt, Human
caguaaaagagaaacgccccaaa

SEQ ID NO: 406337 - RNA, 23 nt, Human
caugccaugacauacuuuauaua

SEQ ID NO: 406338 - RNA, 20 nt, Human
caugccuguaaucucagcac

SEQ ID NO: 406339 - RNA, 24 nt, Human
caugccuguaaucucagcacuuug

SEQ ID NO: 406340 - RNA, 20 nt, Human
ccacuguacuccagccuggg

SEQ ID NO: 406341 - RNA, 20 nt, Human
ccacuguacuccagccuggg

SEQ ID NO: 406342 - RNA, 20 nt, Human
ccacuguacuccagccuggg

SEQ ID NO: 406343 - RNA, 21 nt, Human
ccacuguacuccagccugggu

SEQ ID NO: 406344 - RNA, 21 nt, Human
ccacuguacuccagccugggu

SEQ ID NO: 406345 - RNA, 23 nt, Human
ccacuguacuccagccuggguga

SEQ ID NO: 406346 - RNA, 24 nt, Human
ccacuguacuccagccugggugac

SEQ ID NO: 406347 - RNA, 28 nt, Human
cccauacucauccuugcgugcccagggg

SEQ ID NO: 406348 - RNA, 19 nt, Human
cccauggcccauacucauc

SEQ ID NO: 406349 - RNA, 20 nt, Human
ccccaagaaguccucuuauc

SEQ ID NO: 406350 - RNA, 18 nt, Human
ccggggcgcgggcggagg

SEQ ID NO: 406351 - RNA, 23 nt, Human
ccuaugaaaauaguuuuuuucau

SEQ ID NO: 406352 - RNA, 19 nt, Human
ccuggggcggggccggggc

SEQ ID NO: 406353 - RNA, 21 nt, Human
ccuguaaucccagcuacucag

SEQ ID NO: 406354 - RNA, 22 nt, Human
ccuguaaucucagcacuuuggg

SEQ ID NO: 406355 - RNA, 21 nt, Human
ccuguugugaaccuauuucuu

SEQ ID NO: 406356 - RNA, 24 nt, Human
cgaggcgggcagaucacuugaggu

SEQ ID NO: 406357 - RNA, 26 nt, Human
cgaggcgggcagaucacuugagguca

SEQ ID NO: 406358 - RNA, 24 nt, Human
cgccuguaaucccagcuacucagg

SEQ ID NO: 406359 - RNA, 20 nt, Human
cgggaggaggcugagaccgu

SEQ ID NO: 406360 - RNA, 24 nt, Human
cgggcagaucacuugaggucagga

SEQ ID NO: 406361 - RNA, 24 nt, Human
cggggccggggcgcgggcggaggg

SEQ ID NO: 406362 - RNA, 20 nt, Human
cggggcgcgggcggaggggc

SEQ ID NO: 406363 - RNA, 21 nt, Human
cucaggaagacagagugaacu

SEQ ID NO: 406364 - RNA, 21 nt, Human
cuccuccacaguucuggcccc

SEQ ID NO: 406365 - RNA, 23 nt, Human
cuccuccacaguucuggccccaa

SEQ ID NO: 406366 - RNA, 24 nt, Human
cucugucucaaaaaaaaaguuauc

SEQ ID NO: 406367 - RNA, 24 nt, Human
cucuucccagaagacacucauaua

SEQ ID NO: 406368 - RNA, 20 nt, Human
cugaauuuguccgaggugau

SEQ ID NO: 406369 - RNA, 21 nt, Human
cugcggccggcggcggcggcg

SEQ ID NO: 406370 - RNA, 26 nt, Human
cugcuaauuuuuuaccauuuuugacc

SEQ ID NO: 406371 - RNA, 19 nt, Human
cugcuccuggcugcggccg

SEQ ID NO: 406372 - RNA, 20 nt, Human
cugcugcuccuggcugcggc

SEQ ID NO: 406373 - RNA, 24 nt, Human
cuuggccaacauggcaaaacuccg

SEQ ID NO: 406374 - RNA, 18 nt, Human
cuuuugcagacuuaaggc

SEQ ID NO: 406375 - RNA, 18 nt, Human
gaaguccucuuaucaccc

SEQ ID NO: 406376 - RNA, 21 nt, Human
gacgggcgccuguaaucccag

SEQ ID NO: 406377 - RNA, 23 nt, Human
gagaaucacuugaauucgggagg

SEQ ID NO: 406378 - RNA, 20 nt, Human
gagaucagcuuggccaacau

SEQ ID NO: 406379 - RNA, 24 nt, Human
gaucacuugaggucaggaguuuga

SEQ ID NO: 406380 - RNA, 20 nt, Human
gaugaugaaggaacucugaa

SEQ ID NO: 406381 - RNA, 23 nt, Human
gcaccugggucuggacuuguggg

SEQ ID NO: 406382 - RNA, 23 nt, Human
gcaggagaaucacuugaauucgg

SEQ ID NO: 406383 - RNA, 21 nt, Human
gccaacauggcaaaacuccgu

SEQ ID NO: 406384 - RNA, 19 nt, Human
gccacuguacuccagccug

SEQ ID NO: 406385 - RNA, 24 nt, Human
gccacuguacuccagccuggguga

SEQ ID NO: 406386 - RNA, 20 nt, Human
gcggccggcggcggcggcga

SEQ ID NO: 406387 - RNA, 20 nt, Human
gcggcggcggcgaagcggag

SEQ ID NO: 406388 - RNA, 19 nt, Human
gcggggccggggcgcgggc

SEQ ID NO: 406389 - RNA, 25 nt, Human
gcuaagcaccaguaaaagagaaacg

SEQ ID NO: 406390 - RNA, 18 nt, Human
gcucaggaagacagagug

SEQ ID NO: 406391 - RNA, 19 nt, Human
gcuugcaaacugcugguga

SEQ ID NO: 406392 - RNA, 19 nt, Human
ggaaggggucgggaggagg

SEQ ID NO: 406393 - RNA, 22 nt, Human
ggacgcgcaggaaggggucggg

SEQ ID NO: 406394 - RNA, 25 nt, Human
ggcagaucacuugaggucaggaguu

SEQ ID NO: 406395 - RNA, 24 nt, Human
ggcgaagcggaggcgaggccuggg

SEQ ID NO: 406396 - RNA, 20 nt, Human
gggccggggcgcgggcggaa

SEQ ID NO: 406397 - RNA, 24 nt, Human
gggccggggcgcgggcggaggggc

SEQ ID NO: 406398 - RNA, 18 nt, Human
gggcggaggggcgcgggc

SEQ ID NO: 406399 - RNA, 21 nt, Human
gggucaugccuguaaucucag

SEQ ID NO: 406400 - RNA, 24 nt, Human
ggguguggugacgggcgccuguaa

SEQ ID NO: 406401 - RNA, 19 nt, Human
ggucaggaguuugagauca

SEQ ID NO: 406402 - RNA, 24 nt, Human
ggugacgggcgccuguaaucccag

SEQ ID NO: 406403 - RNA, 23 nt, Human
ggugggucaugccuguaaucuca

SEQ ID NO: 406404 - RNA, 24 nt, Human
ggugggucaugccuguaaucucag

SEQ ID NO: 406405 - RNA, 21 nt, Human
gguguauauguaugugugugu

SEQ ID NO: 406406 - RNA, 18 nt, Human
gguguggugacgggcgcc

SEQ ID NO: 406407 - RNA, 19 nt, Human
guacuccagccugggugac

SEQ ID NO: 406408 - RNA, 25 nt, Human
gucaugccuguaaucucagcacuuu

SEQ ID NO: 406409 - RNA, 22 nt, Human
gugacaaugaaacucugucuca

SEQ ID NO: 406410 - RNA, 23 nt, Human
gugggucaugccuguaaucucag

SEQ ID NO: 406411 - RNA, 18 nt, Human
guguauauguaugugugu

SEQ ID NO: 406412 - RNA, 24 nt, Human
guucuggccccaagaaguccucuu

SEQ ID NO: 406413 - RNA, 26 nt, Human
uaaaaagacagcacuucagaaguuuu

SEQ ID NO: 406414 - RNA, 21 nt, Human
uaacaaaaucugaacuuuagc

SEQ ID NO: 406415 - RNA, 19 nt, Human
uaacuacaucacccacuuc

SEQ ID NO: 406416 - RNA, 21 nt, Human
uaagaauaugaucauuucugu

SEQ ID NO: 406417 - RNA, 19 nt, Human
uaagcagcucuacaggggc

SEQ ID NO: 406418 - RNA, 18 nt, Human
uacuccagccugggugac

SEQ ID NO: 406419 - RNA, 20 nt, Human
uacuccagccugggugacaa

SEQ ID NO: 406420 - RNA, 22 nt, Human
uacuccagccugggugacaaug

SEQ ID NO: 406421 - RNA, 24 nt, Human
uagaaucaauaggccaaacaauaa

SEQ ID NO: 406422 - RNA, 22 nt, Human
uaguagauacuguuuuagccau

SEQ ID NO: 406423 - RNA, 19 nt, Human
uauauagguguauauguau

SEQ ID NO: 406424 - RNA, 20 nt, Human
uauauguaugugugugugua

SEQ ID NO: 406425 - RNA, 25 nt, Human
uauauguauguguguguguauauaa

SEQ ID NO: 406426 - RNA, 20 nt, Human
uauguauguguguguguaua

SEQ ID NO: 406427 - RNA, 18 nt, Human
ucaaaacauuuucaacug

SEQ ID NO: 406428 - RNA, 19 nt, Human
ucaaaacauuuucaacugg

SEQ ID NO: 406429 - RNA, 19 nt, Human
ucacuugaggucaggaguu

SEQ ID NO: 406430 - RNA, 24 nt, Human
ucagaauucugacaagaaacauca

SEQ ID NO: 406431 - RNA, 23 nt, Human
ucaugccacuguacuccagccug

SEQ ID NO: 406432 - RNA, 23 nt, Human
ucaugccuguaaucucagcacuu

SEQ ID NO: 406433 - RNA, 20 nt, Human
uccagccugggugacaauga

SEQ ID NO: 406434 - RNA, 21 nt, Human
ucuagaaucaauaggccaaac

SEQ ID NO: 406435 - RNA, 21 nt, Human
ucucuacuaaaaauacaaaaa

SEQ ID NO: 406436 - RNA, 23 nt, Human
ucugucucaaaaaaaaaguuauc

SEQ ID NO: 406437 - RNA, 20 nt, Human
ucuuaacuggaacagccuac

SEQ ID NO: 406438 - RNA, 23 nt, Human
ucuuuguaacuacaucacccacu

SEQ ID NO: 406439 - RNA, 23 nt, Human
ugaaaaaaagguccaaacugagc

SEQ ID NO: 406440 - RNA, 18 nt, Human
ugaaccuaacaaaaucug

SEQ ID NO: 406441 - RNA, 20 nt, Human
ugacaaugaaacucugucuc

SEQ ID NO: 406442 - RNA, 21 nt, Human
ugacgcggugggucaugccug

SEQ ID NO: 406443 - RNA, 23 nt, Human
ugacgcggugggucaugccugua

SEQ ID NO: 406444 - RNA, 22 nt, Human
ugacgggcgccuguaaucccag

SEQ ID NO: 406445 - RNA, 22 nt, Human
ugagaguacuucugacacccau

SEQ ID NO: 406446 - RNA, 23 nt, Human
ugagaucagcuuggccaacaugg

SEQ ID NO: 406447 - RNA, 22 nt, Human
ugagcugagaucaugccacugu

SEQ ID NO: 406448 - RNA, 20 nt, Human
ugaggcaggagaaucacuug

SEQ ID NO: 406449 - RNA, 24 nt, Human
ugaggcaggagaaucacuugaauu

SEQ ID NO: 406450 - RNA, 25 nt, Human
ugaggcaggagaaucacuugaauuc

SEQ ID NO: 406451 - RNA, 18 nt, Human
ugaggucaggaguuugag

SEQ ID NO: 406452 - RNA, 19 nt, Human
ugccacaguucaccagcag

SEQ ID NO: 406453 - RNA, 18 nt, Human
ugccaugacauacuuuau

SEQ ID NO: 406454 - RNA, 23 nt, Human
ugccuguaaucucagcacuuugg

SEQ ID NO: 406455 - RNA, 23 nt, Human
ugccuguaaucucagcacuuugg

SEQ ID NO: 406456 - RNA, 20 nt, Human
ugcucaggaagacagaguga

SEQ ID NO: 406457 - RNA, 23 nt, Human
uggaacagccuaccuuauaaaga

SEQ ID NO: 406458 - RNA, 18 nt, Human
uggauaaaacacaaaacc

SEQ ID NO: 406459 - RNA, 19 nt, Human
uggauaaaacacaaaacca

SEQ ID NO: 406460 - RNA, 23 nt, Human
uggcauaacaacgcagaagggcu

SEQ ID NO: 406461 - RNA, 21 nt, Human
uggccaacauggcaaaacucc

SEQ ID NO: 406462 - RNA, 20 nt, Human
ugggaggccgaggcgggcag

SEQ ID NO: 406463 - RNA, 24 nt, Human
ugggaggccgaggcgggcagauca

SEQ ID NO: 406464 - RNA, 20 nt, Human
ugggaugauugcugcagugu

SEQ ID NO: 406465 - RNA, 24 nt, Human
ugggucaugccuguaaucucagca

SEQ ID NO: 406466 - RNA, 18 nt, Human
uguauacacacauauaua

SEQ ID NO: 406467 - RNA, 18 nt, Human
uguauacacacauauaua

SEQ ID NO: 406468 - RNA, 29 nt, Human
uguauacacacauauauagguguauaugg

SEQ ID NO: 406469 - RNA, 19 nt, Human
uguggggcucggcgcgcgg

SEQ ID NO: 406470 - RNA, 22 nt, Human
uguguauauauauauuuauuug

SEQ ID NO: 406471 - RNA, 18 nt, Human
uguguguguauauauaua

SEQ ID NO: 406472 - RNA, 18 nt, Human
uguguguguauauauaua

SEQ ID NO: 406473 - RNA, 19 nt, Human
uguguguguauauauauau

SEQ ID NO: 406474 - RNA, 19 nt, Human
uguguugagcaaccgugcc

SEQ ID NO: 406475 - RNA, 29 nt, Human
uguuuguauacacacauauauagguguaa

SEQ ID NO: 406476 - RNA, 22 nt, Human
uuaccuggguguggugacgggc

SEQ ID NO: 406477 - RNA, 24 nt, Human
uuaccuggguguggugacgggcgc

SEQ ID NO: 406478 - RNA, 23 nt, Human
uucacagaguacucagaauucug

SEQ ID NO: 406479 - RNA, 19 nt, Human
uucaugaaaauacuuagag

SEQ ID NO: 406480 - RNA, 20 nt, Human
uugcagugagcugagaucau

SEQ ID NO: 406481 - RNA, 21 nt, Human
uugcagugagcugagaucaug

SEQ ID NO: 406482 - RNA, 25 nt, Human
uugggaggccgaggcgggcagauca

SEQ ID NO: 406483 - RNA, 20 nt, Human
uuguauauacaccuucagac

SEQ ID NO: 406484 - RNA, 22 nt, Human
uuguauauacaccuucagaccc

SEQ ID NO: 406485 - RNA, 19 nt, Human
uuugcagugagcugagauc

SEQ ID NO: 406486 - RNA, 24 nt, Human
uuugcagugagcugagaucaugcc

SEQ ID NO: 406487 - RNA, 27 nt, Human
uuuguauacacacauauauagguguau

SEQ ID NO: 406488 - RNA, 27 nt, Human
uuuuuuuuuuugugaaaaagaggugcu

SEQ ID NO: 406489 - RNA, 18 nt, Human
uuuuuuuuuuuuuuuuug

SEQ ID NO: 406490 - RNA, 21 nt, Human
aaaaucucuaaugcugaaaga

SEQ ID NO: 406491 - RNA, 24 nt, Human
aaagggaaccaaauauuuuccuca

SEQ ID NO: 406492 - RNA, 22 nt, Human
aacaagaugugaacacugaaaa

SEQ ID NO: 406493 - RNA, 24 nt, Human
aaccguacaauagcaaaaaucaaa

SEQ ID NO: 406494 - RNA, 23 nt, Human
aagaacagaaaaaucucuaaugc

SEQ ID NO: 406495 - RNA, 21 nt, Human
aagcagauuucuuuggggaca

SEQ ID NO: 406496 - RNA, 23 nt, Human
aagggaaccaaauauuuuccuca

SEQ ID NO: 406497 - RNA, 22 nt, Human
acaaaaauuccaaaaaauuaga

SEQ ID NO: 406498 - RNA, 25 nt, Human
acaaaaauuccaaaaaauuagagaa

SEQ ID NO: 406499 - RNA, 18 nt, Human
acacaagugagaaauggg

SEQ ID NO: 406500 - RNA, 23 nt, Human
acagagagcuacuacuuuuucca

SEQ ID NO: 406501 - RNA, 23 nt, Human
acccugaaagauaacuuaaaaaa

SEQ ID NO: 406502 - RNA, 26 nt, Human
acucgccgccgccucccccucgugcc

SEQ ID NO: 406503 - RNA, 23 nt, Human
acugaaacuccauaaugcuacag

SEQ ID NO: 406504 - RNA, 23 nt, Human
agaaaaauguucaaaaauaaaaa

SEQ ID NO: 406505 - RNA, 25 nt, Human
agaaagaaaaaggacaauuuccuag

SEQ ID NO: 406506 - RNA, 22 nt, Human
agaacagaaaaaucucuaaugc

SEQ ID NO: 406507 - RNA, 20 nt, Human
agcagauuucuuuggggaca

SEQ ID NO: 406508 - RNA, 22 nt, Human
agcuacuacuuuuuccaggaag

SEQ ID NO: 406509 - RNA, 21 nt, Human
agcuagaaagaaaaaggacaa

SEQ ID NO: 406510 - RNA, 20 nt, Human
agguguaaagucuacaaaaa

SEQ ID NO: 406511 - RNA, 20 nt, Human
agguguaaagucuacaaaaa

SEQ ID NO: 406512 - RNA, 24 nt, Human
aguauugaaaaugcacaagaaaga

SEQ ID NO: 406513 - RNA, 19 nt, Human
auacaaauauauauauaua

SEQ ID NO: 406514 - RNA, 22 nt, Human
auacaaauauauauauauauau

SEQ ID NO: 406515 - RNA, 19 nt, Human
augcuuuuuagagccuuuc

SEQ ID NO: 406516 - RNA, 22 nt, Human
caaaaauuugguuccacugaaa

SEQ ID NO: 406517 - RNA, 18 nt, Human
caccgacucgccgccgcc

SEQ ID NO: 406518 - RNA, 24 nt, Human
cagaaaaaucucuaaugcugaaag

SEQ ID NO: 406519 - RNA, 23 nt, Human
cagcuagaaagaaaaaggacaau

SEQ ID NO: 406520 - RNA, 24 nt, Human
caggugcuccgccccgguucugcu

SEQ ID NO: 406521 - RNA, 19 nt, Human
ccccgguucugcucuuccc

SEQ ID NO: 406522 - RNA, 22 nt, Human
ccgccgccucccccucgugccc

SEQ ID NO: 406523 - RNA, 19 nt, Human
ccgcgccugcaggugcucc

SEQ ID NO: 406524 - RNA, 21 nt, Human
ccugaaagauaacuuaaaaaa

SEQ ID NO: 406525 - RNA, 21 nt, Human
ccugcaggugcuccgccccgg

SEQ ID NO: 406526 - RNA, 24 nt, Human
ccugcaggugcuccgccccgguuc

SEQ ID NO: 406527 - RNA, 23 nt, Human
cuaauaaccacuaccuauaaaau

SEQ ID NO: 406528 - RNA, 22 nt, Human
cuccccucaaaugcccuuuaaa

SEQ ID NO: 406529 - RNA, 22 nt, Human
cuccgccccgguucugcucuuc

SEQ ID NO: 406530 - RNA, 19 nt, Human
cuucuuagaacaggccacu

SEQ ID NO: 406531 - RNA, 23 nt, Human
cuuuauaguauuuccauguuacc

SEQ ID NO: 406532 - RNA, 20 nt, Human
gacucgccgccgccuccccc

SEQ ID NO: 406533 - RNA, 21 nt, Human
gacucgccgccgccucccccu

SEQ ID NO: 406534 - RNA, 21 nt, Human
gaugaauaaaccaaauguagc

SEQ ID NO: 406535 - RNA, 21 nt, Human
gccccgguucugcucuuccca

SEQ ID NO: 406536 - RNA, 19 nt, Human
ggauguaauacuaauaacc

SEQ ID NO: 406537 - RNA, 21 nt, Human
ggggaacaagaugugaacacu

SEQ ID NO: 406538 - RNA, 22 nt, Human
guucugcucuucccagcugcuc

SEQ ID NO: 406539 - RNA, 20 nt, Human
uaaaaaauuggugacagcaa

SEQ ID NO: 406540 - RNA, 22 nt, Human
uaauaaccacuaccuauaaaau

SEQ ID NO: 406541 - RNA, 22 nt, Human
uacaauagcaaaaaucaaagag

SEQ ID NO: 406542 - RNA, 18 nt, Human
uagcaaaaaucaaagagc

SEQ ID NO: 406543 - RNA, 22 nt, Human
uagcaaaaaucaaagagcacag

SEQ ID NO: 406544 - RNA, 23 nt, Human
uagcaaaaaucaaagagcacaga

SEQ ID NO: 406545 - RNA, 18 nt, Human
uauaaaauaaagcacaca

SEQ ID NO: 406546 - RNA, 22 nt, Human
uauuaaacuuauuaugagcccc

SEQ ID NO: 406547 - RNA, 21 nt, Human
uccaaaaaauuagagaacacu

SEQ ID NO: 406548 - RNA, 22 nt, Human
ucccagcugcucaccgacucgc

SEQ ID NO: 406549 - RNA, 21 nt, Human
ucccuaaacuauuuugaaggc

SEQ ID NO: 406550 - RNA, 18 nt, Human
ucgccgccgccucccccu

SEQ ID NO: 406551 - RNA, 22 nt, Human
ucgccgccgccucccccucguc

SEQ ID NO: 406552 - RNA, 19 nt, Human
ucugcuauuauaaaaaauu

SEQ ID NO: 406553 - RNA, 19 nt, Human
ucugcucuucccagcugcu

SEQ ID NO: 406554 - RNA, 23 nt, Human
ugaaaaugcacaagaaagauuuu

SEQ ID NO: 406555 - RNA, 19 nt, Human
ugaaaccguacaauagcaa

SEQ ID NO: 406556 - RNA, 19 nt, Human
ugaaacuccauaaugcuac

SEQ ID NO: 406557 - RNA, 18 nt, Human
ugaaggcagguagcuuag

SEQ ID NO: 406558 - RNA, 22 nt, Human
ugauauguggaauuuuuguaaa

SEQ ID NO: 406559 - RNA, 23 nt, Human
ugcaggugcuccgccccgguucu

SEQ ID NO: 406560 - RNA, 21 nt, Human
ugcuacagagagcuacuacuu

SEQ ID NO: 406561 - RNA, 23 nt, Human
ugcucaccgacucgccgccgccu

SEQ ID NO: 406562 - RNA, 22 nt, Human
uggaauuuuuguaaauaguuuu

SEQ ID NO: 406563 - RNA, 23 nt, Human
uguaauacuaauaaccacuaccu

SEQ ID NO: 406564 - RNA, 21 nt, Human
ugugaaaguaaaaauuuuuau

SEQ ID NO: 406565 - RNA, 22 nt, Human
uuaauaaacauaucaaaaaggg

SEQ ID NO: 406566 - RNA, 21 nt, Human
uuagugcauuaaauguuuucc

SEQ ID NO: 406567 - RNA, 18 nt, Human
uucaagaacagaaaaauc

SEQ ID NO: 406568 - RNA, 21 nt, Human
uuccuagcagcauggcaacuu

SEQ ID NO: 406569 - RNA, 21 nt, Human
uuuuuuuuuuuuuuugugaaa

SEQ ID NO: 406570 - RNA, 19 nt, Human
uuuuuuuuuuuuuuuuugu

SEQ ID NO: 406571 - RNA, 20 nt, Human
uuuuuuuuuuuuuuuuuugg

SEQ ID NO: 406572 - RNA, 25 nt, Human
ggagguggggcugucaucuguggug

SEQ ID NO: 406573 - RNA, 25 nt, Human
aaagaagaaaccgggagacauccug

SEQ ID NO: 406574 - RNA, 22 nt, Human
aagaagaaaccgggagacaucc

SEQ ID NO: 406575 - RNA, 23 nt, Human
acacacacacacacacacacaca

SEQ ID NO: 406576 - RNA, 25 nt, Human
acacacacacacacacacacacagu

SEQ ID NO: 406577 - RNA, 23 nt, Human
acacacacacacacacacacaua

SEQ ID NO: 406578 - RNA, 28 nt, Human
acacacacacacacacauacacacuuug

SEQ ID NO: 406579 - RNA, 24 nt, Human
agaggaaauuuugaaagaagaaac

SEQ ID NO: 406580 - RNA, 33 nt, Human
auacacacaaacacacacacacacacacacagu

SEQ ID NO: 406581 - RNA, 19 nt, Human
auguggagcggaugugagg

SEQ ID NO: 406582 - RNA, 31 nt, Human
cacaaacacacacacacacacacacacacag

SEQ ID NO: 406583 - RNA, 19 nt, Human
cacacaaacacacacacac

SEQ ID NO: 406584 - RNA, 20 nt, Human
cacacacacacacacacaca

SEQ ID NO: 406585 - RNA, 20 nt, Human
cacacacacacacacacaca

SEQ ID NO: 406586 - RNA, 20 nt, Human
cacacacacacacacacaca

SEQ ID NO: 406587 - RNA, 20 nt, Human
cacacacacacacacacaca

SEQ ID NO: 406588 - RNA, 22 nt, Human
cacacacacacacacacacaca

SEQ ID NO: 406589 - RNA, 22 nt, Human
cacacacacacacacacacaca

SEQ ID NO: 406590 - RNA, 26 nt, Human
cacacacacacacacacacacacaca

SEQ ID NO: 406591 - RNA, 25 nt, Human
cacacacacacacacacacacauac

SEQ ID NO: 406592 - RNA, 26 nt, Human
cacacacacacacacacacauacaca

SEQ ID NO: 406593 - RNA, 20 nt, Human
cacacacacacacacacaua

SEQ ID NO: 406594 - RNA, 22 nt, Human
cacacacacacacacacauaca

SEQ ID NO: 406595 - RNA, 27 nt, Human
cacacacacacacacacauacacacuu

SEQ ID NO: 406596 - RNA, 19 nt, Human
cacacacacacacacauac

SEQ ID NO: 406597 - RNA, 24 nt, Human
cagcagauggagaggaaauuuuga

SEQ ID NO: 406598 - RNA, 20 nt, Human
cccagcccccacugcggcca

SEQ ID NO: 406599 - RNA, 22 nt, Human
cccagcccccacugcggccaug

SEQ ID NO: 406600 - RNA, 19 nt, Human
cccuuggaggcgccugggg

SEQ ID NO: 406601 - RNA, 27 nt, Human
ccucaucuuuccucacugcuucccuug

SEQ ID NO: 406602 - RNA, 18 nt, Human
gagucaggagcggggaac

SEQ ID NO: 406603 - RNA, 19 nt, Human
gcgggcgcacacaggggug

SEQ ID NO: 406604 - RNA, 20 nt, Human
gggcgcacacaggggugacc

SEQ ID NO: 406605 - RNA, 25 nt, Human
gggcuggggcgggcgcacacagggg

SEQ ID NO: 406606 - RNA, 21 nt, Human
guggcagcgguggcggccagc

SEQ ID NO: 406607 - RNA, 21 nt, Human
guggcagcgguggcggccagc

SEQ ID NO: 406608 - RNA, 18 nt, Human
uaagacuacuccugggcu

SEQ ID NO: 406609 - RNA, 20 nt, Human
uaagacuacuccugggcugg

SEQ ID NO: 406610 - RNA, 23 nt, Human
uacaaaauacacacaaacacaca

SEQ ID NO: 406611 - RNA, 25 nt, Human
uacacacaaacacacacacacacac

SEQ ID NO: 406612 - RNA, 26 nt, Human
uacacacaaacacacacacacacaca

SEQ ID NO: 406613 - RNA, 24 nt, Human
uccccagcccccacugcggccaug

SEQ ID NO: 406614 - RNA, 21 nt, Human
ugaaagaagaaaccgggagac

SEQ ID NO: 406615 - RNA, 24 nt, Human
ugagcagguggcagcgguggcggc

SEQ ID NO: 406616 - RNA, 25 nt, Human
ugaggcacgaugccucaucuuuccu

SEQ ID NO: 406617 - RNA, 18 nt, Human
uggggcgggcgcacacag

SEQ ID NO: 406618 - RNA, 21 nt, Human
uggggcugcgccaguccccag

SEQ ID NO: 406619 - RNA, 22 nt, Human
uguggagcggaugugaggcacg

SEQ ID NO: 406620 - RNA, 19 nt, Human
aaaugaccuucacugagaa

SEQ ID NO: 406621 - RNA, 19 nt, Human
aacacagugaacuucauua

SEQ ID NO: 406622 - RNA, 21 nt, Human
aacauccauuuuuccuuguuc

SEQ ID NO: 406623 - RNA, 18 nt, Human
aagaaggcaguauaaacc

SEQ ID NO: 406624 - RNA, 28 nt, Human
aagcaagaaggcaguauaaaccuucuag

SEQ ID NO: 406625 - RNA, 23 nt, Human
acucugcaacuacagcuuagcug

SEQ ID NO: 406626 - RNA, 18 nt, Human
acugucccacccaccccc

SEQ ID NO: 406627 - RNA, 23 nt, Human
agagucaaugaaaaauagcaggg

SEQ ID NO: 406628 - RNA, 22 nt, Human
agccccuccccccaagucaaaa

SEQ ID NO: 406629 - RNA, 19 nt, Human
agccgccgccggcgccaca

SEQ ID NO: 406630 - RNA, 22 nt, Human
agccgccgccggcgccacaacc

SEQ ID NO: 406631 - RNA, 20 nt, Human
auaaacacagugaacuucau

SEQ ID NO: 406632 - RNA, 20 nt, Human
aucauccuaaagaguucaau

SEQ ID NO: 406633 - RNA, 20 nt, Human
auggacauuauucccccucu

SEQ ID NO: 406634 - RNA, 19 nt, Human
cacagcagccgccgccggc

SEQ ID NO: 406635 - RNA, 22 nt, Human
cacagcagccgccgccggcgcc

SEQ ID NO: 406636 - RNA, 21 nt, Human
ccacaacccaccauccgccau

SEQ ID NO: 406637 - RNA, 24 nt, Human
ccaugcuuuuaauauucauuuaac

SEQ ID NO: 406638 - RNA, 22 nt, Human
cccaccauccgccauuaccgcc

SEQ ID NO: 406639 - RNA, 33 nt, Human
cccaccauccgccauuaccgccgcuuccgacua

SEQ ID NO: 406640 - RNA, 19 nt, Human
ccccuccccccaagucaaa

SEQ ID NO: 406641 - RNA, 22 nt, Human
ccgccauuaccgccgcuuccga

SEQ ID NO: 406642 - RNA, 18 nt, Human
ccgccgccggcgccacaa

SEQ ID NO: 406643 - RNA, 23 nt, Human
ccggcgccacaacccaccauccg

SEQ ID NO: 406644 - RNA, 24 nt, Human
cugcagcgaaacauccauuuuucc

SEQ ID NO: 406645 - RNA, 29 nt, Human
cuucauuacuguacauguacucugcaacu

SEQ ID NO: 406646 - RNA, 21 nt, Human
gaaaaauagcaggguuauagc

SEQ ID NO: 406647 - RNA, 19 nt, Human
gcuuuaaagcaagaaggca

SEQ ID NO: 406648 - RNA, 19 nt, Human
uaacuuaauccugcagcga

SEQ ID NO: 406649 - RNA, 23 nt, Human
uacagcuuagcuguaaauccucc

SEQ ID NO: 406650 - RNA, 22 nt, Human
uagaccaauugcuuuaaagcaa

SEQ ID NO: 406651 - RNA, 20 nt, Human
uagagucaaugaaaaauagc

SEQ ID NO: 406652 - RNA, 21 nt, Human
uccacacacaaugguauggac

SEQ ID NO: 406653 - RNA, 22 nt, Human
ugaccuucacugagaagauaau

SEQ ID NO: 406654 - RNA, 20 nt, Human
ugacuggaaaaaaaaaaggu

SEQ ID NO: 406655 - RNA, 24 nt, Human
ugcagcgaaacauccauuuuuccu

SEQ ID NO: 406656 - RNA, 19 nt, Human
uguacauguacucugcaac

SEQ ID NO: 406657 - RNA, 21 nt, Human
ugucccacccacccccuuaca

SEQ ID NO: 406658 - RNA, 28 nt, Human
uuauagccccuccccccaagucaaaaca

SEQ ID NO: 406659 - RNA, 28 nt, Human
uuccuuguucuuuucuugcacaguucca

SEQ ID NO: 406660 - RNA, 22 nt, Human
uugaauacuagauacuauaauc

SEQ ID NO: 406661 - RNA, 22 nt, Human
uuguucuuuucuugcacaguuc

SEQ ID NO: 406662 - RNA, 20 nt, Human
uuuguugaaguaauaagaau

SEQ ID NO: 406663 - RNA, 21 nt, Human
uuuucacaaauacugugacug

SEQ ID NO: 406664 - RNA, 24 nt, Human
aaacaggucaccaaagagaccaga

SEQ ID NO: 406665 - RNA, 23 nt, Human
acacaaauuuaaacaggucacca

SEQ ID NO: 406666 - RNA, 23 nt, Human
acuccauuuuggaugaacugaau

SEQ ID NO: 406667 - RNA, 18 nt, Human
agagggcggcggcggcgg

SEQ ID NO: 406668 - RNA, 26 nt, Human
agcaggcggcggaggcagcgauggcc

SEQ ID NO: 406669 - RNA, 19 nt, Human
aggcgggcaacuccgcccc

SEQ ID NO: 406670 - RNA, 20 nt, Human
caacuccgccccugcccucc

SEQ ID NO: 406671 - RNA, 19 nt, Human
cacaguaaacggaaaacca

SEQ ID NO: 406672 - RNA, 18 nt, Human
caggucaccaaagagacc

SEQ ID NO: 406673 - RNA, 22 nt, Human
cauugauacuguuuuugugcuu

SEQ ID NO: 406674 - RNA, 24 nt, Human
ccaaagagaccagaaguaauuaaa

SEQ ID NO: 406675 - RNA, 21 nt, Human
ccccugcccuccuuccucucc

SEQ ID NO: 406676 - RNA, 23 nt, Human
cccggggccgcggccgggggcgg

SEQ ID NO: 406677 - RNA, 19 nt, Human
cccuccuuccucuccuguc

SEQ ID NO: 406678 - RNA, 19 nt, Human
cccugcccuccuuccucuc

SEQ ID NO: 406679 - RNA, 22 nt, Human
cccugcccuccuuccucuccug

SEQ ID NO: 406680 - RNA, 20 nt, Human
ccgcccgcucgcgucccucg

SEQ ID NO: 406681 - RNA, 22 nt, Human
ccgccgcccgcucgcgucccuc

SEQ ID NO: 406682 - RNA, 20 nt, Human
ccgcggccgggggcgggggc

SEQ ID NO: 406683 - RNA, 19 nt, Human
ccgcucgcgucccucgagg

SEQ ID NO: 406684 - RNA, 19 nt, Human
cgcgcggggcagggcccgg

SEQ ID NO: 406685 - RNA, 25 nt, Human
cucacggccagccccgccgcccgcu

SEQ ID NO: 406686 - RNA, 27 nt, Human
cucgagguggagcaggcggcggaggca

SEQ ID NO: 406687 - RNA, 27 nt, Human
gagcaggcggcggaggcagcgauggcc

SEQ ID NO: 406688 - RNA, 25 nt, Human
gcccggggccgcggccgggggcggg

SEQ ID NO: 406689 - RNA, 21 nt, Human
gccgcggccgggggcgggggc

SEQ ID NO: 406690 - RNA, 21 nt, Human
ggaaaaccauucacagauuca

SEQ ID NO: 406691 - RNA, 23 nt, Human
ggccgcggccgggggcgggggcu

SEQ ID NO: 406692 - RNA, 18 nt, Human
gggcagggcccggggccg

SEQ ID NO: 406693 - RNA, 20 nt, Human
gggcagggcccggggccgcg

SEQ ID NO: 406694 - RNA, 19 nt, Human
guggagcaggcggcggagg

SEQ ID NO: 406695 - RNA, 19 nt, Human
uaaggcgggcaacuccgcc

SEQ ID NO: 406696 - RNA, 23 nt, Human
uacacacugaaggugaaggauau

SEQ ID NO: 406697 - RNA, 23 nt, Human
uccgccccugcccuccuuccucu

SEQ ID NO: 406698 - RNA, 18 nt, Human
ucggugggccgggcaggg

SEQ ID NO: 406699 - RNA, 22 nt, Human
ucucacggccagccccgccgcc

SEQ ID NO: 406700 - RNA, 23 nt, Human
ucucacggccagccccgccgccc

SEQ ID NO: 406701 - RNA, 19 nt, Human
uuuuuuuuuuuuuuuguca

SEQ ID NO: 406702 - RNA, 19 nt, Human
uuuuuuuuuuuuuuuuugu

SEQ ID NO: 406703 - RNA, 20 nt, Human
uuuuuuuuuuuuuuuuuugg

SEQ ID NO: 406704 - RNA, 26 nt, Human
aaacacacauaacagauucuugagac

SEQ ID NO: 406705 - RNA, 22 nt, Human
aagcucagagauauuuugagcu

SEQ ID NO: 406706 - RNA, 21 nt, Human
aauacaagcacccccucccac

SEQ ID NO: 406707 - RNA, 21 nt, Human
aauugccugaacuacugugga

SEQ ID NO: 406708 - RNA, 21 nt, Human
agcucuaaaagaguaucacaa

SEQ ID NO: 406709 - RNA, 18 nt, Human
auagugacuggaaauaag

SEQ ID NO: 406710 - RNA, 21 nt, Human
aucauucaagacauaucuuaa

SEQ ID NO: 406711 - RNA, 21 nt, Human
caaagccacaacuaaaauaga

SEQ ID NO: 406712 - RNA, 21 nt, Human
cacaccaggccaaagagcaaa

SEQ ID NO: 406713 - RNA, 19 nt, Human
cacccuuuccguccacacc

SEQ ID NO: 406714 - RNA, 20 nt, Human
ccacaccaggccaaagagca

SEQ ID NO: 406715 - RNA, 20 nt, Human
ccacccuuuccguccacacc

SEQ ID NO: 406716 - RNA, 20 nt, Human
ccgcagcaaacacacauaac

SEQ ID NO: 406717 - RNA, 27 nt, Human
ccguccacaccaggccaaagagcaaaa

SEQ ID NO: 406718 - RNA, 19 nt, Human
gaccugacuaauugaaugg

SEQ ID NO: 406719 - RNA, 21 nt, Human
uaaauacaagcacccccuccc

SEQ ID NO: 406720 - RNA, 21 nt, Human
uaaauacaagcacccccuccc

SEQ ID NO: 406721 - RNA, 18 nt, Human
uaagggucauacaugugu

SEQ ID NO: 406722 - RNA, 22 nt, Human
uaauagcuaacugaagccagga

SEQ ID NO: 406723 - RNA, 23 nt, Human
uagacccuuaaacaugucugcuc

SEQ ID NO: 406724 - RNA, 23 nt, Human
uagcuaacugaagccaggaauuc

SEQ ID NO: 406725 - RNA, 27 nt, Human
uauagugacuggaaauaagauaaauac

SEQ ID NO: 406726 - RNA, 20 nt, Human
ucaagcauuuacucuccacc

SEQ ID NO: 406727 - RNA, 23 nt, Human
ucacucaauccauuuggccaccc

SEQ ID NO: 406728 - RNA, 23 nt, Human
ucacuuuuauauaagcuucccca

SEQ ID NO: 406729 - RNA, 26 nt, Human
ucccaccgcagcaaacagugggaaac

SEQ ID NO: 406730 - RNA, 18 nt, Human
uccguccacaccaggcca

SEQ ID NO: 406731 - RNA, 24 nt, Human
ugacuggaaauaagauaaauacaa

SEQ ID NO: 406732 - RNA, 19 nt, Human
uuagauacccauaugaugc

SEQ ID NO: 406733 - RNA, 22 nt, Human
uuuccacuggacugaauguccu

SEQ ID NO: 406734 - RNA, 19 nt, Human
accuccucccuccucccuu

SEQ ID NO: 406735 - RNA, 18 nt, Human
caccagcgucgaccggcc

SEQ ID NO: 406736 - RNA, 27 nt, Human
cauguuauuaacucccugccuuuuacc

SEQ ID NO: 406737 - RNA, 22 nt, Human
cccugccuuuuaccuccucccu

SEQ ID NO: 406738 - RNA, 19 nt, Human
ccuccucccuuggcacaac

SEQ ID NO: 406739 - RNA, 25 nt, Human
ugccuuuuaccuccucccuccuccc

SEQ ID NO: 406740 - RNA, 19 nt, Human
aaauaugacagucuuggau

SEQ ID NO: 406741 - RNA, 19 nt, Human
cacccuuccccagccaagg

SEQ ID NO: 406742 - RNA, 19 nt, Human
ccacccuuccccagccaag

SEQ ID NO: 406743 - RNA, 18 nt, Human
ccagccaagggcagaagc

SEQ ID NO: 406744 - RNA, 19 nt, Human
cccuggugggacuucuccu

SEQ ID NO: 406745 - RNA, 20 nt, Human
ccuugaacugcagaaaagag

SEQ ID NO: 406746 - RNA, 22 nt, Human
ggaguccugguggccaaguggc

SEQ ID NO: 406747 - RNA, 21 nt, Human
guguucuuaccaccuccccac

SEQ ID NO: 406748 - RNA, 18 nt, Human
uauucagaaguugucagg

SEQ ID NO: 406749 - RNA, 22 nt, Human
uauucagaaguugucagguguu

SEQ ID NO: 406750 - RNA, 21 nt, Human
uccccagccaagggcagaagc

SEQ ID NO: 406751 - RNA, 21 nt, Human
ucuccugggcuuuuccuccca

SEQ ID NO: 406752 - RNA, 18 nt, Human
uggugggacuucuccugg

SEQ ID NO: 406753 - RNA, 19 nt, Human
uuuguaaguguuuaaaaug

SEQ ID NO: 406754 - RNA, 23 nt, Human
aagauccuggguccuggggguga

SEQ ID NO: 406755 - RNA, 23 nt, Human
acacaacgcuucagucccacccc

SEQ ID NO: 406756 - RNA, 23 nt, Human
acagccagacacagcacaacacc

SEQ ID NO: 406757 - RNA, 26 nt, Human
agcacaacaccacaggguaugccccu

SEQ ID NO: 406758 - RNA, 22 nt, Human
aggaaggagcaggccuguggug

SEQ ID NO: 406759 - RNA, 18 nt, Human
aggccugugguggggggg

SEQ ID NO: 406760 - RNA, 22 nt, Human
agggcaaggccaggggcuggga

SEQ ID NO: 406761 - RNA, 18 nt, Human
aggucaugaauggugggg

SEQ ID NO: 406762 - RNA, 23 nt, Human
auggguccgggauccggggacuc

SEQ ID NO: 406763 - RNA, 19 nt, Human
augguggggcacacagggc

SEQ ID NO: 406764 - RNA, 19 nt, Human
cacaacaccacaggguaug

SEQ ID NO: 406765 - RNA, 24 nt, Human
cacacacauuuaucccacagccag

SEQ ID NO: 406766 - RNA, 21 nt, Human
cacagcacaacaccacagggu

SEQ ID NO: 406767 - RNA, 24 nt, Human
cacagccagacacagcacaacacc

SEQ ID NO: 406768 - RNA, 18 nt, Human
cacagggcucaagacauc

SEQ ID NO: 406769 - RNA, 19 nt, Human
caccccacccucacuggcu

SEQ ID NO: 406770 - RNA, 27 nt, Human
caccccacccucacuggcugcccuccc

SEQ ID NO: 406771 - RNA, 19 nt, Human
cagacacagcacaacaccc

SEQ ID NO: 406772 - RNA, 19 nt, Human
cagcacaacaccacagggu

SEQ ID NO: 406773 - RNA, 24 nt, Human
cagcacaacaccacaggguaugcc

SEQ ID NO: 406774 - RNA, 24 nt, Human
cagccagacacagcacaacaccaa

SEQ ID NO: 406775 - RNA, 25 nt, Human
ccacaaacucgacuucagggaaaac

SEQ ID NO: 406776 - RNA, 22 nt, Human
ccacagccagacacagcacaac

SEQ ID NO: 406777 - RNA, 25 nt, Human
ccacagccagacacagcacaacacc

SEQ ID NO: 406778 - RNA, 25 nt, Human
cccacacacauuuaucccacagcca

SEQ ID NO: 406779 - RNA, 25 nt, Human
ccccacccucacuggcugcccuccc

SEQ ID NO: 406780 - RNA, 22 nt, Human
cccuacauaugcuucuccaagc

SEQ ID NO: 406781 - RNA, 18 nt, Human
cucccuguccacuugggg

SEQ ID NO: 406782 - RNA, 23 nt, Human
cugcuaggcugauuuucucacau

SEQ ID NO: 406783 - RNA, 25 nt, Human
gaaaggagaagauccuggguccugg

SEQ ID NO: 406784 - RNA, 20 nt, Human
gaagauccuggguccugggg

SEQ ID NO: 406785 - RNA, 19 nt, Human
gagcaggccuguggugggg

SEQ ID NO: 406786 - RNA, 20 nt, Human
gagcaggccugugguggggg

SEQ ID NO: 406787 - RNA, 22 nt, Human
gcuucagucccaccccacccuc

SEQ ID NO: 406788 - RNA, 18 nt, Human
ggagucuuugcaagacac

SEQ ID NO: 406789 - RNA, 20 nt, Human
ggcugggagggaggggcuca

SEQ ID NO: 406790 - RNA, 18 nt, Human
gggcaaggccaggggcug

SEQ ID NO: 406791 - RNA, 20 nt, Human
ggggcucccuguccacuugg

SEQ ID NO: 406792 - RNA, 24 nt, Human
gggggggugagaggggcucuggga

SEQ ID NO: 406793 - RNA, 19 nt, Human
gguggggggggugagaggg

SEQ ID NO: 406794 - RNA, 23 nt, Human
gugguggggggggugagaggggc

SEQ ID NO: 406795 - RNA, 22 nt, Human
uaacacagcugugggucagggc

SEQ ID NO: 406796 - RNA, 20 nt, Human
uaaguggaggaaaguggggu

SEQ ID NO: 406797 - RNA, 23 nt, Human
uagaggguuauauacaaaccaca

SEQ ID NO: 406798 - RNA, 22 nt, Human
uaucuggaugcagguuuuauua

SEQ ID NO: 406799 - RNA, 24 nt, Human
uccgggauccggggacucgggauc

SEQ ID NO: 406800 - RNA, 24 nt, Human
uccugccagguuggggaggggaug

SEQ ID NO: 406801 - RNA, 20 nt, Human
uccuggguccugggggugaa

SEQ ID NO: 406802 - RNA, 18 nt, Human
ucgacaagggauaggggc

SEQ ID NO: 406803 - RNA, 23 nt, Human
ucugccaggagugggcuccacag

SEQ ID NO: 406804 - RNA, 21 nt, Human
ugcccagaaaggagaagaucc

SEQ ID NO: 406805 - RNA, 22 nt, Human
ugccuaaaggaagagggcaagg

SEQ ID NO: 406806 - RNA, 21 nt, Human
uggggaggggauggaagcugg

SEQ ID NO: 406807 - RNA, 28 nt, Human
ugggucagggcucugcccaaggauuccc

SEQ ID NO: 406808 - RNA, 18 nt, Human
ugguggggggggugagag

SEQ ID NO: 406809 - RNA, 19 nt, Human
ugguggggggggugagagg

SEQ ID NO: 406810 - RNA, 23 nt, Human
ugugaauauggggcugggaggga

SEQ ID NO: 406811 - RNA, 20 nt, Human
ugugguggggggggugagag

SEQ ID NO: 406812 - RNA, 22 nt, Human
ugugguggggggggugagaggg

SEQ ID NO: 406813 - RNA, 27 nt, Human
uugcacacaacgcuucagucccacccc

SEQ ID NO: 406814 - RNA, 25 nt, Human
aaaaaaaauuccucccacauguuaa

SEQ ID NO: 406815 - RNA, 19 nt, Human
aaaaaaaccgguaaagccu

SEQ ID NO: 406816 - RNA, 24 nt, Human
aaaaaauaucccccaaaaccaaaa

SEQ ID NO: 406817 - RNA, 21 nt, Human
aaaaaccgguaaagccugaua

SEQ ID NO: 406818 - RNA, 20 nt, Human
aaaagcccuucaaacucaaa

SEQ ID NO: 406819 - RNA, 23 nt, Human
aaacaaauaaaaaauauccccca

SEQ ID NO: 406820 - RNA, 25 nt, Human
aaacagaacagaaugaaugaaacaa

SEQ ID NO: 406821 - RNA, 22 nt, Human
aaauaaaaaauaucccccaaaa

SEQ ID NO: 406822 - RNA, 18 nt, Human
aacuauaaaagcccuuca

SEQ ID NO: 406823 - RNA, 24 nt, Human
acaaaaacaccaucuuaaugccau

SEQ ID NO: 406824 - RNA, 21 nt, Human
acaaaacaagacauccaccuc

SEQ ID NO: 406825 - RNA, 24 nt, Human
acaaaacaagacauccaccucuaa

SEQ ID NO: 406826 - RNA, 22 nt, Human
acuggcauaaaaggucauuaaa

SEQ ID NO: 406827 - RNA, 21 nt, Human
acuguaacaucaacaugcauc

SEQ ID NO: 406828 - RNA, 18 nt, Human
agacuuaaaagaccaaca

SEQ ID NO: 406829 - RNA, 22 nt, Human
agaggaacacccaguagagaaa

SEQ ID NO: 406830 - RNA, 24 nt, Human
aggaacuuugacagaaaacgaugg

SEQ ID NO: 406831 - RNA, 21 nt, Human
aggaggaaaauacaacuauaa

SEQ ID NO: 406832 - RNA, 24 nt, Human
aggaggaaaauacaacuauaaaaa

SEQ ID NO: 406833 - RNA, 20 nt, Human
agguauugaacauugcacau

SEQ ID NO: 406834 - RNA, 24 nt, Human
auaaaaaauaucccccaaaaccaa

SEQ ID NO: 406835 - RNA, 24 nt, Human
augcaucacuaucauauuuggucc

SEQ ID NO: 406836 - RNA, 23 nt, Human
auuagagcaaaacagacuuaaaa

SEQ ID NO: 406837 - RNA, 21 nt, Human
caaaaacaccaucuuaaugcc

SEQ ID NO: 406838 - RNA, 24 nt, Human
caaaacaagacauccaccucuaau

SEQ ID NO: 406839 - RNA, 21 nt, Human
caaaauucccagguagaacac

SEQ ID NO: 406840 - RNA, 23 nt, Human
caacaugcaucacuaucauauuu

SEQ ID NO: 406841 - RNA, 18 nt, Human
caacuggcauaaaagguc

SEQ ID NO: 406842 - RNA, 25 nt, Human
caagaaguagaugaaaaauucauaa

SEQ ID NO: 406843 - RNA, 18 nt, Human
cacaaaacaagacaucca

SEQ ID NO: 406844 - RNA, 20 nt, Human
cacaacuggcauaaaagguc

SEQ ID NO: 406845 - RNA, 25 nt, Human
cacacagccaugaaaauggcuauuc

SEQ ID NO: 406846 - RNA, 21 nt, Human
cagacaauccaagugcugaaa

SEQ ID NO: 406847 - RNA, 30 nt, Human
cauauacauaugcauacacuaucuauaugg

SEQ ID NO: 406848 - RNA, 25 nt, Human
cauguuaacacugaaaaucuggcca

SEQ ID NO: 406849 - RNA, 22 nt, Human
ccaaaagaaaagcuuuguacau

SEQ ID NO: 406850 - RNA, 18 nt, Human
ccacauguuaacacugaa

SEQ ID NO: 406851 - RNA, 23 nt, Human
ccacuugagguaugcucgcuuaa

SEQ ID NO: 406852 - RNA, 22 nt, Human
cccaaaaccaaaaaauaaaaac

SEQ ID NO: 406853 - RNA, 19 nt, Human
cccauccuagguguaacac

SEQ ID NO: 406854 - RNA, 23 nt, Human
cccccaaaaccaaaaaauaaaaa

SEQ ID NO: 406855 - RNA, 24 nt, Human
ccuccuccuccuccuccuucuucu

SEQ ID NO: 406856 - RNA, 18 nt, Human
ccuccuucuucuucuucc

SEQ ID NO: 406857 - RNA, 21 nt, Human
ccuucuucuucuuccucuuuu

SEQ ID NO: 406858 - RNA, 19 nt, Human
cggcccccuccuccuccuc

SEQ ID NO: 406859 - RNA, 18 nt, Human
cuacugggugagaauacc

SEQ ID NO: 406860 - RNA, 20 nt, Human
cucauaaacuucugaguuga

SEQ ID NO: 406861 - RNA, 20 nt, Human
cuccuccuccuccuccuccu

SEQ ID NO: 406862 - RNA, 20 nt, Human
cuccuccuccuccuccuccu

SEQ ID NO: 406863 - RNA, 20 nt, Human
cuccuccuccuccuccuccu

SEQ ID NO: 406864 - RNA, 20 nt, Human
cuccuccuucuucuucuucc

SEQ ID NO: 406865 - RNA, 29 nt, Human
cuccuucuucuucuuccucuuuuucuucu

SEQ ID NO: 406866 - RNA, 23 nt, Human
cuugaagccuuuugcaacugucc

SEQ ID NO: 406867 - RNA, 20 nt, Human
cuuuuucuucuucuuuuucu

SEQ ID NO: 406868 - RNA, 18 nt, Human
gaagcaucuaagcaacgu

SEQ ID NO: 406869 - RNA, 20 nt, Human
gaauagaccacuguucaaga

SEQ ID NO: 406870 - RNA, 22 nt, Human
gaauaucauuucuguuuuuagu

SEQ ID NO: 406871 - RNA, 28 nt, Human
gacagaaaacgauggcaaaagggacccc

SEQ ID NO: 406872 - RNA, 20 nt, Human
gccuacugggugagaauacc

SEQ ID NO: 406873 - RNA, 21 nt, Human
ggaacacccaguagagaaaca

SEQ ID NO: 406874 - RNA, 20 nt, Human
ggcuaguuucacuugcaaga

SEQ ID NO: 406875 - RNA, 19 nt, Human
guagaacaaaaacaccauc

SEQ ID NO: 406876 - RNA, 21 nt, Human
guuauuuuauucuuuugaaaa

SEQ ID NO: 406877 - RNA, 21 nt, Human
uaaaaaauaucccccaaaacc

SEQ ID NO: 406878 - RNA, 23 nt, Human
uaaaaaauaucccccaaaaccaa

SEQ ID NO: 406879 - RNA, 22 nt, Human
uaaaaagagauaaauuuucuuu

SEQ ID NO: 406880 - RNA, 21 nt, Human
uaaaagaccaacaugcagaga

SEQ ID NO: 406881 - RNA, 24 nt, Human
uaacacaagaaaaggaacuuuuca

SEQ ID NO: 406882 - RNA, 24 nt, Human
uaauucaugacacaaaacaagaca

SEQ ID NO: 406883 - RNA, 22 nt, Human
uacacaacacacagccaugaaa

SEQ ID NO: 406884 - RNA, 21 nt, Human
uacagcugaagcaaucauggc

SEQ ID NO: 406885 - RNA, 18 nt, Human
uaccacuauacuguugag

SEQ ID NO: 406886 - RNA, 18 nt, Human
uacugggugagaauacca

SEQ ID NO: 406887 - RNA, 21 nt, Human
uacugggugagaauaccauuu

SEQ ID NO: 406888 - RNA, 25 nt, Human
uagaacaaaaacaccaucuuaaugc

SEQ ID NO: 406889 - RNA, 22 nt, Human
uagaacacaguugucagugcca

SEQ ID NO: 406890 - RNA, 21 nt, Human
uagagcaaaacagacuuaaaa

SEQ ID NO: 406891 - RNA, 25 nt, Human
uagagcaaaacagacuuaaaagacc

SEQ ID NO: 406892 - RNA, 18 nt, Human
uagcuccucuuuucuacu

SEQ ID NO: 406893 - RNA, 24 nt, Human
uauaacuacguuuuacagauuauu

SEQ ID NO: 406894 - RNA, 27 nt, Human
uauacauaugcauacacuaucuauaug

SEQ ID NO: 406895 - RNA, 20 nt, Human
uaucaugccuauucacauca

SEQ ID NO: 406896 - RNA, 22 nt, Human
uauugaaaaauauguagaacaa

SEQ ID NO: 406897 - RNA, 21 nt, Human
ucaaggccacuaaaauacuga

SEQ ID NO: 406898 - RNA, 20 nt, Human
uccuccuccuccuccuccuu

SEQ ID NO: 406899 - RNA, 20 nt, Human
ucucggcccccuccuccucc

SEQ ID NO: 406900 - RNA, 19 nt, Human
ucuuccucuuuuucuucuu

SEQ ID NO: 406901 - RNA, 21 nt, Human
ucuucucggcccccuccuccu

SEQ ID NO: 406902 - RNA, 19 nt, Human
ucuuuuucuucuucuuuuu

SEQ ID NO: 406903 - RNA, 23 nt, Human
ugaaaaucuggccauuuucuagg

SEQ ID NO: 406904 - RNA, 23 nt, Human
ugaaacaaauaaaaaauaucccc

SEQ ID NO: 406905 - RNA, 22 nt, Human
ugagaauaccauuuaaaaacau

SEQ ID NO: 406906 - RNA, 18 nt, Human
ugagaauaucauuucugu

SEQ ID NO: 406907 - RNA, 19 nt, Human
ugagguauugaacauugca

SEQ ID NO: 406908 - RNA, 21 nt, Human
ugaucugaagacauucuuugu

SEQ ID NO: 406909 - RNA, 23 nt, Human
ugcaucacuaucauauuuggucc

SEQ ID NO: 406910 - RNA, 21 nt, Human
ugcgaagggugagcugcucuu

SEQ ID NO: 406911 - RNA, 22 nt, Human
uguacaacauacuauauacaua

SEQ ID NO: 406912 - RNA, 25 nt, Human
uguacauauacauaugcauacacuu

SEQ ID NO: 406913 - RNA, 24 nt, Human
uguagaacaaaaacaccaucuuaa

SEQ ID NO: 406914 - RNA, 22 nt, Human
ugucaagggcuauuuuaccucu

SEQ ID NO: 406915 - RNA, 18 nt, Human
uguuacacaacacacagc

SEQ ID NO: 406916 - RNA, 22 nt, Human
uuacacaacacacagccaugaa

SEQ ID NO: 406917 - RNA, 24 nt, Human
uucaagaaguagaugaaaaauuca

SEQ ID NO: 406918 - RNA, 27 nt, Human
uucuucuuccucuuuuucuucuucuuu

SEQ ID NO: 406919 - RNA, 23 nt, Human
uucuuucauugcaauacugauug

SEQ ID NO: 406920 - RNA, 18 nt, Human
uugaagcaucuaagcaac

SEQ ID NO: 406921 - RNA, 24 nt, Human
uugaagccuuuugcaacuguccuu

SEQ ID NO: 406922 - RNA, 18 nt, Human
uugcauaaugcccauccu

SEQ ID NO: 406923 - RNA, 21 nt, Human
uuuaaaauaauucuauggcuc

SEQ ID NO: 406924 - RNA, 18 nt, Human
uuugcauaaugcccaucc

SEQ ID NO: 406925 - RNA, 24 nt, Human
uuuuuuuuuuuuuuuaaguagaaa

SEQ ID NO: 406926 - RNA, 19 nt, Human
uuuuuuuuuuuuuuuuuaa

SEQ ID NO: 406927 - RNA, 24 nt, Human
cugaucugcucugucuucacauau

SEQ ID NO: 406928 - RNA, 21 nt, Human
ugacugcacagauucucaauu

SEQ ID NO: 406929 - RNA, 24 nt, Human
uucucaauuucuuugucauccauu

SEQ ID NO: 406930 - RNA, 18 nt, Human
aaaagaaacaacugaugu

SEQ ID NO: 406931 - RNA, 20 nt, Human
aaaauaaaaagaaacaacug

SEQ ID NO: 406932 - RNA, 20 nt, Human
aaacagagagaagacaguga

SEQ ID NO: 406933 - RNA, 19 nt, Human
aacauugucaucucaaccu

SEQ ID NO: 406934 - RNA, 23 nt, Human
aagccaucuucaauaggagccaa

SEQ ID NO: 406935 - RNA, 18 nt, Human
aauccuccuacaaacuuu

SEQ ID NO: 406936 - RNA, 20 nt, Human
agaaaauuauauuacuucuc

SEQ ID NO: 406937 - RNA, 21 nt, Human
agaaaggagaauuaaaaaaaa

SEQ ID NO: 406938 - RNA, 18 nt, Human
agagagaagacagugaag

SEQ ID NO: 406939 - RNA, 21 nt, Human
agcgugacaguaaaacuuauc

SEQ ID NO: 406940 - RNA, 21 nt, Human
augaucaggucaucacccugc

SEQ ID NO: 406941 - RNA, 19 nt, Human
auguacauacauaagcaug

SEQ ID NO: 406942 - RNA, 26 nt, Human
auuaaaaauccuccuacaaacuuuuu

SEQ ID NO: 406943 - RNA, 25 nt, Human
caguaauaaggaaagucuuaacaau

SEQ ID NO: 406944 - RNA, 20 nt, Human
caucacccugcugccaaguc

SEQ ID NO: 406945 - RNA, 21 nt, Human
caucucaaccuugcuuuuugc

SEQ ID NO: 406946 - RNA, 22 nt, Human
caucuuguuuucuuagaagcca

SEQ ID NO: 406947 - RNA, 22 nt, Human
ccuccuacaaacuuuuuuccua

SEQ ID NO: 406948 - RNA, 22 nt, Human
gagaaaggagaauuaaaaaaaa

SEQ ID NO: 406949 - RNA, 19 nt, Human
gagaaaucuuuaucuagcc

SEQ ID NO: 406950 - RNA, 20 nt, Human
gcccagaaaaauauuuagaa

SEQ ID NO: 406951 - RNA, 22 nt, Human
guacauacauaagcaugcccag

SEQ ID NO: 406952 - RNA, 23 nt, Human
uaaaaagaaacaacugauguaca

SEQ ID NO: 406953 - RNA, 22 nt, Human
uaaguaauguguacaaaagaaa

SEQ ID NO: 406954 - RNA, 23 nt, Human
uaauguguacaaaagaaaccaca

SEQ ID NO: 406955 - RNA, 24 nt, Human
uacauacauaagcaugcccagaaa

SEQ ID NO: 406956 - RNA, 19 nt, Human
uaguuaaauauaacaguga

SEQ ID NO: 406957 - RNA, 22 nt, Human
uauaccuuucaaucagaaauuu

SEQ ID NO: 406958 - RNA, 21 nt, Human
uaucuagccauaagacaaaua

SEQ ID NO: 406959 - RNA, 18 nt, Human
uccaagugacuaucucug

SEQ ID NO: 406960 - RNA, 18 nt, Human
ucuccaagugacuaucuc

SEQ ID NO: 406961 - RNA, 21 nt, Human
ugacuggaaagaaaguuuaag

SEQ ID NO: 406962 - RNA, 23 nt, Human
ugagcacauuaauuuuuuacauu

SEQ ID NO: 406963 - RNA, 26 nt, Human
ugaucaggucaucacccugcugccaa

SEQ ID NO: 406964 - RNA, 21 nt, Human
ugccaaguccuucuguguccu

SEQ ID NO: 406965 - RNA, 23 nt, Human
ugggaaaaauacuuuguaagaaa

SEQ ID NO: 406966 - RNA, 25 nt, Human
uuaguaaugcauuuuaauguuuccu

SEQ ID NO: 406967 - RNA, 21 nt, Human
uuuuaagguauuugaaauacu

SEQ ID NO: 406968 - RNA, 24 nt, Human
aaacaggacgcagaaccuucagaa

SEQ ID NO: 406969 - RNA, 18 nt, Human
aaagaagccucccacucc

SEQ ID NO: 406970 - RNA, 21 nt, Human
aaagacuuuucugcaugaaug

SEQ ID NO: 406971 - RNA, 19 nt, Human
aaagcgcugggauuacagg

SEQ ID NO: 406972 - RNA, 24 nt, Human
aaagcgcugggauuacaggcguga

SEQ ID NO: 406973 - RNA, 23 nt, Human
aaagugccauuuuuaacucaaaa

SEQ ID NO: 406974 - RNA, 20 nt, Human
aaaucccuggaaagaagccu

SEQ ID NO: 406975 - RNA, 19 nt, Human
aagcgcugggauuacaggc

SEQ ID NO: 406976 - RNA, 26 nt, Human
aagcgcugggauuacaggcgugagcc

SEQ ID NO: 406977 - RNA, 19 nt, Human
aagcugcccuuccaaagcc

SEQ ID NO: 406978 - RNA, 21 nt, Human
aagucuggaggcugucacgcc

SEQ ID NO: 406979 - RNA, 22 nt, Human
acaaaacaggacgcagaaccuu

SEQ ID NO: 406980 - RNA, 23 nt, Human
acacaaaucccuggaaagaagcc

SEQ ID NO: 406981 - RNA, 22 nt, Human
acaggacgcagaaccuucagaa

SEQ ID NO: 406982 - RNA, 22 nt, Human
accaagcaccuaugaagaugcu

SEQ ID NO: 406983 - RNA, 21 nt, Human
accaaggaagccucauuccug

SEQ ID NO: 406984 - RNA, 21 nt, Human
acccugagcaguauggccugg

SEQ ID NO: 406985 - RNA, 18 nt, Human
accuugugauccacccac

SEQ ID NO: 406986 - RNA, 25 nt, Human
acucuauugcccaggcuggagugca

SEQ ID NO: 406987 - RNA, 24 nt, Human
agaacggagacacaaaucccugga

SEQ ID NO: 406988 - RNA, 24 nt, Human
agacagaagagucaggacuggaug

SEQ ID NO: 406989 - RNA, 24 nt, Human
agacaggucccagauuuguggcuc

SEQ ID NO: 406990 - RNA, 25 nt, Human
agacaggugaaaagacuuuucugca

SEQ ID NO: 406991 - RNA, 21 nt, Human
agcacagaccuggaacucaca

SEQ ID NO: 406992 - RNA, 21 nt, Human
agcagacuuguuuagggccug

SEQ ID NO: 406993 - RNA, 22 nt, Human
agccaccgcgcccagccaggaa

SEQ ID NO: 406994 - RNA, 18 nt, Human
agcgcugggauuacaggc

SEQ ID NO: 406995 - RNA, 19 nt, Human
aggauucggcgaccuuggc

SEQ ID NO: 406996 - RNA, 20 nt, Human
aggcaugcaccaccacgccc

SEQ ID NO: 406997 - RNA, 25 nt, Human
aggcuggagugcaguggugcaaucu

SEQ ID NO: 406998 - RNA, 25 nt, Human
aggcuggagugcaguggugugaucu

SEQ ID NO: 406999 - RNA, 22 nt, Human
agggauuacaggcacaugccau

SEQ ID NO: 407000 - RNA, 23 nt, Human
aguagcagggauuacaggcacau

SEQ ID NO: 407001 - RNA, 21 nt, Human
aguagcugggauuacaggcau

SEQ ID NO: 407002 - RNA, 24 nt, Human
agucuugcucuguccccaggcugg

SEQ ID NO: 407003 - RNA, 28 nt, Human
agugagaaagcagcauaugcagaaggga

SEQ ID NO: 407004 - RNA, 21 nt, Human
agugcaguggugcaaucucag

SEQ ID NO: 407005 - RNA, 19 nt, Human
agugcaguggugugaucuc

SEQ ID NO: 407006 - RNA, 20 nt, Human
agugcaguggugugaucucg

SEQ ID NO: 407007 - RNA, 23 nt, Human
agugcaguggugugaucucggcu

SEQ ID NO: 407008 - RNA, 24 nt, Human
agugcaguggugugaucucggcuc

SEQ ID NO: 407009 - RNA, 20 nt, Human
auaggacaaagcugcccuuc

SEQ ID NO: 407010 - RNA, 21 nt, Human
augaugcugagugagaaagca

SEQ ID NO: 407011 - RNA, 24 nt, Human
augggguuucaccaucuuggccag

SEQ ID NO: 407012 - RNA, 18 nt, Human
auucuccuuccucagccu

SEQ ID NO: 407013 - RNA, 28 nt, Human
caaacuccugaccuugugauccacccac

SEQ ID NO: 407014 - RNA, 24 nt, Human
caaagcgcugggauuacaggcgug

SEQ ID NO: 407015 - RNA, 22 nt, Human
caagcaacucucuugccucagc

SEQ ID NO: 407016 - RNA, 22 nt, Human
caagugauucuccuuccucagc

SEQ ID NO: 407017 - RNA, 23 nt, Human
cacagcacuugguagguagugcu

SEQ ID NO: 407018 - RNA, 22 nt, Human
caccaccacgcccagcuaauuu

SEQ ID NO: 407019 - RNA, 24 nt, Human
caccacgcccagcuaauuuuugua

SEQ ID NO: 407020 - RNA, 19 nt, Human
caccacgcccuuugguugc

SEQ ID NO: 407021 - RNA, 24 nt, Human
caccaucuuggccaggcuagucuc

SEQ ID NO: 407022 - RNA, 24 nt, Human
cacucuauugcccaggcuggagug

SEQ ID NO: 407023 - RNA, 23 nt, Human
cacugcaaucuccgccuccuggg

SEQ ID NO: 407024 - RNA, 23 nt, Human
cagaaccuucagaacggagacac

SEQ ID NO: 407025 - RNA, 21 nt, Human
cagaacggagacacaaauccc

SEQ ID NO: 407026 - RNA, 19 nt, Human
cagcagagagguguggagg

SEQ ID NO: 407027 - RNA, 20 nt, Human
cagccuccugaguagcaggg

SEQ ID NO: 407028 - RNA, 21 nt, Human
cagcugcauucacccugagca

SEQ ID NO: 407029 - RNA, 23 nt, Human
cauaaggccucaucucagacccc

SEQ ID NO: 407030 - RNA, 19 nt, Human
cauaugcagaagggaacau

SEQ ID NO: 407031 - RNA, 23 nt, Human
caugcaccaccacgcccagcuaa

SEQ ID NO: 407032 - RNA, 22 nt, Human
ccaaagcgcugggauuacaggc

SEQ ID NO: 407033 - RNA, 23 nt, Human
ccaaagcgcugggauuacaggcg

SEQ ID NO: 407034 - RNA, 24 nt, Human
ccaaagcgcugggauuacaggcgu

SEQ ID NO: 407035 - RNA, 19 nt, Human
ccacaucggccucccaaag

SEQ ID NO: 407036 - RNA, 18 nt, Human
ccauaaggccucaucuca

SEQ ID NO: 407037 - RNA, 24 nt, Human
cccaagacaguugggaaacaccac

SEQ ID NO: 407038 - RNA, 19 nt, Human
cccacaucggccucccaaa

SEQ ID NO: 407039 - RNA, 19 nt, Human
cccaggcuggagugcagug

SEQ ID NO: 407040 - RNA, 22 nt, Human
cccaggcuggagugcaguggug

SEQ ID NO: 407041 - RNA, 19 nt, Human
ccccaggcuggagugcagu

SEQ ID NO: 407042 - RNA, 24 nt, Human
ccccauuuuauagauggcacugag

SEQ ID NO: 407043 - RNA, 21 nt, Human
ccccucugggccauaaggccu

SEQ ID NO: 407044 - RNA, 19 nt, Human
ccccugcagcugugggucu

SEQ ID NO: 407045 - RNA, 20 nt, Human
cccggguucaagugauucuc

SEQ ID NO: 407046 - RNA, 23 nt, Human
cccggguucaagugauucuccuc

SEQ ID NO: 407047 - RNA, 23 nt, Human
cccuaguagcugggauuacaggc

SEQ ID NO: 407048 - RNA, 18 nt, Human
cccuuugguugcuuagca

SEQ ID NO: 407049 - RNA, 26 nt, Human
ccgccuccuggguucaagcaacucuu

SEQ ID NO: 407050 - RNA, 22 nt, Human
ccggguucaagugauucuccuu

SEQ ID NO: 407051 - RNA, 23 nt, Human
ccuaguagcugggauuacaggca

SEQ ID NO: 407052 - RNA, 24 nt, Human
ccuaguagcugggauuacaggcau

SEQ ID NO: 407053 - RNA, 20 nt, Human
ccucaagagacagaagaguc

SEQ ID NO: 407054 - RNA, 20 nt, Human
ccuccugaguagcagggauu

SEQ ID NO: 407055 - RNA, 22 nt, Human
ccuccuggguucaagcaacucu

SEQ ID NO: 407056 - RNA, 22 nt, Human
ccugaccuugugauccacccac

SEQ ID NO: 407057 - RNA, 19 nt, Human
ccugaguagcagggauuac

SEQ ID NO: 407058 - RNA, 23 nt, Human
ccugaguagcagggauuacaggc

SEQ ID NO: 407059 - RNA, 24 nt, Human
ccugaguagcagggauuacaggca

SEQ ID NO: 407060 - RNA, 20 nt, Human
ccuggguucaagcaacucuc

SEQ ID NO: 407061 - RNA, 22 nt, Human
ccuguuugaaacuagccuagga

SEQ ID NO: 407062 - RNA, 18 nt, Human
ccuugguuagacuuccug

SEQ ID NO: 407063 - RNA, 18 nt, Human
cgagggagaagguuccca

SEQ ID NO: 407064 - RNA, 22 nt, Human
cgcugcccggguucaagugauu

SEQ ID NO: 407065 - RNA, 24 nt, Human
cgcugggauuacaggcgugagcca

SEQ ID NO: 407066 - RNA, 19 nt, Human
cuacuguuuucuaccucug

SEQ ID NO: 407067 - RNA, 22 nt, Human
cuaguagcugggauuacaggca

SEQ ID NO: 407068 - RNA, 19 nt, Human
cucaagagacagaagaguc

SEQ ID NO: 407069 - RNA, 23 nt, Human
cucaagagacagaagagucagga

SEQ ID NO: 407070 - RNA, 24 nt, Human
cucaagagacagaagagucaggac

SEQ ID NO: 407071 - RNA, 20 nt, Human
cucacucuauugcccaggcc

SEQ ID NO: 407072 - RNA, 24 nt, Human
cucacugcaaccuccgcugcccgg

SEQ ID NO: 407073 - RNA, 24 nt, Human
cucacugcaaucuccgccuccugg

SEQ ID NO: 407074 - RNA, 24 nt, Human
cucagccucccuaguagcugggau

SEQ ID NO: 407075 - RNA, 20 nt, Human
cuccccagaugagaucuggc

SEQ ID NO: 407076 - RNA, 18 nt, Human
cuccugaccuugugaucc

SEQ ID NO: 407077 - RNA, 20 nt, Human
cuccuggaagccuuuucaua

SEQ ID NO: 407078 - RNA, 18 nt, Human
cugacuggagagucucua

SEQ ID NO: 407079 - RNA, 18 nt, Human
cugaucuagguagauuag

SEQ ID NO: 407080 - RNA, 24 nt, Human
cugcaaccuccgcugcccggguuc

SEQ ID NO: 407081 - RNA, 21 nt, Human
cugcccggguucaagugauuc

SEQ ID NO: 407082 - RNA, 24 nt, Human
cugcccggguucaagugauucucc

SEQ ID NO: 407083 - RNA, 21 nt, Human
cugccugguauucugcuacau

SEQ ID NO: 407084 - RNA, 18 nt, Human
cugcggcguaccuggagg

SEQ ID NO: 407085 - RNA, 20 nt, Human
cugcugccacauggcagcug

SEQ ID NO: 407086 - RNA, 23 nt, Human
cuggcagcagagagguguggagg

SEQ ID NO: 407087 - RNA, 21 nt, Human
cuggccagagaccagcugcau

SEQ ID NO: 407088 - RNA, 19 nt, Human
cugggccuaagggcugggc

SEQ ID NO: 407089 - RNA, 21 nt, Human
cugggggugggugaacggggc

SEQ ID NO: 407090 - RNA, 20 nt, Human
cugugaggcccgccuaacuc

SEQ ID NO: 407091 - RNA, 21 nt, Human
cugugcugagaauauucuagu

SEQ ID NO: 407092 - RNA, 24 nt, Human
cuugccucagccucccuaguagcu

SEQ ID NO: 407093 - RNA, 24 nt, Human
cuugcucuguccccaggcuggagu

SEQ ID NO: 407094 - RNA, 21 nt, Human
gaaaacuuucuacccucuagg

SEQ ID NO: 407095 - RNA, 18 nt, Human
gaauauaacuucaaaacc

SEQ ID NO: 407096 - RNA, 19 nt, Human
gacaaaacaggacgcagaa

SEQ ID NO: 407097 - RNA, 20 nt, Human
gacaaaacaggacgcagaac

SEQ ID NO: 407098 - RNA, 19 nt, Human
gaccagccacgcugaucua

SEQ ID NO: 407099 - RNA, 22 nt, Human
gaccuugugauccacccacauc

SEQ ID NO: 407100 - RNA, 24 nt, Human
gaccuugugauccacccacaucgg

SEQ ID NO: 407101 - RNA, 24 nt, Human
gaccuugugauccacccacaucgg

SEQ ID NO: 407102 - RNA, 19 nt, Human
gacgcagaaccuucagaac

SEQ ID NO: 407103 - RNA, 18 nt, Human
gagaugggguuucaccau

SEQ ID NO: 407104 - RNA, 24 nt, Human
gagaugggguuucaccaucuuggc

SEQ ID NO: 407105 - RNA, 19 nt, Human
gagggcuuaccuguggggg

SEQ ID NO: 407106 - RNA, 24 nt, Human
gaucacucuaguuuuaggguggaa

SEQ ID NO: 407107 - RNA, 18 nt, Human
gauuacaggcgugagcca

SEQ ID NO: 407108 - RNA, 20 nt, Human
gauuacaggcgugagccacc

SEQ ID NO: 407109 - RNA, 22 nt, Human
gauuacaggcgugagccaccgc

SEQ ID NO: 407110 - RNA, 21 nt, Human
gauucuccuuccucagccucc

SEQ ID NO: 407111 - RNA, 23 nt, Human
gcacugaaagucuauuuaaacca

SEQ ID NO: 407112 - RNA, 21 nt, Human
gcagagaugggguuucaccau

SEQ ID NO: 407113 - RNA, 20 nt, Human
gcagcuucuggagggagcug

SEQ ID NO: 407114 - RNA, 20 nt, Human
gcccagacuccagcuccacc

SEQ ID NO: 407115 - RNA, 20 nt, Human
gcccaggcuggagugcagug

SEQ ID NO: 407116 - RNA, 24 nt, Human
gcccaggcuggagugcaguggugu

SEQ ID NO: 407117 - RNA, 18 nt, Human
gcccggcuaauuuuugua

SEQ ID NO: 407118 - RNA, 22 nt, Human
gcccggcuaauuuuuguauuuu

SEQ ID NO: 407119 - RNA, 19 nt, Human
gcccggguucaagugauuc

SEQ ID NO: 407120 - RNA, 20 nt, Human
gcugagggcuuaccuguggg

SEQ ID NO: 407121 - RNA, 18 nt, Human
gcugggugaccugugagg

SEQ ID NO: 407122 - RNA, 18 nt, Human
gcugggugaccugugagg

SEQ ID NO: 407123 - RNA, 18 nt, Human
gcugucacgccgguccug

SEQ ID NO: 407124 - RNA, 19 nt, Human
ggaauaccaguagucucag

SEQ ID NO: 407125 - RNA, 22 nt, Human
ggacuggaugacucccauucau

SEQ ID NO: 407126 - RNA, 21 nt, Human
ggauuacaggcacaugccaug

SEQ ID NO: 407127 - RNA, 20 nt, Human
ggcagaaauguuggggucaa

SEQ ID NO: 407128 - RNA, 20 nt, Human
ggccagagcaccaggcacug

SEQ ID NO: 407129 - RNA, 22 nt, Human
ggcuggagugcaguggugugau

SEQ ID NO: 407130 - RNA, 18 nt, Human
ggcugggccaggggacag

SEQ ID NO: 407131 - RNA, 18 nt, Human
gggaaacaccacgcccuu

SEQ ID NO: 407132 - RNA, 22 nt, Human
gggagggaaggggcuuucuggg

SEQ ID NO: 407133 - RNA, 18 nt, Human
gggauuacaggcacaugc

SEQ ID NO: 407134 - RNA, 20 nt, Human
gggauuacaggcacaugcca

SEQ ID NO: 407135 - RNA, 18 nt, Human
gggguuucaccaucuugg

SEQ ID NO: 407136 - RNA, 22 nt, Human
gggguuucaccaucuuggccag

SEQ ID NO: 407137 - RNA, 18 nt, Human
guagcugggauuacaggc

SEQ ID NO: 407138 - RNA, 20 nt, Human
guagcugggauuacaggcau

SEQ ID NO: 407139 - RNA, 19 nt, Human
guauuuuuugcagagaugg

SEQ ID NO: 407140 - RNA, 24 nt, Human
gucuugcucuguccccaggcugga

SEQ ID NO: 407141 - RNA, 20 nt, Human
gugacucugggucuccauuu

SEQ ID NO: 407142 - RNA, 24 nt, Human
gugauccacccacaucggccuccc

SEQ ID NO: 407143 - RNA, 18 nt, Human
gugauucuccuuccucag

SEQ ID NO: 407144 - RNA, 20 nt, Human
gugauucuccuuccucagcc

SEQ ID NO: 407145 - RNA, 24 nt, Human
gugauucuccuuccucagccuccu

SEQ ID NO: 407146 - RNA, 19 nt, Human
gugcuggcagcagagaggu

SEQ ID NO: 407147 - RNA, 20 nt, Human
guggaagaugaggacuggga

SEQ ID NO: 407148 - RNA, 23 nt, Human
uaacagaauauaacuucaaaacc

SEQ ID NO: 407149 - RNA, 23 nt, Human
uaagcagguugaaagcugggccu

SEQ ID NO: 407150 - RNA, 23 nt, Human
uaagccugcggaagacugagaca

SEQ ID NO: 407151 - RNA, 21 nt, Human
uaauucacugcuugggaggga

SEQ ID NO: 407152 - RNA, 18 nt, Human
uaauuuccccuuuuucuc

SEQ ID NO: 407153 - RNA, 24 nt, Human
uaauuuuuguauuuuuugcagaga

SEQ ID NO: 407154 - RNA, 24 nt, Human
uacaggcaugcaccaccacgccca

SEQ ID NO: 407155 - RNA, 24 nt, Human
uacaggcgugagccaccgcgccca

SEQ ID NO: 407156 - RNA, 19 nt, Human
uacccuuuuugucccaagg

SEQ ID NO: 407157 - RNA, 22 nt, Human
uaggacuauaguuuuaaggcaa

SEQ ID NO: 407158 - RNA, 27 nt, Human
uaguagcugggauuacaggcaugcacc

SEQ ID NO: 407159 - RNA, 22 nt, Human
uauaggacaaagcugcccuucc

SEQ ID NO: 407160 - RNA, 19 nt, Human
uauugcccaggcuggagug

SEQ ID NO: 407161 - RNA, 23 nt, Human
ucaagucucgcagaguaaccagg

SEQ ID NO: 407162 - RNA, 24 nt, Human
ucacucuauugcccaggcuggagu

SEQ ID NO: 407163 - RNA, 19 nt, Human
ucacugcaaccuccgcugc

SEQ ID NO: 407164 - RNA, 21 nt, Human
ucacugcaaccuccgcugccc

SEQ ID NO: 407165 - RNA, 24 nt, Human
ucacugcaaccuccgcugcccggg

SEQ ID NO: 407166 - RNA, 20 nt, Human
ucacugcaaccuccgcuggg

SEQ ID NO: 407167 - RNA, 23 nt, Human
ucacugcaaccuccgcugggguc

SEQ ID NO: 407168 - RNA, 25 nt, Human
ucacugcaaccuccgcugggguccc

SEQ ID NO: 407169 - RNA, 26 nt, Human
ucacugcaaccuccgcugggguccuc

SEQ ID NO: 407170 - RNA, 23 nt, Human
ucacugcaaucuccgccuccugg

SEQ ID NO: 407171 - RNA, 24 nt, Human
ucacugcaaucuccgccuccuggg

SEQ ID NO: 407172 - RNA, 25 nt, Human
ucacugcaaucuccgccuccugggu

SEQ ID NO: 407173 - RNA, 27 nt, Human
ucacugcaaucuccgccuccuggguuc

SEQ ID NO: 407174 - RNA, 19 nt, Human
ucagaccaggaacugcuaa

SEQ ID NO: 407175 - RNA, 21 nt, Human
ucagcacucggucaguaccgu

SEQ ID NO: 407176 - RNA, 21 nt, Human
uccaccacuagcugugcgacc

SEQ ID NO: 407177 - RNA, 24 nt, Human
ucccaaagcgcugggauuacaggc

SEQ ID NO: 407178 - RNA, 21 nt, Human
ucccaaauuuuugaaucaagu

SEQ ID NO: 407179 - RNA, 19 nt, Human
ucccagauuuguggcucug

SEQ ID NO: 407180 - RNA, 23 nt, Human
uccccaggcuggagugcaguggu

SEQ ID NO: 407181 - RNA, 24 nt, Human
uccccaggcuggagugcaguggug

SEQ ID NO: 407182 - RNA, 24 nt, Human
ucccuaguagcugggauuacaggc

SEQ ID NO: 407183 - RNA, 20 nt, Human
ucccuggaaagaagccuccc

SEQ ID NO: 407184 - RNA, 24 nt, Human
uccgccuccuggguucaagcaacu

SEQ ID NO: 407185 - RNA, 24 nt, Human
uccugaguagcagggauuacaggc

SEQ ID NO: 407186 - RNA, 19 nt, Human
uccuggguucaagcaacuc

SEQ ID NO: 407187 - RNA, 21 nt, Human
uccuggguucaagcaacucuc

SEQ ID NO: 407188 - RNA, 24 nt, Human
uccuggguucaagcaacucucuug

SEQ ID NO: 407189 - RNA, 18 nt, Human
ucuaguagcuccugcugc

SEQ ID NO: 407190 - RNA, 24 nt, Human
ucuauugcccaggcuggagugcag

SEQ ID NO: 407191 - RNA, 23 nt, Human
ucucacucuauugcccaggcugg

SEQ ID NO: 407192 - RNA, 24 nt, Human
ucucacucuauugcccaggcugga

SEQ ID NO: 407193 - RNA, 26 nt, Human
ucucacucuauugcccaggcuggagu

SEQ ID NO: 407194 - RNA, 27 nt, Human
ucucacucuauugcccaggcuggagug

SEQ ID NO: 407195 - RNA, 19 nt, Human
ucucgcagaguaaccaggc

SEQ ID NO: 407196 - RNA, 21 nt, Human
ucucugcuacaugaaucccaa

SEQ ID NO: 407197 - RNA, 23 nt, Human
ucugucaggaacacccucugccu

SEQ ID NO: 407198 - RNA, 23 nt, Human
ucuguccccaggcuggagugcag

SEQ ID NO: 407199 - RNA, 21 nt, Human
ucuucccucugucaggaacac

SEQ ID NO: 407200 - RNA, 21 nt, Human
ucuugcucuguccccaggcug

SEQ ID NO: 407201 - RNA, 21 nt, Human
ucuugcucuguccccaggcug

SEQ ID NO: 407202 - RNA, 22 nt, Human
ucuugcucuguccccaggcugg

SEQ ID NO: 407203 - RNA, 23 nt, Human
ucuugcucuguccccaggcugga

SEQ ID NO: 407204 - RNA, 22 nt, Human
ugaaaagacuuuucugcaugaa

SEQ ID NO: 407205 - RNA, 22 nt, Human
ugaaacggagucucacucuauu

SEQ ID NO: 407206 - RNA, 21 nt, Human
ugaaagagaagaagguaagug

SEQ ID NO: 407207 - RNA, 24 nt, Human
ugaaugugcuggcagcagagaggu

SEQ ID NO: 407208 - RNA, 25 nt, Human
ugaaugugcuggcagcagagaggug

SEQ ID NO: 407209 - RNA, 19 nt, Human
ugacaaaacaggacgcaga

SEQ ID NO: 407210 - RNA, 18 nt, Human
ugagaaagcagcauaugc

SEQ ID NO: 407211 - RNA, 27 nt, Human
ugagaaagcagcauaugcagaagggaa

SEQ ID NO: 407212 - RNA, 23 nt, Human
ugagacaagagucuugcucuguc

SEQ ID NO: 407213 - RNA, 25 nt, Human
ugagagggcagcagcagacuuguuu

SEQ ID NO: 407214 - RNA, 19 nt, Human
ugagauucuuguuccuugg

SEQ ID NO: 407215 - RNA, 21 nt, Human
ugaggacugggagaggguuca

SEQ ID NO: 407216 - RNA, 22 nt, Human
ugaguaagcagguugaaagcug

SEQ ID NO: 407217 - RNA, 23 nt, Human
ugaguagcagggauuacaggcac

SEQ ID NO: 407218 - RNA, 21 nt, Human
ugaugguggggugagggugcg

SEQ ID NO: 407219 - RNA, 20 nt, Human
ugauuccuucccaaaauccc

SEQ ID NO: 407220 - RNA, 22 nt, Human
ugcaguggugcaaucucagcuc

SEQ ID NO: 407221 - RNA, 18 nt, Human
ugcccaggcuggagugca

SEQ ID NO: 407222 - RNA, 21 nt, Human
ugcccaggcuggagugcagug

SEQ ID NO: 407223 - RNA, 24 nt, Human
ugcccaggcuggagugcaguggug

SEQ ID NO: 407224 - RNA, 25 nt, Human
ugcccggcuaauuuuuguauuuuuu

SEQ ID NO: 407225 - RNA, 19 nt, Human
ugcccggguucaagugauu

SEQ ID NO: 407226 - RNA, 24 nt, Human
ugccucagccucccuaguagcugg

SEQ ID NO: 407227 - RNA, 25 nt, Human
ugccugucacaauucaguuugggcc

SEQ ID NO: 407228 - RNA, 21 nt, Human
uggaagaugaggacugggaga

SEQ ID NO: 407229 - RNA, 24 nt, Human
uggaagccuuuucauagcugaggg

SEQ ID NO: 407230 - RNA, 18 nt, Human
uggagugcaguggugcaa

SEQ ID NO: 407231 - RNA, 23 nt, Human
uggagugcaguggugcaaucuca

SEQ ID NO: 407232 - RNA, 24 nt, Human
uggagugcaguggugcaaucucag

SEQ ID NO: 407233 - RNA, 19 nt, Human
uggagugcaguggugugau

SEQ ID NO: 407234 - RNA, 23 nt, Human
uggagugcaguggugugaucucg

SEQ ID NO: 407235 - RNA, 24 nt, Human
uggagugcaguggugugaucucgg

SEQ ID NO: 407236 - RNA, 24 nt, Human
uggccaggcuagucucaaacuccu

SEQ ID NO: 407237 - RNA, 24 nt, Human
uggcgcagguaagccugcggaaga

SEQ ID NO: 407238 - RNA, 25 nt, Human
ugggaaaacuuucuacccucuaggg

SEQ ID NO: 407239 - RNA, 23 nt, Human
ugggaagaggucuuggucaucag

SEQ ID NO: 407240 - RNA, 21 nt, Human
ugggauuacaggcaugcacca

SEQ ID NO: 407241 - RNA, 24 nt, Human
ugggauuacaggcaugcaccacca

SEQ ID NO: 407242 - RNA, 18 nt, Human
ugggauuacaggcgugag

SEQ ID NO: 407243 - RNA, 19 nt, Human
ugggauuacaggcgugagc

SEQ ID NO: 407244 - RNA, 21 nt, Human
ugggauuacaggcgugagcca

SEQ ID NO: 407245 - RNA, 22 nt, Human
ugggauuacaggcgugagccac

SEQ ID NO: 407246 - RNA, 23 nt, Human
ugggauuacaggcgugagccacc

SEQ ID NO: 407247 - RNA, 24 nt, Human
ugggauuacaggcgugagccaccg

SEQ ID NO: 407248 - RNA, 18 nt, Human
uggggcagggagagggcc

SEQ ID NO: 407249 - RNA, 23 nt, Human
uggggcagggagagggcccuaag

SEQ ID NO: 407250 - RNA, 19 nt, Human
ugggggugggugaacgggg

SEQ ID NO: 407251 - RNA, 24 nt, Human
ugggguuucaccaucuuggccagg

SEQ ID NO: 407252 - RNA, 24 nt, Human
uggugcaaucucagcucacugcaa

SEQ ID NO: 407253 - RNA, 18 nt, Human
ugucacgccgguccuggc

SEQ ID NO: 407254 - RNA, 19 nt, Human
ugugcuggcagcagagagg

SEQ ID NO: 407255 - RNA, 20 nt, Human
ugugcuggcagcagagaggu

SEQ ID NO: 407256 - RNA, 22 nt, Human
ugugcuguacgagggagaaggu

SEQ ID NO: 407257 - RNA, 19 nt, Human
uuaaaaauaucugcaagca

SEQ ID NO: 407258 - RNA, 19 nt, Human
uuaaaaauaucugcaagca

SEQ ID NO: 407259 - RNA, 19 nt, Human
uucaaaaccgucuagggaa

SEQ ID NO: 407260 - RNA, 23 nt, Human
uucaagugauucuccuuccucag

SEQ ID NO: 407261 - RNA, 24 nt, Human
uucaagugauucuccuuccucagc

SEQ ID NO: 407262 - RNA, 25 nt, Human
uucacauuuuauuaaaccaaauauu

SEQ ID NO: 407263 - RNA, 25 nt, Human
uucacauuuuauuaaaccaaauauu

SEQ ID NO: 407264 - RNA, 23 nt, Human
uucaggaccucagacuccccaga

SEQ ID NO: 407265 - RNA, 20 nt, Human
uuccaugacauucuggaggc

SEQ ID NO: 407266 - RNA, 20 nt, Human
uuccucagccuccugaguag

SEQ ID NO: 407267 - RNA, 22 nt, Human
uuccuuggcaacaucuggaucu

SEQ ID NO: 407268 - RNA, 18 nt, Human
uuccuugguuagacuucc

SEQ ID NO: 407269 - RNA, 19 nt, Human
uuccuugguuagacuuccu

SEQ ID NO: 407270 - RNA, 22 nt, Human
uugaaagcugggccuaagggcu

SEQ ID NO: 407271 - RNA, 26 nt, Human
uugcagagaugggguuucaccaucuu

SEQ ID NO: 407272 - RNA, 19 nt, Human
uugcagcuucuggagggag

SEQ ID NO: 407273 - RNA, 23 nt, Human
uugcucuguccccaggcuggagu

SEQ ID NO: 407274 - RNA, 24 nt, Human
uugcucuguccccaggcuggagug

SEQ ID NO: 407275 - RNA, 18 nt, Human
uugggcagacuagacaag

SEQ ID NO: 407276 - RNA, 20 nt, Human
uuuacagucuagcucugucu

SEQ ID NO: 407277 - RNA, 24 nt, Human
uuuacagucuagcucugucucugc

SEQ ID NO: 407278 - RNA, 24 nt, Human
uuucaccaucuuggccaggcuagu

SEQ ID NO: 407279 - RNA, 20 nt, Human
uuucucaggauuccugcagc

SEQ ID NO: 407280 - RNA, 20 nt, Human
uuucugacuggagagucucu

SEQ ID NO: 407281 - RNA, 19 nt, Human
uuugcaagguucugucugc

SEQ ID NO: 407282 - RNA, 24 nt, Human
uuugcagagaugggguuucaccau

SEQ ID NO: 407283 - RNA, 24 nt, Human
uuuugggcagacuagacaagccuu

SEQ ID NO: 407284 - RNA, 20 nt, Human
uuuuuguauuuuuugcagag

SEQ ID NO: 407285 - RNA, 23 nt, Human
uuuuuguauuuuuugcagagaug

SEQ ID NO: 407286 - RNA, 24 nt, Human
uuuuuugcagagaugggguuucac

SEQ ID NO: 407287 - RNA, 20 nt, Human
uuuuuuuuuuugaaacggag

SEQ ID NO: 407288 - RNA, 22 nt, Human
uuuuuuuuuuugaaacggaguc

SEQ ID NO: 407289 - RNA, 26 nt, Human
uuuuuuuuuuuugaaacggagucuca

SEQ ID NO: 407290 - RNA, 22 nt, Human
uuuuuuuuuuuuuugaaacgga

SEQ ID NO: 407291 - RNA, 20 nt, Human
uuuuuuuuuuuuuuuuuugg

SEQ ID NO: 407292 - RNA, 22 nt, Human
aauacuuccuauccuccuuaca

SEQ ID NO: 407293 - RNA, 21 nt, Human
acaccauacaucucaaggaug

SEQ ID NO: 407294 - RNA, 22 nt, Human
acacuccacaucugagaugagc

SEQ ID NO: 407295 - RNA, 20 nt, Human
acagugaugcaggcucggca

SEQ ID NO: 407296 - RNA, 22 nt, Human
accuccuugagucucuccacua

SEQ ID NO: 407297 - RNA, 18 nt, Human
acuacucugggagauuuu

SEQ ID NO: 407298 - RNA, 22 nt, Human
acuuaguuuuacacagugaucu

SEQ ID NO: 407299 - RNA, 19 nt, Human
aggaaaaagaaacugagaa

SEQ ID NO: 407300 - RNA, 22 nt, Human
aguucuaaagaagggaaaccac

SEQ ID NO: 407301 - RNA, 21 nt, Human
auacaccauacaucucaagga

SEQ ID NO: 407302 - RNA, 20 nt, Human
caacacacugacauacccuc

SEQ ID NO: 407303 - RNA, 22 nt, Human
caagaaccuuuaguugauguug

SEQ ID NO: 407304 - RNA, 21 nt, Human
cacagagaucucucuucuucc

SEQ ID NO: 407305 - RNA, 23 nt, Human
cacagucuagacucaaggguucu

SEQ ID NO: 407306 - RNA, 19 nt, Human
cacuauguuggccagaugc

SEQ ID NO: 407307 - RNA, 23 nt, Human
cacuauguuggccagaugcugau

SEQ ID NO: 407308 - RNA, 24 nt, Human
cacuauguuggccagaugcugauu

SEQ ID NO: 407309 - RNA, 19 nt, Human
cagagaucucucuucuucc

SEQ ID NO: 407310 - RNA, 22 nt, Human
cagaugggacaggucaccuccu

SEQ ID NO: 407311 - RNA, 19 nt, Human
cagccucugcaaacuuauc

SEQ ID NO: 407312 - RNA, 24 nt, Human
cagcuuccagcuucucagcuuccu

SEQ ID NO: 407313 - RNA, 20 nt, Human
cagcuucucagcuuccuccu

SEQ ID NO: 407314 - RNA, 26 nt, Human
caggcagaugggacaggucaccuccu

SEQ ID NO: 407315 - RNA, 19 nt, Human
caggcucggcagaggcugu

SEQ ID NO: 407316 - RNA, 23 nt, Human
ccaccaaauaacucuaauagcua

SEQ ID NO: 407317 - RNA, 22 nt, Human
ccacugacuccgacacuccaca

SEQ ID NO: 407318 - RNA, 21 nt, Human
ccaggcagaugggacagguca

SEQ ID NO: 407319 - RNA, 23 nt, Human
ccaggcagaugggacaggucacc

SEQ ID NO: 407320 - RNA, 21 nt, Human
ccauugcacugcuucccuggc

SEQ ID NO: 407321 - RNA, 24 nt, Human
cccauacugcugugucuuuaggag

SEQ ID NO: 407322 - RNA, 21 nt, Human
ccuccucuuccuucuucagcc

SEQ ID NO: 407323 - RNA, 23 nt, Human
ccuccuuacagaagaguaggagu

SEQ ID NO: 407324 - RNA, 23 nt, Human
ccuccuugagucucuccacuaug

SEQ ID NO: 407325 - RNA, 19 nt, Human
cucaagccaaauacaccau

SEQ ID NO: 407326 - RNA, 19 nt, Human
cucaagccaaauacaccau

SEQ ID NO: 407327 - RNA, 21 nt, Human
cucugaaaauaugaaaaagag

SEQ ID NO: 407328 - RNA, 21 nt, Human
cucugaugucagcuuccagcu

SEQ ID NO: 407329 - RNA, 19 nt, Human
cuggcuucuucugguccua

SEQ ID NO: 407330 - RNA, 19 nt, Human
cuggcuucuucugguccua

SEQ ID NO: 407331 - RNA, 20 nt, Human
cugguccuaacuccugaggc

SEQ ID NO: 407332 - RNA, 20 nt, Human
cugguccuaacuccugaggc

SEQ ID NO: 407333 - RNA, 24 nt, Human
cuuacagaagaguaggaguuucuc

SEQ ID NO: 407334 - RNA, 25 nt, Human
cuucacucugaauacacauauugcu

SEQ ID NO: 407335 - RNA, 18 nt, Human
cuucugguccuaacuccu

SEQ ID NO: 407336 - RNA, 18 nt, Human
cuucugguccuaacuccu

SEQ ID NO: 407337 - RNA, 21 nt, Human
cuuuucuucuucuuccaaucu

SEQ ID NO: 407338 - RNA, 23 nt, Human
gagaaaguauucaucaugauuag

SEQ ID NO: 407339 - RNA, 18 nt, Human
gauaccacacacaggaca

SEQ ID NO: 407340 - RNA, 22 nt, Human
gauguuauacccauacugcugu

SEQ ID NO: 407341 - RNA, 22 nt, Human
gcacugcuucccuggcuucuuc

SEQ ID NO: 407342 - RNA, 19 nt, Human
gccacagucuagacucaag

SEQ ID NO: 407343 - RNA, 18 nt, Human
gguggcuaacaggcuuug

SEQ ID NO: 407344 - RNA, 25 nt, Human
gugaugcaggcucggcagaggcugu

SEQ ID NO: 407345 - RNA, 22 nt, Human
uaacucaagccaaauacaccau

SEQ ID NO: 407346 - RNA, 20 nt, Human
uaacuccugaggcucuccuc

SEQ ID NO: 407347 - RNA, 20 nt, Human
uaacuccugaggcucuccuc

SEQ ID NO: 407348 - RNA, 23 nt, Human
uacacagugaucuuaauaguuag

SEQ ID NO: 407349 - RNA, 18 nt, Human
uaccacacacaggacagc

SEQ ID NO: 407350 - RNA, 21 nt, Human
uaccacacacaggacagcugc

SEQ ID NO: 407351 - RNA, 23 nt, Human
uaggaugcuucuaagcugaucaa

SEQ ID NO: 407352 - RNA, 18 nt, Human
uaggugaagaaaugagaa

SEQ ID NO: 407353 - RNA, 21 nt, Human
uaggugaagaaaugagaaaau

SEQ ID NO: 407354 - RNA, 18 nt, Human
ucaagccaaauacaccau

SEQ ID NO: 407355 - RNA, 25 nt, Human
ucagccucuugaggacugccuggag

SEQ ID NO: 407356 - RNA, 22 nt, Human
ucaugggggugguuccuaugga

SEQ ID NO: 407357 - RNA, 18 nt, Human
uccaugaugaucacagag

SEQ ID NO: 407358 - RNA, 24 nt, Human
ucccaugcuggucacugccuccuu

SEQ ID NO: 407359 - RNA, 22 nt, Human
uccugaggcucuccucucucuu

SEQ ID NO: 407360 - RNA, 24 nt, Human
uccuugagucucuccacuauguug

SEQ ID NO: 407361 - RNA, 18 nt, Human
ucucucauaacucaagcc

SEQ ID NO: 407362 - RNA, 23 nt, Human
ucucugaaaauaugaaaaagagu

SEQ ID NO: 407363 - RNA, 22 nt, Human
ucugggcucaacuugaccuccu

SEQ ID NO: 407364 - RNA, 19 nt, Human
ugaacuagcucauccucag

SEQ ID NO: 407365 - RNA, 22 nt, Human
ugaauacuuccuauccuccuua

SEQ ID NO: 407366 - RNA, 21 nt, Human
ugaccaccaaauaacucuaau

SEQ ID NO: 407367 - RNA, 22 nt, Human
ugagcucucucaccaacugcuu

SEQ ID NO: 407368 - RNA, 23 nt, Human
ugagcucucucaccaacugcuuc

SEQ ID NO: 407369 - RNA, 18 nt, Human
ugcugugucuuuaggagg

SEQ ID NO: 407370 - RNA, 19 nt, Human
ugguggucauggggguggu

SEQ ID NO: 407371 - RNA, 18 nt, Human
uggugguggucauggggg

SEQ ID NO: 407372 - RNA, 23 nt, Human
ugucugggcucaacuugaccucc

SEQ ID NO: 407373 - RNA, 18 nt, Human
uuauacccauacugcugu

SEQ ID NO: 407374 - RNA, 22 nt, Human
uucaggaaaaagaaacugagaa

SEQ ID NO: 407375 - RNA, 23 nt, Human
uucaggaaaaagaaacugagaaa

SEQ ID NO: 407376 - RNA, 18 nt, Human
uucccuggcuucuucugg

SEQ ID NO: 407377 - RNA, 18 nt, Human
uucccuggcuucuucugg

SEQ ID NO: 407378 - RNA, 22 nt, Human
uuccuccucuuccuucuucagc

SEQ ID NO: 407379 - RNA, 19 nt, Human
uucuucugguccuaacucc

SEQ ID NO: 407380 - RNA, 19 nt, Human
uucuucugguccuaacucc

SEQ ID NO: 407381 - RNA, 23 nt, Human
uugaauacuuccuauccuccuua

SEQ ID NO: 407382 - RNA, 24 nt, Human
uugagcucaaauacucuggacaua

SEQ ID NO: 407383 - RNA, 18 nt, Human
uuuaguugauguuggugg

SEQ ID NO: 407384 - RNA, 20 nt, Human
uuuuccucuccuugauuccu

SEQ ID NO: 407385 - RNA, 19 nt, Human
aaaauacagcagaugagau

SEQ ID NO: 407386 - RNA, 20 nt, Human
aagaaaagggggcuuuaaaa

SEQ ID NO: 407387 - RNA, 20 nt, Human
aaguaaaauacagcagauga

SEQ ID NO: 407388 - RNA, 19 nt, Human
aaucugauuaucugacuga

SEQ ID NO: 407389 - RNA, 19 nt, Human
acagggcagaaucucuucc

SEQ ID NO: 407390 - RNA, 20 nt, Human
acauacuccaaaaaggagau

SEQ ID NO: 407391 - RNA, 23 nt, Human
acugcugucuuagacuaaacugu

SEQ ID NO: 407392 - RNA, 22 nt, Human
acuguuuuucccauguacuacu

SEQ ID NO: 407393 - RNA, 24 nt, Human
acuucaguuauucacauagugucu

SEQ ID NO: 407394 - RNA, 19 nt, Human
agaaaagggggcuuuaaaa

SEQ ID NO: 407395 - RNA, 19 nt, Human
agaagucacacaacagaaa

SEQ ID NO: 407396 - RNA, 23 nt, Human
agagaagauacauacuccaaaaa

SEQ ID NO: 407397 - RNA, 19 nt, Human
agcaaaauucagggucaag

SEQ ID NO: 407398 - RNA, 25 nt, Human
aggcagaaaaaaaugaaaggggacc

SEQ ID NO: 407399 - RNA, 19 nt, Human
agugaacaauauucacuaa

SEQ ID NO: 407400 - RNA, 23 nt, Human
augaaagaaaaccuuauaucaca

SEQ ID NO: 407401 - RNA, 25 nt, Human
caacagaaagauaccaugcgguuga

SEQ ID NO: 407402 - RNA, 20 nt, Human
cacaacagaaagauaccaug

SEQ ID NO: 407403 - RNA, 20 nt, Human
cagcucaaacacaaaugcag

SEQ ID NO: 407404 - RNA, 20 nt, Human
caggagcacaauggcaaagu

SEQ ID NO: 407405 - RNA, 24 nt, Human
caggagcacaauggcaaaguuugg

SEQ ID NO: 407406 - RNA, 19 nt, Human
cagggccaggaacguaaug

SEQ ID NO: 407407 - RNA, 24 nt, Human
caggucgagauaaugaagaaauaa

SEQ ID NO: 407408 - RNA, 18 nt, Human
cauguaagccacugugca

SEQ ID NO: 407409 - RNA, 25 nt, Human
ccaaagacaguagagcaccaaugcc

SEQ ID NO: 407410 - RNA, 22 nt, Human
ccaacaguuuccaaauuacuau

SEQ ID NO: 407411 - RNA, 22 nt, Human
ccaccuuccaacaguuuccaaa

SEQ ID NO: 407412 - RNA, 22 nt, Human
ccuguacuugaacaagugagag

SEQ ID NO: 407413 - RNA, 23 nt, Human
ccuguacuugaacaagugagaga

SEQ ID NO: 407414 - RNA, 24 nt, Human
cgagauaaugaagaaauaagacca

SEQ ID NO: 407415 - RNA, 24 nt, Human
cguauaguaagaggcagaaaaaaa

SEQ ID NO: 407416 - RNA, 28 nt, Human
gaacaaaaguaaacuaugagucacuacc

SEQ ID NO: 407417 - RNA, 21 nt, Human
gaacuguaauuaaaaccccaa

SEQ ID NO: 407418 - RNA, 20 nt, Human
gaccaaaucugauuaucugg

SEQ ID NO: 407419 - RNA, 21 nt, Human
gagaagauacauacuccaaaa

SEQ ID NO: 407420 - RNA, 19 nt, Human
gcaagacaucagacacgga

SEQ ID NO: 407421 - RNA, 18 nt, Human
gcagaaucucuuccaaag

SEQ ID NO: 407422 - RNA, 20 nt, Human
gcaugcagggccuggaggua

SEQ ID NO: 407423 - RNA, 21 nt, Human
uaaaauacagcagaugagaug

SEQ ID NO: 407424 - RNA, 21 nt, Human
uaaauguguugacacugaaau

SEQ ID NO: 407425 - RNA, 20 nt, Human
uaaauuaauagagaacuaca

SEQ ID NO: 407426 - RNA, 20 nt, Human
uaagcucuagccaaagacag

SEQ ID NO: 407427 - RNA, 21 nt, Human
uaaugaaaauaaagaagaaaa

SEQ ID NO: 407428 - RNA, 21 nt, Human
uacacgugucuacagggccag

SEQ ID NO: 407429 - RNA, 24 nt, Human
uacagucguauaguaagaggcaga

SEQ ID NO: 407430 - RNA, 21 nt, Human
uacauacuccaaaaaggagau

SEQ ID NO: 407431 - RNA, 24 nt, Human
uaccaugcgguugaacagugugcc

SEQ ID NO: 407432 - RNA, 21 nt, Human
uagccaaagacaguagagcac

SEQ ID NO: 407433 - RNA, 27 nt, Human
uauaguaagaggcagaaaaaaaugaaa

SEQ ID NO: 407434 - RNA, 23 nt, Human
ucaaacacaaaugcaggagcaca

SEQ ID NO: 407435 - RNA, 21 nt, Human
ucaauguacaacuaaugaaaa

SEQ ID NO: 407436 - RNA, 18 nt, Human
ucuggcaguuaaccagcc

SEQ ID NO: 407437 - RNA, 22 nt, Human
ucuuagacuaaacugugccacc

SEQ ID NO: 407438 - RNA, 21 nt, Human
ugaaagaaaaccuuauaucac

SEQ ID NO: 407439 - RNA, 21 nt, Human
ugaagaaauaagaccaaaucu

SEQ ID NO: 407440 - RNA, 22 nt, Human
ugacaaauuugagcaccaacua

SEQ ID NO: 407441 - RNA, 21 nt, Human
ugauuauuuaaacacaacuaa

SEQ ID NO: 407442 - RNA, 18 nt, Human
ugcaaacuauuuugaaca

SEQ ID NO: 407443 - RNA, 19 nt, Human
ugcaggagcacaauggcag

SEQ ID NO: 407444 - RNA, 25 nt, Human
ugcagggccuggagguacauuuucu

SEQ ID NO: 407445 - RNA, 28 nt, Human
uguaauuuccacaaauauauagcagcuc

SEQ ID NO: 407446 - RNA, 22 nt, Human
uuucacguucauguaagccacu

SEQ ID NO: 407447 - RNA, 25 nt, Human
uuucuggcaguuaaccagccuucug

SEQ ID NO: 407448 - RNA, 21 nt, Human
uuugcuaaauuaauagagaac

SEQ ID NO: 407449 - RNA, 22 nt, Human
aaaaccauccuagaaaccaagg

SEQ ID NO: 407450 - RNA, 22 nt, Human
aacagacaagaaaggaaucucg

SEQ ID NO: 407451 - RNA, 18 nt, Human
aaccagcuccccacccug

SEQ ID NO: 407452 - RNA, 22 nt, Human
acacaaaaccauccuagaaacc

SEQ ID NO: 407453 - RNA, 19 nt, Human
agacaagaaaggaaucucg

SEQ ID NO: 407454 - RNA, 19 nt, Human
agcccaguccuaccucccc

SEQ ID NO: 407455 - RNA, 23 nt, Human
agggguuucuguuuccuccucug

SEQ ID NO: 407456 - RNA, 19 nt, Human
aguccuaccucccccucca

SEQ ID NO: 407457 - RNA, 21 nt, Human
caaaaccauccuagaaaccaa

SEQ ID NO: 407458 - RNA, 19 nt, Human
caagaaaggaaucucgugc

SEQ ID NO: 407459 - RNA, 20 nt, Human
cacaaaaccauccuagaaac

SEQ ID NO: 407460 - RNA, 18 nt, Human
caccccagucauucccac

SEQ ID NO: 407461 - RNA, 23 nt, Human
caccccagucauucccacauccc

SEQ ID NO: 407462 - RNA, 19 nt, Human
cagcaggacacgggaagga

SEQ ID NO: 407463 - RNA, 20 nt, Human
cagcaggacacgggaaggaa

SEQ ID NO: 407464 - RNA, 26 nt, Human
cagcauacuucuccugauccaggcuc

SEQ ID NO: 407465 - RNA, 18 nt, Human
ccagcaggacacgggaag

SEQ ID NO: 407466 - RNA, 19 nt, Human
cccacccugacaguuagga

SEQ ID NO: 407467 - RNA, 21 nt, Human
cccguagcacuugacccugcc

SEQ ID NO: 407468 - RNA, 21 nt, Human
ccuccacacaaaaccauccua

SEQ ID NO: 407469 - RNA, 20 nt, Human
ccuuccuuccugacccgucc

SEQ ID NO: 407470 - RNA, 20 nt, Human
cuccacacaaaaccauccuu

SEQ ID NO: 407471 - RNA, 19 nt, Human
cuccccacccugacaguua

SEQ ID NO: 407472 - RNA, 23 nt, Human
cuccccacccugacaguuaggag

SEQ ID NO: 407473 - RNA, 21 nt, Human
cucuccuuccuuccugacccg

SEQ ID NO: 407474 - RNA, 25 nt, Human
cucuccuuccuuccugacccguccu

SEQ ID NO: 407475 - RNA, 21 nt, Human
cuuucucuuguuagaaagaga

SEQ ID NO: 407476 - RNA, 28 nt, Human
gacccugccucaccccagucauucccac

SEQ ID NO: 407477 - RNA, 24 nt, Human
gcccaguccuaccucccccuccaa

SEQ ID NO: 407478 - RNA, 18 nt, Human
ggaagucacagcugugcu

SEQ ID NO: 407479 - RNA, 23 nt, Human
uaccucccccuccacacaaaacc

SEQ ID NO: 407480 - RNA, 20 nt, Human
uacguuucuaacagacaaga

SEQ ID NO: 407481 - RNA, 18 nt, Human
ucaccccagucauuccca

SEQ ID NO: 407482 - RNA, 18 nt, Human
ucccccuccacacaaaac

SEQ ID NO: 407483 - RNA, 22 nt, Human
uccucugggaaccagcucccca

SEQ ID NO: 407484 - RNA, 18 nt, Human
ucuaccucaagaagcaag

SEQ ID NO: 407485 - RNA, 22 nt, Human
ucuccaagaugauucaggacug

SEQ ID NO: 407486 - RNA, 18 nt, Human
ucuccugauccaggcuca

SEQ ID NO: 407487 - RNA, 22 nt, Human
uggacuucaggguagacaaucc

SEQ ID NO: 407488 - RNA, 19 nt, Human
uguuagaaagagaagcuuc

SEQ ID NO: 407489 - RNA, 24 nt, Human
uugacccugccucaccccagucau

SEQ ID NO: 407490 - RNA, 18 nt, Human
aaaaaggagaaacagaga

SEQ ID NO: 407491 - RNA, 20 nt, Human
aaaacaaaaacaaaagucgc

SEQ ID NO: 407492 - RNA, 21 nt, Human
aaaacaaaauccaaaaggaaa

SEQ ID NO: 407493 - RNA, 19 nt, Human
aaaacaaagccaaaaccaa

SEQ ID NO: 407494 - RNA, 23 nt, Human
aaaaggaaaacaagaggagaaac

SEQ ID NO: 407495 - RNA, 20 nt, Human
aaaaucaaaaacaaagccaa

SEQ ID NO: 407496 - RNA, 27 nt, Human
aaacaaaaacaaaagucgcacaaucua

SEQ ID NO: 407497 - RNA, 28 nt, Human
aaacaaaaacaaaagucgcacaaucuaa

SEQ ID NO: 407498 - RNA, 22 nt, Human
aaacaaaagucgcacaauccua

SEQ ID NO: 407499 - RNA, 21 nt, Human
aaacaaagccaaaaccaaaac

SEQ ID NO: 407500 - RNA, 23 nt, Human
aaacaagaggagaaacaagcccg

SEQ ID NO: 407501 - RNA, 24 nt, Human
aaacaagaggagaaacaagcccgg

SEQ ID NO: 407502 - RNA, 25 nt, Human
aaacaagaggagaaacaaggggacc

SEQ ID NO: 407503 - RNA, 21 nt, Human
aaagccaaaaccaaaacaaaa

SEQ ID NO: 407504 - RNA, 21 nt, Human
aagccaaaaccaaaacaaaau

SEQ ID NO: 407505 - RNA, 18 nt, Human
aaggaaaagaccuggggc

SEQ ID NO: 407506 - RNA, 22 nt, Human
aaggaaaagaccuggggcaaug

SEQ ID NO: 407507 - RNA, 24 nt, Human
aaggacccaacuccgggcagcccc

SEQ ID NO: 407508 - RNA, 22 nt, Human
agaaacagagagagagcucagc

SEQ ID NO: 407509 - RNA, 24 nt, Human
agccaaaaccaaaacaaaauccaa

SEQ ID NO: 407510 - RNA, 18 nt, Human
aggaaaaaaggagaaaca

SEQ ID NO: 407511 - RNA, 18 nt, Human
aggagaaacaagcccggg

SEQ ID NO: 407512 - RNA, 22 nt, Human
aggagauucauaauaaaaaaaa

SEQ ID NO: 407513 - RNA, 25 nt, Human
aggcaaggacccaacuccgggcagc

SEQ ID NO: 407514 - RNA, 22 nt, Human
aggcugaaggugccaaaagcug

SEQ ID NO: 407515 - RNA, 23 nt, Human
agugaucaaacugcccaaaagga

SEQ ID NO: 407516 - RNA, 21 nt, Human
caaaaacaaagccaaaaccaa

SEQ ID NO: 407517 - RNA, 22 nt, Human
caaaaacaaagccaaaaccaaa

SEQ ID NO: 407518 - RNA, 26 nt, Human
caaaaacaaagccaaaaccaaaacaa

SEQ ID NO: 407519 - RNA, 21 nt, Human
caaaaccaaaacaaaauccaa

SEQ ID NO: 407520 - RNA, 18 nt, Human
caacuccgggcagccccu

SEQ ID NO: 407521 - RNA, 23 nt, Human
cagacacuuucccaucuccaggg

SEQ ID NO: 407522 - RNA, 27 nt, Human
caggaaguugcugugucaaaauccagg

SEQ ID NO: 407523 - RNA, 19 nt, Human
ccaaaaccaaaacaaaauc

SEQ ID NO: 407524 - RNA, 21 nt, Human
ccaaaaccaaaacaaaaucca

SEQ ID NO: 407525 - RNA, 21 nt, Human
cccaaaaggaaaacaagagga

SEQ ID NO: 407526 - RNA, 25 nt, Human
cccaaaaggaaaacaagaggagaaa

SEQ ID NO: 407527 - RNA, 27 nt, Human
cccggggcccugggcguuccucccggg

SEQ ID NO: 407528 - RNA, 20 nt, Human
cccugggcguuccucccggg

SEQ ID NO: 407529 - RNA, 19 nt, Human
ccgggggcuggggaggaag

SEQ ID NO: 407530 - RNA, 27 nt, Human
ccucccugcugaccucaacaagggcug

SEQ ID NO: 407531 - RNA, 19 nt, Human
ccuccucccugcugaccuc

SEQ ID NO: 407532 - RNA, 21 nt, Human
ccucgacacagacacuuuccc

SEQ ID NO: 407533 - RNA, 19 nt, Human
ccugccguccuggcccagg

SEQ ID NO: 407534 - RNA, 22 nt, Human
ccuggcccaggccagcucccac

SEQ ID NO: 407535 - RNA, 23 nt, Human
cggggcccugggcguuccucccg

SEQ ID NO: 407536 - RNA, 19 nt, Human
cucccgagcccgggggcug

SEQ ID NO: 407537 - RNA, 21 nt, Human
cugcccaaaaggaaaacaaga

SEQ ID NO: 407538 - RNA, 24 nt, Human
gaacaggaaguccacgauucauac

SEQ ID NO: 407539 - RNA, 20 nt, Human
gaggagaaggaagcaggaga

SEQ ID NO: 407540 - RNA, 18 nt, Human
gaucagugaucaaacugc

SEQ ID NO: 407541 - RNA, 20 nt, Human
gcccggggcccugggcguuc

SEQ ID NO: 407542 - RNA, 25 nt, Human
ggagaaacaagcccggggcccuggg

SEQ ID NO: 407543 - RNA, 23 nt, Human
gggcagccccuccucccugcuga

SEQ ID NO: 407544 - RNA, 18 nt, Human
gggcuggggaggaagauu

SEQ ID NO: 407545 - RNA, 19 nt, Human
gggcuggggaggaagauuc

SEQ ID NO: 407546 - RNA, 25 nt, Human
ggugaggagaaggaagcaggagaaa

SEQ ID NO: 407547 - RNA, 27 nt, Human
uaaaaaaaaaucaaaaacaaagccaaa

SEQ ID NO: 407548 - RNA, 22 nt, Human
uacaaagugcucacuacaggaa

SEQ ID NO: 407549 - RNA, 25 nt, Human
uacagaauaaauaccugcgccuuga

SEQ ID NO: 407550 - RNA, 19 nt, Human
uccccagcgccccgccgcc

SEQ ID NO: 407551 - RNA, 22 nt, Human
uccccagcgccccgccgccugc

SEQ ID NO: 407552 - RNA, 19 nt, Human
ucccgggugggguaagaaa

SEQ ID NO: 407553 - RNA, 24 nt, Human
uccgggcagccccuccucccugcu

SEQ ID NO: 407554 - RNA, 22 nt, Human
ucgacacagacacuuucccauc

SEQ ID NO: 407555 - RNA, 26 nt, Human
ugaggaagaggggaggcgaggaaggu

SEQ ID NO: 407556 - RNA, 19 nt, Human
ugcugaccucaacaagggc

SEQ ID NO: 407557 - RNA, 19 nt, Human
uggaaugaggaagagggga

SEQ ID NO: 407558 - RNA, 18 nt, Human
uggcccaggccagcuccc

SEQ ID NO: 407559 - RNA, 25 nt, Human
ugggacccccaagcuuucagggaaa

SEQ ID NO: 407560 - RNA, 22 nt, Human
uggugaggagaaggaagcagga

SEQ ID NO: 407561 - RNA, 19 nt, Human
ugugucaaaauccaggcaa

SEQ ID NO: 407562 - RNA, 24 nt, Human
uucauaauaaaaaaaaaucaaaaa

SEQ ID NO: 407563 - RNA, 23 nt, Human
uuccuggacauagggguccuguc

SEQ ID NO: 407564 - RNA, 18 nt, Human
uugcugugucaaaaucca

SEQ ID NO: 407565 - RNA, 18 nt, Human
uuuuuuuuuuuuuuuuug

SEQ ID NO: 407566 - RNA, 20 nt, Human
uuuuuuuuuuuuuuuuuggg

SEQ ID NO: 407567 - RNA, 26 nt, Human
aaaaaagaaaaaaacaacaaaacaga

SEQ ID NO: 407568 - RNA, 19 nt, Human
aaaaaccaagacacacaua

SEQ ID NO: 407569 - RNA, 22 nt, Human
aaaaagaagaaaagaaaaaaga

SEQ ID NO: 407570 - RNA, 23 nt, Human
aaaacaacaaaacagaacaaccc

SEQ ID NO: 407571 - RNA, 23 nt, Human
aaaacagaacaaccccaccguga

SEQ ID NO: 407572 - RNA, 20 nt, Human
aaaagaagaaaagaaaaaag

SEQ ID NO: 407573 - RNA, 25 nt, Human
aaaauauaacucaccuacauaaaaa

SEQ ID NO: 407574 - RNA, 25 nt, Human
aaaaucugggagugggaaccaagug

SEQ ID NO: 407575 - RNA, 18 nt, Human
aaacaccaccauaguucu

SEQ ID NO: 407576 - RNA, 19 nt, Human
aaacagcucuagcacccca

SEQ ID NO: 407577 - RNA, 19 nt, Human
aaagaagaaaagaaaaaag

SEQ ID NO: 407578 - RNA, 24 nt, Human
aaagugcugggaugacaggcguga

SEQ ID NO: 407579 - RNA, 21 nt, Human
aaauguuaaaagccucagagg

SEQ ID NO: 407580 - RNA, 24 nt, Human
aacacauucagucauacaaaucca

SEQ ID NO: 407581 - RNA, 25 nt, Human
aaccccgucucuacucacaauacac

SEQ ID NO: 407582 - RNA, 19 nt, Human
aacccgcguggacucuucc

SEQ ID NO: 407583 - RNA, 21 nt, Human
aaccuaggucccacccucaga

SEQ ID NO: 407584 - RNA, 24 nt, Human
aaccucaggugguccgccugccuu

SEQ ID NO: 407585 - RNA, 22 nt, Human
aagaaaaaaacaacaaaacaga

SEQ ID NO: 407586 - RNA, 23 nt, Human
aagaaaaaaacaacaaaacagaa

SEQ ID NO: 407587 - RNA, 26 nt, Human
aagaaaaaaacaacaaaacagaacaa

SEQ ID NO: 407588 - RNA, 18 nt, Human
aagaaaaaccaagacaca

SEQ ID NO: 407589 - RNA, 21 nt, Human
aagaaagaaaauauaacucac

SEQ ID NO: 407590 - RNA, 19 nt, Human
aagaaccuaggucccaccc

SEQ ID NO: 407591 - RNA, 19 nt, Human
aagaagaaaagaaaaaaga

SEQ ID NO: 407592 - RNA, 20 nt, Human
aagagaacuuguuccguuug

SEQ ID NO: 407593 - RNA, 18 nt, Human
aagaggaacuaugagucu

SEQ ID NO: 407594 - RNA, 19 nt, Human
aagcacuguuuucacggcu

SEQ ID NO: 407595 - RNA, 22 nt, Human
aagcaggcaugacagcggagga

SEQ ID NO: 407596 - RNA, 22 nt, Human
aagcauuuuagggugacuggca

SEQ ID NO: 407597 - RNA, 23 nt, Human
aagccauuggaacugccgaugug

SEQ ID NO: 407598 - RNA, 18 nt, Human
aagccgccggcccaagcc

SEQ ID NO: 407599 - RNA, 19 nt, Human
aagcuguagcuaccacauc

SEQ ID NO: 407600 - RNA, 24 nt, Human
aaggccgguggaucaagaggcggu

SEQ ID NO: 407601 - RNA, 30 nt, Human
aauaaauacauacauacauacauacauaca

SEQ ID NO: 407602 - RNA, 18 nt, Human
aaucgcuugaaccuggga

SEQ ID NO: 407603 - RNA, 24 nt, Human
aaucgcuugaaccugggaggcgga

SEQ ID NO: 407604 - RNA, 20 nt, Human
acaagagcgaaacuccgucu

SEQ ID NO: 407605 - RNA, 21 nt, Human
acaagagcgaaacuccgucuc

SEQ ID NO: 407606 - RNA, 20 nt, Human
acagagcgagacuccgucuc

SEQ ID NO: 407607 - RNA, 25 nt, Human
acagagcgagacuccgucuccaaaa

SEQ ID NO: 407608 - RNA, 19 nt, Human
acaggcccucucuaaacag

SEQ ID NO: 407609 - RNA, 23 nt, Human
acaggcgugagccaccgcgccca

SEQ ID NO: 407610 - RNA, 32 nt, Human
acauaaauaaauacauacauacauacauacag

SEQ ID NO: 407611 - RNA, 26 nt, Human
acaucacuguacuccaaaugggaacu

SEQ ID NO: 407612 - RNA, 25 nt, Human
acccagccugggcgacagagcgaga

SEQ ID NO: 407613 - RNA, 24 nt, Human
accccgucucuacucacaauacac

SEQ ID NO: 407614 - RNA, 19 nt, Human
acccucagaacaagcaagu

SEQ ID NO: 407615 - RNA, 22 nt, Human
accuuauauuuguacacaauau

SEQ ID NO: 407616 - RNA, 24 nt, Human
acgguguuuuuccauguuggucag

SEQ ID NO: 407617 - RNA, 22 nt, Human
acuccugccaacucugcacccc

SEQ ID NO: 407618 - RNA, 22 nt, Human
acucugcaccccaccacggcug

SEQ ID NO: 407619 - RNA, 21 nt, Human
acucuuggagggcuuuagcag

SEQ ID NO: 407620 - RNA, 24 nt, Human
acugaaaaauauuuagacaacuaa

SEQ ID NO: 407621 - RNA, 22 nt, Human
acugcagcuuauuuagauuguu

SEQ ID NO: 407622 - RNA, 22 nt, Human
agaaaaaaacaacaaaacagaa

SEQ ID NO: 407623 - RNA, 24 nt, Human
agaaaaaagaaaaaaacaacaaaa

SEQ ID NO: 407624 - RNA, 25 nt, Human
agaaaaaccaagacacacauaaaca

SEQ ID NO: 407625 - RNA, 21 nt, Human
agaaaagaaaaaagaaaaaaa

SEQ ID NO: 407626 - RNA, 18 nt, Human
agaacauucuagcaggua

SEQ ID NO: 407627 - RNA, 23 nt, Human
agaagaaaagaaaaaagaaaaaa

SEQ ID NO: 407628 - RNA, 19 nt, Human
agacaccauaaucuuauga

SEQ ID NO: 407629 - RNA, 18 nt, Human
agacugaagggacuggca

SEQ ID NO: 407630 - RNA, 20 nt, Human
agagacuuuccaauuuuaua

SEQ ID NO: 407631 - RNA, 23 nt, Human
agccaacaggcccucucuaaaca

SEQ ID NO: 407632 - RNA, 24 nt, Human
agccaacaggcccucucuaaacag

SEQ ID NO: 407633 - RNA, 22 nt, Human
agccugggcgacagagcgagac

SEQ ID NO: 407634 - RNA, 24 nt, Human
agccugggcgacagagcgagacuc

SEQ ID NO: 407635 - RNA, 24 nt, Human
agcgauucuccugccucagccucc

SEQ ID NO: 407636 - RNA, 18 nt, Human
aggaagccugaaagaucu

SEQ ID NO: 407637 - RNA, 22 nt, Human
aggcaggagaaucgcuugaacc

SEQ ID NO: 407638 - RNA, 24 nt, Human
aggcaggagaaucgcuugaaccug

SEQ ID NO: 407639 - RNA, 19 nt, Human
aggcaggagaggaacagcg

SEQ ID NO: 407640 - RNA, 23 nt, Human
aggcaggagaggaacagcggcuc

SEQ ID NO: 407641 - RNA, 23 nt, Human
aggccaaggccgguggaucaaga

SEQ ID NO: 407642 - RNA, 24 nt, Human
aggcggagguugcagugagccgag

SEQ ID NO: 407643 - RNA, 24 nt, Human
agggcaauggugcgaucucggcuc

SEQ ID NO: 407644 - RNA, 19 nt, Human
agguagauuugccuugccu

SEQ ID NO: 407645 - RNA, 20 nt, Human
aggucaugugggcauuuucc

SEQ ID NO: 407646 - RNA, 24 nt, Human
aggugguccgccugccuuagccuc

SEQ ID NO: 407647 - RNA, 22 nt, Human
aguacaguuucuuuguuggaag

SEQ ID NO: 407648 - RNA, 21 nt, Human
aguauggugaaaccccgucuc

SEQ ID NO: 407649 - RNA, 22 nt, Human
agucauggaaacacuucaggaa

SEQ ID NO: 407650 - RNA, 19 nt, Human
aguggcagcagguaccaua

SEQ ID NO: 407651 - RNA, 26 nt, Human
aguugcuggucucuuccuguuuggug

SEQ ID NO: 407652 - RNA, 24 nt, Human
auauaagcuccgaagggcagagac

SEQ ID NO: 407653 - RNA, 24 nt, Human
auauuuaaaguauagcuaagaagc

SEQ ID NO: 407654 - RNA, 22 nt, Human
auccccucacuuugggaggcca

SEQ ID NO: 407655 - RNA, 20 nt, Human
auccuaucucuucccuucua

SEQ ID NO: 407656 - RNA, 23 nt, Human
auccuggugcugacggccuccgc

SEQ ID NO: 407657 - RNA, 24 nt, Human
aucgcgccacugcaacccagccug

SEQ ID NO: 407658 - RNA, 18 nt, Human
auggcagcuccacuuuag

SEQ ID NO: 407659 - RNA, 20 nt, Human
auggugaaaccccgucucua

SEQ ID NO: 407660 - RNA, 24 nt, Human
auguuuguacuuuuaguagagacg

SEQ ID NO: 407661 - RNA, 18 nt, Human
auuuugagaaaagaggca

SEQ ID NO: 407662 - RNA, 19 nt, Human
auuuuuagcaucauucuag

SEQ ID NO: 407663 - RNA, 20 nt, Human
caaaaguaaauaauuagcua

SEQ ID NO: 407664 - RNA, 24 nt, Human
caaagugcugggaugacaggcgug

SEQ ID NO: 407665 - RNA, 19 nt, Human
caaauaagaaugcugacau

SEQ ID NO: 407666 - RNA, 19 nt, Human
caacaaaacagaacaaccc

SEQ ID NO: 407667 - RNA, 22 nt, Human
caacaaaacagaacaaccccac

SEQ ID NO: 407668 - RNA, 22 nt, Human
caacaaaauaauuaaaaaguga

SEQ ID NO: 407669 - RNA, 22 nt, Human
caagcgauucuccugccucagc

SEQ ID NO: 407670 - RNA, 28 nt, Human
cacauaccauaggcucucuaaaggcagg

SEQ ID NO: 407671 - RNA, 21 nt, Human
cacccuccgccucccagguuc

SEQ ID NO: 407672 - RNA, 21 nt, Human
caccgcacccuccgccuccca

SEQ ID NO: 407673 - RNA, 24 nt, Human
cacuccagucugagcaacaagagc

SEQ ID NO: 407674 - RNA, 25 nt, Human
cacuccagucugagcaacaagagcg

SEQ ID NO: 407675 - RNA, 23 nt, Human
cacuccugccaacucugcacccc

SEQ ID NO: 407676 - RNA, 24 nt, Human
cacucuuguugcccaggcuagagg

SEQ ID NO: 407677 - RNA, 24 nt, Human
cacugcaacccagccugggcgaca

SEQ ID NO: 407678 - RNA, 25 nt, Human
cacugcaacccagccugggcgacag

SEQ ID NO: 407679 - RNA, 25 nt, Human
cagaacaagcaaguacuacagagua

SEQ ID NO: 407680 - RNA, 21 nt, Human
cagauggcagcuccacuuuag

SEQ ID NO: 407681 - RNA, 18 nt, Human
cagcggcggcggcugugg

SEQ ID NO: 407682 - RNA, 20 nt, Human
cagcgggugccugagcuggc

SEQ ID NO: 407683 - RNA, 20 nt, Human
cagcgggugccugagcuggc

SEQ ID NO: 407684 - RNA, 23 nt, Human
cagcuuuucucuccuccuucucc

SEQ ID NO: 407685 - RNA, 20 nt, Human
caggcuggucucccacuccc

SEQ ID NO: 407686 - RNA, 23 nt, Human
cagggccaguauggugaaacccc

SEQ ID NO: 407687 - RNA, 21 nt, Human
caguccaguaagucaccaaua

SEQ ID NO: 407688 - RNA, 19 nt, Human
caguggccaggguucuggc

SEQ ID NO: 407689 - RNA, 21 nt, Human
caguggccaggguucuggccc

SEQ ID NO: 407690 - RNA, 22 nt, Human
cauacacguacgccucucgccu

SEQ ID NO: 407691 - RNA, 21 nt, Human
cauggugaauuucuuggcuca

SEQ ID NO: 407692 - RNA, 19 nt, Human
cauugagucucauuggaga

SEQ ID NO: 407693 - RNA, 18 nt, Human
cauugcuacaaauuucuc

SEQ ID NO: 407694 - RNA, 22 nt, Human
ccaaagugcugggaugacaggc

SEQ ID NO: 407695 - RNA, 24 nt, Human
ccaaagugcugggaugacaggcgu

SEQ ID NO: 407696 - RNA, 18 nt, Human
ccaacucugcaccccacc

SEQ ID NO: 407697 - RNA, 19 nt, Human
ccaccgugccuggcugaug

SEQ ID NO: 407698 - RNA, 25 nt, Human
ccacuccugccaacucugcacccca

SEQ ID NO: 407699 - RNA, 18 nt, Human
ccacugcaacccagccug

SEQ ID NO: 407700 - RNA, 24 nt, Human
ccacugcaacccagccugggcgac

SEQ ID NO: 407701 - RNA, 20 nt, Human
ccagcggcggcggcuguggu

SEQ ID NO: 407702 - RNA, 18 nt, Human
ccaggagcagccaacagg

SEQ ID NO: 407703 - RNA, 19 nt, Human
ccauguuggucaggcuggu

SEQ ID NO: 407704 - RNA, 23 nt, Human
ccauuugaaacacauucagucau

SEQ ID NO: 407705 - RNA, 20 nt, Human
cccagguucaagcgauucuc

SEQ ID NO: 407706 - RNA, 23 nt, Human
cccagguucaagcgauucuccug

SEQ ID NO: 407707 - RNA, 19 nt, Human
ccccaaagugucagaaugc

SEQ ID NO: 407708 - RNA, 25 nt, Human
cccuggcugggcccgauuguucuuc

SEQ ID NO: 407709 - RNA, 18 nt, Human
ccgcacccuccgccuccc

SEQ ID NO: 407710 - RNA, 21 nt, Human
ccgcacccuccgccucccagg

SEQ ID NO: 407711 - RNA, 21 nt, Human
ccgcacccuccgccucccagg

SEQ ID NO: 407712 - RNA, 24 nt, Human
ccgcacccuccgccucccagguuc

SEQ ID NO: 407713 - RNA, 24 nt, Human
ccgccucccagguucaagcgauuc

SEQ ID NO: 407714 - RNA, 26 nt, Human
ccgccugccuuagccucccaaagugc

SEQ ID NO: 407715 - RNA, 24 nt, Human
ccucccagguucaagcgauucucc

SEQ ID NO: 407716 - RNA, 20 nt, Human
ccucccugguugcccagaca

SEQ ID NO: 407717 - RNA, 23 nt, Human
ccuccugcaggaugaaacgagag

SEQ ID NO: 407718 - RNA, 18 nt, Human
ccuccuucucccacuccu

SEQ ID NO: 407719 - RNA, 24 nt, Human
ccucucgccuuucgaggccucaaa

SEQ ID NO: 407720 - RNA, 24 nt, Human
ccucucuaaacagcucuagcaccc

SEQ ID NO: 407721 - RNA, 22 nt, Human
ccugaucagaaaagaaagaaaa

SEQ ID NO: 407722 - RNA, 23 nt, Human
ccugauuagcugggauuacaggc

SEQ ID NO: 407723 - RNA, 24 nt, Human
ccugauuagcugggauuacaggca

SEQ ID NO: 407724 - RNA, 24 nt, Human
ccugccucagccuccugauuagcu

SEQ ID NO: 407725 - RNA, 24 nt, Human
ccugccuuagccucccaaagugcu

SEQ ID NO: 407726 - RNA, 19 nt, Human
ccugggaggcggagguugc

SEQ ID NO: 407727 - RNA, 22 nt, Human
ccugggcgacagagcgagacuc

SEQ ID NO: 407728 - RNA, 23 nt, Human
ccugucauccccucacuuuggga

SEQ ID NO: 407729 - RNA, 18 nt, Human
ccuuucauccuugcugua

SEQ ID NO: 407730 - RNA, 24 nt, Human
cgaaccaaaucauuaaguccccug

SEQ ID NO: 407731 - RNA, 24 nt, Human
cgagaucgcgccacugcaacccag

SEQ ID NO: 407732 - RNA, 23 nt, Human
cggaagcaggcaugacagcggag

SEQ ID NO: 407733 - RNA, 23 nt, Human
cggcggcggcuguggugguggug

SEQ ID NO: 407734 - RNA, 23 nt, Human
cggcugcagcgggugccugagcu

SEQ ID NO: 407735 - RNA, 23 nt, Human
cggcugcagcgggugccugagcu

SEQ ID NO: 407736 - RNA, 19 nt, Human
cggucugggaggagacagc

SEQ ID NO: 407737 - RNA, 19 nt, Human
cggucugggaggagacagc

SEQ ID NO: 407738 - RNA, 24 nt, Human
cgguguuuuuccauguuggucagg

SEQ ID NO: 407739 - RNA, 20 nt, Human
cgucuccaaaaaaugaaaau

SEQ ID NO: 407740 - RNA, 20 nt, Human
cgucuuguccagcacccugg

SEQ ID NO: 407741 - RNA, 20 nt, Human
cgucuuguccagcacccugg

SEQ ID NO: 407742 - RNA, 18 nt, Human
cuaccacggcccagccau

SEQ ID NO: 407743 - RNA, 21 nt, Human
cucaagaucucccauuacuga

SEQ ID NO: 407744 - RNA, 21 nt, Human
cucauucuucccuaccucccc

SEQ ID NO: 407745 - RNA, 20 nt, Human
cuccuucucccacuccugcc

SEQ ID NO: 407746 - RNA, 22 nt, Human
cucuagcaccccaccacccauu

SEQ ID NO: 407747 - RNA, 19 nt, Human
cucugcaccccaccacggc

SEQ ID NO: 407748 - RNA, 21 nt, Human
cugauuagcugggauuacagg

SEQ ID NO: 407749 - RNA, 24 nt, Human
cugauuagcugggauuacaggcau

SEQ ID NO: 407750 - RNA, 20 nt, Human
cugcaacaguuuuucuguag

SEQ ID NO: 407751 - RNA, 24 nt, Human
cugccuuagccucccaaagugcug

SEQ ID NO: 407752 - RNA, 21 nt, Human
cuggccagcggcggcggcugu

SEQ ID NO: 407753 - RNA, 18 nt, Human
cugggcaaaacuggcaca

SEQ ID NO: 407754 - RNA, 20 nt, Human
cuguaaucccagcuacucgg

SEQ ID NO: 407755 - RNA, 20 nt, Human
cuucuucuucuucuucuucu

SEQ ID NO: 407756 - RNA, 19 nt, Human
cuugaaccugggaggcgga

SEQ ID NO: 407757 - RNA, 23 nt, Human
cuuuccuaaaacuuuaugacaaa

SEQ ID NO: 407758 - RNA, 19 nt, Human
cuuucucuucuucuucuuc

SEQ ID NO: 407759 - RNA, 24 nt, Human
cuuucuuucuuuauuacuuucucu

SEQ ID NO: 407760 - RNA, 21 nt, Human
gaaaaaaacaacaaaacagaa

SEQ ID NO: 407761 - RNA, 21 nt, Human
gaaaaagaagaaaagaaaaaa

SEQ ID NO: 407762 - RNA, 23 nt, Human
gaaaagaaaaaagaaaaaaacaa

SEQ ID NO: 407763 - RNA, 23 nt, Human
gaaaaugacccccaguucuguga

SEQ ID NO: 407764 - RNA, 22 nt, Human
gaaaccccgucucuacucacaa

SEQ ID NO: 407765 - RNA, 19 nt, Human
gaaagggaaaagggcagag

SEQ ID NO: 407766 - RNA, 23 nt, Human
gaacaggcagcuggcgccuccac

SEQ ID NO: 407767 - RNA, 20 nt, Human
gacagcgacggcugcagcgg

SEQ ID NO: 407768 - RNA, 22 nt, Human
gacugcaacucaagaucuccca

SEQ ID NO: 407769 - RNA, 23 nt, Human
gagaaucgcuugaaccugggagg

SEQ ID NO: 407770 - RNA, 19 nt, Human
gagcaagucauggaaacac

SEQ ID NO: 407771 - RNA, 24 nt, Human
gagcugaggcaggagaaucgcuug

SEQ ID NO: 407772 - RNA, 23 nt, Human
gagguugcagugagccgagaucg

SEQ ID NO: 407773 - RNA, 18 nt, Human
gagugggaaccaagugac

SEQ ID NO: 407774 - RNA, 18 nt, Human
gaugacaggcgugagcca

SEQ ID NO: 407775 - RNA, 18 nt, Human
gauuaaaaugacacccca

SEQ ID NO: 407776 - RNA, 23 nt, Human
gauuaaaaugacaccccaaagug

SEQ ID NO: 407777 - RNA, 18 nt, Human
gauuacaggcaugggcca

SEQ ID NO: 407778 - RNA, 21 nt, Human
gauuacaggcaugggccaccg

SEQ ID NO: 407779 - RNA, 24 nt, Human
gauuacaggcaugggccaccgugc

SEQ ID NO: 407780 - RNA, 22 nt, Human
gauuagcugggauuacaggcau

SEQ ID NO: 407781 - RNA, 24 nt, Human
gauuagcugggauuacaggcaugg

SEQ ID NO: 407782 - RNA, 22 nt, Human
gcaggagaggaacagcggcucu

SEQ ID NO: 407783 - RNA, 18 nt, Human
gcauguuuauccugagaa

SEQ ID NO: 407784 - RNA, 21 nt, Human
gccaacucugcaccccaccac

SEQ ID NO: 407785 - RNA, 24 nt, Human
gccacugcaacccagccugggcga

SEQ ID NO: 407786 - RNA, 24 nt, Human
gccaguauggugaaaccccgucuc

SEQ ID NO: 407787 - RNA, 20 nt, Human
gccgagaucgcgccacugca

SEQ ID NO: 407788 - RNA, 23 nt, Human
gccucagagguuauaucuggcca

SEQ ID NO: 407789 - RNA, 24 nt, Human
gcgauucuccugccucagccuccu

SEQ ID NO: 407790 - RNA, 20 nt, Human
gcggcggcggcugugguggu

SEQ ID NO: 407791 - RNA, 20 nt, Human
gcggcggcggcugugguggu

SEQ ID NO: 407792 - RNA, 22 nt, Human
gcggcggcggcugugguggugg

SEQ ID NO: 407793 - RNA, 24 nt, Human
gcggcggcggcuguggugguggug

SEQ ID NO: 407794 - RNA, 24 nt, Human
gcuagcucgcacuccagucugagc

SEQ ID NO: 407795 - RNA, 21 nt, Human
gcuccuugcuguggcucucgc

SEQ ID NO: 407796 - RNA, 20 nt, Human
gcucgcacuccagucugagc

SEQ ID NO: 407797 - RNA, 18 nt, Human
gcugggauuacaggcaug

SEQ ID NO: 407798 - RNA, 23 nt, Human
gcuggucucccacucccaaccuc

SEQ ID NO: 407799 - RNA, 21 nt, Human
gcuguacugucuguaauccca

SEQ ID NO: 407800 - RNA, 21 nt, Human
ggaaucuuugguuugaucaca

SEQ ID NO: 407801 - RNA, 18 nt, Human
ggagaaugggagccugcu

SEQ ID NO: 407802 - RNA, 20 nt, Human
ggagguugcagugagccgag

SEQ ID NO: 407803 - RNA, 22 nt, Human
ggagguugcagugagccgagau

SEQ ID NO: 407804 - RNA, 23 nt, Human
ggagguugcagugagccgagauc

SEQ ID NO: 407805 - RNA, 24 nt, Human
ggagguugcagugagccgagaucg

SEQ ID NO: 407806 - RNA, 24 nt, Human
ggauuacaggcaugggccaccgug

SEQ ID NO: 407807 - RNA, 19 nt, Human
ggccaguauggugaaaccc

SEQ ID NO: 407808 - RNA, 20 nt, Human
ggccaguauggugaaacccc

SEQ ID NO: 407809 - RNA, 20 nt, Human
ggcggcggcugugguggugg

SEQ ID NO: 407810 - RNA, 20 nt, Human
ggcggcggcugugguggugg

SEQ ID NO: 407811 - RNA, 21 nt, Human
ggcggcggcuguggugguggu

SEQ ID NO: 407812 - RNA, 18 nt, Human
gggaaaaagaagaaaaga

SEQ ID NO: 407813 - RNA, 22 nt, Human
gggcaauggugcgaucucggcu

SEQ ID NO: 407814 - RNA, 26 nt, Human
gggcaguggugggguuaccuccgggc

SEQ ID NO: 407815 - RNA, 20 nt, Human
ggucaucccugagagaaggu

SEQ ID NO: 407816 - RNA, 26 nt, Human
ggucugggaggagacagcgacggcug

SEQ ID NO: 407817 - RNA, 26 nt, Human
ggucugggaggagacagcgacggcug

SEQ ID NO: 407818 - RNA, 21 nt, Human
ggugccuucccgcgcagcacu

SEQ ID NO: 407819 - RNA, 21 nt, Human
ggugccuucccgcgcagcacu

SEQ ID NO: 407820 - RNA, 24 nt, Human
gguguuuuuccauguuggucaggc

SEQ ID NO: 407821 - RNA, 18 nt, Human
guacaguuucuuuguugg

SEQ ID NO: 407822 - RNA, 18 nt, Human
gucaucccugagagaagg

SEQ ID NO: 407823 - RNA, 24 nt, Human
gugagccaccgcgcccagccucuc

SEQ ID NO: 407824 - RNA, 22 nt, Human
gugcagcugaaaaggcauugag

SEQ ID NO: 407825 - RNA, 23 nt, Human
guggcucaagccugucauccccu

SEQ ID NO: 407826 - RNA, 24 nt, Human
gugguccgccugccuuagccuccc

SEQ ID NO: 407827 - RNA, 19 nt, Human
guggugguggugccuuccc

SEQ ID NO: 407828 - RNA, 20 nt, Human
guucuucuccuuggucaggg

SEQ ID NO: 407829 - RNA, 19 nt, Human
guugcagugagccgagauc

SEQ ID NO: 407830 - RNA, 21 nt, Human
guugcagugagccgagaucgc

SEQ ID NO: 407831 - RNA, 19 nt, Human
guuuucuuucuuucuuucu

SEQ ID NO: 407832 - RNA, 27 nt, Human
uaaacagcucuagcaccccaccaccca

SEQ ID NO: 407833 - RNA, 22 nt, Human
uaaaguaagcacaaaaguaaau

SEQ ID NO: 407834 - RNA, 20 nt, Human
uaagaugcauuauuauucug

SEQ ID NO: 407835 - RNA, 20 nt, Human
uaagccaggagcagccaaca

SEQ ID NO: 407836 - RNA, 18 nt, Human
uacagaguaauuuagaau

SEQ ID NO: 407837 - RNA, 22 nt, Human
uacaggcaugggccaccgugcc

SEQ ID NO: 407838 - RNA, 26 nt, Human
uacauacauacauacauaaauuaaaa

SEQ ID NO: 407839 - RNA, 22 nt, Human
uacauacauacauacauacaua

SEQ ID NO: 407840 - RNA, 25 nt, Human
uacauacauacauacauacauaaau

SEQ ID NO: 407841 - RNA, 24 nt, Human
uacauacauacauacauacauaca

SEQ ID NO: 407842 - RNA, 21 nt, Human
uaccaagaagggcucugugau

SEQ ID NO: 407843 - RNA, 22 nt, Human
uaccaagaagggcucugugaug

SEQ ID NO: 407844 - RNA, 21 nt, Human
uaccauaggcucucuaaaggc

SEQ ID NO: 407845 - RNA, 24 nt, Human
uagagggcaauggugcgaucucgg

SEQ ID NO: 407846 - RNA, 22 nt, Human
uagcaacauugcuacaaauuuc

SEQ ID NO: 407847 - RNA, 25 nt, Human
uagcaccccaccacccauuugaaac

SEQ ID NO: 407848 - RNA, 22 nt, Human
uagcagcaucagcaaauaagaa

SEQ ID NO: 407849 - RNA, 22 nt, Human
uagcaggagaauuuucuccugg

SEQ ID NO: 407850 - RNA, 22 nt, Human
uagccaagaaaaaccaagacac

SEQ ID NO: 407851 - RNA, 23 nt, Human
uagcucgcacuccagucugagca

SEQ ID NO: 407852 - RNA, 19 nt, Human
uagcugggauuacaggcau

SEQ ID NO: 407853 - RNA, 22 nt, Human
uagcugggauuacaggcauggg

SEQ ID NO: 407854 - RNA, 21 nt, Human
uaggcuuuucuuuguauucag

SEQ ID NO: 407855 - RNA, 24 nt, Human
uaguagagacgguguuuuuccaug

SEQ ID NO: 407856 - RNA, 22 nt, Human
uagugucuugaacagugccugg

SEQ ID NO: 407857 - RNA, 20 nt, Human
uaucauagcagcaucagcaa

SEQ ID NO: 407858 - RNA, 26 nt, Human
uaucauagcagcaucagcaaauaaga

SEQ ID NO: 407859 - RNA, 19 nt, Human
uaugaaacggaggcagucu

SEQ ID NO: 407860 - RNA, 23 nt, Human
ucaaugaguaguaaaacuucuca

SEQ ID NO: 407861 - RNA, 24 nt, Human
ucaccgcacccuccgccucccagg

SEQ ID NO: 407862 - RNA, 23 nt, Human
ucacucuuguugcccaggcuaga

SEQ ID NO: 407863 - RNA, 22 nt, Human
ucacuuugggaggccaaggccg

SEQ ID NO: 407864 - RNA, 18 nt, Human
ucagaaaagaaagaaaau

SEQ ID NO: 407865 - RNA, 19 nt, Human
ucagcaaauaagaaugcug

SEQ ID NO: 407866 - RNA, 21 nt, Human
ucagcucauucuucccuaccu

SEQ ID NO: 407867 - RNA, 21 nt, Human
ucagggguuuccuugucuuuc

SEQ ID NO: 407868 - RNA, 25 nt, Human
ucagugauagauucauucucccaaa

SEQ ID NO: 407869 - RNA, 23 nt, Human
uccaaaaaaugaaaaugaaaaug

SEQ ID NO: 407870 - RNA, 18 nt, Human
uccauguuggucaggcug

SEQ ID NO: 407871 - RNA, 24 nt, Human
ucccaaagugcugggaugacaggc

SEQ ID NO: 407872 - RNA, 21 nt, Human
ucccagguucaagcgauucuc

SEQ ID NO: 407873 - RNA, 24 nt, Human
ucccagguucaagcgauucuccug

SEQ ID NO: 407874 - RNA, 19 nt, Human
ucccauccuaucucuuccc

SEQ ID NO: 407875 - RNA, 22 nt, Human
ucccuaccucccccuacaaccc

SEQ ID NO: 407876 - RNA, 24 nt, Human
uccugauuagcugggauuacaggc

SEQ ID NO: 407877 - RNA, 18 nt, Human
uccugccaacucugcacc

SEQ ID NO: 407878 - RNA, 23 nt, Human
uccugccaacucugcaccccacc

SEQ ID NO: 407879 - RNA, 22 nt, Human
ucgcacuccagucugagcaaca

SEQ ID NO: 407880 - RNA, 24 nt, Human
ucgcuugaaccugggaggcggagg

SEQ ID NO: 407881 - RNA, 23 nt, Human
ucgugcuuucuuguuuucucgau

SEQ ID NO: 407882 - RNA, 18 nt, Human
ucuaccaagaagggcucu

SEQ ID NO: 407883 - RNA, 23 nt, Human
ucuccaaaaaaugaaaaugaaaa

SEQ ID NO: 407884 - RNA, 20 nt, Human
ucucccacucccaaccucag

SEQ ID NO: 407885 - RNA, 23 nt, Human
ucucccauuacugagaauggguc

SEQ ID NO: 407886 - RNA, 22 nt, Human
ucuccccagauguagugaaagc

SEQ ID NO: 407887 - RNA, 20 nt, Human
ucuccuccuucucccacucc

SEQ ID NO: 407888 - RNA, 24 nt, Human
ucuccugccucagccuccugauua

SEQ ID NO: 407889 - RNA, 27 nt, Human
ucucuccuccuucucccacuccucccu

SEQ ID NO: 407890 - RNA, 24 nt, Human
ucuguagccaagaaaaaccaagac

SEQ ID NO: 407891 - RNA, 18 nt, Human
ucuuguugcccaggcuag

SEQ ID NO: 407892 - RNA, 21 nt, Human
ucuuucuuucuuucguuucuu

SEQ ID NO: 407893 - RNA, 18 nt, Human
ucuuucuuucuuucuuuc

SEQ ID NO: 407894 - RNA, 25 nt, Human
ucuuucuuucuuucuuucuuucuuu

SEQ ID NO: 407895 - RNA, 24 nt, Human
ucuuucuuucuuucuuuuguuucu

SEQ ID NO: 407896 - RNA, 24 nt, Human
ucuuucuuucuuucuuuuguuucu

SEQ ID NO: 407897 - RNA, 20 nt, Human
ugaaacacauucagucauac

SEQ ID NO: 407898 - RNA, 24 nt, Human
ugaaccugggaggcggagguugca

SEQ ID NO: 407899 - RNA, 19 nt, Human
ugaagggacuggcaaagau

SEQ ID NO: 407900 - RNA, 22 nt, Human
ugacaacugcuccccaaagcac

SEQ ID NO: 407901 - RNA, 20 nt, Human
ugacauacagucccauguuu

SEQ ID NO: 407902 - RNA, 18 nt, Human
ugaccaaaauauuuaaag

SEQ ID NO: 407903 - RNA, 19 nt, Human
ugacuuggugggcugucua

SEQ ID NO: 407904 - RNA, 23 nt, Human
ugagacagaguuucacucuuguu

SEQ ID NO: 407905 - RNA, 22 nt, Human
ugagccgagaucgcgccacugc

SEQ ID NO: 407906 - RNA, 20 nt, Human
ugaggcaggagaaucgcuug

SEQ ID NO: 407907 - RNA, 24 nt, Human
ugaggcaggagaaucgcuugaacc

SEQ ID NO: 407908 - RNA, 25 nt, Human
ugaggcaggagaaucgcuugaaccu

SEQ ID NO: 407909 - RNA, 19 nt, Human
ugaggugggggggugauuu

SEQ ID NO: 407910 - RNA, 23 nt, Human
ugaguugguacauuucuggugcu

SEQ ID NO: 407911 - RNA, 24 nt, Human
ugaguuucuggggaaaaagaagaa

SEQ ID NO: 407912 - RNA, 24 nt, Human
ugauguuuguacuuuuaguagaga

SEQ ID NO: 407913 - RNA, 23 nt, Human
ugcagagcaagucauggaaacac

SEQ ID NO: 407914 - RNA, 19 nt, Human
ugcagagggaaguuaugga

SEQ ID NO: 407915 - RNA, 20 nt, Human
ugcagcugaaaaggcauuga

SEQ ID NO: 407916 - RNA, 20 nt, Human
ugccaguccaguaagucacc

SEQ ID NO: 407917 - RNA, 22 nt, Human
ugcccagacaaccccgggagac

SEQ ID NO: 407918 - RNA, 21 nt, Human
ugcccaugagucucuuugacc

SEQ ID NO: 407919 - RNA, 24 nt, Human
ugccucagccuccugauuagcugg

SEQ ID NO: 407920 - RNA, 18 nt, Human
ugccugugucuuagagac

SEQ ID NO: 407921 - RNA, 24 nt, Human
ugccuuagccucccaaagugcugg

SEQ ID NO: 407922 - RNA, 23 nt, Human
ugcuuuccuguuuucuuuuucuu

SEQ ID NO: 407923 - RNA, 20 nt, Human
uggaaagaaccuagguccca

SEQ ID NO: 407924 - RNA, 23 nt, Human
uggaagcggaagcaggcaugaca

SEQ ID NO: 407925 - RNA, 21 nt, Human
uggaauagcaucacuuagacu

SEQ ID NO: 407926 - RNA, 21 nt, Human
uggaauauaagcuccgaaggg

SEQ ID NO: 407927 - RNA, 18 nt, Human
uggauuuuuagcaucauu

SEQ ID NO: 407928 - RNA, 20 nt, Human
uggcacaucagaaaugacaa

SEQ ID NO: 407929 - RNA, 20 nt, Human
uggcaccagccacaaauacc

SEQ ID NO: 407930 - RNA, 20 nt, Human
ugggaaaaaaaacaccacca

SEQ ID NO: 407931 - RNA, 24 nt, Human
ugggaaaaaaaacaccaccauagu

SEQ ID NO: 407932 - RNA, 23 nt, Human
ugggaggagacagcgacggcugc

SEQ ID NO: 407933 - RNA, 23 nt, Human
ugggaggagacagcgacggcugc

SEQ ID NO: 407934 - RNA, 24 nt, Human
ugggaggccaaggccgguggauca

SEQ ID NO: 407935 - RNA, 29 nt, Human
ugggaggcggagguugcagugacaacggu

SEQ ID NO: 407936 - RNA, 24 nt, Human
ugggaggcggagguugcagugagc

SEQ ID NO: 407937 - RNA, 19 nt, Human
ugggaugacaggcgugagc

SEQ ID NO: 407938 - RNA, 22 nt, Human
ugggaugacaggcgugagccac

SEQ ID NO: 407939 - RNA, 23 nt, Human
ugggaugacaggcgugagccacc

SEQ ID NO: 407940 - RNA, 24 nt, Human
ugggaugacaggcgugagccaccg

SEQ ID NO: 407941 - RNA, 18 nt, Human
ugggauuacaggcauggg

SEQ ID NO: 407942 - RNA, 21 nt, Human
ugggauuacaggcaugggcca

SEQ ID NO: 407943 - RNA, 22 nt, Human
ugggauuacaggcaugggccac

SEQ ID NO: 407944 - RNA, 23 nt, Human
ugggauuacaggcaugggccacc

SEQ ID NO: 407945 - RNA, 23 nt, Human
ugggauuacaggcaugggccacc

SEQ ID NO: 407946 - RNA, 24 nt, Human
ugggauuacaggcaugggccaccg

SEQ ID NO: 407947 - RNA, 24 nt, Human
ugggccaccgugccuggcugaugu

SEQ ID NO: 407948 - RNA, 21 nt, Human
uggguaagccaggagcagcca

SEQ ID NO: 407949 - RNA, 21 nt, Human
uggucaggcuggucucccacu

SEQ ID NO: 407950 - RNA, 21 nt, Human
uggucucccacucccaaccuc

SEQ ID NO: 407951 - RNA, 19 nt, Human
uggugcugacggccuccgc

SEQ ID NO: 407952 - RNA, 18 nt, Human
uguauucagauacauacc

SEQ ID NO: 407953 - RNA, 23 nt, Human
ugucuguaaucccagcuacucgg

SEQ ID NO: 407954 - RNA, 24 nt, Human
ugucuguaaucccagcuacucggg

SEQ ID NO: 407955 - RNA, 20 nt, Human
ugugaugaguggcagcaggu

SEQ ID NO: 407956 - RNA, 19 nt, Human
ugugcugugcuguacuguc

SEQ ID NO: 407957 - RNA, 20 nt, Human
ugugggaagugggaaaaaaa

SEQ ID NO: 407958 - RNA, 20 nt, Human
uguggugguggugccuuccc

SEQ ID NO: 407959 - RNA, 20 nt, Human
uguggugguggugccuuccc

SEQ ID NO: 407960 - RNA, 20 nt, Human
uguuggacauggaagcggaa

SEQ ID NO: 407961 - RNA, 22 nt, Human
uuagagacuuuccaauuuuaua

SEQ ID NO: 407962 - RNA, 19 nt, Human
uuagcaguuaguaugguau

SEQ ID NO: 407963 - RNA, 18 nt, Human
uuaguagagacgguguuu

SEQ ID NO: 407964 - RNA, 24 nt, Human
uuaguagagacgguguuuuuccau

SEQ ID NO: 407965 - RNA, 20 nt, Human
uuauaauuauuuuauuuuug

SEQ ID NO: 407966 - RNA, 22 nt, Human
uuaugacaaacuaaugaauuuc

SEQ ID NO: 407967 - RNA, 21 nt, Human
uucaagcgauucuccugccuc

SEQ ID NO: 407968 - RNA, 23 nt, Human
uucaagcgauucuccugccucag

SEQ ID NO: 407969 - RNA, 24 nt, Human
uucaagcgauucuccugccucagc

SEQ ID NO: 407970 - RNA, 24 nt, Human
uucacucuuguugcccaggcuaga

SEQ ID NO: 407971 - RNA, 24 nt, Human
uuccauguuggucaggcuggucuc

SEQ ID NO: 407972 - RNA, 18 nt, Human
uucuaccaagaagggcuc

SEQ ID NO: 407973 - RNA, 18 nt, Human
uucuucccuaccuccccc

SEQ ID NO: 407974 - RNA, 18 nt, Human
uucuuguuuuuucauggu

SEQ ID NO: 407975 - RNA, 23 nt, Human
uugaacagugccuggucaauagu

SEQ ID NO: 407976 - RNA, 24 nt, Human
uugaaccugggaggcggagguugc

SEQ ID NO: 407977 - RNA, 18 nt, Human
uugcagugagccgagauc

SEQ ID NO: 407978 - RNA, 19 nt, Human
uugcagugagccgagaucg

SEQ ID NO: 407979 - RNA, 22 nt, Human
uugcagugagccgagaucgcgc

SEQ ID NO: 407980 - RNA, 18 nt, Human
uugcuguaggauucaaaa

SEQ ID NO: 407981 - RNA, 20 nt, Human
uugcuguaggauucaaaauu

SEQ ID NO: 407982 - RNA, 18 nt, Human
uuggaacugccgaugugg

SEQ ID NO: 407983 - RNA, 20 nt, Human
uuuagggugacuggcacaug

SEQ ID NO: 407984 - RNA, 25 nt, Human
uuuauguuauuaucgugauugaugu

SEQ ID NO: 407985 - RNA, 18 nt, Human
uuucauucauaacaggca

SEQ ID NO: 407986 - RNA, 23 nt, Human
uuuccaauuuuauacaguggcca

SEQ ID NO: 407987 - RNA, 22 nt, Human
uuuccggguccuaccuuuccua

SEQ ID NO: 407988 - RNA, 21 nt, Human
uuugauuaaaaugacacccca

SEQ ID NO: 407989 - RNA, 22 nt, Human
uuuggcaccagccacaaauacc

SEQ ID NO: 407990 - RNA, 18 nt, Human
uuuguacuuuuaguagag

SEQ ID NO: 407991 - RNA, 19 nt, Human
uuuguacuuuuaguagaga

SEQ ID NO: 407992 - RNA, 20 nt, Human
uuuugagaaaagaggcaacu

SEQ ID NO: 407993 - RNA, 21 nt, Human
uuuuuagcaucauucuaggaa

SEQ ID NO: 407994 - RNA, 20 nt, Human
uuuuuuuuuuugagacagag

SEQ ID NO: 407995 - RNA, 21 nt, Human
uuuuuuuuuuuuuuuucucuc

SEQ ID NO: 407996 - RNA, 18 nt, Human
uuuuuuuuuuuuuuuuug

SEQ ID NO: 407997 - RNA, 22 nt, Human
aagcauaauugcgaacaaauac

SEQ ID NO: 407998 - RNA, 23 nt, Human
acaugacuuucuccccaaaggcc

SEQ ID NO: 407999 - RNA, 19 nt, Human
acgcagaggccuggccugg

SEQ ID NO: 408000 - RNA, 22 nt, Human
ccaccguccagauugggccacu

SEQ ID NO: 408001 - RNA, 22 nt, Human
cccaaaggccacuuugugauaa

SEQ ID NO: 408002 - RNA, 21 nt, Human
cccacgaauucccaccgucca

SEQ ID NO: 408003 - RNA, 22 nt, Human
cgaccaaauauccuugaacgcc

SEQ ID NO: 408004 - RNA, 20 nt, Human
uacuccugccaacucgacgc

SEQ ID NO: 408005 - RNA, 23 nt, Human
uagaaacgcagaggccuggccug

SEQ ID NO: 408006 - RNA, 22 nt, Human
ucagcucuaaugacuuuccuca

SEQ ID NO: 408007 - RNA, 24 nt, Human
uccccaaaggccacuuugugauaa

SEQ ID NO: 408008 - RNA, 24 nt, Human
uccgaccaaauauccuugaacgcc

SEQ ID NO: 408009 - RNA, 23 nt, Human
uccucaguuccguggguuacucc

SEQ ID NO: 408010 - RNA, 22 nt, Human
ugccuagaaacgcagaggccug

SEQ ID NO: 408011 - RNA, 22 nt, Human
ugugauaaaguacauacauaua

SEQ ID NO: 408012 - RNA, 23 nt, Human
uuacuccugccaacucgacgccg

SEQ ID NO: 408013 - RNA, 21 nt, Human
aaaugucucuuuauaaucugc

SEQ ID NO: 408014 - RNA, 26 nt, Human
aacaagaaggcguaacauguuuccuu

SEQ ID NO: 408015 - RNA, 22 nt, Human
acuaccauucacuaguuaggcc

SEQ ID NO: 408016 - RNA, 23 nt, Human
agaaaucaugauuuguuucuuuu

SEQ ID NO: 408017 - RNA, 18 nt, Human
agcaaagcauguuaaaaa

SEQ ID NO: 408018 - RNA, 21 nt, Human
caacaacguuuuagggccuga

SEQ ID NO: 408019 - RNA, 20 nt, Human
caucccuuuuuuaaauuuca

SEQ ID NO: 408020 - RNA, 23 nt, Human
cccaaagucuccgguccggacuc

SEQ ID NO: 408021 - RNA, 18 nt, Human
cccuuucuagacacuacc

SEQ ID NO: 408022 - RNA, 20 nt, Human
cggcaguaacuuccacuagc

SEQ ID NO: 408023 - RNA, 22 nt, Human
cguaacauguuuccuugacuca

SEQ ID NO: 408024 - RNA, 22 nt, Human
cuccgguccggacucgguggcg

SEQ ID NO: 408025 - RNA, 22 nt, Human
gcaagccguuuuuccuacaaca

SEQ ID NO: 408026 - RNA, 19 nt, Human
ggugauaacauuagaaaag

SEQ ID NO: 408027 - RNA, 21 nt, Human
uaaacaagaacuugcuaaaga

SEQ ID NO: 408028 - RNA, 23 nt, Human
uaaacaagaacuugcuaaagaaa

SEQ ID NO: 408029 - RNA, 23 nt, Human
uaacaggcagacacugcauuucu

SEQ ID NO: 408030 - RNA, 19 nt, Human
uaacauguuuccuugacuc

SEQ ID NO: 408031 - RNA, 22 nt, Human
uaaugaauaucaaccaaauguc

SEQ ID NO: 408032 - RNA, 23 nt, Human
ucgguggcgcggcaguaacuucc

SEQ ID NO: 408033 - RNA, 21 nt, Human
ugcaagccguuuuuccuacaa

SEQ ID NO: 408034 - RNA, 22 nt, Human
ugcacagccacauuuauuguuc

SEQ ID NO: 408035 - RNA, 19 nt, Human
uguaacaggcagacacugc

SEQ ID NO: 408036 - RNA, 22 nt, Human
uguuaaaaacuucacucaucaa

SEQ ID NO: 408037 - RNA, 27 nt, Human
uuaaugaauaucaaccaaaugucucuu

SEQ ID NO: 408038 - RNA, 19 nt, Human
uuaggccccaaagucuccg

SEQ ID NO: 408039 - RNA, 21 nt, Human
uuccagccuggaaaaacaucc

SEQ ID NO: 408040 - RNA, 24 nt, Human
aaagcacuucugccauaacuccag

SEQ ID NO: 408041 - RNA, 21 nt, Human
aagaugucaauacagcauaaa

SEQ ID NO: 408042 - RNA, 18 nt, Human
aaggacgucuguaaaagc

SEQ ID NO: 408043 - RNA, 21 nt, Human
acuacacugcagguacagaaa

SEQ ID NO: 408044 - RNA, 23 nt, Human
acuacacugcagguacagaaaua

SEQ ID NO: 408045 - RNA, 22 nt, Human
agagaauugacauuuugcaaaa

SEQ ID NO: 408046 - RNA, 21 nt, Human
caaaacacaaaccaguugauc

SEQ ID NO: 408047 - RNA, 22 nt, Human
caaaacacaaaccaguugauca

SEQ ID NO: 408048 - RNA, 21 nt, Human
caaaaugcagcaaacauuuua

SEQ ID NO: 408049 - RNA, 18 nt, Human
cagcagcaaaacacaaac

SEQ ID NO: 408050 - RNA, 20 nt, Human
caugagaaaaggaauguuca

SEQ ID NO: 408051 - RNA, 23 nt, Human
cauuuugcaaaaugcagcaaaca

SEQ ID NO: 408052 - RNA, 23 nt, Human
cccaugguauuuugguuuucuuc

SEQ ID NO: 408053 - RNA, 21 nt, Human
cuccaauaauuuucaggacac

SEQ ID NO: 408054 - RNA, 28 nt, Human
gagaaaaggaauguucaaaaggguaugc

SEQ ID NO: 408055 - RNA, 22 nt, Human
uaaaugcagcagcaaaacacaa

SEQ ID NO: 408056 - RNA, 18 nt, Human
uaagugacaguaugccac

SEQ ID NO: 408057 - RNA, 20 nt, Human
uacaugagaaaaggaauguu

SEQ ID NO: 408058 - RNA, 18 nt, Human
uauuuugguuuucuucuu

SEQ ID NO: 408059 - RNA, 21 nt, Human
ucuucuggagauuaaagcugu

SEQ ID NO: 408060 - RNA, 27 nt, Human
ucuucuggagauuaaagcuguuuuucu

SEQ ID NO: 408061 - RNA, 20 nt, Human
ugacaguaugccacuauaau

SEQ ID NO: 408062 - RNA, 24 nt, Human
ugcaaaaugcagcaaacauuuuaa

SEQ ID NO: 408063 - RNA, 19 nt, Human
ugcccaugacaaauuacua

SEQ ID NO: 408064 - RNA, 22 nt, Human
uggagauuaaagcuguuuuucu

SEQ ID NO: 408065 - RNA, 20 nt, Human
ugguauuuugguuuucuucu

SEQ ID NO: 408066 - RNA, 19 nt, Human
uguaaaagcuuguucucug

SEQ ID NO: 408067 - RNA, 23 nt, Human
ugugagagaauuucugcagguaa

SEQ ID NO: 408068 - RNA, 22 nt, Human
uuaaggauuacaucucugcacu

SEQ ID NO: 408069 - RNA, 23 nt, Human
uuucuucuggagauuaaagcugu

SEQ ID NO: 408070 - RNA, 19 nt, Human
uuugccauucccaguucuu

SEQ ID NO: 408071 - RNA, 20 nt, Human
uuugccauucccaguucuuu

SEQ ID NO: 408072 - RNA, 18 nt, Human
uuugguuuucuucuggag

SEQ ID NO: 408073 - RNA, 22 nt, Human
aagcaaacaauaaagcaggaac

SEQ ID NO: 408074 - RNA, 20 nt, Human
aagcaggaacagcaaacaga

SEQ ID NO: 408075 - RNA, 19 nt, Human
aauugcccucaccuuucca

SEQ ID NO: 408076 - RNA, 22 nt, Human
acugcaauuuauuagcgguauc

SEQ ID NO: 408077 - RNA, 19 nt, Human
agaaagcaaacaauaaagc

SEQ ID NO: 408078 - RNA, 26 nt, Human
aggacacuguccucuucuguggucuc

SEQ ID NO: 408079 - RNA, 20 nt, Human
auccaucuuucugggaggcc

SEQ ID NO: 408080 - RNA, 22 nt, Human
cagaaagcaaacaauaaagcag

SEQ ID NO: 408081 - RNA, 21 nt, Human
cagauuuuuccaucacaugac

SEQ ID NO: 408082 - RNA, 20 nt, Human
ccuugugucugagccuaucc

SEQ ID NO: 408083 - RNA, 22 nt, Human
cucccagcucuuguacccaucc

SEQ ID NO: 408084 - RNA, 20 nt, Human
cucuccuugugucugagccu

SEQ ID NO: 408085 - RNA, 30 nt, Human
cuuguacccaucccuguggguccuggcuaa

SEQ ID NO: 408086 - RNA, 20 nt, Human
gccauaacugccuugacugc

SEQ ID NO: 408087 - RNA, 22 nt, Human
uaacaggugagccucgucuucu

SEQ ID NO: 408088 - RNA, 18 nt, Human
uagcgguaucuguaaaca

SEQ ID NO: 408089 - RNA, 22 nt, Human
uaucugaaauagaggcacccua

SEQ ID NO: 408090 - RNA, 23 nt, Human
uaugacagcacacagaaagcaaa

SEQ ID NO: 408091 - RNA, 19 nt, Human
ucucccagcucuuguaccc

SEQ ID NO: 408092 - RNA, 19 nt, Human
ucuccuugugucugagccu

SEQ ID NO: 408093 - RNA, 23 nt, Human
ucugcucucuccaagccucuccu

SEQ ID NO: 408094 - RNA, 24 nt, Human
ugaaaacaaaacaaauaggaacac

SEQ ID NO: 408095 - RNA, 22 nt, Human
ugacagcacacagaaagcaaaa

SEQ ID NO: 408096 - RNA, 20 nt, Human
ugcccucaccuuuccacccu

SEQ ID NO: 408097 - RNA, 23 nt, Human
ugcucucuccaagccucuccuug

SEQ ID NO: 408098 - RNA, 18 nt, Human
uggcuccaugggaaggac

SEQ ID NO: 408099 - RNA, 22 nt, Human
uucuguggucucagucuguaua

SEQ ID NO: 408100 - RNA, 21 nt, Human
accccgaccccgaccccagcc

SEQ ID NO: 408101 - RNA, 21 nt, Human
accggccccgaccccgacccc

SEQ ID NO: 408102 - RNA, 25 nt, Human
cacucgcccuccacugacagcccca

SEQ ID NO: 408103 - RNA, 24 nt, Human
ccacgccccagggcuggaaaaagg

SEQ ID NO: 408104 - RNA, 19 nt, Human
ccccaccggccccgacccc

SEQ ID NO: 408105 - RNA, 21 nt, Human
ccccgaccccgaccccgaccc

SEQ ID NO: 408106 - RNA, 18 nt, Human
ccccggccgagccggucc

SEQ ID NO: 408107 - RNA, 18 nt, Human
ccccggggccagcgaccc

SEQ ID NO: 408108 - RNA, 22 nt, Human
ccccggggccagcgaccccucc

SEQ ID NO: 408109 - RNA, 19 nt, Human
ccccugagaaccagcacuc

SEQ ID NO: 408110 - RNA, 22 nt, Human
ccccugagaaccagcacucgcc

SEQ ID NO: 408111 - RNA, 23 nt, Human
cccgaccccgaccccagccacgc

SEQ ID NO: 408112 - RNA, 25 nt, Human
cccgaccccgaccccgaccccagcc

SEQ ID NO: 408113 - RNA, 26 nt, Human
cccgaccccgaccccgaccccagcca

SEQ ID NO: 408114 - RNA, 22 nt, Human
cccggggccagcgaccccuccc

SEQ ID NO: 408115 - RNA, 20 nt, Human
cccuccacugacagccccaa

SEQ ID NO: 408116 - RNA, 28 nt, Human
ccgaccccgaccccgaccccagccacgc

SEQ ID NO: 408117 - RNA, 19 nt, Human
cgaccccgaccccagccac

SEQ ID NO: 408118 - RNA, 21 nt, Human
cgaggcccguuggcccgaagg

SEQ ID NO: 408119 - RNA, 22 nt, Human
cgccccagggcuggaaaaagga

SEQ ID NO: 408120 - RNA, 19 nt, Human
cggccgagccgguccgcgc

SEQ ID NO: 408121 - RNA, 19 nt, Human
cgggggcggggcccccacc

SEQ ID NO: 408122 - RNA, 21 nt, Human
gaaccagcacucgcccuccac

SEQ ID NO: 408123 - RNA, 18 nt, Human
gaccccgaccccgacccc

SEQ ID NO: 408124 - RNA, 24 nt, Human
gcaggccaggagacgggggcgggg

SEQ ID NO: 408125 - RNA, 24 nt, Human
gcccccaccggccccgaccccgac

SEQ ID NO: 408126 - RNA, 31 nt, Human
gcccccaccggccccgaccccgaccccgacc

SEQ ID NO: 408127 - RNA, 21 nt, Human
gccccgaccccgaccccgacc

SEQ ID NO: 408128 - RNA, 22 nt, Human
gccccgaccccgaccccgaccc

SEQ ID NO: 408129 - RNA, 21 nt, Human
gcggcagccgagcacggggcc

SEQ ID NO: 408130 - RNA, 22 nt, Human
ggcggcgcaugcgcggccccgg

SEQ ID NO: 408131 - RNA, 21 nt, Human
gggccagcgaccccuccccag

SEQ ID NO: 408132 - RNA, 24 nt, Human
guggcggcgcaugcgcggccccgg

SEQ ID NO: 408133 - RNA, 19 nt, Human
uagcccaggaagaggacga

SEQ ID NO: 408134 - RNA, 18 nt, Human
uccccagccgccggcgcc

SEQ ID NO: 408135 - RNA, 23 nt, Human
ucgcccuccacugacagccccaa

SEQ ID NO: 408136 - RNA, 27 nt, Human
uugguggcggcgcaugcgcggccccuu

SEQ ID NO: 408137 - RNA, 22 nt, Human
aaacaagaacaaaaauggagaa

SEQ ID NO: 408138 - RNA, 22 nt, Human
aaacaagaacaaaaauggagaa

SEQ ID NO: 408139 - RNA, 21 nt, Human
aaagcaguuaauuaaaaugaa

SEQ ID NO: 408140 - RNA, 31 nt, Human
aaauaacagaaaccacacuuaucaaaagcuu

SEQ ID NO: 408141 - RNA, 24 nt, Human
aacaagaaaacucaauagccccca

SEQ ID NO: 408142 - RNA, 24 nt, Human
aacacacaaacagaaaaaggaaag

SEQ ID NO: 408143 - RNA, 20 nt, Human
aagaacgaaacaagccacuu

SEQ ID NO: 408144 - RNA, 22 nt, Human
aaggagggaggaaggaagggau

SEQ ID NO: 408145 - RNA, 18 nt, Human
aaucuaaauggauuccua

SEQ ID NO: 408146 - RNA, 20 nt, Human
acaaacagaaaaauaauucg

SEQ ID NO: 408147 - RNA, 24 nt, Human
acacuguagugugaaggagaggga

SEQ ID NO: 408148 - RNA, 18 nt, Human
accugagccccuucaagc

SEQ ID NO: 408149 - RNA, 20 nt, Human
accugagccccuucaagcgc

SEQ ID NO: 408150 - RNA, 22 nt, Human
agaaaagcaaagaggggugggg

SEQ ID NO: 408151 - RNA, 20 nt, Human
agaaaagcaaagcaaaaagg

SEQ ID NO: 408152 - RNA, 22 nt, Human
agaaacaagaaaacucaauagc

SEQ ID NO: 408153 - RNA, 24 nt, Human
agaaggggagagaaaagcaaagag

SEQ ID NO: 408154 - RNA, 20 nt, Human
agagacaaagaugggaaucc

SEQ ID NO: 408155 - RNA, 24 nt, Human
agagggguggggaggggaaaauca

SEQ ID NO: 408156 - RNA, 20 nt, Human
agcaaagagggguggggagg

SEQ ID NO: 408157 - RNA, 25 nt, Human
agcaaagcaaaaagguuaagcaccc

SEQ ID NO: 408158 - RNA, 21 nt, Human
aggaaaccuuugugcuaaugu

SEQ ID NO: 408159 - RNA, 18 nt, Human
aggaaauuacagauuucu

SEQ ID NO: 408160 - RNA, 21 nt, Human
aggaagggauggagagagagg

SEQ ID NO: 408161 - RNA, 20 nt, Human
aggagggaggaaggaaggga

SEQ ID NO: 408162 - RNA, 20 nt, Human
aggagggaggaaggaaggga

SEQ ID NO: 408163 - RNA, 24 nt, Human
agggauggagagagaggggagaga

SEQ ID NO: 408164 - RNA, 18 nt, Human
agggguggggaggggaaa

SEQ ID NO: 408165 - RNA, 25 nt, Human
agggguggggaggggaaaaucaagg

SEQ ID NO: 408166 - RNA, 23 nt, Human
agugugaaggagagggagaagga

SEQ ID NO: 408167 - RNA, 25 nt, Human
auaauaaugaaaguaauaauaaaac

SEQ ID NO: 408168 - RNA, 24 nt, Human
aucggcccuccucaccuuucaccu

SEQ ID NO: 408169 - RNA, 20 nt, Human
auucuucaaaaccuccuccu

SEQ ID NO: 408170 - RNA, 23 nt, Human
caaagcaaaaagguuaagcaccc

SEQ ID NO: 408171 - RNA, 19 nt, Human
caacaagaccagcaaagug

SEQ ID NO: 408172 - RNA, 18 nt, Human
caacccugagcucuuccu

SEQ ID NO: 408173 - RNA, 19 nt, Human
caaggaggcacgcucccuu

SEQ ID NO: 408174 - RNA, 24 nt, Human
cacacaaacagaaaaauaauucgc

SEQ ID NO: 408175 - RNA, 21 nt, Human
cacacauuaggaaacuaacac

SEQ ID NO: 408176 - RNA, 21 nt, Human
cacccugucuccaaaaauguc

SEQ ID NO: 408177 - RNA, 19 nt, Human
cacgcucccuuuauccucc

SEQ ID NO: 408178 - RNA, 22 nt, Human
cacucccuuuacgcagccaguc

SEQ ID NO: 408179 - RNA, 19 nt, Human
cacugaauggcaacaaaga

SEQ ID NO: 408180 - RNA, 21 nt, Human
cagaaaccacaagcugacaau

SEQ ID NO: 408181 - RNA, 20 nt, Human
cagauaugaucaaggaauua

SEQ ID NO: 408182 - RNA, 23 nt, Human
cagcaauaugccauuuuucugau

SEQ ID NO: 408183 - RNA, 19 nt, Human
caguagaauaggacccaac

SEQ ID NO: 408184 - RNA, 21 nt, Human
caguagaauaggacccaacaa

SEQ ID NO: 408185 - RNA, 23 nt, Human
ccaaugucccuacccuguucucc

SEQ ID NO: 408186 - RNA, 22 nt, Human
ccagcaaaguggcaccuggggc

SEQ ID NO: 408187 - RNA, 23 nt, Human
ccagucacacacaauaacagcua

SEQ ID NO: 408188 - RNA, 23 nt, Human
cccccuccauuuugcucuucucc

SEQ ID NO: 408189 - RNA, 21 nt, Human
cccugagcucuuccuuuuccc

SEQ ID NO: 408190 - RNA, 23 nt, Human
cccuuuauccuccccacccuguc

SEQ ID NO: 408191 - RNA, 24 nt, Human
ccugagccccuucaagcgcaccca

SEQ ID NO: 408192 - RNA, 19 nt, Human
ccuggggcuucaaggaagc

SEQ ID NO: 408193 - RNA, 20 nt, Human
cgacugggacagcccggggc

SEQ ID NO: 408194 - RNA, 26 nt, Human
cgcgaaacagcagccgacugggacag

SEQ ID NO: 408195 - RNA, 22 nt, Human
cguagcacugaauggcaacaaa

SEQ ID NO: 408196 - RNA, 24 nt, Human
cuaacacaucuuuaagaaacaaga

SEQ ID NO: 408197 - RNA, 23 nt, Human
cuagagguuucuguccccuucug

SEQ ID NO: 408198 - RNA, 19 nt, Human
cucaccuuucaccuucgcc

SEQ ID NO: 408199 - RNA, 25 nt, Human
cuccuaccuuggcuuccccuuugga

SEQ ID NO: 408200 - RNA, 18 nt, Human
cucuaggacucagaccua

SEQ ID NO: 408201 - RNA, 26 nt, Human
cucuuacacgcacacucaagcuccag

SEQ ID NO: 408202 - RNA, 23 nt, Human
cucuuccuuuucccuucuuucug

SEQ ID NO: 408203 - RNA, 23 nt, Human
cugagccccuucaagcgcaccca

SEQ ID NO: 408204 - RNA, 23 nt, Human
cuggccccucccccuccauuuug

SEQ ID NO: 408205 - RNA, 20 nt, Human
cuuuauuccucccuuugggg

SEQ ID NO: 408206 - RNA, 21 nt, Human
gaaaccuuugugcuaauguug

SEQ ID NO: 408207 - RNA, 21 nt, Human
gacgagcgcaaguacuggcuc

SEQ ID NO: 408208 - RNA, 24 nt, Human
gagaaggggagagaaaagcaaaga

SEQ ID NO: 408209 - RNA, 19 nt, Human
gagagggagaaggagggag

SEQ ID NO: 408210 - RNA, 18 nt, Human
gagcgcaaguacuggcuc

SEQ ID NO: 408211 - RNA, 25 nt, Human
gaggaaaccuuugugcuaauguugg

SEQ ID NO: 408212 - RNA, 18 nt, Human
gaggggaaaaucaaggag

SEQ ID NO: 408213 - RNA, 26 nt, Human
gcaaagagggguggggaggggaaaau

SEQ ID NO: 408214 - RNA, 21 nt, Human
gcccugaaacucuuugcucuu

SEQ ID NO: 408215 - RNA, 20 nt, Human
gcuauaaaagauggugcaaa

SEQ ID NO: 408216 - RNA, 18 nt, Human
gcucccuuuauccucccc

SEQ ID NO: 408217 - RNA, 20 nt, Human
gcuuuauucuucaaaaccuc

SEQ ID NO: 408218 - RNA, 20 nt, Human
ggaaaauggcaugagauucu

SEQ ID NO: 408219 - RNA, 22 nt, Human
ggaaaccuuugugcuaauguug

SEQ ID NO: 408220 - RNA, 21 nt, Human
ggagagaaaagcaaagagggg

SEQ ID NO: 408221 - RNA, 19 nt, Human
ggcaacaaagaugggcagg

SEQ ID NO: 408222 - RNA, 20 nt, Human
guaaagacgagcgcaaguac

SEQ ID NO: 408223 - RNA, 23 nt, Human
guaaagacgagcgcaaguacugg

SEQ ID NO: 408224 - RNA, 20 nt, Human
gugaaggagagggagaagga

SEQ ID NO: 408225 - RNA, 19 nt, Human
gugcaaauaagaguuucac

SEQ ID NO: 408226 - RNA, 23 nt, Human
gugcggcaacaagaccagcaaag

SEQ ID NO: 408227 - RNA, 22 nt, Human
gugggugggcggaugagcacag

SEQ ID NO: 408228 - RNA, 19 nt, Human
uaaaaaaaacagcgugaca

SEQ ID NO: 408229 - RNA, 21 nt, Human
uaaaaaaaacagcgugacacc

SEQ ID NO: 408230 - RNA, 26 nt, Human
uaaaaaggcaaauaauaaugaaagua

SEQ ID NO: 408231 - RNA, 18 nt, Human
uaaaacugcaaccugaau

SEQ ID NO: 408232 - RNA, 19 nt, Human
uaaauaaccacuucagaua

SEQ ID NO: 408233 - RNA, 20 nt, Human
uaacacaucuuuaagaaaca

SEQ ID NO: 408234 - RNA, 22 nt, Human
uaacagaucggcccuccucacc

SEQ ID NO: 408235 - RNA, 21 nt, Human
uaauuccaugaauccacuagg

SEQ ID NO: 408236 - RNA, 23 nt, Human
uacacgcacacucaagcuccagc

SEQ ID NO: 408237 - RNA, 20 nt, Human
uacgcagccagucacacaca

SEQ ID NO: 408238 - RNA, 24 nt, Human
uacuggcuccuaccuuggcuuccc

SEQ ID NO: 408239 - RNA, 26 nt, Human
uagaauaggacccaacaaauaugaca

SEQ ID NO: 408240 - RNA, 24 nt, Human
uagagacaaagaugggaauccauu

SEQ ID NO: 408241 - RNA, 22 nt, Human
uauaaauguagcuuucuuggaa

SEQ ID NO: 408242 - RNA, 21 nt, Human
uauccuccccacccugucucc

SEQ ID NO: 408243 - RNA, 23 nt, Human
uaugagauguagugacuauuggu

SEQ ID NO: 408244 - RNA, 23 nt, Human
uauuucuggccccucccccucca

SEQ ID NO: 408245 - RNA, 19 nt, Human
ucaacaguagaauaggacc

SEQ ID NO: 408246 - RNA, 24 nt, Human
ucaauagcccccacaauaagaagu

SEQ ID NO: 408247 - RNA, 25 nt, Human
uccccuucugcugucguuucuggaa

SEQ ID NO: 408248 - RNA, 21 nt, Human
ucccuacccuguucucccagc

SEQ ID NO: 408249 - RNA, 23 nt, Human
ucccuuugggguggcugcgagcu

SEQ ID NO: 408250 - RNA, 23 nt, Human
uccuccccacccugucuccaaaa

SEQ ID NO: 408251 - RNA, 21 nt, Human
ucuaaacugaggaaaccuuug

SEQ ID NO: 408252 - RNA, 20 nt, Human
ucuccaaaaauguccaaccc

SEQ ID NO: 408253 - RNA, 19 nt, Human
ucuguccccuucugcuguu

SEQ ID NO: 408254 - RNA, 20 nt, Human
ugaaacacacaaacagaaaa

SEQ ID NO: 408255 - RNA, 24 nt, Human
ugaaacacacaaacagaaaaauaa

SEQ ID NO: 408256 - RNA, 27 nt, Human
ugaaacacacaaacagaaaagggaguc

SEQ ID NO: 408257 - RNA, 19 nt, Human
ugaaggagagggagaagga

SEQ ID NO: 408258 - RNA, 21 nt, Human
ugacagucuuagcgacgcagg

SEQ ID NO: 408259 - RNA, 22 nt, Human
ugagagcaaggaaauuacagau

SEQ ID NO: 408260 - RNA, 18 nt, Human
ugaggaaaccuuugugcu

SEQ ID NO: 408261 - RNA, 24 nt, Human
ugaguaaauaaccacuucagauau

SEQ ID NO: 408262 - RNA, 21 nt, Human
ugaugcagcuuuuucacuuga

SEQ ID NO: 408263 - RNA, 23 nt, Human
ugcaaauaagaguuucacucucc

SEQ ID NO: 408264 - RNA, 21 nt, Human
ugcuccuguucuuuauuccuc

SEQ ID NO: 408265 - RNA, 20 nt, Human
ugcugaccacaucccucagc

SEQ ID NO: 408266 - RNA, 19 nt, Human
ugcugucguuucuggaaua

SEQ ID NO: 408267 - RNA, 19 nt, Human
uggaagacaguagaauuug

SEQ ID NO: 408268 - RNA, 18 nt, Human
uggaauaugcuauacaga

SEQ ID NO: 408269 - RNA, 23 nt, Human
uggccccucccccuccauuuugc

SEQ ID NO: 408270 - RNA, 18 nt, Human
uggugcaaauaagaguuu

SEQ ID NO: 408271 - RNA, 24 nt, Human
uguaagauggacuuaguguguaua

SEQ ID NO: 408272 - RNA, 26 nt, Human
uguaagauggacuuaguguguauagg

SEQ ID NO: 408273 - RNA, 24 nt, Human
uguagcccagguucuauuauuauu

SEQ ID NO: 408274 - RNA, 24 nt, Human
uguccccuucugcugucguuucug

SEQ ID NO: 408275 - RNA, 21 nt, Human
ugugcggcaacaagaccagca

SEQ ID NO: 408276 - RNA, 24 nt, Human
ugugcggcaacaagaccagcaaag

SEQ ID NO: 408277 - RNA, 18 nt, Human
uuaaaaaaaacagcguga

SEQ ID NO: 408278 - RNA, 19 nt, Human
uuaagcacccaacugcacc

SEQ ID NO: 408279 - RNA, 21 nt, Human
uuagagucuaaacugaggaaa

SEQ ID NO: 408280 - RNA, 21 nt, Human
uuauccuccccacccugucuc

SEQ ID NO: 408281 - RNA, 21 nt, Human
uucaaaaccuccuccuauuuc

SEQ ID NO: 408282 - RNA, 18 nt, Human
uucccuucuuucugcgcc

SEQ ID NO: 408283 - RNA, 18 nt, Human
uucccuucuuucugcgcc

SEQ ID NO: 408284 - RNA, 23 nt, Human
uucgccagugcccugaaacucuu

SEQ ID NO: 408285 - RNA, 19 nt, Human
uucuggccccucccccucc

SEQ ID NO: 408286 - RNA, 19 nt, Human
uucuggggggcaggggcag

SEQ ID NO: 408287 - RNA, 23 nt, Human
uugacauuaaaaaaaacagcgug

SEQ ID NO: 408288 - RNA, 26 nt, Human
uugacauuaaaaaaaacagcgugaca

SEQ ID NO: 408289 - RNA, 19 nt, Human
uuucccuucuuucugcgcc

SEQ ID NO: 408290 - RNA, 18 nt, Human
uuucuggccccucccccu

SEQ ID NO: 408291 - RNA, 21 nt, Human
uuucuggccccucccccucca

SEQ ID NO: 408292 - RNA, 20 nt, Human
uuucuggggggcaggggcag

SEQ ID NO: 408293 - RNA, 20 nt, Human
uuucuuggaagacaguagaa

SEQ ID NO: 408294 - RNA, 23 nt, Human
uuucuuggaagacaguagaauuu

SEQ ID NO: 408295 - RNA, 24 nt, Human
aaacaagcaccaaacaacugggca

SEQ ID NO: 408296 - RNA, 27 nt, Human
aaacaagcaccaaacaacugggcauaa

SEQ ID NO: 408297 - RNA, 20 nt, Human
aaugacaucaucacaagagu

SEQ ID NO: 408298 - RNA, 18 nt, Human
acacgcacacacacaaaa

SEQ ID NO: 408299 - RNA, 21 nt, Human
acaguguuuguuugggguuuu

SEQ ID NO: 408300 - RNA, 18 nt, Human
accacaguguuuguuugg

SEQ ID NO: 408301 - RNA, 24 nt, Human
accucuugguaaaugcacaugaau

SEQ ID NO: 408302 - RNA, 25 nt, Human
accuuauuuuuccccuuuacauuca

SEQ ID NO: 408303 - RNA, 21 nt, Human
acuuaagggggugcaaagagg

SEQ ID NO: 408304 - RNA, 19 nt, Human
aggaaccugaaauaaacuu

SEQ ID NO: 408305 - RNA, 22 nt, Human
auccaagaaagcaguuuauaaa

SEQ ID NO: 408306 - RNA, 19 nt, Human
aucccccgcacucuccguc

SEQ ID NO: 408307 - RNA, 20 nt, Human
auggucuuugaguaaacauc

SEQ ID NO: 408308 - RNA, 24 nt, Human
auguaagaccauuuuguaugaacg

SEQ ID NO: 408309 - RNA, 18 nt, Human
auuuaaauuaagccaaag

SEQ ID NO: 408310 - RNA, 23 nt, Human
caagggagacggagcugaagagu

SEQ ID NO: 408311 - RNA, 19 nt, Human
cacaguguuuguuuggggu

SEQ ID NO: 408312 - RNA, 21 nt, Human
caccaaacaacugggcauaau

SEQ ID NO: 408313 - RNA, 18 nt, Human
cagcucccgccuucaucc

SEQ ID NO: 408314 - RNA, 20 nt, Human
caggcagacacuacauggca

SEQ ID NO: 408315 - RNA, 23 nt, Human
caucuuuaagaugaaguuaaaga

SEQ ID NO: 408316 - RNA, 18 nt, Human
ccacauuagccacaaacu

SEQ ID NO: 408317 - RNA, 26 nt, Human
cccugaacaauggaguuuaaucacca

SEQ ID NO: 408318 - RNA, 18 nt, Human
ccgggcagagagggcaca

SEQ ID NO: 408319 - RNA, 19 nt, Human
ccucugaaugccaaugguc

SEQ ID NO: 408320 - RNA, 22 nt, Human
cgcacacacacaaaacuggacc

SEQ ID NO: 408321 - RNA, 23 nt, Human
cgcgucagcggccgaacuggacc

SEQ ID NO: 408322 - RNA, 19 nt, Human
cgggggagccgagugggca

SEQ ID NO: 408323 - RNA, 21 nt, Human
cuggaccauguuuccaggguu

SEQ ID NO: 408324 - RNA, 20 nt, Human
cuggaccugggcagaccggu

SEQ ID NO: 408325 - RNA, 18 nt, Human
cuggugguagcgaagcgu

SEQ ID NO: 408326 - RNA, 20 nt, Human
cuucaucccccgcacucucc

SEQ ID NO: 408327 - RNA, 20 nt, Human
gaagcagggggugcagacgc

SEQ ID NO: 408328 - RNA, 20 nt, Human
gacaccacuucacaugauca

SEQ ID NO: 408329 - RNA, 24 nt, Human
gagcugggaguccccagcagggga

SEQ ID NO: 408330 - RNA, 22 nt, Human
gaggaucuugaccugagcaggu

SEQ ID NO: 408331 - RNA, 20 nt, Human
gccccgcucccgggggagcc

SEQ ID NO: 408332 - RNA, 20 nt, Human
gccuucaucccccgcacucu

SEQ ID NO: 408333 - RNA, 20 nt, Human
gcuaaguguggggauucauc

SEQ ID NO: 408334 - RNA, 19 nt, Human
ggaccugggcagaccggug

SEQ ID NO: 408335 - RNA, 18 nt, Human
ggagcuaaacagauuuuc

SEQ ID NO: 408336 - RNA, 22 nt, Human
ggcagagagggcacaggcgggg

SEQ ID NO: 408337 - RNA, 21 nt, Human
ggcaguuccagcggggacccg

SEQ ID NO: 408338 - RNA, 25 nt, Human
ggccugggccccgcucccgggggag

SEQ ID NO: 408339 - RNA, 18 nt, Human
ggcggggccgcugguggu

SEQ ID NO: 408340 - RNA, 18 nt, Human
gggcacaggcggggccgc

SEQ ID NO: 408341 - RNA, 18 nt, Human
gggcaguuccagcgggga

SEQ ID NO: 408342 - RNA, 20 nt, Human
ggggugcagacgcccgccgc

SEQ ID NO: 408343 - RNA, 21 nt, Human
gugaagcagggggugcagacg

SEQ ID NO: 408344 - RNA, 33 nt, Human
guguguacacauuuacacacacgcacacacagu

SEQ ID NO: 408345 - RNA, 25 nt, Human
uaaaacaagcaccaaacaacugggc

SEQ ID NO: 408346 - RNA, 19 nt, Human
uaaaugcucccagaaaugg

SEQ ID NO: 408347 - RNA, 20 nt, Human
uaagacaccacuucacauga

SEQ ID NO: 408348 - RNA, 21 nt, Human
uaagacaccacuucacaugau

SEQ ID NO: 408349 - RNA, 19 nt, Human
uaagccaaaguuggagcua

SEQ ID NO: 408350 - RNA, 19 nt, Human
uacacacacgcacacacac

SEQ ID NO: 408351 - RNA, 21 nt, Human
uacacacacgcacacacacag

SEQ ID NO: 408352 - RNA, 18 nt, Human
uacacauuuacacacacg

SEQ ID NO: 408353 - RNA, 21 nt, Human
uacuaugucaacagagacucu

SEQ ID NO: 408354 - RNA, 20 nt, Human
uauaauggaaccaaacaacc

SEQ ID NO: 408355 - RNA, 22 nt, Human
ucaacagagacucuccagcccu

SEQ ID NO: 408356 - RNA, 18 nt, Human
ucagcucccgccuucauc

SEQ ID NO: 408357 - RNA, 21 nt, Human
ucauuguuaaguguaauguuu

SEQ ID NO: 408358 - RNA, 21 nt, Human
uccacagagcaggcaagaagg

SEQ ID NO: 408359 - RNA, 19 nt, Human
ucuacagccuuuacccuga

SEQ ID NO: 408360 - RNA, 26 nt, Human
ucuuugauuuaaauuaagccaaccaa

SEQ ID NO: 408361 - RNA, 20 nt, Human
ugaaugccaauggucuuuga

SEQ ID NO: 408362 - RNA, 23 nt, Human
ugaauuggaaguagcaguuccaa

SEQ ID NO: 408363 - RNA, 19 nt, Human
ugacaucaucacaagaguu

SEQ ID NO: 408364 - RNA, 20 nt, Human
uggaaccaaacaaccacagu

SEQ ID NO: 408365 - RNA, 21 nt, Human
uggaggaaaaacuuuuuucau

SEQ ID NO: 408366 - RNA, 19 nt, Human
uggcaaugacaucaucaca

SEQ ID NO: 408367 - RNA, 19 nt, Human
uggcucgcccacuggcccg

SEQ ID NO: 408368 - RNA, 22 nt, Human
uggcucgcccacuggcccgggg

SEQ ID NO: 408369 - RNA, 21 nt, Human
uggggaguaacgugggucagc

SEQ ID NO: 408370 - RNA, 24 nt, Human
ugggguuuugauuuuucuccaaua

SEQ ID NO: 408371 - RNA, 21 nt, Human
uguacacauuuacacacacgc

SEQ ID NO: 408372 - RNA, 33 nt, Human
uguguguacacauuuacacacacgcacacagug

SEQ ID NO: 408373 - RNA, 21 nt, Human
uuaaaaggugggcccauuggc

SEQ ID NO: 408374 - RNA, 18 nt, Human
uuaaagcauucuaaaggc

SEQ ID NO: 408375 - RNA, 23 nt, Human
uuacacacacgcacacacacaaa

SEQ ID NO: 408376 - RNA, 27 nt, Human
uuacacacacgcacacacacaaaacug

SEQ ID NO: 408377 - RNA, 23 nt, Human
uucacaugaucaguaaguaacaa

SEQ ID NO: 408378 - RNA, 24 nt, Human
uuguaugaacgguaucaaucaugu

SEQ ID NO: 408379 - RNA, 24 nt, Human
uuuacacacacgcacacacacaaa

SEQ ID NO: 408380 - RNA, 22 nt, Human
aaagauacauucccguuugcaa

SEQ ID NO: 408381 - RNA, 19 nt, Human
aaagugcuaggauuacagg

SEQ ID NO: 408382 - RNA, 24 nt, Human
aaagugcuaggauuacaggcauga

SEQ ID NO: 408383 - RNA, 20 nt, Human
aacugaaaaaacuaagccua

SEQ ID NO: 408384 - RNA, 26 nt, Human
aagugcuaggauuacaggcaugagcc

SEQ ID NO: 408385 - RNA, 23 nt, Human
acccugccacagcaguggaaugg

SEQ ID NO: 408386 - RNA, 22 nt, Human
acuaagccuacuaacauaugcu

SEQ ID NO: 408387 - RNA, 25 nt, Human
acuauguugcccaggcuggucucaa

SEQ ID NO: 408388 - RNA, 23 nt, Human
acugaaaaaacuaagccuacuaa

SEQ ID NO: 408389 - RNA, 23 nt, Human
agcuaucuuucugccuuggccuc

SEQ ID NO: 408390 - RNA, 26 nt, Human
caaaagguuuucucuauccaagauuu

SEQ ID NO: 408391 - RNA, 24 nt, Human
caaagugcuaggauuacaggcaug

SEQ ID NO: 408392 - RNA, 24 nt, Human
caacagaccauuucucaggcugag

SEQ ID NO: 408393 - RNA, 21 nt, Human
caagaugacacccauuagugg

SEQ ID NO: 408394 - RNA, 21 nt, Human
cacagcucaggcucuuucagc

SEQ ID NO: 408395 - RNA, 23 nt, Human
cacagcucaggcucuuucagccu

SEQ ID NO: 408396 - RNA, 25 nt, Human
cacagcucaggcucuuucagccucc

SEQ ID NO: 408397 - RNA, 19 nt, Human
cacuauguugcccaggcug

SEQ ID NO: 408398 - RNA, 24 nt, Human
cacuauguugcccaggcuggucuc

SEQ ID NO: 408399 - RNA, 27 nt, Human
cacuauguugcccaggcuggucucaaa

SEQ ID NO: 408400 - RNA, 19 nt, Human
cacuuucauuugauacuac

SEQ ID NO: 408401 - RNA, 19 nt, Human
ccaaagugcuaggauuaca

SEQ ID NO: 408402 - RNA, 24 nt, Human
ccaaagugcuaggauuacaggcau

SEQ ID NO: 408403 - RNA, 19 nt, Human
ccaccuguuuguuuuccuc

SEQ ID NO: 408404 - RNA, 19 nt, Human
cccuggaauucaagaacuc

SEQ ID NO: 408405 - RNA, 20 nt, Human
ccuggacucaagcuaucuuu

SEQ ID NO: 408406 - RNA, 19 nt, Human
cuaagccuacuaacauaug

SEQ ID NO: 408407 - RNA, 18 nt, Human
cucaagcuaucuuucugc

SEQ ID NO: 408408 - RNA, 20 nt, Human
cucaagcuaucuuucugccu

SEQ ID NO: 408409 - RNA, 23 nt, Human
cugccuuggccucccaaagugcu

SEQ ID NO: 408410 - RNA, 19 nt, Human
gaacuggccacagcaacac

SEQ ID NO: 408411 - RNA, 18 nt, Human
gaauauccgccacccugg

SEQ ID NO: 408412 - RNA, 27 nt, Human
gagucuccaccuguuuguuuuccucuu

SEQ ID NO: 408413 - RNA, 18 nt, Human
gauuacaggcaugagcca

SEQ ID NO: 408414 - RNA, 21 nt, Human
gauuacaggcaugagccacug

SEQ ID NO: 408415 - RNA, 24 nt, Human
gauuacaggcaugagccacugugc

SEQ ID NO: 408416 - RNA, 22 nt, Human
gcaguggaauggagagggcacc

SEQ ID NO: 408417 - RNA, 22 nt, Human
ggauuacaggcaugagccacug

SEQ ID NO: 408418 - RNA, 24 nt, Human
ggauuacaggcaugagccacugug

SEQ ID NO: 408419 - RNA, 23 nt, Human
gggguaucacuauguugcccagg

SEQ ID NO: 408420 - RNA, 22 nt, Human
uaagagaugggguaucacuaug

SEQ ID NO: 408421 - RNA, 24 nt, Human
uacaggcaugagccacugugccca

SEQ ID NO: 408422 - RNA, 23 nt, Human
uacugcaacugaaaaaacuaagc

SEQ ID NO: 408423 - RNA, 21 nt, Human
uaggauuacaggcaugagcca

SEQ ID NO: 408424 - RNA, 22 nt, Human
uaggauuacaggcaugagccac

SEQ ID NO: 408425 - RNA, 22 nt, Human
uaggauuacaggcaugagccac

SEQ ID NO: 408426 - RNA, 24 nt, Human
uaggauuacaggcaugagccacug

SEQ ID NO: 408427 - RNA, 26 nt, Human
uaggauuacaggcaugagccacugug

SEQ ID NO: 408428 - RNA, 23 nt, Human
uauguugcccaggcuggucucaa

SEQ ID NO: 408429 - RNA, 24 nt, Human
uauguugcccaggcuggucucaaa

SEQ ID NO: 408430 - RNA, 21 nt, Human
uccaagauuucugacccugcc

SEQ ID NO: 408431 - RNA, 24 nt, Human
ucccaaagugcuaggauuacaggc

SEQ ID NO: 408432 - RNA, 22 nt, Human
ucccguuugcaaaagguuuucu

SEQ ID NO: 408433 - RNA, 18 nt, Human
uccgccacccuggaauuc

SEQ ID NO: 408434 - RNA, 21 nt, Human
uccuaggcuauuugguggccc

SEQ ID NO: 408435 - RNA, 22 nt, Human
uccuaggcuauuugguggcccu

SEQ ID NO: 408436 - RNA, 20 nt, Human
ucucaggcugagucuccacc

SEQ ID NO: 408437 - RNA, 21 nt, Human
ucugacuguuaaaaaaaaaaa

SEQ ID NO: 408438 - RNA, 21 nt, Human
ucuuaagugaccuaaugguga

SEQ ID NO: 408439 - RNA, 18 nt, Human
ugaacuggccacagcaac

SEQ ID NO: 408440 - RNA, 20 nt, Human
ugacuucagugcucgagggc

SEQ ID NO: 408441 - RNA, 24 nt, Human
ugcccaggcuggucucaaacuccu

SEQ ID NO: 408442 - RNA, 23 nt, Human
ugccuuggccucccaaagugcua

SEQ ID NO: 408443 - RNA, 22 nt, Human
ugcuaggaauuacaaagauaca

SEQ ID NO: 408444 - RNA, 22 nt, Human
uggaauggagagggcacagcuc

SEQ ID NO: 408445 - RNA, 24 nt, Human
ugggguaucacuauguugcccagg

SEQ ID NO: 408446 - RNA, 20 nt, Human
uguuggguagcucugggugu

SEQ ID NO: 408447 - RNA, 23 nt, Human
uguuuagauggccaagaugacac

SEQ ID NO: 408448 - RNA, 18 nt, Human
uuggccucccaaagugcu

SEQ ID NO: 408449 - RNA, 22 nt, Human
uuuugcuggguguugcacuugg

SEQ ID NO: 408450 - RNA, 20 nt, Human
uuuuuuuuuuuuuaagagau

SEQ ID NO: 408451 - RNA, 24 nt, Human
uuuuuuuuuuuuuuuuuuaagaga

SEQ ID NO: 408452 - RNA, 28 nt, Human
uuuuuuuuuuuuuuuuuuaagagauggg

SEQ ID NO: 408453 - RNA, 18 nt, Human
aaagcacagaagagccag

SEQ ID NO: 408454 - RNA, 19 nt, Human
aagggcccagcugcacagg

SEQ ID NO: 408455 - RNA, 21 nt, Human
aagggcccagcugcacaggcc

SEQ ID NO: 408456 - RNA, 23 nt, Human
accagcugccagcgacaugguuu

SEQ ID NO: 408457 - RNA, 19 nt, Human
agaaacuuggggguagggc

SEQ ID NO: 408458 - RNA, 22 nt, Human
agacagaggccuguccagggaa

SEQ ID NO: 408459 - RNA, 20 nt, Human
agacaggaagaugaggcuga

SEQ ID NO: 408460 - RNA, 18 nt, Human
agagaagcccugguuucu

SEQ ID NO: 408461 - RNA, 23 nt, Human
agaggaccuggccacaugcuucc

SEQ ID NO: 408462 - RNA, 25 nt, Human
agaggaccuggccacaugcuuccuc

SEQ ID NO: 408463 - RNA, 23 nt, Human
agaguggcagggccccuuccuca

SEQ ID NO: 408464 - RNA, 18 nt, Human
agaucagagacaggaaga

SEQ ID NO: 408465 - RNA, 24 nt, Human
agccaggaagggaguggacucugg

SEQ ID NO: 408466 - RNA, 22 nt, Human
agccccuggcccuggacguguc

SEQ ID NO: 408467 - RNA, 22 nt, Human
aggaagaugaggcugauguucu

SEQ ID NO: 408468 - RNA, 22 nt, Human
aggaccuggccacaugcuuccu

SEQ ID NO: 408469 - RNA, 20 nt, Human
aggaguucagacagugcccc

SEQ ID NO: 408470 - RNA, 20 nt, Human
aggccaggcaaggcuccaug

SEQ ID NO: 408471 - RNA, 18 nt, Human
agggagcugaugggucag

SEQ ID NO: 408472 - RNA, 24 nt, Human
aggggcacuggguccaccaaaccc

SEQ ID NO: 408473 - RNA, 23 nt, Human
aggggcugcaggacauccacagg

SEQ ID NO: 408474 - RNA, 20 nt, Human
aggggguggcuagagagcuu

SEQ ID NO: 408475 - RNA, 19 nt, Human
agguggaagacagaggccu

SEQ ID NO: 408476 - RNA, 22 nt, Human
agucaggaguucagacagugcc

SEQ ID NO: 408477 - RNA, 23 nt, Human
aguggacucuggccaagggccca

SEQ ID NO: 408478 - RNA, 21 nt, Human
aguggccaggcagccccaggc

SEQ ID NO: 408479 - RNA, 18 nt, Human
caaaccagaaggccccca

SEQ ID NO: 408480 - RNA, 19 nt, Human
caccaaaccagaaggcccc

SEQ ID NO: 408481 - RNA, 22 nt, Human
caccaaaccagaaggcccccac

SEQ ID NO: 408482 - RNA, 19 nt, Human
caccgccagcaccagcugc

SEQ ID NO: 408483 - RNA, 20 nt, Human
caccuugaccccuuccaguu

SEQ ID NO: 408484 - RNA, 21 nt, Human
caccuugaccccuuccaguuc

SEQ ID NO: 408485 - RNA, 19 nt, Human
cagaagagccagccaggcc

SEQ ID NO: 408486 - RNA, 20 nt, Human
cagaaggcccccacgucccc

SEQ ID NO: 408487 - RNA, 18 nt, Human
cagaggagaaacuugggg

SEQ ID NO: 408488 - RNA, 19 nt, Human
cagccgucacacagccccu

SEQ ID NO: 408489 - RNA, 21 nt, Human
cagcugcaaccaggccugcug

SEQ ID NO: 408490 - RNA, 19 nt, Human
caggaacagccugaguccu

SEQ ID NO: 408491 - RNA, 23 nt, Human
cauggccagcacguggcucccag

SEQ ID NO: 408492 - RNA, 21 nt, Human
caugguucacgcuccugugag

SEQ ID NO: 408493 - RNA, 21 nt, Human
ccaaaccagaaggcccccacg

SEQ ID NO: 408494 - RNA, 23 nt, Human
ccaccgccagcaccagcugccag

SEQ ID NO: 408495 - RNA, 18 nt, Human
ccaggccaggcaaggcuc

SEQ ID NO: 408496 - RNA, 22 nt, Human
ccaggccaggcaaggcuccaug

SEQ ID NO: 408497 - RNA, 24 nt, Human
ccaggccaggcaaggcuccauguu

SEQ ID NO: 408498 - RNA, 18 nt, Human
ccagugcucaguggccag

SEQ ID NO: 408499 - RNA, 19 nt, Human
ccccacguccccgccuccu

SEQ ID NO: 408500 - RNA, 23 nt, Human
ccccaggcuccauccggagccuc

SEQ ID NO: 408501 - RNA, 21 nt, Human
cccccacgccagcugcaacca

SEQ ID NO: 408502 - RNA, 22 nt, Human
cccccacguccccgccuccugc

SEQ ID NO: 408503 - RNA, 22 nt, Human
ccccucgccugauggccaaggg

SEQ ID NO: 408504 - RNA, 23 nt, Human
ccgucacacagccccuggcccug

SEQ ID NO: 408505 - RNA, 18 nt, Human
ccucagcucugaguagcc

SEQ ID NO: 408506 - RNA, 18 nt, Human
ccucuuggggagaguggc

SEQ ID NO: 408507 - RNA, 18 nt, Human
ccugguuucuggggggaa

SEQ ID NO: 408508 - RNA, 19 nt, Human
cgccagcaccagcugccag

SEQ ID NO: 408509 - RNA, 23 nt, Human
cuccaccgccagcaccagcugcc

SEQ ID NO: 408510 - RNA, 23 nt, Human
cucuuggggagaguggcagggcc

SEQ ID NO: 408511 - RNA, 21 nt, Human
cugaguccuggccaggcucag

SEQ ID NO: 408512 - RNA, 22 nt, Human
cugcacauguucccagcugcgu

SEQ ID NO: 408513 - RNA, 18 nt, Human
cugcagcagacuugcggc

SEQ ID NO: 408514 - RNA, 18 nt, Human
cugcagggccagagaaag

SEQ ID NO: 408515 - RNA, 18 nt, Human
cugcugcccucaggacag

SEQ ID NO: 408516 - RNA, 24 nt, Human
gagaggaccuggccacaugcuucc

SEQ ID NO: 408517 - RNA, 18 nt, Human
gaggagaaacuugggggu

SEQ ID NO: 408518 - RNA, 23 nt, Human
gcacagggaagucuccaccgcca

SEQ ID NO: 408519 - RNA, 21 nt, Human
gccaaggaggagggcaugugg

SEQ ID NO: 408520 - RNA, 18 nt, Human
gcccagcugcacaggccc

SEQ ID NO: 408521 - RNA, 20 nt, Human
gcccaggccaggcaaggcuc

SEQ ID NO: 408522 - RNA, 22 nt, Human
gcccucaggacaguccucuucc

SEQ ID NO: 408523 - RNA, 23 nt, Human
gcccugucuugagcucuccuccc

SEQ ID NO: 408524 - RNA, 24 nt, Human
gcccugucuugagcucuccucccg

SEQ ID NO: 408525 - RNA, 19 nt, Human
gccugaguccuggccaggc

SEQ ID NO: 408526 - RNA, 22 nt, Human
gccugcauccuggccugguggg

SEQ ID NO: 408527 - RNA, 18 nt, Human
gccugugcccugucuuga

SEQ ID NO: 408528 - RNA, 18 nt, Human
gcucccagggaguaggga

SEQ ID NO: 408529 - RNA, 21 nt, Human
gcugcaaccaggccugcugcc

SEQ ID NO: 408530 - RNA, 21 nt, Human
gcugcgugagaugugucccuu

SEQ ID NO: 408531 - RNA, 18 nt, Human
ggaagggugggcaucacc

SEQ ID NO: 408532 - RNA, 23 nt, Human
ggaccuggccacaugcuuccuca

SEQ ID NO: 408533 - RNA, 20 nt, Human
ggcacuggguccaccaaacc

SEQ ID NO: 408534 - RNA, 18 nt, Human
ggccaggcagccccaggc

SEQ ID NO: 408535 - RNA, 23 nt, Human
gggaagucuccaccgccagcacc

SEQ ID NO: 408536 - RNA, 21 nt, Human
ggggaucgaggagaacuucag

SEQ ID NO: 408537 - RNA, 18 nt, Human
gggguagggcugaggggc

SEQ ID NO: 408538 - RNA, 23 nt, Human
gguagggcugaggggcugcagga

SEQ ID NO: 408539 - RNA, 19 nt, Human
ggugacacagccaggaagg

SEQ ID NO: 408540 - RNA, 22 nt, Human
uacacugggguucuagagacac

SEQ ID NO: 408541 - RNA, 23 nt, Human
uauccugacagucaggaguucag

SEQ ID NO: 408542 - RNA, 23 nt, Human
ucagccugcacauguucccagcu

SEQ ID NO: 408543 - RNA, 23 nt, Human
uccauguugaggcaccucgaaac

SEQ ID NO: 408544 - RNA, 19 nt, Human
ucccgggucaccuugaccc

SEQ ID NO: 408545 - RNA, 19 nt, Human
ucccgggucaccuugaccc

SEQ ID NO: 408546 - RNA, 20 nt, Human
ucccuuggcuggggcccccg

SEQ ID NO: 408547 - RNA, 19 nt, Human
uccucaugugaagcccuca

SEQ ID NO: 408548 - RNA, 18 nt, Human
uccugcucaugccguccc

SEQ ID NO: 408549 - RNA, 22 nt, Human
uccuggccaggcucaggagaga

SEQ ID NO: 408550 - RNA, 21 nt, Human
ucuccggggaacuugccucag

SEQ ID NO: 408551 - RNA, 24 nt, Human
ucuccucccgggucaccuugaccc

SEQ ID NO: 408552 - RNA, 21 nt, Human
ucugcgucucuugacaggccu

SEQ ID NO: 408553 - RNA, 21 nt, Human
ugacaccaaaccagaaggccc

SEQ ID NO: 408554 - RNA, 18 nt, Human
ugcaaccaggccugcugc

SEQ ID NO: 408555 - RNA, 22 nt, Human
uggaaagcacagaagagccagc

SEQ ID NO: 408556 - RNA, 24 nt, Human
uggaaagcacagaagagccagcca

SEQ ID NO: 408557 - RNA, 18 nt, Human
uggaagacagaggccugu

SEQ ID NO: 408558 - RNA, 22 nt, Human
uggacucuggccaagggcccag

SEQ ID NO: 408559 - RNA, 18 nt, Human
uggacuggagccgcccag

SEQ ID NO: 408560 - RNA, 23 nt, Human
ugggcuuggggacgaugcuggag

SEQ ID NO: 408561 - RNA, 19 nt, Human
uggggagaguggcagggcc

SEQ ID NO: 408562 - RNA, 22 nt, Human
ugggguucuagagacacauggg

SEQ ID NO: 408563 - RNA, 20 nt, Human
ugucuugagcucuccucccg

SEQ ID NO: 408564 - RNA, 26 nt, Human
uucauaaugguaacaaccucagguga

SEQ ID NO: 408565 - RNA, 18 nt, Human
uucaucagccugcacaug

SEQ ID NO: 408566 - RNA, 25 nt, Human
uucucuucaucagccugcacauguu

SEQ ID NO: 408567 - RNA, 22 nt, Human
uuuaggaaaaugaagacaggga

SEQ ID NO: 408568 - RNA, 20 nt, Human
aggagcaaaauccccugugg

SEQ ID NO: 408569 - RNA, 24 nt, Human
caaaauccccugugggggcuucuc

SEQ ID NO: 408570 - RNA, 18 nt, Human
cccagggccccggcgcuc

SEQ ID NO: 408571 - RNA, 22 nt, Human
ccccaaggacccugcagccucc

SEQ ID NO: 408572 - RNA, 24 nt, Human
ccccaaggacccugcagccuccag

SEQ ID NO: 408573 - RNA, 24 nt, Human
ccgcaaccuccugcagcccagggc

SEQ ID NO: 408574 - RNA, 25 nt, Human
ccgccgcaaccuccugcagcccagg

SEQ ID NO: 408575 - RNA, 22 nt, Human
ccucaaggacaaggccaccagg

SEQ ID NO: 408576 - RNA, 22 nt, Human
cgccgcaaccuccugcagccca

SEQ ID NO: 408577 - RNA, 23 nt, Human
cgcucccuccgccggcucugcuu

SEQ ID NO: 408578 - RNA, 18 nt, Human
cucaaggacaaggccacc

SEQ ID NO: 408579 - RNA, 19 nt, Human
cucccuccgccggcucugc

SEQ ID NO: 408580 - RNA, 22 nt, Human
gaggagccgggcaugcuguggg

SEQ ID NO: 408581 - RNA, 19 nt, Human
gcccagggccccggcgcuc

SEQ ID NO: 408582 - RNA, 23 nt, Human
gccuuacucuaggagcaaaaucc

SEQ ID NO: 408583 - RNA, 19 nt, Human
ggacugguucugggaggag

SEQ ID NO: 408584 - RNA, 23 nt, Human
ggccgccgcaaccuccugcagcc

SEQ ID NO: 408585 - RNA, 25 nt, Human
ggcgcucccuccgccggcucugcuu

SEQ ID NO: 408586 - RNA, 20 nt, Human
gguucugggaggagccgggc

SEQ ID NO: 408587 - RNA, 20 nt, Human
uaccccaaggacccugcagc

SEQ ID NO: 408588 - RNA, 21 nt, Human
uccccagugugaggaaucugu

SEQ ID NO: 408589 - RNA, 24 nt, Human
ugaggaaucugugaguggugaggg

SEQ ID NO: 408590 - RNA, 20 nt, Human
ugaggggucuguggucccug

SEQ ID NO: 408591 - RNA, 22 nt, Human
ugccgcggccgccgcaaccucc

SEQ ID NO: 408592 - RNA, 22 nt, Human
uggcuuuauuuccccaguguga

SEQ ID NO: 408593 - RNA, 20 nt, Human
uuaccccaaggacccugcag

SEQ ID NO: 408594 - RNA, 24 nt, Human
uuccccagugugaggaaucuguga

SEQ ID NO: 408595 - RNA, 19 nt, Human
uugauccucccaggcuggg

SEQ ID NO: 408596 - RNA, 22 nt, Human
aaaaaaaaaaaaaaaaggccag

SEQ ID NO: 408597 - RNA, 18 nt, Human
aaaagaagaauaacgagg

SEQ ID NO: 408598 - RNA, 20 nt, Human
aaaagagugaaacuccaucu

SEQ ID NO: 408599 - RNA, 19 nt, Human
aaagugcccuggacagagg

SEQ ID NO: 408600 - RNA, 22 nt, Human
aaaucacccaaauuucccgcuu

SEQ ID NO: 408601 - RNA, 19 nt, Human
aacauggugaaaccccauc

SEQ ID NO: 408602 - RNA, 20 nt, Human
aacauggugaaaccccaucu

SEQ ID NO: 408603 - RNA, 20 nt, Human
aacauggugaaaccccaucu

SEQ ID NO: 408604 - RNA, 21 nt, Human
aacauggugaaaccccaucuc

SEQ ID NO: 408605 - RNA, 21 nt, Human
aacccaucgagauuucaccag

SEQ ID NO: 408606 - RNA, 18 nt, Human
aaguuccaagugaccagc

SEQ ID NO: 408607 - RNA, 21 nt, Human
aauaacgaggaucaaauggga

SEQ ID NO: 408608 - RNA, 24 nt, Human
aaugucaggauuaaagauaaaaau

SEQ ID NO: 408609 - RNA, 22 nt, Human
acaagaacaauauucccagcug

SEQ ID NO: 408610 - RNA, 20 nt, Human
acaagaaucgcucaagcccg

SEQ ID NO: 408611 - RNA, 21 nt, Human
acaauaccuuucggcuucagu

SEQ ID NO: 408612 - RNA, 18 nt, Human
acacuacacaguguggcu

SEQ ID NO: 408613 - RNA, 22 nt, Human
acccaaauuucccgcuuuccac

SEQ ID NO: 408614 - RNA, 18 nt, Human
acccaaguaaaaggggaa

SEQ ID NO: 408615 - RNA, 24 nt, Human
accccaucucuacuaaaaauacaa

SEQ ID NO: 408616 - RNA, 18 nt, Human
accuuaggccucacaaac

SEQ ID NO: 408617 - RNA, 25 nt, Human
acuccagccuggguaaaaagaguga

SEQ ID NO: 408618 - RNA, 19 nt, Human
agaaaggagaugcaauagg

SEQ ID NO: 408619 - RNA, 20 nt, Human
agaaaggagaugcaauagga

SEQ ID NO: 408620 - RNA, 23 nt, Human
agacgcugauguaaucaacauca

SEQ ID NO: 408621 - RNA, 27 nt, Human
agagguugcagugagaucgcaucauug

SEQ ID NO: 408622 - RNA, 20 nt, Human
agcaaugagguacacaagaa

SEQ ID NO: 408623 - RNA, 18 nt, Human
agccaggcauaguggugc

SEQ ID NO: 408624 - RNA, 22 nt, Human
agccuggccaacauggugaaac

SEQ ID NO: 408625 - RNA, 24 nt, Human
agccuggccaacauggugaaaccc

SEQ ID NO: 408626 - RNA, 20 nt, Human
aggaguuugagaccagccug

SEQ ID NO: 408627 - RNA, 19 nt, Human
aggcagagguugcagugag

SEQ ID NO: 408628 - RNA, 22 nt, Human
aggcagguggaucaucugaggu

SEQ ID NO: 408629 - RNA, 26 nt, Human
aggcagguggaucaucugaggucagg

SEQ ID NO: 408630 - RNA, 23 nt, Human
aggcauaguggugcacaccugua

SEQ ID NO: 408631 - RNA, 22 nt, Human
aggccaggcgcaguggcucacg

SEQ ID NO: 408632 - RNA, 24 nt, Human
aggcgcaguggcucacgccuguaa

SEQ ID NO: 408633 - RNA, 19 nt, Human
agguagggcaaccaggccc

SEQ ID NO: 408634 - RNA, 19 nt, Human
aggucaggaguuugagacc

SEQ ID NO: 408635 - RNA, 22 nt, Human
agguggaucaucugaggucagg

SEQ ID NO: 408636 - RNA, 24 nt, Human
aguggcucacgccuguaaucccag

SEQ ID NO: 408637 - RNA, 24 nt, Human
aguggugcacaccuguagucccag

SEQ ID NO: 408638 - RNA, 19 nt, Human
auaaaaauauauauauaua

SEQ ID NO: 408639 - RNA, 22 nt, Human
auaaaaauauauauauauauau

SEQ ID NO: 408640 - RNA, 20 nt, Human
auauacauucuuuaugccag

SEQ ID NO: 408641 - RNA, 25 nt, Human
auaugauucacugacaauaucugaa

SEQ ID NO: 408642 - RNA, 19 nt, Human
aucauugcacuccagccug

SEQ ID NO: 408643 - RNA, 22 nt, Human
aucccagcacuuugggaagcca

SEQ ID NO: 408644 - RNA, 24 nt, Human
aucgcaucauugcacuccagccug

SEQ ID NO: 408645 - RNA, 24 nt, Human
aucugaggucaggaguuugagacc

SEQ ID NO: 408646 - RNA, 26 nt, Human
aucugugcaaacccacccuuguucca

SEQ ID NO: 408647 - RNA, 18 nt, Human
auguaucccccccaaccc

SEQ ID NO: 408648 - RNA, 21 nt, Human
auugcacuccagccuggguaa

SEQ ID NO: 408649 - RNA, 25 nt, Human
auugcacuccagccuggguaaaaag

SEQ ID NO: 408650 - RNA, 20 nt, Human
auuuguuuuagguuucccuu

SEQ ID NO: 408651 - RNA, 22 nt, Human
auuuuauauauauaauauauau

SEQ ID NO: 408652 - RNA, 23 nt, Human
caacaaaucacccaaauuucccg

SEQ ID NO: 408653 - RNA, 24 nt, Human
caacauggugaaaccccaucucua

SEQ ID NO: 408654 - RNA, 24 nt, Human
caacuccuaacuaauaguaccccu

SEQ ID NO: 408655 - RNA, 25 nt, Human
caacuccuaacuaauaguaccccuu

SEQ ID NO: 408656 - RNA, 21 nt, Human
caagcaaacucugccucuuuc

SEQ ID NO: 408657 - RNA, 24 nt, Human
caaggcagguggaucaucugaggu

SEQ ID NO: 408658 - RNA, 26 nt, Human
caaggcagguggaucaucugagguca

SEQ ID NO: 408659 - RNA, 18 nt, Human
caagucagcuaaugucag

SEQ ID NO: 408660 - RNA, 21 nt, Human
caaucugugcaaacccacccu

SEQ ID NO: 408661 - RNA, 20 nt, Human
caaucugugggugaggugac

SEQ ID NO: 408662 - RNA, 24 nt, Human
cacaccuguagucccagcuacccg

SEQ ID NO: 408663 - RNA, 21 nt, Human
cacaguguggcugccaggagu

SEQ ID NO: 408664 - RNA, 19 nt, Human
caccaccccaaaacccaag

SEQ ID NO: 408665 - RNA, 23 nt, Human
caccuguagucccagcuacccgg

SEQ ID NO: 408666 - RNA, 24 nt, Human
cacgccuguaaucccagcacuuug

SEQ ID NO: 408667 - RNA, 21 nt, Human
cacuacacaguguggcugcca

SEQ ID NO: 408668 - RNA, 23 nt, Human
cacuccagccuggguaaaaagag

SEQ ID NO: 408669 - RNA, 24 nt, Human
cacuccagccuggguaaaaagagu

SEQ ID NO: 408670 - RNA, 25 nt, Human
cacuccagccuggguaaaaagagug

SEQ ID NO: 408671 - RNA, 20 nt, Human
cacugucaucacagacaucc

SEQ ID NO: 408672 - RNA, 19 nt, Human
cagcacugaggugaguacc

SEQ ID NO: 408673 - RNA, 24 nt, Human
cagcacuuugggaagccaaggcag

SEQ ID NO: 408674 - RNA, 25 nt, Human
cagcacuuugggaagccaaggcagg

SEQ ID NO: 408675 - RNA, 19 nt, Human
caggaaugugcuccaaucu

SEQ ID NO: 408676 - RNA, 18 nt, Human
cagguggaucaucugagg

SEQ ID NO: 408677 - RNA, 24 nt, Human
cagguggaucaucugaggucagga

SEQ ID NO: 408678 - RNA, 23 nt, Human
caucugaggucaggaguuugaga

SEQ ID NO: 408679 - RNA, 18 nt, Human
cauugcacuccagccugg

SEQ ID NO: 408680 - RNA, 19 nt, Human
cauugcacuccagccuggg

SEQ ID NO: 408681 - RNA, 19 nt, Human
cauugcacuccagccuggg

SEQ ID NO: 408682 - RNA, 19 nt, Human
cauugcacuccagccuggg

SEQ ID NO: 408683 - RNA, 20 nt, Human
cauugcacuccagccugggu

SEQ ID NO: 408684 - RNA, 21 nt, Human
cauugcacuccagccugggua

SEQ ID NO: 408685 - RNA, 23 nt, Human
cauugcacuccagccuggguaaa

SEQ ID NO: 408686 - RNA, 18 nt, Human
ccaccaccccaaaaccca

SEQ ID NO: 408687 - RNA, 18 nt, Human
ccaccccaaaacccaagu

SEQ ID NO: 408688 - RNA, 21 nt, Human
ccacugucaucacagacaucc

SEQ ID NO: 408689 - RNA, 22 nt, Human
cccaaauuucccgcuuuccacc

SEQ ID NO: 408690 - RNA, 21 nt, Human
cccagccccacaucucuccuu

SEQ ID NO: 408691 - RNA, 18 nt, Human
cccccccaaccccauccu

SEQ ID NO: 408692 - RNA, 26 nt, Human
cccccccaaccccauccuuuaaugug

SEQ ID NO: 408693 - RNA, 18 nt, Human
cccucaaauacacuacac

SEQ ID NO: 408694 - RNA, 24 nt, Human
ccgcuuuccaccaccccaaaaccc

SEQ ID NO: 408695 - RNA, 23 nt, Human
ccuggccaacauggugaaacccc

SEQ ID NO: 408696 - RNA, 24 nt, Human
ccuggccaacauggugaaacccca

SEQ ID NO: 408697 - RNA, 22 nt, Human
ccuguaaucccagcacuuuggg

SEQ ID NO: 408698 - RNA, 21 nt, Human
ccuguagucccagcuacccgg

SEQ ID NO: 408699 - RNA, 24 nt, Human
ccuguagucccagcuacccggaag

SEQ ID NO: 408700 - RNA, 21 nt, Human
ccugucugagcuuuuaacugu

SEQ ID NO: 408701 - RNA, 23 nt, Human
cgccuguaaucccagcacuuugg

SEQ ID NO: 408702 - RNA, 26 nt, Human
cggaagacugagacacaagaaucgcu

SEQ ID NO: 408703 - RNA, 23 nt, Human
cucacaaaccaaugacauguucu

SEQ ID NO: 408704 - RNA, 22 nt, Human
cucacgccuguaaucccagcac

SEQ ID NO: 408705 - RNA, 24 nt, Human
cucacgccuguaaucccagcacuu

SEQ ID NO: 408706 - RNA, 20 nt, Human
cucccagccccacaucucuc

SEQ ID NO: 408707 - RNA, 22 nt, Human
cucccagccccacaucucuccu

SEQ ID NO: 408708 - RNA, 23 nt, Human
cuggccaacauggugaaacccca

SEQ ID NO: 408709 - RNA, 21 nt, Human
cuuuccaccaccccaaaaccc

SEQ ID NO: 408710 - RNA, 22 nt, Human
gaaaagacagaggaggaaauca

SEQ ID NO: 408711 - RNA, 23 nt, Human
gaaggagaugugaggcucagaag

SEQ ID NO: 408712 - RNA, 20 nt, Human
gacucccagccccacaucuc

SEQ ID NO: 408713 - RNA, 23 nt, Human
gagaucgcaucauugcacuccag

SEQ ID NO: 408714 - RNA, 18 nt, Human
gaggccuuugaacagaag

SEQ ID NO: 408715 - RNA, 24 nt, Human
gaucaucugaggucaggaguuuga

SEQ ID NO: 408716 - RNA, 20 nt, Human
gcagugagaucgcaucauug

SEQ ID NO: 408717 - RNA, 20 nt, Human
gcaucauugcacuccagccu

SEQ ID NO: 408718 - RNA, 24 nt, Human
gccaacauggugaaaccccaucuc

SEQ ID NO: 408719 - RNA, 18 nt, Human
gcccuggacagaggucag

SEQ ID NO: 408720 - RNA, 21 nt, Human
gccuuugaacagaaggagaug

SEQ ID NO: 408721 - RNA, 20 nt, Human
gcgcaguggcucacgccugu

SEQ ID NO: 408722 - RNA, 21 nt, Human
gcugccaggagugcuucaccu

SEQ ID NO: 408723 - RNA, 23 nt, Human
ggaaacccuuucuuaaugauuuc

SEQ ID NO: 408724 - RNA, 21 nt, Human
ggaagcaaacaccugugaaac

SEQ ID NO: 408725 - RNA, 23 nt, Human
ggaauuuuucaaacccaggaggu

SEQ ID NO: 408726 - RNA, 22 nt, Human
ggaucaucugaggucaggaguu

SEQ ID NO: 408727 - RNA, 24 nt, Human
ggcaagcaaacucugccucuuucc

SEQ ID NO: 408728 - RNA, 19 nt, Human
ggucaggaguuugagacca

SEQ ID NO: 408729 - RNA, 23 nt, Human
gugcagcacugaggugaguacca

SEQ ID NO: 408730 - RNA, 23 nt, Human
guguggaacuugaggauggagcu

SEQ ID NO: 408731 - RNA, 20 nt, Human
uaaaaauacaaaauuagcca

SEQ ID NO: 408732 - RNA, 22 nt, Human
uaaaaauacaaaauuagccagg

SEQ ID NO: 408733 - RNA, 23 nt, Human
uaaaaauacaaaauuagccaggc

SEQ ID NO: 408734 - RNA, 22 nt, Human
uaaauguaucccccccaacccc

SEQ ID NO: 408735 - RNA, 24 nt, Human
uaacugccuagaaaagaaggugac

SEQ ID NO: 408736 - RNA, 24 nt, Human
uaauauauauauuccauauauauu

SEQ ID NO: 408737 - RNA, 24 nt, Human
uaguggugcacaccuguaguccca

SEQ ID NO: 408738 - RNA, 23 nt, Human
uauaauauacauauuccauauau

SEQ ID NO: 408739 - RNA, 26 nt, Human
uaucacagaguuccuggcaggcaggg

SEQ ID NO: 408740 - RNA, 23 nt, Human
ucaacaaaucacccaaauuuccc

SEQ ID NO: 408741 - RNA, 21 nt, Human
ucacagaguuccuggcaggca

SEQ ID NO: 408742 - RNA, 19 nt, Human
ucauaugauucacugacaa

SEQ ID NO: 408743 - RNA, 19 nt, Human
ucaucugaggucaggaguu

SEQ ID NO: 408744 - RNA, 21 nt, Human
ucauugcacuccagccugggu

SEQ ID NO: 408745 - RNA, 22 nt, Human
uccaccaccccaaaacccaagu

SEQ ID NO: 408746 - RNA, 19 nt, Human
uccaccuccacacgcugcc

SEQ ID NO: 408747 - RNA, 18 nt, Human
uccauaguugagugcagc

SEQ ID NO: 408748 - RNA, 18 nt, Human
uccccuguaugccuaaga

SEQ ID NO: 408749 - RNA, 19 nt, Human
ucgcaucauugcacuccag

SEQ ID NO: 408750 - RNA, 23 nt, Human
ucgcaucauugcacuccagccug

SEQ ID NO: 408751 - RNA, 23 nt, Human
ucguuuaaaaaaaaaaaaaaaaa

SEQ ID NO: 408752 - RNA, 20 nt, Human
ucucuacuaaaaauacaaaa

SEQ ID NO: 408753 - RNA, 22 nt, Human
ucugaggucaggaguuugagac

SEQ ID NO: 408754 - RNA, 19 nt, Human
ugaaaccccaucucuacua

SEQ ID NO: 408755 - RNA, 24 nt, Human
ugaaauauccaggcaucauaugau

SEQ ID NO: 408756 - RNA, 19 nt, Human
ugaacuggaacagcuuaua

SEQ ID NO: 408757 - RNA, 24 nt, Human
ugacaaauaguaguagggggucca

SEQ ID NO: 408758 - RNA, 18 nt, Human
ugacugaucccucaaaua

SEQ ID NO: 408759 - RNA, 21 nt, Human
ugagaaaauaaaauaaaugua

SEQ ID NO: 408760 - RNA, 23 nt, Human
ugagacacaagaaucgcucaagc

SEQ ID NO: 408761 - RNA, 23 nt, Human
ugagaccagccuggccaacaugg

SEQ ID NO: 408762 - RNA, 24 nt, Human
ugagaccagccuggccaacauggu

SEQ ID NO: 408763 - RNA, 18 nt, Human
ugagaucgcaucauugca

SEQ ID NO: 408764 - RNA, 18 nt, Human
ugaggccuuugaacagaa

SEQ ID NO: 408765 - RNA, 18 nt, Human
ugaggucaggaguuugag

SEQ ID NO: 408766 - RNA, 22 nt, Human
ugcacuccagccuggguaaaaa

SEQ ID NO: 408767 - RNA, 24 nt, Human
ugcuccaaucugugcaaacccacu

SEQ ID NO: 408768 - RNA, 23 nt, Human
uggaaggaagcaaacaccuguga

SEQ ID NO: 408769 - RNA, 20 nt, Human
uggaggcagaaacucugggc

SEQ ID NO: 408770 - RNA, 23 nt, Human
uggaucaucugaggucaggaguu

SEQ ID NO: 408771 - RNA, 24 nt, Human
uggaucaucugaggucaggaguuu

SEQ ID NO: 408772 - RNA, 24 nt, Human
uggccaacauggugaaaccccauc

SEQ ID NO: 408773 - RNA, 21 nt, Human
uggccacugucaucacagaca

SEQ ID NO: 408774 - RNA, 22 nt, Human
uggcucacgccuguaaucccag

SEQ ID NO: 408775 - RNA, 24 nt, Human
uggcucacgccuguaaucccagca

SEQ ID NO: 408776 - RNA, 24 nt, Human
ugggaagccaaggcagguggauca

SEQ ID NO: 408777 - RNA, 24 nt, Human
ugggauggccacugucaucacaga

SEQ ID NO: 408778 - RNA, 23 nt, Human
ugguaguuugugcaggaaugugc

SEQ ID NO: 408779 - RNA, 18 nt, Human
uggugcacaccuguaguc

SEQ ID NO: 408780 - RNA, 18 nt, Human
uguaucccccccaacccc

SEQ ID NO: 408781 - RNA, 27 nt, Human
uguauuuuauauauauaauauauauau

SEQ ID NO: 408782 - RNA, 21 nt, Human
uguggaaaagacagaggagga

SEQ ID NO: 408783 - RNA, 23 nt, Human
uguggaggcagaaacucugggcu

SEQ ID NO: 408784 - RNA, 21 nt, Human
ugugugaaaagcuggugcuug

SEQ ID NO: 408785 - RNA, 24 nt, Human
uguucucguuuaaaaaaaaaaaaa

SEQ ID NO: 408786 - RNA, 27 nt, Human
uuaaagcaagcucacuagcaaguccug

SEQ ID NO: 408787 - RNA, 19 nt, Human
uucacugacaauaucugaa

SEQ ID NO: 408788 - RNA, 22 nt, Human
uucacugacaauaucugaaacc

SEQ ID NO: 408789 - RNA, 21 nt, Human
uuccaccaccccaaaacccaa

SEQ ID NO: 408790 - RNA, 19 nt, Human
uuccauaguugagugcagc

SEQ ID NO: 408791 - RNA, 25 nt, Human
uuccccuguaugccuaagaaugcaa

SEQ ID NO: 408792 - RNA, 24 nt, Human
uugcaggcccugcucccaaagccc

SEQ ID NO: 408793 - RNA, 25 nt, Human
uugcagugagaucgcaucauugcac

SEQ ID NO: 408794 - RNA, 18 nt, Human
uugcugccugugaacugg

SEQ ID NO: 408795 - RNA, 22 nt, Human
uugcugccugugaacuggaaca

SEQ ID NO: 408796 - RNA, 20 nt, Human
uuuccaccaccccaaaaccc

SEQ ID NO: 408797 - RNA, 21 nt, Human
uuuccaccaccccaaaacccc

SEQ ID NO: 408798 - RNA, 22 nt, Human
uuuuaugaacauauauauagac

SEQ ID NO: 408799 - RNA, 19 nt, Human
aaaaaaaaaacuggcucua

SEQ ID NO: 408800 - RNA, 26 nt, Human
aaaagaaaaaaaauuaaagcauaaaa

SEQ ID NO: 408801 - RNA, 23 nt, Human
aaaagaaaaagaaaaaaaaagaa

SEQ ID NO: 408802 - RNA, 22 nt, Human
aaacuggcucuaucuuuaaaua

SEQ ID NO: 408803 - RNA, 22 nt, Human
aaagaaaaaaaaagaaaaaaaa

SEQ ID NO: 408804 - RNA, 25 nt, Human
aaccagugauaucaucacugaacac

SEQ ID NO: 408805 - RNA, 18 nt, Human
aagaaaaaaaaagaaaaa

SEQ ID NO: 408806 - RNA, 19 nt, Human
aagaaaaagaaaaaaaaag

SEQ ID NO: 408807 - RNA, 19 nt, Human
aagcaucuaguugggaacc

SEQ ID NO: 408808 - RNA, 18 nt, Human
aaggaaacaaaagaaaaa

SEQ ID NO: 408809 - RNA, 22 nt, Human
acaaggaacgcccagggaaacc

SEQ ID NO: 408810 - RNA, 22 nt, Human
acauaaugauaauccaacugaa

SEQ ID NO: 408811 - RNA, 24 nt, Human
agaaaaagaaaaaaaaagaaaaaa

SEQ ID NO: 408812 - RNA, 18 nt, Human
aggaaacaaaagaaaaag

SEQ ID NO: 408813 - RNA, 20 nt, Human
aggcggcagcagaggccgcc

SEQ ID NO: 408814 - RNA, 22 nt, Human
aguaccaaggaaacaaaagaaa

SEQ ID NO: 408815 - RNA, 21 nt, Human
agugacuugauaaaacaaugu

SEQ ID NO: 408816 - RNA, 25 nt, Human
aucaauuaccuuuaaaauuucucag

SEQ ID NO: 408817 - RNA, 25 nt, Human
aucacauaaugauaauccaacugaa

SEQ ID NO: 408818 - RNA, 19 nt, Human
auggcaauaaaacagcugc

SEQ ID NO: 408819 - RNA, 24 nt, Human
caaaacaaagucaaaugagauccu

SEQ ID NO: 408820 - RNA, 25 nt, Human
cacaaacagcauucauguucaaaug

SEQ ID NO: 408821 - RNA, 21 nt, Human
cacuuuuucuuucuccccacc

SEQ ID NO: 408822 - RNA, 18 nt, Human
cagggacgcgcccgcgcc

SEQ ID NO: 408823 - RNA, 26 nt, Human
caggucaaaagaauauugaccuuuua

SEQ ID NO: 408824 - RNA, 20 nt, Human
caucuaguugggaaccagug

SEQ ID NO: 408825 - RNA, 26 nt, Human
ccaaggaaacaaaagaaaaagaaaaa

SEQ ID NO: 408826 - RNA, 20 nt, Human
ccaguaucacauaaugauaa

SEQ ID NO: 408827 - RNA, 20 nt, Human
cccguggccaacaagcaucu

SEQ ID NO: 408828 - RNA, 24 nt, Human
cggcagcagaggccgccggacaag

SEQ ID NO: 408829 - RNA, 24 nt, Human
cuagcagcagaagccgagucuuuc

SEQ ID NO: 408830 - RNA, 21 nt, Human
cuccgccggcgacggggcugg

SEQ ID NO: 408831 - RNA, 18 nt, Human
cuuuauacugcucccuuc

SEQ ID NO: 408832 - RNA, 20 nt, Human
gaaacaaaagaaaaagaaaa

SEQ ID NO: 408833 - RNA, 23 nt, Human
gaaccagugauaucaucacugaa

SEQ ID NO: 408834 - RNA, 28 nt, Human
gccaauaaaaucugcauggacaccuacc

SEQ ID NO: 408835 - RNA, 21 nt, Human
gcuuuauacugcucccuucca

SEQ ID NO: 408836 - RNA, 21 nt, Human
ggacgcgcccgcgcccgccuc

SEQ ID NO: 408837 - RNA, 23 nt, Human
ggacuccggaagggcagcaacuc

SEQ ID NO: 408838 - RNA, 20 nt, Human
ggcagcaacuccaccuccuc

SEQ ID NO: 408839 - RNA, 19 nt, Human
gggaaaaaaguacuuuaac

SEQ ID NO: 408840 - RNA, 18 nt, Human
gggaaaagugacacagua

SEQ ID NO: 408841 - RNA, 22 nt, Human
guugcacugcaaucugccagua

SEQ ID NO: 408842 - RNA, 23 nt, Human
uaaaaaacccaauuaacauuuuu

SEQ ID NO: 408843 - RNA, 21 nt, Human
uaaaacaauguuuaaaaaacc

SEQ ID NO: 408844 - RNA, 22 nt, Human
uaaaauuaguaccaaggaaaca

SEQ ID NO: 408845 - RNA, 20 nt, Human
uaaagcauaaaacuuagaug

SEQ ID NO: 408846 - RNA, 26 nt, Human
uaaauauggagccuaacccugauuca

SEQ ID NO: 408847 - RNA, 23 nt, Human
uaaauuacauuuuauuggcauaa

SEQ ID NO: 408848 - RNA, 24 nt, Human
uaacucagcuccggcgcuagcagg

SEQ ID NO: 408849 - RNA, 24 nt, Human
uaccaaggaaacaaaagaaaaaga

SEQ ID NO: 408850 - RNA, 18 nt, Human
uaccacauaagagagagc

SEQ ID NO: 408851 - RNA, 24 nt, Human
uaccgucccucuugaaaauggucu

SEQ ID NO: 408852 - RNA, 18 nt, Human
uaccucugugaaccuaga

SEQ ID NO: 408853 - RNA, 26 nt, Human
uauuuaaaaaaaaaaacuggcucuau

SEQ ID NO: 408854 - RNA, 22 nt, Human
ucagcugccagcucuauccuau

SEQ ID NO: 408855 - RNA, 21 nt, Human
ugauucauaaauaccgucccu

SEQ ID NO: 408856 - RNA, 24 nt, Human
ugccaguaucacauaaugauaauc

SEQ ID NO: 408857 - RNA, 20 nt, Human
ugcuauagauacagauaggg

SEQ ID NO: 408858 - RNA, 21 nt, Human
uggagaaguuuguaaguucug

SEQ ID NO: 408859 - RNA, 19 nt, Human
uuagaugaaaagcuuuucu

SEQ ID NO: 408860 - RNA, 22 nt, Human
uuaguaccaaggaaacaaaaga

SEQ ID NO: 408861 - RNA, 24 nt, Human
uuaguaccaaggaaacaaaagaaa

SEQ ID NO: 408862 - RNA, 19 nt, Human
uugacgagugaguuagguu

SEQ ID NO: 408863 - RNA, 20 nt, Human
uuuaaaaaacccaauuaaca

SEQ ID NO: 408864 - RNA, 21 nt, Human
uuuaaguaauacacuuuuucu

SEQ ID NO: 408865 - RNA, 27 nt, Human
uuucuauauuaccaaacaauuuccucc

SEQ ID NO: 408866 - RNA, 22 nt, Human
uuuguaaguucuggguuguugc

SEQ ID NO: 408867 - RNA, 23 nt, Human
aaaaaaauagacuugaaaaacca

SEQ ID NO: 408868 - RNA, 20 nt, Human
aaaggaaauauucuuccuuu

SEQ ID NO: 408869 - RNA, 22 nt, Human
aaccuuggaaaauuuucccaaa

SEQ ID NO: 408870 - RNA, 18 nt, Human
acacaaggacauagcacc

SEQ ID NO: 408871 - RNA, 18 nt, Human
accauguacccagggguc

SEQ ID NO: 408872 - RNA, 25 nt, Human
acucugucaccccggcuggagugca

SEQ ID NO: 408873 - RNA, 22 nt, Human
aggaaaaaggaggcgguaagaa

SEQ ID NO: 408874 - RNA, 19 nt, Human
aggguuaaauauaauauuu

SEQ ID NO: 408875 - RNA, 27 nt, Human
aguaaaaaggcaucuuuucuccccugg

SEQ ID NO: 408876 - RNA, 21 nt, Human
aguaagauaaucucuccaauu

SEQ ID NO: 408877 - RNA, 22 nt, Human
aguagagaugugguuuugccau

SEQ ID NO: 408878 - RNA, 18 nt, Human
aguagcugggauuacagg

SEQ ID NO: 408879 - RNA, 18 nt, Human
agucggagucucacucug

SEQ ID NO: 408880 - RNA, 23 nt, Human
agugcaguggugcaaucuugguu

SEQ ID NO: 408881 - RNA, 24 nt, Human
agugcaguggugcaaucuugguuc

SEQ ID NO: 408882 - RNA, 22 nt, Human
auacauagaaaaaaaauagacu

SEQ ID NO: 408883 - RNA, 23 nt, Human
auauguaguaugauaacauucug

SEQ ID NO: 408884 - RNA, 21 nt, Human
augaucaacuggagauagccu

SEQ ID NO: 408885 - RNA, 24 nt, Human
augugguuuugccauguuggccag

SEQ ID NO: 408886 - RNA, 21 nt, Human
auucuggagaaacacauaaag

SEQ ID NO: 408887 - RNA, 21 nt, Human
caaaauaacaauacaggagua

SEQ ID NO: 408888 - RNA, 22 nt, Human
caaaauaacaauacaggaguaa

SEQ ID NO: 408889 - RNA, 20 nt, Human
caaagucaguagugccuuuc

SEQ ID NO: 408890 - RNA, 19 nt, Human
caagagagcaagagacugc

SEQ ID NO: 408891 - RNA, 24 nt, Human
cacacuagggugauuuaaaaucau

SEQ ID NO: 408892 - RNA, 19 nt, Human
cacauaauacaaaaaaggg

SEQ ID NO: 408893 - RNA, 18 nt, Human
caccauguacccaggggu

SEQ ID NO: 408894 - RNA, 19 nt, Human
caccauguacccagggguc

SEQ ID NO: 408895 - RNA, 21 nt, Human
caccccggcuggagugcagug

SEQ ID NO: 408896 - RNA, 24 nt, Human
cacucugucaccccggcuggagug

SEQ ID NO: 408897 - RNA, 21 nt, Human
cacugcaaccuccgccuccca

SEQ ID NO: 408898 - RNA, 21 nt, Human
cagcaauucuuguaccucagc

SEQ ID NO: 408899 - RNA, 23 nt, Human
cagguuccagcaauucuuguacc

SEQ ID NO: 408900 - RNA, 22 nt, Human
caucccaaugaucaacuggaga

SEQ ID NO: 408901 - RNA, 24 nt, Human
cauguuggccaggcuggucucgaa

SEQ ID NO: 408902 - RNA, 19 nt, Human
ccacugaguuuauagugua

SEQ ID NO: 408903 - RNA, 23 nt, Human
ccagcaauucuuguaccucagcc

SEQ ID NO: 408904 - RNA, 19 nt, Human
ccauguuggccaggcuggu

SEQ ID NO: 408905 - RNA, 19 nt, Human
ccauucccuucaccaucca

SEQ ID NO: 408906 - RNA, 20 nt, Human
cccaaauacagcaauaggau

SEQ ID NO: 408907 - RNA, 19 nt, Human
cccaaugaucaacuggaga

SEQ ID NO: 408908 - RNA, 23 nt, Human
cccaccauccauaauauuuaaau

SEQ ID NO: 408909 - RNA, 19 nt, Human
cccagacaaaaggaaaaua

SEQ ID NO: 408910 - RNA, 21 nt, Human
cccggcuggagugcaguggug

SEQ ID NO: 408911 - RNA, 22 nt, Human
ccucccagguuccagcaauucu

SEQ ID NO: 408912 - RNA, 19 nt, Human
ccugaccucaagugaucug

SEQ ID NO: 408913 - RNA, 24 nt, Human
ccugaccucaagugaucugcccac

SEQ ID NO: 408914 - RNA, 21 nt, Human
cuacugcccagacaaaaggaa

SEQ ID NO: 408915 - RNA, 22 nt, Human
cucaagugaucugcccaccauc

SEQ ID NO: 408916 - RNA, 24 nt, Human
cucacucugucaccccggcuggag

SEQ ID NO: 408917 - RNA, 24 nt, Human
cucagccuucugaguagcugggau

SEQ ID NO: 408918 - RNA, 23 nt, Human
cugcaaccuccgccucccagguu

SEQ ID NO: 408919 - RNA, 24 nt, Human
cugcaaccuccgccucccagguuc

SEQ ID NO: 408920 - RNA, 25 nt, Human
cuuguaccucagccuucugaguagc

SEQ ID NO: 408921 - RNA, 19 nt, Human
gaaaaagcuuacauaaaaa

SEQ ID NO: 408922 - RNA, 21 nt, Human
gaacaaaauaacaauacagga

SEQ ID NO: 408923 - RNA, 23 nt, Human
gacaaaaggaaaauaaacuuuuu

SEQ ID NO: 408924 - RNA, 22 nt, Human
gaccucaagugaucugcccacc

SEQ ID NO: 408925 - RNA, 24 nt, Human
gaguagcugggauuacaggagugc

SEQ ID NO: 408926 - RNA, 19 nt, Human
gaguccaagagagcaagag

SEQ ID NO: 408927 - RNA, 18 nt, Human
gauuacaggagugcacca

SEQ ID NO: 408928 - RNA, 22 nt, Human
gcaaccuccgccucccagguuc

SEQ ID NO: 408929 - RNA, 20 nt, Human
gccauguuggccaggcuggu

SEQ ID NO: 408930 - RNA, 24 nt, Human
gccauguuggccaggcuggucucg

SEQ ID NO: 408931 - RNA, 23 nt, Human
gcugcagcauguuuuagaaucug

SEQ ID NO: 408932 - RNA, 23 nt, Human
gcuggucucgaacuccugaccuc

SEQ ID NO: 408933 - RNA, 18 nt, Human
ggaaaaguagagaaucaa

SEQ ID NO: 408934 - RNA, 18 nt, Human
ggaguaaagcaugaccag

SEQ ID NO: 408935 - RNA, 21 nt, Human
ggagugcaccaccacacccag

SEQ ID NO: 408936 - RNA, 22 nt, Human
ggcauugagacacagagagaaa

SEQ ID NO: 408937 - RNA, 24 nt, Human
ggcuggucucgaacuccugaccuc

SEQ ID NO: 408938 - RNA, 19 nt, Human
ggucucgaacuccugaccu

SEQ ID NO: 408939 - RNA, 21 nt, Human
gguuuugccauguuggccagg

SEQ ID NO: 408940 - RNA, 23 nt, Human
guagagaugugguuuugccaugu

SEQ ID NO: 408941 - RNA, 20 nt, Human
guagcugggauuacaggagu

SEQ ID NO: 408942 - RNA, 19 nt, Human
guuuugccauguuggccag

SEQ ID NO: 408943 - RNA, 25 nt, Human
uaaaaaggcaucuuuuauuuguguu

SEQ ID NO: 408944 - RNA, 21 nt, Human
uaaaaucauccaccauguacc

SEQ ID NO: 408945 - RNA, 18 nt, Human
uaaccugcaaaaacaucc

SEQ ID NO: 408946 - RNA, 23 nt, Human
uaaccugcaaaaacauccaccag

SEQ ID NO: 408947 - RNA, 22 nt, Human
uaagaacaaagucaguagugcc

SEQ ID NO: 408948 - RNA, 18 nt, Human
uaaucgcuagagguugcc

SEQ ID NO: 408949 - RNA, 23 nt, Human
uaauuuuuuuauuuuuaguagag

SEQ ID NO: 408950 - RNA, 24 nt, Human
uaauuuuuuuauuuuuaguagaga

SEQ ID NO: 408951 - RNA, 24 nt, Human
uacaggagugcaccaccacaccca

SEQ ID NO: 408952 - RNA, 22 nt, Human
uaccucagccuucugaguagcu

SEQ ID NO: 408953 - RNA, 24 nt, Human
uaccucagccuucugaguagcugg

SEQ ID NO: 408954 - RNA, 22 nt, Human
uagagaugugguuuugccaugu

SEQ ID NO: 408955 - RNA, 24 nt, Human
uaguagagaugugguuuugccaug

SEQ ID NO: 408956 - RNA, 19 nt, Human
ucacugcaaccuccgccuc

SEQ ID NO: 408957 - RNA, 24 nt, Human
ucacugcaaccuccgccucccagg

SEQ ID NO: 408958 - RNA, 25 nt, Human
ucacugcaaccuccgccucccaggu

SEQ ID NO: 408959 - RNA, 26 nt, Human
ucacugcaaccuccgccucccagguu

SEQ ID NO: 408960 - RNA, 20 nt, Human
ucagccuucugaguagcugg

SEQ ID NO: 408961 - RNA, 18 nt, Human
ucaguugugcaaaaguac

SEQ ID NO: 408962 - RNA, 18 nt, Human
ucccaaugaucaacugga

SEQ ID NO: 408963 - RNA, 20 nt, Human
ucccagguuccagcaauucu

SEQ ID NO: 408964 - RNA, 22 nt, Human
ucccagguuccagcaauucuug

SEQ ID NO: 408965 - RNA, 18 nt, Human
ucucacucugucaccccg

SEQ ID NO: 408966 - RNA, 24 nt, Human
ucucacucugucaccccggcugga

SEQ ID NO: 408967 - RNA, 21 nt, Human
ucucgaacuccugaccucaag

SEQ ID NO: 408968 - RNA, 20 nt, Human
ucucuccaauucuauaccau

SEQ ID NO: 408969 - RNA, 23 nt, Human
ucugaguagcugggauuacagga

SEQ ID NO: 408970 - RNA, 23 nt, Human
ucuugcugcagcauguuuuagaa

SEQ ID NO: 408971 - RNA, 18 nt, Human
ugaaaaaccauccagaaa

SEQ ID NO: 408972 - RNA, 23 nt, Human
ugaaaaucucucauuuaguaguc

SEQ ID NO: 408973 - RNA, 21 nt, Human
ugaaaccaaucacacacuuua

SEQ ID NO: 408974 - RNA, 27 nt, Human
ugaaagagaauugagacauacauagaa

SEQ ID NO: 408975 - RNA, 23 nt, Human
ugaacacacucauuaaaccaagc

SEQ ID NO: 408976 - RNA, 18 nt, Human
ugaccucaagugaucugc

SEQ ID NO: 408977 - RNA, 22 nt, Human
ugaguaguuauuuucacuacug

SEQ ID NO: 408978 - RNA, 24 nt, Human
ugccauguuggccaggcuggucuc

SEQ ID NO: 408979 - RNA, 26 nt, Human
ugccauguuggccaggcuggucucga

SEQ ID NO: 408980 - RNA, 23 nt, Human
ugcugcagcauguuuuagaaucu

SEQ ID NO: 408981 - RNA, 23 nt, Human
uggagugcaguggugcaaucuug

SEQ ID NO: 408982 - RNA, 24 nt, Human
uggagugcaguggugcaaucuugg

SEQ ID NO: 408983 - RNA, 24 nt, Human
uggccaggcuggucucgaacuccu

SEQ ID NO: 408984 - RNA, 22 nt, Human
ugggauuacaggagugcaccac

SEQ ID NO: 408985 - RNA, 24 nt, Human
ugggauuacaggagugcaccacca

SEQ ID NO: 408986 - RNA, 25 nt, Human
uggguugaaaacauuuaacaguucc

SEQ ID NO: 408987 - RNA, 21 nt, Human
ugucaccccggcuggagugca

SEQ ID NO: 408988 - RNA, 18 nt, Human
ugugguuuugccauguug

SEQ ID NO: 408989 - RNA, 18 nt, Human
uuaguagagaugugguuu

SEQ ID NO: 408990 - RNA, 18 nt, Human
uuaguagagaugugguuu

SEQ ID NO: 408991 - RNA, 24 nt, Human
uuaguagagaugugguuuugccau

SEQ ID NO: 408992 - RNA, 26 nt, Human
uuaguagcuuccuucuaaaauuuccu

SEQ ID NO: 408993 - RNA, 23 nt, Human
uuagucacauaauacaaaaaagg

SEQ ID NO: 408994 - RNA, 18 nt, Human
uuauuuauuuauuuauuu

SEQ ID NO: 408995 - RNA, 18 nt, Human
uuauuuauuuauuuauuu

SEQ ID NO: 408996 - RNA, 18 nt, Human
uuauuuauuuauuuauuu

SEQ ID NO: 408997 - RNA, 19 nt, Human
uuauuuauuuauuuauuua

SEQ ID NO: 408998 - RNA, 25 nt, Human
uuauuuauuuauuuauuuauuuauu

SEQ ID NO: 408999 - RNA, 25 nt, Human
uuauuuauuuauuuauuuauuuauu

SEQ ID NO: 409000 - RNA, 25 nt, Human
uuauuuauuuauuuauuuauuuauu

SEQ ID NO: 409001 - RNA, 25 nt, Human
uuauuuauuuauuuauuuauuuauu

SEQ ID NO: 409002 - RNA, 20 nt, Human
uuauuuauuuauuuauuuuc

SEQ ID NO: 409003 - RNA, 20 nt, Human
uuauuuauuuauuuauuuuc

SEQ ID NO: 409004 - RNA, 21 nt, Human
uucaguaagauaaucucucca

SEQ ID NO: 409005 - RNA, 23 nt, Human
uucagucggagucucacucuguc

SEQ ID NO: 409006 - RNA, 24 nt, Human
uucaugcacaaagaugcucauccc

SEQ ID NO: 409007 - RNA, 20 nt, Human
uuccagagaaagcugggacu

SEQ ID NO: 409008 - RNA, 19 nt, Human
uuccagcaauucuuguacc

SEQ ID NO: 409009 - RNA, 26 nt, Human
uucuccuauauauguguucaucaaga

SEQ ID NO: 409010 - RNA, 24 nt, Human
uugccauguuggccaggcuggucu

SEQ ID NO: 409011 - RNA, 20 nt, Human
uugucaccuccucugacagg

SEQ ID NO: 409012 - RNA, 22 nt, Human
uuuauuuauuuauuuauuuauu

SEQ ID NO: 409013 - RNA, 23 nt, Human
uuuugccauguuggccaggcugg

SEQ ID NO: 409014 - RNA, 24 nt, Human
uuuuuaguagagaugugguuuugc

SEQ ID NO: 409015 - RNA, 20 nt, Human
uuuuuuauuuuuaguagaga

SEQ ID NO: 409016 - RNA, 27 nt, Human
uuuuuuuuuuuuuuuuuuuuuuugggg

SEQ ID NO: 409017 - RNA, 21 nt, Human
aaaaaaaaaaaaaaacagggg

SEQ ID NO: 409018 - RNA, 23 nt, Human
aaaaaaaaaaaaaagaaauagga

SEQ ID NO: 409019 - RNA, 23 nt, Human
aaaaaaaaaaaaguacuuggaau

SEQ ID NO: 409020 - RNA, 23 nt, Human
aaaaaaaaaaagaaauaggaagg

SEQ ID NO: 409021 - RNA, 28 nt, Human
aaaaaaaaaagaaauaggaaggcgagag

SEQ ID NO: 409022 - RNA, 26 nt, Human
aaaaaaaacaggggaaaaccagaauu

SEQ ID NO: 409023 - RNA, 20 nt, Human
aaaaaaacaggggaaaacca

SEQ ID NO: 409024 - RNA, 23 nt, Human
aaaaaaacaggggaaaaccagag

SEQ ID NO: 409025 - RNA, 25 nt, Human
aaaaaccaaaaggaagugcucugca

SEQ ID NO: 409026 - RNA, 22 nt, Human
aaaaagaaacaaaacccaaaca

SEQ ID NO: 409027 - RNA, 22 nt, Human
aaaaagaaacaaaacccaaaca

SEQ ID NO: 409028 - RNA, 25 nt, Human
aaaaagaaacaaaacccaaacaaaa

SEQ ID NO: 409029 - RNA, 20 nt, Human
aaaaauguauuuccucaggc

SEQ ID NO: 409030 - RNA, 19 nt, Human
aaaacaaugauacaaagca

SEQ ID NO: 409031 - RNA, 21 nt, Human
aaaagaaagaauaacaaaaga

SEQ ID NO: 409032 - RNA, 19 nt, Human
aaaaggaagugcucugcaa

SEQ ID NO: 409033 - RNA, 20 nt, Human
aaaaggucuuuccugccucc

SEQ ID NO: 409034 - RNA, 24 nt, Human
aaacaaaacaaugauacaaagcaa

SEQ ID NO: 409035 - RNA, 24 nt, Human
aaacaaaacaaugauacaaagcaa

SEQ ID NO: 409036 - RNA, 20 nt, Human
aaacaaaacccaaacaaaac

SEQ ID NO: 409037 - RNA, 24 nt, Human
aaacagaacaguuuagaacagaac

SEQ ID NO: 409038 - RNA, 20 nt, Human
aaacauggccaaugagagaa

SEQ ID NO: 409039 - RNA, 18 nt, Human
aaagcuccucauuccacu

SEQ ID NO: 409040 - RNA, 21 nt, Human
aaauagagcaaggaugugccc

SEQ ID NO: 409041 - RNA, 21 nt, Human
aacaugugagcccacugucua

SEQ ID NO: 409042 - RNA, 24 nt, Human
aacccaaacaaaacaaugauacaa

SEQ ID NO: 409043 - RNA, 21 nt, Human
aacugcagcacuaucaggaac

SEQ ID NO: 409044 - RNA, 25 nt, Human
aagaacacccucggcagcccgaaag

SEQ ID NO: 409045 - RNA, 22 nt, Human
aagaagggaauuucauguugga

SEQ ID NO: 409046 - RNA, 25 nt, Human
aagauacuuuuuucccuucucauua

SEQ ID NO: 409047 - RNA, 27 nt, Human
aagaugguggcgcggcggccgagucuc

SEQ ID NO: 409048 - RNA, 21 nt, Human
aagcaacugcagcacuaucag

SEQ ID NO: 409049 - RNA, 18 nt, Human
aagcaacugcgaauuaau

SEQ ID NO: 409050 - RNA, 25 nt, Human
aagcauaacaaugugaguuaagagc

SEQ ID NO: 409051 - RNA, 19 nt, Human
aagccuaaccacagcucgc

SEQ ID NO: 409052 - RNA, 20 nt, Human
aauagccauacugagacucu

SEQ ID NO: 409053 - RNA, 19 nt, Human
aauauuuuuggagcuguau

SEQ ID NO: 409054 - RNA, 20 nt, Human
aauuaauguaaaaauggagu

SEQ ID NO: 409055 - RNA, 18 nt, Human
aauucuauuagucaacua

SEQ ID NO: 409056 - RNA, 18 nt, Human
acaaaacccaaacaaaac

SEQ ID NO: 409057 - RNA, 21 nt, Human
acacaagaaagaaauaccugg

SEQ ID NO: 409058 - RNA, 19 nt, Human
acagaacuauuauagccaa

SEQ ID NO: 409059 - RNA, 20 nt, Human
acagcacagaagcagaccac

SEQ ID NO: 409060 - RNA, 20 nt, Human
acaguagcuaaaguugaccu

SEQ ID NO: 409061 - RNA, 24 nt, Human
acauacauccuuguagcaagcauu

SEQ ID NO: 409062 - RNA, 22 nt, Human
accacaggcuucaacaaagagc

SEQ ID NO: 409063 - RNA, 21 nt, Human
accagcuucuuuacuccacau

SEQ ID NO: 409064 - RNA, 28 nt, Human
acccaaacaaaacaaugauacaaagcaa

SEQ ID NO: 409065 - RNA, 19 nt, Human
accgucuucuguuguuugc

SEQ ID NO: 409066 - RNA, 23 nt, Human
accuaacaguaccuaccuuugau

SEQ ID NO: 409067 - RNA, 18 nt, Human
accucagucuccgcgcau

SEQ ID NO: 409068 - RNA, 19 nt, Human
acgcucagaagacacagaa

SEQ ID NO: 409069 - RNA, 21 nt, Human
acuaaauugagagggcgccau

SEQ ID NO: 409070 - RNA, 21 nt, Human
acugcaauuaacugggaugcu

SEQ ID NO: 409071 - RNA, 21 nt, Human
agaaaauaauuauucaauaug

SEQ ID NO: 409072 - RNA, 21 nt, Human
agaaagagaaaggaaauagag

SEQ ID NO: 409073 - RNA, 19 nt, Human
agaaaggaaauagagcaag

SEQ ID NO: 409074 - RNA, 21 nt, Human
agaaaggaaauagagcaagga

SEQ ID NO: 409075 - RNA, 23 nt, Human
agaacacccucggcagcccgaaa

SEQ ID NO: 409076 - RNA, 20 nt, Human
agaacaucacuaucuuaaaa

SEQ ID NO: 409077 - RNA, 18 nt, Human
agacaccaacacuauuaa

SEQ ID NO: 409078 - RNA, 26 nt, Human
agagaaaauuccuaaaucaucaugaa

SEQ ID NO: 409079 - RNA, 18 nt, Human
agagaaaggaaauagagc

SEQ ID NO: 409080 - RNA, 21 nt, Human
agagaacacaugaauguacau

SEQ ID NO: 409081 - RNA, 19 nt, Human
agagagaaagagaaaggaa

SEQ ID NO: 409082 - RNA, 19 nt, Human
agagagagagaaagagaaa

SEQ ID NO: 409083 - RNA, 19 nt, Human
agagagagagagaaagaga

SEQ ID NO: 409084 - RNA, 18 nt, Human
agagagggugugcaugug

SEQ ID NO: 409085 - RNA, 21 nt, Human
agagugagaaaaggaagaaug

SEQ ID NO: 409086 - RNA, 22 nt, Human
agcaagcuuucaccuuacugau

SEQ ID NO: 409087 - RNA, 20 nt, Human
agcagcaccaaaaaagagga

SEQ ID NO: 409088 - RNA, 21 nt, Human
agcagcaccaaaaaagaggac

SEQ ID NO: 409089 - RNA, 20 nt, Human
aggacgcuagagauugcagu

SEQ ID NO: 409090 - RNA, 22 nt, Human
aggcaaaaggcuggcauacagc

SEQ ID NO: 409091 - RNA, 18 nt, Human
aggcaccauuauuugaaa

SEQ ID NO: 409092 - RNA, 21 nt, Human
aggcagagccagaacugacuc

SEQ ID NO: 409093 - RNA, 19 nt, Human
aggggguguuguuuuuugu

SEQ ID NO: 409094 - RNA, 18 nt, Human
agugagaaaaggaagaau

SEQ ID NO: 409095 - RNA, 23 nt, Human
auaacaaugcccuccaaaguccc

SEQ ID NO: 409096 - RNA, 23 nt, Human
auaauaaugaaagcaaaaaauga

SEQ ID NO: 409097 - RNA, 20 nt, Human
auacagcagguuaccuugug

SEQ ID NO: 409098 - RNA, 24 nt, Human
auauauuaauucuagucuggugau

SEQ ID NO: 409099 - RNA, 21 nt, Human
aucuugguaaccuacucauca

SEQ ID NO: 409100 - RNA, 25 nt, Human
augcacacacacacacacaaaagga

SEQ ID NO: 409101 - RNA, 24 nt, Human
auggaauaaaggcuuuaauauguc

SEQ ID NO: 409102 - RNA, 18 nt, Human
auggccaaugagagaaga

SEQ ID NO: 409103 - RNA, 24 nt, Human
auuauaaacauaaugugcuaccac

SEQ ID NO: 409104 - RNA, 22 nt, Human
auuuugagauguuccccccuca

SEQ ID NO: 409105 - RNA, 19 nt, Human
caaaaaagaggacgcuaga

SEQ ID NO: 409106 - RNA, 19 nt, Human
caaacaaaaggacuacuga

SEQ ID NO: 409107 - RNA, 24 nt, Human
caaagccuuaaguauuaaaaguuc

SEQ ID NO: 409108 - RNA, 21 nt, Human
caacacaacaucagaaagaca

SEQ ID NO: 409109 - RNA, 21 nt, Human
caagaacacccucggcagccc

SEQ ID NO: 409110 - RNA, 24 nt, Human
caagcuauugaauucccaucaaga

SEQ ID NO: 409111 - RNA, 19 nt, Human
caaggaugugcccggugcc

SEQ ID NO: 409112 - RNA, 18 nt, Human
cacaacguucugagaugg

SEQ ID NO: 409113 - RNA, 18 nt, Human
cacaggucucaagaccgg

SEQ ID NO: 409114 - RNA, 21 nt, Human
cacccuuauuaaaaaagagag

SEQ ID NO: 409115 - RNA, 26 nt, Human
cacuaaaacagaacaguuuagaacag

SEQ ID NO: 409116 - RNA, 27 nt, Human
cacugugaaaaagaaacaaaacccaaa

SEQ ID NO: 409117 - RNA, 23 nt, Human
cagaaugaauacagaggugagug

SEQ ID NO: 409118 - RNA, 25 nt, Human
cagcacagaagcagaccaccagcuu

SEQ ID NO: 409119 - RNA, 19 nt, Human
cagcaguucacaggucuca

SEQ ID NO: 409120 - RNA, 21 nt, Human
cagcgugccaccaucugucau

SEQ ID NO: 409121 - RNA, 23 nt, Human
caggaacaugugagcccacuguc

SEQ ID NO: 409122 - RNA, 21 nt, Human
caggugaggaaccugaggcac

SEQ ID NO: 409123 - RNA, 19 nt, Human
caguccacauagauaaugu

SEQ ID NO: 409124 - RNA, 22 nt, Human
cauacaugccaaaaauaaagaa

SEQ ID NO: 409125 - RNA, 19 nt, Human
cauauugcccaaguuaacc

SEQ ID NO: 409126 - RNA, 22 nt, Human
ccaaaaaagaggacgcuagaga

SEQ ID NO: 409127 - RNA, 24 nt, Human
ccaaacaaaacaaugauacaaagc

SEQ ID NO: 409128 - RNA, 23 nt, Human
ccaaagccaugaaccgucuucug

SEQ ID NO: 409129 - RNA, 21 nt, Human
ccaagaugguuuugacuuaac

SEQ ID NO: 409130 - RNA, 18 nt, Human
ccagcaacacuuaucaaa

SEQ ID NO: 409131 - RNA, 19 nt, Human
ccauacugagacucuucag

SEQ ID NO: 409132 - RNA, 19 nt, Human
ccauggcucucaaaccaaa

SEQ ID NO: 409133 - RNA, 22 nt, Human
ccccacccuuauuaaaaaagag

SEQ ID NO: 409134 - RNA, 22 nt, Human
ccccccccuuucccucccccac

SEQ ID NO: 409135 - RNA, 20 nt, Human
cccguuaacaaugaaacuga

SEQ ID NO: 409136 - RNA, 24 nt, Human
ccuccaaagucccgacgggcgucc

SEQ ID NO: 409137 - RNA, 20 nt, Human
ccucggcagcccgaaagaug

SEQ ID NO: 409138 - RNA, 21 nt, Human
ccucuagaaaugcauuaauuu

SEQ ID NO: 409139 - RNA, 21 nt, Human
ccugaagauuguuugcauaag

SEQ ID NO: 409140 - RNA, 24 nt, Human
ccugccuccccccccuuucccucc

SEQ ID NO: 409141 - RNA, 19 nt, Human
cgagagagcaaucgagagg

SEQ ID NO: 409142 - RNA, 21 nt, Human
cgagaggacgcgaggucugga

SEQ ID NO: 409143 - RNA, 19 nt, Human
cggcacugugaaaaagaaa

SEQ ID NO: 409144 - RNA, 22 nt, Human
cgugucaacgcuauccaaaaau

SEQ ID NO: 409145 - RNA, 21 nt, Human
cuaaacaaauuaaacccacgg

SEQ ID NO: 409146 - RNA, 21 nt, Human
cuaaaggacaaaaauaucaga

SEQ ID NO: 409147 - RNA, 22 nt, Human
cuacagaaugcaaaaaaaaauc

SEQ ID NO: 409148 - RNA, 22 nt, Human
cuaccuucacuaaaacagaaca

SEQ ID NO: 409149 - RNA, 20 nt, Human
cucaauuuucucuugugccu

SEQ ID NO: 409150 - RNA, 22 nt, Human
cucauauacuuggagucaugua

SEQ ID NO: 409151 - RNA, 23 nt, Human
cuccucauuccacuucuuuauuu

SEQ ID NO: 409152 - RNA, 24 nt, Human
cucucaaaccaaagacaguagcua

SEQ ID NO: 409153 - RNA, 24 nt, Human
cuggagaaaccagcagcaccaaaa

SEQ ID NO: 409154 - RNA, 22 nt, Human
cuggccuuugggaacugacagu

SEQ ID NO: 409155 - RNA, 22 nt, Human
cuggcuaaaaugaaaucacuac

SEQ ID NO: 409156 - RNA, 18 nt, Human
cugguccuggccuaaagu

SEQ ID NO: 409157 - RNA, 19 nt, Human
cuuaagcauaacaauguga

SEQ ID NO: 409158 - RNA, 19 nt, Human
cuuagacgcugccugacca

SEQ ID NO: 409159 - RNA, 19 nt, Human
cuugagagauggaauaaag

SEQ ID NO: 409160 - RNA, 21 nt, Human
cuuucaaaaaagcccaaccuc

SEQ ID NO: 409161 - RNA, 19 nt, Human
gaacaucuaaaggacaaaa

SEQ ID NO: 409162 - RNA, 25 nt, Human
gaauauagacaaauaauuuuaaaau

SEQ ID NO: 409163 - RNA, 20 nt, Human
gagaaagagaaaggaaauag

SEQ ID NO: 409164 - RNA, 21 nt, Human
gagagagagagagaaagagaa

SEQ ID NO: 409165 - RNA, 18 nt, Human
gaggacgcuagagauugc

SEQ ID NO: 409166 - RNA, 26 nt, Human
gcaaauccauacugguucaucacaca

SEQ ID NO: 409167 - RNA, 18 nt, Human
gcacagaagcagaccacc

SEQ ID NO: 409168 - RNA, 20 nt, Human
gcacagaagcagaccaccag

SEQ ID NO: 409169 - RNA, 22 nt, Human
gcagcaccaaaaaagaggacgc

SEQ ID NO: 409170 - RNA, 23 nt, Human
gcagcaguucacaggucucaaga

SEQ ID NO: 409171 - RNA, 18 nt, Human
gcccuuggccgucuuucu

SEQ ID NO: 409172 - RNA, 26 nt, Human
gccuccccccccuuucccucccccac

SEQ ID NO: 409173 - RNA, 18 nt, Human
gcgcggcggccaaagcca

SEQ ID NO: 409174 - RNA, 21 nt, Human
ggaccuucaauuucuccuccu

SEQ ID NO: 409175 - RNA, 19 nt, Human
ggcgagagagcaaucgaga

SEQ ID NO: 409176 - RNA, 18 nt, Human
gggcuggguaaaaacagc

SEQ ID NO: 409177 - RNA, 20 nt, Human
gggugggagaggggaggggg

SEQ ID NO: 409178 - RNA, 21 nt, Human
guagcuaaaguugaccuccuc

SEQ ID NO: 409179 - RNA, 22 nt, Human
gucaacgcuauccaaaaauauu

SEQ ID NO: 409180 - RNA, 18 nt, Human
gucaguuucaagacacca

SEQ ID NO: 409181 - RNA, 19 nt, Human
guccuucuaucuucuucuc

SEQ ID NO: 409182 - RNA, 19 nt, Human
uaaaaacagcgugccacca

SEQ ID NO: 409183 - RNA, 23 nt, Human
uaaaaaggcauacaugccaaaaa

SEQ ID NO: 409184 - RNA, 23 nt, Human
uaaaaaggcauacaugccaaaaa

SEQ ID NO: 409185 - RNA, 20 nt, Human
uaaaaugaaaucacuacaga

SEQ ID NO: 409186 - RNA, 18 nt, Human
uaaacagcuaggcagagc

SEQ ID NO: 409187 - RNA, 20 nt, Human
uaaaggacaaaaauaucaga

SEQ ID NO: 409188 - RNA, 20 nt, Human
uaaaguuauuccugcuuuuc

SEQ ID NO: 409189 - RNA, 21 nt, Human
uaacaaugaaacugaagcaga

SEQ ID NO: 409190 - RNA, 24 nt, Human
uaacagcaccuuuaaccaauuauu

SEQ ID NO: 409191 - RNA, 20 nt, Human
uaacaguaccuaccuuugau

SEQ ID NO: 409192 - RNA, 21 nt, Human
uaagaaauacaccaagaacau

SEQ ID NO: 409193 - RNA, 27 nt, Human
uaagaaauacaccaagaaccggggccc

SEQ ID NO: 409194 - RNA, 22 nt, Human
uaagaacagaacuauuauagcc

SEQ ID NO: 409195 - RNA, 24 nt, Human
uaagaacagaacuauuauagccaa

SEQ ID NO: 409196 - RNA, 21 nt, Human
uaagaauccuauuuaaugcua

SEQ ID NO: 409197 - RNA, 21 nt, Human
uaaggaagauaaauuacauca

SEQ ID NO: 409198 - RNA, 19 nt, Human
uaaggcaaaaggcuggcau

SEQ ID NO: 409199 - RNA, 19 nt, Human
uaaucugacagugcaucca

SEQ ID NO: 409200 - RNA, 20 nt, Human
uacaaacaaguacuacauua

SEQ ID NO: 409201 - RNA, 23 nt, Human
uacaggugaggaaccugaggcac

SEQ ID NO: 409202 - RNA, 24 nt, Human
uaccuaccuuugauuagaauauuu

SEQ ID NO: 409203 - RNA, 22 nt, Human
uacgcgacaggugagaucagaa

SEQ ID NO: 409204 - RNA, 21 nt, Human
uagaagacgcucagaagacac

SEQ ID NO: 409205 - RNA, 22 nt, Human
uagaaggacaauuuucucugau

SEQ ID NO: 409206 - RNA, 24 nt, Human
uagaauauuuaguuugauacucag

SEQ ID NO: 409207 - RNA, 25 nt, Human
uagauaauguugcuuaaggauugcc

SEQ ID NO: 409208 - RNA, 18 nt, Human
uaguugauacuacuaugu

SEQ ID NO: 409209 - RNA, 19 nt, Human
uauaccaacugucagucug

SEQ ID NO: 409210 - RNA, 26 nt, Human
uaugaaaacaaaauaaaauaaaacga

SEQ ID NO: 409211 - RNA, 27 nt, Human
uaugcaaacaaaaaaaugcaaaaauga

SEQ ID NO: 409212 - RNA, 25 nt, Human
uauggaauaagaucuaucgugucaa

SEQ ID NO: 409213 - RNA, 20 nt, Human
uaugucaaaaaaggaguguu

SEQ ID NO: 409214 - RNA, 20 nt, Human
uauuucaguuuaugugaaua

SEQ ID NO: 409215 - RNA, 20 nt, Human
uauuuuucaauuuuacaggu

SEQ ID NO: 409216 - RNA, 24 nt, Human
ucaaaaaagcccaaccucuucucc

SEQ ID NO: 409217 - RNA, 25 nt, Human
ucaaaccaaagacaguagcuaaagu

SEQ ID NO: 409218 - RNA, 20 nt, Human
ucaagaacacccucggcagc

SEQ ID NO: 409219 - RNA, 23 nt, Human
ucacacacaagaaagaaauaccu

SEQ ID NO: 409220 - RNA, 22 nt, Human
ucagagagggugugcauguguu

SEQ ID NO: 409221 - RNA, 22 nt, Human
ucagucuccgcgcauuacguca

SEQ ID NO: 409222 - RNA, 20 nt, Human
ucauaaggcauguggcuuua

SEQ ID NO: 409223 - RNA, 18 nt, Human
ucaugccucccccaaagu

SEQ ID NO: 409224 - RNA, 18 nt, Human
uccaagagagaaaauucc

SEQ ID NO: 409225 - RNA, 23 nt, Human
uccaguagcuuguaauaucuucu

SEQ ID NO: 409226 - RNA, 23 nt, Human
ucccaacuucuuuaaugaaauaa

SEQ ID NO: 409227 - RNA, 24 nt, Human
ucccaucaagaaaaccuauuucua

SEQ ID NO: 409228 - RNA, 21 nt, Human
ucccuuuccuuucaagagaac

SEQ ID NO: 409229 - RNA, 19 nt, Human
uccucugccuaggguuuca

SEQ ID NO: 409230 - RNA, 19 nt, Human
ucgucaagaacacccucgg

SEQ ID NO: 409231 - RNA, 22 nt, Human
ucuaaaccgcaaacaaaaggac

SEQ ID NO: 409232 - RNA, 24 nt, Human
ucuaccuucacuaaaacagaacag

SEQ ID NO: 409233 - RNA, 19 nt, Human
ucuaguauucaaaucagga

SEQ ID NO: 409234 - RNA, 21 nt, Human
ucuaugcuuuugaauugaggg

SEQ ID NO: 409235 - RNA, 18 nt, Human
ucugguguuuugcugauu

SEQ ID NO: 409236 - RNA, 18 nt, Human
ucugucucuugcuuucuc

SEQ ID NO: 409237 - RNA, 22 nt, Human
ucugucugagaaaaaaaaaaaa

SEQ ID NO: 409238 - RNA, 24 nt, Human
ucuucuguuguuugcagaguugau

SEQ ID NO: 409239 - RNA, 23 nt, Human
ugaaaaugacaacacaacaucag

SEQ ID NO: 409240 - RNA, 18 nt, Human
ugaaacauagacaaagca

SEQ ID NO: 409241 - RNA, 19 nt, Human
ugaaacauagacaaagcaa

SEQ ID NO: 409242 - RNA, 19 nt, Human
ugaaacugaagcagaggac

SEQ ID NO: 409243 - RNA, 19 nt, Human
ugaaacugaagcagaggac

SEQ ID NO: 409244 - RNA, 20 nt, Human
ugaacaugcacuaugaaaac

SEQ ID NO: 409245 - RNA, 22 nt, Human
ugacauacuucugcccuagcau

SEQ ID NO: 409246 - RNA, 21 nt, Human
ugagaaaaggaagaaugagaa

SEQ ID NO: 409247 - RNA, 18 nt, Human
ugagacucuucaguuuau

SEQ ID NO: 409248 - RNA, 22 nt, Human
ugagagaaagagugagaaaagg

SEQ ID NO: 409249 - RNA, 22 nt, Human
ugaggcacaaaaagaaaaagug

SEQ ID NO: 409250 - RNA, 23 nt, Human
ugagugaugagagaaagagugag

SEQ ID NO: 409251 - RNA, 23 nt, Human
ugauuucugucucuugcuuucuc

SEQ ID NO: 409252 - RNA, 24 nt, Human
ugcaaacaaaaaaaugcaaaaaug

SEQ ID NO: 409253 - RNA, 24 nt, Human
ugcauaagaaauacaccaagaaca

SEQ ID NO: 409254 - RNA, 20 nt, Human
ugccaaaaauaaagaaccua

SEQ ID NO: 409255 - RNA, 26 nt, Human
ugccgggugggagaggggagggggug

SEQ ID NO: 409256 - RNA, 22 nt, Human
ugccuccccccccuuucccucc

SEQ ID NO: 409257 - RNA, 24 nt, Human
ugccuccccccccuuucccucccc

SEQ ID NO: 409258 - RNA, 21 nt, Human
ugcucuagaaggacaauuuuc

SEQ ID NO: 409259 - RNA, 23 nt, Human
ugcugauuuaagcaguccacaua

SEQ ID NO: 409260 - RNA, 22 nt, Human
ugcuuuacaaacaaguacuaca

SEQ ID NO: 409261 - RNA, 21 nt, Human
uggcaaaaaauaaacuacugg

SEQ ID NO: 409262 - RNA, 18 nt, Human
uggccaguccaguacugc

SEQ ID NO: 409263 - RNA, 21 nt, Human
uggcuaaaaugaaaucacuac

SEQ ID NO: 409264 - RNA, 21 nt, Human
ugggaaaauaacaaugcccuc

SEQ ID NO: 409265 - RNA, 22 nt, Human
uguaacagacaucuuugcugcc

SEQ ID NO: 409266 - RNA, 20 nt, Human
uguaggacagagugaagcuu

SEQ ID NO: 409267 - RNA, 22 nt, Human
ugucauauugcccaaguuaacc

SEQ ID NO: 409268 - RNA, 21 nt, Human
ugugaaaaagaaacaaaaccc

SEQ ID NO: 409269 - RNA, 23 nt, Human
ugugcacaugugcaauuauaaac

SEQ ID NO: 409270 - RNA, 24 nt, Human
uguuccccccucaugccuccccca

SEQ ID NO: 409271 - RNA, 19 nt, Human
uguuguuugcagaguugau

SEQ ID NO: 409272 - RNA, 23 nt, Human
uuaaaaaaaguuccguaccauaa

SEQ ID NO: 409273 - RNA, 23 nt, Human
uuaaauaacccccuuggccacau

SEQ ID NO: 409274 - RNA, 19 nt, Human
uuaauucuagucuggugau

SEQ ID NO: 409275 - RNA, 22 nt, Human
uuaccuuagaaaagaaucccca

SEQ ID NO: 409276 - RNA, 21 nt, Human
uuagaaaagcaaauccauacu

SEQ ID NO: 409277 - RNA, 19 nt, Human
uuagaucuuuaauugucac

SEQ ID NO: 409278 - RNA, 23 nt, Human
uuaucaaaauaauuucugaaaug

SEQ ID NO: 409279 - RNA, 21 nt, Human
uuaucagaaauguuaucgcuu

SEQ ID NO: 409280 - RNA, 21 nt, Human
uucaaccaaggaucucaaagu

SEQ ID NO: 409281 - RNA, 20 nt, Human
uucaccuuacuggcucaccg

SEQ ID NO: 409282 - RNA, 22 nt, Human
uuccucaauuuucucuugugcc

SEQ ID NO: 409283 - RNA, 23 nt, Human
uuccucaauuuucucuugugccu

SEQ ID NO: 409284 - RNA, 22 nt, Human
uuccugccuccccccccuuucc

SEQ ID NO: 409285 - RNA, 19 nt, Human
uuccuggccuuugggaacu

SEQ ID NO: 409286 - RNA, 22 nt, Human
uucuccgguguaggacagagug

SEQ ID NO: 409287 - RNA, 22 nt, Human
uugauuaaucgucaagaacacc

SEQ ID NO: 409288 - RNA, 23 nt, Human
uuguuuaaaaaaaaaaaaaagaa

SEQ ID NO: 409289 - RNA, 18 nt, Human
uuuaaaauggguacaugu

SEQ ID NO: 409290 - RNA, 21 nt, Human
uuuaaccaaaagaaaauaaau

SEQ ID NO: 409291 - RNA, 22 nt, Human
uuuaaugcuacuuaacuaaauc

SEQ ID NO: 409292 - RNA, 21 nt, Human
uuucaaauucuagacaguuuu

SEQ ID NO: 409293 - RNA, 25 nt, Human
uuucaguuuuuaaauggcacacaau

SEQ ID NO: 409294 - RNA, 22 nt, Human
uuuccugccuccccccccuuuc

SEQ ID NO: 409295 - RNA, 18 nt, Human
uuugcagaguugaucuug

SEQ ID NO: 409296 - RNA, 21 nt, Human
uuuggagcuguauuugcauug

SEQ ID NO: 409297 - RNA, 24 nt, Human
uuuggagcuguauuugcauuggau

SEQ ID NO: 409298 - RNA, 21 nt, Human
uuuuucuuucauugcccugga

SEQ ID NO: 409299 - RNA, 28 nt, Human
aaaaaaaaaaaagaauaaaaucaaagaa

SEQ ID NO: 409300 - RNA, 27 nt, Human
aaaaaaaaaagaauaaaaucaaagaag

SEQ ID NO: 409301 - RNA, 23 nt, Human
aaaaaaagaauaaaaucaaagaa

SEQ ID NO: 409302 - RNA, 20 nt, Human
aaaaaaauacaaaaaauuag

SEQ ID NO: 409303 - RNA, 23 nt, Human
aaaauugugccacugcauuccag

SEQ ID NO: 409304 - RNA, 19 nt, Human
aaaucaaagaaaacagccc

SEQ ID NO: 409305 - RNA, 18 nt, Human
aacauggcgaaaccccau

SEQ ID NO: 409306 - RNA, 20 nt, Human
aacauggcgaaaccccauau

SEQ ID NO: 409307 - RNA, 20 nt, Human
aacauggcgaaaccccauau

SEQ ID NO: 409308 - RNA, 21 nt, Human
aacauggcgaaaccccauauc

SEQ ID NO: 409309 - RNA, 21 nt, Human
aacauggcgaaaccccauauc

SEQ ID NO: 409310 - RNA, 19 nt, Human
aacauggugaaaccccguc

SEQ ID NO: 409311 - RNA, 19 nt, Human
aacauggugaaaccccguc

SEQ ID NO: 409312 - RNA, 20 nt, Human
aacauggugaaaccccgucu

SEQ ID NO: 409313 - RNA, 20 nt, Human
aacauggugaaaccccgucu

SEQ ID NO: 409314 - RNA, 21 nt, Human
aacauggugaaaccccgucuc

SEQ ID NO: 409315 - RNA, 21 nt, Human
aacauggugaaaccccgucuc

SEQ ID NO: 409316 - RNA, 25 nt, Human
aaccaaacccagccaacaggaagca

SEQ ID NO: 409317 - RNA, 24 nt, Human
aacuccaacuugcugcugccccca

SEQ ID NO: 409318 - RNA, 23 nt, Human
aacuugcugcugcccccagcccc

SEQ ID NO: 409319 - RNA, 23 nt, Human
aagaaucgcuugaacccgggagg

SEQ ID NO: 409320 - RNA, 23 nt, Human
aagaaucgcuugaacccgggagg

SEQ ID NO: 409321 - RNA, 21 nt, Human
aagaggagcaagcacggcaca

SEQ ID NO: 409322 - RNA, 21 nt, Human
aagaggagcaagcacggcaca

SEQ ID NO: 409323 - RNA, 24 nt, Human
aagcagaagaaucgcuugaacccg

SEQ ID NO: 409324 - RNA, 24 nt, Human
aagcagaagaaucgcuugaacccg

SEQ ID NO: 409325 - RNA, 25 nt, Human
aagcagaagaaucgcuugaacccgg

SEQ ID NO: 409326 - RNA, 25 nt, Human
aagcagaagaaucgcuugaacccgg

SEQ ID NO: 409327 - RNA, 25 nt, Human
aagcaggacugggguuccuagaaau

SEQ ID NO: 409328 - RNA, 21 nt, Human
aagggcccugugaagcagggu

SEQ ID NO: 409329 - RNA, 24 nt, Human
aaucgcuugaacccgggaggcaga

SEQ ID NO: 409330 - RNA, 24 nt, Human
aaucgcuugaacccgggaggcaga

SEQ ID NO: 409331 - RNA, 18 nt, Human
aauuagccagacauggug

SEQ ID NO: 409332 - RNA, 20 nt, Human
acaagagugaaacucugucu

SEQ ID NO: 409333 - RNA, 20 nt, Human
acaagagugaaacucugucu

SEQ ID NO: 409334 - RNA, 21 nt, Human
acaagagugaaacucugucuc

SEQ ID NO: 409335 - RNA, 21 nt, Human
acaagagugaaacucugucuc

SEQ ID NO: 409336 - RNA, 23 nt, Human
acaccaacacccccaaaccaccc

SEQ ID NO: 409337 - RNA, 20 nt, Human
acaccacugcacuccagccu

SEQ ID NO: 409338 - RNA, 20 nt, Human
acaccacugcacuccagccu

SEQ ID NO: 409339 - RNA, 24 nt, Human
acaccacugcacuccagccugggc

SEQ ID NO: 409340 - RNA, 24 nt, Human
acaccacugcacuccagccugggc

SEQ ID NO: 409341 - RNA, 21 nt, Human
acagaacaaggaaaacggccg

SEQ ID NO: 409342 - RNA, 19 nt, Human
acagaagcacugugauacc

SEQ ID NO: 409343 - RNA, 19 nt, Human
acagagcacugguguuccc

SEQ ID NO: 409344 - RNA, 22 nt, Human
acagcaauugagcugaucuucu

SEQ ID NO: 409345 - RNA, 22 nt, Human
acagcaauugagcugaucuucu

SEQ ID NO: 409346 - RNA, 18 nt, Human
acagccucccccaucuuc

SEQ ID NO: 409347 - RNA, 18 nt, Human
acagccucccccaucuuc

SEQ ID NO: 409348 - RNA, 23 nt, Human
accaaacccagccaacaggaagc

SEQ ID NO: 409349 - RNA, 21 nt, Human
accaacacccccaaaccaccc

SEQ ID NO: 409350 - RNA, 22 nt, Human
accaacacccccaaaccacccg

SEQ ID NO: 409351 - RNA, 22 nt, Human
accaacacccccaaaccacccg

SEQ ID NO: 409352 - RNA, 22 nt, Human
accacugcacuccagccugggc

SEQ ID NO: 409353 - RNA, 22 nt, Human
accacugcacuccagccugggc

SEQ ID NO: 409354 - RNA, 22 nt, Human
accccaccugcccuccuugcca

SEQ ID NO: 409355 - RNA, 23 nt, Human
accccaccugcccuccuugccaa

SEQ ID NO: 409356 - RNA, 24 nt, Human
accccgucucuauuaaaaauacaa

SEQ ID NO: 409357 - RNA, 24 nt, Human
accccgucucuauuaaaaauacaa

SEQ ID NO: 409358 - RNA, 24 nt, Human
accugaggucaggaguucgagacc

SEQ ID NO: 409359 - RNA, 20 nt, Human
acgcugaaucuauacugcac

SEQ ID NO: 409360 - RNA, 25 nt, Human
acuccagccugggcaacaagaguga

SEQ ID NO: 409361 - RNA, 25 nt, Human
acuccagccugggcaacaagaguga

SEQ ID NO: 409362 - RNA, 18 nt, Human
acugcacuccagccuggg

SEQ ID NO: 409363 - RNA, 18 nt, Human
acugcacuccagccuggg

SEQ ID NO: 409364 - RNA, 21 nt, Human
acugcacuccagccugggcaa

SEQ ID NO: 409365 - RNA, 21 nt, Human
acugcacuccagccugggcaa

SEQ ID NO: 409366 - RNA, 24 nt, Human
acugcacuccagccugggcaacaa

SEQ ID NO: 409367 - RNA, 24 nt, Human
acugcacuccagccugggcaacaa

SEQ ID NO: 409368 - RNA, 25 nt, Human
acugcacuccagccugggcaacaag

SEQ ID NO: 409369 - RNA, 25 nt, Human
acugcacuccagccugggcaacaag

SEQ ID NO: 409370 - RNA, 18 nt, Human
acugcauuccagccuggg

SEQ ID NO: 409371 - RNA, 18 nt, Human
acugcauuccagccuggg

SEQ ID NO: 409372 - RNA, 22 nt, Human
acugcauuccagccugggugag

SEQ ID NO: 409373 - RNA, 19 nt, Human
agaaggcacugcugcaaca

SEQ ID NO: 409374 - RNA, 22 nt, Human
agaauugcuggaauccaggagg

SEQ ID NO: 409375 - RNA, 24 nt, Human
agacaugguggcacgugccuguaa

SEQ ID NO: 409376 - RNA, 22 nt, Human
agagacucuccaucacacuguc

SEQ ID NO: 409377 - RNA, 20 nt, Human
agaggaagggccucugcauu

SEQ ID NO: 409378 - RNA, 20 nt, Human
agaggaagggccucugcauu

SEQ ID NO: 409379 - RNA, 20 nt, Human
agagguugcagugagccaag

SEQ ID NO: 409380 - RNA, 20 nt, Human
agagguugcagugagccaag

SEQ ID NO: 409381 - RNA, 23 nt, Human
agagguugcagugagccaagauc

SEQ ID NO: 409382 - RNA, 23 nt, Human
agagguugcagugagccaagauc

SEQ ID NO: 409383 - RNA, 24 nt, Human
agagguugcagugagccaagauca

SEQ ID NO: 409384 - RNA, 24 nt, Human
agagguugcagugagccaagauca

SEQ ID NO: 409385 - RNA, 18 nt, Human
agagugaaacucugucuc

SEQ ID NO: 409386 - RNA, 18 nt, Human
agagugaaacucugucuc

SEQ ID NO: 409387 - RNA, 24 nt, Human
agcacuuugggaggccgagguggg

SEQ ID NO: 409388 - RNA, 23 nt, Human
agccagacaugguggcacgugcc

SEQ ID NO: 409389 - RNA, 24 nt, Human
agccuggccaacauggcgaaaccc

SEQ ID NO: 409390 - RNA, 22 nt, Human
agccuggccaacauggugaaac

SEQ ID NO: 409391 - RNA, 22 nt, Human
agccuggccaacauggugaaac

SEQ ID NO: 409392 - RNA, 24 nt, Human
agccuggccaacauggugaaaccc

SEQ ID NO: 409393 - RNA, 24 nt, Human
agccuggccaacauggugaaaccc

SEQ ID NO: 409394 - RNA, 24 nt, Human
agcggcucacaccuguaaucccag

SEQ ID NO: 409395 - RNA, 24 nt, Human
agcggcucacaccuguaaucccag

SEQ ID NO: 409396 - RNA, 23 nt, Human
aggagaauugcuggaauccagga

SEQ ID NO: 409397 - RNA, 20 nt, Human
aggaucucggugaugaggau

SEQ ID NO: 409398 - RNA, 24 nt, Human
aggcagagguugcagugagccaag

SEQ ID NO: 409399 - RNA, 24 nt, Human
aggcagagguugcagugagccaag

SEQ ID NO: 409400 - RNA, 23 nt, Human
aggcaggagaauugcuggaaucc

SEQ ID NO: 409401 - RNA, 23 nt, Human
aggcccccggcucagagccaucu

SEQ ID NO: 409402 - RNA, 22 nt, Human
aggccgagcgcagcggcucaca

SEQ ID NO: 409403 - RNA, 21 nt, Human
aggccgaggugggcggaucac

SEQ ID NO: 409404 - RNA, 19 nt, Human
aggcggagguugcagggag

SEQ ID NO: 409405 - RNA, 21 nt, Human
aggcgggcagaucaccugagg

SEQ ID NO: 409406 - RNA, 21 nt, Human
aggcgggcagaucaccugagg

SEQ ID NO: 409407 - RNA, 26 nt, Human
aggcgggcagaucaccugaggucaag

SEQ ID NO: 409408 - RNA, 26 nt, Human
aggcgggcagaucaccugaggucaag

SEQ ID NO: 409409 - RNA, 24 nt, Human
aggcucacaccuguaaucccagca

SEQ ID NO: 409410 - RNA, 18 nt, Human
agggagagcugggcucgu

SEQ ID NO: 409411 - RNA, 20 nt, Human
agguaccuuugggauguggu

SEQ ID NO: 409412 - RNA, 20 nt, Human
agguaccuuugggauguggu

SEQ ID NO: 409413 - RNA, 19 nt, Human
aggucaggaguucgagacc

SEQ ID NO: 409414 - RNA, 22 nt, Human
aggugggcggaucaccugaggu

SEQ ID NO: 409415 - RNA, 19 nt, Human
agguguggaggcucacacc

SEQ ID NO: 409416 - RNA, 24 nt, Human
agguguggaggcucacaccuguaa

SEQ ID NO: 409417 - RNA, 24 nt, Human
aucacaccacugcacuccagccug

SEQ ID NO: 409418 - RNA, 24 nt, Human
aucacaccacugcacuccagccug

SEQ ID NO: 409419 - RNA, 28 nt, Human
aucacaccacugcacuccagccugggca

SEQ ID NO: 409420 - RNA, 28 nt, Human
aucacaccacugcacuccagccugggca

SEQ ID NO: 409421 - RNA, 24 nt, Human
aucaccugaggucaggaguucgag

SEQ ID NO: 409422 - RNA, 22 nt, Human
aucccagcacuuugggaggcca

SEQ ID NO: 409423 - RNA, 23 nt, Human
auccucuguggcccagugugcaa

SEQ ID NO: 409424 - RNA, 23 nt, Human
auccucuguggcccagugugcaa

SEQ ID NO: 409425 - RNA, 23 nt, Human
auccucuguggcccagugugcaa

SEQ ID NO: 409426 - RNA, 18 nt, Human
augugccauugcggagaa

SEQ ID NO: 409427 - RNA, 18 nt, Human
augugccauugcggagaa

SEQ ID NO: 409428 - RNA, 24 nt, Human
auugugccacugcauuccagccug

SEQ ID NO: 409429 - RNA, 22 nt, Human
caaaacuccaacuugcugcugc

SEQ ID NO: 409430 - RNA, 21 nt, Human
caaagaaggccgagcgcagcg

SEQ ID NO: 409431 - RNA, 21 nt, Human
caaagaaggccgagcgcagcg

SEQ ID NO: 409432 - RNA, 23 nt, Human
caacaagagugaaacucugucuc

SEQ ID NO: 409433 - RNA, 23 nt, Human
caacaagagugaaacucugucuc

SEQ ID NO: 409434 - RNA, 24 nt, Human
caacauggugaaaccccgucucua

SEQ ID NO: 409435 - RNA, 24 nt, Human
caacauggugaaaccccgucucua

SEQ ID NO: 409436 - RNA, 20 nt, Human
caaccaaacccagccaacag

SEQ ID NO: 409437 - RNA, 23 nt, Human
caaccagcuagacgcaggcacac

SEQ ID NO: 409438 - RNA, 24 nt, Human
caaggcgggcagaucaccugaggu

SEQ ID NO: 409439 - RNA, 24 nt, Human
caaggcgggcagaucaccugaggu

SEQ ID NO: 409440 - RNA, 26 nt, Human
caaggcgggcagaucaccugagguca

SEQ ID NO: 409441 - RNA, 26 nt, Human
caaggcgggcagaucaccugagguca

SEQ ID NO: 409442 - RNA, 22 nt, Human
cacacagaacaaggaaaacggc

SEQ ID NO: 409443 - RNA, 21 nt, Human
cacaccacugcacuccagccu

SEQ ID NO: 409444 - RNA, 21 nt, Human
cacaccacugcacuccagccu

SEQ ID NO: 409445 - RNA, 24 nt, Human
cacaccuguaaucccagcacuuug

SEQ ID NO: 409446 - RNA, 24 nt, Human
cacaccuguaaucccagcacuuug

SEQ ID NO: 409447 - RNA, 24 nt, Human
cacaccuguaaucccagcacuuug

SEQ ID NO: 409448 - RNA, 18 nt, Human
cacagaacaaggaaaacg

SEQ ID NO: 409449 - RNA, 24 nt, Human
caccaacacccccaaaccacccgg

SEQ ID NO: 409450 - RNA, 24 nt, Human
caccaacacccccaaaccacccgg

SEQ ID NO: 409451 - RNA, 27 nt, Human
caccccagaggccucagaagguccuuc

SEQ ID NO: 409452 - RNA, 23 nt, Human
caccugaggucaggaguucgaga

SEQ ID NO: 409453 - RNA, 20 nt, Human
caccuguaauccaagcuacu

SEQ ID NO: 409454 - RNA, 23 nt, Human
caccuguaauccaagcuacuugg

SEQ ID NO: 409455 - RNA, 23 nt, Human
caccuguaauccaagcuacuugg

SEQ ID NO: 409456 - RNA, 24 nt, Human
caccuguaauccaagcuacuuggg

SEQ ID NO: 409457 - RNA, 24 nt, Human
caccuguaauccaagcuacuuggg

SEQ ID NO: 409458 - RNA, 19 nt, Human
caccuguaaucccagcacu

SEQ ID NO: 409459 - RNA, 19 nt, Human
caccuguaaucccagcacu

SEQ ID NO: 409460 - RNA, 23 nt, Human
caccuguaaucccagcacuuugg

SEQ ID NO: 409461 - RNA, 23 nt, Human
caccuguaaucccagcacuuugg

SEQ ID NO: 409462 - RNA, 23 nt, Human
caccuguaaucccagcacuuugg

SEQ ID NO: 409463 - RNA, 24 nt, Human
caccuguaaucccagcacuuuggg

SEQ ID NO: 409464 - RNA, 24 nt, Human
caccuguaaucccagcacuuuggg

SEQ ID NO: 409465 - RNA, 24 nt, Human
caccuguaaucccagcacuuuggg

SEQ ID NO: 409466 - RNA, 23 nt, Human
cacuccagccugggcaacaagag

SEQ ID NO: 409467 - RNA, 23 nt, Human
cacuccagccugggcaacaagag

SEQ ID NO: 409468 - RNA, 24 nt, Human
cacuccagccugggcaacaagagu

SEQ ID NO: 409469 - RNA, 24 nt, Human
cacuccagccugggcaacaagagu

SEQ ID NO: 409470 - RNA, 25 nt, Human
cacuccagccugggcaacaagagug

SEQ ID NO: 409471 - RNA, 25 nt, Human
cacuccagccugggcaacaagagug

SEQ ID NO: 409472 - RNA, 18 nt, Human
cacugcacuccagccugg

SEQ ID NO: 409473 - RNA, 18 nt, Human
cacugcacuccagccugg

SEQ ID NO: 409474 - RNA, 19 nt, Human
cacugcacuccagccuggg

SEQ ID NO: 409475 - RNA, 19 nt, Human
cacugcacuccagccuggg

SEQ ID NO: 409476 - RNA, 21 nt, Human
cacugcacuccagccugggca

SEQ ID NO: 409477 - RNA, 21 nt, Human
cacugcacuccagccugggca

SEQ ID NO: 409478 - RNA, 22 nt, Human
cacugcacuccagccugggcaa

SEQ ID NO: 409479 - RNA, 23 nt, Human
cacugcacuccagccugggcaac

SEQ ID NO: 409480 - RNA, 23 nt, Human
cacugcacuccagccugggcaac

SEQ ID NO: 409481 - RNA, 24 nt, Human
cacugcacuccagccugggcaaca

SEQ ID NO: 409482 - RNA, 24 nt, Human
cacugcacuccagccugggcaaca

SEQ ID NO: 409483 - RNA, 25 nt, Human
cacugcacuccagccugggcaacaa

SEQ ID NO: 409484 - RNA, 19 nt, Human
cacugcauuccagccuggg

SEQ ID NO: 409485 - RNA, 19 nt, Human
cacugcauuccagccuggg

SEQ ID NO: 409486 - RNA, 22 nt, Human
cacugcauuccagccuggguga

SEQ ID NO: 409487 - RNA, 22 nt, Human
cacugcauuccagccuggguga

SEQ ID NO: 409488 - RNA, 27 nt, Human
cagaucaccugaggucaagaguucgag

SEQ ID NO: 409489 - RNA, 27 nt, Human
cagaucaccugaggucaagaguucgag

SEQ ID NO: 409490 - RNA, 22 nt, Human
cagcacuuugggaggccaaggc

SEQ ID NO: 409491 - RNA, 24 nt, Human
cagcacuuugggaggccaaggcgg

SEQ ID NO: 409492 - RNA, 24 nt, Human
cagcacuuugggaggccaaggcgg

SEQ ID NO: 409493 - RNA, 21 nt, Human
cagcacuuugggaggccgagg

SEQ ID NO: 409494 - RNA, 24 nt, Human
cagcacuuugggaggccgaggugg

SEQ ID NO: 409495 - RNA, 21 nt, Human
cagccugggugagaagaguga

SEQ ID NO: 409496 - RNA, 20 nt, Human
caggcacaccccaggcccac

SEQ ID NO: 409497 - RNA, 21 nt, Human
caggguaccccaaaacuccaa

SEQ ID NO: 409498 - RNA, 22 nt, Human
caguagagacugaccauccaaa

SEQ ID NO: 409499 - RNA, 20 nt, Human
cagugugcaaccagcuagac

SEQ ID NO: 409500 - RNA, 23 nt, Human
cauggcgaaaccccauaucuauu

SEQ ID NO: 409501 - RNA, 19 nt, Human
caugugccauugcggagaa

SEQ ID NO: 409502 - RNA, 19 nt, Human
caugugccauugcggagaa

SEQ ID NO: 409503 - RNA, 24 nt, Human
cauuccagccugggugagaagagu

SEQ ID NO: 409504 - RNA, 28 nt, Human
ccaaaacuccaacuugcugcugccccca

SEQ ID NO: 409505 - RNA, 20 nt, Human
ccaagcagacugugucccug

SEQ ID NO: 409506 - RNA, 22 nt, Human
ccaagcuacuugggagacugaa

SEQ ID NO: 409507 - RNA, 22 nt, Human
ccaagcuacuugggagacugaa

SEQ ID NO: 409508 - RNA, 20 nt, Human
ccacugcacuccagccuggg

SEQ ID NO: 409509 - RNA, 20 nt, Human
ccacugcacuccagccuggg

SEQ ID NO: 409510 - RNA, 20 nt, Human
ccacugcacuccagccuggg

SEQ ID NO: 409511 - RNA, 21 nt, Human
ccacugcacuccagccugggc

SEQ ID NO: 409512 - RNA, 21 nt, Human
ccacugcacuccagccugggc

SEQ ID NO: 409513 - RNA, 22 nt, Human
ccacugcacuccagccugggca

SEQ ID NO: 409514 - RNA, 22 nt, Human
ccacugcacuccagccugggca

SEQ ID NO: 409515 - RNA, 23 nt, Human
ccacugcacuccagccugggcaa

SEQ ID NO: 409516 - RNA, 23 nt, Human
ccacugcacuccagccugggcaa

SEQ ID NO: 409517 - RNA, 24 nt, Human
ccacugcacuccagccugggcaac

SEQ ID NO: 409518 - RNA, 24 nt, Human
ccacugcacuccagccugggcaac

SEQ ID NO: 409519 - RNA, 20 nt, Human
ccacugcauuccagccuggg

SEQ ID NO: 409520 - RNA, 20 nt, Human
ccacugcauuccagccuggg

SEQ ID NO: 409521 - RNA, 21 nt, Human
ccacugcauuccagccugggu

SEQ ID NO: 409522 - RNA, 21 nt, Human
ccacugcauuccagccugggu

SEQ ID NO: 409523 - RNA, 23 nt, Human
ccacugcauuccagccuggguga

SEQ ID NO: 409524 - RNA, 24 nt, Human
ccacugcauuccagccugggugag

SEQ ID NO: 409525 - RNA, 23 nt, Human
ccagcuagacgcaggcacacccc

SEQ ID NO: 409526 - RNA, 19 nt, Human
ccaggacgggcgaucugac

SEQ ID NO: 409527 - RNA, 19 nt, Human
cccacacagaacaaggaaa

SEQ ID NO: 409528 - RNA, 20 nt, Human
cccaggcaguccugcggcca

SEQ ID NO: 409529 - RNA, 22 nt, Human
ccccagaggccucagaggugag

SEQ ID NO: 409530 - RNA, 21 nt, Human
cccccagcccccuagaacuga

SEQ ID NO: 409531 - RNA, 22 nt, Human
cccccagcccccuagaacugaa

SEQ ID NO: 409532 - RNA, 18 nt, Human
ccccccguggcaacgggg

SEQ ID NO: 409533 - RNA, 19 nt, Human
ccccccguggcaacggggu

SEQ ID NO: 409534 - RNA, 19 nt, Human
cccccggcucagagccauc

SEQ ID NO: 409535 - RNA, 24 nt, Human
cccccguggcaacggggucuccua

SEQ ID NO: 409536 - RNA, 25 nt, Human
cccccguggcaacggggucuccuaa

SEQ ID NO: 409537 - RNA, 24 nt, Human
ccccguggcaacggggucuccuaa

SEQ ID NO: 409538 - RNA, 23 nt, Human
cccggcucagagccaucuguggu

SEQ ID NO: 409539 - RNA, 24 nt, Human
cccguggcaacggggucuccuaag

SEQ ID NO: 409540 - RNA, 19 nt, Human
ccgcgcugccucccucccc

SEQ ID NO: 409541 - RNA, 21 nt, Human
ccucaggugccuccucugcag

SEQ ID NO: 409542 - RNA, 22 nt, Human
ccugaggucaagaguucgagac

SEQ ID NO: 409543 - RNA, 22 nt, Human
ccugaggucaagaguucgagac

SEQ ID NO: 409544 - RNA, 22 nt, Human
ccugaggucaggaguucgagac

SEQ ID NO: 409545 - RNA, 27 nt, Human
ccuggacguggggaacacagggacggu

SEQ ID NO: 409546 - RNA, 28 nt, Human
ccuggacguggggaacacagggacgguu

SEQ ID NO: 409547 - RNA, 24 nt, Human
ccuggccaacauggcgaaacccca

SEQ ID NO: 409548 - RNA, 23 nt, Human
ccuggccaacauggugaaacccc

SEQ ID NO: 409549 - RNA, 23 nt, Human
ccuggccaacauggugaaacccc

SEQ ID NO: 409550 - RNA, 24 nt, Human
ccuggccaacauggugaaaccccg

SEQ ID NO: 409551 - RNA, 24 nt, Human
ccuggccaacauggugaaaccccg

SEQ ID NO: 409552 - RNA, 19 nt, Human
ccugggaggguggacaggc

SEQ ID NO: 409553 - RNA, 18 nt, Human
ccuguaaucccagcuacu

SEQ ID NO: 409554 - RNA, 19 nt, Human
ccuguaaucccagcuacuu

SEQ ID NO: 409555 - RNA, 21 nt, Human
ccuguaaucccagcuacuugg

SEQ ID NO: 409556 - RNA, 22 nt, Human
ccuguaaucccagcuacuuggg

SEQ ID NO: 409557 - RNA, 23 nt, Human
ccugugaagcaggguaccccaaa

SEQ ID NO: 409558 - RNA, 19 nt, Human
ccuuagaccccaccugccc

SEQ ID NO: 409559 - RNA, 22 nt, Human
ccuuagaccccaccugcccucc

SEQ ID NO: 409560 - RNA, 24 nt, Human
cgacaaacgcugaaucuauacugc

SEQ ID NO: 409561 - RNA, 21 nt, Human
cgagaccagccuggccaacau

SEQ ID NO: 409562 - RNA, 24 nt, Human
cgagaccagccuggccaacauggu

SEQ ID NO: 409563 - RNA, 24 nt, Human
cgagaccagccuggccaacauggu

SEQ ID NO: 409564 - RNA, 19 nt, Human
cgaggcaggagaauugcug

SEQ ID NO: 409565 - RNA, 24 nt, Human
cgaggugggcggaucaccugaggu

SEQ ID NO: 409566 - RNA, 26 nt, Human
cgaggugggcggaucaccugagguca

SEQ ID NO: 409567 - RNA, 24 nt, Human
cggaucaccugaggucaggaguuc

SEQ ID NO: 409568 - RNA, 27 nt, Human
cggaucaccugaggucaggaguucgag

SEQ ID NO: 409569 - RNA, 25 nt, Human
cggccgggguggcugucgugggcug

SEQ ID NO: 409570 - RNA, 20 nt, Human
cggccugggaggguggacag

SEQ ID NO: 409571 - RNA, 22 nt, Human
cggcucacaccuguaaucccag

SEQ ID NO: 409572 - RNA, 22 nt, Human
cggcucacaccuguaaucccag

SEQ ID NO: 409573 - RNA, 24 nt, Human
cggcucacaccuguaaucccagca

SEQ ID NO: 409574 - RNA, 24 nt, Human
cggcucacaccuguaaucccagca

SEQ ID NO: 409575 - RNA, 24 nt, Human
cgggaggcagagguugcagugagc

SEQ ID NO: 409576 - RNA, 24 nt, Human
cgggaggcagagguugcagugagc

SEQ ID NO: 409577 - RNA, 24 nt, Human
cgggcagaucaccugaggucaaga

SEQ ID NO: 409578 - RNA, 24 nt, Human
cgggcagaucaccugaggucaaga

SEQ ID NO: 409579 - RNA, 24 nt, Human
cgugccuguaaucccagcuacuug

SEQ ID NO: 409580 - RNA, 20 nt, Human
cguggggaacacagggacgg

SEQ ID NO: 409581 - RNA, 22 nt, Human
cucacaccuguaaucccagcac

SEQ ID NO: 409582 - RNA, 22 nt, Human
cucacaccuguaaucccagcac

SEQ ID NO: 409583 - RNA, 22 nt, Human
cucacaccuguaaucccagcac

SEQ ID NO: 409584 - RNA, 24 nt, Human
cucacaccuguaaucccagcacuu

SEQ ID NO: 409585 - RNA, 24 nt, Human
cucacaccuguaaucccagcacuu

SEQ ID NO: 409586 - RNA, 24 nt, Human
cucacaccuguaaucccagcacuu

SEQ ID NO: 409587 - RNA, 18 nt, Human
cucacagaaaaaaaaaaa

SEQ ID NO: 409588 - RNA, 18 nt, Human
cucacagaaaaaaaaaaa

SEQ ID NO: 409589 - RNA, 23 nt, Human
cucugggccaggccugccugagc

SEQ ID NO: 409590 - RNA, 19 nt, Human
cugcaacagcuugauucuc

SEQ ID NO: 409591 - RNA, 19 nt, Human
cugcaacagcuugauucuc

SEQ ID NO: 409592 - RNA, 18 nt, Human
cugcugcccccagccccc

SEQ ID NO: 409593 - RNA, 23 nt, Human
cuggccaacauggcgaaacccca

SEQ ID NO: 409594 - RNA, 19 nt, Human
cugguguucccucagcagc

SEQ ID NO: 409595 - RNA, 23 nt, Human
cuugcuggauccucuguggccca

SEQ ID NO: 409596 - RNA, 23 nt, Human
cuugcuggauccucuguggccca

SEQ ID NO: 409597 - RNA, 23 nt, Human
cuugcuggauccucuguggccca

SEQ ID NO: 409598 - RNA, 23 nt, Human
cuugcuggauccucuguggccca

SEQ ID NO: 409599 - RNA, 27 nt, Human
gaaaaaaaaaaaagaauaaaaucaaag

SEQ ID NO: 409600 - RNA, 24 nt, Human
gaagagugaaauucugucucaaaa

SEQ ID NO: 409601 - RNA, 26 nt, Human
gaagcaggacugggguuccuagaaau

SEQ ID NO: 409602 - RNA, 26 nt, Human
gaagcaggacugggguuccuagaaau

SEQ ID NO: 409603 - RNA, 24 nt, Human
gaaggccgagcgcagcggcucaca

SEQ ID NO: 409604 - RNA, 22 nt, Human
gaauccaggaggcggagguugc

SEQ ID NO: 409605 - RNA, 18 nt, Human
gaccaggccaggcugcuu

SEQ ID NO: 409606 - RNA, 24 nt, Human
gacgcaggcacaccccaggcccac

SEQ ID NO: 409607 - RNA, 20 nt, Human
gacgucggccugggagggug

SEQ ID NO: 409608 - RNA, 23 nt, Human
gagaauugcuggaauccaggagg

SEQ ID NO: 409609 - RNA, 22 nt, Human
gagagagagagaauacgacugc

SEQ ID NO: 409610 - RNA, 20 nt, Human
gaggaugccaguauggaugg

SEQ ID NO: 409611 - RNA, 20 nt, Human
gaggaugccaguauggaugg

SEQ ID NO: 409612 - RNA, 18 nt, Human
gaggauggcucaguccag

SEQ ID NO: 409613 - RNA, 23 nt, Human
gaggugggcggaucaccugaggu

SEQ ID NO: 409614 - RNA, 25 nt, Human
gaggugggcggaucaccugagguca

SEQ ID NO: 409615 - RNA, 18 nt, Human
gagguugcagggagccaa

SEQ ID NO: 409616 - RNA, 23 nt, Human
gagguugcagggagccaaaauug

SEQ ID NO: 409617 - RNA, 18 nt, Human
gagguugcagugagccaa

SEQ ID NO: 409618 - RNA, 18 nt, Human
gagguugcagugagccaa

SEQ ID NO: 409619 - RNA, 19 nt, Human
gauacugagagagagagag

SEQ ID NO: 409620 - RNA, 24 nt, Human
gaucaccugaggucaagaguucga

SEQ ID NO: 409621 - RNA, 24 nt, Human
gaucaccugaggucaagaguucga

SEQ ID NO: 409622 - RNA, 21 nt, Human
gaucaccugaggucaggaguu

SEQ ID NO: 409623 - RNA, 24 nt, Human
gaucaccugaggucaggaguucga

SEQ ID NO: 409624 - RNA, 18 nt, Human
gcaaccugaacagaagca

SEQ ID NO: 409625 - RNA, 18 nt, Human
gcagggcccaggcagucc

SEQ ID NO: 409626 - RNA, 18 nt, Human
gccaacauggcgaaaccc

SEQ ID NO: 409627 - RNA, 24 nt, Human
gccaacauggugaaaccccgucuc

SEQ ID NO: 409628 - RNA, 24 nt, Human
gccaacauggugaaaccccgucuc

SEQ ID NO: 409629 - RNA, 20 nt, Human
gccaagaucacaccacugca

SEQ ID NO: 409630 - RNA, 20 nt, Human
gccaagaucacaccacugca

SEQ ID NO: 409631 - RNA, 19 nt, Human
gccacugcauuccagccug

SEQ ID NO: 409632 - RNA, 19 nt, Human
gccacugcauuccagccug

SEQ ID NO: 409633 - RNA, 24 nt, Human
gccacugcauuccagccuggguga

SEQ ID NO: 409634 - RNA, 20 nt, Human
gccuguaaucccagcuacuu

SEQ ID NO: 409635 - RNA, 24 nt, Human
ggaggcucacaccuguaaucccag

SEQ ID NO: 409636 - RNA, 22 nt, Human
ggagguugcagggagccaaaau

SEQ ID NO: 409637 - RNA, 24 nt, Human
ggagguugcagggagccaaaauug

SEQ ID NO: 409638 - RNA, 22 nt, Human
ggaucaccugaggucaggaguu

SEQ ID NO: 409639 - RNA, 23 nt, Human
ggaucaccugaggucaggaguuc

SEQ ID NO: 409640 - RNA, 20 nt, Human
ggcacagaccaggccaggcu

SEQ ID NO: 409641 - RNA, 24 nt, Human
ggcacagaccaggccaggcugcuu

SEQ ID NO: 409642 - RNA, 21 nt, Human
ggcacgugccuguaaucccag

SEQ ID NO: 409643 - RNA, 20 nt, Human
ggcgaaaccccauaucuauu

SEQ ID NO: 409644 - RNA, 21 nt, Human
ggcggaucaccugaggucagg

SEQ ID NO: 409645 - RNA, 21 nt, Human
ggcucacaccuguaaucccag

SEQ ID NO: 409646 - RNA, 23 nt, Human
ggcucacaccuguaaucccagca

SEQ ID NO: 409647 - RNA, 23 nt, Human
ggcucacaccuguaaucccagca

SEQ ID NO: 409648 - RNA, 23 nt, Human
ggcucacaccuguaaucccagca

SEQ ID NO: 409649 - RNA, 20 nt, Human
gggaggccgaggugggcgga

SEQ ID NO: 409650 - RNA, 29 nt, Human
gggaggguggacaggcccccggcucagag

SEQ ID NO: 409651 - RNA, 18 nt, Human
gggucuccuaaggcccag

SEQ ID NO: 409652 - RNA, 24 nt, Human
gguggcacgugccuguaaucccag

SEQ ID NO: 409653 - RNA, 19 nt, Human
gugacucugggccaggccu

SEQ ID NO: 409654 - RNA, 23 nt, Human
guggcacgugccuguaaucccag

SEQ ID NO: 409655 - RNA, 21 nt, Human
guugcuacucgaagggagagc

SEQ ID NO: 409656 - RNA, 20 nt, Human
uaagaggagcaagcacggca

SEQ ID NO: 409657 - RNA, 20 nt, Human
uaagaggagcaagcacggca

SEQ ID NO: 409658 - RNA, 26 nt, Human
uaauccaagcuacuugggagacugaa

SEQ ID NO: 409659 - RNA, 26 nt, Human
uaauccaagcuacuugggagacugaa

SEQ ID NO: 409660 - RNA, 25 nt, Human
uaccagguaccuuugggaugugguu

SEQ ID NO: 409661 - RNA, 25 nt, Human
uaccagguaccuuugggaugugguu

SEQ ID NO: 409662 - RNA, 26 nt, Human
uaccagguaccuuugggaugugguuc

SEQ ID NO: 409663 - RNA, 26 nt, Human
uaccagguaccuuugggaugugguuc

SEQ ID NO: 409664 - RNA, 19 nt, Human
uagaccccaccugcccucc

SEQ ID NO: 409665 - RNA, 26 nt, Human
uauggauggaguggaagcaugugcca

SEQ ID NO: 409666 - RNA, 26 nt, Human
uauggauggaguggaagcaugugcca

SEQ ID NO: 409667 - RNA, 23 nt, Human
ucacaccacugcacuccagccug

SEQ ID NO: 409668 - RNA, 23 nt, Human
ucacaccacugcacuccagccug

SEQ ID NO: 409669 - RNA, 31 nt, Human
ucacaccacugcacuccagccugggcaacaa

SEQ ID NO: 409670 - RNA, 19 nt, Human
ucacagaaaaaaaaaaaag

SEQ ID NO: 409671 - RNA, 21 nt, Human
ucacagaaaaaaaaaaaagaa

SEQ ID NO: 409672 - RNA, 20 nt, Human
ucaccugaggucaggaguuc

SEQ ID NO: 409673 - RNA, 20 nt, Human
uccaaacuguuuaguaaagu

SEQ ID NO: 409674 - RNA, 19 nt, Human
uccagaagagccaagcaga

SEQ ID NO: 409675 - RNA, 20 nt, Human
uccagccugggugagaagag

SEQ ID NO: 409676 - RNA, 20 nt, Human
uccagccugggugagaagag

SEQ ID NO: 409677 - RNA, 19 nt, Human
uccaggacugaaccucuca

SEQ ID NO: 409678 - RNA, 22 nt, Human
ucccucagcagccccccguggc

SEQ ID NO: 409679 - RNA, 24 nt, Human
ucccucagcagccccccguggcaa

SEQ ID NO: 409680 - RNA, 18 nt, Human
ucccuccccacacagaac

SEQ ID NO: 409681 - RNA, 22 nt, Human
uccucuguggcccagugugcaa

SEQ ID NO: 409682 - RNA, 18 nt, Human
uccuuagaccccaccugc

SEQ ID NO: 409683 - RNA, 18 nt, Human
ucgcuugaacccgggagg

SEQ ID NO: 409684 - RNA, 18 nt, Human
ucgcuugaacccgggagg

SEQ ID NO: 409685 - RNA, 24 nt, Human
ucggugaugaggauggcucagucc

SEQ ID NO: 409686 - RNA, 20 nt, Human
ucuacggccuggacgugggg

SEQ ID NO: 409687 - RNA, 22 nt, Human
ucuauuaaaaaaauacaaaaaa

SEQ ID NO: 409688 - RNA, 24 nt, Human
ucuauuaaaaaaauacaaaaaauu

SEQ ID NO: 409689 - RNA, 21 nt, Human
ucucuauuaaaaauacaaaaa

SEQ ID NO: 409690 - RNA, 21 nt, Human
ucucuauuaaaaauacaaaaa

SEQ ID NO: 409691 - RNA, 23 nt, Human
ucucuauuaaaaauacaaaaauu

SEQ ID NO: 409692 - RNA, 21 nt, Human
ucucugggccucaggugccuc

SEQ ID NO: 409693 - RNA, 21 nt, Human
ucuguaguuuuaaccugcaca

SEQ ID NO: 409694 - RNA, 21 nt, Human
ucuguaguuuuaaccugcaca

SEQ ID NO: 409695 - RNA, 24 nt, Human
ucugucucacagaaaaaaaaaaaa

SEQ ID NO: 409696 - RNA, 25 nt, Human
ucugucucacagaaaaaaaaaaaaa

SEQ ID NO: 409697 - RNA, 25 nt, Human
ucuucuggagacugugauugaucgu

SEQ ID NO: 409698 - RNA, 25 nt, Human
ucuucuggagacugugauugaucgu

SEQ ID NO: 409699 - RNA, 26 nt, Human
ugaaauucugucucaaaaaaaagaau

SEQ ID NO: 409700 - RNA, 22 nt, Human
ugaagaaggcacugcugcaaca

SEQ ID NO: 409701 - RNA, 22 nt, Human
ugaagaaggcacugcugcaaca

SEQ ID NO: 409702 - RNA, 20 nt, Human
ugaagcagaagaaucgcuug

SEQ ID NO: 409703 - RNA, 20 nt, Human
ugaagcagaagaaucgcuug

SEQ ID NO: 409704 - RNA, 24 nt, Human
ugaagcagaagaaucgcuugaacc

SEQ ID NO: 409705 - RNA, 24 nt, Human
ugaagcagaagaaucgcuugaacc

SEQ ID NO: 409706 - RNA, 24 nt, Human
ugaaguguuuccaggacugaaccu

SEQ ID NO: 409707 - RNA, 19 nt, Human
ugacagugcugucugcgug

SEQ ID NO: 409708 - RNA, 18 nt, Human
ugacucugggccaggccu

SEQ ID NO: 409709 - RNA, 19 nt, Human
ugagaagagugaaauucug

SEQ ID NO: 409710 - RNA, 20 nt, Human
ugagcugaucuucuggagac

SEQ ID NO: 409711 - RNA, 20 nt, Human
ugagcugaucuucuggagac

SEQ ID NO: 409712 - RNA, 21 nt, Human
ugaucuucuggagacugugau

SEQ ID NO: 409713 - RNA, 19 nt, Human
ugauucugccagagcuggg

SEQ ID NO: 409714 - RNA, 19 nt, Human
ugauucugccagagcuggg

SEQ ID NO: 409715 - RNA, 21 nt, Human
ugccaagggcccugugaagca

SEQ ID NO: 409716 - RNA, 22 nt, Human
ugccaagggcccugugaagcag

SEQ ID NO: 409717 - RNA, 23 nt, Human
ugccuguaaucccagcuacuugg

SEQ ID NO: 409718 - RNA, 24 nt, Human
ugccuguaaucccagcuacuuggg

SEQ ID NO: 409719 - RNA, 24 nt, Human
ugccuuuuccucugacggguccca

SEQ ID NO: 409720 - RNA, 24 nt, Human
uggaagaucuuucaaacauucuua

SEQ ID NO: 409721 - RNA, 24 nt, Human
uggaagaucuuucaaacauucuua

SEQ ID NO: 409722 - RNA, 24 nt, Human
uggaauccaggaggcggagguugc

SEQ ID NO: 409723 - RNA, 24 nt, Human
uggaggcucacaccuguaauccca

SEQ ID NO: 409724 - RNA, 21 nt, Human
uggcacgugccuguaauccca

SEQ ID NO: 409725 - RNA, 22 nt, Human
uggcacgugccuguaaucccag

SEQ ID NO: 409726 - RNA, 24 nt, Human
uggccaacauggugaaaccccguc

SEQ ID NO: 409727 - RNA, 24 nt, Human
uggccaacauggugaaaccccguc

SEQ ID NO: 409728 - RNA, 26 nt, Human
ugggagacugaagcagaagaaucgcu

SEQ ID NO: 409729 - RNA, 26 nt, Human
ugggagacugaagcagaagaaucgcu

SEQ ID NO: 409730 - RNA, 27 nt, Human
ugggagacugaagcagaagaaucgcuu

SEQ ID NO: 409731 - RNA, 24 nt, Human
ugggaggccaaggcgggcagauca

SEQ ID NO: 409732 - RNA, 24 nt, Human
ugggaggccaaggcgggcagauca

SEQ ID NO: 409733 - RNA, 19 nt, Human
ugggaggccgaggugggcg

SEQ ID NO: 409734 - RNA, 24 nt, Human
ugggaggccgaggugggcggauca

SEQ ID NO: 409735 - RNA, 22 nt, Human
ugggcaggcacagaccaggcca

SEQ ID NO: 409736 - RNA, 24 nt, Human
ugggcggaucaccugaggucagga

SEQ ID NO: 409737 - RNA, 20 nt, Human
ugggcugaauucagggagga

SEQ ID NO: 409738 - RNA, 24 nt, Human
ugguggcacgugccuguaauccca

SEQ ID NO: 409739 - RNA, 20 nt, Human
ugguguucccucagcagccc

SEQ ID NO: 409740 - RNA, 18 nt, Human
ugguucuggguuagaccc

SEQ ID NO: 409741 - RNA, 24 nt, Human
ugugaagcaggguaccccaaaacu

SEQ ID NO: 409742 - RNA, 22 nt, Human
uuaaaaaaauacaaaaaauuag

SEQ ID NO: 409743 - RNA, 19 nt, Human
uuagccgggcgugguagug

SEQ ID NO: 409744 - RNA, 20 nt, Human
uuagccgggcgugguagugc

SEQ ID NO: 409745 - RNA, 20 nt, Human
uuagccgggcgugguagugc

SEQ ID NO: 409746 - RNA, 25 nt, Human
uucccucagcagccccccguggcaa

SEQ ID NO: 409747 - RNA, 22 nt, Human
uucuccagggaggaaacaccaa

SEQ ID NO: 409748 - RNA, 22 nt, Human
uucuccagggaggaaacaccaa

SEQ ID NO: 409749 - RNA, 19 nt, Human
uucuguaguuuuaaccugc

SEQ ID NO: 409750 - RNA, 19 nt, Human
uucuguaguuuuaaccugc

SEQ ID NO: 409751 - RNA, 22 nt, Human
uugcagggagccaaaauugugc

SEQ ID NO: 409752 - RNA, 20 nt, Human
uugcagugagccaagaucac

SEQ ID NO: 409753 - RNA, 20 nt, Human
uugcagugagccaagaucac

SEQ ID NO: 409754 - RNA, 23 nt, Human
uugccuuuuccucugacgggucc

SEQ ID NO: 409755 - RNA, 24 nt, Human
uugcuggaauccaggaggcggagg

SEQ ID NO: 409756 - RNA, 24 nt, Human
uugggagacugaagcagaagaauc

SEQ ID NO: 409757 - RNA, 24 nt, Human
uugggagacugaagcagaagaauc

SEQ ID NO: 409758 - RNA, 25 nt, Human
uugggaggccgaggugggcggauca

SEQ ID NO: 409759 - RNA, 23 nt, Human
uugucagcggcguugccuuuucc

SEQ ID NO: 409760 - RNA, 23 nt, Human
uugugccacugcauuccagccug

SEQ ID NO: 409761 - RNA, 20 nt, Human
aaccucccuccccagcucug

SEQ ID NO: 409762 - RNA, 20 nt, Human
accagaauucacugggaccu

SEQ ID NO: 409763 - RNA, 21 nt, Human
agcagaugugguuggaaagau

SEQ ID NO: 409764 - RNA, 20 nt, Human
agccggcacgguggagaacg

SEQ ID NO: 409765 - RNA, 23 nt, Human
aguagcaggggcugcgggaggaa

SEQ ID NO: 409766 - RNA, 19 nt, Human
agugaagccgggaggggcu

SEQ ID NO: 409767 - RNA, 22 nt, Human
auucacugggaccccagagcca

SEQ ID NO: 409768 - RNA, 24 nt, Human
cagaggagcggcggaaccucccuc

SEQ ID NO: 409769 - RNA, 21 nt, Human
cagcaagcagguucuggucuc

SEQ ID NO: 409770 - RNA, 24 nt, Human
cagcagaugugguuggaaagaucc

SEQ ID NO: 409771 - RNA, 19 nt, Human
caguagcaggggcugcggg

SEQ ID NO: 409772 - RNA, 18 nt, Human
ccaccuggccagccggca

SEQ ID NO: 409773 - RNA, 18 nt, Human
ccucagcccaccuggcca

SEQ ID NO: 409774 - RNA, 21 nt, Human
ccucccuccccagcucugagc

SEQ ID NO: 409775 - RNA, 20 nt, Human
ccuccugcugcaucugggcc

SEQ ID NO: 409776 - RNA, 18 nt, Human
ccucugugcagauggaga

SEQ ID NO: 409777 - RNA, 20 nt, Human
cggcggaaccucccucccca

SEQ ID NO: 409778 - RNA, 18 nt, Human
cgggaggggcugccggcg

SEQ ID NO: 409779 - RNA, 22 nt, Human
cugucaggacaggcuagccacc

SEQ ID NO: 409780 - RNA, 18 nt, Human
gaagugaagccgggaggg

SEQ ID NO: 409781 - RNA, 27 nt, Human
gacaggcuagccaccagagccucgugc

SEQ ID NO: 409782 - RNA, 18 nt, Human
gaggaggaggcugcucgg

SEQ ID NO: 409783 - RNA, 18 nt, Human
gaggaggcugcucggucc

SEQ ID NO: 409784 - RNA, 22 nt, Human
gcagaugugguuggaaagaucc

SEQ ID NO: 409785 - RNA, 22 nt, Human
gcucugagcacuaagcuccagc

SEQ ID NO: 409786 - RNA, 23 nt, Human
ggaagugaagccgggaggggcug

SEQ ID NO: 409787 - RNA, 22 nt, Human
ggaggaagugaagccgggaggg

SEQ ID NO: 409788 - RNA, 22 nt, Human
ggaggggcugccggcgcugaca

SEQ ID NO: 409789 - RNA, 18 nt, Human
gggagcuuaacucucccc

SEQ ID NO: 409790 - RNA, 23 nt, Human
gggaggaagugaagccgggaggg

SEQ ID NO: 409791 - RNA, 24 nt, Human
ugcgggaggaagugaagccgggag

SEQ ID NO: 409792 - RNA, 24 nt, Human
ugugcagauggagaugucaagggu

SEQ ID NO: 409793 - RNA, 21 nt, Human
aaaacccuguguuaauucugc

SEQ ID NO: 409794 - RNA, 23 nt, Human
aaaacccuguguuaauucugcua

SEQ ID NO: 409795 - RNA, 21 nt, Human
aaccagaggcuucacccggga

SEQ ID NO: 409796 - RNA, 21 nt, Human
accuccgucccccgcacacuc

SEQ ID NO: 409797 - RNA, 24 nt, Human
agacacccacugagcacugagcac

SEQ ID NO: 409798 - RNA, 19 nt, Human
agagaugguacaaugugug

SEQ ID NO: 409799 - RNA, 23 nt, Human
augguacaaugugugggcugggg

SEQ ID NO: 409800 - RNA, 19 nt, Human
caacugccccucaguucag

SEQ ID NO: 409801 - RNA, 21 nt, Human
cacccacugagcacugagcac

SEQ ID NO: 409802 - RNA, 20 nt, Human
cacccgggacuucaggaggc

SEQ ID NO: 409803 - RNA, 24 nt, Human
cacugagcacugagcacgagggug

SEQ ID NO: 409804 - RNA, 24 nt, Human
cagacacccacugagcacugagca

SEQ ID NO: 409805 - RNA, 22 nt, Human
caggaggcucccaggcuccaga

SEQ ID NO: 409806 - RNA, 28 nt, Human
ccaagccgaccugcaauugguaaaacca

SEQ ID NO: 409807 - RNA, 19 nt, Human
cccacaaauucaggcaacc

SEQ ID NO: 409808 - RNA, 21 nt, Human
ccccgaaggguuccggaaggg

SEQ ID NO: 409809 - RNA, 22 nt, Human
ccgaccugcaauugguaaaacc

SEQ ID NO: 409810 - RNA, 21 nt, Human
ccgggucuucguuaaggaagg

SEQ ID NO: 409811 - RNA, 19 nt, Human
ccucaagacugcugccccu

SEQ ID NO: 409812 - RNA, 20 nt, Human
ccuggaagaaucuuggauuu

SEQ ID NO: 409813 - RNA, 23 nt, Human
cgugcgucuuccauucaguccac

SEQ ID NO: 409814 - RNA, 21 nt, Human
cucucccagccaagccgaccu

SEQ ID NO: 409815 - RNA, 24 nt, Human
cugagcacgagggugcacucugcu

SEQ ID NO: 409816 - RNA, 18 nt, Human
cugcugccccuuucccgc

SEQ ID NO: 409817 - RNA, 23 nt, Human
gaccugcaauugguaaaaccaga

SEQ ID NO: 409818 - RNA, 21 nt, Human
gagguucuggguggucguggc

SEQ ID NO: 409819 - RNA, 22 nt, Human
gagugguuuugcuguuguuccu

SEQ ID NO: 409820 - RNA, 24 nt, Human
gagugguuuugcuguuguuccugg

SEQ ID NO: 409821 - RNA, 21 nt, Human
gcagcgccagacagcgcacgc

SEQ ID NO: 409822 - RNA, 18 nt, Human
ggcugggguuggggcuga

SEQ ID NO: 409823 - RNA, 22 nt, Human
ggcugggguuggggcugacggg

SEQ ID NO: 409824 - RNA, 19 nt, Human
gggggaagcuggcaggagg

SEQ ID NO: 409825 - RNA, 19 nt, Human
gggguuggggcugacgggg

SEQ ID NO: 409826 - RNA, 21 nt, Human
gggguuggggcugacggggga

SEQ ID NO: 409827 - RNA, 21 nt, Human
guucagacacccacugagcac

SEQ ID NO: 409828 - RNA, 21 nt, Human
uccagcuuaccuccguccccc

SEQ ID NO: 409829 - RNA, 20 nt, Human
ucccccgcacacucugggau

SEQ ID NO: 409830 - RNA, 23 nt, Human
uccucaagacugcugccccuuuc

SEQ ID NO: 409831 - RNA, 22 nt, Human
ucucucagcuugagacaguuug

SEQ ID NO: 409832 - RNA, 19 nt, Human
ugccaaguaacaaaaucca

SEQ ID NO: 409833 - RNA, 18 nt, Human
ugcccugagaucaccgca

SEQ ID NO: 409834 - RNA, 21 nt, Human
uggcaacccuugcccugagau

SEQ ID NO: 409835 - RNA, 20 nt, Human
ugggaucacgggucucccac

SEQ ID NO: 409836 - RNA, 18 nt, Human
uggggcugacgggggaag

SEQ ID NO: 409837 - RNA, 22 nt, Human
uggggcugacgggggaagcugg

SEQ ID NO: 409838 - RNA, 19 nt, Human
ugugugggcugggguuggg

SEQ ID NO: 409839 - RNA, 24 nt, Human
uguuccuggaagaaucuuggauuu

SEQ ID NO: 409840 - RNA, 22 nt, Human
uuaauucugcuacuaaaaacau

SEQ ID NO: 409841 - RNA, 21 nt, Human
uuccggaaggguguuuccaga

SEQ ID NO: 409842 - RNA, 24 nt, Human
uuccuggaagaaucuuggauuuug

SEQ ID NO: 409843 - RNA, 21 nt, Human
uugcaaguuaaaacccugugu

SEQ ID NO: 409844 - RNA, 23 nt, Human
aaaugguggcgcaugcagcucag

SEQ ID NO: 409845 - RNA, 23 nt, Human
acacuacagaacacacagaaggc

SEQ ID NO: 409846 - RNA, 26 nt, Human
acagaacacacagaaggcauggcccc

SEQ ID NO: 409847 - RNA, 23 nt, Human
acugcucagccugcaagggaaug

SEQ ID NO: 409848 - RNA, 20 nt, Human
agaggcaggggcuggggccu

SEQ ID NO: 409849 - RNA, 19 nt, Human
aggcacugcugaaaugcgg

SEQ ID NO: 409850 - RNA, 24 nt, Human
aggcaggggcuggggccugaggug

SEQ ID NO: 409851 - RNA, 18 nt, Human
aggcugaggcuggggcuu

SEQ ID NO: 409852 - RNA, 24 nt, Human
aggguggggaggcagagccagggg

SEQ ID NO: 409853 - RNA, 22 nt, Human
agucaggcagaacccggccagg

SEQ ID NO: 409854 - RNA, 23 nt, Human
auaaauaauggagaggcaggggc

SEQ ID NO: 409855 - RNA, 21 nt, Human
caaaucccagacacuacagaa

SEQ ID NO: 409856 - RNA, 23 nt, Human
caaaucccagacacuacagaaca

SEQ ID NO: 409857 - RNA, 20 nt, Human
caagacagguggccgggagc

SEQ ID NO: 409858 - RNA, 22 nt, Human
caccccagaaggcacugcugaa

SEQ ID NO: 409859 - RNA, 19 nt, Human
cacgccgagggccccagcc

SEQ ID NO: 409860 - RNA, 20 nt, Human
cacugcucagccugcaaggg

SEQ ID NO: 409861 - RNA, 19 nt, Human
cacugcugaaaugcggcug

SEQ ID NO: 409862 - RNA, 19 nt, Human
ccacaggguccuggggccu

SEQ ID NO: 409863 - RNA, 18 nt, Human
ccacuggucccucgccuc

SEQ ID NO: 409864 - RNA, 18 nt, Human
cccagccccuugcaaagc

SEQ ID NO: 409865 - RNA, 25 nt, Human
cgccgagggccccagccccuugcaa

SEQ ID NO: 409866 - RNA, 22 nt, Human
cuuccugagagcagagcaaaua

SEQ ID NO: 409867 - RNA, 21 nt, Human
gacuccauaggagcaagacag

SEQ ID NO: 409868 - RNA, 22 nt, Human
gcaaaucccagacacuacagaa

SEQ ID NO: 409869 - RNA, 21 nt, Human
gccaggggcgggggcuccagg

SEQ ID NO: 409870 - RNA, 21 nt, Human
gccucuggggccaaagcaggg

SEQ ID NO: 409871 - RNA, 21 nt, Human
gcucaggcgcaggcugaggcu

SEQ ID NO: 409872 - RNA, 20 nt, Human
ggaccacaggguccuggggc

SEQ ID NO: 409873 - RNA, 23 nt, Human
ggccgggagcccccaccccaggg

SEQ ID NO: 409874 - RNA, 18 nt, Human
ggccugagguggaggggc

SEQ ID NO: 409875 - RNA, 24 nt, Human
ggcuggggccugagguggaggggc

SEQ ID NO: 409876 - RNA, 24 nt, Human
gggccaaagcagggugugggggga

SEQ ID NO: 409877 - RNA, 24 nt, Human
gggcuggggccugagguggagggg

SEQ ID NO: 409878 - RNA, 21 nt, Human
gguggggaggcagagccaggg

SEQ ID NO: 409879 - RNA, 24 nt, Human
ucaaugaauaaacauuuauugagc

SEQ ID NO: 409880 - RNA, 25 nt, Human
ucaggcgcaggcugaggcuggggcu

SEQ ID NO: 409881 - RNA, 18 nt, Human
ucugccagguuccagcug

SEQ ID NO: 409882 - RNA, 21 nt, Human
ugaauaaacauuuauugagca

SEQ ID NO: 409883 - RNA, 22 nt, Human
ugaggcuggggcuuggccgggc

SEQ ID NO: 409884 - RNA, 19 nt, Human
ugagguggaggggcucugg

SEQ ID NO: 409885 - RNA, 20 nt, Human
ugcaagggaaugaaagggga

SEQ ID NO: 409886 - RNA, 22 nt, Human
ugccagguuccagcuggggcag

SEQ ID NO: 409887 - RNA, 26 nt, Human
uggaacgggguccuaaggccucugcc

SEQ ID NO: 409888 - RNA, 18 nt, Human
uggagaggcaggggcugg

SEQ ID NO: 409889 - RNA, 20 nt, Human
uggccgggagcccccacccc

SEQ ID NO: 409890 - RNA, 21 nt, Human
ugggcagagaagcuggggcug

SEQ ID NO: 409891 - RNA, 21 nt, Human
uggggccaaagcagggugugg

SEQ ID NO: 409892 - RNA, 25 nt, Human
aaaaagcacaggagccgccugcaga

SEQ ID NO: 409893 - RNA, 19 nt, Human
aaaaaggacucacucagaa

SEQ ID NO: 409894 - RNA, 21 nt, Human
aagagaaaaguaucaggucca

SEQ ID NO: 409895 - RNA, 26 nt, Human
aagcggcagcacccgccgaccgagca

SEQ ID NO: 409896 - RNA, 26 nt, Human
accagccccgaccucggcggcccggc

SEQ ID NO: 409897 - RNA, 22 nt, Human
acccagugaaacuauggggcuu

SEQ ID NO: 409898 - RNA, 23 nt, Human
accccggcgacccccagccgagc

SEQ ID NO: 409899 - RNA, 23 nt, Human
accgcaacccagugaaacuaugg

SEQ ID NO: 409900 - RNA, 18 nt, Human
acuccuguuucucaaaca

SEQ ID NO: 409901 - RNA, 23 nt, Human
acuuugugcucagagaaaaacca

SEQ ID NO: 409902 - RNA, 19 nt, Human
agaaaaaccagcaugaugg

SEQ ID NO: 409903 - RNA, 19 nt, Human
agaaaaaccagcaugaugg

SEQ ID NO: 409904 - RNA, 23 nt, Human
agaaagacuaaagcuagcgaagg

SEQ ID NO: 409905 - RNA, 23 nt, Human
agacauccgaagagccagaaaua

SEQ ID NO: 409906 - RNA, 20 nt, Human
agagaaaaaccagcaugaug

SEQ ID NO: 409907 - RNA, 22 nt, Human
agcgaaggaacguacauuucug

SEQ ID NO: 409908 - RNA, 18 nt, Human
auccgaagagccagaaau

SEQ ID NO: 409909 - RNA, 18 nt, Human
caaaagcacgaagcugcu

SEQ ID NO: 409910 - RNA, 20 nt, Human
caccauaaaaaaaggacuca

SEQ ID NO: 409911 - RNA, 22 nt, Human
caccauaaaaaaaggacucacu

SEQ ID NO: 409912 - RNA, 20 nt, Human
cagaaagacuaaagcuagcg

SEQ ID NO: 409913 - RNA, 20 nt, Human
cagagcccggagcgcccuuc

SEQ ID NO: 409914 - RNA, 19 nt, Human
cagccgagcccucgucgca

SEQ ID NO: 409915 - RNA, 20 nt, Human
cagccuaaaacuuugugcuu

SEQ ID NO: 409916 - RNA, 23 nt, Human
caggcccggcccgcgaccccggc

SEQ ID NO: 409917 - RNA, 21 nt, Human
cccgcaggguggccuggcccc

SEQ ID NO: 409918 - RNA, 19 nt, Human
cccgcgugccguggcggcc

SEQ ID NO: 409919 - RNA, 21 nt, Human
cccgcgugccguggcggccac

SEQ ID NO: 409920 - RNA, 30 nt, Human
cccggcccgcgaccccggcgacccccagcc

SEQ ID NO: 409921 - RNA, 18 nt, Human
ccgccugcagacucucag

SEQ ID NO: 409922 - RNA, 19 nt, Human
ccgcgcgcagucccgcccc

SEQ ID NO: 409923 - RNA, 18 nt, Human
ccucggcggcccggcucc

SEQ ID NO: 409924 - RNA, 25 nt, Human
ccugcagacucucagaguucugucc

SEQ ID NO: 409925 - RNA, 22 nt, Human
ccugcaggcccggcccgcgacc

SEQ ID NO: 409926 - RNA, 19 nt, Human
ccuggccccguggauccac

SEQ ID NO: 409927 - RNA, 22 nt, Human
cuagaagacauccgaagagcca

SEQ ID NO: 409928 - RNA, 23 nt, Human
cuauauucucccuuucuuacacg

SEQ ID NO: 409929 - RNA, 25 nt, Human
cuguacauucacagagggaggacac

SEQ ID NO: 409930 - RNA, 21 nt, Human
gaacagaaagacuaaagcuag

SEQ ID NO: 409931 - RNA, 22 nt, Human
gaagacauccgaagagccagaa

SEQ ID NO: 409932 - RNA, 21 nt, Human
gaccccggcgacccccagccg

SEQ ID NO: 409933 - RNA, 18 nt, Human
gaccgagcaccaggcccc

SEQ ID NO: 409934 - RNA, 20 nt, Human
gaguucaaccagccccgacc

SEQ ID NO: 409935 - RNA, 19 nt, Human
gcccggcccgcgaccccgg

SEQ ID NO: 409936 - RNA, 20 nt, Human
gcucagagcccggagcgccc

SEQ ID NO: 409937 - RNA, 18 nt, Human
gcuguguacagccuaaaa

SEQ ID NO: 409938 - RNA, 18 nt, Human
gggaacagaaagacuaaa

SEQ ID NO: 409939 - RNA, 20 nt, Human
gucuguacaaaagcacgaag

SEQ ID NO: 409940 - RNA, 19 nt, Human
guguggccucccgcagggu

SEQ ID NO: 409941 - RNA, 26 nt, Human
uaaaagauuauuuugaaagcuuggaa

SEQ ID NO: 409942 - RNA, 18 nt, Human
uaaagcggcagcacccgc

SEQ ID NO: 409943 - RNA, 23 nt, Human
uaaagcuagcgaaggaacguaca

SEQ ID NO: 409944 - RNA, 21 nt, Human
uaccaggaaaauaaccgcaac

SEQ ID NO: 409945 - RNA, 24 nt, Human
uagcgaaggaacguacauuucugu

SEQ ID NO: 409946 - RNA, 24 nt, Human
ucaagagaaaaguaucagguccau

SEQ ID NO: 409947 - RNA, 23 nt, Human
ucuguacacuuguuacaaagguu

SEQ ID NO: 409948 - RNA, 19 nt, Human
ugagguguuauuuccgaaa

SEQ ID NO: 409949 - RNA, 22 nt, Human
ugauuuuuucuucaggugcagu

SEQ ID NO: 409950 - RNA, 19 nt, Human
ugcucagagaaaaaccagc

SEQ ID NO: 409951 - RNA, 19 nt, Human
uggaagggagcuguucgua

SEQ ID NO: 409952 - RNA, 25 nt, Human
uggauccacgccgaacgcucaacga

SEQ ID NO: 409953 - RNA, 24 nt, Human
ugguuugcuucucaagagaaaagu

SEQ ID NO: 409954 - RNA, 18 nt, Human
ugugcucagagaaaaacc

SEQ ID NO: 409955 - RNA, 21 nt, Human
uguguacagccuaaaacuuug

SEQ ID NO: 409956 - RNA, 21 nt, Human
uuacacgcaaacuaccaggaa

SEQ ID NO: 409957 - RNA, 21 nt, Human
uucacagagggaggacaccau

SEQ ID NO: 409958 - RNA, 20 nt, Human
aaaaacagcgaagucccaca

SEQ ID NO: 409959 - RNA, 19 nt, Human
aacaaaccuuuuuuuuuuu

SEQ ID NO: 409960 - RNA, 19 nt, Human
acauaccauacccuacaag

SEQ ID NO: 409961 - RNA, 24 nt, Human
acauaccauacccuacaagacaca

SEQ ID NO: 409962 - RNA, 19 nt, Human
accauacccuacaagacac

SEQ ID NO: 409963 - RNA, 19 nt, Human
agaggcuguccgccgggcc

SEQ ID NO: 409964 - RNA, 27 nt, Human
auuaacaaaccuuuuuuuuuuuuuuuu

SEQ ID NO: 409965 - RNA, 19 nt, Human
cccaugcacacgcuggccg

SEQ ID NO: 409966 - RNA, 19 nt, Human
ccugggcugcuccagcuac

SEQ ID NO: 409967 - RNA, 26 nt, Human
ccuuuuuuuuuuuuuuuuauuggaga

SEQ ID NO: 409968 - RNA, 24 nt, Human
cgugcaucuuggucucaaugucga

SEQ ID NO: 409969 - RNA, 18 nt, Human
gaggcggccccauugcaa

SEQ ID NO: 409970 - RNA, 22 nt, Human
gccaugguuuccauguuaagga

SEQ ID NO: 409971 - RNA, 21 nt, Human
gcggagguggcggugggucag

SEQ ID NO: 409972 - RNA, 23 nt, Human
ggccugggcugcuccagcuacgc

SEQ ID NO: 409973 - RNA, 18 nt, Human
ucccacauaccauacccu

SEQ ID NO: 409974 - RNA, 23 nt, Human
uccgccgggccugggcugcucca

SEQ ID NO: 409975 - RNA, 18 nt, Human
ucuuuuuuuuuuuuuuuu

SEQ ID NO: 409976 - RNA, 18 nt, Human
ucuuuuuuuuuuuuuuuu

SEQ ID NO: 409977 - RNA, 21 nt, Human
ugccagaucuucaggaagucc

SEQ ID NO: 409978 - RNA, 22 nt, Human
ugccagaucuucaggaaguccu

SEQ ID NO: 409979 - RNA, 20 nt, Human
ugggcugcuccagcuacgcg

SEQ ID NO: 409980 - RNA, 27 nt, Human
uuuaauuaacaaaccuuuuuuuuuuuu

SEQ ID NO: 409981 - RNA, 25 nt, Human
uuuuuuuuuuuuuuuuuuucuuuuu

SEQ ID NO: 409982 - RNA, 25 nt, Human
uuuuuuuuuuuuuuuuuuucuuuuu

SEQ ID NO: 409983 - RNA, 19 nt, Human
ccaaggccagugcaggagg

SEQ ID NO: 409984 - RNA, 18 nt, Human
gccucuaugucugugcac

SEQ ID NO: 409985 - RNA, 24 nt, Human
auucucggucugaagagguuuggg

SEQ ID NO: 409986 - RNA, 19 nt, Human
ccugggccaaaagucucug

SEQ ID NO: 409987 - RNA, 23 nt, Human
ccugggccaaaagucucuggaac

SEQ ID NO: 409988 - RNA, 24 nt, Human
cuagccgcgauaaacacccucccc

SEQ ID NO: 409989 - RNA, 22 nt, Human
cuccugggccaaaagucucugg

SEQ ID NO: 409990 - RNA, 18 nt, Human
gcgauaaacacccucccc

SEQ ID NO: 409991 - RNA, 24 nt, Human
guaaauauuccuccugggccaaaa

SEQ ID NO: 409992 - RNA, 19 nt, Human
ucugaagagguuugggaaa

SEQ ID NO: 409993 - RNA, 18 nt, Human
uuuuuuuuuuuuuuuuug

SEQ ID NO: 409994 - RNA, 19 nt, Human
uuuuuuuuuuuuuuuuugu

SEQ ID NO: 409995 - RNA, 24 nt, Human
aaaaucaguaagaacaguuauaua

SEQ ID NO: 409996 - RNA, 26 nt, Human
aaaauuuaaugaagaccuaaaaaaug

SEQ ID NO: 409997 - RNA, 21 nt, Human
aaacaaugugguuuaagaaau

SEQ ID NO: 409998 - RNA, 20 nt, Human
aaacaucacuccacucacag

SEQ ID NO: 409999 - RNA, 18 nt, Human
aaacaugcgccacggucc

SEQ ID NO: 410000 - RNA, 18 nt, Human
aaagcaaaaaccuuuugg

SEQ ID NO: 410001 - RNA, 22 nt, Human
aacacacacacaaacaucacuc

SEQ ID NO: 410002 - RNA, 18 nt, Human
aagaaaaggagacccuaa

SEQ ID NO: 410003 - RNA, 25 nt, Human
aagaaacuuauuccaaagucuuuac

SEQ ID NO: 410004 - RNA, 23 nt, Human
aaggaucuuuuauauauggcuuu

SEQ ID NO: 410005 - RNA, 22 nt, Human
acacugcuuugucuuggcuaag

SEQ ID NO: 410006 - RNA, 19 nt, Human
accaggguacaagcuguuu

SEQ ID NO: 410007 - RNA, 21 nt, Human
acccucauaaaucagaaaaaa

SEQ ID NO: 410008 - RNA, 18 nt, Human
acccugaaaaucuuggua

SEQ ID NO: 410009 - RNA, 27 nt, Human
accuagugcuuuaaaaaucugguuaua

SEQ ID NO: 410010 - RNA, 18 nt, Human
acuggcucagccuccccu

SEQ ID NO: 410011 - RNA, 19 nt, Human
agaaaaggagacccuaaug

SEQ ID NO: 410012 - RNA, 21 nt, Human
agaaacgcuuuugcuugcuaa

SEQ ID NO: 410013 - RNA, 18 nt, Human
agauacaaccaacagacu

SEQ ID NO: 410014 - RNA, 22 nt, Human
agcaggagacugcagauuccuu

SEQ ID NO: 410015 - RNA, 19 nt, Human
agccgucugcugaaaaaca

SEQ ID NO: 410016 - RNA, 18 nt, Human
aggaagaaaaggagaccc

SEQ ID NO: 410017 - RNA, 24 nt, Human
aggaagaaaaggagacccuaaugu

SEQ ID NO: 410018 - RNA, 20 nt, Human
aguugcuuugguuugcauuu

SEQ ID NO: 410019 - RNA, 25 nt, Human
augaagaccuaaaaaaugauaaaug

SEQ ID NO: 410020 - RNA, 19 nt, Human
auuaaaaaagaaaaaagaa

SEQ ID NO: 410021 - RNA, 21 nt, Human
caaacccucauaaaucagaaa

SEQ ID NO: 410022 - RNA, 23 nt, Human
caagauacaaccaacagacuuac

SEQ ID NO: 410023 - RNA, 18 nt, Human
caccauuucccuaccagg

SEQ ID NO: 410024 - RNA, 22 nt, Human
cacugccuaugucagcacuuug

SEQ ID NO: 410025 - RNA, 23 nt, Human
cagaaaaaccugcuaacaagcac

SEQ ID NO: 410026 - RNA, 24 nt, Human
cagcacuuugggcaggggaaaugg

SEQ ID NO: 410027 - RNA, 21 nt, Human
cagcgacaccauuucccuacc

SEQ ID NO: 410028 - RNA, 22 nt, Human
caucaacaugcuucugcuaaca

SEQ ID NO: 410029 - RNA, 24 nt, Human
cauuugauuuggcaccacuauugu

SEQ ID NO: 410030 - RNA, 19 nt, Human
ccaccccuagauccccgcc

SEQ ID NO: 410031 - RNA, 19 nt, Human
ccacggucccgcgaagucg

SEQ ID NO: 410032 - RNA, 23 nt, Human
ccagcagugcauuuaaagcaauu

SEQ ID NO: 410033 - RNA, 18 nt, Human
cccagcauuuucacccug

SEQ ID NO: 410034 - RNA, 22 nt, Human
cccgcgaagucgcccaccccua

SEQ ID NO: 410035 - RNA, 20 nt, Human
ccgccgggucggccgagccc

SEQ ID NO: 410036 - RNA, 18 nt, Human
ccugaaaaucuugguaaa

SEQ ID NO: 410037 - RNA, 28 nt, Human
cuaauuauuuacaccagcagugcauuua

SEQ ID NO: 410038 - RNA, 19 nt, Human
cucaugaagaaggggagcu

SEQ ID NO: 410039 - RNA, 20 nt, Human
cucuagguggagucugauuu

SEQ ID NO: 410040 - RNA, 20 nt, Human
cugaaaaacagcagaguuga

SEQ ID NO: 410041 - RNA, 25 nt, Human
cugcgcaccugcuucucauaugacc

SEQ ID NO: 410042 - RNA, 20 nt, Human
cuuugggcaggggaaaugga

SEQ ID NO: 410043 - RNA, 19 nt, Human
gaaaaacagcagaguugaa

SEQ ID NO: 410044 - RNA, 20 nt, Human
gaagggcacauaguaucuuu

SEQ ID NO: 410045 - RNA, 22 nt, Human
gagguauuccuaaaaaguugcu

SEQ ID NO: 410046 - RNA, 22 nt, Human
ggaauucucugcgcaccugcuu

SEQ ID NO: 410047 - RNA, 27 nt, Human
ggcaauaaaaucaguaagaacaguuau

SEQ ID NO: 410048 - RNA, 21 nt, Human
uaaaaaccucagaucuuucaa

SEQ ID NO: 410049 - RNA, 22 nt, Human
uaaaaagaacauuauauccaga

SEQ ID NO: 410050 - RNA, 20 nt, Human
uaaaauggauaaaacaaggc

SEQ ID NO: 410051 - RNA, 21 nt, Human
uaaaauggauaaaacaaggca

SEQ ID NO: 410052 - RNA, 20 nt, Human
uaaagagguauuccuaaaaa

SEQ ID NO: 410053 - RNA, 26 nt, Human
uaacaagcacaagucuuacuauaaga

SEQ ID NO: 410054 - RNA, 27 nt, Human
uacaaaauaugaacauagaggacauac

SEQ ID NO: 410055 - RNA, 18 nt, Human
uacaaaauguguccaaga

SEQ ID NO: 410056 - RNA, 21 nt, Human
uacagaugcucaugaagaagg

SEQ ID NO: 410057 - RNA, 23 nt, Human
uacauaaacacagaauagauuuu

SEQ ID NO: 410058 - RNA, 18 nt, Human
uaccugaagucacagaaa

SEQ ID NO: 410059 - RNA, 18 nt, Human
uaucagagugguauauca

SEQ ID NO: 410060 - RNA, 22 nt, Human
uaugggggaaaaacuaacagaa

SEQ ID NO: 410061 - RNA, 21 nt, Human
ucacaucaacaugcuucugcu

SEQ ID NO: 410062 - RNA, 21 nt, Human
uccacucacaguaggaaauga

SEQ ID NO: 410063 - RNA, 18 nt, Human
ucccaucagccgucugcu

SEQ ID NO: 410064 - RNA, 23 nt, Human
ucccuagugcucuuuaagcuggu

SEQ ID NO: 410065 - RNA, 18 nt, Human
uccuggugcucuaggugg

SEQ ID NO: 410066 - RNA, 24 nt, Human
ucucgcacuggcucagccuccccc

SEQ ID NO: 410067 - RNA, 23 nt, Human
ucugcuaacacuuucaaagcaaa

SEQ ID NO: 410068 - RNA, 20 nt, Human
ucuugaauauuuacuuucaa

SEQ ID NO: 410069 - RNA, 20 nt, Human
ucuuuacaacuuaacuuacu

SEQ ID NO: 410070 - RNA, 23 nt, Human
ugaaaaacagcagaguugaacug

SEQ ID NO: 410071 - RNA, 18 nt, Human
ugaaagagcagaaaaggu

SEQ ID NO: 410072 - RNA, 21 nt, Human
ugaaauacauuauaaaacugg

SEQ ID NO: 410073 - RNA, 18 nt, Human
ugacugaaaaacagcaga

SEQ ID NO: 410074 - RNA, 21 nt, Human
ugcgcaccugcuucucauaug

SEQ ID NO: 410075 - RNA, 18 nt, Human
ugcuuuaaaaaucugguu

SEQ ID NO: 410076 - RNA, 19 nt, Human
uggaauuuuagaaaucaca

SEQ ID NO: 410077 - RNA, 23 nt, Human
uggaauuuuagaaaucacauguc

SEQ ID NO: 410078 - RNA, 23 nt, Human
uggagugaacaucaucuugaaua

SEQ ID NO: 410079 - RNA, 22 nt, Human
uggauaaaacaaggcacaauga

SEQ ID NO: 410080 - RNA, 18 nt, Human
uggcuuuuaugauaccca

SEQ ID NO: 410081 - RNA, 20 nt, Human
uggcuuuuaugauacccacu

SEQ ID NO: 410082 - RNA, 18 nt, Human
ugggcaggggaaauggaa

SEQ ID NO: 410083 - RNA, 19 nt, Human
ugggcaggggaaauggaag

SEQ ID NO: 410084 - RNA, 23 nt, Human
ugguaaagauucuucaucacugc

SEQ ID NO: 410085 - RNA, 23 nt, Human
ugucagcacuuugggcaggggaa

SEQ ID NO: 410086 - RNA, 22 nt, Human
uguuaaaaaccucagaucuuuc

SEQ ID NO: 410087 - RNA, 18 nt, Human
uguuaugggggaaaaacu

SEQ ID NO: 410088 - RNA, 24 nt, Human
uuacuaaguugcuuugguuugcau

SEQ ID NO: 410089 - RNA, 21 nt, Human
uuauuaaaaaagaaaaaagaa

SEQ ID NO: 410090 - RNA, 25 nt, Human
uucaaggaauucucugcgcaccugc

SEQ ID NO: 410091 - RNA, 24 nt, Human
uucaugcuuuaagauugagauuuu

SEQ ID NO: 410092 - RNA, 19 nt, Human
uuccugucccaucagccgu

SEQ ID NO: 410093 - RNA, 23 nt, Human
uucucauaugaccaaaguuguac

SEQ ID NO: 410094 - RNA, 24 nt, Human
uugaauagagauuuuaaaauuuca

SEQ ID NO: 410095 - RNA, 24 nt, Human
uuuaaaaagaacauuauauccaga

SEQ ID NO: 410096 - RNA, 19 nt, Human
uuuaaccaggcuaucaacu

SEQ ID NO: 410097 - RNA, 19 nt, Human
aaacaacaggaagucggca

SEQ ID NO: 410098 - RNA, 19 nt, Human
acccccaacccggccucaa

SEQ ID NO: 410099 - RNA, 22 nt, Human
acccccaacccggccucaaaca

SEQ ID NO: 410100 - RNA, 23 nt, Human
acggccgccuggcgacucccuuc

SEQ ID NO: 410101 - RNA, 19 nt, Human
aggaagucggcaccacuac

SEQ ID NO: 410102 - RNA, 22 nt, Human
auaaaagccagucuuuaccaaa

SEQ ID NO: 410103 - RNA, 21 nt, Human
caacccggccucaaacaacag

SEQ ID NO: 410104 - RNA, 22 nt, Human
cagucccaacauucagcacaaa

SEQ ID NO: 410105 - RNA, 21 nt, Human
ccaacccggccucaaacaaca

SEQ ID NO: 410106 - RNA, 20 nt, Human
cccacacaaucgcacacccc

SEQ ID NO: 410107 - RNA, 22 nt, Human
cccacacaaucgcacaccccca

SEQ ID NO: 410108 - RNA, 18 nt, Human
ccggccucaaacaacagg

SEQ ID NO: 410109 - RNA, 26 nt, Human
cugcugggcugccccagaccguccca

SEQ ID NO: 410110 - RNA, 25 nt, Human
ggauagaaagugcauuaauaaaagc

SEQ ID NO: 410111 - RNA, 21 nt, Human
uaagaagagcucaaccuccag

SEQ ID NO: 410112 - RNA, 21 nt, Human
uagaaagugcauuaauaaaag

SEQ ID NO: 410113 - RNA, 19 nt, Human
ucccacacaaucgcacacc

SEQ ID NO: 410114 - RNA, 22 nt, Human
ucccacacaaucgcacacccuu

SEQ ID NO: 410115 - RNA, 20 nt, Human
ugccccagaccgucccacac

SEQ ID NO: 410116 - RNA, 21 nt, Human
uggcgacucccuuccccgcag

SEQ ID NO: 410117 - RNA, 23 nt, Human
uuccccgcaggcagagggucagc

SEQ ID NO: 410118 - RNA, 24 nt, Human
aagggccuuuucuaucacaaaggu

SEQ ID NO: 410119 - RNA, 19 nt, Human
aagucaucucagaucacug

SEQ ID NO: 410120 - RNA, 19 nt, Human
accuccuuacuauccaaga

SEQ ID NO: 410121 - RNA, 19 nt, Human
agaacagagauucagagac

SEQ ID NO: 410122 - RNA, 19 nt, Human
agaacagagauucagagac

SEQ ID NO: 410123 - RNA, 18 nt, Human
agacacaaaguuaauaaa

SEQ ID NO: 410124 - RNA, 21 nt, Human
aggaaaaaaaaauuagaccca

SEQ ID NO: 410125 - RNA, 19 nt, Human
auagaaagagccauauaca

SEQ ID NO: 410126 - RNA, 18 nt, Human
caagucuagaaggagauu

SEQ ID NO: 410127 - RNA, 19 nt, Human
caccuccuuacuauccaag

SEQ ID NO: 410128 - RNA, 21 nt, Human
cauugccaagcauuuaaaaga

SEQ ID NO: 410129 - RNA, 23 nt, Human
cccacuaucaaaccaucaaugga

SEQ ID NO: 410130 - RNA, 26 nt, Human
cucauguagcaaaaaaaaaaaaaauc

SEQ ID NO: 410131 - RNA, 18 nt, Human
gacaaaggaaucaagucu

SEQ ID NO: 410132 - RNA, 21 nt, Human
uagaaagagccauauacauuu

SEQ ID NO: 410133 - RNA, 23 nt, Human
uauuuugugcuuuuucaguaucu

SEQ ID NO: 410134 - RNA, 20 nt, Human
ucaggaacuauauuaaauuc

SEQ ID NO: 410135 - RNA, 22 nt, Human
ucaguuuguaacuuugaccuuu

SEQ ID NO: 410136 - RNA, 23 nt, Human
ucauguagcaaaaaaaaaaaaaa

SEQ ID NO: 410137 - RNA, 22 nt, Human
ucuacuugacugcuuaccaccu

SEQ ID NO: 410138 - RNA, 22 nt, Human
uggaugaagaaaagggccuuuu

SEQ ID NO: 410139 - RNA, 22 nt, Human
uguagcaaaaaaaaaaaaaauc

SEQ ID NO: 410140 - RNA, 24 nt, Human
uuaaaucaucuacuugacugcuua

SEQ ID NO: 410141 - RNA, 21 nt, Human
uucucaaauguugagcuucac

SEQ ID NO: 410142 - RNA, 23 nt, Human
uugccaagcauuuaaaagauaaa

SEQ ID NO: 410143 - RNA, 22 nt, Human
uuuauaagucaucucagaucac

SEQ ID NO: 410144 - RNA, 18 nt, Human
uuugcuggcaaaugagau

SEQ ID NO: 410145 - RNA, 19 nt, Human
caaaaggagacccgggagc

SEQ ID NO: 410146 - RNA, 25 nt, Human
cccaggccaaaaggagacccgggag

SEQ ID NO: 410147 - RNA, 27 nt, Human
ccccaggccaaaaggagacccgggagc

SEQ ID NO: 410148 - RNA, 23 nt, Human
cucggguuaccccaggccaaaag

SEQ ID NO: 410149 - RNA, 22 nt, Human
uaccccaggccaaaaggagacu

SEQ ID NO: 410150 - RNA, 19 nt, Human
uucucagcucugcaccucg

SEQ ID NO: 410151 - RNA, 22 nt, Human
uuuguaaguuccccuaccauug

SEQ ID NO: 410152 - RNA, 22 nt, Human
uuuguaaguuccccuaccauug

SEQ ID NO: 410153 - RNA, 23 nt, Human
uuuguaaguuccccuaccauugu

SEQ ID NO: 410154 - RNA, 19 nt, Human
aaagaugauuuauuuuggu

SEQ ID NO: 410155 - RNA, 24 nt, Human
aauacuuucacaauacuuugcuug

SEQ ID NO: 410156 - RNA, 23 nt, Human
aauauuuuuccuuuuucagggaa

SEQ ID NO: 410157 - RNA, 21 nt, Human
acccaauuccaccccaguuuc

SEQ ID NO: 410158 - RNA, 21 nt, Human
aggcggcaaaguuuacgagaa

SEQ ID NO: 410159 - RNA, 23 nt, Human
agucagagagaagaggucagggu

SEQ ID NO: 410160 - RNA, 20 nt, Human
augcuccagagcuuucuggc

SEQ ID NO: 410161 - RNA, 21 nt, Human
auuuaaaacuuggcuuagaau

SEQ ID NO: 410162 - RNA, 18 nt, Human
cacuaaacucuucccacc

SEQ ID NO: 410163 - RNA, 25 nt, Human
cacuuucuucucuuguaaauuuuua

SEQ ID NO: 410164 - RNA, 20 nt, Human
ccaauuccaccccaguuuca

SEQ ID NO: 410165 - RNA, 24 nt, Human
ccaauuccaccccaguuucacacu

SEQ ID NO: 410166 - RNA, 24 nt, Human
ccaauuccaccccaguuucacacu

SEQ ID NO: 410167 - RNA, 18 nt, Human
cgagaaaaggagaaaaca

SEQ ID NO: 410168 - RNA, 25 nt, Human
cgagaaaaggagaaaacaccagaga

SEQ ID NO: 410169 - RNA, 20 nt, Human
gagaaaacaccagagagaga

SEQ ID NO: 410170 - RNA, 26 nt, Human
gcgcagccggcggugggauugaaggu

SEQ ID NO: 410171 - RNA, 20 nt, Human
gcugugaaauaugaccauaa

SEQ ID NO: 410172 - RNA, 19 nt, Human
ggagcggggaacacaaguc

SEQ ID NO: 410173 - RNA, 22 nt, Human
guugccuuaaguuggagucucc

SEQ ID NO: 410174 - RNA, 18 nt, Human
uaacacaagaagugucau

SEQ ID NO: 410175 - RNA, 21 nt, Human
uaagaaauauauagugucaau

SEQ ID NO: 410176 - RNA, 23 nt, Human
uacacaauaaaaacuuacaaaag

SEQ ID NO: 410177 - RNA, 24 nt, Human
ucaauguuauggaagcuucccuca

SEQ ID NO: 410178 - RNA, 18 nt, Human
ugaaaggggaggggagga

SEQ ID NO: 410179 - RNA, 21 nt, Human
ugaagguuaggcucuggauuu

SEQ ID NO: 410180 - RNA, 18 nt, Human
ugaccauaauaaagaugg

SEQ ID NO: 410181 - RNA, 23 nt, Human
ugagcaaugcuuaugcaacuaca

SEQ ID NO: 410182 - RNA, 21 nt, Human
ugagugaaaggggaggggagg

SEQ ID NO: 410183 - RNA, 20 nt, Human
ugcacuuuuggauuuuccuc

SEQ ID NO: 410184 - RNA, 24 nt, Human
ugccuuaaguuggagucucccuga

SEQ ID NO: 410185 - RNA, 22 nt, Human
ugcuuucacuuucuucucuugu

SEQ ID NO: 410186 - RNA, 18 nt, Human
uguaacaaagguacuucu

SEQ ID NO: 410187 - RNA, 21 nt, Human
ugugaaauaugaccauaauaa

SEQ ID NO: 410188 - RNA, 20 nt, Human
uguggucuucuuugucacag

SEQ ID NO: 410189 - RNA, 21 nt, Human
uuaaaacuuggcuuagaauac

SEQ ID NO: 410190 - RNA, 19 nt, Human
uucuauaauuuauauguau

SEQ ID NO: 410191 - RNA, 21 nt, Human
uucuauaauuuauauguauau

SEQ ID NO: 410192 - RNA, 19 nt, Human
uucucaggaucuacuugua

SEQ ID NO: 410193 - RNA, 19 nt, Human
uuuuuccuuuuucagggaa

SEQ ID NO: 410194 - RNA, 23 nt, Human
aaaaaaaauucuguccauguaaa

SEQ ID NO: 410195 - RNA, 21 nt, Human
aaaacacugccaaagcuuucc

SEQ ID NO: 410196 - RNA, 24 nt, Human
aaaagaccaaaaaaauuuuauugc

SEQ ID NO: 410197 - RNA, 24 nt, Human
aaacacauuaccaaaucccacuga

SEQ ID NO: 410198 - RNA, 26 nt, Human
aaauuggggcguguggggaagaccac

SEQ ID NO: 410199 - RNA, 26 nt, Human
aacaagccagcaacaaaccggacccc

SEQ ID NO: 410200 - RNA, 24 nt, Human
aacuucuggcaaguacuucaauau

SEQ ID NO: 410201 - RNA, 25 nt, Human
aagaaaaggugacacuuuuagauac

SEQ ID NO: 410202 - RNA, 23 nt, Human
aagcaagaaaaggacuuuaccaa

SEQ ID NO: 410203 - RNA, 25 nt, Human
aagcaagaaaaggacuuuaccaaga

SEQ ID NO: 410204 - RNA, 25 nt, Human
aagcagucccccugccucggccucc

SEQ ID NO: 410205 - RNA, 22 nt, Human
aagccagcaacaaacacaacug

SEQ ID NO: 410206 - RNA, 21 nt, Human
aagcccuacucccugccuggu

SEQ ID NO: 410207 - RNA, 26 nt, Human
acacuaagcccuacucccugccuggu

SEQ ID NO: 410208 - RNA, 22 nt, Human
accaccaacaguauuuacauga

SEQ ID NO: 410209 - RNA, 20 nt, Human
accacgcccggccugacuua

SEQ ID NO: 410210 - RNA, 21 nt, Human
accgccgcguccccccggucu

SEQ ID NO: 410211 - RNA, 24 nt, Human
acuuuguugcccaggcuggucucg

SEQ ID NO: 410212 - RNA, 25 nt, Human
acuuuguugcccaggcuggucucga

SEQ ID NO: 410213 - RNA, 18 nt, Human
agagcugucacaagaaaa

SEQ ID NO: 410214 - RNA, 23 nt, Human
agcaacugagcauccuaacuacc

SEQ ID NO: 410215 - RNA, 22 nt, Human
agcaagaaaaggacuuuaccaa

SEQ ID NO: 410216 - RNA, 19 nt, Human
agccaguguagcaagggcg

SEQ ID NO: 410217 - RNA, 25 nt, Human
aggcaagaaaaggugacacuuuuag

SEQ ID NO: 410218 - RNA, 19 nt, Human
aguacuaccugaaaauugg

SEQ ID NO: 410219 - RNA, 20 nt, Human
agugggugcaaaauaacuac

SEQ ID NO: 410220 - RNA, 23 nt, Human
auaaaagcugugaaagguaugcc

SEQ ID NO: 410221 - RNA, 21 nt, Human
auagagauggagucucacuuu

SEQ ID NO: 410222 - RNA, 21 nt, Human
auuguugaucaggcaagaaaa

SEQ ID NO: 410223 - RNA, 19 nt, Human
caaacuguacauuuaaaac

SEQ ID NO: 410224 - RNA, 22 nt, Human
caaauggccccuuguacaaaca

SEQ ID NO: 410225 - RNA, 28 nt, Human
caagcagucccccugccucggccuccca

SEQ ID NO: 410226 - RNA, 19 nt, Human
cacucacuuacaaaaagac

SEQ ID NO: 410227 - RNA, 19 nt, Human
cacuuuguugcccaggcug

SEQ ID NO: 410228 - RNA, 24 nt, Human
cacuuuguugcccaggcuggucuc

SEQ ID NO: 410229 - RNA, 22 nt, Human
cagcaacaaacacaacugaaua

SEQ ID NO: 410230 - RNA, 26 nt, Human
cagcaguaucugcuugucaccccggu

SEQ ID NO: 410231 - RNA, 25 nt, Human
cagcaguaucugcuugucggcgucg

SEQ ID NO: 410232 - RNA, 20 nt, Human
cagucccccugccucggccu

SEQ ID NO: 410233 - RNA, 22 nt, Human
cagugugcugggauuacaggug

SEQ ID NO: 410234 - RNA, 24 nt, Human
cauaagacaguguccccuaauuca

SEQ ID NO: 410235 - RNA, 19 nt, Human
caucuggaagaaucacaaa

SEQ ID NO: 410236 - RNA, 18 nt, Human
caugcuugauccuggcag

SEQ ID NO: 410237 - RNA, 22 nt, Human
ccaacaaccugaaauuucuuac

SEQ ID NO: 410238 - RNA, 21 nt, Human
ccaccaacaguauuuacauga

SEQ ID NO: 410239 - RNA, 25 nt, Human
ccacgcccggccugacuuauuuaua

SEQ ID NO: 410240 - RNA, 20 nt, Human
ccagcaacaaacacaacuga

SEQ ID NO: 410241 - RNA, 21 nt, Human
ccagugugcugggauuacagg

SEQ ID NO: 410242 - RNA, 24 nt, Human
ccagugugcugggauuacaggugu

SEQ ID NO: 410243 - RNA, 21 nt, Human
cccaaugcacaguaacucaug

SEQ ID NO: 410244 - RNA, 26 nt, Human
cccccugccucggccucccagugugc

SEQ ID NO: 410245 - RNA, 19 nt, Human
cccugccucggccucccag

SEQ ID NO: 410246 - RNA, 26 nt, Human
ccgccgcgcugccugaggcgccgucc

SEQ ID NO: 410247 - RNA, 26 nt, Human
ccgccgcuaccgccgcguccccccgg

SEQ ID NO: 410248 - RNA, 18 nt, Human
ccgcugaggucagcaagg

SEQ ID NO: 410249 - RNA, 23 nt, Human
ccucauuucaacugcuuuccuca

SEQ ID NO: 410250 - RNA, 27 nt, Human
ccucggccucccaguguugcgaccucg

SEQ ID NO: 410251 - RNA, 20 nt, Human
ccugagcucaagcagucccc

SEQ ID NO: 410252 - RNA, 21 nt, Human
ccugccucggccucccagugu

SEQ ID NO: 410253 - RNA, 22 nt, Human
ccuggguguggauggcuaacuc

SEQ ID NO: 410254 - RNA, 25 nt, Human
cgaacuccugagcucaagcaguccc

SEQ ID NO: 410255 - RNA, 20 nt, Human
cgccgcuaccgccgcguccc

SEQ ID NO: 410256 - RNA, 24 nt, Human
cgcggcgcgccggaggacgggcug

SEQ ID NO: 410257 - RNA, 23 nt, Human
cuaaauccucaaauggaauucca

SEQ ID NO: 410258 - RNA, 23 nt, Human
cuaacuucacaaaaagagcuguc

SEQ ID NO: 410259 - RNA, 19 nt, Human
cucacaccacaacugguua

SEQ ID NO: 410260 - RNA, 25 nt, Human
cugaaauacacugaauuacaggcau

SEQ ID NO: 410261 - RNA, 18 nt, Human
cugaguggcuggugucuu

SEQ ID NO: 410262 - RNA, 23 nt, Human
cugccucggccucccagugugcu

SEQ ID NO: 410263 - RNA, 18 nt, Human
cugccugguggaaaacaa

SEQ ID NO: 410264 - RNA, 26 nt, Human
cugguucucuucuuauaaaugaaucc

SEQ ID NO: 410265 - RNA, 22 nt, Human
cuuacagcagcacacucacuua

SEQ ID NO: 410266 - RNA, 18 nt, Human
cuuccuggcaaccgcuga

SEQ ID NO: 410267 - RNA, 19 nt, Human
gaaagcacuuuccuuucag

SEQ ID NO: 410268 - RNA, 25 nt, Human
gaaccugcagcuauaauucccuugg

SEQ ID NO: 410269 - RNA, 22 nt, Human
gaauccauaagacagugucccc

SEQ ID NO: 410270 - RNA, 21 nt, Human
gaauuacaggcauauucacug

SEQ ID NO: 410271 - RNA, 22 nt, Human
gagacaaugaacuucucaauca

SEQ ID NO: 410272 - RNA, 18 nt, Human
gauuacaggugugagcca

SEQ ID NO: 410273 - RNA, 21 nt, Human
gauuacaggugugagccacca

SEQ ID NO: 410274 - RNA, 22 nt, Human
gauuacaggugugagccaccac

SEQ ID NO: 410275 - RNA, 19 nt, Human
gcaaaucuccccaagugua

SEQ ID NO: 410276 - RNA, 18 nt, Human
gcaaucaaucgcaacggc

SEQ ID NO: 410277 - RNA, 21 nt, Human
gcucgcggcgcgccggaggac

SEQ ID NO: 410278 - RNA, 18 nt, Human
ggacgggcuguccgccgc

SEQ ID NO: 410279 - RNA, 20 nt, Human
ggcuaugccuggguguggau

SEQ ID NO: 410280 - RNA, 21 nt, Human
gggcggccaaggaaguggacg

SEQ ID NO: 410281 - RNA, 21 nt, Human
gugcugggauuacagguguga

SEQ ID NO: 410282 - RNA, 19 nt, Human
uaaaacacauuaccaaauc

SEQ ID NO: 410283 - RNA, 21 nt, Human
uaaaaccagagcccagguuuc

SEQ ID NO: 410284 - RNA, 19 nt, Human
uaacuucacaaaaagagcu

SEQ ID NO: 410285 - RNA, 21 nt, Human
uaacuuggccugauaaaagcu

SEQ ID NO: 410286 - RNA, 21 nt, Human
uaaguucucaaaacacugcca

SEQ ID NO: 410287 - RNA, 20 nt, Human
uacaaaaagaccaaaaaaau

SEQ ID NO: 410288 - RNA, 22 nt, Human
uacaacaagccagcaacaaaca

SEQ ID NO: 410289 - RNA, 23 nt, Human
uacaacaagccagcaacaaacac

SEQ ID NO: 410290 - RNA, 23 nt, Human
uacaggcauauucacugaaacaa

SEQ ID NO: 410291 - RNA, 23 nt, Human
uacaggugugagccaccacgccc

SEQ ID NO: 410292 - RNA, 26 nt, Human
uaccaagaaacuaacauuuacacuuu

SEQ ID NO: 410293 - RNA, 23 nt, Human
uaccugaaaauuggggcgugugg

SEQ ID NO: 410294 - RNA, 18 nt, Human
uacuucaauauucucaag

SEQ ID NO: 410295 - RNA, 22 nt, Human
uauuaaggcaacaucagaaagc

SEQ ID NO: 410296 - RNA, 22 nt, Human
ucaaauggaauuccaagaccag

SEQ ID NO: 410297 - RNA, 18 nt, Human
ucaagguaagcaagaaaa

SEQ ID NO: 410298 - RNA, 19 nt, Human
ucaagguauaacacacaaa

SEQ ID NO: 410299 - RNA, 21 nt, Human
ucacaaacgagacaaugaacu

SEQ ID NO: 410300 - RNA, 23 nt, Human
ucagccuuuaacuuggccugaua

SEQ ID NO: 410301 - RNA, 23 nt, Human
ucccagugugcugggauuacagg

SEQ ID NO: 410302 - RNA, 24 nt, Human
ucccagugugcugggauuacaggu

SEQ ID NO: 410303 - RNA, 26 nt, Human
ucccagugugcugggauuacaggugu

SEQ ID NO: 410304 - RNA, 24 nt, Human
uccccaaguguauauggcugguuc

SEQ ID NO: 410305 - RNA, 19 nt, Human
ucccccugccucggccucc

SEQ ID NO: 410306 - RNA, 22 nt, Human
ucccccugccucggccucccag

SEQ ID NO: 410307 - RNA, 21 nt, Human
ucccuuggcaaaagaauucaa

SEQ ID NO: 410308 - RNA, 22 nt, Human
ucccuuggcaaaagaauucaac

SEQ ID NO: 410309 - RNA, 20 nt, Human
uccgccgcgcugccugaggc

SEQ ID NO: 410310 - RNA, 21 nt, Human
uccgccgcgcugccugaggcg

SEQ ID NO: 410311 - RNA, 19 nt, Human
ucucacuuuguugcccagg

SEQ ID NO: 410312 - RNA, 22 nt, Human
ucucacuuuguugcccaggcug

SEQ ID NO: 410313 - RNA, 23 nt, Human
ucucacuuuguugcccaggcugg

SEQ ID NO: 410314 - RNA, 26 nt, Human
ucucacuuuguugcccaggcuggucu

SEQ ID NO: 410315 - RNA, 27 nt, Human
ucucacuuuguugcccaggcuggucuc

SEQ ID NO: 410316 - RNA, 24 nt, Human
ucucgaacuccugagcucaagcag

SEQ ID NO: 410317 - RNA, 21 nt, Human
ucuuacgccacgaccgucgcu

SEQ ID NO: 410318 - RNA, 20 nt, Human
ugaaacaacaaaaaaaauuc

SEQ ID NO: 410319 - RNA, 22 nt, Human
ugacuacuaggaaaaagguuuc

SEQ ID NO: 410320 - RNA, 24 nt, Human
ugcaauagcagaauauuaaggcaa

SEQ ID NO: 410321 - RNA, 19 nt, Human
ugccaaagcuuuccuucuc

SEQ ID NO: 410322 - RNA, 24 nt, Human
ugcccaggcuggucucgaacuccu

SEQ ID NO: 410323 - RNA, 28 nt, Human
ugcccaggcuggucucgaacuccugagc

SEQ ID NO: 410324 - RNA, 21 nt, Human
ugccucggccucccagugugc

SEQ ID NO: 410325 - RNA, 24 nt, Human
ugccucggccucccagugugcugg

SEQ ID NO: 410326 - RNA, 24 nt, Human
ugcugggauuacaggugugagcca

SEQ ID NO: 410327 - RNA, 18 nt, Human
uggaagaaucacaaacga

SEQ ID NO: 410328 - RNA, 24 nt, Human
uggagucucacuuuguugcccagg

SEQ ID NO: 410329 - RNA, 18 nt, Human
ugggauuacaggugugag

SEQ ID NO: 410330 - RNA, 19 nt, Human
ugggauuacaggugugagc

SEQ ID NO: 410331 - RNA, 22 nt, Human
ugggauuacaggugugagccac

SEQ ID NO: 410332 - RNA, 23 nt, Human
ugggauuacaggugugagccacc

SEQ ID NO: 410333 - RNA, 24 nt, Human
ugggauuacaggugugagccacca

SEQ ID NO: 410334 - RNA, 20 nt, Human
uguagcaagggcggccaagg

SEQ ID NO: 410335 - RNA, 21 nt, Human
ugugagccaccacgcccggcc

SEQ ID NO: 410336 - RNA, 21 nt, Human
uguggggaagaccaccaacag

SEQ ID NO: 410337 - RNA, 22 nt, Human
uguugcccaggcuggucucgaa

SEQ ID NO: 410338 - RNA, 20 nt, Human
uuaaaacugaaauccacaac

SEQ ID NO: 410339 - RNA, 24 nt, Human
uuaaucaucucaauucaauagcaa

SEQ ID NO: 410340 - RNA, 23 nt, Human
uuacaacaagccagcaacaaaca

SEQ ID NO: 410341 - RNA, 23 nt, Human
uuagccucaaaaaauauucagaa

SEQ ID NO: 410342 - RNA, 23 nt, Human
uucaacugcuuuccucaugauga

SEQ ID NO: 410343 - RNA, 26 nt, Human
uucaauucugauacucacaccacaac

SEQ ID NO: 410344 - RNA, 19 nt, Human
uucuggaaagcacuuuccu

SEQ ID NO: 410345 - RNA, 21 nt, Human
uugacuucgcaguuuaaucuu

SEQ ID NO: 410346 - RNA, 19 nt, Human
uuuccuggcacauacucuu

SEQ ID NO: 410347 - RNA, 25 nt, Human
uuucuuacagcagcacacucacuua

SEQ ID NO: 410348 - RNA, 24 nt, Human
uuuguugcccaggcuggucucgaa

SEQ ID NO: 410349 - RNA, 22 nt, Human
aaaaaaaacaaaaaauaaaugg

SEQ ID NO: 410350 - RNA, 19 nt, Human
aaaaauaaaacccaguauc

SEQ ID NO: 410351 - RNA, 19 nt, Human
aaaaauaaauggagaaagc

SEQ ID NO: 410352 - RNA, 19 nt, Human
aaaaccaacuggaaauguc

SEQ ID NO: 410353 - RNA, 23 nt, Human
aaaauaaauggagaaagcaacau

SEQ ID NO: 410354 - RNA, 20 nt, Human
aaacagagcuaaucuuucaa

SEQ ID NO: 410355 - RNA, 24 nt, Human
aaagugcugggauuacaggcguga

SEQ ID NO: 410356 - RNA, 21 nt, Human
aaaugcuagaauaggaaagcc

SEQ ID NO: 410357 - RNA, 22 nt, Human
aaauuacaaauugcuuccacua

SEQ ID NO: 410358 - RNA, 21 nt, Human
aacuuaguauuucaaaacuuc

SEQ ID NO: 410359 - RNA, 24 nt, Human
aaguagcugggauuacaggcacau

SEQ ID NO: 410360 - RNA, 25 nt, Human
aaguagcugggauuacaggcacaua

SEQ ID NO: 410361 - RNA, 19 nt, Human
aagugcugggauuacaggc

SEQ ID NO: 410362 - RNA, 19 nt, Human
aagugcugggauuacaggc

SEQ ID NO: 410363 - RNA, 26 nt, Human
aagugcugggauuacaggcgugagcc

SEQ ID NO: 410364 - RNA, 21 nt, Human
aauaggaaagccuccaaacau

SEQ ID NO: 410365 - RNA, 24 nt, Human
acaaauugcuuccacuaaaaauua

SEQ ID NO: 410366 - RNA, 20 nt, Human
acccaggcuggagugcagug

SEQ ID NO: 410367 - RNA, 18 nt, Human
acgagguuucgccacguu

SEQ ID NO: 410368 - RNA, 20 nt, Human
acgagguuucgccacguugg

SEQ ID NO: 410369 - RNA, 24 nt, Human
acgagguuucgccacguuggucag

SEQ ID NO: 410370 - RNA, 19 nt, Human
agcaagaggagugcgcgag

SEQ ID NO: 410371 - RNA, 21 nt, Human
agccaccacgcccagccuaaa

SEQ ID NO: 410372 - RNA, 24 nt, Human
agcggagacugaaggaccuggagc

SEQ ID NO: 410373 - RNA, 20 nt, Human
aggcacauaccaccauaucc

SEQ ID NO: 410374 - RNA, 25 nt, Human
aggcuggagugcaguggcgcaaucu

SEQ ID NO: 410375 - RNA, 21 nt, Human
agggaaccugggaaaacagcc

SEQ ID NO: 410376 - RNA, 20 nt, Human
agugcaguggcgcaaucucg

SEQ ID NO: 410377 - RNA, 24 nt, Human
agugcaguggcgcaaucucggcuc

SEQ ID NO: 410378 - RNA, 18 nt, Human
agugcugggauuacaggc

SEQ ID NO: 410379 - RNA, 22 nt, Human
aucuucuuuggcaacuuuauua

SEQ ID NO: 410380 - RNA, 22 nt, Human
auuaccauuguuauucucaacu

SEQ ID NO: 410381 - RNA, 23 nt, Human
caaaaaauaaauggagaaagcaa

SEQ ID NO: 410382 - RNA, 28 nt, Human
caaaagguacacucugaagccggggccc

SEQ ID NO: 410383 - RNA, 24 nt, Human
caaagugcugggauuacaggcgug

SEQ ID NO: 410384 - RNA, 25 nt, Human
caacuuuaccaacaaaaauauuaua

SEQ ID NO: 410385 - RNA, 26 nt, Human
caacuuuauuaacaccaugggacaac

SEQ ID NO: 410386 - RNA, 20 nt, Human
caagaggagugcgcgaggua

SEQ ID NO: 410387 - RNA, 22 nt, Human
caagcgagucuccugccucagc

SEQ ID NO: 410388 - RNA, 22 nt, Human
cacaauaaaguuaaaugaaaua

SEQ ID NO: 410389 - RNA, 24 nt, Human
caccauauccagcuaauuuuugua

SEQ ID NO: 410390 - RNA, 18 nt, Human
cacugcaaccucugccuc

SEQ ID NO: 410391 - RNA, 21 nt, Human
cacugcaaccucugccuccca

SEQ ID NO: 410392 - RNA, 21 nt, Human
cagcaaaaauucaaaaaggca

SEQ ID NO: 410393 - RNA, 24 nt, Human
cauaccaccauauccagcuaauuu

SEQ ID NO: 410394 - RNA, 22 nt, Human
cauggaauaagccuauuuuuga

SEQ ID NO: 410395 - RNA, 20 nt, Human
ccaaagugcugggauuacag

SEQ ID NO: 410396 - RNA, 22 nt, Human
ccaaagugcugggauuacaggc

SEQ ID NO: 410397 - RNA, 22 nt, Human
ccaaagugcugggauuacaggc

SEQ ID NO: 410398 - RNA, 24 nt, Human
ccaaagugcugggauuacaggcgu

SEQ ID NO: 410399 - RNA, 22 nt, Human
ccaacuggaaaugucugguugu

SEQ ID NO: 410400 - RNA, 23 nt, Human
ccaaguagcugggauuacaggca

SEQ ID NO: 410401 - RNA, 21 nt, Human
ccaauucuaaauauuacuaac

SEQ ID NO: 410402 - RNA, 22 nt, Human
ccacgcccagccuaaacuugua

SEQ ID NO: 410403 - RNA, 19 nt, Human
ccacguuggucaggcuggu

SEQ ID NO: 410404 - RNA, 21 nt, Human
ccacguuggucaggcuggucu

SEQ ID NO: 410405 - RNA, 23 nt, Human
cccaaguagcugggauuacaggc

SEQ ID NO: 410406 - RNA, 24 nt, Human
cccaaguagcugggauuacaggca

SEQ ID NO: 410407 - RNA, 23 nt, Human
cccagguucaagcgagucucccc

SEQ ID NO: 410408 - RNA, 23 nt, Human
cccagguucaagcgagucuccug

SEQ ID NO: 410409 - RNA, 23 nt, Human
ccuacggugagacgagcggagac

SEQ ID NO: 410410 - RNA, 21 nt, Human
ccucccagguucaagcgaguc

SEQ ID NO: 410411 - RNA, 24 nt, Human
ccucccagguucaagcgagucucc

SEQ ID NO: 410412 - RNA, 23 nt, Human
ccugccucagccucccaaguagc

SEQ ID NO: 410413 - RNA, 24 nt, Human
ccugccucagccucccaaguagcu

SEQ ID NO: 410414 - RNA, 24 nt, Human
cgagguuucgccacguuggucagg

SEQ ID NO: 410415 - RNA, 23 nt, Human
cgauauuaacaagaaauuuaaac

SEQ ID NO: 410416 - RNA, 22 nt, Human
cuaaaaauuaucacuccaaacu

SEQ ID NO: 410417 - RNA, 24 nt, Human
cucacugcaaccucugccucccag

SEQ ID NO: 410418 - RNA, 24 nt, Human
cucacugcaaccucugccucccag

SEQ ID NO: 410419 - RNA, 24 nt, Human
cucagccucccaaguagcugggau

SEQ ID NO: 410420 - RNA, 22 nt, Human
cucuugaccucgugaucugccu

SEQ ID NO: 410421 - RNA, 23 nt, Human
cugcaaccucugccucccagguu

SEQ ID NO: 410422 - RNA, 24 nt, Human
cugcaaccucugccucccagguuc

SEQ ID NO: 410423 - RNA, 23 nt, Human
cuggagcaagaggagugcgcgag

SEQ ID NO: 410424 - RNA, 24 nt, Human
cuggagcaagaggagugcgcgagg

SEQ ID NO: 410425 - RNA, 26 nt, Human
cugugauuaaaaaaaaaccggggucc

SEQ ID NO: 410426 - RNA, 19 nt, Human
cuuacaaaaccaacuggaa

SEQ ID NO: 410427 - RNA, 21 nt, Human
cuugcucuguuacccaggcug

SEQ ID NO: 410428 - RNA, 24 nt, Human
cuugcucuguuacccaggcuggag

SEQ ID NO: 410429 - RNA, 21 nt, Human
cuuucaaaaaauaaaacccag

SEQ ID NO: 410430 - RNA, 18 nt, Human
cuuucuuucuuuuuuuga

SEQ ID NO: 410431 - RNA, 26 nt, Human
gaaucagcccuuacaaacagagcuaa

SEQ ID NO: 410432 - RNA, 22 nt, Human
gaccucgugaucugccuaccuc

SEQ ID NO: 410433 - RNA, 22 nt, Human
gaccucgugaucugccuaccuc

SEQ ID NO: 410434 - RNA, 24 nt, Human
gaccucgugaucugccuaccucgg

SEQ ID NO: 410435 - RNA, 20 nt, Human
gaccuggagcaagaggagug

SEQ ID NO: 410436 - RNA, 21 nt, Human
gacgcucauguccagaaguuu

SEQ ID NO: 410437 - RNA, 24 nt, Human
gauuacaggcacauaccaccauau

SEQ ID NO: 410438 - RNA, 18 nt, Human
gauuacaggcgugagcca

SEQ ID NO: 410439 - RNA, 21 nt, Human
gauuacaggcgugagccacca

SEQ ID NO: 410440 - RNA, 22 nt, Human
gauuacaggcgugagccaccac

SEQ ID NO: 410441 - RNA, 24 nt, Human
gccacguuggucaggcuggucuug

SEQ ID NO: 410442 - RNA, 24 nt, Human
gcgagucuccugccucagccuccc

SEQ ID NO: 410443 - RNA, 25 nt, Human
gcucuguuacccaggcuggagugca

SEQ ID NO: 410444 - RNA, 19 nt, Human
gcuggagugcaguggcgca

SEQ ID NO: 410445 - RNA, 21 nt, Human
ggaaagccuccaaacaugccu

SEQ ID NO: 410446 - RNA, 19 nt, Human
ggauuacaggcgugagcca

SEQ ID NO: 410447 - RNA, 18 nt, Human
guagcugggauuacaggc

SEQ ID NO: 410448 - RNA, 23 nt, Human
uaaagguuaaccagcaaaaauuc

SEQ ID NO: 410449 - RNA, 23 nt, Human
uaacaaaaacaaaaauugcuaaa

SEQ ID NO: 410450 - RNA, 18 nt, Human
uaacaccaugggacaacu

SEQ ID NO: 410451 - RNA, 21 nt, Human
uaacaccaugggacaacuaaa

SEQ ID NO: 410452 - RNA, 24 nt, Human
uaauuuuuguauuucuaguagaga

SEQ ID NO: 410453 - RNA, 21 nt, Human
uacaaacagagcuaaucuuuc

SEQ ID NO: 410454 - RNA, 24 nt, Human
uacaggcgugagccaccacgccca

SEQ ID NO: 410455 - RNA, 21 nt, Human
uacccaggcuggagugcagug

SEQ ID NO: 410456 - RNA, 24 nt, Human
uacccaggcuggagugcaguggcg

SEQ ID NO: 410457 - RNA, 24 nt, Human
uaccucggccucccaaagugcugg

SEQ ID NO: 410458 - RNA, 19 nt, Human
uacuaggcauguccauguu

SEQ ID NO: 410459 - RNA, 24 nt, Human
uaguagagacgagguuucgccacg

SEQ ID NO: 410460 - RNA, 22 nt, Human
uauaugcaaacaucuguaugca

SEQ ID NO: 410461 - RNA, 20 nt, Human
uauguaaaagccacaauaaa

SEQ ID NO: 410462 - RNA, 21 nt, Human
uauuucaaaacuucauuauaa

SEQ ID NO: 410463 - RNA, 20 nt, Human
uauuuucuuuagguguuuuu

SEQ ID NO: 410464 - RNA, 19 nt, Human
ucacugcaaccucugccuc

SEQ ID NO: 410465 - RNA, 24 nt, Human
ucacugcaaccucugccucccagg

SEQ ID NO: 410466 - RNA, 25 nt, Human
ucacugcaaccucugccucccaggu

SEQ ID NO: 410467 - RNA, 18 nt, Human
ucagccagaaugcgaauu

SEQ ID NO: 410468 - RNA, 18 nt, Human
ucagccucccaaguagcu

SEQ ID NO: 410469 - RNA, 18 nt, Human
ucaguaggcaaauuccaa

SEQ ID NO: 410470 - RNA, 22 nt, Human
uccacuaaaaauuaucacucca

SEQ ID NO: 410471 - RNA, 22 nt, Human
uccauggaauaagccuauuuuu

SEQ ID NO: 410472 - RNA, 24 nt, Human
ucccaaagugcugggauuacaggc

SEQ ID NO: 410473 - RNA, 24 nt, Human
ucccaaguagcugggauuacaggc

SEQ ID NO: 410474 - RNA, 21 nt, Human
ucccagguucaagcgagucuc

SEQ ID NO: 410475 - RNA, 24 nt, Human
ucccagguucaagcgagucuccug

SEQ ID NO: 410476 - RNA, 18 nt, Human
ucggccucccaaagugcu

SEQ ID NO: 410477 - RNA, 21 nt, Human
ucuaucagaccuacugugaag

SEQ ID NO: 410478 - RNA, 23 nt, Human
ucuaucagaccuacugugauuaa

SEQ ID NO: 410479 - RNA, 21 nt, Human
ucucaaaacuuacaaaaccaa

SEQ ID NO: 410480 - RNA, 26 nt, Human
ucuccugccucagccucccaaguagc

SEQ ID NO: 410481 - RNA, 21 nt, Human
ucugguugucaugcucaauuc

SEQ ID NO: 410482 - RNA, 24 nt, Human
ucuguuacccaggcuggagugcag

SEQ ID NO: 410483 - RNA, 23 nt, Human
ucuugcucuguuacccaggcugg

SEQ ID NO: 410484 - RNA, 24 nt, Human
ucuugcucuguuacccaggcugga

SEQ ID NO: 410485 - RNA, 24 nt, Human
ucuuucuuucuuuuuuugagaugg

SEQ ID NO: 410486 - RNA, 20 nt, Human
ugaauuguucauaauacauc

SEQ ID NO: 410487 - RNA, 22 nt, Human
ugagacgagcggagacugaagg

SEQ ID NO: 410488 - RNA, 22 nt, Human
ugagauggagucuugcucuguu

SEQ ID NO: 410489 - RNA, 24 nt, Human
ugaucugccuaccucggccuccca

SEQ ID NO: 410490 - RNA, 22 nt, Human
ugcaguggcgcaaucucggcuc

SEQ ID NO: 410491 - RNA, 23 nt, Human
ugcaguggcgcaaucucggcuca

SEQ ID NO: 410492 - RNA, 19 nt, Human
ugccuaauauaacaaaaac

SEQ ID NO: 410493 - RNA, 24 nt, Human
ugccucagccucccaaguagcugg

SEQ ID NO: 410494 - RNA, 23 nt, Human
ugcuagaauaggaaagccuccaa

SEQ ID NO: 410495 - RNA, 24 nt, Human
ugcucuguuacccaggcuggagug

SEQ ID NO: 410496 - RNA, 24 nt, Human
ugcugggauuacaggcgugagcca

SEQ ID NO: 410497 - RNA, 19 nt, Human
uggagaaagcaacaucugg

SEQ ID NO: 410498 - RNA, 23 nt, Human
uggagugcaguggcgcaaucucg

SEQ ID NO: 410499 - RNA, 24 nt, Human
uggagugcaguggcgcaaucucgg

SEQ ID NO: 410500 - RNA, 20 nt, Human
uggccggaagucuccucucc

SEQ ID NO: 410501 - RNA, 22 nt, Human
ugggaaaacagccugcagaaaa

SEQ ID NO: 410502 - RNA, 21 nt, Human
ugggauuacaggcacauacca

SEQ ID NO: 410503 - RNA, 22 nt, Human
ugggauuacaggcacauaccac

SEQ ID NO: 410504 - RNA, 24 nt, Human
ugggauuacaggcacauaccacca

SEQ ID NO: 410505 - RNA, 25 nt, Human
ugggauuacaggcacauaccaccau

SEQ ID NO: 410506 - RNA, 18 nt, Human
ugggauuacaggcgugag

SEQ ID NO: 410507 - RNA, 19 nt, Human
ugggauuacaggcgugagc

SEQ ID NO: 410508 - RNA, 22 nt, Human
ugggauuacaggcgugagccac

SEQ ID NO: 410509 - RNA, 23 nt, Human
ugggauuacaggcgugagccacc

SEQ ID NO: 410510 - RNA, 24 nt, Human
ugggauuacaggcgugagccacca

SEQ ID NO: 410511 - RNA, 24 nt, Human
uggucaggcuggucuugaucucuu

SEQ ID NO: 410512 - RNA, 21 nt, Human
uguuacccaggcuggagugca

SEQ ID NO: 410513 - RNA, 24 nt, Human
uugcucuguuacccaggcuggagu

SEQ ID NO: 410514 - RNA, 23 nt, Human
uugcugaauuguucauaauacau

SEQ ID NO: 410515 - RNA, 20 nt, Human
uuucacaucacaaguaauca

SEQ ID NO: 410516 - RNA, 21 nt, Human
uuucgccacguuggucaggcu

SEQ ID NO: 410517 - RNA, 24 nt, Human
uuucuaguagagacgagguuucgc

SEQ ID NO: 410518 - RNA, 24 nt, Human
uuuuugagauggagucuugcucug

SEQ ID NO: 410519 - RNA, 20 nt, Human
uuuuuguauuucuaguagag

SEQ ID NO: 410520 - RNA, 23 nt, Human
uuuuuguauuucuaguagagacg

SEQ ID NO: 410521 - RNA, 23 nt, Human
uuuuuuuuuuuuuuuuuacuagg

SEQ ID NO: 410522 - RNA, 23 nt, Human
uuuuuuuuuuuuuuuuuuacuag

SEQ ID NO: 410523 - RNA, 26 nt, Human
aaaaccucuuccgcucugaggcacuc

SEQ ID NO: 410524 - RNA, 22 nt, Human
aauuauuucccuuacccucccc

SEQ ID NO: 410525 - RNA, 24 nt, Human
acaccaaggccugugcugcccgac

SEQ ID NO: 410526 - RNA, 22 nt, Human
agccacacugguccguggcaac

SEQ ID NO: 410527 - RNA, 21 nt, Human
aggagcaacagggaagaaggc

SEQ ID NO: 410528 - RNA, 24 nt, Human
auggggaggcgcgauuugcagaga

SEQ ID NO: 410529 - RNA, 21 nt, Human
auguaugaucuccuuucgccu

SEQ ID NO: 410530 - RNA, 22 nt, Human
caaagagucacaucgacgccga

SEQ ID NO: 410531 - RNA, 22 nt, Human
cacacucccuuaaaaauagcuu

SEQ ID NO: 410532 - RNA, 23 nt, Human
cacauuuacccccucuuccugaa

SEQ ID NO: 410533 - RNA, 24 nt, Human
caccugucaggacaagguggagaa

SEQ ID NO: 410534 - RNA, 20 nt, Human
cacugguccguggcaacucc

SEQ ID NO: 410535 - RNA, 22 nt, Human
cagcaaucacacucccuuaaaa

SEQ ID NO: 410536 - RNA, 23 nt, Human
cauuccauacaauccacauuuac

SEQ ID NO: 410537 - RNA, 26 nt, Human
ccacuacccauccugggagccaccug

SEQ ID NO: 410538 - RNA, 21 nt, Human
cccaaagagucacaucgacgc

SEQ ID NO: 410539 - RNA, 22 nt, Human
ccccaaacgucugcugcucggc

SEQ ID NO: 410540 - RNA, 23 nt, Human
ccccaaagagucacaucgacgcc

SEQ ID NO: 410541 - RNA, 23 nt, Human
cccccgcuaaacccucuagcccc

SEQ ID NO: 410542 - RNA, 22 nt, Human
cccgcuaaacccucuagcccca

SEQ ID NO: 410543 - RNA, 23 nt, Human
cccguuggcaaugauccacccac

SEQ ID NO: 410544 - RNA, 26 nt, Human
cccucuagccccagucuuccuggccu

SEQ ID NO: 410545 - RNA, 22 nt, Human
cccuuaaaaauagcuucauuca

SEQ ID NO: 410546 - RNA, 23 nt, Human
ccguggcaacuccccuuuguucc

SEQ ID NO: 410547 - RNA, 19 nt, Human
ccuccccguccccguaaac

SEQ ID NO: 410548 - RNA, 23 nt, Human
ccuggccucaccuccaggcugac

SEQ ID NO: 410549 - RNA, 24 nt, Human
ccuguauucuacagagacaggagu

SEQ ID NO: 410550 - RNA, 25 nt, Human
ccuuccacuacccauccugggagcc

SEQ ID NO: 410551 - RNA, 23 nt, Human
cgauggaagggaaagcgaggagc

SEQ ID NO: 410552 - RNA, 25 nt, Human
cggcaucaccaaggguuucucugcc

SEQ ID NO: 410553 - RNA, 19 nt, Human
cuaagagcacccagaggcu

SEQ ID NO: 410554 - RNA, 20 nt, Human
cugaaggcggugcccuccuu

SEQ ID NO: 410555 - RNA, 21 nt, Human
cugcccgacccacgccacaga

SEQ ID NO: 410556 - RNA, 21 nt, Human
cuuccuggccucaccuccagg

SEQ ID NO: 410557 - RNA, 18 nt, Human
cuuuauucuggaaguagg

SEQ ID NO: 410558 - RNA, 18 nt, Human
cuuuccacagccacacug

SEQ ID NO: 410559 - RNA, 24 nt, Human
gaaagaacaacaugaucuugcaga

SEQ ID NO: 410560 - RNA, 18 nt, Human
gaaugaauuauuucccuu

SEQ ID NO: 410561 - RNA, 21 nt, Human
gagcacccagaggcuggggua

SEQ ID NO: 410562 - RNA, 21 nt, Human
gagcugcccaucggucacuua

SEQ ID NO: 410563 - RNA, 19 nt, Human
gcagagacuugcugguguc

SEQ ID NO: 410564 - RNA, 19 nt, Human
gcuuauagccgaagacgcc

SEQ ID NO: 410565 - RNA, 18 nt, Human
ggagccaccugucaccug

SEQ ID NO: 410566 - RNA, 21 nt, Human
ggcuggaucccguuggcaaug

SEQ ID NO: 410567 - RNA, 25 nt, Human
gggaaagcgaggagcaaccgguacc

SEQ ID NO: 410568 - RNA, 18 nt, Human
uaagagcacccagaggcu

SEQ ID NO: 410569 - RNA, 19 nt, Human
uaagagcacccagaggcug

SEQ ID NO: 410570 - RNA, 24 nt, Human
uagcaaggggcagcaaucacacuc

SEQ ID NO: 410571 - RNA, 18 nt, Human
uaggggauuucucagauc

SEQ ID NO: 410572 - RNA, 23 nt, Human
uauuucccuuacccucccccgcu

SEQ ID NO: 410573 - RNA, 22 nt, Human
ucaaaaagaugccccaaacguc

SEQ ID NO: 410574 - RNA, 23 nt, Human
ucaaagagacuuuacacacgaug

SEQ ID NO: 410575 - RNA, 24 nt, Human
uccacuucauaauccggauaccac

SEQ ID NO: 410576 - RNA, 23 nt, Human
uccauacaauccacauuuacccc

SEQ ID NO: 410577 - RNA, 25 nt, Human
uccauacaauccacauuuacccccu

SEQ ID NO: 410578 - RNA, 27 nt, Human
uccuugguaaucacuuuauucuggaag

SEQ ID NO: 410579 - RNA, 19 nt, Human
ucucugccgcaugcaggac

SEQ ID NO: 410580 - RNA, 25 nt, Human
ucucuuuuuccuuuaguuccugugc

SEQ ID NO: 410581 - RNA, 18 nt, Human
ucugauuuaggucaaaga

SEQ ID NO: 410582 - RNA, 22 nt, Human
ucugcuuauagccgaagacgcc

SEQ ID NO: 410583 - RNA, 24 nt, Human
ucuuccuggccucaccuccaggcu

SEQ ID NO: 410584 - RNA, 23 nt, Human
ucuugcuuacaggaaugaauuau

SEQ ID NO: 410585 - RNA, 21 nt, Human
ugacucgaucucuuuuuccuu

SEQ ID NO: 410586 - RNA, 22 nt, Human
ugauccacccaccaucuuccuu

SEQ ID NO: 410587 - RNA, 20 nt, Human
ugaucuccuuucgccucccc

SEQ ID NO: 410588 - RNA, 22 nt, Human
ugcugaguacugccguccugca

SEQ ID NO: 410589 - RNA, 20 nt, Human
ugggaagggggcuggauccc

SEQ ID NO: 410590 - RNA, 21 nt, Human
ugggagccaccugucaccugu

SEQ ID NO: 410591 - RNA, 21 nt, Human
ugguccguggcaacuccccuu

SEQ ID NO: 410592 - RNA, 21 nt, Human
uuccccgagagcaccucucca

SEQ ID NO: 410593 - RNA, 21 nt, Human
uucccuuacccucccccgcua

SEQ ID NO: 410594 - RNA, 25 nt, Human
uuccuugguaaucacuuuauucugg

SEQ ID NO: 410595 - RNA, 19 nt, Human
uuuccacagccacacuggu

SEQ ID NO: 410596 - RNA, 23 nt, Human
uuuugugggaagggggcuggauc

SEQ ID NO: 410597 - RNA, 19 nt, Human
agaaaagcaaacuggccaa

SEQ ID NO: 410598 - RNA, 24 nt, Human
agacuauaaaauaugugacuacaa

SEQ ID NO: 410599 - RNA, 23 nt, Human
agauauuagauaguccaauaacu

SEQ ID NO: 410600 - RNA, 22 nt, Human
auucauucaaagccgguuccca

SEQ ID NO: 410601 - RNA, 25 nt, Human
auuuauucauucaaagccgguuccc

SEQ ID NO: 410602 - RNA, 21 nt, Human
cacagugaugcaaaaacaaga

SEQ ID NO: 410603 - RNA, 24 nt, Human
cacccucccagcaggagucucacu

SEQ ID NO: 410604 - RNA, 22 nt, Human
cagcguauggcccgcggcgggc

SEQ ID NO: 410605 - RNA, 23 nt, Human
ccagcgccuuucacaccagcccc

SEQ ID NO: 410606 - RNA, 22 nt, Human
cccagcgccuuucacaccagcc

SEQ ID NO: 410607 - RNA, 23 nt, Human
ccucgguccgacucguccagcgu

SEQ ID NO: 410608 - RNA, 21 nt, Human
ccugcccgcccauuccugggc

SEQ ID NO: 410609 - RNA, 26 nt, Human
cgaaauaaauacauagauauuagaua

SEQ ID NO: 410610 - RNA, 21 nt, Human
cgccggccacguccuagccuc

SEQ ID NO: 410611 - RNA, 18 nt, Human
cgcgggacugggagcggc

SEQ ID NO: 410612 - RNA, 24 nt, Human
cgggcggugacggcgccggcucuu

SEQ ID NO: 410613 - RNA, 25 nt, Human
cuccacccucccagcaggagucuca

SEQ ID NO: 410614 - RNA, 18 nt, Human
cugagccacagccggaug

SEQ ID NO: 410615 - RNA, 19 nt, Human
cuucugcugcagggcugga

SEQ ID NO: 410616 - RNA, 20 nt, Human
gccggccacguccuagccuc

SEQ ID NO: 410617 - RNA, 25 nt, Human
gcgcacgggaaguucuucugcugca

SEQ ID NO: 410618 - RNA, 20 nt, Human
ggaugguagaaaagcaaacu

SEQ ID NO: 410619 - RNA, 19 nt, Human
ggcacagugaugcaaaaac

SEQ ID NO: 410620 - RNA, 24 nt, Human
ggccaagugauuuauuugcaaugg

SEQ ID NO: 410621 - RNA, 20 nt, Human
gggagcggcaaugcgggcgg

SEQ ID NO: 410622 - RNA, 18 nt, Human
gucgugccgagcgcggga

SEQ ID NO: 410623 - RNA, 22 nt, Human
uaaaauaugugacuacaaagaa

SEQ ID NO: 410624 - RNA, 22 nt, Human
uaaauacauagauauuagauag

SEQ ID NO: 410625 - RNA, 21 nt, Human
uccugggccuccacccuccca

SEQ ID NO: 410626 - RNA, 28 nt, Human
ugacuacaaagaaccagcgaaauaaaua

SEQ ID NO: 410627 - RNA, 19 nt, Human
ugggccuccacccucccag

SEQ ID NO: 410628 - RNA, 19 nt, Human
ugguagaaaagcaaacugg

SEQ ID NO: 410629 - RNA, 19 nt, Human
uuccugggccuccacccuc

SEQ ID NO: 410630 - RNA, 19 nt, Human
acaccccacaccccaggag

SEQ ID NO: 410631 - RNA, 22 nt, Human
acaggcguggucgucucaggcc

SEQ ID NO: 410632 - RNA, 24 nt, Human
accccacaccccaggagcuucagc

SEQ ID NO: 410633 - RNA, 25 nt, Human
accccacaccccaggagcuucagca

SEQ ID NO: 410634 - RNA, 20 nt, Human
aggcguggucgucucaggcc

SEQ ID NO: 410635 - RNA, 25 nt, Human
caccggugccaccugcaggcuuccu

SEQ ID NO: 410636 - RNA, 20 nt, Human
cacugggaaggcagcaggau

SEQ ID NO: 410637 - RNA, 21 nt, Human
cagaacugcagccagggccac

SEQ ID NO: 410638 - RNA, 18 nt, Human
cagcccacaccccacacc

SEQ ID NO: 410639 - RNA, 20 nt, Human
cagcccacaccccacacccc

SEQ ID NO: 410640 - RNA, 25 nt, Human
cagccccacugggaaggcagcagga

SEQ ID NO: 410641 - RNA, 19 nt, Human
caggagcuucagcaagguc

SEQ ID NO: 410642 - RNA, 23 nt, Human
caggagcuucagcaaggucucug

SEQ ID NO: 410643 - RNA, 19 nt, Human
caguggccaggcugccccc

SEQ ID NO: 410644 - RNA, 18 nt, Human
ccacgccacaccucucuu

SEQ ID NO: 410645 - RNA, 19 nt, Human
ccagcccacaccccacacc

SEQ ID NO: 410646 - RNA, 21 nt, Human
cccaaaaccuuuauugucccu

SEQ ID NO: 410647 - RNA, 22 nt, Human
cccacaccccacaccccaggag

SEQ ID NO: 410648 - RNA, 23 nt, Human
cccacaccccacaccccaggagc

SEQ ID NO: 410649 - RNA, 19 nt, Human
ccccagggccacgccacac

SEQ ID NO: 410650 - RNA, 25 nt, Human
ccccagggccacgccacaccucucu

SEQ ID NO: 410651 - RNA, 23 nt, Human
cucaggccucggagugccccggc

SEQ ID NO: 410652 - RNA, 22 nt, Human
cucggagugccccggcauggcc

SEQ ID NO: 410653 - RNA, 26 nt, Human
cucugcuugggaggaugcugcccaga

SEQ ID NO: 410654 - RNA, 23 nt, Human
cugcagccagggccaccggugcc

SEQ ID NO: 410655 - RNA, 24 nt, Human
cuuccagcccacaccccacacccc

SEQ ID NO: 410656 - RNA, 22 nt, Human
gacccaaaaccuuuauuguccc

SEQ ID NO: 410657 - RNA, 19 nt, Human
gcaguggccagugggguca

SEQ ID NO: 410658 - RNA, 19 nt, Human
ggauggcaguggccagugg

SEQ ID NO: 410659 - RNA, 22 nt, Human
ucagcaaggucucugcuuggga

SEQ ID NO: 410660 - RNA, 20 nt, Human
ugccccggcauggccucugu

SEQ ID NO: 410661 - RNA, 19 nt, Human
ugcuuccagcccacacccc

SEQ ID NO: 410662 - RNA, 18 nt, Human
uggacagccaagcgggcc

SEQ ID NO: 410663 - RNA, 19 nt, Human
uggccucuguucagcugcu

SEQ ID NO: 410664 - RNA, 22 nt, Human
ugggugccagugguugacacug

SEQ ID NO: 410665 - RNA, 23 nt, Human
uuggcugcugggugccagugguu

SEQ ID NO: 410666 - RNA, 24 nt, Human
uuuuucagaaagacccaaaaccuu

SEQ ID NO: 410667 - RNA, 23 nt, Human
uuuuuuuuuuuuuuuuuuuucag

SEQ ID NO: 410668 - RNA, 19 nt, Human
aaaaacaugucaucuccuu

SEQ ID NO: 410669 - RNA, 21 nt, Human
ccaguguugacagagagaggg

SEQ ID NO: 410670 - RNA, 24 nt, Human
ccgcgcuggcgcucgccccccucg

SEQ ID NO: 410671 - RNA, 23 nt, Human
cgccgcgcuggcgcucgcccccc

SEQ ID NO: 410672 - RNA, 20 nt, Human
cgcuggcgcucgccccccuc

SEQ ID NO: 410673 - RNA, 26 nt, Human
cuaaaaacaugucaucuccuucaccu

SEQ ID NO: 410674 - RNA, 24 nt, Human
cuccuucaccuaagagguaagaac

SEQ ID NO: 410675 - RNA, 21 nt, Human
gcgcuggcgcucgccccccuc

SEQ ID NO: 410676 - RNA, 22 nt, Human
uacaguaagcagaagaggucac

SEQ ID NO: 410677 - RNA, 23 nt, Human
uuccaguguugacagagagaggg

SEQ ID NO: 410678 - RNA, 21 nt, Human
uuuuuuuuuuucagaaaaggc

SEQ ID NO: 410679 - RNA, 22 nt, Human
uuuuuuuuuuuuuuuuuuucag

SEQ ID NO: 410680 - RNA, 22 nt, Human
agcggauggaaugcaggcccag

SEQ ID NO: 410681 - RNA, 21 nt, Human
aggcccagguugcuggguggu

SEQ ID NO: 410682 - RNA, 18 nt, Human
caaagcgccgggccugcc

SEQ ID NO: 410683 - RNA, 20 nt, Human
caaagcgccgggccugcccc

SEQ ID NO: 410684 - RNA, 22 nt, Human
cccagggagugggaugcaggau

SEQ ID NO: 410685 - RNA, 22 nt, Human
ccggacccugguuucccugagg

SEQ ID NO: 410686 - RNA, 21 nt, Human
gacccugguuucccugaggac

SEQ ID NO: 410687 - RNA, 19 nt, Human
gcaggcccagguugcuggg

SEQ ID NO: 410688 - RNA, 21 nt, Human
gcaggcccagguugcugggug

SEQ ID NO: 410689 - RNA, 19 nt, Human
ggggagcaaagcgccgggc

SEQ ID NO: 410690 - RNA, 20 nt, Human
gugggaugcaggaucagagu

SEQ ID NO: 410691 - RNA, 25 nt, Human
ugccagccgaugguccgcuggcacc

SEQ ID NO: 410692 - RNA, 20 nt, Human
ugcuggguggugcccucagc

SEQ ID NO: 410693 - RNA, 23 nt, Human
uggaaagaugcuuggggcugcag

SEQ ID NO: 410694 - RNA, 22 nt, Human
uggaaugcaggcccagguugcu

SEQ ID NO: 410695 - RNA, 21 nt, Human
uggcaggguugacggguggug

SEQ ID NO: 410696 - RNA, 18 nt, Human
uggccgcugggcucugcc

SEQ ID NO: 410697 - RNA, 24 nt, Human
ugggaugcaggaucagaguggaca

SEQ ID NO: 410698 - RNA, 26 nt, Human
aaaugcuggaggcagccucguuagcu

SEQ ID NO: 410699 - RNA, 23 nt, Human
aacagguuuguuugguucaggag

SEQ ID NO: 410700 - RNA, 22 nt, Human
acaccagcugcacagacaccac

SEQ ID NO: 410701 - RNA, 24 nt, Human
agaggaaaucaggaaaugcuggag

SEQ ID NO: 410702 - RNA, 19 nt, Human
agccagaaucggggacacc

SEQ ID NO: 410703 - RNA, 21 nt, Human
agggaggggacagcaggcggg

SEQ ID NO: 410704 - RNA, 19 nt, Human
caacaaaugggcuucuucc

SEQ ID NO: 410705 - RNA, 19 nt, Human
caagcagcacacaauucca

SEQ ID NO: 410706 - RNA, 19 nt, Human
cacacaauuccaagucagc

SEQ ID NO: 410707 - RNA, 23 nt, Human
cacagacaccaccuuaaaaugga

SEQ ID NO: 410708 - RNA, 18 nt, Human
cagcaagcagcacacaau

SEQ ID NO: 410709 - RNA, 23 nt, Human
ccagugagggaggugacgcuaaa

SEQ ID NO: 410710 - RNA, 20 nt, Human
cccgucaucaaucaugucug

SEQ ID NO: 410711 - RNA, 21 nt, Human
cuagcuaacagcaagcagcac

SEQ ID NO: 410712 - RNA, 23 nt, Human
cucccaaccaacagguuuguuug

SEQ ID NO: 410713 - RNA, 23 nt, Human
cugcacagacaccaccuuaaaau

SEQ ID NO: 410714 - RNA, 25 nt, Human
gaaaugcuggaggcagccucguuag

SEQ ID NO: 410715 - RNA, 28 nt, Human
gacauaggacagccagaaucggggacac

SEQ ID NO: 410716 - RNA, 24 nt, Human
gaggaaaucaggaaaugcuggagg

SEQ ID NO: 410717 - RNA, 21 nt, Human
gcuguguguguguaugaucag

SEQ ID NO: 410718 - RNA, 21 nt, Human
ggacaccagcugcacagacac

SEQ ID NO: 410719 - RNA, 22 nt, Human
ggcagccucguuagcuguguga

SEQ ID NO: 410720 - RNA, 23 nt, Human
gggaacccgucaucaaucauguc

SEQ ID NO: 410721 - RNA, 21 nt, Human
uaaaauggaaaucaaauuagg

SEQ ID NO: 410722 - RNA, 21 nt, Human
uaggacagccagaaucgggga

SEQ ID NO: 410723 - RNA, 18 nt, Human
ucagccucaacaaauggg

SEQ ID NO: 410724 - RNA, 24 nt, Human
ucagggaggggacagcaggcggga

SEQ ID NO: 410725 - RNA, 18 nt, Human
ugcacagacaccaccuua

SEQ ID NO: 410726 - RNA, 18 nt, Human
ugggcuguguguguguau

SEQ ID NO: 410727 - RNA, 21 nt, Human
ugucugggcagucucccaacc

SEQ ID NO: 410728 - RNA, 27 nt, Human
uuaaaauggaaaucaaauuagguucau

SEQ ID NO: 410729 - RNA, 25 nt, Human
uucacccugaucauaaaagagggac

SEQ ID NO: 410730 - RNA, 23 nt, Human
aaaaaugcaccauuuuauuacuu

SEQ ID NO: 410731 - RNA, 19 nt, Human
aaaaggaaaaaacccucac

SEQ ID NO: 410732 - RNA, 26 nt, Human
aaaaggggaacaaacguggggaacaa

SEQ ID NO: 410733 - RNA, 23 nt, Human
aaaaucagauuacaucuauaaaa

SEQ ID NO: 410734 - RNA, 20 nt, Human
aaacagaaaaggggaacaaa

SEQ ID NO: 410735 - RNA, 25 nt, Human
aaacagaaaaggggaacaaacgugg

SEQ ID NO: 410736 - RNA, 21 nt, Human
aaagaagccacccaccucaaa

SEQ ID NO: 410737 - RNA, 20 nt, Human
aagaagccacccaccucaaa

SEQ ID NO: 410738 - RNA, 19 nt, Human
aagacaucagaacucacag

SEQ ID NO: 410739 - RNA, 21 nt, Human
aaggagacaacacaaacucaa

SEQ ID NO: 410740 - RNA, 19 nt, Human
aaucauuugagauaacaga

SEQ ID NO: 410741 - RNA, 19 nt, Human
accaaauguuuuacaugca

SEQ ID NO: 410742 - RNA, 20 nt, Human
acuuguaccuaucacuucac

SEQ ID NO: 410743 - RNA, 18 nt, Human
agaaaaggggaacaaacg

SEQ ID NO: 410744 - RNA, 21 nt, Human
agaacacugagcuccgaaaga

SEQ ID NO: 410745 - RNA, 24 nt, Human
agaacacugagcuccgaaagauuc

SEQ ID NO: 410746 - RNA, 19 nt, Human
agaggaucaucaagggcau

SEQ ID NO: 410747 - RNA, 22 nt, Human
aggaaauaacuccuaucagaac

SEQ ID NO: 410748 - RNA, 22 nt, Human
auaauaacaaucuuccuagcaa

SEQ ID NO: 410749 - RNA, 21 nt, Human
aucaucaccagcgcaucauaa

SEQ ID NO: 410750 - RNA, 24 nt, Human
aucgcaaaaaggaaaaaacccuca

SEQ ID NO: 410751 - RNA, 21 nt, Human
auuacuucuagcucuugccca

SEQ ID NO: 410752 - RNA, 19 nt, Human
caaaagccauguuuuaaaa

SEQ ID NO: 410753 - RNA, 25 nt, Human
caaacacagaacgauuguaacacag

SEQ ID NO: 410754 - RNA, 21 nt, Human
caaagagcccugcgcagcccc

SEQ ID NO: 410755 - RNA, 19 nt, Human
caaagcaagaacacuacca

SEQ ID NO: 410756 - RNA, 23 nt, Human
caaagcaagaacacuaccagucc

SEQ ID NO: 410757 - RNA, 21 nt, Human
caacacaaacucaagucagua

SEQ ID NO: 410758 - RNA, 25 nt, Human
caaggcggcauccagaccuuccauc

SEQ ID NO: 410759 - RNA, 21 nt, Human
caaucagcacugcuaaaucgc

SEQ ID NO: 410760 - RNA, 24 nt, Human
cacaaagaggagauuuggggggcc

SEQ ID NO: 410761 - RNA, 23 nt, Human
cacaauaucacaagugaagaaua

SEQ ID NO: 410762 - RNA, 22 nt, Human
cacagauaccucaggguugucu

SEQ ID NO: 410763 - RNA, 22 nt, Human
cacauauucaccaucucuacuc

SEQ ID NO: 410764 - RNA, 19 nt, Human
caccagugguagaaaauug

SEQ ID NO: 410765 - RNA, 23 nt, Human
cacccaccucaaagagcccugcg

SEQ ID NO: 410766 - RNA, 19 nt, Human
cacccauagcgcucaauuc

SEQ ID NO: 410767 - RNA, 18 nt, Human
cacugcuaaaucgcaaaa

SEQ ID NO: 410768 - RNA, 20 nt, Human
cacuguacagaugggaaaau

SEQ ID NO: 410769 - RNA, 21 nt, Human
cagaagcugcuaaggaaggca

SEQ ID NO: 410770 - RNA, 21 nt, Human
cagcucauaaacucaugacuc

SEQ ID NO: 410771 - RNA, 23 nt, Human
cagugaacaaaggcagaggaagg

SEQ ID NO: 410772 - RNA, 25 nt, Human
cauaaacacuauuacuuguaccuau

SEQ ID NO: 410773 - RNA, 18 nt, Human
caugcacguuaacaccca

SEQ ID NO: 410774 - RNA, 20 nt, Human
caugcacguuaacacccaua

SEQ ID NO: 410775 - RNA, 27 nt, Human
cauuuuauuacuucuagcucuugccca

SEQ ID NO: 410776 - RNA, 22 nt, Human
ccaaaagaagccacccaccuca

SEQ ID NO: 410777 - RNA, 20 nt, Human
ccaaaucagcucauaaacuc

SEQ ID NO: 410778 - RNA, 28 nt, Human
cccaaggaaauaacuccuaucagaacac

SEQ ID NO: 410779 - RNA, 21 nt, Human
ccccaaggcggcauccagacc

SEQ ID NO: 410780 - RNA, 23 nt, Human
ccuggccuaaccuaaauccugac

SEQ ID NO: 410781 - RNA, 18 nt, Human
cgaaagauucucgucccc

SEQ ID NO: 410782 - RNA, 19 nt, Human
cgagacguucauaguacuu

SEQ ID NO: 410783 - RNA, 22 nt, Human
cgcaaaaaggaaaaaacccuca

SEQ ID NO: 410784 - RNA, 22 nt, Human
cggcauccagaccuuccauccu

SEQ ID NO: 410785 - RNA, 23 nt, Human
cucacagugaacaaaggcagagg

SEQ ID NO: 410786 - RNA, 22 nt, Human
cucaugcacguuaacacccaua

SEQ ID NO: 410787 - RNA, 19 nt, Human
cucuaaguuaaccuguuua

SEQ ID NO: 410788 - RNA, 25 nt, Human
cugacuccacugagaacuuuccuau

SEQ ID NO: 410789 - RNA, 20 nt, Human
cugcaaacugauccucaugc

SEQ ID NO: 410790 - RNA, 20 nt, Human
cugcucucaaacacucucuu

SEQ ID NO: 410791 - RNA, 18 nt, Human
gaaagauucucgucccca

SEQ ID NO: 410792 - RNA, 18 nt, Human
gaagaggacagaagcugc

SEQ ID NO: 410793 - RNA, 25 nt, Human
gaaucuguuucaaacuaaggcguga

SEQ ID NO: 410794 - RNA, 19 nt, Human
gacacacagccucgauucc

SEQ ID NO: 410795 - RNA, 22 nt, Human
gaggacagaagcugcuaaggaa

SEQ ID NO: 410796 - RNA, 23 nt, Human
gcaaaaaggaaaaaacccucaca

SEQ ID NO: 410797 - RNA, 23 nt, Human
gcacugcuaaaucgcaaaaagga

SEQ ID NO: 410798 - RNA, 27 nt, Human
gccaaucuccuaacuccccaaggcggc

SEQ ID NO: 410799 - RNA, 23 nt, Human
gcgcagccccagugacccaugag

SEQ ID NO: 410800 - RNA, 23 nt, Human
ggaaaaaacccucacauuaucaa

SEQ ID NO: 410801 - RNA, 21 nt, Human
gggauuggugcuaaaguuuca

SEQ ID NO: 410802 - RNA, 20 nt, Human
gggcaagggggauuggugcu

SEQ ID NO: 410803 - RNA, 18 nt, Human
gucacguuucaagaucac

SEQ ID NO: 410804 - RNA, 19 nt, Human
guggaacaaagaacacauu

SEQ ID NO: 410805 - RNA, 19 nt, Human
uaaaaugcagaaucuuuga

SEQ ID NO: 410806 - RNA, 21 nt, Human
uaaaaugcagaaucuuugagg

SEQ ID NO: 410807 - RNA, 20 nt, Human
uaagacaucagaacucacag

SEQ ID NO: 410808 - RNA, 24 nt, Human
uaaggagacaacacaaacucaagu

SEQ ID NO: 410809 - RNA, 21 nt, Human
uaaggguuuuuuuuuccugaa

SEQ ID NO: 410810 - RNA, 20 nt, Human
uaccacugucuaaaagucac

SEQ ID NO: 410811 - RNA, 18 nt, Human
uacugcuucgagacguuc

SEQ ID NO: 410812 - RNA, 19 nt, Human
uaucagaacacugagcucc

SEQ ID NO: 410813 - RNA, 21 nt, Human
uaucaucaccagcgcaucaua

SEQ ID NO: 410814 - RNA, 25 nt, Human
uauucugacaguuguuggacaaaua

SEQ ID NO: 410815 - RNA, 20 nt, Human
ucaaacagaaaaggggaaca

SEQ ID NO: 410816 - RNA, 18 nt, Human
ucaagaucacuggcaacu

SEQ ID NO: 410817 - RNA, 20 nt, Human
ucaauggggggcaaggggga

SEQ ID NO: 410818 - RNA, 22 nt, Human
ucaauggggggcaagggggauu

SEQ ID NO: 410819 - RNA, 22 nt, Human
ucaccuauuuaucucuugguua

SEQ ID NO: 410820 - RNA, 19 nt, Human
ucagccaauauuuuaacau

SEQ ID NO: 410821 - RNA, 18 nt, Human
ucaucaaaguauucacuc

SEQ ID NO: 410822 - RNA, 22 nt, Human
ucaugcacguuaacacccauag

SEQ ID NO: 410823 - RNA, 21 nt, Human
ucauugucaccuauuuaucuc

SEQ ID NO: 410824 - RNA, 19 nt, Human
uccaaagcaagaacacuac

SEQ ID NO: 410825 - RNA, 22 nt, Human
uccacacacagccuguugugug

SEQ ID NO: 410826 - RNA, 21 nt, Human
uccauccuccuaucgacugcu

SEQ ID NO: 410827 - RNA, 26 nt, Human
uccccaaggcggcauccagaccuucc

SEQ ID NO: 410828 - RNA, 21 nt, Human
uccuuuuguacuugcugcugc

SEQ ID NO: 410829 - RNA, 21 nt, Human
ucuauauuuaccacugucuaa

SEQ ID NO: 410830 - RNA, 25 nt, Human
ucuccuggccuaaccuaaauccuga

SEQ ID NO: 410831 - RNA, 19 nt, Human
ucuucggauucaacacacu

SEQ ID NO: 410832 - RNA, 24 nt, Human
ucuuguggagcuaccagaacaggu

SEQ ID NO: 410833 - RNA, 21 nt, Human
ucuuugaggaaaaauauaggc

SEQ ID NO: 410834 - RNA, 24 nt, Human
ugcagaugggauuucacaaagagg

SEQ ID NO: 410835 - RNA, 19 nt, Human
ugcauuauuucacuaaucu

SEQ ID NO: 410836 - RNA, 21 nt, Human
ugcucauauucuccuauccau

SEQ ID NO: 410837 - RNA, 23 nt, Human
uggaaugugaccagaauucaugg

SEQ ID NO: 410838 - RNA, 21 nt, Human
ugggaaaaugcucacuuaaau

SEQ ID NO: 410839 - RNA, 23 nt, Human
ugggauuucacaaagaggagauu

SEQ ID NO: 410840 - RNA, 22 nt, Human
uggggaccaccguggagaaucu

SEQ ID NO: 410841 - RNA, 27 nt, Human
uguaacacagauaccucaggguugucu

SEQ ID NO: 410842 - RNA, 23 nt, Human
uguacaaaacacacucauucaac

SEQ ID NO: 410843 - RNA, 19 nt, Human
ugucuaaagacacagcuuc

SEQ ID NO: 410844 - RNA, 18 nt, Human
uguuggacaaauauaagg

SEQ ID NO: 410845 - RNA, 23 nt, Human
uguugugugcucagcacggcugg

SEQ ID NO: 410846 - RNA, 21 nt, Human
uguuucugucuugggcaaagg

SEQ ID NO: 410847 - RNA, 23 nt, Human
uuaaucuauuucuuccuuuccuc

SEQ ID NO: 410848 - RNA, 19 nt, Human
uuacaugcauuauuucacu

SEQ ID NO: 410849 - RNA, 26 nt, Human
uuagaaaaauacuuggaaccuaugcc

SEQ ID NO: 410850 - RNA, 20 nt, Human
uucucuuuuugugguggggu

SEQ ID NO: 410851 - RNA, 22 nt, Human
uuuccacacacagccuguugug

SEQ ID NO: 410852 - RNA, 26 nt, Human
accgccaccuuucucccaacccccaa

SEQ ID NO: 410853 - RNA, 23 nt, Human
cgaaagcaccgccaccuuucucc

SEQ ID NO: 410854 - RNA, 19 nt, Human
cuccuucuccuuuuuugcc

SEQ ID NO: 410855 - RNA, 24 nt, Human
gagcguguacucuggcuccuucuc

SEQ ID NO: 410856 - RNA, 23 nt, Human
ggagcguguacucuggcuccuuc

SEQ ID NO: 410857 - RNA, 22 nt, Human
uccccuggccauauuauucugg

SEQ ID NO: 410858 - RNA, 25 nt, Human
ucuggcuccuucuccuuuuuugccu

SEQ ID NO: 410859 - RNA, 24 nt, Human
uugacuauggguuuuguuuucuuu

SEQ ID NO: 410860 - RNA, 22 nt, Human
uucgcuggguccccucugccuu

SEQ ID NO: 410861 - RNA, 21 nt, Human
agaaagcaguaccaguaaacg

SEQ ID NO: 410862 - RNA, 18 nt, Human
auugaagggaaggaagag

SEQ ID NO: 410863 - RNA, 21 nt, Human
cacucagauaaucuauaccau

SEQ ID NO: 410864 - RNA, 20 nt, Human
cagaagcaaccuuggucugc

SEQ ID NO: 410865 - RNA, 19 nt, Human
cugcaguuacaaauccaua

SEQ ID NO: 410866 - RNA, 20 nt, Human
gaaggcaaauuauuacuaua

SEQ ID NO: 410867 - RNA, 19 nt, Human
gccagcuggguuuaaccca

SEQ ID NO: 410868 - RNA, 21 nt, Human
uaaaacaguauuuagaaagca

SEQ ID NO: 410869 - RNA, 24 nt, Human
uacaagagaaaacggguaaaacag

SEQ ID NO: 410870 - RNA, 25 nt, Human
uacaagagaaaacggguaaaacagu

SEQ ID NO: 410871 - RNA, 18 nt, Human
uagaaugugcaagaguca

SEQ ID NO: 410872 - RNA, 22 nt, Human
uagaaugugcaagagucaaagg

SEQ ID NO: 410873 - RNA, 21 nt, Human
ucagaagcaaccuuggucugc

SEQ ID NO: 410874 - RNA, 21 nt, Human
ucuuccuuguugagauccuga

SEQ ID NO: 410875 - RNA, 19 nt, Human
ugaagggaaggaagaggca

SEQ ID NO: 410876 - RNA, 24 nt, Human
ugacauacaacuguggaacacuca

SEQ ID NO: 410877 - RNA, 20 nt, Human
ugauuuguuccuggaagggu

SEQ ID NO: 410878 - RNA, 26 nt, Human
ugcuccuggcuuugguagagugaccu

SEQ ID NO: 410879 - RNA, 19 nt, Human
ugguagagugaccuucucu

SEQ ID NO: 410880 - RNA, 24 nt, Human
uguaaucaaauauauuacuaaugg

SEQ ID NO: 410881 - RNA, 22 nt, Human
ugugcaagagucaaaggauaaa

SEQ ID NO: 410882 - RNA, 21 nt, Human
uguuaauacagcuauggauua

SEQ ID NO: 410883 - RNA, 22 nt, Human
uuaaaugugcaugacuuaaaug

SEQ ID NO: 410884 - RNA, 24 nt, Human
uuccagagggugccagcuggguuu

SEQ ID NO: 410885 - RNA, 22 nt, Human
uuccuggaaggguggggcccug

SEQ ID NO: 410886 - RNA, 21 nt, Human
uuugguagagugaccuucucu

SEQ ID NO: 410887 - RNA, 24 nt, Human
uuuuaagauagucuucugcaguua

SEQ ID NO: 410888 - RNA, 22 nt, Human
aaaugaaaagauggaacccaaa

SEQ ID NO: 410889 - RNA, 20 nt, Human
aagagcauaaaacagagaaa

SEQ ID NO: 410890 - RNA, 19 nt, Human
acaagagcauaaaacagag

SEQ ID NO: 410891 - RNA, 20 nt, Human
acagagaaaacaagucuaca

SEQ ID NO: 410892 - RNA, 18 nt, Human
agaguaaaaugaugucaa

SEQ ID NO: 410893 - RNA, 22 nt, Human
auaaaacagagaaaacaagucu

SEQ ID NO: 410894 - RNA, 22 nt, Human
auaaaacagagaaaacaagucu

SEQ ID NO: 410895 - RNA, 25 nt, Human
caaguagauuacacaagagcauaaa

SEQ ID NO: 410896 - RNA, 20 nt, Human
cccacuauuccaagaguaaa

SEQ ID NO: 410897 - RNA, 23 nt, Human
cuuaaauccucggauuccauuuc

SEQ ID NO: 410898 - RNA, 23 nt, Human
uaaaacagagaaaacaagucuac

SEQ ID NO: 410899 - RNA, 20 nt, Human
uacacaagagcauaaaacag

SEQ ID NO: 410900 - RNA, 18 nt, Human
ugaaaagauggaacccaa

SEQ ID NO: 410901 - RNA, 19 nt, Human
aagaaacuuucuccuacca

SEQ ID NO: 410902 - RNA, 23 nt, Human
aagagugccuaaaaaggguggga

SEQ ID NO: 410903 - RNA, 23 nt, Human
aagcacucagaucaaugcuaaua

SEQ ID NO: 410904 - RNA, 24 nt, Human
aauaaaugguacaaaacuuuauaa

SEQ ID NO: 410905 - RNA, 21 nt, Human
aauuuagaacuaccacacaaa

SEQ ID NO: 410906 - RNA, 18 nt, Human
accaaugccuuacauuuc

SEQ ID NO: 410907 - RNA, 22 nt, Human
acccacugaggcauacuuagac

SEQ ID NO: 410908 - RNA, 25 nt, Human
agagaaaauguaagacguuaaagug

SEQ ID NO: 410909 - RNA, 20 nt, Human
aggcacuaaaacauuacauu

SEQ ID NO: 410910 - RNA, 19 nt, Human
augaauucaaauauggugg

SEQ ID NO: 410911 - RNA, 20 nt, Human
auuuagaacuaccacacaaa

SEQ ID NO: 410912 - RNA, 19 nt, Human
cacaguucagauaacaaaa

SEQ ID NO: 410913 - RNA, 22 nt, Human
caccaaugccuuacauuucuga

SEQ ID NO: 410914 - RNA, 18 nt, Human
caugucacuagcaaaugu

SEQ ID NO: 410915 - RNA, 20 nt, Human
ccacugaggcauacuuagac

SEQ ID NO: 410916 - RNA, 22 nt, Human
ccacugaggcauacuuagacau

SEQ ID NO: 410917 - RNA, 20 nt, Human
ccucuaauccuaaaaacaaa

SEQ ID NO: 410918 - RNA, 22 nt, Human
cgaggcgaggcugggaaugcac

SEQ ID NO: 410919 - RNA, 19 nt, Human
cuaauccuaaaaacaaaac

SEQ ID NO: 410920 - RNA, 25 nt, Human
cuaauccuaaaaacaaaacuacaca

SEQ ID NO: 410921 - RNA, 20 nt, Human
cuaccacacaaaggcauugg

SEQ ID NO: 410922 - RNA, 25 nt, Human
cuauauacaguauguacaugucacu

SEQ ID NO: 410923 - RNA, 21 nt, Human
cugcacucugggaccuccaag

SEQ ID NO: 410924 - RNA, 23 nt, Human
cugcacucugggaccuccaagag

SEQ ID NO: 410925 - RNA, 20 nt, Human
gaaacuuucuccuaccaaca

SEQ ID NO: 410926 - RNA, 21 nt, Human
gaaacuuucuccuaccaacag

SEQ ID NO: 410927 - RNA, 20 nt, Human
gaucaaugcuaauaauuacu

SEQ ID NO: 410928 - RNA, 20 nt, Human
gcaucauucucuuuuaggug

SEQ ID NO: 410929 - RNA, 21 nt, Human
gccucuaauccuaaaaacaaa

SEQ ID NO: 410930 - RNA, 21 nt, Human
gggauuuucucaacccacuga

SEQ ID NO: 410931 - RNA, 23 nt, Human
uaaaaacaaaacuacacagucaa

SEQ ID NO: 410932 - RNA, 27 nt, Human
uaaaaacaaaacuacacagucaagacu

SEQ ID NO: 410933 - RNA, 20 nt, Human
uaaaaagggugggacuaagc

SEQ ID NO: 410934 - RNA, 23 nt, Human
uaaaugcaaacaucaccaaugcc

SEQ ID NO: 410935 - RNA, 22 nt, Human
uaaaugguacaaaacuuuauaa

SEQ ID NO: 410936 - RNA, 19 nt, Human
uaagaaacuuucuccuacc

SEQ ID NO: 410937 - RNA, 23 nt, Human
uaccacacaaaggcauuggcugc

SEQ ID NO: 410938 - RNA, 24 nt, Human
uacuugaauagcuugguuaaauga

SEQ ID NO: 410939 - RNA, 19 nt, Human
uagagauuauuucuuuagg

SEQ ID NO: 410940 - RNA, 21 nt, Human
uaucucaaggagguccaacaa

SEQ ID NO: 410941 - RNA, 20 nt, Human
uauuacacagcaugauugac

SEQ ID NO: 410942 - RNA, 22 nt, Human
uauuucuuuaggggucuccaag

SEQ ID NO: 410943 - RNA, 25 nt, Human
uauuuuguuguuacuaucucaagga

SEQ ID NO: 410944 - RNA, 22 nt, Human
ucaacaguauguugaggcacaa

SEQ ID NO: 410945 - RNA, 18 nt, Human
ucccuacacccgaggcga

SEQ ID NO: 410946 - RNA, 19 nt, Human
ugaaaagaacuacaucaaa

SEQ ID NO: 410947 - RNA, 19 nt, Human
ugacacaagugaugauucc

SEQ ID NO: 410948 - RNA, 18 nt, Human
ugauaugcacagcaucau

SEQ ID NO: 410949 - RNA, 19 nt, Human
ugauaugcacagcaucauu

SEQ ID NO: 410950 - RNA, 21 nt, Human
ugcaaucccuacacccgaggc

SEQ ID NO: 410951 - RNA, 18 nt, Human
ugccuaaaaaggguggga

SEQ ID NO: 410952 - RNA, 20 nt, Human
uggaaguuuauuagauccac

SEQ ID NO: 410953 - RNA, 21 nt, Human
ugguggaccuguuuggaaguu

SEQ ID NO: 410954 - RNA, 24 nt, Human
uguaagacguuaaaguguugcuua

SEQ ID NO: 410955 - RNA, 19 nt, Human
ugucagagacagcguaaaa

SEQ ID NO: 410956 - RNA, 24 nt, Human
uuacaaagaugagauuucuacaua

SEQ ID NO: 410957 - RNA, 21 nt, Human
uuauuuuguuguuacuaucuc

SEQ ID NO: 410958 - RNA, 24 nt, Human
uugacacaagugaugauuccacag

SEQ ID NO: 410959 - RNA, 18 nt, Human
uuuauuagauccacauaa

SEQ ID NO: 410960 - RNA, 23 nt, Human
uuuucucaacccacugaggcaua

SEQ ID NO: 410961 - RNA, 20 nt, Human
aaaaguagagaaaaaagcau

SEQ ID NO: 410962 - RNA, 18 nt, Human
aaaaucuuuccaaacacc

SEQ ID NO: 410963 - RNA, 22 nt, Human
aaaguucaggcaagcauuaguu

SEQ ID NO: 410964 - RNA, 22 nt, Human
acuucaaaaguagagaaaaaag

SEQ ID NO: 410965 - RNA, 22 nt, Human
agagaaaaaagcauuuaaaaag

SEQ ID NO: 410966 - RNA, 21 nt, Human
ccaaacaccuguguugcucau

SEQ ID NO: 410967 - RNA, 18 nt, Human
cuagaaacauacaaagau

SEQ ID NO: 410968 - RNA, 22 nt, Human
gagaaaaaagcauuuaaaaagu

SEQ ID NO: 410969 - RNA, 20 nt, Human
uacuucaaaaguagagaaaa

SEQ ID NO: 410970 - RNA, 22 nt, Human
ucauucauuuaaccagguugga

SEQ ID NO: 410971 - RNA, 21 nt, Human
uccaaacaccuguguugcuca

SEQ ID NO: 410972 - RNA, 27 nt, Human
uucaaaaguagagaaaaaagcauuuaa

SEQ ID NO: 410973 - RNA, 27 nt, Human
uuuagcaauaacuuucauguucucuuc

SEQ ID NO: 410974 - RNA, 22 nt, Human
agguccacuggaggagaagucc

SEQ ID NO: 410975 - RNA, 19 nt, Human
aucccaucccucguccuuc

SEQ ID NO: 410976 - RNA, 18 nt, Human
gguccacuggaggagaag

SEQ ID NO: 410977 - RNA, 27 nt, Human
uaguaaaaauggaauacucuugguuac

SEQ ID NO: 410978 - RNA, 23 nt, Human
uccuucagguccacuggaggaga

SEQ ID NO: 410979 - RNA, 21 nt, Human
ucuugguuacaugaaauccca

SEQ ID NO: 410980 - RNA, 21 nt, Human
ugaggugaaaacagugcuuua

SEQ ID NO: 410981 - RNA, 21 nt, Human
ugccaagaaugaguggacuuc

SEQ ID NO: 410982 - RNA, 19 nt, Human
uggacuucuaacauagcau

SEQ ID NO: 410983 - RNA, 21 nt, Human
uuacaugaaaucccaucccuc

SEQ ID NO: 410984 - RNA, 24 nt, Human
acucccaaggccaaggacagaaau

SEQ ID NO: 410985 - RNA, 22 nt, Human
agagcagggaggcgguccugug

SEQ ID NO: 410986 - RNA, 21 nt, Human
aggccaaggacagaaauggga

SEQ ID NO: 410987 - RNA, 18 nt, Human
aggggcagcagggggacu

SEQ ID NO: 410988 - RNA, 20 nt, Human
agggggucagagcccacugg

SEQ ID NO: 410989 - RNA, 21 nt, Human
caagagcagggaggcgguccu

SEQ ID NO: 410990 - RNA, 22 nt, Human
caggcuccaguccagccgggag

SEQ ID NO: 410991 - RNA, 18 nt, Human
cgaggcgaggcugucugc

SEQ ID NO: 410992 - RNA, 18 nt, Human
cucauguccccaccccca

SEQ ID NO: 410993 - RNA, 21 nt, Human
cuccccugccagcccuacucc

SEQ ID NO: 410994 - RNA, 19 nt, Human
cugcccccucagcuacucc

SEQ ID NO: 410995 - RNA, 20 nt, Human
cugcccccuccccugccagc

SEQ ID NO: 410996 - RNA, 23 nt, Human
gagccaggcuccaguccagccgg

SEQ ID NO: 410997 - RNA, 24 nt, Human
gaugggaccggcagccagggauga

SEQ ID NO: 410998 - RNA, 19 nt, Human
gccaagagcagggaggcgg

SEQ ID NO: 410999 - RNA, 21 nt, Human
gcccccgggggagggggcagc

SEQ ID NO: 411000 - RNA, 20 nt, Human
ggacucauguccccaccccc

SEQ ID NO: 411001 - RNA, 18 nt, Human
gggagggggcagcggggc

SEQ ID NO: 411002 - RNA, 19 nt, Human
ggggagggggcagcggggc

SEQ ID NO: 411003 - RNA, 21 nt, Human
ggggagggggcagcggggcgg

SEQ ID NO: 411004 - RNA, 19 nt, Human
gggggagggggcagcgggg

SEQ ID NO: 411005 - RNA, 20 nt, Human
gggggagggggcagcggggc

SEQ ID NO: 411006 - RNA, 20 nt, Human
uacucccaaggccaaggaca

SEQ ID NO: 411007 - RNA, 25 nt, Human
uagucugcccccucagcuacuccca

SEQ ID NO: 411008 - RNA, 23 nt, Human
ugggauguggcaggggcagcagg

SEQ ID NO: 411009 - RNA, 25 nt, Human
ugggauguggcaggggcagcagggg

SEQ ID NO: 411010 - RNA, 23 nt, Human
ugucugcccccuccccugccagc

SEQ ID NO: 411011 - RNA, 27 nt, Human
ugucugcccccuccccugccagcccua

SEQ ID NO: 411012 - RNA, 21 nt, Human
uguggcaggggcagcaggggg

SEQ ID NO: 411013 - RNA, 22 nt, Human
aaagcagccacgcugggggugg

SEQ ID NO: 411014 - RNA, 22 nt, Human
caacgcuacuacuugaccucaa

SEQ ID NO: 411015 - RNA, 19 nt, Human
caguggaguggagaaccca

SEQ ID NO: 411016 - RNA, 23 nt, Human
caguggaguggagaacccaccac

SEQ ID NO: 411017 - RNA, 20 nt, Human
ccgcagcccaacgcuacuac

SEQ ID NO: 411018 - RNA, 20 nt, Human
cuccgcugccgcagcccaac

SEQ ID NO: 411019 - RNA, 21 nt, Human
ggaguggagaacccaccacac

SEQ ID NO: 411020 - RNA, 22 nt, Human
uccuccgcugccgcagcccaac

SEQ ID NO: 411021 - RNA, 22 nt, Human
uggaguggagaacccaccacac

SEQ ID NO: 411022 - RNA, 24 nt, Human
uggcaguggaguggagaacccacc

SEQ ID NO: 411023 - RNA, 18 nt, Human
uuaauugcaaagaacuug

SEQ ID NO: 411024 - RNA, 24 nt, Human
uuuuuuuuuuuuuuuuuuauacag

SEQ ID NO: 411025 - RNA, 19 nt, Human
aagacagggaauacuuuau

SEQ ID NO: 411026 - RNA, 21 nt, Human
aggcggucgauguaagagaac

SEQ ID NO: 411027 - RNA, 24 nt, Human
agggaauacuuuauucaaaaccca

SEQ ID NO: 411028 - RNA, 22 nt, Human
cugauggcggagacgaagagga

SEQ ID NO: 411029 - RNA, 25 nt, Human
gggaauacuuuauucaaaacccauc

SEQ ID NO: 411030 - RNA, 20 nt, Human
ggucuguaacaaagcauuca

SEQ ID NO: 411031 - RNA, 19 nt, Human
uaugagagcauacacugcu

SEQ ID NO: 411032 - RNA, 20 nt, Human
ucccuguaaaagcagcaccu

SEQ ID NO: 411033 - RNA, 21 nt, Human
ugccgagcugauggcggagac

SEQ ID NO: 411034 - RNA, 21 nt, Human
uuacagcgcgacucuuaggcg

SEQ ID NO: 411035 - RNA, 18 nt, Human
uuuuuuuuuuaagacagg

SEQ ID NO: 411036 - RNA, 23 nt, Human
uuuuuuuuuuuuuuaagacaggg

SEQ ID NO: 411037 - RNA, 21 nt, Human
agaggcaaaacugagcaccau

SEQ ID NO: 411038 - RNA, 18 nt, Human
agcggguggcgcuggccc

SEQ ID NO: 411039 - RNA, 20 nt, Human
auaguuuacaaguagaaaga

SEQ ID NO: 411040 - RNA, 18 nt, Human
cggcugcggagcgggugg

SEQ ID NO: 411041 - RNA, 18 nt, Human
gaauuucuaacagaggca

SEQ ID NO: 411042 - RNA, 21 nt, Human
gauaccuucacagacaauacu

SEQ ID NO: 411043 - RNA, 23 nt, Human
gugaauuucuaacagaggcaaaa

SEQ ID NO: 411044 - RNA, 23 nt, Human
uaacagaggcaaaacugagcacc

SEQ ID NO: 411045 - RNA, 21 nt, Human
uugaggacaacagaaguucac

SEQ ID NO: 411046 - RNA, 22 nt, Human
agagaguccauguauaugagaa

SEQ ID NO: 411047 - RNA, 20 nt, Human
agaugagggucccuguccug

SEQ ID NO: 411048 - RNA, 21 nt, Human
agaugagggucccuguccugg

SEQ ID NO: 411049 - RNA, 18 nt, Human
agggcuugggccaaccag

SEQ ID NO: 411050 - RNA, 22 nt, Human
aggggguggucagucaggcagg

SEQ ID NO: 411051 - RNA, 20 nt, Human
caggccaacagagaguccau

SEQ ID NO: 411052 - RNA, 26 nt, Human
uaugagaaagagaugcgugagguccc

SEQ ID NO: 411053 - RNA, 30 nt, Human
aaaaaaagaaaaccaugaugaccugcaggg

SEQ ID NO: 411054 - RNA, 18 nt, Human
aacaguuuucccgguuuc

SEQ ID NO: 411055 - RNA, 23 nt, Human
aagagagaagaaacaggcagagg

SEQ ID NO: 411056 - RNA, 21 nt, Human
aagccgagguggguggaucac

SEQ ID NO: 411057 - RNA, 24 nt, Human
aaucgcuuaaauccgggaggcaga

SEQ ID NO: 411058 - RNA, 24 nt, Human
acagagugagacucugucucagaa

SEQ ID NO: 411059 - RNA, 24 nt, Human
accaccaauaacuuagcaaaauaa

SEQ ID NO: 411060 - RNA, 19 nt, Human
accccaaagccucagggaa

SEQ ID NO: 411061 - RNA, 24 nt, Human
accccaucucuacuaaaaauacaa

SEQ ID NO: 411062 - RNA, 21 nt, Human
accccgcugucuggcuccaac

SEQ ID NO: 411063 - RNA, 24 nt, Human
acuccagccugggugacagaguga

SEQ ID NO: 411064 - RNA, 19 nt, Human
acugcaagagaaggcuaua

SEQ ID NO: 411065 - RNA, 18 nt, Human
acugcacuccagccuggg

SEQ ID NO: 411066 - RNA, 18 nt, Human
acugcacuccagccuggg

SEQ ID NO: 411067 - RNA, 18 nt, Human
acugcacuccagccuggg

SEQ ID NO: 411068 - RNA, 19 nt, Human
acugcacuccagccugggu

SEQ ID NO: 411069 - RNA, 21 nt, Human
acugcacuccagccuggguga

SEQ ID NO: 411070 - RNA, 22 nt, Human
acugcacuccagccugggugac

SEQ ID NO: 411071 - RNA, 24 nt, Human
acugcacuccagccugggugacag

SEQ ID NO: 411072 - RNA, 26 nt, Human
acugcacuccagccugggugacagag

SEQ ID NO: 411073 - RNA, 27 nt, Human
acuucauucccccaggacauucuccaa

SEQ ID NO: 411074 - RNA, 25 nt, Human
agaaaaaaaaaaacaauaaaaaaag

SEQ ID NO: 411075 - RNA, 26 nt, Human
agaaaaaaaaaaacaauaaaaaaaga

SEQ ID NO: 411076 - RNA, 18 nt, Human
agaaagacaaggccaccc

SEQ ID NO: 411077 - RNA, 23 nt, Human
agacaaggccacccagucaaagc

SEQ ID NO: 411078 - RNA, 21 nt, Human
agagaagaaacaggcagagga

SEQ ID NO: 411079 - RNA, 23 nt, Human
agagaagaaacaggcagaggaaa

SEQ ID NO: 411080 - RNA, 21 nt, Human
agagcaaguuugaaggagaaa

SEQ ID NO: 411081 - RNA, 23 nt, Human
agaggauuuugcugggacuggug

SEQ ID NO: 411082 - RNA, 22 nt, Human
agagguugcagugagcugagau

SEQ ID NO: 411083 - RNA, 23 nt, Human
agagguugcagugagcugagauc

SEQ ID NO: 411084 - RNA, 24 nt, Human
agagguugcagugagcugagaucg

SEQ ID NO: 411085 - RNA, 20 nt, Human
agcacuuugggaagccgagg

SEQ ID NO: 411086 - RNA, 24 nt, Human
agcacuuugggaagccgagguggg

SEQ ID NO: 411087 - RNA, 20 nt, Human
agccaggcgugguggcacac

SEQ ID NO: 411088 - RNA, 24 nt, Human
agccuagccaguauggugaaaccc

SEQ ID NO: 411089 - RNA, 24 nt, Human
agccugggugacagagugagacuc

SEQ ID NO: 411090 - RNA, 19 nt, Human
aggaagagcccuaaagaaa

SEQ ID NO: 411091 - RNA, 26 nt, Human
aggaggccagggcagcguagugggca

SEQ ID NO: 411092 - RNA, 24 nt, Human
aggcagaagaaucgcuuaaauccg

SEQ ID NO: 411093 - RNA, 23 nt, Human
aggcagaggcagcagcaauggca

SEQ ID NO: 411094 - RNA, 20 nt, Human
aggcagagguugcagugagc

SEQ ID NO: 411095 - RNA, 24 nt, Human
aggcagagguugcagugagcugag

SEQ ID NO: 411096 - RNA, 22 nt, Human
aggcagcagcaauggcagcaac

SEQ ID NO: 411097 - RNA, 19 nt, Human
aggcugcagauggagcaag

SEQ ID NO: 411098 - RNA, 22 nt, Human
agguggguggaucaccugaggu

SEQ ID NO: 411099 - RNA, 24 nt, Human
aguagcucaagccuauaauccuag

SEQ ID NO: 411100 - RNA, 20 nt, Human
aguauggugaaaccccaucu

SEQ ID NO: 411101 - RNA, 23 nt, Human
aucaugagauguaagcaaaacca

SEQ ID NO: 411102 - RNA, 24 nt, Human
aucgcgcuacugcacuccagccug

SEQ ID NO: 411103 - RNA, 20 nt, Human
auggugaaaccccaucucua

SEQ ID NO: 411104 - RNA, 24 nt, Human
caaaauaaauacaaagaggauuuu

SEQ ID NO: 411105 - RNA, 18 nt, Human
caacaggggcagugggcu

SEQ ID NO: 411106 - RNA, 19 nt, Human
cacaccuguagucccagcu

SEQ ID NO: 411107 - RNA, 22 nt, Human
caccaugggccgggcacaguag

SEQ ID NO: 411108 - RNA, 23 nt, Human
caccaugggccgggcacaguagc

SEQ ID NO: 411109 - RNA, 20 nt, Human
caccugaggucaggaauucg

SEQ ID NO: 411110 - RNA, 23 nt, Human
caccuguagucccagcuacucgg

SEQ ID NO: 411111 - RNA, 24 nt, Human
caccuguagucccagcuacucggg

SEQ ID NO: 411112 - RNA, 22 nt, Human
cacuccagccugggugacagag

SEQ ID NO: 411113 - RNA, 22 nt, Human
cacuccagccugggugacagag

SEQ ID NO: 411114 - RNA, 24 nt, Human
cacuccagccugggugacagagug

SEQ ID NO: 411115 - RNA, 31 nt, Human
cagaaaaaaaaaaacaauaaaaaaagaaaaa

SEQ ID NO: 411116 - RNA, 19 nt, Human
cagaaagacaaggccaccc

SEQ ID NO: 411117 - RNA, 19 nt, Human
cagaguccagucuacaaca

SEQ ID NO: 411118 - RNA, 20 nt, Human
cagcagagagaagucacaca

SEQ ID NO: 411119 - RNA, 21 nt, Human
cagcagcaauggcagcaacca

SEQ ID NO: 411120 - RNA, 24 nt, Human
cagcuacucgggaggcugaggcag

SEQ ID NO: 411121 - RNA, 22 nt, Human
cagcuuuuagggcugaggcaaa

SEQ ID NO: 411122 - RNA, 23 nt, Human
caggagcccgaaguccugggugc

SEQ ID NO: 411123 - RNA, 23 nt, Human
caggcgugguggcacaccuguag

SEQ ID NO: 411124 - RNA, 24 nt, Human
caguauggugaaaccccaucucua

SEQ ID NO: 411125 - RNA, 21 nt, Human
caugagauguaagcaaaacca

SEQ ID NO: 411126 - RNA, 20 nt, Human
ccaaagggcugcagugccuu

SEQ ID NO: 411127 - RNA, 21 nt, Human
ccacagacaacaauaucagaa

SEQ ID NO: 411128 - RNA, 21 nt, Human
ccagaaagacaaggccaccca

SEQ ID NO: 411129 - RNA, 18 nt, Human
ccagcuuagaguggccag

SEQ ID NO: 411130 - RNA, 20 nt, Human
ccaggacauucuccaaucac

SEQ ID NO: 411131 - RNA, 21 nt, Human
cccagaagaguccugauugcc

SEQ ID NO: 411132 - RNA, 24 nt, Human
ccccaaagccucagggaaaguaga

SEQ ID NO: 411133 - RNA, 20 nt, Human
cccuaaagaaaaacaccaug

SEQ ID NO: 411134 - RNA, 21 nt, Human
ccgguuucaagcaaauccaaa

SEQ ID NO: 411135 - RNA, 24 nt, Human
ccuagccaguauggugaaacccca

SEQ ID NO: 411136 - RNA, 20 nt, Human
ccuauaauccuagcacuuug

SEQ ID NO: 411137 - RNA, 22 nt, Human
ccugaggucaggaauucgagac

SEQ ID NO: 411138 - RNA, 22 nt, Human
ccugggugacagagugagacuc

SEQ ID NO: 411139 - RNA, 24 nt, Human
ccugggugcagccaggggacaguc

SEQ ID NO: 411140 - RNA, 21 nt, Human
ccuguagucccagcuacucgg

SEQ ID NO: 411141 - RNA, 24 nt, Human
cgagaccagccuagccaguauggu

SEQ ID NO: 411142 - RNA, 24 nt, Human
cgagguggguggaucaccugaggu

SEQ ID NO: 411143 - RNA, 26 nt, Human
cgagguggguggaucaccugagguca

SEQ ID NO: 411144 - RNA, 24 nt, Human
cgggaggcagagguugcagugagc

SEQ ID NO: 411145 - RNA, 21 nt, Human
cuaaagagacucugggaguuu

SEQ ID NO: 411146 - RNA, 21 nt, Human
cuacugcacuccagccugggu

SEQ ID NO: 411147 - RNA, 24 nt, Human
cuacugcacuccagccugggugac

SEQ ID NO: 411148 - RNA, 24 nt, Human
cucaagccuauaauccuagcacuu

SEQ ID NO: 411149 - RNA, 22 nt, Human
cucccaaucugaugaaggccug

SEQ ID NO: 411150 - RNA, 24 nt, Human
cuccccagaaagacaaggccaccc

SEQ ID NO: 411151 - RNA, 18 nt, Human
cucgugcuccgucugccc

SEQ ID NO: 411152 - RNA, 18 nt, Human
cucucaccaggccuugcc

SEQ ID NO: 411153 - RNA, 20 nt, Human
cugaauguacauucccuccu

SEQ ID NO: 411154 - RNA, 21 nt, Human
cugaccccaaagccucaggga

SEQ ID NO: 411155 - RNA, 20 nt, Human
cugggucaagaagacugagg

SEQ ID NO: 411156 - RNA, 24 nt, Human
gacacauuaauauaauuuauuaaa

SEQ ID NO: 411157 - RNA, 24 nt, Human
gacagagugagacucugucucaga

SEQ ID NO: 411158 - RNA, 18 nt, Human
gacucugucucagaaaaa

SEQ ID NO: 411159 - RNA, 20 nt, Human
gagaaagagagaagaaacag

SEQ ID NO: 411160 - RNA, 23 nt, Human
gagaucgcgcuacugcacuccag

SEQ ID NO: 411161 - RNA, 18 nt, Human
gaucaccugaggucagga

SEQ ID NO: 411162 - RNA, 24 nt, Human
gaucaccugaggucaggaauucga

SEQ ID NO: 411163 - RNA, 23 nt, Human
gcacuccagccugggugacagag

SEQ ID NO: 411164 - RNA, 21 nt, Human
gcagagcaaguuugaaggaga

SEQ ID NO: 411165 - RNA, 22 nt, Human
gccacagacaacaauaucagaa

SEQ ID NO: 411166 - RNA, 24 nt, Human
gccaguauggugaaaccccaucuc

SEQ ID NO: 411167 - RNA, 19 nt, Human
gcuacugcacuccagccug

SEQ ID NO: 411168 - RNA, 24 nt, Human
gcuacugcacuccagccuggguga

SEQ ID NO: 411169 - RNA, 19 nt, Human
ggagaaagagagaagaaac

SEQ ID NO: 411170 - RNA, 22 nt, Human
ggcagcagcaauggcagcaacc

SEQ ID NO: 411171 - RNA, 20 nt, Human
gggaagccgaggugggugga

SEQ ID NO: 411172 - RNA, 24 nt, Human
gggaggcugaggcagaagaaucgc

SEQ ID NO: 411173 - RNA, 21 nt, Human
gguggaucaccugaggucagg

SEQ ID NO: 411174 - RNA, 21 nt, Human
guccugauugcccucuuucuc

SEQ ID NO: 411175 - RNA, 24 nt, Human
gugacagagugagacucugucuca

SEQ ID NO: 411176 - RNA, 19 nt, Human
guggaacccagugaaaaca

SEQ ID NO: 411177 - RNA, 22 nt, Human
guggaaggaacuucauuccccc

SEQ ID NO: 411178 - RNA, 24 nt, Human
gugguggcacaccuguagucccag

SEQ ID NO: 411179 - RNA, 19 nt, Human
guugcagugagcugagauc

SEQ ID NO: 411180 - RNA, 24 nt, Human
uaaaaaaagaaaaccaugaugacc

SEQ ID NO: 411181 - RNA, 21 nt, Human
uaaaaauacaaaaaucagcca

SEQ ID NO: 411182 - RNA, 22 nt, Human
uacaaaugagggaacucccuga

SEQ ID NO: 411183 - RNA, 21 nt, Human
uacugcaagagaaggcuauag

SEQ ID NO: 411184 - RNA, 21 nt, Human
uacugcacuccagccugggug

SEQ ID NO: 411185 - RNA, 23 nt, Human
uacugcacuccagccugggugac

SEQ ID NO: 411186 - RNA, 24 nt, Human
uacugcacuccagccugggugaca

SEQ ID NO: 411187 - RNA, 25 nt, Human
uacugcacuccagccugggugacag

SEQ ID NO: 411188 - RNA, 26 nt, Human
uagaguggccaggggcuugggaaugg

SEQ ID NO: 411189 - RNA, 23 nt, Human
uagcaaaauaaauacaaagagga

SEQ ID NO: 411190 - RNA, 24 nt, Human
uagcacuuugggaagccgaggugg

SEQ ID NO: 411191 - RNA, 21 nt, Human
uaggcugcagauggagcaaag

SEQ ID NO: 411192 - RNA, 21 nt, Human
uaucuacuucucaaggcugua

SEQ ID NO: 411193 - RNA, 22 nt, Human
uauugcccuggcuccugcuugc

SEQ ID NO: 411194 - RNA, 22 nt, Human
ucaaagagacacauuaauauaa

SEQ ID NO: 411195 - RNA, 22 nt, Human
ucaagcaaauccaaauacugca

SEQ ID NO: 411196 - RNA, 19 nt, Human
ucaaucaugagauguaagc

SEQ ID NO: 411197 - RNA, 21 nt, Human
ucacuggcucucaccaggccu

SEQ ID NO: 411198 - RNA, 22 nt, Human
ucagaaagggaagaaacaugga

SEQ ID NO: 411199 - RNA, 18 nt, Human
ucagagccaggauaaaag

SEQ ID NO: 411200 - RNA, 21 nt, Human
ucagccaggcgugguggcaca

SEQ ID NO: 411201 - RNA, 21 nt, Human
ucagccaggcgugguggcaca

SEQ ID NO: 411202 - RNA, 23 nt, Human
uccacauuuguuuugaauuuuuc

SEQ ID NO: 411203 - RNA, 23 nt, Human
uccagccugggugacagagugag

SEQ ID NO: 411204 - RNA, 24 nt, Human
uccagccugggugacagagugaga

SEQ ID NO: 411205 - RNA, 24 nt, Human
ucccccaggacauucuccaaucac

SEQ ID NO: 411206 - RNA, 19 nt, Human
ucccgguuucaagcaaauc

SEQ ID NO: 411207 - RNA, 19 nt, Human
ucccuaaagagacucuggg

SEQ ID NO: 411208 - RNA, 21 nt, Human
ucccuaaagagacucugggag

SEQ ID NO: 411209 - RNA, 18 nt, Human
ucccuccuccccagaaag

SEQ ID NO: 411210 - RNA, 26 nt, Human
ucccugaauguacauucccuccuccc

SEQ ID NO: 411211 - RNA, 21 nt, Human
uccgcaaaaggcuacucccug

SEQ ID NO: 411212 - RNA, 23 nt, Human
uccgcaaaaggcuacucccugaa

SEQ ID NO: 411213 - RNA, 21 nt, Human
uccgggaggcagagguugcag

SEQ ID NO: 411214 - RNA, 19 nt, Human
uccuccccagaaagacaaa

SEQ ID NO: 411215 - RNA, 23 nt, Human
ucgcgcuacugcacuccagccug

SEQ ID NO: 411216 - RNA, 24 nt, Human
ucgggaggcugaggcagaagaauc

SEQ ID NO: 411217 - RNA, 22 nt, Human
ucuccaaacaacauauacucug

SEQ ID NO: 411218 - RNA, 23 nt, Human
ucuccagcuuuuagggcugaggc

SEQ ID NO: 411219 - RNA, 21 nt, Human
ucucuacuaaaaauacaaaaa

SEQ ID NO: 411220 - RNA, 19 nt, Human
ugaaaccccaucucuacua

SEQ ID NO: 411221 - RNA, 24 nt, Human
ugacauuaacaagccuaaugggaa

SEQ ID NO: 411222 - RNA, 23 nt, Human
ugagauguaagcaaaaccaccaa

SEQ ID NO: 411223 - RNA, 22 nt, Human
ugagcugagaucgcgcuacugc

SEQ ID NO: 411224 - RNA, 25 nt, Human
ugaggcagaagaaucgcuuaaaucc

SEQ ID NO: 411225 - RNA, 23 nt, Human
ugcagccaggggacagucaggaa

SEQ ID NO: 411226 - RNA, 21 nt, Human
ugccagguaaccccacuaucu

SEQ ID NO: 411227 - RNA, 19 nt, Human
ugcgugagccacauagagc

SEQ ID NO: 411228 - RNA, 19 nt, Human
uggacaucugugucuccag

SEQ ID NO: 411229 - RNA, 24 nt, Human
uggaucaccugaggucaggaauuc

SEQ ID NO: 411230 - RNA, 27 nt, Human
uggaucaccugaggucaggaauucgag

SEQ ID NO: 411231 - RNA, 20 nt, Human
uggcacaccuguagucccag

SEQ ID NO: 411232 - RNA, 23 nt, Human
ugggaagccgagguggguggauc

SEQ ID NO: 411233 - RNA, 24 nt, Human
ugggaagccgagguggguggauca

SEQ ID NO: 411234 - RNA, 19 nt, Human
ugggaauggugagacacag

SEQ ID NO: 411235 - RNA, 24 nt, Human
ugggccgggcacaguagcucaagc

SEQ ID NO: 411236 - RNA, 21 nt, Human
ugggugacagagugagacucu

SEQ ID NO: 411237 - RNA, 24 nt, Human
uggguggaucaccugaggucagga

SEQ ID NO: 411238 - RNA, 22 nt, Human
ugguggcacaccuguaguccca

SEQ ID NO: 411239 - RNA, 18 nt, Human
uguaagcaaaaccaccaa

SEQ ID NO: 411240 - RNA, 25 nt, Human
ugucuuccaaagggcugcagugccu

SEQ ID NO: 411241 - RNA, 24 nt, Human
uguggaaggaacuucauuccccca

SEQ ID NO: 411242 - RNA, 20 nt, Human
uguugcuaagaacugagcug

SEQ ID NO: 411243 - RNA, 21 nt, Human
uguuuugaauuuuucugauuc

SEQ ID NO: 411244 - RNA, 20 nt, Human
uuaaggauucuggcugcgug

SEQ ID NO: 411245 - RNA, 18 nt, Human
uugcagugagcugagauc

SEQ ID NO: 411246 - RNA, 19 nt, Human
uugcagugagcugagaucg

SEQ ID NO: 411247 - RNA, 20 nt, Human
uugcagugagcugagaucgc

SEQ ID NO: 411248 - RNA, 22 nt, Human
uugcagugagcugagaucgcgc

SEQ ID NO: 411249 - RNA, 18 nt, Human
uuugaaggagaaagagag

SEQ ID NO: 411250 - RNA, 26 nt, Human
uuuucaggcucugggucaagaagacu

SEQ ID NO: 411251 - RNA, 22 nt, Human
uuuuuuuuuuuucaaagagaca

SEQ ID NO: 411252 - RNA, 19 nt, Human
uuuuuuuuuuuuuuuucaa

SEQ ID NO: 411253 - RNA, 19 nt, Human
aaacaacaaugacuacugc

SEQ ID NO: 411254 - RNA, 26 nt, Human
acuccagauguucuucaucuccgucc

SEQ ID NO: 411255 - RNA, 19 nt, Human
acuggggcgcggggaggag

SEQ ID NO: 411256 - RNA, 22 nt, Human
agauguucuucaucuccguccu

SEQ ID NO: 411257 - RNA, 24 nt, Human
aggaggggggcacagcggcgcagg

SEQ ID NO: 411258 - RNA, 19 nt, Human
aggcgaacuccgaaaccag

SEQ ID NO: 411259 - RNA, 18 nt, Human
agugagaggucagccccg

SEQ ID NO: 411260 - RNA, 22 nt, Human
cagcggcgcaggcgaacuccga

SEQ ID NO: 411261 - RNA, 19 nt, Human
ccccaucaccuacccccuc

SEQ ID NO: 411262 - RNA, 22 nt, Human
cccgccguccgggcuccuccug

SEQ ID NO: 411263 - RNA, 24 nt, Human
ccgggcuccuccugccucggccug

SEQ ID NO: 411264 - RNA, 18 nt, Human
ccuacccgccguccgggc

SEQ ID NO: 411265 - RNA, 25 nt, Human
ccuccugccucggccugugccaggc

SEQ ID NO: 411266 - RNA, 22 nt, Human
ccugugccaggcuggggagagg

SEQ ID NO: 411267 - RNA, 22 nt, Human
cgacacaggagcaguuuuccgc

SEQ ID NO: 411268 - RNA, 22 nt, Human
cgccccagcuccucggagcccu

SEQ ID NO: 411269 - RNA, 22 nt, Human
cuccuagcccgccccagcuccc

SEQ ID NO: 411270 - RNA, 24 nt, Human
cuggagggacccugccagccucca

SEQ ID NO: 411271 - RNA, 22 nt, Human
cuuugcuggagggacccugcca

SEQ ID NO: 411272 - RNA, 20 nt, Human
gcgaacuccgaaaccagaug

SEQ ID NO: 411273 - RNA, 18 nt, Human
ggaggaggggggcacagc

SEQ ID NO: 411274 - RNA, 19 nt, Human
ggcuccuccugccucggcc

SEQ ID NO: 411275 - RNA, 22 nt, Human
gggaugugggugccuggcccuc

SEQ ID NO: 411276 - RNA, 21 nt, Human
gggcgcggggaggaggggggc

SEQ ID NO: 411277 - RNA, 19 nt, Human
ggggcgcggggaggagggg

SEQ ID NO: 411278 - RNA, 23 nt, Human
gggggcacagcggcgcaggcggc

SEQ ID NO: 411279 - RNA, 25 nt, Human
uacccccuccuccuagcccgcccca

SEQ ID NO: 411280 - RNA, 19 nt, Human
uacugcucccggacaggaa

SEQ ID NO: 411281 - RNA, 19 nt, Human
ucaccuacccccuccuccu

SEQ ID NO: 411282 - RNA, 22 nt, Human
uccaacuccagauguucuucau

SEQ ID NO: 411283 - RNA, 21 nt, Human
uccacugaauccuuuccccca

SEQ ID NO: 411284 - RNA, 19 nt, Human
uccgcgggagcuuugcugg

SEQ ID NO: 411285 - RNA, 23 nt, Human
uccgcgggagcuuugcuggaggg

SEQ ID NO: 411286 - RNA, 23 nt, Human
uccuacccgccguccgggcuccu

SEQ ID NO: 411287 - RNA, 18 nt, Human
uccuccuagcccgcccca

SEQ ID NO: 411288 - RNA, 19 nt, Human
ugacuggggcgcggggagg

SEQ ID NO: 411289 - RNA, 20 nt, Human
uggggaugugggugccuggc

SEQ ID NO: 411290 - RNA, 20 nt, Human
agaagaaagacggcucagag

SEQ ID NO: 411291 - RNA, 23 nt, Human
aggagaagaaagacggcucagag

SEQ ID NO: 411292 - RNA, 18 nt, Human
gaaauagggaggagaaga

SEQ ID NO: 411293 - RNA, 24 nt, Human
gaggagaagaaagacggcucagag

SEQ ID NO: 411294 - RNA, 19 nt, Human
gauccucucuuuggaagcu

SEQ ID NO: 411295 - RNA, 21 nt, Human
gcucagagggagggaggauuc

SEQ ID NO: 411296 - RNA, 22 nt, Human
ggaggagaagaaagacggcuca

SEQ ID NO: 411297 - RNA, 28 nt, Human
gggaggagaagaaagacggcucagaggg

SEQ ID NO: 411298 - RNA, 21 nt, Human
ugcuggcaaggguaugguauu

SEQ ID NO: 411299 - RNA, 18 nt, Human
uuuuuuuuuuuuuuuuug

SEQ ID NO: 411300 - RNA, 20 nt, Human
uuuuuuuuuuuuuuuuugcu

SEQ ID NO: 411301 - RNA, 22 nt, Human
uuuuuuuuuuuuuuuuugcugg

SEQ ID NO: 411302 - RNA, 23 nt, Human
uuuuuuuuuuuuuuuuuugcugg

SEQ ID NO: 411303 - RNA, 20 nt, Human
cacguacacacucuuccccg

SEQ ID NO: 411304 - RNA, 21 nt, Human
ccugaaagcucuguggggaga

SEQ ID NO: 411305 - RNA, 23 nt, Human
cucuuccccgccgucgcuagagu

SEQ ID NO: 411306 - RNA, 24 nt, Human
gaagcccccaccacguacacacuc

SEQ ID NO: 411307 - RNA, 23 nt, Human
gccaccgaggaagcccccaccac

SEQ ID NO: 411308 - RNA, 23 nt, Human
ggcagggaggggaaggggaggcc

SEQ ID NO: 411309 - RNA, 23 nt, Human
ggcuaggcuggcacgccgccgcg

SEQ ID NO: 411310 - RNA, 24 nt, Human
gggcagggaggggaaggggaggcc

SEQ ID NO: 411311 - RNA, 25 nt, Human
gggcagggaggggaaggggaggcca

SEQ ID NO: 411312 - RNA, 19 nt, Human
ggggaaggggaggccacug

SEQ ID NO: 411313 - RNA, 18 nt, Human
uccuggggcagggagggg

SEQ ID NO: 411314 - RNA, 19 nt, Human
ucuguggggagaagggcuc

SEQ ID NO: 411315 - RNA, 23 nt, Human
ucuguggggagaagggcucccug

SEQ ID NO: 411316 - RNA, 20 nt, Human
uuaaguccuggggcagggag

SEQ ID NO: 411317 - RNA, 25 nt, Human
aaaaaaaaaaacacaaacaacuguu

SEQ ID NO: 411318 - RNA, 19 nt, Human
aaaaaaaaaacacaaacaa

SEQ ID NO: 411319 - RNA, 24 nt, Human
aaaaaaaaaacacaaacaacuguu

SEQ ID NO: 411320 - RNA, 21 nt, Human
aaaaaacacaaacaacuguuc

SEQ ID NO: 411321 - RNA, 19 nt, Human
aaaagugcgccccacgccc

SEQ ID NO: 411322 - RNA, 19 nt, Human
aaacaacuguucagacuuc

SEQ ID NO: 411323 - RNA, 22 nt, Human
aaaguccauagugaugccuuuc

SEQ ID NO: 411324 - RNA, 23 nt, Human
aaguuuuuuuuuguuuuuccccu

SEQ ID NO: 411325 - RNA, 21 nt, Human
aaugcagaggugugaggaugg

SEQ ID NO: 411326 - RNA, 31 nt, Human
acauucuucgucaaaaaaaaaaaaaaaaaaa

SEQ ID NO: 411327 - RNA, 23 nt, Human
accggaucuauuugcauuuuacc

SEQ ID NO: 411328 - RNA, 23 nt, Human
acgcccuguuucuuugaauuugg

SEQ ID NO: 411329 - RNA, 18 nt, Human
cagaaaaauauacaaaga

SEQ ID NO: 411330 - RNA, 21 nt, Human
cagcccgccagcuucccccgc

SEQ ID NO: 411331 - RNA, 23 nt, Human
caguggcugauuggcacgaccuc

SEQ ID NO: 411332 - RNA, 20 nt, Human
ccccucagaggaaggaugaa

SEQ ID NO: 411333 - RNA, 22 nt, Human
ccccucagaggaaggaugaaaa

SEQ ID NO: 411334 - RNA, 22 nt, Human
ccucagcccgccagcuuccccc

SEQ ID NO: 411335 - RNA, 21 nt, Human
cgcguggccucgcgggcccgg

SEQ ID NO: 411336 - RNA, 22 nt, Human
cggcgacgcguggccucgcggg

SEQ ID NO: 411337 - RNA, 18 nt, Human
cgucugggaaucacuguc

SEQ ID NO: 411338 - RNA, 18 nt, Human
gaaggaugaaaaaaagaa

SEQ ID NO: 411339 - RNA, 22 nt, Human
gaggaaggaugaaaaaaagaau

SEQ ID NO: 411340 - RNA, 18 nt, Human
gaggagaagagcggggcg

SEQ ID NO: 411341 - RNA, 22 nt, Human
gauuuugcucuucuaauuucca

SEQ ID NO: 411342 - RNA, 25 nt, Human
gcuccagagucucuagacuguccau

SEQ ID NO: 411343 - RNA, 20 nt, Human
gcugaggggguggggggcuc

SEQ ID NO: 411344 - RNA, 21 nt, Human
gucaaaaaaaaaaaaaaaaaa

SEQ ID NO: 411345 - RNA, 21 nt, Human
uaggucuccggcccugcugag

SEQ ID NO: 411346 - RNA, 23 nt, Human
uaucagaaugcagaggugugagg

SEQ ID NO: 411347 - RNA, 22 nt, Human
ucagacuucuaucagaaugcag

SEQ ID NO: 411348 - RNA, 21 nt, Human
ucagcccgccagcuucccccg

SEQ ID NO: 411349 - RNA, 21 nt, Human
uccagagucucuagacugucc

SEQ ID NO: 411350 - RNA, 26 nt, Human
uccucugauuguuaccauuuuaaaau

SEQ ID NO: 411351 - RNA, 23 nt, Human
ucuucgucaaaaaaaaaaaaaaa

SEQ ID NO: 411352 - RNA, 22 nt, Human
ugacaucuaggucuccggcccu

SEQ ID NO: 411353 - RNA, 18 nt, Human
ugacuaugguuuugcagg

SEQ ID NO: 411354 - RNA, 19 nt, Human
ugcagaaaaauauacaaag

SEQ ID NO: 411355 - RNA, 24 nt, Human
uucucuggaaacaaugacaucuag

SEQ ID NO: 411356 - RNA, 25 nt, Human
uuguuuuuccccucagaggaaggau

SEQ ID NO: 411357 - RNA, 23 nt, Human
uuuugcucuucuaauuuccaaga

SEQ ID NO: 411358 - RNA, 23 nt, Human
uuuuuauuuuuaguuauccagcu

SEQ ID NO: 411359 - RNA, 20 nt, Human
uuuuuuguuuuuccccucag

SEQ ID NO: 411360 - RNA, 21 nt, Human
aaaaacacaucuuucaacuga

SEQ ID NO: 411361 - RNA, 20 nt, Human
aacuuuuaaaaacugugauc

SEQ ID NO: 411362 - RNA, 24 nt, Human
aagaaggaagcacucucagccuug

SEQ ID NO: 411363 - RNA, 23 nt, Human
aagugaccccauauggugaagau

SEQ ID NO: 411364 - RNA, 18 nt, Human
aauaaggccucugaaacu

SEQ ID NO: 411365 - RNA, 18 nt, Human
aaugaagacugcugcgaa

SEQ ID NO: 411366 - RNA, 20 nt, Human
acaaaaacacaucuuucaac

SEQ ID NO: 411367 - RNA, 21 nt, Human
acaacagucuucaguucuucu

SEQ ID NO: 411368 - RNA, 24 nt, Human
acauguaaaaaguguaaaaucaca

SEQ ID NO: 411369 - RNA, 21 nt, Human
acucgaaugcaaaaaaacugg

SEQ ID NO: 411370 - RNA, 23 nt, Human
acucucagccuugugaagaagaa

SEQ ID NO: 411371 - RNA, 24 nt, Human
aggguuccuggggcuaugaucaug

SEQ ID NO: 411372 - RNA, 25 nt, Human
auggagcuugaugucacauuuggcu

SEQ ID NO: 411373 - RNA, 22 nt, Human
caaaaacacaucuuucaacuga

SEQ ID NO: 411374 - RNA, 20 nt, Human
cacauguaaaaaguguaaaa

SEQ ID NO: 411375 - RNA, 20 nt, Human
caggagacacuuaguaugac

SEQ ID NO: 411376 - RNA, 18 nt, Human
cagguuccggauuuuccu

SEQ ID NO: 411377 - RNA, 23 nt, Human
caugaagagcaccacaaugaaga

SEQ ID NO: 411378 - RNA, 24 nt, Human
ccccuuuaucccaugaguuggaag

SEQ ID NO: 411379 - RNA, 18 nt, Human
cgaaugcaaaaaaacugc

SEQ ID NO: 411380 - RNA, 22 nt, Human
cuauacagcccaaaaacaugaa

SEQ ID NO: 411381 - RNA, 19 nt, Human
cucacacauagaaaaacga

SEQ ID NO: 411382 - RNA, 23 nt, Human
cugaagaaagauauucaccauaa

SEQ ID NO: 411383 - RNA, 18 nt, Human
cuuugcacuguuuucaag

SEQ ID NO: 411384 - RNA, 18 nt, Human
gaagagcaccacaaugaa

SEQ ID NO: 411385 - RNA, 22 nt, Human
gccucugaaacuguccaaucuc

SEQ ID NO: 411386 - RNA, 22 nt, Human
gggaugugaaauauuuuacaga

SEQ ID NO: 411387 - RNA, 19 nt, Human
ggggagcacacaacagucu

SEQ ID NO: 411388 - RNA, 22 nt, Human
guguuuaaaacucgaaugcaaa

SEQ ID NO: 411389 - RNA, 21 nt, Human
uaaagagcuauacagcccaaa

SEQ ID NO: 411390 - RNA, 24 nt, Human
uaaagagcuauacagcccaaaaac

SEQ ID NO: 411391 - RNA, 21 nt, Human
uaacaaaagacauuuccagaa

SEQ ID NO: 411392 - RNA, 19 nt, Human
uaagugaccccauauggug

SEQ ID NO: 411393 - RNA, 21 nt, Human
uacagcccaaaaacaugaaag

SEQ ID NO: 411394 - RNA, 18 nt, Human
uaugacaaaauaaggccu

SEQ ID NO: 411395 - RNA, 21 nt, Human
ucaccgggaucuguucaaagg

SEQ ID NO: 411396 - RNA, 24 nt, Human
ucuucaguucuucugcggugcucu

SEQ ID NO: 411397 - RNA, 23 nt, Human
ugaguuggaagaauuuauuuuca

SEQ ID NO: 411398 - RNA, 21 nt, Human
ugcucuacucacaaaaacaca

SEQ ID NO: 411399 - RNA, 22 nt, Human
ugcuuuugucuccucuucugga

SEQ ID NO: 411400 - RNA, 24 nt, Human
uggauuuccgaaacaauggagcuu

SEQ ID NO: 411401 - RNA, 22 nt, Human
ugugaagaagaaccucaagggu

SEQ ID NO: 411402 - RNA, 23 nt, Human
ugugaagaagaaccucaaggguu

SEQ ID NO: 411403 - RNA, 24 nt, Human
ugugaagaagaaccucaaggguuc

SEQ ID NO: 411404 - RNA, 25 nt, Human
ugugaagaagaaccucaaggguucc

SEQ ID NO: 411405 - RNA, 23 nt, Human
uuaaauuuuuaaaacuuuuaaaa

SEQ ID NO: 411406 - RNA, 20 nt, Human
uucaagggaguccccuuuau

SEQ ID NO: 411407 - RNA, 18 nt, Human
uuuacagaaaaauaagag

SEQ ID NO: 411408 - RNA, 21 nt, Human
uuuuacagaaaaauaagagug

SEQ ID NO: 411409 - RNA, 27 nt, Human
aaggaccgauggaaauggauccaaagc

SEQ ID NO: 411410 - RNA, 21 nt, Human
aaaaagaaacaaguagguaaa

SEQ ID NO: 411411 - RNA, 22 nt, Human
aaaauggcuuuuaagaccuuug

SEQ ID NO: 411412 - RNA, 20 nt, Human
aaaccaaccaucuucagccc

SEQ ID NO: 411413 - RNA, 19 nt, Human
aagugcuggcagcugcagu

SEQ ID NO: 411414 - RNA, 24 nt, Human
acaccccuguaucacaacaugggc

SEQ ID NO: 411415 - RNA, 18 nt, Human
acagggaaagcucucucc

SEQ ID NO: 411416 - RNA, 20 nt, Human
acaguagaccaguuucagcu

SEQ ID NO: 411417 - RNA, 24 nt, Human
accaguuucagcuuacauuuaaga

SEQ ID NO: 411418 - RNA, 19 nt, Human
agaaaaaaaaagcuccaaa

SEQ ID NO: 411419 - RNA, 18 nt, Human
agacaaaaagaaacaagu

SEQ ID NO: 411420 - RNA, 23 nt, Human
agaccaguuucagcuuacauuua

SEQ ID NO: 411421 - RNA, 20 nt, Human
agaggcuaagguggacccaa

SEQ ID NO: 411422 - RNA, 19 nt, Human
agccuccaaaaaaccuuga

SEQ ID NO: 411423 - RNA, 20 nt, Human
aggaaggggguucaaagggc

SEQ ID NO: 411424 - RNA, 21 nt, Human
aggaauuaaagugcuaagaac

SEQ ID NO: 411425 - RNA, 18 nt, Human
aggggguucaaagggcuu

SEQ ID NO: 411426 - RNA, 23 nt, Human
caaaaagccuccaaaaaaccuug

SEQ ID NO: 411427 - RNA, 24 nt, Human
caacaaacaccccuguaucacaac

SEQ ID NO: 411428 - RNA, 21 nt, Human
caaggcugacagcagcaaccc

SEQ ID NO: 411429 - RNA, 18 nt, Human
cagcccacacuuucuggc

SEQ ID NO: 411430 - RNA, 22 nt, Human
caggaagagagacaaaaagaaa

SEQ ID NO: 411431 - RNA, 22 nt, Human
caggagauugccugcugaccac

SEQ ID NO: 411432 - RNA, 20 nt, Human
cagugggcaaggcugacagc

SEQ ID NO: 411433 - RNA, 18 nt, Human
caguuacuacugcuuuaa

SEQ ID NO: 411434 - RNA, 25 nt, Human
ccauccaacaaacaccccuguauca

SEQ ID NO: 411435 - RNA, 25 nt, Human
ccauccaacaaacaccccuguauca

SEQ ID NO: 411436 - RNA, 18 nt, Human
ccauuuuuaccugacccg

SEQ ID NO: 411437 - RNA, 18 nt, Human
cccaggagauugccugcu

SEQ ID NO: 411438 - RNA, 20 nt, Human
cccuagagacacaguagacc

SEQ ID NO: 411439 - RNA, 23 nt, Human
ccuccaaaaaaccuugaaaagcu

SEQ ID NO: 411440 - RNA, 21 nt, Human
cgaaacuaucgaaaaggccuc

SEQ ID NO: 411441 - RNA, 18 nt, Human
cucauggcaguauuugga

SEQ ID NO: 411442 - RNA, 24 nt, Human
cugaccaagugcuggcagcugcag

SEQ ID NO: 411443 - RNA, 25 nt, Human
cugcagugaggggccaauaucccua

SEQ ID NO: 411444 - RNA, 25 nt, Human
cuuacauuuaagauggcagaagggg

SEQ ID NO: 411445 - RNA, 23 nt, Human
gaaaccaaccaucuucagcccac

SEQ ID NO: 411446 - RNA, 18 nt, Human
gagcagcuagcuuccuuu

SEQ ID NO: 411447 - RNA, 20 nt, Human
gaucacaggguugggcaucu

SEQ ID NO: 411448 - RNA, 19 nt, Human
gcccacacuuucuggcugu

SEQ ID NO: 411449 - RNA, 24 nt, Human
gcuuuuaugaacaccugcccucua

SEQ ID NO: 411450 - RNA, 19 nt, Human
gggcaaggcugacagcagc

SEQ ID NO: 411451 - RNA, 18 nt, Human
guagagcagcuagcuucc

SEQ ID NO: 411452 - RNA, 27 nt, Human
uaagauggcagaaggggagaacaacga

SEQ ID NO: 411453 - RNA, 26 nt, Human
uaagcaaagaugaccguaaucaacgg

SEQ ID NO: 411454 - RNA, 22 nt, Human
uaagguggacccacacuccauu

SEQ ID NO: 411455 - RNA, 22 nt, Human
uacaaaaagccuccaaaaaacc

SEQ ID NO: 411456 - RNA, 21 nt, Human
uacaugaagagaaaaccaucc

SEQ ID NO: 411457 - RNA, 22 nt, Human
uagaccaguuucagcuuacauu

SEQ ID NO: 411458 - RNA, 27 nt, Human
ucacaauuuacaaaaagccuccaaaaa

SEQ ID NO: 411459 - RNA, 19 nt, Human
ucagcccacacuuucuggc

SEQ ID NO: 411460 - RNA, 20 nt, Human
ucagcccacacuuucuggcu

SEQ ID NO: 411461 - RNA, 19 nt, Human
ucccaaaguuuuggccaca

SEQ ID NO: 411462 - RNA, 22 nt, Human
ucgaaaaggccucaauuuucaa

SEQ ID NO: 411463 - RNA, 19 nt, Human
ucgaaaaggcgccuaaaaa

SEQ ID NO: 411464 - RNA, 19 nt, Human
ucugacacaggacagugaa

SEQ ID NO: 411465 - RNA, 19 nt, Human
ucuuuuggcuuaacccuag

SEQ ID NO: 411466 - RNA, 20 nt, Human
ucuuuuggcuuaacccuaga

SEQ ID NO: 411467 - RNA, 25 nt, Human
ugaacaccugcccucuaguuucuca

SEQ ID NO: 411468 - RNA, 23 nt, Human
ugaagagaaaaccauccucccau

SEQ ID NO: 411469 - RNA, 20 nt, Human
ugaagucacagugggcaagg

SEQ ID NO: 411470 - RNA, 23 nt, Human
ugacaggaauuaaagugcuaaga

SEQ ID NO: 411471 - RNA, 18 nt, Human
ugaguguccaggaagaga

SEQ ID NO: 411472 - RNA, 24 nt, Human
ugcaauaggcuccaaaaauggcuu

SEQ ID NO: 411473 - RNA, 23 nt, Human
uggaagaaaaaaaaagcuccaaa

SEQ ID NO: 411474 - RNA, 24 nt, Human
uggaagaaaaaaaaagcuccaaau

SEQ ID NO: 411475 - RNA, 23 nt, Human
uggcaguauuuggagguucugau

SEQ ID NO: 411476 - RNA, 21 nt, Human
ugggcaaggcugacagcagca

SEQ ID NO: 411477 - RNA, 19 nt, Human
uuaugaacaccugcccucu

SEQ ID NO: 411478 - RNA, 19 nt, Human
uucaaggagaucugagaaa

SEQ ID NO: 411479 - RNA, 20 nt, Human
uucacuuuaaggaauuaagg

SEQ ID NO: 411480 - RNA, 26 nt, Human
uuuaagaaccuccuuuucccaaaguu

SEQ ID NO: 411481 - RNA, 25 nt, Human
uuuacaaaaagccuccaaaaaaccc

SEQ ID NO: 411482 - RNA, 26 nt, Human
aaagaaaaaaauucaacccuagaaaa

SEQ ID NO: 411483 - RNA, 24 nt, Human
aaagauauguacuguuucuccccc

SEQ ID NO: 411484 - RNA, 21 nt, Human
aacagcauccacacuggggcu

SEQ ID NO: 411485 - RNA, 18 nt, Human
aacauuccacuccacuaa

SEQ ID NO: 411486 - RNA, 25 nt, Human
aacccuagaaaacuugacaacgaga

SEQ ID NO: 411487 - RNA, 23 nt, Human
aagaaaaaaauucaacccuagaa

SEQ ID NO: 411488 - RNA, 23 nt, Human
aagaacccucuagaaaacuucgc

SEQ ID NO: 411489 - RNA, 23 nt, Human
acaaggaaaggucaugcuaaaac

SEQ ID NO: 411490 - RNA, 23 nt, Human
acaaggcacaguuguucauucaa

SEQ ID NO: 411491 - RNA, 19 nt, Human
acaguuguucauucaacag

SEQ ID NO: 411492 - RNA, 22 nt, Human
accgggucgaaaccgcacacgc

SEQ ID NO: 411493 - RNA, 23 nt, Human
acucagugcugcaacugagaaau

SEQ ID NO: 411494 - RNA, 18 nt, Human
acuucauggaugcauccc

SEQ ID NO: 411495 - RNA, 23 nt, Human
agaaagaaauagauacccaaugu

SEQ ID NO: 411496 - RNA, 20 nt, Human
agaacauuccacuccacuaa

SEQ ID NO: 411497 - RNA, 22 nt, Human
agaauaagaaaauccacaagga

SEQ ID NO: 411498 - RNA, 22 nt, Human
agcccaagaacccucuagaaaa

SEQ ID NO: 411499 - RNA, 25 nt, Human
agcuaccagaaaaacuuuuaaacaa

SEQ ID NO: 411500 - RNA, 22 nt, Human
agcuugcuuagaccagcacaca

SEQ ID NO: 411501 - RNA, 21 nt, Human
aggacacgcaggugccaagag

SEQ ID NO: 411502 - RNA, 21 nt, Human
aggacgugaggcagagccugu

SEQ ID NO: 411503 - RNA, 22 nt, Human
aggugccaagagcccaagaacc

SEQ ID NO: 411504 - RNA, 23 nt, Human
auggagaaaaaagaaaaaaauuc

SEQ ID NO: 411505 - RNA, 26 nt, Human
auuaaugccuuuuaauuuuaauguuu

SEQ ID NO: 411506 - RNA, 25 nt, Human
auuccacuccacuaagaaaagagaa

SEQ ID NO: 411507 - RNA, 22 nt, Human
caaagcauaaacacuucugcaa

SEQ ID NO: 411508 - RNA, 21 nt, Human
caacagaaaaagucaaaacca

SEQ ID NO: 411509 - RNA, 22 nt, Human
caaccuacacaguuagaaaaga

SEQ ID NO: 411510 - RNA, 21 nt, Human
caagccuacauagccuccaag

SEQ ID NO: 411511 - RNA, 24 nt, Human
cacacaauaaacuaaagacagaaa

SEQ ID NO: 411512 - RNA, 19 nt, Human
cacaugggcuugagacugg

SEQ ID NO: 411513 - RNA, 23 nt, Human
cagcacacaauaaacuaaagaca

SEQ ID NO: 411514 - RNA, 20 nt, Human
cagcugagauagaauccuca

SEQ ID NO: 411515 - RNA, 21 nt, Human
caggcagaugcauggguuccc

SEQ ID NO: 411516 - RNA, 18 nt, Human
cagggcccgaccguccuc

SEQ ID NO: 411517 - RNA, 18 nt, Human
caggggcucugcugccua

SEQ ID NO: 411518 - RNA, 20 nt, Human
caggugccaagagcccaaga

SEQ ID NO: 411519 - RNA, 20 nt, Human
cagugaccccagugugaugc

SEQ ID NO: 411520 - RNA, 23 nt, Human
cauacuauacuaccaaaugccag

SEQ ID NO: 411521 - RNA, 22 nt, Human
caucaggcccuccuucaggacu

SEQ ID NO: 411522 - RNA, 18 nt, Human
caucauguagcacacagg

SEQ ID NO: 411523 - RNA, 21 nt, Human
caucauguagcacacaggggc

SEQ ID NO: 411524 - RNA, 27 nt, Human
cauggaacuuaguauauguuucaauaa

SEQ ID NO: 411525 - RNA, 19 nt, Human
cauggaugcaucccuucga

SEQ ID NO: 411526 - RNA, 20 nt, Human
cauugcaaaugaucucagcu

SEQ ID NO: 411527 - RNA, 24 nt, Human
ccacuccacuaagaaaagagaauc

SEQ ID NO: 411528 - RNA, 22 nt, Human
ccagcacacaauaaacuaaaga

SEQ ID NO: 411529 - RNA, 22 nt, Human
ccccauuucugguguaugucug

SEQ ID NO: 411530 - RNA, 26 nt, Human
cccgaccguccucacaugacaugcug

SEQ ID NO: 411531 - RNA, 22 nt, Human
cccuuccuaaacagaccuuaaa

SEQ ID NO: 411532 - RNA, 18 nt, Human
ccgccuacuguucuaauu

SEQ ID NO: 411533 - RNA, 21 nt, Human
ccugccaaaugucagcuucaa

SEQ ID NO: 411534 - RNA, 24 nt, Human
ccugugggggacggucaggggcuc

SEQ ID NO: 411535 - RNA, 23 nt, Human
cgacgcagagcuuacaagaauuu

SEQ ID NO: 411536 - RNA, 21 nt, Human
cgccacgaagcugccuggguu

SEQ ID NO: 411537 - RNA, 23 nt, Human
cguguucaaaacucaaccuacac

SEQ ID NO: 411538 - RNA, 19 nt, Human
cuccuuuucccuuuuccca

SEQ ID NO: 411539 - RNA, 19 nt, Human
cugcugcacccaggcgcaa

SEQ ID NO: 411540 - RNA, 20 nt, Human
cuuaaaauaucuucccuucc

SEQ ID NO: 411541 - RNA, 21 nt, Human
cuuaaaauaucuucccuuccc

SEQ ID NO: 411542 - RNA, 23 nt, Human
cuucaagaacugcuggcaggagg

SEQ ID NO: 411543 - RNA, 24 nt, Human
cuucacauccaccuguguucaaaa

SEQ ID NO: 411544 - RNA, 21 nt, Human
gaaaauccuucacauccaccu

SEQ ID NO: 411545 - RNA, 22 nt, Human
gacaacgagaauaagaaaaucc

SEQ ID NO: 411546 - RNA, 22 nt, Human
gaccauggccgccuaucuuucu

SEQ ID NO: 411547 - RNA, 19 nt, Human
gagaagaaacugcugagca

SEQ ID NO: 411548 - RNA, 23 nt, Human
gagaagaaacugcugagcagguc

SEQ ID NO: 411549 - RNA, 23 nt, Human
gagauagaauccucagccaguac

SEQ ID NO: 411550 - RNA, 18 nt, Human
gagcccaagaacccucua

SEQ ID NO: 411551 - RNA, 21 nt, Human
gaggacgugaggcagagccug

SEQ ID NO: 411552 - RNA, 20 nt, Human
gcagagccugugggggacgg

SEQ ID NO: 411553 - RNA, 23 nt, Human
gcccagaaauguauuuugaccac

SEQ ID NO: 411554 - RNA, 27 nt, Human
gccugccuucuauucaccaacuccuau

SEQ ID NO: 411555 - RNA, 22 nt, Human
ggacgugaggcagagccugugg

SEQ ID NO: 411556 - RNA, 19 nt, Human
guaaagaacaguccauuuc

SEQ ID NO: 411557 - RNA, 22 nt, Human
guguucaaaacucaaccuacac

SEQ ID NO: 411558 - RNA, 23 nt, Human
guucauucaacagaaaaagucaa

SEQ ID NO: 411559 - RNA, 18 nt, Human
guuucucccccauuucug

SEQ ID NO: 411560 - RNA, 23 nt, Human
uaaaaagcaauuaccacaaaaca

SEQ ID NO: 411561 - RNA, 22 nt, Human
uaaauaaaacugaauaugguca

SEQ ID NO: 411562 - RNA, 20 nt, Human
uaagaaaagagaaucacaac

SEQ ID NO: 411563 - RNA, 19 nt, Human
uaagaaaauccacaaggaa

SEQ ID NO: 411564 - RNA, 22 nt, Human
uacagaaucugaacaagacaag

SEQ ID NO: 411565 - RNA, 23 nt, Human
uacuaccaaaugccaggcaaugg

SEQ ID NO: 411566 - RNA, 19 nt, Human
uacuauacuaccaaaugcc

SEQ ID NO: 411567 - RNA, 20 nt, Human
uagaaaagacagcugagaua

SEQ ID NO: 411568 - RNA, 18 nt, Human
uagaguagcaggaaugaa

SEQ ID NO: 411569 - RNA, 18 nt, Human
uagcaggaaugaaaaaga

SEQ ID NO: 411570 - RNA, 26 nt, Human
uagcaggaaugaaaaagaagcuucaa

SEQ ID NO: 411571 - RNA, 21 nt, Human
uagcauaaagcuaaagcuacc

SEQ ID NO: 411572 - RNA, 22 nt, Human
ucaacugccucaauugcucucu

SEQ ID NO: 411573 - RNA, 26 nt, Human
ucauggaugcaucccuucgaugcccu

SEQ ID NO: 411574 - RNA, 20 nt, Human
uccaagggggccuugggcgg

SEQ ID NO: 411575 - RNA, 19 nt, Human
uccacaagcacguguucaa

SEQ ID NO: 411576 - RNA, 22 nt, Human
uccacuaagaaaagagaaucac

SEQ ID NO: 411577 - RNA, 19 nt, Human
ugaagcuuugugugaccgg

SEQ ID NO: 411578 - RNA, 20 nt, Human
ugacuucauggaugcauccc

SEQ ID NO: 411579 - RNA, 18 nt, Human
ugagaaauacagguagag

SEQ ID NO: 411580 - RNA, 19 nt, Human
ugagauagaauccucagcc

SEQ ID NO: 411581 - RNA, 23 nt, Human
ugagcaggucaguaaagaacagu

SEQ ID NO: 411582 - RNA, 22 nt, Human
ugaggcagagccugugggggac

SEQ ID NO: 411583 - RNA, 20 nt, Human
ugcaaaaauuccacaaggca

SEQ ID NO: 411584 - RNA, 20 nt, Human
ugcagucuuggcaacagcau

SEQ ID NO: 411585 - RNA, 21 nt, Human
ugccuaaaugccaggcagaug

SEQ ID NO: 411586 - RNA, 19 nt, Human
ugcucccaucccugggcuc

SEQ ID NO: 411587 - RNA, 22 nt, Human
ugcugagcaggucaguaaagaa

SEQ ID NO: 411588 - RNA, 18 nt, Human
uggaaaagccuccccguc

SEQ ID NO: 411589 - RNA, 19 nt, Human
uggaccauggccgccuauc

SEQ ID NO: 411590 - RNA, 22 nt, Human
uggagaaaaaaacaaauuaaaa

SEQ ID NO: 411591 - RNA, 18 nt, Human
uggauacucuagccauga

SEQ ID NO: 411592 - RNA, 22 nt, Human
ugggcuugagacuggugacuuc

SEQ ID NO: 411593 - RNA, 26 nt, Human
uuaguagcuuuugaagucugcccucc

SEQ ID NO: 411594 - RNA, 19 nt, Human
uucaagucugucagugacc

SEQ ID NO: 411595 - RNA, 21 nt, Human
uucaucucuaauaucauuaac

SEQ ID NO: 411596 - RNA, 22 nt, Human
uugacaaacacauaacugaggc

SEQ ID NO: 411597 - RNA, 19 nt, Human
uuucccuuuucccauuucu

SEQ ID NO: 411598 - RNA, 19 nt, Human
accggggccgaaugcggcc

SEQ ID NO: 411599 - RNA, 21 nt, Human
agaaaugccagggggcucgga

SEQ ID NO: 411600 - RNA, 24 nt, Human
agaccggggccgaaugcggccgga

SEQ ID NO: 411601 - RNA, 21 nt, Human
agccauccugggucuggccuc

SEQ ID NO: 411602 - RNA, 18 nt, Human
aggugcaggggugaggug

SEQ ID NO: 411603 - RNA, 18 nt, Human
cauccugggucuggccuc

SEQ ID NO: 411604 - RNA, 19 nt, Human
ccaggagccuggggggggg

SEQ ID NO: 411605 - RNA, 24 nt, Human
ccagucccgggcgggccgucgcgg

SEQ ID NO: 411606 - RNA, 18 nt, Human
cccaaaccuggccugcag

SEQ ID NO: 411607 - RNA, 21 nt, Human
cccaaaccuggccugcagcca

SEQ ID NO: 411608 - RNA, 19 nt, Human
ccccugagccaucccugug

SEQ ID NO: 411609 - RNA, 18 nt, Human
cccgccgcgcugccugcg

SEQ ID NO: 411610 - RNA, 21 nt, Human
cccgccgcgcugccugcgccg

SEQ ID NO: 411611 - RNA, 19 nt, Human
cccgggcgggccgucgcgg

SEQ ID NO: 411612 - RNA, 19 nt, Human
ccgccgcgcugccugcgcc

SEQ ID NO: 411613 - RNA, 18 nt, Human
ccugcagccauccugggu

SEQ ID NO: 411614 - RNA, 21 nt, Human
ccugcagccauccugggucug

SEQ ID NO: 411615 - RNA, 18 nt, Human
ccugcgccggaccggggc

SEQ ID NO: 411616 - RNA, 19 nt, Human
ccugggggggggugcccgg

SEQ ID NO: 411617 - RNA, 19 nt, Human
ccugggucuggccuccgag

SEQ ID NO: 411618 - RNA, 19 nt, Human
cggcagaggcugagaggug

SEQ ID NO: 411619 - RNA, 22 nt, Human
cgggagaggugagagcgcuggc

SEQ ID NO: 411620 - RNA, 22 nt, Human
cggggcggguccagucccgggc

SEQ ID NO: 411621 - RNA, 19 nt, Human
cuucuggggcagcuagggc

SEQ ID NO: 411622 - RNA, 19 nt, Human
gcgggcgcaccgugugccc

SEQ ID NO: 411623 - RNA, 19 nt, Human
gcggguccagucccgggcg

SEQ ID NO: 411624 - RNA, 20 nt, Human
gggggggggugcccggcggc

SEQ ID NO: 411625 - RNA, 23 nt, Human
ggggggugcccggcggcagaggc

SEQ ID NO: 411626 - RNA, 20 nt, Human
ucagaaaaaguacccucuuu

SEQ ID NO: 411627 - RNA, 22 nt, Human
ucagaaaaaguacccucuuuau

SEQ ID NO: 411628 - RNA, 24 nt, Human
ugagguggacaguccccugagcca

SEQ ID NO: 411629 - RNA, 21 nt, Human
ugcagccauccugggucuggc

SEQ ID NO: 411630 - RNA, 25 nt, Human
uuuuuuuuuuuuuuuuuuuuaucag

SEQ ID NO: 411631 - RNA, 20 nt, Human
aagggcuggauuagugcccc

SEQ ID NO: 411632 - RNA, 20 nt, Human
acagacccgggcaucggagc

SEQ ID NO: 411633 - RNA, 21 nt, Human
accaggugcucccauccaagu

SEQ ID NO: 411634 - RNA, 18 nt, Human
agggagguccucagggug

SEQ ID NO: 411635 - RNA, 25 nt, Human
agggugaguccuggagcucccugug

SEQ ID NO: 411636 - RNA, 21 nt, Human
agugccccuacaaauguuggg

SEQ ID NO: 411637 - RNA, 20 nt, Human
caagcaagccacuuagcaau

SEQ ID NO: 411638 - RNA, 24 nt, Human
caauucugggccucaguuucccca

SEQ ID NO: 411639 - RNA, 20 nt, Human
caggaguaaggcacacggug

SEQ ID NO: 411640 - RNA, 23 nt, Human
caggugcucccauccaagugcag

SEQ ID NO: 411641 - RNA, 23 nt, Human
ccaagaaagaaaaauaaguucac

SEQ ID NO: 411642 - RNA, 20 nt, Human
cccggaccccuccccgcucc

SEQ ID NO: 411643 - RNA, 22 nt, Human
cccucugcagccacugccuggu

SEQ ID NO: 411644 - RNA, 19 nt, Human
ccgcgcccgcguccagacu

SEQ ID NO: 411645 - RNA, 20 nt, Human
ccgcggcuucuuccugagga

SEQ ID NO: 411646 - RNA, 24 nt, Human
ccucaagaucaugguuaggcucac

SEQ ID NO: 411647 - RNA, 23 nt, Human
ccucugcagccacugccuggucc

SEQ ID NO: 411648 - RNA, 22 nt, Human
cgcccgcguccagacucacccu

SEQ ID NO: 411649 - RNA, 21 nt, Human
cggcagguggcucagcugagg

SEQ ID NO: 411650 - RNA, 19 nt, Human
cuggagcucccugugucaa

SEQ ID NO: 411651 - RNA, 23 nt, Human
cugggccucaguuuccccaucug

SEQ ID NO: 411652 - RNA, 21 nt, Human
gcagccaguccccgcggcuuc

SEQ ID NO: 411653 - RNA, 24 nt, Human
gccccuacaaauguugggucccuc

SEQ ID NO: 411654 - RNA, 22 nt, Human
ggaacacaagcucgaacccgga

SEQ ID NO: 411655 - RNA, 24 nt, Human
gguccaguccucccaggcagggcu

SEQ ID NO: 411656 - RNA, 19 nt, Human
ggucccucaagaucauggu

SEQ ID NO: 411657 - RNA, 21 nt, Human
guaaggcacacggugugggug

SEQ ID NO: 411658 - RNA, 21 nt, Human
gugaggcugacaucccccucu

SEQ ID NO: 411659 - RNA, 18 nt, Human
uaccagaugguggagaug

SEQ ID NO: 411660 - RNA, 23 nt, Human
ucaaaagaugguuguaauguuuc

SEQ ID NO: 411661 - RNA, 22 nt, Human
uccugaggaccuccggccgcgc

SEQ ID NO: 411662 - RNA, 21 nt, Human
ucugcagccacugccugguug

SEQ ID NO: 411663 - RNA, 19 nt, Human
ugaggcugacaucccccuc

SEQ ID NO: 411664 - RNA, 18 nt, Human
ugggggauuuaagggcug

SEQ ID NO: 411665 - RNA, 24 nt, Human
uuaccagaugguggagaugguggg

SEQ ID NO: 411666 - RNA, 23 nt, Human
uucacagagguggggucucuaga

SEQ ID NO: 411667 - RNA, 28 nt, Human
agcaagacaaagacaggugucgcggacc

SEQ ID NO: 411668 - RNA, 21 nt, Human
cagcagauauucucugggaac

SEQ ID NO: 411669 - RNA, 23 nt, Human
gaaaauguuaaaagggcugagug

SEQ ID NO: 411670 - RNA, 29 nt, Human
gacagguguguucuaccugaguuggaagg

SEQ ID NO: 411671 - RNA, 24 nt, Human
guucuaccugaguuggaagaaggc

SEQ ID NO: 411672 - RNA, 20 nt, Human
ucacaaggucugcaggaacu

SEQ ID NO: 411673 - RNA, 19 nt, Human
ucacagauuucucuuucca

SEQ ID NO: 411674 - RNA, 18 nt, Human
ugaaaacagcaagacaaa

SEQ ID NO: 411675 - RNA, 20 nt, Human
ugaaaacagcaagacaaaga

SEQ ID NO: 411676 - RNA, 22 nt, Human
ugaaaacagcaagacaaagaca

SEQ ID NO: 411677 - RNA, 19 nt, Human
uggaagaaggcuacacuuu

SEQ ID NO: 411678 - RNA, 24 nt, Human
uguauuagguuacaauuuugcaaa

SEQ ID NO: 411679 - RNA, 21 nt, Human
uuaaaagggcugagugaaaac

SEQ ID NO: 411680 - RNA, 21 nt, Human
uuacuuugaguuagagugagg

SEQ ID NO: 411681 - RNA, 25 nt, Human
uucacauacaaauaacaguuccuca

SEQ ID NO: 411682 - RNA, 18 nt, Human
uuuacagaaaaauaccag

SEQ ID NO: 411683 - RNA, 21 nt, Human
uuuacagaaaaauaccagcag

SEQ ID NO: 411684 - RNA, 23 nt, Human
aaagauggugaagauucagaccu

SEQ ID NO: 411685 - RNA, 24 nt, Human
aaccacuaguuuucaaaaaaaucc

SEQ ID NO: 411686 - RNA, 21 nt, Human
aaccaggacuggcccacuucc

SEQ ID NO: 411687 - RNA, 20 nt, Human
aaccccuuaccaacccucac

SEQ ID NO: 411688 - RNA, 24 nt, Human
aagcaugcuccccucaacuucucc

SEQ ID NO: 411689 - RNA, 19 nt, Human
acccucaccuaaaagggaa

SEQ ID NO: 411690 - RNA, 22 nt, Human
agcaggaggguagggcccacag

SEQ ID NO: 411691 - RNA, 19 nt, Human
aggaauucccccucaucag

SEQ ID NO: 411692 - RNA, 20 nt, Human
aggagggaggagggcggggc

SEQ ID NO: 411693 - RNA, 21 nt, Human
aggagggaggagggcggggcc

SEQ ID NO: 411694 - RNA, 21 nt, Human
agggagccuuuaauguuugug

SEQ ID NO: 411695 - RNA, 20 nt, Human
agggaggagggcggggcccu

SEQ ID NO: 411696 - RNA, 19 nt, Human
caaauggccccgaugcccu

SEQ ID NO: 411697 - RNA, 22 nt, Human
caaccccuuaccaacccucacc

SEQ ID NO: 411698 - RNA, 27 nt, Human
cacccaugguaaccauggaaacauaac

SEQ ID NO: 411699 - RNA, 23 nt, Human
caccccuuccucuugcuggcucg

SEQ ID NO: 411700 - RNA, 23 nt, Human
cacuugcuccugggcaagccuca

SEQ ID NO: 411701 - RNA, 24 nt, Human
cagagugguugcaggaagaacugg

SEQ ID NO: 411702 - RNA, 21 nt, Human
cagcaccccuuccucuugcug

SEQ ID NO: 411703 - RNA, 21 nt, Human
cagcuaggacccgccccaugc

SEQ ID NO: 411704 - RNA, 18 nt, Human
cagcucaguggccaccag

SEQ ID NO: 411705 - RNA, 22 nt, Human
caggaagaacugggauugggug

SEQ ID NO: 411706 - RNA, 24 nt, Human
caggaauucccccucaucaggccu

SEQ ID NO: 411707 - RNA, 24 nt, Human
cauucuuaucuucuuuugugaagg

SEQ ID NO: 411708 - RNA, 22 nt, Human
ccaaauggccccgaugcccucu

SEQ ID NO: 411709 - RNA, 22 nt, Human
ccaacccucaccuaaaagggaa

SEQ ID NO: 411710 - RNA, 23 nt, Human
ccacagagcuggaccugcccucc

SEQ ID NO: 411711 - RNA, 25 nt, Human
ccagaggcucccccaccaaggcugg

SEQ ID NO: 411712 - RNA, 18 nt, Human
ccaugccgggcccggccc

SEQ ID NO: 411713 - RNA, 22 nt, Human
cccacacugccauccacaccca

SEQ ID NO: 411714 - RNA, 18 nt, Human
cccacuccugccagcugc

SEQ ID NO: 411715 - RNA, 18 nt, Human
cccaugcauuccagaggc

SEQ ID NO: 411716 - RNA, 21 nt, Human
ccccacacugccauccacacc

SEQ ID NO: 411717 - RNA, 23 nt, Human
cccccaccaaggcugggguccag

SEQ ID NO: 411718 - RNA, 22 nt, Human
ccggccaaauggccccgaugcc

SEQ ID NO: 411719 - RNA, 18 nt, Human
ccuugcugucugggcugg

SEQ ID NO: 411720 - RNA, 21 nt, Human
cggccaaauggccccgaugcc

SEQ ID NO: 411721 - RNA, 23 nt, Human
cggccaaauggccccgaugcccu

SEQ ID NO: 411722 - RNA, 23 nt, Human
cuaacagcuuggaaaugucccua

SEQ ID NO: 411723 - RNA, 20 nt, Human
cucccccaccaaggcugggg

SEQ ID NO: 411724 - RNA, 19 nt, Human
cuccggccucacuugcucc

SEQ ID NO: 411725 - RNA, 22 nt, Human
cugggcuggggucagacggggc

SEQ ID NO: 411726 - RNA, 24 nt, Human
cugggguccagguuccaggaauuc

SEQ ID NO: 411727 - RNA, 21 nt, Human
cuuaagcagcaggggcagcuc

SEQ ID NO: 411728 - RNA, 25 nt, Human
cuuaucuucuuuugugaagguucug

SEQ ID NO: 411729 - RNA, 22 nt, Human
cuuccaucaagccaaggccuaa

SEQ ID NO: 411730 - RNA, 22 nt, Human
gaccugcccuccccacacugcc

SEQ ID NO: 411731 - RNA, 28 nt, Human
gaccugcccuccccacacugccauccac

SEQ ID NO: 411732 - RNA, 19 nt, Human
gacuugggacagaagaggc

SEQ ID NO: 411733 - RNA, 26 nt, Human
gaggagggcggggcccuuucauucuu

SEQ ID NO: 411734 - RNA, 19 nt, Human
gccccgaugcccucugccu

SEQ ID NO: 411735 - RNA, 23 nt, Human
gcggaaucagaaagauggugaag

SEQ ID NO: 411736 - RNA, 21 nt, Human
gcggcgacgccgcaccaugcc

SEQ ID NO: 411737 - RNA, 22 nt, Human
gcugggguccagguuccaggaa

SEQ ID NO: 411738 - RNA, 22 nt, Human
ggaauucccccucaucaggccu

SEQ ID NO: 411739 - RNA, 18 nt, Human
ggcacuaaaggucaccgu

SEQ ID NO: 411740 - RNA, 23 nt, Human
ggcuuagucagccagcucagugg

SEQ ID NO: 411741 - RNA, 21 nt, Human
gggacagaagaggcuguccag

SEQ ID NO: 411742 - RNA, 24 nt, Human
ggggcagcucagcaggaggguagg

SEQ ID NO: 411743 - RNA, 24 nt, Human
ggguugggcucagacacagcugcc

SEQ ID NO: 411744 - RNA, 19 nt, Human
gguagggcccacagagcug

SEQ ID NO: 411745 - RNA, 18 nt, Human
gguugcaggaagaacugg

SEQ ID NO: 411746 - RNA, 24 nt, Human
uaacagcuaggacccgccccaugc

SEQ ID NO: 411747 - RNA, 23 nt, Human
uaaccauggaaacauaaccaccc

SEQ ID NO: 411748 - RNA, 20 nt, Human
uaaguaaauaggugugaggu

SEQ ID NO: 411749 - RNA, 20 nt, Human
uaauagcugggccaccaggc

SEQ ID NO: 411750 - RNA, 25 nt, Human
uaccaacccucaccuaaaagggaau

SEQ ID NO: 411751 - RNA, 23 nt, Human
uaggcagggugcggaaucagaaa

SEQ ID NO: 411752 - RNA, 21 nt, Human
uaggucuuuagucuucaauuu

SEQ ID NO: 411753 - RNA, 23 nt, Human
uauuacaaggacaucucuuucug

SEQ ID NO: 411754 - RNA, 18 nt, Human
ucagcaggaggguagggc

SEQ ID NO: 411755 - RNA, 18 nt, Human
ucaggagcacgguacaag

SEQ ID NO: 411756 - RNA, 20 nt, Human
ucaguggccaccagagccgg

SEQ ID NO: 411757 - RNA, 21 nt, Human
uccacacccaugguaaccaug

SEQ ID NO: 411758 - RNA, 18 nt, Human
uccaggaauucccccuca

SEQ ID NO: 411759 - RNA, 19 nt, Human
uccaucaagccaaggccua

SEQ ID NO: 411760 - RNA, 23 nt, Human
uccucuugcuggcucggcacgcu

SEQ ID NO: 411761 - RNA, 22 nt, Human
uccugaacuccucuccggccuc

SEQ ID NO: 411762 - RNA, 23 nt, Human
ucugggcuggggucagacggggc

SEQ ID NO: 411763 - RNA, 18 nt, Human
ugacccggucagcugcag

SEQ ID NO: 411764 - RNA, 18 nt, Human
ugccaggcuggccacaga

SEQ ID NO: 411765 - RNA, 21 nt, Human
ugccaggcuggccacagagug

SEQ ID NO: 411766 - RNA, 20 nt, Human
ugccuuuggaagaggggcac

SEQ ID NO: 411767 - RNA, 18 nt, Human
uggaagaggggcaccuga

SEQ ID NO: 411768 - RNA, 18 nt, Human
uggaagaggggcaccuga

SEQ ID NO: 411769 - RNA, 19 nt, Human
uggcacuaaaggucaccgu

SEQ ID NO: 411770 - RNA, 23 nt, Human
ugggcuggggucagacggggcuu

SEQ ID NO: 411771 - RNA, 23 nt, Human
ugucccuaacagcuaggacccgc

SEQ ID NO: 411772 - RNA, 20 nt, Human
ugucugggcuggggucagac

SEQ ID NO: 411773 - RNA, 25 nt, Human
ugucugggcuggggucagacggggc

SEQ ID NO: 411774 - RNA, 25 nt, Human
uugggugauuuggucaguccgggcu

SEQ ID NO: 411775 - RNA, 21 nt, Human
uuuagaaggguugggcucaga

SEQ ID NO: 411776 - RNA, 22 nt, Human
uuuguuagucuuaggauauuuu

SEQ ID NO: 411777 - RNA, 24 nt, Human
uuuuaucuuuuucuuguggaugac

SEQ ID NO: 411778 - RNA, 19 nt, Human
ccggaugcugcuggacacc

SEQ ID NO: 411779 - RNA, 23 nt, Human
gcagggugggcuucaggaauggc

SEQ ID NO: 411780 - RNA, 19 nt, Human
ggagaguauuggggagcgg

SEQ ID NO: 411781 - RNA, 22 nt, Human
gggauguggcgcagcgcggacg

SEQ ID NO: 411782 - RNA, 18 nt, Human
uaggaguuggaaugaggu

SEQ ID NO: 411783 - RNA, 20 nt, Human
uaucauguugcugacuguca

SEQ ID NO: 411784 - RNA, 23 nt, Human
ucucagggauggcacucuguggg

SEQ ID NO: 411785 - RNA, 23 nt, Human
uggaaugaggugcagggugggcu

SEQ ID NO: 411786 - RNA, 21 nt, Human
uugcugacugucaugauucgg

SEQ ID NO: 411787 - RNA, 21 nt, Human
uuggggagcggucuggucucu

SEQ ID NO: 411788 - RNA, 23 nt, Human
uuuuuuuuuuugugcuucauguu

SEQ ID NO: 411789 - RNA, 24 nt, Human
uuuuuuuuuuuuuuuuuugugcuu

SEQ ID NO: 411790 - RNA, 27 nt, Human
uuuuuuuuuuuuuuuuuuuuuuugggg

SEQ ID NO: 411791 - RNA, 19 nt, Human
aaaaagaagaccaaugaaa

SEQ ID NO: 411792 - RNA, 22 nt, Human
aaaaagaagaccaaugaaauaa

SEQ ID NO: 411793 - RNA, 24 nt, Human
aaaggcugauaaaugauaagauaa

SEQ ID NO: 411794 - RNA, 25 nt, Human
aagaagguaauaaagugaaagaaaa

SEQ ID NO: 411795 - RNA, 23 nt, Human
aagagugcaaaacaaagaccugg

SEQ ID NO: 411796 - RNA, 18 nt, Human
aagaucaaaaagagaaaa

SEQ ID NO: 411797 - RNA, 28 nt, Human
aagugaagauuuucccucuccaaaguuu

SEQ ID NO: 411798 - RNA, 23 nt, Human
accugguuugcagcucuuugugu

SEQ ID NO: 411799 - RNA, 23 nt, Human
agagcaguauaaaacauguucuc

SEQ ID NO: 411800 - RNA, 22 nt, Human
aggaaaauccagcucacaaucc

SEQ ID NO: 411801 - RNA, 22 nt, Human
auaauauguuaauauuuuacuu

SEQ ID NO: 411802 - RNA, 22 nt, Human
cagauaaaaaagaagaccaaug

SEQ ID NO: 411803 - RNA, 21 nt, Human
cagcgaauugagaggcaggga

SEQ ID NO: 411804 - RNA, 22 nt, Human
cauaaaaggcugauaaaugaua

SEQ ID NO: 411805 - RNA, 20 nt, Human
caugccaaagaucuucacac

SEQ ID NO: 411806 - RNA, 26 nt, Human
ccaaagaucuucacacuauccuuaag

SEQ ID NO: 411807 - RNA, 18 nt, Human
ccagauaaaaaagaagac

SEQ ID NO: 411808 - RNA, 25 nt, Human
ccagauaaaaaagaagaccaaugaa

SEQ ID NO: 411809 - RNA, 18 nt, Human
ccauggaccucuaagaug

SEQ ID NO: 411810 - RNA, 19 nt, Human
cuagaacuuuaaugcuaac

SEQ ID NO: 411811 - RNA, 19 nt, Human
cuccaaaguuugacaaaga

SEQ ID NO: 411812 - RNA, 22 nt, Human
cuccaaaguuugacaaagaugg

SEQ ID NO: 411813 - RNA, 24 nt, Human
cuuggaaaauacauaaaaggcugg

SEQ ID NO: 411814 - RNA, 21 nt, Human
gagaggcagggaaacacagug

SEQ ID NO: 411815 - RNA, 24 nt, Human
gaucaaaaagagaaaauauauuuc

SEQ ID NO: 411816 - RNA, 21 nt, Human
gcuuugaaaaguaugccuaga

SEQ ID NO: 411817 - RNA, 19 nt, Human
uaaaaaagaagaccaauga

SEQ ID NO: 411818 - RNA, 22 nt, Human
uaaaacauguucuccauaugcc

SEQ ID NO: 411819 - RNA, 22 nt, Human
uagcacaagaucaaaaagagaa

SEQ ID NO: 411820 - RNA, 18 nt, Human
uaucaaacauuauuuucc

SEQ ID NO: 411821 - RNA, 23 nt, Human
uaugaccaccuuauacaguucuu

SEQ ID NO: 411822 - RNA, 26 nt, Human
uaugcuuguauuagaaagaagguaau

SEQ ID NO: 411823 - RNA, 23 nt, Human
ucacacuauccuuaaauaucaug

SEQ ID NO: 411824 - RNA, 27 nt, Human
ucacauacucaaccuuuaaaucaugcc

SEQ ID NO: 411825 - RNA, 22 nt, Human
ugaaaauuaaaacccauugaaa

SEQ ID NO: 411826 - RNA, 19 nt, Human
ugaaagaaaauacaguuaa

SEQ ID NO: 411827 - RNA, 23 nt, Human
ugccuagaacuuuaaugcuaaca

SEQ ID NO: 411828 - RNA, 24 nt, Human
ugcuugaaauaagagugcaaaaca

SEQ ID NO: 411829 - RNA, 21 nt, Human
uggaccucuaagauguuagaa

SEQ ID NO: 411830 - RNA, 22 nt, Human
uggcaaacacaggcaauaucca

SEQ ID NO: 411831 - RNA, 20 nt, Human
uguagccuugaaccugagac

SEQ ID NO: 411832 - RNA, 20 nt, Human
uuguuguagccuugaaccug

SEQ ID NO: 411833 - RNA, 21 nt, Human
uuuaaguggacauuuacuauc

SEQ ID NO: 411834 - RNA, 22 nt, Human
aaccuucgcuccugcacacuuc

SEQ ID NO: 411835 - RNA, 21 nt, Human
agcagcggugccaggucagaa

SEQ ID NO: 411836 - RNA, 22 nt, Human
cagaggcucuaagaggaagucc

SEQ ID NO: 411837 - RNA, 23 nt, Human
caguagcauucagugguaugguu

SEQ ID NO: 411838 - RNA, 27 nt, Human
caucucauuucaagccucauuuggagg

SEQ ID NO: 411839 - RNA, 20 nt, Human
ccugcacacuucaguguccu

SEQ ID NO: 411840 - RNA, 19 nt, Human
ccuggggcgcuucuggggc

SEQ ID NO: 411841 - RNA, 20 nt, Human
gggcucgcuggccugggcuu

SEQ ID NO: 411842 - RNA, 19 nt, Human
gguugaaaggggagggagg

SEQ ID NO: 411843 - RNA, 26 nt, Human
gugaagaugaaaugacgugacgaaua

SEQ ID NO: 411844 - RNA, 19 nt, Human
uaggccgccguagcagcgg

SEQ ID NO: 411845 - RNA, 21 nt, Human
ucagugguaugguuguuucuu

SEQ ID NO: 411846 - RNA, 19 nt, Human
uccacagugugagguccau

SEQ ID NO: 411847 - RNA, 21 nt, Human
uccacagugugagguccaugg

SEQ ID NO: 411848 - RNA, 18 nt, Human
ucgcuggccugggcuucu

SEQ ID NO: 411849 - RNA, 24 nt, Human
ugaaaggggagggaggaacaucuc

SEQ ID NO: 411850 - RNA, 21 nt, Human
ugccaggucagaagccgagcc

SEQ ID NO: 411851 - RNA, 26 nt, Human
uggcuuggguaccuaacucagaggcu

SEQ ID NO: 411852 - RNA, 20 nt, Human
ugguuguuucuuagagauga

SEQ ID NO: 411853 - RNA, 30 nt, Human
uuauggugaugagaucgacaaucuccccuu

SEQ ID NO: 411854 - RNA, 21 nt, Human
uugaaaggggagggaggaaca

SEQ ID NO: 411855 - RNA, 20 nt, Human
uuuggaggugggggugaaga

SEQ ID NO: 411856 - RNA, 19 nt, Human
aaauuccccuuaugaacug

SEQ ID NO: 411857 - RNA, 19 nt, Human
agacauaagguaaaaaugg

SEQ ID NO: 411858 - RNA, 28 nt, Human
cccacccgccgccgccgcugccgucgac

SEQ ID NO: 411859 - RNA, 20 nt, Human
ccccuuaugaacugguuugg

SEQ ID NO: 411860 - RNA, 18 nt, Human
ccgccgccgccgcugccg

SEQ ID NO: 411861 - RNA, 19 nt, Human
ccgccgccgcugccgucga

SEQ ID NO: 411862 - RNA, 18 nt, Human
cuagcagacauaagguaa

SEQ ID NO: 411863 - RNA, 24 nt, Human
ucccacccgccgccgccgcugccg

SEQ ID NO: 411864 - RNA, 18 nt, Human
gccugaccccucagacau

SEQ ID NO: 411865 - RNA, 19 nt, Human
uuauugaggcuccagggcc

SEQ ID NO: 411866 - RNA, 19 nt, Human
aagaaaaaacgauugggaa

SEQ ID NO: 411867 - RNA, 22 nt, Human
acagcagcaucucccagccucu

SEQ ID NO: 411868 - RNA, 18 nt, Human
aggcgaaagccggaggga

SEQ ID NO: 411869 - RNA, 19 nt, Human
agugauggacccagaaaaa

SEQ ID NO: 411870 - RNA, 18 nt, Human
cacaugguuucugccucu

SEQ ID NO: 411871 - RNA, 22 nt, Human
cacucgguguacaugcugcagg

SEQ ID NO: 411872 - RNA, 22 nt, Human
cacucgguguacaugcugcagg

SEQ ID NO: 411873 - RNA, 25 nt, Human
cagaaaaagaaaaaacgauugggaa

SEQ ID NO: 411874 - RNA, 23 nt, Human
cagccucugcacaugguuucugc

SEQ ID NO: 411875 - RNA, 19 nt, Human
ccagaaaaagaaaaaacga

SEQ ID NO: 411876 - RNA, 25 nt, Human
ccagaaaaagaaaaaacgauuggga

SEQ ID NO: 411877 - RNA, 26 nt, Human
ccagaaaaagaaaaaacgauugggaa

SEQ ID NO: 411878 - RNA, 20 nt, Human
ccagccaccugcccugugcu

SEQ ID NO: 411879 - RNA, 18 nt, Human
cccagaaaaagaaaaaac

SEQ ID NO: 411880 - RNA, 24 nt, Human
cccauguggauauggcuaaagagu

SEQ ID NO: 411881 - RNA, 19 nt, Human
cccgcagcugggcuggugg

SEQ ID NO: 411882 - RNA, 18 nt, Human
cgccucuggaaacagcag

SEQ ID NO: 411883 - RNA, 23 nt, Human
cuccacucugagguuaugacaac

SEQ ID NO: 411884 - RNA, 19 nt, Human
cugcacaugguuucugccu

SEQ ID NO: 411885 - RNA, 23 nt, Human
gccaccugcccugugcuccccgc

SEQ ID NO: 411886 - RNA, 26 nt, Human
gcccugugcuccccgcagcugggcug

SEQ ID NO: 411887 - RNA, 21 nt, Human
ucccgggcaguugugucccca

SEQ ID NO: 411888 - RNA, 26 nt, Human
uccuucguguguggugagucuuuaau

SEQ ID NO: 411889 - RNA, 24 nt, Human
ucucccagccucugcacaugguuu

SEQ ID NO: 411890 - RNA, 19 nt, Human
ugagacuaagacgccucug

SEQ ID NO: 411891 - RNA, 21 nt, Human
ugcagacacucgguguacaug

SEQ ID NO: 411892 - RNA, 18 nt, Human
uguguccccagcugcaga

SEQ ID NO: 411893 - RNA, 21 nt, Human
uuccugcccuuaggccaagaa

SEQ ID NO: 411894 - RNA, 26 nt, Human
aagcucacccaacaaagccaaccgcc

SEQ ID NO: 411895 - RNA, 21 nt, Human
acccaacaaagccaaccgccc

SEQ ID NO: 411896 - RNA, 22 nt, Human
cacaaacaagcucacccaacag

SEQ ID NO: 411897 - RNA, 21 nt, Human
cacccaacaaagccaaccgcc

SEQ ID NO: 411898 - RNA, 18 nt, Human
ccaacaaagccaaccgcc

SEQ ID NO: 411899 - RNA, 22 nt, Human
ccaaucaccaaccacguccacc

SEQ ID NO: 411900 - RNA, 22 nt, Human
ccacccacagggacacaaacaa

SEQ ID NO: 411901 - RNA, 23 nt, Human
ccacccacagggacacaaacaag

SEQ ID NO: 411902 - RNA, 20 nt, Human
gccaaucaccaaccacgucc

SEQ ID NO: 411903 - RNA, 19 nt, Human
guccacccacagggacaca

SEQ ID NO: 411904 - RNA, 19 nt, Human
ugaaacuuguaauuucuaa

SEQ ID NO: 411905 - RNA, 26 nt, Human
aaaaaaaaaaaaaaaacaccaauugg

SEQ ID NO: 411906 - RNA, 26 nt, Human
aaaaaaaaaaaaaacaccaauuggga

SEQ ID NO: 411907 - RNA, 28 nt, Human
aaaaaacuucacaaaacacacucgccaa

SEQ ID NO: 411908 - RNA, 27 nt, Human
aaaaagccaaaaacggccagaauuuag

SEQ ID NO: 411909 - RNA, 24 nt, Human
aaaacaccaauugggaaugcaaca

SEQ ID NO: 411910 - RNA, 19 nt, Human
aaacggccagaauuuagcg

SEQ ID NO: 411911 - RNA, 23 nt, Human
aagccaaaaacggccagaauuua

SEQ ID NO: 411912 - RNA, 22 nt, Human
acaaaaaagccaaaaacggcca

SEQ ID NO: 411913 - RNA, 25 nt, Human
acaaaaaagccaaaaacggccagaa

SEQ ID NO: 411914 - RNA, 22 nt, Human
caaaaacggccagaauuuagcg

SEQ ID NO: 411915 - RNA, 31 nt, Human
caaaauaaacuuaaaaaaaaaaaaaaaaaaa

SEQ ID NO: 411916 - RNA, 24 nt, Human
caacuuuauugaaaggaaagugca

SEQ ID NO: 411917 - RNA, 18 nt, Human
guugaaaccuuaaaaggg

SEQ ID NO: 411918 - RNA, 23 nt, Human
uaaacuuaaaaaaaaaaaaaaag

SEQ ID NO: 411919 - RNA, 25 nt, Human
uaacacugaaaauuacauauugacc

SEQ ID NO: 411920 - RNA, 20 nt, Human
ucaaaaggugccuaaaaaaa

SEQ ID NO: 411921 - RNA, 20 nt, Human
uuaaaaaaaaaaaaaaaaaa

SEQ ID NO: 411922 - RNA, 20 nt, Human
uucaaaaggugccuaaaaaa

SEQ ID NO: 411923 - RNA, 18 nt, Human
uugacccaaaugauuaca

SEQ ID NO: 411924 - RNA, 21 nt, Human
uuuacuagucuaacacugaaa

SEQ ID NO: 411925 - RNA, 21 nt, Human
uuuguugaaaccuuaaaaggg

SEQ ID NO: 411926 - RNA, 18 nt, Human
accccauccccagggugg

SEQ ID NO: 411927 - RNA, 18 nt, Human
caacaccccauccccagg

SEQ ID NO: 411928 - RNA, 24 nt, Human
ccaaaucuuacucuacucaucuca

SEQ ID NO: 411929 - RNA, 22 nt, Human
ccacccaaaucuuacucuacuc

SEQ ID NO: 411930 - RNA, 18 nt, Human
cccacccaaaucuuacuc

SEQ ID NO: 411931 - RNA, 20 nt, Human
cccaucccacccaaaucuua

SEQ ID NO: 411932 - RNA, 21 nt, Human
ccugccaacaccccaucccca

SEQ ID NO: 411933 - RNA, 22 nt, Human
ggaaaucaucagaagauguguu

SEQ ID NO: 411934 - RNA, 26 nt, Human
ggcaauauacuucauccccugaaagg

SEQ ID NO: 411935 - RNA, 19 nt, Human
ugaccccugccaacacccc

SEQ ID NO: 411936 - RNA, 23 nt, Human
ugccaacaccccauccccagggu

SEQ ID NO: 411937 - RNA, 21 nt, Human
uguguuagaaucaaagaaaca

SEQ ID NO: 411938 - RNA, 26 nt, Human
agccaaaugggaacccugggcuggaa

SEQ ID NO: 411939 - RNA, 24 nt, Human
aggcaguggcaagagggguucagg

SEQ ID NO: 411940 - RNA, 21 nt, Human
agguagaaggcaguggcaaga

SEQ ID NO: 411941 - RNA, 20 nt, Human
gaugaugagggaacaccaga

SEQ ID NO: 411942 - RNA, 21 nt, Human
ggaacccugggcuggaagggg

SEQ ID NO: 411943 - RNA, 18 nt, Human
ggguguggagaggggugg

SEQ ID NO: 411944 - RNA, 23 nt, Human
uaguugggccacugccagaagcc

SEQ ID NO: 411945 - RNA, 24 nt, Human
ugagggaacaccagacuuggcuag

SEQ ID NO: 411946 - RNA, 19 nt, Human
uggcuaguugggccacugc

SEQ ID NO: 411947 - RNA, 19 nt, Human
uucaaacaagguagaaggc

SEQ ID NO: 411948 - RNA, 22 nt, Human
uucagguagggggaugaugagg

SEQ ID NO: 411949 - RNA, 24 nt, Human
uuuuugggaguuauuaauucuuua

SEQ ID NO: 411950 - RNA, 19 nt, Human
aaaauaacugccugaaaac

SEQ ID NO: 411951 - RNA, 20 nt, Human
aaacacauucacuucuaaau

SEQ ID NO: 411952 - RNA, 33 nt, Human
aaacacuucagcaaucauuuuguuaaaaauagu

SEQ ID NO: 411953 - RNA, 19 nt, Human
aaacccagaagaccaauag

SEQ ID NO: 411954 - RNA, 25 nt, Human
aaacuggaaaugaaauacaacagaa

SEQ ID NO: 411955 - RNA, 23 nt, Human
aagcaccucuuguauaacaauuc

SEQ ID NO: 411956 - RNA, 22 nt, Human
aaggaccagccaggaugaaaca

SEQ ID NO: 411957 - RNA, 20 nt, Human
acaauaauaaaaauaacugc

SEQ ID NO: 411958 - RNA, 23 nt, Human
acacaagugaaggaccagccagg

SEQ ID NO: 411959 - RNA, 19 nt, Human
acagauaugcuaugcuccc

SEQ ID NO: 411960 - RNA, 21 nt, Human
acguuguaauucauaugacug

SEQ ID NO: 411961 - RNA, 22 nt, Human
agaagaccaauaauucugaaac

SEQ ID NO: 411962 - RNA, 23 nt, Human
agaaggggaggcggaagcaccca

SEQ ID NO: 411963 - RNA, 21 nt, Human
aggaagauggaaacagcacaa

SEQ ID NO: 411964 - RNA, 24 nt, Human
aggaggccgaagaggcuggagaag

SEQ ID NO: 411965 - RNA, 18 nt, Human
aggcuggagaagcaggag

SEQ ID NO: 411966 - RNA, 22 nt, Human
aggggaggcggaagcacccaga

SEQ ID NO: 411967 - RNA, 25 nt, Human
aguacaauaauaaaaauaacugccu

SEQ ID NO: 411968 - RNA, 18 nt, Human
auggccagcuucuuuaaa

SEQ ID NO: 411969 - RNA, 21 nt, Human
auuugaguggaaaauaguuug

SEQ ID NO: 411970 - RNA, 19 nt, Human
caaaaacccagaagaccaa

SEQ ID NO: 411971 - RNA, 18 nt, Human
caacagaaaaacugaagc

SEQ ID NO: 411972 - RNA, 23 nt, Human
caacagaaaaacugaagcauuag

SEQ ID NO: 411973 - RNA, 22 nt, Human
caaggaagauggaaacagcaca

SEQ ID NO: 411974 - RNA, 21 nt, Human
caauugcuguacuccuuuagc

SEQ ID NO: 411975 - RNA, 22 nt, Human
cacaccucuuuuaaaaagcaaa

SEQ ID NO: 411976 - RNA, 19 nt, Human
cacuuagggcagcacugau

SEQ ID NO: 411977 - RNA, 22 nt, Human
cagaaaaacugaagcauuagua

SEQ ID NO: 411978 - RNA, 19 nt, Human
cagaagaccaauaauucug

SEQ ID NO: 411979 - RNA, 19 nt, Human
cagcagcuugcaaagagag

SEQ ID NO: 411980 - RNA, 20 nt, Human
cauuccucugcucccacacc

SEQ ID NO: 411981 - RNA, 24 nt, Human
ccacaccucuuuuaaaaagcaaaa

SEQ ID NO: 411982 - RNA, 24 nt, Human
ccagccaggaugaaacacuucagc

SEQ ID NO: 411983 - RNA, 22 nt, Human
ccauauuccaaacacauucacu

SEQ ID NO: 411984 - RNA, 20 nt, Human
cccauacugcuacuuaaagg

SEQ ID NO: 411985 - RNA, 22 nt, Human
ccucugcucccacaccucuuuu

SEQ ID NO: 411986 - RNA, 20 nt, Human
cgaggaggccgaagaggcug

SEQ ID NO: 411987 - RNA, 25 nt, Human
cuggagaagcaggagaaggggaggc

SEQ ID NO: 411988 - RNA, 20 nt, Human
cuggucaucaagcuaagcau

SEQ ID NO: 411989 - RNA, 19 nt, Human
cuuggcaaggaagauggaa

SEQ ID NO: 411990 - RNA, 22 nt, Human
cuuuuaaaaagcaaaaacccag

SEQ ID NO: 411991 - RNA, 20 nt, Human
gaagggguaggaaaacuugg

SEQ ID NO: 411992 - RNA, 23 nt, Human
gcgagcggggucagggguggggc

SEQ ID NO: 411993 - RNA, 18 nt, Human
gcuggagaagcaggagaa

SEQ ID NO: 411994 - RNA, 19 nt, Human
gcuuuaagguucucagaug

SEQ ID NO: 411995 - RNA, 20 nt, Human
ggagaagcaggagaagggga

SEQ ID NO: 411996 - RNA, 25 nt, Human
ggaggccgaagaggcuggagaagca

SEQ ID NO: 411997 - RNA, 20 nt, Human
ggaggcggaagcacccagag

SEQ ID NO: 411998 - RNA, 22 nt, Human
ggaggcggaagcacccagagga

SEQ ID NO: 411999 - RNA, 22 nt, Human
gggaggcggaagcacccagagg

SEQ ID NO: 412000 - RNA, 20 nt, Human
ggggcauacacuggggucuc

SEQ ID NO: 412001 - RNA, 22 nt, Human
uaaaaagcaaaaacccagaaga

SEQ ID NO: 412002 - RNA, 18 nt, Human
uagcucaaaaacucacga

SEQ ID NO: 412003 - RNA, 20 nt, Human
uagcugaguccuucaacuuu

SEQ ID NO: 412004 - RNA, 19 nt, Human
uaucacaggauuuuuagcu

SEQ ID NO: 412005 - RNA, 25 nt, Human
uauccaaaaaaagaucgcagacauu

SEQ ID NO: 412006 - RNA, 23 nt, Human
ucacgauuguuuccauuccucug

SEQ ID NO: 412007 - RNA, 19 nt, Human
ucagaugcugaaagggaag

SEQ ID NO: 412008 - RNA, 24 nt, Human
ucagcagcuugcaaagagaggaug

SEQ ID NO: 412009 - RNA, 25 nt, Human
ucagggguggggcauacacuggggu

SEQ ID NO: 412010 - RNA, 19 nt, Human
ucaucaagcuaagcauaag

SEQ ID NO: 412011 - RNA, 20 nt, Human
uccaaaaaaagaucgcagac

SEQ ID NO: 412012 - RNA, 22 nt, Human
uccaaacacauucacuucuaaa

SEQ ID NO: 412013 - RNA, 25 nt, Human
ucccacaccucuuuuaaaaagcaaa

SEQ ID NO: 412014 - RNA, 22 nt, Human
ucuaaaaguauaaauauccaaa

SEQ ID NO: 412015 - RNA, 21 nt, Human
ugaaauacaacagaaaaacug

SEQ ID NO: 412016 - RNA, 23 nt, Human
ugacugagaucuuaguaucacag

SEQ ID NO: 412017 - RNA, 22 nt, Human
ugcaaagagaggaugugucagu

SEQ ID NO: 412018 - RNA, 19 nt, Human
ugccacagauaugcuaugc

SEQ ID NO: 412019 - RNA, 21 nt, Human
ugccaguaaauacuacguugu

SEQ ID NO: 412020 - RNA, 28 nt, Human
ugcuguacuccuuuagcugaguccuuca

SEQ ID NO: 412021 - RNA, 23 nt, Human
uguaaugacaggaguagggaggu

SEQ ID NO: 412022 - RNA, 23 nt, Human
uucuuauggccagcuucuuuaaa

SEQ ID NO: 412023 - RNA, 21 nt, Human
uugcuguacuccuuuagcuga

SEQ ID NO: 412024 - RNA, 22 nt, Human
aaaaaagucccgcgcagccccc

SEQ ID NO: 412025 - RNA, 20 nt, Human
aaaaacuuuaagugcuuuuc

SEQ ID NO: 412026 - RNA, 22 nt, Human
aaacacuaucccgucucccucc

SEQ ID NO: 412027 - RNA, 19 nt, Human
aaacagauaugcauugcau

SEQ ID NO: 412028 - RNA, 20 nt, Human
aaagucccgcgcagcccccc

SEQ ID NO: 412029 - RNA, 25 nt, Human
aaagucccgcgcagcccccccaccc

SEQ ID NO: 412030 - RNA, 19 nt, Human
aaagugcugggacuacagg

SEQ ID NO: 412031 - RNA, 21 nt, Human
aaagugcugggacuacaggug

SEQ ID NO: 412032 - RNA, 22 nt, Human
aaagugcugggacuacaggugg

SEQ ID NO: 412033 - RNA, 24 nt, Human
aaagugcugggacuacagguggga

SEQ ID NO: 412034 - RNA, 23 nt, Human
aaauaaaguuggagauuauaauc

SEQ ID NO: 412035 - RNA, 20 nt, Human
aacacuaucccgucucccuc

SEQ ID NO: 412036 - RNA, 20 nt, Human
aacucagcaggcccuggcau

SEQ ID NO: 412037 - RNA, 22 nt, Human
aagaaacucuugggguuacuaa

SEQ ID NO: 412038 - RNA, 21 nt, Human
aagaagcaacucagcaggccc

SEQ ID NO: 412039 - RNA, 21 nt, Human
aagauacacaagcuuuuguag

SEQ ID NO: 412040 - RNA, 26 nt, Human
aaguagcugagacuacaggcaagugc

SEQ ID NO: 412041 - RNA, 19 nt, Human
aagugcugggacuacaggu

SEQ ID NO: 412042 - RNA, 26 nt, Human
aagugcugggacuacaggugggagcc

SEQ ID NO: 412043 - RNA, 25 nt, Human
aauccuuaaaaccuguggcacuuaa

SEQ ID NO: 412044 - RNA, 18 nt, Human
acagcucacugcagccuc

SEQ ID NO: 412045 - RNA, 24 nt, Human
acccaggcuggagugcaauggcau

SEQ ID NO: 412046 - RNA, 23 nt, Human
accucagccuccuaaguagcuga

SEQ ID NO: 412047 - RNA, 18 nt, Human
accuggcccagccuauaa

SEQ ID NO: 412048 - RNA, 18 nt, Human
acuaguuuaggcucggcg

SEQ ID NO: 412049 - RNA, 18 nt, Human
acugcagccucaaccucc

SEQ ID NO: 412050 - RNA, 23 nt, Human
agaaacacuaucccgucucccuc

SEQ ID NO: 412051 - RNA, 25 nt, Human
agugauccucccgccuuugccuccc

SEQ ID NO: 412052 - RNA, 23 nt, Human
agugcaauggcauaaucacagcu

SEQ ID NO: 412053 - RNA, 24 nt, Human
auccucccgccuuugccucccaaa

SEQ ID NO: 412054 - RNA, 21 nt, Human
auggauaugagaagaaacucu

SEQ ID NO: 412055 - RNA, 20 nt, Human
auguugcccuggcuggucuc

SEQ ID NO: 412056 - RNA, 18 nt, Human
auugcucugucacccagg

SEQ ID NO: 412057 - RNA, 20 nt, Human
auuuuuggcaauguuuaugg

SEQ ID NO: 412058 - RNA, 27 nt, Human
caaagugcugggacuacaggugggagc

SEQ ID NO: 412059 - RNA, 28 nt, Human
caagugauccucccgccuuugccuccca

SEQ ID NO: 412060 - RNA, 24 nt, Human
caaugacgucucccuccgccgccu

SEQ ID NO: 412061 - RNA, 21 nt, Human
cacaggugguucaacagaauu

SEQ ID NO: 412062 - RNA, 19 nt, Human
cacugcagccucaaccucc

SEQ ID NO: 412063 - RNA, 19 nt, Human
cacuuggaaaaaaauacaa

SEQ ID NO: 412064 - RNA, 24 nt, Human
cacuuggaaaaaaauacaaacagg

SEQ ID NO: 412065 - RNA, 19 nt, Human
cagcaaaacaagucgcauc

SEQ ID NO: 412066 - RNA, 21 nt, Human
cagccuauaagcauuuaucca

SEQ ID NO: 412067 - RNA, 24 nt, Human
cagccucaaccuccuaggcauaag

SEQ ID NO: 412068 - RNA, 20 nt, Human
cagcggggcgcgguuccccc

SEQ ID NO: 412069 - RNA, 22 nt, Human
cagugugagugcugggggagga

SEQ ID NO: 412070 - RNA, 24 nt, Human
cauaaugaauagaagcuguagaua

SEQ ID NO: 412071 - RNA, 21 nt, Human
ccaaagugcugggacuacagg

SEQ ID NO: 412072 - RNA, 22 nt, Human
ccaaagugcugggacuacaggu

SEQ ID NO: 412073 - RNA, 19 nt, Human
ccacccccggcggcgcggc

SEQ ID NO: 412074 - RNA, 24 nt, Human
cccaaagugcugggacuacaggug

SEQ ID NO: 412075 - RNA, 19 nt, Human
ccccgagcccuucagcggg

SEQ ID NO: 412076 - RNA, 20 nt, Human
ccccugggcuuccugaagua

SEQ ID NO: 412077 - RNA, 19 nt, Human
cccgcgcagcccccccacc

SEQ ID NO: 412078 - RNA, 19 nt, Human
cccgcgcagcccccccacc

SEQ ID NO: 412079 - RNA, 19 nt, Human
cccuccgccgccuccggau

SEQ ID NO: 412080 - RNA, 19 nt, Human
cccuccgccgcuaccacag

SEQ ID NO: 412081 - RNA, 23 nt, Human
ccgccgagacugacaaacaaccc

SEQ ID NO: 412082 - RNA, 23 nt, Human
ccgccgccgagacugacaaacaa

SEQ ID NO: 412083 - RNA, 18 nt, Human
ccgccgccgccgccgccg

SEQ ID NO: 412084 - RNA, 18 nt, Human
ccgccgccgccgccgccg

SEQ ID NO: 412085 - RNA, 18 nt, Human
ccgccgccgccgccgccg

SEQ ID NO: 412086 - RNA, 18 nt, Human
ccgccgccgccgccgccg

SEQ ID NO: 412087 - RNA, 19 nt, Human
ccgccgccgccgccgccga

SEQ ID NO: 412088 - RNA, 23 nt, Human
ccgccgccgccgccgccgccgag

SEQ ID NO: 412089 - RNA, 24 nt, Human
ccgccgccgccgccgccgccgccg

SEQ ID NO: 412090 - RNA, 24 nt, Human
ccgccgccgccgccgccgccgccg

SEQ ID NO: 412091 - RNA, 24 nt, Human
ccgccgccgccgccgccgccgccg

SEQ ID NO: 412092 - RNA, 24 nt, Human
ccgccgccgccgccgccgccgccg

SEQ ID NO: 412093 - RNA, 25 nt, Human
ccgccgccgccgccgccgccgccga

SEQ ID NO: 412094 - RNA, 23 nt, Human
ccgccuccggaucccuccgcccu

SEQ ID NO: 412095 - RNA, 24 nt, Human
ccgccuuugccucccaaagugcug

SEQ ID NO: 412096 - RNA, 24 nt, Human
ccuaaguagcugagacuacaggca

SEQ ID NO: 412097 - RNA, 22 nt, Human
ccucccgccuuugccucccaaa

SEQ ID NO: 412098 - RNA, 26 nt, Human
ccucccgccuuugccucccaaagugc

SEQ ID NO: 412099 - RNA, 18 nt, Human
ccuggccucaagugaucc

SEQ ID NO: 412100 - RNA, 22 nt, Human
ccuggccucaagugauccuccc

SEQ ID NO: 412101 - RNA, 22 nt, Human
ccuggccucaagugauccuccc

SEQ ID NO: 412102 - RNA, 20 nt, Human
ccuuaaaaccuguggcacuu

SEQ ID NO: 412103 - RNA, 29 nt, Human
cgccgagacugacaaacaacccugcaaca

SEQ ID NO: 412104 - RNA, 23 nt, Human
cgccgccgagacugacaaacaac

SEQ ID NO: 412105 - RNA, 22 nt, Human
cggggcgcgguucccccugggc

SEQ ID NO: 412106 - RNA, 19 nt, Human
cuaaagaauucaaaaauaa

SEQ ID NO: 412107 - RNA, 24 nt, Human
cucaagugauccucccgccuuugc

SEQ ID NO: 412108 - RNA, 21 nt, Human
cuccaauaugugccuuucuca

SEQ ID NO: 412109 - RNA, 23 nt, Human
cuccacaccaacauuauacacuu

SEQ ID NO: 412110 - RNA, 21 nt, Human
cuccuaaguagcugagacuac

SEQ ID NO: 412111 - RNA, 22 nt, Human
cugcagccucaaccuccuaggc

SEQ ID NO: 412112 - RNA, 20 nt, Human
cuuuuuuuucugcagaaucc

SEQ ID NO: 412113 - RNA, 18 nt, Human
gaagugccaacugugaaa

SEQ ID NO: 412114 - RNA, 22 nt, Human
gccgagacugacaaacaacccu

SEQ ID NO: 412115 - RNA, 21 nt, Human
gccuuccccgagcccuucagc

SEQ ID NO: 412116 - RNA, 22 nt, Human
gccuuugccucccaaagugcug

SEQ ID NO: 412117 - RNA, 20 nt, Human
gcucugucacccaggcugga

SEQ ID NO: 412118 - RNA, 27 nt, Human
gcucugucacccaggcuggagugcaau

SEQ ID NO: 412119 - RNA, 24 nt, Human
gcugccccgcggucagucugaaaa

SEQ ID NO: 412120 - RNA, 19 nt, Human
gcuggagugcaauggcaua

SEQ ID NO: 412121 - RNA, 19 nt, Human
gcuuuuauuuuuaaagaca

SEQ ID NO: 412122 - RNA, 20 nt, Human
ggaaaaaaauacaaacagga

SEQ ID NO: 412123 - RNA, 21 nt, Human
ggacuacaggugggagccacc

SEQ ID NO: 412124 - RNA, 23 nt, Human
ggacuacaggugggagccaccug

SEQ ID NO: 412125 - RNA, 18 nt, Human
ggauaugagaagaaacuc

SEQ ID NO: 412126 - RNA, 18 nt, Human
ggcaagugccacuaugcc

SEQ ID NO: 412127 - RNA, 24 nt, Human
ggccucaagugauccucccgccuu

SEQ ID NO: 412128 - RNA, 22 nt, Human
ggcucggcgggguggagaaaga

SEQ ID NO: 412129 - RNA, 22 nt, Human
gggggaggagggggcgggacgc

SEQ ID NO: 412130 - RNA, 21 nt, Human
ggucagucugaaaaaaaaaaa

SEQ ID NO: 412131 - RNA, 22 nt, Human
gugagugcugggggaggagggg

SEQ ID NO: 412132 - RNA, 25 nt, Human
uaaaaaaaaaaucuccacaagaaga

SEQ ID NO: 412133 - RNA, 22 nt, Human
uaacuuaguucacaccaugcaa

SEQ ID NO: 412134 - RNA, 22 nt, Human
uacaggcaagugccacuaugcc

SEQ ID NO: 412135 - RNA, 24 nt, Human
uacaggcaagugccacuaugccca

SEQ ID NO: 412136 - RNA, 22 nt, Human
uagauggagagcuagagacuua

SEQ ID NO: 412137 - RNA, 22 nt, Human
uaucccgucucccuccccguca

SEQ ID NO: 412138 - RNA, 24 nt, Human
uaucccgucucccuccccgucacu

SEQ ID NO: 412139 - RNA, 22 nt, Human
uaugucuagaauuacucaauug

SEQ ID NO: 412140 - RNA, 24 nt, Human
uaugugccuuucucaaaccaauuc

SEQ ID NO: 412141 - RNA, 24 nt, Human
uauguugcccuggcuggucucaaa

SEQ ID NO: 412142 - RNA, 23 nt, Human
uauugcucugucacccaggcugg

SEQ ID NO: 412143 - RNA, 24 nt, Human
uauugcucugucacccaggcugga

SEQ ID NO: 412144 - RNA, 22 nt, Human
ucacaccaugcaauaaaaagua

SEQ ID NO: 412145 - RNA, 18 nt, Human
ucacccaggcuggagugc

SEQ ID NO: 412146 - RNA, 19 nt, Human
ucacugcagccucaaccuc

SEQ ID NO: 412147 - RNA, 23 nt, Human
ucacugcagccucaaccuccuag

SEQ ID NO: 412148 - RNA, 24 nt, Human
ucacugcagccucaaccuccuagg

SEQ ID NO: 412149 - RNA, 25 nt, Human
ucacuguggaucgccgccgccgccg

SEQ ID NO: 412150 - RNA, 26 nt, Human
ucauuaaucaaaaaauuuuuuaaagu

SEQ ID NO: 412151 - RNA, 21 nt, Human
uccacaccaacauuauacacu

SEQ ID NO: 412152 - RNA, 23 nt, Human
ucccaaagugcugggacuacagg

SEQ ID NO: 412153 - RNA, 20 nt, Human
ucccgucucccuccccguca

SEQ ID NO: 412154 - RNA, 18 nt, Human
uccgcagcugccccgcgg

SEQ ID NO: 412155 - RNA, 24 nt, Human
uccuaaguagcugagacuacaggc

SEQ ID NO: 412156 - RNA, 25 nt, Human
ucgccgccgccgccgccgccgccgg

SEQ ID NO: 412157 - RNA, 23 nt, Human
ucgccgccgccgccgccgccggg

SEQ ID NO: 412158 - RNA, 21 nt, Human
ucucccuccgccgccuccgga

SEQ ID NO: 412159 - RNA, 27 nt, Human
ucucuguguucagacuagagguugugg

SEQ ID NO: 412160 - RNA, 24 nt, Human
ucugucacccaggcuggagugcaa

SEQ ID NO: 412161 - RNA, 21 nt, Human
ugagacuacaggcaagugcca

SEQ ID NO: 412162 - RNA, 24 nt, Human
ugagacuacaggcaagugccacua

SEQ ID NO: 412163 - RNA, 20 nt, Human
ugcuaauacuggggcaugaa

SEQ ID NO: 412164 - RNA, 20 nt, Human
ugcucauggcagaagugcca

SEQ ID NO: 412165 - RNA, 24 nt, Human
ugcucugucacccaggcuggagug

SEQ ID NO: 412166 - RNA, 24 nt, Human
ugcugggacuacaggugggagcca

SEQ ID NO: 412167 - RNA, 19 nt, Human
ugcugggggaggagggggc

SEQ ID NO: 412168 - RNA, 20 nt, Human
ugcugggggaggagggggcc

SEQ ID NO: 412169 - RNA, 21 nt, Human
uggaaaaaaauacaaacagga

SEQ ID NO: 412170 - RNA, 20 nt, Human
uggacagagucaaaccaguu

SEQ ID NO: 412171 - RNA, 21 nt, Human
uggagugcaauggcauaauca

SEQ ID NO: 412172 - RNA, 23 nt, Human
uggcauaaucacagcucacugca

SEQ ID NO: 412173 - RNA, 18 nt, Human
uggccucaagugauccuc

SEQ ID NO: 412174 - RNA, 24 nt, Human
uggccucaagugauccucccgccu

SEQ ID NO: 412175 - RNA, 21 nt, Human
ugggacuacaggugggagcca

SEQ ID NO: 412176 - RNA, 22 nt, Human
ugggacuacaggugggagccac

SEQ ID NO: 412177 - RNA, 20 nt, Human
ugucacccaggcuggagugc

SEQ ID NO: 412178 - RNA, 22 nt, Human
ugucaugaaaacuccacaccaa

SEQ ID NO: 412179 - RNA, 20 nt, Human
uuaaccccuccuacacacau

SEQ ID NO: 412180 - RNA, 21 nt, Human
uuacaccaagauuucccucca

SEQ ID NO: 412181 - RNA, 18 nt, Human
uuccccgagcccuucagc

SEQ ID NO: 412182 - RNA, 21 nt, Human
uugcucugucacccaggcugg

SEQ ID NO: 412183 - RNA, 22 nt, Human
uugcucugucacccaggcugga

SEQ ID NO: 412184 - RNA, 24 nt, Human
uugcucugucacccaggcuggagu

SEQ ID NO: 412185 - RNA, 23 nt, Human
uuuaaagugcuaccaagcagcaa

SEQ ID NO: 412186 - RNA, 18 nt, Human
uuuaugguuuuacuuucu

SEQ ID NO: 412187 - RNA, 23 nt, Human
uuuaugguuuuacuuucuucauu

SEQ ID NO: 412188 - RNA, 19 nt, Human
uuuguagguucuaaacuga

SEQ ID NO: 412189 - RNA, 21 nt, Human
uuuucugcagaauccuuaaaa

SEQ ID NO: 412190 - RNA, 20 nt, Human
uuuuucugcagaauccuuaa

SEQ ID NO: 412191 - RNA, 18 nt, Human
aaagaagcaagacuugca

SEQ ID NO: 412192 - RNA, 23 nt, Human
aacugacaaagguaaaagguaaa

SEQ ID NO: 412193 - RNA, 20 nt, Human
aagcaagacuugcaaguagg

SEQ ID NO: 412194 - RNA, 26 nt, Human
acaaaggguaaaaggaaauccucuca

SEQ ID NO: 412195 - RNA, 21 nt, Human
acacugcauacaaauuaugug

SEQ ID NO: 412196 - RNA, 25 nt, Human
acagcaugaaccacauacucagagg

SEQ ID NO: 412197 - RNA, 23 nt, Human
agaaaaaaacccuuccuuaagga

SEQ ID NO: 412198 - RNA, 20 nt, Human
agaaguccguauuguaaagg

SEQ ID NO: 412199 - RNA, 21 nt, Human
agcuacaaaggguaaaaggaa

SEQ ID NO: 412200 - RNA, 20 nt, Human
aggauaaaagcagaguagaa

SEQ ID NO: 412201 - RNA, 28 nt, Human
caaacugacaaagguaaaagguaaaaca

SEQ ID NO: 412202 - RNA, 27 nt, Human
cacaacagcaugaaccacauacucaga

SEQ ID NO: 412203 - RNA, 20 nt, Human
caggcuccaaaggauaaaag

SEQ ID NO: 412204 - RNA, 22 nt, Human
cauaacuaaucuacagcuacaa

SEQ ID NO: 412205 - RNA, 20 nt, Human
cauuuugauaucccaaagaa

SEQ ID NO: 412206 - RNA, 23 nt, Human
cccaggcuccaaaggauaaaaaa

SEQ ID NO: 412207 - RNA, 24 nt, Human
cugagcuacaaaggguaaaaggaa

SEQ ID NO: 412208 - RNA, 21 nt, Human
ggaaaacucggccgcccgccc

SEQ ID NO: 412209 - RNA, 20 nt, Human
ggagggagagagaaaaaaac

SEQ ID NO: 412210 - RNA, 18 nt, Human
ggugugggggagggagag

SEQ ID NO: 412211 - RNA, 19 nt, Human
uaaaaggaaauccucucau

SEQ ID NO: 412212 - RNA, 18 nt, Human
uacaucaggugcucucug

SEQ ID NO: 412213 - RNA, 22 nt, Human
uaggcuaaaaugcacuauaaua

SEQ ID NO: 412214 - RNA, 22 nt, Human
uauaacauauacacagaagucc

SEQ ID NO: 412215 - RNA, 21 nt, Human
ucccaaagaagcaagacuugc

SEQ ID NO: 412216 - RNA, 20 nt, Human
uccuucaggagcauguuuau

SEQ ID NO: 412217 - RNA, 23 nt, Human
ucucauuacaaacugacaaaggu

SEQ ID NO: 412218 - RNA, 20 nt, Human
ucucuuggaaaacucggccg

SEQ ID NO: 412219 - RNA, 20 nt, Human
uggggagucucccaggcucc

SEQ ID NO: 412220 - RNA, 24 nt, Human
uuaguacaucacaaaauacauuuu

SEQ ID NO: 412221 - RNA, 19 nt, Human
aaagagcugggauuacagg

SEQ ID NO: 412222 - RNA, 24 nt, Human
aaagugcugggauugcaggcguga

SEQ ID NO: 412223 - RNA, 22 nt, Human
aacagcugcgccgagcgaccuc

SEQ ID NO: 412224 - RNA, 22 nt, Human
aagaccucaccugcaccugcuc

SEQ ID NO: 412225 - RNA, 18 nt, Human
aagagcugggauuacagg

SEQ ID NO: 412226 - RNA, 23 nt, Human
aaguaggaaagguuugaaaaaaa

SEQ ID NO: 412227 - RNA, 19 nt, Human
aagugcugggauugcaggc

SEQ ID NO: 412228 - RNA, 19 nt, Human
aagugcugggauugcaggc

SEQ ID NO: 412229 - RNA, 26 nt, Human
aagugcugggauugcaggcgugagcc

SEQ ID NO: 412230 - RNA, 22 nt, Human
aauggacuccucauggggccca

SEQ ID NO: 412231 - RNA, 20 nt, Human
acagaagccuccaggcaauu

SEQ ID NO: 412232 - RNA, 23 nt, Human
acaggcgcccgccaccacgcccg

SEQ ID NO: 412233 - RNA, 18 nt, Human
acaggguuucacuguuag

SEQ ID NO: 412234 - RNA, 23 nt, Human
acaggguuucacuguuagccagg

SEQ ID NO: 412235 - RNA, 22 nt, Human
acccccucaacacuccagggag

SEQ ID NO: 412236 - RNA, 24 nt, Human
accuugugaucuaccugccuuggc

SEQ ID NO: 412237 - RNA, 25 nt, Human
acucuguugcccaggcuggagugca

SEQ ID NO: 412238 - RNA, 18 nt, Human
acugcaagcuccgccucc

SEQ ID NO: 412239 - RNA, 30 nt, Human
agaaggaaaagaaucugcuguccacagaaa

SEQ ID NO: 412240 - RNA, 18 nt, Human
agagcugggauuacaggc

SEQ ID NO: 412241 - RNA, 20 nt, Human
agccccuugugagaaggaaa

SEQ ID NO: 412242 - RNA, 24 nt, Human
agcgauucuccugccucagccucc

SEQ ID NO: 412243 - RNA, 20 nt, Human
agcguucuggguauuccauc

SEQ ID NO: 412244 - RNA, 18 nt, Human
agcuccgccuccuggguu

SEQ ID NO: 412245 - RNA, 20 nt, Human
aggaagaaaggaaguaaugg

SEQ ID NO: 412246 - RNA, 20 nt, Human
aggcgcccgccaccacgccc

SEQ ID NO: 412247 - RNA, 21 nt, Human
aggcguggagcuacuucaacc

SEQ ID NO: 412248 - RNA, 18 nt, Human
aggcuggagugcaguggc

SEQ ID NO: 412249 - RNA, 25 nt, Human
aggcuggagugcaguggcgugaucu

SEQ ID NO: 412250 - RNA, 18 nt, Human
aguagcugggacuacagg

SEQ ID NO: 412251 - RNA, 23 nt, Human
aguagcugggacuacaggcgccc

SEQ ID NO: 412252 - RNA, 18 nt, Human
agugcaguggcgggacuu

SEQ ID NO: 412253 - RNA, 23 nt, Human
agugcaguggcgggacuucagcu

SEQ ID NO: 412254 - RNA, 19 nt, Human
agugcaguggcgugaucuc

SEQ ID NO: 412255 - RNA, 21 nt, Human
agugcaguggcgugaucucag

SEQ ID NO: 412256 - RNA, 23 nt, Human
agugcaguggcgugaucucagcu

SEQ ID NO: 412257 - RNA, 24 nt, Human
agugcaguggcgugaucucagcuc

SEQ ID NO: 412258 - RNA, 24 nt, Human
aguggcgugaucucagcucacugc

SEQ ID NO: 412259 - RNA, 19 nt, Human
aucuaccugccuuggccuc

SEQ ID NO: 412260 - RNA, 24 nt, Human
augauccgcccgccucagucuccc

SEQ ID NO: 412261 - RNA, 20 nt, Human
augggguuucacuguauuag

SEQ ID NO: 412262 - RNA, 19 nt, Human
caaaaacccuagaauuucc

SEQ ID NO: 412263 - RNA, 24 nt, Human
caaagagcugggauuacaggcacg

SEQ ID NO: 412264 - RNA, 24 nt, Human
caaagugcugggauugcaggcgug

SEQ ID NO: 412265 - RNA, 22 nt, Human
caaaucuacuguaugccucaua

SEQ ID NO: 412266 - RNA, 24 nt, Human
caacagucauuagguuccaccaca

SEQ ID NO: 412267 - RNA, 20 nt, Human
caagcgauucuccugccuca

SEQ ID NO: 412268 - RNA, 22 nt, Human
caagcgauucuccugccucagc

SEQ ID NO: 412269 - RNA, 18 nt, Human
cacacuucaaaaaagcau

SEQ ID NO: 412270 - RNA, 19 nt, Human
cacagaagccuccaggcaa

SEQ ID NO: 412271 - RNA, 22 nt, Human
caccaccacgcccagcuaauuu

SEQ ID NO: 412272 - RNA, 21 nt, Human
cacgccauucuccugccucag

SEQ ID NO: 412273 - RNA, 24 nt, Human
cacucuguugcccaggcuggagug

SEQ ID NO: 412274 - RNA, 23 nt, Human
cacugcuaccucugccucccggg

SEQ ID NO: 412275 - RNA, 18 nt, Human
cacuguauuagccaggau

SEQ ID NO: 412276 - RNA, 19 nt, Human
cacuguauuagccaggauc

SEQ ID NO: 412277 - RNA, 24 nt, Human
cacuguauuagccaggauggucuc

SEQ ID NO: 412278 - RNA, 24 nt, Human
cacuucaaaaaagcauuuccugga

SEQ ID NO: 412279 - RNA, 18 nt, Human
cagaagccaggcguggag

SEQ ID NO: 412280 - RNA, 24 nt, Human
cagagucucacucuguugcccagg

SEQ ID NO: 412281 - RNA, 20 nt, Human
cagcacccagccuccaaauu

SEQ ID NO: 412282 - RNA, 20 nt, Human
cagccuccugaguagcugag

SEQ ID NO: 412283 - RNA, 24 nt, Human
caggaaggacccagaaagggugcc

SEQ ID NO: 412284 - RNA, 21 nt, Human
caggcgcccgccaccacgccc

SEQ ID NO: 412285 - RNA, 22 nt, Human
caggcgugagccacagcaccca

SEQ ID NO: 412286 - RNA, 22 nt, Human
cagggacaccaugggauuguuu

SEQ ID NO: 412287 - RNA, 22 nt, Human
cagggcagggaaaacacagaac

SEQ ID NO: 412288 - RNA, 24 nt, Human
caugauccgcccgccucagucucc

SEQ ID NO: 412289 - RNA, 19 nt, Human
ccaaagagcugggauuaca

SEQ ID NO: 412290 - RNA, 23 nt, Human
ccaaagagcugggauuacaggca

SEQ ID NO: 412291 - RNA, 24 nt, Human
ccaaagagcugggauuacaggcac

SEQ ID NO: 412292 - RNA, 20 nt, Human
ccaaagugcugggauugcag

SEQ ID NO: 412293 - RNA, 22 nt, Human
ccaaagugcugggauugcaggc

SEQ ID NO: 412294 - RNA, 24 nt, Human
ccaaagugcugggauugcaggcgu

SEQ ID NO: 412295 - RNA, 24 nt, Human
cccaaagagcugggauuacaggca

SEQ ID NO: 412296 - RNA, 18 nt, Human
cccacaugcccaccucca

SEQ ID NO: 412297 - RNA, 20 nt, Human
cccacaugcccaccuccaca

SEQ ID NO: 412298 - RNA, 25 nt, Human
cccacaugcccaccuccacagccca

SEQ ID NO: 412299 - RNA, 21 nt, Human
cccaggcuggagugcaguggc

SEQ ID NO: 412300 - RNA, 22 nt, Human
cccaggcuggagugcaguggcg

SEQ ID NO: 412301 - RNA, 22 nt, Human
cccaggcuggagugcaguggcg

SEQ ID NO: 412302 - RNA, 19 nt, Human
ccccuggaagucuggcagg

SEQ ID NO: 412303 - RNA, 20 nt, Human
cccggguucaagcgauucuc

SEQ ID NO: 412304 - RNA, 23 nt, Human
cccggguucaagcgauucuccug

SEQ ID NO: 412305 - RNA, 24 nt, Human
ccgccucagucucccaaagugcug

SEQ ID NO: 412306 - RNA, 22 nt, Human
ccgggggagaaugcugagcugc

SEQ ID NO: 412307 - RNA, 22 nt, Human
ccucauagaccaucccuuauuu

SEQ ID NO: 412308 - RNA, 24 nt, Human
ccucccggguucaagcgauucucc

SEQ ID NO: 412309 - RNA, 19 nt, Human
ccuccuggccugugcugcu

SEQ ID NO: 412310 - RNA, 21 nt, Human
ccucuccucccucucccgauc

SEQ ID NO: 412311 - RNA, 21 nt, Human
ccugaccuugugaucuaccug

SEQ ID NO: 412312 - RNA, 19 nt, Human
ccugaguagcugagacuac

SEQ ID NO: 412313 - RNA, 24 nt, Human
ccugaguagcugagacuacaggcg

SEQ ID NO: 412314 - RNA, 23 nt, Human
ccugccucagccuccugaguagc

SEQ ID NO: 412315 - RNA, 24 nt, Human
ccugccucagccuccugaguagcu

SEQ ID NO: 412316 - RNA, 24 nt, Human
ccugccucagucuucagaguagcu

SEQ ID NO: 412317 - RNA, 20 nt, Human
ccugugcugcagcuacaggg

SEQ ID NO: 412318 - RNA, 24 nt, Human
cgccucagucucccaaagugcugg

SEQ ID NO: 412319 - RNA, 19 nt, Human
cgccuccuggguucacgcc

SEQ ID NO: 412320 - RNA, 24 nt, Human
cgcucuguugcccaggcuggagug

SEQ ID NO: 412321 - RNA, 23 nt, Human
cgugcaccaccacgcccagcuaa

SEQ ID NO: 412322 - RNA, 19 nt, Human
cucacagaagccuccaggc

SEQ ID NO: 412323 - RNA, 24 nt, Human
cucacucuguugcccaggcuggag

SEQ ID NO: 412324 - RNA, 24 nt, Human
cucacugcuaccucugccucccgg

SEQ ID NO: 412325 - RNA, 24 nt, Human
cucagucuucagaguagcugggac

SEQ ID NO: 412326 - RNA, 18 nt, Human
cucaugauccgcccgccu

SEQ ID NO: 412327 - RNA, 22 nt, Human
cuccugccucagccuccugagu

SEQ ID NO: 412328 - RNA, 21 nt, Human
cuccuggguucacgccauucu

SEQ ID NO: 412329 - RNA, 22 nt, Human
cuccuuucccccaucuccuucc

SEQ ID NO: 412330 - RNA, 21 nt, Human
cucgcucuguugcccaggcug

SEQ ID NO: 412331 - RNA, 24 nt, Human
cucgcucuguugcccaggcuggag

SEQ ID NO: 412332 - RNA, 23 nt, Human
cugccuuggccucccaaagagcu

SEQ ID NO: 412333 - RNA, 24 nt, Human
cuggagugcaguggcgugaucuca

SEQ ID NO: 412334 - RNA, 23 nt, Human
cuuccccugugcugcagcuacag

SEQ ID NO: 412335 - RNA, 24 nt, Human
cuuggccucccaaagagcugggau

SEQ ID NO: 412336 - RNA, 21 nt, Human
gaaaagaaucugcuguccaca

SEQ ID NO: 412337 - RNA, 23 nt, Human
gaauccacaggaagccaugaacu

SEQ ID NO: 412338 - RNA, 22 nt, Human
gaccucaugauccgcccgccuc

SEQ ID NO: 412339 - RNA, 21 nt, Human
gaccuugugaucuaccugccu

SEQ ID NO: 412340 - RNA, 24 nt, Human
gaccuugugaucuaccugccuugg

SEQ ID NO: 412341 - RNA, 24 nt, Human
gaguagcugagacuacaggcgugc

SEQ ID NO: 412342 - RNA, 20 nt, Human
gaguagcugggacuacaggc

SEQ ID NO: 412343 - RNA, 18 nt, Human
gauugcaggcgugagcca

SEQ ID NO: 412344 - RNA, 23 nt, Human
gauugcaggcgugagccacagca

SEQ ID NO: 412345 - RNA, 19 nt, Human
gcccaggcuggagugcagu

SEQ ID NO: 412346 - RNA, 18 nt, Human
gcccagucaagugugggg

SEQ ID NO: 412347 - RNA, 23 nt, Human
gcccggcuaauuuuuuguauuuu

SEQ ID NO: 412348 - RNA, 19 nt, Human
gccgagcgaccucgccuca

SEQ ID NO: 412349 - RNA, 24 nt, Human
gccucagucucccaaagugcuggg

SEQ ID NO: 412350 - RNA, 19 nt, Human
gccucccaaagagcuggga

SEQ ID NO: 412351 - RNA, 25 nt, Human
gccuccuggguucacgccauucucc

SEQ ID NO: 412352 - RNA, 23 nt, Human
gcgauucuccugccucagccucc

SEQ ID NO: 412353 - RNA, 25 nt, Human
gcucuguugcccaggcuggagugca

SEQ ID NO: 412354 - RNA, 18 nt, Human
gcugcucagcuggcccug

SEQ ID NO: 412355 - RNA, 19 nt, Human
gcuggagugcaguggcgug

SEQ ID NO: 412356 - RNA, 23 nt, Human
ggaaagguuugaaaaaaaaaaaa

SEQ ID NO: 412357 - RNA, 20 nt, Human
ggaagggagggagaaaagga

SEQ ID NO: 412358 - RNA, 24 nt, Human
ggauggucgcgaucuccugaccuc

SEQ ID NO: 412359 - RNA, 22 nt, Human
ggcuggagugcaguggcgugau

SEQ ID NO: 412360 - RNA, 20 nt, Human
ggggcccacagggaaccagg

SEQ ID NO: 412361 - RNA, 18 nt, Human
gggguuucacuguauuag

SEQ ID NO: 412362 - RNA, 20 nt, Human
gguagugcugacagcucuga

SEQ ID NO: 412363 - RNA, 19 nt, Human
ggucucaauuuccugaccu

SEQ ID NO: 412364 - RNA, 21 nt, Human
gugcugcagcuacagggcccc

SEQ ID NO: 412365 - RNA, 24 nt, Human
uaaauucccagugcauccaaaaug

SEQ ID NO: 412366 - RNA, 18 nt, Human
uaagucacaaaacaaggg

SEQ ID NO: 412367 - RNA, 19 nt, Human
uaauuuuuuguaauuuuag

SEQ ID NO: 412368 - RNA, 24 nt, Human
uaauuuuuuguauuuuuaguggag

SEQ ID NO: 412369 - RNA, 25 nt, Human
uaauuuuuuguauuuuuaguggaga

SEQ ID NO: 412370 - RNA, 21 nt, Human
uacaaaaacccuagaauuucc

SEQ ID NO: 412371 - RNA, 23 nt, Human
uacaggcgcccgccaccacgccc

SEQ ID NO: 412372 - RNA, 24 nt, Human
uacaggcgugcaccaccacgccca

SEQ ID NO: 412373 - RNA, 19 nt, Human
uacuguaaaacugcaguaa

SEQ ID NO: 412374 - RNA, 23 nt, Human
uagcagacaugggguuucacugu

SEQ ID NO: 412375 - RNA, 25 nt, Human
uaggaaagguuugaaaaaaaaaaaa

SEQ ID NO: 412376 - RNA, 20 nt, Human
uaguggagacaggguuucac

SEQ ID NO: 412377 - RNA, 22 nt, Human
uaguggagacaggguuucacug

SEQ ID NO: 412378 - RNA, 22 nt, Human
ucaaaaaagcauuuccuggaag

SEQ ID NO: 412379 - RNA, 24 nt, Human
ucaaaaaagcauuuccuggaagua

SEQ ID NO: 412380 - RNA, 24 nt, Human
ucaaccagaaacugucacccauga

SEQ ID NO: 412381 - RNA, 24 nt, Human
ucaagagacugccucuccucccuc

SEQ ID NO: 412382 - RNA, 18 nt, Human
ucaccugcaccugcucua

SEQ ID NO: 412383 - RNA, 24 nt, Human
ucacucuguugcccaggcuggagu

SEQ ID NO: 412384 - RNA, 18 nt, Human
ucacugcaagcuccgccu

SEQ ID NO: 412385 - RNA, 23 nt, Human
ucacugcaagcuccgccuccugg

SEQ ID NO: 412386 - RNA, 24 nt, Human
ucacugcaagcuccgccuccuggg

SEQ ID NO: 412387 - RNA, 24 nt, Human
ucacugcuaccucugccucccggg

SEQ ID NO: 412388 - RNA, 24 nt, Human
ucacuguauuagccaggauggucu

SEQ ID NO: 412389 - RNA, 23 nt, Human
ucagaguagcugggacuacaggc

SEQ ID NO: 412390 - RNA, 24 nt, Human
ucagaguagcugggacuacaggcg

SEQ ID NO: 412391 - RNA, 19 nt, Human
ucagcucacugcaagcucc

SEQ ID NO: 412392 - RNA, 23 nt, Human
ucagucuucagaguagcugggac

SEQ ID NO: 412393 - RNA, 19 nt, Human
ucccaaagagcugggauua

SEQ ID NO: 412394 - RNA, 23 nt, Human
ucccaaagagcugggauuacagg

SEQ ID NO: 412395 - RNA, 24 nt, Human
ucccaaagagcugggauuacaggc

SEQ ID NO: 412396 - RNA, 24 nt, Human
ucccaaagugcugggauugcaggc

SEQ ID NO: 412397 - RNA, 19 nt, Human
uccccagccugggcccagg

SEQ ID NO: 412398 - RNA, 26 nt, Human
uccccagccugggcccaggggcccac

SEQ ID NO: 412399 - RNA, 21 nt, Human
uccccuggaagucuggcaggu

SEQ ID NO: 412400 - RNA, 21 nt, Human
ucccggguucaagcgauucuc

SEQ ID NO: 412401 - RNA, 24 nt, Human
ucccggguucaagcgauucuccug

SEQ ID NO: 412402 - RNA, 21 nt, Human
uccgcccgccucagucuccca

SEQ ID NO: 412403 - RNA, 24 nt, Human
uccuaagucacaaaacaagggcuc

SEQ ID NO: 412404 - RNA, 24 nt, Human
uccugaguagcugagacuacaggc

SEQ ID NO: 412405 - RNA, 24 nt, Human
uccuggguucacgccauucuccug

SEQ ID NO: 412406 - RNA, 24 nt, Human
ucgcucuguugcccaggcuggagu

SEQ ID NO: 412407 - RNA, 25 nt, Human
ucuaguaaugcacuaguuacuaaua

SEQ ID NO: 412408 - RNA, 23 nt, Human
ucucacucuguugcccaggcugg

SEQ ID NO: 412409 - RNA, 24 nt, Human
ucucacucuguugcccaggcugga

SEQ ID NO: 412410 - RNA, 26 nt, Human
ucucacucuguugcccaggcuggagu

SEQ ID NO: 412411 - RNA, 27 nt, Human
ucucacucuguugcccaggcuggagug

SEQ ID NO: 412412 - RNA, 25 nt, Human
ucuccugaccucaugauccgcccgc

SEQ ID NO: 412413 - RNA, 19 nt, Human
ucucgcucuguugcccagg

SEQ ID NO: 412414 - RNA, 23 nt, Human
ucucgcucuguugcccaggcugg

SEQ ID NO: 412415 - RNA, 24 nt, Human
ucucgcucuguugcccaggcugga

SEQ ID NO: 412416 - RNA, 26 nt, Human
ucucgcucuguugcccaggcuggagu

SEQ ID NO: 412417 - RNA, 27 nt, Human
ucucgcucuguugcccaggcuggagug

SEQ ID NO: 412418 - RNA, 19 nt, Human
ucugauaaucuaccugaag

SEQ ID NO: 412419 - RNA, 18 nt, Human
ucuguugcccaggcugga

SEQ ID NO: 412420 - RNA, 24 nt, Human
ucuguugcccaggcuggagugcag

SEQ ID NO: 412421 - RNA, 24 nt, Human
ucuguugcccaggcuggagugcag

SEQ ID NO: 412422 - RNA, 21 nt, Human
ugaaaaaaaaaaaagaugcca

SEQ ID NO: 412423 - RNA, 21 nt, Human
ugagaaggaaaagaaucugcu

SEQ ID NO: 412424 - RNA, 18 nt, Human
ugagacagagucucacuc

SEQ ID NO: 412425 - RNA, 22 nt, Human
ugagacagagucucacucuguu

SEQ ID NO: 412426 - RNA, 21 nt, Human
ugagacuacaggcgugcacca

SEQ ID NO: 412427 - RNA, 24 nt, Human
ugagacuacaggcgugcaccacca

SEQ ID NO: 412428 - RNA, 21 nt, Human
ugagucucgcucuguugccca

SEQ ID NO: 412429 - RNA, 23 nt, Human
ugcacaaaugacucuucuuuaca

SEQ ID NO: 412430 - RNA, 18 nt, Human
ugcccaggcuggagugca

SEQ ID NO: 412431 - RNA, 18 nt, Human
ugcccaggcuggagugca

SEQ ID NO: 412432 - RNA, 21 nt, Human
ugcccaggcuggagugcagug

SEQ ID NO: 412433 - RNA, 21 nt, Human
ugcccaggcuggagugcagug

SEQ ID NO: 412434 - RNA, 22 nt, Human
ugcccaggcuggagugcagugg

SEQ ID NO: 412435 - RNA, 22 nt, Human
ugcccaggcuggagugcagugg

SEQ ID NO: 412436 - RNA, 24 nt, Human
ugccucagccuccugaguagcuga

SEQ ID NO: 412437 - RNA, 21 nt, Human
ugccucagucuucagaguagc

SEQ ID NO: 412438 - RNA, 24 nt, Human
ugccucagucuucagaguagcugg

SEQ ID NO: 412439 - RNA, 20 nt, Human
ugccucauagaccaucccuu

SEQ ID NO: 412440 - RNA, 18 nt, Human
ugccuguaaaauaugaag

SEQ ID NO: 412441 - RNA, 23 nt, Human
ugccuguaaaauaugaaggaaga

SEQ ID NO: 412442 - RNA, 25 nt, Human
ugcguuccauuuuuuuuuuuuuuuu

SEQ ID NO: 412443 - RNA, 19 nt, Human
uggagugcaguggcgggac

SEQ ID NO: 412444 - RNA, 28 nt, Human
uggagugcaguggcgggacggcucuagc

SEQ ID NO: 412445 - RNA, 21 nt, Human
uggagugcaguggcgggacuu

SEQ ID NO: 412446 - RNA, 23 nt, Human
uggagugcaguggcgggacuuca

SEQ ID NO: 412447 - RNA, 19 nt, Human
uggagugcaguggcgugau

SEQ ID NO: 412448 - RNA, 24 nt, Human
uggagugcaguggcgugaucucag

SEQ ID NO: 412449 - RNA, 27 nt, Human
uggcagguacaacccccucaacacucc

SEQ ID NO: 412450 - RNA, 20 nt, Human
uggccucccaaagagcuggg

SEQ ID NO: 412451 - RNA, 18 nt, Human
uggccuccuggccugugc

SEQ ID NO: 412452 - RNA, 24 nt, Human
uggcgugaucucagcucacugcaa

SEQ ID NO: 412453 - RNA, 21 nt, Human
ugggacuacaggcgcccgcca

SEQ ID NO: 412454 - RNA, 22 nt, Human
ugggacuacaggcgcccgccac

SEQ ID NO: 412455 - RNA, 24 nt, Human
ugggacuacaggcgcccgccacca

SEQ ID NO: 412456 - RNA, 21 nt, Human
ugggauuacaggcacgaacca

SEQ ID NO: 412457 - RNA, 23 nt, Human
ugggauuacaggcacgaaccacc

SEQ ID NO: 412458 - RNA, 24 nt, Human
ugggauuacaggcacgaaccaccg

SEQ ID NO: 412459 - RNA, 24 nt, Human
ugggauuacaggcacgaaccaccg

SEQ ID NO: 412460 - RNA, 18 nt, Human
ugggauugcaggcgugag

SEQ ID NO: 412461 - RNA, 19 nt, Human
ugggauugcaggcgugagc

SEQ ID NO: 412462 - RNA, 21 nt, Human
ugggauugcaggcgugagcca

SEQ ID NO: 412463 - RNA, 22 nt, Human
ugggauugcaggcgugagccac

SEQ ID NO: 412464 - RNA, 23 nt, Human
ugggauugcaggcgugagccaca

SEQ ID NO: 412465 - RNA, 24 nt, Human
ugggauugcaggcgugagccacag

SEQ ID NO: 412466 - RNA, 24 nt, Human
ugggguuucacuguauuagccagg

SEQ ID NO: 412467 - RNA, 20 nt, Human
uggguucacgccauucuccu

SEQ ID NO: 412468 - RNA, 23 nt, Human
uguaaaauaugaaggaagaaagg

SEQ ID NO: 412469 - RNA, 23 nt, Human
uguacaaaaacccuagaauuucc

SEQ ID NO: 412470 - RNA, 20 nt, Human
ugugcugcucagcuggcccu

SEQ ID NO: 412471 - RNA, 19 nt, Human
ugugugccccuccagggcc

SEQ ID NO: 412472 - RNA, 21 nt, Human
uuagcagacaugggguuucac

SEQ ID NO: 412473 - RNA, 24 nt, Human
uuagcagacaugggguuucacugu

SEQ ID NO: 412474 - RNA, 21 nt, Human
uuaguggagacaggguuucac

SEQ ID NO: 412475 - RNA, 24 nt, Human
uuaguggagacaggguuucacugu

SEQ ID NO: 412476 - RNA, 19 nt, Human
uucaaccagaaacugucac

SEQ ID NO: 412477 - RNA, 21 nt, Human
uucaagcgauucuccugccuc

SEQ ID NO: 412478 - RNA, 23 nt, Human
uucaagcgauucuccugccucag

SEQ ID NO: 412479 - RNA, 24 nt, Human
uucaagcgauucuccugccucagc

SEQ ID NO: 412480 - RNA, 20 nt, Human
uucccagugcauccaaaaug

SEQ ID NO: 412481 - RNA, 24 nt, Human
uuccugaccuugugaucuaccugc

SEQ ID NO: 412482 - RNA, 24 nt, Human
uugcccaggcuggagugcaguggc

SEQ ID NO: 412483 - RNA, 24 nt, Human
uugcccaggcuggagugcaguggc

SEQ ID NO: 412484 - RNA, 21 nt, Human
uuuucuguagauccagaagaa

SEQ ID NO: 412485 - RNA, 24 nt, Human
uuuuuaguggagacaggguuucac

SEQ ID NO: 412486 - RNA, 21 nt, Human
uuuuuguauuuuuaguggaga

SEQ ID NO: 412487 - RNA, 18 nt, Human
uuuuuuguaauuuuagca

SEQ ID NO: 412488 - RNA, 20 nt, Human
uuuuuuguaauuuuagcaga

SEQ ID NO: 412489 - RNA, 24 nt, Human
uuuuuuguauuuuuaguggagaca

SEQ ID NO: 412490 - RNA, 20 nt, Human
uuuuuuuuuuugagacagag

SEQ ID NO: 412491 - RNA, 18 nt, Human
uuuuuuuuuuuuuuuuug

SEQ ID NO: 412492 - RNA, 24 nt, Human
aaaaagaacugguucagaaaacac

SEQ ID NO: 412493 - RNA, 21 nt, Human
aaaaauaacccccccagaaac

SEQ ID NO: 412494 - RNA, 18 nt, Human
aaagaacugguucagaaa

SEQ ID NO: 412495 - RNA, 21 nt, Human
aaauaacccccccagaaacac

SEQ ID NO: 412496 - RNA, 23 nt, Human
aagaaaucaagaucuaaagggug

SEQ ID NO: 412497 - RNA, 18 nt, Human
aaugcaugcauucagacc

SEQ ID NO: 412498 - RNA, 21 nt, Human
acaauacacacacacacacac

SEQ ID NO: 412499 - RNA, 24 nt, Human
acaauacacacacacacacaccaa

SEQ ID NO: 412500 - RNA, 21 nt, Human
acacacacaccaaaaaaauaa

SEQ ID NO: 412501 - RNA, 23 nt, Human
acagaagacauagggccaccuag

SEQ ID NO: 412502 - RNA, 21 nt, Human
acaucuaccuaucagagcggc

SEQ ID NO: 412503 - RNA, 19 nt, Human
auuagcucccugcuuuaua

SEQ ID NO: 412504 - RNA, 19 nt, Human
caaaaaaauaaccccccca

SEQ ID NO: 412505 - RNA, 24 nt, Human
cacaauacacacacacacacacca

SEQ ID NO: 412506 - RNA, 24 nt, Human
cacaggaaggagcagcucugauuc

SEQ ID NO: 412507 - RNA, 24 nt, Human
caccaaaaaaauaacccccccaga

SEQ ID NO: 412508 - RNA, 23 nt, Human
cacgcucuaccccaagaaaaaga

SEQ ID NO: 412509 - RNA, 18 nt, Human
cagcaggccucuuccucc

SEQ ID NO: 412510 - RNA, 26 nt, Human
cagcaggccucuuccuccccaaguuu

SEQ ID NO: 412511 - RNA, 25 nt, Human
caggaaggagcagcucugauucuua

SEQ ID NO: 412512 - RNA, 18 nt, Human
cagguugagaaaugacca

SEQ ID NO: 412513 - RNA, 18 nt, Human
cagucacuuuucuccucc

SEQ ID NO: 412514 - RNA, 19 nt, Human
ccaaaaaaauaaccccccc

SEQ ID NO: 412515 - RNA, 23 nt, Human
ccaaacacuaggaugaggaugug

SEQ ID NO: 412516 - RNA, 21 nt, Human
ccacagaagacauagggccac

SEQ ID NO: 412517 - RNA, 22 nt, Human
ccagucacuuuucuccuccugu

SEQ ID NO: 412518 - RNA, 19 nt, Human
ccccaaguuuuuccucucc

SEQ ID NO: 412519 - RNA, 19 nt, Human
cccccacagcaggccucuu

SEQ ID NO: 412520 - RNA, 22 nt, Human
cccccagaaacacaacccucau

SEQ ID NO: 412521 - RNA, 20 nt, Human
ccccccagaaacacaacccu

SEQ ID NO: 412522 - RNA, 19 nt, Human
ccgccucucucccuuccuc

SEQ ID NO: 412523 - RNA, 20 nt, Human
cuaaagggugauauauaaua

SEQ ID NO: 412524 - RNA, 24 nt, Human
cucagguugagaaaugaccaagaa

SEQ ID NO: 412525 - RNA, 18 nt, Human
cuccacagaagacauagg

SEQ ID NO: 412526 - RNA, 22 nt, Human
cuccccaaguuuuuccucucca

SEQ ID NO: 412527 - RNA, 19 nt, Human
cucccuuccucugccggcc

SEQ ID NO: 412528 - RNA, 21 nt, Human
cuccugugcuguccuuucaaa

SEQ ID NO: 412529 - RNA, 22 nt, Human
gaaaaagaacugguucagaaag

SEQ ID NO: 412530 - RNA, 22 nt, Human
gcacaauacacacacacacaca

SEQ ID NO: 412531 - RNA, 18 nt, Human
gggaauaugcuaugcacc

SEQ ID NO: 412532 - RNA, 23 nt, Human
gguaggugaagaugaaaucugca

SEQ ID NO: 412533 - RNA, 20 nt, Human
gugaagggcagcaacugaca

SEQ ID NO: 412534 - RNA, 18 nt, Human
uaacccccccagaaacac

SEQ ID NO: 412535 - RNA, 23 nt, Human
uaacccccccagaaacacaaccc

SEQ ID NO: 412536 - RNA, 23 nt, Human
uaacuccacagaagacauagggc

SEQ ID NO: 412537 - RNA, 24 nt, Human
uaacuccacagaagacauagggcc

SEQ ID NO: 412538 - RNA, 22 nt, Human
uacuguaacuccacagaagaca

SEQ ID NO: 412539 - RNA, 19 nt, Human
uaguaauaaaaaaaauugc

SEQ ID NO: 412540 - RNA, 21 nt, Human
ucagguugagaaaugaccaag

SEQ ID NO: 412541 - RNA, 19 nt, Human
uccacagaagacauagggc

SEQ ID NO: 412542 - RNA, 22 nt, Human
uccacagaagacauagggccac

SEQ ID NO: 412543 - RNA, 19 nt, Human
uccucuccauuucaaaaaa

SEQ ID NO: 412544 - RNA, 27 nt, Human
ucgccgccgccucucucccuuccucug

SEQ ID NO: 412545 - RNA, 21 nt, Human
ucucaaacugccaaacacuag

SEQ ID NO: 412546 - RNA, 23 nt, Human
ucuucacauccaagagcugguug

SEQ ID NO: 412547 - RNA, 19 nt, Human
ugaaaagcaggugcuuuuu

SEQ ID NO: 412548 - RNA, 22 nt, Human
ugaaaucugcaaccuuucuaag

SEQ ID NO: 412549 - RNA, 18 nt, Human
ugagaaaugaccaagaaa

SEQ ID NO: 412550 - RNA, 22 nt, Human
ugagaaaugaccaagaaaucaa

SEQ ID NO: 412551 - RNA, 21 nt, Human
ugcaugcauucagaccgcaua

SEQ ID NO: 412552 - RNA, 18 nt, Human
uggaaugugggaauaugc

SEQ ID NO: 412553 - RNA, 19 nt, Human
uggaaugugggaauaugcu

SEQ ID NO: 412554 - RNA, 21 nt, Human
ugggaauaugcuaugcaccuc

SEQ ID NO: 412555 - RNA, 24 nt, Human
uguuuaguaauaaaaaaaauugcu

SEQ ID NO: 412556 - RNA, 23 nt, Human
uuaauacucuuaauuagcucccu

SEQ ID NO: 412557 - RNA, 18 nt, Human
uucacaggaaggagcagc

SEQ ID NO: 412558 - RNA, 25 nt, Human
uuccccaaguuucuccaacagaaca

SEQ ID NO: 412559 - RNA, 19 nt, Human
uuuccuguucuuuuuacuc

SEQ ID NO: 412560 - RNA, 19 nt, Human
aaaaagcaggcgaaggaac

SEQ ID NO: 412561 - RNA, 23 nt, Human
aaagucccucgcagccgcagaaa

SEQ ID NO: 412562 - RNA, 23 nt, Human
aagaagccaaggcagguccagug

SEQ ID NO: 412563 - RNA, 22 nt, Human
aagcagcacagcccagguucua

SEQ ID NO: 412564 - RNA, 22 nt, Human
aagcaugccugcaucccagagc

SEQ ID NO: 412565 - RNA, 18 nt, Human
aaggcugucucgcacugg

SEQ ID NO: 412566 - RNA, 21 nt, Human
aaguucuugccaaaccaaucc

SEQ ID NO: 412567 - RNA, 24 nt, Human
aauacaaaagaccgaaggaagaga

SEQ ID NO: 412568 - RNA, 25 nt, Human
acagacaaaacgccauauaaacaca

SEQ ID NO: 412569 - RNA, 21 nt, Human
acagcaacacagacaaaacgc

SEQ ID NO: 412570 - RNA, 20 nt, Human
accguuugcccuuccccgug

SEQ ID NO: 412571 - RNA, 20 nt, Human
accuggcacucgccagggag

SEQ ID NO: 412572 - RNA, 19 nt, Human
acguuccuccacccuccac

SEQ ID NO: 412573 - RNA, 21 nt, Human
agaaaucgggggugggguugg

SEQ ID NO: 412574 - RNA, 19 nt, Human
agaagcaugccugcauccc

SEQ ID NO: 412575 - RNA, 24 nt, Human
agacacaggcccgggcuggaggca

SEQ ID NO: 412576 - RNA, 18 nt, Human
agguucuggguggcacga

SEQ ID NO: 412577 - RNA, 28 nt, Human
augcugcccuggggucugauggucaacc

SEQ ID NO: 412578 - RNA, 24 nt, Human
cacagacaaaacgccauauaaacc

SEQ ID NO: 412579 - RNA, 25 nt, Human
cacagcccagguucuagagaggagc

SEQ ID NO: 412580 - RNA, 21 nt, Human
cacagcuagggucaggcaggg

SEQ ID NO: 412581 - RNA, 18 nt, Human
caccaggauguccuuccc

SEQ ID NO: 412582 - RNA, 21 nt, Human
cacccuccacucccacguggc

SEQ ID NO: 412583 - RNA, 23 nt, Human
cacugggcuggacuccgaaacuc

SEQ ID NO: 412584 - RNA, 19 nt, Human
cagcaguugaaauacugac

SEQ ID NO: 412585 - RNA, 21 nt, Human
caggugaauuuggcuccuuuu

SEQ ID NO: 412586 - RNA, 19 nt, Human
ccagggagacaaggcccag

SEQ ID NO: 412587 - RNA, 22 nt, Human
ccagguccacgacuaaguccaa

SEQ ID NO: 412588 - RNA, 21 nt, Human
ccagucagcagagcagaaauc

SEQ ID NO: 412589 - RNA, 21 nt, Human
cccaacccccccaggugacua

SEQ ID NO: 412590 - RNA, 22 nt, Human
cccaccaggauguccuucccca

SEQ ID NO: 412591 - RNA, 21 nt, Human
cccaguccccggcagacccac

SEQ ID NO: 412592 - RNA, 21 nt, Human
cccgcccaacccccccaggug

SEQ ID NO: 412593 - RNA, 22 nt, Human
cccgcccaacccccccagguga

SEQ ID NO: 412594 - RNA, 19 nt, Human
ccgcagccucaccuggcac

SEQ ID NO: 412595 - RNA, 20 nt, Human
ccucuaagugagggggcggg

SEQ ID NO: 412596 - RNA, 19 nt, Human
ccuuccccacgcccuccuc

SEQ ID NO: 412597 - RNA, 19 nt, Human
cggcaauggaagauggcgc

SEQ ID NO: 412598 - RNA, 23 nt, Human
cuccacacguuccuccacccucc

SEQ ID NO: 412599 - RNA, 20 nt, Human
cucuggaccguuugcccuuc

SEQ ID NO: 412600 - RNA, 21 nt, Human
cugaagcugcuagagccgccu

SEQ ID NO: 412601 - RNA, 24 nt, Human
cugaggcucaaaagcagcacagcc

SEQ ID NO: 412602 - RNA, 18 nt, Human
cugcccuggggucugagg

SEQ ID NO: 412603 - RNA, 19 nt, Human
gaaaaagcaggcgaaggaa

SEQ ID NO: 412604 - RNA, 25 nt, Human
gaaaaagcaggcgaaggaaccuggg

SEQ ID NO: 412605 - RNA, 24 nt, Human
gaaacuccacacguuccuccaccc

SEQ ID NO: 412606 - RNA, 24 nt, Human
gaagauggcgcccgcccaaccccc

SEQ ID NO: 412607 - RNA, 20 nt, Human
gagaagcaugccugcauccc

SEQ ID NO: 412608 - RNA, 25 nt, Human
gagcccgcagccgcccgcccucugg

SEQ ID NO: 412609 - RNA, 21 nt, Human
gagcgcccgccaaccacgguu

SEQ ID NO: 412610 - RNA, 18 nt, Human
gcacugggcuggacuccg

SEQ ID NO: 412611 - RNA, 23 nt, Human
gcagaaaucgggggugggguugg

SEQ ID NO: 412612 - RNA, 20 nt, Human
gcagccgcagaaaggggccg

SEQ ID NO: 412613 - RNA, 20 nt, Human
gcggcggcaauggaagaugg

SEQ ID NO: 412614 - RNA, 20 nt, Human
gcugcccuggggucugaggc

SEQ ID NO: 412615 - RNA, 18 nt, Human
ggaagagacccuguaugg

SEQ ID NO: 412616 - RNA, 19 nt, Human
ggaccguuugcccuucccc

SEQ ID NO: 412617 - RNA, 19 nt, Human
ggagacaaggcccaguccc

SEQ ID NO: 412618 - RNA, 20 nt, Human
ggcccaguccccggcagacc

SEQ ID NO: 412619 - RNA, 27 nt, Human
gggcacagcuagggucaggcaggguuc

SEQ ID NO: 412620 - RNA, 20 nt, Human
ggucaggcaggguucgagcc

SEQ ID NO: 412621 - RNA, 21 nt, Human
ggugacagggccagccgggca

SEQ ID NO: 412622 - RNA, 18 nt, Human
guggagcgcccgccaacc

SEQ ID NO: 412623 - RNA, 22 nt, Human
guuccuccacccuccacuccca

SEQ ID NO: 412624 - RNA, 21 nt, Human
guucuggguggcacgaugacu

SEQ ID NO: 412625 - RNA, 20 nt, Human
uaaaauaaaagcgaguuuua

SEQ ID NO: 412626 - RNA, 21 nt, Human
uaaacagcaacacagacaaaa

SEQ ID NO: 412627 - RNA, 21 nt, Human
ucagcagagcagaaaucgggg

SEQ ID NO: 412628 - RNA, 22 nt, Human
uccauacagccagcugaggcca

SEQ ID NO: 412629 - RNA, 18 nt, Human
ucccagagcgaggaacuc

SEQ ID NO: 412630 - RNA, 19 nt, Human
uccccacgcccuccucaca

SEQ ID NO: 412631 - RNA, 23 nt, Human
uccccagucagcagagcagaaau

SEQ ID NO: 412632 - RNA, 19 nt, Human
uccccggcagacccacgga

SEQ ID NO: 412633 - RNA, 22 nt, Human
ucgccugggggacuuacccaag

SEQ ID NO: 412634 - RNA, 21 nt, Human
ucucgcacugggcuggacucc

SEQ ID NO: 412635 - RNA, 20 nt, Human
ucuggguggcacgaugacuu

SEQ ID NO: 412636 - RNA, 21 nt, Human
ugagaagcaugccugcauccc

SEQ ID NO: 412637 - RNA, 19 nt, Human
ugagaggcccgcacucagg

SEQ ID NO: 412638 - RNA, 19 nt, Human
ugagaggcccgcacucagg

SEQ ID NO: 412639 - RNA, 24 nt, Human
ugaggccaagugcagcucugcacg

SEQ ID NO: 412640 - RNA, 19 nt, Human
ugccaaaccaaucccuucc

SEQ ID NO: 412641 - RNA, 21 nt, Human
ugcugcccuggggucugaggc

SEQ ID NO: 412642 - RNA, 21 nt, Human
uggcaggcccagcugcgacuu

SEQ ID NO: 412643 - RNA, 20 nt, Human
uggccuccagguccacgacu

SEQ ID NO: 412644 - RNA, 19 nt, Human
uggcgcccgcccaaccccc

SEQ ID NO: 412645 - RNA, 21 nt, Human
uguaaacaaguucuugccaaa

SEQ ID NO: 412646 - RNA, 22 nt, Human
ugucucgcacugggcuggacuc

SEQ ID NO: 412647 - RNA, 19 nt, Human
uuaaaauaaaagcgaguuu

SEQ ID NO: 412648 - RNA, 19 nt, Human
uuccuccacccuccacucc

SEQ ID NO: 412649 - RNA, 21 nt, Human
uugcccuuccccgugcccucc

SEQ ID NO: 412650 - RNA, 22 nt, Human
aaaacaauauaaaacacauuga

SEQ ID NO: 412651 - RNA, 21 nt, Human
aaaagaagccgaguucgugua

SEQ ID NO: 412652 - RNA, 29 nt, Human
aaacaaaaagcaaaguuuaaggggacccc

SEQ ID NO: 412653 - RNA, 26 nt, Human
aaacaaaaagcaaaguuuaagucauc

SEQ ID NO: 412654 - RNA, 19 nt, Human
aaacuguagaaaguuagua

SEQ ID NO: 412655 - RNA, 19 nt, Human
aaagccaagccucugcuga

SEQ ID NO: 412656 - RNA, 22 nt, Human
aacaaagagagcagaacuagaa

SEQ ID NO: 412657 - RNA, 21 nt, Human
aaccacaaccguuuuuuuucc

SEQ ID NO: 412658 - RNA, 19 nt, Human
aagccgcccaggcccaaag

SEQ ID NO: 412659 - RNA, 18 nt, Human
aaggacccagcacacuuc

SEQ ID NO: 412660 - RNA, 23 nt, Human
acacagugugcacagcauccucc

SEQ ID NO: 412661 - RNA, 24 nt, Human
acacagugugcacagcauccuccu

SEQ ID NO: 412662 - RNA, 19 nt, Human
acaggaucuaguccccccc

SEQ ID NO: 412663 - RNA, 19 nt, Human
accaacucccacacugggc

SEQ ID NO: 412664 - RNA, 26 nt, Human
acccugaaggcauggcuggcaggagc

SEQ ID NO: 412665 - RNA, 19 nt, Human
accuaggacaaaagaagcc

SEQ ID NO: 412666 - RNA, 19 nt, Human
acuggaggagggguguggc

SEQ ID NO: 412667 - RNA, 21 nt, Human
agaagggaagccgccaguggc

SEQ ID NO: 412668 - RNA, 23 nt, Human
agcaaugggacaguuuccaagaa

SEQ ID NO: 412669 - RNA, 20 nt, Human
agcccggggucuggggaagg

SEQ ID NO: 412670 - RNA, 21 nt, Human
agggagggcuguggcagggcc

SEQ ID NO: 412671 - RNA, 22 nt, Human
agggagucuccagaaaccugcc

SEQ ID NO: 412672 - RNA, 18 nt, Human
aguaaguaagugaaaaau

SEQ ID NO: 412673 - RNA, 21 nt, Human
aguggcaaggguagggaagaa

SEQ ID NO: 412674 - RNA, 22 nt, Human
aguggguggcugcuccacagcu

SEQ ID NO: 412675 - RNA, 21 nt, Human
augaagacagauguggaaacg

SEQ ID NO: 412676 - RNA, 18 nt, Human
caaccguuuuuuuuccuu

SEQ ID NO: 412677 - RNA, 22 nt, Human
cacagaccagaccaagcugucu

SEQ ID NO: 412678 - RNA, 20 nt, Human
cacagcauccuccugacuag

SEQ ID NO: 412679 - RNA, 22 nt, Human
cacagcucgccccuccuccaga

SEQ ID NO: 412680 - RNA, 21 nt, Human
cacagugugcacagcauccuc

SEQ ID NO: 412681 - RNA, 20 nt, Human
caccaggaccgccagggcag

SEQ ID NO: 412682 - RNA, 20 nt, Human
cagaacgggaucgcagcauc

SEQ ID NO: 412683 - RNA, 20 nt, Human
cagcacacuucaagaaacca

SEQ ID NO: 412684 - RNA, 18 nt, Human
cagcagaacgggaucgca

SEQ ID NO: 412685 - RNA, 19 nt, Human
cagcaguggguggcugcuc

SEQ ID NO: 412686 - RNA, 19 nt, Human
cagcucgccccuccuccag

SEQ ID NO: 412687 - RNA, 19 nt, Human
ccacagcucgccccuccuc

SEQ ID NO: 412688 - RNA, 22 nt, Human
ccagaccaagcugucuuacacg

SEQ ID NO: 412689 - RNA, 20 nt, Human
ccagagaagcaacaagaaca

SEQ ID NO: 412690 - RNA, 19 nt, Human
ccagcccggugcccuugcc

SEQ ID NO: 412691 - RNA, 23 nt, Human
ccaggcccaaaggagagacaccc

SEQ ID NO: 412692 - RNA, 20 nt, Human
ccagggcagucucuucuccu

SEQ ID NO: 412693 - RNA, 22 nt, Human
ccccacuucugcacagaccaga

SEQ ID NO: 412694 - RNA, 18 nt, Human
cccgggcugggcuggcug

SEQ ID NO: 412695 - RNA, 18 nt, Human
ccugcccaucacucccca

SEQ ID NO: 412696 - RNA, 23 nt, Human
cgaguccugcuaauuccaauccu

SEQ ID NO: 412697 - RNA, 18 nt, Human
cgcagcaucuuagaaagc

SEQ ID NO: 412698 - RNA, 24 nt, Human
cuagucccccccaagagccaagaa

SEQ ID NO: 412699 - RNA, 18 nt, Human
cuccccacuucugcacag

SEQ ID NO: 412700 - RNA, 22 nt, Human
cuccccacuucugcacagacca

SEQ ID NO: 412701 - RNA, 21 nt, Human
cuccuccagaggacccagcuu

SEQ ID NO: 412702 - RNA, 18 nt, Human
cucugugcaggccaggcc

SEQ ID NO: 412703 - RNA, 23 nt, Human
cugaaggcauggcuggcaggagc

SEQ ID NO: 412704 - RNA, 22 nt, Human
cuggauccagagaagcaacaag

SEQ ID NO: 412705 - RNA, 22 nt, Human
cuucaaguggagcuugacucug

SEQ ID NO: 412706 - RNA, 20 nt, Human
cuucugcacagaccagacca

SEQ ID NO: 412707 - RNA, 22 nt, Human
cuuugcggggugucugaaugca

SEQ ID NO: 412708 - RNA, 20 nt, Human
gaaaggauauuacugaguga

SEQ ID NO: 412709 - RNA, 20 nt, Human
gaacaauguuaggcugccga

SEQ ID NO: 412710 - RNA, 18 nt, Human
gaccagaccaagcugucu

SEQ ID NO: 412711 - RNA, 21 nt, Human
gagacacccacuggcucgaaa

SEQ ID NO: 412712 - RNA, 18 nt, Human
gauccagagaagcaacaa

SEQ ID NO: 412713 - RNA, 21 nt, Human
gcaagccgcccaggcccaaag

SEQ ID NO: 412714 - RNA, 20 nt, Human
gcacacuucaagaaaccagg

SEQ ID NO: 412715 - RNA, 19 nt, Human
gcucuggaggaggggguca

SEQ ID NO: 412716 - RNA, 20 nt, Human
ggacuggaggaggggugugg

SEQ ID NO: 412717 - RNA, 21 nt, Human
ggacuggaggagggguguggc

SEQ ID NO: 412718 - RNA, 21 nt, Human
ggacuggaggagggguguggc

SEQ ID NO: 412719 - RNA, 20 nt, Human
ggagaaggacuggaggaggg

SEQ ID NO: 412720 - RNA, 25 nt, Human
ggagagacacccacuggcucggcuu

SEQ ID NO: 412721 - RNA, 18 nt, Human
ggaguagggagcagaggg

SEQ ID NO: 412722 - RNA, 25 nt, Human
ggcaggagcaagccgcccaggccca

SEQ ID NO: 412723 - RNA, 19 nt, Human
ggccaacccuggggugcca

SEQ ID NO: 412724 - RNA, 26 nt, Human
ggcugcagggagaagugccaaccugg

SEQ ID NO: 412725 - RNA, 20 nt, Human
ggcuucucugugcaggccag

SEQ ID NO: 412726 - RNA, 23 nt, Human
gggcagcaguggguggcugcucc

SEQ ID NO: 412727 - RNA, 18 nt, Human
gguagggaagaaagggaa

SEQ ID NO: 412728 - RNA, 18 nt, Human
ggucucugcucacacuug

SEQ ID NO: 412729 - RNA, 23 nt, Human
gucuuguucccgggcugggcugg

SEQ ID NO: 412730 - RNA, 20 nt, Human
gugaaauaaaauccaucauc

SEQ ID NO: 412731 - RNA, 24 nt, Human
guggagagcaagcuccguggcaca

SEQ ID NO: 412732 - RNA, 20 nt, Human
guggguggcugcuccacagc

SEQ ID NO: 412733 - RNA, 25 nt, Human
guguacacaccgcaggggccaugcg

SEQ ID NO: 412734 - RNA, 25 nt, Human
uaacugccacaagcgaacgccaggc

SEQ ID NO: 412735 - RNA, 24 nt, Human
uaagaaaagccaccaggaccgcca

SEQ ID NO: 412736 - RNA, 24 nt, Human
uacaaaaaaaggcagucaaaacaa

SEQ ID NO: 412737 - RNA, 25 nt, Human
uacaaaaaaaggcagucaaaacaau

SEQ ID NO: 412738 - RNA, 20 nt, Human
uaccuagaccacuuuugauu

SEQ ID NO: 412739 - RNA, 21 nt, Human
uaccuagaccacuuuugauua

SEQ ID NO: 412740 - RNA, 24 nt, Human
uagcaggccccccauuucggggcc

SEQ ID NO: 412741 - RNA, 18 nt, Human
ucaaagugugccgaggga

SEQ ID NO: 412742 - RNA, 23 nt, Human
uccacaggaucuaguccccccca

SEQ ID NO: 412743 - RNA, 26 nt, Human
uccacaggaucuagucccccccaaga

SEQ ID NO: 412744 - RNA, 18 nt, Human
ucccacacugggcaacag

SEQ ID NO: 412745 - RNA, 21 nt, Human
ucccgggcacaagggagucuc

SEQ ID NO: 412746 - RNA, 20 nt, Human
ucccugaggggcugccggga

SEQ ID NO: 412747 - RNA, 24 nt, Human
ucucugugcaggccaggccagagg

SEQ ID NO: 412748 - RNA, 18 nt, Human
ucugacgauaaauucuaa

SEQ ID NO: 412749 - RNA, 22 nt, Human
ucugcucacacuugcuggaacc

SEQ ID NO: 412750 - RNA, 21 nt, Human
ugaaaaauaaacucggugcca

SEQ ID NO: 412751 - RNA, 19 nt, Human
ugaaaggauauuacugagu

SEQ ID NO: 412752 - RNA, 21 nt, Human
ugaggagaaggacuggaggag

SEQ ID NO: 412753 - RNA, 18 nt, Human
ugcaaaggcugugagucc

SEQ ID NO: 412754 - RNA, 23 nt, Human
ugccaaccugggaccucaggagc

SEQ ID NO: 412755 - RNA, 19 nt, Human
ugccagggcugagaguccc

SEQ ID NO: 412756 - RNA, 21 nt, Human
ugcccuugccaucccgggcac

SEQ ID NO: 412757 - RNA, 18 nt, Human
ugccgagggagggcugug

SEQ ID NO: 412758 - RNA, 23 nt, Human
ugccgagggagggcuguggcagg

SEQ ID NO: 412759 - RNA, 23 nt, Human
ugcucagagccuacccugaaggc

SEQ ID NO: 412760 - RNA, 23 nt, Human
uggacaagaaaagaaacaccauu

SEQ ID NO: 412761 - RNA, 18 nt, Human
uggaggagggggucagca

SEQ ID NO: 412762 - RNA, 22 nt, Human
uggagugugagugaaauaaaau

SEQ ID NO: 412763 - RNA, 20 nt, Human
uggcagaaauacgaagcaau

SEQ ID NO: 412764 - RNA, 22 nt, Human
uggcagaaauacgaagcaaugg

SEQ ID NO: 412765 - RNA, 24 nt, Human
uggcagaaauacgaagcaauggga

SEQ ID NO: 412766 - RNA, 26 nt, Human
uggcagaagcgggguugaccggaacg

SEQ ID NO: 412767 - RNA, 18 nt, Human
uggcagaagcgggguugg

SEQ ID NO: 412768 - RNA, 21 nt, Human
uggcagaagcgggguugguga

SEQ ID NO: 412769 - RNA, 18 nt, Human
uggcugcagggagaagug

SEQ ID NO: 412770 - RNA, 22 nt, Human
uggggcagcaguggguggcugc

SEQ ID NO: 412771 - RNA, 19 nt, Human
ugguaacaucagcuggagu

SEQ ID NO: 412772 - RNA, 24 nt, Human
uguacacaccgcaggggccaugcg

SEQ ID NO: 412773 - RNA, 22 nt, Human
ugucugaaugcacugcacgggg

SEQ ID NO: 412774 - RNA, 22 nt, Human
ugugagugaaauaaaauccauc

SEQ ID NO: 412775 - RNA, 19 nt, Human
uuaagaaaacuguagaaag

SEQ ID NO: 412776 - RNA, 25 nt, Human
uuccacagaguccugcuuugcgggg

SEQ ID NO: 412777 - RNA, 19 nt, Human
uuccugagugagcuugggg

SEQ ID NO: 412778 - RNA, 21 nt, Human
uuccugagugagcuuggggca

SEQ ID NO: 412779 - RNA, 19 nt, Human
uuccuuggggugucagagc

SEQ ID NO: 412780 - RNA, 23 nt, Human
uugaaaggauauuacugagugag

SEQ ID NO: 412781 - RNA, 23 nt, Human
uugaagcagugauuuuuaaaaca

SEQ ID NO: 412782 - RNA, 24 nt, Human
uuggcguaccuaggacaaaagaag

SEQ ID NO: 412783 - RNA, 19 nt, Human
uuggggcagcagugggugg

SEQ ID NO: 412784 - RNA, 21 nt, Human
uuuauuucuacaaaaaaaggc

SEQ ID NO: 412785 - RNA, 19 nt, Human
uuugguuuuggagcagcca

SEQ ID NO: 412786 - RNA, 24 nt, Human
aaaaaugaauggggaaugggccgg

SEQ ID NO: 412787 - RNA, 18 nt, Human
aagcaggccugcaaggug

SEQ ID NO: 412788 - RNA, 20 nt, Human
aauggggaaugggccacagg

SEQ ID NO: 412789 - RNA, 24 nt, Human
acaacacacacacucauagcuccc

SEQ ID NO: 412790 - RNA, 23 nt, Human
acccauaugcuccacugucccca

SEQ ID NO: 412791 - RNA, 22 nt, Human
agcucccuucccuccaccacac

SEQ ID NO: 412792 - RNA, 23 nt, Human
aggccugcaaggugaccugucuc

SEQ ID NO: 412793 - RNA, 20 nt, Human
caaacuuaaacucccuuggc

SEQ ID NO: 412794 - RNA, 23 nt, Human
cacacacaaacuaaugacuaaca

SEQ ID NO: 412795 - RNA, 20 nt, Human
cacagucugaggccuggucc

SEQ ID NO: 412796 - RNA, 22 nt, Human
cacagucugaggccugguccca

SEQ ID NO: 412797 - RNA, 22 nt, Human
cacccguggccuccagcaggac

SEQ ID NO: 412798 - RNA, 19 nt, Human
caccuguggccaggugaac

SEQ ID NO: 412799 - RNA, 20 nt, Human
caccuguggccaggugaacc

SEQ ID NO: 412800 - RNA, 23 nt, Human
ccacccauaugcuccacuguccc

SEQ ID NO: 412801 - RNA, 26 nt, Human
ccauaugcuccacuguccccaggccc

SEQ ID NO: 412802 - RNA, 18 nt, Human
cccacccauaugcuccac

SEQ ID NO: 412803 - RNA, 19 nt, Human
cccauaugcuccacugucc

SEQ ID NO: 412804 - RNA, 24 nt, Human
ccccaggcccucagugccugagcc

SEQ ID NO: 412805 - RNA, 25 nt, Human
ccccaggcccucagugccugagccc

SEQ ID NO: 412806 - RNA, 23 nt, Human
ccugagcccuagggggauucgag

SEQ ID NO: 412807 - RNA, 21 nt, Human
cgggaccgaguguguggcacc

SEQ ID NO: 412808 - RNA, 21 nt, Human
cuccaccacacacacacacaa

SEQ ID NO: 412809 - RNA, 23 nt, Human
cucuaagauggagagcuggagaa

SEQ ID NO: 412810 - RNA, 24 nt, Human
cucucuaagauggagagcuggaga

SEQ ID NO: 412811 - RNA, 21 nt, Human
cugaggccuggucccaggaac

SEQ ID NO: 412812 - RNA, 20 nt, Human
cuggggaauguaaagggugu

SEQ ID NO: 412813 - RNA, 19 nt, Human
ggccuggucccaggaacug

SEQ ID NO: 412814 - RNA, 20 nt, Human
gggaaugggccacagggggc

SEQ ID NO: 412815 - RNA, 20 nt, Human
gggggcucuggccucagucc

SEQ ID NO: 412816 - RNA, 18 nt, Human
ggguacccuccaucuguc

SEQ ID NO: 412817 - RNA, 20 nt, Human
uaaauaggguacccuccauc

SEQ ID NO: 412818 - RNA, 21 nt, Human
uaagauggagagcuggagaac

SEQ ID NO: 412819 - RNA, 23 nt, Human
uaggguacccuccaucugucucc

SEQ ID NO: 412820 - RNA, 24 nt, Human
uauagauuuucaggauggaaguuu

SEQ ID NO: 412821 - RNA, 20 nt, Human
ucaguccaugaggugugucc

SEQ ID NO: 412822 - RNA, 19 nt, Human
uccaccacacacacacaca

SEQ ID NO: 412823 - RNA, 21 nt, Human
uccaccacacacacacacaaa

SEQ ID NO: 412824 - RNA, 19 nt, Human
uccauacacaacacacaca

SEQ ID NO: 412825 - RNA, 18 nt, Human
uccccaggcccucagugc

SEQ ID NO: 412826 - RNA, 23 nt, Human
uccugcaagcaggccugcaaggu

SEQ ID NO: 412827 - RNA, 21 nt, Human
ucuaacaggauggcaaguggu

SEQ ID NO: 412828 - RNA, 20 nt, Human
ucucccacccauaugcucca

SEQ ID NO: 412829 - RNA, 18 nt, Human
ugacucaguuguaaauag

SEQ ID NO: 412830 - RNA, 22 nt, Human
ugacucauccguggaaaauaaa

SEQ ID NO: 412831 - RNA, 23 nt, Human
ugaggccuggucccaggaacugg

SEQ ID NO: 412832 - RNA, 20 nt, Human
uggagagcuggagaacuggc

SEQ ID NO: 412833 - RNA, 23 nt, Human
uggagagcuggagaacuggccug

SEQ ID NO: 412834 - RNA, 21 nt, Human
uggcugcuggauucauuuccu

SEQ ID NO: 412835 - RNA, 21 nt, Human
uggggaaugggccacaggggg

SEQ ID NO: 412836 - RNA, 19 nt, Human
uguaacugcaaacuuaaac

SEQ ID NO: 412837 - RNA, 21 nt, Human
uguaacugcaaacuuaaacuc

SEQ ID NO: 412838 - RNA, 19 nt, Human
uucacagucugaggccugg

SEQ ID NO: 412839 - RNA, 26 nt, Human
uucccuccaccacacacacacacaaa

SEQ ID NO: 412840 - RNA, 21 nt, Human
uuccguggcucccccuggacu

SEQ ID NO: 412841 - RNA, 18 nt, Human
aaaaccaaggcaugcacc

SEQ ID NO: 412842 - RNA, 18 nt, Human
aaaaccaaggcaugcacc

SEQ ID NO: 412843 - RNA, 18 nt, Human
aacuagacccccaaugga

SEQ ID NO: 412844 - RNA, 21 nt, Human
aagaaaccaggggugcaggcg

SEQ ID NO: 412845 - RNA, 24 nt, Human
aagaaaccaggggugcaggcgaaa

SEQ ID NO: 412846 - RNA, 19 nt, Human
aagcagcagcagcaccaaa

SEQ ID NO: 412847 - RNA, 19 nt, Human
aagcagcagcagcaccaaa

SEQ ID NO: 412848 - RNA, 21 nt, Human
aagcagcagcagcaccaaaac

SEQ ID NO: 412849 - RNA, 21 nt, Human
aagcagcagcagcaccaaaac

SEQ ID NO: 412850 - RNA, 24 nt, Human
aagcagcagcagcaccaaaaccaa

SEQ ID NO: 412851 - RNA, 24 nt, Human
aagcagcagcagcaccaaaaccaa

SEQ ID NO: 412852 - RNA, 21 nt, Human
aaggaaccaggggugcaggcg

SEQ ID NO: 412853 - RNA, 19 nt, Human
aaguucaaccaccaaggac

SEQ ID NO: 412854 - RNA, 20 nt, Human
aauuaaaaaaaaaaaaaaaa

SEQ ID NO: 412855 - RNA, 21 nt, Human
aauuuuuaaaagcaaaagcag

SEQ ID NO: 412856 - RNA, 23 nt, Human
acaauaaaaaggcugcuuaugga

SEQ ID NO: 412857 - RNA, 23 nt, Human
acaauaaaaaggcugcuuaugga

SEQ ID NO: 412858 - RNA, 20 nt, Human
acacaccuagcaguaguccc

SEQ ID NO: 412859 - RNA, 18 nt, Human
acaggcugcgaccugaaa

SEQ ID NO: 412860 - RNA, 18 nt, Human
acaggcugcgaccugaag

SEQ ID NO: 412861 - RNA, 24 nt, Human
accccaggccguguaaucagcagc

SEQ ID NO: 412862 - RNA, 23 nt, Human
acggugcaaaaaggaacuugagg

SEQ ID NO: 412863 - RNA, 19 nt, Human
acucaguuugcuuugugac

SEQ ID NO: 412864 - RNA, 22 nt, Human
agacuuaaagaaaccaggggug

SEQ ID NO: 412865 - RNA, 22 nt, Human
agacuuaaaggaaccaggggug

SEQ ID NO: 412866 - RNA, 24 nt, Human
agagaccccaggccguguaaucag

SEQ ID NO: 412867 - RNA, 18 nt, Human
agagcuggcaggucugag

SEQ ID NO: 412868 - RNA, 21 nt, Human
agcaaguggaaagacgcagca

SEQ ID NO: 412869 - RNA, 22 nt, Human
agcaaguggaaagacgcagcaa

SEQ ID NO: 412870 - RNA, 24 nt, Human
agcggcagcagugucaccaggcag

SEQ ID NO: 412871 - RNA, 18 nt, Human
aggaacuugaggaggagg

SEQ ID NO: 412872 - RNA, 24 nt, Human
aggguaaggggagaaggcagagac

SEQ ID NO: 412873 - RNA, 21 nt, Human
aggugauugugugaugugucu

SEQ ID NO: 412874 - RNA, 18 nt, Human
agugguuacacuugacag

SEQ ID NO: 412875 - RNA, 23 nt, Human
auaaaaaggcugcuuauggaaua

SEQ ID NO: 412876 - RNA, 23 nt, Human
auaaaaaggcugcuuauggaaua

SEQ ID NO: 412877 - RNA, 23 nt, Human
augcaccggauucaagguucuuu

SEQ ID NO: 412878 - RNA, 22 nt, Human
auuaaaaaaaaaaaaaaaaccu

SEQ ID NO: 412879 - RNA, 22 nt, Human
auuaaaaaaaaaaaaaaaaccu

SEQ ID NO: 412880 - RNA, 18 nt, Human
caaccaccaaggacuccg

SEQ ID NO: 412881 - RNA, 18 nt, Human
caagccccccaggcuaga

SEQ ID NO: 412882 - RNA, 21 nt, Human
cacacaccuagcaguaguccc

SEQ ID NO: 412883 - RNA, 22 nt, Human
cacaccuagcaguagucccaca

SEQ ID NO: 412884 - RNA, 24 nt, Human
caccaaaaccaaggcaugcaccgg

SEQ ID NO: 412885 - RNA, 24 nt, Human
caccaaaaccaaggcaugcaccgg

SEQ ID NO: 412886 - RNA, 22 nt, Human
cagcaccaaaaccaaggcaugc

SEQ ID NO: 412887 - RNA, 22 nt, Human
cagcaccaaaaccaaggcaugc

SEQ ID NO: 412888 - RNA, 18 nt, Human
cagcagcaccaaaaccaa

SEQ ID NO: 412889 - RNA, 18 nt, Human
cagcagcaccaaaaccaa

SEQ ID NO: 412890 - RNA, 21 nt, Human
cagcagcagcaccaaaaccaa

SEQ ID NO: 412891 - RNA, 21 nt, Human
cagcagcagcaccaaaaccaa

SEQ ID NO: 412892 - RNA, 22 nt, Human
cagcagcagcaccaaaaccaag

SEQ ID NO: 412893 - RNA, 22 nt, Human
cagcagcagcaccaaaaccaag

SEQ ID NO: 412894 - RNA, 24 nt, Human
caggcgaaacaccccacacaccua

SEQ ID NO: 412895 - RNA, 24 nt, Human
cagguaagacgcuugaaccucucc

SEQ ID NO: 412896 - RNA, 21 nt, Human
ccaaguucaaccaccaaggac

SEQ ID NO: 412897 - RNA, 24 nt, Human
cccacacaccuagcaguaguccca

SEQ ID NO: 412898 - RNA, 22 nt, Human
cccacaggcugcgaccugaaac

SEQ ID NO: 412899 - RNA, 22 nt, Human
cccacaggcugcgaccugaagc

SEQ ID NO: 412900 - RNA, 22 nt, Human
cccaccaauuucggggaucugc

SEQ ID NO: 412901 - RNA, 22 nt, Human
cccaccaauuucggggaucugc

SEQ ID NO: 412902 - RNA, 21 nt, Human
cccagaaaaagauuaauggaa

SEQ ID NO: 412903 - RNA, 21 nt, Human
cccagaaaaagauuaauggaa

SEQ ID NO: 412904 - RNA, 19 nt, Human
ccccaggcuagagggcugu

SEQ ID NO: 412905 - RNA, 18 nt, Human
cccccaggcuagagggcu

SEQ ID NO: 412906 - RNA, 20 nt, Human
ccccccaggcuagagggcug

SEQ ID NO: 412907 - RNA, 18 nt, Human
ccggguucaagguucuuu

SEQ ID NO: 412908 - RNA, 18 nt, Human
ccuagcaguagucccaca

SEQ ID NO: 412909 - RNA, 18 nt, Human
ccugaacagcaaguggaa

SEQ ID NO: 412910 - RNA, 18 nt, Human
ccugaacagcaaguggaa

SEQ ID NO: 412911 - RNA, 22 nt, Human
cgaccugaaaccuucacaucua

SEQ ID NO: 412912 - RNA, 22 nt, Human
cgaccugaagccuucacaucua

SEQ ID NO: 412913 - RNA, 22 nt, Human
cuaaauuaaaaaaaaaaaaaaa

SEQ ID NO: 412914 - RNA, 22 nt, Human
cuaaauuaaaaaaaaaaaaaaa

SEQ ID NO: 412915 - RNA, 23 nt, Human
cuaaauuaaaaaaaaaaaaaaaa

SEQ ID NO: 412916 - RNA, 23 nt, Human
cuaaauuaaaaaaaaaaaaaaaa

SEQ ID NO: 412917 - RNA, 24 nt, Human
cuagaccccaauggauugcaagga

SEQ ID NO: 412918 - RNA, 25 nt, Human
cuagacccccaauggauugcaagga

SEQ ID NO: 412919 - RNA, 21 nt, Human
cucuaacaagccccccaggcu

SEQ ID NO: 412920 - RNA, 23 nt, Human
cugguggagagugagugaguaug

SEQ ID NO: 412921 - RNA, 24 nt, Human
cuugaggaggagggagaaaaagca

SEQ ID NO: 412922 - RNA, 23 nt, Human
gaaaaagauuaauggaaacauca

SEQ ID NO: 412923 - RNA, 23 nt, Human
gaaaaagauuaauggaaacauca

SEQ ID NO: 412924 - RNA, 18 nt, Human
gaaacaccccacacaccu

SEQ ID NO: 412925 - RNA, 19 nt, Human
gaagguguuggguggugac

SEQ ID NO: 412926 - RNA, 20 nt, Human
gaagguguuggguggugacg

SEQ ID NO: 412927 - RNA, 18 nt, Human
gacaggaugaugguuugg

SEQ ID NO: 412928 - RNA, 21 nt, Human
gaccugaaaccuucacaucua

SEQ ID NO: 412929 - RNA, 21 nt, Human
gaggucagaggcucuuuccaa

SEQ ID NO: 412930 - RNA, 23 nt, Human
gcagcaccaaaaccaaggcaugc

SEQ ID NO: 412931 - RNA, 23 nt, Human
gcagcaccaaaaccaaggcaugc

SEQ ID NO: 412932 - RNA, 26 nt, Human
gcagcggcagcagugucaccaggcag

SEQ ID NO: 412933 - RNA, 20 nt, Human
gcuugaaccucuccuggcau

SEQ ID NO: 412934 - RNA, 24 nt, Human
ggaaagcccugaauuccucaccga

SEQ ID NO: 412935 - RNA, 24 nt, Human
ggaaagcccugaauuccucaccga

SEQ ID NO: 412936 - RNA, 18 nt, Human
ggcaugcaccggauucaa

SEQ ID NO: 412937 - RNA, 18 nt, Human
ggcaugcaccggguucaa

SEQ ID NO: 412938 - RNA, 21 nt, Human
gggaaucaauuuaaauagacu

SEQ ID NO: 412939 - RNA, 23 nt, Human
gggaguggagggguuacaaucua

SEQ ID NO: 412940 - RNA, 18 nt, Human
ggggaguggagggguuac

SEQ ID NO: 412941 - RNA, 18 nt, Human
gggggaaggggaagggcc

SEQ ID NO: 412942 - RNA, 21 nt, Human
ggggggaaggggaagggccug

SEQ ID NO: 412943 - RNA, 23 nt, Human
ggggugcaggcgaaacaccccac

SEQ ID NO: 412944 - RNA, 18 nt, Human
gggugcaggcgaaacacc

SEQ ID NO: 412945 - RNA, 19 nt, Human
ggugacggugcaaaaagga

SEQ ID NO: 412946 - RNA, 24 nt, Human
gugguccugaacagcaaguggaaa

SEQ ID NO: 412947 - RNA, 24 nt, Human
gugguccugaacagcaaguggaaa

SEQ ID NO: 412948 - RNA, 20 nt, Human
guugcugcuucaaaaggugg

SEQ ID NO: 412949 - RNA, 20 nt, Human
guugcugcuucaaaaggugg

SEQ ID NO: 412950 - RNA, 26 nt, Human
uaaauuaaaaaaaaaaaaaaaaccuu

SEQ ID NO: 412951 - RNA, 26 nt, Human
uaaauuaaaaaaaaaaaaaaaaccuu

SEQ ID NO: 412952 - RNA, 20 nt, Human
uaagacgcuugaaccucucc

SEQ ID NO: 412953 - RNA, 19 nt, Human
uacaguaucuuaagauaaa

SEQ ID NO: 412954 - RNA, 23 nt, Human
uagaccccaauggauugcaagga

SEQ ID NO: 412955 - RNA, 28 nt, Human
uagcaguagucccacaggcugcgacugg

SEQ ID NO: 412956 - RNA, 29 nt, Human
uagcaguagucccacaggcugcgacuggu

SEQ ID NO: 412957 - RNA, 18 nt, Human
uaguaucaaccucauagg

SEQ ID NO: 412958 - RNA, 22 nt, Human
ucacaucuacucuaacaagccc

SEQ ID NO: 412959 - RNA, 19 nt, Human
ucaccuuaucaaaaccuga

SEQ ID NO: 412960 - RNA, 24 nt, Human
ucagauuccaaacuagacccccaa

SEQ ID NO: 412961 - RNA, 22 nt, Human
uccaaacuagaccccaauggau

SEQ ID NO: 412962 - RNA, 23 nt, Human
uccaaacuagacccccaauggau

SEQ ID NO: 412963 - RNA, 18 nt, Human
ucuaugcuucggccaagg

SEQ ID NO: 412964 - RNA, 18 nt, Human
ugacuucagguaagacgc

SEQ ID NO: 412965 - RNA, 20 nt, Human
ugagcuaaaaacaaugcauc

SEQ ID NO: 412966 - RNA, 21 nt, Human
ugagcuaaaaacaaugcauca

SEQ ID NO: 412967 - RNA, 21 nt, Human
ugaggaggagggagaaaaagc

SEQ ID NO: 412968 - RNA, 24 nt, Human
ugaggaucuugggaagcagcagca

SEQ ID NO: 412969 - RNA, 24 nt, Human
ugaggaucuugggaagcagcagca

SEQ ID NO: 412970 - RNA, 24 nt, Human
ugauaguugcugcuucaaaaggug

SEQ ID NO: 412971 - RNA, 24 nt, Human
ugauaguugcugcuucaaaaggug

SEQ ID NO: 412972 - RNA, 19 nt, Human
ugaugguuuggaaggggca

SEQ ID NO: 412973 - RNA, 23 nt, Human
uggcaggucugaguaacccuggu

SEQ ID NO: 412974 - RNA, 23 nt, Human
uggggaaagcccugaauuccuca

SEQ ID NO: 412975 - RNA, 23 nt, Human
uggggaaagcccugaauuccuca

SEQ ID NO: 412976 - RNA, 20 nt, Human
ugggggagagaagauauggg

SEQ ID NO: 412977 - RNA, 25 nt, Human
uggggggaaggggaagggccugugg

SEQ ID NO: 412978 - RNA, 20 nt, Human
uggucugacaauaaaaaggc

SEQ ID NO: 412979 - RNA, 20 nt, Human
uggucugacaauaaaaaggc

SEQ ID NO: 412980 - RNA, 22 nt, Human
uguuauguuaaacuucacuuac

SEQ ID NO: 412981 - RNA, 22 nt, Human
uguuauguuaaacuucacuuac

SEQ ID NO: 412982 - RNA, 20 nt, Human
uguuggguggugacggugca

SEQ ID NO: 412983 - RNA, 20 nt, Human
uuaauggaaacaucaauugc

SEQ ID NO: 412984 - RNA, 20 nt, Human
uuaauggaaacaucaauugc

SEQ ID NO: 412985 - RNA, 20 nt, Human
uuacaguaucuuaagauaaa

SEQ ID NO: 412986 - RNA, 19 nt, Human
uuaccugauggcuucuggc

SEQ ID NO: 412987 - RNA, 22 nt, Human
uuagaacuaagguuuucccccc

SEQ ID NO: 412988 - RNA, 22 nt, Human
uuagaacuaagguuuucccccc

SEQ ID NO: 412989 - RNA, 21 nt, Human
uucacaguugaguuagaugug

SEQ ID NO: 412990 - RNA, 23 nt, Human
uugaggaggagggagaaaaagca

SEQ ID NO: 412991 - RNA, 23 nt, Human
uugucagauuccaaacuagaccc

SEQ ID NO: 412992 - RNA, 23 nt, Human
uugucagauuccaaacuagaccc

SEQ ID NO: 412993 - RNA, 21 nt, Human
uuucccaggcugguggagagu

SEQ ID NO: 412994 - RNA, 20 nt, Human
uuucggggaucugcugugcc

SEQ ID NO: 412995 - RNA, 20 nt, Human
uuucggggaucugcugugcc

SEQ ID NO: 412996 - RNA, 20 nt, Human
uuuuuuuuuuuuuuauuaac

SEQ ID NO: 412997 - RNA, 23 nt, Human
uuuuuuuuuuuuuuuuauuaacg

SEQ ID NO: 412998 - RNA, 18 nt, Human
aaaacaacaacgagaaca

SEQ ID NO: 412999 - RNA, 23 nt, Human
aaaacauuccaauuucucccuuc

SEQ ID NO: 413000 - RNA, 21 nt, Human
aaaacgaggccgggaaaggga

SEQ ID NO: 413001 - RNA, 20 nt, Human
aaacaaacaacaaacuuccu

SEQ ID NO: 413002 - RNA, 23 nt, Human
aaaggccccgucgucuccuguag

SEQ ID NO: 413003 - RNA, 19 nt, Human
aaagugccacaguuuuauu

SEQ ID NO: 413004 - RNA, 20 nt, Human
aacaaaaaucccuguccuuu

SEQ ID NO: 413005 - RNA, 19 nt, Human
aacaacaucacauacacag

SEQ ID NO: 413006 - RNA, 21 nt, Human
aacaacaucacauacacagaa

SEQ ID NO: 413007 - RNA, 20 nt, Human
aacaacgagaacaacaagaa

SEQ ID NO: 413008 - RNA, 25 nt, Human
aacaacgagaacaacaagaacaaaa

SEQ ID NO: 413009 - RNA, 22 nt, Human
aacgagaacaacaagaacaaaa

SEQ ID NO: 413010 - RNA, 24 nt, Human
aagaacaaaaaucccuguccuuuc

SEQ ID NO: 413011 - RNA, 18 nt, Human
aagacauccuuuuucucc

SEQ ID NO: 413012 - RNA, 26 nt, Human
aaucaccaaggcacaagcucagcacc

SEQ ID NO: 413013 - RNA, 21 nt, Human
aauggcugauucaacaagaug

SEQ ID NO: 413014 - RNA, 19 nt, Human
acaaaaaucccuguccuuu

SEQ ID NO: 413015 - RNA, 20 nt, Human
accaaggcacaagcucagca

SEQ ID NO: 413016 - RNA, 18 nt, Human
accccgagcccagcgcca

SEQ ID NO: 413017 - RNA, 19 nt, Human
accccgagcccagcgccac

SEQ ID NO: 413018 - RNA, 22 nt, Human
accgccucguucucuuucgcug

SEQ ID NO: 413019 - RNA, 21 nt, Human
acgagaacaacaagaacaaaa

SEQ ID NO: 413020 - RNA, 19 nt, Human
acgaggccgggaaagggag

SEQ ID NO: 413021 - RNA, 21 nt, Human
acucuuugggggcuagaacag

SEQ ID NO: 413022 - RNA, 19 nt, Human
acuucugaggagcugguga

SEQ ID NO: 413023 - RNA, 19 nt, Human
agaaaaaccccauguuacc

SEQ ID NO: 413024 - RNA, 23 nt, Human
agauuuuuaaccugucgucgccc

SEQ ID NO: 413025 - RNA, 18 nt, Human
agcaaaagugauuuaacc

SEQ ID NO: 413026 - RNA, 21 nt, Human
agcuucaaugucgucagacug

SEQ ID NO: 413027 - RNA, 23 nt, Human
aggaaaggggaaacuacuuacug

SEQ ID NO: 413028 - RNA, 20 nt, Human
aggaggagccgaaggaggcg

SEQ ID NO: 413029 - RNA, 20 nt, Human
aggcuggcccagaaaaaccc

SEQ ID NO: 413030 - RNA, 20 nt, Human
agggcugcaguuaaaacauu

SEQ ID NO: 413031 - RNA, 24 nt, Human
aggugaagcguaaguaggcggcgg

SEQ ID NO: 413032 - RNA, 19 nt, Human
aguaauaaacacaagcaaa

SEQ ID NO: 413033 - RNA, 20 nt, Human
aguaauaaacacaagcaaaa

SEQ ID NO: 413034 - RNA, 19 nt, Human
aguuaaaaauacauaaucc

SEQ ID NO: 413035 - RNA, 21 nt, Human
caacaacgagaacaacaagaa

SEQ ID NO: 413036 - RNA, 23 nt, Human
caacgagaacaacaagaacaaaa

SEQ ID NO: 413037 - RNA, 20 nt, Human
caagaacaaaaaucccuguc

SEQ ID NO: 413038 - RNA, 25 nt, Human
caagaacaaaaaucccuguccuuuc

SEQ ID NO: 413039 - RNA, 20 nt, Human
caauaaagaagggaggcaca

SEQ ID NO: 413040 - RNA, 23 nt, Human
caauauggaaagcauugucuucu

SEQ ID NO: 413041 - RNA, 23 nt, Human
caaucaaucaccaaggcacaagc

SEQ ID NO: 413042 - RNA, 24 nt, Human
caaucaccaaggcacaagcucagc

SEQ ID NO: 413043 - RNA, 18 nt, Human
cacacuguuuucaagacu

SEQ ID NO: 413044 - RNA, 20 nt, Human
cagccgccgcugccugucca

SEQ ID NO: 413045 - RNA, 21 nt, Human
cagggacaaaaaaguagcaca

SEQ ID NO: 413046 - RNA, 21 nt, Human
caguaauaaacacaagcaaaa

SEQ ID NO: 413047 - RNA, 18 nt, Human
ccagcgccaccaucuugg

SEQ ID NO: 413048 - RNA, 25 nt, Human
ccaguaaacuuaaaacaacaacgag

SEQ ID NO: 413049 - RNA, 26 nt, Human
cccaguaaacuuaaaacaacaacgag

SEQ ID NO: 413050 - RNA, 23 nt, Human
ccgcccgcagccgagcgcgccgg

SEQ ID NO: 413051 - RNA, 23 nt, Human
ccgcugccuguccacaccggggg

SEQ ID NO: 413052 - RNA, 21 nt, Human
ccucaagcaguaauaaacaca

SEQ ID NO: 413053 - RNA, 18 nt, Human
ccuccgcccgccaccgcc

SEQ ID NO: 413054 - RNA, 21 nt, Human
ccuccgcccgccaccgccucg

SEQ ID NO: 413055 - RNA, 21 nt, Human
ccucgcccgccgccuccgccc

SEQ ID NO: 413056 - RNA, 21 nt, Human
ccuggcgaagggaaaaggccc

SEQ ID NO: 413057 - RNA, 19 nt, Human
ccuuccuuccaucuuucuu

SEQ ID NO: 413058 - RNA, 22 nt, Human
cgagaacaacaagaacaaaaau

SEQ ID NO: 413059 - RNA, 20 nt, Human
cgcccgccgccuccgcccgg

SEQ ID NO: 413060 - RNA, 20 nt, Human
cgccgcugccuguccacacc

SEQ ID NO: 413061 - RNA, 20 nt, Human
cgcgagcgagcgaagccugg

SEQ ID NO: 413062 - RNA, 20 nt, Human
cgucgccagccgccgcugcc

SEQ ID NO: 413063 - RNA, 20 nt, Human
cuaacaguguucuaaaggcu

SEQ ID NO: 413064 - RNA, 18 nt, Human
cuaccuugaucugagcgu

SEQ ID NO: 413065 - RNA, 24 nt, Human
cuaucuuacagccuuuuuguacug

SEQ ID NO: 413066 - RNA, 18 nt, Human
cuccugccaggggcuaca

SEQ ID NO: 413067 - RNA, 21 nt, Human
cucuuucgcugccgccaccgc

SEQ ID NO: 413068 - RNA, 27 nt, Human
cuuaaaauaaauauucagaaaaaccuc

SEQ ID NO: 413069 - RNA, 23 nt, Human
cuugacuaccauuucauuuggcc

SEQ ID NO: 413070 - RNA, 22 nt, Human
gaaaacgaggccgggaaaggga

SEQ ID NO: 413071 - RNA, 26 nt, Human
gacacuaucaccaccaaaaauuuauc

SEQ ID NO: 413072 - RNA, 19 nt, Human
gagaacaacaagaacaaaa

SEQ ID NO: 413073 - RNA, 18 nt, Human
gcacuuuccccaguaaac

SEQ ID NO: 413074 - RNA, 24 nt, Human
gcugcuaccuugaucugagcguag

SEQ ID NO: 413075 - RNA, 18 nt, Human
gcuggcccagaaaaaccc

SEQ ID NO: 413076 - RNA, 22 nt, Human
gcuuaauaacucauauuucgcc

SEQ ID NO: 413077 - RNA, 23 nt, Human
ggaaacuacuuacuucuggaaau

SEQ ID NO: 413078 - RNA, 25 nt, Human
gggaaacuacuuacuucuggaaauc

SEQ ID NO: 413079 - RNA, 24 nt, Human
uaaaacauuccaauuucucccuuc

SEQ ID NO: 413080 - RNA, 21 nt, Human
uaaacaaacaacaaacuuccu

SEQ ID NO: 413081 - RNA, 18 nt, Human
uaaacuuaaaacaacaac

SEQ ID NO: 413082 - RNA, 20 nt, Human
uaaaggauuuguucauauau

SEQ ID NO: 413083 - RNA, 23 nt, Human
uaagaugacuacaguugcacgaa

SEQ ID NO: 413084 - RNA, 24 nt, Human
uaauaaacaaacaacaaacuuccu

SEQ ID NO: 413085 - RNA, 18 nt, Human
uacacauuaagaagcaca

SEQ ID NO: 413086 - RNA, 19 nt, Human
uacacauuaagaagcacag

SEQ ID NO: 413087 - RNA, 18 nt, Human
uacaggccgcgagcuauu

SEQ ID NO: 413088 - RNA, 18 nt, Human
uacaguaaucaguuaaaa

SEQ ID NO: 413089 - RNA, 21 nt, Human
uacaguaaucaguuaaaacaa

SEQ ID NO: 413090 - RNA, 25 nt, Human
uacugaaacaguucauugcaagaca

SEQ ID NO: 413091 - RNA, 20 nt, Human
uagcauuaugguacauaaca

SEQ ID NO: 413092 - RNA, 19 nt, Human
uagccaucuuuuucauuau

SEQ ID NO: 413093 - RNA, 20 nt, Human
uaggaaaggggaaacuacuu

SEQ ID NO: 413094 - RNA, 19 nt, Human
uagucgcccucgcccgccg

SEQ ID NO: 413095 - RNA, 24 nt, Human
ucaaccucaagcaguaauaaacac

SEQ ID NO: 413096 - RNA, 22 nt, Human
ucaagcaguaauaaacacaagc

SEQ ID NO: 413097 - RNA, 22 nt, Human
ucacauacacagaagacuagga

SEQ ID NO: 413098 - RNA, 24 nt, Human
ucaccuuaguuaaaaauacauaau

SEQ ID NO: 413099 - RNA, 19 nt, Human
uccagcccacaugucccca

SEQ ID NO: 413100 - RNA, 20 nt, Human
ucccuuccuuccaucuuucu

SEQ ID NO: 413101 - RNA, 19 nt, Human
uccgcccgccaccgccucg

SEQ ID NO: 413102 - RNA, 24 nt, Human
ucgcccccgcgccugggcugcggc

SEQ ID NO: 413103 - RNA, 19 nt, Human
ucgcugccgccaccgccgg

SEQ ID NO: 413104 - RNA, 25 nt, Human
ucgcugccgccaccgccggggcuca

SEQ ID NO: 413105 - RNA, 19 nt, Human
ucggguccuggcgaaggga

SEQ ID NO: 413106 - RNA, 20 nt, Human
ucggguccuggcgaagggaa

SEQ ID NO: 413107 - RNA, 23 nt, Human
ucucaauuaugaaaaaaauuaau

SEQ ID NO: 413108 - RNA, 19 nt, Human
ucuuaagugcacuuucaca

SEQ ID NO: 413109 - RNA, 26 nt, Human
ucuuucgcugccgccaccgccggggc

SEQ ID NO: 413110 - RNA, 22 nt, Human
ugaaacaguucauugcaagaca

SEQ ID NO: 413111 - RNA, 22 nt, Human
ugaaagaauauguaacacuuuc

SEQ ID NO: 413112 - RNA, 24 nt, Human
ugaaagacauccuuuuucuccccc

SEQ ID NO: 413113 - RNA, 23 nt, Human
ugaaagcugcauuuuuccugcca

SEQ ID NO: 413114 - RNA, 22 nt, Human
ugaagguuacguggucuacaaa

SEQ ID NO: 413115 - RNA, 18 nt, Human
ugaguuguuuuuguuuuu

SEQ ID NO: 413116 - RNA, 21 nt, Human
ugccaauuucaaacaaacaaa

SEQ ID NO: 413117 - RNA, 18 nt, Human
ugccuguccacaccgggg

SEQ ID NO: 413118 - RNA, 23 nt, Human
uggaaagcauugucuucuuuuuc

SEQ ID NO: 413119 - RNA, 22 nt, Human
uggcccagaaaaaccccauguu

SEQ ID NO: 413120 - RNA, 30 nt, Human
uguggcaugaguuguuuuuguuuuuaauuu

SEQ ID NO: 413121 - RNA, 23 nt, Human
uuaaauacucaaaaggcucaacc

SEQ ID NO: 413122 - RNA, 25 nt, Human
uuccaauuucucccuuccuuccauc

SEQ ID NO: 413123 - RNA, 25 nt, Human
uuccuugggagaguaguucuguugg

SEQ ID NO: 413124 - RNA, 23 nt, Human
uucgucgccagccgccgcugccu

SEQ ID NO: 413125 - RNA, 18 nt, Human
uuuaacauguuuugaauu

SEQ ID NO: 413126 - RNA, 25 nt, Human
uuuguucauauauguagcugaaauc

SEQ ID NO: 413127 - RNA, 19 nt, Human
uuuuccauaguacaugaaa

SEQ ID NO: 413128 - RNA, 19 nt, Human
aaaaaaaaaaaaaagaaaa

SEQ ID NO: 413129 - RNA, 19 nt, Human
aaaaaaaaaaagaaaaaga

SEQ ID NO: 413130 - RNA, 24 nt, Human
aaaaaaaaaagaaaaagaaaagaa

SEQ ID NO: 413131 - RNA, 26 nt, Human
aaaaaaagaagaaaagcuugccagaa

SEQ ID NO: 413132 - RNA, 21 nt, Human
aaaaacaaaacccagacugcu

SEQ ID NO: 413133 - RNA, 23 nt, Human
aaaaaccuuuaacauuuccuuca

SEQ ID NO: 413134 - RNA, 25 nt, Human
aaaagaaaaagaaaagaagaaagaa

SEQ ID NO: 413135 - RNA, 23 nt, Human
aaaagaagaaaagcuugccagaa

SEQ ID NO: 413136 - RNA, 25 nt, Human
aaaagaagaaagaaaaggaacagaa

SEQ ID NO: 413137 - RNA, 22 nt, Human
aaaaggaagaagaauaugaaga

SEQ ID NO: 413138 - RNA, 23 nt, Human
aaacaaauccugucaacccaugc

SEQ ID NO: 413139 - RNA, 23 nt, Human
aaacauggccacauacugcauac

SEQ ID NO: 413140 - RNA, 19 nt, Human
aaaccaacaaaaaagcaca

SEQ ID NO: 413141 - RNA, 23 nt, Human
aaagaagaaaagcuugccagaaa

SEQ ID NO: 413142 - RNA, 24 nt, Human
aaagaagaaaagcuugccagaaaa

SEQ ID NO: 413143 - RNA, 18 nt, Human
aaagcagcacucaccaag

SEQ ID NO: 413144 - RNA, 22 nt, Human
aaaggaagaagaauaugaagag

SEQ ID NO: 413145 - RNA, 25 nt, Human
aacacagaaaagggguuaagucuag

SEQ ID NO: 413146 - RNA, 22 nt, Human
aaccacaaacaauuguuuaucu

SEQ ID NO: 413147 - RNA, 22 nt, Human
aagaaaaagaaaagaagaaaga

SEQ ID NO: 413148 - RNA, 20 nt, Human
aagaaaagaagaaagaaaag

SEQ ID NO: 413149 - RNA, 20 nt, Human
aagaaagaaaaggaacagaa

SEQ ID NO: 413150 - RNA, 20 nt, Human
aagaagaaagaaaaggaaca

SEQ ID NO: 413151 - RNA, 20 nt, Human
aagaagaaagaaaaggaaca

SEQ ID NO: 413152 - RNA, 19 nt, Human
aagcagugacacccauuuc

SEQ ID NO: 413153 - RNA, 18 nt, Human
aagcuuccaaguguauau

SEQ ID NO: 413154 - RNA, 23 nt, Human
aagguauccuccauccagaccua

SEQ ID NO: 413155 - RNA, 20 nt, Human
aaguuccagacaaaacaccu

SEQ ID NO: 413156 - RNA, 23 nt, Human
aauaugaagagacaacagagggu

SEQ ID NO: 413157 - RNA, 23 nt, Human
aauugaguagugagcucaaguuc

SEQ ID NO: 413158 - RNA, 22 nt, Human
aauuuugugaagaaugaguaug

SEQ ID NO: 413159 - RNA, 21 nt, Human
acacugccaggcaaguuugac

SEQ ID NO: 413160 - RNA, 23 nt, Human
acagaaaagggguuaagucuaga

SEQ ID NO: 413161 - RNA, 19 nt, Human
acuugguuuccuuaccagu

SEQ ID NO: 413162 - RNA, 21 nt, Human
agaaaagaagaaagaaaagga

SEQ ID NO: 413163 - RNA, 20 nt, Human
agaaagaaaaaaggcacaga

SEQ ID NO: 413164 - RNA, 23 nt, Human
agaaagaaaaaaggcacagagga

SEQ ID NO: 413165 - RNA, 23 nt, Human
agaaagaaaaggaacagaaccag

SEQ ID NO: 413166 - RNA, 20 nt, Human
agaaccagaaagagagaaac

SEQ ID NO: 413167 - RNA, 19 nt, Human
agccaauacacaaaacuag

SEQ ID NO: 413168 - RNA, 24 nt, Human
agcugcugggaauagcugccuucu

SEQ ID NO: 413169 - RNA, 22 nt, Human
aggaaaagaguuuaaaaaaaga

SEQ ID NO: 413170 - RNA, 19 nt, Human
aggaagaagaauaugaaga

SEQ ID NO: 413171 - RNA, 18 nt, Human
aggcagaagcuuauuuua

SEQ ID NO: 413172 - RNA, 25 nt, Human
aggcagagccugaagugccagcagc

SEQ ID NO: 413173 - RNA, 20 nt, Human
agguauccuccauccagacc

SEQ ID NO: 413174 - RNA, 27 nt, Human
agguauccuccauccagaccuaguggg

SEQ ID NO: 413175 - RNA, 18 nt, Human
aguucauucucagagagg

SEQ ID NO: 413176 - RNA, 20 nt, Human
auaggcagaagcuuauuuua

SEQ ID NO: 413177 - RNA, 18 nt, Human
auuuugcuaucauacucc

SEQ ID NO: 413178 - RNA, 19 nt, Human
caaagccaauacacaaaac

SEQ ID NO: 413179 - RNA, 27 nt, Human
caaauccugucaacccaugccauaaag

SEQ ID NO: 413180 - RNA, 22 nt, Human
caaaugaagcagugacacccau

SEQ ID NO: 413181 - RNA, 23 nt, Human
caccauuaaaaaaccuuuaacau

SEQ ID NO: 413182 - RNA, 23 nt, Human
cacccauuucuugauccuaucac

SEQ ID NO: 413183 - RNA, 21 nt, Human
cacucugggguugguuuuggu

SEQ ID NO: 413184 - RNA, 24 nt, Human
cagaagaauacagacaaagacugg

SEQ ID NO: 413185 - RNA, 22 nt, Human
cagcugaugcaaucaaaaaccc

SEQ ID NO: 413186 - RNA, 20 nt, Human
ccaacagucuccucaccccc

SEQ ID NO: 413187 - RNA, 23 nt, Human
ccaccaucaaauaaaguaaugaa

SEQ ID NO: 413188 - RNA, 21 nt, Human
ccauaggggaaugucccuagu

SEQ ID NO: 413189 - RNA, 23 nt, Human
cccaugccauaaaggcccaggga

SEQ ID NO: 413190 - RNA, 20 nt, Human
ccucacaugacaucaacagu

SEQ ID NO: 413191 - RNA, 24 nt, Human
cuaaaccaacaaaaaagcacaugg

SEQ ID NO: 413192 - RNA, 24 nt, Human
cucaaacaaauauuaacuauauac

SEQ ID NO: 413193 - RNA, 22 nt, Human
cucugggguugguuuugguuug

SEQ ID NO: 413194 - RNA, 21 nt, Human
cugcugggaauagcugccuuc

SEQ ID NO: 413195 - RNA, 22 nt, Human
cuuuuccccucguuuuuaaaau

SEQ ID NO: 413196 - RNA, 21 nt, Human
gaaaauaaacaaauccuguca

SEQ ID NO: 413197 - RNA, 24 nt, Human
gaaagaaaaggaacagaaccagaa

SEQ ID NO: 413198 - RNA, 18 nt, Human
gaagaagaauaugaagag

SEQ ID NO: 413199 - RNA, 19 nt, Human
gaaguagcucuuagaaguc

SEQ ID NO: 413200 - RNA, 18 nt, Human
gacuggaggcagcauggg

SEQ ID NO: 413201 - RNA, 22 nt, Human
gggaaaggaggaugauaaauau

SEQ ID NO: 413202 - RNA, 22 nt, Human
gguacucaguuuacacuaaacc

SEQ ID NO: 413203 - RNA, 20 nt, Human
gugaugauuucuaaacuugg

SEQ ID NO: 413204 - RNA, 22 nt, Human
uaaaaaaagaagaaaagcuugc

SEQ ID NO: 413205 - RNA, 28 nt, Human
uaaaaaaagaagaaaagcuugccagaaa

SEQ ID NO: 413206 - RNA, 21 nt, Human
uaaaaaaccuuuaacauuucc

SEQ ID NO: 413207 - RNA, 23 nt, Human
uaaaagcagcacucaccaaaaau

SEQ ID NO: 413208 - RNA, 20 nt, Human
uaaaccaacaaaaaagcaca

SEQ ID NO: 413209 - RNA, 23 nt, Human
uaaauacagaagaauacagacaa

SEQ ID NO: 413210 - RNA, 19 nt, Human
uaaaugcaaauaggcagaa

SEQ ID NO: 413211 - RNA, 19 nt, Human
uaagcacagcaauaggcaa

SEQ ID NO: 413212 - RNA, 18 nt, Human
uaaguauaauuuccugca

SEQ ID NO: 413213 - RNA, 23 nt, Human
uaagucuagaucaugaggacuag

SEQ ID NO: 413214 - RNA, 24 nt, Human
uacacuaaaccaacaaaaaagcac

SEQ ID NO: 413215 - RNA, 19 nt, Human
uacauaguucauucucaga

SEQ ID NO: 413216 - RNA, 24 nt, Human
uagaaagacagugauauaaagaua

SEQ ID NO: 413217 - RNA, 19 nt, Human
uagcaaccaccaucaaaua

SEQ ID NO: 413218 - RNA, 21 nt, Human
uaguucauucucagagaggga

SEQ ID NO: 413219 - RNA, 24 nt, Human
uauaauaaguauaauuuccugcaa

SEQ ID NO: 413220 - RNA, 21 nt, Human
uauaucucacacacugagaua

SEQ ID NO: 413221 - RNA, 23 nt, Human
uauauuaaaaaacaaaacccaga

SEQ ID NO: 413222 - RNA, 21 nt, Human
uaugugaaguuacucuguaac

SEQ ID NO: 413223 - RNA, 23 nt, Human
uauguguauuuauauaucucaca

SEQ ID NO: 413224 - RNA, 23 nt, Human
ucauuuaggaaaaggaagaagaa

SEQ ID NO: 413225 - RNA, 21 nt, Human
uccagaccuagugggagaggc

SEQ ID NO: 413226 - RNA, 22 nt, Human
uccagcaaagccaauacacaaa

SEQ ID NO: 413227 - RNA, 33 nt, Human
ucuaauuuaguaaaaaaaaaaaaaaaaagaaaa

SEQ ID NO: 413228 - RNA, 18 nt, Human
ucuccugaaaaacucugg

SEQ ID NO: 413229 - RNA, 18 nt, Human
ugaaaaacucuggucuuu

SEQ ID NO: 413230 - RNA, 23 nt, Human
ugaacaguaauuggaagagaaau

SEQ ID NO: 413231 - RNA, 21 nt, Human
ugaugcaaucaaaaacccauc

SEQ ID NO: 413232 - RNA, 18 nt, Human
ugcagcaucagccucugg

SEQ ID NO: 413233 - RNA, 20 nt, Human
ugccagaaaaggcuuacaau

SEQ ID NO: 413234 - RNA, 19 nt, Human
ugccauaaaggcccaggga

SEQ ID NO: 413235 - RNA, 22 nt, Human
ugccuucugaguuuuugugccc

SEQ ID NO: 413236 - RNA, 22 nt, Human
uggcauuugcaaaaguguccuc

SEQ ID NO: 413237 - RNA, 18 nt, Human
ugggaauagcugccuucu

SEQ ID NO: 413238 - RNA, 22 nt, Human
ugggagaggcagagccugaagu

SEQ ID NO: 413239 - RNA, 19 nt, Human
uguaaaggcacccaguaga

SEQ ID NO: 413240 - RNA, 19 nt, Human
uuacaagcucaaacaaaua

SEQ ID NO: 413241 - RNA, 23 nt, Human
uuagaaaauaaacaaauccuguc

SEQ ID NO: 413242 - RNA, 23 nt, Human
uuaugagcaauaccagagcugag

SEQ ID NO: 413243 - RNA, 22 nt, Human
uucaaaauacagucgcguugau

SEQ ID NO: 413244 - RNA, 24 nt, Human
uucacagaaagaaaaaaggcacag

SEQ ID NO: 413245 - RNA, 19 nt, Human
uuccuggaauguuucaaaa

SEQ ID NO: 413246 - RNA, 18 nt, Human
uucuccugaaaaacucug

SEQ ID NO: 413247 - RNA, 21 nt, Human
uucuugauccuaucacuuuuc

SEQ ID NO: 413248 - RNA, 22 nt, Human
uugaucaaguuuuauuucaauc

SEQ ID NO: 413249 - RNA, 20 nt, Human
uuuaaagauauucagcagca

SEQ ID NO: 413250 - RNA, 19 nt, Human
uuuaggaaaaggaagaaga

SEQ ID NO: 413251 - RNA, 22 nt, Human
uuuuccccucguuuuuaaaaug

SEQ ID NO: 413252 - RNA, 23 nt, Human
aaaaaaggauugagggaaaagaa

SEQ ID NO: 413253 - RNA, 22 nt, Human
aaaaaggauugagggaaaagaa

SEQ ID NO: 413254 - RNA, 23 nt, Human
aaaacccauaucccaggccaaaa

SEQ ID NO: 413255 - RNA, 22 nt, Human
aaaaguacaaauaaaaucaaaa

SEQ ID NO: 413256 - RNA, 20 nt, Human
aaacccauaucccaggccaa

SEQ ID NO: 413257 - RNA, 20 nt, Human
aaagagcaguguucuguugu

SEQ ID NO: 413258 - RNA, 23 nt, Human
aaauccuucucccuuccccacag

SEQ ID NO: 413259 - RNA, 23 nt, Human
aacaaacaauaaugaauaaugag

SEQ ID NO: 413260 - RNA, 21 nt, Human
aauaaaaaaggauugagggaa

SEQ ID NO: 413261 - RNA, 24 nt, Human
aaucaaaaagagcaguguucuguu

SEQ ID NO: 413262 - RNA, 20 nt, Human
aaugaagcugguacagacaa

SEQ ID NO: 413263 - RNA, 21 nt, Human
acaauaaugaauaaugagcac

SEQ ID NO: 413264 - RNA, 22 nt, Human
acagacaauguccauuuaaaac

SEQ ID NO: 413265 - RNA, 23 nt, Human
aggagaggguaauaugaagggga

SEQ ID NO: 413266 - RNA, 24 nt, Human
aggagaggguaauaugaaggggac

SEQ ID NO: 413267 - RNA, 19 nt, Human
aucacaugcuagaacauca

SEQ ID NO: 413268 - RNA, 23 nt, Human
aucuuaaaaugccuuuucuucag

SEQ ID NO: 413269 - RNA, 23 nt, Human
augaaaacaaacaauaaugaaua

SEQ ID NO: 413270 - RNA, 18 nt, Human
augcuagaacaucagggc

SEQ ID NO: 413271 - RNA, 18 nt, Human
caaaaagagcaguguucu

SEQ ID NO: 413272 - RNA, 19 nt, Human
caaaaagagcaguguucug

SEQ ID NO: 413273 - RNA, 24 nt, Human
caaacaauaaugaauaaugagcac

SEQ ID NO: 413274 - RNA, 23 nt, Human
caaacaauaaugaauaaugagcc

SEQ ID NO: 413275 - RNA, 19 nt, Human
caccacauuacaaaagaac

SEQ ID NO: 413276 - RNA, 23 nt, Human
cagacaauguccauuuaaaaccc

SEQ ID NO: 413277 - RNA, 22 nt, Human
cagcacaaugaaaacaaacuuc

SEQ ID NO: 413278 - RNA, 20 nt, Human
caguguucuguuguauucau

SEQ ID NO: 413279 - RNA, 26 nt, Human
cccauaucccaggccaaaaaguacaa

SEQ ID NO: 413280 - RNA, 26 nt, Human
cgggguuuacaaauccuucucccuuc

SEQ ID NO: 413281 - RNA, 21 nt, Human
cucggguaagcagaaccucgc

SEQ ID NO: 413282 - RNA, 25 nt, Human
cugaaaaacuuccaucucccacuga

SEQ ID NO: 413283 - RNA, 27 nt, Human
cugaaaaacuuccaucucccacugaaa

SEQ ID NO: 413284 - RNA, 19 nt, Human
gaaaaacuuccaucuccca

SEQ ID NO: 413285 - RNA, 22 nt, Human
gaaaagaaaaaaaaauaaaaag

SEQ ID NO: 413286 - RNA, 24 nt, Human
gaaaagaaaaaaaaauaaaaagaa

SEQ ID NO: 413287 - RNA, 22 nt, Human
gacaagauuuuuaaaaaaucuu

SEQ ID NO: 413288 - RNA, 21 nt, Human
gaucaccaaaaaucagcacaa

SEQ ID NO: 413289 - RNA, 25 nt, Human
ggaaaagaaaaaaaaauaaaaagaa

SEQ ID NO: 413290 - RNA, 20 nt, Human
ggccaaaaaguacaaauaaa

SEQ ID NO: 413291 - RNA, 21 nt, Human
ggguaagcagaaccucgcucc

SEQ ID NO: 413292 - RNA, 22 nt, Human
uaaugagcacuagaauucaaau

SEQ ID NO: 413293 - RNA, 19 nt, Human
uacaaauaaaaucaaaaag

SEQ ID NO: 413294 - RNA, 18 nt, Human
uauagcuuuauuaauugc

SEQ ID NO: 413295 - RNA, 25 nt, Human
ucaauuccguuuugaacaccacauu

SEQ ID NO: 413296 - RNA, 18 nt, Human
ucaccaaaaaucagcaca

SEQ ID NO: 413297 - RNA, 21 nt, Human
ucaccaaaaaucagcacaaug

SEQ ID NO: 413298 - RNA, 21 nt, Human
ucaccacaagccugaaaaugc

SEQ ID NO: 413299 - RNA, 25 nt, Human
uccccacagcacaacaccgcggcug

SEQ ID NO: 413300 - RNA, 20 nt, Human
ucuccgcacagcagcggccu

SEQ ID NO: 413301 - RNA, 19 nt, Human
ucucugugcacacguaauu

SEQ ID NO: 413302 - RNA, 24 nt, Human
ugcuaaugaaaauuagaacuuuuc

SEQ ID NO: 413303 - RNA, 26 nt, Human
ugguacagacaauguccauuuaaaac

SEQ ID NO: 413304 - RNA, 22 nt, Human
uguauucauuucugcauguaua

SEQ ID NO: 413305 - RNA, 23 nt, Human
uuaaggaaaggucauuuuuccac

SEQ ID NO: 413306 - RNA, 19 nt, Human
uucaaagagauggggugcc

SEQ ID NO: 413307 - RNA, 19 nt, Human
uuccccacagcacaacacc

SEQ ID NO: 413308 - RNA, 20 nt, Human
uuccccacagcacaacaccg

SEQ ID NO: 413309 - RNA, 22 nt, Human
uugaucaccaaaaaucagcacu

SEQ ID NO: 413310 - RNA, 20 nt, Human
uuuaaaaaggagaggguaau

SEQ ID NO: 413311 - RNA, 18 nt, Human
uuuuuuuuuuuuuuuuug

SEQ ID NO: 413312 - RNA, 25 nt, Human
uuuuuuuuuuuuuuuuuugauuuuu

SEQ ID NO: 413313 - RNA, 18 nt, Human
aaaaaaacaaacaaagaa

SEQ ID NO: 413314 - RNA, 28 nt, Human
aaaaaaacaaacaaagaaaaaagagcag

SEQ ID NO: 413315 - RNA, 22 nt, Human
aaaaaagagcagaagucuucac

SEQ ID NO: 413316 - RNA, 25 nt, Human
aaaaaccaauagagaauuauuuuua

SEQ ID NO: 413317 - RNA, 21 nt, Human
aaaaagagcagaagucuucac

SEQ ID NO: 413318 - RNA, 23 nt, Human
aaaacaaacaaagaaaaaagagc

SEQ ID NO: 413319 - RNA, 20 nt, Human
aaaaugguuucugcuacgaa

SEQ ID NO: 413320 - RNA, 23 nt, Human
aaacaaacaaagaaaaaagagca

SEQ ID NO: 413321 - RNA, 20 nt, Human
aaacaacgcugaccauuuga

SEQ ID NO: 413322 - RNA, 20 nt, Human
aaauauauaaucugagaaca

SEQ ID NO: 413323 - RNA, 18 nt, Human
aacaaaauuaguacuaug

SEQ ID NO: 413324 - RNA, 27 nt, Human
aacacuugauuuauuaguucugaugau

SEQ ID NO: 413325 - RNA, 21 nt, Human
aaguagccuuggauaugagga

SEQ ID NO: 413326 - RNA, 24 nt, Human
aauacaagaaauaaaaaaucagag

SEQ ID NO: 413327 - RNA, 25 nt, Human
acacagaaaaauauauugaaaaacc

SEQ ID NO: 413328 - RNA, 23 nt, Human
acccagauguuuacgaaaaaaac

SEQ ID NO: 413329 - RNA, 19 nt, Human
acgaaaaaaacaaacaaag

SEQ ID NO: 413330 - RNA, 21 nt, Human
acgaaaaaaacaaacaaagaa

SEQ ID NO: 413331 - RNA, 23 nt, Human
acgaaaaaaacaaacaaagaaaa

SEQ ID NO: 413332 - RNA, 19 nt, Human
acugcauucaaaaaccaau

SEQ ID NO: 413333 - RNA, 20 nt, Human
agacaugcugagguuuuaau

SEQ ID NO: 413334 - RNA, 22 nt, Human
agggagacaugcugagguuuua

SEQ ID NO: 413335 - RNA, 20 nt, Human
agguauuaaaaauaauuacc

SEQ ID NO: 413336 - RNA, 21 nt, Human
agugaaaaaauauaaaaaucu

SEQ ID NO: 413337 - RNA, 22 nt, Human
agugaaaaauguucuugguucu

SEQ ID NO: 413338 - RNA, 20 nt, Human
aguuuacaggaagaaucugu

SEQ ID NO: 413339 - RNA, 21 nt, Human
aucacaucacacuaggcagac

SEQ ID NO: 413340 - RNA, 20 nt, Human
augagugacugaaacuaccc

SEQ ID NO: 413341 - RNA, 21 nt, Human
caaacucuaaauugagggaaa

SEQ ID NO: 413342 - RNA, 20 nt, Human
cagagggaucuucaaaagua

SEQ ID NO: 413343 - RNA, 19 nt, Human
cagcagcaugaaagacaaa

SEQ ID NO: 413344 - RNA, 22 nt, Human
caugaaagacaaagacuauauc

SEQ ID NO: 413345 - RNA, 18 nt, Human
caugacacuggauguggu

SEQ ID NO: 413346 - RNA, 19 nt, Human
caugagaaaagaugacagu

SEQ ID NO: 413347 - RNA, 22 nt, Human
cccacauuaaggcuaggagacc

SEQ ID NO: 413348 - RNA, 21 nt, Human
cccagcagcaugaaagacaaa

SEQ ID NO: 413349 - RNA, 19 nt, Human
ccccaaaacaacaacagaa

SEQ ID NO: 413350 - RNA, 19 nt, Human
cuguccacaaauuaaccag

SEQ ID NO: 413351 - RNA, 21 nt, Human
gaaaaaaacaaacaaagaaaa

SEQ ID NO: 413352 - RNA, 21 nt, Human
gaaagcaaauaguucagauca

SEQ ID NO: 413353 - RNA, 26 nt, Human
gaccauuugaaaccauuuacauuuaa

SEQ ID NO: 413354 - RNA, 22 nt, Human
gagugcuuuaaacaggcacauu

SEQ ID NO: 413355 - RNA, 19 nt, Human
gauagucuuuaacuuaaaa

SEQ ID NO: 413356 - RNA, 19 nt, Human
gaugagugacugaaacuac

SEQ ID NO: 413357 - RNA, 20 nt, Human
gccaaucuauauuuuaaguc

SEQ ID NO: 413358 - RNA, 21 nt, Human
gcucaacaaaaaauacaagaa

SEQ ID NO: 413359 - RNA, 18 nt, Human
ggacauaggcucaucauu

SEQ ID NO: 413360 - RNA, 22 nt, Human
ggagacgcacucucaccccuuc

SEQ ID NO: 413361 - RNA, 22 nt, Human
gggaaauauauaaucugagaac

SEQ ID NO: 413362 - RNA, 23 nt, Human
guagcucaugcuuuagugcugug

SEQ ID NO: 413363 - RNA, 20 nt, Human
gugacugaaacuacccuccc

SEQ ID NO: 413364 - RNA, 19 nt, Human
guuuacaggcagacuguuc

SEQ ID NO: 413365 - RNA, 20 nt, Human
uaaaaaaagaguaaucagaa

SEQ ID NO: 413366 - RNA, 20 nt, Human
uaaaaaaucagagugaaaaa

SEQ ID NO: 413367 - RNA, 25 nt, Human
uaaaauacaacuuaucuugaagaga

SEQ ID NO: 413368 - RNA, 24 nt, Human
uaaaauuaccaccaaaaugcacua

SEQ ID NO: 413369 - RNA, 20 nt, Human
uaacuuguuaacuuuucccc

SEQ ID NO: 413370 - RNA, 25 nt, Human
uacaaaauagagccauaaauuguuu

SEQ ID NO: 413371 - RNA, 20 nt, Human
uacaagaaauaaaaaaucag

SEQ ID NO: 413372 - RNA, 25 nt, Human
uacauugggaauacuccccaaaaca

SEQ ID NO: 413373 - RNA, 23 nt, Human
uacgaaaaaaacaaacaaagaaa

SEQ ID NO: 413374 - RNA, 23 nt, Human
uagucaacacuaacagaauucac

SEQ ID NO: 413375 - RNA, 20 nt, Human
uaucacaucacacuaggcag

SEQ ID NO: 413376 - RNA, 21 nt, Human
uaugaggaaacuucauuuaac

SEQ ID NO: 413377 - RNA, 20 nt, Human
uaugauauuagguauuaagc

SEQ ID NO: 413378 - RNA, 24 nt, Human
uauguacauuacuggaucuaugca

SEQ ID NO: 413379 - RNA, 19 nt, Human
ucagcuagucaacaaagca

SEQ ID NO: 413380 - RNA, 23 nt, Human
uccaugguaaaauacaacuuauc

SEQ ID NO: 413381 - RNA, 22 nt, Human
ucccagugaaaaaauauaaaaa

SEQ ID NO: 413382 - RNA, 18 nt, Human
ucuauccauuguugugac

SEQ ID NO: 413383 - RNA, 22 nt, Human
ucugaacucuaaggaguaagca

SEQ ID NO: 413384 - RNA, 20 nt, Human
ucugcacaauaaugaaagcc

SEQ ID NO: 413385 - RNA, 28 nt, Human
ugagaacacacagaaaaauuggagaccc

SEQ ID NO: 413386 - RNA, 18 nt, Human
ugagacaccagcguuagg

SEQ ID NO: 413387 - RNA, 21 nt, Human
ugaggaaaauaaugccaaucu

SEQ ID NO: 413388 - RNA, 23 nt, Human
ugccauaaaaaucagcuuuugac

SEQ ID NO: 413389 - RNA, 19 nt, Human
ugcccaauuaagcaacuac

SEQ ID NO: 413390 - RNA, 24 nt, Human
ugcuacgaaagauaacuuguuaac

SEQ ID NO: 413391 - RNA, 22 nt, Human
ugguaaaauacaacuuaucuug

SEQ ID NO: 413392 - RNA, 23 nt, Human
ugucccagcagcaugaaagacaa

SEQ ID NO: 413393 - RNA, 24 nt, Human
ugucccagcagcaugaaagacaaa

SEQ ID NO: 413394 - RNA, 23 nt, Human
uguuauaaauucugcugaugagg

SEQ ID NO: 413395 - RNA, 18 nt, Human
uuaagaaaugaaaguaga

SEQ ID NO: 413396 - RNA, 24 nt, Human
uuaguuucuuuuccauuuuuuccu

SEQ ID NO: 413397 - RNA, 23 nt, Human
uucacccaacauuuuaguuucuu

SEQ ID NO: 413398 - RNA, 22 nt, Human
uucaucaaagcauuaacaauga

SEQ ID NO: 413399 - RNA, 25 nt, Human
uuuacgaaaaaaacaaacaaagaaa

SEQ ID NO: 413400 - RNA, 18 nt, Human
uuuagguaaaagagauga

SEQ ID NO: 413401 - RNA, 23 nt, Human
uuuguuuuacaaaauagagccau

SEQ ID NO: 413402 - RNA, 23 nt, Human
uuuuaauuuuaagaauucaucug

SEQ ID NO: 413403 - RNA, 20 nt, Human
uuuuccucucaaguuggccc

SEQ ID NO: 413404 - RNA, 18 nt, Human
uuuuuagugcaaauugua

SEQ ID NO: 413405 - RNA, 23 nt, Human
uuuuuccaugguaaaauacaacu

SEQ ID NO: 413406 - RNA, 20 nt, Human
cagugugggggaugaggaug

SEQ ID NO: 413407 - RNA, 18 nt, Human
gggaugaggaugggagag

SEQ ID NO: 413408 - RNA, 21 nt, Human
ggggcaggaagaugaggauuc

SEQ ID NO: 413409 - RNA, 24 nt, Human
uacaaacaagcaucuaucccagug

SEQ ID NO: 413410 - RNA, 24 nt, Human
ucgaaccugccgacgccaccagcu

SEQ ID NO: 413411 - RNA, 19 nt, Human
ugugggggaugaggauggg

SEQ ID NO: 413412 - RNA, 26 nt, Human
aaaaauacagaaaaacccacacaucu

SEQ ID NO: 413413 - RNA, 22 nt, Human
aaagaaaaauacagaaaaaccc

SEQ ID NO: 413414 - RNA, 20 nt, Human
aaauaaacuggacagaugca

SEQ ID NO: 413415 - RNA, 23 nt, Human
aacaaaccugacuaaccggcacu

SEQ ID NO: 413416 - RNA, 18 nt, Human
aaucuggucacccaacua

SEQ ID NO: 413417 - RNA, 24 nt, Human
aaugaaauaaagcagguauuuuaa

SEQ ID NO: 413418 - RNA, 24 nt, Human
aaugcagucccaaaugugcauacu

SEQ ID NO: 413419 - RNA, 26 nt, Human
acccacacaucuuacuguacuccacc

SEQ ID NO: 413420 - RNA, 23 nt, Human
accuuaaaaugcaucauauuggg

SEQ ID NO: 413421 - RNA, 23 nt, Human
agaaaaacccacacaucuuacug

SEQ ID NO: 413422 - RNA, 21 nt, Human
agaaaaauacagaaaaaccca

SEQ ID NO: 413423 - RNA, 21 nt, Human
agaaaagaaaaauacagaaaa

SEQ ID NO: 413424 - RNA, 26 nt, Human
agagccggcaggccuggacagcgaag

SEQ ID NO: 413425 - RNA, 22 nt, Human
aggagccagcagacaccagagc

SEQ ID NO: 413426 - RNA, 20 nt, Human
aggcgagcaaggaggagccg

SEQ ID NO: 413427 - RNA, 21 nt, Human
auacuacaguguuccuucagu

SEQ ID NO: 413428 - RNA, 23 nt, Human
augcaguagccuuaauucccacu

SEQ ID NO: 413429 - RNA, 26 nt, Human
caaaaugaaauaaagcagguaguggg

SEQ ID NO: 413430 - RNA, 18 nt, Human
caaaugauuugcuucuuu

SEQ ID NO: 413431 - RNA, 18 nt, Human
caagauacagaaaugcug

SEQ ID NO: 413432 - RNA, 19 nt, Human
caccagagccggcaggccu

SEQ ID NO: 413433 - RNA, 19 nt, Human
caccguagcgggugugggg

SEQ ID NO: 413434 - RNA, 20 nt, Human
cagaagugaugcaugcagua

SEQ ID NO: 413435 - RNA, 21 nt, Human
caguaguauaaaucuuacagc

SEQ ID NO: 413436 - RNA, 23 nt, Human
ccgcagcagccaccgcuuccucc

SEQ ID NO: 413437 - RNA, 20 nt, Human
cggcggcggcggcggugacu

SEQ ID NO: 413438 - RNA, 24 nt, Human
cgggucaggcgcucggcagccgcc

SEQ ID NO: 413439 - RNA, 21 nt, Human
cuguggcggcggcggcggcuu

SEQ ID NO: 413440 - RNA, 20 nt, Human
gaaaaauacagaaaaaccca

SEQ ID NO: 413441 - RNA, 23 nt, Human
gagccagcagacaccagagccgg

SEQ ID NO: 413442 - RNA, 27 nt, Human
gagccggcaggccuggacagcgaagaa

SEQ ID NO: 413443 - RNA, 22 nt, Human
gaggagccagcagacaccagag

SEQ ID NO: 413444 - RNA, 18 nt, Human
gcaaaaaugcaugccaaa

SEQ ID NO: 413445 - RNA, 19 nt, Human
gcaaggaggagccagcaga

SEQ ID NO: 413446 - RNA, 23 nt, Human
gcggcggcggcggugacucaggc

SEQ ID NO: 413447 - RNA, 24 nt, Human
gcggcggcggcggugacucaggca

SEQ ID NO: 413448 - RNA, 21 nt, Human
ggagaagcugagaaguccuag

SEQ ID NO: 413449 - RNA, 26 nt, Human
ggagauguuugucaaagaugcuguaa

SEQ ID NO: 413450 - RNA, 21 nt, Human
ggcuaauguuuaaaaagcaaa

SEQ ID NO: 413451 - RNA, 23 nt, Human
ggcuguggcggcggcggcggcgg

SEQ ID NO: 413452 - RNA, 19 nt, Human
guggcggcggcggcggcgg

SEQ ID NO: 413453 - RNA, 22 nt, Human
guggcggcggcggcggcgguga

SEQ ID NO: 413454 - RNA, 19 nt, Human
guuuccagaaaugcagucc

SEQ ID NO: 413455 - RNA, 21 nt, Human
uaaaaagcaaauaaacuggac

SEQ ID NO: 413456 - RNA, 22 nt, Human
uaaaaagcaaauaaacuggaca

SEQ ID NO: 413457 - RNA, 19 nt, Human
uaaaaugcaucauauuggg

SEQ ID NO: 413458 - RNA, 19 nt, Human
uaaaaugcaucauauuggg

SEQ ID NO: 413459 - RNA, 24 nt, Human
uaaacuaccuaugggagaagcuga

SEQ ID NO: 413460 - RNA, 22 nt, Human
uaaacuggacagaugcaggaca

SEQ ID NO: 413461 - RNA, 21 nt, Human
uaacagcacagaauuccaaga

SEQ ID NO: 413462 - RNA, 22 nt, Human
uacuguacuccaccuuaaaaug

SEQ ID NO: 413463 - RNA, 23 nt, Human
uauacaaauaaaacaaaauuauc

SEQ ID NO: 413464 - RNA, 24 nt, Human
uaucaguaguauaaaucuuacagc

SEQ ID NO: 413465 - RNA, 18 nt, Human
ucaaagaugcuguaagau

SEQ ID NO: 413466 - RNA, 18 nt, Human
ucaguagcaacgggcgca

SEQ ID NO: 413467 - RNA, 24 nt, Human
uccagaaaagaaaaauacagaaaa

SEQ ID NO: 413468 - RNA, 25 nt, Human
uccagaaaagaaaaauacagaaaaa

SEQ ID NO: 413469 - RNA, 19 nt, Human
uccgcagcagccaccgcuu

SEQ ID NO: 413470 - RNA, 24 nt, Human
uccgcagcagccaccgcuuccucc

SEQ ID NO: 413471 - RNA, 18 nt, Human
ugcaugccaaagucacaa

SEQ ID NO: 413472 - RNA, 18 nt, Human
ugccaaagucacaauaag

SEQ ID NO: 413473 - RNA, 22 nt, Human
ugcucagagagccuauugcagu

SEQ ID NO: 413474 - RNA, 24 nt, Human
uggacagcgaagaaugcagagcac

SEQ ID NO: 413475 - RNA, 23 nt, Human
uggcggcggcggcggcggugacu

SEQ ID NO: 413476 - RNA, 18 nt, Human
ugggagaagcugagaagu

SEQ ID NO: 413477 - RNA, 20 nt, Human
ugggagaagcugagaagucc

SEQ ID NO: 413478 - RNA, 22 nt, Human
ugggagaagcugagaaguccua

SEQ ID NO: 413479 - RNA, 24 nt, Human
ugggagaagcugagaaguccuagg

SEQ ID NO: 413480 - RNA, 20 nt, Human
ugggagauguuugucaaaga

SEQ ID NO: 413481 - RNA, 18 nt, Human
uggggccccggagcucgg

SEQ ID NO: 413482 - RNA, 18 nt, Human
uguggcggcggcggcggc

SEQ ID NO: 413483 - RNA, 21 nt, Human
uguggggccccggagcucggu

SEQ ID NO: 413484 - RNA, 18 nt, Human
uguuccagaaaagaaaaa

SEQ ID NO: 413485 - RNA, 18 nt, Human
uuaaaaagcaaauaaacu

SEQ ID NO: 413486 - RNA, 22 nt, Human
uuaaugccuguuaaacuaccua

SEQ ID NO: 413487 - RNA, 22 nt, Human
uuacuguacuccaccuuaaaau

SEQ ID NO: 413488 - RNA, 20 nt, Human
uugcuucuuuuuaaugcuuu

SEQ ID NO: 413489 - RNA, 23 nt, Human
uuuugcugggagauguuugucaa

SEQ ID NO: 413490 - RNA, 18 nt, Human
uuuuuuuuuuuuuuuuug

SEQ ID NO: 413491 - RNA, 21 nt, Human
aaggaaggaaggaaacaaaga

SEQ ID NO: 413492 - RNA, 19 nt, Human
aaggagaaagggagugagg

SEQ ID NO: 413493 - RNA, 25 nt, Human
acaaaucaaaaugcauauuaggguc

SEQ ID NO: 413494 - RNA, 21 nt, Human
acagauuuaaaagaaucaaaa

SEQ ID NO: 413495 - RNA, 20 nt, Human
acugauccuucaggcugcac

SEQ ID NO: 413496 - RNA, 19 nt, Human
agaggaagggaagguagga

SEQ ID NO: 413497 - RNA, 19 nt, Human
agagggagggaguggggag

SEQ ID NO: 413498 - RNA, 18 nt, Human
agcgcgagggaaggagga

SEQ ID NO: 413499 - RNA, 21 nt, Human
aggaaggaaggaaacaaagag

SEQ ID NO: 413500 - RNA, 21 nt, Human
aggaaggaaggaaacaaagag

SEQ ID NO: 413501 - RNA, 24 nt, Human
aggaaggaaggaggcaccgccgca

SEQ ID NO: 413502 - RNA, 18 nt, Human
aggagaaagggagugagg

SEQ ID NO: 413503 - RNA, 18 nt, Human
aggaggaaggaaggaggc

SEQ ID NO: 413504 - RNA, 24 nt, Human
aggcgggcagggaaggcgcgggcg

SEQ ID NO: 413505 - RNA, 18 nt, Human
agggagggaguggggaga

SEQ ID NO: 413506 - RNA, 19 nt, Human
agugagggaaguaggaggg

SEQ ID NO: 413507 - RNA, 22 nt, Human
auacaaauauagcaaaaaagau

SEQ ID NO: 413508 - RNA, 22 nt, Human
augaagucaaaagacacacuuu

SEQ ID NO: 413509 - RNA, 19 nt, Human
caaaucaaaaugcauauua

SEQ ID NO: 413510 - RNA, 21 nt, Human
caaugguauaaaucuuacagc

SEQ ID NO: 413511 - RNA, 24 nt, Human
cauuucuuguauucuuucucauuu

SEQ ID NO: 413512 - RNA, 18 nt, Human
ccaccacucaaaacggcu

SEQ ID NO: 413513 - RNA, 19 nt, Human
ccuguuuccaaaaaucaca

SEQ ID NO: 413514 - RNA, 22 nt, Human
cgcgagggaaggaggaaggaag

SEQ ID NO: 413515 - RNA, 24 nt, Human
cgggcagggaaggcgcgggcgggc

SEQ ID NO: 413516 - RNA, 21 nt, Human
cuagcaaaaauacaugccaaa

SEQ ID NO: 413517 - RNA, 19 nt, Human
cuucaaauaauuugcuucu

SEQ ID NO: 413518 - RNA, 19 nt, Human
gaaggaaacuaaaggaaau

SEQ ID NO: 413519 - RNA, 19 nt, Human
gaaggaaggaaacaaagag

SEQ ID NO: 413520 - RNA, 21 nt, Human
gaguggggagacaagaggaag

SEQ ID NO: 413521 - RNA, 24 nt, Human
gaucaaugguauaaaucuuacagc

SEQ ID NO: 413522 - RNA, 21 nt, Human
gaugaagucaaaagacacacu

SEQ ID NO: 413523 - RNA, 24 nt, Human
gcacaagagaaauaacugaugaag

SEQ ID NO: 413524 - RNA, 19 nt, Human
gcgcgggcgggcgaaagag

SEQ ID NO: 413525 - RNA, 21 nt, Human
ggaaggaaacaaagagggagg

SEQ ID NO: 413526 - RNA, 18 nt, Human
ggaaggaggaaggaagga

SEQ ID NO: 413527 - RNA, 23 nt, Human
ggagggaguggggagacaagagg

SEQ ID NO: 413528 - RNA, 18 nt, Human
ggccgggucaggcgggga

SEQ ID NO: 413529 - RNA, 21 nt, Human
ggcgcgggcgggcgaaagaga

SEQ ID NO: 413530 - RNA, 20 nt, Human
gggaaguaggagggagggac

SEQ ID NO: 413531 - RNA, 22 nt, Human
gggcagggaaggcgcgggcggg

SEQ ID NO: 413532 - RNA, 18 nt, Human
gggcugggccgggucagg

SEQ ID NO: 413533 - RNA, 19 nt, Human
guaaaaagcacuuuccugg

SEQ ID NO: 413534 - RNA, 25 nt, Human
guaaugcaaacaucacaugacaccg

SEQ ID NO: 413535 - RNA, 22 nt, Human
gucauuuuuaaugcauuuuucu

SEQ ID NO: 413536 - RNA, 20 nt, Human
uaaaaagcacuuuccuggca

SEQ ID NO: 413537 - RNA, 23 nt, Human
uaaaaaugcaaauaaauuggaca

SEQ ID NO: 413538 - RNA, 22 nt, Human
uaaaagaaucaaaaugaaagua

SEQ ID NO: 413539 - RNA, 18 nt, Human
uaaaaugcaucauauuag

SEQ ID NO: 413540 - RNA, 18 nt, Human
uaaauguauacuuagaga

SEQ ID NO: 413541 - RNA, 23 nt, Human
uacauagcaguuaaaaguaaugc

SEQ ID NO: 413542 - RNA, 18 nt, Human
uacaugccaaagucacaa

SEQ ID NO: 413543 - RNA, 20 nt, Human
uaccaggauaaacauuucua

SEQ ID NO: 413544 - RNA, 19 nt, Human
uagcaaaaauacaugccaa

SEQ ID NO: 413545 - RNA, 19 nt, Human
uagcaguuaaaaguaaugc

SEQ ID NO: 413546 - RNA, 22 nt, Human
uauacaaauauagcaaaaaaga

SEQ ID NO: 413547 - RNA, 18 nt, Human
uauuagggucucuuuaug

SEQ ID NO: 413548 - RNA, 21 nt, Human
ugagaaguuuaucaaagaugc

SEQ ID NO: 413549 - RNA, 23 nt, Human
ugagacauaacuagcuccagaaa

SEQ ID NO: 413550 - RNA, 19 nt, Human
ugagggaaguaggagggag

SEQ ID NO: 413551 - RNA, 23 nt, Human
ugcacaagagaaauaacugauga

SEQ ID NO: 413552 - RNA, 20 nt, Human
ugcgguucccugguccuccg

SEQ ID NO: 413553 - RNA, 18 nt, Human
ugggagaagcugagaagg

SEQ ID NO: 413554 - RNA, 19 nt, Human
ugggagaagcugagaagga

SEQ ID NO: 413555 - RNA, 26 nt, Human
ugggagaagcugagaaggaagucuua

SEQ ID NO: 413556 - RNA, 22 nt, Human
uggggagacaagaggaagggaa

SEQ ID NO: 413557 - RNA, 27 nt, Human
uuacuacacugauccuucaggcugcac

SEQ ID NO: 413558 - RNA, 23 nt, Human
uucucauuuugguuacacauauu

SEQ ID NO: 413559 - RNA, 23 nt, Human
uugcuucuguuuuuaauaucuuc

SEQ ID NO: 413560 - RNA, 22 nt, Human
uuuccuggcauuacuacacuga

SEQ ID NO: 413561 - RNA, 24 nt, Human
uuuuuuuuuuuuuuuuucauuuuu

SEQ ID NO: 413562 - RNA, 19 nt, Human
aacaacauugccuccacag

SEQ ID NO: 413563 - RNA, 25 nt, Human
acacagcaccuccacuauguuuugg

SEQ ID NO: 413564 - RNA, 18 nt, Human
acagaggaaaacguaugg

SEQ ID NO: 413565 - RNA, 18 nt, Human
accuccacuauguuuugg

SEQ ID NO: 413566 - RNA, 18 nt, Human
agaucuguggggacacag

SEQ ID NO: 413567 - RNA, 19 nt, Human
augcagggcuccaaaccuc

SEQ ID NO: 413568 - RNA, 19 nt, Human
cacagcagucagcuguggu

SEQ ID NO: 413569 - RNA, 20 nt, Human
cagcuguggucccguccuuc

SEQ ID NO: 413570 - RNA, 22 nt, Human
cagcuguggucccguccuucuc

SEQ ID NO: 413571 - RNA, 19 nt, Human
ccagugguauagugguaca

SEQ ID NO: 413572 - RNA, 24 nt, Human
ccccccagugguauagugguacaa

SEQ ID NO: 413573 - RNA, 18 nt, Human
ccuccacuauguuuuggc

SEQ ID NO: 413574 - RNA, 24 nt, Human
cucacacacagcaccuccacuaug

SEQ ID NO: 413575 - RNA, 23 nt, Human
gagcuuagacuggggccccccag

SEQ ID NO: 413576 - RNA, 18 nt, Human
gcuguauucaaaaauggg

SEQ ID NO: 413577 - RNA, 25 nt, Human
gggaaaaaggcacagaggaaaacgu

SEQ ID NO: 413578 - RNA, 24 nt, Human
guccuucucuuuaugcagggcucc

SEQ ID NO: 413579 - RNA, 20 nt, Human
ucaaaaaugggagagcuagg

SEQ ID NO: 413580 - RNA, 23 nt, Human
ucagcuguggucccguccuucuc

SEQ ID NO: 413581 - RNA, 19 nt, Human
uccacagcaaaggacuuca

SEQ ID NO: 413582 - RNA, 20 nt, Human
uggcagcaggaggcccagau

SEQ ID NO: 413583 - RNA, 21 nt, Human
ugguugacucacacacagcac

SEQ ID NO: 413584 - RNA, 20 nt, Human
uguggucccguccuucucuu

SEQ ID NO: 413585 - RNA, 18 nt, Human
uuggccauuagucuuccu

SEQ ID NO: 413586 - RNA, 19 nt, Human
aaaaaacacuucugccccc

SEQ ID NO: 413587 - RNA, 19 nt, Human
aaaacacuucugcccccuc

SEQ ID NO: 413588 - RNA, 24 nt, Human
aaaacacuucugcccccuccccca

SEQ ID NO: 413589 - RNA, 19 nt, Human
aaacacuucugcccccucc

SEQ ID NO: 413590 - RNA, 18 nt, Human
aagaaagugggggaggcc

SEQ ID NO: 413591 - RNA, 21 nt, Human
aagaaagugggggaggccagg

SEQ ID NO: 413592 - RNA, 22 nt, Human
aagaaagugggggaggccaggg

SEQ ID NO: 413593 - RNA, 19 nt, Human
aaggcaccgacccuccucc

SEQ ID NO: 413594 - RNA, 23 nt, Human
aaggcaccgacccuccuccuccc

SEQ ID NO: 413595 - RNA, 19 nt, Human
aauauauacacauauauaa

SEQ ID NO: 413596 - RNA, 18 nt, Human
acacauauauaaaaaaca

SEQ ID NO: 413597 - RNA, 20 nt, Human
accgacccuccuccucccca

SEQ ID NO: 413598 - RNA, 25 nt, Human
agaaagaaagugggggaggccaggg

SEQ ID NO: 413599 - RNA, 20 nt, Human
aggcagcuccuuccugcagg

SEQ ID NO: 413600 - RNA, 19 nt, Human
aggcugguccggugcuggc

SEQ ID NO: 413601 - RNA, 22 nt, Human
agggacagaacaugggggagaa

SEQ ID NO: 413602 - RNA, 24 nt, Human
auaaaaaacacuucugcccccucc

SEQ ID NO: 413603 - RNA, 24 nt, Human
caaacucuuugggaccccccaccc

SEQ ID NO: 413604 - RNA, 22 nt, Human
caaagguggucaguuggggagg

SEQ ID NO: 413605 - RNA, 19 nt, Human
cagcuccuuccugcagggg

SEQ ID NO: 413606 - RNA, 21 nt, Human
caggccccucugggaaggaau

SEQ ID NO: 413607 - RNA, 25 nt, Human
ccaccguauuuuuuuuuuuuuuuuu

SEQ ID NO: 413608 - RNA, 22 nt, Human
ccagggcagugccuguuuucuu

SEQ ID NO: 413609 - RNA, 19 nt, Human
ccaggggggcaagggacag

SEQ ID NO: 413610 - RNA, 18 nt, Human
cccauguucccugccucc

SEQ ID NO: 413611 - RNA, 22 nt, Human
ccccaagcuuccaccccaccuu

SEQ ID NO: 413612 - RNA, 19 nt, Human
ccccaagggcugaugucuc

SEQ ID NO: 413613 - RNA, 20 nt, Human
ccccaagggcugaugucucu

SEQ ID NO: 413614 - RNA, 23 nt, Human
ccccacccccacucuccggucca

SEQ ID NO: 413615 - RNA, 19 nt, Human
ccccaugaacggguccagg

SEQ ID NO: 413616 - RNA, 20 nt, Human
ccccauguucccugccucca

SEQ ID NO: 413617 - RNA, 18 nt, Human
cccccacucuccggucca

SEQ ID NO: 413618 - RNA, 19 nt, Human
ccccccacccccacucucc

SEQ ID NO: 413619 - RNA, 19 nt, Human
ccccccacccccacucucc

SEQ ID NO: 413620 - RNA, 23 nt, Human
cccccucccccaugaacgggucc

SEQ ID NO: 413621 - RNA, 21 nt, Human
cccuccuccuccccauguucc

SEQ ID NO: 413622 - RNA, 25 nt, Human
ccuccagcuguccagccaccuccuc

SEQ ID NO: 413623 - RNA, 24 nt, Human
ccuccaguuccaaugcaggggucc

SEQ ID NO: 413624 - RNA, 18 nt, Human
ccugggguggggcugagc

SEQ ID NO: 413625 - RNA, 18 nt, Human
cggggucaaagccaccuc

SEQ ID NO: 413626 - RNA, 24 nt, Human
cucagagcuuaaaaaaaaauauau

SEQ ID NO: 413627 - RNA, 21 nt, Human
cuccagcccccuacccccacc

SEQ ID NO: 413628 - RNA, 24 nt, Human
cuccagcccccuacccccaccgua

SEQ ID NO: 413629 - RNA, 21 nt, Human
cucccccaugaacggguccag

SEQ ID NO: 413630 - RNA, 21 nt, Human
cuccgguccauuguccaugcc

SEQ ID NO: 413631 - RNA, 20 nt, Human
cuccuuccugcagggggcag

SEQ ID NO: 413632 - RNA, 22 nt, Human
cuuccccaagcuuccaccccac

SEQ ID NO: 413633 - RNA, 21 nt, Human
gaaugggucuuccccaagcuu

SEQ ID NO: 413634 - RNA, 23 nt, Human
gacccuccuccuccccauguucc

SEQ ID NO: 413635 - RNA, 19 nt, Human
gaggccaggggggcaaggg

SEQ ID NO: 413636 - RNA, 23 nt, Human
gcagaaguggguggggugggcca

SEQ ID NO: 413637 - RNA, 22 nt, Human
gcagaguccuggccugggcucc

SEQ ID NO: 413638 - RNA, 18 nt, Human
gcugcagaguccuggccu

SEQ ID NO: 413639 - RNA, 18 nt, Human
ggaaccgcaagugcagaa

SEQ ID NO: 413640 - RNA, 25 nt, Human
gggcaggggagagggccaccagggc

SEQ ID NO: 413641 - RNA, 22 nt, Human
gggccaggcugguccggugcug

SEQ ID NO: 413642 - RNA, 22 nt, Human
gggcucgccauuagccgucgcu

SEQ ID NO: 413643 - RNA, 18 nt, Human
gggggaggccaggggggc

SEQ ID NO: 413644 - RNA, 24 nt, Human
gguggucaguuggggaggggagcu

SEQ ID NO: 413645 - RNA, 21 nt, Human
gguguggagggccucaucaaa

SEQ ID NO: 413646 - RNA, 22 nt, Human
guccagccaccuccucggucgu

SEQ ID NO: 413647 - RNA, 21 nt, Human
gucccuggaggaggaccccca

SEQ ID NO: 413648 - RNA, 23 nt, Human
gucccuggaggaggacccccaag

SEQ ID NO: 413649 - RNA, 24 nt, Human
gugcuggccgggcaacccgggguc

SEQ ID NO: 413650 - RNA, 22 nt, Human
gugggccaggcugguccggugc

SEQ ID NO: 413651 - RNA, 22 nt, Human
guggguggggugggccaggcug

SEQ ID NO: 413652 - RNA, 25 nt, Human
guggucaguuggggaggggagcucc

SEQ ID NO: 413653 - RNA, 24 nt, Human
guugcugucccuggaggaggaccc

SEQ ID NO: 413654 - RNA, 21 nt, Human
uaaagaaagaaagaaaguggg

SEQ ID NO: 413655 - RNA, 20 nt, Human
uccaaugcagggguccaggu

SEQ ID NO: 413656 - RNA, 26 nt, Human
uccaccccaccuuggauugggccgca

SEQ ID NO: 413657 - RNA, 20 nt, Human
uccccaagcuuccaccccac

SEQ ID NO: 413658 - RNA, 19 nt, Human
uccccauguucccugccuc

SEQ ID NO: 413659 - RNA, 22 nt, Human
ucccccaugaacggguccaggc

SEQ ID NO: 413660 - RNA, 22 nt, Human
ucccuggaggaggacccccaag

SEQ ID NO: 413661 - RNA, 26 nt, Human
ugaaggcaccgacccuccuccucccc

SEQ ID NO: 413662 - RNA, 20 nt, Human
ugaggcugcagaguccuggc

SEQ ID NO: 413663 - RNA, 19 nt, Human
ugccggaaccgcaagugca

SEQ ID NO: 413664 - RNA, 26 nt, Human
ugccuccaguuccaaugcaggggucc

SEQ ID NO: 413665 - RNA, 18 nt, Human
ugggaaggaaugggucuu

SEQ ID NO: 413666 - RNA, 18 nt, Human
ugggcuccuccagccccc

SEQ ID NO: 413667 - RNA, 23 nt, Human
ugggggaggccaggggggcaagg

SEQ ID NO: 413668 - RNA, 24 nt, Human
uggggugggccaggcugguccggu

SEQ ID NO: 413669 - RNA, 18 nt, Human
uggucaguuggggagggg

SEQ ID NO: 413670 - RNA, 24 nt, Human
uucgccaucucgggcuuugucugg

SEQ ID NO: 413671 - RNA, 21 nt, Human
uugaaggcaccgacccuccuc

SEQ ID NO: 413672 - RNA, 21 nt, Human
uuggggaggggagcuccuggg

SEQ ID NO: 413673 - RNA, 18 nt, Human
uuuuuuuaaagaaagaaa

SEQ ID NO: 413674 - RNA, 19 nt, Human
uuuuuuuuuuuuuuuuuaa

SEQ ID NO: 413675 - RNA, 21 nt, Human
aaaacaaaaccaaagaaaaac

SEQ ID NO: 413676 - RNA, 24 nt, Human
aaacagaaugggaaaguucucuga

SEQ ID NO: 413677 - RNA, 24 nt, Human
aaagugcugggauuacaggcguga

SEQ ID NO: 413678 - RNA, 18 nt, Human
aaauaaccuccuacauca

SEQ ID NO: 413679 - RNA, 21 nt, Human
aaaugguucucaaacagccuu

SEQ ID NO: 413680 - RNA, 23 nt, Human
aacagaaugggaaaguucucuga

SEQ ID NO: 413681 - RNA, 22 nt, Human
aacauggguuuguauuuuagaa

SEQ ID NO: 413682 - RNA, 18 nt, Human
aaccuccuacaucaucaa

SEQ ID NO: 413683 - RNA, 19 nt, Human
aagugcugggauuacaggc

SEQ ID NO: 413684 - RNA, 19 nt, Human
aagugcugggauuacaggc

SEQ ID NO: 413685 - RNA, 26 nt, Human
aagugcugggauuacaggcgugagcc

SEQ ID NO: 413686 - RNA, 20 nt, Human
aaguuucacuuuccuugguu

SEQ ID NO: 413687 - RNA, 23 nt, Human
aauuagccaccucgauauauuua

SEQ ID NO: 413688 - RNA, 22 nt, Human
acaaaaccaaagaaaaacacaa

SEQ ID NO: 413689 - RNA, 20 nt, Human
acaaacgccuaguaaacauc

SEQ ID NO: 413690 - RNA, 22 nt, Human
acaaccuccaccuuccggguuc

SEQ ID NO: 413691 - RNA, 24 nt, Human
accaugcuggucaggcuggucucg

SEQ ID NO: 413692 - RNA, 20 nt, Human
acccuuugauaugacugccu

SEQ ID NO: 413693 - RNA, 21 nt, Human
acuccuguugcccaggcugga

SEQ ID NO: 413694 - RNA, 22 nt, Human
acuccuguugcccaggcuggag

SEQ ID NO: 413695 - RNA, 18 nt, Human
acucuugacucaggcaug

SEQ ID NO: 413696 - RNA, 24 nt, Human
agaaaaacacaaucuguguuugga

SEQ ID NO: 413697 - RNA, 20 nt, Human
agaagaucccauagugaaga

SEQ ID NO: 413698 - RNA, 23 nt, Human
agaagaucccauagugaagaaaa

SEQ ID NO: 413699 - RNA, 23 nt, Human
aggcgugagccaccgugccuggc

SEQ ID NO: 413700 - RNA, 23 nt, Human
aguagcugggauuacaggcaugu

SEQ ID NO: 413701 - RNA, 26 nt, Human
agugaagaaaacaaaaccaaagaaaa

SEQ ID NO: 413702 - RNA, 27 nt, Human
agugaagaaaacaaaaccaaagaaaaa

SEQ ID NO: 413703 - RNA, 18 nt, Human
agugcugggauuacaggc

SEQ ID NO: 413704 - RNA, 21 nt, Human
auguaucaguacugucgucag

SEQ ID NO: 413705 - RNA, 20 nt, Human
caaacuaaauugagauaaua

SEQ ID NO: 413706 - RNA, 24 nt, Human
caaagugcugggauuacaggcgug

SEQ ID NO: 413707 - RNA, 21 nt, Human
caccaugcuggucaggcuggu

SEQ ID NO: 413708 - RNA, 23 nt, Human
caccaugcuggucaggcuggucu

SEQ ID NO: 413709 - RNA, 24 nt, Human
caccaugcuggucaggcuggucuc

SEQ ID NO: 413710 - RNA, 19 nt, Human
cagaagaucccauagugaa

SEQ ID NO: 413711 - RNA, 24 nt, Human
cagaagaucccauagugaagaaaa

SEQ ID NO: 413712 - RNA, 24 nt, Human
cagaagaucccauagugaagaaaa

SEQ ID NO: 413713 - RNA, 20 nt, Human
cagccuccugaguagcuggg

SEQ ID NO: 413714 - RNA, 21 nt, Human
cauaaucuuaauuuaagcgca

SEQ ID NO: 413715 - RNA, 22 nt, Human
cauagugaagaaaacaaaacca

SEQ ID NO: 413716 - RNA, 20 nt, Human
ccaaagugcugggauuacag

SEQ ID NO: 413717 - RNA, 22 nt, Human
ccaaagugcugggauuacaggc

SEQ ID NO: 413718 - RNA, 22 nt, Human
ccaaagugcugggauuacaggc

SEQ ID NO: 413719 - RNA, 24 nt, Human
ccaaagugcugggauuacaggcgu

SEQ ID NO: 413720 - RNA, 20 nt, Human
ccaccacgcccggcuaauuu

SEQ ID NO: 413721 - RNA, 26 nt, Human
ccaccuuccggguucaagcaauucuu

SEQ ID NO: 413722 - RNA, 18 nt, Human
cccaggcuggagugcaau

SEQ ID NO: 413723 - RNA, 24 nt, Human
cccgaccucaggugauccacccac

SEQ ID NO: 413724 - RNA, 23 nt, Human
ccgccucagccuccugaguagcu

SEQ ID NO: 413725 - RNA, 19 nt, Human
ccggguucaagcaauucuc

SEQ ID NO: 413726 - RNA, 19 nt, Human
ccucccaucuuucuuuacc

SEQ ID NO: 413727 - RNA, 23 nt, Human
ccugaguagcugggauuacaggc

SEQ ID NO: 413728 - RNA, 24 nt, Human
ccugaguagcugggauuacaggca

SEQ ID NO: 413729 - RNA, 24 nt, Human
ccuguugcccaggcuggagugcaa

SEQ ID NO: 413730 - RNA, 24 nt, Human
ccuuccggguucaagcaauucucc

SEQ ID NO: 413731 - RNA, 18 nt, Human
ccuuuaaauaguuuaugc

SEQ ID NO: 413732 - RNA, 24 nt, Human
cgccucagccuccugaguagcugg

SEQ ID NO: 413733 - RNA, 25 nt, Human
cucaaacagccuucccucuuccugc

SEQ ID NO: 413734 - RNA, 24 nt, Human
cucagccuccugaguagcugggau

SEQ ID NO: 413735 - RNA, 24 nt, Human
cuccgccucagccuccugaguagc

SEQ ID NO: 413736 - RNA, 18 nt, Human
cugaagccauugagaccc

SEQ ID NO: 413737 - RNA, 23 nt, Human
cugaguagcugggauuacaggca

SEQ ID NO: 413738 - RNA, 24 nt, Human
cugaguagcugggauuacaggcau

SEQ ID NO: 413739 - RNA, 19 nt, Human
cuggccgggguauuuuuau

SEQ ID NO: 413740 - RNA, 22 nt, Human
cuuacacuugggaaguuucuuc

SEQ ID NO: 413741 - RNA, 19 nt, Human
cuucuagaguuccuuuugg

SEQ ID NO: 413742 - RNA, 22 nt, Human
gaacaaacauugaaagccugga

SEQ ID NO: 413743 - RNA, 23 nt, Human
gaagaaaacaaaaccaaagaaaa

SEQ ID NO: 413744 - RNA, 24 nt, Human
gaccucaggugauccacccaccuc

SEQ ID NO: 413745 - RNA, 18 nt, Human
gagacagaaacacaugug

SEQ ID NO: 413746 - RNA, 22 nt, Human
gagcaagaaacacgacaaagga

SEQ ID NO: 413747 - RNA, 23 nt, Human
gaggccaaugauagagucagaaa

SEQ ID NO: 413748 - RNA, 22 nt, Human
gaguagcugggauuacaggcau

SEQ ID NO: 413749 - RNA, 25 nt, Human
gaguagcugggauuacaggcaugug

SEQ ID NO: 413750 - RNA, 18 nt, Human
gauuacaggcaugugcca

SEQ ID NO: 413751 - RNA, 18 nt, Human
gauuacaggcgugagcca

SEQ ID NO: 413752 - RNA, 21 nt, Human
gauuacaggcgugagccaccg

SEQ ID NO: 413753 - RNA, 24 nt, Human
gauuacaggcgugagccaccgugc

SEQ ID NO: 413754 - RNA, 23 nt, Human
gcccggcuaauuuuuuguguuuu

SEQ ID NO: 413755 - RNA, 21 nt, Human
gccuaguaaacaucuauagaa

SEQ ID NO: 413756 - RNA, 20 nt, Human
gcugggcacagaagauccca

SEQ ID NO: 413757 - RNA, 23 nt, Human
gcuggucucgaacucccgaccuc

SEQ ID NO: 413758 - RNA, 19 nt, Human
ggauuacaggcaugugcca

SEQ ID NO: 413759 - RNA, 18 nt, Human
guagcugggauuacaggc

SEQ ID NO: 413760 - RNA, 20 nt, Human
guagcugggauuacaggcau

SEQ ID NO: 413761 - RNA, 21 nt, Human
uaaagcaccaccauuuccaag

SEQ ID NO: 413762 - RNA, 19 nt, Human
uaaucuuaauuuaagcgca

SEQ ID NO: 413763 - RNA, 24 nt, Human
uaauuuuuuguguuuuuaguagag

SEQ ID NO: 413764 - RNA, 23 nt, Human
uacaggcaugugccaccacgccc

SEQ ID NO: 413765 - RNA, 22 nt, Human
uacaggcgugagccaccgugcc

SEQ ID NO: 413766 - RNA, 22 nt, Human
uacaggcgugagccaccgugcc

SEQ ID NO: 413767 - RNA, 23 nt, Human
uacaggcgugagccaccgugccu

SEQ ID NO: 413768 - RNA, 24 nt, Human
uacuccuguugcccaggcuggagu

SEQ ID NO: 413769 - RNA, 25 nt, Human
uaguagagauggggguuccaccaug

SEQ ID NO: 413770 - RNA, 18 nt, Human
uagugaaguuugagagug

SEQ ID NO: 413771 - RNA, 24 nt, Human
uagugcaaucucagcucaccgcaa

SEQ ID NO: 413772 - RNA, 21 nt, Human
uauuaccaaaguggaagggag

SEQ ID NO: 413773 - RNA, 21 nt, Human
ucaaacagccuucccucuucc

SEQ ID NO: 413774 - RNA, 21 nt, Human
ucaccgcaacaaccuccaccu

SEQ ID NO: 413775 - RNA, 27 nt, Human
ucaccgcaacaaccuccaccuuccggg

SEQ ID NO: 413776 - RNA, 20 nt, Human
ucagccuccugaguagcugg

SEQ ID NO: 413777 - RNA, 20 nt, Human
ucaggugauccacccaccuc

SEQ ID NO: 413778 - RNA, 18 nt, Human
ucaguacugucgucagug

SEQ ID NO: 413779 - RNA, 23 nt, Human
uccacccaccucccaaagugcug

SEQ ID NO: 413780 - RNA, 24 nt, Human
ucccaaagugcugggauuacaggc

SEQ ID NO: 413781 - RNA, 25 nt, Human
uccuacaucaucaaauucuuuucau

SEQ ID NO: 413782 - RNA, 24 nt, Human
uccugaguagcugggauuacaggc

SEQ ID NO: 413783 - RNA, 23 nt, Human
ucugguauuaccaaaguggaagg

SEQ ID NO: 413784 - RNA, 24 nt, Human
ugaaauaaccuccuacaucaucaa

SEQ ID NO: 413785 - RNA, 19 nt, Human
ugaagaaaacaaaaccaaa

SEQ ID NO: 413786 - RNA, 21 nt, Human
ugaagaaaacaaaaccaaaga

SEQ ID NO: 413787 - RNA, 23 nt, Human
ugaagaaaacaaaaccaaagaaa

SEQ ID NO: 413788 - RNA, 18 nt, Human
ugacuaauggagagacag

SEQ ID NO: 413789 - RNA, 19 nt, Human
ugauccacccaccucccaa

SEQ ID NO: 413790 - RNA, 21 nt, Human
ugcaaacauauuguuugugca

SEQ ID NO: 413791 - RNA, 23 nt, Human
ugcaauagugcaaucucagcucc

SEQ ID NO: 413792 - RNA, 18 nt, Human
ugcccaggcuggagugca

SEQ ID NO: 413793 - RNA, 24 nt, Human
ugcccaggcuggagugcaauagug

SEQ ID NO: 413794 - RNA, 24 nt, Human
ugcugggauuacaggcgugagcca

SEQ ID NO: 413795 - RNA, 18 nt, Human
ugcuggucaggcuggucu

SEQ ID NO: 413796 - RNA, 18 nt, Human
ugggauuacaggcaugug

SEQ ID NO: 413797 - RNA, 21 nt, Human
ugggauuacaggcaugugcca

SEQ ID NO: 413798 - RNA, 22 nt, Human
ugggauuacaggcaugugccac

SEQ ID NO: 413799 - RNA, 24 nt, Human
ugggauuacaggcaugugccacca

SEQ ID NO: 413800 - RNA, 18 nt, Human
ugggauuacaggcgugag

SEQ ID NO: 413801 - RNA, 21 nt, Human
ugggauuacaggcgugagcca

SEQ ID NO: 413802 - RNA, 22 nt, Human
ugggauuacaggcgugagccac

SEQ ID NO: 413803 - RNA, 23 nt, Human
ugggauuacaggcgugagccacc

SEQ ID NO: 413804 - RNA, 23 nt, Human
ugggauuacaggcgugagccacc

SEQ ID NO: 413805 - RNA, 24 nt, Human
ugggauuacaggcgugagccaccg

SEQ ID NO: 413806 - RNA, 23 nt, Human
uggucaggcuggucucgaacucc

SEQ ID NO: 413807 - RNA, 19 nt, Human
uggucucgaacucccgacc

SEQ ID NO: 413808 - RNA, 19 nt, Human
uguagcaauagaagaauaa

SEQ ID NO: 413809 - RNA, 21 nt, Human
uguguuuuuaguagagauggg

SEQ ID NO: 413810 - RNA, 28 nt, Human
uguucuauagauccaaacagaaugggaa

SEQ ID NO: 413811 - RNA, 20 nt, Human
uguugcccaggcuggagugc

SEQ ID NO: 413812 - RNA, 23 nt, Human
uuacuccuguugcccaggcugga

SEQ ID NO: 413813 - RNA, 24 nt, Human
uuacugaguuuuccucccaucuuu

SEQ ID NO: 413814 - RNA, 25 nt, Human
uuaguagagauggggguuccaccau

SEQ ID NO: 413815 - RNA, 23 nt, Human
uuccggguucaagcaauucuccg

SEQ ID NO: 413816 - RNA, 23 nt, Human
uucuagaguuccuuuuggaaaga

SEQ ID NO: 413817 - RNA, 19 nt, Human
uugaaguuggaaugguuca

SEQ ID NO: 413818 - RNA, 18 nt, Human
uugcccaggcuggagugc

SEQ ID NO: 413819 - RNA, 24 nt, Human
uuguguuuuuaguagagauggggg

SEQ ID NO: 413820 - RNA, 24 nt, Human
uuuacuccuguugcccaggcugga

SEQ ID NO: 413821 - RNA, 18 nt, Human
uuucuacuuugcaaacag

SEQ ID NO: 413822 - RNA, 24 nt, Human
uuuuacuccuguugcccaggcugg

SEQ ID NO: 413823 - RNA, 18 nt, Human
uuuuuaguagagaugggg

SEQ ID NO: 413824 - RNA, 18 nt, Human
uuuuuauauaacaaacgc

SEQ ID NO: 413825 - RNA, 21 nt, Human
uuuuuguguuuuuaguagaga

SEQ ID NO: 413826 - RNA, 24 nt, Human
uuuuuuguguuuuuaguagagaug

SEQ ID NO: 413827 - RNA, 22 nt, Human
aaacaauuaaaccacauccaag

SEQ ID NO: 413828 - RNA, 22 nt, Human
aacuuacagacagaaaccaaag

SEQ ID NO: 413829 - RNA, 22 nt, Human
aagcucacaccacaauggcccc

SEQ ID NO: 413830 - RNA, 25 nt, Human
acaccacaauggcccaguggacagc

SEQ ID NO: 413831 - RNA, 20 nt, Human
agacagaaaccaaaguagcc

SEQ ID NO: 413832 - RNA, 20 nt, Human
agacagaaaccaaaguagcc

SEQ ID NO: 413833 - RNA, 22 nt, Human
agacauacacuggggagaaugc

SEQ ID NO: 413834 - RNA, 19 nt, Human
caaaguagccauuuaaagc

SEQ ID NO: 413835 - RNA, 26 nt, Human
cacaaguacugaagcauuuuagacug

SEQ ID NO: 413836 - RNA, 27 nt, Human
cagaaaccaaaguagccauuuaaagcg

SEQ ID NO: 413837 - RNA, 22 nt, Human
cagaagaacagcuguguuucac

SEQ ID NO: 413838 - RNA, 20 nt, Human
cagcaaagucccucccacag

SEQ ID NO: 413839 - RNA, 21 nt, Human
ccacauccaaggucuuaacuu

SEQ ID NO: 413840 - RNA, 25 nt, Human
cucacaccacaauggcccaguggac

SEQ ID NO: 413841 - RNA, 21 nt, Human
cucugcuugugcuuaagugcc

SEQ ID NO: 413842 - RNA, 25 nt, Human
cucugcuugugcuuaagugccuggg

SEQ ID NO: 413843 - RNA, 22 nt, Human
cugaagcucacaccacaauggc

SEQ ID NO: 413844 - RNA, 20 nt, Human
gccuggguguggcugagggg

SEQ ID NO: 413845 - RNA, 21 nt, Human
gcggagcgcccggcagaaaua

SEQ ID NO: 413846 - RNA, 20 nt, Human
ggcccaguggacagcugugc

SEQ ID NO: 413847 - RNA, 23 nt, Human
guacugaagcauuuuagacugca

SEQ ID NO: 413848 - RNA, 21 nt, Human
guagccauuuaaagcguuaga

SEQ ID NO: 413849 - RNA, 20 nt, Human
uaacuuacagacagaaacca

SEQ ID NO: 413850 - RNA, 19 nt, Human
uaagugccuggguguggcu

SEQ ID NO: 413851 - RNA, 22 nt, Human
uagggaagacgaaaaacagcua

SEQ ID NO: 413852 - RNA, 24 nt, Human
ucugcagaacagaagaacagcugu

SEQ ID NO: 413853 - RNA, 19 nt, Human
ugcagaacagaagaacagc

SEQ ID NO: 413854 - RNA, 19 nt, Human
uggggagaaugcuucacca

SEQ ID NO: 413855 - RNA, 18 nt, Human
uuacagacagaaaccaaa

SEQ ID NO: 413856 - RNA, 23 nt, Human
uucaccaucugaagcucacacca

SEQ ID NO: 413857 - RNA, 21 nt, Human
uuuagacugcaugggggggua

SEQ ID NO: 413858 - RNA, 22 nt, Human
uuuuuuuuuuuuuuuuuaucuu

SEQ ID NO: 413859 - RNA, 22 nt, Human
acucuggggugggggaaagggg

SEQ ID NO: 413860 - RNA, 19 nt, Human
cuggggugggggaaagggg

SEQ ID NO: 413861 - RNA, 19 nt, Human
ggaacacagggucuguccc

SEQ ID NO: 413862 - RNA, 19 nt, Human
guggcucugccccgcaucc

SEQ ID NO: 413863 - RNA, 21 nt, Human
ucaacguuuucgcagccccaa

SEQ ID NO: 413864 - RNA, 21 nt, Human
ucccucggggcaggcugaaga

SEQ ID NO: 413865 - RNA, 19 nt, Human
ucuggggugggggaaaggg

SEQ ID NO: 413866 - RNA, 18 nt, Human
uggggugggggaaagggg

SEQ ID NO: 413867 - RNA, 23 nt, Human
ugguggcucugccccgcauccca

SEQ ID NO: 413868 - RNA, 20 nt, Human
uucaguacuuuuauuaaaaa

SEQ ID NO: 413869 - RNA, 21 nt, Human
uucgcagccccaaaccgggcc

SEQ ID NO: 413870 - RNA, 24 nt, Human
ccgaagguggaggaaguuccuuuc

SEQ ID NO: 413871 - RNA, 18 nt, Human
cuugcucuucacgccugu

SEQ ID NO: 413872 - RNA, 20 nt, Human
gcuccagccccgaaggugga

SEQ ID NO: 413873 - RNA, 18 nt, Human
ucagagacuggagaugca

SEQ ID NO: 413874 - RNA, 24 nt, Human
uccgccgggcagcaaacccgauuu

SEQ ID NO: 413875 - RNA, 19 nt, Human
uugcucuucacgccugucc

SEQ ID NO: 413876 - RNA, 25 nt, Human
aaaaggaaagcauggcccggcuaga

SEQ ID NO: 413877 - RNA, 19 nt, Human
agaaagaaggaagaaaagg

SEQ ID NO: 413878 - RNA, 20 nt, Human
agcaacaagacgagauagag

SEQ ID NO: 413879 - RNA, 23 nt, Human
agcaacaagacgagauagaggaa

SEQ ID NO: 413880 - RNA, 21 nt, Human
aggaagagguggggaaagagg

SEQ ID NO: 413881 - RNA, 26 nt, Human
aguagaugagaauguagaaagaggga

SEQ ID NO: 413882 - RNA, 21 nt, Human
caaaugucaacuccaccagca

SEQ ID NO: 413883 - RNA, 24 nt, Human
caacuccaccagcacugagacaau

SEQ ID NO: 413884 - RNA, 19 nt, Human
cacggcagugcgugcggcu

SEQ ID NO: 413885 - RNA, 22 nt, Human
cacggcagugcgugcggcugug

SEQ ID NO: 413886 - RNA, 21 nt, Human
cauggcccggcuagagacaaa

SEQ ID NO: 413887 - RNA, 20 nt, Human
cccaggagauggagaaaaac

SEQ ID NO: 413888 - RNA, 19 nt, Human
ccgggcgagcguggacagu

SEQ ID NO: 413889 - RNA, 22 nt, Human
cgagauagaggaacucugccgg

SEQ ID NO: 413890 - RNA, 20 nt, Human
cggcagugcgugcggcugug

SEQ ID NO: 413891 - RNA, 22 nt, Human
cuaaaggugucccguucuucaa

SEQ ID NO: 413892 - RNA, 21 nt, Human
gaaagagggaaggagagaagg

SEQ ID NO: 413893 - RNA, 21 nt, Human
gaagagaaagaaggaagaaaa

SEQ ID NO: 413894 - RNA, 18 nt, Human
gaagggaaggagggaaga

SEQ ID NO: 413895 - RNA, 22 nt, Human
gaaggugguagguaaaggagcg

SEQ ID NO: 413896 - RNA, 20 nt, Human
gacgaagauucuggcugaac

SEQ ID NO: 413897 - RNA, 19 nt, Human
gagaaaaacuggagacagg

SEQ ID NO: 413898 - RNA, 21 nt, Human
gagaagggaaggagggaagag

SEQ ID NO: 413899 - RNA, 20 nt, Human
gagccgcagggagaacacgg

SEQ ID NO: 413900 - RNA, 19 nt, Human
gcugggcugucgggggcag

SEQ ID NO: 413901 - RNA, 19 nt, Human
gcugguacgaggccuccca

SEQ ID NO: 413902 - RNA, 19 nt, Human
gcuugggauccuggcuggu

SEQ ID NO: 413903 - RNA, 20 nt, Human
ggaugacaagugggcuaggc

SEQ ID NO: 413904 - RNA, 21 nt, Human
ggcuagagacaaagccagagg

SEQ ID NO: 413905 - RNA, 24 nt, Human
gggaaagagggaaggagagaaggg

SEQ ID NO: 413906 - RNA, 21 nt, Human
gggaaggagagaagggaagga

SEQ ID NO: 413907 - RNA, 21 nt, Human
gggaaggugguagguaaagga

SEQ ID NO: 413908 - RNA, 20 nt, Human
gggcuaggcugggcugucgg

SEQ ID NO: 413909 - RNA, 23 nt, Human
uaaggucucacggugaggccucc

SEQ ID NO: 413910 - RNA, 18 nt, Human
uccugcuacgucccagga

SEQ ID NO: 413911 - RNA, 19 nt, Human
ugagcuugcuuuauggaug

SEQ ID NO: 413912 - RNA, 22 nt, Human
uggcccggcuagagacaaagcc

SEQ ID NO: 413913 - RNA, 23 nt, Human
ugucccguucuucaaagcugcca

SEQ ID NO: 413914 - RNA, 18 nt, Human
uuccaagggacgggacgc

SEQ ID NO: 413915 - RNA, 19 nt, Human
uuccaagggacgggacgcu

SEQ ID NO: 413916 - RNA, 19 nt, Human
aaacaacaguucuguaaac

SEQ ID NO: 413917 - RNA, 19 nt, Human
aaagaagccccuguucucu

SEQ ID NO: 413918 - RNA, 20 nt, Human
acauucgaaaagaaagaagc

SEQ ID NO: 413919 - RNA, 22 nt, Human
accucuuuucccccaagcccaa

SEQ ID NO: 413920 - RNA, 21 nt, Human
agaaucccuccuccucuucua

SEQ ID NO: 413921 - RNA, 24 nt, Human
agaggcugcuccacagcccugggc

SEQ ID NO: 413922 - RNA, 22 nt, Human
aggcauggcagugaagaccaga

SEQ ID NO: 413923 - RNA, 22 nt, Human
aggcugcuccacagcccugggc

SEQ ID NO: 413924 - RNA, 19 nt, Human
cacaugggcccagcagggc

SEQ ID NO: 413925 - RNA, 22 nt, Human
caccgcuacaucccagguugac

SEQ ID NO: 413926 - RNA, 23 nt, Human
caccucuuuucccccaagcccaa

SEQ ID NO: 413927 - RNA, 18 nt, Human
cacguuagcuaccagugg

SEQ ID NO: 413928 - RNA, 20 nt, Human
cagaaucccuccuccucuuc

SEQ ID NO: 413929 - RNA, 26 nt, Human
cagcagggcuucuuuagcacaggcuc

SEQ ID NO: 413930 - RNA, 18 nt, Human
caggggcucccuagggcu

SEQ ID NO: 413931 - RNA, 23 nt, Human
cagugcaaaacaaagguguucuu

SEQ ID NO: 413932 - RNA, 18 nt, Human
caguggccuucuugucuu

SEQ ID NO: 413933 - RNA, 20 nt, Human
ccaaaggacucucuguggca

SEQ ID NO: 413934 - RNA, 21 nt, Human
ccaaaggacucucuguggcag

SEQ ID NO: 413935 - RNA, 28 nt, Human
ccaagcccaacaauccuuugagguacuu

SEQ ID NO: 413936 - RNA, 20 nt, Human
ccacauucgaaaagaaagaa

SEQ ID NO: 413937 - RNA, 23 nt, Human
ccaggaauccaccucuuuucccc

SEQ ID NO: 413938 - RNA, 18 nt, Human
ccagguugacccacggua

SEQ ID NO: 413939 - RNA, 23 nt, Human
ccagguugacccacgguagccac

SEQ ID NO: 413940 - RNA, 18 nt, Human
ccccagccucacaugggc

SEQ ID NO: 413941 - RNA, 18 nt, Human
ccccuccuugucauucac

SEQ ID NO: 413942 - RNA, 18 nt, Human
cccuccauuuuguaggaa

SEQ ID NO: 413943 - RNA, 21 nt, Human
cccuguucucugggagggagu

SEQ ID NO: 413944 - RNA, 19 nt, Human
ccguggcugaucucccacc

SEQ ID NO: 413945 - RNA, 20 nt, Human
ccucacaugggcccagcagg

SEQ ID NO: 413946 - RNA, 25 nt, Human
ccucacaugggcccagcagggcuuc

SEQ ID NO: 413947 - RNA, 21 nt, Human
ccucugguccccaagucucug

SEQ ID NO: 413948 - RNA, 18 nt, Human
cgagaggagguccaagga

SEQ ID NO: 413949 - RNA, 23 nt, Human
cgugguggggggggguggggaag

SEQ ID NO: 413950 - RNA, 25 nt, Human
cguuagcuaccaguggccuucuugu

SEQ ID NO: 413951 - RNA, 20 nt, Human
cuagaaucccaaaggacucu

SEQ ID NO: 413952 - RNA, 21 nt, Human
cuccaaccuuccauuuugucc

SEQ ID NO: 413953 - RNA, 18 nt, Human
cugguccccaagucucug

SEQ ID NO: 413954 - RNA, 20 nt, Human
cuuguaguuagauuuacaca

SEQ ID NO: 413955 - RNA, 18 nt, Human
gacagggaagggauggcu

SEQ ID NO: 413956 - RNA, 19 nt, Human
gagaggcugcuccacagcc

SEQ ID NO: 413957 - RNA, 23 nt, Human
gagguggcagcagggauuggaug

SEQ ID NO: 413958 - RNA, 18 nt, Human
gagugcuggaggcaggag

SEQ ID NO: 413959 - RNA, 21 nt, Human
gccccuguucucugggaggga

SEQ ID NO: 413960 - RNA, 19 nt, Human
gcguggugggggggggugg

SEQ ID NO: 413961 - RNA, 24 nt, Human
gcuccuguggcuucacgucaucca

SEQ ID NO: 413962 - RNA, 18 nt, Human
gcucuguguugcugggug

SEQ ID NO: 413963 - RNA, 18 nt, Human
ggaaggcucugcccaguc

SEQ ID NO: 413964 - RNA, 18 nt, Human
ggcauggcagugaagacc

SEQ ID NO: 413965 - RNA, 22 nt, Human
ggcugaugaugcaugugugaug

SEQ ID NO: 413966 - RNA, 21 nt, Human
ggggaagaggcugcauggggg

SEQ ID NO: 413967 - RNA, 23 nt, Human
ggggauacacgucuccaaccuuc

SEQ ID NO: 413968 - RNA, 24 nt, Human
ggggcugugaguccugccacggca

SEQ ID NO: 413969 - RNA, 27 nt, Human
gggggguggggaagaggcugcaugggg

SEQ ID NO: 413970 - RNA, 22 nt, Human
ggggguggggaagaggcugcau

SEQ ID NO: 413971 - RNA, 23 nt, Human
gucagggaauauuuacgagcccc

SEQ ID NO: 413972 - RNA, 20 nt, Human
gugcagcugcagucgccagc

SEQ ID NO: 413973 - RNA, 30 nt, Human
guggcagcagggauuggauggccccuccuu

SEQ ID NO: 413974 - RNA, 23 nt, Human
guggggggggguggggaagaggc

SEQ ID NO: 413975 - RNA, 22 nt, Human
guuuuuuaaacuucuucuuugu

SEQ ID NO: 413976 - RNA, 21 nt, Human
uaaacaacaguucuguaaaca

SEQ ID NO: 413977 - RNA, 24 nt, Human
uagguucuugcccaggaauccacc

SEQ ID NO: 413978 - RNA, 24 nt, Human
uaguuagauuuacacagagcuuuu

SEQ ID NO: 413979 - RNA, 22 nt, Human
uaucuugguuuauuuucucuug

SEQ ID NO: 413980 - RNA, 23 nt, Human
ucacuugcaugucauagcacccc

SEQ ID NO: 413981 - RNA, 20 nt, Human
ucagugcagcgguggggcug

SEQ ID NO: 413982 - RNA, 24 nt, Human
ucaugauugagcgcgugguggggg

SEQ ID NO: 413983 - RNA, 23 nt, Human
uccaaauggaucuaucuugguuu

SEQ ID NO: 413984 - RNA, 23 nt, Human
ucccacuccauugugggccccuc

SEQ ID NO: 413985 - RNA, 27 nt, Human
ucccagguugacccacgguagccacau

SEQ ID NO: 413986 - RNA, 25 nt, Human
ucccuagggcuccaucccaggaggu

SEQ ID NO: 413987 - RNA, 20 nt, Human
ucccuccaggcuccguggcu

SEQ ID NO: 413988 - RNA, 21 nt, Human
uccuagaaucccaaaggacuc

SEQ ID NO: 413989 - RNA, 24 nt, Human
uccuguggcuucacgucauccacu

SEQ ID NO: 413990 - RNA, 23 nt, Human
uccuuuggucucaccucuagaca

SEQ ID NO: 413991 - RNA, 22 nt, Human
ugaggcauggcagugaagacca

SEQ ID NO: 413992 - RNA, 23 nt, Human
ugaguccugccacggcaggggca

SEQ ID NO: 413993 - RNA, 22 nt, Human
ugcaaaacaaagguguucuuga

SEQ ID NO: 413994 - RNA, 19 nt, Human
ugcauggggguggggcucc

SEQ ID NO: 413995 - RNA, 18 nt, Human
uggauggccccuccuuuc

SEQ ID NO: 413996 - RNA, 23 nt, Human
uggcaacuccucucugucccgac

SEQ ID NO: 413997 - RNA, 21 nt, Human
ugggagggagugcuggaggca

SEQ ID NO: 413998 - RNA, 22 nt, Human
uggggggggguggggaagaggc

SEQ ID NO: 413999 - RNA, 20 nt, Human
uggggguggggcuccugugg

SEQ ID NO: 414000 - RNA, 24 nt, Human
ugggucuguguccaugugugcgug

SEQ ID NO: 414001 - RNA, 21 nt, Human
uggugagguggacagggaagg

SEQ ID NO: 414002 - RNA, 22 nt, Human
ugucauagcaccccuggugagg

SEQ ID NO: 414003 - RNA, 21 nt, Human
ugucccgacaaaaucucuccc

SEQ ID NO: 414004 - RNA, 19 nt, Human
ugugggccccuccuguccc

SEQ ID NO: 414005 - RNA, 18 nt, Human
uguguccaugugugcgug

SEQ ID NO: 414006 - RNA, 23 nt, Human
ugugugcguggaugcaccguuuu

SEQ ID NO: 414007 - RNA, 21 nt, Human
ugugugggucuguguccaugu

SEQ ID NO: 414008 - RNA, 24 nt, Human
uucaaaccuucuucccuggcaacu

SEQ ID NO: 414009 - RNA, 20 nt, Human
uucacgucauccacugucac

SEQ ID NO: 414010 - RNA, 23 nt, Human
uuccuuggguuuccuagaauccc

SEQ ID NO: 414011 - RNA, 20 nt, Human
uucuuuagcacaggcucuag

SEQ ID NO: 414012 - RNA, 19 nt, Human
uugagcgcguggugggggg

SEQ ID NO: 414013 - RNA, 21 nt, Human
uugcuggguggcaucccucca

SEQ ID NO: 414014 - RNA, 22 nt, Human
uuggauggccccuccuuucaaa

SEQ ID NO: 414015 - RNA, 26 nt, Human
uuucuugaaucagcaacaaguaaaca

SEQ ID NO: 414016 - RNA, 22 nt, Human
aaaagccaagauguugcaaaug

SEQ ID NO: 414017 - RNA, 24 nt, Human
aaaugauucuuuuauuauuuucca

SEQ ID NO: 414018 - RNA, 19 nt, Human
aaccccgccgaccgcucuc

SEQ ID NO: 414019 - RNA, 24 nt, Human
aagaaaccccgccgaccgcucucc

SEQ ID NO: 414020 - RNA, 22 nt, Human
aagccuuuuuuuaggccaaaga

SEQ ID NO: 414021 - RNA, 22 nt, Human
agaaagaacacuucauguuaga

SEQ ID NO: 414022 - RNA, 21 nt, Human
agaaaggauaaaugaagaaaa

SEQ ID NO: 414023 - RNA, 23 nt, Human
aggauaaaugaagaaaaagaaag

SEQ ID NO: 414024 - RNA, 18 nt, Human
agguucuucugaguggug

SEQ ID NO: 414025 - RNA, 18 nt, Human
agugggagcuccccucaa

SEQ ID NO: 414026 - RNA, 22 nt, Human
auaaaugaagaaaaagaaagaa

SEQ ID NO: 414027 - RNA, 23 nt, Human
augaggcucgucccugucagugc

SEQ ID NO: 414028 - RNA, 22 nt, Human
caaaucaagcauacaacuacaa

SEQ ID NO: 414029 - RNA, 22 nt, Human
cagccacaguagugggacagcc

SEQ ID NO: 414030 - RNA, 24 nt, Human
caggcaaugcaacgaagaaacccc

SEQ ID NO: 414031 - RNA, 20 nt, Human
cauguuugcuucuccaugga

SEQ ID NO: 414032 - RNA, 18 nt, Human
ccaagauguugcaaauga

SEQ ID NO: 414033 - RNA, 18 nt, Human
ccaguaacuaaaagccaa

SEQ ID NO: 414034 - RNA, 19 nt, Human
ccccgccgaccgcucuccc

SEQ ID NO: 414035 - RNA, 23 nt, Human
ccgccgaccgcucucccagccgc

SEQ ID NO: 414036 - RNA, 18 nt, Human
ccgcugccgcugccgccg

SEQ ID NO: 414037 - RNA, 20 nt, Human
ccgcugccgcugccgccgcg

SEQ ID NO: 414038 - RNA, 20 nt, Human
ccuggcagacuccgcuccuc

SEQ ID NO: 414039 - RNA, 25 nt, Human
ccuuuuuuuaggccaaagacugaca

SEQ ID NO: 414040 - RNA, 24 nt, Human
cgccgcgccaagccgguacgcccc

SEQ ID NO: 414041 - RNA, 21 nt, Human
cucaagcugaaagcgugaaga

SEQ ID NO: 414042 - RNA, 22 nt, Human
cucaggcaaugcaacgaagaaa

SEQ ID NO: 414043 - RNA, 18 nt, Human
cucccagccgccgcugcc

SEQ ID NO: 414044 - RNA, 18 nt, Human
cuccucucaggcaaugca

SEQ ID NO: 414045 - RNA, 18 nt, Human
cugccgcugccgccgcgc

SEQ ID NO: 414046 - RNA, 19 nt, Human
cugcugaggcagugggagc

SEQ ID NO: 414047 - RNA, 18 nt, Human
gaagaaaaagaaagaaca

SEQ ID NO: 414048 - RNA, 19 nt, Human
gcaacgaagaaaccccgcc

SEQ ID NO: 414049 - RNA, 21 nt, Human
gcaacgaagaaaccccgccga

SEQ ID NO: 414050 - RNA, 19 nt, Human
gcagugggagcuccccuca

SEQ ID NO: 414051 - RNA, 23 nt, Human
gccgccgcugccgcugccgccgg

SEQ ID NO: 414052 - RNA, 23 nt, Human
gccgcugccgccgcgccaagccg

SEQ ID NO: 414053 - RNA, 26 nt, Human
ggaaaagaaaggauaaaugaagaaaa

SEQ ID NO: 414054 - RNA, 22 nt, Human
ggaggcagcuaucuacaggccc

SEQ ID NO: 414055 - RNA, 26 nt, Human
uaaaauugggaguuggggaguaggga

SEQ ID NO: 414056 - RNA, 24 nt, Human
uacaaaguccugcugcuccacuuc

SEQ ID NO: 414057 - RNA, 23 nt, Human
uagaacacaugucuauuuaaagc

SEQ ID NO: 414058 - RNA, 22 nt, Human
uauagaacacaugucuauuuaa

SEQ ID NO: 414059 - RNA, 25 nt, Human
uauguaaaauaaaaauagaaacauu

SEQ ID NO: 414060 - RNA, 19 nt, Human
ucacauguuugcuucucca

SEQ ID NO: 414061 - RNA, 20 nt, Human
ucacauguuugcuucuccau

SEQ ID NO: 414062 - RNA, 21 nt, Human
ucacuaaggagccaguuaugu

SEQ ID NO: 414063 - RNA, 23 nt, Human
ucauucagaucagguucuucuga

SEQ ID NO: 414064 - RNA, 25 nt, Human
ucccagccgccgcugccgcugccgg

SEQ ID NO: 414065 - RNA, 20 nt, Human
uccugcugcuccacuuccaa

SEQ ID NO: 414066 - RNA, 25 nt, Human
ugaggaggcagcuaucuacaggccc

SEQ ID NO: 414067 - RNA, 21 nt, Human
ugcaacgaagaaaccccgccg

SEQ ID NO: 414068 - RNA, 23 nt, Human
ugcaacgaagaaaccccgccgac

SEQ ID NO: 414069 - RNA, 20 nt, Human
ugggaguuggggaguaggga

SEQ ID NO: 414070 - RNA, 21 nt, Human
uggggaguagggaagaaggag

SEQ ID NO: 414071 - RNA, 22 nt, Human
uguucauucuaacauucacaug

SEQ ID NO: 414072 - RNA, 21 nt, Human
aaagggcggaggggggugggg

SEQ ID NO: 414073 - RNA, 21 nt, Human
auacuucucuuuuuuccuuua

SEQ ID NO: 414074 - RNA, 22 nt, Human
cagauaccaaaacauacaugug

SEQ ID NO: 414075 - RNA, 22 nt, Human
ccgcaggaggaggacagggugg

SEQ ID NO: 414076 - RNA, 21 nt, Human
ccggcccgccggaccggcccg

SEQ ID NO: 414077 - RNA, 22 nt, Human
ccggcccggcccgcugcggccg

SEQ ID NO: 414078 - RNA, 18 nt, Human
ccggugcgggggcgcggg

SEQ ID NO: 414079 - RNA, 23 nt, Human
cgagaggaagguggggagaggaa

SEQ ID NO: 414080 - RNA, 22 nt, Human
cggccgccaacacggacaacgc

SEQ ID NO: 414081 - RNA, 20 nt, Human
gcccggugcgggggcgcggg

SEQ ID NO: 414082 - RNA, 21 nt, Human
gcccggugcgggggcgcggga

SEQ ID NO: 414083 - RNA, 23 nt, Human
gcgcgcccccgcccgcgcgcucu

SEQ ID NO: 414084 - RNA, 19 nt, Human
ggaggaggacagggugggc

SEQ ID NO: 414085 - RNA, 23 nt, Human
ggcgagaggaagguggggagagg

SEQ ID NO: 414086 - RNA, 20 nt, Human
gggguggggacggaaggggc

SEQ ID NO: 414087 - RNA, 19 nt, Human
gguggggagaggaaagggc

SEQ ID NO: 414088 - RNA, 24 nt, Human
gguggggagaggaaagggcggagg

SEQ ID NO: 414089 - RNA, 19 nt, Human
uacagaagguagauuuuua

SEQ ID NO: 414090 - RNA, 19 nt, Human
uacagucacaaagcuguag

SEQ ID NO: 414091 - RNA, 27 nt, Human
ugcaaaaauaaauuaaagaacagauac

SEQ ID NO: 414092 - RNA, 19 nt, Human
ugcugcggucucccggcuc

SEQ ID NO: 414093 - RNA, 18 nt, Human
uggggacggaaggggcgg

SEQ ID NO: 414094 - RNA, 18 nt, Human
uggucggggcgaccgcgg

SEQ ID NO: 414095 - RNA, 20 nt, Human
uucacagaugcaagugccau

SEQ ID NO: 414096 - RNA, 21 nt, Human
aaaaaaaaaaaaaaucacaaa

SEQ ID NO: 414097 - RNA, 25 nt, Human
aaaaaaaaaaaaaaucacaaauaaa

SEQ ID NO: 414098 - RNA, 23 nt, Human
aaaaaaaaaaagauuagugagga

SEQ ID NO: 414099 - RNA, 21 nt, Human
aaaaaaaaaaucacaaauaaa

SEQ ID NO: 414100 - RNA, 24 nt, Human
aaaaaaaaaucuuuuaaccauauu

SEQ ID NO: 414101 - RNA, 21 nt, Human
aaaaaaaacaaaaaaaaacac

SEQ ID NO: 414102 - RNA, 23 nt, Human
aaaaaaaagauuagugaggaaaa

SEQ ID NO: 414103 - RNA, 18 nt, Human
aaaaaaaucacaaauaaa

SEQ ID NO: 414104 - RNA, 23 nt, Human
aaaaacacuugguucaugggccc

SEQ ID NO: 414105 - RNA, 25 nt, Human
aaaaagcagacagaaaacaaaaaaa

SEQ ID NO: 414106 - RNA, 26 nt, Human
aaaacacuugguucaugggcccaggc

SEQ ID NO: 414107 - RNA, 25 nt, Human
aaaagauuagugaggaaaaccaaua

SEQ ID NO: 414108 - RNA, 20 nt, Human
aaaauacaaaaaauuagccc

SEQ ID NO: 414109 - RNA, 20 nt, Human
aaaauuacaauuaagaaugg

SEQ ID NO: 414110 - RNA, 30 nt, Human
aaagauuagugaggaaaaccaauaaauaaa

SEQ ID NO: 414111 - RNA, 23 nt, Human
aaauaaccacugaaaauauaaaa

SEQ ID NO: 414112 - RNA, 24 nt, Human
aaauaaccacugaaaauauaaaac

SEQ ID NO: 414113 - RNA, 22 nt, Human
aacuguacauucucagcagagc

SEQ ID NO: 414114 - RNA, 23 nt, Human
aagaaaaaaauuacaauuaagaa

SEQ ID NO: 414115 - RNA, 21 nt, Human
aagaaaaaagcagacagaaaa

SEQ ID NO: 414116 - RNA, 19 nt, Human
aagcaaaaauaaccacuga

SEQ ID NO: 414117 - RNA, 22 nt, Human
aagcaaaaauaaccacugaaaa

SEQ ID NO: 414118 - RNA, 24 nt, Human
aagcaaaaauaaccacugaaaaua

SEQ ID NO: 414119 - RNA, 26 nt, Human
aagcagacagaaaacaaaaaaaauuc

SEQ ID NO: 414120 - RNA, 21 nt, Human
aagcagagcuugcagugagcc

SEQ ID NO: 414121 - RNA, 23 nt, Human
aaggaacaaaggaacuuuaacca

SEQ ID NO: 414122 - RNA, 31 nt, Human
aaugacaaacaaaccaauaaccaggaggaaa

SEQ ID NO: 414123 - RNA, 20 nt, Human
acagaaaacaaaaaaaauuc

SEQ ID NO: 414124 - RNA, 18 nt, Human
acauggugaaacccuguc

SEQ ID NO: 414125 - RNA, 19 nt, Human
acauggugaaacccugucu

SEQ ID NO: 414126 - RNA, 20 nt, Human
acauggugaaacccugucuc

SEQ ID NO: 414127 - RNA, 22 nt, Human
acauggugaaacccugucucua

SEQ ID NO: 414128 - RNA, 20 nt, Human
accacugaaaauauaaaacu

SEQ ID NO: 414129 - RNA, 22 nt, Human
accacugcacuccagccugggc

SEQ ID NO: 414130 - RNA, 24 nt, Human
acccugucucuacuaaaaauacaa

SEQ ID NO: 414131 - RNA, 22 nt, Human
acuccagccugggcaacaguga

SEQ ID NO: 414132 - RNA, 24 nt, Human
acugcacuccagccugggcaacag

SEQ ID NO: 414133 - RNA, 25 nt, Human
agaaaaaagcagacagaaaacaaaa

SEQ ID NO: 414134 - RNA, 24 nt, Human
agacgggugguucacaaggucagg

SEQ ID NO: 414135 - RNA, 24 nt, Human
agagcuugcagugagccgagauug

SEQ ID NO: 414136 - RNA, 22 nt, Human
agcaagcgcagggaccgcuccu

SEQ ID NO: 414137 - RNA, 24 nt, Human
agcacuuugggaggccgagacggg

SEQ ID NO: 414138 - RNA, 24 nt, Human
agccaggagaauggcgugaaccug

SEQ ID NO: 414139 - RNA, 22 nt, Human
agccugggcaacagugagacuc

SEQ ID NO: 414140 - RNA, 21 nt, Human
aggccgagacgggugguucac

SEQ ID NO: 414141 - RNA, 24 nt, Human
aggcgugguggcucacaccuguaa

SEQ ID NO: 414142 - RNA, 20 nt, Human
aucacaaauaaaaauggcaa

SEQ ID NO: 414143 - RNA, 19 nt, Human
auccaauaacugagcuaac

SEQ ID NO: 414144 - RNA, 20 nt, Human
auuacaauuaagaauggaaa

SEQ ID NO: 414145 - RNA, 24 nt, Human
auugcaccacugcacuccagccug

SEQ ID NO: 414146 - RNA, 28 nt, Human
auugcaccacugcacuccagccugggca

SEQ ID NO: 414147 - RNA, 22 nt, Human
caaaauuccugaaggaugagac

SEQ ID NO: 414148 - RNA, 24 nt, Human
caacagugagacucugucucaaaa

SEQ ID NO: 414149 - RNA, 21 nt, Human
caagagacauaagaaaaaagc

SEQ ID NO: 414150 - RNA, 24 nt, Human
cacaccuguaaucccagcacuuug

SEQ ID NO: 414151 - RNA, 21 nt, Human
cacauggugaaacccugucuc

SEQ ID NO: 414152 - RNA, 19 nt, Human
caccuguaaucccagcacu

SEQ ID NO: 414153 - RNA, 24 nt, Human
caccuguaaucccagcacuuuggg

SEQ ID NO: 414154 - RNA, 20 nt, Human
cacuccagccugggcaacag

SEQ ID NO: 414155 - RNA, 21 nt, Human
cacuccagccugggcaacagu

SEQ ID NO: 414156 - RNA, 22 nt, Human
cacuccagccugggcaacagug

SEQ ID NO: 414157 - RNA, 19 nt, Human
cacugcacuccagccuggg

SEQ ID NO: 414158 - RNA, 21 nt, Human
cacugcacuccagccugggca

SEQ ID NO: 414159 - RNA, 22 nt, Human
cacugcacuccagccugggcaa

SEQ ID NO: 414160 - RNA, 23 nt, Human
cacugcacuccagccugggcaac

SEQ ID NO: 414161 - RNA, 24 nt, Human
cacugcacuccagccugggcaaca

SEQ ID NO: 414162 - RNA, 25 nt, Human
cacugcacuccagccugggcaacaa

SEQ ID NO: 414163 - RNA, 26 nt, Human
cacugcacuccagccugggcaacagu

SEQ ID NO: 414164 - RNA, 22 nt, Human
cacuguggcgggugccuguagu

SEQ ID NO: 414165 - RNA, 23 nt, Human
cagacagaaaacaaaaaaaauuc

SEQ ID NO: 414166 - RNA, 24 nt, Human
cagacagaaaacaaaaaaaauucu

SEQ ID NO: 414167 - RNA, 24 nt, Human
cagcacuuugggaggccgagacgg

SEQ ID NO: 414168 - RNA, 26 nt, Human
cagcacuuugggaggccgagacgggu

SEQ ID NO: 414169 - RNA, 25 nt, Human
cagcagagcacaaguaucaaaggga

SEQ ID NO: 414170 - RNA, 20 nt, Human
ccacugcacuccagccuggg

SEQ ID NO: 414171 - RNA, 21 nt, Human
ccacugcacuccagccugggc

SEQ ID NO: 414172 - RNA, 23 nt, Human
ccacugcacuccagccugggcaa

SEQ ID NO: 414173 - RNA, 24 nt, Human
ccacugcacuccagccugggcaac

SEQ ID NO: 414174 - RNA, 19 nt, Human
cccgaucgaucggacagca

SEQ ID NO: 414175 - RNA, 21 nt, Human
ccugaaggaugagaccuggga

SEQ ID NO: 414176 - RNA, 26 nt, Human
ccugaaguaccaaaaaaaaaaaaaaa

SEQ ID NO: 414177 - RNA, 22 nt, Human
ccuggcucacauggugaaaccc

SEQ ID NO: 414178 - RNA, 22 nt, Human
ccuggcucacauggugaaaccc

SEQ ID NO: 414179 - RNA, 24 nt, Human
ccuggcucacauggugaaacccug

SEQ ID NO: 414180 - RNA, 20 nt, Human
ccugggcaacagugagacuc

SEQ ID NO: 414181 - RNA, 21 nt, Human
ccuguagucccagcuacuugg

SEQ ID NO: 414182 - RNA, 22 nt, Human
ccuguagucccagcuacuuggg

SEQ ID NO: 414183 - RNA, 22 nt, Human
cgggugguucacaaggucagga

SEQ ID NO: 414184 - RNA, 22 nt, Human
cucacaccuguaaucccagcac

SEQ ID NO: 414185 - RNA, 24 nt, Human
cucacaccuguaaucccagcacuu

SEQ ID NO: 414186 - RNA, 24 nt, Human
cucccucuucucauugaacugcaa

SEQ ID NO: 414187 - RNA, 23 nt, Human
cucugucucaaaaaaaaaacaaa

SEQ ID NO: 414188 - RNA, 24 nt, Human
cuggcucacauggugaaacccugu

SEQ ID NO: 414189 - RNA, 22 nt, Human
cugucucaaaaaaaaaacaaaa

SEQ ID NO: 414190 - RNA, 19 nt, Human
cuugcagugagccgagauu

SEQ ID NO: 414191 - RNA, 21 nt, Human
cuugcagugagccgagauugc

SEQ ID NO: 414192 - RNA, 19 nt, Human
gaaacccugucucuacuaa

SEQ ID NO: 414193 - RNA, 20 nt, Human
gaaccugggaagcagagcuu

SEQ ID NO: 414194 - RNA, 23 nt, Human
gagaccauccuggcucacauggu

SEQ ID NO: 414195 - RNA, 23 nt, Human
gagacgggugguucacaagguca

SEQ ID NO: 414196 - RNA, 24 nt, Human
gagaugcuucuguccucaucuuua

SEQ ID NO: 414197 - RNA, 23 nt, Human
gagauugcaccacugcacuccag

SEQ ID NO: 414198 - RNA, 18 nt, Human
gagcuugcagugagccga

SEQ ID NO: 414199 - RNA, 18 nt, Human
gagcuugcagugagccga

SEQ ID NO: 414200 - RNA, 22 nt, Human
gcaacagugagacucugucuca

SEQ ID NO: 414201 - RNA, 24 nt, Human
gcaacagugagacucugucucaaa

SEQ ID NO: 414202 - RNA, 19 nt, Human
gcagagcacaaguaucaaa

SEQ ID NO: 414203 - RNA, 24 nt, Human
gcucacauggugaaacccugucuc

SEQ ID NO: 414204 - RNA, 22 nt, Human
gcugagccaggagaauggcgug

SEQ ID NO: 414205 - RNA, 21 nt, Human
ggcucacaccuguaaucccag

SEQ ID NO: 414206 - RNA, 23 nt, Human
ggcuuuuggacuaaaaaaaaaaa

SEQ ID NO: 414207 - RNA, 24 nt, Human
gggcaacagugagacucugucuca

SEQ ID NO: 414208 - RNA, 21 nt, Human
gggcccaggcgugguggcuca

SEQ ID NO: 414209 - RNA, 20 nt, Human
ggugguucacaaggucagga

SEQ ID NO: 414210 - RNA, 21 nt, Human
ggugguucacaaggucaggag

SEQ ID NO: 414211 - RNA, 24 nt, Human
guaccaaaaaaaaaaaaaaauccu

SEQ ID NO: 414212 - RNA, 22 nt, Human
guggcgggugccuguaguccca

SEQ ID NO: 414213 - RNA, 23 nt, Human
guggcucacaccuguaaucccag

SEQ ID NO: 414214 - RNA, 21 nt, Human
uaaaaauacaaaaaauuagcc

SEQ ID NO: 414215 - RNA, 22 nt, Human
uaaaaauacaaaaaauuagccc

SEQ ID NO: 414216 - RNA, 18 nt, Human
uaaagaaaaaaauuacaa

SEQ ID NO: 414217 - RNA, 19 nt, Human
uaaagaaaaaaauuacaau

SEQ ID NO: 414218 - RNA, 18 nt, Human
uaaccauauuugggguga

SEQ ID NO: 414219 - RNA, 20 nt, Human
uagcccaggcacuguggcgg

SEQ ID NO: 414220 - RNA, 23 nt, Human
uauaaaacucaacaagagacaua

SEQ ID NO: 414221 - RNA, 21 nt, Human
uauuugucucccucuucucau

SEQ ID NO: 414222 - RNA, 24 nt, Human
ucacaaggucaggagauugagacc

SEQ ID NO: 414223 - RNA, 20 nt, Human
ucauuuaccauuuaauagca

SEQ ID NO: 414224 - RNA, 22 nt, Human
uccagccugggcaacagugaga

SEQ ID NO: 414225 - RNA, 25 nt, Human
ucccagcagcaagcgcaggguaccc

SEQ ID NO: 414226 - RNA, 22 nt, Human
ucucuacuaaaaauacaaaaaa

SEQ ID NO: 414227 - RNA, 23 nt, Human
ugacaaacaaaccaauaaccagg

SEQ ID NO: 414228 - RNA, 28 nt, Human
ugacacauuuuauuaaaacaaaaggaac

SEQ ID NO: 414229 - RNA, 23 nt, Human
ugagccaggagaauggcgugaac

SEQ ID NO: 414230 - RNA, 24 nt, Human
ugagccaggagaauggcgugaacc

SEQ ID NO: 414231 - RNA, 22 nt, Human
ugagccgagauugcaccacugc

SEQ ID NO: 414232 - RNA, 20 nt, Human
ugauuaucuuucacucaucc

SEQ ID NO: 414233 - RNA, 21 nt, Human
ugcaccacugcacuccagccu

SEQ ID NO: 414234 - RNA, 23 nt, Human
ugccuguagucccagcuacuugg

SEQ ID NO: 414235 - RNA, 24 nt, Human
ugccuguagucccagcuacuuggg

SEQ ID NO: 414236 - RNA, 24 nt, Human
uggcgggugccuguagucccagcu

SEQ ID NO: 414237 - RNA, 21 nt, Human
uggcucacaccuguaauccca

SEQ ID NO: 414238 - RNA, 22 nt, Human
uggcucacaccuguaaucccag

SEQ ID NO: 414239 - RNA, 24 nt, Human
uggcucacaccuguaaucccagca

SEQ ID NO: 414240 - RNA, 19 nt, Human
ugggaggccgagacgggug

SEQ ID NO: 414241 - RNA, 24 nt, Human
ugggcccaggcgugguggcucaca

SEQ ID NO: 414242 - RNA, 24 nt, Human
ugguggcucacaccuguaauccca

SEQ ID NO: 414243 - RNA, 23 nt, Human
uugcaccacugcacuccagccug

SEQ ID NO: 414244 - RNA, 18 nt, Human
uugcagugagccgagauu

SEQ ID NO: 414245 - RNA, 19 nt, Human
uugcagugagccgagauug

SEQ ID NO: 414246 - RNA, 22 nt, Human
uugcagugagccgagauugcac

SEQ ID NO: 414247 - RNA, 21 nt, Human
caacacugcaggguacaguaa

SEQ ID NO: 414248 - RNA, 24 nt, Human
cauaguaaaguaccuuuuagugcc

SEQ ID NO: 414249 - RNA, 18 nt, Human
cuuagacuaaaagcauac

SEQ ID NO: 414250 - RNA, 19 nt, Human
gcuuuuuuuuuuuuuuucu

SEQ ID NO: 414251 - RNA, 23 nt, Human
ggcuuaguaaaauacuccggcuu

SEQ ID NO: 414252 - RNA, 18 nt, Human
uaacuaacuuugggaucu

SEQ ID NO: 414253 - RNA, 21 nt, Human
ugccuaaauccuagagaacau

SEQ ID NO: 414254 - RNA, 18 nt, Human
ugggaucucuucaaagaa

SEQ ID NO: 414255 - RNA, 23 nt, Human
uguaagaaacuagcccauuauuu

SEQ ID NO: 414256 - RNA, 21 nt, Human
uuagacuaaaagcauacugca

SEQ ID NO: 414257 - RNA, 24 nt, Human
uucaaagaaggaaaguauugcacc

SEQ ID NO: 414258 - RNA, 20 nt, Human
uuuuaaaaaucaacacugca

SEQ ID NO: 414259 - RNA, 21 nt, Human
uuuuuuuuuucuagaggaguc

SEQ ID NO: 414260 - RNA, 22 nt, Human
uuuuuuuuuuuuuuucuagagg

SEQ ID NO: 414261 - RNA, 19 nt, Human
aaaaauggcacaugucauc

SEQ ID NO: 414262 - RNA, 23 nt, Human
aaauacaccacccaccaauuuca

SEQ ID NO: 414263 - RNA, 18 nt, Human
aagcacucuggggcugau

SEQ ID NO: 414264 - RNA, 24 nt, Human
aagcaggacagagaugaggacuga

SEQ ID NO: 414265 - RNA, 23 nt, Human
acaaagcuucccuucuuuaaaca

SEQ ID NO: 414266 - RNA, 21 nt, Human
accuuauuucccacccacuuc

SEQ ID NO: 414267 - RNA, 18 nt, Human
caaagacaccggaggggg

SEQ ID NO: 414268 - RNA, 25 nt, Human
cacucccaaacaggccauguuucag

SEQ ID NO: 414269 - RNA, 23 nt, Human
cagcuccauuugacauaagcaau

SEQ ID NO: 414270 - RNA, 24 nt, Human
cagcuccauuugacauaagcaaug

SEQ ID NO: 414271 - RNA, 20 nt, Human
cauaugcuguucucagugca

SEQ ID NO: 414272 - RNA, 20 nt, Human
ccagccugucugcacguccu

SEQ ID NO: 414273 - RNA, 18 nt, Human
cccaaagcaagaaaucau

SEQ ID NO: 414274 - RNA, 24 nt, Human
ccuaugaagcaggacagagaugag

SEQ ID NO: 414275 - RNA, 19 nt, Human
cugcagaagccaaaagaua

SEQ ID NO: 414276 - RNA, 22 nt, Human
cuucucaaauacaccacccacc

SEQ ID NO: 414277 - RNA, 20 nt, Human
gcagaagccaaaagauaaga

SEQ ID NO: 414278 - RNA, 23 nt, Human
gcagcggugggaccaccuuugaa

SEQ ID NO: 414279 - RNA, 23 nt, Human
uaaacacacaagguggcaccuau

SEQ ID NO: 414280 - RNA, 23 nt, Human
uaauuuaugcaaaguauuuccuu

SEQ ID NO: 414281 - RNA, 23 nt, Human
uaugcuguucucagugcacucca

SEQ ID NO: 414282 - RNA, 21 nt, Human
uauuuuggguuuuuaucaaau

SEQ ID NO: 414283 - RNA, 24 nt, Human
ucaaagacaccggagggggcacga

SEQ ID NO: 414284 - RNA, 21 nt, Human
ucauccugaucaaagacaccg

SEQ ID NO: 414285 - RNA, 23 nt, Human
uggguuuuuaucaaauucagcuc

SEQ ID NO: 414286 - RNA, 24 nt, Human
uuaauuuaugcaaaguauuuccuu

SEQ ID NO: 414287 - RNA, 19 nt, Human
uuggaaaugacuagggaau

SEQ ID NO: 414288 - RNA, 19 nt, Human
aaaaauggcacaugucauc

SEQ ID NO: 414289 - RNA, 23 nt, Human
aaauacaccacccaccaauuuca

SEQ ID NO: 414290 - RNA, 18 nt, Human
aagcacucuggggcugau

SEQ ID NO: 414291 - RNA, 24 nt, Human
aagcaggacagagaugaggacuga

SEQ ID NO: 414292 - RNA, 23 nt, Human
acaaagcuucccuucuuuaaaca

SEQ ID NO: 414293 - RNA, 18 nt, Human
caaagacaccggaggggg

SEQ ID NO: 414294 - RNA, 25 nt, Human
cacucccaaacaggccauguuucag

SEQ ID NO: 414295 - RNA, 23 nt, Human
cagcuccauuugacauaagcaau

SEQ ID NO: 414296 - RNA, 24 nt, Human
cagcuccauuugacauaagcaaug

SEQ ID NO: 414297 - RNA, 20 nt, Human
cauaugcuguucucagugca

SEQ ID NO: 414298 - RNA, 20 nt, Human
cauccugaucaaagacaccg

SEQ ID NO: 414299 - RNA, 20 nt, Human
ccagccugucugcacguccu

SEQ ID NO: 414300 - RNA, 18 nt, Human
cccaaagcaagaaaucau

SEQ ID NO: 414301 - RNA, 24 nt, Human
ccuaugaagcaggacagagaugag

SEQ ID NO: 414302 - RNA, 19 nt, Human
cugcagaagccaaaagaua

SEQ ID NO: 414303 - RNA, 23 nt, Human
gcagcggugggaccaccuuugaa

SEQ ID NO: 414304 - RNA, 23 nt, Human
uaaacacacaagguggcaccuau

SEQ ID NO: 414305 - RNA, 23 nt, Human
uaauuuaugcaaaguauuuccuu

SEQ ID NO: 414306 - RNA, 22 nt, Human
uaccuuauuucccacccacuuc

SEQ ID NO: 414307 - RNA, 23 nt, Human
uaugcuguucucagugcacucca

SEQ ID NO: 414308 - RNA, 21 nt, Human
uauuuuggguuuuuaucaaau

SEQ ID NO: 414309 - RNA, 24 nt, Human
ucaaagacaccggagggggcacga

SEQ ID NO: 414310 - RNA, 23 nt, Human
ucugcagaagccaaaagauaaga

SEQ ID NO: 414311 - RNA, 23 nt, Human
uggguuuuuaucaaauucagcuc

SEQ ID NO: 414312 - RNA, 24 nt, Human
uuaauuuaugcaaaguauuuccuu

SEQ ID NO: 414313 - RNA, 21 nt, Human
uucucaaauacaccacccacc

SEQ ID NO: 414314 - RNA, 19 nt, Human
uuggaaaugacuagggaau

SEQ ID NO: 414315 - RNA, 21 nt, Human
uuuaucaaauucagcuccauu

SEQ ID NO: 414316 - RNA, 19 nt, Human
aaaaauggcacaugucauc

SEQ ID NO: 414317 - RNA, 23 nt, Human
aaauacaccacccaccaauuuca

SEQ ID NO: 414318 - RNA, 18 nt, Human
aagcacucuggggcugau

SEQ ID NO: 414319 - RNA, 24 nt, Human
aagcaggacagagaugaggacuga

SEQ ID NO: 414320 - RNA, 23 nt, Human
acaaagcuucccuucuuuaaaca

SEQ ID NO: 414321 - RNA, 18 nt, Human
caaagacaccggaggggg

SEQ ID NO: 414322 - RNA, 25 nt, Human
cacucccaaacaggccauguuucag

SEQ ID NO: 414323 - RNA, 23 nt, Human
cagcuccauuugacauaagcaau

SEQ ID NO: 414324 - RNA, 24 nt, Human
cagcuccauuugacauaagcaaug

SEQ ID NO: 414325 - RNA, 20 nt, Human
cauaugcuguucucagugca

SEQ ID NO: 414326 - RNA, 20 nt, Human
ccagccugucugcacguccu

SEQ ID NO: 414327 - RNA, 18 nt, Human
cccaaagcaagaaaucau

SEQ ID NO: 414328 - RNA, 24 nt, Human
ccuaugaagcaggacagagaugag

SEQ ID NO: 414329 - RNA, 27 nt, Human
ccuaugaagcaggacagagaugaggac

SEQ ID NO: 414330 - RNA, 19 nt, Human
cugcagaagccaaaagaua

SEQ ID NO: 414331 - RNA, 22 nt, Human
cuucucaaauacaccacccacc

SEQ ID NO: 414332 - RNA, 23 nt, Human
gcagcggugggaccaccuuugaa

SEQ ID NO: 414333 - RNA, 23 nt, Human
uaaacacacaagguggcaccuau

SEQ ID NO: 414334 - RNA, 23 nt, Human
uaauuuaugcaaaguauuuccuu

SEQ ID NO: 414335 - RNA, 22 nt, Human
uaccuuauuucccacccacuuc

SEQ ID NO: 414336 - RNA, 23 nt, Human
uaugcuguucucagugcacucca

SEQ ID NO: 414337 - RNA, 21 nt, Human
uauuuuggguuuuuaucaaau

SEQ ID NO: 414338 - RNA, 24 nt, Human
ucaaagacaccggagggggcacga

SEQ ID NO: 414339 - RNA, 21 nt, Human
ucauccugaucaaagacaccg

SEQ ID NO: 414340 - RNA, 23 nt, Human
ucugcagaagccaaaagauaaga

SEQ ID NO: 414341 - RNA, 23 nt, Human
uggguuuuuaucaaauucagcuc

SEQ ID NO: 414342 - RNA, 24 nt, Human
uuaauuuaugcaaaguauuuccuu

SEQ ID NO: 414343 - RNA, 19 nt, Human
uuggaaaugacuagggaau

SEQ ID NO: 414344 - RNA, 21 nt, Human
uuuaucaaauucagcuccauu

SEQ ID NO: 414345 - RNA, 20 nt, Human
caggauuuugccaaacuuaa

SEQ ID NO: 414346 - RNA, 20 nt, Human
uugaugcagaagauuugaug

SEQ ID NO: 414347 - RNA, 22 nt, Human
cuugcauaacaaucuuuucuuu

SEQ ID NO: 414348 - RNA, 21 nt, Human
ucuugcuggaauaaacugaag

SEQ ID NO: 414349 - RNA, 23 nt, Human
uguccuaucuaucugguuuucca

SEQ ID NO: 414350 - RNA, 23 nt, Human
uuuuuuuuuuuuuugucacagga

SEQ ID NO: 414351 - RNA, 24 nt, Human
uuuuuuuuuuuuuuuugucacagg

SEQ ID NO: 414352 - RNA, 19 nt, Human
uuuuuuuuuuuuuuuuugu

SEQ ID NO: 414353 - RNA, 20 nt, Human
uuuuuuuuuuuuuuuuuugg

SEQ ID NO: 414354 - RNA, 22 nt, Human
acaggaaaaaggaaauccucca

SEQ ID NO: 414355 - RNA, 18 nt, Human
acccuccaugcugaaaua

SEQ ID NO: 414356 - RNA, 21 nt, Human
aggaaaaaggaaauccuccau

SEQ ID NO: 414357 - RNA, 24 nt, Human
aggaaauccuccauuuaaaacccu

SEQ ID NO: 414358 - RNA, 21 nt, Human
aggaggagucccaucuuucag

SEQ ID NO: 414359 - RNA, 23 nt, Human
cauccaguaacucgucauuuaac

SEQ ID NO: 414360 - RNA, 18 nt, Human
ccccccauuguauuuuuc

SEQ ID NO: 414361 - RNA, 23 nt, Human
cccuccaugcugaaauaaaggag

SEQ ID NO: 414362 - RNA, 22 nt, Human
ccuccauuuaaaacccuccaug

SEQ ID NO: 414363 - RNA, 24 nt, Human
cuccaaaugcuauccuucccccca

SEQ ID NO: 414364 - RNA, 21 nt, Human
gaguuguauuuuuuuuuuuuu

SEQ ID NO: 414365 - RNA, 25 nt, Human
gcugaaauaaaggaggagucccagu

SEQ ID NO: 414366 - RNA, 26 nt, Human
guauuuuuuuuuuuuugcuuuuuuua

SEQ ID NO: 414367 - RNA, 18 nt, Human
uaaguugugaaaagaugu

SEQ ID NO: 414368 - RNA, 21 nt, Human
uauuuuuuuuuuuuugcuuuu

SEQ ID NO: 414369 - RNA, 18 nt, Human
uccaugcugaaauaaagg

SEQ ID NO: 414370 - RNA, 23 nt, Human
ucuccaaaugcuauccuuccccc

SEQ ID NO: 414371 - RNA, 19 nt, Human
ugcagguuagcuacauaug

SEQ ID NO: 414372 - RNA, 18 nt, Human
uggaugacacuuuauuuu

SEQ ID NO: 414373 - RNA, 25 nt, Human
uuucagucauuccacuucaggcuuu

SEQ ID NO: 414374 - RNA, 23 nt, Human
uuucauagcuuaaaaaucauuga

SEQ ID NO: 414375 - RNA, 22 nt, Human
cuugcauaacaaucuuuucuuu

SEQ ID NO: 414376 - RNA, 25 nt, Human
gcuggaauaaacugaugucaaccca

SEQ ID NO: 414377 - RNA, 21 nt, Human
uaccugggugguaaaucucug

SEQ ID NO: 414378 - RNA, 20 nt, Human
ugccacagaauauuucuaac

SEQ ID NO: 414379 - RNA, 30 nt, Human
uucauugccacagaauauuucuaaccauuu

SEQ ID NO: 414380 - RNA, 29 nt, Human
uucuucauugccacagaauauuucuaacu

SEQ ID NO: 414381 - RNA, 18 nt, Human
uuuuuuuuuuuuuuuuug

SEQ ID NO: 414382 - RNA, 24 nt, Human
uuuuuuuuuuuuuuuuuuggcuuu

SEQ ID NO: 414383 - RNA, 22 nt, Human
uuuuuuuuuuuuuuuuuuuggc

SEQ ID NO: 414384 - RNA, 18 nt, Human
acaacacaauccugcaug

SEQ ID NO: 414385 - RNA, 23 nt, Human
caacaacaguuaaaacaacacaa

SEQ ID NO: 414386 - RNA, 24 nt, Human
caauccugcaugaaauggauccaa

SEQ ID NO: 414387 - RNA, 21 nt, Human
cacaauccugcaugaaaugga

SEQ ID NO: 414388 - RNA, 18 nt, Human
cccuaauguuuuccuccu

SEQ ID NO: 414389 - RNA, 22 nt, Human
cucaacaacaguuaaaacaaca

SEQ ID NO: 414390 - RNA, 21 nt, Human
gauacugucaguggacuucuu

SEQ ID NO: 414391 - RNA, 20 nt, Human
ggaacaauaaauuucaauau

SEQ ID NO: 414392 - RNA, 19 nt, Human
uaaaacaacacaauccugc

SEQ ID NO: 414393 - RNA, 24 nt, Human
uaaaacaacacaauccugcaugaa

SEQ ID NO: 414394 - RNA, 25 nt, Human
uaguaaauuuuuuuucauguaaccu

SEQ ID NO: 414395 - RNA, 27 nt, Human
ucaguggacuucuuaauguucuuguuu

SEQ ID NO: 414396 - RNA, 18 nt, Human
uccauguacaauguguga

SEQ ID NO: 414397 - RNA, 19 nt, Human
ucccagcuuccagccucag

SEQ ID NO: 414398 - RNA, 21 nt, Human
ucccuaauguuuuccuccuug

SEQ ID NO: 414399 - RNA, 19 nt, Human
ugaaauggauccaaaguau

SEQ ID NO: 414400 - RNA, 22 nt, Human
ugaaauggauccaaaguaugcu

SEQ ID NO: 414401 - RNA, 24 nt, Human
ugaaauggauccaaaguaugcuga

SEQ ID NO: 414402 - RNA, 18 nt, Human
ugaugcaaugcaaugcuu

SEQ ID NO: 414403 - RNA, 19 nt, Human
ugcugaguauuugcaaaac

SEQ ID NO: 414404 - RNA, 24 nt, Human
uguuuucccuaauguuuuccuccu

SEQ ID NO: 414405 - RNA, 21 nt, Human
uguuuugucacaagaagaaag

SEQ ID NO: 414406 - RNA, 24 nt, Human
uucccuaauguuuuccuccuugac

SEQ ID NO: 414407 - RNA, 24 nt, Human
uuguaauaaacuaaaggaguucau

SEQ ID NO: 414408 - RNA, 21 nt, Human
uuuaauuauuuauuagcuucc

SEQ ID NO: 414409 - RNA, 24 nt, Human
uuuaauuauuuauuagcuuccuca

SEQ ID NO: 414410 - RNA, 18 nt, Human
uuuauuggguuucccagc

SEQ ID NO: 414411 - RNA, 18 nt, Human
uuuccauguacaaugugu

SEQ ID NO: 414412 - RNA, 22 nt, Human
uuuguuuucccuaauguuuucc

SEQ ID NO: 414413 - RNA, 25 nt, Human
uuuuucauguaaccugugaauugga

SEQ ID NO: 414414 - RNA, 23 nt, Human
cacaaucuuucuugcuggaauaa

SEQ ID NO: 414415 - RNA, 25 nt, Human
caucacaaucuuucuugcuggaaua

SEQ ID NO: 414416 - RNA, 22 nt, Human
cauugccacaaaauauuucuaa

SEQ ID NO: 414417 - RNA, 19 nt, Human
cguaguguuuucuucauug

SEQ ID NO: 414418 - RNA, 25 nt, Human
guaguguuuucuucauugccacaaa

SEQ ID NO: 414419 - RNA, 26 nt, Human
guaguguuuucuucauugccacaaaa

SEQ ID NO: 414420 - RNA, 21 nt, Human
ucuugcuggaauaaacugaag

SEQ ID NO: 414421 - RNA, 23 nt, Human
ucuuuuuuuuuuuuuugucucag

SEQ ID NO: 414422 - RNA, 22 nt, Human
ugaacugggugguaaaucucug

SEQ ID NO: 414423 - RNA, 22 nt, Human
ugucucaggaagaaagaaaucu

SEQ ID NO: 414424 - RNA, 29 nt, Human
uucuucauugccacaaaauauuucuaacu

SEQ ID NO: 414425 - RNA, 24 nt, Human
uugccacaaaauauuucuaaccau

SEQ ID NO: 414426 - RNA, 20 nt, Human
uuucuuuuuuuuuuuuuugu

SEQ ID NO: 414427 - RNA, 24 nt, Human
uuucuuuuuuuuuuuuuugucuca

SEQ ID NO: 414428 - RNA, 27 nt, Human
uuuuuuuucuuuuuuuuuuuuuugggg

SEQ ID NO: 414429 - RNA, 21 nt, Human
uuuuuuuuuuuuuugucucag

SEQ ID NO: 414430 - RNA, 22 nt, Human
uuuuuuuuuuuuuugucucagg

SEQ ID NO: 414431 - RNA, 23 nt, Human
aaccugucacucuaaaggacucu

SEQ ID NO: 414432 - RNA, 25 nt, Human
aagaaagagaucaucauucaaagaa

SEQ ID NO: 414433 - RNA, 20 nt, Human
acacggaaagaauccccaga

SEQ ID NO: 414434 - RNA, 25 nt, Human
acagaacaauaaauuacuaaaggaa

SEQ ID NO: 414435 - RNA, 22 nt, Human
agacuugauggaaggagagccu

SEQ ID NO: 414436 - RNA, 22 nt, Human
agcuauuggguccaugauguca

SEQ ID NO: 414437 - RNA, 22 nt, Human
auuugcaagaaagagaucauca

SEQ ID NO: 414438 - RNA, 23 nt, Human
caaacaaaaagagaagaaagaaa

SEQ ID NO: 414439 - RNA, 21 nt, Human
caaagaaguacuugauuuucc

SEQ ID NO: 414440 - RNA, 22 nt, Human
caccaagagaaaauugcauaau

SEQ ID NO: 414441 - RNA, 23 nt, Human
caccaagagaaaauugcauaaua

SEQ ID NO: 414442 - RNA, 21 nt, Human
caggagccuuuugguaucagc

SEQ ID NO: 414443 - RNA, 22 nt, Human
caucauucaaagaaguacuuga

SEQ ID NO: 414444 - RNA, 24 nt, Human
cauuugcaagaaagagaucaucau

SEQ ID NO: 414445 - RNA, 22 nt, Human
cuggaggccacuggacauacac

SEQ ID NO: 414446 - RNA, 20 nt, Human
gaagaugaaucaccucaagg

SEQ ID NO: 414447 - RNA, 19 nt, Human
gauuuuccaaacaaaaaga

SEQ ID NO: 414448 - RNA, 23 nt, Human
gcagugaaugagcuauugggucc

SEQ ID NO: 414449 - RNA, 23 nt, Human
uaaaggaaacaaucauuaauaua

SEQ ID NO: 414450 - RNA, 18 nt, Human
uacaccguaggucguggg

SEQ ID NO: 414451 - RNA, 27 nt, Human
uacagaacaauaaauuacuaaaggaaa

SEQ ID NO: 414452 - RNA, 22 nt, Human
uaggucgugggcagcuggccag

SEQ ID NO: 414453 - RNA, 18 nt, Human
ucaaagaaguacuugauu

SEQ ID NO: 414454 - RNA, 19 nt, Human
ucaaggcagugaaugagcu

SEQ ID NO: 414455 - RNA, 24 nt, Human
ugggaaauagaacucuuuauuuaa

SEQ ID NO: 414456 - RNA, 25 nt, Human
uuaaaaauucucuuucaggacacgg

SEQ ID NO: 414457 - RNA, 26 nt, Human
uucaggacacggaaagaauccccaga

SEQ ID NO: 414458 - RNA, 21 nt, Human
uuuuuuuuuuuuuuuuuuggg

SEQ ID NO: 414459 - RNA, 18 nt, Human
aaaagaaggcaggcugaa

SEQ ID NO: 414460 - RNA, 26 nt, Human
aaaagaaggcaggcugaacaaagcau

SEQ ID NO: 414461 - RNA, 19 nt, Human
aaaagcagcauuuaaagac

SEQ ID NO: 414462 - RNA, 18 nt, Human
aaagacacaggcuguuuc

SEQ ID NO: 414463 - RNA, 18 nt, Human
aaggagaugggggccuca

SEQ ID NO: 414464 - RNA, 19 nt, Human
acagggcuuuccgcuguca

SEQ ID NO: 414465 - RNA, 24 nt, Human
accgucacaagucccauuuugaga

SEQ ID NO: 414466 - RNA, 20 nt, Human
agccauggagcacagggcuu

SEQ ID NO: 414467 - RNA, 23 nt, Human
agggagaaaagaaggcaggcuga

SEQ ID NO: 414468 - RNA, 19 nt, Human
auggagcacagggcuuucc

SEQ ID NO: 414469 - RNA, 19 nt, Human
caggcugaacaaagcauga

SEQ ID NO: 414470 - RNA, 18 nt, Human
cccgcaucaugcccccug

SEQ ID NO: 414471 - RNA, 21 nt, Human
cgcaucaugcccccugcccag

SEQ ID NO: 414472 - RNA, 24 nt, Human
cuuucugcucuucccgcuacuuca

SEQ ID NO: 414473 - RNA, 24 nt, Human
cuuuucuguggcuggagcacuggc

SEQ ID NO: 414474 - RNA, 22 nt, Human
uagauagcaccugcccaaagga

SEQ ID NO: 414475 - RNA, 21 nt, Human
ucugucucugaugucuggugu

SEQ ID NO: 414476 - RNA, 19 nt, Human
ucuguggcuggagcacugg

SEQ ID NO: 414477 - RNA, 18 nt, Human
ugaauuuuucucucuguc

SEQ ID NO: 414478 - RNA, 23 nt, Human
uggcagccauggagcacagggcu

SEQ ID NO: 414479 - RNA, 21 nt, Human
uuucuguggcuggagcacugg

SEQ ID NO: 414480 - RNA, 21 nt, Human
aaaagaaaaaaaaaaucaaag

SEQ ID NO: 414481 - RNA, 21 nt, Human
aaagaaaaaaaaaaucaaagg

SEQ ID NO: 414482 - RNA, 18 nt, Human
agcagugccuccugaccc

SEQ ID NO: 414483 - RNA, 20 nt, Human
agcucagggucaaguucugu

SEQ ID NO: 414484 - RNA, 26 nt, Human
auuuaagcucagggucaaguucuguu

SEQ ID NO: 414485 - RNA, 20 nt, Human
cacgcuccccgcccgcgccc

SEQ ID NO: 414486 - RNA, 19 nt, Human
cagaugagcagugccuccu

SEQ ID NO: 414487 - RNA, 24 nt, Human
cagaugagcagugccuccugaccc

SEQ ID NO: 414488 - RNA, 23 nt, Human
cagccgccgcugggcgcugccgg

SEQ ID NO: 414489 - RNA, 24 nt, Human
ccaguaguaguuggcacaguuuuu

SEQ ID NO: 414490 - RNA, 22 nt, Human
ccgcgcccgcgucggacucccc

SEQ ID NO: 414491 - RNA, 23 nt, Human
ccggugacggggcuggguuuccc

SEQ ID NO: 414492 - RNA, 19 nt, Human
ccuccugaccccuccucug

SEQ ID NO: 414493 - RNA, 20 nt, Human
ccugaccccuccucugucuc

SEQ ID NO: 414494 - RNA, 21 nt, Human
cgcacgcuccccgcccgcgcc

SEQ ID NO: 414495 - RNA, 20 nt, Human
cgccccuccucccgcugccu

SEQ ID NO: 414496 - RNA, 23 nt, Human
cgcccgcgucggacucccuccgc

SEQ ID NO: 414497 - RNA, 21 nt, Human
cgccgcugggcgcugccgggg

SEQ ID NO: 414498 - RNA, 22 nt, Human
cgcucggagcccggugacgggg

SEQ ID NO: 414499 - RNA, 18 nt, Human
cuccccgcccgcgcccgc

SEQ ID NO: 414500 - RNA, 22 nt, Human
cuuuccgcagccgccgcugggc

SEQ ID NO: 414501 - RNA, 21 nt, Human
gagcagugccuccugaccccu

SEQ ID NO: 414502 - RNA, 18 nt, Human
gcccggugacggggcugg

SEQ ID NO: 414503 - RNA, 22 nt, Human
guacaaaaagaaaaaaaaaauc

SEQ ID NO: 414504 - RNA, 18 nt, Human
guuauuuaagcucagggu

SEQ ID NO: 414505 - RNA, 21 nt, Human
uacagaugagcagugccuccc

SEQ ID NO: 414506 - RNA, 20 nt, Human
uccaaaguacaaaaagaaaa

SEQ ID NO: 414507 - RNA, 24 nt, Human
uccaaaguacaaaaagaaaaaaaa

SEQ ID NO: 414508 - RNA, 25 nt, Human
uccaaaguacaaaaagaaaaaaaaa

SEQ ID NO: 414509 - RNA, 28 nt, Human
uccaaaguacaaaaagaaaaaaaaaauc

SEQ ID NO: 414510 - RNA, 20 nt, Human
uccgcagccgccgcugggcg

SEQ ID NO: 414511 - RNA, 22 nt, Human
uccucugucucuuggagauagg

SEQ ID NO: 414512 - RNA, 18 nt, Human
ugaccccuccucugucuc

SEQ ID NO: 414513 - RNA, 18 nt, Human
ugccggggcugaggccgc

SEQ ID NO: 414514 - RNA, 19 nt, Human
uuugucguuccaaaguaca

SEQ ID NO: 414515 - RNA, 21 nt, Human
aaagaccaugagaacuccaga

SEQ ID NO: 414516 - RNA, 24 nt, Human
aacagagugagauccugucucgaa

SEQ ID NO: 414517 - RNA, 20 nt, Human
aacauggcaagaccucaucu

SEQ ID NO: 414518 - RNA, 24 nt, Human
aagcugaggugggaggaucaccug

SEQ ID NO: 414519 - RNA, 24 nt, Human
acagagugagauccugucucgaaa

SEQ ID NO: 414520 - RNA, 18 nt, Human
accagcuaaucuggaagc

SEQ ID NO: 414521 - RNA, 20 nt, Human
acccauucuuacacaggccc

SEQ ID NO: 414522 - RNA, 24 nt, Human
accugggaggucgaggcugcaaug

SEQ ID NO: 414523 - RNA, 18 nt, Human
acugcacuccauccuggg

SEQ ID NO: 414524 - RNA, 24 nt, Human
acugcacuccauccugggcaacag

SEQ ID NO: 414525 - RNA, 23 nt, Human
acuuugagagacugaggcaggag

SEQ ID NO: 414526 - RNA, 24 nt, Human
agaaugaacuuauuauaguaucaa

SEQ ID NO: 414527 - RNA, 24 nt, Human
agacugaggcaggaggaucgcuug

SEQ ID NO: 414528 - RNA, 23 nt, Human
agccuggguaacauggcaagacc

SEQ ID NO: 414529 - RNA, 24 nt, Human
agccuggguaacauggcaagaccu

SEQ ID NO: 414530 - RNA, 22 nt, Human
aggaaggauccucaaaugugga

SEQ ID NO: 414531 - RNA, 23 nt, Human
aggcaggaggaucgcuugagccc

SEQ ID NO: 414532 - RNA, 24 nt, Human
aggcaggaggaucgcuugagccca

SEQ ID NO: 414533 - RNA, 22 nt, Human
aggucgaggcugcaaugagccg

SEQ ID NO: 414534 - RNA, 18 nt, Human
aggugggaggaucaccug

SEQ ID NO: 414535 - RNA, 24 nt, Human
aggugggaggaucaccugggaggu

SEQ ID NO: 414536 - RNA, 24 nt, Human
aguggcucacaccuguaaucccag

SEQ ID NO: 414537 - RNA, 21 nt, Human
caaacaccagucucaaaaaaa

SEQ ID NO: 414538 - RNA, 21 nt, Human
caaauguggaagacccuaacc

SEQ ID NO: 414539 - RNA, 22 nt, Human
caacagagugagauccugucuc

SEQ ID NO: 414540 - RNA, 24 nt, Human
cacaccuguaaucccagcacuuug

SEQ ID NO: 414541 - RNA, 24 nt, Human
caccacugcacuccauccugggca

SEQ ID NO: 414542 - RNA, 18 nt, Human
caccuguaaucccagcac

SEQ ID NO: 414543 - RNA, 19 nt, Human
caccuguaaucccagcacu

SEQ ID NO: 414544 - RNA, 22 nt, Human
cacuccauccugggcaacagag

SEQ ID NO: 414545 - RNA, 23 nt, Human
cacuccauccugggcaacagagu

SEQ ID NO: 414546 - RNA, 23 nt, Human
cacugcacuccauccugggcaac

SEQ ID NO: 414547 - RNA, 24 nt, Human
cacugcacuccauccugggcaaca

SEQ ID NO: 414548 - RNA, 24 nt, Human
cagcacuuugagagacugaggcag

SEQ ID NO: 414549 - RNA, 25 nt, Human
cauggcaagaccucaucucuacaaa

SEQ ID NO: 414550 - RNA, 21 nt, Human
ccacugcacuccauccugggc

SEQ ID NO: 414551 - RNA, 23 nt, Human
ccacugcacuccauccugggcaa

SEQ ID NO: 414552 - RNA, 24 nt, Human
ccacugcacuccauccugggcaac

SEQ ID NO: 414553 - RNA, 24 nt, Human
ccuggguaacauggcaagaccuca

SEQ ID NO: 414554 - RNA, 18 nt, Human
cgcccgcgaagucccgcc

SEQ ID NO: 414555 - RNA, 22 nt, Human
cucacaccuguaaucccagcac

SEQ ID NO: 414556 - RNA, 24 nt, Human
cucacaccuguaaucccagcacuu

SEQ ID NO: 414557 - RNA, 23 nt, Human
cuuucaggaggaccacauaucuu

SEQ ID NO: 414558 - RNA, 22 nt, Human
gaagucccgccucucccugccu

SEQ ID NO: 414559 - RNA, 18 nt, Human
gacgugguggugcaugcc

SEQ ID NO: 414560 - RNA, 24 nt, Human
gaucgcuugagcccaggaguugag

SEQ ID NO: 414561 - RNA, 20 nt, Human
gcugggcacaguggcucaca

SEQ ID NO: 414562 - RNA, 20 nt, Human
ggaguugagaccagccuggg

SEQ ID NO: 414563 - RNA, 23 nt, Human
ggcacaguggcucacaccuguaa

SEQ ID NO: 414564 - RNA, 18 nt, Human
ggcugucuaacaaacacc

SEQ ID NO: 414565 - RNA, 21 nt, Human
ggugcaugccuauagcaccag

SEQ ID NO: 414566 - RNA, 23 nt, Human
ggugcaugccuauagcaccagcu

SEQ ID NO: 414567 - RNA, 21 nt, Human
gugcaugccuauagcaccagc

SEQ ID NO: 414568 - RNA, 22 nt, Human
uaagaaugaacuuauuauagua

SEQ ID NO: 414569 - RNA, 24 nt, Human
uacacaggcccuguggaagaaucc

SEQ ID NO: 414570 - RNA, 19 nt, Human
uauagcaccagcuaaucug

SEQ ID NO: 414571 - RNA, 18 nt, Human
ucaggaggaccacauauc

SEQ ID NO: 414572 - RNA, 19 nt, Human
ucccaggcgccccggcguc

SEQ ID NO: 414573 - RNA, 22 nt, Human
ucccaggcgccccggcguccgg

SEQ ID NO: 414574 - RNA, 20 nt, Human
uccucaaauguggaagaccc

SEQ ID NO: 414575 - RNA, 19 nt, Human
ucgcccgcgaagucccgcc

SEQ ID NO: 414576 - RNA, 20 nt, Human
ucgcuugagcccaggaguug

SEQ ID NO: 414577 - RNA, 20 nt, Human
ucugaaaaauguaucugaag

SEQ ID NO: 414578 - RNA, 22 nt, Human
ugagcccaggaguugagaccag

SEQ ID NO: 414579 - RNA, 24 nt, Human
ugaggcaggaggaucgcuugagcc

SEQ ID NO: 414580 - RNA, 25 nt, Human
ugaggcaggaggaucgcuugagccc

SEQ ID NO: 414581 - RNA, 20 nt, Human
ugaggugggaggaucaccug

SEQ ID NO: 414582 - RNA, 26 nt, Human
ugaggugggaggaucaccugggaggu

SEQ ID NO: 414583 - RNA, 28 nt, Human
ugaggugggaggaucaccugggaggucg

SEQ ID NO: 414584 - RNA, 22 nt, Human
ugcaaugagccgugaucucacc

SEQ ID NO: 414585 - RNA, 25 nt, Human
ugcacuccauccugggcaacagagu

SEQ ID NO: 414586 - RNA, 21 nt, Human
uggaagacccuaacccagaca

SEQ ID NO: 414587 - RNA, 21 nt, Human
uggcucacaccuguaauccca

SEQ ID NO: 414588 - RNA, 24 nt, Human
uggcucacaccuguaaucccagca

SEQ ID NO: 414589 - RNA, 21 nt, Human
ugggcaacagagugagauccu

SEQ ID NO: 414590 - RNA, 24 nt, Human
uuagauggacgugguggugcaugc

SEQ ID NO: 414591 - RNA, 24 nt, Human
uuaggcugggcacaguggcucaca

SEQ ID NO: 414592 - RNA, 20 nt, Human
uucaaacucccaggcgcccc

SEQ ID NO: 414593 - RNA, 20 nt, Human
uucaaugucuucacauugua

SEQ ID NO: 414594 - RNA, 19 nt, Human
uuuccuaaagaccaugaga

SEQ ID NO: 414595 - RNA, 21 nt, Human
aagcugucagacugggucuca

SEQ ID NO: 414596 - RNA, 21 nt, Human
accagguacccuuccucccaa

SEQ ID NO: 414597 - RNA, 21 nt, Human
accagguacccuuccucccaa

SEQ ID NO: 414598 - RNA, 23 nt, Human
acugcaggggcuucaggacuggg

SEQ ID NO: 414599 - RNA, 21 nt, Human
acugggguacagggacagcca

SEQ ID NO: 414600 - RNA, 18 nt, Human
agaacuggagccuccugg

SEQ ID NO: 414601 - RNA, 18 nt, Human
agaacuggagccuccugg

SEQ ID NO: 414602 - RNA, 22 nt, Human
agacguggaggcaaacagccuc

SEQ ID NO: 414603 - RNA, 22 nt, Human
agacguggaggcaaacagccuc

SEQ ID NO: 414604 - RNA, 19 nt, Human
agaggacuugggguugagg

SEQ ID NO: 414605 - RNA, 19 nt, Human
agaggacuugggguugagg

SEQ ID NO: 414606 - RNA, 22 nt, Human
agaggacuugggguugaggggu

SEQ ID NO: 414607 - RNA, 22 nt, Human
agaggacuugggguugaggggu

SEQ ID NO: 414608 - RNA, 23 nt, Human
agccguggggucagggugucccg

SEQ ID NO: 414609 - RNA, 21 nt, Human
agccuccuggggucagggcag

SEQ ID NO: 414610 - RNA, 21 nt, Human
agccuccuggggucagggcag

SEQ ID NO: 414611 - RNA, 22 nt, Human
agccugaaauauccccagccuc

SEQ ID NO: 414612 - RNA, 23 nt, Human
aggcaaacagccucccuacgacc

SEQ ID NO: 414613 - RNA, 23 nt, Human
aggcaaacagccucccuacgacc

SEQ ID NO: 414614 - RNA, 31 nt, Human
aggcccagccaggccgggcaaaggucaggaa

SEQ ID NO: 414615 - RNA, 24 nt, Human
agggcccagacucccuuggguggc

SEQ ID NO: 414616 - RNA, 24 nt, Human
agggcccagacucccuuggguggc

SEQ ID NO: 414617 - RNA, 18 nt, Human
auccccagccucuuucuc

SEQ ID NO: 414618 - RNA, 19 nt, Human
caagucccucucccucccc

SEQ ID NO: 414619 - RNA, 23 nt, Human
caagucccucucccucccgcagc

SEQ ID NO: 414620 - RNA, 22 nt, Human
cacagccuugauaggggaacac

SEQ ID NO: 414621 - RNA, 18 nt, Human
caccagguacccuuccuc

SEQ ID NO: 414622 - RNA, 18 nt, Human
caccagguacccuuccuc

SEQ ID NO: 414623 - RNA, 21 nt, Human
cagaccacagaagagccccag

SEQ ID NO: 414624 - RNA, 21 nt, Human
cagccaaacagccugaaauau

SEQ ID NO: 414625 - RNA, 25 nt, Human
cagccaaacagccugaaauaucccc

SEQ ID NO: 414626 - RNA, 24 nt, Human
caggguccggagcuccuggagaac

SEQ ID NO: 414627 - RNA, 24 nt, Human
caggguccggagcuccuggagaac

SEQ ID NO: 414628 - RNA, 22 nt, Human
ccagcuaaguuguccggaaguc

SEQ ID NO: 414629 - RNA, 22 nt, Human
ccagcuaaguuguccggaaguc

SEQ ID NO: 414630 - RNA, 21 nt, Human
ccaggguggggagaaauggga

SEQ ID NO: 414631 - RNA, 21 nt, Human
ccaugggcugcaaucucagcc

SEQ ID NO: 414632 - RNA, 21 nt, Human
ccaugggcugcaaucucagcc

SEQ ID NO: 414633 - RNA, 26 nt, Human
cccaagcagaggacuugggguugagg

SEQ ID NO: 414634 - RNA, 26 nt, Human
cccaagcagaggacuugggguugagg

SEQ ID NO: 414635 - RNA, 21 nt, Human
cccagcuaaguuguccggaag

SEQ ID NO: 414636 - RNA, 21 nt, Human
cccagcuaaguuguccggaag

SEQ ID NO: 414637 - RNA, 22 nt, Human
cccaggguggggagaaauggga

SEQ ID NO: 414638 - RNA, 22 nt, Human
ccccaggguggggagaaauggg

SEQ ID NO: 414639 - RNA, 25 nt, Human
ccccucauggggagggauggggcua

SEQ ID NO: 414640 - RNA, 26 nt, Human
ccccucauggggagggauggggcuag

SEQ ID NO: 414641 - RNA, 21 nt, Human
ccucccuacgaccccacccca

SEQ ID NO: 414642 - RNA, 21 nt, Human
ccucccuacgaccccacccca

SEQ ID NO: 414643 - RNA, 22 nt, Human
ccucucacaggccuuccuagac

SEQ ID NO: 414644 - RNA, 22 nt, Human
ccucucacaggccuuccuagac

SEQ ID NO: 414645 - RNA, 19 nt, Human
ccugcugcugccgccgcug

SEQ ID NO: 414646 - RNA, 20 nt, Human
ccugcugcugccgccgcugc

SEQ ID NO: 414647 - RNA, 18 nt, Human
ccuggggucagggcagcc

SEQ ID NO: 414648 - RNA, 18 nt, Human
ccuggggucagggcagcc

SEQ ID NO: 414649 - RNA, 21 nt, Human
ccuuaggcagugucuuggccc

SEQ ID NO: 414650 - RNA, 21 nt, Human
ccuuaggcagugucuuggccc

SEQ ID NO: 414651 - RNA, 23 nt, Human
cgccugcugcugccgccgcugcc

SEQ ID NO: 414652 - RNA, 19 nt, Human
cgggcaaaggucaggagcu

SEQ ID NO: 414653 - RNA, 22 nt, Human
cgggcaaaggucaggagcuuga

SEQ ID NO: 414654 - RNA, 21 nt, Human
cucgccugcugcugccgccgc

SEQ ID NO: 414655 - RNA, 19 nt, Human
cugacugcuccucucacag

SEQ ID NO: 414656 - RNA, 19 nt, Human
cugacugcuccucucacag

SEQ ID NO: 414657 - RNA, 19 nt, Human
cugccgccgcugccugcgc

SEQ ID NO: 414658 - RNA, 22 nt, Human
cuggggucagggcagccguggg

SEQ ID NO: 414659 - RNA, 22 nt, Human
cuggggucagggcagccguggg

SEQ ID NO: 414660 - RNA, 22 nt, Human
gaacuggagccuccugggguca

SEQ ID NO: 414661 - RNA, 21 nt, Human
gacguggaggcaaacagccuc

SEQ ID NO: 414662 - RNA, 21 nt, Human
gacguggaggcaaacagccuc

SEQ ID NO: 414663 - RNA, 19 nt, Human
gagcuccuggagaacuccc

SEQ ID NO: 414664 - RNA, 19 nt, Human
gagcuccuggagaacuccc

SEQ ID NO: 414665 - RNA, 20 nt, Human
gagcuugagucccgccacug

SEQ ID NO: 414666 - RNA, 20 nt, Human
gaggggugagcguuggggag

SEQ ID NO: 414667 - RNA, 20 nt, Human
gaggggugagcguuggggag

SEQ ID NO: 414668 - RNA, 19 nt, Human
gccguggggucaggguguc

SEQ ID NO: 414669 - RNA, 21 nt, Human
gccugaaauauccccagccuc

SEQ ID NO: 414670 - RNA, 21 nt, Human
gccugcugcugccgccgcugc

SEQ ID NO: 414671 - RNA, 19 nt, Human
gccuugauaggggaacacu

SEQ ID NO: 414672 - RNA, 19 nt, Human
gccuugauaggggaacacu

SEQ ID NO: 414673 - RNA, 22 nt, Human
gcugccgccgcugccugcgccg

SEQ ID NO: 414674 - RNA, 18 nt, Human
gcugcugccgccgcugcc

SEQ ID NO: 414675 - RNA, 23 nt, Human
ggaacacuauucugaaacuuggg

SEQ ID NO: 414676 - RNA, 23 nt, Human
ggaacacuauucugaaacuuggg

SEQ ID NO: 414677 - RNA, 24 nt, Human
ggacagccaaacagccugaaauau

SEQ ID NO: 414678 - RNA, 19 nt, Human
ggcagccguggggucaggg

SEQ ID NO: 414679 - RNA, 18 nt, Human
ggcaggggacagggaaug

SEQ ID NO: 414680 - RNA, 18 nt, Human
ggcaggggacagggaaug

SEQ ID NO: 414681 - RNA, 25 nt, Human
gguacagggacagccaaacagccug

SEQ ID NO: 414682 - RNA, 21 nt, Human
gucagggugucccgcuguagg

SEQ ID NO: 414683 - RNA, 19 nt, Human
guccggaaguccugacugc

SEQ ID NO: 414684 - RNA, 21 nt, Human
guccggaaguccugacugcuc

SEQ ID NO: 414685 - RNA, 21 nt, Human
guccggaaguccugacugcuc

SEQ ID NO: 414686 - RNA, 19 nt, Human
gugggcaggggacagggaa

SEQ ID NO: 414687 - RNA, 19 nt, Human
gugggcaggggacagggaa

SEQ ID NO: 414688 - RNA, 18 nt, Human
uaacagaaaaggaaaaaa

SEQ ID NO: 414689 - RNA, 23 nt, Human
ucacagccuugauaggggaacac

SEQ ID NO: 414690 - RNA, 26 nt, Human
ucagacccacaagucccucucccucc

SEQ ID NO: 414691 - RNA, 19 nt, Human
ucauccacgaaguagaagc

SEQ ID NO: 414692 - RNA, 21 nt, Human
ucccuuggguggcuuggcagc

SEQ ID NO: 414693 - RNA, 21 nt, Human
ucccuuggguggcuuggcagc

SEQ ID NO: 414694 - RNA, 21 nt, Human
uccggagcuccuggagaacuc

SEQ ID NO: 414695 - RNA, 21 nt, Human
uccggagcuccuggagaacuc

SEQ ID NO: 414696 - RNA, 20 nt, Human
ucgccugcugcugccgccgc

SEQ ID NO: 414697 - RNA, 25 nt, Human
ucgccugcugcugccgccgcugccu

SEQ ID NO: 414698 - RNA, 18 nt, Human
ucuacggaugauauggga

SEQ ID NO: 414699 - RNA, 20 nt, Human
ucucagccagucccucccac

SEQ ID NO: 414700 - RNA, 20 nt, Human
ucucagccagucccucccac

SEQ ID NO: 414701 - RNA, 22 nt, Human
ucucuacggaugauaugggaau

SEQ ID NO: 414702 - RNA, 18 nt, Human
ugaaauauccccagccuc

SEQ ID NO: 414703 - RNA, 19 nt, Human
ugacuggggacaccaggua

SEQ ID NO: 414704 - RNA, 19 nt, Human
ugacuggggacaccaggua

SEQ ID NO: 414705 - RNA, 21 nt, Human
ugacuggggacaccagguacc

SEQ ID NO: 414706 - RNA, 21 nt, Human
ugacuggggacaccagguacc

SEQ ID NO: 414707 - RNA, 19 nt, Human
ugccugaucuagucacagc

SEQ ID NO: 414708 - RNA, 19 nt, Human
ugccugaucuagucacagc

SEQ ID NO: 414709 - RNA, 22 nt, Human
uggagccuccuggggucagggc

SEQ ID NO: 414710 - RNA, 22 nt, Human
uggagccuccuggggucagggc

SEQ ID NO: 414711 - RNA, 25 nt, Human
uugaacagaaaaggaaaaaguuuau

SEQ ID NO: 414712 - RNA, 20 nt, Human
uugguccagcuccuaccaug

SEQ ID NO: 414713 - RNA, 20 nt, Human
uugguccagcuccuaccaug

SEQ ID NO: 414714 - RNA, 23 nt, Human
uuguaaauuuacaacucuaaaug

SEQ ID NO: 414715 - RNA, 23 nt, Human
uuguaaauuuacaacucuaaaug

SEQ ID NO: 414716 - RNA, 21 nt, Human
uuguccggaaguccugacugc

SEQ ID NO: 414717 - RNA, 20 nt, Human
uuuuuuuugaacagaaaagg

SEQ ID NO: 414718 - RNA, 23 nt, Human
uuuuuuuuuuuuuuuuuuaacag

SEQ ID NO: 414719 - RNA, 18 nt, Human
aagccucugccgcgcccc

SEQ ID NO: 414720 - RNA, 18 nt, Human
acagcaaagaugcuuggu

SEQ ID NO: 414721 - RNA, 23 nt, Human
acagcaaagaugcuugguuucuu

SEQ ID NO: 414722 - RNA, 21 nt, Human
agaaggcaguggccacagaug

SEQ ID NO: 414723 - RNA, 23 nt, Human
agaggaaauccaagaaccauguc

SEQ ID NO: 414724 - RNA, 20 nt, Human
agccaggcacaaguuccaca

SEQ ID NO: 414725 - RNA, 20 nt, Human
agccccuaguaccacagucc

SEQ ID NO: 414726 - RNA, 19 nt, Human
aggcagggagacucccagg

SEQ ID NO: 414727 - RNA, 20 nt, Human
aggcucagcugacuacccag

SEQ ID NO: 414728 - RNA, 18 nt, Human
aggguugaauaucagagg

SEQ ID NO: 414729 - RNA, 19 nt, Human
caagccucugccgcgcccc

SEQ ID NO: 414730 - RNA, 21 nt, Human
cacaucccagccccuaguacc

SEQ ID NO: 414731 - RNA, 19 nt, Human
caccgucugagcgaacucc

SEQ ID NO: 414732 - RNA, 22 nt, Human
cagccccuaguaccacaguccu

SEQ ID NO: 414733 - RNA, 19 nt, Human
cagcuaacucccacuggcc

SEQ ID NO: 414734 - RNA, 19 nt, Human
caggcucagcugacuaccc

SEQ ID NO: 414735 - RNA, 20 nt, Human
ccaggcacaaguuccacacc

SEQ ID NO: 414736 - RNA, 23 nt, Human
cccaaauuuuuccuuaaauaucu

SEQ ID NO: 414737 - RNA, 25 nt, Human
cccaaauuuuuccuuaaauaucuuu

SEQ ID NO: 414738 - RNA, 24 nt, Human
cccaagaagaaaauacuccuggau

SEQ ID NO: 414739 - RNA, 18 nt, Human
cccagccccuaguaccac

SEQ ID NO: 414740 - RNA, 21 nt, Human
ccccacaucccagccccuagu

SEQ ID NO: 414741 - RNA, 22 nt, Human
ccccacaucccagccccuagua

SEQ ID NO: 414742 - RNA, 18 nt, Human
ccccuaguaccacagucc

SEQ ID NO: 414743 - RNA, 19 nt, Human
cccgccccaaaucucaccg

SEQ ID NO: 414744 - RNA, 23 nt, Human
ccgccgcugccucggacccgccc

SEQ ID NO: 414745 - RNA, 19 nt, Human
ccgucugagcgaacuccgg

SEQ ID NO: 414746 - RNA, 21 nt, Human
ccucaggaaguccaggaggcu

SEQ ID NO: 414747 - RNA, 19 nt, Human
ccucauggucccggucgca

SEQ ID NO: 414748 - RNA, 24 nt, Human
ccugaagcaucacuccccugccua

SEQ ID NO: 414749 - RNA, 25 nt, Human
cggccccacgggucuggcagcuccu

SEQ ID NO: 414750 - RNA, 21 nt, Human
cuaagccgguuacacagcuaa

SEQ ID NO: 414751 - RNA, 19 nt, Human
cuagaaggcaguggccaca

SEQ ID NO: 414752 - RNA, 18 nt, Human
cucucguuaccggcccca

SEQ ID NO: 414753 - RNA, 18 nt, Human
cugccgcgccccagccgc

SEQ ID NO: 414754 - RNA, 20 nt, Human
cuuaauggaaaaucucucca

SEQ ID NO: 414755 - RNA, 21 nt, Human
gaaacaguuugucucugaccu

SEQ ID NO: 414756 - RNA, 23 nt, Human
gaaacaguuugucucugaccucc

SEQ ID NO: 414757 - RNA, 20 nt, Human
gaggaguggagaggugucua

SEQ ID NO: 414758 - RNA, 21 nt, Human
gaggaguggagaggugucuac

SEQ ID NO: 414759 - RNA, 23 nt, Human
gcacaaguuccacaccuucuaaa

SEQ ID NO: 414760 - RNA, 21 nt, Human
gcauggagauggguagaggug

SEQ ID NO: 414761 - RNA, 22 nt, Human
gccauauuaucaccaccccaaa

SEQ ID NO: 414762 - RNA, 24 nt, Human
gccucugccgcgccccagccgcgc

SEQ ID NO: 414763 - RNA, 18 nt, Human
ggagauggguagaggugg

SEQ ID NO: 414764 - RNA, 20 nt, Human
ggcaagccucugccgcgccc

SEQ ID NO: 414765 - RNA, 25 nt, Human
ggccagggcuucaugacccuuucug

SEQ ID NO: 414766 - RNA, 21 nt, Human
guaugugucuaacuggauaag

SEQ ID NO: 414767 - RNA, 20 nt, Human
guccugaagcaucacucccc

SEQ ID NO: 414768 - RNA, 22 nt, Human
uaccaagaauggcugacacucu

SEQ ID NO: 414769 - RNA, 19 nt, Human
uacuccuggauccuucaac

SEQ ID NO: 414770 - RNA, 18 nt, Human
uagaaggcaguggccaca

SEQ ID NO: 414771 - RNA, 24 nt, Human
uauaauaauuaacaacagcaaaga

SEQ ID NO: 414772 - RNA, 18 nt, Human
ucaggaaguccaggaggc

SEQ ID NO: 414773 - RNA, 23 nt, Human
ucaggcccacccaagaagaaaau

SEQ ID NO: 414774 - RNA, 21 nt, Human
uccaggaggcugcuacagagg

SEQ ID NO: 414775 - RNA, 19 nt, Human
uccaggcuccuucuauagg

SEQ ID NO: 414776 - RNA, 25 nt, Human
ucccagccccuaguaccacaguccu

SEQ ID NO: 414777 - RNA, 20 nt, Human
ucccaggcagguggccccua

SEQ ID NO: 414778 - RNA, 21 nt, Human
ucccucuuuccucucagcagg

SEQ ID NO: 414779 - RNA, 19 nt, Human
uccugaagcaucacucccc

SEQ ID NO: 414780 - RNA, 22 nt, Human
uccuguaacaauggcacauaua

SEQ ID NO: 414781 - RNA, 22 nt, Human
ucucagaaauguuuguccuacu

SEQ ID NO: 414782 - RNA, 20 nt, Human
ucugaccucccaggaagugu

SEQ ID NO: 414783 - RNA, 21 nt, Human
ugaaaagccauauuaucacca

SEQ ID NO: 414784 - RNA, 21 nt, Human
ugacccuuucugugaaaagcc

SEQ ID NO: 414785 - RNA, 18 nt, Human
ugagagagagagagacca

SEQ ID NO: 414786 - RNA, 18 nt, Human
ugagagagagagagacca

SEQ ID NO: 414787 - RNA, 24 nt, Human
ugagcaggacuuuuucuagacugg

SEQ ID NO: 414788 - RNA, 23 nt, Human
ugcaagguggaggacggcuagaa

SEQ ID NO: 414789 - RNA, 20 nt, Human
ugccuagaggagugaggcag

SEQ ID NO: 414790 - RNA, 25 nt, Human
ugccucggacccgccccaaaucuca

SEQ ID NO: 414791 - RNA, 18 nt, Human
uggagccacagaaaauca

SEQ ID NO: 414792 - RNA, 22 nt, Human
ugggaugaggaguggagaggug

SEQ ID NO: 414793 - RNA, 19 nt, Human
uguacagagggaucagagu

SEQ ID NO: 414794 - RNA, 24 nt, Human
uuacacagcuaacucccacuggcc

SEQ ID NO: 414795 - RNA, 21 nt, Human
uuguucaguuucaaagccuug

SEQ ID NO: 414796 - RNA, 25 nt, Human
uuuuuggcuuuuguucaggcccacc

SEQ ID NO: 414797 - RNA, 18 nt, Human
uuuuuuuuuuuuuuuuug

SEQ ID NO: 414798 - RNA, 20 nt, Human
uuuuuuuuuuuuuuuuugcu

SEQ ID NO: 414799 - RNA, 24 nt, Human
uuuuuuuuuuuuuuuuugcuauaa

SEQ ID NO: 414800 - RNA, 18 nt, Human
acacaauuuuucuuaacu

SEQ ID NO: 414801 - RNA, 20 nt, Human
acagaacacugaugggagga

SEQ ID NO: 414802 - RNA, 21 nt, Human
aguuguaucuguuuuccuucu

SEQ ID NO: 414803 - RNA, 18 nt, Human
caaaccguccacagcuuc

SEQ ID NO: 414804 - RNA, 22 nt, Human
caaccaagcgccacacuccacu

SEQ ID NO: 414805 - RNA, 20 nt, Human
caccuggacggccacagacu

SEQ ID NO: 414806 - RNA, 20 nt, Human
cauguacaugggcaguugua

SEQ ID NO: 414807 - RNA, 20 nt, Human
cauucuugccugugaagugg

SEQ ID NO: 414808 - RNA, 18 nt, Human
ccguccacagcuucaacu

SEQ ID NO: 414809 - RNA, 19 nt, Human
ccuggacggccacagacuc

SEQ ID NO: 414810 - RNA, 19 nt, Human
cuccacuucccugauacaa

SEQ ID NO: 414811 - RNA, 24 nt, Human
cugggcagaagcugaauccgugca

SEQ ID NO: 414812 - RNA, 23 nt, Human
gaacaaaaauagaacgagccaug

SEQ ID NO: 414813 - RNA, 22 nt, Human
gaggggagggggacagagagac

SEQ ID NO: 414814 - RNA, 20 nt, Human
gaugggaggauuaucugaga

SEQ ID NO: 414815 - RNA, 23 nt, Human
gcaaacagcugaaagccccacug

SEQ ID NO: 414816 - RNA, 23 nt, Human
gcagaagcugaauccgugcaccg

SEQ ID NO: 414817 - RNA, 21 nt, Human
gcuacagcuuuauucccaaag

SEQ ID NO: 414818 - RNA, 19 nt, Human
uaaaaagcguuuccuagga

SEQ ID NO: 414819 - RNA, 19 nt, Human
uaacucccgugaugaucuc

SEQ ID NO: 414820 - RNA, 24 nt, Human
uacagcuuuauucccaaagggcac

SEQ ID NO: 414821 - RNA, 19 nt, Human
uaccacacagcauacagcc

SEQ ID NO: 414822 - RNA, 23 nt, Human
uagacacaacaaaccguccacag

SEQ ID NO: 414823 - RNA, 24 nt, Human
ucaccuggacggccacagacuccc

SEQ ID NO: 414824 - RNA, 25 nt, Human
ucaucuggauuuccuccucagcugu

SEQ ID NO: 414825 - RNA, 20 nt, Human
uccaauuugauguaaacaac

SEQ ID NO: 414826 - RNA, 18 nt, Human
uccauauaucuggauagc

SEQ ID NO: 414827 - RNA, 20 nt, Human
ucccuccaaggaauaggagu

SEQ ID NO: 414828 - RNA, 18 nt, Human
ugaagugcauuggucuca

SEQ ID NO: 414829 - RNA, 20 nt, Human
ugccugugaagugcauuggu

SEQ ID NO: 414830 - RNA, 18 nt, Human
uugauagcuaaauucaag

SEQ ID NO: 414831 - RNA, 23 nt, Human
uuguagaaauuggguuuguuaag

SEQ ID NO: 414832 - RNA, 19 nt, Human
uuguaucuguuuuccuucu

SEQ ID NO: 414833 - RNA, 19 nt, Human
uuugaacaaaaauagaacg

SEQ ID NO: 414834 - RNA, 23 nt, Human
uuuuguccuucauuuccccuucc

SEQ ID NO: 414835 - RNA, 24 nt, Human
aaaaaccccaacuggacauaaccc

SEQ ID NO: 414836 - RNA, 23 nt, Human
aaaacauccuuaugcugcgaggg

SEQ ID NO: 414837 - RNA, 19 nt, Human
aaagagagccaacugagua

SEQ ID NO: 414838 - RNA, 20 nt, Human
aaagcggacaguaagagccc

SEQ ID NO: 414839 - RNA, 21 nt, Human
aaaggcaagggagauaaagag

SEQ ID NO: 414840 - RNA, 23 nt, Human
aaaucaccccaccccauaaagac

SEQ ID NO: 414841 - RNA, 24 nt, Human
aagcaaaaacaccccaaccagcuc

SEQ ID NO: 414842 - RNA, 19 nt, Human
aagcggacaguaagagccc

SEQ ID NO: 414843 - RNA, 24 nt, Human
aagcggacaguaagagcccagggc

SEQ ID NO: 414844 - RNA, 20 nt, Human
aagggagauaaagagagcca

SEQ ID NO: 414845 - RNA, 18 nt, Human
acccaauaaagaccgucu

SEQ ID NO: 414846 - RNA, 21 nt, Human
agaaaaucaccccaccccaua

SEQ ID NO: 414847 - RNA, 22 nt, Human
agacaaggggaccuuucuaagc

SEQ ID NO: 414848 - RNA, 22 nt, Human
agccaacugaguauuugaccuc

SEQ ID NO: 414849 - RNA, 19 nt, Human
aggaauaacaagacccagc

SEQ ID NO: 414850 - RNA, 18 nt, Human
aggcaaaaccaaggagca

SEQ ID NO: 414851 - RNA, 24 nt, Human
aggccgaagccauguugcagagaa

SEQ ID NO: 414852 - RNA, 20 nt, Human
agggagauaaagagagccaa

SEQ ID NO: 414853 - RNA, 21 nt, Human
agucuaaccaggcaaaaccaa

SEQ ID NO: 414854 - RNA, 23 nt, Human
auucccuuuucuccucuuccuug

SEQ ID NO: 414855 - RNA, 20 nt, Human
caaaauucccuuuucuccuc

SEQ ID NO: 414856 - RNA, 18 nt, Human
caagaucaaggauggagg

SEQ ID NO: 414857 - RNA, 21 nt, Human
caagggagauaaagagagcca

SEQ ID NO: 414858 - RNA, 26 nt, Human
cacccaaggaauaacaagacccagcu

SEQ ID NO: 414859 - RNA, 21 nt, Human
caccccaccccauaaagacaa

SEQ ID NO: 414860 - RNA, 18 nt, Human
caccccauaaagacaaaa

SEQ ID NO: 414861 - RNA, 23 nt, Human
cagcaaaaacagcauugcuaaca

SEQ ID NO: 414862 - RNA, 23 nt, Human
cagcagcuucucaaaggccaccc

SEQ ID NO: 414863 - RNA, 20 nt, Human
cagcuucucaaaggccaccc

SEQ ID NO: 414864 - RNA, 22 nt, Human
cagcuucucaaaggccaccccu

SEQ ID NO: 414865 - RNA, 18 nt, Human
cauaacccuaggagaaaa

SEQ ID NO: 414866 - RNA, 23 nt, Human
cauaacccuaggagaaaaucacc

SEQ ID NO: 414867 - RNA, 22 nt, Human
ccaacacccaaggaauaacaag

SEQ ID NO: 414868 - RNA, 18 nt, Human
ccaaggaauaacaagacc

SEQ ID NO: 414869 - RNA, 18 nt, Human
ccacccgggaaccggcga

SEQ ID NO: 414870 - RNA, 19 nt, Human
cccaaggaauaacaagacc

SEQ ID NO: 414871 - RNA, 20 nt, Human
cccuaggagaaaaucacccc

SEQ ID NO: 414872 - RNA, 19 nt, Human
ccucaucugucuucugcau

SEQ ID NO: 414873 - RNA, 25 nt, Human
ccuuaaaaaccccaacuggacauaa

SEQ ID NO: 414874 - RNA, 21 nt, Human
cgacuaacagcaaaaacagca

SEQ ID NO: 414875 - RNA, 18 nt, Human
cgccacccgggaaccggc

SEQ ID NO: 414876 - RNA, 25 nt, Human
cgcgcgccacccgggaaccggcgag

SEQ ID NO: 414877 - RNA, 19 nt, Human
cuaacccgacuaacagcaa

SEQ ID NO: 414878 - RNA, 22 nt, Human
cuaacccgacuaacagcaaaaa

SEQ ID NO: 414879 - RNA, 23 nt, Human
cucaaaggccaccccucagcuga

SEQ ID NO: 414880 - RNA, 23 nt, Human
cucacagcaaucuuaaccucuac

SEQ ID NO: 414881 - RNA, 27 nt, Human
cugccuuaaaaaccccaacuggacaua

SEQ ID NO: 414882 - RNA, 19 nt, Human
gacuaacagcaaaaacagc

SEQ ID NO: 414883 - RNA, 22 nt, Human
gagccaacucuaacccgacuaa

SEQ ID NO: 414884 - RNA, 21 nt, Human
gaggcuagcccuggcuguggc

SEQ ID NO: 414885 - RNA, 22 nt, Human
gauggaggugcagacccaauaa

SEQ ID NO: 414886 - RNA, 18 nt, Human
gcuagcccuggcuguggc

SEQ ID NO: 414887 - RNA, 20 nt, Human
ggaacuggcagagacuggca

SEQ ID NO: 414888 - RNA, 18 nt, Human
ggcugggaggcgcccuau

SEQ ID NO: 414889 - RNA, 21 nt, Human
gggcugggcccgguccgggaa

SEQ ID NO: 414890 - RNA, 25 nt, Human
guaagagcccagggcugggcccggu

SEQ ID NO: 414891 - RNA, 19 nt, Human
uaaaaaaaacaguacuugg

SEQ ID NO: 414892 - RNA, 24 nt, Human
uaaaaaaaggacugggaaaaauau

SEQ ID NO: 414893 - RNA, 19 nt, Human
uaaaaaccccaacuggaca

SEQ ID NO: 414894 - RNA, 24 nt, Human
uaaaaaccccaacuggacauaacc

SEQ ID NO: 414895 - RNA, 20 nt, Human
uaaagagagccaacugagua

SEQ ID NO: 414896 - RNA, 22 nt, Human
uaacaaaccucgcguagagcca

SEQ ID NO: 414897 - RNA, 18 nt, Human
uaacccgacuaacagcaa

SEQ ID NO: 414898 - RNA, 21 nt, Human
uaacccgacuaacagcaaaaa

SEQ ID NO: 414899 - RNA, 25 nt, Human
uaagcaaaaacaccccaaucaacgg

SEQ ID NO: 414900 - RNA, 18 nt, Human
uagagccaacucuaaccc

SEQ ID NO: 414901 - RNA, 25 nt, Human
uaggccgaagccauguugcagagaa

SEQ ID NO: 414902 - RNA, 18 nt, Human
ucaaaggguagccuuugu

SEQ ID NO: 414903 - RNA, 19 nt, Human
ucccccuuaugcagaguac

SEQ ID NO: 414904 - RNA, 21 nt, Human
uccuggacagccugguucaug

SEQ ID NO: 414905 - RNA, 20 nt, Human
ucuaaacuggagcggggaga

SEQ ID NO: 414906 - RNA, 19 nt, Human
ucugucuucugcauauuuu

SEQ ID NO: 414907 - RNA, 19 nt, Human
ugaaagucuaaccaggcaa

SEQ ID NO: 414908 - RNA, 19 nt, Human
ugagacaaggggaccuuuc

SEQ ID NO: 414909 - RNA, 24 nt, Human
ugcgaggggccugaggacuccuuc

SEQ ID NO: 414910 - RNA, 19 nt, Human
ugcugccuuaaaaacccca

SEQ ID NO: 414911 - RNA, 20 nt, Human
uggucaaaggguagccuuug

SEQ ID NO: 414912 - RNA, 21 nt, Human
uucaccauaaaggcaagggag

SEQ ID NO: 414913 - RNA, 22 nt, Human
uuccuggacagccugguucaug

SEQ ID NO: 414914 - RNA, 20 nt, Human
uugugguuggauacagcugc

SEQ ID NO: 414915 - RNA, 24 nt, Human
uuuuuuuuuuuuuuaaacuuuuaa

SEQ ID NO: 414916 - RNA, 20 nt, Human
aaagaagggcaauccggugg

SEQ ID NO: 414917 - RNA, 18 nt, Human
aacucuggaaggcugaug

SEQ ID NO: 414918 - RNA, 21 nt, Human
aauuggauguuggcuuguaua

SEQ ID NO: 414919 - RNA, 19 nt, Human
acaacugaagcaaaaaaag

SEQ ID NO: 414920 - RNA, 21 nt, Human
aggaaaagaagggcaauccgg

SEQ ID NO: 414921 - RNA, 19 nt, Human
aggaaaguaggggaugggg

SEQ ID NO: 414922 - RNA, 18 nt, Human
aggcccccgcccugacac

SEQ ID NO: 414923 - RNA, 19 nt, Human
agggaaagggagggaggga

SEQ ID NO: 414924 - RNA, 19 nt, Human
agggagggaggaaaguagg

SEQ ID NO: 414925 - RNA, 20 nt, Human
aggggugagggaggggucag

SEQ ID NO: 414926 - RNA, 23 nt, Human
agucgacgagggagggaaaggga

SEQ ID NO: 414927 - RNA, 20 nt, Human
caacaggaaaagaagggcaa

SEQ ID NO: 414928 - RNA, 19 nt, Human
cacuagggcugggcugggc

SEQ ID NO: 414929 - RNA, 20 nt, Human
cauaaacagcuacaagaacc

SEQ ID NO: 414930 - RNA, 22 nt, Human
cauucugcuuuaagaucagaaa

SEQ ID NO: 414931 - RNA, 19 nt, Human
ccacgauucacagcgucca

SEQ ID NO: 414932 - RNA, 19 nt, Human
cugaagcaaaaaaagaaaa

SEQ ID NO: 414933 - RNA, 18 nt, Human
gagggagggaggaaagua

SEQ ID NO: 414934 - RNA, 22 nt, Human
gccucgggcugcuccaggcccc

SEQ ID NO: 414935 - RNA, 20 nt, Human
gcugggcaacaggaaaagaa

SEQ ID NO: 414936 - RNA, 22 nt, Human
gggagggagggaggaaaguagg

SEQ ID NO: 414937 - RNA, 21 nt, Human
gggcugggcaacaggaaaaga

SEQ ID NO: 414938 - RNA, 23 nt, Human
gggcugggcugggcaacaggaaa

SEQ ID NO: 414939 - RNA, 23 nt, Human
uaacauaaacagcuacaagaacc

SEQ ID NO: 414940 - RNA, 19 nt, Human
uaacugcaacauaugauug

SEQ ID NO: 414941 - RNA, 22 nt, Human
uaagaggauaacuccaccuccc

SEQ ID NO: 414942 - RNA, 22 nt, Human
uaagaucagaaaaaaaucagcc

SEQ ID NO: 414943 - RNA, 22 nt, Human
uagggaggggugagggaggggu

SEQ ID NO: 414944 - RNA, 25 nt, Human
uaucauguauucccucuucuuuaca

SEQ ID NO: 414945 - RNA, 18 nt, Human
ucagaaaaaaaucagcca

SEQ ID NO: 414946 - RNA, 19 nt, Human
uccaggcccccgcccugac

SEQ ID NO: 414947 - RNA, 24 nt, Human
ucuccauauuaacauaaacagcua

SEQ ID NO: 414948 - RNA, 21 nt, Human
ucuucuuuacaacugaagcaa

SEQ ID NO: 414949 - RNA, 22 nt, Human
ugaagcaaaaaaagaaaaggca

SEQ ID NO: 414950 - RNA, 21 nt, Human
ugccucgggcugcuccaggcc

SEQ ID NO: 414951 - RNA, 20 nt, Human
ugccuuaagcagacaguaac

SEQ ID NO: 414952 - RNA, 21 nt, Human
ugcgaccagcaagaaacaguc

SEQ ID NO: 414953 - RNA, 25 nt, Human
uuacaacugaagcaaaaaaagaaaa

SEQ ID NO: 414954 - RNA, 20 nt, Human
uuagucaguuguauacuaac

SEQ ID NO: 414955 - RNA, 23 nt, Human
uuaguuguuccagcacuggagcu

SEQ ID NO: 414956 - RNA, 18 nt, Human
uuucugccuuaagcagac

SEQ ID NO: 414957 - RNA, 20 nt, Human
uuuuuuuuuuuuuuguuuua

SEQ ID NO: 414958 - RNA, 18 nt, Human
uuuuuuuuuuuuuuuuug

SEQ ID NO: 414959 - RNA, 24 nt, Human
uuuuuuuuuuuuuuuuuuuguuuu

SEQ ID NO: 414960 - RNA, 25 nt, Human
aaacaacaaauacuaguuuauaaca

SEQ ID NO: 414961 - RNA, 18 nt, Human
aaaccacaaacacaucca

SEQ ID NO: 414962 - RNA, 22 nt, Human
aaacucaaaaacaggcucugua

SEQ ID NO: 414963 - RNA, 22 nt, Human
aaagggcaauaguugaagcugu

SEQ ID NO: 414964 - RNA, 22 nt, Human
aacaaacaagaacuacucuuca

SEQ ID NO: 414965 - RNA, 20 nt, Human
aacaggaaugguaaaaucug

SEQ ID NO: 414966 - RNA, 21 nt, Human
aaccguaaugguuacaaaccc

SEQ ID NO: 414967 - RNA, 23 nt, Human
aauaaaguaucuaaaacucaaaa

SEQ ID NO: 414968 - RNA, 19 nt, Human
acaaaccacaaacacaucc

SEQ ID NO: 414969 - RNA, 21 nt, Human
acaaagguuguaacaaacaag

SEQ ID NO: 414970 - RNA, 21 nt, Human
acuacucuucacucgacacca

SEQ ID NO: 414971 - RNA, 22 nt, Human
auaaaguaucuaaaacucaaaa

SEQ ID NO: 414972 - RNA, 24 nt, Human
cacaaacacauccauccagagacu

SEQ ID NO: 414973 - RNA, 22 nt, Human
cacaaagguuguaacaaacaag

SEQ ID NO: 414974 - RNA, 23 nt, Human
caccauggcucagaggccaccga

SEQ ID NO: 414975 - RNA, 19 nt, Human
cagaggccaccgagaagca

SEQ ID NO: 414976 - RNA, 23 nt, Human
cauggaggccaggugcgugcagu

SEQ ID NO: 414977 - RNA, 24 nt, Human
ccgagccgcagccgccagcccccg

SEQ ID NO: 414978 - RNA, 23 nt, Human
cgagccgcagccgccagcccccg

SEQ ID NO: 414979 - RNA, 20 nt, Human
cucuccgccgagccgcagcc

SEQ ID NO: 414980 - RNA, 25 nt, Human
cuguaugcuauaucuaguuuauccc

SEQ ID NO: 414981 - RNA, 22 nt, Human
gaauaaguucuccuucccaguc

SEQ ID NO: 414982 - RNA, 22 nt, Human
ggaaugguaaaaucugugagaa

SEQ ID NO: 414983 - RNA, 19 nt, Human
ggaggccaggugcgugcag

SEQ ID NO: 414984 - RNA, 20 nt, Human
uaaaacacagcacgcuuugc

SEQ ID NO: 414985 - RNA, 18 nt, Human
uaaaacucaaaaacaggc

SEQ ID NO: 414986 - RNA, 21 nt, Human
uaaaguaucuaaaacucaaaa

SEQ ID NO: 414987 - RNA, 23 nt, Human
uaacaggaaugguaaaaucugug

SEQ ID NO: 414988 - RNA, 21 nt, Human
uaaggaauaaguucuccuucc

SEQ ID NO: 414989 - RNA, 18 nt, Human
uaccaggacuaaaacaca

SEQ ID NO: 414990 - RNA, 19 nt, Human
uaccaggacuaaaacacag

SEQ ID NO: 414991 - RNA, 22 nt, Human
uccuaccaggacuaaaacacag

SEQ ID NO: 414992 - RNA, 23 nt, Human
ucugcucaauuuaauacaagauc

SEQ ID NO: 414993 - RNA, 23 nt, Human
ucugcuuacaaacgaaugaaacc

SEQ ID NO: 414994 - RNA, 21 nt, Human
ugaaacccaaaguggaugucg

SEQ ID NO: 414995 - RNA, 19 nt, Human
ugacugacagcuccucugc

SEQ ID NO: 414996 - RNA, 19 nt, Human
ugccaaaaauacauugaca

SEQ ID NO: 414997 - RNA, 21 nt, Human
uggcuaaacaacaaauacuag

SEQ ID NO: 414998 - RNA, 21 nt, Human
uggcucagaggccaccgagaa

SEQ ID NO: 414999 - RNA, 19 nt, Human
ugggaugcccuugcucguc

SEQ ID NO: 415000 - RNA, 20 nt, Human
uguuggguuuuauauagugu

SEQ ID NO: 415001 - RNA, 23 nt, Human
uucaggacucacacugauccaau

SEQ ID NO: 415002 - RNA, 23 nt, Human
aacagcuuuugauuuuagaacca

SEQ ID NO: 415003 - RNA, 19 nt, Human
aagaugcugaugacaaaac

SEQ ID NO: 415004 - RNA, 21 nt, Human
aagcaaacaaaaaacuaaaac

SEQ ID NO: 415005 - RNA, 19 nt, Human
aagcaaugaaauuguacuu

SEQ ID NO: 415006 - RNA, 25 nt, Human
acagucaggacaccuaaggccaucu

SEQ ID NO: 415007 - RNA, 23 nt, Human
accccgggcacaaacggcucccg

SEQ ID NO: 415008 - RNA, 20 nt, Human
acggcucccgggaagcuccc

SEQ ID NO: 415009 - RNA, 24 nt, Human
agauuccugcuuugacacaagacu

SEQ ID NO: 415010 - RNA, 18 nt, Human
aggacacuggauacagaa

SEQ ID NO: 415011 - RNA, 22 nt, Human
caaaagcaaugaaauuguacuu

SEQ ID NO: 415012 - RNA, 20 nt, Human
caaggacaugcuuguugcuu

SEQ ID NO: 415013 - RNA, 25 nt, Human
caaugucaacacuuaucaucaacaa

SEQ ID NO: 415014 - RNA, 18 nt, Human
cagcacagcggcucccuu

SEQ ID NO: 415015 - RNA, 21 nt, Human
cagcacagcggcucccuuucu

SEQ ID NO: 415016 - RNA, 23 nt, Human
cagcggcucccuuucucucuauu

SEQ ID NO: 415017 - RNA, 19 nt, Human
cggaacaaggcuucaaagc

SEQ ID NO: 415018 - RNA, 19 nt, Human
cucagaucaugagaccuaa

SEQ ID NO: 415019 - RNA, 22 nt, Human
cucauauaagcaaacaaaaaac

SEQ ID NO: 415020 - RNA, 24 nt, Human
cuuggccggaacgggguuaccccg

SEQ ID NO: 415021 - RNA, 26 nt, Human
gacagucaggacaccuaaggccaucu

SEQ ID NO: 415022 - RNA, 21 nt, Human
gcgacucugcuccacccaaau

SEQ ID NO: 415023 - RNA, 24 nt, Human
gcucccuuucucucuauucuuugc

SEQ ID NO: 415024 - RNA, 24 nt, Human
guugcuucuacacuacccaauguc

SEQ ID NO: 415025 - RNA, 18 nt, Human
uaacgugugcucuuuggc

SEQ ID NO: 415026 - RNA, 20 nt, Human
uaacgugugcucuuuggcuu

SEQ ID NO: 415027 - RNA, 18 nt, Human
uacaaggacaugcuuguu

SEQ ID NO: 415028 - RNA, 21 nt, Human
uaccccgggcacaaacggcuc

SEQ ID NO: 415029 - RNA, 23 nt, Human
uagaaccagcucuuacuuuucuc

SEQ ID NO: 415030 - RNA, 19 nt, Human
uagaucggaacaaggcuuc

SEQ ID NO: 415031 - RNA, 21 nt, Human
ucaaagcgacucugcuccacc

SEQ ID NO: 415032 - RNA, 22 nt, Human
ucaacaauacaauagaauuaga

SEQ ID NO: 415033 - RNA, 20 nt, Human
ugacaaaacacgaaguuuaa

SEQ ID NO: 415034 - RNA, 25 nt, Human
ugacaaaacacgaaguuuaaaaaua

SEQ ID NO: 415035 - RNA, 26 nt, Human
uguccuugccgucaccuuuuucugac

SEQ ID NO: 415036 - RNA, 21 nt, Human
ugugaugaaguccucacuuga

SEQ ID NO: 415037 - RNA, 23 nt, Human
uucacuguaccuguacuacaagg

SEQ ID NO: 415038 - RNA, 19 nt, Human
uucagaaaauucaauucag

SEQ ID NO: 415039 - RNA, 21 nt, Human
aaacacauacuucaagguaug

SEQ ID NO: 415040 - RNA, 24 nt, Human
aaagugcugggauuacaggcauga

SEQ ID NO: 415041 - RNA, 21 nt, Human
aacguggaauauuaggagaga

SEQ ID NO: 415042 - RNA, 24 nt, Human
aagaauuuccuucaggaccacaaa

SEQ ID NO: 415043 - RNA, 21 nt, Human
aaggagguaugguggcaacac

SEQ ID NO: 415044 - RNA, 19 nt, Human
aaguagcuaggauuacagg

SEQ ID NO: 415045 - RNA, 23 nt, Human
aaguaguuauuaugcauuuuuca

SEQ ID NO: 415046 - RNA, 19 nt, Human
aagugcugggauuacaggc

SEQ ID NO: 415047 - RNA, 21 nt, Human
aagugcugggauuacaggcau

SEQ ID NO: 415048 - RNA, 26 nt, Human
aagugcugggauuacaggcaugagcc

SEQ ID NO: 415049 - RNA, 22 nt, Human
acaaauguugaguuauaagaau

SEQ ID NO: 415050 - RNA, 19 nt, Human
acaagcugaaggcaagcgc

SEQ ID NO: 415051 - RNA, 21 nt, Human
acaggcaccuugucugucccc

SEQ ID NO: 415052 - RNA, 24 nt, Human
accauguuggccaggcuggucuug

SEQ ID NO: 415053 - RNA, 23 nt, Human
accucggccucccaaagugcugg

SEQ ID NO: 415054 - RNA, 18 nt, Human
acgggguuucaccauguu

SEQ ID NO: 415055 - RNA, 23 nt, Human
acgggguuucaccauguuggcca

SEQ ID NO: 415056 - RNA, 24 nt, Human
acgggguuucaccauguuggccag

SEQ ID NO: 415057 - RNA, 22 nt, Human
agaauuuccuucaggaccacaa

SEQ ID NO: 415058 - RNA, 24 nt, Human
aggugaucugcccaccucggccuc

SEQ ID NO: 415059 - RNA, 23 nt, Human
aguagcuaggauuacaggcaccu

SEQ ID NO: 415060 - RNA, 23 nt, Human
auacaggcagauugcuagccaaa

SEQ ID NO: 415061 - RNA, 25 nt, Human
auuaaaaauaagcagggauggaagu

SEQ ID NO: 415062 - RNA, 24 nt, Human
caaagugcugggauuacaggcaug

SEQ ID NO: 415063 - RNA, 22 nt, Human
caagugauucuccugcguuagc

SEQ ID NO: 415064 - RNA, 20 nt, Human
cacacuuuuaauuaauggaa

SEQ ID NO: 415065 - RNA, 21 nt, Human
caccauguuggccaggcuggu

SEQ ID NO: 415066 - RNA, 23 nt, Human
caccauguuggccaggcuggucu

SEQ ID NO: 415067 - RNA, 24 nt, Human
caccauguuggccaggcuggucuu

SEQ ID NO: 415068 - RNA, 27 nt, Human
caccauguuggccaggcuggucuugaa

SEQ ID NO: 415069 - RNA, 21 nt, Human
cacgccuggcuaauuuuugua

SEQ ID NO: 415070 - RNA, 18 nt, Human
cacugcaaccucugucuc

SEQ ID NO: 415071 - RNA, 21 nt, Human
caggcaccugccaucacgccu

SEQ ID NO: 415072 - RNA, 19 nt, Human
caggcaccuugucuguccc

SEQ ID NO: 415073 - RNA, 24 nt, Human
cauguuggccaggcuggucuugaa

SEQ ID NO: 415074 - RNA, 23 nt, Human
ccaaagugcugggauuacaggca

SEQ ID NO: 415075 - RNA, 24 nt, Human
ccaaagugcugggauuacaggcau

SEQ ID NO: 415076 - RNA, 21 nt, Human
ccaaguagcuaggauuacagg

SEQ ID NO: 415077 - RNA, 23 nt, Human
ccaaguagcuaggauuacaggca

SEQ ID NO: 415078 - RNA, 24 nt, Human
cccaaagugcugggauuacaggca

SEQ ID NO: 415079 - RNA, 19 nt, Human
cccacaagcugaaggcaag

SEQ ID NO: 415080 - RNA, 24 nt, Human
ccugaccucaggugaucugcccac

SEQ ID NO: 415081 - RNA, 21 nt, Human
cggggaaggagguaugguggc

SEQ ID NO: 415082 - RNA, 24 nt, Human
cgggguuucaccauguuggccagg

SEQ ID NO: 415083 - RNA, 24 nt, Human
cucacugcaaccucugucucccgg

SEQ ID NO: 415084 - RNA, 22 nt, Human
cugcaaccucugucucccgguc

SEQ ID NO: 415085 - RNA, 21 nt, Human
cuucucuccaguuugaaaugg

SEQ ID NO: 415086 - RNA, 21 nt, Human
gaccacaaauggaaacauagu

SEQ ID NO: 415087 - RNA, 24 nt, Human
gaccucaggugaucugcccaccuc

SEQ ID NO: 415088 - RNA, 24 nt, Human
gagacgggguuucaccauguuggc

SEQ ID NO: 415089 - RNA, 22 nt, Human
gauaauagugagagauacaggc

SEQ ID NO: 415090 - RNA, 18 nt, Human
gauuacaggcaugagccc

SEQ ID NO: 415091 - RNA, 19 nt, Human
gauuacaggcaugagcccc

SEQ ID NO: 415092 - RNA, 20 nt, Human
gcaaccucugucucccgguc

SEQ ID NO: 415093 - RNA, 24 nt, Human
gcaugagcccccacgcccagccca

SEQ ID NO: 415094 - RNA, 23 nt, Human
gcuggucuugaacuccugaccuc

SEQ ID NO: 415095 - RNA, 19 nt, Human
ggagagagcugguuccagc

SEQ ID NO: 415096 - RNA, 19 nt, Human
ggauuacaggcaugagccc

SEQ ID NO: 415097 - RNA, 21 nt, Human
ggcagauugcuagccaaauac

SEQ ID NO: 415098 - RNA, 24 nt, Human
ggcuggucuugaacuccugaccuc

SEQ ID NO: 415099 - RNA, 18 nt, Human
ggggaaggagguauggug

SEQ ID NO: 415100 - RNA, 23 nt, Human
gggguuucaccauguuggccagg

SEQ ID NO: 415101 - RNA, 23 nt, Human
gguacgaucucagcucacugcaa

SEQ ID NO: 415102 - RNA, 19 nt, Human
ggucuugaacuccugaccu

SEQ ID NO: 415103 - RNA, 18 nt, Human
guagagacgggguuucac

SEQ ID NO: 415104 - RNA, 21 nt, Human
guagagacgggguuucaccau

SEQ ID NO: 415105 - RNA, 22 nt, Human
guagagacgggguuucaccaug

SEQ ID NO: 415106 - RNA, 23 nt, Human
gucucccggucaagugauucucc

SEQ ID NO: 415107 - RNA, 24 nt, Human
gugaucugcccaccucggccuccc

SEQ ID NO: 415108 - RNA, 21 nt, Human
uaaaaggaucugaagguggca

SEQ ID NO: 415109 - RNA, 22 nt, Human
uaagacacacacguuagugugg

SEQ ID NO: 415110 - RNA, 23 nt, Human
uaauuuuuguauuuuuguagaga

SEQ ID NO: 415111 - RNA, 22 nt, Human
uacaggcaccugccaucacgcc

SEQ ID NO: 415112 - RNA, 24 nt, Human
uacaggcaugagcccccacgccca

SEQ ID NO: 415113 - RNA, 24 nt, Human
uacugagaucaacagaagcauugg

SEQ ID NO: 415114 - RNA, 22 nt, Human
uacugugauaacacagguuccu

SEQ ID NO: 415115 - RNA, 21 nt, Human
uagagacgggguuucaccaug

SEQ ID NO: 415116 - RNA, 22 nt, Human
uagagacgggguuucaccaugu

SEQ ID NO: 415117 - RNA, 21 nt, Human
uaggauuacaggcaccugcca

SEQ ID NO: 415118 - RNA, 21 nt, Human
uaggauuacaggcaccugcca

SEQ ID NO: 415119 - RNA, 22 nt, Human
uaggauuacaggcaccugccau

SEQ ID NO: 415120 - RNA, 24 nt, Human
uaggauuacaggcaccugccauca

SEQ ID NO: 415121 - RNA, 19 nt, Human
uauauaaauguugcagaau

SEQ ID NO: 415122 - RNA, 19 nt, Human
uaugguggcaacacuuuau

SEQ ID NO: 415123 - RNA, 19 nt, Human
ucacugcaaccucugucuc

SEQ ID NO: 415124 - RNA, 23 nt, Human
ucacugcaaccucugucucccgg

SEQ ID NO: 415125 - RNA, 25 nt, Human
ucaguaaucuuuucccaacuucucu

SEQ ID NO: 415126 - RNA, 24 nt, Human
uccauauaugggagcuacucuaga

SEQ ID NO: 415127 - RNA, 24 nt, Human
ucccaaagugcugggauuacaggc

SEQ ID NO: 415128 - RNA, 24 nt, Human
ucccacaagcugaaggcaagcgcc

SEQ ID NO: 415129 - RNA, 22 nt, Human
ucccggucaagugauucuccug

SEQ ID NO: 415130 - RNA, 21 nt, Human
ucccuguaaaucaccccauuc

SEQ ID NO: 415131 - RNA, 18 nt, Human
ucggccucccaaagugcu

SEQ ID NO: 415132 - RNA, 21 nt, Human
ucgggauuucccacaagcuga

SEQ ID NO: 415133 - RNA, 24 nt, Human
ucuggcucuuucauccaggaugga

SEQ ID NO: 415134 - RNA, 23 nt, Human
ucuugaacuccugaccucaggug

SEQ ID NO: 415135 - RNA, 22 nt, Human
ugaaaggaaauuugaaccacug

SEQ ID NO: 415136 - RNA, 20 nt, Human
ugaagguggcaucaagagaa

SEQ ID NO: 415137 - RNA, 18 nt, Human
ugaccucaggugaucugc

SEQ ID NO: 415138 - RNA, 20 nt, Human
ugaccucaggugaucugccc

SEQ ID NO: 415139 - RNA, 21 nt, Human
ugaccucaggugaucugccca

SEQ ID NO: 415140 - RNA, 24 nt, Human
ugaccucaggugaucugcccaccu

SEQ ID NO: 415141 - RNA, 22 nt, Human
ugagacagagucuggcucuuuc

SEQ ID NO: 415142 - RNA, 19 nt, Human
ugagauccuaaaggaaguc

SEQ ID NO: 415143 - RNA, 19 nt, Human
ugagcccccacgcccagcc

SEQ ID NO: 415144 - RNA, 24 nt, Human
ugaucugcccaccucggccuccca

SEQ ID NO: 415145 - RNA, 20 nt, Human
ugauucuccugcguuagccu

SEQ ID NO: 415146 - RNA, 21 nt, Human
ugcagaugagaaauauuuuga

SEQ ID NO: 415147 - RNA, 20 nt, Human
ugcugggauuacaggcauga

SEQ ID NO: 415148 - RNA, 24 nt, Human
uggaaguaguuauuaugcauuuuu

SEQ ID NO: 415149 - RNA, 21 nt, Human
uggagugcaauagguacgauc

SEQ ID NO: 415150 - RNA, 18 nt, Human
uggcaucaagagaaucac

SEQ ID NO: 415151 - RNA, 24 nt, Human
uggccaggcuggucuugaacuccu

SEQ ID NO: 415152 - RNA, 18 nt, Human
ugggauuacaggcaugag

SEQ ID NO: 415153 - RNA, 19 nt, Human
ugggauuacaggcaugagc

SEQ ID NO: 415154 - RNA, 22 nt, Human
ugggauuacaggcaugagcccc

SEQ ID NO: 415155 - RNA, 23 nt, Human
ugggauuacaggcaugagccccc

SEQ ID NO: 415156 - RNA, 24 nt, Human
ugggauuacaggcaugagccccca

SEQ ID NO: 415157 - RNA, 24 nt, Human
uguagagacgggguuucaccaugu

SEQ ID NO: 415158 - RNA, 21 nt, Human
uuaauggagaauugaggcuac

SEQ ID NO: 415159 - RNA, 19 nt, Human
uuacaggcaccugccauca

SEQ ID NO: 415160 - RNA, 19 nt, Human
uuacaggcaugagccccca

SEQ ID NO: 415161 - RNA, 23 nt, Human
uucaguaaucuuuucccaacuuc

SEQ ID NO: 415162 - RNA, 21 nt, Human
uucucuguuccccugacaaua

SEQ ID NO: 415163 - RNA, 20 nt, Human
uugaguuauaagaauuuccu

SEQ ID NO: 415164 - RNA, 24 nt, Human
uuguagagacgggguuucaccaug

SEQ ID NO: 415165 - RNA, 24 nt, Human
uuucaccauguuggccaggcuggu

SEQ ID NO: 415166 - RNA, 18 nt, Human
uuuguagagacgggguuu

SEQ ID NO: 415167 - RNA, 24 nt, Human
uuuguagagacgggguuucaccau

SEQ ID NO: 415168 - RNA, 21 nt, Human
uuuuuguauuuuuguagagac

SEQ ID NO: 415169 - RNA, 22 nt, Human
aacagcugcauccacagacuuc

SEQ ID NO: 415170 - RNA, 21 nt, Human
aaccagugaggaaaacugaua

SEQ ID NO: 415171 - RNA, 24 nt, Human
aaccaucuucauaacagcugcauc

SEQ ID NO: 415172 - RNA, 20 nt, Human
aaguaaaacaucuucagacc

SEQ ID NO: 415173 - RNA, 22 nt, Human
agcugcauccacagacuucaac

SEQ ID NO: 415174 - RNA, 19 nt, Human
aggaugcaaaaucaaaucu

SEQ ID NO: 415175 - RNA, 25 nt, Human
aucuucauaacagcugcauccacca

SEQ ID NO: 415176 - RNA, 21 nt, Human
caauagacauuuauuuaaagu

SEQ ID NO: 415177 - RNA, 24 nt, Human
cagaccaaauaauucuuaaaauug

SEQ ID NO: 415178 - RNA, 22 nt, Human
cuccaaguagcaguuaaacaca

SEQ ID NO: 415179 - RNA, 20 nt, Human
cuugaaaguuuggaaaaaaa

SEQ ID NO: 415180 - RNA, 21 nt, Human
gaagaggcuauuucucaaucu

SEQ ID NO: 415181 - RNA, 20 nt, Human
ggaauucaaaaacuccagcc

SEQ ID NO: 415182 - RNA, 21 nt, Human
guaaaacaucuucagaccaaa

SEQ ID NO: 415183 - RNA, 19 nt, Human
uaaaguaaaacaucuucag

SEQ ID NO: 415184 - RNA, 18 nt, Human
uaaccaucuucauaacag

SEQ ID NO: 415185 - RNA, 21 nt, Human
uaacuuacggaaguuauaucc

SEQ ID NO: 415186 - RNA, 23 nt, Human
uaacuuacggaaguuauauccuu

SEQ ID NO: 415187 - RNA, 20 nt, Human
uagcaguuaaacacaacuaa

SEQ ID NO: 415188 - RNA, 22 nt, Human
ucaaaaacuccagccauuacaa

SEQ ID NO: 415189 - RNA, 23 nt, Human
uccauaaggauguaacuuacgga

SEQ ID NO: 415190 - RNA, 20 nt, Human
ugaggaaaacugauaaagug

SEQ ID NO: 415191 - RNA, 18 nt, Human
ugcauccacagacuucaa

SEQ ID NO: 415192 - RNA, 22 nt, Human
ugcauccacagacuucaacuac

SEQ ID NO: 415193 - RNA, 21 nt, Human
ugccuauguuggggugcagac

SEQ ID NO: 415194 - RNA, 19 nt, Human
uggcuucugagcuccaagu

SEQ ID NO: 415195 - RNA, 23 nt, Human
uuuaacaguaaagggauucagua

SEQ ID NO: 415196 - RNA, 21 nt, Human
uuuuugauuugucuuuauacu

SEQ ID NO: 415197 - RNA, 18 nt, Human
uuuuuuuuuuuuuuuuug

SEQ ID NO: 415198 - RNA, 19 nt, Human
uuuuuuuuuuuuuuuuuug

SEQ ID NO: 415199 - RNA, 20 nt, Human
agggcuaaaguaccagcgug

SEQ ID NO: 415200 - RNA, 21 nt, Human
caaaccccggcccugcccucu

SEQ ID NO: 415201 - RNA, 18 nt, Human
ccgcagguucgagcccag

SEQ ID NO: 415202 - RNA, 18 nt, Human
cggcgcaggcgcaguacc

SEQ ID NO: 415203 - RNA, 25 nt, Human
cuaaaguaccagcguggaaacuuac

SEQ ID NO: 415204 - RNA, 26 nt, Human
cugcccucuugcuuacauaggcuucc

SEQ ID NO: 415205 - RNA, 23 nt, Human
guacaguuggugcucggccgccu

SEQ ID NO: 415206 - RNA, 18 nt, Human
guccaucuccccauucca

SEQ ID NO: 415207 - RNA, 20 nt, Human
ucagcccgagcagguccgcc

SEQ ID NO: 415208 - RNA, 21 nt, Human
uccacgcguggaagucagagu

SEQ ID NO: 415209 - RNA, 22 nt, Human
uccgcagguucgagcccagggc

SEQ ID NO: 415210 - RNA, 19 nt, Human
ucgagcccagggcuaaagu

SEQ ID NO: 415211 - RNA, 24 nt, Human
ucgagcccagggcuaaaguaccag

SEQ ID NO: 415212 - RNA, 22 nt, Human
uggcacagguuagaggagccga

SEQ ID NO: 415213 - RNA, 23 nt, Human
uggcugacuggcucugaccgcgc

SEQ ID NO: 415214 - RNA, 20 nt, Human
uuguggugggggggggaccc

SEQ ID NO: 415215 - RNA, 18 nt, Human
aaaaaagacaaaugauau

SEQ ID NO: 415216 - RNA, 18 nt, Human
caaaugauauauuagaga

SEQ ID NO: 415217 - RNA, 22 nt, Human
uaccucacuggaaaaaagacaa

SEQ ID NO: 415218 - RNA, 18 nt, Human
uguuugcugcucuggguc

SEQ ID NO: 415219 - RNA, 25 nt, Human
uuaccucacuggaaaaaagacaaau

SEQ ID NO: 415220 - RNA, 19 nt, Human
aaagaagccuaugacuuga

SEQ ID NO: 415221 - RNA, 18 nt, Human
aggaggcgcgggacgcgu

SEQ ID NO: 415222 - RNA, 26 nt, Human
cagaaggcuuccucucaaauaagucu

SEQ ID NO: 415223 - RNA, 22 nt, Human
uaagugaaugccugaaaguauu

SEQ ID NO: 415224 - RNA, 26 nt, Human
uccaaccacggugcaggcgcgaggag

SEQ ID NO: 415225 - RNA, 21 nt, Human
ucuccugaggugacauaaaga

SEQ ID NO: 415226 - RNA, 24 nt, Human
ugacauaaagacugaaagaagccu

SEQ ID NO: 415227 - RNA, 20 nt, Human
uuaacagugucuuuauuaag

SEQ ID NO: 415228 - RNA, 24 nt, Human
uugcaaauacaucaucaauucuua

SEQ ID NO: 415229 - RNA, 25 nt, Human
uuugcaaauacaucaucaauucuua

SEQ ID NO: 415230 - RNA, 23 nt, Human
uaagaagaacugaggauaugggc

SEQ ID NO: 415231 - RNA, 24 nt, Human
uucaacuccgaaacuuuuauuguc

SEQ ID NO: 415232 - RNA, 20 nt, Human
aacaggggcggaagcccccc

SEQ ID NO: 415233 - RNA, 21 nt, Human
aagcuggcuuccacagagggc

SEQ ID NO: 415234 - RNA, 21 nt, Human
agcccccuccccacgcagccc

SEQ ID NO: 415235 - RNA, 20 nt, Human
agcccgaggggccgcggcag

SEQ ID NO: 415236 - RNA, 24 nt, Human
aggcaggagucugacggcagcagc

SEQ ID NO: 415237 - RNA, 22 nt, Human
cagccacccgcgcugggcccca

SEQ ID NO: 415238 - RNA, 19 nt, Human
caggaagcucucacagggc

SEQ ID NO: 415239 - RNA, 26 nt, Human
caggagcaaugacaacaggggcggaa

SEQ ID NO: 415240 - RNA, 21 nt, Human
caggugcuuccacucaggcuu

SEQ ID NO: 415241 - RNA, 19 nt, Human
ccccacgcagcccgagggg

SEQ ID NO: 415242 - RNA, 18 nt, Human
ccccuccccacgcagccc

SEQ ID NO: 415243 - RNA, 20 nt, Human
cucgcgggaccgugcccagg

SEQ ID NO: 415244 - RNA, 21 nt, Human
gcaaugacaacaggggcggaa

SEQ ID NO: 415245 - RNA, 20 nt, Human
gccgcggcagccacccgcgc

SEQ ID NO: 415246 - RNA, 23 nt, Human
gccugaggccagccccaggucag

SEQ ID NO: 415247 - RNA, 20 nt, Human
ggcacccggucggggggcgg

SEQ ID NO: 415248 - RNA, 18 nt, Human
ggcagucacgugcacgug

SEQ ID NO: 415249 - RNA, 22 nt, Human
ggcuaggguuuaagcuggcuuc

SEQ ID NO: 415250 - RNA, 24 nt, Human
ggcuaggguuuaagcuggcuucca

SEQ ID NO: 415251 - RNA, 22 nt, Human
guccuuauagggcacucgcggg

SEQ ID NO: 415252 - RNA, 18 nt, Human
uccacagagggcagucac

SEQ ID NO: 415253 - RNA, 23 nt, Human
uccuuccugcugggcacaggaag

SEQ ID NO: 415254 - RNA, 19 nt, Human
ugaggcaggagucugacgg

SEQ ID NO: 415255 - RNA, 20 nt, Human
ugaggcaggagucugacggc

SEQ ID NO: 415256 - RNA, 23 nt, Human
ugcaggagcaaugacaacagggg

SEQ ID NO: 415257 - RNA, 20 nt, Human
uggcaguccuuauagggcac

SEQ ID NO: 415258 - RNA, 25 nt, Human
ugggcacaggaagcucucacagggc

SEQ ID NO: 415259 - RNA, 20 nt, Human
aaacacacacacacaccccc

SEQ ID NO: 415260 - RNA, 19 nt, Human
aagaaaauuaaaacacaca

SEQ ID NO: 415261 - RNA, 20 nt, Human
acacacccccaaaggggagc

SEQ ID NO: 415262 - RNA, 24 nt, Human
acacacccccaaaggggagcaggg

SEQ ID NO: 415263 - RNA, 22 nt, Human
acccccaaaggggagcagggac

SEQ ID NO: 415264 - RNA, 18 nt, Human
acuguauccacagaaaug

SEQ ID NO: 415265 - RNA, 18 nt, Human
aggcuccccuccuuccca

SEQ ID NO: 415266 - RNA, 19 nt, Human
agguccaggccccgggugg

SEQ ID NO: 415267 - RNA, 19 nt, Human
cacacccccaaaggggagc

SEQ ID NO: 415268 - RNA, 22 nt, Human
cacacccccaaaggggagcagg

SEQ ID NO: 415269 - RNA, 23 nt, Human
cagaaacaagaggugggguggga

SEQ ID NO: 415270 - RNA, 22 nt, Human
cagaggccggcgugggcggcgg

SEQ ID NO: 415271 - RNA, 24 nt, Human
cagcagaggccggcgugggcggcg

SEQ ID NO: 415272 - RNA, 26 nt, Human
caggccccggguggcccccccaaagg

SEQ ID NO: 415273 - RNA, 20 nt, Human
cagggacccagaaacaagag

SEQ ID NO: 415274 - RNA, 18 nt, Human
ccaaguggaggagggcgg

SEQ ID NO: 415275 - RNA, 22 nt, Human
ccccaaaggcuccccuccuucc

SEQ ID NO: 415276 - RNA, 21 nt, Human
ccccaaaggggagcagggacc

SEQ ID NO: 415277 - RNA, 19 nt, Human
cccccaaaggggagcaggg

SEQ ID NO: 415278 - RNA, 18 nt, Human
ccccccaaaggcuccccu

SEQ ID NO: 415279 - RNA, 19 nt, Human
ccccccaaaggcuccccuc

SEQ ID NO: 415280 - RNA, 22 nt, Human
ccccuccuucccaucagcaccc

SEQ ID NO: 415281 - RNA, 24 nt, Human
ccucucugugcuaagggcugggga

SEQ ID NO: 415282 - RNA, 20 nt, Human
cgugggcggcggcggcugcg

SEQ ID NO: 415283 - RNA, 21 nt, Human
cucaguaccuccagagagcag

SEQ ID NO: 415284 - RNA, 23 nt, Human
cucucucuauuuuuuuuuuguca

SEQ ID NO: 415285 - RNA, 25 nt, Human
cuguacccucccucuugccuccagg

SEQ ID NO: 415286 - RNA, 22 nt, Human
gccggggcuuagcgagggccgg

SEQ ID NO: 415287 - RNA, 18 nt, Human
gccuccaggugagaccac

SEQ ID NO: 415288 - RNA, 21 nt, Human
gcggugggcacuguauccaca

SEQ ID NO: 415289 - RNA, 22 nt, Human
ggaggcaccagcgggacguugg

SEQ ID NO: 415290 - RNA, 23 nt, Human
ggaugggcagggaggauaccguu

SEQ ID NO: 415291 - RNA, 18 nt, Human
ggcacuguauccacagaa

SEQ ID NO: 415292 - RNA, 26 nt, Human
ggcagcagaggccggcgugggcggcg

SEQ ID NO: 415293 - RNA, 23 nt, Human
ggcccccccaaaggcuccccucc

SEQ ID NO: 415294 - RNA, 18 nt, Human
ggccggcgugggcggcgg

SEQ ID NO: 415295 - RNA, 22 nt, Human
ggccggcgugggcggcggcggc

SEQ ID NO: 415296 - RNA, 25 nt, Human
gggcagcagaggccggcgugggcga

SEQ ID NO: 415297 - RNA, 25 nt, Human
ggguggcccccccaaaggcuccccu

SEQ ID NO: 415298 - RNA, 21 nt, Human
guacccucccucuugccucca

SEQ ID NO: 415299 - RNA, 21 nt, Human
gugcuaagggcuggggaaggg

SEQ ID NO: 415300 - RNA, 18 nt, Human
gugggcggcggcggcugc

SEQ ID NO: 415301 - RNA, 21 nt, Human
uaaaacacacacacacacccc

SEQ ID NO: 415302 - RNA, 27 nt, Human
uacccucccucuugccuccaggugaga

SEQ ID NO: 415303 - RNA, 19 nt, Human
uccaggccccggguggccc

SEQ ID NO: 415304 - RNA, 19 nt, Human
ugcauagguccaggccccg

SEQ ID NO: 415305 - RNA, 23 nt, Human
ugggcagggaggauaccguuucc

SEQ ID NO: 415306 - RNA, 21 nt, Human
ugggggaggggcauguguccc

SEQ ID NO: 415307 - RNA, 18 nt, Human
uggggugggacguggccc

SEQ ID NO: 415308 - RNA, 20 nt, Human
aaaaagaagaaggaaacagc

SEQ ID NO: 415309 - RNA, 24 nt, Human
aaaaagaagaaggaaacagcaaga

SEQ ID NO: 415310 - RNA, 18 nt, Human
aaaaagacaaauacaaag

SEQ ID NO: 415311 - RNA, 20 nt, Human
aaaaagacaaauacaaagca

SEQ ID NO: 415312 - RNA, 24 nt, Human
aaaaagcauucuccuccugauaaa

SEQ ID NO: 415313 - RNA, 24 nt, Human
aaaagaagaaggaaacagcaagag

SEQ ID NO: 415314 - RNA, 26 nt, Human
aaaagaagaaggaaacagcaagagaa

SEQ ID NO: 415315 - RNA, 22 nt, Human
aaacaaucaggcaaaagcuauc

SEQ ID NO: 415316 - RNA, 23 nt, Human
aaagcauucuccuccugauaaag

SEQ ID NO: 415317 - RNA, 18 nt, Human
aaauaaauaaucaggccc

SEQ ID NO: 415318 - RNA, 19 nt, Human
aagaagaaggaaacagcaa

SEQ ID NO: 415319 - RNA, 21 nt, Human
aagaaggaaacagcaagagaa

SEQ ID NO: 415320 - RNA, 22 nt, Human
aagaaggaaacagcaagagaaa

SEQ ID NO: 415321 - RNA, 23 nt, Human
aagaaggaaacagcaagagaaag

SEQ ID NO: 415322 - RNA, 20 nt, Human
aauggcucuucaacaggacu

SEQ ID NO: 415323 - RNA, 19 nt, Human
accccugguuacucagcaa

SEQ ID NO: 415324 - RNA, 22 nt, Human
acgcugcuguaaccccugguua

SEQ ID NO: 415325 - RNA, 19 nt, Human
acuuuaagugauguugcga

SEQ ID NO: 415326 - RNA, 27 nt, Human
agaaaaagaaaacauuacaucaaauau

SEQ ID NO: 415327 - RNA, 23 nt, Human
agaaucuccaauagcaugagggc

SEQ ID NO: 415328 - RNA, 23 nt, Human
agcagcaggaaugcuggaaggaa

SEQ ID NO: 415329 - RNA, 25 nt, Human
aggaaugcuggaaggaagacuuggg

SEQ ID NO: 415330 - RNA, 18 nt, Human
aggugcaucagcagccag

SEQ ID NO: 415331 - RNA, 19 nt, Human
aguaaaaauaaaacaauac

SEQ ID NO: 415332 - RNA, 23 nt, Human
aguuuuuuagugccuuuaaauuu

SEQ ID NO: 415333 - RNA, 19 nt, Human
auacaaagcacauacuuug

SEQ ID NO: 415334 - RNA, 22 nt, Human
caaaaaagcauucuccuccuga

SEQ ID NO: 415335 - RNA, 21 nt, Human
caaaaagacaaauacaaagca

SEQ ID NO: 415336 - RNA, 22 nt, Human
caaaaagacaaauacaaagcac

SEQ ID NO: 415337 - RNA, 20 nt, Human
caacaggaccgcugucccuc

SEQ ID NO: 415338 - RNA, 20 nt, Human
cacaauguucuucauagaac

SEQ ID NO: 415339 - RNA, 30 nt, Human
cagcaauacuuugaagcaggguacuuuaaa

SEQ ID NO: 415340 - RNA, 24 nt, Human
cagccagucucaaugaaaagcaaa

SEQ ID NO: 415341 - RNA, 22 nt, Human
cauuuugcaaacucauuugcuc

SEQ ID NO: 415342 - RNA, 21 nt, Human
ccaguccccucagugugacaa

SEQ ID NO: 415343 - RNA, 21 nt, Human
ccccucagugugacaaauggc

SEQ ID NO: 415344 - RNA, 24 nt, Human
cuguaaccccugguuacucagcaa

SEQ ID NO: 415345 - RNA, 23 nt, Human
gcccacgccacuugccagcaaua

SEQ ID NO: 415346 - RNA, 21 nt, Human
ggaaacugcagacacguucuc

SEQ ID NO: 415347 - RNA, 24 nt, Human
ggcuguagcagcaggaaugcugga

SEQ ID NO: 415348 - RNA, 22 nt, Human
guaaaguauucugcagagcaaa

SEQ ID NO: 415349 - RNA, 19 nt, Human
uacuuugauccaauaaggc

SEQ ID NO: 415350 - RNA, 24 nt, Human
uagcucaaugguucaauuucuaau

SEQ ID NO: 415351 - RNA, 20 nt, Human
uagcuuucuuacaaugcuuu

SEQ ID NO: 415352 - RNA, 22 nt, Human
uagcuuucuuacaaugcuuuuu

SEQ ID NO: 415353 - RNA, 22 nt, Human
ucaaauaucuguuaggcaugau

SEQ ID NO: 415354 - RNA, 18 nt, Human
ucacagugaaaaaaagaa

SEQ ID NO: 415355 - RNA, 21 nt, Human
ucacagugaaaaaaagaagaa

SEQ ID NO: 415356 - RNA, 23 nt, Human
ucacuugcuuuaccauaguccug

SEQ ID NO: 415357 - RNA, 19 nt, Human
ucaggcccacgccacuugc

SEQ ID NO: 415358 - RNA, 22 nt, Human
ucagugugacaaauggcucuuc

SEQ ID NO: 415359 - RNA, 25 nt, Human
ucaguuagaauauaaucaugauuca

SEQ ID NO: 415360 - RNA, 22 nt, Human
ucauggaugauuaaaugaacau

SEQ ID NO: 415361 - RNA, 22 nt, Human
uccaaaaugacuuucucaugga

SEQ ID NO: 415362 - RNA, 23 nt, Human
ucucauggaugauuaaaugaaca

SEQ ID NO: 415363 - RNA, 20 nt, Human
ugaaacaaucaggcaaaagc

SEQ ID NO: 415364 - RNA, 21 nt, Human
ugaagcaggguacuuuaagug

SEQ ID NO: 415365 - RNA, 20 nt, Human
ugaccgaaacaagagccuca

SEQ ID NO: 415366 - RNA, 18 nt, Human
ugauccaauaaggcugcu

SEQ ID NO: 415367 - RNA, 23 nt, Human
uggaugauuaaaugaacaucuuu

SEQ ID NO: 415368 - RNA, 25 nt, Human
ugggacuuccaaaauauugcgguac

SEQ ID NO: 415369 - RNA, 21 nt, Human
ugguacagaguucaaucuguc

SEQ ID NO: 415370 - RNA, 19 nt, Human
uguaaagggauaugaaaau

SEQ ID NO: 415371 - RNA, 19 nt, Human
uuaacacugaguuuuuuag

SEQ ID NO: 415372 - RNA, 18 nt, Human
uuaccaaggugcaucagc

SEQ ID NO: 415373 - RNA, 27 nt, Human
uuagagaaguuaucuuuucccugggaa

SEQ ID NO: 415374 - RNA, 25 nt, Human
uucacaaaaagacaaauacaaagca

SEQ ID NO: 415375 - RNA, 18 nt, Human
uugauccaauaaggcugc

SEQ ID NO: 415376 - RNA, 19 nt, Human
uugcgauacuccauuuucu

SEQ ID NO: 415377 - RNA, 20 nt, Human
uugcuccaaaaugacuuucu

SEQ ID NO: 415378 - RNA, 21 nt, Human
uuuacauaauaauauauaucu

SEQ ID NO: 415379 - RNA, 26 nt, Human
uuuuacagcuauauugaaaucaugcu

SEQ ID NO: 415380 - RNA, 18 nt, Human
uuuuccuuuccuucacuu

SEQ ID NO: 415381 - RNA, 24 nt, Human
uuuuuuuuuuuuuuuuugccauuu

SEQ ID NO: 415382 - RNA, 28 nt, Human
uuuuuuuuuuuuuuuuuugccauuuuaa

SEQ ID NO: 415383 - RNA, 20 nt, Human
uuuuuuuuuuuuuuuuuugg

SEQ ID NO: 415384 - RNA, 24 nt, Human
aaaaaaaaauccccuuuguggcua

SEQ ID NO: 415385 - RNA, 21 nt, Human
aaaaaaaauccccuuuguggc

SEQ ID NO: 415386 - RNA, 19 nt, Human
aagaaaauagccugcauca

SEQ ID NO: 415387 - RNA, 24 nt, Human
aagcacaacugaggcaggaaugag

SEQ ID NO: 415388 - RNA, 23 nt, Human
aagggaaacaguguuuuauuuua

SEQ ID NO: 415389 - RNA, 23 nt, Human
aauagcgaauugacaccagagca

SEQ ID NO: 415390 - RNA, 21 nt, Human
aaucacccuuuaaagaucuac

SEQ ID NO: 415391 - RNA, 20 nt, Human
acagcacuaaagcagccagc

SEQ ID NO: 415392 - RNA, 22 nt, Human
acggaacagagaacgauuggag

SEQ ID NO: 415393 - RNA, 22 nt, Human
acuccaagaagacagagaggaa

SEQ ID NO: 415394 - RNA, 22 nt, Human
aucacccuuuaaagaucuacag

SEQ ID NO: 415395 - RNA, 18 nt, Human
auuuaaggggaaaaacca

SEQ ID NO: 415396 - RNA, 25 nt, Human
caaccaacuccucacgcaggagacg

SEQ ID NO: 415397 - RNA, 22 nt, Human
caagaaaauagccugcaucaac

SEQ ID NO: 415398 - RNA, 22 nt, Human
cagaaagaacuuuccagggaaa

SEQ ID NO: 415399 - RNA, 21 nt, Human
cagcuaaagacuuacagaacu

SEQ ID NO: 415400 - RNA, 20 nt, Human
cagcugguuccugcacucgu

SEQ ID NO: 415401 - RNA, 19 nt, Human
cagggaaaagaagcacaac

SEQ ID NO: 415402 - RNA, 22 nt, Human
cagggaaaagaagcacaacuga

SEQ ID NO: 415403 - RNA, 19 nt, Human
cagugcaguggagccuggu

SEQ ID NO: 415404 - RNA, 21 nt, Human
cagugcuuuuguacuggacca

SEQ ID NO: 415405 - RNA, 21 nt, Human
caguggagccuggugaauggu

SEQ ID NO: 415406 - RNA, 24 nt, Human
caucaacaacaagauaguuucaga

SEQ ID NO: 415407 - RNA, 18 nt, Human
cauucucugcuuuuuccu

SEQ ID NO: 415408 - RNA, 19 nt, Human
ccucauuagauuuuucagc

SEQ ID NO: 415409 - RNA, 25 nt, Human
ccuccugcaagagguugagcagggc

SEQ ID NO: 415410 - RNA, 19 nt, Human
ccugcaucaacaacaagau

SEQ ID NO: 415411 - RNA, 26 nt, Human
cuagugaucuguuugcugucauucuc

SEQ ID NO: 415412 - RNA, 19 nt, Human
cuccaagaagacagagagg

SEQ ID NO: 415413 - RNA, 18 nt, Human
cugguuccugcacucguu

SEQ ID NO: 415414 - RNA, 20 nt, Human
cugguuccugcacucguuca

SEQ ID NO: 415415 - RNA, 22 nt, Human
cuguuaccaaaaaaaaaaaauc

SEQ ID NO: 415416 - RNA, 20 nt, Human
cuuggugcuuucuggaggac

SEQ ID NO: 415417 - RNA, 21 nt, Human
gaauccaauaagagugcaggg

SEQ ID NO: 415418 - RNA, 18 nt, Human
gagccagugcaguggagc

SEQ ID NO: 415419 - RNA, 21 nt, Human
gcugguuccugcacucguuca

SEQ ID NO: 415420 - RNA, 21 nt, Human
ggaaaaaccagcaucuggagg

SEQ ID NO: 415421 - RNA, 19 nt, Human
ggaccuccaaccaacuccu

SEQ ID NO: 415422 - RNA, 21 nt, Human
ggagccuggugaauggugggg

SEQ ID NO: 415423 - RNA, 23 nt, Human
ggagccuggugaaugguggggag

SEQ ID NO: 415424 - RNA, 18 nt, Human
ggaguuuuucaaaacucc

SEQ ID NO: 415425 - RNA, 21 nt, Human
guccuuguccuccuagcccac

SEQ ID NO: 415426 - RNA, 18 nt, Human
gugaaacgagcugacacc

SEQ ID NO: 415427 - RNA, 24 nt, Human
gugugcucccuccugcaagagguu

SEQ ID NO: 415428 - RNA, 18 nt, Human
uaaagcagccagcugguu

SEQ ID NO: 415429 - RNA, 20 nt, Human
uacucagcaccuguggucag

SEQ ID NO: 415430 - RNA, 21 nt, Human
uacuggaccauuucagcuaaa

SEQ ID NO: 415431 - RNA, 24 nt, Human
uacuggaccauuucagcuaaagac

SEQ ID NO: 415432 - RNA, 20 nt, Human
ucagcagcugcuccagguuu

SEQ ID NO: 415433 - RNA, 23 nt, Human
ucauuagauuuuucagcagcugc

SEQ ID NO: 415434 - RNA, 18 nt, Human
uccuuggugcuuucugga

SEQ ID NO: 415435 - RNA, 23 nt, Human
uccuuguccuccuagcccacuca

SEQ ID NO: 415436 - RNA, 20 nt, Human
ucgguguguucugaugucug

SEQ ID NO: 415437 - RNA, 18 nt, Human
ucucugaguggaugggca

SEQ ID NO: 415438 - RNA, 23 nt, Human
ugaaacgagcugacaccugaaug

SEQ ID NO: 415439 - RNA, 23 nt, Human
ugagcagggcaggcugaguaaau

SEQ ID NO: 415440 - RNA, 20 nt, Human
ugagggcugcugaguacuca

SEQ ID NO: 415441 - RNA, 24 nt, Human
ugaucucugaguggaugggcaugg

SEQ ID NO: 415442 - RNA, 21 nt, Human
uggaggacagcagguugagga

SEQ ID NO: 415443 - RNA, 20 nt, Human
uggcgaauagcgaauugaca

SEQ ID NO: 415444 - RNA, 21 nt, Human
ugggcucuagccuguuaccaa

SEQ ID NO: 415445 - RNA, 18 nt, Human
uggggaccuccaaccaac

SEQ ID NO: 415446 - RNA, 22 nt, Human
uggucaggaaagugaaacgagc

SEQ ID NO: 415447 - RNA, 22 nt, Human
ugguguucgaaggaguuuuuca

SEQ ID NO: 415448 - RNA, 19 nt, Human
uguacuggaccauuucagc

SEQ ID NO: 415449 - RNA, 25 nt, Human
uguacuggaccauuucagcuaaaga

SEQ ID NO: 415450 - RNA, 19 nt, Human
uguuaccaaaaaaaaaaaa

SEQ ID NO: 415451 - RNA, 21 nt, Human
uguugggagucccaugaaggg

SEQ ID NO: 415452 - RNA, 24 nt, Human
uguugggagucccaugaagggguc

SEQ ID NO: 415453 - RNA, 25 nt, Human
uguuucauccuuguaaauaguucca

SEQ ID NO: 415454 - RNA, 18 nt, Human
uuccuuggugcuuucugg

SEQ ID NO: 415455 - RNA, 21 nt, Human
uuggugcuuucuggaggacag

SEQ ID NO: 415456 - RNA, 21 nt, Human
uuguccagguguauuuccuga

SEQ ID NO: 415457 - RNA, 21 nt, Human
uuugccucuuaguuccucauu

SEQ ID NO: 415458 - RNA, 18 nt, Human
uuuguacuggaccauuuc

SEQ ID NO: 415459 - RNA, 23 nt, Human
uuuucuaaagaaaaaagccuggu

SEQ ID NO: 415460 - RNA, 23 nt, Human
uuuuguacuggaccauuucagcu

SEQ ID NO: 415461 - RNA, 23 nt, Human
aaaaagcaaacacaaaagacugg

SEQ ID NO: 415462 - RNA, 18 nt, Human
aaaaccuagagagaccaa

SEQ ID NO: 415463 - RNA, 18 nt, Human
aaaagacugguguaaauc

SEQ ID NO: 415464 - RNA, 18 nt, Human
aaaagcaaacacaaaaga

SEQ ID NO: 415465 - RNA, 19 nt, Human
aaacacaaaagacuggugg

SEQ ID NO: 415466 - RNA, 22 nt, Human
aaacagauacaaauuaguccau

SEQ ID NO: 415467 - RNA, 19 nt, Human
aaaccuagagagaccaaua

SEQ ID NO: 415468 - RNA, 25 nt, Human
aaagacugguguaaauccaaguguu

SEQ ID NO: 415469 - RNA, 18 nt, Human
acaaggaaaauacacuca

SEQ ID NO: 415470 - RNA, 23 nt, Human
acacaaaagacugguguaaaucc

SEQ ID NO: 415471 - RNA, 21 nt, Human
accgauacaaguuuguuccca

SEQ ID NO: 415472 - RNA, 26 nt, Human
acugguguaaauccaaguguuuaaau

SEQ ID NO: 415473 - RNA, 21 nt, Human
agauauacuaggguacagaau

SEQ ID NO: 415474 - RNA, 22 nt, Human
agcccgccggguccccggcccc

SEQ ID NO: 415475 - RNA, 22 nt, Human
agcuucaaaagauaagcuaaag

SEQ ID NO: 415476 - RNA, 21 nt, Human
auaauuacuccaaaauaugga

SEQ ID NO: 415477 - RNA, 23 nt, Human
caaaucccaaggagugucaagag

SEQ ID NO: 415478 - RNA, 24 nt, Human
cauggcccaaagcgaaguccgcgg

SEQ ID NO: 415479 - RNA, 24 nt, Human
ccaaaaagauauacuaggguacag

SEQ ID NO: 415480 - RNA, 21 nt, Human
ccauccgcucccaagagcggg

SEQ ID NO: 415481 - RNA, 23 nt, Human
cccaaaaagauauacuaggguac

SEQ ID NO: 415482 - RNA, 22 nt, Human
ccccgagcccgccggguccccg

SEQ ID NO: 415483 - RNA, 21 nt, Human
cccgccggguccccggcccca

SEQ ID NO: 415484 - RNA, 19 nt, Human
cccugccccgagcccgccg

SEQ ID NO: 415485 - RNA, 18 nt, Human
ccgccggguccccggccc

SEQ ID NO: 415486 - RNA, 21 nt, Human
cgacaggugagucccugcccc

SEQ ID NO: 415487 - RNA, 21 nt, Human
cuucaaaagauaagcuaaaga

SEQ ID NO: 415488 - RNA, 22 nt, Human
cuucaugacucuuauaaaacua

SEQ ID NO: 415489 - RNA, 18 nt, Human
uaaaaaccuagagagacc

SEQ ID NO: 415490 - RNA, 18 nt, Human
uaaaaaccuagagagacc

SEQ ID NO: 415491 - RNA, 23 nt, Human
uaaaaagcaaacacaaaagacug

SEQ ID NO: 415492 - RNA, 21 nt, Human
uacacaaggaaaauacacuca

SEQ ID NO: 415493 - RNA, 20 nt, Human
uacauacaccauugugaaua

SEQ ID NO: 415494 - RNA, 20 nt, Human
uagucucuacugaggaaaau

SEQ ID NO: 415495 - RNA, 22 nt, Human
uccaugcccaaaaagauauacu

SEQ ID NO: 415496 - RNA, 22 nt, Human
ucccagaagcuaaugcaucacu

SEQ ID NO: 415497 - RNA, 20 nt, Human
uccccggccccaggaaaauc

SEQ ID NO: 415498 - RNA, 22 nt, Human
ugaaaaaccacaggaacuauaa

SEQ ID NO: 415499 - RNA, 23 nt, Human
ugaaugagauucugcuucuuggg

SEQ ID NO: 415500 - RNA, 18 nt, Human
ugagauucugcuucuugg

SEQ ID NO: 415501 - RNA, 23 nt, Human
ugagauucugcuucuugggugaa

SEQ ID NO: 415502 - RNA, 22 nt, Human
ugcccaaaaagauauacuaggg

SEQ ID NO: 415503 - RNA, 26 nt, Human
uggcccaaagcgaaguccgcggcggg

SEQ ID NO: 415504 - RNA, 23 nt, Human
ugggugaaaaaccacaggaacua

SEQ ID NO: 415505 - RNA, 21 nt, Human
ugucaagaguuaauuuauaga

SEQ ID NO: 415506 - RNA, 22 nt, Human
uucaaaucccaaggagugucaa

SEQ ID NO: 415507 - RNA, 22 nt, Human
uucaguaauucagauuucacua

SEQ ID NO: 415508 - RNA, 21 nt, Human
uuguauggguguguuuaauau

SEQ ID NO: 415509 - RNA, 18 nt, Human
uuuuuuuuuuuuuuuguc

SEQ ID NO: 415510 - RNA, 18 nt, Human
uuuuuuuuuuuuuuuuug

SEQ ID NO: 415511 - RNA, 19 nt, Human
uuuuuuuuuuuuuuuuugu

SEQ ID NO: 415512 - RNA, 26 nt, Human
aaccgugaugugugugucauacaacc

SEQ ID NO: 415513 - RNA, 25 nt, Human
aagcggggcggacacgagaagcgag

SEQ ID NO: 415514 - RNA, 18 nt, Human
accagugcuucuccacaa

SEQ ID NO: 415515 - RNA, 24 nt, Human
accagugcuucuccacaaggaacc

SEQ ID NO: 415516 - RNA, 23 nt, Human
accuugcguucaauggguggcug

SEQ ID NO: 415517 - RNA, 24 nt, Human
acgacuaagccugcaaugccuggc

SEQ ID NO: 415518 - RNA, 21 nt, Human
acucugggcugaggagaggga

SEQ ID NO: 415519 - RNA, 20 nt, Human
agaacacucugggcugagga

SEQ ID NO: 415520 - RNA, 18 nt, Human
agaagggagggucacugc

SEQ ID NO: 415521 - RNA, 26 nt, Human
agagagggcuuuuuuuuuuuuuuuuc

SEQ ID NO: 415522 - RNA, 21 nt, Human
agcacauaauccucgccuucc

SEQ ID NO: 415523 - RNA, 18 nt, Human
agugucuuccuggggcuc

SEQ ID NO: 415524 - RNA, 19 nt, Human
caauggguggcuggccaug

SEQ ID NO: 415525 - RNA, 21 nt, Human
caauggguggcuggccaugcu

SEQ ID NO: 415526 - RNA, 22 nt, Human
cacauaauccucgccuuccacc

SEQ ID NO: 415527 - RNA, 23 nt, Human
cacugcuaggaggagacacgacc

SEQ ID NO: 415528 - RNA, 18 nt, Human
cagaacacucugggcuga

SEQ ID NO: 415529 - RNA, 22 nt, Human
caguagccacgacuaagccugc

SEQ ID NO: 415530 - RNA, 18 nt, Human
ccaaagagccuucugagu

SEQ ID NO: 415531 - RNA, 21 nt, Human
cccgugccgccgccauagccg

SEQ ID NO: 415532 - RNA, 23 nt, Human
cccgugccgccgccauagccgcc

SEQ ID NO: 415533 - RNA, 24 nt, Human
cccgugccgccgccauagccgccg

SEQ ID NO: 415534 - RNA, 21 nt, Human
ccgggagagagcgaugcagcg

SEQ ID NO: 415535 - RNA, 18 nt, Human
ccucgugcuguggcucuc

SEQ ID NO: 415536 - RNA, 25 nt, Human
ccugguccccucccugguccccugg

SEQ ID NO: 415537 - RNA, 22 nt, Human
ccuuccaccaguccuccuugag

SEQ ID NO: 415538 - RNA, 24 nt, Human
cgccauagccgccgcagcagcagc

SEQ ID NO: 415539 - RNA, 20 nt, Human
cucaguccaccgcccgugcc

SEQ ID NO: 415540 - RNA, 19 nt, Human
cugcaguaugccucccacu

SEQ ID NO: 415541 - RNA, 24 nt, Human
gagaaccgugaugugugugucaua

SEQ ID NO: 415542 - RNA, 24 nt, Human
gagaagcgagauugcagagagggc

SEQ ID NO: 415543 - RNA, 27 nt, Human
gagagggcuuuuuuuuuuuuuuuuccu

SEQ ID NO: 415544 - RNA, 22 nt, Human
gcagagagggcuuuuuuuuuuu

SEQ ID NO: 415545 - RNA, 24 nt, Human
gcagcagcagcuguagaagcggaa

SEQ ID NO: 415546 - RNA, 19 nt, Human
gcagcuguagaagcggaau

SEQ ID NO: 415547 - RNA, 19 nt, Human
gccgccgccauagccgccg

SEQ ID NO: 415548 - RNA, 19 nt, Human
ggaagggcaaacacaggcg

SEQ ID NO: 415549 - RNA, 20 nt, Human
guugaugcagccagggaagg

SEQ ID NO: 415550 - RNA, 19 nt, Human
uaagaaaauacacucugug

SEQ ID NO: 415551 - RNA, 19 nt, Human
uaaugccaagcacgugcug

SEQ ID NO: 415552 - RNA, 18 nt, Human
uacacuucgaccuucugg

SEQ ID NO: 415553 - RNA, 20 nt, Human
uaccagugcuucuccacaag

SEQ ID NO: 415554 - RNA, 24 nt, Human
uauauacacacacacagcagaagg

SEQ ID NO: 415555 - RNA, 22 nt, Human
uauauauacacacacacagcag

SEQ ID NO: 415556 - RNA, 19 nt, Human
ucaguccaccgcccgugcc

SEQ ID NO: 415557 - RNA, 19 nt, Human
uccaccaguccuccuugag

SEQ ID NO: 415558 - RNA, 23 nt, Human
ucccugcaguaugccucccacug

SEQ ID NO: 415559 - RNA, 21 nt, Human
ucugaguucuuggcccaaagc

SEQ ID NO: 415560 - RNA, 19 nt, Human
ucuguggcaggacccaggg

SEQ ID NO: 415561 - RNA, 18 nt, Human
ugaacccccaucaccacc

SEQ ID NO: 415562 - RNA, 26 nt, Human
ugaacugaacagugugagauuugccc

SEQ ID NO: 415563 - RNA, 25 nt, Human
ugaccagguaaugccaagcacgugc

SEQ ID NO: 415564 - RNA, 20 nt, Human
ugcagagagggcuuuuuuuu

SEQ ID NO: 415565 - RNA, 28 nt, Human
ugcagagagggcuuuuuuuuuuuuuuuu

SEQ ID NO: 415566 - RNA, 28 nt, Human
ugcagcggcacaggagaacaguagccac

SEQ ID NO: 415567 - RNA, 21 nt, Human
ugccggacaagcagcaguucu

SEQ ID NO: 415568 - RNA, 22 nt, Human
ugccuggcgggggcaccuaaca

SEQ ID NO: 415569 - RNA, 19 nt, Human
ugcuaggaggagacacgac

SEQ ID NO: 415570 - RNA, 21 nt, Human
ugcuaggaggagacacgaccu

SEQ ID NO: 415571 - RNA, 19 nt, Human
ugugccggacaagcagcag

SEQ ID NO: 415572 - RNA, 18 nt, Human
uguggcaggacccagggc

SEQ ID NO: 415573 - RNA, 19 nt, Human
uugugccggacaagcagca

SEQ ID NO: 415574 - RNA, 23 nt, Human
uuguugaugcagccagggaaggu

SEQ ID NO: 415575 - RNA, 23 nt, Human
uuuucuaucuggccgcacuggcu

SEQ ID NO: 415576 - RNA, 23 nt, Human
uuuuuuuuuggggagcagacugg

SEQ ID NO: 415577 - RNA, 19 nt, Human
uuuuuuuuuuuuuuucugu

SEQ ID NO: 415578 - RNA, 21 nt, Human
uuuuuuuuuuuuuuucugugg

SEQ ID NO: 415579 - RNA, 26 nt, Human
cggagccggagcgcggggucugccgg

SEQ ID NO: 415580 - RNA, 18 nt, Human
cggcgcgcaccggagccg

SEQ ID NO: 415581 - RNA, 19 nt, Human
cugccggcggcggcggcgc

SEQ ID NO: 415582 - RNA, 19 nt, Human
gagccgagcgagccgagcc

SEQ ID NO: 415583 - RNA, 20 nt, Human
gagccggagccggagcgcgg

SEQ ID NO: 415584 - RNA, 22 nt, Human
gagcgagccgagccggagccgg

SEQ ID NO: 415585 - RNA, 22 nt, Human
gagcgcggggucugccggcggc

SEQ ID NO: 415586 - RNA, 22 nt, Human
gcaccggagccgagcgagccga

SEQ ID NO: 415587 - RNA, 18 nt, Human
gccggagcgcggggucug

SEQ ID NO: 415588 - RNA, 21 nt, Human
ggggucugccggcggcggcgg

SEQ ID NO: 415589 - RNA, 26 nt, Human
ggggucugccggcggcggcggcgacg

SEQ ID NO: 415590 - RNA, 18 nt, Human
ucugccggcggcggcggc

SEQ ID NO: 415591 - RNA, 19 nt, Human
ugccggcggcggcggcgcg

SEQ ID NO: 415592 - RNA, 24 nt, Human
uuaaaaaggcguauggcuucuuuu

SEQ ID NO: 415593 - RNA, 24 nt, Human
aaagugcugggauuacaggcguga

SEQ ID NO: 415594 - RNA, 25 nt, Human
aagcaauucucccaccucagccucc

SEQ ID NO: 415595 - RNA, 18 nt, Human
aaggauggguggcuacag

SEQ ID NO: 415596 - RNA, 19 nt, Human
aaguagcugggaucacagg

SEQ ID NO: 415597 - RNA, 24 nt, Human
aaguagcugggaucacaggugugc

SEQ ID NO: 415598 - RNA, 19 nt, Human
aagugcugggauuacaggc

SEQ ID NO: 415599 - RNA, 19 nt, Human
aagugcugggauuacaggc

SEQ ID NO: 415600 - RNA, 26 nt, Human
aagugcugggauuacaggcgugagcc

SEQ ID NO: 415601 - RNA, 21 nt, Human
aaugagagcaacacuuccuuu

SEQ ID NO: 415602 - RNA, 19 nt, Human
acaggguuucaccaugugg

SEQ ID NO: 415603 - RNA, 23 nt, Human
acaggguuucaccauguggccag

SEQ ID NO: 415604 - RNA, 23 nt, Human
accauguggccaggcuggucucg

SEQ ID NO: 415605 - RNA, 23 nt, Human
acccaggcuggagugcaguggug

SEQ ID NO: 415606 - RNA, 21 nt, Human
agaaaggaaauacaaacacaa

SEQ ID NO: 415607 - RNA, 22 nt, Human
agacaaaagacuugaggucaaa

SEQ ID NO: 415608 - RNA, 20 nt, Human
agacaggguuucaccaugug

SEQ ID NO: 415609 - RNA, 26 nt, Human
agcaagaaaaaugaccacagaaggaa

SEQ ID NO: 415610 - RNA, 24 nt, Human
aggagagcugggccugacgagggc

SEQ ID NO: 415611 - RNA, 23 nt, Human
aggcggaggcgcggugguggcgg

SEQ ID NO: 415612 - RNA, 25 nt, Human
aggcuggagugcaguggugugaucu

SEQ ID NO: 415613 - RNA, 19 nt, Human
agguaauaggugugcagua

SEQ ID NO: 415614 - RNA, 24 nt, Human
agucucucugucacccaggcugga

SEQ ID NO: 415615 - RNA, 19 nt, Human
agugcaguggugugaucuc

SEQ ID NO: 415616 - RNA, 21 nt, Human
agugcaguggugugaucucag

SEQ ID NO: 415617 - RNA, 23 nt, Human
agugcaguggugugaucucagcu

SEQ ID NO: 415618 - RNA, 24 nt, Human
agugcaguggugugaucucagcuc

SEQ ID NO: 415619 - RNA, 24 nt, Human
aguggugugaucucagcucacugc

SEQ ID NO: 415620 - RNA, 21 nt, Human
auagggcagcacaauccaaag

SEQ ID NO: 415621 - RNA, 23 nt, Human
augaggugaaacauaaacccacc

SEQ ID NO: 415622 - RNA, 27 nt, Human
auuaaucccuuuuuuuuuauuauuauu

SEQ ID NO: 415623 - RNA, 19 nt, Human
caaacacaacugagccaag

SEQ ID NO: 415624 - RNA, 24 nt, Human
caaagugcugggauuacaggcgug

SEQ ID NO: 415625 - RNA, 21 nt, Human
caacacucagaagacaaaaga

SEQ ID NO: 415626 - RNA, 24 nt, Human
caagaacagcaaauaauagguaau

SEQ ID NO: 415627 - RNA, 27 nt, Human
caagcaauucucccaccucagccuccc

SEQ ID NO: 415628 - RNA, 24 nt, Human
cacaggugugcaccaccacaucca

SEQ ID NO: 415629 - RNA, 20 nt, Human
caccauguggccaggcuggu

SEQ ID NO: 415630 - RNA, 23 nt, Human
caccauguggccaggcuggucuc

SEQ ID NO: 415631 - RNA, 21 nt, Human
cacccaggcuggagugcagug

SEQ ID NO: 415632 - RNA, 19 nt, Human
caccgugcccagccaagau

SEQ ID NO: 415633 - RNA, 24 nt, Human
caccucagccucccaaguagcugg

SEQ ID NO: 415634 - RNA, 23 nt, Human
caccugccucagccucccaaagu

SEQ ID NO: 415635 - RNA, 18 nt, Human
cagcacaauccaaagaua

SEQ ID NO: 415636 - RNA, 18 nt, Human
caggaaaagccugcaaua

SEQ ID NO: 415637 - RNA, 19 nt, Human
caggaaaagccugcaauag

SEQ ID NO: 415638 - RNA, 20 nt, Human
caggagcagcugcggcggcg

SEQ ID NO: 415639 - RNA, 18 nt, Human
caggguuucaccaugugg

SEQ ID NO: 415640 - RNA, 23 nt, Human
caggguuucaccauguggccagg

SEQ ID NO: 415641 - RNA, 19 nt, Human
caucagagagagacacaau

SEQ ID NO: 415642 - RNA, 22 nt, Human
ccaaagugcugggauuacaggc

SEQ ID NO: 415643 - RNA, 22 nt, Human
ccaaagugcugggauuacaggc

SEQ ID NO: 415644 - RNA, 24 nt, Human
ccaaagugcugggauuacaggcgu

SEQ ID NO: 415645 - RNA, 26 nt, Human
ccaccugccucagccucccaaagugc

SEQ ID NO: 415646 - RNA, 22 nt, Human
ccagagcuugucaacauuuucu

SEQ ID NO: 415647 - RNA, 19 nt, Human
ccagguucaagcaauucuc

SEQ ID NO: 415648 - RNA, 21 nt, Human
ccagguucaagcaauucuccc

SEQ ID NO: 415649 - RNA, 19 nt, Human
cccaaguagcugggaucac

SEQ ID NO: 415650 - RNA, 23 nt, Human
cccaccucagccucccaaguagc

SEQ ID NO: 415651 - RNA, 20 nt, Human
cccaggcuggagugcagugg

SEQ ID NO: 415652 - RNA, 20 nt, Human
ccucauuuucuaaaaauaag

SEQ ID NO: 415653 - RNA, 23 nt, Human
ccucuaaagcucuggauuauaga

SEQ ID NO: 415654 - RNA, 24 nt, Human
ccugccucagccucccaaagugcu

SEQ ID NO: 415655 - RNA, 24 nt, Human
ccuuccagguucaagcaauucucc

SEQ ID NO: 415656 - RNA, 23 nt, Human
cgaggcggaggcgcggugguggc

SEQ ID NO: 415657 - RNA, 24 nt, Human
cgcggugguggcggcggcuucggu

SEQ ID NO: 415658 - RNA, 20 nt, Human
cggccgaggcggaggcgcgg

SEQ ID NO: 415659 - RNA, 25 nt, Human
cuaaagcucuggauuauagaaauga

SEQ ID NO: 415660 - RNA, 24 nt, Human
cucacugcaacuucugccuuccag

SEQ ID NO: 415661 - RNA, 24 nt, Human
cucagccucccaaguagcugggau

SEQ ID NO: 415662 - RNA, 20 nt, Human
cucugucacccaggcuggag

SEQ ID NO: 415663 - RNA, 24 nt, Human
cugcaacuucugccuuccagguuc

SEQ ID NO: 415664 - RNA, 24 nt, Human
cugccucagccucccaaagugcug

SEQ ID NO: 415665 - RNA, 24 nt, Human
cugcggcggcggccgaggcggagg

SEQ ID NO: 415666 - RNA, 21 nt, Human
cuucuguccucuuuuguucca

SEQ ID NO: 415667 - RNA, 19 nt, Human
gaaauacaaacacaacuga

SEQ ID NO: 415668 - RNA, 22 nt, Human
gagagacacaauaauaaaugua

SEQ ID NO: 415669 - RNA, 18 nt, Human
gagcuugucaacauuuuc

SEQ ID NO: 415670 - RNA, 21 nt, Human
gagugcaguggugugaucuca

SEQ ID NO: 415671 - RNA, 18 nt, Human
gauuacaggcgugagcca

SEQ ID NO: 415672 - RNA, 21 nt, Human
gauuacaggcgugagccaccg

SEQ ID NO: 415673 - RNA, 24 nt, Human
gauuacaggcgugagccaccgugc

SEQ ID NO: 415674 - RNA, 24 nt, Human
gcagcaagaaaaaugaccacagag

SEQ ID NO: 415675 - RNA, 22 nt, Human
gccaagcuccaacacucagaag

SEQ ID NO: 415676 - RNA, 22 nt, Human
gcggaggcgcggugguggcggc

SEQ ID NO: 415677 - RNA, 26 nt, Human
gcggcgcaggagagcugggccugacg

SEQ ID NO: 415678 - RNA, 24 nt, Human
gcggcggcgcaggagagcugggcc

SEQ ID NO: 415679 - RNA, 22 nt, Human
ggaaauacaaacacaacugagc

SEQ ID NO: 415680 - RNA, 24 nt, Human
ggaaauacaaacacaacugagcca

SEQ ID NO: 415681 - RNA, 22 nt, Human
ggaccaggagcagcugcggcgg

SEQ ID NO: 415682 - RNA, 22 nt, Human
ggaggcgcggugguggcggcgg

SEQ ID NO: 415683 - RNA, 21 nt, Human
ggcaaagaagauaacaaauau

SEQ ID NO: 415684 - RNA, 18 nt, Human
ggcgcggcgggaggcggc

SEQ ID NO: 415685 - RNA, 20 nt, Human
ggcggcgcaggagagcuggg

SEQ ID NO: 415686 - RNA, 22 nt, Human
ggcuggagugcaguggugugau

SEQ ID NO: 415687 - RNA, 18 nt, Human
gggaccaggagcagcugc

SEQ ID NO: 415688 - RNA, 22 nt, Human
ggggcgcggcgggaggcggcgg

SEQ ID NO: 415689 - RNA, 23 nt, Human
ggugaaaaaggcagcaagaaaaa

SEQ ID NO: 415690 - RNA, 23 nt, Human
gucucucugucacccaggcugga

SEQ ID NO: 415691 - RNA, 24 nt, Human
gugaaccaccugccucagccuccc

SEQ ID NO: 415692 - RNA, 19 nt, Human
gugguggcggcggcuucgg

SEQ ID NO: 415693 - RNA, 24 nt, Human
uaaaauacaggcaggcaaagaaga

SEQ ID NO: 415694 - RNA, 18 nt, Human
uaaauguccucauuuucu

SEQ ID NO: 415695 - RNA, 23 nt, Human
uaagacugauuauuacaaagcca

SEQ ID NO: 415696 - RNA, 24 nt, Human
uaauuuuuauaucuuuaguagaga

SEQ ID NO: 415697 - RNA, 21 nt, Human
uacaaacacaacugagccaag

SEQ ID NO: 415698 - RNA, 24 nt, Human
uacaggcgugagccaccgugccca

SEQ ID NO: 415699 - RNA, 22 nt, Human
uagagacaggguuucaccaugu

SEQ ID NO: 415700 - RNA, 24 nt, Human
uaguagagacaggguuucaccaug

SEQ ID NO: 415701 - RNA, 25 nt, Human
uaguagagacaggguuucaccaugu

SEQ ID NO: 415702 - RNA, 19 nt, Human
uauagaaaugaucaacaaa

SEQ ID NO: 415703 - RNA, 24 nt, Human
uauuaaauguccucauuuucuaaa

SEQ ID NO: 415704 - RNA, 22 nt, Human
ucacccaggcuggagugcagug

SEQ ID NO: 415705 - RNA, 18 nt, Human
ucacugcaacuucugccu

SEQ ID NO: 415706 - RNA, 24 nt, Human
ucacugcaacuucugccuuccagg

SEQ ID NO: 415707 - RNA, 22 nt, Human
ucagcauccaaagaaauccauu

SEQ ID NO: 415708 - RNA, 18 nt, Human
ucagccucccaaguagcu

SEQ ID NO: 415709 - RNA, 20 nt, Human
ucagccucccaaguagcugg

SEQ ID NO: 415710 - RNA, 22 nt, Human
uccaugggauggacagcagcac

SEQ ID NO: 415711 - RNA, 24 nt, Human
ucccaaagugcugggauuacaggc

SEQ ID NO: 415712 - RNA, 23 nt, Human
ucccaaguagcugggaucacagg

SEQ ID NO: 415713 - RNA, 24 nt, Human
ucuaagcauaaauacuaaaaugaa

SEQ ID NO: 415714 - RNA, 23 nt, Human
ucucccaccucagccucccaagu

SEQ ID NO: 415715 - RNA, 26 nt, Human
ucucccaccucagccucccaaguagc

SEQ ID NO: 415716 - RNA, 22 nt, Human
ucucucugucacccaggcugga

SEQ ID NO: 415717 - RNA, 23 nt, Human
ucucucugucacccaggcuggag

SEQ ID NO: 415718 - RNA, 24 nt, Human
ucucucugucacccaggcuggagu

SEQ ID NO: 415719 - RNA, 25 nt, Human
ucucugucacccaggcuggagugca

SEQ ID NO: 415720 - RNA, 24 nt, Human
ucugucacccaggcuggagugcag

SEQ ID NO: 415721 - RNA, 24 nt, Human
ucuuuaguagagacaggguuucac

SEQ ID NO: 415722 - RNA, 20 nt, Human
ugaaaaaggcagcaagaaaa

SEQ ID NO: 415723 - RNA, 19 nt, Human
ugagacagagucucucugu

SEQ ID NO: 415724 - RNA, 24 nt, Human
ugagacagagucucucugucaccc

SEQ ID NO: 415725 - RNA, 23 nt, Human
ugcaacuucugccuuccagguuc

SEQ ID NO: 415726 - RNA, 24 nt, Human
ugccucagccucccaaagugcugg

SEQ ID NO: 415727 - RNA, 24 nt, Human
ugcugggauuacaggcgugagcca

SEQ ID NO: 415728 - RNA, 19 nt, Human
uggagugcaguggugugau

SEQ ID NO: 415729 - RNA, 24 nt, Human
uggagugcaguggugugaucucag

SEQ ID NO: 415730 - RNA, 23 nt, Human
uggaugcuuaacagcacaguguu

SEQ ID NO: 415731 - RNA, 22 nt, Human
uggccaggcuggucucgaacuc

SEQ ID NO: 415732 - RNA, 21 nt, Human
ugggaucacaggugugcacca

SEQ ID NO: 415733 - RNA, 22 nt, Human
ugggaucacaggugugcaccac

SEQ ID NO: 415734 - RNA, 24 nt, Human
ugggaucacaggugugcaccacca

SEQ ID NO: 415735 - RNA, 18 nt, Human
ugggauuacaggcgugag

SEQ ID NO: 415736 - RNA, 21 nt, Human
ugggauuacaggcgugagcca

SEQ ID NO: 415737 - RNA, 22 nt, Human
ugggauuacaggcgugagccac

SEQ ID NO: 415738 - RNA, 23 nt, Human
ugggauuacaggcgugagccacc

SEQ ID NO: 415739 - RNA, 23 nt, Human
ugggauuacaggcgugagccacc

SEQ ID NO: 415740 - RNA, 24 nt, Human
ugggauuacaggcgugagccaccg

SEQ ID NO: 415741 - RNA, 24 nt, Human
uggugugaucucagcucacugcaa

SEQ ID NO: 415742 - RNA, 21 nt, Human
ugucuucagccaagcuccaac

SEQ ID NO: 415743 - RNA, 18 nt, Human
ugugcaccaccacaucca

SEQ ID NO: 415744 - RNA, 24 nt, Human
uuaguagagacaggguuucaccau

SEQ ID NO: 415745 - RNA, 24 nt, Human
uucaagcaauucucccaccucagc

SEQ ID NO: 415746 - RNA, 24 nt, Human
uucagcauccaaagaaauccauuu

SEQ ID NO: 415747 - RNA, 23 nt, Human
uuccaugggauggacagcagcac

SEQ ID NO: 415748 - RNA, 24 nt, Human
uuuaaaaaugucuuucugccaccu

SEQ ID NO: 415749 - RNA, 20 nt, Human
uuucaccauguggccaggcu

SEQ ID NO: 415750 - RNA, 22 nt, Human
uuugaaccaugcaagaacagca

SEQ ID NO: 415751 - RNA, 22 nt, Human
uuuuauaucuuuaguagagaca

SEQ ID NO: 415752 - RNA, 19 nt, Human
uuuuguuccaaaugaggug

SEQ ID NO: 415753 - RNA, 20 nt, Human
uuuuuauaucuuuaguagag

SEQ ID NO: 415754 - RNA, 20 nt, Human
uuuuuuuuuuugagacagag

SEQ ID NO: 415755 - RNA, 20 nt, Human
uuuuuuuuuuuuuuuuuugg

SEQ ID NO: 415756 - RNA, 18 nt, Human
aaaauuacaaacagcacu

SEQ ID NO: 415757 - RNA, 20 nt, Human
aaaauuacaaacagcacuga

SEQ ID NO: 415758 - RNA, 26 nt, Human
acggaaauggaaaaugacagcguguc

SEQ ID NO: 415759 - RNA, 22 nt, Human
acuccguagauccaggaacgga

SEQ ID NO: 415760 - RNA, 20 nt, Human
agaugaucaauaaauauuug

SEQ ID NO: 415761 - RNA, 25 nt, Human
agaugccucccacugccacugcucu

SEQ ID NO: 415762 - RNA, 22 nt, Human
agcagccacauggccgggucug

SEQ ID NO: 415763 - RNA, 22 nt, Human
agcaguuguauaauacugaaau

SEQ ID NO: 415764 - RNA, 21 nt, Human
auacugaaauacccccugcca

SEQ ID NO: 415765 - RNA, 18 nt, Human
caaaacccccaggccgca

SEQ ID NO: 415766 - RNA, 18 nt, Human
cacccaggaccgagcagc

SEQ ID NO: 415767 - RNA, 21 nt, Human
cacugggaaccccugaaguuc

SEQ ID NO: 415768 - RNA, 18 nt, Human
cagcugccuggcccgcgu

SEQ ID NO: 415769 - RNA, 20 nt, Human
cagcugccuggcccgcguuc

SEQ ID NO: 415770 - RNA, 19 nt, Human
caggacagcacgacuucac

SEQ ID NO: 415771 - RNA, 21 nt, Human
caugcaagcguccagccuccg

SEQ ID NO: 415772 - RNA, 20 nt, Human
ccaaaacccccaggccgcag

SEQ ID NO: 415773 - RNA, 22 nt, Human
cccacugccacugcucucccca

SEQ ID NO: 415774 - RNA, 26 nt, Human
cccacugggaaccccugaaguuccca

SEQ ID NO: 415775 - RNA, 21 nt, Human
cccccagaugccucccacugc

SEQ ID NO: 415776 - RNA, 24 nt, Human
cccccagaugccucccacugccac

SEQ ID NO: 415777 - RNA, 25 nt, Human
cccccaggccgcagcugccuggccc

SEQ ID NO: 415778 - RNA, 19 nt, Human
ccccugaaguucccacagg

SEQ ID NO: 415779 - RNA, 19 nt, Human
cccgcguucaggacagcac

SEQ ID NO: 415780 - RNA, 21 nt, Human
cccgcguucaggacagcacga

SEQ ID NO: 415781 - RNA, 19 nt, Human
cccugaaguucccacaggc

SEQ ID NO: 415782 - RNA, 20 nt, Human
ccucauugcaaaaucucuua

SEQ ID NO: 415783 - RNA, 22 nt, Human
ccucccacugccacugcucucc

SEQ ID NO: 415784 - RNA, 22 nt, Human
cgugaucacuccaaaaccccca

SEQ ID NO: 415785 - RNA, 18 nt, Human
cuccccacugggaacccc

SEQ ID NO: 415786 - RNA, 22 nt, Human
cuccccacugggaaccccugaa

SEQ ID NO: 415787 - RNA, 18 nt, Human
cucuccccacugggaacc

SEQ ID NO: 415788 - RNA, 19 nt, Human
cugccacugcucuccccac

SEQ ID NO: 415789 - RNA, 20 nt, Human
cugccacugcucuccccacu

SEQ ID NO: 415790 - RNA, 19 nt, Human
cugggaaccccugaaguuc

SEQ ID NO: 415791 - RNA, 19 nt, Human
cuuauggagaagagaugau

SEQ ID NO: 415792 - RNA, 18 nt, Human
gaauagcaguuacaaaac

SEQ ID NO: 415793 - RNA, 27 nt, Human
gccucccacugccacugcucuccccac

SEQ ID NO: 415794 - RNA, 19 nt, Human
ggaaucucucaagcgccau

SEQ ID NO: 415795 - RNA, 21 nt, Human
gggaaccccugaaguucccac

SEQ ID NO: 415796 - RNA, 24 nt, Human
guuauauaguuugaaaacaaugcu

SEQ ID NO: 415797 - RNA, 20 nt, Human
uacccccugccacugaccuu

SEQ ID NO: 415798 - RNA, 24 nt, Human
uaucacacuaucuuauggagaaga

SEQ ID NO: 415799 - RNA, 23 nt, Human
ucccacugccacugcucucccca

SEQ ID NO: 415800 - RNA, 18 nt, Human
ucuuagaagacuccguag

SEQ ID NO: 415801 - RNA, 21 nt, Human
ucuugcacagcagcgagcacc

SEQ ID NO: 415802 - RNA, 24 nt, Human
ugaaauacccccugccacugaccu

SEQ ID NO: 415803 - RNA, 25 nt, Human
ugaaauacccccugccacugaccuu

SEQ ID NO: 415804 - RNA, 19 nt, Human
uggcccccagaugccuccc

SEQ ID NO: 415805 - RNA, 19 nt, Human
aaaaaauaauggagcuaca

SEQ ID NO: 415806 - RNA, 21 nt, Human
aaaaaauaauggagcuacaac

SEQ ID NO: 415807 - RNA, 19 nt, Human
aaagacacaaaaauagacg

SEQ ID NO: 415808 - RNA, 19 nt, Human
aauuuauucacaaaaagug

SEQ ID NO: 415809 - RNA, 18 nt, Human
acccccuccccccucccc

SEQ ID NO: 415810 - RNA, 24 nt, Human
aggccagccagggccaggccccag

SEQ ID NO: 415811 - RNA, 21 nt, Human
cacaggcuggaccuguccccc

SEQ ID NO: 415812 - RNA, 24 nt, Human
caccacaggcuggaccuguccccc

SEQ ID NO: 415813 - RNA, 19 nt, Human
cacccccuccccccucccc

SEQ ID NO: 415814 - RNA, 22 nt, Human
cagggccaggccccaguucagg

SEQ ID NO: 415815 - RNA, 18 nt, Human
caggggcuuggugagcuu

SEQ ID NO: 415816 - RNA, 27 nt, Human
ccacccccuccccccuccccgauuaaa

SEQ ID NO: 415817 - RNA, 23 nt, Human
ccagggccaggccccaguucagg

SEQ ID NO: 415818 - RNA, 21 nt, Human
ccgauuaaaaagacacaaaaa

SEQ ID NO: 415819 - RNA, 24 nt, Human
cggcgggagaggccagccagggcc

SEQ ID NO: 415820 - RNA, 25 nt, Human
cgggagaggccagccagggccaggc

SEQ ID NO: 415821 - RNA, 23 nt, Human
gcuuggugagcuuuguacauggg

SEQ ID NO: 415822 - RNA, 21 nt, Human
ggagccuggggcuuaagggug

SEQ ID NO: 415823 - RNA, 24 nt, Human
gggagaggccagccagggccaggc

SEQ ID NO: 415824 - RNA, 22 nt, Human
gggcaggggcuuggugagcuuu

SEQ ID NO: 415825 - RNA, 24 nt, Human
ggggcuguacaugggcaggggcuu

SEQ ID NO: 415826 - RNA, 22 nt, Human
gggggcuguacaugggcagggg

SEQ ID NO: 415827 - RNA, 18 nt, Human
uaaaaagacacaaaaaua

SEQ ID NO: 415828 - RNA, 20 nt, Human
uaaaaagacacaaaaauaga

SEQ ID NO: 415829 - RNA, 24 nt, Human
uaaaaagacacaaaaauagacguu

SEQ ID NO: 415830 - RNA, 27 nt, Human
uacaaccacccccuccccccuccccga

SEQ ID NO: 415831 - RNA, 23 nt, Human
uccccccuccccgauuaaaaaga

SEQ ID NO: 415832 - RNA, 20 nt, Human
ugagcuuuguacauggggcu

SEQ ID NO: 415833 - RNA, 19 nt, Human
ugaggcggcgggagaggcc

SEQ ID NO: 415834 - RNA, 21 nt, Human
ugaggcggcgggagaggccag

SEQ ID NO: 415835 - RNA, 24 nt, Human
ugagguaaacggggagccuggggc

SEQ ID NO: 415836 - RNA, 20 nt, Human
uggggcugggagacaaggga

SEQ ID NO: 415837 - RNA, 20 nt, Human
uggugagcuuuguacauggg

SEQ ID NO: 415838 - RNA, 21 nt, Human
ugucccccagugaggcggcgg

SEQ ID NO: 415839 - RNA, 21 nt, Human
uuuaaagggcuucacaggugc

SEQ ID NO: 415840 - RNA, 21 nt, Human
agaacacuagcagucugcaga

SEQ ID NO: 415841 - RNA, 19 nt, Human
agcagucugcagaguguca

SEQ ID NO: 415842 - RNA, 19 nt, Human
cagaacacuagcagucugc

SEQ ID NO: 415843 - RNA, 21 nt, Human
cagaacacuagcagucugcag

SEQ ID NO: 415844 - RNA, 19 nt, Human
cuagguaaacggucuucuu

SEQ ID NO: 415845 - RNA, 23 nt, Human
uacaggguggcaggaucguggag

SEQ ID NO: 415846 - RNA, 21 nt, Human
aaaaggguacagagcagaggg

SEQ ID NO: 415847 - RNA, 24 nt, Human
aaagggggaggggaggcacaggug

SEQ ID NO: 415848 - RNA, 18 nt, Human
aacaaagggggaggggag

SEQ ID NO: 415849 - RNA, 18 nt, Human
aacaaagucuccuuacag

SEQ ID NO: 415850 - RNA, 21 nt, Human
acaaagucuccuuacagacag

SEQ ID NO: 415851 - RNA, 22 nt, Human
agaaggacaaggaagagacagg

SEQ ID NO: 415852 - RNA, 20 nt, Human
agacugaggcaggagggcaa

SEQ ID NO: 415853 - RNA, 21 nt, Human
agacugaggcaggagggcaag

SEQ ID NO: 415854 - RNA, 21 nt, Human
agagaagcagagcacugugga

SEQ ID NO: 415855 - RNA, 21 nt, Human
agagacagggugggggaaaga

SEQ ID NO: 415856 - RNA, 20 nt, Human
aggaagagacaggguggggg

SEQ ID NO: 415857 - RNA, 21 nt, Human
aggaagagacaggguggggga

SEQ ID NO: 415858 - RNA, 21 nt, Human
aggcaggagggcaagucgggg

SEQ ID NO: 415859 - RNA, 24 nt, Human
aggcaggagggcaagucggggggu

SEQ ID NO: 415860 - RNA, 22 nt, Human
aggggcaaacaaagggggaggg

SEQ ID NO: 415861 - RNA, 18 nt, Human
agggggaggggaggcaca

SEQ ID NO: 415862 - RNA, 19 nt, Human
agggggaggggaggcacag

SEQ ID NO: 415863 - RNA, 18 nt, Human
caaagucuccuuacagac

SEQ ID NO: 415864 - RNA, 22 nt, Human
caaccacacaggggcaaacaaa

SEQ ID NO: 415865 - RNA, 25 nt, Human
caccggcagcagcuucuccgcggcc

SEQ ID NO: 415866 - RNA, 21 nt, Human
cagagucuaucgcugccccuc

SEQ ID NO: 415867 - RNA, 20 nt, Human
cagccauucucccacggccu

SEQ ID NO: 415868 - RNA, 19 nt, Human
cagcuucuucccugcugcc

SEQ ID NO: 415869 - RNA, 23 nt, Human
cagcuucuucccugcugccgggg

SEQ ID NO: 415870 - RNA, 20 nt, Human
ccacgcgcacaaacgagacc

SEQ ID NO: 415871 - RNA, 19 nt, Human
cccacgcgcacaaacgaga

SEQ ID NO: 415872 - RNA, 20 nt, Human
cccagagucuaucgcugccc

SEQ ID NO: 415873 - RNA, 25 nt, Human
ccccagagucuaucgcugccccucu

SEQ ID NO: 415874 - RNA, 20 nt, Human
cccuauuucccucacauccc

SEQ ID NO: 415875 - RNA, 20 nt, Human
cccucccuccacaccagggg

SEQ ID NO: 415876 - RNA, 22 nt, Human
cccucugcucugcccagccauu

SEQ ID NO: 415877 - RNA, 26 nt, Human
ccggggacaaaaggaaaaaggguaca

SEQ ID NO: 415878 - RNA, 20 nt, Human
ccucaugccagguggucuuc

SEQ ID NO: 415879 - RNA, 26 nt, Human
ccuccagcuucuucccugcugccggg

SEQ ID NO: 415880 - RNA, 19 nt, Human
cgagaccccucccuccaca

SEQ ID NO: 415881 - RNA, 27 nt, Human
cggccccucccguccccguccugcucc

SEQ ID NO: 415882 - RNA, 23 nt, Human
cggggcgacacagagaagcagag

SEQ ID NO: 415883 - RNA, 24 nt, Human
cucacaucccuccuugaccaacca

SEQ ID NO: 415884 - RNA, 22 nt, Human
cucaugccagguggucuucccc

SEQ ID NO: 415885 - RNA, 20 nt, Human
cuccuuacagacagguggcu

SEQ ID NO: 415886 - RNA, 19 nt, Human
cugccccucugcucugccc

SEQ ID NO: 415887 - RNA, 22 nt, Human
cugcugccggggacaaaaggaa

SEQ ID NO: 415888 - RNA, 19 nt, Human
cuuccccugcccucauugg

SEQ ID NO: 415889 - RNA, 20 nt, Human
gaaagacugaggcaggaggg

SEQ ID NO: 415890 - RNA, 21 nt, Human
gaaagacugaggcaggagggc

SEQ ID NO: 415891 - RNA, 20 nt, Human
gagaccccucccuccacacc

SEQ ID NO: 415892 - RNA, 19 nt, Human
gcagagcacuguggauucc

SEQ ID NO: 415893 - RNA, 18 nt, Human
gggaggggaggcacaggu

SEQ ID NO: 415894 - RNA, 20 nt, Human
ggggaggggaggcacaggug

SEQ ID NO: 415895 - RNA, 22 nt, Human
ggggcugggcggggcgacacag

SEQ ID NO: 415896 - RNA, 21 nt, Human
gggggaggggaagcaacaaag

SEQ ID NO: 415897 - RNA, 22 nt, Human
ggugggggaaagacugaggcag

SEQ ID NO: 415898 - RNA, 20 nt, Human
gucuuccccugcccucauug

SEQ ID NO: 415899 - RNA, 25 nt, Human
uccauccccagagucuaucgcugcc

SEQ ID NO: 415900 - RNA, 22 nt, Human
uccccagagucuaucgcugccc

SEQ ID NO: 415901 - RNA, 20 nt, Human
uccccguccugcuccauccc

SEQ ID NO: 415902 - RNA, 21 nt, Human
ucccucagccccucucccuca

SEQ ID NO: 415903 - RNA, 24 nt, Human
uccuugaccaaccacacaggggca

SEQ ID NO: 415904 - RNA, 25 nt, Human
ugaccaaccacacaggggcaaacaa

SEQ ID NO: 415905 - RNA, 24 nt, Human
ugccagguggucuuccccugcccu

SEQ ID NO: 415906 - RNA, 23 nt, Human
ugcucugcccagccauucuccca

SEQ ID NO: 415907 - RNA, 22 nt, Human
uucuccgcggccgcggauccga

SEQ ID NO: 415908 - RNA, 23 nt, Human
uugaccaaccacacaggggcaaa

SEQ ID NO: 415909 - RNA, 22 nt, Human
uuguacuuuuauucacaucgug

SEQ ID NO: 415910 - RNA, 19 nt, Human
uuuuggcauuuccagagaa

SEQ ID NO: 415911 - RNA, 22 nt, Human
aaaaaaugaaguaagcaaagaa

SEQ ID NO: 415912 - RNA, 27 nt, Human
aaaacaaacacagaaaagaauaaccac

SEQ ID NO: 415913 - RNA, 21 nt, Human
aaacaaagcaaaacuaaaguu

SEQ ID NO: 415914 - RNA, 25 nt, Human
aaagaaacauaacuuucaaugacua

SEQ ID NO: 415915 - RNA, 20 nt, Human
aaauacacgucccacaggcg

SEQ ID NO: 415916 - RNA, 24 nt, Human
aaauacacgucccacaggcgcagg

SEQ ID NO: 415917 - RNA, 19 nt, Human
aaauauuggcaacugcucc

SEQ ID NO: 415918 - RNA, 26 nt, Human
aagcaagaaaaagaaaggguaugggg

SEQ ID NO: 415919 - RNA, 22 nt, Human
aagcaagaaaaagagggacccc

SEQ ID NO: 415920 - RNA, 20 nt, Human
aagcugucuagcagccagag

SEQ ID NO: 415921 - RNA, 22 nt, Human
aaggcaacccaggcagagcuga

SEQ ID NO: 415922 - RNA, 24 nt, Human
aauucuaccucaaauaaauaauau

SEQ ID NO: 415923 - RNA, 26 nt, Human
acaaagaccaaaaauaaggugaaaca

SEQ ID NO: 415924 - RNA, 19 nt, Human
acaaggagucaucucccuc

SEQ ID NO: 415925 - RNA, 26 nt, Human
acacaauggcaaaaacaaaaagcaag

SEQ ID NO: 415926 - RNA, 24 nt, Human
acaugcaaacaaagcaaaacuaaa

SEQ ID NO: 415927 - RNA, 24 nt, Human
acccccagaaaggacuggaguuac

SEQ ID NO: 415928 - RNA, 26 nt, Human
agaaaagaauaaccacuaauugugaa

SEQ ID NO: 415929 - RNA, 21 nt, Human
agaaaggacuggcucuguccc

SEQ ID NO: 415930 - RNA, 18 nt, Human
agcacauagaggcaacca

SEQ ID NO: 415931 - RNA, 25 nt, Human
aggaagaaaggguaauggaaucugg

SEQ ID NO: 415932 - RNA, 18 nt, Human
aggaggaacaaggcggug

SEQ ID NO: 415933 - RNA, 19 nt, Human
aggcagcuccgucucacug

SEQ ID NO: 415934 - RNA, 27 nt, Human
aggccccuuguccucuggcagcccagg

SEQ ID NO: 415935 - RNA, 18 nt, Human
aggcggugauguggcuca

SEQ ID NO: 415936 - RNA, 19 nt, Human
agggaaaaaaugaaguaag

SEQ ID NO: 415937 - RNA, 21 nt, Human
agggugaagagccugugaugg

SEQ ID NO: 415938 - RNA, 21 nt, Human
agguuccggagaaggcagccu

SEQ ID NO: 415939 - RNA, 24 nt, Human
auacaguucauauuucaguacauc

SEQ ID NO: 415940 - RNA, 18 nt, Human
auagcccuuagagccauc

SEQ ID NO: 415941 - RNA, 22 nt, Human
auaucaaaauaaaaaaaccagu

SEQ ID NO: 415942 - RNA, 21 nt, Human
aucaaaauaaaaaaaccagug

SEQ ID NO: 415943 - RNA, 18 nt, Human
auuuccauccacuugcuc

SEQ ID NO: 415944 - RNA, 22 nt, Human
caaaaugccaaaacgaucaaug

SEQ ID NO: 415945 - RNA, 23 nt, Human
caaacacagaaaagaauaaccac

SEQ ID NO: 415946 - RNA, 24 nt, Human
caaagaccaaaaauaaggugaaac

SEQ ID NO: 415947 - RNA, 21 nt, Human
caacauuaguagauugugcua

SEQ ID NO: 415948 - RNA, 18 nt, Human
cacuggccagcagcugca

SEQ ID NO: 415949 - RNA, 19 nt, Human
cagauaaacagguacaccc

SEQ ID NO: 415950 - RNA, 18 nt, Human
cagcccgggagaaggcac

SEQ ID NO: 415951 - RNA, 22 nt, Human
cagcuacaaggagucaucuccc

SEQ ID NO: 415952 - RNA, 19 nt, Human
cagcugcaccagugcccag

SEQ ID NO: 415953 - RNA, 19 nt, Human
caggaggcagcuccgucuc

SEQ ID NO: 415954 - RNA, 22 nt, Human
caggcagagcugaggacgugca

SEQ ID NO: 415955 - RNA, 19 nt, Human
caggccccuuguccucugg

SEQ ID NO: 415956 - RNA, 19 nt, Human
caggguucagacuggcugg

SEQ ID NO: 415957 - RNA, 23 nt, Human
caguauaacacaaaucacacaac

SEQ ID NO: 415958 - RNA, 19 nt, Human
cauggcccagguaucgaag

SEQ ID NO: 415959 - RNA, 20 nt, Human
cauuaguagauugugcuacc

SEQ ID NO: 415960 - RNA, 21 nt, Human
ccaaucuuaaauaauuagagg

SEQ ID NO: 415961 - RNA, 18 nt, Human
ccacaggccacaccugga

SEQ ID NO: 415962 - RNA, 18 nt, Human
ccacaggccacaccugga

SEQ ID NO: 415963 - RNA, 23 nt, Human
ccacaguauuuaauuuguuugga

SEQ ID NO: 415964 - RNA, 23 nt, Human
ccagugcccagaaugcguccucc

SEQ ID NO: 415965 - RNA, 21 nt, Human
cccacaggcgcagggugagcc

SEQ ID NO: 415966 - RNA, 21 nt, Human
cccaggaggggcaucacugca

SEQ ID NO: 415967 - RNA, 21 nt, Human
ccccagaaaggacuggcucug

SEQ ID NO: 415968 - RNA, 22 nt, Human
ccccuuguccucuggcagccca

SEQ ID NO: 415969 - RNA, 22 nt, Human
cccgcauagaccuuccuugucc

SEQ ID NO: 415970 - RNA, 23 nt, Human
cccgcauagaccuuccuuguccu

SEQ ID NO: 415971 - RNA, 21 nt, Human
cccgccgaauuuucuucgccu

SEQ ID NO: 415972 - RNA, 19 nt, Human
ccucucagggagaaaaccu

SEQ ID NO: 415973 - RNA, 20 nt, Human
ccucuugccccucuccuuca

SEQ ID NO: 415974 - RNA, 22 nt, Human
ccugccaagggugaagagccug

SEQ ID NO: 415975 - RNA, 22 nt, Human
cggccuccugggauguucaggg

SEQ ID NO: 415976 - RNA, 22 nt, Human
cgggagaaggcacagggaaggg

SEQ ID NO: 415977 - RNA, 22 nt, Human
cguaaacacaauggcaaaaaca

SEQ ID NO: 415978 - RNA, 19 nt, Human
cgugaucuagcuccgaugc

SEQ ID NO: 415979 - RNA, 21 nt, Human
cgugcacagggccuggagccg

SEQ ID NO: 415980 - RNA, 19 nt, Human
cguucgugucaucucccgc

SEQ ID NO: 415981 - RNA, 22 nt, Human
cuaaagucagugcauugucaac

SEQ ID NO: 415982 - RNA, 22 nt, Human
cuaaaugaauaaacaaagacca

SEQ ID NO: 415983 - RNA, 21 nt, Human
cuaccauguccauccugcccc

SEQ ID NO: 415984 - RNA, 18 nt, Human
cucaggccccuuguccuc

SEQ ID NO: 415985 - RNA, 20 nt, Human
cucucacuggccagcagcug

SEQ ID NO: 415986 - RNA, 23 nt, Human
cucuuguugcaacaugugcaugu

SEQ ID NO: 415987 - RNA, 21 nt, Human
cugcaaacuaucugcauucuc

SEQ ID NO: 415988 - RNA, 20 nt, Human
cugcauucucuaccaugucc

SEQ ID NO: 415989 - RNA, 24 nt, Human
cuggcaaugagaaucaacuugcag

SEQ ID NO: 415990 - RNA, 19 nt, Human
cuggccucagauaucagaa

SEQ ID NO: 415991 - RNA, 24 nt, Human
cuggugccacaccuuuuguuuaca

SEQ ID NO: 415992 - RNA, 23 nt, Human
cuguaaggcaacccaggcagagc

SEQ ID NO: 415993 - RNA, 23 nt, Human
cuucaugaggcgcuucugcugaa

SEQ ID NO: 415994 - RNA, 20 nt, Human
gaaaaagaaaggguauggaa

SEQ ID NO: 415995 - RNA, 26 nt, Human
gacaacauuauaauuguuuguuuuuu

SEQ ID NO: 415996 - RNA, 23 nt, Human
gacaauuuaggccacuccuaccu

SEQ ID NO: 415997 - RNA, 18 nt, Human
gacagcuuguaugagacu

SEQ ID NO: 415998 - RNA, 25 nt, Human
gcaaacuaucugcauucucuaccau

SEQ ID NO: 415999 - RNA, 18 nt, Human
gccaagggugaagagccu

SEQ ID NO: 416000 - RNA, 19 nt, Human
gccucucacuggccagcag

SEQ ID NO: 416001 - RNA, 22 nt, Human
ggacaagcacaauucaauucuu

SEQ ID NO: 416002 - RNA, 20 nt, Human
ggagaaaaccuuugagucca

SEQ ID NO: 416003 - RNA, 24 nt, Human
ggagaaaaccuuugaguccacaaa

SEQ ID NO: 416004 - RNA, 20 nt, Human
ggagaaggcagccuaacgag

SEQ ID NO: 416005 - RNA, 20 nt, Human
ggaucugccugaaaguucuc

SEQ ID NO: 416006 - RNA, 24 nt, Human
ggcgcagggugagcccgagagaga

SEQ ID NO: 416007 - RNA, 23 nt, Human
ggcuggugccacaccuuuuguuu

SEQ ID NO: 416008 - RNA, 18 nt, Human
gggccuggagccgcccaa

SEQ ID NO: 416009 - RNA, 22 nt, Human
guaaggcaacccaggcagagcu

SEQ ID NO: 416010 - RNA, 18 nt, Human
gugaucuagcuccgaugc

SEQ ID NO: 416011 - RNA, 18 nt, Human
guggcuccugggacugcc

SEQ ID NO: 416012 - RNA, 19 nt, Human
uaaaaaaaccaguggacau

SEQ ID NO: 416013 - RNA, 22 nt, Human
uaaaaaaaccaguggacaugca

SEQ ID NO: 416014 - RNA, 23 nt, Human
uaaaaaaaccaguggacaugcaa

SEQ ID NO: 416015 - RNA, 24 nt, Human
uaaaaaaagacaaauaucaaaaua

SEQ ID NO: 416016 - RNA, 22 nt, Human
uaaacacaauggcaaaaacaaa

SEQ ID NO: 416017 - RNA, 24 nt, Human
uaaaugaauaaacaaagaccaaaa

SEQ ID NO: 416018 - RNA, 26 nt, Human
uacacacaagcaaguucauuugcaug

SEQ ID NO: 416019 - RNA, 20 nt, Human
uacaggcuaauggugggauc

SEQ ID NO: 416020 - RNA, 23 nt, Human
uacaugaaaaaaauucuaccuca

SEQ ID NO: 416021 - RNA, 22 nt, Human
uaccacaugcuccuguuggucu

SEQ ID NO: 416022 - RNA, 22 nt, Human
uaccauguccauccugccccgg

SEQ ID NO: 416023 - RNA, 24 nt, Human
uaucaugucgucccuagacaacau

SEQ ID NO: 416024 - RNA, 19 nt, Human
uaucuggacaagcacaauu

SEQ ID NO: 416025 - RNA, 22 nt, Human
ucaaauacacacaagcaaguuc

SEQ ID NO: 416026 - RNA, 23 nt, Human
ucaaauacacacaagcaaguuca

SEQ ID NO: 416027 - RNA, 21 nt, Human
ucaaugcugcuguugauucca

SEQ ID NO: 416028 - RNA, 20 nt, Human
ucacugcaaaaugccaaaac

SEQ ID NO: 416029 - RNA, 23 nt, Human
ucacuguaaggcaacccaggcag

SEQ ID NO: 416030 - RNA, 18 nt, Human
ucagaacacaaaugcuua

SEQ ID NO: 416031 - RNA, 23 nt, Human
ucagauaucagaacacaaaugcu

SEQ ID NO: 416032 - RNA, 18 nt, Human
ucaggaggacugaccaca

SEQ ID NO: 416033 - RNA, 23 nt, Human
ucagguuccggagaaggcagccu

SEQ ID NO: 416034 - RNA, 20 nt, Human
uccccuugcuuccuuguuag

SEQ ID NO: 416035 - RNA, 18 nt, Human
ucccugcaguagcccacc

SEQ ID NO: 416036 - RNA, 18 nt, Human
ucccuuguacacucgauc

SEQ ID NO: 416037 - RNA, 22 nt, Human
uccuguggcucugacucccagg

SEQ ID NO: 416038 - RNA, 22 nt, Human
uccuguuggucuuggagccccu

SEQ ID NO: 416039 - RNA, 23 nt, Human
uccuguuggucuuggagccccug

SEQ ID NO: 416040 - RNA, 24 nt, Human
ucucccauucucccagcauuucca

SEQ ID NO: 416041 - RNA, 23 nt, Human
ucuuaagagagccucccuuucag

SEQ ID NO: 416042 - RNA, 21 nt, Human
ucuuucagugacacuuuugcc

SEQ ID NO: 416043 - RNA, 26 nt, Human
ugaaucagcuggccugggucggaucc

SEQ ID NO: 416044 - RNA, 24 nt, Human
ugacuccaaggaaaucuuuaauau

SEQ ID NO: 416045 - RNA, 24 nt, Human
ugacuuccuaaaaccaccaauuuc

SEQ ID NO: 416046 - RNA, 26 nt, Human
ugacuuccuaaaaccaccaauuucau

SEQ ID NO: 416047 - RNA, 18 nt, Human
ugagaaucaacuugcagg

SEQ ID NO: 416048 - RNA, 23 nt, Human
ugaggaaaaacagcacauagagg

SEQ ID NO: 416049 - RNA, 18 nt, Human
ugaggacgugcacagggc

SEQ ID NO: 416050 - RNA, 23 nt, Human
ugcccagaaugcguccuccucag

SEQ ID NO: 416051 - RNA, 18 nt, Human
ugcuuucuccaucuuguc

SEQ ID NO: 416052 - RNA, 25 nt, Human
uggacaugcaaacaaagcaaaacua

SEQ ID NO: 416053 - RNA, 23 nt, Human
uggaugucuucaugaggcgcuuc

SEQ ID NO: 416054 - RNA, 19 nt, Human
uggauguguucagaugacc

SEQ ID NO: 416055 - RNA, 18 nt, Human
uggcaaaaacaaaaagca

SEQ ID NO: 416056 - RNA, 19 nt, Human
uggcaaaaacaaaaagcaa

SEQ ID NO: 416057 - RNA, 18 nt, Human
uggcucaggucccugcag

SEQ ID NO: 416058 - RNA, 22 nt, Human
uggcucaggucccugcaguagc

SEQ ID NO: 416059 - RNA, 23 nt, Human
uggcucaggucccugcaguagcc

SEQ ID NO: 416060 - RNA, 20 nt, Human
uggcuccugggacugccccc

SEQ ID NO: 416061 - RNA, 19 nt, Human
ugggcuguggaauccuggc

SEQ ID NO: 416062 - RNA, 18 nt, Human
uggggguggcaggucccc

SEQ ID NO: 416063 - RNA, 21 nt, Human
uguaaagaaauuauuuaaaau

SEQ ID NO: 416064 - RNA, 22 nt, Human
uguaaggcaacccaggcagagc

SEQ ID NO: 416065 - RNA, 22 nt, Human
uguccugaugccacauggucuu

SEQ ID NO: 416066 - RNA, 20 nt, Human
uguuuaaauaaaacaucugu

SEQ ID NO: 416067 - RNA, 22 nt, Human
uuaguuacauugguaauuacua

SEQ ID NO: 416068 - RNA, 18 nt, Human
uucguagaggcccuaaga

SEQ ID NO: 416069 - RNA, 23 nt, Human
uugaaguagccuaaauguaagau

SEQ ID NO: 416070 - RNA, 19 nt, Human
uugauuccaacgggcucag

SEQ ID NO: 416071 - RNA, 24 nt, Human
uugguuccgcagacgugcccacag

SEQ ID NO: 416072 - RNA, 18 nt, Human
uuugcacaccuucaugau

SEQ ID NO: 416073 - RNA, 20 nt, Human
aaaaacaucuucauuuugcu

SEQ ID NO: 416074 - RNA, 22 nt, Human
acagcccagagaccuugagcca

SEQ ID NO: 416075 - RNA, 24 nt, Human
accguccucgccuugaacacacca

SEQ ID NO: 416076 - RNA, 20 nt, Human
agagaagccaaacugaacag

SEQ ID NO: 416077 - RNA, 18 nt, Human
auuaacaccagcagcgaa

SEQ ID NO: 416078 - RNA, 21 nt, Human
cacgggaccccaggaaggcag

SEQ ID NO: 416079 - RNA, 24 nt, Human
cagagaccuugagccagggacccc

SEQ ID NO: 416080 - RNA, 25 nt, Human
cagcgaauccucuugcugaagacuu

SEQ ID NO: 416081 - RNA, 21 nt, Human
caggaaggcagccgagccacu

SEQ ID NO: 416082 - RNA, 23 nt, Human
cagggacccccgauccacuaacu

SEQ ID NO: 416083 - RNA, 21 nt, Human
ccacucgugcccacuagggac

SEQ ID NO: 416084 - RNA, 21 nt, Human
ccggggcggcggcggcggcuu

SEQ ID NO: 416085 - RNA, 18 nt, Human
ccuaaacacaagacuugc

SEQ ID NO: 416086 - RNA, 25 nt, Human
cgagccuaaacacaagacuugcuag

SEQ ID NO: 416087 - RNA, 22 nt, Human
cggcccgcggcgggcggcggcg

SEQ ID NO: 416088 - RNA, 23 nt, Human
cggcgacggcggccccggggcgg

SEQ ID NO: 416089 - RNA, 19 nt, Human
cggcggcggcggcggggcg

SEQ ID NO: 416090 - RNA, 24 nt, Human
cgggaccccaggaaggcagccgag

SEQ ID NO: 416091 - RNA, 22 nt, Human
cggggcugcgagcccggcgggc

SEQ ID NO: 416092 - RNA, 24 nt, Human
cucucauuggcauccaagcuuuau

SEQ ID NO: 416093 - RNA, 22 nt, Human
gaagccaaacugaacagccuca

SEQ ID NO: 416094 - RNA, 21 nt, Human
gacccccgauccacuaaccuc

SEQ ID NO: 416095 - RNA, 20 nt, Human
gagcccggcgggcgggcggc

SEQ ID NO: 416096 - RNA, 23 nt, Human
gagggcacgugcaccaaaguucu

SEQ ID NO: 416097 - RNA, 21 nt, Human
gauccacuaaccucuucuccc

SEQ ID NO: 416098 - RNA, 19 nt, Human
gccacucgugcccacuagg

SEQ ID NO: 416099 - RNA, 22 nt, Human
gcggcggcagggagacgcgcac

SEQ ID NO: 416100 - RNA, 27 nt, Human
gcggcggcgagccggggcggcggcggc

SEQ ID NO: 416101 - RNA, 20 nt, Human
gcggcggcggcggcggcggc

SEQ ID NO: 416102 - RNA, 20 nt, Human
gcggcggcggcggcggcggc

SEQ ID NO: 416103 - RNA, 23 nt, Human
gcggcggcggcggcggcggcggc

SEQ ID NO: 416104 - RNA, 22 nt, Human
gcggcggcggcggcggcggggc

SEQ ID NO: 416105 - RNA, 19 nt, Human
gcggcggcggcggcggggc

SEQ ID NO: 416106 - RNA, 19 nt, Human
gcggcgggcggcggcggcg

SEQ ID NO: 416107 - RNA, 22 nt, Human
gcggcgggcggcggcggcggca

SEQ ID NO: 416108 - RNA, 20 nt, Human
gcugcgagcccggcgggcgg

SEQ ID NO: 416109 - RNA, 18 nt, Human
ggccgggggccggggcug

SEQ ID NO: 416110 - RNA, 20 nt, Human
ggccgggggccggggcugcg

SEQ ID NO: 416111 - RNA, 23 nt, Human
ggcggcggcggcggcggcggcgg

SEQ ID NO: 416112 - RNA, 29 nt, Human
ggcgggcggcggcgagccggggcggcggg

SEQ ID NO: 416113 - RNA, 29 nt, Human
gggcggcggcgagccggggcggcggcgac

SEQ ID NO: 416114 - RNA, 28 nt, Human
gggcggcggcgagccggggcggcggcgg

SEQ ID NO: 416115 - RNA, 18 nt, Human
gggcggcggcggcggcag

SEQ ID NO: 416116 - RNA, 19 nt, Human
gggcggcggcggcggcggc

SEQ ID NO: 416117 - RNA, 24 nt, Human
gggcggcggcggcggcggcggcgg

SEQ ID NO: 416118 - RNA, 22 nt, Human
ggggcggcccgcggcgggcggc

SEQ ID NO: 416119 - RNA, 20 nt, Human
ggggcggcggcggcggcggc

SEQ ID NO: 416120 - RNA, 20 nt, Human
uaacagaugcacaaaagguc

SEQ ID NO: 416121 - RNA, 19 nt, Human
uagcugcagggcuggugca

SEQ ID NO: 416122 - RNA, 25 nt, Human
ucgucggcgacggcggccccggggc

SEQ ID NO: 416123 - RNA, 20 nt, Human
ugcagggcuggugcacggga

SEQ ID NO: 416124 - RNA, 19 nt, Human
uuaacaccagcagcgaauc

SEQ ID NO: 416125 - RNA, 24 nt, Human
uuaacaccagcagcgaauccucuu

SEQ ID NO: 416126 - RNA, 20 nt, Human
uuagguugugaguuucucug

SEQ ID NO: 416127 - RNA, 19 nt, Human
aaggagcugauccaacugc

SEQ ID NO: 416128 - RNA, 19 nt, Human
cgacacagggcagaucuuu

SEQ ID NO: 416129 - RNA, 19 nt, Human
gcuuauguaguugucuuga

SEQ ID NO: 416130 - RNA, 18 nt, Human
uaacaagaaaauuaacuu

SEQ ID NO: 416131 - RNA, 20 nt, Human
uaaggccugggugcacaguc

SEQ ID NO: 416132 - RNA, 19 nt, Human
uacuauauacaccuuugcc

SEQ ID NO: 416133 - RNA, 23 nt, Human
uauuagccagacacagaaaaagg

SEQ ID NO: 416134 - RNA, 23 nt, Human
ucugcagauaagacagugaauaa

SEQ ID NO: 416135 - RNA, 19 nt, Human
uuggacuguaaggccuggg

SEQ ID NO: 416136 - RNA, 20 nt, Human
uuuccacugcaggcggguua

SEQ ID NO: 416137 - RNA, 22 nt, Human
uuuuucuuuuuuguaaaggagc

SEQ ID NO: 416138 - RNA, 20 nt, Human
uuuuuuuuuuucuuuuuugg

SEQ ID NO: 416139 - RNA, 20 nt, Human
uuuuuuuuuuucuuuuuugu

SEQ ID NO: 416140 - RNA, 19 nt, Human
aaagucuuuccacaccauc

SEQ ID NO: 416141 - RNA, 22 nt, Human
aaccagugaauaugcucuuuac

SEQ ID NO: 416142 - RNA, 22 nt, Human
aacugcucaaagcaggcaauau

SEQ ID NO: 416143 - RNA, 24 nt, Human
aagaaacuauugguguaaacugac

SEQ ID NO: 416144 - RNA, 18 nt, Human
aaggaaaaaaucugacuu

SEQ ID NO: 416145 - RNA, 21 nt, Human
aauacaauucauaagcugccc

SEQ ID NO: 416146 - RNA, 24 nt, Human
aauaccacaguuuuuaagaccagc

SEQ ID NO: 416147 - RNA, 19 nt, Human
aauagcuuuaaagugguua

SEQ ID NO: 416148 - RNA, 27 nt, Human
aaucacuuaugacccagucucauucaa

SEQ ID NO: 416149 - RNA, 21 nt, Human
aaucugcuaauugguagaaaa

SEQ ID NO: 416150 - RNA, 20 nt, Human
aauggaauuaccacugcaaa

SEQ ID NO: 416151 - RNA, 19 nt, Human
aauggcaaaucuaaguuuc

SEQ ID NO: 416152 - RNA, 22 nt, Human
accacaguuuuuaagaccagca

SEQ ID NO: 416153 - RNA, 18 nt, Human
accacugcaaaaauaugg

SEQ ID NO: 416154 - RNA, 18 nt, Human
acuugaaaucacuuauga

SEQ ID NO: 416155 - RNA, 23 nt, Human
agcaggcaauaucaauugcacaa

SEQ ID NO: 416156 - RNA, 19 nt, Human
agcaguuuaucuaguuuuc

SEQ ID NO: 416157 - RNA, 25 nt, Human
agucagacauuaacauaguauauau

SEQ ID NO: 416158 - RNA, 24 nt, Human
auaccacaguuuuuaagaccagca

SEQ ID NO: 416159 - RNA, 18 nt, Human
aucaugaguaaaugaaua

SEQ ID NO: 416160 - RNA, 22 nt, Human
caauacuagccagacacagaga

SEQ ID NO: 416161 - RNA, 18 nt, Human
cacaauguagugaacaca

SEQ ID NO: 416162 - RNA, 20 nt, Human
cacagccaccagaauuaucu

SEQ ID NO: 416163 - RNA, 22 nt, Human
caccucugagcccagaaaaguc

SEQ ID NO: 416164 - RNA, 23 nt, Human
caccucugagcccagaaaagucu

SEQ ID NO: 416165 - RNA, 25 nt, Human
cagaauaaaaagguaaugaaaagua

SEQ ID NO: 416166 - RNA, 27 nt, Human
cagcauaagaauagcuuuaaagugguu

SEQ ID NO: 416167 - RNA, 22 nt, Human
cauauaauucaaaaguuaccac

SEQ ID NO: 416168 - RNA, 23 nt, Human
cauauaauucaaaaguuaccacc

SEQ ID NO: 416169 - RNA, 20 nt, Human
ccaggaaagaaggauuaaca

SEQ ID NO: 416170 - RNA, 20 nt, Human
cuagagccuuaaaaguggag

SEQ ID NO: 416171 - RNA, 24 nt, Human
cuccacacagccaccagaauuauc

SEQ ID NO: 416172 - RNA, 18 nt, Human
cuccaguggaaguaucug

SEQ ID NO: 416173 - RNA, 18 nt, Human
cucucugcaaaacaaaaa

SEQ ID NO: 416174 - RNA, 19 nt, Human
cucugagcccagaaaaguc

SEQ ID NO: 416175 - RNA, 22 nt, Human
gacccagucucauucaaaccag

SEQ ID NO: 416176 - RNA, 22 nt, Human
gagcaguuuaucuaguuuucaa

SEQ ID NO: 416177 - RNA, 22 nt, Human
gaucugacuuguuuucaucaaa

SEQ ID NO: 416178 - RNA, 18 nt, Human
gccuuauauauccaggaa

SEQ ID NO: 416179 - RNA, 24 nt, Human
gugugacuguguagaucugacuug

SEQ ID NO: 416180 - RNA, 22 nt, Human
guugaccaaacugcucaaagca

SEQ ID NO: 416181 - RNA, 21 nt, Human
uaaaaauaaaaucucagugcc

SEQ ID NO: 416182 - RNA, 21 nt, Human
uaaucacuacacucucucagu

SEQ ID NO: 416183 - RNA, 18 nt, Human
uacaauucauaagcugcc

SEQ ID NO: 416184 - RNA, 21 nt, Human
uacaauucauaagcugcccag

SEQ ID NO: 416185 - RNA, 19 nt, Human
uacacugacaaauugcaaa

SEQ ID NO: 416186 - RNA, 19 nt, Human
uagaaaagcuacaauggca

SEQ ID NO: 416187 - RNA, 21 nt, Human
uagaaaagcuacaauggcaaa

SEQ ID NO: 416188 - RNA, 20 nt, Human
uagugaacacaacaaaaaau

SEQ ID NO: 416189 - RNA, 21 nt, Human
uauaagaccuuagugcauagu

SEQ ID NO: 416190 - RNA, 21 nt, Human
uaugauuuucuucaccucuuc

SEQ ID NO: 416191 - RNA, 19 nt, Human
ucaaagcaggcaauaucaa

SEQ ID NO: 416192 - RNA, 23 nt, Human
ucaagcucgcuaauucccuccua

SEQ ID NO: 416193 - RNA, 26 nt, Human
ucagacauuaacauaguauauauacc

SEQ ID NO: 416194 - RNA, 18 nt, Human
ucagucagucagaaaugc

SEQ ID NO: 416195 - RNA, 24 nt, Human
ucagucagucagaaaugcugcuga

SEQ ID NO: 416196 - RNA, 25 nt, Human
uccacacagccaccagaauuaucuc

SEQ ID NO: 416197 - RNA, 18 nt, Human
uccacaccaucuauaaaa

SEQ ID NO: 416198 - RNA, 22 nt, Human
uccacaucaaccauauaauuca

SEQ ID NO: 416199 - RNA, 25 nt, Human
ucuucaccucuucuacuauuccaca

SEQ ID NO: 416200 - RNA, 25 nt, Human
ucuuuuuucuuuuuuuugucucuuu

SEQ ID NO: 416201 - RNA, 19 nt, Human
ucuuuuuuuugucucuuua

SEQ ID NO: 416202 - RNA, 20 nt, Human
ugacccagucucauucaaac

SEQ ID NO: 416203 - RNA, 20 nt, Human
ugaguuaaacaaucugcuaa

SEQ ID NO: 416204 - RNA, 19 nt, Human
ugcaaaaauauggagaaau

SEQ ID NO: 416205 - RNA, 22 nt, Human
ugcaaaacaaaaagcagauuuc

SEQ ID NO: 416206 - RNA, 27 nt, Human
ugcaaaacaaaaagcaggacggggucg

SEQ ID NO: 416207 - RNA, 23 nt, Human
ugccaauuuuccacaucaaccau

SEQ ID NO: 416208 - RNA, 19 nt, Human
uggaaucaccaaaauacca

SEQ ID NO: 416209 - RNA, 20 nt, Human
uggaaucaccaaaauaccac

SEQ ID NO: 416210 - RNA, 25 nt, Human
uggaauuaccacugcaaaaggucac

SEQ ID NO: 416211 - RNA, 20 nt, Human
ugguaaguugaccaaacugc

SEQ ID NO: 416212 - RNA, 22 nt, Human
ugugaaaauuuaauaccuccaa

SEQ ID NO: 416213 - RNA, 23 nt, Human
uucauguaauucuguccucuugg

SEQ ID NO: 416214 - RNA, 26 nt, Human
uuccacaucaaccauauaauucaaaa

SEQ ID NO: 416215 - RNA, 24 nt, Human
uugguuuggagcaguuuaucuagu

SEQ ID NO: 416216 - RNA, 21 nt, Human
aggcagcaggagggucagggc

SEQ ID NO: 416217 - RNA, 19 nt, Human
agggucagggcggagggcc

SEQ ID NO: 416218 - RNA, 20 nt, Human
ccuuuuauugaacguaccca

SEQ ID NO: 416219 - RNA, 21 nt, Human
gaaaacaauccuuuuauugaa

SEQ ID NO: 416220 - RNA, 22 nt, Human
gccuggagaggggagacugccc

SEQ ID NO: 416221 - RNA, 20 nt, Human
gcggagggccucggccugga

SEQ ID NO: 416222 - RNA, 19 nt, Human
gggucagggcggagggccu

SEQ ID NO: 416223 - RNA, 19 nt, Human
uuucuaggaaaacaauccu

SEQ ID NO: 416224 - RNA, 23 nt, Human
uuuuuuuuuuuuuuuuuucuagg

SEQ ID NO: 416225 - RNA, 24 nt, Human
uuuuuuuuuuuuuuuuuuuuucuu

SEQ ID NO: 416226 - RNA, 20 nt, Human
aaguuguuucauggcaucuu

SEQ ID NO: 416227 - RNA, 20 nt, Human
acgcagcgaauucacaacuc

SEQ ID NO: 416228 - RNA, 25 nt, Human
cacaacuccaacgccgacacccccc

SEQ ID NO: 416229 - RNA, 18 nt, Human
ugaaugguaagugaauac

SEQ ID NO: 416230 - RNA, 23 nt, Human
ugguaagugaauacuggcaaugu

SEQ ID NO: 416231 - RNA, 23 nt, Human
aaaacacacaaaaacauaaagca

SEQ ID NO: 416232 - RNA, 18 nt, Human
aaacagcuacaaaaccag

SEQ ID NO: 416233 - RNA, 22 nt, Human
aaacagcuacaaaaccaguggu

SEQ ID NO: 416234 - RNA, 19 nt, Human
aaagagguuaucauucuga

SEQ ID NO: 416235 - RNA, 20 nt, Human
aaccauguuguacaagcagg

SEQ ID NO: 416236 - RNA, 20 nt, Human
aacccuuuaaacauuuaaca

SEQ ID NO: 416237 - RNA, 19 nt, Human
aagaaacucuuaauuauaa

SEQ ID NO: 416238 - RNA, 21 nt, Human
aagcucgcagugcuggagagc

SEQ ID NO: 416239 - RNA, 19 nt, Human
aaucuaggcgacugauucg

SEQ ID NO: 416240 - RNA, 20 nt, Human
acacacaaaaacauaaagca

SEQ ID NO: 416241 - RNA, 24 nt, Human
acacacacauauaaaauacauaua

SEQ ID NO: 416242 - RNA, 19 nt, Human
acacauacacacacauaua

SEQ ID NO: 416243 - RNA, 24 nt, Human
acacauacacacacauauaaaaua

SEQ ID NO: 416244 - RNA, 18 nt, Human
acgcagccgccgcgaccu

SEQ ID NO: 416245 - RNA, 23 nt, Human
acuacaacuuaauaaaucacacu

SEQ ID NO: 416246 - RNA, 24 nt, Human
agaaacauaaaaaaggccgguacc

SEQ ID NO: 416247 - RNA, 19 nt, Human
agagagcgaugggaagggc

SEQ ID NO: 416248 - RNA, 19 nt, Human
agcaggacaguauagcauu

SEQ ID NO: 416249 - RNA, 22 nt, Human
agcugcgcaggcccuaaaccuu

SEQ ID NO: 416250 - RNA, 19 nt, Human
agcuuuuagucaacaguuu

SEQ ID NO: 416251 - RNA, 20 nt, Human
aggcauaauaucuuaugacc

SEQ ID NO: 416252 - RNA, 21 nt, Human
aggcccuagggaaucaacgug

SEQ ID NO: 416253 - RNA, 22 nt, Human
agucucugggauggaacaaccu

SEQ ID NO: 416254 - RNA, 30 nt, Human
auacauguguguacacauacacacacauag

SEQ ID NO: 416255 - RNA, 20 nt, Human
aucuagcuuuaaaaaaauaa

SEQ ID NO: 416256 - RNA, 22 nt, Human
caaaacacacaaaaacauaaag

SEQ ID NO: 416257 - RNA, 21 nt, Human
caaaugaauauuaauucauca

SEQ ID NO: 416258 - RNA, 20 nt, Human
caaauguaaucaucauggcc

SEQ ID NO: 416259 - RNA, 22 nt, Human
caacguggcaacugcauuuauc

SEQ ID NO: 416260 - RNA, 23 nt, Human
caagacuuuuggcccuaaggccu

SEQ ID NO: 416261 - RNA, 21 nt, Human
caaggaccuaggaacaugaca

SEQ ID NO: 416262 - RNA, 22 nt, Human
caaguuuagaaacaaaaaucac

SEQ ID NO: 416263 - RNA, 20 nt, Human
cacacaaaaacauaaagcag

SEQ ID NO: 416264 - RNA, 22 nt, Human
cacugaccaagucuaaagagaa

SEQ ID NO: 416265 - RNA, 18 nt, Human
cacugucacaagccuugc

SEQ ID NO: 416266 - RNA, 21 nt, Human
caggcccuaaaccuucacccu

SEQ ID NO: 416267 - RNA, 21 nt, Human
cauaaaaaaggcuaucuucaa

SEQ ID NO: 416268 - RNA, 26 nt, Human
cauuccauucacaaauauuuucaggc

SEQ ID NO: 416269 - RNA, 22 nt, Human
ccagccaguucgccaaggaccu

SEQ ID NO: 416270 - RNA, 22 nt, Human
cccacgcagccgccgcgaccuc

SEQ ID NO: 416271 - RNA, 23 nt, Human
cccacgcagccgccgcgaccucc

SEQ ID NO: 416272 - RNA, 24 nt, Human
cccacgcagccgccgcgaccuccc

SEQ ID NO: 416273 - RNA, 22 nt, Human
cccacugucacaagccuugcga

SEQ ID NO: 416274 - RNA, 23 nt, Human
ccccgcucccaaccacuuaguug

SEQ ID NO: 416275 - RNA, 21 nt, Human
cccuaaaccuucacccucaag

SEQ ID NO: 416276 - RNA, 22 nt, Human
cccuaaaccuucacccucaaga

SEQ ID NO: 416277 - RNA, 18 nt, Human
ccgccgcgaccuccccgc

SEQ ID NO: 416278 - RNA, 20 nt, Human
ccgccgcgaccuccccgcuc

SEQ ID NO: 416279 - RNA, 18 nt, Human
ccuugcggggcauggcag

SEQ ID NO: 416280 - RNA, 23 nt, Human
cgcccagccaguucgccaaggac

SEQ ID NO: 416281 - RNA, 24 nt, Human
cgcccagccaguucgccaaggacc

SEQ ID NO: 416282 - RNA, 24 nt, Human
cgcgaccuccccgcucccaaccac

SEQ ID NO: 416283 - RNA, 23 nt, Human
cgucuggaaaaaaacaacauucc

SEQ ID NO: 416284 - RNA, 30 nt, Human
cuagcgauauagauuuuuuaauacuuuccu

SEQ ID NO: 416285 - RNA, 19 nt, Human
cuauggugacuacaacuua

SEQ ID NO: 416286 - RNA, 18 nt, Human
cugaaguacagcuggauc

SEQ ID NO: 416287 - RNA, 20 nt, Human
cugaggcaaagacuuaagcu

SEQ ID NO: 416288 - RNA, 21 nt, Human
cuuaugaagaaaugaccagcu

SEQ ID NO: 416289 - RNA, 25 nt, Human
gaacaaaaaguggauuuuuucagaa

SEQ ID NO: 416290 - RNA, 19 nt, Human
gaggcagcacuguguccag

SEQ ID NO: 416291 - RNA, 18 nt, Human
gcagaauuucuuaaaauc

SEQ ID NO: 416292 - RNA, 23 nt, Human
gcauaauaucuuaugaccucagu

SEQ ID NO: 416293 - RNA, 18 nt, Human
gcccuaaaccuucacccu

SEQ ID NO: 416294 - RNA, 24 nt, Human
gccgcgaccuccccgcucccaacc

SEQ ID NO: 416295 - RNA, 19 nt, Human
gcugcugggaccccgccca

SEQ ID NO: 416296 - RNA, 24 nt, Human
ggaaacuacagggaaggcagaagc

SEQ ID NO: 416297 - RNA, 19 nt, Human
ggaaccacaaauguaauca

SEQ ID NO: 416298 - RNA, 21 nt, Human
gggaaggcagaagcucgcagu

SEQ ID NO: 416299 - RNA, 20 nt, Human
guccaguugcuugacauacc

SEQ ID NO: 416300 - RNA, 18 nt, Human
gugcagaaauuuccugaa

SEQ ID NO: 416301 - RNA, 22 nt, Human
gugcuaguuaaaugcauuaaga

SEQ ID NO: 416302 - RNA, 21 nt, Human
guggugcagaaauuuccugaa

SEQ ID NO: 416303 - RNA, 24 nt, Human
guuguagccaaucuaggcgacuga

SEQ ID NO: 416304 - RNA, 24 nt, Human
uaaaaaaggcuaucuucaaaucag

SEQ ID NO: 416305 - RNA, 21 nt, Human
uaaaauacaauuuuccagcaa

SEQ ID NO: 416306 - RNA, 26 nt, Human
uaaaaucacaaacuuugccagcacca

SEQ ID NO: 416307 - RNA, 21 nt, Human
uaagcuaccgaagcacgggca

SEQ ID NO: 416308 - RNA, 21 nt, Human
uaaguccugaagcagaggcag

SEQ ID NO: 416309 - RNA, 18 nt, Human
uaauaggaguaguguuua

SEQ ID NO: 416310 - RNA, 24 nt, Human
uacacauacacacacauauaaaau

SEQ ID NO: 416311 - RNA, 19 nt, Human
uacacauuuuuuaaaagcu

SEQ ID NO: 416312 - RNA, 20 nt, Human
uaccuggaucacaucuggga

SEQ ID NO: 416313 - RNA, 19 nt, Human
uacgcuugaaggggaagag

SEQ ID NO: 416314 - RNA, 25 nt, Human
uacgcuugaaggggaagagagcgau

SEQ ID NO: 416315 - RNA, 21 nt, Human
uagaaaauggagugucugugc

SEQ ID NO: 416316 - RNA, 21 nt, Human
uaguugaaaagacgccuucaa

SEQ ID NO: 416317 - RNA, 21 nt, Human
uauaaaauacaauuuuccagc

SEQ ID NO: 416318 - RNA, 20 nt, Human
uauacauguguguacacaua

SEQ ID NO: 416319 - RNA, 20 nt, Human
uaucuuaugaagaaaugacc

SEQ ID NO: 416320 - RNA, 21 nt, Human
uaugaaacagcuacaaaacca

SEQ ID NO: 416321 - RNA, 20 nt, Human
uauuacaauuuacuagcgau

SEQ ID NO: 416322 - RNA, 24 nt, Human
ucaaaacacacaaaaacauaaagc

SEQ ID NO: 416323 - RNA, 21 nt, Human
ucaacaguuuuaugaaacagc

SEQ ID NO: 416324 - RNA, 18 nt, Human
ucaccuccauaggcuggu

SEQ ID NO: 416325 - RNA, 18 nt, Human
ucagcauguuaaguccug

SEQ ID NO: 416326 - RNA, 19 nt, Human
ucagcauguuaaguccugg

SEQ ID NO: 416327 - RNA, 22 nt, Human
ucaggcauugcuccacuguacu

SEQ ID NO: 416328 - RNA, 19 nt, Human
uccuaggcugcugggaccc

SEQ ID NO: 416329 - RNA, 21 nt, Human
ucuauggagaaaaggguaguc

SEQ ID NO: 416330 - RNA, 22 nt, Human
ucuguauauauuauacaugugu

SEQ ID NO: 416331 - RNA, 25 nt, Human
ucuguauauauuauacaugugugua

SEQ ID NO: 416332 - RNA, 20 nt, Human
ugaaacagcuacaaaaccag

SEQ ID NO: 416333 - RNA, 20 nt, Human
ugacagaggcugacugauuc

SEQ ID NO: 416334 - RNA, 18 nt, Human
ugcaaggaaaaaagcuga

SEQ ID NO: 416335 - RNA, 21 nt, Human
ugcaaggaaaaaagcugaggc

SEQ ID NO: 416336 - RNA, 24 nt, Human
ugcuccacuguacuccuaggcugc

SEQ ID NO: 416337 - RNA, 19 nt, Human
uggaaaaaaacaacauucc

SEQ ID NO: 416338 - RNA, 20 nt, Human
uggaaccacaaauguaauca

SEQ ID NO: 416339 - RNA, 22 nt, Human
uggaaccacaaauguaaucauc

SEQ ID NO: 416340 - RNA, 18 nt, Human
ugggaagggcggcaucgg

SEQ ID NO: 416341 - RNA, 21 nt, Human
ugggaagggcggcaucgggca

SEQ ID NO: 416342 - RNA, 23 nt, Human
ugggaccccgcccagccaguucg

SEQ ID NO: 416343 - RNA, 19 nt, Human
ugggauggaacaaccugua

SEQ ID NO: 416344 - RNA, 22 nt, Human
uguacacauacacacacauaua

SEQ ID NO: 416345 - RNA, 26 nt, Human
uguacacauacacacacauauaaaau

SEQ ID NO: 416346 - RNA, 23 nt, Human
uguauauauuauacaugugugua

SEQ ID NO: 416347 - RNA, 21 nt, Human
ugucugugcuggguguuuuug

SEQ ID NO: 416348 - RNA, 18 nt, Human
uuaagauagaaaauggag

SEQ ID NO: 416349 - RNA, 21 nt, Human
uucagaaagucuuuuuuaaac

SEQ ID NO: 416350 - RNA, 24 nt, Human
uuggaaccacaaauguaaucaacc

SEQ ID NO: 416351 - RNA, 24 nt, Human
uuuaaaaacagcaaacuuccguaa

SEQ ID NO: 416352 - RNA, 22 nt, Human
uuuaaaauauuuacuucacuga

SEQ ID NO: 416353 - RNA, 23 nt, Human
uuuaaacucaaacauugggaaac

SEQ ID NO: 416354 - RNA, 23 nt, Human
uuuaucaguucaugauauuaucu

SEQ ID NO: 416355 - RNA, 19 nt, Human
uuugcccauuuccucucca

SEQ ID NO: 416356 - RNA, 20 nt, Human
uuuucagaaagucuuuuuua

SEQ ID NO: 416357 - RNA, 19 nt, Human
uuuuuaacuaaggaaaauu

SEQ ID NO: 416358 - RNA, 19 nt, Human
aaaaacuuuggcccccaca

SEQ ID NO: 416359 - RNA, 25 nt, Human
aauaaaaagcagacaaauagcuaaa

SEQ ID NO: 416360 - RNA, 21 nt, Human
acagaccuuucaguacauggc

SEQ ID NO: 416361 - RNA, 18 nt, Human
acagcaaaugaaaucuga

SEQ ID NO: 416362 - RNA, 25 nt, Human
accaagccccugcagccuagaaacc

SEQ ID NO: 416363 - RNA, 22 nt, Human
accccaacucucuacauacauu

SEQ ID NO: 416364 - RNA, 21 nt, Human
acggagaagauggggcgacag

SEQ ID NO: 416365 - RNA, 31 nt, Human
acgucacagcuacuggguuacagaaccaguu

SEQ ID NO: 416366 - RNA, 19 nt, Human
agagcuucugccccagucc

SEQ ID NO: 416367 - RNA, 18 nt, Human
agagggugauuuuugcuu

SEQ ID NO: 416368 - RNA, 24 nt, Human
aguaaccucgagguccuugagggu

SEQ ID NO: 416369 - RNA, 24 nt, Human
auacaaggguaaauaaaaagcaga

SEQ ID NO: 416370 - RNA, 19 nt, Human
auccugagucccuccuuca

SEQ ID NO: 416371 - RNA, 23 nt, Human
auuuuugcuuuaaaaucaucagg

SEQ ID NO: 416372 - RNA, 18 nt, Human
caagcggcggggcgggca

SEQ ID NO: 416373 - RNA, 21 nt, Human
caccaccuaccaagccccugc

SEQ ID NO: 416374 - RNA, 22 nt, Human
caccaggagcaaguuuuucauc

SEQ ID NO: 416375 - RNA, 20 nt, Human
cacuucauuuuaggcagagc

SEQ ID NO: 416376 - RNA, 18 nt, Human
cagccuagaaacccgcca

SEQ ID NO: 416377 - RNA, 18 nt, Human
caggggccgccaagcggc

SEQ ID NO: 416378 - RNA, 23 nt, Human
cauaaaaacuuuggcccccacag

SEQ ID NO: 416379 - RNA, 22 nt, Human
cccacauaaaaacuuuggcccc

SEQ ID NO: 416380 - RNA, 27 nt, Human
ccccugcagccuagaaacccgccaccc

SEQ ID NO: 416381 - RNA, 24 nt, Human
ccccuugccaccaccuaccaagcc

SEQ ID NO: 416382 - RNA, 25 nt, Human
ccccuugccaccaccuaccaagccc

SEQ ID NO: 416383 - RNA, 22 nt, Human
cccgccacccgagaggcacuac

SEQ ID NO: 416384 - RNA, 19 nt, Human
cccugcagccuagaaaccc

SEQ ID NO: 416385 - RNA, 19 nt, Human
ccgccgcccccuugccacc

SEQ ID NO: 416386 - RNA, 22 nt, Human
ccgccgcccccuugccaccacc

SEQ ID NO: 416387 - RNA, 24 nt, Human
ccgccgcccccuugccaccaccua

SEQ ID NO: 416388 - RNA, 18 nt, Human
ccgccgccgcccccuugc

SEQ ID NO: 416389 - RNA, 18 nt, Human
ccgccgccgcugccgccg

SEQ ID NO: 416390 - RNA, 24 nt, Human
ccgccgccgcugccgccgcugccg

SEQ ID NO: 416391 - RNA, 24 nt, Human
ccgccgcugccgccgcugccgccg

SEQ ID NO: 416392 - RNA, 24 nt, Human
ccgccgcugccgccguugccgccg

SEQ ID NO: 416393 - RNA, 21 nt, Human
ccgcugccgccgcugccgccg

SEQ ID NO: 416394 - RNA, 21 nt, Human
ccgcugccgccgcugccgccg

SEQ ID NO: 416395 - RNA, 21 nt, Human
ccgcugccgccguugccgccg

SEQ ID NO: 416396 - RNA, 24 nt, Human
ccgcugccgccguugccgccgcug

SEQ ID NO: 416397 - RNA, 19 nt, Human
ccggcauccgccgccgccc

SEQ ID NO: 416398 - RNA, 27 nt, Human
ccuaccaagccccugcagccuagaaac

SEQ ID NO: 416399 - RNA, 19 nt, Human
ccuagaaacccgccacccg

SEQ ID NO: 416400 - RNA, 27 nt, Human
ccuagaaacccgccacccgagaggcac

SEQ ID NO: 416401 - RNA, 28 nt, Human
ccucugaggauaacauacaaggguaaag

SEQ ID NO: 416402 - RNA, 24 nt, Human
cgagaggcacuacugcucagccca

SEQ ID NO: 416403 - RNA, 22 nt, Human
cguauaaagcaacagcaaauga

SEQ ID NO: 416404 - RNA, 18 nt, Human
cugaaugcgggaaugaca

SEQ ID NO: 416405 - RNA, 23 nt, Human
cugccgccguugccgccgcuggc

SEQ ID NO: 416406 - RNA, 27 nt, Human
gagaagauggggcgacaguagggucua

SEQ ID NO: 416407 - RNA, 19 nt, Human
gcccacauaaaaacuuugg

SEQ ID NO: 416408 - RNA, 23 nt, Human
gcccccacaggggaugagauggc

SEQ ID NO: 416409 - RNA, 23 nt, Human
gccccugcagccuagaaacccgc

SEQ ID NO: 416410 - RNA, 24 nt, Human
gcccgaaaagcaaaucuugaaagc

SEQ ID NO: 416411 - RNA, 20 nt, Human
gccgccgccgcugccgccgc

SEQ ID NO: 416412 - RNA, 22 nt, Human
gccgccgcugccgccguugccg

SEQ ID NO: 416413 - RNA, 19 nt, Human
ggagaagauggggcgacag

SEQ ID NO: 416414 - RNA, 21 nt, Human
guaagcucuuucaacuagagg

SEQ ID NO: 416415 - RNA, 19 nt, Human
uaaaaagcagacaaauagc

SEQ ID NO: 416416 - RNA, 19 nt, Human
uaaaaagcagacaaauagc

SEQ ID NO: 416417 - RNA, 20 nt, Human
uaaaaagcagacaaauagcu

SEQ ID NO: 416418 - RNA, 22 nt, Human
uaaaaagcagacaaauagcuaa

SEQ ID NO: 416419 - RNA, 20 nt, Human
uaaauuuuccuuuaaagagu

SEQ ID NO: 416420 - RNA, 21 nt, Human
uagaaacccgccacccgagag

SEQ ID NO: 416421 - RNA, 21 nt, Human
uagaagagauggaacgucaca

SEQ ID NO: 416422 - RNA, 18 nt, Human
uagccucuuaauccaacu

SEQ ID NO: 416423 - RNA, 24 nt, Human
uaucucaacugccuugcaguuugc

SEQ ID NO: 416424 - RNA, 23 nt, Human
uauuccguuuucccaaaguuuua

SEQ ID NO: 416425 - RNA, 20 nt, Human
ucaagggauuuuugucuggu

SEQ ID NO: 416426 - RNA, 21 nt, Human
ucagcccagacaguagccgcc

SEQ ID NO: 416427 - RNA, 23 nt, Human
uccaacuaucucaacugccuugc

SEQ ID NO: 416428 - RNA, 23 nt, Human
ucccuugggauccaccaggagca

SEQ ID NO: 416429 - RNA, 19 nt, Human
ucucaacugccuugcaguu

SEQ ID NO: 416430 - RNA, 23 nt, Human
ucuuccggcauccgccgccgccc

SEQ ID NO: 416431 - RNA, 18 nt, Human
ugagaaacuaagggugug

SEQ ID NO: 416432 - RNA, 21 nt, Human
ugagucccuccuucauuccca

SEQ ID NO: 416433 - RNA, 23 nt, Human
ugccagaaagcaugccuaguucc

SEQ ID NO: 416434 - RNA, 19 nt, Human
ugcucagcccagacaguag

SEQ ID NO: 416435 - RNA, 21 nt, Human
uggcagaggaggggaaggcca

SEQ ID NO: 416436 - RNA, 19 nt, Human
ugggauuuacaucaaggga

SEQ ID NO: 416437 - RNA, 24 nt, Human
ugucucgucuagccucuuaaucca

SEQ ID NO: 416438 - RNA, 18 nt, Human
ugugguacccgggggcag

SEQ ID NO: 416439 - RNA, 22 nt, Human
uucgaaacauaauuuaauauuc

SEQ ID NO: 416440 - RNA, 20 nt, Human
uugccagaaagcaugccuag

SEQ ID NO: 416441 - RNA, 20 nt, Human
augauaaauagcugaauucc

SEQ ID NO: 416442 - RNA, 22 nt, Human
uaacaguauccaugacuuucau

SEQ ID NO: 416443 - RNA, 23 nt, Human
uaguaguuaauauuuccuaaauc

SEQ ID NO: 416444 - RNA, 25 nt, Human
ucuaaagaauucccuuuuuaaacuu

SEQ ID NO: 416445 - RNA, 24 nt, Human
ugguauuagaucuuccuggacaag

SEQ ID NO: 416446 - RNA, 27 nt, Human
acaucgaggacaguggugguucuucuc

SEQ ID NO: 416447 - RNA, 19 nt, Human
accuggugagccucagagg

SEQ ID NO: 416448 - RNA, 24 nt, Human
aggagaguggagaccuucgagggg

SEQ ID NO: 416449 - RNA, 23 nt, Human
cagcggugacccccugcauuagg

SEQ ID NO: 416450 - RNA, 24 nt, Human
cccaaagaacaaggccaacuacac

SEQ ID NO: 416451 - RNA, 18 nt, Human
ccccaaagaacaaggcca

SEQ ID NO: 416452 - RNA, 22 nt, Human
cccccaaagaacaaggccaacu

SEQ ID NO: 416453 - RNA, 18 nt, Human
ccugugauagggcuggga

SEQ ID NO: 416454 - RNA, 26 nt, Human
cuaauacccccaaagaacaaggccaa

SEQ ID NO: 416455 - RNA, 22 nt, Human
cugcggcugaaguggacggaac

SEQ ID NO: 416456 - RNA, 22 nt, Human
cugcggcugaaguggacggaac

SEQ ID NO: 416457 - RNA, 20 nt, Human
cuucauuugacugcaaaguc

SEQ ID NO: 416458 - RNA, 19 nt, Human
gaggagcccagaggagagu

SEQ ID NO: 416459 - RNA, 20 nt, Human
gcaaggaggagcccagagga

SEQ ID NO: 416460 - RNA, 22 nt, Human
gggucuguuccucuccggaggc

SEQ ID NO: 416461 - RNA, 22 nt, Human
gggucuguuccucuccggaggc

SEQ ID NO: 416462 - RNA, 22 nt, Human
gguacagggugggugagaaaga

SEQ ID NO: 416463 - RNA, 21 nt, Human
uccugugauagggcugggaga

SEQ ID NO: 416464 - RNA, 18 nt, Human
ugacagagagagugaggg

SEQ ID NO: 416465 - RNA, 18 nt, Human
ugacagagagagugaggg

SEQ ID NO: 416466 - RNA, 19 nt, Human
ugagaaagaaaguagaagg

SEQ ID NO: 416467 - RNA, 20 nt, Human
uggagaccuucgaggggggc

SEQ ID NO: 416468 - RNA, 18 nt, Human
ugggagagccaagaggac

SEQ ID NO: 416469 - RNA, 21 nt, Human
ugggaggaaagggggauagca

SEQ ID NO: 416470 - RNA, 22 nt, Human
uggguggugggaggaaaggggg

SEQ ID NO: 416471 - RNA, 23 nt, Human
aaugcaggggugcacauguuggg

SEQ ID NO: 416472 - RNA, 18 nt, Human
agguccucuggagaccag

SEQ ID NO: 416473 - RNA, 20 nt, Human
cacauguuggggcugcccuu

SEQ ID NO: 416474 - RNA, 23 nt, Human
cagcauggccaguacagcaggcu

SEQ ID NO: 416475 - RNA, 18 nt, Human
ccagguggggcuggccca

SEQ ID NO: 416476 - RNA, 18 nt, Human
ccgccgccucgcccgcuc

SEQ ID NO: 416477 - RNA, 23 nt, Human
ccucgcccgcucccggcuucucu

SEQ ID NO: 416478 - RNA, 18 nt, Human
ccuucaggaccagcuggg

SEQ ID NO: 416479 - RNA, 26 nt, Human
ccuuuggcacucacugggguggguca

SEQ ID NO: 416480 - RNA, 19 nt, Human
cgcugcugccgccgccgcc

SEQ ID NO: 416481 - RNA, 19 nt, Human
cgcugcugccgccgccgcc

SEQ ID NO: 416482 - RNA, 18 nt, Human
cuccagguggggcuggcc

SEQ ID NO: 416483 - RNA, 21 nt, Human
gagcuccagguggggcuggcc

SEQ ID NO: 416484 - RNA, 18 nt, Human
ucacuggggugggucaag

SEQ ID NO: 416485 - RNA, 19 nt, Human
ucacuggggugggucaagg

SEQ ID NO: 416486 - RNA, 20 nt, Human
uggggcuggcccagcauggc

SEQ ID NO: 416487 - RNA, 24 nt, Human
uggggugggucaagggagagcaaa

SEQ ID NO: 416488 - RNA, 19 nt, Human
aaggacccaagaaaugcag

SEQ ID NO: 416489 - RNA, 19 nt, Human
acucuaaggacccaagaaa

SEQ ID NO: 416490 - RNA, 24 nt, Human
agacaggaaaggagacccucuugg

SEQ ID NO: 416491 - RNA, 21 nt, Human
aggaggaccgagcagcauucu

SEQ ID NO: 416492 - RNA, 18 nt, Human
augcugggcccucuaggu

SEQ ID NO: 416493 - RNA, 23 nt, Human
cacacauuuauggaggguugucc

SEQ ID NO: 416494 - RNA, 22 nt, Human
cagcauucucuguagaggaaga

SEQ ID NO: 416495 - RNA, 18 nt, Human
cagccacaguccaucucu

SEQ ID NO: 416496 - RNA, 24 nt, Human
cagccacaguccaucucucuuuuu

SEQ ID NO: 416497 - RNA, 20 nt, Human
ccugaaaagaagggcaggug

SEQ ID NO: 416498 - RNA, 18 nt, Human
cucucuuuuuucucuccu

SEQ ID NO: 416499 - RNA, 19 nt, Human
cuggccaccaacaguuucc

SEQ ID NO: 416500 - RNA, 21 nt, Human
gagcagcccaggccggucagu

SEQ ID NO: 416501 - RNA, 19 nt, Human
uaaggacccaagaaaugca

SEQ ID NO: 416502 - RNA, 20 nt, Human
uaaggacccaagaaaugcag

SEQ ID NO: 416503 - RNA, 23 nt, Human
uacccacuggccaccaacaguuu

SEQ ID NO: 416504 - RNA, 18 nt, Human
uaggaggaccgagcagca

SEQ ID NO: 416505 - RNA, 19 nt, Human
ucccagccacaugcugggc

SEQ ID NO: 416506 - RNA, 20 nt, Human
ucccugaaaagaagggcagg

SEQ ID NO: 416507 - RNA, 18 nt, Human
ucuuuuuucucuccuucc

SEQ ID NO: 416508 - RNA, 18 nt, Human
uggaggguugucccugaa

SEQ ID NO: 416509 - RNA, 23 nt, Human
uguagaggaagacaggaaaggag

SEQ ID NO: 416510 - RNA, 21 nt, Human
uuuauggaggguugucccuga

SEQ ID NO: 416511 - RNA, 18 nt, Human
uuuuuuuuuuuuagggau

SEQ ID NO: 416512 - RNA, 25 nt, Human
uuuuuuuuuuuuuuuuuuuuagggg

SEQ ID NO: 416513 - RNA, 21 nt, Human
aaaaaagacaaagauaccaca

SEQ ID NO: 416514 - RNA, 26 nt, Human
aaaagaccaaaaugcuagugggcacc

SEQ ID NO: 416515 - RNA, 18 nt, Human
aaagagacagacccccag

SEQ ID NO: 416516 - RNA, 21 nt, Human
aaagagaugaggcaacagguc

SEQ ID NO: 416517 - RNA, 22 nt, Human
aaagguccuccauguggauccu

SEQ ID NO: 416518 - RNA, 24 nt, Human
aaauccuuucccucucccccaccc

SEQ ID NO: 416519 - RNA, 19 nt, Human
aagaagaagaaggguggca

SEQ ID NO: 416520 - RNA, 21 nt, Human
aagagacagacccccagaaca

SEQ ID NO: 416521 - RNA, 23 nt, Human
aagagggaaauaagaaaaaacaa

SEQ ID NO: 416522 - RNA, 19 nt, Human
aagcagaggacaaacacau

SEQ ID NO: 416523 - RNA, 19 nt, Human
aaggggaaugaaaaaaaaa

SEQ ID NO: 416524 - RNA, 22 nt, Human
aagguaccuuccccuaaguccc

SEQ ID NO: 416525 - RNA, 24 nt, Human
aagguaccuuccccuaagucccug

SEQ ID NO: 416526 - RNA, 21 nt, Human
aauccuuucccucucccccac

SEQ ID NO: 416527 - RNA, 19 nt, Human
acaaagagagcacaaagac

SEQ ID NO: 416528 - RNA, 18 nt, Human
acacaaaguuuuugaaga

SEQ ID NO: 416529 - RNA, 18 nt, Human
acaccacagaggaacagg

SEQ ID NO: 416530 - RNA, 20 nt, Human
acagcaguucacagcaugga

SEQ ID NO: 416531 - RNA, 23 nt, Human
acagcauggagacaacuucccac

SEQ ID NO: 416532 - RNA, 21 nt, Human
acaggucucuggagucgagag

SEQ ID NO: 416533 - RNA, 20 nt, Human
acaguggcagaguggcgagg

SEQ ID NO: 416534 - RNA, 23 nt, Human
acauuagguggagauuucuggga

SEQ ID NO: 416535 - RNA, 19 nt, Human
accccacccccccaaaaaa

SEQ ID NO: 416536 - RNA, 19 nt, Human
acggacugacagacaccac

SEQ ID NO: 416537 - RNA, 20 nt, Human
acugcaaacuguagaaacaa

SEQ ID NO: 416538 - RNA, 23 nt, Human
acuguugacagcaggauggucuc

SEQ ID NO: 416539 - RNA, 24 nt, Human
acuuggaagggacucaaaaagccc

SEQ ID NO: 416540 - RNA, 19 nt, Human
agaaaaaacaaagagagca

SEQ ID NO: 416541 - RNA, 24 nt, Human
agaaaaaacaaagagagcacaaag

SEQ ID NO: 416542 - RNA, 23 nt, Human
agaaaagagacagacccccagaa

SEQ ID NO: 416543 - RNA, 18 nt, Human
agaaaggaccaaugggga

SEQ ID NO: 416544 - RNA, 23 nt, Human
agaaccaagcccccucccacccc

SEQ ID NO: 416545 - RNA, 18 nt, Human
agaagaagaaggguggca

SEQ ID NO: 416546 - RNA, 19 nt, Human
agaagaagaaggguggcag

SEQ ID NO: 416547 - RNA, 25 nt, Human
agaaggugggggugcguuaacaacg

SEQ ID NO: 416548 - RNA, 26 nt, Human
agacaagagggaaauaagagggaccc

SEQ ID NO: 416549 - RNA, 27 nt, Human
agaccacaccacacuccauccugucca

SEQ ID NO: 416550 - RNA, 24 nt, Human
agagaaacccuguugggccacuga

SEQ ID NO: 416551 - RNA, 21 nt, Human
agaggaacaggggaguuagcc

SEQ ID NO: 416552 - RNA, 23 nt, Human
agaggaacaggggaguuagccug

SEQ ID NO: 416553 - RNA, 23 nt, Human
agcaaaagaccaaaaugcuacca

SEQ ID NO: 416554 - RNA, 20 nt, Human
agcagggcccugugcccuuu

SEQ ID NO: 416555 - RNA, 19 nt, Human
agccccuaaccuagggcag

SEQ ID NO: 416556 - RNA, 19 nt, Human
agcuccacaacccaccccu

SEQ ID NO: 416557 - RNA, 19 nt, Human
aggagagaaggugggggug

SEQ ID NO: 416558 - RNA, 19 nt, Human
aggagucagugaugggggu

SEQ ID NO: 416559 - RNA, 23 nt, Human
aggcagggagaaaaggggugggg

SEQ ID NO: 416560 - RNA, 21 nt, Human
aggcaggggaugaggaggagc

SEQ ID NO: 416561 - RNA, 22 nt, Human
aggcccagccacagcagcccua

SEQ ID NO: 416562 - RNA, 18 nt, Human
agggaaagaagagggaga

SEQ ID NO: 416563 - RNA, 21 nt, Human
aggggaugaggaggagcugcc

SEQ ID NO: 416564 - RNA, 20 nt, Human
aggguuugccauuggaauac

SEQ ID NO: 416565 - RNA, 19 nt, Human
agguaggugaaggacugag

SEQ ID NO: 416566 - RNA, 22 nt, Human
aguaaaaaaaaaagagcaagaa

SEQ ID NO: 416567 - RNA, 19 nt, Human
agugcuggugaggcccagc

SEQ ID NO: 416568 - RNA, 22 nt, Human
augaaaaaagacaaagauacca

SEQ ID NO: 416569 - RNA, 22 nt, Human
caaaaugcuaccauucucaggc

SEQ ID NO: 416570 - RNA, 24 nt, Human
caaaaugcuaccauucucaggcac

SEQ ID NO: 416571 - RNA, 19 nt, Human
caaccugcuccucagacca

SEQ ID NO: 416572 - RNA, 23 nt, Human
caagaagaagaaggguggcagga

SEQ ID NO: 416573 - RNA, 20 nt, Human
caagcccccucccacccccu

SEQ ID NO: 416574 - RNA, 21 nt, Human
caagcccccucccacccccuc

SEQ ID NO: 416575 - RNA, 22 nt, Human
caaggucucagcucuguaaccc

SEQ ID NO: 416576 - RNA, 22 nt, Human
cacaccccacagcaguucacag

SEQ ID NO: 416577 - RNA, 18 nt, Human
cacaguucugaagcaaaa

SEQ ID NO: 416578 - RNA, 28 nt, Human
cacauggccauaugucugacaauucauc

SEQ ID NO: 416579 - RNA, 23 nt, Human
caccacacuccauccuguccaca

SEQ ID NO: 416580 - RNA, 20 nt, Human
cacuaggcuccaucauuccc

SEQ ID NO: 416581 - RNA, 22 nt, Human
cacuccauccuguccacaaagg

SEQ ID NO: 416582 - RNA, 20 nt, Human
cacugcaaacuguagaaaca

SEQ ID NO: 416583 - RNA, 22 nt, Human
cagacccccagaacaggacaua

SEQ ID NO: 416584 - RNA, 21 nt, Human
cagaggacaaacacauggcca

SEQ ID NO: 416585 - RNA, 18 nt, Human
cagauuuauauugaaaau

SEQ ID NO: 416586 - RNA, 21 nt, Human
cagcaacuaagaucccaaauc

SEQ ID NO: 416587 - RNA, 21 nt, Human
cagcucuguaaccccaccccc

SEQ ID NO: 416588 - RNA, 23 nt, Human
caggccuaucucauaacccuggc

SEQ ID NO: 416589 - RNA, 22 nt, Human
caggggcugccuaggaagacac

SEQ ID NO: 416590 - RNA, 19 nt, Human
caggguuuguuguggcugg

SEQ ID NO: 416591 - RNA, 24 nt, Human
caguaauccuugccccucaaccca

SEQ ID NO: 416592 - RNA, 25 nt, Human
cauaacccuggccccagccagaggc

SEQ ID NO: 416593 - RNA, 19 nt, Human
cauacaggccuaucucaua

SEQ ID NO: 416594 - RNA, 19 nt, Human
ccacccccucaggaccccc

SEQ ID NO: 416595 - RNA, 22 nt, Human
cccacagccaccuccuucagca

SEQ ID NO: 416596 - RNA, 19 nt, Human
cccacccccccaaaaaaaa

SEQ ID NO: 416597 - RNA, 22 nt, Human
cccagaacaggacauauuucau

SEQ ID NO: 416598 - RNA, 18 nt, Human
cccagaguuucccacucc

SEQ ID NO: 416599 - RNA, 23 nt, Human
cccagccccuaaccuagggcagc

SEQ ID NO: 416600 - RNA, 24 nt, Human
cccaggguuuguuguggcuggggu

SEQ ID NO: 416601 - RNA, 21 nt, Human
ccccaccccaaccugcuccuc

SEQ ID NO: 416602 - RNA, 21 nt, Human
cccccaaaaaaaaggaaaaaa

SEQ ID NO: 416603 - RNA, 21 nt, Human
ccccccaaaaaaaaggaaaaa

SEQ ID NO: 416604 - RNA, 21 nt, Human
cccccccaaaaaaaaggaaaa

SEQ ID NO: 416605 - RNA, 20 nt, Human
cccccucaggaccccccaga

SEQ ID NO: 416606 - RNA, 23 nt, Human
cccccucccacccccucaggacc

SEQ ID NO: 416607 - RNA, 18 nt, Human
ccccucaacccaauacag

SEQ ID NO: 416608 - RNA, 24 nt, Human
cccuaagucccuggaaaagugguc

SEQ ID NO: 416609 - RNA, 24 nt, Human
cccugcccuagaacccaggguuug

SEQ ID NO: 416610 - RNA, 22 nt, Human
cccuggccccagccagaggccc

SEQ ID NO: 416611 - RNA, 18 nt, Human
cccugggaaaaagacgug

SEQ ID NO: 416612 - RNA, 21 nt, Human
ccucuuggggggccccacagc

SEQ ID NO: 416613 - RNA, 22 nt, Human
cgagaccccugaggcaaagaac

SEQ ID NO: 416614 - RNA, 18 nt, Human
cggggacgaaagugaggg

SEQ ID NO: 416615 - RNA, 20 nt, Human
cuaauucuacucuccuuggc

SEQ ID NO: 416616 - RNA, 22 nt, Human
cuagaacccaggguuuguugug

SEQ ID NO: 416617 - RNA, 22 nt, Human
cuagucauugcagccaucagaa

SEQ ID NO: 416618 - RNA, 25 nt, Human
cucagaccacaccacacuccauccu

SEQ ID NO: 416619 - RNA, 22 nt, Human
cuccaucauucccagggcuggu

SEQ ID NO: 416620 - RNA, 20 nt, Human
cucccacccccucaggaccc

SEQ ID NO: 416621 - RNA, 22 nt, Human
cucccccaccccaaccugcucc

SEQ ID NO: 416622 - RNA, 21 nt, Human
cuccuuggcaaaaaugucuga

SEQ ID NO: 416623 - RNA, 19 nt, Human
cucuguaaccccacccccc

SEQ ID NO: 416624 - RNA, 21 nt, Human
cucuguaaccccaccccccca

SEQ ID NO: 416625 - RNA, 21 nt, Human
cugacagacaccacagaggaa

SEQ ID NO: 416626 - RNA, 23 nt, Human
cugcacaccccacagcaguucac

SEQ ID NO: 416627 - RNA, 19 nt, Human
cuguacaggagucuacaua

SEQ ID NO: 416628 - RNA, 24 nt, Human
cuuaaaauaaacacuccccagccc

SEQ ID NO: 416629 - RNA, 21 nt, Human
cuuaaggcaggggaugaggag

SEQ ID NO: 416630 - RNA, 22 nt, Human
cuuccccuaagucccuggaaaa

SEQ ID NO: 416631 - RNA, 24 nt, Human
gaacaaaucacaacaaucacacac

SEQ ID NO: 416632 - RNA, 20 nt, Human
gacagcaggagaaaccccga

SEQ ID NO: 416633 - RNA, 21 nt, Human
gacagcaggagaaaccccgau

SEQ ID NO: 416634 - RNA, 23 nt, Human
gagaaacccuguugggccacuga

SEQ ID NO: 416635 - RNA, 19 nt, Human
gagaagacagacggacuga

SEQ ID NO: 416636 - RNA, 19 nt, Human
gagagcacaaagaccaguu

SEQ ID NO: 416637 - RNA, 24 nt, Human
gagccucccaggggagacacuggg

SEQ ID NO: 416638 - RNA, 24 nt, Human
gagcuccacaacccaccccuuugg

SEQ ID NO: 416639 - RNA, 20 nt, Human
gaggaguuuggcacuguggc

SEQ ID NO: 416640 - RNA, 24 nt, Human
gagggccaguugcugcccuggagg

SEQ ID NO: 416641 - RNA, 18 nt, Human
gaguggagaugggaaaga

SEQ ID NO: 416642 - RNA, 19 nt, Human
gaucuauucagcccuccuc

SEQ ID NO: 416643 - RNA, 18 nt, Human
gcaaacuguagaaacaag

SEQ ID NO: 416644 - RNA, 21 nt, Human
gcaccggcuucuuuaggccaa

SEQ ID NO: 416645 - RNA, 25 nt, Human
gcccccucccacccccucaggaccc

SEQ ID NO: 416646 - RNA, 24 nt, Human
gcccugccuaagugagcuccacaa

SEQ ID NO: 416647 - RNA, 22 nt, Human
gcucagagggacugagucagcu

SEQ ID NO: 416648 - RNA, 21 nt, Human
ggaaaagaagggccuacaaaa

SEQ ID NO: 416649 - RNA, 21 nt, Human
ggaaaagaagggccuacaaaa

SEQ ID NO: 416650 - RNA, 19 nt, Human
ggaaagaagagggagagag

SEQ ID NO: 416651 - RNA, 21 nt, Human
ggaaaguacaaucagcagggc

SEQ ID NO: 416652 - RNA, 20 nt, Human
ggacugaauccaucagcaga

SEQ ID NO: 416653 - RNA, 19 nt, Human
ggagacaacuucccacagg

SEQ ID NO: 416654 - RNA, 24 nt, Human
ggcaaagaacuggacuuaaggcaa

SEQ ID NO: 416655 - RNA, 23 nt, Human
ggcaggacagggguggcugguga

SEQ ID NO: 416656 - RNA, 18 nt, Human
ggcaggggaugaggagga

SEQ ID NO: 416657 - RNA, 19 nt, Human
gggacagacacagugggga

SEQ ID NO: 416658 - RNA, 21 nt, Human
gggcuggugcuacacagaggg

SEQ ID NO: 416659 - RNA, 20 nt, Human
ggguggggacccuggaaggc

SEQ ID NO: 416660 - RNA, 23 nt, Human
guccacaaaggcaaugaccccag

SEQ ID NO: 416661 - RNA, 20 nt, Human
gucugacaauucauccugac

SEQ ID NO: 416662 - RNA, 23 nt, Human
gugcguuaauucaaguaaaaaaa

SEQ ID NO: 416663 - RNA, 18 nt, Human
gugcuuagagaguuggag

SEQ ID NO: 416664 - RNA, 20 nt, Human
uaacucgggcuguguggcag

SEQ ID NO: 416665 - RNA, 22 nt, Human
uaagaaaaaacaaagagagcac

SEQ ID NO: 416666 - RNA, 24 nt, Human
uaagaaaaaacaaagagagcacaa

SEQ ID NO: 416667 - RNA, 25 nt, Human
uaagaaaaaacaaagagagcacaaa

SEQ ID NO: 416668 - RNA, 18 nt, Human
uaagugagcuccacaacc

SEQ ID NO: 416669 - RNA, 18 nt, Human
uagagaguuggaggcaaa

SEQ ID NO: 416670 - RNA, 21 nt, Human
uagggcagcaacuaagauccc

SEQ ID NO: 416671 - RNA, 28 nt, Human
ucaaguaaaaaaaaaagagcaagaagaa

SEQ ID NO: 416672 - RNA, 27 nt, Human
ucacagaggguuuccacguggcgcgag

SEQ ID NO: 416673 - RNA, 24 nt, Human
ucagcucuguaaccccaccccccc

SEQ ID NO: 416674 - RNA, 22 nt, Human
ucaggaccccccagaguuuccc

SEQ ID NO: 416675 - RNA, 23 nt, Human
ucaggaggggaaaguacaaucag

SEQ ID NO: 416676 - RNA, 21 nt, Human
ucaggcacagcccuuagugcu

SEQ ID NO: 416677 - RNA, 19 nt, Human
ucauaacccuggccccagc

SEQ ID NO: 416678 - RNA, 20 nt, Human
ucauugcagccaucagaaag

SEQ ID NO: 416679 - RNA, 19 nt, Human
uccacugcaaacuguagaa

SEQ ID NO: 416680 - RNA, 21 nt, Human
uccagggccgcaggcuggggc

SEQ ID NO: 416681 - RNA, 21 nt, Human
uccauguggauccuggcugga

SEQ ID NO: 416682 - RNA, 22 nt, Human
ucccacccccucaggacccccc

SEQ ID NO: 416683 - RNA, 24 nt, Human
ucccacccccucaggaccccccag

SEQ ID NO: 416684 - RNA, 22 nt, Human
uccccagccccuaaccuagggc

SEQ ID NO: 416685 - RNA, 27 nt, Human
ucccccaccccaaccugcuccucagac

SEQ ID NO: 416686 - RNA, 19 nt, Human
ucccucucccccaccccaa

SEQ ID NO: 416687 - RNA, 24 nt, Human
ucccuggaaaaguggucacagagg

SEQ ID NO: 416688 - RNA, 21 nt, Human
uccggagaguccgaugucuca

SEQ ID NO: 416689 - RNA, 22 nt, Human
uccucagaccacaccacacucc

SEQ ID NO: 416690 - RNA, 19 nt, Human
uccucaggggcugccuagg

SEQ ID NO: 416691 - RNA, 23 nt, Human
uccuucacugggaagagcgggga

SEQ ID NO: 416692 - RNA, 19 nt, Human
ucuauucagcccuccuccu

SEQ ID NO: 416693 - RNA, 18 nt, Human
ucucccccaccccaaccu

SEQ ID NO: 416694 - RNA, 18 nt, Human
ucugaacgccgcgccuug

SEQ ID NO: 416695 - RNA, 18 nt, Human
ucugacaauucauccuga

SEQ ID NO: 416696 - RNA, 21 nt, Human
ucugcaagccacuaugucugu

SEQ ID NO: 416697 - RNA, 18 nt, Human
ucuggagucgagagaagg

SEQ ID NO: 416698 - RNA, 19 nt, Human
ucuguacaggagucuacau

SEQ ID NO: 416699 - RNA, 20 nt, Human
ugaaaugggaggggaauggg

SEQ ID NO: 416700 - RNA, 23 nt, Human
ugacaaaaauaaaaacauuuguc

SEQ ID NO: 416701 - RNA, 24 nt, Human
ugacaaaaauaaaaacauuugucu

SEQ ID NO: 416702 - RNA, 23 nt, Human
ugacacaaaguuuuugaagagaa

SEQ ID NO: 416703 - RNA, 23 nt, Human
ugaccauacaaaccaaaaacauu

SEQ ID NO: 416704 - RNA, 21 nt, Human
ugagcuccacaacccaccccu

SEQ ID NO: 416705 - RNA, 20 nt, Human
ugaggcaaagaacuggacuu

SEQ ID NO: 416706 - RNA, 22 nt, Human
ugaguggagaugggaaagagaa

SEQ ID NO: 416707 - RNA, 21 nt, Human
ugcccuggaggaguuuggcac

SEQ ID NO: 416708 - RNA, 19 nt, Human
ugccuaagugagcuccaca

SEQ ID NO: 416709 - RNA, 19 nt, Human
ugccuaagugagcuccaca

SEQ ID NO: 416710 - RNA, 22 nt, Human
ugcuccucagaccacaccacac

SEQ ID NO: 416711 - RNA, 20 nt, Human
ugcuggugaggcccagccac

SEQ ID NO: 416712 - RNA, 20 nt, Human
uggaaaauucuacauuuaca

SEQ ID NO: 416713 - RNA, 19 nt, Human
uggcagaguggcgagguag

SEQ ID NO: 416714 - RNA, 20 nt, Human
uggcaggaauguggcugggc

SEQ ID NO: 416715 - RNA, 20 nt, Human
uggccaaugagcuccucucu

SEQ ID NO: 416716 - RNA, 18 nt, Human
uggggaaacugcucagag

SEQ ID NO: 416717 - RNA, 21 nt, Human
ugggggucucuccaaaaccuc

SEQ ID NO: 416718 - RNA, 21 nt, Human
uggggugagggacaggagggc

SEQ ID NO: 416719 - RNA, 18 nt, Human
ugggucagggucugcaag

SEQ ID NO: 416720 - RNA, 22 nt, Human
ugguugccuauggucacgugac

SEQ ID NO: 416721 - RNA, 22 nt, Human
uguaaccccacccccccaaaaa

SEQ ID NO: 416722 - RNA, 20 nt, Human
ugucaaggggguaagaggug

SEQ ID NO: 416723 - RNA, 22 nt, Human
ugucuguacaggagucuacaua

SEQ ID NO: 416724 - RNA, 19 nt, Human
uguggcaggaguaucccug

SEQ ID NO: 416725 - RNA, 18 nt, Human
uguggcuggggugaggga

SEQ ID NO: 416726 - RNA, 21 nt, Human
uguuggugaggugggaguccu

SEQ ID NO: 416727 - RNA, 21 nt, Human
uuagagggccagcaaauuuug

SEQ ID NO: 416728 - RNA, 23 nt, Human
uucccucucccccaccccaaccu

SEQ ID NO: 416729 - RNA, 19 nt, Human
uuugcagaaaggacagcag

SEQ ID NO: 416730 - RNA, 25 nt, Human
aaaaaaaaaaagaaacagcacucug

SEQ ID NO: 416731 - RNA, 18 nt, Human
aaacaaagaacaauucuu

SEQ ID NO: 416732 - RNA, 21 nt, Human
aagaggcaccauuuccccaag

SEQ ID NO: 416733 - RNA, 19 nt, Human
aaugugcaacugacaucug

SEQ ID NO: 416734 - RNA, 20 nt, Human
agagaaaaaaaaaaagaaac

SEQ ID NO: 416735 - RNA, 19 nt, Human
agaucauuaaaggcaaagc

SEQ ID NO: 416736 - RNA, 21 nt, Human
aggcaaagccuauaugacgcu

SEQ ID NO: 416737 - RNA, 22 nt, Human
cauaaaggacucaaugugcaac

SEQ ID NO: 416738 - RNA, 21 nt, Human
ccccaaggaauaccucuuggc

SEQ ID NO: 416739 - RNA, 18 nt, Human
ccucuuggcauuuccuga

SEQ ID NO: 416740 - RNA, 22 nt, Human
cuguacacacaaaaaaaugguc

SEQ ID NO: 416741 - RNA, 21 nt, Human
cuguccaguagccgaacaguu

SEQ ID NO: 416742 - RNA, 18 nt, Human
gaaaaaaaaaaagaaaca

SEQ ID NO: 416743 - RNA, 21 nt, Human
gaaaaacucauucaacaacug

SEQ ID NO: 416744 - RNA, 20 nt, Human
uaaaaccacaaacaaagaac

SEQ ID NO: 416745 - RNA, 20 nt, Human
uaaaaccacaaacaaagaac

SEQ ID NO: 416746 - RNA, 21 nt, Human
uaaaaccacaaacaaagaaca

SEQ ID NO: 416747 - RNA, 22 nt, Human
uaaaaccacaaacaaagaacaa

SEQ ID NO: 416748 - RNA, 25 nt, Human
uaaacaaaucuuuuucuggucaaga

SEQ ID NO: 416749 - RNA, 21 nt, Human
uaaauaaaucauauuucaaga

SEQ ID NO: 416750 - RNA, 18 nt, Human
uaaauaccaugggacagg

SEQ ID NO: 416751 - RNA, 19 nt, Human
uaagaggcaccauuucccc

SEQ ID NO: 416752 - RNA, 21 nt, Human
uacuaccaaugaaaugguagg

SEQ ID NO: 416753 - RNA, 24 nt, Human
uagcaaucuaaauaaaucauauuu

SEQ ID NO: 416754 - RNA, 23 nt, Human
uaucgagcaagaaucuguuaaca

SEQ ID NO: 416755 - RNA, 22 nt, Human
ucaagagaaaaaaaaaaagaaa

SEQ ID NO: 416756 - RNA, 23 nt, Human
ucauuaaaggcaaagccuauaug

SEQ ID NO: 416757 - RNA, 24 nt, Human
ucugccaugauauuacaaagguug

SEQ ID NO: 416758 - RNA, 24 nt, Human
ugcuagugaugaucugguaauaua

SEQ ID NO: 416759 - RNA, 24 nt, Human
uguccaguagccgaacaguuuguu

SEQ ID NO: 416760 - RNA, 18 nt, Human
uguuaacaguuuuauuuu

SEQ ID NO: 416761 - RNA, 25 nt, Human
uuagcaaucuaaauaaaucauauuu

SEQ ID NO: 416762 - RNA, 22 nt, Human
uucaagagguaacagcaacaga

SEQ ID NO: 416763 - RNA, 21 nt, Human
aaaaaacacuuccuggcagcu

SEQ ID NO: 416764 - RNA, 21 nt, Human
aagaaaacaugagaugaaaua

SEQ ID NO: 416765 - RNA, 22 nt, Human
aaggagcugauggcuuggacag

SEQ ID NO: 416766 - RNA, 24 nt, Human
aaggagcugauggcuuggacagaa

SEQ ID NO: 416767 - RNA, 20 nt, Human
acaauaugccauuguggcau

SEQ ID NO: 416768 - RNA, 21 nt, Human
accaauguuuaaaaugacauu

SEQ ID NO: 416769 - RNA, 18 nt, Human
agacacggaaagcagccu

SEQ ID NO: 416770 - RNA, 21 nt, Human
agaguuucucucuucccuugc

SEQ ID NO: 416771 - RNA, 23 nt, Human
agcacgcagcauuaacuguacuc

SEQ ID NO: 416772 - RNA, 21 nt, Human
agcccacagcccuccagcagc

SEQ ID NO: 416773 - RNA, 20 nt, Human
augacgaguacgucugauga

SEQ ID NO: 416774 - RNA, 26 nt, Human
caaagcgcugggucaaucagucaaca

SEQ ID NO: 416775 - RNA, 23 nt, Human
cacccacaacugcuggugcccuc

SEQ ID NO: 416776 - RNA, 22 nt, Human
cacuacaugaaccaauacaaau

SEQ ID NO: 416777 - RNA, 19 nt, Human
cagagacagaggagcccac

SEQ ID NO: 416778 - RNA, 24 nt, Human
cagcagcaauaccaguucacccaa

SEQ ID NO: 416779 - RNA, 19 nt, Human
caguucacccaacagaguu

SEQ ID NO: 416780 - RNA, 22 nt, Human
ccagaaaaaacacuuccuggca

SEQ ID NO: 416781 - RNA, 18 nt, Human
ccagcaccaacaggcgag

SEQ ID NO: 416782 - RNA, 20 nt, Human
cccaauaaaccccaccucca

SEQ ID NO: 416783 - RNA, 26 nt, Human
cccacagcccuccagcagcaauacca

SEQ ID NO: 416784 - RNA, 21 nt, Human
ccccaccuccacaugaccaga

SEQ ID NO: 416785 - RNA, 20 nt, Human
cccgauccauuuguccugac

SEQ ID NO: 416786 - RNA, 26 nt, Human
ccuccagcagcaauaccaguucaccc

SEQ ID NO: 416787 - RNA, 18 nt, Human
cggucggggcacgggcgg

SEQ ID NO: 416788 - RNA, 19 nt, Human
cguuacauuauauuugugu

SEQ ID NO: 416789 - RNA, 24 nt, Human
cuacucuucauuaaaaaagguaac

SEQ ID NO: 416790 - RNA, 21 nt, Human
cuagguccccaaggggagguc

SEQ ID NO: 416791 - RNA, 19 nt, Human
cuccagagacagaggagcc

SEQ ID NO: 416792 - RNA, 20 nt, Human
cuccagcaucccaauaaacc

SEQ ID NO: 416793 - RNA, 24 nt, Human
cuccccagcaugcugggcuccagc

SEQ ID NO: 416794 - RNA, 25 nt, Human
cugccacagugcaauuccuuugggc

SEQ ID NO: 416795 - RNA, 19 nt, Human
cugcuggugcccucgcuuc

SEQ ID NO: 416796 - RNA, 20 nt, Human
cugggcuccagcuccccaag

SEQ ID NO: 416797 - RNA, 20 nt, Human
cugggcuccagcuccccaag

SEQ ID NO: 416798 - RNA, 21 nt, Human
cuguacucuugugacaauaag

SEQ ID NO: 416799 - RNA, 24 nt, Human
cuugugacaauaagaaaacaugag

SEQ ID NO: 416800 - RNA, 24 nt, Human
gccacagugcaauuccuuugggcu

SEQ ID NO: 416801 - RNA, 23 nt, Human
gcgcugggucaaucagucaacac

SEQ ID NO: 416802 - RNA, 18 nt, Human
gcggggguccucuaccgg

SEQ ID NO: 416803 - RNA, 21 nt, Human
ggagggguaauuuaaaggcaa

SEQ ID NO: 416804 - RNA, 19 nt, Human
ggagugggccacgugggga

SEQ ID NO: 416805 - RNA, 23 nt, Human
ggcuuggacagaacugaagacac

SEQ ID NO: 416806 - RNA, 21 nt, Human
gggagggguaauuuaaaggca

SEQ ID NO: 416807 - RNA, 24 nt, Human
gggccagcaccaacaggcgaggaa

SEQ ID NO: 416808 - RNA, 23 nt, Human
gggccgggagugggccacguggg

SEQ ID NO: 416809 - RNA, 22 nt, Human
gggcuccagcuccccaagggcc

SEQ ID NO: 416810 - RNA, 20 nt, Human
gguauaagaacaaucuagaa

SEQ ID NO: 416811 - RNA, 21 nt, Human
gucaaacucucaacuaguacu

SEQ ID NO: 416812 - RNA, 20 nt, Human
gugacaauaagaaaacauga

SEQ ID NO: 416813 - RNA, 19 nt, Human
uaaaccccaccuccacaug

SEQ ID NO: 416814 - RNA, 21 nt, Human
uaacccuuugcagcccgaucc

SEQ ID NO: 416815 - RNA, 28 nt, Human
uaagaaaacaugagaugaaauacauuaa

SEQ ID NO: 416816 - RNA, 23 nt, Human
uaagaacaaucuagaagacugac

SEQ ID NO: 416817 - RNA, 19 nt, Human
uaagagagguaauccagca

SEQ ID NO: 416818 - RNA, 23 nt, Human
uaauccagcaucauguaccaaga

SEQ ID NO: 416819 - RNA, 24 nt, Human
uaccaaggccuaccaauguuuaaa

SEQ ID NO: 416820 - RNA, 18 nt, Human
uacuguguggagcugacc

SEQ ID NO: 416821 - RNA, 23 nt, Human
uaugacgaguacgucugaugcug

SEQ ID NO: 416822 - RNA, 24 nt, Human
uauuuguguguguguaucugugua

SEQ ID NO: 416823 - RNA, 19 nt, Human
uccagcaucccaauaaacc

SEQ ID NO: 416824 - RNA, 22 nt, Human
ucccaauaaaccccaccuccac

SEQ ID NO: 416825 - RNA, 19 nt, Human
uccccaagggccagcacca

SEQ ID NO: 416826 - RNA, 18 nt, Human
uccccagcaugcugggcu

SEQ ID NO: 416827 - RNA, 21 nt, Human
ucccuugucauuaauaaagau

SEQ ID NO: 416828 - RNA, 23 nt, Human
ucuccagagacagaggagcccac

SEQ ID NO: 416829 - RNA, 22 nt, Human
ucucugaauaacaguuugacuu

SEQ ID NO: 416830 - RNA, 18 nt, Human
ugaccagacucuccagag

SEQ ID NO: 416831 - RNA, 21 nt, Human
ugacccagaaaaaacacuucc

SEQ ID NO: 416832 - RNA, 24 nt, Human
ugacgaguacgucugaugcugcca

SEQ ID NO: 416833 - RNA, 19 nt, Human
ugacuccaggcuagguccc

SEQ ID NO: 416834 - RNA, 21 nt, Human
ugacuccaggcuaggucccca

SEQ ID NO: 416835 - RNA, 21 nt, Human
ugagaugucaucauacauuaa

SEQ ID NO: 416836 - RNA, 22 nt, Human
uggaagugugaguaaugguuga

SEQ ID NO: 416837 - RNA, 19 nt, Human
uggacagaacugaagacac

SEQ ID NO: 416838 - RNA, 24 nt, Human
uggcggggagaccccugagagguc

SEQ ID NO: 416839 - RNA, 19 nt, Human
uggguuggucuuuuauggc

SEQ ID NO: 416840 - RNA, 20 nt, Human
uguguguaucuguguaugug

SEQ ID NO: 416841 - RNA, 21 nt, Human
uguguguguaucuguguaugu

SEQ ID NO: 416842 - RNA, 19 nt, Human
uguguguguguaucugugu

SEQ ID NO: 416843 - RNA, 21 nt, Human
uguguguguguaucuguguau

SEQ ID NO: 416844 - RNA, 20 nt, Human
uuaacuguacucuugugaca

SEQ ID NO: 416845 - RNA, 24 nt, Human
uuaaugcugcgcccgcuuuaaguu

SEQ ID NO: 416846 - RNA, 19 nt, Human
uuagcggcggagcaccuuu

SEQ ID NO: 416847 - RNA, 21 nt, Human
uucccugccuaugacaguugu

SEQ ID NO: 416848 - RNA, 21 nt, Human
uuuguguguguguaucugugu

SEQ ID NO: 416849 - RNA, 22 nt, Human
caccucacagccaggcgccggc

SEQ ID NO: 416850 - RNA, 21 nt, Human
cagacugggccgggaauccac

SEQ ID NO: 416851 - RNA, 22 nt, Human
cagacugggccgggaauccacc

SEQ ID NO: 416852 - RNA, 18 nt, Human
cccauggugagccgcugg

SEQ ID NO: 416853 - RNA, 21 nt, Human
cccauggugagccgcuggggg

SEQ ID NO: 416854 - RNA, 18 nt, Human
ggcccgggcggaggaguc

SEQ ID NO: 416855 - RNA, 24 nt, Human
ggugaggggugaagcuggguggug

SEQ ID NO: 416856 - RNA, 21 nt, Human
guggaaaaacuggagggagau

SEQ ID NO: 416857 - RNA, 18 nt, Human
uaugagaagguccgaacg

SEQ ID NO: 416858 - RNA, 23 nt, Human
uauuuuauugcugccauccccau

SEQ ID NO: 416859 - RNA, 27 nt, Human
uccaccucacagccaggcgccggccgc

SEQ ID NO: 416860 - RNA, 19 nt, Human
ucuccaggugacccuaguu

SEQ ID NO: 416861 - RNA, 21 nt, Human
ugagaagguccgaacgaagug

SEQ ID NO: 416862 - RNA, 21 nt, Human
ugagccgcugggggugagggg

SEQ ID NO: 416863 - RNA, 21 nt, Human
uggagggagauggucagacug

SEQ ID NO: 416864 - RNA, 24 nt, Human
uggagggagauggucagacugggc

SEQ ID NO: 416865 - RNA, 27 nt, Human
uggagggagauggucagacugggccgg

SEQ ID NO: 416866 - RNA, 23 nt, Human
ugggggugaggggugaagcuggg

SEQ ID NO: 416867 - RNA, 21 nt, Human
uuauugcugccauccccaugg

SEQ ID NO: 416868 - RNA, 18 nt, Human
uugcugccauccccaugg

SEQ ID NO: 416869 - RNA, 23 nt, Human
aaaaaaccaaaacuuugaaggca

SEQ ID NO: 416870 - RNA, 21 nt, Human
aaauggccuggaccccaaaac

SEQ ID NO: 416871 - RNA, 24 nt, Human
aagcgggucuucugggucccugug

SEQ ID NO: 416872 - RNA, 24 nt, Human
aagcuaaaggugaaggugggaggg

SEQ ID NO: 416873 - RNA, 18 nt, Human
aagggguaaaaaaaaugg

SEQ ID NO: 416874 - RNA, 20 nt, Human
aagggguaaaaaaaauggcc

SEQ ID NO: 416875 - RNA, 27 nt, Human
acuuugaaggcauuaagcguuaaaggg

SEQ ID NO: 416876 - RNA, 20 nt, Human
agcagaaaggggaugcccca

SEQ ID NO: 416877 - RNA, 21 nt, Human
aggcucccccagggucccgcc

SEQ ID NO: 416878 - RNA, 21 nt, Human
agggaaggggagucccugggg

SEQ ID NO: 416879 - RNA, 21 nt, Human
cagaaaggggaugccccaaug

SEQ ID NO: 416880 - RNA, 22 nt, Human
cagcagaaaggggaugccccaa

SEQ ID NO: 416881 - RNA, 27 nt, Human
cauccccuccccuuaaauagcugcccc

SEQ ID NO: 416882 - RNA, 23 nt, Human
ccaaagggagaaaagggcggggg

SEQ ID NO: 416883 - RNA, 20 nt, Human
ccaagugggauggggagugg

SEQ ID NO: 416884 - RNA, 19 nt, Human
ccagagggaaggggagucc

SEQ ID NO: 416885 - RNA, 19 nt, Human
ccagcccggugagacaucc

SEQ ID NO: 416886 - RNA, 21 nt, Human
ccauuuucaagaagcuaaagg

SEQ ID NO: 416887 - RNA, 18 nt, Human
cccaaugaaccccacagg

SEQ ID NO: 416888 - RNA, 19 nt, Human
cccaaugaaccccacagga

SEQ ID NO: 416889 - RNA, 18 nt, Human
ccccaaaaccuacccaaa

SEQ ID NO: 416890 - RNA, 18 nt, Human
ccccaaaaccuacccaaa

SEQ ID NO: 416891 - RNA, 22 nt, Human
ccccaaggggauggcagagggg

SEQ ID NO: 416892 - RNA, 20 nt, Human
ccccaaugaaccccacagga

SEQ ID NO: 416893 - RNA, 22 nt, Human
ccggccccaaggggauggcaga

SEQ ID NO: 416894 - RNA, 21 nt, Human
ccuacccaaauaaaaaaucaa

SEQ ID NO: 416895 - RNA, 20 nt, Human
ccucaucuuauuuccuccaa

SEQ ID NO: 416896 - RNA, 19 nt, Human
ccuccccuucuccuuucuc

SEQ ID NO: 416897 - RNA, 20 nt, Human
ccuccccuucuccuuucucc

SEQ ID NO: 416898 - RNA, 21 nt, Human
ccuggaccccaaaaccuaccc

SEQ ID NO: 416899 - RNA, 23 nt, Human
ccuggaccccaaaaccuacccaa

SEQ ID NO: 416900 - RNA, 24 nt, Human
ccuggaccccaaaaccuacccaaa

SEQ ID NO: 416901 - RNA, 18 nt, Human
ccuuccuucccccuuccu

SEQ ID NO: 416902 - RNA, 23 nt, Human
cgccgcuucccucaggcggucug

SEQ ID NO: 416903 - RNA, 22 nt, Human
cggggcuggcuccgggcucggc

SEQ ID NO: 416904 - RNA, 19 nt, Human
cuccaagggguaaaaaaaa

SEQ ID NO: 416905 - RNA, 22 nt, Human
cucccucaucuuauuuccucca

SEQ ID NO: 416906 - RNA, 19 nt, Human
cuggaccccaaaaccuacc

SEQ ID NO: 416907 - RNA, 20 nt, Human
cuggaccccaaaaccuaccc

SEQ ID NO: 416908 - RNA, 22 nt, Human
cuggcugcucccggggcgcccc

SEQ ID NO: 416909 - RNA, 22 nt, Human
cuuccugugggguucauuggug

SEQ ID NO: 416910 - RNA, 22 nt, Human
cuuggaguuuuccaagugggau

SEQ ID NO: 416911 - RNA, 19 nt, Human
ggccccaaggggauggcag

SEQ ID NO: 416912 - RNA, 23 nt, Human
gggaaggagccagagggaagggg

SEQ ID NO: 416913 - RNA, 24 nt, Human
gggagaauguggaccgggccgggg

SEQ ID NO: 416914 - RNA, 22 nt, Human
gggagucccuggggugggggga

SEQ ID NO: 416915 - RNA, 18 nt, Human
ggggauggcagaggggaa

SEQ ID NO: 416916 - RNA, 21 nt, Human
ggggauggcagaggggaagga

SEQ ID NO: 416917 - RNA, 18 nt, Human
ggggcgccccuggcugga

SEQ ID NO: 416918 - RNA, 18 nt, Human
gugcggaaaggagaagcg

SEQ ID NO: 416919 - RNA, 20 nt, Human
guucagggguucggggcugg

SEQ ID NO: 416920 - RNA, 25 nt, Human
uaaaaaaaauggccuggaccccaaa

SEQ ID NO: 416921 - RNA, 23 nt, Human
uaaaaaaaccaaaacuuugaagg

SEQ ID NO: 416922 - RNA, 25 nt, Human
uaaaaaaaccaaaacuuugaaggca

SEQ ID NO: 416923 - RNA, 24 nt, Human
uaaaaaaucaaaaaacugagguuc

SEQ ID NO: 416924 - RNA, 22 nt, Human
uagcauuuaaaaacucccacau

SEQ ID NO: 416925 - RNA, 24 nt, Human
ucaaaaaacugagguuccaaaaag

SEQ ID NO: 416926 - RNA, 19 nt, Human
ucaaaaccaaagagaaaaa

SEQ ID NO: 416927 - RNA, 22 nt, Human
ucaaaaccaaagagaaaaaaaa

SEQ ID NO: 416928 - RNA, 22 nt, Human
uccaagggguaaaaaaaauggc

SEQ ID NO: 416929 - RNA, 28 nt, Human
ucccacaucccauuuuaucaaaaccaaa

SEQ ID NO: 416930 - RNA, 19 nt, Human
uccccuucuccuuucuccc

SEQ ID NO: 416931 - RNA, 22 nt, Human
uccccuucuccuuucucccuca

SEQ ID NO: 416932 - RNA, 20 nt, Human
uccuccaagggguaaaaaaa

SEQ ID NO: 416933 - RNA, 25 nt, Human
uccugugucuucagccaauuccaag

SEQ ID NO: 416934 - RNA, 20 nt, Human
uccuuccuucccccuuccuc

SEQ ID NO: 416935 - RNA, 20 nt, Human
ugccccaaugaaccccacag

SEQ ID NO: 416936 - RNA, 21 nt, Human
uggaccccaaaaccuacccaa

SEQ ID NO: 416937 - RNA, 20 nt, Human
uggaccgggccggggcgggu

SEQ ID NO: 416938 - RNA, 19 nt, Human
uggcuggagguucaggggu

SEQ ID NO: 416939 - RNA, 22 nt, Human
ugugaaauucccuccuuccuuc

SEQ ID NO: 416940 - RNA, 27 nt, Human
uuaaaaacucccacaucccauuuuauc

SEQ ID NO: 416941 - RNA, 19 nt, Human
uucaagaagcuaaagguga

SEQ ID NO: 416942 - RNA, 20 nt, Human
uucaagaagcuaaaggugaa

SEQ ID NO: 416943 - RNA, 21 nt, Human
uuggaguuuuccaagugggau

SEQ ID NO: 416944 - RNA, 24 nt, Human
uuuaaaaacucccacaucccauuu

SEQ ID NO: 416945 - RNA, 25 nt, Human
uuuaaaaacucccacaucccauuuu

SEQ ID NO: 416946 - RNA, 22 nt, Human
uuucccuuuucccccaaaaccc

SEQ ID NO: 416947 - RNA, 19 nt, Human
uuucucccucaucuuauuu

SEQ ID NO: 416948 - RNA, 21 nt, Human
uuucucccucaucuuauuucc

SEQ ID NO: 416949 - RNA, 18 nt, Human
uuucuuaaaaaaaccaaa

SEQ ID NO: 416950 - RNA, 20 nt, Human
aaacaggauccucccucccc

SEQ ID NO: 416951 - RNA, 22 nt, Human
aacuucucccuucgcuggucuc

SEQ ID NO: 416952 - RNA, 18 nt, Human
aagaggcagccuugguua

SEQ ID NO: 416953 - RNA, 20 nt, Human
aagaggcagccuugguuaag

SEQ ID NO: 416954 - RNA, 23 nt, Human
acaaaagcagcacagcaggcccg

SEQ ID NO: 416955 - RNA, 24 nt, Human
acagacagcacugccuuucagagc

SEQ ID NO: 416956 - RNA, 19 nt, Human
acucagugaaggguggggg

SEQ ID NO: 416957 - RNA, 18 nt, Human
acucuguacuucccugcu

SEQ ID NO: 416958 - RNA, 21 nt, Human
aggcagaggugaaagcacaug

SEQ ID NO: 416959 - RNA, 24 nt, Human
aggcugaagggacacuagggagag

SEQ ID NO: 416960 - RNA, 20 nt, Human
agucugguggccaacagaac

SEQ ID NO: 416961 - RNA, 21 nt, Human
auccaaauggucacuucccaa

SEQ ID NO: 416962 - RNA, 22 nt, Human
auugcaaugguuggggcaauaa

SEQ ID NO: 416963 - RNA, 21 nt, Human
caaaagcagcacagcaggccc

SEQ ID NO: 416964 - RNA, 21 nt, Human
caacagaacguagcuucccaa

SEQ ID NO: 416965 - RNA, 26 nt, Human
caauaacccucccuaauccuagcuca

SEQ ID NO: 416966 - RNA, 19 nt, Human
cacacacacaagcacaggu

SEQ ID NO: 416967 - RNA, 26 nt, Human
cagcuccaccagaacaaggaaggcac

SEQ ID NO: 416968 - RNA, 22 nt, Human
caggaagcagccggccucccuc

SEQ ID NO: 416969 - RNA, 23 nt, Human
caggaagcagccggccucccucu

SEQ ID NO: 416970 - RNA, 25 nt, Human
ccaauggcacauacacagauuuuug

SEQ ID NO: 416971 - RNA, 23 nt, Human
ccauagagacgggacauggcaca

SEQ ID NO: 416972 - RNA, 20 nt, Human
cccacccauguaaacagagu

SEQ ID NO: 416973 - RNA, 25 nt, Human
ccgccgccacacacacacaagcaca

SEQ ID NO: 416974 - RNA, 21 nt, Human
ccugcuccaucuccccaccca

SEQ ID NO: 416975 - RNA, 18 nt, Human
ccugucccuccaccuccc

SEQ ID NO: 416976 - RNA, 21 nt, Human
cgccacacacacacaagcaca

SEQ ID NO: 416977 - RNA, 19 nt, Human
cggggaaagggugggggca

SEQ ID NO: 416978 - RNA, 18 nt, Human
cuccaccagaacaaggaa

SEQ ID NO: 416979 - RNA, 19 nt, Human
cuccccaggaggcuugggg

SEQ ID NO: 416980 - RNA, 24 nt, Human
cuuggcagggcccagacauccaaa

SEQ ID NO: 416981 - RNA, 23 nt, Human
gaagaagcccaauugugcuuaag

SEQ ID NO: 416982 - RNA, 21 nt, Human
gaccacgaugagggcaccugg

SEQ ID NO: 416983 - RNA, 24 nt, Human
gacuggggaggagagaaaccccag

SEQ ID NO: 416984 - RNA, 22 nt, Human
gauccucccuccccgccgccac

SEQ ID NO: 416985 - RNA, 24 nt, Human
gcacagaccacgaugagggcaccu

SEQ ID NO: 416986 - RNA, 23 nt, Human
gcagcacagcaggcccggggaaa

SEQ ID NO: 416987 - RNA, 21 nt, Human
gcagcugugguaauggggugg

SEQ ID NO: 416988 - RNA, 24 nt, Human
gccucccucugacccucccugucg

SEQ ID NO: 416989 - RNA, 21 nt, Human
ggaggagagaaaccccagcuc

SEQ ID NO: 416990 - RNA, 18 nt, Human
ggaggggcaggggagagc

SEQ ID NO: 416991 - RNA, 18 nt, Human
ggauggagagugcacagc

SEQ ID NO: 416992 - RNA, 23 nt, Human
ggcacugagaacaaauccagaga

SEQ ID NO: 416993 - RNA, 18 nt, Human
ggccucccucugacccuc

SEQ ID NO: 416994 - RNA, 18 nt, Human
gggaaagggugggggcag

SEQ ID NO: 416995 - RNA, 22 nt, Human
gggacagaggacgagauuggga

SEQ ID NO: 416996 - RNA, 21 nt, Human
gggcaggggagagcggucauc

SEQ ID NO: 416997 - RNA, 22 nt, Human
ggggaaagggugggggcaggaa

SEQ ID NO: 416998 - RNA, 20 nt, Human
ggggaggagaaggagguggg

SEQ ID NO: 416999 - RNA, 19 nt, Human
gggggagggagggcagagc

SEQ ID NO: 417000 - RNA, 23 nt, Human
gguggcggggcagggacgggagg

SEQ ID NO: 417001 - RNA, 22 nt, Human
guagggccuccccuaacugcaa

SEQ ID NO: 417002 - RNA, 20 nt, Human
gugaagggugggggcucugu

SEQ ID NO: 417003 - RNA, 22 nt, Human
gugaagggugggggcucuguaa

SEQ ID NO: 417004 - RNA, 23 nt, Human
gugggggcucuguauccuuccca

SEQ ID NO: 417005 - RNA, 20 nt, Human
uaaaugccacacauaucugg

SEQ ID NO: 417006 - RNA, 21 nt, Human
uaaggcacugagaacaaaucc

SEQ ID NO: 417007 - RNA, 19 nt, Human
uacaugcuggacucacaga

SEQ ID NO: 417008 - RNA, 19 nt, Human
uagcuucccaacuucuccc

SEQ ID NO: 417009 - RNA, 22 nt, Human
uaucugcaaggcugaggaagcu

SEQ ID NO: 417010 - RNA, 20 nt, Human
ucagugaagggugggggcuc

SEQ ID NO: 417011 - RNA, 18 nt, Human
ucccaacuucucccuucg

SEQ ID NO: 417012 - RNA, 21 nt, Human
uccccaggaggcuuggggcug

SEQ ID NO: 417013 - RNA, 24 nt, Human
ucccucugacccucccugucgccu

SEQ ID NO: 417014 - RNA, 18 nt, Human
uccucaaccaccauagag

SEQ ID NO: 417015 - RNA, 25 nt, Human
ugaggaagcuuccccgccuuucucc

SEQ ID NO: 417016 - RNA, 20 nt, Human
ugauaagcugccucucugcu

SEQ ID NO: 417017 - RNA, 19 nt, Human
ugcuuggauuuuuacuuug

SEQ ID NO: 417018 - RNA, 21 nt, Human
ugcuuugagaaggcaguaggg

SEQ ID NO: 417019 - RNA, 19 nt, Human
uggaagaagcccaauugug

SEQ ID NO: 417020 - RNA, 21 nt, Human
uggaagaagcccaauugugcu

SEQ ID NO: 417021 - RNA, 22 nt, Human
uggcacaaaagcagcacagcag

SEQ ID NO: 417022 - RNA, 19 nt, Human
uggcagaaaaccuggagau

SEQ ID NO: 417023 - RNA, 25 nt, Human
uggccaacagaacguagcuucccaa

SEQ ID NO: 417024 - RNA, 27 nt, Human
uggcuaaccuuggcacaaaagcagcac

SEQ ID NO: 417025 - RNA, 24 nt, Human
ugggaacuggucaagcccagaggc

SEQ ID NO: 417026 - RNA, 18 nt, Human
uggucacuucccaaccuc

SEQ ID NO: 417027 - RNA, 22 nt, Human
ugguugcaauggcccagguccu

SEQ ID NO: 417028 - RNA, 20 nt, Human
uuggaagaggcagccuuggu

SEQ ID NO: 417029 - RNA, 23 nt, Human
uuggcagggcccagacauccaaa

SEQ ID NO: 417030 - RNA, 21 nt, Human
uugguugcaauggcccagguc

SEQ ID NO: 417031 - RNA, 21 nt, Human
uugugggacuggggaggagag

SEQ ID NO: 417032 - RNA, 22 nt, Human
uuuuuuuuuucccaggguuugg

SEQ ID NO: 417033 - RNA, 21 nt, Human
uuuuuuuuuuuuuuuucccag

SEQ ID NO: 417034 - RNA, 25 nt, Human
uuuuuuuuuuuuuuuuucccagggg

SEQ ID NO: 417035 - RNA, 24 nt, Human
agccuggaguuucucgucucucug

SEQ ID NO: 417036 - RNA, 20 nt, Human
auuaaccaugucagggcaca

SEQ ID NO: 417037 - RNA, 21 nt, Human
cagccccuggcuccgcugccu

SEQ ID NO: 417038 - RNA, 26 nt, Human
caucccaaagucuccacccgccggga

SEQ ID NO: 417039 - RNA, 22 nt, Human
ccacccgcccgcacgccugccc

SEQ ID NO: 417040 - RNA, 23 nt, Human
ccaucccaaagucuccacccgcc

SEQ ID NO: 417041 - RNA, 21 nt, Human
cccgcacgccugcccugcucg

SEQ ID NO: 417042 - RNA, 28 nt, Human
cccucgcagccuccaccacccacccgcc

SEQ ID NO: 417043 - RNA, 23 nt, Human
ccuccaguccaucccaaagucuc

SEQ ID NO: 417044 - RNA, 23 nt, Human
ccugcccacgccgggcucagagc

SEQ ID NO: 417045 - RNA, 19 nt, Human
ccuggcuccgcugccugcc

SEQ ID NO: 417046 - RNA, 19 nt, Human
cgcugcgcuccuccagucc

SEQ ID NO: 417047 - RNA, 25 nt, Human
cgcugcgcuccuccaguccauccca

SEQ ID NO: 417048 - RNA, 20 nt, Human
cuccgcugccugcccacgcc

SEQ ID NO: 417049 - RNA, 23 nt, Human
cuugagccccgucugcuugaggg

SEQ ID NO: 417050 - RNA, 18 nt, Human
cuugaggggacccaagag

SEQ ID NO: 417051 - RNA, 18 nt, Human
ggagcugucacagccccu

SEQ ID NO: 417052 - RNA, 20 nt, Human
uaaauuaaccaugucagggc

SEQ ID NO: 417053 - RNA, 19 nt, Human
ucccaaagucuccacccgc

SEQ ID NO: 417054 - RNA, 19 nt, Human
ucgcagccuccaccaccca

SEQ ID NO: 417055 - RNA, 21 nt, Human
ugcccugcucgccuguggagc

SEQ ID NO: 417056 - RNA, 27 nt, Human
ugcccugcucgccuguggagcgacagc

SEQ ID NO: 417057 - RNA, 21 nt, Human
caagaaaaucugcgagucuug

SEQ ID NO: 417058 - RNA, 20 nt, Human
gaaaaucugcgagucuuguc

SEQ ID NO: 417059 - RNA, 18 nt, Human
ugagucacagaggagcua

SEQ ID NO: 417060 - RNA, 22 nt, Human
uucagggcuggagugacucucc

SEQ ID NO: 417061 - RNA, 22 nt, Human
agacacacacacucacacugca

SEQ ID NO: 417062 - RNA, 18 nt, Human
aguguguggcugcagccc

SEQ ID NO: 417063 - RNA, 24 nt, Human
ccuucuugucauuguuuuccuuuu

SEQ ID NO: 417064 - RNA, 21 nt, Human
cuccggggccugcucagugcc

SEQ ID NO: 417065 - RNA, 18 nt, Human
cugcagccccuccucucc

SEQ ID NO: 417066 - RNA, 19 nt, Human
cugcagccccuccucuccg

SEQ ID NO: 417067 - RNA, 23 nt, Human
ucauuguuuuccuuuuauuucag

SEQ ID NO: 417068 - RNA, 26 nt, Human
ucccuucuugucauuguuuuccuuuu

SEQ ID NO: 417069 - RNA, 18 nt, Human
ucuugucauuguuuuccu

SEQ ID NO: 417070 - RNA, 19 nt, Human
ugagagacacacacacuca

SEQ ID NO: 417071 - RNA, 19 nt, Human
ugagagacacacacacuca

SEQ ID NO: 417072 - RNA, 23 nt, Human
ugcacucacgcacacaagcugcg

SEQ ID NO: 417073 - RNA, 19 nt, Human
uguccgcuuggggcacagg

SEQ ID NO: 417074 - RNA, 22 nt, Human
uuuuuuuuuuuuuuuuucccuu

SEQ ID NO: 417075 - RNA, 23 nt, Human
aaacuccacuuauagaagacaau

SEQ ID NO: 417076 - RNA, 18 nt, Human
aaccuguaaggauaaagg

SEQ ID NO: 417077 - RNA, 18 nt, Human
aagaacuacaaaaucacc

SEQ ID NO: 417078 - RNA, 22 nt, Human
aauguguagcaaggcaaauuac

SEQ ID NO: 417079 - RNA, 18 nt, Human
acugccucccgggccgcc

SEQ ID NO: 417080 - RNA, 19 nt, Human
auagaagacaauagcaaca

SEQ ID NO: 417081 - RNA, 19 nt, Human
cacugcacuuaucugaggu

SEQ ID NO: 417082 - RNA, 24 nt, Human
caggcaaaaauaaugauuaaaaua

SEQ ID NO: 417083 - RNA, 18 nt, Human
caucaagugagaguaaca

SEQ ID NO: 417084 - RNA, 22 nt, Human
caugaaauacaaguacaaaaca

SEQ ID NO: 417085 - RNA, 22 nt, Human
caugcacauucauuggugcgca

SEQ ID NO: 417086 - RNA, 18 nt, Human
ccucccgggccgccggcc

SEQ ID NO: 417087 - RNA, 22 nt, Human
cuaaaccacauuuuuaauugcc

SEQ ID NO: 417088 - RNA, 22 nt, Human
cuaaguccuaaauauaccaaag

SEQ ID NO: 417089 - RNA, 22 nt, Human
cucuaggugcugauuggcugcg

SEQ ID NO: 417090 - RNA, 22 nt, Human
cuuaauagcccucuuaaugugu

SEQ ID NO: 417091 - RNA, 20 nt, Human
cuugcaggcccgccucucca

SEQ ID NO: 417092 - RNA, 18 nt, Human
gaaauacaaguacaaaac

SEQ ID NO: 417093 - RNA, 19 nt, Human
gaaauacaaguacaaaaca

SEQ ID NO: 417094 - RNA, 21 nt, Human
gagcgcgcgacugccucccgg

SEQ ID NO: 417095 - RNA, 26 nt, Human
gcaacagaggaccacuaaguccuaaa

SEQ ID NO: 417096 - RNA, 19 nt, Human
ggagcgucccccacaaguc

SEQ ID NO: 417097 - RNA, 21 nt, Human
ggagcgucccccacaaguccc

SEQ ID NO: 417098 - RNA, 21 nt, Human
uaaaauaccauuagcuuugcu

SEQ ID NO: 417099 - RNA, 24 nt, Human
uaaaaugguuuaaccacaucaagu

SEQ ID NO: 417100 - RNA, 18 nt, Human
uaaaauguccagaauauc

SEQ ID NO: 417101 - RNA, 23 nt, Human
uaaccacaucaagugagaguaac

SEQ ID NO: 417102 - RNA, 22 nt, Human
uaaguccuaaauauaccaaaga

SEQ ID NO: 417103 - RNA, 22 nt, Human
uaauguguagcaaggcaaauua

SEQ ID NO: 417104 - RNA, 19 nt, Human
uaccaaagaaaaacaaguu

SEQ ID NO: 417105 - RNA, 26 nt, Human
uaccaaagaaaaacaaguuuacaaau

SEQ ID NO: 417106 - RNA, 22 nt, Human
uagcuuuccacagggauuuuuu

SEQ ID NO: 417107 - RNA, 23 nt, Human
uaucagaaucuguaucacccagc

SEQ ID NO: 417108 - RNA, 24 nt, Human
ucagccauugcagauucacauuua

SEQ ID NO: 417109 - RNA, 24 nt, Human
ucagcuuccauagcaugucucaca

SEQ ID NO: 417110 - RNA, 23 nt, Human
ucgcacuugcaggcccgccucuc

SEQ ID NO: 417111 - RNA, 20 nt, Human
ucucacaguuuucggccauu

SEQ ID NO: 417112 - RNA, 21 nt, Human
uggcauugcaaagacacugca

SEQ ID NO: 417113 - RNA, 20 nt, Human
uuaagaacuacaaaaucacc

SEQ ID NO: 417114 - RNA, 24 nt, Human
uuaauagcccucuuaauguguagc

SEQ ID NO: 417115 - RNA, 19 nt, Human
uuggggaugcgagcgcgcg

SEQ ID NO: 417116 - RNA, 23 nt, Human
uuucuuaugacaggcaaaaauug

SEQ ID NO: 417117 - RNA, 19 nt, Human
aaaaaaaccuaaacauuua

SEQ ID NO: 417118 - RNA, 21 nt, Human
aacccuuauuugugucccacc

SEQ ID NO: 417119 - RNA, 20 nt, Human
auagaugggcauuucuuucc

SEQ ID NO: 417120 - RNA, 21 nt, Human
cauagaugggcauuucuuucc

SEQ ID NO: 417121 - RNA, 19 nt, Human
cauugggaaaguugcacag

SEQ ID NO: 417122 - RNA, 22 nt, Human
cugaagccagugaggcccgaug

SEQ ID NO: 417123 - RNA, 23 nt, Human
cugaagccagugaggcccgaugc

SEQ ID NO: 417124 - RNA, 19 nt, Human
gaaagggaauaaaauagaa

SEQ ID NO: 417125 - RNA, 20 nt, Human
gaaaguugcacaggagucug

SEQ ID NO: 417126 - RNA, 18 nt, Human
ggaacuccuccaguucuc

SEQ ID NO: 417127 - RNA, 19 nt, Human
uaaaaauauaaaacccggc

SEQ ID NO: 417128 - RNA, 25 nt, Human
uaaaauagaagaaagaugacaaagg

SEQ ID NO: 417129 - RNA, 23 nt, Human
uacaaaaccugaaauuauuguca

SEQ ID NO: 417130 - RNA, 28 nt, Human
uacagagaaacccagucaaccauuauac

SEQ ID NO: 417131 - RNA, 19 nt, Human
uauuuuacauauguacaaa

SEQ ID NO: 417132 - RNA, 23 nt, Human
uccaaaacccuuauuuguguccc

SEQ ID NO: 417133 - RNA, 22 nt, Human
ugaaacaucuccguaccaugcc

SEQ ID NO: 417134 - RNA, 21 nt, Human
ugagguauuuaguaccugaaa

SEQ ID NO: 417135 - RNA, 18 nt, Human
ugcacaggagucugauga

SEQ ID NO: 417136 - RNA, 18 nt, Human
ugucagcaaauauuaaug

SEQ ID NO: 417137 - RNA, 25 nt, Human
uuuacaaaaccugaaauuauuguca

SEQ ID NO: 417138 - RNA, 18 nt, Human
uuugacuucuugcucaca

SEQ ID NO: 417139 - RNA, 23 nt, Human
uuuuuuuuuuuuuuuuucuaauu

SEQ ID NO: 417140 - RNA, 19 nt, Human
aaaaaccaggauauaggag

SEQ ID NO: 417141 - RNA, 25 nt, Human
aaaaaggaucuuuuagaguuacaga

SEQ ID NO: 417142 - RNA, 24 nt, Human
aaaaggacccagguagcacagccc

SEQ ID NO: 417143 - RNA, 26 nt, Human
aaaaugcagcauuucagcucaaaaug

SEQ ID NO: 417144 - RNA, 21 nt, Human
aaacugaggaagggcaggaaa

SEQ ID NO: 417145 - RNA, 21 nt, Human
aaaggaaacacugcccucuca

SEQ ID NO: 417146 - RNA, 24 nt, Human
aaccacuggaagaaccgggagagc

SEQ ID NO: 417147 - RNA, 26 nt, Human
aaccacuggaagaaccgggagagcaa

SEQ ID NO: 417148 - RNA, 21 nt, Human
aacuguguuugagaauacagg

SEQ ID NO: 417149 - RNA, 23 nt, Human
aacuguguuugagaauacaggaa

SEQ ID NO: 417150 - RNA, 24 nt, Human
aagcagaaucauaugauucugugg

SEQ ID NO: 417151 - RNA, 19 nt, Human
aaugaacaauuaagagcua

SEQ ID NO: 417152 - RNA, 18 nt, Human
acacauuucaaagugucc

SEQ ID NO: 417153 - RNA, 18 nt, Human
acagaggccaccuucccc

SEQ ID NO: 417154 - RNA, 23 nt, Human
acccuggcuacucugcccuucca

SEQ ID NO: 417155 - RNA, 18 nt, Human
agcacagacauugcucag

SEQ ID NO: 417156 - RNA, 22 nt, Human
agcgaugggugggaaggaagga

SEQ ID NO: 417157 - RNA, 18 nt, Human
aggaaagagaaacagagg

SEQ ID NO: 417158 - RNA, 19 nt, Human
aggcaagguucuuacuccu

SEQ ID NO: 417159 - RNA, 21 nt, Human
aggcagugacuaagcauggag

SEQ ID NO: 417160 - RNA, 25 nt, Human
aggcagugacuaagcauggagugcc

SEQ ID NO: 417161 - RNA, 18 nt, Human
agggaacaagggcagagc

SEQ ID NO: 417162 - RNA, 19 nt, Human
agggaacaagggcagagca

SEQ ID NO: 417163 - RNA, 21 nt, Human
aguaauaaguaccaaaaagga

SEQ ID NO: 417164 - RNA, 19 nt, Human
aguagagguuucugugcca

SEQ ID NO: 417165 - RNA, 23 nt, Human
agugaaugggagccaaggaaaga

SEQ ID NO: 417166 - RNA, 20 nt, Human
aguggcccugcugggaagau

SEQ ID NO: 417167 - RNA, 28 nt, Human
aucauuuuccuucuuuuuaaccuucagg

SEQ ID NO: 417168 - RNA, 25 nt, Human
aucuucagcagcacuagaauucuag

SEQ ID NO: 417169 - RNA, 21 nt, Human
auggcagggccacacccuggc

SEQ ID NO: 417170 - RNA, 22 nt, Human
auuuuccuucuuuuuaguagag

SEQ ID NO: 417171 - RNA, 21 nt, Human
caaaaaccaggauauaggaga

SEQ ID NO: 417172 - RNA, 20 nt, Human
caacauggaaagcucaaaac

SEQ ID NO: 417173 - RNA, 21 nt, Human
caacauggaaagcucaaaaca

SEQ ID NO: 417174 - RNA, 18 nt, Human
caacucugggcagcuccu

SEQ ID NO: 417175 - RNA, 24 nt, Human
caaggaaagagaaacagagggaag

SEQ ID NO: 417176 - RNA, 18 nt, Human
cacaaguguaacuguguu

SEQ ID NO: 417177 - RNA, 21 nt, Human
cagagagcuugguuguaguug

SEQ ID NO: 417178 - RNA, 21 nt, Human
cagcucaaaaugaacaauuaa

SEQ ID NO: 417179 - RNA, 18 nt, Human
cagcucccagcaacucug

SEQ ID NO: 417180 - RNA, 21 nt, Human
caggacacaguguguucaugg

SEQ ID NO: 417181 - RNA, 23 nt, Human
caggaugugauuuuucagcuccc

SEQ ID NO: 417182 - RNA, 21 nt, Human
cauggagugccgggaguggcc

SEQ ID NO: 417183 - RNA, 19 nt, Human
ccacagaggccaccuuccc

SEQ ID NO: 417184 - RNA, 20 nt, Human
ccacagaggccaccuucccc

SEQ ID NO: 417185 - RNA, 23 nt, Human
ccaggccaggaugugauuuuuca

SEQ ID NO: 417186 - RNA, 18 nt, Human
ccccuguagcagcaaagc

SEQ ID NO: 417187 - RNA, 20 nt, Human
ccccuguagcagcaaagcuc

SEQ ID NO: 417188 - RNA, 24 nt, Human
ccccuguagcagcaaagcucacuu

SEQ ID NO: 417189 - RNA, 20 nt, Human
cccuggcuacucugcccuuc

SEQ ID NO: 417190 - RNA, 21 nt, Human
ccugggcccugggucuuggga

SEQ ID NO: 417191 - RNA, 22 nt, Human
ccuugaaaauaaucauccucau

SEQ ID NO: 417192 - RNA, 23 nt, Human
cuagcacagacauugcucagggg

SEQ ID NO: 417193 - RNA, 22 nt, Human
cucaaaaugaacaauuaagagc

SEQ ID NO: 417194 - RNA, 19 nt, Human
cuccacagaggccaccuuc

SEQ ID NO: 417195 - RNA, 21 nt, Human
cuccacagaggccaccuuccc

SEQ ID NO: 417196 - RNA, 20 nt, Human
cucucuugaaccccauacuu

SEQ ID NO: 417197 - RNA, 18 nt, Human
gaaagccugaguguaaag

SEQ ID NO: 417198 - RNA, 20 nt, Human
gaagaggcccccauuccuuu

SEQ ID NO: 417199 - RNA, 19 nt, Human
gaaggcuacaaaaaccagg

SEQ ID NO: 417200 - RNA, 19 nt, Human
gacucagaucauuuuccuu

SEQ ID NO: 417201 - RNA, 21 nt, Human
gagggaaguguccccuaggga

SEQ ID NO: 417202 - RNA, 20 nt, Human
gauucugagcuuaugugaag

SEQ ID NO: 417203 - RNA, 23 nt, Human
gcacagacauugcucaggggcau

SEQ ID NO: 417204 - RNA, 22 nt, Human
gcauggagugccgggaguggcc

SEQ ID NO: 417205 - RNA, 23 nt, Human
gcccccauaugcuggggcuccac

SEQ ID NO: 417206 - RNA, 21 nt, Human
ggacccagguagcacagccca

SEQ ID NO: 417207 - RNA, 18 nt, Human
ggcagagagcaccaggac

SEQ ID NO: 417208 - RNA, 18 nt, Human
ggcgacagagaaguagga

SEQ ID NO: 417209 - RNA, 18 nt, Human
ggcuacaaaaaccaggau

SEQ ID NO: 417210 - RNA, 22 nt, Human
gggccgggaaccggcgaagaga

SEQ ID NO: 417211 - RNA, 18 nt, Human
gggcggcgaaccgcgggc

SEQ ID NO: 417212 - RNA, 19 nt, Human
gucuggcuaguguucacuu

SEQ ID NO: 417213 - RNA, 21 nt, Human
uaaaaaggaucuuuuagaguu

SEQ ID NO: 417214 - RNA, 21 nt, Human
uaaaaugcagcauuucagcuc

SEQ ID NO: 417215 - RNA, 22 nt, Human
uaaaaugcagcauuucagcuca

SEQ ID NO: 417216 - RNA, 18 nt, Human
uaaaggaccaacuuaagu

SEQ ID NO: 417217 - RNA, 23 nt, Human
uaccaaaaaggaaacacugcccu

SEQ ID NO: 417218 - RNA, 20 nt, Human
uagaaaggauguggaggaag

SEQ ID NO: 417219 - RNA, 19 nt, Human
uaugcuggggcuccacaga

SEQ ID NO: 417220 - RNA, 21 nt, Human
ucaaaacaauuuugggaggca

SEQ ID NO: 417221 - RNA, 21 nt, Human
uccacagaggccaccuucccc

SEQ ID NO: 417222 - RNA, 21 nt, Human
uccaguggcagagagcaccag

SEQ ID NO: 417223 - RNA, 19 nt, Human
ucccagcaacucugggcag

SEQ ID NO: 417224 - RNA, 18 nt, Human
ucccauugauucaucuuc

SEQ ID NO: 417225 - RNA, 18 nt, Human
ucuggcuaguguucacuu

SEQ ID NO: 417226 - RNA, 24 nt, Human
ucuucagcagcacuagaauucuag

SEQ ID NO: 417227 - RNA, 22 nt, Human
ugagggccuugaaaauaaucau

SEQ ID NO: 417228 - RNA, 22 nt, Human
ugcagggagguaggaauuacag

SEQ ID NO: 417229 - RNA, 18 nt, Human
ugcugggaagauggcagg

SEQ ID NO: 417230 - RNA, 23 nt, Human
ugcugggaagauggcagggccac

SEQ ID NO: 417231 - RNA, 21 nt, Human
ugcuggggcuccacagaggcc

SEQ ID NO: 417232 - RNA, 20 nt, Human
uggaagagugaaugggagcc

SEQ ID NO: 417233 - RNA, 25 nt, Human
uggagugccgggaguggcccugcug

SEQ ID NO: 417234 - RNA, 18 nt, Human
uggcagagagcaccagga

SEQ ID NO: 417235 - RNA, 18 nt, Human
ugggaaggaaggauguuc

SEQ ID NO: 417236 - RNA, 18 nt, Human
ugggagccaaggaaagag

SEQ ID NO: 417237 - RNA, 18 nt, Human
ugggauagagggugcaca

SEQ ID NO: 417238 - RNA, 25 nt, Human
ugggauagagggugcacaaguguaa

SEQ ID NO: 417239 - RNA, 19 nt, Human
ugggauucuggaagaguga

SEQ ID NO: 417240 - RNA, 19 nt, Human
ugugggaaacuagaaggau

SEQ ID NO: 417241 - RNA, 20 nt, Human
ugugggaaacuagaaggauu

SEQ ID NO: 417242 - RNA, 18 nt, Human
uucaaaguguccaugaaa

SEQ ID NO: 417243 - RNA, 22 nt, Human
uucaucuucagcagcacuagaa

SEQ ID NO: 417244 - RNA, 25 nt, Human
uucaugggauggcuaccuuggcggg

SEQ ID NO: 417245 - RNA, 20 nt, Human
uugaaaauaaucauccucau

SEQ ID NO: 417246 - RNA, 19 nt, Human
uugguuguaguugguugca

SEQ ID NO: 417247 - RNA, 20 nt, Human
uuugaagaggcccccauucc

SEQ ID NO: 417248 - RNA, 21 nt, Human
aacagaaauggcauaggccca

SEQ ID NO: 417249 - RNA, 21 nt, Human
aacccgcaagcggcuucccuc

SEQ ID NO: 417250 - RNA, 25 nt, Human
aagcgcccccacccccagggaacaa

SEQ ID NO: 417251 - RNA, 18 nt, Human
acaacagaaauggcauag

SEQ ID NO: 417252 - RNA, 20 nt, Human
acagaaacccccuguccaga

SEQ ID NO: 417253 - RNA, 24 nt, Human
acugccccaaacuacaacagaaaa

SEQ ID NO: 417254 - RNA, 23 nt, Human
agaaacccccuguccagagucag

SEQ ID NO: 417255 - RNA, 19 nt, Human
aggcggugggcgagcagcg

SEQ ID NO: 417256 - RNA, 26 nt, Human
auggagcaggcugugggcgcaccccc

SEQ ID NO: 417257 - RNA, 19 nt, Human
caacagaaauggcauaggc

SEQ ID NO: 417258 - RNA, 21 nt, Human
caacagaaauggcauaggccc

SEQ ID NO: 417259 - RNA, 20 nt, Human
caacauuaacucaaaagcaa

SEQ ID NO: 417260 - RNA, 23 nt, Human
caagcgcccccacccccagggaa

SEQ ID NO: 417261 - RNA, 22 nt, Human
caccccacacagguccccugca

SEQ ID NO: 417262 - RNA, 19 nt, Human
cagguccccugcacugccc

SEQ ID NO: 417263 - RNA, 26 nt, Human
cauccagcaacuguggccccuaccca

SEQ ID NO: 417264 - RNA, 18 nt, Human
ccacccccagggaacaag

SEQ ID NO: 417265 - RNA, 18 nt, Human
cccaaacuacaacagaaa

SEQ ID NO: 417266 - RNA, 24 nt, Human
cccaaacuacaacagaaauggcau

SEQ ID NO: 417267 - RNA, 20 nt, Human
cccccagggaacaaggucca

SEQ ID NO: 417268 - RNA, 20 nt, Human
ccccuacccaccuacccagg

SEQ ID NO: 417269 - RNA, 20 nt, Human
ccccuguccagagucagacu

SEQ ID NO: 417270 - RNA, 19 nt, Human
ccgccuaccaaaugaaaau

SEQ ID NO: 417271 - RNA, 23 nt, Human
ccggcagcgaggcgucgggcgaa

SEQ ID NO: 417272 - RNA, 19 nt, Human
ccucccaccggcagcgagg

SEQ ID NO: 417273 - RNA, 26 nt, Human
cgacaaacccgcaagcggcuucccuc

SEQ ID NO: 417274 - RNA, 18 nt, Human
cggcggcuguggcggccc

SEQ ID NO: 417275 - RNA, 22 nt, Human
cggcuucccucucgcuuccucc

SEQ ID NO: 417276 - RNA, 21 nt, Human
cgggcgaacaacgcuggcucc

SEQ ID NO: 417277 - RNA, 18 nt, Human
cucccggccggcggcugu

SEQ ID NO: 417278 - RNA, 24 nt, Human
cuccugauccgcgagguggcagug

SEQ ID NO: 417279 - RNA, 20 nt, Human
cuccugggcaagcgccccca

SEQ ID NO: 417280 - RNA, 21 nt, Human
cugccccaaacuacaacagaa

SEQ ID NO: 417281 - RNA, 23 nt, Human
cuguccagagucagacuguagcu

SEQ ID NO: 417282 - RNA, 22 nt, Human
cugugggcgcaccccugguccc

SEQ ID NO: 417283 - RNA, 19 nt, Human
gaacaacgcuggcuccuga

SEQ ID NO: 417284 - RNA, 25 nt, Human
gagaauggagcaggcugugggcgca

SEQ ID NO: 417285 - RNA, 20 nt, Human
gccccaaacuacaacagaaa

SEQ ID NO: 417286 - RNA, 21 nt, Human
ggccccuacccaccuacccag

SEQ ID NO: 417287 - RNA, 22 nt, Human
ggccggcggcuguggcggcccg

SEQ ID NO: 417288 - RNA, 23 nt, Human
ggccggcggcuguggcggcccgc

SEQ ID NO: 417289 - RNA, 22 nt, Human
ggccggggcucggcucuuccag

SEQ ID NO: 417290 - RNA, 19 nt, Human
ggcggugggcgagcagcgg

SEQ ID NO: 417291 - RNA, 20 nt, Human
gggcaagcgcccccaccccc

SEQ ID NO: 417292 - RNA, 18 nt, Human
ggggaagggagggcucgg

SEQ ID NO: 417293 - RNA, 19 nt, Human
gugggcgagcagcggcgac

SEQ ID NO: 417294 - RNA, 23 nt, Human
uacccaccuacccagguuggaua

SEQ ID NO: 417295 - RNA, 18 nt, Human
uauauaaacauccagcaa

SEQ ID NO: 417296 - RNA, 20 nt, Human
uauuguccuuuuacaacaug

SEQ ID NO: 417297 - RNA, 21 nt, Human
ucauuuuuugguuuagaaacu

SEQ ID NO: 417298 - RNA, 19 nt, Human
ucggcucuuccaggcggug

SEQ ID NO: 417299 - RNA, 22 nt, Human
ucuccgccuaccaaaugaaaau

SEQ ID NO: 417300 - RNA, 25 nt, Human
ucucuauauaaacauccagcaacug

SEQ ID NO: 417301 - RNA, 21 nt, Human
ugccccaaacuacaacagaaa

SEQ ID NO: 417302 - RNA, 24 nt, Human
ugggcgagcagcggcgacaaaccc

SEQ ID NO: 417303 - RNA, 22 nt, Human
uguggcagguggcaguagugcc

SEQ ID NO: 417304 - RNA, 22 nt, Human
uguggcggcccgcggguaacgg

SEQ ID NO: 417305 - RNA, 21 nt, Human
uuggauagggggaagggaggg

SEQ ID NO: 417306 - RNA, 22 nt, Human
uuuauuguccuuuuacaacaug

SEQ ID NO: 417307 - RNA, 19 nt, Human
acuccacuacccagccaau

SEQ ID NO: 417308 - RNA, 23 nt, Human
aggaccauucacuucuuggaugc

SEQ ID NO: 417309 - RNA, 19 nt, Human
aucaaagaacuuuuccauc

SEQ ID NO: 417310 - RNA, 18 nt, Human
aucucacuuccuucuccc

SEQ ID NO: 417311 - RNA, 23 nt, Human
caacacuccacuacccagccaau

SEQ ID NO: 417312 - RNA, 22 nt, Human
cacuacccagccaaugguagcc

SEQ ID NO: 417313 - RNA, 20 nt, Human
cacuccacuacccagccaau

SEQ ID NO: 417314 - RNA, 22 nt, Human
cacuuccuucucccagugucca

SEQ ID NO: 417315 - RNA, 21 nt, Human
caucucacuuccuucucccag

SEQ ID NO: 417316 - RNA, 19 nt, Human
ccagccaaugguagcccuu

SEQ ID NO: 417317 - RNA, 23 nt, Human
ccucccuguauauaccccucucg

SEQ ID NO: 417318 - RNA, 18 nt, Human
ccuucucccaguguccac

SEQ ID NO: 417319 - RNA, 19 nt, Human
cgacuaacuccaggcugcc

SEQ ID NO: 417320 - RNA, 25 nt, Human
cuguauauaccccucucgcgauccc

SEQ ID NO: 417321 - RNA, 26 nt, Human
cuguauauaccccucucgcgauccca

SEQ ID NO: 417322 - RNA, 21 nt, Human
ggacgagacaaucacgccccu

SEQ ID NO: 417323 - RNA, 18 nt, Human
cgacuaacuccaggcugc

SEQ ID NO: 417324 - RNA, 19 nt, Human
cgacuaacuccaggcugcc

SEQ ID NO: 417325 - RNA, 19 nt, Human
ugagaucucugaggucugg

SEQ ID NO: 417326 - RNA, 19 nt, Human
uggugagaucucugagguc

SEQ ID NO: 417327 - RNA, 21 nt, Human
aaaaaaaaacacaacacaaga

SEQ ID NO: 417328 - RNA, 18 nt, Human
aaaaaaacacaacacaag

SEQ ID NO: 417329 - RNA, 23 nt, Human
aaaaaaacacaacacaagaagga

SEQ ID NO: 417330 - RNA, 23 nt, Human
aaagcugaaucaacuuuaaccug

SEQ ID NO: 417331 - RNA, 21 nt, Human
aaauagguuucuucuguaccu

SEQ ID NO: 417332 - RNA, 20 nt, Human
aagaaaccuggcaucucaaa

SEQ ID NO: 417333 - RNA, 20 nt, Human
aaguucuccccgagucuacc

SEQ ID NO: 417334 - RNA, 27 nt, Human
acaaaauggaagacucuaaaauguacc

SEQ ID NO: 417335 - RNA, 21 nt, Human
accccaaaauggcacaaaaga

SEQ ID NO: 417336 - RNA, 23 nt, Human
accccaaaauggcacaaaagaaa

SEQ ID NO: 417337 - RNA, 19 nt, Human
aucacauccaccuucucca

SEQ ID NO: 417338 - RNA, 22 nt, Human
aucacauccaccuucuccaccc

SEQ ID NO: 417339 - RNA, 19 nt, Human
auccaccuucuccacccca

SEQ ID NO: 417340 - RNA, 18 nt, Human
caaaaaaaaacacaacac

SEQ ID NO: 417341 - RNA, 22 nt, Human
caaaauggaagacucuaaaaug

SEQ ID NO: 417342 - RNA, 21 nt, Human
caaaauggcacaaaagaaaca

SEQ ID NO: 417343 - RNA, 21 nt, Human
caacaaaauggaagacucuaa

SEQ ID NO: 417344 - RNA, 18 nt, Human
caacauuaaaagauacac

SEQ ID NO: 417345 - RNA, 22 nt, Human
cacaaaagaaacaguuaccaca

SEQ ID NO: 417346 - RNA, 25 nt, Human
cacauccaccuucuccaccccaaaa

SEQ ID NO: 417347 - RNA, 20 nt, Human
caccaaguucuccccgaguc

SEQ ID NO: 417348 - RNA, 21 nt, Human
caccaaguucuccccgagucu

SEQ ID NO: 417349 - RNA, 18 nt, Human
caccuucuccaccccaaa

SEQ ID NO: 417350 - RNA, 21 nt, Human
caucaagcagcgagccucuca

SEQ ID NO: 417351 - RNA, 28 nt, Human
caucacauccaccuucuccaccccaaaa

SEQ ID NO: 417352 - RNA, 23 nt, Human
cccaaaauggcacaaaagaaaca

SEQ ID NO: 417353 - RNA, 21 nt, Human
ccccaaaauggcacaaaagaa

SEQ ID NO: 417354 - RNA, 20 nt, Human
cuagauaaaaaagaaaccug

SEQ ID NO: 417355 - RNA, 20 nt, Human
cuccccgagucuaccacuga

SEQ ID NO: 417356 - RNA, 20 nt, Human
cuccuggaagcuauuucaua

SEQ ID NO: 417357 - RNA, 21 nt, Human
cuggugcaagggccaaaaaaa

SEQ ID NO: 417358 - RNA, 26 nt, Human
gaaucaacuuuaaccuggagggcuaa

SEQ ID NO: 417359 - RNA, 23 nt, Human
gggcucggaggcggcuacggcgg

SEQ ID NO: 417360 - RNA, 22 nt, Human
gguguaaaagagaugaugauga

SEQ ID NO: 417361 - RNA, 19 nt, Human
gugauuacaaucacacaga

SEQ ID NO: 417362 - RNA, 19 nt, Human
uaaaaaacaaauugagugg

SEQ ID NO: 417363 - RNA, 19 nt, Human
uaaaaaagaaaccuggcau

SEQ ID NO: 417364 - RNA, 20 nt, Human
uaaaagauacacuaaauucu

SEQ ID NO: 417365 - RNA, 18 nt, Human
uaaacugcuaaaaaacaa

SEQ ID NO: 417366 - RNA, 19 nt, Human
uagcaauacuugcauccca

SEQ ID NO: 417367 - RNA, 19 nt, Human
uagcuggagcuccuggaag

SEQ ID NO: 417368 - RNA, 21 nt, Human
uagcuggagcuccuggaagcu

SEQ ID NO: 417369 - RNA, 22 nt, Human
uauagcuggagcuccuggaagc

SEQ ID NO: 417370 - RNA, 21 nt, Human
uccaccuucuccaccccaaaa

SEQ ID NO: 417371 - RNA, 25 nt, Human
uccccgagucuaccacugaaaggac

SEQ ID NO: 417372 - RNA, 23 nt, Human
ugaaaggaccuuuuuuggaaaua

SEQ ID NO: 417373 - RNA, 19 nt, Human
uggcacaaaagaaacaguu

SEQ ID NO: 417374 - RNA, 23 nt, Human
uuauuggcuucaucacauccacc

SEQ ID NO: 417375 - RNA, 18 nt, Human
uucuagauaaaaaagaaa

SEQ ID NO: 417376 - RNA, 21 nt, Human
uuguuaauuacagcauuugaa

SEQ ID NO: 417377 - RNA, 19 nt, Human
aaccucaucuuaauaucca

SEQ ID NO: 417378 - RNA, 20 nt, Human
aacuagaaaccagcuaacaa

SEQ ID NO: 417379 - RNA, 23 nt, Human
aagccugcugcuggucacaaugg

SEQ ID NO: 417380 - RNA, 18 nt, Human
aaggaacauaaaaacaaa

SEQ ID NO: 417381 - RNA, 20 nt, Human
aaggaacauaaaaacaaaca

SEQ ID NO: 417382 - RNA, 24 nt, Human
auaaaaacaaacaugcacacaauu

SEQ ID NO: 417383 - RNA, 24 nt, Human
caaaaguaauaauggcugaacuua

SEQ ID NO: 417384 - RNA, 24 nt, Human
ccaaaaguaauaauggcugaacuu

SEQ ID NO: 417385 - RNA, 20 nt, Human
ccuccagcugcugcagcugc

SEQ ID NO: 417386 - RNA, 24 nt, Human
cgcccuccagcugcugcagcugca

SEQ ID NO: 417387 - RNA, 21 nt, Human
uaaaaacaaacaugcacacaa

SEQ ID NO: 417388 - RNA, 25 nt, Human
ucaaugguaacagucaauguuuucu

SEQ ID NO: 417389 - RNA, 18 nt, Human
uccagcugcugcagcugc

SEQ ID NO: 417390 - RNA, 19 nt, Human
ucccaaagguuucuuucag

SEQ ID NO: 417391 - RNA, 21 nt, Human
ucuugggggaaaaaagccugc

SEQ ID NO: 417392 - RNA, 21 nt, Human
ucuuguugagaucauccuuug

SEQ ID NO: 417393 - RNA, 18 nt, Human
ugagaucauccuuuguuu

SEQ ID NO: 417394 - RNA, 19 nt, Human
ugucuccuucacuucgccc

SEQ ID NO: 417395 - RNA, 26 nt, Human
uucaaugguaacagucaauguuuucu

SEQ ID NO: 417396 - RNA, 25 nt, Human
uucauaauuugucauguucugggau

SEQ ID NO: 417397 - RNA, 19 nt, Human
aaacaaacagcaacuccuc

SEQ ID NO: 417398 - RNA, 20 nt, Human
aaacugcugggauuacaggc

SEQ ID NO: 417399 - RNA, 24 nt, Human
aaacugcugggauuacaggcguga

SEQ ID NO: 417400 - RNA, 22 nt, Human
aaaucugccacacauuccugcc

SEQ ID NO: 417401 - RNA, 21 nt, Human
aacacucucucugacuagcca

SEQ ID NO: 417402 - RNA, 23 nt, Human
aacagcauuauccaaggccugag

SEQ ID NO: 417403 - RNA, 21 nt, Human
aagaagccucugugauccacc

SEQ ID NO: 417404 - RNA, 22 nt, Human
aagcuggaccaauacaguucug

SEQ ID NO: 417405 - RNA, 21 nt, Human
aaggaacguggcuuucagaug

SEQ ID NO: 417406 - RNA, 19 nt, Human
aaggacaccggaccaugac

SEQ ID NO: 417407 - RNA, 21 nt, Human
aaguguuuuucucccacugaa

SEQ ID NO: 417408 - RNA, 24 nt, Human
acaggguuucuccauguuggucag

SEQ ID NO: 417409 - RNA, 21 nt, Human
accucgaccucccaaacugcu

SEQ ID NO: 417410 - RNA, 24 nt, Human
acgcccuccucugucaguuuuccu

SEQ ID NO: 417411 - RNA, 19 nt, Human
acuagccacccgagacugc

SEQ ID NO: 417412 - RNA, 21 nt, Human
acucauuuuccccucuuuucu

SEQ ID NO: 417413 - RNA, 20 nt, Human
agaaaacccaccucaccaca

SEQ ID NO: 417414 - RNA, 18 nt, Human
agaaucgaugaugaccuu

SEQ ID NO: 417415 - RNA, 21 nt, Human
agaaugggcuggguggauagg

SEQ ID NO: 417416 - RNA, 18 nt, Human
agacaggguuucuccaug

SEQ ID NO: 417417 - RNA, 21 nt, Human
agagggagagcugggaaggug

SEQ ID NO: 417418 - RNA, 21 nt, Human
agauguuuuuccaccugaaga

SEQ ID NO: 417419 - RNA, 18 nt, Human
agcggccuugcaaccaca

SEQ ID NO: 417420 - RNA, 25 nt, Human
agcggccuugcaaccacauugaggc

SEQ ID NO: 417421 - RNA, 21 nt, Human
aggagagggagaccccacuag

SEQ ID NO: 417422 - RNA, 21 nt, Human
agggaaggaaggaaagggucc

SEQ ID NO: 417423 - RNA, 19 nt, Human
agggaccggggaaaagccc

SEQ ID NO: 417424 - RNA, 24 nt, Human
agggacugggucagccaccugggg

SEQ ID NO: 417425 - RNA, 18 nt, Human
agguggcagaggaggggc

SEQ ID NO: 417426 - RNA, 21 nt, Human
aggugguggggcccagggcug

SEQ ID NO: 417427 - RNA, 18 nt, Human
agguuggacaggagagag

SEQ ID NO: 417428 - RNA, 22 nt, Human
aguaaacggacagacgcuuccc

SEQ ID NO: 417429 - RNA, 19 nt, Human
aguagcugggauuacaggc

SEQ ID NO: 417430 - RNA, 19 nt, Human
agugaugggaagaaaaccc

SEQ ID NO: 417431 - RNA, 18 nt, Human
augcauuucuccugucug

SEQ ID NO: 417432 - RNA, 23 nt, Human
auuuuggggcaccuucuccuuca

SEQ ID NO: 417433 - RNA, 23 nt, Human
caaacaugguguagugaaaagga

SEQ ID NO: 417434 - RNA, 24 nt, Human
caaacugcugggauuacaggcgug

SEQ ID NO: 417435 - RNA, 23 nt, Human
caaccuccaccuccuggguucaa

SEQ ID NO: 417436 - RNA, 21 nt, Human
caaggccugagguggagagcc

SEQ ID NO: 417437 - RNA, 19 nt, Human
caauucuucugccucagcc

SEQ ID NO: 417438 - RNA, 22 nt, Human
cacagacacuucagacccaaag

SEQ ID NO: 417439 - RNA, 24 nt, Human
cacagacacuucagacccaaaggc

SEQ ID NO: 417440 - RNA, 19 nt, Human
cacaucguggugggguagg

SEQ ID NO: 417441 - RNA, 20 nt, Human
caccacagcuacugcccgug

SEQ ID NO: 417442 - RNA, 18 nt, Human
cacccaggcaccgcacag

SEQ ID NO: 417443 - RNA, 21 nt, Human
cacccaggcaccgcacaggcu

SEQ ID NO: 417444 - RNA, 18 nt, Human
caccggaccaugacucca

SEQ ID NO: 417445 - RNA, 24 nt, Human
caccucaccacagcuacugcccgu

SEQ ID NO: 417446 - RNA, 19 nt, Human
cacguggcccuggaggagc

SEQ ID NO: 417447 - RNA, 22 nt, Human
cacucucacaaagacccaccuu

SEQ ID NO: 417448 - RNA, 21 nt, Human
cacugcaaccuccaccuccug

SEQ ID NO: 417449 - RNA, 23 nt, Human
cacugcaaccuccaccuccuggg

SEQ ID NO: 417450 - RNA, 20 nt, Human
cagacacuucagacccaaag

SEQ ID NO: 417451 - RNA, 23 nt, Human
cagcaacuccucauggcugaggu

SEQ ID NO: 417452 - RNA, 25 nt, Human
cagcagccagggcacaucgugguga

SEQ ID NO: 417453 - RNA, 22 nt, Human
cagcaggcacuguuuacauccu

SEQ ID NO: 417454 - RNA, 19 nt, Human
cagcaguacuugcaaacaa

SEQ ID NO: 417455 - RNA, 22 nt, Human
cagcaguacuugcaaacaaagu

SEQ ID NO: 417456 - RNA, 20 nt, Human
cagccuccugaguagcuggg

SEQ ID NO: 417457 - RNA, 18 nt, Human
cagccucugcccucugcc

SEQ ID NO: 417458 - RNA, 19 nt, Human
cagcuacugcccgugagaa

SEQ ID NO: 417459 - RNA, 19 nt, Human
cagcuuccaggaguugggg

SEQ ID NO: 417460 - RNA, 19 nt, Human
caggagagggagaccccac

SEQ ID NO: 417461 - RNA, 23 nt, Human
caggcaccgcacaggcuguccua

SEQ ID NO: 417462 - RNA, 24 nt, Human
caggguuucuccauguuggucagg

SEQ ID NO: 417463 - RNA, 24 nt, Human
caucacggaacccccaaacacucu

SEQ ID NO: 417464 - RNA, 22 nt, Human
ccaaacugcugggauuacaggc

SEQ ID NO: 417465 - RNA, 22 nt, Human
ccaaacugcugggauuacaggc

SEQ ID NO: 417466 - RNA, 24 nt, Human
ccaaacugcugggauuacaggcgu

SEQ ID NO: 417467 - RNA, 20 nt, Human
ccaccgcgcccggccugucc

SEQ ID NO: 417468 - RNA, 20 nt, Human
ccaccgcgcccggccugucc

SEQ ID NO: 417469 - RNA, 23 nt, Human
ccaccuaccucgaccucccaaac

SEQ ID NO: 417470 - RNA, 20 nt, Human
ccaccuccuggguucaauuc

SEQ ID NO: 417471 - RNA, 19 nt, Human
ccacuuaggcagcgguggg

SEQ ID NO: 417472 - RNA, 19 nt, Human
ccagggcaaugggauguug

SEQ ID NO: 417473 - RNA, 19 nt, Human
ccauguuggucagguuggu

SEQ ID NO: 417474 - RNA, 22 nt, Human
ccauguuggucagguuggucuc

SEQ ID NO: 417475 - RNA, 23 nt, Human
ccauguuggucagguuggucucg

SEQ ID NO: 417476 - RNA, 22 nt, Human
cccauaaaaacucauuuucccc

SEQ ID NO: 417477 - RNA, 22 nt, Human
cccccaaacacucucucugacu

SEQ ID NO: 417478 - RNA, 23 nt, Human
cccccauaaauaucuccaaauca

SEQ ID NO: 417479 - RNA, 24 nt, Human
ccccuggggaggggguggggcgcg

SEQ ID NO: 417480 - RNA, 25 nt, Human
ccccuggggaggggguggggcgcug

SEQ ID NO: 417481 - RNA, 24 nt, Human
cccgaccucaggugauccaccuac

SEQ ID NO: 417482 - RNA, 20 nt, Human
cccuccucugucaguuuucc

SEQ ID NO: 417483 - RNA, 21 nt, Human
cccuggggaggggguggggga

SEQ ID NO: 417484 - RNA, 23 nt, Human
ccgccccugccucacaggcacug

SEQ ID NO: 417485 - RNA, 19 nt, Human
ccuaccucgaccucccaaa

SEQ ID NO: 417486 - RNA, 21 nt, Human
ccuccaccuccuggguucaau

SEQ ID NO: 417487 - RNA, 23 nt, Human
ccuccagccucugcccucugccc

SEQ ID NO: 417488 - RNA, 21 nt, Human
ccucccagcuccuagacuucc

SEQ ID NO: 417489 - RNA, 23 nt, Human
ccuccucugucaguuuuccugaa

SEQ ID NO: 417490 - RNA, 19 nt, Human
ccucucuggguuuucaggg

SEQ ID NO: 417491 - RNA, 23 nt, Human
ccugaguagcugggauuacaggc

SEQ ID NO: 417492 - RNA, 24 nt, Human
ccugaguagcugggauuacaggcu

SEQ ID NO: 417493 - RNA, 24 nt, Human
ccuggcacguggcccuggaggagc

SEQ ID NO: 417494 - RNA, 23 nt, Human
ccuggguucaauucuucugccuc

SEQ ID NO: 417495 - RNA, 20 nt, Human
cgaccucaggugauccaccu

SEQ ID NO: 417496 - RNA, 27 nt, Human
cgcugccauaucucuagccgggugucc

SEQ ID NO: 417497 - RNA, 24 nt, Human
cuacagcucacucucacaaagacc

SEQ ID NO: 417498 - RNA, 21 nt, Human
cuaguuauauauggcuugggu

SEQ ID NO: 417499 - RNA, 22 nt, Human
cucacucucacaaagacccacc

SEQ ID NO: 417500 - RNA, 24 nt, Human
cucacugcaaccuccaccuccugg

SEQ ID NO: 417501 - RNA, 26 nt, Human
cucacugcaaccuccaccuccugggu

SEQ ID NO: 417502 - RNA, 23 nt, Human
cucagccuccugaguagcuggga

SEQ ID NO: 417503 - RNA, 21 nt, Human
cuccaaaucagugguaccugc

SEQ ID NO: 417504 - RNA, 21 nt, Human
cuccagccucugcccucugcc

SEQ ID NO: 417505 - RNA, 21 nt, Human
cucccaaacugcugggauuac

SEQ ID NO: 417506 - RNA, 24 nt, Human
cucccuagacccuuguaaaauaac

SEQ ID NO: 417507 - RNA, 21 nt, Human
cuccuccaucccacccugcca

SEQ ID NO: 417508 - RNA, 21 nt, Human
cucuuucugaaauccagggcu

SEQ ID NO: 417509 - RNA, 21 nt, Human
cugaaggagcagggggcaggu

SEQ ID NO: 417510 - RNA, 23 nt, Human
cugcaaccuccaccuccuggguu

SEQ ID NO: 417511 - RNA, 24 nt, Human
cugcaaccuccaccuccuggguuc

SEQ ID NO: 417512 - RNA, 23 nt, Human
cugccucagccuccugaguagcu

SEQ ID NO: 417513 - RNA, 20 nt, Human
cuggcucuccugggcaggag

SEQ ID NO: 417514 - RNA, 20 nt, Human
cugggucagccaccugggga

SEQ ID NO: 417515 - RNA, 22 nt, Human
cuugcauuuuggggcaccuucu

SEQ ID NO: 417516 - RNA, 24 nt, Human
cuuguggaaaaucuugcauuuugg

SEQ ID NO: 417517 - RNA, 23 nt, Human
cuuuucugcaaacuggggacaau

SEQ ID NO: 417518 - RNA, 19 nt, Human
gaaaagcccgcaggaaagg

SEQ ID NO: 417519 - RNA, 21 nt, Human
gacagacgcuucccaccagcu

SEQ ID NO: 417520 - RNA, 26 nt, Human
gacccuuguaaaauaacaacagcaau

SEQ ID NO: 417521 - RNA, 18 nt, Human
gaccucaggugauccacc

SEQ ID NO: 417522 - RNA, 24 nt, Human
gaccucaggugauccaccuaccuc

SEQ ID NO: 417523 - RNA, 20 nt, Human
gacucagccgcuggggucug

SEQ ID NO: 417524 - RNA, 18 nt, Human
gacugccccgcucucccu

SEQ ID NO: 417525 - RNA, 20 nt, Human
gagacaggguuucuccaugu

SEQ ID NO: 417526 - RNA, 21 nt, Human
gagacaggguuucuccauguu

SEQ ID NO: 417527 - RNA, 21 nt, Human
gagagcugggaagguggugac

SEQ ID NO: 417528 - RNA, 19 nt, Human
gagcccaggggugcucuuc

SEQ ID NO: 417529 - RNA, 24 nt, Human
gaguagcugggauuacaggcuugc

SEQ ID NO: 417530 - RNA, 25 nt, Human
gaguggccuaggugguggggcccag

SEQ ID NO: 417531 - RNA, 18 nt, Human
gauuacaggcgugagcca

SEQ ID NO: 417532 - RNA, 22 nt, Human
gauuacaggcgugagccaccgc

SEQ ID NO: 417533 - RNA, 22 nt, Human
gauuacaggcgugagccaccgc

SEQ ID NO: 417534 - RNA, 24 nt, Human
gauuacaggcuugcgccaccaugc

SEQ ID NO: 417535 - RNA, 18 nt, Human
gcaggaaagggguuaggu

SEQ ID NO: 417536 - RNA, 18 nt, Human
gccaccaugcccggcuau

SEQ ID NO: 417537 - RNA, 19 nt, Human
gccccacccaggcaccgca

SEQ ID NO: 417538 - RNA, 20 nt, Human
gccccgcucucccuucccac

SEQ ID NO: 417539 - RNA, 20 nt, Human
gccuccagccucugcccucu

SEQ ID NO: 417540 - RNA, 18 nt, Human
gccugagguggagagccc

SEQ ID NO: 417541 - RNA, 21 nt, Human
gcuguuuuugucuguuuuucc

SEQ ID NO: 417542 - RNA, 18 nt, Human
gcuuccaccucaaccaac

SEQ ID NO: 417543 - RNA, 23 nt, Human
ggacacagcuuccaggaguuggg

SEQ ID NO: 417544 - RNA, 18 nt, Human
ggacagcugucauauucu

SEQ ID NO: 417545 - RNA, 27 nt, Human
ggagcugugggccgauuaacgaccgac

SEQ ID NO: 417546 - RNA, 23 nt, Human
ggcacgaucucagcucacugcaa

SEQ ID NO: 417547 - RNA, 23 nt, Human
ggcuugguggaguuacaagccag

SEQ ID NO: 417548 - RNA, 22 nt, Human
gggcagguaaguggagcccagg

SEQ ID NO: 417549 - RNA, 20 nt, Human
gggccagagggagagcuggg

SEQ ID NO: 417550 - RNA, 24 nt, Human
gggggagcaggcucucggcuacuc

SEQ ID NO: 417551 - RNA, 23 nt, Human
ggggguggggugggagcuguggg

SEQ ID NO: 417552 - RNA, 23 nt, Human
gguggggugggagcugugggccg

SEQ ID NO: 417553 - RNA, 22 nt, Human
guagcugggauuacaggcuugc

SEQ ID NO: 417554 - RNA, 24 nt, Human
gugauccaccuaccucgaccuccc

SEQ ID NO: 417555 - RNA, 23 nt, Human
gugauccaccucgaagaacgccu

SEQ ID NO: 417556 - RNA, 21 nt, Human
guggagcccaggggugcucuu

SEQ ID NO: 417557 - RNA, 19 nt, Human
uacagcucacucucacaaa

SEQ ID NO: 417558 - RNA, 23 nt, Human
uacaggcgugagccaccgcgccc

SEQ ID NO: 417559 - RNA, 18 nt, Human
uacauggauccguggaag

SEQ ID NO: 417560 - RNA, 18 nt, Human
uacccuacaucacggaac

SEQ ID NO: 417561 - RNA, 24 nt, Human
uaccucgaccucccaaacugcugg

SEQ ID NO: 417562 - RNA, 22 nt, Human
uagagacaggguuucuccaugu

SEQ ID NO: 417563 - RNA, 21 nt, Human
uagccacccgagacugcccuu

SEQ ID NO: 417564 - RNA, 22 nt, Human
uauaccuuaaaaguuuuacauu

SEQ ID NO: 417565 - RNA, 20 nt, Human
uaucgugaguaaggcaggag

SEQ ID NO: 417566 - RNA, 21 nt, Human
ucacaaagacccaccuuggag

SEQ ID NO: 417567 - RNA, 22 nt, Human
ucacagacacuucagacccaaa

SEQ ID NO: 417568 - RNA, 23 nt, Human
ucacugcaaccuccaccuccugg

SEQ ID NO: 417569 - RNA, 24 nt, Human
ucacugcaaccuccaccuccuggg

SEQ ID NO: 417570 - RNA, 25 nt, Human
ucacugcaaccuccaccuccugggu

SEQ ID NO: 417571 - RNA, 20 nt, Human
ucagccuccugaguagcugg

SEQ ID NO: 417572 - RNA, 23 nt, Human
uccaaggccugagguggagagga

SEQ ID NO: 417573 - RNA, 24 nt, Human
ucccaaacugcugggauuacaggc

SEQ ID NO: 417574 - RNA, 21 nt, Human
ucccagauccagacuuggcuc

SEQ ID NO: 417575 - RNA, 19 nt, Human
ucccagcuccuagacuucc

SEQ ID NO: 417576 - RNA, 18 nt, Human
ucccuucccacacucugg

SEQ ID NO: 417577 - RNA, 24 nt, Human
uccugaguagcugggauuacaggc

SEQ ID NO: 417578 - RNA, 24 nt, Human
uccuuuggaggaguggccuaggug

SEQ ID NO: 417579 - RNA, 22 nt, Human
ucgcucuuguuguccagguugg

SEQ ID NO: 417580 - RNA, 24 nt, Human
ucguuuagcaacuuacaaguguuu

SEQ ID NO: 417581 - RNA, 21 nt, Human
ucuccauguuggucagguugg

SEQ ID NO: 417582 - RNA, 18 nt, Human
ucucccuucccacacucu

SEQ ID NO: 417583 - RNA, 21 nt, Human
ucucccuucccacacucuggg

SEQ ID NO: 417584 - RNA, 22 nt, Human
ucucucagcagguggguucgug

SEQ ID NO: 417585 - RNA, 22 nt, Human
ucucugacuagccacccgagac

SEQ ID NO: 417586 - RNA, 22 nt, Human
ucugaaaauucuucuccuccau

SEQ ID NO: 417587 - RNA, 19 nt, Human
ucugagucugaaaacaacu

SEQ ID NO: 417588 - RNA, 27 nt, Human
ucugcagcuaaaaucaaaccggggucc

SEQ ID NO: 417589 - RNA, 18 nt, Human
ucugcccucugcccccac

SEQ ID NO: 417590 - RNA, 21 nt, Human
ucuggcaaacuuuuuuucucu

SEQ ID NO: 417591 - RNA, 20 nt, Human
ucugucaguuuuccugaaug

SEQ ID NO: 417592 - RNA, 23 nt, Human
ucugucccugaggaauggaugca

SEQ ID NO: 417593 - RNA, 23 nt, Human
ucuucugugaggcuguuuuuguc

SEQ ID NO: 417594 - RNA, 23 nt, Human
ugaaauccagggcuucccccagg

SEQ ID NO: 417595 - RNA, 19 nt, Human
ugaagggggugggguggga

SEQ ID NO: 417596 - RNA, 18 nt, Human
ugagagugggggucugag

SEQ ID NO: 417597 - RNA, 18 nt, Human
ugaggcaacagcauuauc

SEQ ID NO: 417598 - RNA, 21 nt, Human
ugaggucucaagggaccgggg

SEQ ID NO: 417599 - RNA, 24 nt, Human
ugauccaccuaccucgaccuccca

SEQ ID NO: 417600 - RNA, 19 nt, Human
ugccccgcucucccuuccc

SEQ ID NO: 417601 - RNA, 24 nt, Human
ugccucagccuccugaguagcugg

SEQ ID NO: 417602 - RNA, 24 nt, Human
ugcugggauuacaggcgugagcca

SEQ ID NO: 417603 - RNA, 18 nt, Human
uggaaggagggcuuccac

SEQ ID NO: 417604 - RNA, 22 nt, Human
uggcaaacuuuuuuucucuuug

SEQ ID NO: 417605 - RNA, 24 nt, Human
uggcacguggcccuggaggagcag

SEQ ID NO: 417606 - RNA, 21 nt, Human
uggcagggggaggacgagguc

SEQ ID NO: 417607 - RNA, 22 nt, Human
uggcagggggaggacgaggucg

SEQ ID NO: 417608 - RNA, 21 nt, Human
ugggaagaaaacccaccucac

SEQ ID NO: 417609 - RNA, 19 nt, Human
ugggauuacaggcgugagc

SEQ ID NO: 417610 - RNA, 21 nt, Human
ugggauuacaggcgugagcca

SEQ ID NO: 417611 - RNA, 22 nt, Human
ugggauuacaggcgugagccac

SEQ ID NO: 417612 - RNA, 23 nt, Human
ugggauuacaggcgugagccacc

SEQ ID NO: 417613 - RNA, 24 nt, Human
ugggauuacaggcgugagccaccg

SEQ ID NO: 417614 - RNA, 18 nt, Human
ugggauuacaggcuugcg

SEQ ID NO: 417615 - RNA, 24 nt, Human
ugggauuacaggcuugcgccacca

SEQ ID NO: 417616 - RNA, 25 nt, Human
ugggauuacaggcuugcgccaccau

SEQ ID NO: 417617 - RNA, 19 nt, Human
ugggcaggagguaaggcac

SEQ ID NO: 417618 - RNA, 23 nt, Human
ugggcuggguggauaggggaggu

SEQ ID NO: 417619 - RNA, 19 nt, Human
uggggagggggugggggag

SEQ ID NO: 417620 - RNA, 18 nt, Human
uggggccagguggacacc

SEQ ID NO: 417621 - RNA, 18 nt, Human
uggguggauaggggaggu

SEQ ID NO: 417622 - RNA, 23 nt, Human
uggucagguuggucucgaacucc

SEQ ID NO: 417623 - RNA, 19 nt, Human
uggucucgaacucccgacc

SEQ ID NO: 417624 - RNA, 20 nt, Human
uggugaacagcggccuugca

SEQ ID NO: 417625 - RNA, 18 nt, Human
ugguggggcccagggcug

SEQ ID NO: 417626 - RNA, 22 nt, Human
ugugaggcuguuuuugucuguu

SEQ ID NO: 417627 - RNA, 23 nt, Human
uguuuuugucuguuuuuccuccu

SEQ ID NO: 417628 - RNA, 19 nt, Human
uuaacauuccuggugacuc

SEQ ID NO: 417629 - RNA, 24 nt, Human
uuaauagagacaggguuucuccau

SEQ ID NO: 417630 - RNA, 24 nt, Human
uuacagcaguacuugcaaacaaag

SEQ ID NO: 417631 - RNA, 26 nt, Human
uuacccuacaucacggaacccccaaa

SEQ ID NO: 417632 - RNA, 21 nt, Human
uuagccagccagaggauuuuc

SEQ ID NO: 417633 - RNA, 19 nt, Human
uuaggcagcgguggaggca

SEQ ID NO: 417634 - RNA, 20 nt, Human
uuauagaugaggcaacagca

SEQ ID NO: 417635 - RNA, 18 nt, Human
uuccaggaguuggggcag

SEQ ID NO: 417636 - RNA, 19 nt, Human
uuccccucuuuucuuuucc

SEQ ID NO: 417637 - RNA, 18 nt, Human
uucuccccguucagcccc

SEQ ID NO: 417638 - RNA, 18 nt, Human
uucugguccggccggcgg

SEQ ID NO: 417639 - RNA, 22 nt, Human
uugaucugaagaagccucugug

SEQ ID NO: 417640 - RNA, 22 nt, Human
uuggacaggagagagaaugggc

SEQ ID NO: 417641 - RNA, 21 nt, Human
uuggauucuccuacaugcuuc

SEQ ID NO: 417642 - RNA, 21 nt, Human
uuggggcaccuucuccuucag

SEQ ID NO: 417643 - RNA, 20 nt, Human
uuggugggcacugaaggggg

SEQ ID NO: 417644 - RNA, 20 nt, Human
uuuacauuuacaaaugucua

SEQ ID NO: 417645 - RNA, 24 nt, Human
uuucgcucuuguuguccagguugg

SEQ ID NO: 417646 - RNA, 19 nt, Human
uuucuccauguuggucagg

SEQ ID NO: 417647 - RNA, 20 nt, Human
uuucuccauguuggucaggu

SEQ ID NO: 417648 - RNA, 19 nt, Human
uuugucuguuuuuccuccu

SEQ ID NO: 417649 - RNA, 20 nt, Human
uuuugggugguggagugaga

SEQ ID NO: 417650 - RNA, 24 nt, Human
uuuuuuguauuuuuaauagagaca

SEQ ID NO: 417651 - RNA, 25 nt, Human
aaaaggagagagauuuaguauguag

SEQ ID NO: 417652 - RNA, 21 nt, Human
aaacagaauagcgauguuuau

SEQ ID NO: 417653 - RNA, 21 nt, Human
aaauacauccagugaagacac

SEQ ID NO: 417654 - RNA, 22 nt, Human
aaccaagaauacugaaaaaaaa

SEQ ID NO: 417655 - RNA, 25 nt, Human
aaccaagaauacugaaaaaaaaccc

SEQ ID NO: 417656 - RNA, 23 nt, Human
aaccacucacacacacacaacca

SEQ ID NO: 417657 - RNA, 22 nt, Human
aaccgguacaaauaagagagca

SEQ ID NO: 417658 - RNA, 21 nt, Human
aacugcacuagagacaaagac

SEQ ID NO: 417659 - RNA, 20 nt, Human
aagugggacaaaaaaaagaa

SEQ ID NO: 417660 - RNA, 22 nt, Human
acacaaauacaaguugcccaau

SEQ ID NO: 417661 - RNA, 19 nt, Human
acacacaaccagguuuccu

SEQ ID NO: 417662 - RNA, 27 nt, Human
acaccgccgccucacccguccaugagc

SEQ ID NO: 417663 - RNA, 22 nt, Human
acauccagugaagacaccaaua

SEQ ID NO: 417664 - RNA, 20 nt, Human
accaagugggacaaaaaaaa

SEQ ID NO: 417665 - RNA, 18 nt, Human
acccucuuucaaaggaau

SEQ ID NO: 417666 - RNA, 18 nt, Human
acggaauaucucgaaaaa

SEQ ID NO: 417667 - RNA, 23 nt, Human
acguggauccugcccugucucuc

SEQ ID NO: 417668 - RNA, 18 nt, Human
acuagagacaaagacgug

SEQ ID NO: 417669 - RNA, 21 nt, Human
acugcacuagagacaaagacg

SEQ ID NO: 417670 - RNA, 20 nt, Human
acugcggcccccucuccucu

SEQ ID NO: 417671 - RNA, 21 nt, Human
agauauaucuguauuucuuug

SEQ ID NO: 417672 - RNA, 20 nt, Human
agauguauauugaaacccuc

SEQ ID NO: 417673 - RNA, 23 nt, Human
agcaggaagaggaugagggcgag

SEQ ID NO: 417674 - RNA, 20 nt, Human
aggaagaggaugagggcgag

SEQ ID NO: 417675 - RNA, 22 nt, Human
aggaaggggagcaggaagagga

SEQ ID NO: 417676 - RNA, 23 nt, Human
aggaaggggagcaggaagaggau

SEQ ID NO: 417677 - RNA, 19 nt, Human
aggcagugccccugggggc

SEQ ID NO: 417678 - RNA, 21 nt, Human
aggccgggccagggcugggga

SEQ ID NO: 417679 - RNA, 22 nt, Human
agggaagggaaggaccagggga

SEQ ID NO: 417680 - RNA, 24 nt, Human
agggaagggaaggaccaggggaug

SEQ ID NO: 417681 - RNA, 24 nt, Human
agggcuggggagcgcgcgcgcugg

SEQ ID NO: 417682 - RNA, 22 nt, Human
aggggaucggggagggcagagc

SEQ ID NO: 417683 - RNA, 19 nt, Human
auaagagagcaagagagag

SEQ ID NO: 417684 - RNA, 22 nt, Human
auacaaaaaccgguacaaauaa

SEQ ID NO: 417685 - RNA, 20 nt, Human
auccagugaagacaccaaua

SEQ ID NO: 417686 - RNA, 19 nt, Human
aucccaagggggagggcuc

SEQ ID NO: 417687 - RNA, 22 nt, Human
aucuccuccucuucccugucag

SEQ ID NO: 417688 - RNA, 23 nt, Human
caaauacauccagugaagacacc

SEQ ID NO: 417689 - RNA, 19 nt, Human
caacucaaguccacagcag

SEQ ID NO: 417690 - RNA, 20 nt, Human
cacacaaauacaaguugccc

SEQ ID NO: 417691 - RNA, 20 nt, Human
cacccccaaaagcaggucac

SEQ ID NO: 417692 - RNA, 23 nt, Human
cacuguccgccgccggccgggga

SEQ ID NO: 417693 - RNA, 19 nt, Human
cagcaauguccugaagcuc

SEQ ID NO: 417694 - RNA, 23 nt, Human
caggaaggggagcaggaagagga

SEQ ID NO: 417695 - RNA, 18 nt, Human
cauaaacauauauauaua

SEQ ID NO: 417696 - RNA, 23 nt, Human
cauaaacauauauauauauauau

SEQ ID NO: 417697 - RNA, 22 nt, Human
cauauaaaaaacagaauagcga

SEQ ID NO: 417698 - RNA, 21 nt, Human
ccacaaugggcacguggaucc

SEQ ID NO: 417699 - RNA, 22 nt, Human
ccaccccgccuccgggggcggg

SEQ ID NO: 417700 - RNA, 28 nt, Human
ccacugcggcccccucuccucuuccuuc

SEQ ID NO: 417701 - RNA, 27 nt, Human
cccaugcccuggccuugcaccgguucc

SEQ ID NO: 417702 - RNA, 26 nt, Human
ccccaccaagugggacaaaaaaaaga

SEQ ID NO: 417703 - RNA, 19 nt, Human
cccccuccaccccgccucc

SEQ ID NO: 417704 - RNA, 18 nt, Human
cccccucuccucuuccuu

SEQ ID NO: 417705 - RNA, 20 nt, Human
cccccucuccucuuccuucu

SEQ ID NO: 417706 - RNA, 23 nt, Human
ccccgcgcggaccacggcuccuc

SEQ ID NO: 417707 - RNA, 23 nt, Human
ccccuccaccccgccuccggggg

SEQ ID NO: 417708 - RNA, 19 nt, Human
ccccugucgcuuucgcugc

SEQ ID NO: 417709 - RNA, 21 nt, Human
ccccugucgcuuucgcugcuc

SEQ ID NO: 417710 - RNA, 18 nt, Human
cccgaggccgggccaggg

SEQ ID NO: 417711 - RNA, 19 nt, Human
cccugagggaggcuccuuc

SEQ ID NO: 417712 - RNA, 24 nt, Human
ccgaagcgagaacagcccagaagu

SEQ ID NO: 417713 - RNA, 19 nt, Human
ccgacccccuccaccccgc

SEQ ID NO: 417714 - RNA, 20 nt, Human
ccgccggagucucgcccucc

SEQ ID NO: 417715 - RNA, 23 nt, Human
ccuccgggggcgggcuccggccc

SEQ ID NO: 417716 - RNA, 19 nt, Human
ccucggcgccucggcgagc

SEQ ID NO: 417717 - RNA, 29 nt, Human
ccucuccucuuccuucucuucuuccuccc

SEQ ID NO: 417718 - RNA, 23 nt, Human
ccucuuccuucucuucuuccucc

SEQ ID NO: 417719 - RNA, 21 nt, Human
ccuucucuucuuccuccuccc

SEQ ID NO: 417720 - RNA, 19 nt, Human
cgccgagucgccacugcgg

SEQ ID NO: 417721 - RNA, 18 nt, Human
cgccgggacaucugccag

SEQ ID NO: 417722 - RNA, 21 nt, Human
cgccgggacaucugccagugg

SEQ ID NO: 417723 - RNA, 19 nt, Human
cggcucgggcuguggggcg

SEQ ID NO: 417724 - RNA, 21 nt, Human
cgggggcgggcuccggccccu

SEQ ID NO: 417725 - RNA, 19 nt, Human
cuccuccggcugcggcucc

SEQ ID NO: 417726 - RNA, 25 nt, Human
cucgcacgcccgcgcgcucucucug

SEQ ID NO: 417727 - RNA, 19 nt, Human
cucugcgcagagucuccuc

SEQ ID NO: 417728 - RNA, 20 nt, Human
cugaaaaaaaacccuacucu

SEQ ID NO: 417729 - RNA, 18 nt, Human
cugcggcccccucuccuc

SEQ ID NO: 417730 - RNA, 20 nt, Human
cuuccaggcagugccccugg

SEQ ID NO: 417731 - RNA, 19 nt, Human
cuuccgccggagucucgcc

SEQ ID NO: 417732 - RNA, 20 nt, Human
cuuccuucucuucuuccucc

SEQ ID NO: 417733 - RNA, 24 nt, Human
cuuccuucucuucuuccuccuccc

SEQ ID NO: 417734 - RNA, 18 nt, Human
cuucuuccuccucccccu

SEQ ID NO: 417735 - RNA, 22 nt, Human
gaaaaacugcacuagagacaaa

SEQ ID NO: 417736 - RNA, 18 nt, Human
gaaggccgcccaggcucc

SEQ ID NO: 417737 - RNA, 22 nt, Human
gacaaaaaaaagaucaugccag

SEQ ID NO: 417738 - RNA, 22 nt, Human
gacauagguccuuuuaggcugc

SEQ ID NO: 417739 - RNA, 18 nt, Human
gaccugggguagagaggc

SEQ ID NO: 417740 - RNA, 24 nt, Human
gagcaggaagaggaugagggcgag

SEQ ID NO: 417741 - RNA, 21 nt, Human
gaggaugagggcgagucccag

SEQ ID NO: 417742 - RNA, 22 nt, Human
gagggaccgugcugggucaccc

SEQ ID NO: 417743 - RNA, 19 nt, Human
gaucggggagggcagagcu

SEQ ID NO: 417744 - RNA, 20 nt, Human
gcccugucucucugugccuc

SEQ ID NO: 417745 - RNA, 21 nt, Human
gcccugucucucugugccucg

SEQ ID NO: 417746 - RNA, 19 nt, Human
gccucacccguccaugagc

SEQ ID NO: 417747 - RNA, 20 nt, Human
gccuccacaaugggcacgug

SEQ ID NO: 417748 - RNA, 22 nt, Human
gcgagcuccgacccccuccacc

SEQ ID NO: 417749 - RNA, 23 nt, Human
gcgagcuccgacccccuccaccc

SEQ ID NO: 417750 - RNA, 22 nt, Human
gcgcacaccgccgccucacccg

SEQ ID NO: 417751 - RNA, 19 nt, Human
gcgcuggagcacugucugc

SEQ ID NO: 417752 - RNA, 18 nt, Human
gcucacgccgcgcuccgg

SEQ ID NO: 417753 - RNA, 21 nt, Human
gcugggucacccgcccgggaa

SEQ ID NO: 417754 - RNA, 18 nt, Human
ggaaggggcgcugucaug

SEQ ID NO: 417755 - RNA, 23 nt, Human
ggacauagguccuuuuaggcugc

SEQ ID NO: 417756 - RNA, 18 nt, Human
ggaccaggggauggagga

SEQ ID NO: 417757 - RNA, 21 nt, Human
ggaggcuccuuccuccugccc

SEQ ID NO: 417758 - RNA, 21 nt, Human
ggcgggcuccggccccugccc

SEQ ID NO: 417759 - RNA, 20 nt, Human
ggcucacgccgcgcuccggc

SEQ ID NO: 417760 - RNA, 23 nt, Human
gggaauccccaaagcacagcaau

SEQ ID NO: 417761 - RNA, 26 nt, Human
gggaauccccaaagcacagcaauguc

SEQ ID NO: 417762 - RNA, 20 nt, Human
gggaggaggugguaacuggg

SEQ ID NO: 417763 - RNA, 22 nt, Human
gggcaggggagaggacccuggc

SEQ ID NO: 417764 - RNA, 21 nt, Human
gggcucacgccgcgcuccggc

SEQ ID NO: 417765 - RNA, 20 nt, Human
gggcuggggagcgcgcgcgc

SEQ ID NO: 417766 - RNA, 19 nt, Human
ggggagcgcgcgcgcugga

SEQ ID NO: 417767 - RNA, 26 nt, Human
ggggcgcugucaugggcugcuucuuc

SEQ ID NO: 417768 - RNA, 19 nt, Human
ggggcgggcuccggccccu

SEQ ID NO: 417769 - RNA, 21 nt, Human
guucuguaucagucuuuccug

SEQ ID NO: 417770 - RNA, 20 nt, Human
guucugucgauggugauggu

SEQ ID NO: 417771 - RNA, 20 nt, Human
uaaaaaaggagagagauuua

SEQ ID NO: 417772 - RNA, 20 nt, Human
uacauaaacauauauauaua

SEQ ID NO: 417773 - RNA, 20 nt, Human
uacauaaacauauauauaua

SEQ ID NO: 417774 - RNA, 25 nt, Human
uacauaaacauauauauauauauau

SEQ ID NO: 417775 - RNA, 20 nt, Human
uaguauguagauguauauug

SEQ ID NO: 417776 - RNA, 25 nt, Human
uauacauaaacauauauauauauau

SEQ ID NO: 417777 - RNA, 20 nt, Human
uauauaauauauauauauau

SEQ ID NO: 417778 - RNA, 18 nt, Human
uauauacacacaaauaca

SEQ ID NO: 417779 - RNA, 22 nt, Human
uauauacauaaacauauauaua

SEQ ID NO: 417780 - RNA, 21 nt, Human
uauauauaauauauauauaua

SEQ ID NO: 417781 - RNA, 21 nt, Human
uauauauaauauauauauaua

SEQ ID NO: 417782 - RNA, 23 nt, Human
uauauauaauauauauauauaua

SEQ ID NO: 417783 - RNA, 22 nt, Human
uauauauacacacaaauacaag

SEQ ID NO: 417784 - RNA, 24 nt, Human
uauauauauauacacacaaauaca

SEQ ID NO: 417785 - RNA, 24 nt, Human
uauauauauauauaaauguaugua

SEQ ID NO: 417786 - RNA, 18 nt, Human
uauauauauauauauaca

SEQ ID NO: 417787 - RNA, 23 nt, Human
uaugugggugggugugucuacag

SEQ ID NO: 417788 - RNA, 21 nt, Human
ucaaaggaaugugugcugggg

SEQ ID NO: 417789 - RNA, 20 nt, Human
ucagaagcaggugagaguaa

SEQ ID NO: 417790 - RNA, 19 nt, Human
ucagggagagagagauugg

SEQ ID NO: 417791 - RNA, 24 nt, Human
uccacuguccgccgccggccgggg

SEQ ID NO: 417792 - RNA, 18 nt, Human
uccaugagcccggcuucc

SEQ ID NO: 417793 - RNA, 18 nt, Human
ucccagaaauaaaacucu

SEQ ID NO: 417794 - RNA, 22 nt, Human
uccccaaacuccuggucagagc

SEQ ID NO: 417795 - RNA, 22 nt, Human
uccuccggcugcggcuccuccc

SEQ ID NO: 417796 - RNA, 22 nt, Human
uccugcccugucucucugugcc

SEQ ID NO: 417797 - RNA, 28 nt, Human
ucgccgccgcguccacuguccgccgccg

SEQ ID NO: 417798 - RNA, 19 nt, Human
ucuccuccucuucccuguc

SEQ ID NO: 417799 - RNA, 23 nt, Human
ucuccucuuccuucucuucuucc

SEQ ID NO: 417800 - RNA, 20 nt, Human
ucucgcccuccggacccaaa

SEQ ID NO: 417801 - RNA, 18 nt, Human
ucucucaucuccuccucu

SEQ ID NO: 417802 - RNA, 18 nt, Human
ucucuuuucucugccucc

SEQ ID NO: 417803 - RNA, 21 nt, Human
ucugaccugggguagagaggc

SEQ ID NO: 417804 - RNA, 25 nt, Human
ucuuccaggcagugccccugggggc

SEQ ID NO: 417805 - RNA, 22 nt, Human
ucuucuuccuccucccccuccu

SEQ ID NO: 417806 - RNA, 23 nt, Human
ugaaaaaaaacccuacucuuuaa

SEQ ID NO: 417807 - RNA, 22 nt, Human
ugaagacaccaauaacauuagc

SEQ ID NO: 417808 - RNA, 26 nt, Human
ugaagacaccaauaacauuagcacug

SEQ ID NO: 417809 - RNA, 21 nt, Human
ugaccccgucucucucuuccu

SEQ ID NO: 417810 - RNA, 22 nt, Human
ugagaguaagcgaaggccgccc

SEQ ID NO: 417811 - RNA, 20 nt, Human
ugagugggaacauuccccuc

SEQ ID NO: 417812 - RNA, 23 nt, Human
ugccagagucucucaucuccucc

SEQ ID NO: 417813 - RNA, 20 nt, Human
ugcccugucucucugugccu

SEQ ID NO: 417814 - RNA, 19 nt, Human
ugcggcuccucccggcccg

SEQ ID NO: 417815 - RNA, 22 nt, Human
ugcugggucacccgcccgggaa

SEQ ID NO: 417816 - RNA, 24 nt, Human
ugggaacauuccccucccaacuca

SEQ ID NO: 417817 - RNA, 22 nt, Human
ugggcaggggagaggacccugg

SEQ ID NO: 417818 - RNA, 20 nt, Human
ugggggcggugucugucucc

SEQ ID NO: 417819 - RNA, 23 nt, Human
ugguggcggcagcgugguuucug

SEQ ID NO: 417820 - RNA, 23 nt, Human
uggugugguggcggcagcguggu

SEQ ID NO: 417821 - RNA, 19 nt, Human
uguccugaagcuccccaaa

SEQ ID NO: 417822 - RNA, 23 nt, Human
ugucgauggugaugguguggugg

SEQ ID NO: 417823 - RNA, 23 nt, Human
ugucuacaggaaucccagaaaua

SEQ ID NO: 417824 - RNA, 21 nt, Human
ugugauuugucuuucuguccg

SEQ ID NO: 417825 - RNA, 20 nt, Human
uguggggcggcccgcucucc

SEQ ID NO: 417826 - RNA, 20 nt, Human
ugugucucuucucuucgccg

SEQ ID NO: 417827 - RNA, 22 nt, Human
ugugucucuucucuucgccggg

SEQ ID NO: 417828 - RNA, 21 nt, Human
uguucaagauaagcuagugac

SEQ ID NO: 417829 - RNA, 22 nt, Human
uuaaauauuaaccaagaauacu

SEQ ID NO: 417830 - RNA, 19 nt, Human
uucgccgggacaucugcca

SEQ ID NO: 417831 - RNA, 22 nt, Human
uuuagcagcaagaaaaauaaaa

SEQ ID NO: 417832 - RNA, 21 nt, Human
uuuccuggggggacagaacua

SEQ ID NO: 417833 - RNA, 23 nt, Human
acccugcugagucugaaaagcca

SEQ ID NO: 417834 - RNA, 19 nt, Human
acuccauucuccccugagc

SEQ ID NO: 417835 - RNA, 24 nt, Human
aggcaagucacccugcugagucug

SEQ ID NO: 417836 - RNA, 23 nt, Human
aggcuccucuuuguucccccacu

SEQ ID NO: 417837 - RNA, 21 nt, Human
aggguugggggucacaguucu

SEQ ID NO: 417838 - RNA, 18 nt, Human
cagcuuccggcaccugca

SEQ ID NO: 417839 - RNA, 21 nt, Human
caucucuuuuaucaggguugg

SEQ ID NO: 417840 - RNA, 23 nt, Human
ccaaagcccaaaucccauuaugc

SEQ ID NO: 417841 - RNA, 21 nt, Human
ccaggcuccucuuuguucccc

SEQ ID NO: 417842 - RNA, 22 nt, Human
ccccucuugcugccucccaguc

SEQ ID NO: 417843 - RNA, 22 nt, Human
cccugagcugguaugugacccc

SEQ ID NO: 417844 - RNA, 19 nt, Human
ccucugagaggcccagguc

SEQ ID NO: 417845 - RNA, 22 nt, Human
ccugggcugaggucuugggggc

SEQ ID NO: 417846 - RNA, 23 nt, Human
cgccggggccgcccgccgggggc

SEQ ID NO: 417847 - RNA, 20 nt, Human
cucccagucuccucuuccaa

SEQ ID NO: 417848 - RNA, 21 nt, Human
cucuuuuaucaggguuggggg

SEQ ID NO: 417849 - RNA, 23 nt, Human
cugccugggcugaggucuugggg

SEQ ID NO: 417850 - RNA, 23 nt, Human
cugcugagucugaaaagccaugu

SEQ ID NO: 417851 - RNA, 20 nt, Human
cuucgcagcuuccggcaccu

SEQ ID NO: 417852 - RNA, 18 nt, Human
gaggaagagccaguugua

SEQ ID NO: 417853 - RNA, 19 nt, Human
gaggcccagguccuagagc

SEQ ID NO: 417854 - RNA, 24 nt, Human
gcccgccggggccgcccgccgggg

SEQ ID NO: 417855 - RNA, 19 nt, Human
gcugguaugugaccccucu

SEQ ID NO: 417856 - RNA, 18 nt, Human
ggagacaagggauggcag

SEQ ID NO: 417857 - RNA, 20 nt, Human
ggggcuuggcuguuuuuuac

SEQ ID NO: 417858 - RNA, 21 nt, Human
ggggucacaguucuuguacca

SEQ ID NO: 417859 - RNA, 18 nt, Human
gugcccgccggggccgcc

SEQ ID NO: 417860 - RNA, 21 nt, Human
gugucaccuucgcagcuuccg

SEQ ID NO: 417861 - RNA, 21 nt, Human
uaccaggcuccucuuuguucc

SEQ ID NO: 417862 - RNA, 23 nt, Human
uagccucugaggcaagucacccu

SEQ ID NO: 417863 - RNA, 21 nt, Human
uauagccucugaggcaaguca

SEQ ID NO: 417864 - RNA, 22 nt, Human
ucagggagacaagggauggcag

SEQ ID NO: 417865 - RNA, 24 nt, Human
ucccagucuccucuuccaacucug

SEQ ID NO: 417866 - RNA, 20 nt, Human
uccucuuuguucccccacug

SEQ ID NO: 417867 - RNA, 20 nt, Human
ucgcagcuuccggcaccuga

SEQ ID NO: 417868 - RNA, 18 nt, Human
ucuguccuguuugaugau

SEQ ID NO: 417869 - RNA, 22 nt, Human
ugccucccagucuccucuucca

SEQ ID NO: 417870 - RNA, 24 nt, Human
ugccugggcugaggucuugggggc

SEQ ID NO: 417871 - RNA, 27 nt, Human
ugccugggcugaggucuugggggcuug

SEQ ID NO: 417872 - RNA, 22 nt, Human
ugggcugaggucuugggggcuu

SEQ ID NO: 417873 - RNA, 21 nt, Human
uucgcagcuuccggcaccugc

SEQ ID NO: 417874 - RNA, 28 nt, Human
uuuaccaggcuccucuuuguucccccaa

SEQ ID NO: 417875 - RNA, 21 nt, Human
uuuuuccuuccaucucuuuua

SEQ ID NO: 417876 - RNA, 24 nt, Human
uuuuuuuuuccuuccaucucuuuu

SEQ ID NO: 417877 - RNA, 27 nt, Human
aaagcccuacccaugacaagcccacuu

SEQ ID NO: 417878 - RNA, 18 nt, Human
aacagaacaacugagucc

SEQ ID NO: 417879 - RNA, 18 nt, Human
aacauggugaaaccccau

SEQ ID NO: 417880 - RNA, 19 nt, Human
aacauggugaaaccccauu

SEQ ID NO: 417881 - RNA, 20 nt, Human
aacauggugaaaccccauuu

SEQ ID NO: 417882 - RNA, 21 nt, Human
aacauggugaaaccccauuuc

SEQ ID NO: 417883 - RNA, 21 nt, Human
aacauggugaaaccccauuuc

SEQ ID NO: 417884 - RNA, 20 nt, Human
aauugcuugaacccaggagg

SEQ ID NO: 417885 - RNA, 24 nt, Human
aauugcuugaacccaggaggcgga

SEQ ID NO: 417886 - RNA, 19 nt, Human
acacacacacauauaugua

SEQ ID NO: 417887 - RNA, 24 nt, Human
acagagcaacacuccgucucaaaa

SEQ ID NO: 417888 - RNA, 24 nt, Human
acccaggaggcggagguugcagug

SEQ ID NO: 417889 - RNA, 21 nt, Human
acccaguagccccuguccagc

SEQ ID NO: 417890 - RNA, 18 nt, Human
accccauuucuacuaaaa

SEQ ID NO: 417891 - RNA, 19 nt, Human
accccuuuuaaaaaacaaa

SEQ ID NO: 417892 - RNA, 23 nt, Human
acgcacagccuagagcgcacugc

SEQ ID NO: 417893 - RNA, 19 nt, Human
agcacguguuggagggugg

SEQ ID NO: 417894 - RNA, 24 nt, Human
agcacuuugggaggccgaggcggg

SEQ ID NO: 417895 - RNA, 22 nt, Human
agccuggcuaacauggugaaac

SEQ ID NO: 417896 - RNA, 24 nt, Human
agccuggcuaacauggugaaaccc

SEQ ID NO: 417897 - RNA, 24 nt, Human
agccugggugacagagcaacacuc

SEQ ID NO: 417898 - RNA, 22 nt, Human
agcgcacugcagggccccagca

SEQ ID NO: 417899 - RNA, 22 nt, Human
aggaauugcacuugucucaggu

SEQ ID NO: 417900 - RNA, 19 nt, Human
aggacgauguacagcagcu

SEQ ID NO: 417901 - RNA, 20 nt, Human
aggaguuugagaccagccug

SEQ ID NO: 417902 - RNA, 21 nt, Human
aggccgaggcgggcggaucac

SEQ ID NO: 417903 - RNA, 21 nt, Human
aggcggagguugcagugagcc

SEQ ID NO: 417904 - RNA, 24 nt, Human
aggcggagguugcagugagccgag

SEQ ID NO: 417905 - RNA, 24 nt, Human
aggcgggcggaucacagggucagg

SEQ ID NO: 417906 - RNA, 24 nt, Human
aggcugaggcuggagaauugcuug

SEQ ID NO: 417907 - RNA, 23 nt, Human
aggcuggagaauugcuugaaccc

SEQ ID NO: 417908 - RNA, 23 nt, Human
aggcuucugucacauugucacuc

SEQ ID NO: 417909 - RNA, 27 nt, Human
agguaggagccaggugcgaucagcaag

SEQ ID NO: 417910 - RNA, 24 nt, Human
aguggcucaugcccguaaucccag

SEQ ID NO: 417911 - RNA, 22 nt, Human
auacacacacacauauauguau

SEQ ID NO: 417912 - RNA, 27 nt, Human
auauauauauacacacacacauauaug

SEQ ID NO: 417913 - RNA, 19 nt, Human
auauauauauauauauaua

SEQ ID NO: 417914 - RNA, 19 nt, Human
auauauauauauauauaua

SEQ ID NO: 417915 - RNA, 19 nt, Human
auauauauauauauauaua

SEQ ID NO: 417916 - RNA, 21 nt, Human
auauauguauauauauauuua

SEQ ID NO: 417917 - RNA, 23 nt, Human
auauucuccaguaaucuccagaa

SEQ ID NO: 417918 - RNA, 19 nt, Human
augcccguaaucccagcac

SEQ ID NO: 417919 - RNA, 21 nt, Human
auugcacuccagccuggguga

SEQ ID NO: 417920 - RNA, 24 nt, Human
auugcacuccagccugggugacag

SEQ ID NO: 417921 - RNA, 22 nt, Human
auuugacucuguucacugaccc

SEQ ID NO: 417922 - RNA, 23 nt, Human
caacacuccgucucaaaaaaaaa

SEQ ID NO: 417923 - RNA, 18 nt, Human
cacacacacauauaugua

SEQ ID NO: 417924 - RNA, 20 nt, Human
cacacacauauauguauaua

SEQ ID NO: 417925 - RNA, 24 nt, Human
cacagccgcaggucccggcugccc

SEQ ID NO: 417926 - RNA, 24 nt, Human
cacagggucaggaguuugagacca

SEQ ID NO: 417927 - RNA, 19 nt, Human
cacauugucacucgccagg

SEQ ID NO: 417928 - RNA, 22 nt, Human
cacuccagccugggugacagag

SEQ ID NO: 417929 - RNA, 23 nt, Human
cacuccagccugggugacagagc

SEQ ID NO: 417930 - RNA, 18 nt, Human
cacucuggggcgacaugg

SEQ ID NO: 417931 - RNA, 21 nt, Human
cacuuacaacaagggagaaac

SEQ ID NO: 417932 - RNA, 22 nt, Human
cagcaagaccgcgaguguggga

SEQ ID NO: 417933 - RNA, 24 nt, Human
cagcacuuugggaggccgaggcgg

SEQ ID NO: 417934 - RNA, 18 nt, Human
cagcugcugcccuccgag

SEQ ID NO: 417935 - RNA, 21 nt, Human
caggccaaacccaguagcccc

SEQ ID NO: 417936 - RNA, 23 nt, Human
caggccaaacccaguagccccug

SEQ ID NO: 417937 - RNA, 19 nt, Human
cauauauacguacauauau

SEQ ID NO: 417938 - RNA, 18 nt, Human
cauauauguauauauaua

SEQ ID NO: 417939 - RNA, 21 nt, Human
caugacaagcccacuucugca

SEQ ID NO: 417940 - RNA, 21 nt, Human
caugcacgcagucaggagucu

SEQ ID NO: 417941 - RNA, 19 nt, Human
cauugcacuccagccuggg

SEQ ID NO: 417942 - RNA, 19 nt, Human
cauugcacuccagccuggg

SEQ ID NO: 417943 - RNA, 19 nt, Human
cauugcacuccagccuggg

SEQ ID NO: 417944 - RNA, 20 nt, Human
cauugcacuccagccugggu

SEQ ID NO: 417945 - RNA, 21 nt, Human
cauugcacuccagccugggug

SEQ ID NO: 417946 - RNA, 22 nt, Human
cauugcacuccagccuggguga

SEQ ID NO: 417947 - RNA, 23 nt, Human
cauugcacuccagccugggugac

SEQ ID NO: 417948 - RNA, 24 nt, Human
cauugcacuccagccugggugaca

SEQ ID NO: 417949 - RNA, 24 nt, Human
cauugcacuccagccugggugaca

SEQ ID NO: 417950 - RNA, 20 nt, Human
ccacaacgcuauaaacacac

SEQ ID NO: 417951 - RNA, 18 nt, Human
ccacuucugcauuugacu

SEQ ID NO: 417952 - RNA, 23 nt, Human
ccaggccaaacccaguagccccu

SEQ ID NO: 417953 - RNA, 19 nt, Human
cccaagaagagcagcccuc

SEQ ID NO: 417954 - RNA, 18 nt, Human
cccauccacauccacaaa

SEQ ID NO: 417955 - RNA, 22 nt, Human
cccggcugcccugcuuucccug

SEQ ID NO: 417956 - RNA, 20 nt, Human
cccguaaucccagcacuuug

SEQ ID NO: 417957 - RNA, 22 nt, Human
cccguaaucccagcacuuuggg

SEQ ID NO: 417958 - RNA, 19 nt, Human
ccgcaggucccggcugccc

SEQ ID NO: 417959 - RNA, 22 nt, Human
ccgcaggucccggcugcccugc

SEQ ID NO: 417960 - RNA, 23 nt, Human
ccggguggguuucacaggucgcc

SEQ ID NO: 417961 - RNA, 18 nt, Human
ccuccagguaggagccag

SEQ ID NO: 417962 - RNA, 18 nt, Human
ccuccugggcacucuggg

SEQ ID NO: 417963 - RNA, 20 nt, Human
ccugcgggacagcuucaguc

SEQ ID NO: 417964 - RNA, 23 nt, Human
ccuggcuaacauggugaaacccc

SEQ ID NO: 417965 - RNA, 24 nt, Human
ccuggcuaacauggugaaacccca

SEQ ID NO: 417966 - RNA, 22 nt, Human
ccugggugacagagcaacacuc

SEQ ID NO: 417967 - RNA, 23 nt, Human
ccuuuuaucguacgccgaaagcc

SEQ ID NO: 417968 - RNA, 21 nt, Human
cgacauggaaggaauugcacu

SEQ ID NO: 417969 - RNA, 22 nt, Human
cgaggcgggcggaucacagggu

SEQ ID NO: 417970 - RNA, 24 nt, Human
cgaggcgggcggaucacaggguca

SEQ ID NO: 417971 - RNA, 24 nt, Human
cgcagccgcaggaccacgcuucug

SEQ ID NO: 417972 - RNA, 19 nt, Human
cgcuggggacgcagccgca

SEQ ID NO: 417973 - RNA, 21 nt, Human
cggaucacagggucaggaguu

SEQ ID NO: 417974 - RNA, 22 nt, Human
cgggcggaucacagggucagga

SEQ ID NO: 417975 - RNA, 25 nt, Human
cguacauauauauauuuauauauau

SEQ ID NO: 417976 - RNA, 20 nt, Human
cgucauugcacuccagccug

SEQ ID NO: 417977 - RNA, 22 nt, Human
cuagagcgcacugcagggcccc

SEQ ID NO: 417978 - RNA, 18 nt, Human
cucaaaaaaaaaaaaaaa

SEQ ID NO: 417979 - RNA, 24 nt, Human
cucaugcccguaaucccagcacuu

SEQ ID NO: 417980 - RNA, 20 nt, Human
cuccccgggaggggcuuccg

SEQ ID NO: 417981 - RNA, 19 nt, Human
cuccgucucaaaaaaaaaa

SEQ ID NO: 417982 - RNA, 20 nt, Human
cugacccuucguuuccuucc

SEQ ID NO: 417983 - RNA, 22 nt, Human
cuggcccaagaagagcagcccu

SEQ ID NO: 417984 - RNA, 23 nt, Human
cuggcuaacauggugaaacccca

SEQ ID NO: 417985 - RNA, 21 nt, Human
cuguaauccuagcuacuuggg

SEQ ID NO: 417986 - RNA, 25 nt, Human
cuuacaaccuuuacuguuuccaacu

SEQ ID NO: 417987 - RNA, 23 nt, Human
cuugaaccacaacgcuauaaaca

SEQ ID NO: 417988 - RNA, 19 nt, Human
cuuucgguaacuuucagug

SEQ ID NO: 417989 - RNA, 18 nt, Human
gacaacgugcccccaucc

SEQ ID NO: 417990 - RNA, 24 nt, Human
gacagagcaacacuccgucucaaa

SEQ ID NO: 417991 - RNA, 23 nt, Human
gagauugcgucauugcacuccag

SEQ ID NO: 417992 - RNA, 18 nt, Human
gaggcugaggcuggagaa

SEQ ID NO: 417993 - RNA, 24 nt, Human
gaggcuggagaauugcuugaaccc

SEQ ID NO: 417994 - RNA, 23 nt, Human
gagguugcagugagccgagauug

SEQ ID NO: 417995 - RNA, 18 nt, Human
gaucacagggucaggagu

SEQ ID NO: 417996 - RNA, 21 nt, Human
gaucacagggucaggaguuug

SEQ ID NO: 417997 - RNA, 21 nt, Human
gaucacagggucaggaguuug

SEQ ID NO: 417998 - RNA, 22 nt, Human
gaucacagggucaggaguuuga

SEQ ID NO: 417999 - RNA, 24 nt, Human
gaucacagggucaggaguuugaga

SEQ ID NO: 418000 - RNA, 24 nt, Human
gcacuccagccugggugacagagc

SEQ ID NO: 418001 - RNA, 18 nt, Human
gcacugccugccuccugg

SEQ ID NO: 418002 - RNA, 21 nt, Human
gccaggacgauguacagcagc

SEQ ID NO: 418003 - RNA, 24 nt, Human
gcccguaaucccagcacuuuggga

SEQ ID NO: 418004 - RNA, 23 nt, Human
gcggaucacagggucaggaguuu

SEQ ID NO: 418005 - RNA, 24 nt, Human
gcuaacauggugaaaccccauuuc

SEQ ID NO: 418006 - RNA, 21 nt, Human
gcuacuugggaggcugaggcu

SEQ ID NO: 418007 - RNA, 24 nt, Human
ggacgauguacagcagcuguuccc

SEQ ID NO: 418008 - RNA, 22 nt, Human
ggaggcggagguugcagugagc

SEQ ID NO: 418009 - RNA, 22 nt, Human
ggagguugcagugagccgagau

SEQ ID NO: 418010 - RNA, 24 nt, Human
ggagguugcagugagccgagauug

SEQ ID NO: 418011 - RNA, 20 nt, Human
ggaucacagggucaggaguu

SEQ ID NO: 418012 - RNA, 23 nt, Human
ggaucacagggucaggaguuuga

SEQ ID NO: 418013 - RNA, 18 nt, Human
ggccgggugcaguggcuc

SEQ ID NO: 418014 - RNA, 21 nt, Human
ggccgggugcaguggcucaug

SEQ ID NO: 418015 - RNA, 23 nt, Human
ggccgggugcaguggcucaugcc

SEQ ID NO: 418016 - RNA, 23 nt, Human
ggcggaucacagggucaggaguu

SEQ ID NO: 418017 - RNA, 23 nt, Human
ggugcaguggcucaugcccguaa

SEQ ID NO: 418018 - RNA, 24 nt, Human
ggugucuguaauccuagcuacuug

SEQ ID NO: 418019 - RNA, 22 nt, Human
guacauauauauauuuauauau

SEQ ID NO: 418020 - RNA, 20 nt, Human
guauauauauauuuauauau

SEQ ID NO: 418021 - RNA, 18 nt, Human
gucacauugucacucgcc

SEQ ID NO: 418022 - RNA, 24 nt, Human
gucauugcacuccagccuggguga

SEQ ID NO: 418023 - RNA, 19 nt, Human
gugcccggguggguuucac

SEQ ID NO: 418024 - RNA, 25 nt, Human
guucacugacccuucguuuccuucc

SEQ ID NO: 418025 - RNA, 19 nt, Human
guugcagugagccgagauu

SEQ ID NO: 418026 - RNA, 24 nt, Human
uaaaagcacaugccaguuguaaac

SEQ ID NO: 418027 - RNA, 19 nt, Human
uaacauggugaaaccccau

SEQ ID NO: 418028 - RNA, 21 nt, Human
uaacauggugaaaccccauuu

SEQ ID NO: 418029 - RNA, 24 nt, Human
uaacauggugaaaccccauuucua

SEQ ID NO: 418030 - RNA, 23 nt, Human
uaagagggacuugaaccacaacg

SEQ ID NO: 418031 - RNA, 18 nt, Human
uacacacaaagcuuacaa

SEQ ID NO: 418032 - RNA, 20 nt, Human
uacauauauacguacauaua

SEQ ID NO: 418033 - RNA, 24 nt, Human
uacguacauauauauauuuauaua

SEQ ID NO: 418034 - RNA, 18 nt, Human
uacuugggaggcugaggc

SEQ ID NO: 418035 - RNA, 25 nt, Human
uagaaaaaauuagccgggcguggug

SEQ ID NO: 418036 - RNA, 21 nt, Human
uagccgggcgugguggcgggu

SEQ ID NO: 418037 - RNA, 18 nt, Human
uauacguacauauauaua

SEQ ID NO: 418038 - RNA, 24 nt, Human
uauauacacacacacauauaugua

SEQ ID NO: 418039 - RNA, 25 nt, Human
uauauacacacacacauauauguag

SEQ ID NO: 418040 - RNA, 18 nt, Human
uauauacguacauauaua

SEQ ID NO: 418041 - RNA, 19 nt, Human
uauauacguacauauauau

SEQ ID NO: 418042 - RNA, 18 nt, Human
uauauauauauauauaca

SEQ ID NO: 418043 - RNA, 19 nt, Human
uauauauauauauauauau

SEQ ID NO: 418044 - RNA, 21 nt, Human
uauauauauauuuauauauac

SEQ ID NO: 418045 - RNA, 28 nt, Human
uauauauauuuauauauacguauaugug

SEQ ID NO: 418046 - RNA, 21 nt, Human
uauauuuauauauacguauau

SEQ ID NO: 418047 - RNA, 22 nt, Human
uauguauauauauauuuauaua

SEQ ID NO: 418048 - RNA, 22 nt, Human
uauguauauauauauuuauaua

SEQ ID NO: 418049 - RNA, 25 nt, Human
uauguauauauauauuuauauauac

SEQ ID NO: 418050 - RNA, 21 nt, Human
uauguguauuuacauauauac

SEQ ID NO: 418051 - RNA, 24 nt, Human
uauuuacauauauacguacauaua

SEQ ID NO: 418052 - RNA, 21 nt, Human
ucaaaaaaaaaaaaaaaaaaa

SEQ ID NO: 418053 - RNA, 22 nt, Human
ucaaaaaaaaaaaaaaaaaaaa

SEQ ID NO: 418054 - RNA, 21 nt, Human
ucaacgcgggaguccuccccg

SEQ ID NO: 418055 - RNA, 24 nt, Human
ucacagggucaggaguuugagacc

SEQ ID NO: 418056 - RNA, 21 nt, Human
ucaggagucugcaccaagaac

SEQ ID NO: 418057 - RNA, 19 nt, Human
ucagggccgggugcagugg

SEQ ID NO: 418058 - RNA, 20 nt, Human
ucaguccaggcacagccgca

SEQ ID NO: 418059 - RNA, 22 nt, Human
ucaugcccguaaucccagcacu

SEQ ID NO: 418060 - RNA, 18 nt, Human
ucauugcacuccagccug

SEQ ID NO: 418061 - RNA, 20 nt, Human
ucauugcacuccagccuggg

SEQ ID NO: 418062 - RNA, 21 nt, Human
ucauugcacuccagccugggu

SEQ ID NO: 418063 - RNA, 24 nt, Human
ucauugcacuccagccugggugac

SEQ ID NO: 418064 - RNA, 23 nt, Human
uccaaccccuuuuaaaaaacaaa

SEQ ID NO: 418065 - RNA, 18 nt, Human
uccagccugggugacaga

SEQ ID NO: 418066 - RNA, 19 nt, Human
ucccggcugcccugcuuuc

SEQ ID NO: 418067 - RNA, 19 nt, Human
uccgagggccucgcccagg

SEQ ID NO: 418068 - RNA, 22 nt, Human
uccgagggccucgcccaggcuu

SEQ ID NO: 418069 - RNA, 23 nt, Human
uccgucucaaaaaaaaaaaaaaa

SEQ ID NO: 418070 - RNA, 23 nt, Human
uccuugagucauuguuuuguccc

SEQ ID NO: 418071 - RNA, 18 nt, Human
ucucagggccgggugcag

SEQ ID NO: 418072 - RNA, 21 nt, Human
ucucagggccgggugcagugg

SEQ ID NO: 418073 - RNA, 21 nt, Human
ugaaacucgcuggggacgcag

SEQ ID NO: 418074 - RNA, 20 nt, Human
ugaagagguggcuuuaauaa

SEQ ID NO: 418075 - RNA, 23 nt, Human
ugagaccagccuggcuaacaugg

SEQ ID NO: 418076 - RNA, 22 nt, Human
ugagccgagauugcgucauugc

SEQ ID NO: 418077 - RNA, 24 nt, Human
ugaggcuggagaauugcuugaacc

SEQ ID NO: 418078 - RNA, 22 nt, Human
ugcacuccagccugggugacag

SEQ ID NO: 418079 - RNA, 24 nt, Human
ugcacuccagccugggugacagag

SEQ ID NO: 418080 - RNA, 25 nt, Human
ugcauuugacucuguucacugaccc

SEQ ID NO: 418081 - RNA, 24 nt, Human
ugccaccaggauguaaacagaaca

SEQ ID NO: 418082 - RNA, 22 nt, Human
ugcccccauccacauccacaaa

SEQ ID NO: 418083 - RNA, 23 nt, Human
ugcccguaaucccagcacuuugg

SEQ ID NO: 418084 - RNA, 19 nt, Human
uggaggguggggaccugcg

SEQ ID NO: 418085 - RNA, 21 nt, Human
uggcccaagaagagcagcccu

SEQ ID NO: 418086 - RNA, 24 nt, Human
uggcucaugcccguaaucccagca

SEQ ID NO: 418087 - RNA, 19 nt, Human
ugggaggccgaggcgggcg

SEQ ID NO: 418088 - RNA, 24 nt, Human
ugggaggccgaggcgggcggauca

SEQ ID NO: 418089 - RNA, 24 nt, Human
ugggaggcugaggcuggagaauug

SEQ ID NO: 418090 - RNA, 23 nt, Human
ugggcaccccgcacugccugccu

SEQ ID NO: 418091 - RNA, 24 nt, Human
ugggcaccccgcacugccugccuc

SEQ ID NO: 418092 - RNA, 22 nt, Human
ugguggcgggugucuguaaucc

SEQ ID NO: 418093 - RNA, 23 nt, Human
ugguggcgggugucuguaauccu

SEQ ID NO: 418094 - RNA, 19 nt, Human
uguacacacaaagcuuaca

SEQ ID NO: 418095 - RNA, 19 nt, Human
ugucccgaggcugcugcga

SEQ ID NO: 418096 - RNA, 24 nt, Human
ugucuguaauccuagcuacuuggg

SEQ ID NO: 418097 - RNA, 19 nt, Human
uguguauuuacauauauac

SEQ ID NO: 418098 - RNA, 20 nt, Human
uguguauuuacauauauacg

SEQ ID NO: 418099 - RNA, 22 nt, Human
uguucaccuuuguucccuccug

SEQ ID NO: 418100 - RNA, 19 nt, Human
uuagccgggcgugguggcg

SEQ ID NO: 418101 - RNA, 23 nt, Human
uuagccgggcgugguggcgggug

SEQ ID NO: 418102 - RNA, 24 nt, Human
uuagccgggcgugguggcgggugu

SEQ ID NO: 418103 - RNA, 23 nt, Human
uuaucguacgccgaaagcccuac

SEQ ID NO: 418104 - RNA, 22 nt, Human
uuccuaaaccgacucuuucggu

SEQ ID NO: 418105 - RNA, 21 nt, Human
uucuacuaaaaauagaaaaaa

SEQ ID NO: 418106 - RNA, 20 nt, Human
uucugcauuugacucuguuc

SEQ ID NO: 418107 - RNA, 20 nt, Human
uucugggcacuuccagaccu

SEQ ID NO: 418108 - RNA, 24 nt, Human
uugaacccaggaggcggagguugc

SEQ ID NO: 418109 - RNA, 18 nt, Human
uugcagugagccgagauu

SEQ ID NO: 418110 - RNA, 19 nt, Human
uugcagugagccgagauug

SEQ ID NO: 418111 - RNA, 20 nt, Human
uugcagugagccgagauugc

SEQ ID NO: 418112 - RNA, 22 nt, Human
uugcagugagccgagauugcgu

SEQ ID NO: 418113 - RNA, 23 nt, Human
uugcgucauugcacuccagccug

SEQ ID NO: 418114 - RNA, 24 nt, Human
uugcuugaacccaggaggcggagg

SEQ ID NO: 418115 - RNA, 25 nt, Human
uugggaggccgaggcgggcggauca

SEQ ID NO: 418116 - RNA, 23 nt, Human
uugggaggcugaggcuggagaau

SEQ ID NO: 418117 - RNA, 25 nt, Human
uugggaggcugaggcuggagaauug

SEQ ID NO: 418118 - RNA, 19 nt, Human
uuguucccuccugcuuucc

SEQ ID NO: 418119 - RNA, 22 nt, Human
uuucuacuaaaaauagaaaaaa

SEQ ID NO: 418120 - RNA, 21 nt, Human
uuuuuuuuuugugaggggcac

SEQ ID NO: 418121 - RNA, 21 nt, Human
uuuuuuuuuuuugugaggggc

SEQ ID NO: 418122 - RNA, 24 nt, Human
uuuuuuuuuuuuuuuuugugaggg

SEQ ID NO: 418123 - RNA, 20 nt, Human
acagagaaaggaaagaaggg

SEQ ID NO: 418124 - RNA, 21 nt, Human
caacacggaggggggcgccgg

SEQ ID NO: 418125 - RNA, 19 nt, Human
cacaaaccacccgcccucc

SEQ ID NO: 418126 - RNA, 20 nt, Human
cagcccggggacaggggcag

SEQ ID NO: 418127 - RNA, 23 nt, Human
caggucccgacgcagcccgggga

SEQ ID NO: 418128 - RNA, 21 nt, Human
ccccagagggacuugaugggg

SEQ ID NO: 418129 - RNA, 20 nt, Human
ccuccugggcuggcccccgg

SEQ ID NO: 418130 - RNA, 24 nt, Human
ccuccugggcuggcccccggucac

SEQ ID NO: 418131 - RNA, 21 nt, Human
cgaagggcuggagacagacac

SEQ ID NO: 418132 - RNA, 21 nt, Human
cgcacaaaccacccgcccucc

SEQ ID NO: 418133 - RNA, 21 nt, Human
cgcgcggcgggggcgcgcggg

SEQ ID NO: 418134 - RNA, 22 nt, Human
cggggacguccccagagggacu

SEQ ID NO: 418135 - RNA, 20 nt, Human
cuccggcuucagcacgcuga

SEQ ID NO: 418136 - RNA, 21 nt, Human
cucgcacaaaccacccgcccu

SEQ ID NO: 418137 - RNA, 20 nt, Human
gacaggggcagggccaaggg

SEQ ID NO: 418138 - RNA, 24 nt, Human
gagggggagcgggcaacacggagg

SEQ ID NO: 418139 - RNA, 19 nt, Human
gcgcggcgggggcgcgcgg

SEQ ID NO: 418140 - RNA, 25 nt, Human
gcgcggcuccgggcggcuagcucgc

SEQ ID NO: 418141 - RNA, 24 nt, Human
ggacccgggaggggggucuggcag

SEQ ID NO: 418142 - RNA, 24 nt, Human
ggcuggaggggcucgugggaggcc

SEQ ID NO: 418143 - RNA, 21 nt, Human
gggacaggggcagggccaagg

SEQ ID NO: 418144 - RNA, 23 nt, Human
gggacaggggcagggccaagggg

SEQ ID NO: 418145 - RNA, 22 nt, Human
gggcagggccggggcgcaugca

SEQ ID NO: 418146 - RNA, 20 nt, Human
gggcugggcucagcuggguc

SEQ ID NO: 418147 - RNA, 27 nt, Human
ggggccggggccccgcguggcaaggga

SEQ ID NO: 418148 - RNA, 21 nt, Human
gguggagaggagggucggggc

SEQ ID NO: 418149 - RNA, 19 nt, Human
uacaacagagaaaggaaag

SEQ ID NO: 418150 - RNA, 19 nt, Human
ucacuuuuauuucuuagca

SEQ ID NO: 418151 - RNA, 22 nt, Human
uggaggggcucgugggaggccc

SEQ ID NO: 418152 - RNA, 19 nt, Human
uggcaagggaacucgcaca

SEQ ID NO: 418153 - RNA, 25 nt, Human
uggcaggucccgacgcagcccgggg

SEQ ID NO: 418154 - RNA, 19 nt, Human
ugggcugggcucagcuggg

SEQ ID NO: 418155 - RNA, 24 nt, Human
aaaaaaacuugaaauaggaacuuc

SEQ ID NO: 418156 - RNA, 23 nt, Human
aaaaaccaaccaaaaucugcccu

SEQ ID NO: 418157 - RNA, 20 nt, Human
aaaaaugcuauuaucacaac

SEQ ID NO: 418158 - RNA, 24 nt, Human
aaaacaaaacaaaacaaaaaaaac

SEQ ID NO: 418159 - RNA, 25 nt, Human
aaaacaacaacaacaaaaaaacccc

SEQ ID NO: 418160 - RNA, 24 nt, Human
aaaacaccacacaacacacccugc

SEQ ID NO: 418161 - RNA, 21 nt, Human
aaaaugcuauuaucacaacug

SEQ ID NO: 418162 - RNA, 24 nt, Human
aaaaugcugggauuacaggcauga

SEQ ID NO: 418163 - RNA, 18 nt, Human
aaacaaaacaaaacaaaa

SEQ ID NO: 418164 - RNA, 19 nt, Human
aaacaaaacaaaacaaaaa

SEQ ID NO: 418165 - RNA, 23 nt, Human
aaacaaaacaaaacaacaacaaa

SEQ ID NO: 418166 - RNA, 23 nt, Human
aaacaaaacaaaacaacaacaac

SEQ ID NO: 418167 - RNA, 25 nt, Human
aaacaaaacaaaacaacaacaacaa

SEQ ID NO: 418168 - RNA, 18 nt, Human
aaacaaaacaacaacaac

SEQ ID NO: 418169 - RNA, 23 nt, Human
aaacaacaacaacaaaaaaaccc

SEQ ID NO: 418170 - RNA, 21 nt, Human
aaacaucacaaugccuaguga

SEQ ID NO: 418171 - RNA, 19 nt, Human
aaaguacugggauuacagg

SEQ ID NO: 418172 - RNA, 20 nt, Human
aaaguacugggauuacaggc

SEQ ID NO: 418173 - RNA, 22 nt, Human
aaaguacugggauuacaggcgg

SEQ ID NO: 418174 - RNA, 24 nt, Human
aaaguacugggauuacaggcggga

SEQ ID NO: 418175 - RNA, 24 nt, Human
aaagugcugagauuacaggcguga

SEQ ID NO: 418176 - RNA, 24 nt, Human
aaagugcugggauuacaggcauga

SEQ ID NO: 418177 - RNA, 24 nt, Human
aaagugcugggauuacaggcguga

SEQ ID NO: 418178 - RNA, 27 nt, Human
aacaaaacaaaacaaaacaacaacaac

SEQ ID NO: 418179 - RNA, 22 nt, Human
aacaacaacaaaaaaacccaaa

SEQ ID NO: 418180 - RNA, 20 nt, Human
aacagagggagacuccaucc

SEQ ID NO: 418181 - RNA, 20 nt, Human
aacauggcgaaacacugucu

SEQ ID NO: 418182 - RNA, 21 nt, Human
aacauggcgaaacacugucuc

SEQ ID NO: 418183 - RNA, 19 nt, Human
aacauggugaaaccccguc

SEQ ID NO: 418184 - RNA, 20 nt, Human
aacauggugaaaccccgucu

SEQ ID NO: 418185 - RNA, 21 nt, Human
aacauggugaaaccccgucuc

SEQ ID NO: 418186 - RNA, 22 nt, Human
aagacuugucccugccucacgg

SEQ ID NO: 418187 - RNA, 25 nt, Human
aagcaauccucuuaccuuggcuucc

SEQ ID NO: 418188 - RNA, 27 nt, Human
aagcaauccucuuaccuuggcuuccca

SEQ ID NO: 418189 - RNA, 18 nt, Human
aaguacugggauuacagg

SEQ ID NO: 418190 - RNA, 19 nt, Human
aaguagcuaggauuacaga

SEQ ID NO: 418191 - RNA, 26 nt, Human
aaguagcuaggauuacagaugugugc

SEQ ID NO: 418192 - RNA, 19 nt, Human
aagugcugggauuacaggc

SEQ ID NO: 418193 - RNA, 19 nt, Human
aagugcugggauuacaggc

SEQ ID NO: 418194 - RNA, 19 nt, Human
aagugcugggauuacaggc

SEQ ID NO: 418195 - RNA, 21 nt, Human
aagugcugggauuacaggcau

SEQ ID NO: 418196 - RNA, 24 nt, Human
aaguggagaugagguuucaccaug

SEQ ID NO: 418197 - RNA, 19 nt, Human
aaguuuugguuuuuguuuu

SEQ ID NO: 418198 - RNA, 24 nt, Human
aaucacuugaacucgggaggcaga

SEQ ID NO: 418199 - RNA, 18 nt, Human
aauuagccaggcauggug

SEQ ID NO: 418200 - RNA, 19 nt, Human
acaaaaaaacccaaaucaa

SEQ ID NO: 418201 - RNA, 25 nt, Human
acaaaaaugcuauuaucacaacugu

SEQ ID NO: 418202 - RNA, 25 nt, Human
acaaaacaaaacaaaacaacaacaa

SEQ ID NO: 418203 - RNA, 23 nt, Human
acaaaacaaaacaacaacaacaa

SEQ ID NO: 418204 - RNA, 28 nt, Human
acaaaacaacaacaacaaaaaaacccaa

SEQ ID NO: 418205 - RNA, 24 nt, Human
acaacaaaaaaacccaaaucaauc

SEQ ID NO: 418206 - RNA, 21 nt, Human
acaacaacaacaaaaaaaccc

SEQ ID NO: 418207 - RNA, 19 nt, Human
acacaccuguaaucccacc

SEQ ID NO: 418208 - RNA, 21 nt, Human
acaccacacaacacacccugc

SEQ ID NO: 418209 - RNA, 24 nt, Human
accauguuagccaggcuggucuug

SEQ ID NO: 418210 - RNA, 18 nt, Human
accauguuggccaggcug

SEQ ID NO: 418211 - RNA, 20 nt, Human
accauguuggccaggcuggu

SEQ ID NO: 418212 - RNA, 23 nt, Human
accauguuggccaggcuggucuc

SEQ ID NO: 418213 - RNA, 24 nt, Human
accauguuggccaggcuggucucg

SEQ ID NO: 418214 - RNA, 18 nt, Human
accccgucuccacuaaaa

SEQ ID NO: 418215 - RNA, 24 nt, Human
acccguguuagccaggauggucuc

SEQ ID NO: 418216 - RNA, 25 nt, Human
acccugccuauuuccuuuacucagc

SEQ ID NO: 418217 - RNA, 23 nt, Human
accucagccugccaaguagcuag

SEQ ID NO: 418218 - RNA, 24 nt, Human
accucgccuggccuuauucucaac

SEQ ID NO: 418219 - RNA, 25 nt, Human
accuuccagguucaugccauucucc

SEQ ID NO: 418220 - RNA, 19 nt, Human
acgggguuucacccguguu

SEQ ID NO: 418221 - RNA, 21 nt, Human
acgggguuucacccguguuag

SEQ ID NO: 418222 - RNA, 26 nt, Human
acuaaaaguacaaaaauuggccaguc

SEQ ID NO: 418223 - RNA, 24 nt, Human
acucaggaggcagagguugcagug

SEQ ID NO: 418224 - RNA, 25 nt, Human
acucugucgcccagguuagagugca

SEQ ID NO: 418225 - RNA, 22 nt, Human
acucuuguuucccaggcuggag

SEQ ID NO: 418226 - RNA, 22 nt, Human
agaaucacuugaacucgggagg

SEQ ID NO: 418227 - RNA, 18 nt, Human
agacuuggaaugaggcug

SEQ ID NO: 418228 - RNA, 24 nt, Human
agagaucgcaccucugcacuccag

SEQ ID NO: 418229 - RNA, 19 nt, Human
agaggcagaaccucuaagc

SEQ ID NO: 418230 - RNA, 19 nt, Human
agaggcagaaccucuaagc

SEQ ID NO: 418231 - RNA, 18 nt, Human
agagguugcagugagccg

SEQ ID NO: 418232 - RNA, 22 nt, Human
agagguugcagugagccgagau

SEQ ID NO: 418233 - RNA, 24 nt, Human
agagguugcagugagccgagaugg

SEQ ID NO: 418234 - RNA, 24 nt, Human
agaugaucugccugcccuggccuc

SEQ ID NO: 418235 - RNA, 21 nt, Human
agauuacaggcgugagccacc

SEQ ID NO: 418236 - RNA, 18 nt, Human
agccaggagaaucacuug

SEQ ID NO: 418237 - RNA, 24 nt, Human
agccaggagaaucacuugaacucg

SEQ ID NO: 418238 - RNA, 23 nt, Human
agccaggcaugguggcaggcgcc

SEQ ID NO: 418239 - RNA, 18 nt, Human
agccuccugaguagcuag

SEQ ID NO: 418240 - RNA, 24 nt, Human
agccugggcaacagagggagacuc

SEQ ID NO: 418241 - RNA, 23 nt, Human
agcgugguggcaggcaccuguaa

SEQ ID NO: 418242 - RNA, 26 nt, Human
aggcacgguggcccacacaccuguaa

SEQ ID NO: 418243 - RNA, 20 nt, Human
aggcagagcuuguagugagc

SEQ ID NO: 418244 - RNA, 21 nt, Human
aggcagagguugcagugagcc

SEQ ID NO: 418245 - RNA, 24 nt, Human
aggcagagguugcagugagccgag

SEQ ID NO: 418246 - RNA, 21 nt, Human
aggcagggucuugcucugucc

SEQ ID NO: 418247 - RNA, 23 nt, Human
aggcaugagccacugugcucggc

SEQ ID NO: 418248 - RNA, 24 nt, Human
aggcaugguggcaggcgccuguaa

SEQ ID NO: 418249 - RNA, 19 nt, Human
aggcgugaaccaccauucc

SEQ ID NO: 418250 - RNA, 24 nt, Human
aggcugaggugggcggaucaccug

SEQ ID NO: 418251 - RNA, 19 nt, Human
aggcugagguggguggauc

SEQ ID NO: 418252 - RNA, 19 nt, Human
aggcuggagguggaagucc

SEQ ID NO: 418253 - RNA, 23 nt, Human
aggguuucaccauguuggccagg

SEQ ID NO: 418254 - RNA, 24 nt, Human
aggugauccauccgccuuggucuc

SEQ ID NO: 418255 - RNA, 22 nt, Human
aggugggcggaucaccugaggu

SEQ ID NO: 418256 - RNA, 24 nt, Human
agguggguggaucacaaggucagg

SEQ ID NO: 418257 - RNA, 22 nt, Human
aguagaaaugggguuuuaccau

SEQ ID NO: 418258 - RNA, 21 nt, Human
aguagcuaggauuacaggcau

SEQ ID NO: 418259 - RNA, 19 nt, Human
aguagcugggacuacaggc

SEQ ID NO: 418260 - RNA, 19 nt, Human
aguagcugggacuacaggc

SEQ ID NO: 418261 - RNA, 24 nt, Human
agugauucuccugccucagccucc

SEQ ID NO: 418262 - RNA, 23 nt, Human
agugcaauggugugaucuuggcu

SEQ ID NO: 418263 - RNA, 24 nt, Human
agugcaauggugugaucuuggcuc

SEQ ID NO: 418264 - RNA, 24 nt, Human
agugcaguggcaccaucucagcuc

SEQ ID NO: 418265 - RNA, 18 nt, Human
agugcugggauuacaggc

SEQ ID NO: 418266 - RNA, 18 nt, Human
agugcugggauuacaggc

SEQ ID NO: 418267 - RNA, 22 nt, Human
aguggagaugagguuucaccau

SEQ ID NO: 418268 - RNA, 23 nt, Human
aguggagaugagguuucaccaug

SEQ ID NO: 418269 - RNA, 24 nt, Human
aguucugggcucaagcaauccucu

SEQ ID NO: 418270 - RNA, 21 nt, Human
auaaagcuaaaagaaacaaug

SEQ ID NO: 418271 - RNA, 18 nt, Human
auaggguuucaccauguu

SEQ ID NO: 418272 - RNA, 23 nt, Human
auaggguuucaccauguuggcca

SEQ ID NO: 418273 - RNA, 24 nt, Human
auaggguuucaccauguuggccag

SEQ ID NO: 418274 - RNA, 18 nt, Human
aucaagaccauccuggac

SEQ ID NO: 418275 - RNA, 20 nt, Human
aucaccugaggucaggaguu

SEQ ID NO: 418276 - RNA, 24 nt, Human
aucccaaaaaaacaaaacaaaaca

SEQ ID NO: 418277 - RNA, 22 nt, Human
auccccaaaaaaaaaaaaaaaa

SEQ ID NO: 418278 - RNA, 24 nt, Human
aucgcaccucugcacuccagccug

SEQ ID NO: 418279 - RNA, 20 nt, Human
augagguuucaccauguuag

SEQ ID NO: 418280 - RNA, 23 nt, Human
augccaagaaauacccacaaaca

SEQ ID NO: 418281 - RNA, 19 nt, Human
augcgccaccacacccagc

SEQ ID NO: 418282 - RNA, 18 nt, Human
augggguuuuaccauguu

SEQ ID NO: 418283 - RNA, 24 nt, Human
caaaaaaacccaaaucaaucagga

SEQ ID NO: 418284 - RNA, 24 nt, Human
caaaaauagaggcagaaccucuaa

SEQ ID NO: 418285 - RNA, 21 nt, Human
caaaaaugauucccuuuaaga

SEQ ID NO: 418286 - RNA, 18 nt, Human
caaaaaugcuauuaucac

SEQ ID NO: 418287 - RNA, 23 nt, Human
caaaacaaaacaaaaaaaacuug

SEQ ID NO: 418288 - RNA, 25 nt, Human
caaaacaaaacaacaacaacaaaaa

SEQ ID NO: 418289 - RNA, 25 nt, Human
caaaacaacaacaacaaaaaaaccc

SEQ ID NO: 418290 - RNA, 23 nt, Human
caaagcaggaggcagacaaguca

SEQ ID NO: 418291 - RNA, 19 nt, Human
caacaaaaauagaggcaga

SEQ ID NO: 418292 - RNA, 22 nt, Human
caacacacccugccuauuuccu

SEQ ID NO: 418293 - RNA, 22 nt, Human
caacauggugaaaccccgucuc

SEQ ID NO: 418294 - RNA, 24 nt, Human
caacauggugaaaccccgucucca

SEQ ID NO: 418295 - RNA, 20 nt, Human
caaccuccgccucccggguu

SEQ ID NO: 418296 - RNA, 24 nt, Human
caagaccauccuggacaacauggu

SEQ ID NO: 418297 - RNA, 20 nt, Human
caagugauucuccugccuca

SEQ ID NO: 418298 - RNA, 22 nt, Human
caagugauucuccugccucagc

SEQ ID NO: 418299 - RNA, 25 nt, Human
caaguuacaaaaaugcuauuaucac

SEQ ID NO: 418300 - RNA, 24 nt, Human
caauuuuuguauuuuaaguggaga

SEQ ID NO: 418301 - RNA, 24 nt, Human
cacaagauucgaaaugaaaacaaa

SEQ ID NO: 418302 - RNA, 24 nt, Human
cacaccuguaaucccaccacuuug

SEQ ID NO: 418303 - RNA, 24 nt, Human
cacaccuguaaucccaccauuuug

SEQ ID NO: 418304 - RNA, 20 nt, Human
caccacacaacacacccugc

SEQ ID NO: 418305 - RNA, 21 nt, Human
caccacacaacacacccugcc

SEQ ID NO: 418306 - RNA, 19 nt, Human
caccacacccagcuaauuc

SEQ ID NO: 418307 - RNA, 24 nt, Human
caccacuuugggaggcugaggugg

SEQ ID NO: 418308 - RNA, 22 nt, Human
caccauguuagccaggcugguc

SEQ ID NO: 418309 - RNA, 23 nt, Human
caccauguuagccaggcuggucu

SEQ ID NO: 418310 - RNA, 24 nt, Human
caccauguuagccaggcuggucuu

SEQ ID NO: 418311 - RNA, 21 nt, Human
caccauguuggccaggcuggu

SEQ ID NO: 418312 - RNA, 24 nt, Human
caccauguuggccaggcuggucuc

SEQ ID NO: 418313 - RNA, 27 nt, Human
caccauguuggccaggcuggucucaaa

SEQ ID NO: 418314 - RNA, 24 nt, Human
caccauuuugggaggcugaggugg

SEQ ID NO: 418315 - RNA, 23 nt, Human
caccccccaacaaaaauagaggc

SEQ ID NO: 418316 - RNA, 23 nt, Human
cacccgccuaggccucccaaagu

SEQ ID NO: 418317 - RNA, 24 nt, Human
cacccguguuagccaggauggucu

SEQ ID NO: 418318 - RNA, 24 nt, Human
caccucgaccccccaaagugcugg

SEQ ID NO: 418319 - RNA, 19 nt, Human
caccuguaaucccaccacu

SEQ ID NO: 418320 - RNA, 24 nt, Human
caccuguaaucccaccacuuuggg

SEQ ID NO: 418321 - RNA, 23 nt, Human
caccuguaaucccaccauuuugg

SEQ ID NO: 418322 - RNA, 24 nt, Human
caccuguaaucccaccauuuuggg

SEQ ID NO: 418323 - RNA, 21 nt, Human
caccuguaaucccagcuacuc

SEQ ID NO: 418324 - RNA, 24 nt, Human
caccuguaaucccagcuacucagg

SEQ ID NO: 418325 - RNA, 24 nt, Human
cacucugucgcccagguuagagug

SEQ ID NO: 418326 - RNA, 21 nt, Human
cacugcaaccuccgccucccg

SEQ ID NO: 418327 - RNA, 23 nt, Human
cacugcaaccuccgccucccggg

SEQ ID NO: 418328 - RNA, 19 nt, Human
cacugcaagcuccaccuuc

SEQ ID NO: 418329 - RNA, 21 nt, Human
cacugcaaucuucgccuccug

SEQ ID NO: 418330 - RNA, 23 nt, Human
cacugcaaucuucgccuccuggg

SEQ ID NO: 418331 - RNA, 22 nt, Human
cacuuugggaggcugagguggg

SEQ ID NO: 418332 - RNA, 18 nt, Human
cagaaccucuaagcacuu

SEQ ID NO: 418333 - RNA, 19 nt, Human
cagccuccugaguagcuag

SEQ ID NO: 418334 - RNA, 19 nt, Human
caggguuggaaagagaaga

SEQ ID NO: 418335 - RNA, 19 nt, Human
caguacaaucucaacuaug

SEQ ID NO: 418336 - RNA, 24 nt, Human
caucccaaaaaaacaaaacaaaac

SEQ ID NO: 418337 - RNA, 20 nt, Human
caugcgccaccacacccagc

SEQ ID NO: 418338 - RNA, 23 nt, Human
cauguuagccaggcuggucuuga

SEQ ID NO: 418339 - RNA, 24 nt, Human
cauguuagccaggcuggucuugag

SEQ ID NO: 418340 - RNA, 24 nt, Human
cauguuggccaggcuggucucaaa

SEQ ID NO: 418341 - RNA, 24 nt, Human
cauguuggccaggcuggucucgaa

SEQ ID NO: 418342 - RNA, 22 nt, Human
cauuuugggaggcugagguggg

SEQ ID NO: 418343 - RNA, 23 nt, Human
ccaaaaaaacaaaacaaaacaaa

SEQ ID NO: 418344 - RNA, 23 nt, Human
ccaaaaugcugggauuacaggca

SEQ ID NO: 418345 - RNA, 24 nt, Human
ccaaaaugcugggauuacaggcau

SEQ ID NO: 418346 - RNA, 23 nt, Human
ccaaaguacugggauuacaggcg

SEQ ID NO: 418347 - RNA, 22 nt, Human
ccaaagugcugagauuacaggc

SEQ ID NO: 418348 - RNA, 22 nt, Human
ccaaagugcugagauuacaggc

SEQ ID NO: 418349 - RNA, 24 nt, Human
ccaaagugcugagauuacaggcgu

SEQ ID NO: 418350 - RNA, 20 nt, Human
ccaaagugcugggauuacag

SEQ ID NO: 418351 - RNA, 22 nt, Human
ccaaagugcugggauuacaggc

SEQ ID NO: 418352 - RNA, 22 nt, Human
ccaaagugcugggauuacaggc

SEQ ID NO: 418353 - RNA, 23 nt, Human
ccaaagugcugggauuacaggca

SEQ ID NO: 418354 - RNA, 24 nt, Human
ccaaagugcugggauuacaggcau

SEQ ID NO: 418355 - RNA, 24 nt, Human
ccaaagugcugggauuacaggcgu

SEQ ID NO: 418356 - RNA, 24 nt, Human
ccaaguagcuaggauuacagaugu

SEQ ID NO: 418357 - RNA, 19 nt, Human
ccagguucaugccauucuc

SEQ ID NO: 418358 - RNA, 22 nt, Human
ccagguucaugccauucuccug

SEQ ID NO: 418359 - RNA, 24 nt, Human
cccaaaaugcugggauuacaggca

SEQ ID NO: 418360 - RNA, 24 nt, Human
cccaaagugcugggauuacaggca

SEQ ID NO: 418361 - RNA, 18 nt, Human
cccaccgccacaccugga

SEQ ID NO: 418362 - RNA, 25 nt, Human
cccaccgccacaccuggaagguuuc

SEQ ID NO: 418363 - RNA, 19 nt, Human
cccaccucgaccccccaaa

SEQ ID NO: 418364 - RNA, 19 nt, Human
cccaggcuggagugcaaug

SEQ ID NO: 418365 - RNA, 24 nt, Human
ccccaaagugcugggauuacaggc

SEQ ID NO: 418366 - RNA, 24 nt, Human
ccccaggcuggagugcagcggcau

SEQ ID NO: 418367 - RNA, 23 nt, Human
cccggguucaagagauucgccug

SEQ ID NO: 418368 - RNA, 24 nt, Human
ccgccuuggucucccaaaaugcug

SEQ ID NO: 418369 - RNA, 19 nt, Human
ccucacggaugccucaguc

SEQ ID NO: 418370 - RNA, 24 nt, Human
ccuccuggggucaagugauucucc

SEQ ID NO: 418371 - RNA, 20 nt, Human
ccucugcacuccagccuggg

SEQ ID NO: 418372 - RNA, 21 nt, Human
ccucugcacuccagccugggc

SEQ ID NO: 418373 - RNA, 24 nt, Human
ccucugcacuccagccugggcaac

SEQ ID NO: 418374 - RNA, 21 nt, Human
ccugaccucagaugaucugcc

SEQ ID NO: 418375 - RNA, 23 nt, Human
ccugaccucagaugaucugccug

SEQ ID NO: 418376 - RNA, 19 nt, Human
ccugaccucaggugaucca

SEQ ID NO: 418377 - RNA, 22 nt, Human
ccugaccucaggugauccaucc

SEQ ID NO: 418378 - RNA, 24 nt, Human
ccugaccucaggugaucugcccac

SEQ ID NO: 418379 - RNA, 20 nt, Human
ccugacgucgugauccaccc

SEQ ID NO: 418380 - RNA, 23 nt, Human
ccugaguagcuaggauuacaggc

SEQ ID NO: 418381 - RNA, 24 nt, Human
ccugaguagcuaggauuacaggca

SEQ ID NO: 418382 - RNA, 22 nt, Human
ccuggacaacauggugaaaccc

SEQ ID NO: 418383 - RNA, 23 nt, Human
ccuggacaacauggugaaacccc

SEQ ID NO: 418384 - RNA, 24 nt, Human
ccuggacaacauggugaaaccccg

SEQ ID NO: 418385 - RNA, 19 nt, Human
ccuggauaaguuuugguuu

SEQ ID NO: 418386 - RNA, 20 nt, Human
ccuggccaacauggcgaaac

SEQ ID NO: 418387 - RNA, 24 nt, Human
ccuggccaacauggcgaaacacug

SEQ ID NO: 418388 - RNA, 21 nt, Human
ccuguaaucccagcuacucag

SEQ ID NO: 418389 - RNA, 19 nt, Human
ccuguaaucccagcucagg

SEQ ID NO: 418390 - RNA, 21 nt, Human
ccuuccagguucaugccauuc

SEQ ID NO: 418391 - RNA, 24 nt, Human
cggaucaccugaggucaggaguuu

SEQ ID NO: 418392 - RNA, 27 nt, Human
cggaucaccugaggucaggaguuugaa

SEQ ID NO: 418393 - RNA, 22 nt, Human
cgggagccaccaugccagccgu

SEQ ID NO: 418394 - RNA, 25 nt, Human
cgggguuucacccguguuagccagg

SEQ ID NO: 418395 - RNA, 23 nt, Human
cuaaaagaaacaauguuaaauaa

SEQ ID NO: 418396 - RNA, 18 nt, Human
cuaggaagcaaaaaugcc

SEQ ID NO: 418397 - RNA, 21 nt, Human
cuaggccucccaaagugcugg

SEQ ID NO: 418398 - RNA, 20 nt, Human
cuauguaaaaaccaaccaaa

SEQ ID NO: 418399 - RNA, 22 nt, Human
cucaacauaauugcuggugaaa

SEQ ID NO: 418400 - RNA, 24 nt, Human
cucaagcaauccucuuaccuuggc

SEQ ID NO: 418401 - RNA, 22 nt, Human
cucacaccuguaaucccaccac

SEQ ID NO: 418402 - RNA, 24 nt, Human
cucacaccuguaaucccaccacuu

SEQ ID NO: 418403 - RNA, 21 nt, Human
cucacaggcgcccaccgccac

SEQ ID NO: 418404 - RNA, 23 nt, Human
cucacggaugccucagucuuccc

SEQ ID NO: 418405 - RNA, 24 nt, Human
cucacugcaaccuccgccucccgg

SEQ ID NO: 418406 - RNA, 24 nt, Human
cucacugcaaucuucgccuccugg

SEQ ID NO: 418407 - RNA, 21 nt, Human
cucacugccgccuccaauucc

SEQ ID NO: 418408 - RNA, 24 nt, Human
cucaggugauccauccgccuuggu

SEQ ID NO: 418409 - RNA, 21 nt, Human
cucccaaagugcugagauuac

SEQ ID NO: 418410 - RNA, 26 nt, Human
cuccgcgauccagaccacccgggccg

SEQ ID NO: 418411 - RNA, 26 nt, Human
cuccugaccucagaugaucugccugc

SEQ ID NO: 418412 - RNA, 24 nt, Human
cuccugaguagcuaggauuacagg

SEQ ID NO: 418413 - RNA, 20 nt, Human
cuccuggggucaagugauuc

SEQ ID NO: 418414 - RNA, 24 nt, Human
cucgaguagcugggacuacaggcg

SEQ ID NO: 418415 - RNA, 25 nt, Human
cucgaguagcugggacuacaggcgc

SEQ ID NO: 418416 - RNA, 18 nt, Human
cucuuguuucccaggcug

SEQ ID NO: 418417 - RNA, 18 nt, Human
cucuuguuucccaggcug

SEQ ID NO: 418418 - RNA, 19 nt, Human
cucuuguuucccaggcugg

SEQ ID NO: 418419 - RNA, 22 nt, Human
cucuuguuucccaggcuggagu

SEQ ID NO: 418420 - RNA, 24 nt, Human
cugaguagcuaggauuacaggcau

SEQ ID NO: 418421 - RNA, 24 nt, Human
cugcaaccuccgccucccggguuc

SEQ ID NO: 418422 - RNA, 24 nt, Human
cugcaagcuccaccuuccagguuc

SEQ ID NO: 418423 - RNA, 23 nt, Human
cugcacuccagccugggcaacag

SEQ ID NO: 418424 - RNA, 23 nt, Human
cugcacuccagccugggcaacag

SEQ ID NO: 418425 - RNA, 19 nt, Human
cugccgccuccaauuccua

SEQ ID NO: 418426 - RNA, 23 nt, Human
cugccucagccuccugaguagcu

SEQ ID NO: 418427 - RNA, 23 nt, Human
cugccucaggcucucgaguagcu

SEQ ID NO: 418428 - RNA, 21 nt, Human
cuguaaucccagcuacucagg

SEQ ID NO: 418429 - RNA, 18 nt, Human
cugucccccaggcuggag

SEQ ID NO: 418430 - RNA, 21 nt, Human
cuuguagugagcagagaucgc

SEQ ID NO: 418431 - RNA, 20 nt, Human
gaacucgggaggcagagcuu

SEQ ID NO: 418432 - RNA, 18 nt, Human
gaaggaaauagcucaaaa

SEQ ID NO: 418433 - RNA, 18 nt, Human
gaccccccaaagugcugg

SEQ ID NO: 418434 - RNA, 18 nt, Human
gaccucagaugaucugcc

SEQ ID NO: 418435 - RNA, 23 nt, Human
gaccucaggugauccauccgccu

SEQ ID NO: 418436 - RNA, 24 nt, Human
gaccucaggugaucugcccaccuc

SEQ ID NO: 418437 - RNA, 23 nt, Human
gacgcgguggcucacaccuguaa

SEQ ID NO: 418438 - RNA, 20 nt, Human
gacgucgugauccacccgcc

SEQ ID NO: 418439 - RNA, 21 nt, Human
gacuuggaaugaggcuggugg

SEQ ID NO: 418440 - RNA, 21 nt, Human
gacuugucccugccucacgga

SEQ ID NO: 418441 - RNA, 24 nt, Human
gagaagcgccuaguuaaaacacca

SEQ ID NO: 418442 - RNA, 25 nt, Human
gagacgggguuucacccguguuagc

SEQ ID NO: 418443 - RNA, 23 nt, Human
gagauggcgccacugcacuccag

SEQ ID NO: 418444 - RNA, 21 nt, Human
gaggcagagguugcagugagc

SEQ ID NO: 418445 - RNA, 23 nt, Human
gaggugggcggaucaccugaggu

SEQ ID NO: 418446 - RNA, 22 nt, Human
gagguggguggaucacaagguc

SEQ ID NO: 418447 - RNA, 18 nt, Human
gagguuucaccauguuag

SEQ ID NO: 418448 - RNA, 22 nt, Human
gaguagcuaggauuacaggcau

SEQ ID NO: 418449 - RNA, 24 nt, Human
gaguagcuaggauuacaggcaugc

SEQ ID NO: 418450 - RNA, 25 nt, Human
gaguagcugggacuacaggcgcuca

SEQ ID NO: 418451 - RNA, 19 nt, Human
gagugcaauggugugaucu

SEQ ID NO: 418452 - RNA, 21 nt, Human
gaucaccugaggucaggaguu

SEQ ID NO: 418453 - RNA, 24 nt, Human
gaucaccugaggucaggaguuuga

SEQ ID NO: 418454 - RNA, 18 nt, Human
gauuacagaugugugccg

SEQ ID NO: 418455 - RNA, 24 nt, Human
gauuacagaugugugccgccaugc

SEQ ID NO: 418456 - RNA, 18 nt, Human
gauuacaggcaugagcca

SEQ ID NO: 418457 - RNA, 21 nt, Human
gauuacaggcaugagccacug

SEQ ID NO: 418458 - RNA, 24 nt, Human
gauuacaggcaugagccacugugc

SEQ ID NO: 418459 - RNA, 22 nt, Human
gauuacaggcaugagccgccgc

SEQ ID NO: 418460 - RNA, 22 nt, Human
gauuacaggcaugagccgccgc

SEQ ID NO: 418461 - RNA, 18 nt, Human
gauuacaggcaugcgcca

SEQ ID NO: 418462 - RNA, 18 nt, Human
gauuacaggcgggagcca

SEQ ID NO: 418463 - RNA, 22 nt, Human
gauuacaggcgggagccaccau

SEQ ID NO: 418464 - RNA, 21 nt, Human
gauuacaggcgugaaccacca

SEQ ID NO: 418465 - RNA, 18 nt, Human
gauuacaggcgugagcca

SEQ ID NO: 418466 - RNA, 24 nt, Human
gauuacaggcgugagccaccucgc

SEQ ID NO: 418467 - RNA, 22 nt, Human
gcaagcuccaccuuccagguuc

SEQ ID NO: 418468 - RNA, 19 nt, Human
gcagaaccucuaagcacuu

SEQ ID NO: 418469 - RNA, 24 nt, Human
gccaacauggcgaaacacugucuc

SEQ ID NO: 418470 - RNA, 21 nt, Human
gccacugugcucggccugcag

SEQ ID NO: 418471 - RNA, 19 nt, Human
gcccaggcucaucuugaag

SEQ ID NO: 418472 - RNA, 22 nt, Human
gcccuggccucccaaagugcug

SEQ ID NO: 418473 - RNA, 22 nt, Human
gccucagucuucccaaagcagg

SEQ ID NO: 418474 - RNA, 24 nt, Human
gccuuggucucccaaaaugcuggg

SEQ ID NO: 418475 - RNA, 21 nt, Human
gcgcucaccaccacgcccgcc

SEQ ID NO: 418476 - RNA, 20 nt, Human
gcucugucacacaggcugga

SEQ ID NO: 418477 - RNA, 30 nt, Human; identical to SEQ ID NO: 340167

SEQ ID NO: 418478 - RNA, 19 nt, Human
gcuggagugcagcggcaua

SEQ ID NO: 418479 - RNA, 23 nt, Human
gcuggucucaaacuccugaccuc

SEQ ID NO: 418480 - RNA, 23 nt, Human
gcuggucucgaacuccugaccuc

SEQ ID NO: 418481 - RNA, 23 nt, Human
gcuggucuugagcuccugaccuc

SEQ ID NO: 418482 - RNA, 20 nt, Human
ggagcaugaacuaucauuuu

SEQ ID NO: 418483 - RNA, 19 nt, Human
ggaguagaaggaaaacugg

SEQ ID NO: 418484 - RNA, 22 nt, Human
ggaucaccugaggucaggaguu

SEQ ID NO: 418485 - RNA, 18 nt, Human
ggauuacagaugugugcc

SEQ ID NO: 418486 - RNA, 24 nt, Human
ggauuacaggcaugagccacugug

SEQ ID NO: 418487 - RNA, 19 nt, Human
ggauuacaggcaugagccg

SEQ ID NO: 418488 - RNA, 19 nt, Human
ggauuacaggcaugcgcca

SEQ ID NO: 418489 - RNA, 22 nt, Human
ggauuacaggcaugcgccacca

SEQ ID NO: 418490 - RNA, 24 nt, Human
ggauuacaggcgggagccaccaug

SEQ ID NO: 418491 - RNA, 19 nt, Human
ggauuacaggcgugaacca

SEQ ID NO: 418492 - RNA, 19 nt, Human
ggcaccuguaaucccagcu

SEQ ID NO: 418493 - RNA, 21 nt, Human
ggcaggcgccuguaaucccag

SEQ ID NO: 418494 - RNA, 21 nt, Human
ggcggaucaccugaggucagg

SEQ ID NO: 418495 - RNA, 21 nt, Human
ggcuggacgcgguggcucaca

SEQ ID NO: 418496 - RNA, 22 nt, Human
ggcuggagugcaauggugugau

SEQ ID NO: 418497 - RNA, 24 nt, Human
ggcuggucucaaacuccugaccuc

SEQ ID NO: 418498 - RNA, 24 nt, Human
ggcuggucucgaacuccugaccuc

SEQ ID NO: 418499 - RNA, 24 nt, Human
ggcuggucuugagcuccugaccuc

SEQ ID NO: 418500 - RNA, 20 nt, Human
gggaggcugaggugggcgga

SEQ ID NO: 418501 - RNA, 22 nt, Human
gggcucaagcaauccucuuacc

SEQ ID NO: 418502 - RNA, 22 nt, Human
gggguuuuaccauguuggccag

SEQ ID NO: 418503 - RNA, 24 nt, Human
ggguggaucacaaggucaggagau

SEQ ID NO: 418504 - RNA, 21 nt, Human
ggguuucaccauguuggccag

SEQ ID NO: 418505 - RNA, 22 nt, Human
ggguuucaccauguuggccagg

SEQ ID NO: 418506 - RNA, 18 nt, Human
ggguuuuaccauguuggc

SEQ ID NO: 418507 - RNA, 19 nt, Human
ggucucgaacuccugaccu

SEQ ID NO: 418508 - RNA, 24 nt, Human
gguggcaggcaccuguaaucccag

SEQ ID NO: 418509 - RNA, 23 nt, Human
gguggcucacaccuguaauccca

SEQ ID NO: 418510 - RNA, 20 nt, Human
guagcuaggauuacaggcau

SEQ ID NO: 418511 - RNA, 23 nt, Human
gucaagugauucuccugccucag

SEQ ID NO: 418512 - RNA, 19 nt, Human
gucucuacuaaaaguacaa

SEQ ID NO: 418513 - RNA, 24 nt, Human
gugauccacccgccuaggccuccc

SEQ ID NO: 418514 - RNA, 24 nt, Human
gugauccauccgccuuggucuccc

SEQ ID NO: 418515 - RNA, 21 nt, Human
gugaucugcccaccucgaccc

SEQ ID NO: 418516 - RNA, 24 nt, Human
gugauucuccugccucagccuccu

SEQ ID NO: 418517 - RNA, 23 nt, Human
guggcaggcgccuguaaucccag

SEQ ID NO: 418518 - RNA, 25 nt, Human
guucugggcucaagcaauccucuua

SEQ ID NO: 418519 - RNA, 24 nt, Human
guugcagugagccgagauggcgcc

SEQ ID NO: 418520 - RNA, 20 nt, Human
uaaaaaacagcuuaaaaaca

SEQ ID NO: 418521 - RNA, 27 nt, Human
uaaaaaacagcuuaaaaacaaaacaaa

SEQ ID NO: 418522 - RNA, 20 nt, Human
uaaaaacacaaaauuagcca

SEQ ID NO: 418523 - RNA, 22 nt, Human
uaaaaacacaaaauuagccagg

SEQ ID NO: 418524 - RNA, 23 nt, Human
uaaaaacacaaaauuagccaggc

SEQ ID NO: 418525 - RNA, 23 nt, Human
uaaaacaccacacaacacacccu

SEQ ID NO: 418526 - RNA, 24 nt, Human
uaaguggagaugagguuucaccau

SEQ ID NO: 418527 - RNA, 18 nt, Human
uaaguuucaacagaaauc

SEQ ID NO: 418528 - RNA, 21 nt, Human
uaauagagacgggguuucacc

SEQ ID NO: 418529 - RNA, 25 nt, Human
uaauagagacgggguuucacccgug

SEQ ID NO: 418530 - RNA, 23 nt, Human
uaauucuuguauuuuuuaguaga

SEQ ID NO: 418531 - RNA, 22 nt, Human
uaauugcuggugaaauacuaac

SEQ ID NO: 418532 - RNA, 25 nt, Human
uaauuuuuucuauuuuuuaauagag

SEQ ID NO: 418533 - RNA, 23 nt, Human
uacaggcaugagccgccgcggcc

SEQ ID NO: 418534 - RNA, 24 nt, Human
uacaggcaugcgccaccacaccca

SEQ ID NO: 418535 - RNA, 18 nt, Human
uacaggcgugagccaccu

SEQ ID NO: 418536 - RNA, 21 nt, Human
uaccauguuggccaggcuggu

SEQ ID NO: 418537 - RNA, 24 nt, Human
uaccauguuggccaggcuggucuc

SEQ ID NO: 418538 - RNA, 27 nt, Human
uaccauguuggccaggcuggucucgaa

SEQ ID NO: 418539 - RNA, 24 nt, Human
uacugggauuacaggcgggagcca

SEQ ID NO: 418540 - RNA, 22 nt, Human
uagaaaugggguuuuaccaugu

SEQ ID NO: 418541 - RNA, 25 nt, Human
uagaaggaaaacuggagugucucau

SEQ ID NO: 418542 - RNA, 22 nt, Human
uagagauaggguuucaccaugu

SEQ ID NO: 418543 - RNA, 23 nt, Human
uagagugcaguggcaccaucuca

SEQ ID NO: 418544 - RNA, 24 nt, Human
uagccaggcuggucuugagcuccu

SEQ ID NO: 418545 - RNA, 18 nt, Human
uagccuauaagaauuugu

SEQ ID NO: 418546 - RNA, 24 nt, Human
uaggauuacagaugugugccgcca

SEQ ID NO: 418547 - RNA, 22 nt, Human
uaggauuacaggcaugcgccac

SEQ ID NO: 418548 - RNA, 24 nt, Human
uaggauuacaggcaugcgccacca

SEQ ID NO: 418549 - RNA, 21 nt, Human
uagggaaggaguagaacaaaa

SEQ ID NO: 418550 - RNA, 24 nt, Human
uaggguuucaccauguuggccagg

SEQ ID NO: 418551 - RNA, 24 nt, Human
uaguagaaaugggguuuuaccaug

SEQ ID NO: 418552 - RNA, 24 nt, Human
uaguagagauaggguuucaccaug

SEQ ID NO: 418553 - RNA, 18 nt, Human
uauaaaguuaaaugaaaa

SEQ ID NO: 418554 - RNA, 20 nt, Human
uauguaaaaaccaaccaaaa

SEQ ID NO: 418555 - RNA, 24 nt, Human
uauugcucugucacacaggcugga

SEQ ID NO: 418556 - RNA, 19 nt, Human
ucaagugauucuccugccu

SEQ ID NO: 418557 - RNA, 21 nt, Human
ucacaagauucgaaaugaaaa

SEQ ID NO: 418558 - RNA, 18 nt, Human
ucacaaggucaggagauc

SEQ ID NO: 418559 - RNA, 24 nt, Human
ucacaaggucaggagaucaagacc

SEQ ID NO: 418560 - RNA, 22 nt, Human
ucacucuuguuucccaggcugg

SEQ ID NO: 418561 - RNA, 23 nt, Human
ucacucuuguuucccaggcugga

SEQ ID NO: 418562 - RNA, 23 nt, Human
ucacugcaaccuccgccucccgg

SEQ ID NO: 418563 - RNA, 24 nt, Human
ucacugcaaccuccgccucccggg

SEQ ID NO: 418564 - RNA, 25 nt, Human
ucacugcaaccuccgccucccgggu

SEQ ID NO: 418565 - RNA, 27 nt, Human
ucacugcaaccuccgccucccggguuc

SEQ ID NO: 418566 - RNA, 18 nt, Human
ucacugcaagcuccaccu

SEQ ID NO: 418567 - RNA, 19 nt, Human
ucacugcaagcuccaccuu

SEQ ID NO: 418568 - RNA, 24 nt, Human
ucacugcaagcuccaccuuccagg

SEQ ID NO: 418569 - RNA, 23 nt, Human
ucacugcaaucuucgccuccugg

SEQ ID NO: 418570 - RNA, 24 nt, Human
ucacugcaaucuucgccuccuggg

SEQ ID NO: 418571 - RNA, 23 nt, Human
ucagccaggcacgguggcccaca

SEQ ID NO: 418572 - RNA, 24 nt, Human
ucauucacuucacucugauuugaa

SEQ ID NO: 418573 - RNA, 20 nt, Human
uccagguucaugccauucuc

SEQ ID NO: 418574 - RNA, 22 nt, Human
uccaucccaaaaaaacaaaaca

SEQ ID NO: 418575 - RNA, 23 nt, Human
uccaucccaaaaaaacaaaacaa

SEQ ID NO: 418576 - RNA, 25 nt, Human
uccaucccaaaaaaacaaaacaaaa

SEQ ID NO: 418577 - RNA, 24 nt, Human
uccauccccaaaaaaaaaaaaaaa

SEQ ID NO: 418578 - RNA, 24 nt, Human
ucccaaaaugcugggauuacaggc

SEQ ID NO: 418579 - RNA, 24 nt, Human
ucccaaaguacugggauuacaggc

SEQ ID NO: 418580 - RNA, 24 nt, Human
ucccaaagugcugagauuacaggc

SEQ ID NO: 418581 - RNA, 24 nt, Human
ucccaaagugcugggauuacaggc

SEQ ID NO: 418582 - RNA, 18 nt, Human
ucccaccacuuugggagg

SEQ ID NO: 418583 - RNA, 21 nt, Human
ucccaggcuggagugcaaugg

SEQ ID NO: 418584 - RNA, 18 nt, Human
ucccccaggcuggagugc

SEQ ID NO: 418585 - RNA, 24 nt, Human
uccccucucccaccccccaacaaa

SEQ ID NO: 418586 - RNA, 21 nt, Human
uccccugguuuguuccucuga

SEQ ID NO: 418587 - RNA, 19 nt, Human
ucccggguucaagagauuc

SEQ ID NO: 418588 - RNA, 24 nt, Human
ucccggguucaagagauucgccug

SEQ ID NO: 418589 - RNA, 19 nt, Human
uccugaguagcuaggauua

SEQ ID NO: 418590 - RNA, 24 nt, Human
uccugaguagcuaggauuacaggc

SEQ ID NO: 418591 - RNA, 24 nt, Human
uccuggggucaagugauucuccug

SEQ ID NO: 418592 - RNA, 24 nt, Human
uccuuggacaacaccaaaaacaca

SEQ ID NO: 418593 - RNA, 27 nt, Human
ucgcaccucugcacuccagccugggca

SEQ ID NO: 418594 - RNA, 31 nt, Human
ucgcaccucugcacuccagccugggcaacaa

SEQ ID NO: 418595 - RNA, 18 nt, Human
ucgcccagguuagagugc

SEQ ID NO: 418596 - RNA, 18 nt, Human
ucucacucugucgcccag

SEQ ID NO: 418597 - RNA, 19 nt, Human
ucucacucugucgcccagg

SEQ ID NO: 418598 - RNA, 23 nt, Human
ucucacucugucgcccagguuag

SEQ ID NO: 418599 - RNA, 24 nt, Human
ucucacucugucgcccagguuaga

SEQ ID NO: 418600 - RNA, 24 nt, Human
ucuccugccucagccuccugagua

SEQ ID NO: 418601 - RNA, 23 nt, Human
ucucgaacuccugaccucaggug

SEQ ID NO: 418602 - RNA, 24 nt, Human
ucucgaguagcugggacuacaggc

SEQ ID NO: 418603 - RNA, 21 nt, Human
ucucuacuaaaaguacaaaaa

SEQ ID NO: 418604 - RNA, 24 nt, Human
ucugcacuccagccugggcaacag

SEQ ID NO: 418605 - RNA, 19 nt, Human
ucugcccuaaaaaggcugg

SEQ ID NO: 418606 - RNA, 24 nt, Human
ucugucccccaggcuggagugcag

SEQ ID NO: 418607 - RNA, 21 nt, Human
ucuugaaguucugggcucaag

SEQ ID NO: 418608 - RNA, 21 nt, Human
ucuugagcuccugaccucagg

SEQ ID NO: 418609 - RNA, 19 nt, Human
ucuugcucugucccccagg

SEQ ID NO: 418610 - RNA, 23 nt, Human
ucuugcucugucccccaggcugg

SEQ ID NO: 418611 - RNA, 24 nt, Human
ucuugcucugucccccaggcugga

SEQ ID NO: 418612 - RNA, 19 nt, Human
ucuuguuucccaggcugga

SEQ ID NO: 418613 - RNA, 22 nt, Human
ugaaaccccgucuccacuaaaa

SEQ ID NO: 418614 - RNA, 21 nt, Human
ugaaacuaaggaaggaaccag

SEQ ID NO: 418615 - RNA, 19 nt, Human
ugaaaggaggagcuaaaau

SEQ ID NO: 418616 - RNA, 20 nt, Human
ugacacaaagacagcuuaaa

SEQ ID NO: 418617 - RNA, 18 nt, Human
ugaccucagaugaucugc

SEQ ID NO: 418618 - RNA, 19 nt, Human
ugaccucagaugaucugcc

SEQ ID NO: 418619 - RNA, 19 nt, Human
ugaccucaggugauccauc

SEQ ID NO: 418620 - RNA, 24 nt, Human
ugaccucaggugauccauccgccu

SEQ ID NO: 418621 - RNA, 18 nt, Human
ugaccucaggugaucugc

SEQ ID NO: 418622 - RNA, 20 nt, Human
ugaccucaggugaucugccc

SEQ ID NO: 418623 - RNA, 21 nt, Human
ugaccucaggugaucugccca

SEQ ID NO: 418624 - RNA, 24 nt, Human
ugaccucaggugaucugcccaccu

SEQ ID NO: 418625 - RNA, 24 nt, Human
ugacucacugccgccuccaauucc

SEQ ID NO: 418626 - RNA, 24 nt, Human
ugagauggaauuucacucuuguuu

SEQ ID NO: 418627 - RNA, 18 nt, Human
ugagauuacaggcgugag

SEQ ID NO: 418628 - RNA, 19 nt, Human
ugagauuacaggcgugagc

SEQ ID NO: 418629 - RNA, 21 nt, Human
ugagauuacaggcgugagcca

SEQ ID NO: 418630 - RNA, 22 nt, Human
ugagauuacaggcgugagccac

SEQ ID NO: 418631 - RNA, 23 nt, Human
ugagauuacaggcgugagccacc

SEQ ID NO: 418632 - RNA, 24 nt, Human
ugagauuacaggcgugagccaccu

SEQ ID NO: 418633 - RNA, 27 nt, Human
ugagauuacaggcgugagccaccucgc

SEQ ID NO: 418634 - RNA, 20 nt, Human
ugagccaggagaaucacuug

SEQ ID NO: 418635 - RNA, 23 nt, Human
ugagccaggagaaucacuugaac

SEQ ID NO: 418636 - RNA, 22 nt, Human
ugagccgagauggcgccacugc

SEQ ID NO: 418637 - RNA, 18 nt, Human
ugaggucaggaguuugaa

SEQ ID NO: 418638 - RNA, 23 nt, Human
ugaggucaggaguuugaaaccag

SEQ ID NO: 418639 - RNA, 20 nt, Human
ugaggugggcggaucaccug

SEQ ID NO: 418640 - RNA, 24 nt, Human
ugaggugggcggaucaccugaggu

SEQ ID NO: 418641 - RNA, 26 nt, Human
ugaggugggcggaucaccugagguca

SEQ ID NO: 418642 - RNA, 19 nt, Human
ugagguggguggaucacaa

SEQ ID NO: 418643 - RNA, 21 nt, Human
ugagguggguggaucacaagg

SEQ ID NO: 418644 - RNA, 24 nt, Human
ugagguggguggaucacaagguca

SEQ ID NO: 418645 - RNA, 26 nt, Human
ugagguggguggaucacaaggucagg

SEQ ID NO: 418646 - RNA, 23 nt, Human
ugagguggguggaucacaagguu

SEQ ID NO: 418647 - RNA, 24 nt, Human
ugagguuucaccauguuagccagg

SEQ ID NO: 418648 - RNA, 24 nt, Human
ugaucugcccaccucgacccccca

SEQ ID NO: 418649 - RNA, 20 nt, Human
ugauucuccugccucagccu

SEQ ID NO: 418650 - RNA, 19 nt, Human
ugcaagcuccaccuuccag

SEQ ID NO: 418651 - RNA, 18 nt, Human
ugccaagaaauacccacc

SEQ ID NO: 418652 - RNA, 21 nt, Human
ugcccaccucgaccccccaaa

SEQ ID NO: 418653 - RNA, 24 nt, Human
ugccucagccuccugaguagcuag

SEQ ID NO: 418654 - RNA, 21 nt, Human
ugccucaggcucucgaguagc

SEQ ID NO: 418655 - RNA, 24 nt, Human
ugccucaggcucucgaguagcugg

SEQ ID NO: 418656 - RNA, 20 nt, Human
ugccucagucuucccaaagc

SEQ ID NO: 418657 - RNA, 24 nt, Human
ugcucugucccccaggcuggagug

SEQ ID NO: 418658 - RNA, 24 nt, Human
ugcugagauuacaggcgugagcca

SEQ ID NO: 418659 - RNA, 20 nt, Human
ugcugggauuacaggcauga

SEQ ID NO: 418660 - RNA, 23 nt, Human
ugcugggauuacaggcgugaacc

SEQ ID NO: 418661 - RNA, 21 nt, Human
uggagaugagguuucaccaug

SEQ ID NO: 418662 - RNA, 19 nt, Human
uggagugcaauggugugau

SEQ ID NO: 418663 - RNA, 24 nt, Human
uggagugcaauggugugaucuugg

SEQ ID NO: 418664 - RNA, 19 nt, Human
uggcaccaucucagcucac

SEQ ID NO: 418665 - RNA, 24 nt, Human
uggcaccaucucagcucacugcaa

SEQ ID NO: 418666 - RNA, 22 nt, Human
uggcaggcaccuguaaucccag

SEQ ID NO: 418667 - RNA, 22 nt, Human
uggcaggcgccuguaaucccag

SEQ ID NO: 418668 - RNA, 24 nt, Human
uggccaggcuggucucaaacuccu

SEQ ID NO: 418669 - RNA, 24 nt, Human
uggccaggcuggucucgaacuccu

SEQ ID NO: 418670 - RNA, 21 nt, Human
uggcucacaccuguaauccca

SEQ ID NO: 418671 - RNA, 19 nt, Human
ugggacuacaggcgcucac

SEQ ID NO: 418672 - RNA, 21 nt, Human
ugggacuacaggcgcucacca

SEQ ID NO: 418673 - RNA, 24 nt, Human
ugggacuacaggcgcucaccacca

SEQ ID NO: 418674 - RNA, 19 nt, Human
ugggaggcugaggugggcg

SEQ ID NO: 418675 - RNA, 24 nt, Human
ugggaggcugaggugggcggauca

SEQ ID NO: 418676 - RNA, 23 nt, Human
ugggaggcugagguggguggauc

SEQ ID NO: 418677 - RNA, 24 nt, Human
ugggaggcugagguggguggauca

SEQ ID NO: 418678 - RNA, 19 nt, Human
ugggauuacaggcaugagc

SEQ ID NO: 418679 - RNA, 20 nt, Human
ugggauuacaggcaugagcc

SEQ ID NO: 418680 - RNA, 20 nt, Human
ugggauuacaggcaugagcc

SEQ ID NO: 418681 - RNA, 21 nt, Human
ugggauuacaggcaugagcca

SEQ ID NO: 418682 - RNA, 22 nt, Human
ugggauuacaggcaugagccac

SEQ ID NO: 418683 - RNA, 22 nt, Human
ugggauuacaggcaugagccac

SEQ ID NO: 418684 - RNA, 22 nt, Human
ugggauuacaggcaugagccac

SEQ ID NO: 418685 - RNA, 23 nt, Human
ugggauuacaggcaugagccacu

SEQ ID NO: 418686 - RNA, 24 nt, Human
ugggauuacaggcaugagccacug

SEQ ID NO: 418687 - RNA, 26 nt, Human
ugggauuacaggcaugagccacugug

SEQ ID NO: 418688 - RNA, 21 nt, Human
ugggauuacaggcaugagccg

SEQ ID NO: 418689 - RNA, 22 nt, Human
ugggauuacaggcaugagccgc

SEQ ID NO: 418690 - RNA, 23 nt, Human
ugggauuacaggcaugagccgcc

SEQ ID NO: 418691 - RNA, 24 nt, Human
ugggauuacaggcaugagccgccg

SEQ ID NO: 418692 - RNA, 18 nt, Human
ugggauuacaggcgggag

SEQ ID NO: 418693 - RNA, 21 nt, Human
ugggauuacaggcgggagcca

SEQ ID NO: 418694 - RNA, 22 nt, Human
ugggauuacaggcgggagccac

SEQ ID NO: 418695 - RNA, 24 nt, Human
ugggauuacaggcgggagccacca

SEQ ID NO: 418696 - RNA, 25 nt, Human
ugggauuacaggcgggagccaccau

SEQ ID NO: 418697 - RNA, 19 nt, Human
ugggauuacaggcgugaac

SEQ ID NO: 418698 - RNA, 22 nt, Human
ugggauuacaggcgugaaccac

SEQ ID NO: 418699 - RNA, 23 nt, Human
ugggauuacaggcgugaaccacc

SEQ ID NO: 418700 - RNA, 24 nt, Human
ugggauuacaggcgugaaccacca

SEQ ID NO: 418701 - RNA, 25 nt, Human
ugggauuacaggcgugaaccaccau

SEQ ID NO: 418702 - RNA, 24 nt, Human
ugggcggaucaccugaggucagga

SEQ ID NO: 418703 - RNA, 23 nt, Human
uggggucaagugauucuccugcc

SEQ ID NO: 418704 - RNA, 24 nt, Human
ugggguuuuaccauguuggccagg

SEQ ID NO: 418705 - RNA, 19 nt, Human
uggguucuguuuucauggg

SEQ ID NO: 418706 - RNA, 24 nt, Human
uggugcgauaucagcucacugcaa

SEQ ID NO: 418707 - RNA, 24 nt, Human
ugguggcaggcaccuguaauccca

SEQ ID NO: 418708 - RNA, 24 nt, Human
ugguggcaggcgccuguaauccca

SEQ ID NO: 418709 - RNA, 20 nt, Human
ugguggcuuauguuuggauc

SEQ ID NO: 418710 - RNA, 25 nt, Human
uguaaucccagcuacucaggaggau

SEQ ID NO: 418711 - RNA, 21 nt, Human
ugucgcccagguuagagugca

SEQ ID NO: 418712 - RNA, 22 nt, Human
ugugauguuugccccuaaacau

SEQ ID NO: 418713 - RNA, 19 nt, Human
uguuugccccuaaacauca

SEQ ID NO: 418714 - RNA, 21 nt, Human
uuaaaaaacagcuuaaaaaca

SEQ ID NO: 418715 - RNA, 26 nt, Human
uuaaaaacaaaacaaaacaaaaaaaa

SEQ ID NO: 418716 - RNA, 25 nt, Human
uuaauagagacgggguuucacccgu

SEQ ID NO: 418717 - RNA, 18 nt, Human
uuaguagaaaugggguuu

SEQ ID NO: 418718 - RNA, 22 nt, Human
uuaguagaaaugggguuuuacc

SEQ ID NO: 418719 - RNA, 24 nt, Human
uuaguagaaaugggguuuuaccau

SEQ ID NO: 418720 - RNA, 18 nt, Human
uuaguagagauaggguuu

SEQ ID NO: 418721 - RNA, 22 nt, Human
uuaguagagauaggguuucacc

SEQ ID NO: 418722 - RNA, 24 nt, Human
uuaguagagauaggguuucaccau

SEQ ID NO: 418723 - RNA, 26 nt, Human
uuaguuuucugucuuuuccaaauguu

SEQ ID NO: 418724 - RNA, 24 nt, Human
uucacucuuguuucccaggcugga

SEQ ID NO: 418725 - RNA, 19 nt, Human
uucaugccauucuccugcc

SEQ ID NO: 418726 - RNA, 24 nt, Human
uuccagguucaugccauucuccug

SEQ ID NO: 418727 - RNA, 24 nt, Human
uuccugacgucgugauccacccgc

SEQ ID NO: 418728 - RNA, 18 nt, Human
uugcagugagccgagaug

SEQ ID NO: 418729 - RNA, 22 nt, Human
uugcagugagccgagauggcgc

SEQ ID NO: 418730 - RNA, 20 nt, Human
uugcucugucacacaggcug

SEQ ID NO: 418731 - RNA, 22 nt, Human
uugcucugucacacaggcugga

SEQ ID NO: 418732 - RNA, 24 nt, Human
uugcucugucccccaggcuggagu

SEQ ID NO: 418733 - RNA, 27 nt, Human
uuggccagcgugguggcaggcaccugu

SEQ ID NO: 418734 - RNA, 25 nt, Human
uugggaggcugaggugggcggauca

SEQ ID NO: 418735 - RNA, 25 nt, Human
uugggaggcugagguggguggauca

SEQ ID NO: 418736 - RNA, 21 nt, Human
uuguccauuaauacuauaauc

SEQ ID NO: 418737 - RNA, 21 nt, Human
uugucccugccucacggaugc

SEQ ID NO: 418738 - RNA, 23 nt, Human
uuguuucccaggcuggagugcaa

SEQ ID NO: 418739 - RNA, 19 nt, Human
uuguuuuuuuuuuugagac

SEQ ID NO: 418740 - RNA, 23 nt, Human
uuuaagguccccucucccacccc

SEQ ID NO: 418741 - RNA, 18 nt, Human
uuuaauuuuuaguagaga

SEQ ID NO: 418742 - RNA, 22 nt, Human
uuuauaagaaaaauaaagcuaa

SEQ ID NO: 418743 - RNA, 21 nt, Human
uuucaccauguuagccaggcu

SEQ ID NO: 418744 - RNA, 24 nt, Human
uuucaccauguuggccaggcuggu

SEQ ID NO: 418745 - RNA, 22 nt, Human
uuugccccuaaacaucacaaug

SEQ ID NO: 418746 - RNA, 24 nt, Human
uuuuaaguggagaugagguuucac

SEQ ID NO: 418747 - RNA, 24 nt, Human
uuuuuaauagagacgggguuucac

SEQ ID NO: 418748 - RNA, 24 nt, Human
uuuuuaguagaaaugggguuuuac

SEQ ID NO: 418749 - RNA, 24 nt, Human
uuuuuaguagagauaggguuucac

SEQ ID NO: 418750 - RNA, 23 nt, Human
uuuuuguauuuuaaguggagaug

SEQ ID NO: 418751 - RNA, 19 nt, Human
uuuuuuaaaaagcuauuag

SEQ ID NO: 418752 - RNA, 20 nt, Human
uuuuuuuugaggcagggucu

SEQ ID NO: 418753 - RNA, 23 nt, Human
uuuuuuuuuuugagacggagucu

SEQ ID NO: 418754 - RNA, 22 nt, Human
cugcaaaauuucacuucaauug

SEQ ID NO: 418755 - RNA, 22 nt, Human
cugcaaaauuucacuucaauug

SEQ ID NO: 418756 - RNA, 21 nt, Human
uuuuuuuuuuuugggguauca

SEQ ID NO: 418757 - RNA, 23 nt, Human
aaaaaaaaaaaaacaaaaaaaaa

SEQ ID NO: 418758 - RNA, 23 nt, Human
aaaaaaaacaaaaaaaaaaaucc

SEQ ID NO: 418759 - RNA, 18 nt, Human
aaaaauccaaguguccuc

SEQ ID NO: 418760 - RNA, 24 nt, Human
aaaagguaacaaaauauacagaac

SEQ ID NO: 418761 - RNA, 24 nt, Human
aaaauuaaaagugugcauagucca

SEQ ID NO: 418762 - RNA, 19 nt, Human
aaacaaacaaacacaagca

SEQ ID NO: 418763 - RNA, 23 nt, Human
aaacaaacaaacacaagcaaaca

SEQ ID NO: 418764 - RNA, 24 nt, Human
aaacaaacaaacacaagcaaacag

SEQ ID NO: 418765 - RNA, 25 nt, Human
aaacaaacaaacacaagcaaacaga

SEQ ID NO: 418766 - RNA, 23 nt, Human
aaacacgacuauccagcagcagc

SEQ ID NO: 418767 - RNA, 22 nt, Human
aaauuaaaagugugcauagucc

SEQ ID NO: 418768 - RNA, 19 nt, Human
aacugcuuucuaaaggaac

SEQ ID NO: 418769 - RNA, 24 nt, Human
aagcaaaaaaaaaaaaaacaaaaa

SEQ ID NO: 418770 - RNA, 19 nt, Human
aagcaaacagagucucuuc

SEQ ID NO: 418771 - RNA, 21 nt, Human
aagcucauaguggcaugugug

SEQ ID NO: 418772 - RNA, 19 nt, Human
aagcugccuuccagcagcc

SEQ ID NO: 418773 - RNA, 20 nt, Human
aagcugccuuccagcagccu

SEQ ID NO: 418774 - RNA, 19 nt, Human
aagguaacaaaauauacag

SEQ ID NO: 418775 - RNA, 19 nt, Human
acagcuggagucugaaagc

SEQ ID NO: 418776 - RNA, 18 nt, Human
accacugcccuccugcca

SEQ ID NO: 418777 - RNA, 24 nt, Human
agcaaaaaaaaaaaaaacaaaaaa

SEQ ID NO: 418778 - RNA, 22 nt, Human
aggagaaagcagugcacgagaa

SEQ ID NO: 418779 - RNA, 21 nt, Human
auaaaacacuaauaauaaucc

SEQ ID NO: 418780 - RNA, 22 nt, Human
caaaaaaaaaaaaaacaaaaaa

SEQ ID NO: 418781 - RNA, 22 nt, Human
caaguguccuccuccaccacuc

SEQ ID NO: 418782 - RNA, 23 nt, Human
cacugcccuccugccacaucaca

SEQ ID NO: 418783 - RNA, 18 nt, Human
cacugugugugcgagagu

SEQ ID NO: 418784 - RNA, 18 nt, Human
cagaacaaaacuuucccu

SEQ ID NO: 418785 - RNA, 18 nt, Human
cagcagcagcgaagacgc

SEQ ID NO: 418786 - RNA, 19 nt, Human
cagcagcagcgaagacgcu

SEQ ID NO: 418787 - RNA, 20 nt, Human
cagcaggcagguccagcucc

SEQ ID NO: 418788 - RNA, 21 nt, Human
cagccugccaaggccauggca

SEQ ID NO: 418789 - RNA, 19 nt, Human
caucaagugccaugguuua

SEQ ID NO: 418790 - RNA, 26 nt, Human
ccaacggccuccacaagcugccuucc

SEQ ID NO: 418791 - RNA, 18 nt, Human
ccccucugcccuuggucc

SEQ ID NO: 418792 - RNA, 20 nt, Human
ccccucugcccuugguccug

SEQ ID NO: 418793 - RNA, 19 nt, Human
cccgaaaacacgacuaucc

SEQ ID NO: 418794 - RNA, 20 nt, Human
ccugccacaucacaucaagu

SEQ ID NO: 418795 - RNA, 28 nt, Human
ccuggagucagagcagaacccuuagagc

SEQ ID NO: 418796 - RNA, 20 nt, Human
ccugguucccagcccagaau

SEQ ID NO: 418797 - RNA, 20 nt, Human
cgagaaggaaugagugggcg

SEQ ID NO: 418798 - RNA, 27 nt, Human
cugcaaacaaacaaacacaagcaaaca

SEQ ID NO: 418799 - RNA, 20 nt, Human
cugcagcaggcagguccagc

SEQ ID NO: 418800 - RNA, 22 nt, Human
cuuagcugugaaggagaaagca

SEQ ID NO: 418801 - RNA, 21 nt, Human
gaaguccugccacguuuccuu

SEQ ID NO: 418802 - RNA, 21 nt, Human
gcaggcagguccagcuccacc

SEQ ID NO: 418803 - RNA, 18 nt, Human
gcccugccucguccuccu

SEQ ID NO: 418804 - RNA, 19 nt, Human
gcccugccucguccuccug

SEQ ID NO: 418805 - RNA, 18 nt, Human
ggccauggcagagagaga

SEQ ID NO: 418806 - RNA, 20 nt, Human
gggaaaacaaaccagggcgc

SEQ ID NO: 418807 - RNA, 24 nt, Human
uaacaaaauauacagaacaaaacu

SEQ ID NO: 418808 - RNA, 23 nt, Human
uaacugcuuucuaaaggaacugg

SEQ ID NO: 418809 - RNA, 24 nt, Human
uaauucaaucaguccugcucccag

SEQ ID NO: 418810 - RNA, 18 nt, Human
uacacgugacugcagcag

SEQ ID NO: 418811 - RNA, 24 nt, Human
uacagaacaaaacuuucccuuuuu

SEQ ID NO: 418812 - RNA, 20 nt, Human
uauggcacagauggaagucc

SEQ ID NO: 418813 - RNA, 24 nt, Human
uccccgaaaacacgacuauccagc

SEQ ID NO: 418814 - RNA, 23 nt, Human
ugacugcagcaggcagguccagc

SEQ ID NO: 418815 - RNA, 18 nt, Human
ugaguauccucgaucccc

SEQ ID NO: 418816 - RNA, 21 nt, Human
ugcaaacaaacaaacacaagc

SEQ ID NO: 418817 - RNA, 21 nt, Human
ugcagcaggcagguccagcuc

SEQ ID NO: 418818 - RNA, 18 nt, Human
uggcacagauggaagucc

SEQ ID NO: 418819 - RNA, 24 nt, Human
uguccuccuccaccacucacgcug

SEQ ID NO: 418820 - RNA, 18 nt, Human
ugugugcgagagugcuuc

SEQ ID NO: 418821 - RNA, 23 nt, Human
uguuaagcaaaaaaaaaaaaaac

SEQ ID NO: 418822 - RNA, 19 nt, Human
uucuuacucagacuuuaca

SEQ ID NO: 418823 - RNA, 18 nt, Human
uuuuuuuuuuuuuuuucg

SEQ ID NO: 418824 - RNA, 25 nt, Human
uuuuuuuuuuuuuuuucgugccuuu

SEQ ID NO: 418825 - RNA, 20 nt, Human
uuuuuuuuuuuuuuuuucgu

SEQ ID NO: 418826 - RNA, 24 nt, Human
aaaaaaaagcaguuuuaaugguaa

SEQ ID NO: 418827 - RNA, 20 nt, Human
aagcagaaccaaguugguug

SEQ ID NO: 418828 - RNA, 25 nt, Human
agggcgcgguggguguggguggugg

SEQ ID NO: 418829 - RNA, 23 nt, Human
auggccugggcggcggcgguggc

SEQ ID NO: 418830 - RNA, 20 nt, Human
ccugggcggcggcgguggcg

SEQ ID NO: 418831 - RNA, 25 nt, Human
cugggcggcggcgguggcgcggacu

SEQ ID NO: 418832 - RNA, 24 nt, Human
cuguaaacuagauuauguuguaaa

SEQ ID NO: 418833 - RNA, 18 nt, Human
gcgaacgagggcgcggug

SEQ ID NO: 418834 - RNA, 21 nt, Human
gcgcuccugaaaaacugcaga

SEQ ID NO: 418835 - RNA, 20 nt, Human
ggccugggcggcggcggugg

SEQ ID NO: 418836 - RNA, 20 nt, Human
ggcgauggccugggcggcgg

SEQ ID NO: 418837 - RNA, 23 nt, Human
ggcggcggcgguggcgcggacug

SEQ ID NO: 418838 - RNA, 18 nt, Human
gggcggcggcgguggcgc

SEQ ID NO: 418839 - RNA, 19 nt, Human
gggcggcggcgguggcgcg

SEQ ID NO: 418840 - RNA, 18 nt, Human
ggguguggguggugggag

SEQ ID NO: 418841 - RNA, 24 nt, Human
guggguggugggagcgcggcugcg

SEQ ID NO: 418842 - RNA, 23 nt, Human
ucgguuguuaagaacuagagcuu

SEQ ID NO: 418843 - RNA, 24 nt, Human
ucgguuguuaagaacuagagcuua

SEQ ID NO: 418844 - RNA, 24 nt, Human
ucuagcacaagauuuuucuguaaa

SEQ ID NO: 418845 - RNA, 24 nt, Human
ucuugcgcuccugaaaaacugcag

SEQ ID NO: 418846 - RNA, 19 nt, Human
ugcagaaaggcacuugaaa

SEQ ID NO: 418847 - RNA, 19 nt, Human
ugcugcacugagugugugc

SEQ ID NO: 418848 - RNA, 21 nt, Human
ugggcggcggcgguggcgcgg

SEQ ID NO: 418849 - RNA, 22 nt, Human
uggguguggguggugggagcgc

SEQ ID NO: 418850 - RNA, 24 nt, Human
uguaaacuagauuauguuguaaac

SEQ ID NO: 418851 - RNA, 19 nt, Human
uuccaaagauuuauugaag

SEQ ID NO: 418852 - RNA, 24 nt, Human
uugguuggauacuugcuggaaaaa

SEQ ID NO: 418853 - RNA, 19 nt, Human
aagcagaaagggaaguuuc

SEQ ID NO: 418854 - RNA, 21 nt, Human
aagcagaaagggaaguuucag

SEQ ID NO: 418855 - RNA, 18 nt, Human
acacagcauuccaucugc

SEQ ID NO: 418856 - RNA, 25 nt, Human
acaccauuaaaaauaaaaggugagc

SEQ ID NO: 418857 - RNA, 24 nt, Human
acaucacaacauucacaacacaau

SEQ ID NO: 418858 - RNA, 23 nt, Human
agaaaggauauacagcauaugaa

SEQ ID NO: 418859 - RNA, 19 nt, Human
aucacaacauucacaacac

SEQ ID NO: 418860 - RNA, 24 nt, Human
caaauuuagacacacugauuaucu

SEQ ID NO: 418861 - RNA, 23 nt, Human
cacaacauucacaacacaauauu

SEQ ID NO: 418862 - RNA, 22 nt, Human
cacugauuaucuguucuacucu

SEQ ID NO: 418863 - RNA, 19 nt, Human
caggagagagccuuuggug

SEQ ID NO: 418864 - RNA, 27 nt, Human
cauuuuccuucaagaauucacugggaa

SEQ ID NO: 418865 - RNA, 26 nt, Human
ccaucugcuuaacauucaaauuuaga

SEQ ID NO: 418866 - RNA, 25 nt, Human
cuccaaaauguauuucacagaagga

SEQ ID NO: 418867 - RNA, 24 nt, Human
cuguucuacucuccugaauaguua

SEQ ID NO: 418868 - RNA, 21 nt, Human
cuucaagaauucacugggaag

SEQ ID NO: 418869 - RNA, 22 nt, Human
cuucacaguuauuacauuagcu

SEQ ID NO: 418870 - RNA, 23 nt, Human
gagccuuuggugauuagcaaucc

SEQ ID NO: 418871 - RNA, 18 nt, Human
gagcuggccguuccggau

SEQ ID NO: 418872 - RNA, 20 nt, Human
guuccggauuguuuuggagc

SEQ ID NO: 418873 - RNA, 20 nt, Human
uacacauacuuaacacaagc

SEQ ID NO: 418874 - RNA, 20 nt, Human
uacacucuauaaauaaacac

SEQ ID NO: 418875 - RNA, 21 nt, Human
uacagcauaugaaauugcagg

SEQ ID NO: 418876 - RNA, 22 nt, Human
uagaacucucaaauacuauuua

SEQ ID NO: 418877 - RNA, 25 nt, Human
uaucuucauuguuacuaucuuagac

SEQ ID NO: 418878 - RNA, 23 nt, Human
uauguugcguaucauuuuccuuc

SEQ ID NO: 418879 - RNA, 22 nt, Human
ucuauuacuacucuuccaaaaa

SEQ ID NO: 418880 - RNA, 18 nt, Human
ugccuauaaaauauggaa

SEQ ID NO: 418881 - RNA, 21 nt, Human
ugcucuauuacuacucuucca

SEQ ID NO: 418882 - RNA, 19 nt, Human
uggaaaaauaguugugucc

SEQ ID NO: 418883 - RNA, 19 nt, Human
ugugccucucgcccagucg

SEQ ID NO: 418884 - RNA, 27 nt, Human
uguucuacucuccugaauaguuaagua

SEQ ID NO: 418885 - RNA, 24 nt, Human
uuacacauacuuaacacaagcaga

SEQ ID NO: 418886 - RNA, 20 nt, Human
uuagaacucucaaauacuaa

SEQ ID NO: 418887 - RNA, 23 nt, Human
uucaagaauucacugggaaguug

SEQ ID NO: 418888 - RNA, 22 nt, Human
uucucucuuugauuucuuaaaa

SEQ ID NO: 418889 - RNA, 22 nt, Human
aaacaaaaacuccagaauaacc

SEQ ID NO: 418890 - RNA, 20 nt, Human
aaaguuagcaguaagagucc

SEQ ID NO: 418891 - RNA, 19 nt, Human
aaauaaccaagaggaucug

SEQ ID NO: 418892 - RNA, 24 nt, Human
aaauaaccaagaggaucuggcugg

SEQ ID NO: 418893 - RNA, 24 nt, Human
aagaggaucuggcugguuacgaua

SEQ ID NO: 418894 - RNA, 18 nt, Human
acagaucccacuugacag

SEQ ID NO: 418895 - RNA, 20 nt, Human
acaugagauggaggccuccu

SEQ ID NO: 418896 - RNA, 18 nt, Human
agacuuggagagcaggua

SEQ ID NO: 418897 - RNA, 26 nt, Human
agagauaaguauggcuggugugacag

SEQ ID NO: 418898 - RNA, 26 nt, Human
agagccagcagggggcagagucagga

SEQ ID NO: 418899 - RNA, 23 nt, Human
agagcuggcgggcggcgcaccag

SEQ ID NO: 418900 - RNA, 20 nt, Human
agagucccucaguccuuggg

SEQ ID NO: 418901 - RNA, 24 nt, Human
aggaagcugaguggccacuggggu

SEQ ID NO: 418902 - RNA, 24 nt, Human
aggaggcugugaccagcaggcucc

SEQ ID NO: 418903 - RNA, 18 nt, Human
agggccggggcuggccgc

SEQ ID NO: 418904 - RNA, 22 nt, Human
aggggccgccuugggccccugg

SEQ ID NO: 418905 - RNA, 21 nt, Human
agguaucugcuuucugucaga

SEQ ID NO: 418906 - RNA, 21 nt, Human
augaagccacugagacuugga

SEQ ID NO: 418907 - RNA, 22 nt, Human
caaaaacuccagaauaacccac

SEQ ID NO: 418908 - RNA, 21 nt, Human
caaacaaaaacuccagaauaa

SEQ ID NO: 418909 - RNA, 25 nt, Human
caaacaaaaacuccagaauaaccca

SEQ ID NO: 418910 - RNA, 20 nt, Human
cacaagccuguugcaguccu

SEQ ID NO: 418911 - RNA, 19 nt, Human
cacagcacagagagauaag

SEQ ID NO: 418912 - RNA, 19 nt, Human
caccagacugacccagggg

SEQ ID NO: 418913 - RNA, 18 nt, Human
cacuggggugaagggcag

SEQ ID NO: 418914 - RNA, 21 nt, Human
cagacagaggaggcugugacc

SEQ ID NO: 418915 - RNA, 19 nt, Human
cagcaggcuccuauccaga

SEQ ID NO: 418916 - RNA, 20 nt, Human
cagcaggcuccuauccagau

SEQ ID NO: 418917 - RNA, 20 nt, Human
cagccuccgagcccagggcc

SEQ ID NO: 418918 - RNA, 18 nt, Human
ccaccgguugcuuuccuc

SEQ ID NO: 418919 - RNA, 22 nt, Human
ccacugagacuuggagagcagg

SEQ ID NO: 418920 - RNA, 20 nt, Human
ccagacugacccaggggcca

SEQ ID NO: 418921 - RNA, 21 nt, Human
cccaccagacugacccagggg

SEQ ID NO: 418922 - RNA, 19 nt, Human
ccccgcgcgggcaaagagc

SEQ ID NO: 418923 - RNA, 27 nt, Human
ccccgcgcgggcaaagagcuggcgggc

SEQ ID NO: 418924 - RNA, 18 nt, Human
ccccugggauccuggugg

SEQ ID NO: 418925 - RNA, 19 nt, Human
cccgcggcgggcggccccg

SEQ ID NO: 418926 - RNA, 23 nt, Human
cccugagcccgcggcgggcggcc

SEQ ID NO: 418927 - RNA, 23 nt, Human
ccguccucccaccagacugaccc

SEQ ID NO: 418928 - RNA, 22 nt, Human
ccugagugguaaugcuuaaccc

SEQ ID NO: 418929 - RNA, 18 nt, Human
ccuguauguguagcaggg

SEQ ID NO: 418930 - RNA, 21 nt, Human
cggcgggcggccccgcgcggg

SEQ ID NO: 418931 - RNA, 22 nt, Human
cgggcagaaccuuucugcccuc

SEQ ID NO: 418932 - RNA, 22 nt, Human
cucaggucacaccaguguuguu

SEQ ID NO: 418933 - RNA, 21 nt, Human
cugccggggugagugggaagg

SEQ ID NO: 418934 - RNA, 18 nt, Human
cuguauguguagcagggu

SEQ ID NO: 418935 - RNA, 18 nt, Human
cuugcuagaaacgcucca

SEQ ID NO: 418936 - RNA, 19 nt, Human
gaagagccagcagggggca

SEQ ID NO: 418937 - RNA, 21 nt, Human
gaagcugaguggccacugggg

SEQ ID NO: 418938 - RNA, 18 nt, Human
gagaccagggggccgggg

SEQ ID NO: 418939 - RNA, 24 nt, Human
gagccuaguuacaacaguuggcac

SEQ ID NO: 418940 - RNA, 20 nt, Human
gagcucccaucucucucacu

SEQ ID NO: 418941 - RNA, 22 nt, Human
gauaacuaagcguaaagagaga

SEQ ID NO: 418942 - RNA, 21 nt, Human
gauccaccgguugcuuuccuc

SEQ ID NO: 418943 - RNA, 26 nt, Human
gcaaagagcuggcgggcggcgcacca

SEQ ID NO: 418944 - RNA, 21 nt, Human
gcccaugggugcacaucucug

SEQ ID NO: 418945 - RNA, 19 nt, Human
ggccuuuggaggaggaguc

SEQ ID NO: 418946 - RNA, 22 nt, Human
gggcaaagagcuggcgggcggc

SEQ ID NO: 418947 - RNA, 21 nt, Human
gggcagaagagccagcagggg

SEQ ID NO: 418948 - RNA, 19 nt, Human
gggcagagucaggaugaaa

SEQ ID NO: 418949 - RNA, 19 nt, Human
gggcgggaggggccgccuu

SEQ ID NO: 418950 - RNA, 18 nt, Human
ggggugagugggaagggg

SEQ ID NO: 418951 - RNA, 20 nt, Human
ggguggacaaggagggcagc

SEQ ID NO: 418952 - RNA, 18 nt, Human
ggugcacaucucugagcc

SEQ ID NO: 418953 - RNA, 21 nt, Human
uaacccaaaggaacuugacag

SEQ ID NO: 418954 - RNA, 22 nt, Human
uaccgugguguuggugcuggug

SEQ ID NO: 418955 - RNA, 22 nt, Human
uccaccugcaauccuccaggag

SEQ ID NO: 418956 - RNA, 21 nt, Human
uccccgggcagaaccuuucug

SEQ ID NO: 418957 - RNA, 22 nt, Human
uccggaccagagaccagggggc

SEQ ID NO: 418958 - RNA, 22 nt, Human
uccuccaggagaggagcuccca

SEQ ID NO: 418959 - RNA, 24 nt, Human
uccuuggguugcaccguccuccca

SEQ ID NO: 418960 - RNA, 21 nt, Human
ucucauuucccagaggcuuca

SEQ ID NO: 418961 - RNA, 22 nt, Human
ucucuaggaguguccggaccag

SEQ ID NO: 418962 - RNA, 23 nt, Human
ugacagcaauggugaaauuucag

SEQ ID NO: 418963 - RNA, 23 nt, Human
ugaggggaucuucuggcagaggu

SEQ ID NO: 418964 - RNA, 20 nt, Human
ugcaccguccucccaccaga

SEQ ID NO: 418965 - RNA, 20 nt, Human
uggacaaggagggcagcucu

SEQ ID NO: 418966 - RNA, 18 nt, Human
uggagagcagguaggcuu

SEQ ID NO: 418967 - RNA, 19 nt, Human
uggcagaguggcgcuggcc

SEQ ID NO: 418968 - RNA, 21 nt, Human
uggcgggcggcgcaccaggcg

SEQ ID NO: 418969 - RNA, 20 nt, Human
uggguaggaagcugaguggc

SEQ ID NO: 418970 - RNA, 24 nt, Human
uggguugcaccguccucccaccag

SEQ ID NO: 418971 - RNA, 21 nt, Human
uguccggaccagagaccaggg

SEQ ID NO: 418972 - RNA, 23 nt, Human
uuccacagcacagagagauaagu

SEQ ID NO: 418973 - RNA, 26 nt, Human
uuccccgggcagaaccuuucugcccu

SEQ ID NO: 418974 - RNA, 18 nt, Human
uucgcugguggcugccuu

SEQ ID NO: 418975 - RNA, 21 nt, Human
uucgcugguggcugccuucuc

SEQ ID NO: 418976 - RNA, 23 nt, Human
uugauuggcguagggggccuuug

SEQ ID NO: 418977 - RNA, 22 nt, Human
aaacagcccuguggaguugggu

SEQ ID NO: 418978 - RNA, 19 nt, Human
aacauggugaaacccuguc

SEQ ID NO: 418979 - RNA, 20 nt, Human
aacauggugaaacccugucu

SEQ ID NO: 418980 - RNA, 21 nt, Human
aacauggugaaacccugucuc

SEQ ID NO: 418981 - RNA, 18 nt, Human
aaccaccgaccaucaaca

SEQ ID NO: 418982 - RNA, 26 nt, Human
aaccagugccugguaaccaccugaca

SEQ ID NO: 418983 - RNA, 22 nt, Human
aacccuacaggggaggaacagc

SEQ ID NO: 418984 - RNA, 20 nt, Human
aagagagaggacgggcugcc

SEQ ID NO: 418985 - RNA, 22 nt, Human
aaggagcagccgcuagggcugc

SEQ ID NO: 418986 - RNA, 24 nt, Human
acacaaugacaguuaaagacaccu

SEQ ID NO: 418987 - RNA, 20 nt, Human
acagagcaagacuccgucuc

SEQ ID NO: 418988 - RNA, 24 nt, Human
acagagcaagacuccgucucaaaa

SEQ ID NO: 418989 - RNA, 22 nt, Human
acagccgaggggccgcacugaa

SEQ ID NO: 418990 - RNA, 18 nt, Human
acagccggcccucuacca

SEQ ID NO: 418991 - RNA, 21 nt, Human
acccaacaccuucaguuacca

SEQ ID NO: 418992 - RNA, 20 nt, Human
accccaucaccaggggcccg

SEQ ID NO: 418993 - RNA, 24 nt, Human
acccugucucuacuaaaaauacaa

SEQ ID NO: 418994 - RNA, 18 nt, Human
accugcccgacacggugc

SEQ ID NO: 418995 - RNA, 25 nt, Human
acugacccaacaccuucaguuacca

SEQ ID NO: 418996 - RNA, 24 nt, Human
acugcacuccagccugggcgacag

SEQ ID NO: 418997 - RNA, 26 nt, Human
acugcacuccagccugggcgacagag

SEQ ID NO: 418998 - RNA, 24 nt, Human
agagaucaggccacugcacuccag

SEQ ID NO: 418999 - RNA, 22 nt, Human
agcaacguccccagacacccuc

SEQ ID NO: 419000 - RNA, 24 nt, Human
agcacuuugggaggccgaggcggg

SEQ ID NO: 419001 - RNA, 19 nt, Human
agccagagcugcugagggu

SEQ ID NO: 419002 - RNA, 21 nt, Human
agccccgaaccgugggccucc

SEQ ID NO: 419003 - RNA, 22 nt, Human
agccgaggggccgcacugaacc

SEQ ID NO: 419004 - RNA, 24 nt, Human
agccugggcgacagagcaagacuc

SEQ ID NO: 419005 - RNA, 18 nt, Human
agcucuggggaggagggc

SEQ ID NO: 419006 - RNA, 21 nt, Human
aggcaggagaauggcgugaac

SEQ ID NO: 419007 - RNA, 24 nt, Human
aggcaggagaauggcgugaacccg

SEQ ID NO: 419008 - RNA, 21 nt, Human
aggccgaggcgggcccaucac

SEQ ID NO: 419009 - RNA, 19 nt, Human
aggcggagcuugcagggag

SEQ ID NO: 419010 - RNA, 24 nt, Human
aggcgggcccaucacgaggucagg

SEQ ID NO: 419011 - RNA, 24 nt, Human
aggcguguuggcgggcgccuguag

SEQ ID NO: 419012 - RNA, 18 nt, Human
aggcugaggcaggagaau

SEQ ID NO: 419013 - RNA, 20 nt, Human
agggugugcaggacagggug

SEQ ID NO: 419014 - RNA, 21 nt, Human
aguaggugggggaugcucccu

SEQ ID NO: 419015 - RNA, 21 nt, Human
agugcgcggagaccucgggcc

SEQ ID NO: 419016 - RNA, 23 nt, Human
aguggcucacgccuuaaucccag

SEQ ID NO: 419017 - RNA, 24 nt, Human
aucaggccacugcacuccagccug

SEQ ID NO: 419018 - RNA, 20 nt, Human
auccucugcggcccccagaa

SEQ ID NO: 419019 - RNA, 22 nt, Human
caaaccacccuucgccugaagg

SEQ ID NO: 419020 - RNA, 24 nt, Human
caaccaccgaccaucaacaaccag

SEQ ID NO: 419021 - RNA, 21 nt, Human
caaccagcuugacggagucag

SEQ ID NO: 419022 - RNA, 21 nt, Human
caaccucggguucauucuccc

SEQ ID NO: 419023 - RNA, 21 nt, Human
caagacuccgucucaaaaaaa

SEQ ID NO: 419024 - RNA, 23 nt, Human
cacaaugacaguuaaagacaccu

SEQ ID NO: 419025 - RNA, 21 nt, Human
cacagucggggcaccugggcc

SEQ ID NO: 419026 - RNA, 18 nt, Human
cacaucugcaaaccaccc

SEQ ID NO: 419027 - RNA, 22 nt, Human
cacauuuugcacaagauuaucu

SEQ ID NO: 419028 - RNA, 22 nt, Human
cacccuccccacaucugcaaag

SEQ ID NO: 419029 - RNA, 23 nt, Human
caccugaugacugaugacugccc

SEQ ID NO: 419030 - RNA, 19 nt, Human
caccuggccacugacccaa

SEQ ID NO: 419031 - RNA, 20 nt, Human
caccugggccagggcugggc

SEQ ID NO: 419032 - RNA, 25 nt, Human
caccugucuccccaaaccaaccucg

SEQ ID NO: 419033 - RNA, 19 nt, Human
cacugcacuccagccuggg

SEQ ID NO: 419034 - RNA, 20 nt, Human
cacugcacuccagccugggc

SEQ ID NO: 419035 - RNA, 22 nt, Human
cacugcacuccagccugggcga

SEQ ID NO: 419036 - RNA, 23 nt, Human
cacugcacuccagccugggcgac

SEQ ID NO: 419037 - RNA, 24 nt, Human
cacugcacuccagccugggcgaca

SEQ ID NO: 419038 - RNA, 27 nt, Human
cacugcacuccagccugggcgacagag

SEQ ID NO: 419039 - RNA, 20 nt, Human
cacugcacuccagccugggg

SEQ ID NO: 419040 - RNA, 22 nt, Human
cagcacuuugggaggccgaggc

SEQ ID NO: 419041 - RNA, 24 nt, Human
cagcacuuugggaggccgaggcgg

SEQ ID NO: 419042 - RNA, 20 nt, Human
cagcagagggguguggccgg

SEQ ID NO: 419043 - RNA, 22 nt, Human
cagcgcccgccgccuccguccu

SEQ ID NO: 419044 - RNA, 21 nt, Human
cagcguccaccugccucccuc

SEQ ID NO: 419045 - RNA, 23 nt, Human
cagcgugccgggggccgcccagc

SEQ ID NO: 419046 - RNA, 23 nt, Human
cagcuaugggaggcugaggcagg

SEQ ID NO: 419047 - RNA, 24 nt, Human
cagcucagcaacguccccagacac

SEQ ID NO: 419048 - RNA, 18 nt, Human
cagucggggcaccugggc

SEQ ID NO: 419049 - RNA, 24 nt, Human
caguggcucacgccuuaaucccag

SEQ ID NO: 419050 - RNA, 22 nt, Human
ccaaccgccucaccugucuccc

SEQ ID NO: 419051 - RNA, 20 nt, Human
ccaccgaccaucaacaacca

SEQ ID NO: 419052 - RNA, 24 nt, Human
ccacucagcuguaucccgcacccc

SEQ ID NO: 419053 - RNA, 20 nt, Human
ccacugcacuccagccuggg

SEQ ID NO: 419054 - RNA, 21 nt, Human
ccacugcacuccagccugggc

SEQ ID NO: 419055 - RNA, 21 nt, Human
ccacugcacuccagccugggc

SEQ ID NO: 419056 - RNA, 23 nt, Human
ccacugcacuccagccugggcga

SEQ ID NO: 419057 - RNA, 24 nt, Human
ccacugcacuccagccugggcgac

SEQ ID NO: 419058 - RNA, 23 nt, Human
ccagcuaugggaggcugaggcag

SEQ ID NO: 419059 - RNA, 21 nt, Human
ccaggcucgugcugggccacc

SEQ ID NO: 419060 - RNA, 21 nt, Human
cccaaccaccgaccaucaaca

SEQ ID NO: 419061 - RNA, 19 nt, Human
cccacacccaaccaccgac

SEQ ID NO: 419062 - RNA, 20 nt, Human
cccacacccaaccaccgacc

SEQ ID NO: 419063 - RNA, 23 nt, Human
cccacacccaaccaccgaccauc

SEQ ID NO: 419064 - RNA, 22 nt, Human
cccacagucggggcaccugggc

SEQ ID NO: 419065 - RNA, 25 nt, Human
cccacagucggggcaccugggccag

SEQ ID NO: 419066 - RNA, 21 nt, Human
ccccaagagagaggacgggcu

SEQ ID NO: 419067 - RNA, 20 nt, Human
ccccacguaaccccaucacc

SEQ ID NO: 419068 - RNA, 22 nt, Human
ccccacguaaccccaucaccag

SEQ ID NO: 419069 - RNA, 21 nt, Human
cccccagaaaugguggguugu

SEQ ID NO: 419070 - RNA, 26 nt, Human
cccgaccuuugacaucgcgccccagc

SEQ ID NO: 419071 - RNA, 19 nt, Human
cccgcaccccacguaaccc

SEQ ID NO: 419072 - RNA, 23 nt, Human
cccgcaccccacguaaccccauu

SEQ ID NO: 419073 - RNA, 21 nt, Human
cccuguggaguuggguggggc

SEQ ID NO: 419074 - RNA, 21 nt, Human
cccuguggcugccucccggca

SEQ ID NO: 419075 - RNA, 18 nt, Human
ccgcagaagccccgaacc

SEQ ID NO: 419076 - RNA, 24 nt, Human
ccgcagcuguagccgagcgccccg

SEQ ID NO: 419077 - RNA, 20 nt, Human
ccgcccagcgcccgccgccu

SEQ ID NO: 419078 - RNA, 23 nt, Human
ccgccucaccugucuccccaaac

SEQ ID NO: 419079 - RNA, 22 nt, Human
ccgccuccguccuagguccccg

SEQ ID NO: 419080 - RNA, 21 nt, Human
ccuccagcaugggccgggagc

SEQ ID NO: 419081 - RNA, 22 nt, Human
ccucccggcacagcugucccga

SEQ ID NO: 419082 - RNA, 21 nt, Human
ccuggccgcagcuggccuggg

SEQ ID NO: 419083 - RNA, 22 nt, Human
ccuggcuaacauggugaaaccc

SEQ ID NO: 419084 - RNA, 22 nt, Human
ccuggcuaacauggugaaaccc

SEQ ID NO: 419085 - RNA, 24 nt, Human
ccuggcuaacauggugaaacccug

SEQ ID NO: 419086 - RNA, 19 nt, Human
ccugggcaccuggccuggg

SEQ ID NO: 419087 - RNA, 22 nt, Human
ccugggcaccuggccugggccg

SEQ ID NO: 419088 - RNA, 22 nt, Human
ccugggcgacagagcaagacuc

SEQ ID NO: 419089 - RNA, 26 nt, Human
ccugguccuaacguccgggggggccc

SEQ ID NO: 419090 - RNA, 20 nt, Human
cgaccaucaacaaccagugc

SEQ ID NO: 419091 - RNA, 24 nt, Human
cgagaccauccuggcuaacauggu

SEQ ID NO: 419092 - RNA, 21 nt, Human
cgagcgcgggggccgcccccu

SEQ ID NO: 419093 - RNA, 18 nt, Human
cgcccagcgcccgccgcc

SEQ ID NO: 419094 - RNA, 21 nt, Human
cgccuguagucccagcuaugg

SEQ ID NO: 419095 - RNA, 22 nt, Human
cgccuguagucccagcuauggg

SEQ ID NO: 419096 - RNA, 21 nt, Human
cgccuuaaucccagcacuuug

SEQ ID NO: 419097 - RNA, 23 nt, Human
cgccuuaaucccagcacuuuggg

SEQ ID NO: 419098 - RNA, 19 nt, Human
cgggggccgcccagcgccc

SEQ ID NO: 419099 - RNA, 23 nt, Human
cgggggccgcccagcgcccgccg

SEQ ID NO: 419100 - RNA, 20 nt, Human
cgguugaggggagauugucc

SEQ ID NO: 419101 - RNA, 23 nt, Human
cgugcugggccacacaacugcgu

SEQ ID NO: 419102 - RNA, 21 nt, Human
cucacgccuuaaucccagcac

SEQ ID NO: 419103 - RNA, 23 nt, Human
cucacgccuuaaucccagcacuu

SEQ ID NO: 419104 - RNA, 23 nt, Human
cuccccuauucucuugggccggg

SEQ ID NO: 419105 - RNA, 19 nt, Human
cuccgucucaaaaaaaaaa

SEQ ID NO: 419106 - RNA, 21 nt, Human
cuccugguccuaacguccggg

SEQ ID NO: 419107 - RNA, 21 nt, Human
cugaugacugcccacacccaa

SEQ ID NO: 419108 - RNA, 24 nt, Human
cuggcuaacauggugaaacccugu

SEQ ID NO: 419109 - RNA, 19 nt, Human
cuucaugaccuugcucucc

SEQ ID NO: 419110 - RNA, 21 nt, Human
cuuggcuccccuauucucuug

SEQ ID NO: 419111 - RNA, 21 nt, Human
gaaaccagucagcuccgcuga

SEQ ID NO: 419112 - RNA, 19 nt, Human
gaaagcugggcaaggcugg

SEQ ID NO: 419113 - RNA, 24 nt, Human
gacagagcaagacuccgucucaaa

SEQ ID NO: 419114 - RNA, 20 nt, Human
gaccuugcucuccugaucug

SEQ ID NO: 419115 - RNA, 21 nt, Human
gacugcccacacccaaccacc

SEQ ID NO: 419116 - RNA, 19 nt, Human
gagcagccgcuagggcugc

SEQ ID NO: 419117 - RNA, 23 nt, Human
gagccagagcugcugaggguccc

SEQ ID NO: 419118 - RNA, 24 nt, Human
gauauccccacccuucugcagcca

SEQ ID NO: 419119 - RNA, 24 nt, Human
gcacuccagccugggcgacagagc

SEQ ID NO: 419120 - RNA, 22 nt, Human
gccacugcacuccagccugggc

SEQ ID NO: 419121 - RNA, 24 nt, Human
gccacugcacuccagccugggcga

SEQ ID NO: 419122 - RNA, 18 nt, Human
gccccgcagaagccccga

SEQ ID NO: 419123 - RNA, 19 nt, Human
gcccugauauccccacccu

SEQ ID NO: 419124 - RNA, 19 nt, Human
gcccuguggaguugggugg

SEQ ID NO: 419125 - RNA, 19 nt, Human
gccucaccugucuccccaa

SEQ ID NO: 419126 - RNA, 23 nt, Human
gccucaccugucuccccaaacca

SEQ ID NO: 419127 - RNA, 23 nt, Human
gccuggccgcagcuggccugggg

SEQ ID NO: 419128 - RNA, 22 nt, Human
gcgcugugggggccagggcuug

SEQ ID NO: 419129 - RNA, 24 nt, Human
gcuaacauggugaaacccugucuc

SEQ ID NO: 419130 - RNA, 22 nt, Human
gcucccuuuuguccuuugaaag

SEQ ID NO: 419131 - RNA, 20 nt, Human
gcucgugcugggccacacaa

SEQ ID NO: 419132 - RNA, 22 nt, Human
gcugaggcaggagaauggcgug

SEQ ID NO: 419133 - RNA, 21 nt, Human
gcugcugagcgccagcucugg

SEQ ID NO: 419134 - RNA, 18 nt, Human
gcugugggggccagggcu

SEQ ID NO: 419135 - RNA, 24 nt, Human
ggaccugggaggccgcccugaugu

SEQ ID NO: 419136 - RNA, 22 nt, Human
ggagaaaccagucagcuccgcu

SEQ ID NO: 419137 - RNA, 25 nt, Human
ggagucaggaccgcgcugaccugcc

SEQ ID NO: 419138 - RNA, 21 nt, Human
ggcagggcucagccgggccgg

SEQ ID NO: 419139 - RNA, 23 nt, Human
ggccggcguggcccagggugugc

SEQ ID NO: 419140 - RNA, 21 nt, Human
ggccgggcgcaguggcucacg

SEQ ID NO: 419141 - RNA, 19 nt, Human
ggcgcaguggcucacgccu

SEQ ID NO: 419142 - RNA, 25 nt, Human
gggccagggcugggcagcuugcuga

SEQ ID NO: 419143 - RNA, 24 nt, Human
gggccgggagcgagugcgcggaga

SEQ ID NO: 419144 - RNA, 23 nt, Human
gggcgccccaagagagaggacgg

SEQ ID NO: 419145 - RNA, 23 nt, Human
gggcucagccgggccgggugggc

SEQ ID NO: 419146 - RNA, 19 nt, Human
ggguccugcuuccccugcu

SEQ ID NO: 419147 - RNA, 21 nt, Human
gguccugcuuccccugcucac

SEQ ID NO: 419148 - RNA, 23 nt, Human
gguuuugcaaaccaaggugacac

SEQ ID NO: 419149 - RNA, 21 nt, Human
guccgacaggcaggggugggg

SEQ ID NO: 419150 - RNA, 24 nt, Human
gucugcagcguccaccugccuccc

SEQ ID NO: 419151 - RNA, 21 nt, Human
gugaaacccugucucuacuaa

SEQ ID NO: 419152 - RNA, 23 nt, Human
guggaggagucugcgacauucca

SEQ ID NO: 419153 - RNA, 21 nt, Human
guggccggcguggcccagggu

SEQ ID NO: 419154 - RNA, 24 nt, Human
guuggcgggcgccuguagucccag

SEQ ID NO: 419155 - RNA, 22 nt, Human
uaacauggugaaacccugucuc

SEQ ID NO: 419156 - RNA, 24 nt, Human
uaacauggugaaacccugucucua

SEQ ID NO: 419157 - RNA, 20 nt, Human
ucaaaaaaaaaaaaaaaaaa

SEQ ID NO: 419158 - RNA, 22 nt, Human
ucaaaaaaaaaaaaaaaaaaaa

SEQ ID NO: 419159 - RNA, 18 nt, Human
ucacgaggucaggagauc

SEQ ID NO: 419160 - RNA, 24 nt, Human
ucacgaggucaggagaucgagacc

SEQ ID NO: 419161 - RNA, 24 nt, Human
ucacgccuuaaucccagcacuuug

SEQ ID NO: 419162 - RNA, 20 nt, Human
uccacauuuccuccuuggcu

SEQ ID NO: 419163 - RNA, 24 nt, Human
uccagccugggcgacagagcaaga

SEQ ID NO: 419164 - RNA, 22 nt, Human
uccagggaugagcuuguugcag

SEQ ID NO: 419165 - RNA, 24 nt, Human
uccccaaaccaaccucggguucau

SEQ ID NO: 419166 - RNA, 18 nt, Human
uccccagacacccucccc

SEQ ID NO: 419167 - RNA, 19 nt, Human
uccccagacacccucccca

SEQ ID NO: 419168 - RNA, 20 nt, Human
uccccgcgguuccgccgccu

SEQ ID NO: 419169 - RNA, 20 nt, Human
ucccuguggcugccucccgg

SEQ ID NO: 419170 - RNA, 19 nt, Human
ucccuuuuguccuuugaaa

SEQ ID NO: 419171 - RNA, 23 nt, Human
uccgucucaaaaaaaaaaaaaaa

SEQ ID NO: 419172 - RNA, 20 nt, Human
uccucagcguccccucuggg

SEQ ID NO: 419173 - RNA, 23 nt, Human
uccucagcguccccucuggguca

SEQ ID NO: 419174 - RNA, 21 nt, Human
uccugaucugguugucuccuc

SEQ ID NO: 419175 - RNA, 19 nt, Human
ucgccugaaggagcagccg

SEQ ID NO: 419176 - RNA, 23 nt, Human
ucggggcaccugggccagggcug

SEQ ID NO: 419177 - RNA, 22 nt, Human
ucgugcugggccacacaacugc

SEQ ID NO: 419178 - RNA, 22 nt, Human
ucucuacuaaaaauacaaaaaa

SEQ ID NO: 419179 - RNA, 18 nt, Human
ucucuggacacugcugcu

SEQ ID NO: 419180 - RNA, 21 nt, Human
ucugcaaaccacccuucgccu

SEQ ID NO: 419181 - RNA, 24 nt, Human
ucugcaaaccacccuucgccugaa

SEQ ID NO: 419182 - RNA, 24 nt, Human
ucugcggcccccagaaaugguggg

SEQ ID NO: 419183 - RNA, 20 nt, Human
ucugguugucuccucagccc

SEQ ID NO: 419184 - RNA, 23 nt, Human
ugacaggaugugugagcuucccu

SEQ ID NO: 419185 - RNA, 19 nt, Human
ugacaguuaaagacaccug

SEQ ID NO: 419186 - RNA, 20 nt, Human
ugacauguccacucacgccc

SEQ ID NO: 419187 - RNA, 24 nt, Human
ugaccacuggguccugcuuccccu

SEQ ID NO: 419188 - RNA, 23 nt, Human
ugacugaugacugcccacaccca

SEQ ID NO: 419189 - RNA, 21 nt, Human
ugaggcagagccagagcugcu

SEQ ID NO: 419190 - RNA, 24 nt, Human
ugaggcaggagaauggcgugaacc

SEQ ID NO: 419191 - RNA, 25 nt, Human
ugaggcaggagaauggcgugaaccc

SEQ ID NO: 419192 - RNA, 18 nt, Human
ugaggggagauugucccc

SEQ ID NO: 419193 - RNA, 22 nt, Human
ugagguccaucgagcgcugugg

SEQ ID NO: 419194 - RNA, 18 nt, Human
ugaucugguugucuccuc

SEQ ID NO: 419195 - RNA, 20 nt, Human
ugcacaggaacaagacauuc

SEQ ID NO: 419196 - RNA, 21 nt, Human
ugcgcggagaccucgggcccc

SEQ ID NO: 419197 - RNA, 19 nt, Human
ugcucgggcaucuggaagg

SEQ ID NO: 419198 - RNA, 24 nt, Human
ugcugggccacacaacugcguuuc

SEQ ID NO: 419199 - RNA, 22 nt, Human
uggcccagggugugcaggacag

SEQ ID NO: 419200 - RNA, 19 nt, Human
uggccgcagcuggccuggg

SEQ ID NO: 419201 - RNA, 18 nt, Human
uggccuggggcugagcgu

SEQ ID NO: 419202 - RNA, 21 nt, Human
uggcgggcgccuguaguccca

SEQ ID NO: 419203 - RNA, 20 nt, Human
uggcucacgccuuaauccca

SEQ ID NO: 419204 - RNA, 23 nt, Human
uggcucacgccuuaaucccagca

SEQ ID NO: 419205 - RNA, 24 nt, Human
ugggaggccgaggcgggcccauca

SEQ ID NO: 419206 - RNA, 20 nt, Human
ugggaggccgcccugaugug

SEQ ID NO: 419207 - RNA, 18 nt, Human
ugggaggcugaggcagga

SEQ ID NO: 419208 - RNA, 24 nt, Human
ugggaggcugaggcaggagaaugg

SEQ ID NO: 419209 - RNA, 20 nt, Human
ugggccucccgccgcguccg

SEQ ID NO: 419210 - RNA, 21 nt, Human
uggggaggagggcuugaaaca

SEQ ID NO: 419211 - RNA, 23 nt, Human
uggggaggagggcuugaaacagu

SEQ ID NO: 419212 - RNA, 19 nt, Human
uggggucugugaugccacc

SEQ ID NO: 419213 - RNA, 18 nt, Human
ugucaggauacagccggc

SEQ ID NO: 419214 - RNA, 18 nt, Human
uguccccugagcacaccu

SEQ ID NO: 419215 - RNA, 25 nt, Human
ugugcaggacagggugcggggaacc

SEQ ID NO: 419216 - RNA, 19 nt, Human
ugugggggccagggcuugg

SEQ ID NO: 419217 - RNA, 20 nt, Human
ugugggggccagggcuuggc

SEQ ID NO: 419218 - RNA, 22 nt, Human
uguuaaaaagagaauagguuuc

SEQ ID NO: 419219 - RNA, 22 nt, Human
uguugcagcagagggguguggc

SEQ ID NO: 419220 - RNA, 21 nt, Human
uuaaagacaccuguugaccac

SEQ ID NO: 419221 - RNA, 21 nt, Human
uuccacauuuccuccuuggcu

SEQ ID NO: 419222 - RNA, 18 nt, Human
uucccuguggcugccucc

SEQ ID NO: 419223 - RNA, 19 nt, Human
uuccuccuuggcuccccua

SEQ ID NO: 419224 - RNA, 18 nt, Human
uugaaagcugggcaaggc

SEQ ID NO: 419225 - RNA, 26 nt, Human
uuggcuccccuauucucuugggcccc

SEQ ID NO: 419226 - RNA, 22 nt, Human
uuuccugggcaccuggccuggg

SEQ ID NO: 419227 - RNA, 18 nt, Human
uuuuuuuuuuuuuuuuug

SEQ ID NO: 419228 - RNA, 18 nt, Human
acucgguaaccacaucca

SEQ ID NO: 419229 - RNA, 21 nt, Human
agaaaaagagacuucagcugc

SEQ ID NO: 419230 - RNA, 20 nt, Human
aucuugauguucuuccagcc

SEQ ID NO: 419231 - RNA, 18 nt, Human
auugucccaaccauugaa

SEQ ID NO: 419232 - RNA, 21 nt, Human
cacauccaaagcugaaguaga

SEQ ID NO: 419233 - RNA, 18 nt, Human
cagauggccuauacaaug

SEQ ID NO: 419234 - RNA, 24 nt, Human
ccuauugccauugucccaaccauu

SEQ ID NO: 419235 - RNA, 26 nt, Human
cguuuuguccuauugccauuguccca

SEQ ID NO: 419236 - RNA, 20 nt, Human
cuagggaaagugcauauuug

SEQ ID NO: 419237 - RNA, 25 nt, Human
cucaaaggucaacauuugucacaga

SEQ ID NO: 419238 - RNA, 23 nt, Human
gauguucuuccagccgagaggaa

SEQ ID NO: 419239 - RNA, 21 nt, Human
gcuuaagaauagugauuguuc

SEQ ID NO: 419240 - RNA, 24 nt, Human
ggacaagaauauuuacaaaaguaa

SEQ ID NO: 419241 - RNA, 22 nt, Human
guacacaagcuugauccacgca

SEQ ID NO: 419242 - RNA, 25 nt, Human
uagaauguggacaagaauauuuaca

SEQ ID NO: 419243 - RNA, 26 nt, Human
uagaauguggacaagaauauuuacaa

SEQ ID NO: 419244 - RNA, 24 nt, Human
uagcacuugaaaaaaaauguacag

SEQ ID NO: 419245 - RNA, 19 nt, Human
uccaaagcugaaguagaau

SEQ ID NO: 419246 - RNA, 21 nt, Human
ugaaguagaauguggacaaga

SEQ ID NO: 419247 - RNA, 22 nt, Human
ugcaaaccuccauugaggucaa

SEQ ID NO: 419248 - RNA, 21 nt, Human
uggccagagguggcaauacug

SEQ ID NO: 419249 - RNA, 22 nt, Human
uguucucugggauauuuacaga

SEQ ID NO: 419250 - RNA, 22 nt, Human
uuaagaauagugauuguucucu

SEQ ID NO: 419251 - RNA, 24 nt, Human
uuguccuauugccauugucccaac

SEQ ID NO: 419252 - RNA, 21 nt, Human
aaacugacuccaccuuucuua

SEQ ID NO: 419253 - RNA, 22 nt, Human
auuaaucauccaguacaauuca

SEQ ID NO: 419254 - RNA, 19 nt, Human
auuacuuucauuaaacaau

SEQ ID NO: 419255 - RNA, 19 nt, Human
cacacacccucgcucugcc

SEQ ID NO: 419256 - RNA, 19 nt, Human
cauuaaacaauguuagcca

SEQ ID NO: 419257 - RNA, 22 nt, Human
ccggcgguccccgccggcccuc

SEQ ID NO: 419258 - RNA, 22 nt, Human
cugauacaaacugacuccaccu

SEQ ID NO: 419259 - RNA, 21 nt, Human
gaauaugaacauccuauuaac

SEQ ID NO: 419260 - RNA, 19 nt, Human
gccggcccuccacacaccc

SEQ ID NO: 419261 - RNA, 18 nt, Human
gcugauacaaauaugaaa

SEQ ID NO: 419262 - RNA, 22 nt, Human
uaaaaaaacaacuaauauccuu

SEQ ID NO: 419263 - RNA, 24 nt, Human
uaaaaaaacaacuaauauccuugg

SEQ ID NO: 419264 - RNA, 24 nt, Human
uacaaacugacuccaccuuucuua

SEQ ID NO: 419265 - RNA, 23 nt, Human
uagcacaaaagcugauacaaaua

SEQ ID NO: 419266 - RNA, 18 nt, Human
ucaggucacauacaauca

SEQ ID NO: 419267 - RNA, 27 nt, Human
uccacacacccucgcucugccucugac

SEQ ID NO: 419268 - RNA, 18 nt, Human
uccaccuuucuuauagca

SEQ ID NO: 419269 - RNA, 20 nt, Human
uccaccuuucuuauagcagu

SEQ ID NO: 419270 - RNA, 21 nt, Human
ugacucccguccguacuccuu

SEQ ID NO: 419271 - RNA, 20 nt, Human
aaaggcauuaaaggcugaag

SEQ ID NO: 419272 - RNA, 22 nt, Human
acuaagguguggcugucuugga

SEQ ID NO: 419273 - RNA, 20 nt, Human
aggcagugggcugcagcagg

SEQ ID NO: 419274 - RNA, 24 nt, Human
aggcauuaaaggcugaaguagucu

SEQ ID NO: 419275 - RNA, 18 nt, Human
aggugggguuccaggugg

SEQ ID NO: 419276 - RNA, 19 nt, Human
ccacagaaggucuggcgac

SEQ ID NO: 419277 - RNA, 21 nt, Human
gggcaguauacuaaggugugg

SEQ ID NO: 419278 - RNA, 20 nt, Human
gggucaggugggguuccagg

SEQ ID NO: 419279 - RNA, 21 nt, Human
gucaggugggguuccaggugg

SEQ ID NO: 419280 - RNA, 19 nt, Human
ugggguuccaggugggucc

SEQ ID NO: 419281 - RNA, 19 nt, Human
aaaagugguaacaagagca

SEQ ID NO: 419282 - RNA, 24 nt, Human
aaacaauagaaauuuauuucucau

SEQ ID NO: 419283 - RNA, 19 nt, Human
aaacaucugccacaaaaau

SEQ ID NO: 419284 - RNA, 18 nt, Human
aagccuuuuguugaagcu

SEQ ID NO: 419285 - RNA, 24 nt, Human
acccugucuccaaauacagucaca

SEQ ID NO: 419286 - RNA, 18 nt, Human
acguccaagaaagaccaa

SEQ ID NO: 419287 - RNA, 21 nt, Human
acuaaaagagcaaacaaacaa

SEQ ID NO: 419288 - RNA, 20 nt, Human
aggaacaggaaugggucuuu

SEQ ID NO: 419289 - RNA, 19 nt, Human
aguaccauggacuggguga

SEQ ID NO: 419290 - RNA, 19 nt, Human
agugguggggagaggaaca

SEQ ID NO: 419291 - RNA, 21 nt, Human
aucugguguguguguguuugu

SEQ ID NO: 419292 - RNA, 21 nt, Human
auucugcuguuacuaaaauag

SEQ ID NO: 419293 - RNA, 22 nt, Human
caaaugucaguuaaugucaccc

SEQ ID NO: 419294 - RNA, 21 nt, Human
caagaaagaccaauguucaaa

SEQ ID NO: 419295 - RNA, 18 nt, Human
caagguguuggcaggguu

SEQ ID NO: 419296 - RNA, 20 nt, Human
caagguguuggcaggguugg

SEQ ID NO: 419297 - RNA, 26 nt, Human
cacacaaugcuauauuaaauaucuaa

SEQ ID NO: 419298 - RNA, 23 nt, Human
cagcagagcugaauaagugauac

SEQ ID NO: 419299 - RNA, 21 nt, Human
cccagaccagcugaauauucu

SEQ ID NO: 419300 - RNA, 22 nt, Human
ccuucuuuaagagugucuauug

SEQ ID NO: 419301 - RNA, 24 nt, Human
cuggaaguccaagaucaagguguu

SEQ ID NO: 419302 - RNA, 21 nt, Human
gaaauuuucagcagagcugaa

SEQ ID NO: 419303 - RNA, 24 nt, Human
gccuguugugcccuacucgccucu

SEQ ID NO: 419304 - RNA, 23 nt, Human
ggguugguuucuucugaggcccu

SEQ ID NO: 419305 - RNA, 19 nt, Human
gguuucuucugaggcccuc

SEQ ID NO: 419306 - RNA, 24 nt, Human
uaaaaaacuaaaagagcaaacaaa

SEQ ID NO: 419307 - RNA, 18 nt, Human
uaaaagagcaaacaaaca

SEQ ID NO: 419308 - RNA, 24 nt, Human
uaaaagagcaaacaaacaaaguca

SEQ ID NO: 419309 - RNA, 23 nt, Human
uaagagugucuauuggagucuug

SEQ ID NO: 419310 - RNA, 21 nt, Human
uacagagaauugcucugagga

SEQ ID NO: 419311 - RNA, 20 nt, Human
uacuagaggauaauauuaac

SEQ ID NO: 419312 - RNA, 22 nt, Human
uagaaaacaguaguggugggga

SEQ ID NO: 419313 - RNA, 22 nt, Human
uaggaaaaacaucugccacaaa

SEQ ID NO: 419314 - RNA, 23 nt, Human
uauaauaaaagugguaacaagaa

SEQ ID NO: 419315 - RNA, 21 nt, Human
uauauuaucuggugugugugu

SEQ ID NO: 419316 - RNA, 22 nt, Human
uauuuuaccucuuuaaagaccc

SEQ ID NO: 419317 - RNA, 18 nt, Human
ucagcagagcugaauaag

SEQ ID NO: 419318 - RNA, 26 nt, Human
ucauccaucauuuuuuaaauuauccc

SEQ ID NO: 419319 - RNA, 20 nt, Human
uccucugugucuccuuaugg

SEQ ID NO: 419320 - RNA, 20 nt, Human
ucucugguuuucuaauucca

SEQ ID NO: 419321 - RNA, 23 nt, Human
ucucugguuuucuaauuccagag

SEQ ID NO: 419322 - RNA, 22 nt, Human
ucugguuuucuaauuccagagg

SEQ ID NO: 419323 - RNA, 20 nt, Human
ucuuucuuuucucauccauc

SEQ ID NO: 419324 - RNA, 18 nt, Human
ugcacagugcauggcugu

SEQ ID NO: 419325 - RNA, 19 nt, Human
ugcagaagggcaugcuuug

SEQ ID NO: 419326 - RNA, 19 nt, Human
ugccuaacaaaguaccaug

SEQ ID NO: 419327 - RNA, 27 nt, Human
ugccuugcucuccugugcagaagggca

SEQ ID NO: 419328 - RNA, 21 nt, Human
ugcucugaggauuccuguuuc

SEQ ID NO: 419329 - RNA, 21 nt, Human
uggaaauuuucagcagagcug

SEQ ID NO: 419330 - RNA, 21 nt, Human
uguguaaugucaagagauucu

SEQ ID NO: 419331 - RNA, 21 nt, Human
uguguguguguuugucuaaau

SEQ ID NO: 419332 - RNA, 24 nt, Human
uguuugucuaaauaaagagaaacu

SEQ ID NO: 419333 - RNA, 25 nt, Human
uuacauugaaauuauaugagaauac

SEQ ID NO: 419334 - RNA, 21 nt, Human
uugaaauuauaugagaauaca

SEQ ID NO: 419335 - RNA, 23 nt, Human
uuggaaauuuucagcagagcuga

SEQ ID NO: 419336 - RNA, 18 nt, Human
aaacuugggaagccgaua

SEQ ID NO: 419337 - RNA, 22 nt, Human
aagcaaaugaggcuggagcugg

SEQ ID NO: 419338 - RNA, 24 nt, Human
acuggucuauacuacugaaauagc

SEQ ID NO: 419339 - RNA, 23 nt, Human
auagucuuuaaugucaaagggaa

SEQ ID NO: 419340 - RNA, 23 nt, Human
caagcauaugaugcagaagcuga

SEQ ID NO: 419341 - RNA, 23 nt, Human
cacaaagucucaagcaaaugagg

SEQ ID NO: 419342 - RNA, 19 nt, Human
cacccaggcucuuuccauu

SEQ ID NO: 419343 - RNA, 24 nt, Human
cagcugcuuuccuuuccaaggccu

SEQ ID NO: 419344 - RNA, 23 nt, Human
cauuacuauucucuucaagggcc

SEQ ID NO: 419345 - RNA, 23 nt, Human
ccacacugcaacauuucagagua

SEQ ID NO: 419346 - RNA, 18 nt, Human
ccauacauacaagucccc

SEQ ID NO: 419347 - RNA, 18 nt, Human
cccaaacacccaggcucu

SEQ ID NO: 419348 - RNA, 24 nt, Human
cccauacacacaaagucucaagca

SEQ ID NO: 419349 - RNA, 25 nt, Human
ccccauacacacaaagucucaagca

SEQ ID NO: 419350 - RNA, 19 nt, Human
ccgauaaacacauucagcc

SEQ ID NO: 419351 - RNA, 27 nt, Human
ccucuggaucucagcugcuuuccuuuc

SEQ ID NO: 419352 - RNA, 18 nt, Human
cgauaaacacauucagcc

SEQ ID NO: 419353 - RNA, 27 nt, Human
cucacucccauacauacaaguccccca

SEQ ID NO: 419354 - RNA, 22 nt, Human
cucccauacauacaaguccccc

SEQ ID NO: 419355 - RNA, 20 nt, Human
gcccugaaacuccucacucc

SEQ ID NO: 419356 - RNA, 22 nt, Human
gcccugaaacuccucacucccu

SEQ ID NO: 419357 - RNA, 22 nt, Human
ggcacagcuauguuugcaaugg

SEQ ID NO: 419358 - RNA, 23 nt, Human
guagccaaaaaaauggacaacau

SEQ ID NO: 419359 - RNA, 22 nt, Human
uagccaaaaaaauggacaacau

SEQ ID NO: 419360 - RNA, 21 nt, Human
uauguuugcaauggcccugaa

SEQ ID NO: 419361 - RNA, 22 nt, Human
uccacacugcaacauuucagag

SEQ ID NO: 419362 - RNA, 21 nt, Human
ucccauacauacaaguccccc

SEQ ID NO: 419363 - RNA, 23 nt, Human
ucccaucauuacuauucucuuca

SEQ ID NO: 419364 - RNA, 19 nt, Human
ucccccauacacacaaagu

SEQ ID NO: 419365 - RNA, 24 nt, Human
ucccccauacacacaaagucucaa

SEQ ID NO: 419366 - RNA, 18 nt, Human
uccucuggaucucagcug

SEQ ID NO: 419367 - RNA, 22 nt, Human
uuaggacucacuggucuauacu

SEQ ID NO: 419368 - RNA, 19 nt, Human
uucagaguagccaaaaaaa

SEQ ID NO: 419369 - RNA, 18 nt, Human
uuccaaggccugugcucc

SEQ ID NO: 419370 - RNA, 24 nt, Human
uugaugagaaaaaauauuuaggac

SEQ ID NO: 419371 - RNA, 18 nt, Human
uuuuuuuuuuuuuuuuug

SEQ ID NO: 419372 - RNA, 27 nt, Human
uuuuuuuuuuuuuuuuuuuuuuugggg

SEQ ID NO: 419373 - RNA, 19 nt, Human
aaucaaacaccacaucagu

SEQ ID NO: 419374 - RNA, 20 nt, Human
cacuggcauugcauggcuuc

SEQ ID NO: 419375 - RNA, 18 nt, Human
ccaucagggggacacuga

SEQ ID NO: 419376 - RNA, 30 nt, Human
cuuaugguagcgugccaacaguuuucccuu

SEQ ID NO: 419377 - RNA, 19 nt, Human
cuuguccccaauauuagcc

SEQ ID NO: 419378 - RNA, 24 nt, Human
uagcgugccaacaguuuucccuga

SEQ ID NO: 419379 - RNA, 20 nt, Human
uauugguaacggccaucagg

SEQ ID NO: 419380 - RNA, 27 nt, Human
uauuuuagugauuuaucacucagcuag

SEQ ID NO: 419381 - RNA, 21 nt, Human
ucaaacaccacaucaguguug

SEQ ID NO: 419382 - RNA, 22 nt, Human
ucacuggcauugcauggcuucc

SEQ ID NO: 419383 - RNA, 22 nt, Human
ucagauucuuacguuuuguuuc

SEQ ID NO: 419384 - RNA, 21 nt, Human
ucccagaaguagggcuuccuu

SEQ ID NO: 419385 - RNA, 19 nt, Human
ucucuuuuuuuucuuccuu

SEQ ID NO: 419386 - RNA, 20 nt, Human
ugaaaaacaaacucagauuc

SEQ ID NO: 419387 - RNA, 23 nt, Human
ugaaaaacaaacucagauucuua

SEQ ID NO: 419388 - RNA, 20 nt, Human
uuagccaggcuaauccuaaa

SEQ ID NO: 419389 - RNA, 25 nt, Human
uugccgaaucuaauucaauagacau

SEQ ID NO: 419390 - RNA, 23 nt, Human
uuucuuagccaggcuaauccuaa

SEQ ID NO: 419391 - RNA, 20 nt, Human
uuuuuuuuuuuuuugcuuuu

SEQ ID NO: 419392 - RNA, 24 nt, Human
uuuuuuuuuuuuuuuuuugcuuuu

SEQ ID NO: 419393 - RNA, 21 nt, Human
uuuuuuuuuuuuuuuuuuugg

SEQ ID NO: 419394 - RNA, 21 nt, Human
acagcaacacugcaggaccag

SEQ ID NO: 419395 - RNA, 20 nt, Human
cagacaugcagagcucugac

SEQ ID NO: 419396 - RNA, 23 nt, Human
cucuuccaugacagucucuccaa

SEQ ID NO: 419397 - RNA, 25 nt, Human
ggagaugcugaguggcucagccucc

SEQ ID NO: 419398 - RNA, 20 nt, Human
ggugcagacaugcagagcuc

SEQ ID NO: 419399 - RNA, 24 nt, Human
ucgggcggcggcuccacccucuuc

SEQ ID NO: 419400 - RNA, 19 nt, Human
ugccucugcugucuucagu

SEQ ID NO: 419401 - RNA, 20 nt, Human
acccaucucacaccccaccc

SEQ ID NO: 419402 - RNA, 22 nt, Human
aggcacccaucucacaccccac

SEQ ID NO: 419403 - RNA, 27 nt, Human
aggcaggcaaguagaaguucugcaagg

SEQ ID NO: 419404 - RNA, 20 nt, Human
aggcagggaggcaggcaagu

SEQ ID NO: 419405 - RNA, 18 nt, Human
agggaggcaggcaaguag

SEQ ID NO: 419406 - RNA, 22 nt, Human
caggggcagaaaugggaggcag

SEQ ID NO: 419407 - RNA, 27 nt, Human
caggggcagaaaugggaggcagagggg

SEQ ID NO: 419408 - RNA, 20 nt, Human
ggacccaaggucaggggcag

SEQ ID NO: 419409 - RNA, 24 nt, Human
gggaggcacccaucucacacccca

SEQ ID NO: 419410 - RNA, 20 nt, Human
ugggaggcagaggggaggca

SEQ ID NO: 419411 - RNA, 21 nt, Human
aaaaaaaggcagcuuaacaaa

SEQ ID NO: 419412 - RNA, 18 nt, Human
aaaaggcagcuuaacaaa

SEQ ID NO: 419413 - RNA, 19 nt, Human
aaaauuacaaauaccagcc

SEQ ID NO: 419414 - RNA, 23 nt, Human
aaacaaauguaguucucaaaaau

SEQ ID NO: 419415 - RNA, 23 nt, Human
aaacaugaaauuacccagaucua

SEQ ID NO: 419416 - RNA, 21 nt, Human
aaaucucugcaggacacaaga

SEQ ID NO: 419417 - RNA, 23 nt, Human
aaaugaccaugaaaauauuuggc

SEQ ID NO: 419418 - RNA, 20 nt, Human
aagucaacuccacauugcag

SEQ ID NO: 419419 - RNA, 18 nt, Human
aaucuucuuuuuuagaga

SEQ ID NO: 419420 - RNA, 19 nt, Human
acuacaugcaaaugaccau

SEQ ID NO: 419421 - RNA, 19 nt, Human
acucccagccccggcuccc

SEQ ID NO: 419422 - RNA, 24 nt, Human
agaaagaaagcaaaauuacaaaua

SEQ ID NO: 419423 - RNA, 21 nt, Human
aggcacuuacaugaaggaaaa

SEQ ID NO: 419424 - RNA, 18 nt, Human
aguuuccauacagcaggu

SEQ ID NO: 419425 - RNA, 24 nt, Human
auaauauuugcauacacauggcaa

SEQ ID NO: 419426 - RNA, 19 nt, Human
aucaugguugcacaauuug

SEQ ID NO: 419427 - RNA, 23 nt, Human
auucauagcacagaagaccucaa

SEQ ID NO: 419428 - RNA, 23 nt, Human
caaaaaaaagaaggccauaauga

SEQ ID NO: 419429 - RNA, 25 nt, Human
caaaaaaaagaaggccauaaugacc

SEQ ID NO: 419430 - RNA, 22 nt, Human
caaaaagauuccuuaaauugaa

SEQ ID NO: 419431 - RNA, 19 nt, Human
caaaaauauugagaugcca

SEQ ID NO: 419432 - RNA, 23 nt, Human
caagcuaagucaacuccacauug

SEQ ID NO: 419433 - RNA, 18 nt, Human
cacaacgguacuacugga

SEQ ID NO: 419434 - RNA, 21 nt, Human
cacauugcagaaaacacacaa

SEQ ID NO: 419435 - RNA, 21 nt, Human
cacuccucuucccucaggaga

SEQ ID NO: 419436 - RNA, 22 nt, Human
cagcugcaaccaucuuuaaccu

SEQ ID NO: 419437 - RNA, 26 nt, Human
cagcuuaacaaaguuccaguguuuca

SEQ ID NO: 419438 - RNA, 23 nt, Human
ccaucccaaaauuuuccccugaa

SEQ ID NO: 419439 - RNA, 18 nt, Human
cccagccccggcucccuc

SEQ ID NO: 419440 - RNA, 19 nt, Human
ccccccuacuccacuccuc

SEQ ID NO: 419441 - RNA, 20 nt, Human
cccuacuccacuccucuucc

SEQ ID NO: 419442 - RNA, 21 nt, Human
ccgcccccuccagcugcaacc

SEQ ID NO: 419443 - RNA, 21 nt, Human
cguccccccuacuccacuccu

SEQ ID NO: 419444 - RNA, 22 nt, Human
cuacuccacuccucuucccuca

SEQ ID NO: 419445 - RNA, 25 nt, Human
cucaaacacauauguuaaaaacaaa

SEQ ID NO: 419446 - RNA, 21 nt, Human
cuccacauugcagaaaacaca

SEQ ID NO: 419447 - RNA, 27 nt, Human
gaaaagaaaaugaauguaugaagaaaa

SEQ ID NO: 419448 - RNA, 22 nt, Human
gaaauuacccagaucuagauaa

SEQ ID NO: 419449 - RNA, 21 nt, Human
gaacagaugcuccagcacaug

SEQ ID NO: 419450 - RNA, 21 nt, Human
gacuuaaaacaaaugacuuga

SEQ ID NO: 419451 - RNA, 21 nt, Human
gagguaaucauuagccugaaa

SEQ ID NO: 419452 - RNA, 18 nt, Human
gcaaaugaccaugaaaau

SEQ ID NO: 419453 - RNA, 23 nt, Human
gcuccagcacauggugguacaug

SEQ ID NO: 419454 - RNA, 21 nt, Human
gcugcaaccaucuuuaaccug

SEQ ID NO: 419455 - RNA, 24 nt, Human
ggauaaaauucuggaagccaugga

SEQ ID NO: 419456 - RNA, 20 nt, Human
uaaaauucuggaagccaugg

SEQ ID NO: 419457 - RNA, 19 nt, Human
uaacuagccaaaguucgag

SEQ ID NO: 419458 - RNA, 21 nt, Human
uaauaaacaugaaauuaccca

SEQ ID NO: 419459 - RNA, 18 nt, Human
uacauggacccuuuugcc

SEQ ID NO: 419460 - RNA, 24 nt, Human
uaugcuuuucucaaacacauaugu

SEQ ID NO: 419461 - RNA, 24 nt, Human
ucaaaaucucuuugaauauuuucu

SEQ ID NO: 419462 - RNA, 26 nt, Human
ucaacgccgccgccgcguccccccua

SEQ ID NO: 419463 - RNA, 20 nt, Human
uccacauguagaacagaugc

SEQ ID NO: 419464 - RNA, 19 nt, Human
uccagcugcaaccaucuuu

SEQ ID NO: 419465 - RNA, 20 nt, Human
ucccaaaauuuuccccugaa

SEQ ID NO: 419466 - RNA, 22 nt, Human
ucccagccccggcucccuccgc

SEQ ID NO: 419467 - RNA, 18 nt, Human
ucccucaggagaacuccc

SEQ ID NO: 419468 - RNA, 24 nt, Human
ucccucaggagaacucccagcccc

SEQ ID NO: 419469 - RNA, 19 nt, Human
ucccuuggggaaagaaauc

SEQ ID NO: 419470 - RNA, 22 nt, Human
uccugagucccccaucccaaaa

SEQ ID NO: 419471 - RNA, 19 nt, Human
ugaauaggcacuuacauga

SEQ ID NO: 419472 - RNA, 19 nt, Human
ugacaagacuugcacugaa

SEQ ID NO: 419473 - RNA, 22 nt, Human
ugacaagacuugcacugaagug

SEQ ID NO: 419474 - RNA, 20 nt, Human
ugaccugccacauaaucccu

SEQ ID NO: 419475 - RNA, 19 nt, Human
ugagaugccauguuuuaaa

SEQ ID NO: 419476 - RNA, 23 nt, Human
ugagucccccaucccaaaauuuu

SEQ ID NO: 419477 - RNA, 19 nt, Human
ugcaggacacaagaggcca

SEQ ID NO: 419478 - RNA, 21 nt, Human
ugcauacacauggcaaaaaga

SEQ ID NO: 419479 - RNA, 22 nt, Human
uggccaaaaaaaagaaggccau

SEQ ID NO: 419480 - RNA, 21 nt, Human
uggccaaaaaaaagaaggccc

SEQ ID NO: 419481 - RNA, 23 nt, Human
uuaaaaauguauauacaugaacg

SEQ ID NO: 419482 - RNA, 20 nt, Human
uuaaagaaauguaauuuggg

SEQ ID NO: 419483 - RNA, 24 nt, Human
uuaauaaacaugaaauuacccaga

SEQ ID NO: 419484 - RNA, 24 nt, Human
uucauguuuacgcugauauauauc

SEQ ID NO: 419485 - RNA, 20 nt, Human
uuccaguguuucaaagaaaa

SEQ ID NO: 419486 - RNA, 23 nt, Human
uuggccuuuuuccgcccccucca

SEQ ID NO: 419487 - RNA, 20 nt, Human
uuucauguuuacgcugauau

SEQ ID NO: 419488 - RNA, 18 nt, Human
aaaaaagccaaacccaga

SEQ ID NO: 419489 - RNA, 24 nt, Human
aaaaaagccaaacccagaaugcaa

SEQ ID NO: 419490 - RNA, 25 nt, Human
aaaaaagccaaacccagaaugcaag

SEQ ID NO: 419491 - RNA, 21 nt, Human
aaaacuagcaguguagcagaa

SEQ ID NO: 419492 - RNA, 25 nt, Human
aaaagaaaaaacaauuggguaagaa

SEQ ID NO: 419493 - RNA, 21 nt, Human
aaaauauucacuauggacccc

SEQ ID NO: 419494 - RNA, 21 nt, Human
aaacaaauaaauaacaaaaua

SEQ ID NO: 419495 - RNA, 22 nt, Human
aaagaaugagccaaacaaauaa

SEQ ID NO: 419496 - RNA, 24 nt, Human
aaagcccugggauuacgggcguga

SEQ ID NO: 419497 - RNA, 22 nt, Human
aaagccuuucauacuucagcuu

SEQ ID NO: 419498 - RNA, 20 nt, Human
aacaugugauuaguaaacau

SEQ ID NO: 419499 - RNA, 18 nt, Human
aaccauaguugaugacac

SEQ ID NO: 419500 - RNA, 28 nt, Human
aagaaaaaacaauuggguaagaacaaaa

SEQ ID NO: 419501 - RNA, 23 nt, Human
aagcaaaaugacuucacugaaau

SEQ ID NO: 419502 - RNA, 23 nt, Human
aagccaaacccagaaugcaagaa

SEQ ID NO: 419503 - RNA, 21 nt, Human
aagcgcucagacucgaaggug

SEQ ID NO: 419504 - RNA, 18 nt, Human
aaguauuugugacuaaca

SEQ ID NO: 419505 - RNA, 18 nt, Human
aaguugcagguagcagcu

SEQ ID NO: 419506 - RNA, 23 nt, Human
aauauucacuauggaccccaaaa

SEQ ID NO: 419507 - RNA, 21 nt, Human
aaugagugacaauuuguacaa

SEQ ID NO: 419508 - RNA, 21 nt, Human
aaugccuauuuagaggauaac

SEQ ID NO: 419509 - RNA, 21 nt, Human
acacagaaaaaagccaaaccc

SEQ ID NO: 419510 - RNA, 20 nt, Human
acagaaaaaagccaaaccca

SEQ ID NO: 419511 - RNA, 21 nt, Human
acagaaaaaagccaaacccag

SEQ ID NO: 419512 - RNA, 22 nt, Human
acagaaaaaagccaaacccaga

SEQ ID NO: 419513 - RNA, 18 nt, Human
acaggaauagaugaagaa

SEQ ID NO: 419514 - RNA, 20 nt, Human
accucugugaccucaacaac

SEQ ID NO: 419515 - RNA, 18 nt, Human
acuagcacccuguccuuu

SEQ ID NO: 419516 - RNA, 26 nt, Human
acugaaucuguaaauugguaauguug

SEQ ID NO: 419517 - RNA, 24 nt, Human
agaaaaaagccaaacccagaaugc

SEQ ID NO: 419518 - RNA, 22 nt, Human
agaaaagacauucuaaggaacg

SEQ ID NO: 419519 - RNA, 20 nt, Human
agaaucguagccagcagagc

SEQ ID NO: 419520 - RNA, 19 nt, Human
aggaacgaaagcuaguguu

SEQ ID NO: 419521 - RNA, 22 nt, Human
aggcaagaggaaacaucauuag

SEQ ID NO: 419522 - RNA, 23 nt, Human
aggugucaucaaaugagugacaa

SEQ ID NO: 419523 - RNA, 22 nt, Human
aguagagaugggguuucuccau

SEQ ID NO: 419524 - RNA, 23 nt, Human
aguagcugggauuacaggcaugu

SEQ ID NO: 419525 - RNA, 28 nt, Human
aguauaauauaaacauaaacaaaucucc

SEQ ID NO: 419526 - RNA, 21 nt, Human
agugcaauggcgcgaucucag

SEQ ID NO: 419527 - RNA, 22 nt, Human
aguguccgccauggccagauac

SEQ ID NO: 419528 - RNA, 22 nt, Human
auauucacuauggaccccaaaa

SEQ ID NO: 419529 - RNA, 20 nt, Human
augggguuucuccauguugg

SEQ ID NO: 419530 - RNA, 24 nt, Human
augggguuucuccauguuggucag

SEQ ID NO: 419531 - RNA, 22 nt, Human
auggugcaggacaucagccugc

SEQ ID NO: 419532 - RNA, 25 nt, Human
caaaaacagucucaaaaagaguggu

SEQ ID NO: 419533 - RNA, 26 nt, Human
caaaaacagucucaaaaagaguggug

SEQ ID NO: 419534 - RNA, 24 nt, Human
caaagcccugggauuacgggcgug

SEQ ID NO: 419535 - RNA, 21 nt, Human
caacaucucuacauuuugcuu

SEQ ID NO: 419536 - RNA, 22 nt, Human
caagugauucuccugccucagc

SEQ ID NO: 419537 - RNA, 20 nt, Human
cacacagaacaugugauuag

SEQ ID NO: 419538 - RNA, 19 nt, Human
cacagaaaaaagccaaacc

SEQ ID NO: 419539 - RNA, 20 nt, Human
cacagaaaaaagccaaaccc

SEQ ID NO: 419540 - RNA, 23 nt, Human
cacagaaaaaagccaaacccaga

SEQ ID NO: 419541 - RNA, 21 nt, Human
caccacaaccuacgucuccug

SEQ ID NO: 419542 - RNA, 20 nt, Human
cacccuguccuuuccccaaa

SEQ ID NO: 419543 - RNA, 24 nt, Human
cacccuguccuuuccccaaaaaga

SEQ ID NO: 419544 - RNA, 20 nt, Human
cagccuccugaguagcuggg

SEQ ID NO: 419545 - RNA, 18 nt, Human
caggugauccaccugcca

SEQ ID NO: 419546 - RNA, 22 nt, Human
cagucaccucugugaccucaac

SEQ ID NO: 419547 - RNA, 19 nt, Human
caguuuucagggucacugg

SEQ ID NO: 419548 - RNA, 23 nt, Human
ccaaacaaauaaauaacaaaaua

SEQ ID NO: 419549 - RNA, 22 nt, Human
ccaaagcccugggauuacgggc

SEQ ID NO: 419550 - RNA, 24 nt, Human
ccaaagcccugggauuacgggcgu

SEQ ID NO: 419551 - RNA, 19 nt, Human
ccauguuggucaggcuggu

SEQ ID NO: 419552 - RNA, 22 nt, Human
ccauguuggucaggcuggucuc

SEQ ID NO: 419553 - RNA, 23 nt, Human
ccauguuggucaggcuggucucg

SEQ ID NO: 419554 - RNA, 23 nt, Human
ccugaguagcugggauuacaggc

SEQ ID NO: 419555 - RNA, 24 nt, Human
ccugaguagcugggauuacaggca

SEQ ID NO: 419556 - RNA, 23 nt, Human
ccugccucagccuccugaguagc

SEQ ID NO: 419557 - RNA, 24 nt, Human
ccugccucagccuccugaguagcu

SEQ ID NO: 419558 - RNA, 18 nt, Human
ccuguccuuuccccaaaa

SEQ ID NO: 419559 - RNA, 21 nt, Human
ccuucugaaguauuucaguua

SEQ ID NO: 419560 - RNA, 20 nt, Human
cgaucucaggugauccaccu

SEQ ID NO: 419561 - RNA, 25 nt, Human
cuagguuuaucagaucuucuuccug

SEQ ID NO: 419562 - RNA, 27 nt, Human
cucacuagcacccuguccuuuccccaa

SEQ ID NO: 419563 - RNA, 24 nt, Human
cucagccuccugaguagcugggau

SEQ ID NO: 419564 - RNA, 23 nt, Human
cuccuggggucaagugauucucc

SEQ ID NO: 419565 - RNA, 23 nt, Human
cucuuaacagcacgagugucaac

SEQ ID NO: 419566 - RNA, 23 nt, Human
cugaaaacuagcaguguagcaga

SEQ ID NO: 419567 - RNA, 26 nt, Human
cugaaauuagcaaauccuauugauga

SEQ ID NO: 419568 - RNA, 23 nt, Human
cugaguagcugggauuacaggca

SEQ ID NO: 419569 - RNA, 24 nt, Human
cugaguagcugggauuacaggcau

SEQ ID NO: 419570 - RNA, 18 nt, Human
cugcuccugaggcacccu

SEQ ID NO: 419571 - RNA, 25 nt, Human
cugcuccugaggcacccucaguuuu

SEQ ID NO: 419572 - RNA, 24 nt, Human
cuuguugcccaggcuggagugcaa

SEQ ID NO: 419573 - RNA, 23 nt, Human
gaaaaaacaauuggguaagaaca

SEQ ID NO: 419574 - RNA, 21 nt, Human
gaacaaaacugaaaacuagca

SEQ ID NO: 419575 - RNA, 23 nt, Human
gaagagagccccaaauucucugu

SEQ ID NO: 419576 - RNA, 21 nt, Human
gaauuuuccaguguguuacag

SEQ ID NO: 419577 - RNA, 22 nt, Human
gaccccaaaauuucaaggcaug

SEQ ID NO: 419578 - RNA, 24 nt, Human
gagaugggguuucuccauguuggu

SEQ ID NO: 419579 - RNA, 25 nt, Human
gaggauaaccauaguugaugacacc

SEQ ID NO: 419580 - RNA, 22 nt, Human
gaguagcugggauuacaggcau

SEQ ID NO: 419581 - RNA, 25 nt, Human
gaguagcugggauuacaggcaugua

SEQ ID NO: 419582 - RNA, 19 nt, Human
gaguguccgccauggccag

SEQ ID NO: 419583 - RNA, 18 nt, Human
gaucucaggugauccacc

SEQ ID NO: 419584 - RNA, 22 nt, Human
gaucucaggugauccaccugcc

SEQ ID NO: 419585 - RNA, 18 nt, Human
gauuacgggcgugagcca

SEQ ID NO: 419586 - RNA, 21 nt, Human
gauuacgggcgugagccacca

SEQ ID NO: 419587 - RNA, 22 nt, Human
gauuacgggcgugagccaccau

SEQ ID NO: 419588 - RNA, 21 nt, Human
gauucuccugccucagccucc

SEQ ID NO: 419589 - RNA, 19 nt, Human
gcaugaagagagccccaaa

SEQ ID NO: 419590 - RNA, 21 nt, Human
gccacgggagagucaccugac

SEQ ID NO: 419591 - RNA, 19 nt, Human
gcccaggcuggagugcaau

SEQ ID NO: 419592 - RNA, 20 nt, Human
gcgaucucaggugauccacc

SEQ ID NO: 419593 - RNA, 19 nt, Human
gcgugagccaccaugcccg

SEQ ID NO: 419594 - RNA, 24 nt, Human
gcuaauuuguguuuuuaguagaga

SEQ ID NO: 419595 - RNA, 20 nt, Human
gcucuuguugcccaggcugg

SEQ ID NO: 419596 - RNA, 21 nt, Human
gcucuuguugcccaggcugga

SEQ ID NO: 419597 - RNA, 24 nt, Human
gcucuuguugcccaggcuggagug

SEQ ID NO: 419598 - RNA, 19 nt, Human
gcuggagugcaauggcgcg

SEQ ID NO: 419599 - RNA, 24 nt, Human
ggauuacgggcgugagccaccaug

SEQ ID NO: 419600 - RNA, 18 nt, Human
ggcaauggaggcaccaga

SEQ ID NO: 419601 - RNA, 26 nt, Human
ggcaauggaggcaccagagaaggcaa

SEQ ID NO: 419602 - RNA, 23 nt, Human
ggcaccagagaaggcaagaggaa

SEQ ID NO: 419603 - RNA, 21 nt, Human
gggaauggcugggugacuucg

SEQ ID NO: 419604 - RNA, 18 nt, Human
gggcaauggaggcaccag

SEQ ID NO: 419605 - RNA, 22 nt, Human
gggguuucuccauguuggucag

SEQ ID NO: 419606 - RNA, 22 nt, Human
gggucaagugauucuccugccu

SEQ ID NO: 419607 - RNA, 27 nt, Human
ggugacaaggagacugacaaggagaaa

SEQ ID NO: 419608 - RNA, 20 nt, Human
ggugcaggacaucagccugc

SEQ ID NO: 419609 - RNA, 20 nt, Human
guagcugggauuacaggcau

SEQ ID NO: 419610 - RNA, 26 nt, Human
guauuugugacuaacaacaacaaaaa

SEQ ID NO: 419611 - RNA, 23 nt, Human
gucaagugauucuccugccucag

SEQ ID NO: 419612 - RNA, 24 nt, Human
gucccacugcuccugaggcacccu

SEQ ID NO: 419613 - RNA, 24 nt, Human
gugauccaccugccaaggccuccc

SEQ ID NO: 419614 - RNA, 23 nt, Human
gugauucuccugccucagccucc

SEQ ID NO: 419615 - RNA, 19 nt, Human
guggugacaaggagacuga

SEQ ID NO: 419616 - RNA, 21 nt, Human
guuugacuuuucucccucuau

SEQ ID NO: 419617 - RNA, 18 nt, Human
uaaaugccuauuuagagg

SEQ ID NO: 419618 - RNA, 19 nt, Human
uaacaaaauauucacuaug

SEQ ID NO: 419619 - RNA, 20 nt, Human
uaaggaaaugcugagaaggc

SEQ ID NO: 419620 - RNA, 22 nt, Human
uaaggaaaugcugagaaggcug

SEQ ID NO: 419621 - RNA, 24 nt, Human
uaauuuguguuuuuaguagagaug

SEQ ID NO: 419622 - RNA, 22 nt, Human
uacaggcauguaccaccacgcc

SEQ ID NO: 419623 - RNA, 22 nt, Human
uaccaccacgccuggcuaauuu

SEQ ID NO: 419624 - RNA, 24 nt, Human
uacgggcgugagccaccaugcccg

SEQ ID NO: 419625 - RNA, 23 nt, Human
uagcaguguagcagaaagcacac

SEQ ID NO: 419626 - RNA, 24 nt, Human
uagccagcagagcacguggaaaca

SEQ ID NO: 419627 - RNA, 24 nt, Human
uaguagagaugggguuucuccaug

SEQ ID NO: 419628 - RNA, 19 nt, Human
ucaagugauucuccugccu

SEQ ID NO: 419629 - RNA, 24 nt, Human
ucaccacaaccuacgucuccuggg

SEQ ID NO: 419630 - RNA, 21 nt, Human
ucacugguuuccucccuccug

SEQ ID NO: 419631 - RNA, 20 nt, Human
ucagccuccugaguagcugg

SEQ ID NO: 419632 - RNA, 19 nt, Human
uccaugagggcaauggagg

SEQ ID NO: 419633 - RNA, 24 nt, Human
ucccaaagcccugggauuacgggc

SEQ ID NO: 419634 - RNA, 23 nt, Human
uccccaaaaagaaagaagcagaa

SEQ ID NO: 419635 - RNA, 24 nt, Human
uccugaguagcugggauuacaggc

SEQ ID NO: 419636 - RNA, 24 nt, Human
uccuggggucaagugauucuccug

SEQ ID NO: 419637 - RNA, 18 nt, Human
ucguagccagcagagcac

SEQ ID NO: 419638 - RNA, 24 nt, Human
ucuaaugugaagauauguucugug

SEQ ID NO: 419639 - RNA, 24 nt, Human
ucuccugccucagccuccugagua

SEQ ID NO: 419640 - RNA, 21 nt, Human
ucuccuggggucaagugauuc

SEQ ID NO: 419641 - RNA, 21 nt, Human
ucucugugaacugcaaagaga

SEQ ID NO: 419642 - RNA, 22 nt, Human
ucuuguugcccaggcuggagug

SEQ ID NO: 419643 - RNA, 24 nt, Human
ugaagagagccccaaauucucugu

SEQ ID NO: 419644 - RNA, 21 nt, Human
ugacacagaaaaaagccaaac

SEQ ID NO: 419645 - RNA, 22 nt, Human
ugacacagaaaaaagccaaacc

SEQ ID NO: 419646 - RNA, 23 nt, Human
ugacacagaaaaaagccaaaccc

SEQ ID NO: 419647 - RNA, 23 nt, Human
ugaccucaacaacaucucuacau

SEQ ID NO: 419648 - RNA, 18 nt, Human
ugacuucgguagcuggca

SEQ ID NO: 419649 - RNA, 21 nt, Human
ugagaaggcugagggguacau

SEQ ID NO: 419650 - RNA, 24 nt, Human
ugaguauaauauaaacauaaacaa

SEQ ID NO: 419651 - RNA, 30 nt, Human
ugaguauaauauaaacauaaacaaaucucc

SEQ ID NO: 419652 - RNA, 22 nt, Human
ugaugacacagaaaaaagccaa

SEQ ID NO: 419653 - RNA, 20 nt, Human
ugauucuccugccucagccu

SEQ ID NO: 419654 - RNA, 19 nt, Human
ugcaaagagaaaccauuag

SEQ ID NO: 419655 - RNA, 18 nt, Human
ugcccaggcuggagugca

SEQ ID NO: 419656 - RNA, 21 nt, Human
ugcccaggcuggagugcaaug

SEQ ID NO: 419657 - RNA, 21 nt, Human
ugcccaggcuggagugcaaug

SEQ ID NO: 419658 - RNA, 24 nt, Human
ugcccaggcuggagugcaauggcg

SEQ ID NO: 419659 - RNA, 24 nt, Human
ugccucagccuccugaguagcugg

SEQ ID NO: 419660 - RNA, 24 nt, Human
ugcucuuguugcccaggcuggagu

SEQ ID NO: 419661 - RNA, 23 nt, Human
ugcugucaguacucacuagcacc

SEQ ID NO: 419662 - RNA, 24 nt, Human
uggaccccaaaauuucaaggcaug

SEQ ID NO: 419663 - RNA, 18 nt, Human
uggaggcaccagagaagg

SEQ ID NO: 419664 - RNA, 23 nt, Human
uggagugcaauggcgcgaucuca

SEQ ID NO: 419665 - RNA, 24 nt, Human
uggagugcaauggcgcgaucucag

SEQ ID NO: 419666 - RNA, 24 nt, Human
uggcgcgaucucagcucaccacaa

SEQ ID NO: 419667 - RNA, 21 nt, Human
ugggauuacaggcauguacca

SEQ ID NO: 419668 - RNA, 24 nt, Human
ugggauuacaggcauguaccacca

SEQ ID NO: 419669 - RNA, 18 nt, Human
ugggauuacgggcgugag

SEQ ID NO: 419670 - RNA, 22 nt, Human
ugggauuacgggcgugagccac

SEQ ID NO: 419671 - RNA, 23 nt, Human
ugggauuacgggcgugagccacc

SEQ ID NO: 419672 - RNA, 24 nt, Human
ugggauuacgggcgugagccacca

SEQ ID NO: 419673 - RNA, 25 nt, Human
ugggauuacgggcgugagccaccau

SEQ ID NO: 419674 - RNA, 23 nt, Human
uggggucaagugauucuccugcc

SEQ ID NO: 419675 - RNA, 24 nt, Human
ugggguuucuccauguuggucagg

SEQ ID NO: 419676 - RNA, 22 nt, Human
uggguaagaacaaaacugaaaa

SEQ ID NO: 419677 - RNA, 22 nt, Human
uggucaggcuggucucgaacgu

SEQ ID NO: 419678 - RNA, 20 nt, Human
uguugcccaggcuggagugc

SEQ ID NO: 419679 - RNA, 18 nt, Human
uuaguagagaugggguuu

SEQ ID NO: 419680 - RNA, 24 nt, Human
uuaguagagaugggguuucuccau

SEQ ID NO: 419681 - RNA, 21 nt, Human
uuccuggcgacgcugugacaa

SEQ ID NO: 419682 - RNA, 18 nt, Human
uugcccaggcuggagugc

SEQ ID NO: 419683 - RNA, 23 nt, Human
uugcucuuguugcccaggcugga

SEQ ID NO: 419684 - RNA, 24 nt, Human
uuuaucuguaaaccuagguuuauc

SEQ ID NO: 419685 - RNA, 21 nt, Human
uuucuccauguuggucaggcu

SEQ ID NO: 419686 - RNA, 19 nt, Human
uuucucccucuaugauaug

SEQ ID NO: 419687 - RNA, 24 nt, Human
uuugcucuuguugcccaggcugga

SEQ ID NO: 419688 - RNA, 18 nt, Human
uuuguguuuuuaguagag

SEQ ID NO: 419689 - RNA, 19 nt, Human
uuuguguuuuuaguagaga

SEQ ID NO: 419690 - RNA, 24 nt, Human
uuuguguuuuuaguagagaugggg

SEQ ID NO: 419691 - RNA, 23 nt, Human
uuuuaugguuaaaugguuuuacu

SEQ ID NO: 419692 - RNA, 21 nt, Human
uuuucucccucuaugauaugc

SEQ ID NO: 419693 - RNA, 23 nt, Human
uuuugcucuuguugcccaggcug

SEQ ID NO: 419694 - RNA, 24 nt, Human
uuuugcucuuguugcccaggcugg

SEQ ID NO: 419695 - RNA, 22 nt, Human
uuuuuaguagagaugggguuuc

SEQ ID NO: 419696 - RNA, 23 nt, Human
aaaaaagucaaaagaaaacaaag

SEQ ID NO: 419697 - RNA, 21 nt, Human
aaaagaaaacaaagaaaagga

SEQ ID NO: 419698 - RNA, 25 nt, Human
aacagaaaaggagaaaaaagucaaa

SEQ ID NO: 419699 - RNA, 21 nt, Human
aagaaaaggaaaucugguuca

SEQ ID NO: 419700 - RNA, 22 nt, Human
accuaagccgcagacccgucgc

SEQ ID NO: 419701 - RNA, 32 nt, Human
acucugagaaauguacaaugauuagaaaaggg

SEQ ID NO: 419702 - RNA, 24 nt, Human
aggaaaucugguucacagcaucug

SEQ ID NO: 419703 - RNA, 21 nt, Human
aggagaaaaaagucaaaagaa

SEQ ID NO: 419704 - RNA, 22 nt, Human
auaaaacaguucuaacagaaaa

SEQ ID NO: 419705 - RNA, 23 nt, Human
auaacuuaaggaguauaaccuga

SEQ ID NO: 419706 - RNA, 25 nt, Human
caaaacaucacaaacacacggcuuu

SEQ ID NO: 419707 - RNA, 22 nt, Human
caaaagaaaacaaagaaaagga

SEQ ID NO: 419708 - RNA, 22 nt, Human
cagaaaaggagaaaaaagucaa

SEQ ID NO: 419709 - RNA, 20 nt, Human
ccaaaacaucacaaacacac

SEQ ID NO: 419710 - RNA, 20 nt, Human
cucacaggaaaauaaaacag

SEQ ID NO: 419711 - RNA, 21 nt, Human
cucgcaagacucacaggaaaa

SEQ ID NO: 419712 - RNA, 26 nt, Human
cuucccgccgcuuucgccgacucgua

SEQ ID NO: 419713 - RNA, 21 nt, Human
gaacacaugaguauuuaauca

SEQ ID NO: 419714 - RNA, 18 nt, Human
guacuccaaaacaucaca

SEQ ID NO: 419715 - RNA, 22 nt, Human
uaaaacaguucuaacagaaaag

SEQ ID NO: 419716 - RNA, 18 nt, Human
uaacagaaaaggagaaaa

SEQ ID NO: 419717 - RNA, 20 nt, Human
uacaaugauuagaaaagugc

SEQ ID NO: 419718 - RNA, 23 nt, Human
uacuccaaaacaucacaaacaca

SEQ ID NO: 419719 - RNA, 22 nt, Human
ucacaaacacacggcuuuggga

SEQ ID NO: 419720 - RNA, 24 nt, Human
ugagaaauguacaaugauuagaaa

SEQ ID NO: 419721 - RNA, 19 nt, Human
accugccuaacuucucucc

SEQ ID NO: 419722 - RNA, 20 nt, Human
accugccuaacuucucucca

SEQ ID NO: 419723 - RNA, 22 nt, Human
accuuaaaaaugucuggaagga

SEQ ID NO: 419724 - RNA, 25 nt, Human
accuuaaaaaugucuggaaggaaac

SEQ ID NO: 419725 - RNA, 20 nt, Human
agcacucgagccugcccucc

SEQ ID NO: 419726 - RNA, 25 nt, Human
aggaaacacugaaauaagaauacaa

SEQ ID NO: 419727 - RNA, 19 nt, Human
aggcggagcccccgggccu

SEQ ID NO: 419728 - RNA, 22 nt, Human
cauuucggugaagagcuggaaa

SEQ ID NO: 419729 - RNA, 18 nt, Human
ccagcacucgagccugcc

SEQ ID NO: 419730 - RNA, 23 nt, Human
cccagcacucgagccugcccucc

SEQ ID NO: 419731 - RNA, 23 nt, Human
cccccgggccuacagucccgcgg

SEQ ID NO: 419732 - RNA, 23 nt, Human
ccuacagucccgcggggaggcgg

SEQ ID NO: 419733 - RNA, 24 nt, Human
ccugccuaacuucucuccagcugc

SEQ ID NO: 419734 - RNA, 18 nt, Human
cgagccugcccucccuag

SEQ ID NO: 419735 - RNA, 18 nt, Human
gaagagcuggaaacuuaa

SEQ ID NO: 419736 - RNA, 21 nt, Human
gagcccccgggccuacagucc

SEQ ID NO: 419737 - RNA, 22 nt, Human
gagcccccgggccuacaguccc

SEQ ID NO: 419738 - RNA, 20 nt, Human
ucccuaggaccugccuaacu

SEQ ID NO: 419739 - RNA, 21 nt, Human
ucccuaggaccugccuaacuu

SEQ ID NO: 419740 - RNA, 21 nt, Human
ucuccagcugcgucggccucg

SEQ ID NO: 419741 - RNA, 21 nt, Human
aaaaggcaugcaaauguagua

SEQ ID NO: 419742 - RNA, 21 nt, Human
aaaucccucuuggaucgcgcc

SEQ ID NO: 419743 - RNA, 24 nt, Human
agcaauauuugugugugugugugu

SEQ ID NO: 419744 - RNA, 24 nt, Human
agcacauuucugcccaggcuuuuu

SEQ ID NO: 419745 - RNA, 20 nt, Human
aggaggguagugacauagcu

SEQ ID NO: 419746 - RNA, 22 nt, Human
aggcuuuggaggaagagggauu

SEQ ID NO: 419747 - RNA, 19 nt, Human
aguguuucaaacacaagaa

SEQ ID NO: 419748 - RNA, 23 nt, Human
caaaacagcucuuuccagaucga

SEQ ID NO: 419749 - RNA, 22 nt, Human
caaacagaaaccaauacacuuc

SEQ ID NO: 419750 - RNA, 20 nt, Human
caaacccaaaaggcaugcaa

SEQ ID NO: 419751 - RNA, 21 nt, Human
caagcccagccgcugccgcaa

SEQ ID NO: 419752 - RNA, 21 nt, Human
cacauaucacauuguggcagg

SEQ ID NO: 419753 - RNA, 19 nt, Human
cagaaaccaauacacuucc

SEQ ID NO: 419754 - RNA, 23 nt, Human
cauuucugcccaggcuuuggagg

SEQ ID NO: 419755 - RNA, 20 nt, Human
gcucucuuuuucucuggagc

SEQ ID NO: 419756 - RNA, 20 nt, Human
gcuuuggaggaagagggauu

SEQ ID NO: 419757 - RNA, 19 nt, Human
ggcagguuguuuguuuugu

SEQ ID NO: 419758 - RNA, 19 nt, Human
guguggaccagacacagga

SEQ ID NO: 419759 - RNA, 21 nt, Human
gugugugugugugugugugug

SEQ ID NO: 419760 - RNA, 21 nt, Human
gugugugugugugugugugug

SEQ ID NO: 419761 - RNA, 21 nt, Human
gugugugugugugugugugug

SEQ ID NO: 419762 - RNA, 18 nt, Human
uaaaauaagaauuagggg

SEQ ID NO: 419763 - RNA, 18 nt, Human
uacaggaggguagugaca

SEQ ID NO: 419764 - RNA, 20 nt, Human
uagcaaaacaugaacaagaa

SEQ ID NO: 419765 - RNA, 22 nt, Human
uagcugcagacugaauggaaca

SEQ ID NO: 419766 - RNA, 22 nt, Human
uauauguauauauagauagaua

SEQ ID NO: 419767 - RNA, 19 nt, Human
uauuugugugugugugugu

SEQ ID NO: 419768 - RNA, 24 nt, Human
uauuugugugugugugugugugug

SEQ ID NO: 419769 - RNA, 28 nt, Human
ucaaacagaaaccaauacaacgucaccg

SEQ ID NO: 419770 - RNA, 22 nt, Human
ucacugauaauacaagcuucug

SEQ ID NO: 419771 - RNA, 19 nt, Human
ucggaaugaacaaaucugu

SEQ ID NO: 419772 - RNA, 24 nt, Human
ucugugguguguggaccagacaca

SEQ ID NO: 419773 - RNA, 19 nt, Human
ugaaaaguuggaaaguugc

SEQ ID NO: 419774 - RNA, 21 nt, Human
ugaauagcugcagacugaaug

SEQ ID NO: 419775 - RNA, 23 nt, Human
ugaauggaacauugagacuuuug

SEQ ID NO: 419776 - RNA, 24 nt, Human
ugagguaagaauuaaggcaaaccc

SEQ ID NO: 419777 - RNA, 20 nt, Human
ugugguguguggaccagaca

SEQ ID NO: 419778 - RNA, 18 nt, Human
uguguauauguauauaua

SEQ ID NO: 419779 - RNA, 18 nt, Human
uguguauauguauauaua

SEQ ID NO: 419780 - RNA, 24 nt, Human
uguguauauguauauauagauaga

SEQ ID NO: 419781 - RNA, 26 nt, Human
ugugugaauagcugcagacugaaugg

SEQ ID NO: 419782 - RNA, 18 nt, Human
ugugugugugugugugug

SEQ ID NO: 419783 - RNA, 18 nt, Human
ugugugugugugugugug

SEQ ID NO: 419784 - RNA, 18 nt, Human
ugugugugugugugugug

SEQ ID NO: 419785 - RNA, 18 nt, Human
ugugugugugugugugug

SEQ ID NO: 419786 - RNA, 18 nt, Human
ugugugugugugugugug

SEQ ID NO: 419787 - RNA, 18 nt, Human
ugugugugugugugugug

SEQ ID NO: 419788 - RNA, 18 nt, Human
ugugugugugugugugug

SEQ ID NO: 419789 - RNA, 18 nt, Human
ugugugugugugugugug

SEQ ID NO: 419790 - RNA, 18 nt, Human
ugugugugugugugugug

SEQ ID NO: 419791 - RNA, 18 nt, Human
ugugugugugugugugug

SEQ ID NO: 419792 - RNA, 18 nt, Human
ugugugugugugugugug

SEQ ID NO: 419793 - RNA, 18 nt, Human
ugugugugugugugugug

SEQ ID NO: 419794 - RNA, 18 nt, Human
ugugugugugugugugug

SEQ ID NO: 419795 - RNA, 18 nt, Human
ugugugugugugugugug

SEQ ID NO: 419796 - RNA, 18 nt, Human
ugugugugugugugugug

SEQ ID NO: 419797 - RNA, 18 nt, Human
ugugugugugugugugug

SEQ ID NO: 419798 - RNA, 20 nt, Human
ugugugugugugugugugug

SEQ ID NO: 419799 - RNA, 21 nt, Human
ugugugugugugugugugugu

SEQ ID NO: 419800 - RNA, 21 nt, Human
ugugugugugugugugugugu

SEQ ID NO: 419801 - RNA, 21 nt, Human
ugugugugugugugugugugu

SEQ ID NO: 419802 - RNA, 21 nt, Human
ugugugugugugugugugugu

SEQ ID NO: 419803 - RNA, 21 nt, Human
ugugugugugugugugugugu

SEQ ID NO: 419804 - RNA, 21 nt, Human
ugugugugugugugugugugu

SEQ ID NO: 419805 - RNA, 21 nt, Human
ugugugugugugugugugugu

SEQ ID NO: 419806 - RNA, 21 nt, Human
ugugugugugugugugugugu

SEQ ID NO: 419807 - RNA, 21 nt, Human
ugugugugugugugugugugu

SEQ ID NO: 419808 - RNA, 21 nt, Human
ugugugugugugugugugugu

SEQ ID NO: 419809 - RNA, 21 nt, Human
ugugugugugugugugugugu

SEQ ID NO: 419810 - RNA, 21 nt, Human
ugugugugugugugugugugu

SEQ ID NO: 419811 - RNA, 21 nt, Human
ugugugugugugugugugugu

SEQ ID NO: 419812 - RNA, 21 nt, Human
ugugugugugugugugugugu

SEQ ID NO: 419813 - RNA, 21 nt, Human
ugugugugugugugugugugu

SEQ ID NO: 419814 - RNA, 21 nt, Human
ugugugugugugugugugugu

SEQ ID NO: 419815 - RNA, 21 nt, Human
ugugugugugugugugugugu

SEQ ID NO: 419816 - RNA, 21 nt, Human
ugugugugugugugugugugu

SEQ ID NO: 419817 - RNA, 21 nt, Human
ugugugugugugugugugugu

SEQ ID NO: 419818 - RNA, 21 nt, Human
ugugugugugugugugugugu

SEQ ID NO: 419819 - RNA, 21 nt, Human
ugugugugugugugugugugu

SEQ ID NO: 419820 - RNA, 21 nt, Human
ugugugugugugugugugugu

SEQ ID NO: 419821 - RNA, 21 nt, Human
ugugugugugugugugugugu

SEQ ID NO: 419822 - RNA, 21 nt, Human
ugugugugugugugugugugu

SEQ ID NO: 419823 - RNA, 21 nt, Human
ugugugugugugugugugugu

SEQ ID NO: 419824 - RNA, 21 nt, Human
ugugugugugugugugugugu

SEQ ID NO: 419825 - RNA, 21 nt, Human
ugugugugugugugugugugu

SEQ ID NO: 419826 - RNA, 21 nt, Human
ugugugugugugugugugugu

SEQ ID NO: 419827 - RNA, 21 nt, Human
ugugugugugugugugugugu

SEQ ID NO: 419828 - RNA, 22 nt, Human
ugugugugugugugugugugug

SEQ ID NO: 419829 - RNA, 22 nt, Human
ugugugugugugugugugugug

SEQ ID NO: 419830 - RNA, 22 nt, Human
ugugugugugugugugugugug

SEQ ID NO: 419831 - RNA, 22 nt, Human
ugugugugugugugugugugug

SEQ ID NO: 419832 - RNA, 22 nt, Human
ugugugugugugugugugugug

SEQ ID NO: 419833 - RNA, 22 nt, Human
ugugugugugugugugugugug

SEQ ID NO: 419834 - RNA, 22 nt, Human
ugugugugugugugugugugug

SEQ ID NO: 419835 - RNA, 22 nt, Human
ugugugugugugugugugugug

SEQ ID NO: 419836 - RNA, 22 nt, Human
ugugugugugugugugugugug

SEQ ID NO: 419837 - RNA, 22 nt, Human
ugugugugugugugugugugug

SEQ ID NO: 419838 - RNA, 22 nt, Human
ugugugugugugugugugugug

SEQ ID NO: 419839 - RNA, 19 nt, Human
uguuuuguuuuauauaugc

SEQ ID NO: 419840 - RNA, 19 nt, Human
uugcagcacauuucugccc

SEQ ID NO: 419841 - RNA, 21 nt, Human
uuuacaggaggguagugacau

SEQ ID NO: 419842 - RNA, 23 nt, Human
uuuguguauauguauauauagau

SEQ ID NO: 419843 - RNA, 24 nt, Human
uuuguguauauguauauauagaua

SEQ ID NO: 419844 - RNA, 24 nt, Human
uuugugugugugugugugugugug

SEQ ID NO: 419845 - RNA, 22 nt, Human
uuuugugcaguccauagcauug

SEQ ID NO: 419846 - RNA, 21 nt, Human
uuuuuuuuuuuuuuuuccacu

SEQ ID NO: 419847 - RNA, 22 nt, Human
uuuuuuuuuuuuuuuuccacug

SEQ ID NO: 419848 - RNA, 23 nt, Human
uuuuuuuuuuuuuuuuccacuga

SEQ ID NO: 419849 - RNA, 23 nt, Human
aaagacaauauaauucauucaug

SEQ ID NO: 419850 - RNA, 19 nt, Human
aaaugaugcccagcaguga

SEQ ID NO: 419851 - RNA, 21 nt, Human
aagaauaaauaaauggcaaag

SEQ ID NO: 419852 - RNA, 26 nt, Human
agagaaucaaaaguuuugcaccaagu

SEQ ID NO: 419853 - RNA, 18 nt, Human
agcuacaaaagagaauca

SEQ ID NO: 419854 - RNA, 20 nt, Human
auagaauuuucccuagguca

SEQ ID NO: 419855 - RNA, 22 nt, Human
auagaauuuucccuaggucacu

SEQ ID NO: 419856 - RNA, 24 nt, Human
aucacaaauuuugaaaggccaaaa

SEQ ID NO: 419857 - RNA, 26 nt, Human
caaacugagaguacaugucuuggaca

SEQ ID NO: 419858 - RNA, 24 nt, Human
caaauuuugaaaggccaaaagccu

SEQ ID NO: 419859 - RNA, 19 nt, Human
caucuguccucuuaaagca

SEQ ID NO: 419860 - RNA, 21 nt, Human
cauuuuaucuugacauuguca

SEQ ID NO: 419861 - RNA, 18 nt, Human
ccaaaagccuggucugac

SEQ ID NO: 419862 - RNA, 22 nt, Human
ccuaucaagugacacucaagaa

SEQ ID NO: 419863 - RNA, 23 nt, Human
ccucccugcucaagcuacaaaag

SEQ ID NO: 419864 - RNA, 18 nt, Human
ccucuuaaagcaaguggc

SEQ ID NO: 419865 - RNA, 23 nt, Human
cuaaaaacacuguuuccagcuau

SEQ ID NO: 419866 - RNA, 20 nt, Human
cucccuaacaagaaaacuga

SEQ ID NO: 419867 - RNA, 19 nt, Human
gaguacaugucuuggacaa

SEQ ID NO: 419868 - RNA, 23 nt, Human
ggcaaaggaaacgcaggaaagga

SEQ ID NO: 419869 - RNA, 21 nt, Human
uaaagaauaaauaaauggcaa

SEQ ID NO: 419870 - RNA, 20 nt, Human
uaaauggcaaaggaaacgca

SEQ ID NO: 419871 - RNA, 18 nt, Human
uacaaaagagaaucaaaa

SEQ ID NO: 419872 - RNA, 24 nt, Human
uacaguacauugaaccacacaucu

SEQ ID NO: 419873 - RNA, 24 nt, Human
uaucaagugacacucaagaaaaca

SEQ ID NO: 419874 - RNA, 27 nt, Human
ucaaaaguuuugcaccaaguuaacugg

SEQ ID NO: 419875 - RNA, 25 nt, Human
ucaagguaaagacaauauaauucau

SEQ ID NO: 419876 - RNA, 19 nt, Human
ucagaccuaaccuauucau

SEQ ID NO: 419877 - RNA, 24 nt, Human
ugaaaggccaaaagccuggucuga

SEQ ID NO: 419878 - RNA, 18 nt, Human
ugacagugggaccugugg

SEQ ID NO: 419879 - RNA, 19 nt, Human
ugacagugggaccuguggg

SEQ ID NO: 419880 - RNA, 27 nt, Human
ugaccuaaaaacacuguuuccagcuau

SEQ ID NO: 419881 - RNA, 18 nt, Human
ugcuuucaaucacaaauu

SEQ ID NO: 419882 - RNA, 18 nt, Human
uggaaaaugccagugagg

SEQ ID NO: 419883 - RNA, 25 nt, Human
uggcaaaggaaacgcaggaaaggaa

SEQ ID NO: 419884 - RNA, 20 nt, Human
uggucugaccuaaaaacacu

SEQ ID NO: 419885 - RNA, 21 nt, Human
uguauggagucuucacuauga

SEQ ID NO: 419886 - RNA, 19 nt, Human
uugacauugucagaagaaa

SEQ ID NO: 419887 - RNA, 18 nt, Human
uuuuuuuuuuuuuuuuug

SEQ ID NO: 419888 - RNA, 21 nt, Human
acaaauuccuucuccaaacau

SEQ ID NO: 419889 - RNA, 21 nt, Human
acagggaaggagggcacugga

SEQ ID NO: 419890 - RNA, 18 nt, Human
agacaaaaugcccaguag

SEQ ID NO: 419891 - RNA, 21 nt, Human
agagggcccggccaugugggc

SEQ ID NO: 419892 - RNA, 27 nt, Human
agaugggaggagggagcuacagagggc

SEQ ID NO: 419893 - RNA, 24 nt, Human
agcccauccccucugcccccucca

SEQ ID NO: 419894 - RNA, 22 nt, Human
agcucagugccuggcaagcugg

SEQ ID NO: 419895 - RNA, 18 nt, Human
aggagggagcuacagagg

SEQ ID NO: 419896 - RNA, 19 nt, Human
agggcccggccaugugggc

SEQ ID NO: 419897 - RNA, 18 nt, Human
auccccucugcccccucc

SEQ ID NO: 419898 - RNA, 21 nt, Human
augaacuggaccagacaaaau

SEQ ID NO: 419899 - RNA, 20 nt, Human
caaccuccagcccauccccu

SEQ ID NO: 419900 - RNA, 19 nt, Human
cagcggcugcugcagcaaa

SEQ ID NO: 419901 - RNA, 25 nt, Human
cagggaaggagggcacuggagaaga

SEQ ID NO: 419902 - RNA, 22 nt, Human
cagggcuucuagcucagugccu

SEQ ID NO: 419903 - RNA, 19 nt, Human
caguaaaauaggauuaaca

SEQ ID NO: 419904 - RNA, 22 nt, Human
caugaacuggaccagacaaaau

SEQ ID NO: 419905 - RNA, 19 nt, Human
ccagcccauccccucugcc

SEQ ID NO: 419906 - RNA, 23 nt, Human
cccauccccucugcccccuccag

SEQ ID NO: 419907 - RNA, 21 nt, Human
ccuccagcccauccccucugc

SEQ ID NO: 419908 - RNA, 23 nt, Human
ccuccagcccauccccucugccc

SEQ ID NO: 419909 - RNA, 24 nt, Human
ccuggaacacugggccugggcgag

SEQ ID NO: 419910 - RNA, 22 nt, Human
ccuucuccaaacauagcuauug

SEQ ID NO: 419911 - RNA, 18 nt, Human
cucaaccuccagcccauc

SEQ ID NO: 419912 - RNA, 19 nt, Human
cuccagcggcugcugcagc

SEQ ID NO: 419913 - RNA, 23 nt, Human
cucuggucucccugaagucuccg

SEQ ID NO: 419914 - RNA, 24 nt, Human
cuggagcagccacaaauuccuucu

SEQ ID NO: 419915 - RNA, 18 nt, Human
gaaggagaugggaggagg

SEQ ID NO: 419916 - RNA, 18 nt, Human
gaccagacaaaaugccca

SEQ ID NO: 419917 - RNA, 22 nt, Human
gagaggcagagacagggaagga

SEQ ID NO: 419918 - RNA, 23 nt, Human
gagggcacuggagaagaggaacu

SEQ ID NO: 419919 - RNA, 22 nt, Human
gcagccacaaauuccuucucca

SEQ ID NO: 419920 - RNA, 21 nt, Human
gccacaaauuccuucuccaaa

SEQ ID NO: 419921 - RNA, 19 nt, Human
gcucagugccuggcaagcu

SEQ ID NO: 419922 - RNA, 19 nt, Human
gcugggggaaggagauggg

SEQ ID NO: 419923 - RNA, 19 nt, Human
ggaaggagaugggaggagg

SEQ ID NO: 419924 - RNA, 20 nt, Human
ggaggagggagcuacagagg

SEQ ID NO: 419925 - RNA, 20 nt, Human
gggaaggagaugggaggagg

SEQ ID NO: 419926 - RNA, 21 nt, Human
gggaaggagaugggaggaggg

SEQ ID NO: 419927 - RNA, 21 nt, Human
gggcuaagggaccuuuauugg

SEQ ID NO: 419928 - RNA, 18 nt, Human
gggcugggggaaggagau

SEQ ID NO: 419929 - RNA, 18 nt, Human
uagcucagugccuggcaa

SEQ ID NO: 419930 - RNA, 24 nt, Human
uccagcccauccccucugcccccu

SEQ ID NO: 419931 - RNA, 23 nt, Human
ucuccaaacauagcuauugaucc

SEQ ID NO: 419932 - RNA, 21 nt, Human
ucucugagucuuaguucauuu

SEQ ID NO: 419933 - RNA, 25 nt, Human
ucucugagucuuaguucauuuucag

SEQ ID NO: 419934 - RNA, 18 nt, Human
uggcaagcugggcucugg

SEQ ID NO: 419935 - RNA, 26 nt, Human
uggcaagcugggcucuggucucccug

SEQ ID NO: 419936 - RNA, 20 nt, Human
ugggcgagcugggagauaag

SEQ ID NO: 419937 - RNA, 18 nt, Human
ugggcugggggaaggaga

SEQ ID NO: 419938 - RNA, 21 nt, Human
uuucugcugcucuguuugcuc

SEQ ID NO: 419939 - RNA, 24 nt, Human
uuuucugcugcucuguuugcucaa

SEQ ID NO: 419940 - RNA, 22 nt, Human
aaccacccucccuuucccacca

SEQ ID NO: 419941 - RNA, 20 nt, Human
aagcugugacauccaccaac

SEQ ID NO: 419942 - RNA, 22 nt, Human
aaggcaggcagcagcaggcacc

SEQ ID NO: 419943 - RNA, 24 nt, Human
accaaccacccucccuuucccacc

SEQ ID NO: 419944 - RNA, 19 nt, Human
acuggcagcacucuggccu

SEQ ID NO: 419945 - RNA, 19 nt, Human
agagcagaacaugcagagg

SEQ ID NO: 419946 - RNA, 21 nt, Human
aggccaaggcaggcagcagca

SEQ ID NO: 419947 - RNA, 26 nt, Human
augcagcaagauaagagcucagccuu

SEQ ID NO: 419948 - RNA, 20 nt, Human
cacccucccuuucccaccac

SEQ ID NO: 419949 - RNA, 21 nt, Human
cacccucccuuucccaccaca

SEQ ID NO: 419950 - RNA, 18 nt, Human
cagaagggcacaagagca

SEQ ID NO: 419951 - RNA, 18 nt, Human
cagaagggcacaagagca

SEQ ID NO: 419952 - RNA, 19 nt, Human
caggccaaggcaggcagca

SEQ ID NO: 419953 - RNA, 22 nt, Human
caggccaaggcaggcagcagca

SEQ ID NO: 419954 - RNA, 18 nt, Human
caucaggccaaggcaggc

SEQ ID NO: 419955 - RNA, 18 nt, Human
caugcagcugcagcagcc

SEQ ID NO: 419956 - RNA, 20 nt, Human
cccucccuuucccaccacaa

SEQ ID NO: 419957 - RNA, 23 nt, Human
ccuaggccaugcucucagcugcu

SEQ ID NO: 419958 - RNA, 18 nt, Human
cugcaaaugagggcugcg

SEQ ID NO: 419959 - RNA, 21 nt, Human
cuggacaauggugccuucccc

SEQ ID NO: 419960 - RNA, 23 nt, Human
cuguggaguccccacugcugggg

SEQ ID NO: 419961 - RNA, 22 nt, Human
gcaaaggcucaaucaggucugc

SEQ ID NO: 419962 - RNA, 22 nt, Human
ggagauaaagcccaagcuguga

SEQ ID NO: 419963 - RNA, 19 nt, Human
ucagaagggcacaagagca

SEQ ID NO: 419964 - RNA, 19 nt, Human
ucagaagggcacaagagca

SEQ ID NO: 419965 - RNA, 24 nt, Human
ucaggucugcuacagcuccggacu

SEQ ID NO: 419966 - RNA, 19 nt, Human
uccccugcaaaugagggcu

SEQ ID NO: 419967 - RNA, 19 nt, Human
ucccugggaaacucagcug

SEQ ID NO: 419968 - RNA, 19 nt, Human
ucccugggaaacucagcug

SEQ ID NO: 419969 - RNA, 18 nt, Human
ucucagcugcugcaaagg

SEQ ID NO: 419970 - RNA, 20 nt, Human
uggcagcacucuggccuggc

SEQ ID NO: 419971 - RNA, 21 nt, Human
uggcagcacucuggccuggcc

SEQ ID NO: 419972 - RNA, 21 nt, Human
ugggggagauaaagcccaagc

SEQ ID NO: 419973 - RNA, 24 nt, Human
ugugacauccaccaaccacccucc

SEQ ID NO: 419974 - RNA, 26 nt, Human
uuccccugcaaaugagggcugcggcu

SEQ ID NO: 419975 - RNA, 18 nt, Human
aaaaugaagcaucugcgg

SEQ ID NO: 419976 - RNA, 19 nt, Human
aaccaaggacuucccugag

SEQ ID NO: 419977 - RNA, 25 nt, Human
aagccuacagguggcggugcuuuga

SEQ ID NO: 419978 - RNA, 22 nt, Human
aaguccacccguccagggacac

SEQ ID NO: 419979 - RNA, 23 nt, Human
aauaauggaacucacaggaagaa

SEQ ID NO: 419980 - RNA, 20 nt, Human
acuguggggcugcuuugggg

SEQ ID NO: 419981 - RNA, 20 nt, Human
acuuggaacccucggagucc

SEQ ID NO: 419982 - RNA, 21 nt, Human
agacagaagccuacagguggc

SEQ ID NO: 419983 - RNA, 19 nt, Human
agaccagguuguggaagac

SEQ ID NO: 419984 - RNA, 22 nt, Human
agugcuccagaggagacccaga

SEQ ID NO: 419985 - RNA, 27 nt, Human
aguuuauuuacucuacugggugaaaca

SEQ ID NO: 419986 - RNA, 19 nt, Human
auacucuuccccucuuucu

SEQ ID NO: 419987 - RNA, 18 nt, Human
auuuacucuacuggguga

SEQ ID NO: 419988 - RNA, 24 nt, Human
caaccaaggacuucccugagauuu

SEQ ID NO: 419989 - RNA, 22 nt, Human
caagaacaggguggcccaugga

SEQ ID NO: 419990 - RNA, 23 nt, Human
cacagucaggggaaaagccaccc

SEQ ID NO: 419991 - RNA, 18 nt, Human
cacccccaagucuuaauu

SEQ ID NO: 419992 - RNA, 21 nt, Human
cagaggagacccagauacauc

SEQ ID NO: 419993 - RNA, 22 nt, Human
cagcagacgagucaagaccagg

SEQ ID NO: 419994 - RNA, 18 nt, Human
cagguggcggugcuuuga

SEQ ID NO: 419995 - RNA, 24 nt, Human
ccacccguccagggacacagccag

SEQ ID NO: 419996 - RNA, 23 nt, Human
ccccacaucaauauuucaaagca

SEQ ID NO: 419997 - RNA, 19 nt, Human
cccguccagggacacagcc

SEQ ID NO: 419998 - RNA, 20 nt, Human
cccguccagggacacagcca

SEQ ID NO: 419999 - RNA, 20 nt, Human
ccuccauggacaagaacagg

SEQ ID NO: 420000 - RNA, 23 nt, Human
ccuccauggacaagaacagggug

SEQ ID NO: 420001 - RNA, 19 nt, Human
ccucgagggcugcugccuc

SEQ ID NO: 420002 - RNA, 19 nt, Human
cgaccaugcaauguuagcc

SEQ ID NO: 420003 - RNA, 21 nt, Human
cgcugggcaguugagcugcug

SEQ ID NO: 420004 - RNA, 23 nt, Human
cucgagggcugcugccucgacuu

SEQ ID NO: 420005 - RNA, 22 nt, Human
cuguggggcugcuuuggggaga

SEQ ID NO: 420006 - RNA, 23 nt, Human
cuuccacugcagccaagggucaa

SEQ ID NO: 420007 - RNA, 26 nt, Human
gaaauacaucuugugcucaauaaacc

SEQ ID NO: 420008 - RNA, 20 nt, Human
gaacucacaggaagaaacag

SEQ ID NO: 420009 - RNA, 23 nt, Human
gaagacacugcagagguggccac

SEQ ID NO: 420010 - RNA, 18 nt, Human
gagggucuagggucauuu

SEQ ID NO: 420011 - RNA, 24 nt, Human
gagucaagaccagguuguggaaga

SEQ ID NO: 420012 - RNA, 18 nt, Human
gcccauggacuuccagcc

SEQ ID NO: 420013 - RNA, 21 nt, Human
gccucgagggcugcugccucg

SEQ ID NO: 420014 - RNA, 25 nt, Human
ggaaaagccacccugacucugcagg

SEQ ID NO: 420015 - RNA, 18 nt, Human
ggaagcgagcaugauuuc

SEQ ID NO: 420016 - RNA, 22 nt, Human
ggagacccagauacaucaacca

SEQ ID NO: 420017 - RNA, 21 nt, Human
ggcaggagaacacuggugugc

SEQ ID NO: 420018 - RNA, 21 nt, Human
ggcccaguaauuaccaugaga

SEQ ID NO: 420019 - RNA, 19 nt, Human
gggaagcgagcaugauuuc

SEQ ID NO: 420020 - RNA, 20 nt, Human
gggugacaggagggcagagu

SEQ ID NO: 420021 - RNA, 20 nt, Human
uaaguccacccguccaggga

SEQ ID NO: 420022 - RNA, 18 nt, Human
uacacaggcuuacagagg

SEQ ID NO: 420023 - RNA, 19 nt, Human
uacucuuccccucuuucuu

SEQ ID NO: 420024 - RNA, 23 nt, Human
uauacgcauacauagaauauaua

SEQ ID NO: 420025 - RNA, 24 nt, Human
ucaaaauugcugaacucuguucaa

SEQ ID NO: 420026 - RNA, 20 nt, Human
uccacugcagccaaggguca

SEQ ID NO: 420027 - RNA, 18 nt, Human
uccauauacgcauacaua

SEQ ID NO: 420028 - RNA, 18 nt, Human
uccuccauggacaagaac

SEQ ID NO: 420029 - RNA, 19 nt, Human
uccuccauggacaagaaca

SEQ ID NO: 420030 - RNA, 20 nt, Human
ucggaguccuccauggacaa

SEQ ID NO: 420031 - RNA, 21 nt, Human
ucucccuagcuaaguccaccc

SEQ ID NO: 420032 - RNA, 22 nt, Human
ucugugcugacuuccacugcag

SEQ ID NO: 420033 - RNA, 19 nt, Human
ucuugugcucaauaaaccu

SEQ ID NO: 420034 - RNA, 19 nt, Human
ugacaggagggcagagugc

SEQ ID NO: 420035 - RNA, 23 nt, Human
ugacugggcugggauuauugaua

SEQ ID NO: 420036 - RNA, 18 nt, Human
ugagagugcccugcccag

SEQ ID NO: 420037 - RNA, 21 nt, Human
ugccuagacaucugugagggc

SEQ ID NO: 420038 - RNA, 22 nt, Human
uggaacccucggaguccuccau

SEQ ID NO: 420039 - RNA, 19 nt, Human
uggcccauggacuuccagc

SEQ ID NO: 420040 - RNA, 20 nt, Human
ugggagggggcaugggcuga

SEQ ID NO: 420041 - RNA, 22 nt, Human
ugggauuauugauacauuacug

SEQ ID NO: 420042 - RNA, 22 nt, Human
ugggugacaggagggcagagug

SEQ ID NO: 420043 - RNA, 22 nt, Human
ugugcucaauaaaccuccccac

SEQ ID NO: 420044 - RNA, 22 nt, Human
uuaauacucuuccccucuuucu

SEQ ID NO: 420045 - RNA, 21 nt, Human
uucccugagauuuggcuuugc

SEQ ID NO: 420046 - RNA, 26 nt, Human
uugauacauuacugauacaucacuuc

SEQ ID NO: 420047 - RNA, 20 nt, Human
uuggcaggagaacacuggug

SEQ ID NO: 420048 - RNA, 19 nt, Human
uugggagggggcaugggcu

SEQ ID NO: 420049 - RNA, 23 nt, Human
uuugacugggcugggauuauuga

SEQ ID NO: 420050 - RNA, 22 nt, Human
auuuuuuguuguuguuguucac

SEQ ID NO: 420051 - RNA, 19 nt, Human
cacugucguauuucaaagc

SEQ ID NO: 420052 - RNA, 21 nt, Human
ucagaaugcauggagugcaag

SEQ ID NO: 420053 - RNA, 20 nt, Human
ugcaaggcacaaaagccuug

SEQ ID NO: 420054 - RNA, 20 nt, Human
ugcaaggcacaaaagccuug

SEQ ID NO: 420055 - RNA, 19 nt, Human
uggaacacugucguauuuc

SEQ ID NO: 420056 - RNA, 19 nt, Human
uggagugcaaggcacaaaa

SEQ ID NO: 420057 - RNA, 24 nt, Human
uggagugcaaggcacaaaagccuu

SEQ ID NO: 420058 - RNA, 22 nt, Human
uuuuguuguuguuguucacagc

SEQ ID NO: 420059 - RNA, 25 nt, Human
uuuuuuguuguuguuguucacagca

SEQ ID NO: 420060 - RNA, 20 nt, Human
uuuuuuuuuuuuuuuugcua

SEQ ID NO: 420061 - RNA, 18 nt, Human
uuuuuuuuuuuuuuuuug

SEQ ID NO: 420062 - RNA, 20 nt, Human
uuuuuuuuuuuuuuuuugcu

SEQ ID NO: 420063 - RNA, 21 nt, Human
acagggcagcaaguaacucag

SEQ ID NO: 420064 - RNA, 26 nt, Human
agaguggagggugggcacagagcagg

SEQ ID NO: 420065 - RNA, 20 nt, Human
agggauaacagcauuggagg

SEQ ID NO: 420066 - RNA, 21 nt, Human
agggguugguggggaagaaau

SEQ ID NO: 420067 - RNA, 26 nt, Human
agggguugguggggaagaaauggggg

SEQ ID NO: 420068 - RNA, 22 nt, Human
cagcauuggagggguugguggg

SEQ ID NO: 420069 - RNA, 23 nt, Human
cagcauuggagggguuggugggg

SEQ ID NO: 420070 - RNA, 19 nt, Human
ccuugggauuguuggguga

SEQ ID NO: 420071 - RNA, 19 nt, Human
cugcggggaggagcacagg

SEQ ID NO: 420072 - RNA, 18 nt, Human
gaagaaaugggggguugg

SEQ ID NO: 420073 - RNA, 18 nt, Human
gagaguggagggugggca

SEQ ID NO: 420074 - RNA, 20 nt, Human
gagaguggagggugggcaca

SEQ ID NO: 420075 - RNA, 18 nt, Human
ggaagaaaugggggguug

SEQ ID NO: 420076 - RNA, 20 nt, Human
ggagggugggcacagagcag

SEQ ID NO: 420077 - RNA, 24 nt, Human
ggcagggauaacagcauuggaggg

SEQ ID NO: 420078 - RNA, 20 nt, Human
ggcccuggaagaggagagug

SEQ ID NO: 420079 - RNA, 20 nt, Human
ggugagugugaggaccaggc

SEQ ID NO: 420080 - RNA, 24 nt, Human
gugggcacagagcagguggagggg

SEQ ID NO: 420081 - RNA, 24 nt, Human
uaaaaagggccuugggauuguuuc

SEQ ID NO: 420082 - RNA, 21 nt, Human
uggaagaggagaguggagggu

SEQ ID NO: 420083 - RNA, 18 nt, Human
uguugggugagugugagg

SEQ ID NO: 420084 - RNA, 21 nt, Human
uugggggcccuggaagaggag

SEQ ID NO: 420085 - RNA, 22 nt, Human
aaaaaacugaaucugcuacucu

SEQ ID NO: 420086 - RNA, 21 nt, Human
aaaagaaagcaaaacacuaga

SEQ ID NO: 420087 - RNA, 21 nt, Human
aaacaauaaaacaauaaugaa

SEQ ID NO: 420088 - RNA, 23 nt, Human
accacaaaggacauuugcauuca

SEQ ID NO: 420089 - RNA, 24 nt, Human
agauauaucaaaaaacugaaucug

SEQ ID NO: 420090 - RNA, 24 nt, Human
auaaaacaauaaugaaaaaauuca

SEQ ID NO: 420091 - RNA, 22 nt, Human
auacagcugcccucaagauuuc

SEQ ID NO: 420092 - RNA, 23 nt, Human
caaaacacuagaaugaccaaaca

SEQ ID NO: 420093 - RNA, 24 nt, Human
cagcuguccaugcuuaauacuuag

SEQ ID NO: 420094 - RNA, 18 nt, Human
ccuauaggcaagcaaaau

SEQ ID NO: 420095 - RNA, 24 nt, Human
cuccaacacuagucuagcugggga

SEQ ID NO: 420096 - RNA, 26 nt, Human
gagaauucaacacuacaagcuaaaug

SEQ ID NO: 420097 - RNA, 19 nt, Human
gcccucaagauuucaauuu

SEQ ID NO: 420098 - RNA, 23 nt, Human
gggaaggggauacugcuaaacau

SEQ ID NO: 420099 - RNA, 18 nt, Human
guauguuuaagucagagu

SEQ ID NO: 420100 - RNA, 25 nt, Human
uauaaaaacaauaaaacaauaauga

SEQ ID NO: 420101 - RNA, 22 nt, Human
uauaaggaaaagaaagcaaaac

SEQ ID NO: 420102 - RNA, 25 nt, Human
uauaaggaaaagaaagcaaaacacu

SEQ ID NO: 420103 - RNA, 18 nt, Human
ucaaggaacaagcaccac

SEQ ID NO: 420104 - RNA, 22 nt, Human
ugcagccauagcuuccacugca

SEQ ID NO: 420105 - RNA, 19 nt, Human
ugcuuaauacuuagugguu

SEQ ID NO: 420106 - RNA, 19 nt, Human
uucagggggaaaaaaaaga

SEQ ID NO: 420107 - RNA, 23 nt, Human
uucaucguuauuccaguucauca

SEQ ID NO: 420108 - RNA, 22 nt, Human
aaaaaaacaaaaggaaaaacca

SEQ ID NO: 420109 - RNA, 25 nt, Human
aaaaaaacaaaaggaaaaaccaaag

SEQ ID NO: 420110 - RNA, 23 nt, Human
aaaaaaacaaagaagcauuacca

SEQ ID NO: 420111 - RNA, 26 nt, Human
aaaaaaacaaagaagcauuaccaaag

SEQ ID NO: 420112 - RNA, 21 nt, Human
aaaaaagagagagagagagaa

SEQ ID NO: 420113 - RNA, 23 nt, Human
aaaagacccagaauuuuuggaug

SEQ ID NO: 420114 - RNA, 19 nt, Human
aaacaaaaggaaaaaccaa

SEQ ID NO: 420115 - RNA, 21 nt, Human
aaacaaaaggaaaaaccaaag

SEQ ID NO: 420116 - RNA, 21 nt, Human
aaacacaaaguuuggagaaau

SEQ ID NO: 420117 - RNA, 25 nt, Human
aaacugaaaauucaaaucuucucuu

SEQ ID NO: 420118 - RNA, 23 nt, Human
aaacugaaagcagaaacacugga

SEQ ID NO: 420119 - RNA, 19 nt, Human
aaagagagagagagagaaa

SEQ ID NO: 420120 - RNA, 18 nt, Human
aacagguagccacucgag

SEQ ID NO: 420121 - RNA, 19 nt, Human
aaccaaagcggugaaacaa

SEQ ID NO: 420122 - RNA, 24 nt, Human
aacucacuugccuugugcuccgcc

SEQ ID NO: 420123 - RNA, 21 nt, Human
aagaaacugaaagcagaaaca

SEQ ID NO: 420124 - RNA, 18 nt, Human
aagcagaaacacuggauu

SEQ ID NO: 420125 - RNA, 22 nt, Human
aagcagaugcuguuuucaggac

SEQ ID NO: 420126 - RNA, 18 nt, Human
aagcagccuuggaaaggg

SEQ ID NO: 420127 - RNA, 25 nt, Human
aagcccaacagguagccacucgaga

SEQ ID NO: 420128 - RNA, 24 nt, Human
aaguagcaucaccacuuuggcuca

SEQ ID NO: 420129 - RNA, 25 nt, Human
aauacaaaagcaacaagaaagacaa

SEQ ID NO: 420130 - RNA, 23 nt, Human
acaaaagcaacaagaaagacaag

SEQ ID NO: 420131 - RNA, 21 nt, Human
acagguagccacucgagacac

SEQ ID NO: 420132 - RNA, 22 nt, Human
acauccuuuaaaaaaacaaaag

SEQ ID NO: 420133 - RNA, 20 nt, Human
acccagccugaaaagggccc

SEQ ID NO: 420134 - RNA, 21 nt, Human
acccccaucaccauccugcuc

SEQ ID NO: 420135 - RNA, 25 nt, Human
agaaacacauccuuuaaaaaaacaa

SEQ ID NO: 420136 - RNA, 24 nt, Human
agaaauuccccucaaguagcauca

SEQ ID NO: 420137 - RNA, 23 nt, Human
agaauuacaaaauauagaagcug

SEQ ID NO: 420138 - RNA, 22 nt, Human
agacaacuaacaauuaacaggc

SEQ ID NO: 420139 - RNA, 21 nt, Human
agagacuggcaaguaucuuga

SEQ ID NO: 420140 - RNA, 21 nt, Human
agagagagagaaauuagaaau

SEQ ID NO: 420141 - RNA, 18 nt, Human
agcaccgugaaaggugaa

SEQ ID NO: 420142 - RNA, 19 nt, Human
agcgguguagcucccagag

SEQ ID NO: 420143 - RNA, 20 nt, Human
agcuacaggaagacaacuaa

SEQ ID NO: 420144 - RNA, 21 nt, Human
aggaaaagacgcugaagagga

SEQ ID NO: 420145 - RNA, 20 nt, Human
aggaaggguggaggugaggg

SEQ ID NO: 420146 - RNA, 21 nt, Human
agggcccuuccaauuucauau

SEQ ID NO: 420147 - RNA, 24 nt, Human
auccugcucacauuccuaccguca

SEQ ID NO: 420148 - RNA, 20 nt, Human
augcauuuuaacaaaaaccc

SEQ ID NO: 420149 - RNA, 22 nt, Human
auggguugcagaaauuccccuc

SEQ ID NO: 420150 - RNA, 20 nt, Human
caaaugcccacagggaaccc

SEQ ID NO: 420151 - RNA, 21 nt, Human
caagccaagaaacugaaagca

SEQ ID NO: 420152 - RNA, 22 nt, Human
cacaaaguuuggagaaaugaaa

SEQ ID NO: 420153 - RNA, 19 nt, Human
cacacgcggccucuccgcc

SEQ ID NO: 420154 - RNA, 24 nt, Human
caccaggcagcuucacaaacacac

SEQ ID NO: 420155 - RNA, 19 nt, Human
cacugcccacaagcccaac

SEQ ID NO: 420156 - RNA, 22 nt, Human
cacuguacuacagcugcagggc

SEQ ID NO: 420157 - RNA, 18 nt, Human
cagcaaucaaaacuaaaa

SEQ ID NO: 420158 - RNA, 26 nt, Human
cagcaaucaaaacuaaaacgguccgc

SEQ ID NO: 420159 - RNA, 21 nt, Human
cagccaucggggacugggcaa

SEQ ID NO: 420160 - RNA, 21 nt, Human
cagcuacaggaagacaacuaa

SEQ ID NO: 420161 - RNA, 25 nt, Human
caggugucaggaaacuaaaggagca

SEQ ID NO: 420162 - RNA, 22 nt, Human
caguuaucuuucauccagaauu

SEQ ID NO: 420163 - RNA, 28 nt, Human
cauaaaaaaacaaagaagcauuaccaaa

SEQ ID NO: 420164 - RNA, 21 nt, Human
cauccugcucacauuccuacc

SEQ ID NO: 420165 - RNA, 22 nt, Human
cauuccuaccgucaccucaaac

SEQ ID NO: 420166 - RNA, 21 nt, Human
ccaagccaagaaacugaaagc

SEQ ID NO: 420167 - RNA, 20 nt, Human
ccauggucccgccgcgccgc

SEQ ID NO: 420168 - RNA, 22 nt, Human
cccacaagcccaacagguagcc

SEQ ID NO: 420169 - RNA, 18 nt, Human
cccugugccgcagcucug

SEQ ID NO: 420170 - RNA, 21 nt, Human
cccugugccgcagcucugccc

SEQ ID NO: 420171 - RNA, 18 nt, Human
cccuguuuguugaaccuu

SEQ ID NO: 420172 - RNA, 22 nt, Human
cccuuuuuaacaacaacaaaaa

SEQ ID NO: 420173 - RNA, 24 nt, Human
ccgcagcucugcccagcucagcgg

SEQ ID NO: 420174 - RNA, 20 nt, Human
ccgccgccuccugugugcgc

SEQ ID NO: 420175 - RNA, 18 nt, Human
ccgccgcgccgcggccgc

SEQ ID NO: 420176 - RNA, 20 nt, Human
ccuuugcagcccaggcccug

SEQ ID NO: 420177 - RNA, 19 nt, Human
cgagacacacacacugagg

SEQ ID NO: 420178 - RNA, 19 nt, Human
cgccggcgccggggcugcg

SEQ ID NO: 420179 - RNA, 21 nt, Human
cgcggucccgccgccggcgcc

SEQ ID NO: 420180 - RNA, 18 nt, Human
cuaaaggagcagggcucc

SEQ ID NO: 420181 - RNA, 22 nt, Human
cucaugugcagcacaauuugcu

SEQ ID NO: 420182 - RNA, 20 nt, Human
cuccauggucccgccgcgcc

SEQ ID NO: 420183 - RNA, 18 nt, Human
cucugcuuuuagcuccag

SEQ ID NO: 420184 - RNA, 21 nt, Human
cugaauucucuugcaaaaacc

SEQ ID NO: 420185 - RNA, 20 nt, Human
cugcccacaagcccaacagg

SEQ ID NO: 420186 - RNA, 19 nt, Human
cuggccccagcaccgugaa

SEQ ID NO: 420187 - RNA, 20 nt, Human
cugggacagaggagagaaca

SEQ ID NO: 420188 - RNA, 23 nt, Human
cuuaaaaucuucaacacgcuccc

SEQ ID NO: 420189 - RNA, 27 nt, Human
cuuuaaaaaaacaaaaggaaaaaccaa

SEQ ID NO: 420190 - RNA, 21 nt, Human
cuuucauuacuguugagcugc

SEQ ID NO: 420191 - RNA, 22 nt, Human
gaaaagggcccuuccaauuuca

SEQ ID NO: 420192 - RNA, 18 nt, Human
gaacagggugaaggcccu

SEQ ID NO: 420193 - RNA, 19 nt, Human
gaaggguggaggugagggc

SEQ ID NO: 420194 - RNA, 21 nt, Human
gaccaaguggugaaaggugcc

SEQ ID NO: 420195 - RNA, 24 nt, Human
gacugcacccaauggacaggcucu

SEQ ID NO: 420196 - RNA, 19 nt, Human
gagaccacuuaaaaucuuc

SEQ ID NO: 420197 - RNA, 20 nt, Human
gaggugagggcacagcacug

SEQ ID NO: 420198 - RNA, 23 nt, Human
gcccacagggaacccagccugaa

SEQ ID NO: 420199 - RNA, 20 nt, Human
ggaggacaaccaugugcuuc

SEQ ID NO: 420200 - RNA, 23 nt, Human
ggaggacaaccaugugcuucuag

SEQ ID NO: 420201 - RNA, 22 nt, Human
gggaacaacaggaaggguggag

SEQ ID NO: 420202 - RNA, 21 nt, Human
gggacagaggagagaacagac

SEQ ID NO: 420203 - RNA, 25 nt, Human
uaaaaaaacaaaaggaaaaaccaaa

SEQ ID NO: 420204 - RNA, 19 nt, Human
uaaaaccaacuuauucaga

SEQ ID NO: 420205 - RNA, 24 nt, Human
uaaacccaaacugcacuaaauacu

SEQ ID NO: 420206 - RNA, 22 nt, Human
uaacaccaggcagcuucacaaa

SEQ ID NO: 420207 - RNA, 19 nt, Human
uaacuaaccacaauggaua

SEQ ID NO: 420208 - RNA, 21 nt, Human
uacaaaagcaacaagaaagac

SEQ ID NO: 420209 - RNA, 23 nt, Human
uaccaagccaagaaacugaaagc

SEQ ID NO: 420210 - RNA, 24 nt, Human
uacgagggacaauuuaaaauuacc

SEQ ID NO: 420211 - RNA, 20 nt, Human
uagcaucaccacuuuggcuc

SEQ ID NO: 420212 - RNA, 22 nt, Human
uagcuucuguguucucuccauc

SEQ ID NO: 420213 - RNA, 22 nt, Human
uaguagcuucuguguucucucc

SEQ ID NO: 420214 - RNA, 22 nt, Human
uauaaucaaagccuggagcacc

SEQ ID NO: 420215 - RNA, 18 nt, Human
ucaagggaaucucaugag

SEQ ID NO: 420216 - RNA, 22 nt, Human
ucacauuccuaccgucaccuca

SEQ ID NO: 420217 - RNA, 23 nt, Human
ucacauuguuuauacaaaaggug

SEQ ID NO: 420218 - RNA, 23 nt, Human
ucagaaaacauuuugauguucua

SEQ ID NO: 420219 - RNA, 18 nt, Human
ucccagagucauggacug

SEQ ID NO: 420220 - RNA, 18 nt, Human
uccugcggcucacucagg

SEQ ID NO: 420221 - RNA, 21 nt, Human
ucgcugaggagcuaagaacuc

SEQ ID NO: 420222 - RNA, 21 nt, Human
ucuauaaucaaagccuggagc

SEQ ID NO: 420223 - RNA, 18 nt, Human
ugaaacaauaucacuuac

SEQ ID NO: 420224 - RNA, 26 nt, Human
ugaaacugaaaauucaaaucuucucu

SEQ ID NO: 420225 - RNA, 22 nt, Human
ugaaaggugccaucuaaagugc

SEQ ID NO: 420226 - RNA, 20 nt, Human
ugacagccuauuuccucaug

SEQ ID NO: 420227 - RNA, 20 nt, Human
ugaggggacuucggggcugg

SEQ ID NO: 420228 - RNA, 23 nt, Human
ugaguugaaaauaacuuguugau

SEQ ID NO: 420229 - RNA, 25 nt, Human
ugaguugaaaauaacuuguugauuc

SEQ ID NO: 420230 - RNA, 23 nt, Human
ugcccacaagcccaacagguagc

SEQ ID NO: 420231 - RNA, 20 nt, Human
ugcccacgugggaacaacag

SEQ ID NO: 420232 - RNA, 18 nt, Human
uggagaaauaauacgagg

SEQ ID NO: 420233 - RNA, 23 nt, Human
uggcucaguuaucaguaguaguu

SEQ ID NO: 420234 - RNA, 18 nt, Human
ugugcagagguaaugaaa

SEQ ID NO: 420235 - RNA, 19 nt, Human
ugugcagagguaaugaaau

SEQ ID NO: 420236 - RNA, 20 nt, Human
ugugcagagguaaugaaauu

SEQ ID NO: 420237 - RNA, 20 nt, Human
uguuuguugaaccuuucccu

SEQ ID NO: 420238 - RNA, 21 nt, Human
uucauuguaauaccauauuag

SEQ ID NO: 420239 - RNA, 24 nt, Human
uuggauguuucuucuccauuuguu

SEQ ID NO: 420240 - RNA, 26 nt, Human
uuggauguuucuucuccauuuguuuu

SEQ ID NO: 420241 - RNA, 23 nt, Human
uuuagaaguucauuaauaacugu

SEQ ID NO: 420242 - RNA, 19 nt, Human
uuuccucaugugcagcaca

SEQ ID NO: 420243 - RNA, 19 nt, Human
uuugcuauguuuaguggca

SEQ ID NO: 420244 - RNA, 20 nt, Human
uuuuggaugugcagaagcaa

SEQ ID NO: 420245 - RNA, 27 nt, Human
aaacaggaacaggggaugcuccgugcu

SEQ ID NO: 420246 - RNA, 20 nt, Human
aagcaggcuggggggcuggu

SEQ ID NO: 420247 - RNA, 19 nt, Human
aagcuuaaggggaagaagc

SEQ ID NO: 420248 - RNA, 22 nt, Human
aaggcgcccccuccccucccca

SEQ ID NO: 420249 - RNA, 21 nt, Human
acaugcauucucugguuccag

SEQ ID NO: 420250 - RNA, 22 nt, Human
accaaguggacagacaugcauu

SEQ ID NO: 420251 - RNA, 19 nt, Human
aggcagggaggcaggaggg

SEQ ID NO: 420252 - RNA, 23 nt, Human
aggcgcccccuccccuccccaag

SEQ ID NO: 420253 - RNA, 22 nt, Human
aggggcacaaagcuuaagggga

SEQ ID NO: 420254 - RNA, 21 nt, Human
caaagcuuaaggggaagaagc

SEQ ID NO: 420255 - RNA, 23 nt, Human
cacuucauggccaguccagggac

SEQ ID NO: 420256 - RNA, 24 nt, Human
cagccaccaaguggacagacaugc

SEQ ID NO: 420257 - RNA, 24 nt, Human
caggaagcuccuucuggcuggucu

SEQ ID NO: 420258 - RNA, 23 nt, Human
cauggccaguccagggacaaaca

SEQ ID NO: 420259 - RNA, 19 nt, Human
ccagacugagggagcugga

SEQ ID NO: 420260 - RNA, 18 nt, Human
ccaguccagggacaaaca

SEQ ID NO: 420261 - RNA, 19 nt, Human
ccccaagccccagcacagc

SEQ ID NO: 420262 - RNA, 21 nt, Human
ccccaagccccagcacagccc

SEQ ID NO: 420263 - RNA, 22 nt, Human
ccccaagccccagcacagcccc

SEQ ID NO: 420264 - RNA, 23 nt, Human
ccccacccagcagccaccaagug

SEQ ID NO: 420265 - RNA, 18 nt, Human
cccccuccccuccccaag

SEQ ID NO: 420266 - RNA, 21 nt, Human
ccccuccccaagccccagcac

SEQ ID NO: 420267 - RNA, 19 nt, Human
cgguggaggagguggccag

SEQ ID NO: 420268 - RNA, 21 nt, Human
cuccccuccccaagccccagc

SEQ ID NO: 420269 - RNA, 20 nt, Human
cucccgaggccgggggcccu

SEQ ID NO: 420270 - RNA, 25 nt, Human
gagaacaaggcgcccccuccccucc

SEQ ID NO: 420271 - RNA, 21 nt, Human
gaggcagggaggcaggagggc

SEQ ID NO: 420272 - RNA, 20 nt, Human
gccccgaugggagggguagg

SEQ ID NO: 420273 - RNA, 19 nt, Human
gcuuaaggggaagaagcag

SEQ ID NO: 420274 - RNA, 22 nt, Human
gggcugguggcaggucccggcc

SEQ ID NO: 420275 - RNA, 18 nt, Human
ggggagaagcugagagug

SEQ ID NO: 420276 - RNA, 24 nt, Human
gggugggaggcagggaggcaggag

SEQ ID NO: 420277 - RNA, 25 nt, Human
uagcagugggugccagacugaggga

SEQ ID NO: 420278 - RNA, 21 nt, Human
uccgugcucccagaagagccc

SEQ ID NO: 420279 - RNA, 20 nt, Human
uccuucuggcuggucugaag

SEQ ID NO: 420280 - RNA, 24 nt, Human
ugagggagcuggacugcgguggag

SEQ ID NO: 420281 - RNA, 19 nt, Human
ugcuaguuccugguaauug

SEQ ID NO: 420282 - RNA, 26 nt, Human
ugcuccgugcucccagaagagcccca

SEQ ID NO: 420283 - RNA, 19 nt, Human
uggcucaugaggcugagug

SEQ ID NO: 420284 - RNA, 22 nt, Human
ugggaggcagggaggcaggagg

SEQ ID NO: 420285 - RNA, 21 nt, Human
uggggggcugguggcaggucc

SEQ ID NO: 420286 - RNA, 21 nt, Human
ugugggcuccgggcuggcaug

SEQ ID NO: 420287 - RNA, 19 nt, Human
uguucccggccccacccag

SEQ ID NO: 420288 - RNA, 25 nt, Human
uucccggccccacccagcagccacc

SEQ ID NO: 420289 - RNA, 18 nt, Human
aaaaaaacgcacaaacag

SEQ ID NO: 420290 - RNA, 23 nt, Human
aaaaaaacgcacaaacaggcacu

SEQ ID NO: 420291 - RNA, 18 nt, Human
aaaaaacgcacaaacagg

SEQ ID NO: 420292 - RNA, 19 nt, Human
aaaagaaacccgcuggcca

SEQ ID NO: 420293 - RNA, 24 nt, Human
aaaagcccaggaugacggcuggug

SEQ ID NO: 420294 - RNA, 24 nt, Human
aaaagccuaaccccuagcacuccc

SEQ ID NO: 420295 - RNA, 26 nt, Human
aaaagccuaaccccuagcacucccac

SEQ ID NO: 420296 - RNA, 18 nt, Human
aaaauaccauauccauag

SEQ ID NO: 420297 - RNA, 23 nt, Human
aaagaaaaaaacgcacaaacagg

SEQ ID NO: 420298 - RNA, 23 nt, Human
aaagaucauucacaaaauaccau

SEQ ID NO: 420299 - RNA, 18 nt, Human
aacugcuccccauaggac

SEQ ID NO: 420300 - RNA, 22 nt, Human
aagcucaaaagccuaaccccua

SEQ ID NO: 420301 - RNA, 19 nt, Human
aaggacccugcagauauuu

SEQ ID NO: 420302 - RNA, 20 nt, Human
aaggacccugcagauauuuu

SEQ ID NO: 420303 - RNA, 20 nt, Human
aaugaaaggaaacgccugga

SEQ ID NO: 420304 - RNA, 21 nt, Human
aaugguucuuaucucagaaga

SEQ ID NO: 420305 - RNA, 19 nt, Human
acacacacacgugugaaug

SEQ ID NO: 420306 - RNA, 18 nt, Human
accacccccuccaccccc

SEQ ID NO: 420307 - RNA, 18 nt, Human
acccccaaagcgccuugg

SEQ ID NO: 420308 - RNA, 18 nt, Human
accgcucuuccauagccc

SEQ ID NO: 420309 - RNA, 21 nt, Human
agaaagaaaaaaacgcacaaa

SEQ ID NO: 420310 - RNA, 25 nt, Human
agcaccagcaccacccccuccaccc

SEQ ID NO: 420311 - RNA, 22 nt, Human
agcacugagggaaugaaaggaa

SEQ ID NO: 420312 - RNA, 21 nt, Human
agcagaaaagaaacccgcugg

SEQ ID NO: 420313 - RNA, 18 nt, Human
agcccagugcagcaccag

SEQ ID NO: 420314 - RNA, 22 nt, Human
agccuaaccccuagcacuccca

SEQ ID NO: 420315 - RNA, 19 nt, Human
aggaacagauccacacaac

SEQ ID NO: 420316 - RNA, 21 nt, Human
aggacagacugggacuugggu

SEQ ID NO: 420317 - RNA, 18 nt, Human
aggacggcugcccgggga

SEQ ID NO: 420318 - RNA, 18 nt, Human
aggcguucaagcucaaaa

SEQ ID NO: 420319 - RNA, 24 nt, Human
aguaaagagaaagcaaaggaaaaa

SEQ ID NO: 420320 - RNA, 21 nt, Human
agugcagcaccagcaccaccc

SEQ ID NO: 420321 - RNA, 24 nt, Human
aucuucuccguggacucccuaccg

SEQ ID NO: 420322 - RNA, 20 nt, Human
auggcaggcgcaggaguggc

SEQ ID NO: 420323 - RNA, 21 nt, Human
augggaacaguccaguguguc

SEQ ID NO: 420324 - RNA, 22 nt, Human
augggaacaguccagugugucc

SEQ ID NO: 420325 - RNA, 25 nt, Human
caaaagccuaaccccuagcacuccc

SEQ ID NO: 420326 - RNA, 22 nt, Human
caaagcgccuuggcccagcaga

SEQ ID NO: 420327 - RNA, 21 nt, Human
caaaggaaaaaugacgcagca

SEQ ID NO: 420328 - RNA, 22 nt, Human
caaauacuaagcacauuccgcu

SEQ ID NO: 420329 - RNA, 23 nt, Human
caagcucaaaagccuaaccccua

SEQ ID NO: 420330 - RNA, 25 nt, Human
caagcucaaaagccuaaccccuagc

SEQ ID NO: 420331 - RNA, 19 nt, Human
cacaaacaggcacuagaua

SEQ ID NO: 420332 - RNA, 18 nt, Human
cacaacacacaggcaaca

SEQ ID NO: 420333 - RNA, 19 nt, Human
cacaacacacaggcaacag

SEQ ID NO: 420334 - RNA, 20 nt, Human
cacaacacacaggcaacagg

SEQ ID NO: 420335 - RNA, 21 nt, Human
cacacgcaggcguucaagcuc

SEQ ID NO: 420336 - RNA, 21 nt, Human
caccacccccuccacccccaa

SEQ ID NO: 420337 - RNA, 25 nt, Human
caccagcaccacccccuccaccccc

SEQ ID NO: 420338 - RNA, 19 nt, Human
caccaggcugugguccugc

SEQ ID NO: 420339 - RNA, 19 nt, Human
cacccccuccacccccaaa

SEQ ID NO: 420340 - RNA, 27 nt, Human
cacccccuccacccccaaagcgccuug

SEQ ID NO: 420341 - RNA, 19 nt, Human
cacccuggcccugccauca

SEQ ID NO: 420342 - RNA, 24 nt, Human
caccgcagcccaaacgccccccca

SEQ ID NO: 420343 - RNA, 19 nt, Human
caccucugcuccuccgagg

SEQ ID NO: 420344 - RNA, 18 nt, Human
cacgcacggcgaaaggag

SEQ ID NO: 420345 - RNA, 18 nt, Human
cacugcacccagccagag

SEQ ID NO: 420346 - RNA, 18 nt, Human
cagaagcagagaagcuga

SEQ ID NO: 420347 - RNA, 18 nt, Human
cagagaagcugacaggug

SEQ ID NO: 420348 - RNA, 22 nt, Human
cagagaggccagccuccaccac

SEQ ID NO: 420349 - RNA, 19 nt, Human
cagcaaagcccagaaugua

SEQ ID NO: 420350 - RNA, 18 nt, Human
cagcaccacccccuccac

SEQ ID NO: 420351 - RNA, 26 nt, Human
cagcaccagcaccacccccuccaccc

SEQ ID NO: 420352 - RNA, 24 nt, Human
cagcagaaaagaaacccgcuggcc

SEQ ID NO: 420353 - RNA, 26 nt, Human
cagcccaaacgcccccccacggcggg

SEQ ID NO: 420354 - RNA, 19 nt, Human
cagcccagugcagcaccag

SEQ ID NO: 420355 - RNA, 24 nt, Human
cagcggaagaaagaaaaaaacgca

SEQ ID NO: 420356 - RNA, 20 nt, Human
caggacggcugcccggggaa

SEQ ID NO: 420357 - RNA, 19 nt, Human
caggucagaagagaagcac

SEQ ID NO: 420358 - RNA, 24 nt, Human
cagguggaaggaaggagagagagu

SEQ ID NO: 420359 - RNA, 19 nt, Human
caguccacucgggaggggg

SEQ ID NO: 420360 - RNA, 22 nt, Human
caugcaagcauucacugcaucu

SEQ ID NO: 420361 - RNA, 27 nt, Human
cauucuuacauuuaaaagucaacugga

SEQ ID NO: 420362 - RNA, 25 nt, Human
cauuuaaaagucaacuggauugccc

SEQ ID NO: 420363 - RNA, 22 nt, Human
cauuuuggcucugaacugaagg

SEQ ID NO: 420364 - RNA, 21 nt, Human
ccaaagcgccuuggcccagca

SEQ ID NO: 420365 - RNA, 23 nt, Human
ccaaauacuaagcacauuccgcu

SEQ ID NO: 420366 - RNA, 19 nt, Human
ccacccccuccacccccaa

SEQ ID NO: 420367 - RNA, 20 nt, Human
ccacccccuccacccccaaa

SEQ ID NO: 420368 - RNA, 22 nt, Human
ccacgccccauucccucccaac

SEQ ID NO: 420369 - RNA, 18 nt, Human
ccagagaggccagccucc

SEQ ID NO: 420370 - RNA, 19 nt, Human
ccagcaccacccccuccac

SEQ ID NO: 420371 - RNA, 21 nt, Human
ccagcaccacccccuccaccc

SEQ ID NO: 420372 - RNA, 23 nt, Human
ccagcaccacccccuccaccccc

SEQ ID NO: 420373 - RNA, 22 nt, Human
ccagcaguuuagaugcaugugu

SEQ ID NO: 420374 - RNA, 24 nt, Human
ccaggaugacggcuggugaccaaa

SEQ ID NO: 420375 - RNA, 18 nt, Human
ccaggcuccugcugccgg

SEQ ID NO: 420376 - RNA, 23 nt, Human
cccacgccccauucccucccaac

SEQ ID NO: 420377 - RNA, 21 nt, Human
ccccacgccccauucccuccc

SEQ ID NO: 420378 - RNA, 22 nt, Human
ccccaggccacccuggcccugc

SEQ ID NO: 420379 - RNA, 21 nt, Human
cccccacggcggccaccucug

SEQ ID NO: 420380 - RNA, 24 nt, Human
cccccacggcggccaccucugcuc

SEQ ID NO: 420381 - RNA, 19 nt, Human
cccccccuuucagccucac

SEQ ID NO: 420382 - RNA, 27 nt, Human
cccuccacccccaaagcgccuuggccc

SEQ ID NO: 420383 - RNA, 19 nt, Human
ccgcucuuccauagccccc

SEQ ID NO: 420384 - RNA, 19 nt, Human
ccggccgcccccaaacugc

SEQ ID NO: 420385 - RNA, 21 nt, Human
ccuaaccccuagcacucccac

SEQ ID NO: 420386 - RNA, 26 nt, Human
ccuccacccccaaagcgccuuggccc

SEQ ID NO: 420387 - RNA, 19 nt, Human
ccucuuucccaggcuccug

SEQ ID NO: 420388 - RNA, 23 nt, Human
ccugcugccggccgcccccaaac

SEQ ID NO: 420389 - RNA, 22 nt, Human
ccuggcccugccaucaccuggc

SEQ ID NO: 420390 - RNA, 18 nt, Human
cgcuggccauucacugca

SEQ ID NO: 420391 - RNA, 19 nt, Human
cggcugcaggacggcugcc

SEQ ID NO: 420392 - RNA, 20 nt, Human
cgugugaaugcaugcaagca

SEQ ID NO: 420393 - RNA, 21 nt, Human
cuaaccccuagcacucccaca

SEQ ID NO: 420394 - RNA, 25 nt, Human
cuagcugggacacacacacgugugg

SEQ ID NO: 420395 - RNA, 23 nt, Human
cuccugcugccggccgcccccaa

SEQ ID NO: 420396 - RNA, 24 nt, Human
cugaauaccaacaaggucucugcu

SEQ ID NO: 420397 - RNA, 20 nt, Human
cugcaguccucuacugcuau

SEQ ID NO: 420398 - RNA, 23 nt, Human
cugcugggaaaacaaggagcagg

SEQ ID NO: 420399 - RNA, 21 nt, Human
gaaaacaaggagcaggagaaa

SEQ ID NO: 420400 - RNA, 23 nt, Human
gaaaagaaacccgcuggccauuc

SEQ ID NO: 420401 - RNA, 25 nt, Human
gaaaauggggaagcagcggaagaaa

SEQ ID NO: 420402 - RNA, 27 nt, Human
gacagacugggacuugggucggacccc

SEQ ID NO: 420403 - RNA, 22 nt, Human
gagaaagcaaaggaaaaaugac

SEQ ID NO: 420404 - RNA, 20 nt, Human
gcagcaccagcaccaccccc

SEQ ID NO: 420405 - RNA, 19 nt, Human
gcaggcguucaagcucaaa

SEQ ID NO: 420406 - RNA, 19 nt, Human
gccaauggcaggcgcagga

SEQ ID NO: 420407 - RNA, 20 nt, Human
gccagauucuagacccauuu

SEQ ID NO: 420408 - RNA, 24 nt, Human
gcccagugcagcaccagcaccacc

SEQ ID NO: 420409 - RNA, 19 nt, Human
gccggccgcccccaaacug

SEQ ID NO: 420410 - RNA, 21 nt, Human
gcucugaacugaaggggaggu

SEQ ID NO: 420411 - RNA, 24 nt, Human
gcucuuccauagcccccccuuuca

SEQ ID NO: 420412 - RNA, 21 nt, Human
gcugggacacacacacgugug

SEQ ID NO: 420413 - RNA, 22 nt, Human
ggaacaguccagugugucccca

SEQ ID NO: 420414 - RNA, 23 nt, Human
ggaagaaagaaaaaaacgcacaa

SEQ ID NO: 420415 - RNA, 21 nt, Human
ggacagacugggacuugggua

SEQ ID NO: 420416 - RNA, 28 nt, Human
ggacagacugggacuugggucggacccc

SEQ ID NO: 420417 - RNA, 24 nt, Human
ggaugacggcuggugaccaaauac

SEQ ID NO: 420418 - RNA, 19 nt, Human
gggaagcagcggaagaaag

SEQ ID NO: 420419 - RNA, 18 nt, Human
gggugccccaggccaccc

SEQ ID NO: 420420 - RNA, 20 nt, Human
gggugccccaggccacccug

SEQ ID NO: 420421 - RNA, 23 nt, Human
gugcagcaccagcaccacccccu

SEQ ID NO: 420422 - RNA, 18 nt, Human
uaacaagacacaguagga

SEQ ID NO: 420423 - RNA, 21 nt, Human
uaaguaggucaucugaaagca

SEQ ID NO: 420424 - RNA, 19 nt, Human
uacagaacucaacaugcag

SEQ ID NO: 420425 - RNA, 18 nt, Human
uacagcaaagcccagaau

SEQ ID NO: 420426 - RNA, 21 nt, Human
uaggaaaagcccaggaugacg

SEQ ID NO: 420427 - RNA, 23 nt, Human
uaggacagacugggacuugggua

SEQ ID NO: 420428 - RNA, 20 nt, Human
ucacaagcuguguuuccgcu

SEQ ID NO: 420429 - RNA, 21 nt, Human
ucacaagcuguguuuccgcug

SEQ ID NO: 420430 - RNA, 23 nt, Human
ucacugcacccagccagagaggc

SEQ ID NO: 420431 - RNA, 18 nt, Human
ucacugcaucuucuccgg

SEQ ID NO: 420432 - RNA, 19 nt, Human
ucacugcaucuucuccgug

SEQ ID NO: 420433 - RNA, 27 nt, Human
ucagcccagugcagcaccagcaccacc

SEQ ID NO: 420434 - RNA, 19 nt, Human
ucauauagcugaauguguu

SEQ ID NO: 420435 - RNA, 24 nt, Human
ucaucugaaagcaucggguuugau

SEQ ID NO: 420436 - RNA, 26 nt, Human
uccacacaacacacaggcaacaggga

SEQ ID NO: 420437 - RNA, 22 nt, Human
uccaccacgcacggcgaaagga

SEQ ID NO: 420438 - RNA, 18 nt, Human
uccacccccaaagcgccu

SEQ ID NO: 420439 - RNA, 24 nt, Human
ucccacauaacugcugaacccugc

SEQ ID NO: 420440 - RNA, 22 nt, Human
uccccaagauguggccgcagac

SEQ ID NO: 420441 - RNA, 24 nt, Human
ucucauuauguugccuauacuagg

SEQ ID NO: 420442 - RNA, 23 nt, Human
ucuccguggacucccuaccgcuc

SEQ ID NO: 420443 - RNA, 21 nt, Human
ucugaagguuccugacagcuc

SEQ ID NO: 420444 - RNA, 20 nt, Human
ucuguggauugcugaggccu

SEQ ID NO: 420445 - RNA, 22 nt, Human
ucuguggauugcugaggccuug

SEQ ID NO: 420446 - RNA, 23 nt, Human
ucuuccauagcccccccuuucag

SEQ ID NO: 420447 - RNA, 23 nt, Human
ugaccaaauacuaagcacauucc

SEQ ID NO: 420448 - RNA, 22 nt, Human
ugaguaaagugccagauucuag

SEQ ID NO: 420449 - RNA, 21 nt, Human
ugcaggucagaagagaagcac

SEQ ID NO: 420450 - RNA, 21 nt, Human
ugcaugcaagcauucacugca

SEQ ID NO: 420451 - RNA, 24 nt, Human
ugccccaggccacccuggcccugc

SEQ ID NO: 420452 - RNA, 20 nt, Human
ugcccggggacucaccaggc

SEQ ID NO: 420453 - RNA, 19 nt, Human
ugcuaucugaagguuccug

SEQ ID NO: 420454 - RNA, 20 nt, Human
ugcugcugggaaaacaagga

SEQ ID NO: 420455 - RNA, 21 nt, Human
ugcugcugggaaaacaaggag

SEQ ID NO: 420456 - RNA, 22 nt, Human
ugcugcugggaaaacaaggagc

SEQ ID NO: 420457 - RNA, 21 nt, Human
uggaaaggacccugcagauau

SEQ ID NO: 420458 - RNA, 19 nt, Human
uggaaggaaggagagagaa

SEQ ID NO: 420459 - RNA, 21 nt, Human
uggcgagggccucuuucccag

SEQ ID NO: 420460 - RNA, 25 nt, Human
ugggacuuggguacugaaggauuuu

SEQ ID NO: 420461 - RNA, 22 nt, Human
ugugaaaacaaggugccucuga

SEQ ID NO: 420462 - RNA, 19 nt, Human
uguggccgcagaccuagac

SEQ ID NO: 420463 - RNA, 19 nt, Human
uucacaaaauaccauaucc

SEQ ID NO: 420464 - RNA, 21 nt, Human
uucacaaaauaccauauccau

SEQ ID NO: 420465 - RNA, 19 nt, Human
uucccaggcuccugcugcc

SEQ ID NO: 420466 - RNA, 21 nt, Human
uuuggcucugaacugaagggg

SEQ ID NO: 420467 - RNA, 19 nt, Human
aacacagcgguccaaagac

SEQ ID NO: 420468 - RNA, 22 nt, Human
aagcagcccccagggcagcuga

SEQ ID NO: 420469 - RNA, 18 nt, Human
aagugugaaaccuggacc

SEQ ID NO: 420470 - RNA, 24 nt, Human
acacacacacauccacacacacac

SEQ ID NO: 420471 - RNA, 25 nt, Human
acacacacacauccacacacacaca

SEQ ID NO: 420472 - RNA, 25 nt, Human
acacacauccacacacacacacaca

SEQ ID NO: 420473 - RNA, 24 nt, Human
acacacauccacacacacacacag

SEQ ID NO: 420474 - RNA, 25 nt, Human
acacauccacacacacacacacaca

SEQ ID NO: 420475 - RNA, 27 nt, Human
acccacacacacacauccacacacaca

SEQ ID NO: 420476 - RNA, 19 nt, Human
agaauucuuuacaaaaccc

SEQ ID NO: 420477 - RNA, 20 nt, Human
agaauucuuuacaaaacccu

SEQ ID NO: 420478 - RNA, 22 nt, Human
agacaguuuuugcuuuuauugg

SEQ ID NO: 420479 - RNA, 23 nt, Human
agggcagagccagggccuggggc

SEQ ID NO: 420480 - RNA, 18 nt, Human
agggccuggggcaggaag

SEQ ID NO: 420481 - RNA, 22 nt, Human
agugaaggagcagagagaggga

SEQ ID NO: 420482 - RNA, 21 nt, Human
auccacacacacacacacaca

SEQ ID NO: 420483 - RNA, 21 nt, Human
auccccauuuugcagauugaa

SEQ ID NO: 420484 - RNA, 22 nt, Human
augucacagcugccaaggccug

SEQ ID NO: 420485 - RNA, 19 nt, Human
caaccgccuggucccugcu

SEQ ID NO: 420486 - RNA, 27 nt, Human
cacacacacacacacacaugaugccug

SEQ ID NO: 420487 - RNA, 28 nt, Human
cacacacacacacacaugaugccugccc

SEQ ID NO: 420488 - RNA, 30 nt, Human
cacacacacacauccacacacacacacaca

SEQ ID NO: 420489 - RNA, 31 nt, Human
cacacacacauccacacacacacacacacag

SEQ ID NO: 420490 - RNA, 25 nt, Human
cacacacauccacacacacacacac

SEQ ID NO: 420491 - RNA, 31 nt, Human
cacacacauccacacacacacacacacaugg

SEQ ID NO: 420492 - RNA, 18 nt, Human
cacagcugccaaggccug

SEQ ID NO: 420493 - RNA, 24 nt, Human
cagcagugaaggagcagagagagg

SEQ ID NO: 420494 - RNA, 20 nt, Human
cagcgguccaaagacagcgg

SEQ ID NO: 420495 - RNA, 18 nt, Human
cagcugagugagcagcag

SEQ ID NO: 420496 - RNA, 19 nt, Human
ccacacacacacacacaca

SEQ ID NO: 420497 - RNA, 24 nt, Human
ccacacacacacauccacacacac

SEQ ID NO: 420498 - RNA, 30 nt, Human
ccacacacacacauccacacacacacacag

SEQ ID NO: 420499 - RNA, 22 nt, Human
cccacacacacacauccacaca

SEQ ID NO: 420500 - RNA, 23 nt, Human
cccacacacacacauccacacac

SEQ ID NO: 420501 - RNA, 28 nt, Human
cccacacacacacauccacacacacaca

SEQ ID NO: 420502 - RNA, 19 nt, Human
cccagagaugaucccugga

SEQ ID NO: 420503 - RNA, 20 nt, Human
cccucugggucagcagugaa

SEQ ID NO: 420504 - RNA, 22 nt, Human
ccuggacccugcuccacccccc

SEQ ID NO: 420505 - RNA, 25 nt, Human
ccuggacccugcuccaccccccagg

SEQ ID NO: 420506 - RNA, 20 nt, Human
ccugggaucaggcccuccug

SEQ ID NO: 420507 - RNA, 24 nt, Human
cgagucacccaaggucacggugcu

SEQ ID NO: 420508 - RNA, 23 nt, Human
cuccucuuuccaccguugagccc

SEQ ID NO: 420509 - RNA, 23 nt, Human
cuuuucugcuucucugcucagga

SEQ ID NO: 420510 - RNA, 22 nt, Human
gaaacacagcgguccaaagaca

SEQ ID NO: 420511 - RNA, 18 nt, Human
gaaagcagcccccagggc

SEQ ID NO: 420512 - RNA, 19 nt, Human
gacagcggacgagucaccc

SEQ ID NO: 420513 - RNA, 23 nt, Human
gagcagggacggggacucugcuc

SEQ ID NO: 420514 - RNA, 26 nt, Human
gagccagggccuggggcaggaaggga

SEQ ID NO: 420515 - RNA, 21 nt, Human
gcagcugagugagcagcaggg

SEQ ID NO: 420516 - RNA, 19 nt, Human
gcccagggaaagcagcccc

SEQ ID NO: 420517 - RNA, 19 nt, Human
gcugucgccgccgcaaccg

SEQ ID NO: 420518 - RNA, 19 nt, Human
ggcaggaagggagugcccg

SEQ ID NO: 420519 - RNA, 20 nt, Human
gugacagauaaacagcaucc

SEQ ID NO: 420520 - RNA, 21 nt, Human
ucaggaacagaggucugugcc

SEQ ID NO: 420521 - RNA, 24 nt, Human
uccaaagacagcggacgagucacc

SEQ ID NO: 420522 - RNA, 20 nt, Human
uccacacacacacacacaca

SEQ ID NO: 420523 - RNA, 21 nt, Human
uccacacacacacacacacau

SEQ ID NO: 420524 - RNA, 25 nt, Human
uccacacacacacacacacaugaug

SEQ ID NO: 420525 - RNA, 23 nt, Human
ucccuggagcccgugcccaggga

SEQ ID NO: 420526 - RNA, 21 nt, Human
uccugggaucaggcccuccug

SEQ ID NO: 420527 - RNA, 21 nt, Human
ucucugcucaggaacagaggu

SEQ ID NO: 420528 - RNA, 19 nt, Human
ucugcucuucuugaccucc

SEQ ID NO: 420529 - RNA, 21 nt, Human
ugacagauaaacagcauccuc

SEQ ID NO: 420530 - RNA, 23 nt, Human
ugacagauaaacagcauccuccu

SEQ ID NO: 420531 - RNA, 20 nt, Human
ugagcccccggaguugccag

SEQ ID NO: 420532 - RNA, 23 nt, Human
ugagcccccggaguugccagccu

SEQ ID NO: 420533 - RNA, 19 nt, Human
ugccaaggccuggggguca

SEQ ID NO: 420534 - RNA, 20 nt, Human
ugccugcccugcugugguca

SEQ ID NO: 420535 - RNA, 19 nt, Human
uggacccugcuccaccccc

SEQ ID NO: 420536 - RNA, 19 nt, Human
uggcagagcagggacgggg

SEQ ID NO: 420537 - RNA, 22 nt, Human
ugucacagcugccaaggccugg

SEQ ID NO: 420538 - RNA, 21 nt, Human
ugucggggagcaaguggaggu

SEQ ID NO: 420539 - RNA, 19 nt, Human
uugaccuccaggagguggc

SEQ ID NO: 420540 - RNA, 23 nt, Human
aacacagauaccaguguuggaca

SEQ ID NO: 420541 - RNA, 18 nt, Human
aacacggccgccccaucc

SEQ ID NO: 420542 - RNA, 19 nt, Human
aacacggugaaauuccauc

SEQ ID NO: 420543 - RNA, 20 nt, Human
aacacggugaaauuccaucu

SEQ ID NO: 420544 - RNA, 21 nt, Human
aacacggugaaauuccaucuc

SEQ ID NO: 420545 - RNA, 22 nt, Human
aagaacacagauaccaguguug

SEQ ID NO: 420546 - RNA, 18 nt, Human
aaggucccucugggcccc

SEQ ID NO: 420547 - RNA, 24 nt, Human
aagugacauuuccacuggaagcac

SEQ ID NO: 420548 - RNA, 21 nt, Human
acaccacugacacuggcgggc

SEQ ID NO: 420549 - RNA, 19 nt, Human
acacggugaaauuccaucu

SEQ ID NO: 420550 - RNA, 20 nt, Human
accacggccgccccauccug

SEQ ID NO: 420551 - RNA, 19 nt, Human
accaguguuggacaguggu

SEQ ID NO: 420552 - RNA, 23 nt, Human
accaguguuggacagugguuuug

SEQ ID NO: 420553 - RNA, 21 nt, Human
agaacacagauaccaguguug

SEQ ID NO: 420554 - RNA, 18 nt, Human
agagggcuuggugacggg

SEQ ID NO: 420555 - RNA, 18 nt, Human
agcaaccaacaauagcaa

SEQ ID NO: 420556 - RNA, 18 nt, Human
agcucugcagaggccagc

SEQ ID NO: 420557 - RNA, 21 nt, Human
aggagcgguggcucacgccua

SEQ ID NO: 420558 - RNA, 24 nt, Human
aggaucgcuugagaucaagagcuc

SEQ ID NO: 420559 - RNA, 22 nt, Human
aggcagggaggaucgcuugaga

SEQ ID NO: 420560 - RNA, 24 nt, Human
aggcagggaggaucgcuugagauc

SEQ ID NO: 420561 - RNA, 21 nt, Human
aggccgaggcagggaggaucg

SEQ ID NO: 420562 - RNA, 25 nt, Human
aggccgaggcagggaggaucgcuug

SEQ ID NO: 420563 - RNA, 19 nt, Human
aggggaagagagccagggc

SEQ ID NO: 420564 - RNA, 19 nt, Human
aggugccugccccacaaag

SEQ ID NO: 420565 - RNA, 18 nt, Human
aguagcucugggaaaugg

SEQ ID NO: 420566 - RNA, 23 nt, Human
auagcacaaaagaacacagauac

SEQ ID NO: 420567 - RNA, 18 nt, Human
auggggacugggugacag

SEQ ID NO: 420568 - RNA, 19 nt, Human
caaaagaacacagauacca

SEQ ID NO: 420569 - RNA, 23 nt, Human
caacaauagcaauuaggaaucca

SEQ ID NO: 420570 - RNA, 18 nt, Human
caagcugaugccaacacc

SEQ ID NO: 420571 - RNA, 21 nt, Human
cacaacacuguuuaaucagcu

SEQ ID NO: 420572 - RNA, 18 nt, Human
cacagauaccaguguugg

SEQ ID NO: 420573 - RNA, 18 nt, Human
cacgcauggccagguggu

SEQ ID NO: 420574 - RNA, 24 nt, Human
cacgccuauaaucccagcacguug

SEQ ID NO: 420575 - RNA, 18 nt, Human
cacggccgccccauccug

SEQ ID NO: 420576 - RNA, 21 nt, Human
cacugaaucauccguacaucc

SEQ ID NO: 420577 - RNA, 20 nt, Human
cacuggcgggcgggcagggc

SEQ ID NO: 420578 - RNA, 23 nt, Human
cagaaaucucuacucugaaaucc

SEQ ID NO: 420579 - RNA, 24 nt, Human
cagcacguugggaggccgaggcag

SEQ ID NO: 420580 - RNA, 25 nt, Human
cagcacguugggaggccgaggcagg

SEQ ID NO: 420581 - RNA, 25 nt, Human
caguggucccucuuugccuuggcuc

SEQ ID NO: 420582 - RNA, 23 nt, Human
cauuuaaaaccccagcaaccaac

SEQ ID NO: 420583 - RNA, 20 nt, Human
ccaggagcaaccauggcagg

SEQ ID NO: 420584 - RNA, 18 nt, Human
ccaggguuccucaccacg

SEQ ID NO: 420585 - RNA, 18 nt, Human
cccacaaagccugggucg

SEQ ID NO: 420586 - RNA, 20 nt, Human
cccagcacguugggaggccg

SEQ ID NO: 420587 - RNA, 25 nt, Human
cccagcucuucccaugagacaguca

SEQ ID NO: 420588 - RNA, 21 nt, Human
ccccacaaagccugggucggg

SEQ ID NO: 420589 - RNA, 24 nt, Human
ccccauccugagcccgcacaccug

SEQ ID NO: 420590 - RNA, 24 nt, Human
ccccucuauaaguuaacuguacaa

SEQ ID NO: 420591 - RNA, 18 nt, Human
cccgcacaccugcccaag

SEQ ID NO: 420592 - RNA, 23 nt, Human
cccucuauaaguuaacuguacaa

SEQ ID NO: 420593 - RNA, 21 nt, Human
ccguccauaccaggagccggg

SEQ ID NO: 420594 - RNA, 19 nt, Human
ccucuugugaugcugagag

SEQ ID NO: 420595 - RNA, 26 nt, Human
ccugcagcucccgugaguaacugucu

SEQ ID NO: 420596 - RNA, 27 nt, Human
ccugcagcucccgugaguaacugucuu

SEQ ID NO: 420597 - RNA, 19 nt, Human
ccugccccacaaagccugg

SEQ ID NO: 420598 - RNA, 19 nt, Human
ccugggucgggagagggcu

SEQ ID NO: 420599 - RNA, 23 nt, Human
cgccuauaaucccagcacguugg

SEQ ID NO: 420600 - RNA, 24 nt, Human
cgccuauaaucccagcacguuggg

SEQ ID NO: 420601 - RNA, 21 nt, Human
cuaggagacaacacagaaauc

SEQ ID NO: 420602 - RNA, 20 nt, Human
cucaaggucccucugggccc

SEQ ID NO: 420603 - RNA, 22 nt, Human
cucacgccuauaaucccagcac

SEQ ID NO: 420604 - RNA, 22 nt, Human
cucacgccuauaaucccagcac

SEQ ID NO: 420605 - RNA, 22 nt, Human
cuccagaccagccuaggcaaca

SEQ ID NO: 420606 - RNA, 19 nt, Human
cucugggccccagcucuuc

SEQ ID NO: 420607 - RNA, 21 nt, Human
cugaugccaacaccacugaca

SEQ ID NO: 420608 - RNA, 19 nt, Human
cugcagaggccagcccugg

SEQ ID NO: 420609 - RNA, 22 nt, Human
cugggccccagcucuucccaug

SEQ ID NO: 420610 - RNA, 20 nt, Human
cuuccaggagcaaccauggc

SEQ ID NO: 420611 - RNA, 24 nt, Human
cuuccugagugaacugaagcccaa

SEQ ID NO: 420612 - RNA, 19 nt, Human
cuuggcuccuuucuucuug

SEQ ID NO: 420613 - RNA, 27 nt, Human
cuuugccuuggcuccuuucuucuuggu

SEQ ID NO: 420614 - RNA, 19 nt, Human
gagagggcuuggugacggg

SEQ ID NO: 420615 - RNA, 19 nt, Human
gagcagaggaggauucagg

SEQ ID NO: 420616 - RNA, 19 nt, Human
gagccagggccccacccaa

SEQ ID NO: 420617 - RNA, 23 nt, Human
gaggggaccuacucugcccuguu

SEQ ID NO: 420618 - RNA, 18 nt, Human
gaucgcuugagaucaaga

SEQ ID NO: 420619 - RNA, 22 nt, Human
gcagcgauggguccaugagcac

SEQ ID NO: 420620 - RNA, 20 nt, Human
gccagggccccacccaacaa

SEQ ID NO: 420621 - RNA, 27 nt, Human
gccccagcucuucccaugagacaguca

SEQ ID NO: 420622 - RNA, 20 nt, Human
gcccuguucuggucacuacu

SEQ ID NO: 420623 - RNA, 19 nt, Human
gcguggccuggugaaugga

SEQ ID NO: 420624 - RNA, 23 nt, Human
ggaucgcuugagaucaagagcuc

SEQ ID NO: 420625 - RNA, 21 nt, Human
ggccaggagcgguggcucacg

SEQ ID NO: 420626 - RNA, 18 nt, Human
ggcgacagccucauuucu

SEQ ID NO: 420627 - RNA, 21 nt, Human
ggcucacgccuauaaucccag

SEQ ID NO: 420628 - RNA, 24 nt, Human
gguggcucacgccuauaaucccag

SEQ ID NO: 420629 - RNA, 19 nt, Human
gugcacgcauggccaggug

SEQ ID NO: 420630 - RNA, 20 nt, Human
gugcacgcauggccaggugg

SEQ ID NO: 420631 - RNA, 23 nt, Human
guggcucacgccuauaaucccag

SEQ ID NO: 420632 - RNA, 20 nt, Human
guggucccucuuugccuugg

SEQ ID NO: 420633 - RNA, 19 nt, Human
uagcacaaaagaacacaga

SEQ ID NO: 420634 - RNA, 21 nt, Human
uagcacaaaagaacacagaua

SEQ ID NO: 420635 - RNA, 22 nt, Human
uagcacaaaagaacacagauac

SEQ ID NO: 420636 - RNA, 18 nt, Human
uagcucugggaaaugguc

SEQ ID NO: 420637 - RNA, 21 nt, Human
ucauagcacaaaagaacacag

SEQ ID NO: 420638 - RNA, 23 nt, Human
ucccaggcugugcacgcauggcc

SEQ ID NO: 420639 - RNA, 19 nt, Human
uccguccauaccaggagcc

SEQ ID NO: 420640 - RNA, 22 nt, Human
uccugagcccgcacaccugccc

SEQ ID NO: 420641 - RNA, 19 nt, Human
uccuuggaaggcagcgaug

SEQ ID NO: 420642 - RNA, 21 nt, Human
ucuauaaguuaacuguacaag

SEQ ID NO: 420643 - RNA, 26 nt, Human
ucugcagaggccagcccuggagcagg

SEQ ID NO: 420644 - RNA, 21 nt, Human
ugaaauaaacuacauguaaug

SEQ ID NO: 420645 - RNA, 18 nt, Human
ugaagcccaaagaaaggg

SEQ ID NO: 420646 - RNA, 21 nt, Human
ugagcccgcacaccugcccaa

SEQ ID NO: 420647 - RNA, 23 nt, Human
ugcccuguucuggucacuacuuc

SEQ ID NO: 420648 - RNA, 24 nt, Human
uggccaggagcgguggcucacgcc

SEQ ID NO: 420649 - RNA, 21 nt, Human
uggcucacgccuauaauccca

SEQ ID NO: 420650 - RNA, 22 nt, Human
uggcucacgccuauaaucccag

SEQ ID NO: 420651 - RNA, 24 nt, Human
uggcucacgccuauaaucccagca

SEQ ID NO: 420652 - RNA, 19 nt, Human
uggcuccugguguugccuu

SEQ ID NO: 420653 - RNA, 19 nt, Human
uggcuccugguguugccuu

SEQ ID NO: 420654 - RNA, 18 nt, Human
ugggaggccgaggcaggg

SEQ ID NO: 420655 - RNA, 24 nt, Human
ugggaggccgaggcagggaggauc

SEQ ID NO: 420656 - RNA, 22 nt, Human
ugguuggaggagauacuuuuuc

SEQ ID NO: 420657 - RNA, 19 nt, Human
uuaaaaccccagcaaccaa

SEQ ID NO: 420658 - RNA, 19 nt, Human
uugagauguuuugguugga

SEQ ID NO: 420659 - RNA, 25 nt, Human
uugggaggccgaggcagggaggauc

SEQ ID NO: 420660 - RNA, 20 nt, Human
uuuucuggcaacauuucuga

SEQ ID NO: 420661 - RNA, 20 nt, Human
uuuuuuuuuucaacuaaaau

SEQ ID NO: 420662 - RNA, 23 nt, Human
uuuuuuuuuuuucaacuaaaaug

SEQ ID NO: 420663 - RNA, 19 nt, Human
aaaaaggaaagauacccac

SEQ ID NO: 420664 - RNA, 18 nt, Human
aaaaggaaagauacccac

SEQ ID NO: 420665 - RNA, 20 nt, Human
aaacucuagugccugauucg

SEQ ID NO: 420666 - RNA, 24 nt, Human
aagcacaaaaucugacaaugaaac

SEQ ID NO: 420667 - RNA, 24 nt, Human
aagcacaaaaucugacaaugaaac

SEQ ID NO: 420668 - RNA, 26 nt, Human
aagcacaaaaucugacaaugaaacau

SEQ ID NO: 420669 - RNA, 26 nt, Human
aagcacaaaaucugacaaugaaacau

SEQ ID NO: 420670 - RNA, 24 nt, Human
aagcaugauggugaaacggugacc

SEQ ID NO: 420671 - RNA, 24 nt, Human
aagcaugauggugaaacggugacc

SEQ ID NO: 420672 - RNA, 24 nt, Human
acaaggguucuaaaaacuuggaca

SEQ ID NO: 420673 - RNA, 24 nt, Human
acaaggguucuaaaaacuuggaca

SEQ ID NO: 420674 - RNA, 24 nt, Human
acacgcaaaaacacucccaaucac

SEQ ID NO: 420675 - RNA, 19 nt, Human
agagcagaagagggaaaga

SEQ ID NO: 420676 - RNA, 19 nt, Human
agagcagaagagggaaaga

SEQ ID NO: 420677 - RNA, 24 nt, Human
agagggaaagacaggggaacauca

SEQ ID NO: 420678 - RNA, 24 nt, Human
agagggaaagacaggggaacauca

SEQ ID NO: 420679 - RNA, 23 nt, Human
agcagaagagggaaagacagggg

SEQ ID NO: 420680 - RNA, 23 nt, Human
agcagaagagggaaagacagggg

SEQ ID NO: 420681 - RNA, 29 nt, Human
agccaacauuuaccagugauuccgacacc

SEQ ID NO: 420682 - RNA, 21 nt, Human
agccgcggcggggccaggggc

SEQ ID NO: 420683 - RNA, 21 nt, Human
agccgcggcggggccaggggc

SEQ ID NO: 420684 - RNA, 24 nt, Human
agccuccggggccggcccgcgcug

SEQ ID NO: 420685 - RNA, 23 nt, Human
augauggugaaacggugaccagg

SEQ ID NO: 420686 - RNA, 23 nt, Human
augauggugaaacggugaccagg

SEQ ID NO: 420687 - RNA, 20 nt, Human
cacagaaauagagaaaugac

SEQ ID NO: 420688 - RNA, 23 nt, Human
caccuguacaaccuccccugaca

SEQ ID NO: 420689 - RNA, 23 nt, Human
caccuguacaaccuccccugaca

SEQ ID NO: 420690 - RNA, 30 nt, Human
cagccaacauuuaccagugauuccgacacc

SEQ ID NO: 420691 - RNA, 24 nt, Human
caggaacaugagccccccggcuca

SEQ ID NO: 420692 - RNA, 24 nt, Human
caggaacaugagccccccggcuca

SEQ ID NO: 420693 - RNA, 21 nt, Human
ccauccagaggcggggguggg

SEQ ID NO: 420694 - RNA, 19 nt, Human
cccacaauuccauucuuaa

SEQ ID NO: 420695 - RNA, 19 nt, Human
cccacaauuccauucuuaa

SEQ ID NO: 420696 - RNA, 22 nt, Human
cccccggcucauucaccuguac

SEQ ID NO: 420697 - RNA, 22 nt, Human
cccccggcucauucaccuguac

SEQ ID NO: 420698 - RNA, 18 nt, Human
ccgcgcugcgaauuacac

SEQ ID NO: 420699 - RNA, 24 nt, Human
ccuccccugacagauagugagagc

SEQ ID NO: 420700 - RNA, 24 nt, Human
ccuccccugacagauagugagagc

SEQ ID NO: 420701 - RNA, 20 nt, Human
ccuuugcucuugagagcaga

SEQ ID NO: 420702 - RNA, 20 nt, Human
ccuuugcucuugagagcaga

SEQ ID NO: 420703 - RNA, 21 nt, Human
cgacacacgcaaaaacacucc

SEQ ID NO: 420704 - RNA, 21 nt, Human
cgacacacgcaaaaacacucc

SEQ ID NO: 420705 - RNA, 22 nt, Human
cgaggccgagcccggggacugg

SEQ ID NO: 420706 - RNA, 23 nt, Human
cgaggccggggcucagaggccag

SEQ ID NO: 420707 - RNA, 21 nt, Human
cgcaaaaacacucccaaucac

SEQ ID NO: 420708 - RNA, 25 nt, Human
cugcacugaaaaagaaaaggaaggg

SEQ ID NO: 420709 - RNA, 21 nt, Human
cugcacugaaaaagaaaaggc

SEQ ID NO: 420710 - RNA, 21 nt, Human
cugcacugaaaaagaaaaggc

SEQ ID NO: 420711 - RNA, 18 nt, Human
cuguggguuuuaguuaug

SEQ ID NO: 420712 - RNA, 18 nt, Human
cuguggguuuuaguuaug

SEQ ID NO: 420713 - RNA, 22 nt, Human
gagacagacaucuguucaacac

SEQ ID NO: 420714 - RNA, 22 nt, Human
gagacagacaucuguucaacac

SEQ ID NO: 420715 - RNA, 18 nt, Human
gagagccuccggggccgg

SEQ ID NO: 420716 - RNA, 21 nt, Human
gagcccggggacuggagccgg

SEQ ID NO: 420717 - RNA, 23 nt, Human
gagccgcggcggggccaggggcu

SEQ ID NO: 420718 - RNA, 21 nt, Human
gagguggcgcucugaaggcag

SEQ ID NO: 420719 - RNA, 21 nt, Human
gagguggcgcucugaaggcag

SEQ ID NO: 420720 - RNA, 24 nt, Human
gccggcccgcgcugcgaauuacac

SEQ ID NO: 420721 - RNA, 23 nt, Human
gccucuugugguggggugggggc

SEQ ID NO: 420722 - RNA, 24 nt, Human
gccucuugugguggggugggggca

SEQ ID NO: 420723 - RNA, 18 nt, Human
gcucugugugcuuuggag

SEQ ID NO: 420724 - RNA, 20 nt, Human
ggccaggggcucugugugcu

SEQ ID NO: 420725 - RNA, 20 nt, Human
ggccaggggcucugugugcu

SEQ ID NO: 420726 - RNA, 25 nt, Human
ggccggcccgcgcugcgaauuacac

SEQ ID NO: 420727 - RNA, 20 nt, Human
ggcggggccaggggcucugu

SEQ ID NO: 420728 - RNA, 20 nt, Human
ggcggggccaggggcucugu

SEQ ID NO: 420729 - RNA, 23 nt, Human
ggcggggccaggggcucugugug

SEQ ID NO: 420730 - RNA, 23 nt, Human
ggcggggccaggggcucugugug

SEQ ID NO: 420731 - RNA, 24 nt, Human
gggaaagacaggggaacaucaaag

SEQ ID NO: 420732 - RNA, 24 nt, Human
gggaaagacaggggaacaucaaag

SEQ ID NO: 420733 - RNA, 23 nt, Human
gggcucugugugcuuuggaggcu

SEQ ID NO: 420734 - RNA, 23 nt, Human
gggcucugugugcuuuggaggcu

SEQ ID NO: 420735 - RNA, 21 nt, Human
ggggccggcccgcgcugcgaa

SEQ ID NO: 420736 - RNA, 21 nt, Human
ggggcucugugugcuuuggag

SEQ ID NO: 420737 - RNA, 18 nt, Human
gguccauccagaggcggg

SEQ ID NO: 420738 - RNA, 20 nt, Human
gguggggugggggcaugggg

SEQ ID NO: 420739 - RNA, 20 nt, Human
gugguggggugggggcaugg

SEQ ID NO: 420740 - RNA, 18 nt, Human
gugugagucacacacuag

SEQ ID NO: 420741 - RNA, 18 nt, Human
gugugagucacacacuag

SEQ ID NO: 420742 - RNA, 18 nt, Human
uacagugacuucaucuuu

SEQ ID NO: 420743 - RNA, 18 nt, Human
uacagugacuucaucuuu

SEQ ID NO: 420744 - RNA, 25 nt, Human
uacauuaaaaaaaaaggaaagauac

SEQ ID NO: 420745 - RNA, 25 nt, Human
uacauuaaaaaaaaaggaaagauac

SEQ ID NO: 420746 - RNA, 18 nt, Human
uacccacaauuccauucu

SEQ ID NO: 420747 - RNA, 18 nt, Human
uacccacaauuccauucu

SEQ ID NO: 420748 - RNA, 24 nt, Human
ucacagaaauagagaaaugacaug

SEQ ID NO: 420749 - RNA, 18 nt, Human
ucagaggccagcucgcgc

SEQ ID NO: 420750 - RNA, 22 nt, Human
ucagaggccagcucgcgccugc

SEQ ID NO: 420751 - RNA, 22 nt, Human
uccgaggccggggcucagaggc

SEQ ID NO: 420752 - RNA, 20 nt, Human
ucgccgagagccuccggggc

SEQ ID NO: 420753 - RNA, 20 nt, Human
ucuaaaaacuuggacacggu

SEQ ID NO: 420754 - RNA, 20 nt, Human
ucuaaaaacuuggacacggu

SEQ ID NO: 420755 - RNA, 18 nt, Human
ucugcacugaaaaagaaa

SEQ ID NO: 420756 - RNA, 18 nt, Human
ucugcacugaaaaagaaa

SEQ ID NO: 420757 - RNA, 19 nt, Human
ugaaaaagaaaaggaaggg

SEQ ID NO: 420758 - RNA, 23 nt, Human
ugagagcagaagagggaaagaca

SEQ ID NO: 420759 - RNA, 23 nt, Human
ugagagcagaagagggaaagaca

SEQ ID NO: 420760 - RNA, 19 nt, Human
ugagagccgcggcggggcc

SEQ ID NO: 420761 - RNA, 19 nt, Human
ugagagccgcggcggggcc

SEQ ID NO: 420762 - RNA, 20 nt, Human
ugagagccgcggcggggcca

SEQ ID NO: 420763 - RNA, 20 nt, Human
ugagagccgcggcggggcca

SEQ ID NO: 420764 - RNA, 18 nt, Human
ugaucuggagguggcgcu

SEQ ID NO: 420765 - RNA, 18 nt, Human
ugaucuggagguggcgcu

SEQ ID NO: 420766 - RNA, 22 nt, Human
ugccucuugugguggggugggg

SEQ ID NO: 420767 - RNA, 23 nt, Human
uggagguggcgcucugaaggcag

SEQ ID NO: 420768 - RNA, 21 nt, Human
uggagugggcgguccgaggcc

SEQ ID NO: 420769 - RNA, 18 nt, Human
uggggugggggcaugggg

SEQ ID NO: 420770 - RNA, 20 nt, Human
uggggugggggcaugggggc

SEQ ID NO: 420771 - RNA, 23 nt, Human
ugguggggugggggcaugggggg

SEQ ID NO: 420772 - RNA, 25 nt, Human
ugugguggggugggggcaugggggc

SEQ ID NO: 420773 - RNA, 24 nt, Human
uguguccccaucugaucuggaggu

SEQ ID NO: 420774 - RNA, 24 nt, Human
uguguccccaucugaucuggaggu

SEQ ID NO: 420775 - RNA, 19 nt, Human
uuuaauuauuucucaggcu

SEQ ID NO: 420776 - RNA, 19 nt, Human
uuuaauuauuucucaggcu

SEQ ID NO: 420777 - RNA, 20 nt, Human
uuuuuuuuuuuuuuuuuugg

SEQ ID NO: 420778 - RNA, 20 nt, Human
uuuuuuuuuuuuuuuuuugg

SEQ ID NO: 420779 - RNA, 30 nt, Human
aaccgccucacuaacggucgccacuccacu

SEQ ID NO: 420780 - RNA, 20 nt, Human
cacagcccagcagaccccuu

SEQ ID NO: 420781 - RNA, 19 nt, Human
cagaccccaaggcgggcag

SEQ ID NO: 420782 - RNA, 20 nt, Human
cagcgucugucucagcaacc

SEQ ID NO: 420783 - RNA, 20 nt, Human
ccaaggcgggcagagggugg

SEQ ID NO: 420784 - RNA, 20 nt, Human
ccagaaaagcagcaaaagca

SEQ ID NO: 420785 - RNA, 23 nt, Human
ccuuacggcucgggcuccuccua

SEQ ID NO: 420786 - RNA, 24 nt, Human
cgccucagcgucugucucagcaac

SEQ ID NO: 420787 - RNA, 20 nt, Human
cuaacggucgccacuccaca

SEQ ID NO: 420788 - RNA, 18 nt, Human
gggcuccuccuacccgcc

SEQ ID NO: 420789 - RNA, 23 nt, Human
uaccccuggcaacguacaugcgc

SEQ ID NO: 420790 - RNA, 23 nt, Human
ucagcgucugucucagcaaccgc

SEQ ID NO: 420791 - RNA, 18 nt, Human
uguccgaaagggaaagcc

SEQ ID NO: 420792 - RNA, 20 nt, Human
ugucucagcaaccgccucac

SEQ ID NO: 420793 - RNA, 18 nt, Human
uuuuuuuuuuuuuuuuug

SEQ ID NO: 420794 - RNA, 22 nt, Human
uuuuuuuuuuuuuuuuugacag

SEQ ID NO: 420795 - RNA, 19 nt, Human
aaggaaaaaguugaaaaaa

SEQ ID NO: 420796 - RNA, 22 nt, Human
acaaauaccuaauuaaaacaau

SEQ ID NO: 420797 - RNA, 23 nt, Human
acacacacacacacacacacaca

SEQ ID NO: 420798 - RNA, 23 nt, Human
acacacacacacacacacacaca

SEQ ID NO: 420799 - RNA, 23 nt, Human
acacacacacacacacacacaca

SEQ ID NO: 420800 - RNA, 23 nt, Human
acacacacacacacacacacaca

SEQ ID NO: 420801 - RNA, 23 nt, Human
acacacacacacacacacacaca

SEQ ID NO: 420802 - RNA, 23 nt, Human
acacacacacacacacacacaca

SEQ ID NO: 420803 - RNA, 31 nt, Human
acacacacacacacacacacacgaaguguag

SEQ ID NO: 420804 - RNA, 21 nt, Human
acacauacacacacacacaca

SEQ ID NO: 420805 - RNA, 21 nt, Human
agaaauggagcccagcccaua

SEQ ID NO: 420806 - RNA, 27 nt, Human
agugucaacuauauauauguaugugua

SEQ ID NO: 420807 - RNA, 24 nt, Human
auacacauacacacacacacacac

SEQ ID NO: 420808 - RNA, 24 nt, Human
auauacagacauaacuugcagaag

SEQ ID NO: 420809 - RNA, 18 nt, Human
auguauguguacauacac

SEQ ID NO: 420810 - RNA, 20 nt, Human
cacacacacacacacacaca

SEQ ID NO: 420811 - RNA, 20 nt, Human
cacacacacacacacacaca

SEQ ID NO: 420812 - RNA, 20 nt, Human
cacacacacacacacacaca

SEQ ID NO: 420813 - RNA, 20 nt, Human
cacacacacacacacacaca

SEQ ID NO: 420814 - RNA, 20 nt, Human
cacacacacacacacacaca

SEQ ID NO: 420815 - RNA, 20 nt, Human
cacacacacacacacacaca

SEQ ID NO: 420816 - RNA, 20 nt, Human
cacacacacacacacacaca

SEQ ID NO: 420817 - RNA, 20 nt, Human
cacacacacacacacacaca

SEQ ID NO: 420818 - RNA, 22 nt, Human
cacacacacacacacacacaca

SEQ ID NO: 420819 - RNA, 26 nt, Human
cacacacacacacacacacacacaca

SEQ ID NO: 420820 - RNA, 26 nt, Human
cacacacacacacacacacacacaca

SEQ ID NO: 420821 - RNA, 26 nt, Human
cacacacacacacacacacacacaca

SEQ ID NO: 420822 - RNA, 26 nt, Human
cacacacacacacacacacacacaca

SEQ ID NO: 420823 - RNA, 26 nt, Human
cacacacacacacacacacacacaca

SEQ ID NO: 420824 - RNA, 26 nt, Human
cacacacacacacacacacacacacg

SEQ ID NO: 420825 - RNA, 30 nt, Human
cacacacacacacacacacacacgaagugg

SEQ ID NO: 420826 - RNA, 26 nt, Human
cacauacacacacacacacacacaca

SEQ ID NO: 420827 - RNA, 21 nt, Human
caccugguugucucaauaggc

SEQ ID NO: 420828 - RNA, 25 nt, Human
cauacacacacacacacacacacac

SEQ ID NO: 420829 - RNA, 21 nt, Human
caucugccauaaaaaaauacg

SEQ ID NO: 420830 - RNA, 19 nt, Human
ccaucaggcaaagcuggaa

SEQ ID NO: 420831 - RNA, 21 nt, Human
cuaaguaacauuuucuuuucu

SEQ ID NO: 420832 - RNA, 26 nt, Human
cuuuaaaggaaaaaguugaaaaaaaa

SEQ ID NO: 420833 - RNA, 22 nt, Human
gcggggcguaggggugggucag

SEQ ID NO: 420834 - RNA, 21 nt, Human
gcguaggggugggucagugcc

SEQ ID NO: 420835 - RNA, 30 nt, Human
guauguguacauacacauacacacacacag

SEQ ID NO: 420836 - RNA, 23 nt, Human
gugucaacuauauauauguaugu

SEQ ID NO: 420837 - RNA, 22 nt, Human
uaacuugcagaagguuaagucu

SEQ ID NO: 420838 - RNA, 20 nt, Human
uaagaugacgccaacucuuc

SEQ ID NO: 420839 - RNA, 21 nt, Human
uaagucugaggacgcuguucu

SEQ ID NO: 420840 - RNA, 19 nt, Human
uacaauauauauaauacau

SEQ ID NO: 420841 - RNA, 20 nt, Human
uacacacacacacacacaca

SEQ ID NO: 420842 - RNA, 25 nt, Human
uacacacacacacacacacacacac

SEQ ID NO: 420843 - RNA, 22 nt, Human
uaccacaggugaagcaaucuca

SEQ ID NO: 420844 - RNA, 21 nt, Human
uauauacagacauaacuugca

SEQ ID NO: 420845 - RNA, 22 nt, Human
uauguauguguacauacacaua

SEQ ID NO: 420846 - RNA, 21 nt, Human
ucaauaggcaguaaaaccuaa

SEQ ID NO: 420847 - RNA, 18 nt, Human
ucagaagcccagccaggc

SEQ ID NO: 420848 - RNA, 21 nt, Human
ugaaaaaaaaaagauaccaca

SEQ ID NO: 420849 - RNA, 20 nt, Human
ugacugugcggggcguaggg

SEQ ID NO: 420850 - RNA, 24 nt, Human
ugagagcacagaaaguuuuuaaac

SEQ ID NO: 420851 - RNA, 18 nt, Human
ugcauuuuuauggccaaa

SEQ ID NO: 420852 - RNA, 23 nt, Human
ugccauaaaaaaauacgaaaaac

SEQ ID NO: 420853 - RNA, 22 nt, Human
uggaaaccacauccugauauca

SEQ ID NO: 420854 - RNA, 22 nt, Human
uggaauuccaucaggcaaagcu

SEQ ID NO: 420855 - RNA, 19 nt, Human
uggggaaucaaaaguuaua

SEQ ID NO: 420856 - RNA, 19 nt, Human
ugguugucucaauaggcag

SEQ ID NO: 420857 - RNA, 20 nt, Human
uguauguguacauacacaua

SEQ ID NO: 420858 - RNA, 28 nt, Human
uguguacauacacauacacacacacaca

SEQ ID NO: 420859 - RNA, 23 nt, Human
uuggggaaucaaaaguuauaugc

SEQ ID NO: 420860 - RNA, 23 nt, Human
uuuaaaggaaaaaguugaaaaaa

SEQ ID NO: 420861 - RNA, 18 nt, Human
uuuaagaugacgccaacu

SEQ ID NO: 420862 - RNA, 24 nt, Human
uuucucuagcuuacuuuaagaaua

SEQ ID NO: 420863 - RNA, 26 nt, Human
uuuuuagcucuaagauccaugacacu

SEQ ID NO: 420864 - RNA, 23 nt, Human
aaacauccaccaugccagaaacg

SEQ ID NO: 420865 - RNA, 21 nt, Human
aacaugaaaacauccaccaug

SEQ ID NO: 420866 - RNA, 27 nt, Human
aaccagaaagggggcacaggcacccag

SEQ ID NO: 420867 - RNA, 22 nt, Human
aagaccuucuccuccgaggcac

SEQ ID NO: 420868 - RNA, 19 nt, Human
aagcagaggacaaaucaca

SEQ ID NO: 420869 - RNA, 24 nt, Human
acaacaugaaaacauccaccaugc

SEQ ID NO: 420870 - RNA, 19 nt, Human
accaagaccuucuccuccg

SEQ ID NO: 420871 - RNA, 19 nt, Human
accagaaagggggcacagg

SEQ ID NO: 420872 - RNA, 18 nt, Human
acccgcccgccucaccgc

SEQ ID NO: 420873 - RNA, 24 nt, Human
acuuggagaagguggacgccagaa

SEQ ID NO: 420874 - RNA, 26 nt, Human
agaaacacagacagcugccgccacca

SEQ ID NO: 420875 - RNA, 19 nt, Human
agccaggcccgugcucaca

SEQ ID NO: 420876 - RNA, 19 nt, Human
agccugugcuggugacaca

SEQ ID NO: 420877 - RNA, 23 nt, Human
agcggaaaaacauaucccauaag

SEQ ID NO: 420878 - RNA, 23 nt, Human
aggcacccagcaagagccugugc

SEQ ID NO: 420879 - RNA, 21 nt, Human
agggagccacucuccaggagc

SEQ ID NO: 420880 - RNA, 19 nt, Human
aguuaaaaagcuuuuccua

SEQ ID NO: 420881 - RNA, 22 nt, Human
auccgaacaagcucaucgucgg

SEQ ID NO: 420882 - RNA, 22 nt, Human
augccagaaacgucagcccaca

SEQ ID NO: 420883 - RNA, 21 nt, Human
augccaggaugcaggggaaca

SEQ ID NO: 420884 - RNA, 18 nt, Human
caaaauagcugccagacu

SEQ ID NO: 420885 - RNA, 22 nt, Human
caacaugaaaacauccaccaug

SEQ ID NO: 420886 - RNA, 19 nt, Human
cacaggcacccagcaagag

SEQ ID NO: 420887 - RNA, 22 nt, Human
caccaccggcucacacgcagcc

SEQ ID NO: 420888 - RNA, 22 nt, Human
caccaucugugccaccgaugcc

SEQ ID NO: 420889 - RNA, 19 nt, Human
caccgaugccagacagagc

SEQ ID NO: 420890 - RNA, 19 nt, Human
caccuuuuccuucuugaag

SEQ ID NO: 420891 - RNA, 19 nt, Human
cagagcucccugcgacucc

SEQ ID NO: 420892 - RNA, 21 nt, Human
cagcaacaucccuguggcucu

SEQ ID NO: 420893 - RNA, 22 nt, Human
cagcaacaucccuguggcucug

SEQ ID NO: 420894 - RNA, 19 nt, Human
caggcacccagcaagagcc

SEQ ID NO: 420895 - RNA, 20 nt, Human
caggggacagccccauccuc

SEQ ID NO: 420896 - RNA, 21 nt, Human
ccaccaagaccuucuccuccg

SEQ ID NO: 420897 - RNA, 18 nt, Human
ccagaaagggggcacagg

SEQ ID NO: 420898 - RNA, 21 nt, Human
ccagccaggcccgugcucaca

SEQ ID NO: 420899 - RNA, 24 nt, Human
ccaugccagaaacgucagcccaca

SEQ ID NO: 420900 - RNA, 20 nt, Human
ccccuuuauuuucuugugac

SEQ ID NO: 420901 - RNA, 20 nt, Human
cccgccucaccgccauacac

SEQ ID NO: 420902 - RNA, 21 nt, Human
cccgugcucacacuuccugaa

SEQ ID NO: 420903 - RNA, 22 nt, Human
cccuguaaaccgggugccagcc

SEQ ID NO: 420904 - RNA, 23 nt, Human
ccucaaucaccucccuguaaacc

SEQ ID NO: 420905 - RNA, 27 nt, Human
ccucaccgccauacacaugugccagcc

SEQ ID NO: 420906 - RNA, 25 nt, Human
cgaaaaggaguagacgucuccagac

SEQ ID NO: 420907 - RNA, 20 nt, Human
cgcaccgcuccccuggucca

SEQ ID NO: 420908 - RNA, 19 nt, Human
cgccaccaccggcucacac

SEQ ID NO: 420909 - RNA, 21 nt, Human
cggcggaacaacaugaaaaag

SEQ ID NO: 420910 - RNA, 21 nt, Human
cgggugccagccaggcccgug

SEQ ID NO: 420911 - RNA, 22 nt, Human
cucccuguaaaccgggugccag

SEQ ID NO: 420912 - RNA, 24 nt, Human
cucccuguaaaccgggugccagcc

SEQ ID NO: 420913 - RNA, 27 nt, Human
cucuagacggccacacccguguggcuc

SEQ ID NO: 420914 - RNA, 19 nt, Human
cugagcuggucacaacuga

SEQ ID NO: 420915 - RNA, 19 nt, Human
cuucaagagcuuccacucc

SEQ ID NO: 420916 - RNA, 21 nt, Human
gaacaacaugaaaacauccac

SEQ ID NO: 420917 - RNA, 20 nt, Human
gacaaaucacagaugcuccu

SEQ ID NO: 420918 - RNA, 24 nt, Human
gagaacaggagaaacacagacagc

SEQ ID NO: 420919 - RNA, 21 nt, Human
gagaagguucauccuugcuga

SEQ ID NO: 420920 - RNA, 18 nt, Human
gauggagcuacauccgaa

SEQ ID NO: 420921 - RNA, 18 nt, Human
gcaaaauagcugccagac

SEQ ID NO: 420922 - RNA, 25 nt, Human
gcccagagccucuuccuguccgcac

SEQ ID NO: 420923 - RNA, 26 nt, Human
gcccagagccucuuccuguccgcacc

SEQ ID NO: 420924 - RNA, 21 nt, Human
ggcacaggcacccagcaagag

SEQ ID NO: 420925 - RNA, 22 nt, Human
ggcaggcucaagcauucgugcu

SEQ ID NO: 420926 - RNA, 18 nt, Human
ggcggaacaacaugaaaa

SEQ ID NO: 420927 - RNA, 26 nt, Human
gggcacaggcacccagcaagagccug

SEQ ID NO: 420928 - RNA, 24 nt, Human
gggcuggggcaggcucaagcauuc

SEQ ID NO: 420929 - RNA, 23 nt, Human
gucacaacugaugucaccuuuuc

SEQ ID NO: 420930 - RNA, 23 nt, Human
uaaaccgggugccagccaggccc

SEQ ID NO: 420931 - RNA, 22 nt, Human
uacacaugugccagcccagagc

SEQ ID NO: 420932 - RNA, 23 nt, Human
uaucccauaagcagaggacaaau

SEQ ID NO: 420933 - RNA, 23 nt, Human
ucaagagcuuccacuccacuggu

SEQ ID NO: 420934 - RNA, 21 nt, Human
ucaccuuuuccuucuugaagg

SEQ ID NO: 420935 - RNA, 24 nt, Human
uccagacuugucggccaccaagac

SEQ ID NO: 420936 - RNA, 18 nt, Human
uccccugguccaagggcg

SEQ ID NO: 420937 - RNA, 23 nt, Human
ucggccgacagaucgcacgcaag

SEQ ID NO: 420938 - RNA, 22 nt, Human
ucuccuccgaggcuaugaaagu

SEQ ID NO: 420939 - RNA, 19 nt, Human
ucugucaucgguuaaagca

SEQ ID NO: 420940 - RNA, 25 nt, Human
ucugugccaccgaugccagacagag

SEQ ID NO: 420941 - RNA, 26 nt, Human
ucugugccaccgaugccagacagagc

SEQ ID NO: 420942 - RNA, 25 nt, Human
ugaaaacauccaccaugccagaaac

SEQ ID NO: 420943 - RNA, 23 nt, Human
ugaaaagaaagugcuucaagagc

SEQ ID NO: 420944 - RNA, 19 nt, Human
ugagaacaggagaaacaca

SEQ ID NO: 420945 - RNA, 23 nt, Human
ugagagacaccacugaccgccac

SEQ ID NO: 420946 - RNA, 21 nt, Human
ugagcuggucacaacugaugu

SEQ ID NO: 420947 - RNA, 20 nt, Human
ugccacggucugucaucggu

SEQ ID NO: 420948 - RNA, 19 nt, Human
ugccagacagagcucccug

SEQ ID NO: 420949 - RNA, 21 nt, Human
ugccaggaugcaggggaacaa

SEQ ID NO: 420950 - RNA, 22 nt, Human
ugccaggaugcaggggaacaag

SEQ ID NO: 420951 - RNA, 20 nt, Human
ugccccagcucuagacggcc

SEQ ID NO: 420952 - RNA, 22 nt, Human
ugcugaguuucaacagccugug

SEQ ID NO: 420953 - RNA, 23 nt, Human
uguaaaccgggugccagccaggc

SEQ ID NO: 420954 - RNA, 23 nt, Human
ugugacuucuuuucugcagcacu

SEQ ID NO: 420955 - RNA, 24 nt, Human
ugugccaccgaugccagacagagc

SEQ ID NO: 420956 - RNA, 25 nt, Human
uucaagagcuuccacuccacugguc

SEQ ID NO: 420957 - RNA, 21 nt, Human
uuccuagucaaaaauuuacua

SEQ ID NO: 420958 - RNA, 19 nt, Human
uugaaauucagcaacaucc

SEQ ID NO: 420959 - RNA, 20 nt, Human
uuucuugugacuucuuuucu

SEQ ID NO: 420960 - RNA, 24 nt, Human
uuuuuuuuuuugaguuuugccugg

SEQ ID NO: 420961 - RNA, 18 nt, Human
uuuuuuuuuuuuuuuuug

SEQ ID NO: 420962 - RNA, 24 nt, Human
uuuuuuuuuuuuuuuuuugaguuu

SEQ ID NO: 420963 - RNA, 20 nt, Human
uuuuuuuuuuuuuuuuuugg

SEQ ID NO: 420964 - RNA, 21 nt, Human
aaucacugaauccagaccacc

SEQ ID NO: 420965 - RNA, 19 nt, Human
acaguggagaaccuccugg

SEQ ID NO: 420966 - RNA, 21 nt, Human
cagaccaccacaguggagaac

SEQ ID NO: 420967 - RNA, 21 nt, Human
ccacacuggaaacacagagua

SEQ ID NO: 420968 - RNA, 23 nt, Human
ccacccugcgcccgaaaacccgc

SEQ ID NO: 420969 - RNA, 21 nt, Human
cccacacuggaaacacagagu

SEQ ID NO: 420970 - RNA, 19 nt, Human
ccccugggcgcgcagcagg

SEQ ID NO: 420971 - RNA, 22 nt, Human
ccccugggcgcgcagcaggcug

SEQ ID NO: 420972 - RNA, 18 nt, Human
cccugcgcccgaaaaccc

SEQ ID NO: 420973 - RNA, 21 nt, Human
ccgcgggcgccacccugcgcc

SEQ ID NO: 420974 - RNA, 19 nt, Human
ccuccuggugaagcugugu

SEQ ID NO: 420975 - RNA, 22 nt, Human
ccugcgcccgaaaacccgcggg

SEQ ID NO: 420976 - RNA, 22 nt, Human
cgccacccugcgcccgaaaacc

SEQ ID NO: 420977 - RNA, 28 nt, Human
cugcgcccgaaaacccgcgggaccccaa

SEQ ID NO: 420978 - RNA, 22 nt, Human
cuggugaagcuguguuuuuucc

SEQ ID NO: 420979 - RNA, 18 nt, Human
gcacacguuagugcaccg

SEQ ID NO: 420980 - RNA, 22 nt, Human
gggcgccacccugcgcccgaaa

SEQ ID NO: 420981 - RNA, 21 nt, Human
uaccauacauauuuacaaaaa

SEQ ID NO: 420982 - RNA, 21 nt, Human
uagaaucaaucacugaaucca

SEQ ID NO: 420983 - RNA, 23 nt, Human
ucaaucacugaauccagaccacc

SEQ ID NO: 420984 - RNA, 22 nt, Human
ucacugaauccagaccaccaca

SEQ ID NO: 420985 - RNA, 21 nt, Human
ugcuauagaaaaauagaauca

SEQ ID NO: 420986 - RNA, 18 nt, Human
uggaaacacagaguagcc

SEQ ID NO: 420987 - RNA, 21 nt, Human
uucccacacuggaaacacaga

SEQ ID NO: 420988 - RNA, 22 nt, Human
uuugcuauagaaaaauagaauc

SEQ ID NO: 420989 - RNA, 23 nt, Human
uuuuuuuuuuaaaucagcaagua

SEQ ID NO: 420990 - RNA, 24 nt, Human
aaaaaaaaaagaaauauaagaugg

SEQ ID NO: 420991 - RNA, 21 nt, Human
aaaaaagaaauauaagaugga

SEQ ID NO: 420992 - RNA, 19 nt, Human
aaaaggagggcgcgacgua

SEQ ID NO: 420993 - RNA, 24 nt, Human
aaaauuaaugagaaaacaaacaga

SEQ ID NO: 420994 - RNA, 20 nt, Human
aaacagacuaauaauacaau

SEQ ID NO: 420995 - RNA, 25 nt, Human
aaacagcagcacaguugcccaccac

SEQ ID NO: 420996 - RNA, 19 nt, Human
aaacauguuuuagaccaaa

SEQ ID NO: 420997 - RNA, 18 nt, Human
aaagacaagugcaaacau

SEQ ID NO: 420998 - RNA, 22 nt, Human
aaauauugaagagaaaaaccgg

SEQ ID NO: 420999 - RNA, 19 nt, Human
aacccgcuggcuccacccc

SEQ ID NO: 421000 - RNA, 21 nt, Human
aacuauaagcagcacaccacc

SEQ ID NO: 421001 - RNA, 18 nt, Human
aagagccagggaccgaau

SEQ ID NO: 421002 - RNA, 23 nt, Human
aaggcaauaccuccacagaauca

SEQ ID NO: 421003 - RNA, 26 nt, Human
acaagucaaagacaagugcaaacaug

SEQ ID NO: 421004 - RNA, 27 nt, Human
acgaagaucgguuuauauacacaaaua

SEQ ID NO: 421005 - RNA, 18 nt, Human
acuauaagcagcacacca

SEQ ID NO: 421006 - RNA, 18 nt, Human
acuggggcguagugggcg

SEQ ID NO: 421007 - RNA, 24 nt, Human
agaccaaaauuaaugagaaaacaa

SEQ ID NO: 421008 - RNA, 27 nt, Human
agagcucucccaagcagggguccaccu

SEQ ID NO: 421009 - RNA, 18 nt, Human
agcagcacaccaccacag

SEQ ID NO: 421010 - RNA, 24 nt, Human
agccccauuauuuccccggggugg

SEQ ID NO: 421011 - RNA, 20 nt, Human
agccgacccgaaagccggcc

SEQ ID NO: 421012 - RNA, 21 nt, Human
agccggccuggacgcagcccc

SEQ ID NO: 421013 - RNA, 19 nt, Human
aggagggcgcgacguagcc

SEQ ID NO: 421014 - RNA, 22 nt, Human
aggcggccgggcagcgcuuccg

SEQ ID NO: 421015 - RNA, 25 nt, Human
aggggcaggcggccgggcagcgcuu

SEQ ID NO: 421016 - RNA, 18 nt, Human
aucugaagaggggcaggc

SEQ ID NO: 421017 - RNA, 23 nt, Human
caaaaagaagaccuauuaacaac

SEQ ID NO: 421018 - RNA, 21 nt, Human
caaaagaaacagcagcacagu

SEQ ID NO: 421019 - RNA, 23 nt, Human
caaaagagagcuggauucgccua

SEQ ID NO: 421020 - RNA, 26 nt, Human
caaaauuaaugagaaaacaaacagac

SEQ ID NO: 421021 - RNA, 18 nt, Human
caaacuauaagcagcaca

SEQ ID NO: 421022 - RNA, 24 nt, Human
caacagcaaacuauaagcagcaca

SEQ ID NO: 421023 - RNA, 27 nt, Human
cacaauuaaaaaaaaaaaagaaauaua

SEQ ID NO: 421024 - RNA, 24 nt, Human
caccacagugguuaacccuggaaa

SEQ ID NO: 421025 - RNA, 20 nt, Human
caccacgaaaccaagugccc

SEQ ID NO: 421026 - RNA, 27 nt, Human
caccacgaaaccaagugcccggcacac

SEQ ID NO: 421027 - RNA, 19 nt, Human
caccgaggcugaggucucc

SEQ ID NO: 421028 - RNA, 23 nt, Human
cagcaaacuauaagcagcacacc

SEQ ID NO: 421029 - RNA, 22 nt, Human
cagcuuucaacuguaauucaca

SEQ ID NO: 421030 - RNA, 19 nt, Human
caggcggccgggcagcgcu

SEQ ID NO: 421031 - RNA, 19 nt, Human
cauagcaaucaucaaaaua

SEQ ID NO: 421032 - RNA, 19 nt, Human
ccaaaagaaacagcagcac

SEQ ID NO: 421033 - RNA, 18 nt, Human
ccagggaccgaauggccu

SEQ ID NO: 421034 - RNA, 22 nt, Human
cccuggggcgagccacuggggc

SEQ ID NO: 421035 - RNA, 20 nt, Human
ccgcuggcuccacccccggc

SEQ ID NO: 421036 - RNA, 19 nt, Human
ccggaaauggugacucggg

SEQ ID NO: 421037 - RNA, 18 nt, Human
ccggccuggacgcagccc

SEQ ID NO: 421038 - RNA, 19 nt, Human
ccggcgccgcccgaacacc

SEQ ID NO: 421039 - RNA, 24 nt, Human
ccggggugggugacuguuaggggc

SEQ ID NO: 421040 - RNA, 19 nt, Human
ccuaugagcgagccugggg

SEQ ID NO: 421041 - RNA, 24 nt, Human
ccucggaggccgcuucuugccccu

SEQ ID NO: 421042 - RNA, 21 nt, Human
cgaaagccggccuggacgcag

SEQ ID NO: 421043 - RNA, 21 nt, Human
cgagccuggggcggcgggggg

SEQ ID NO: 421044 - RNA, 21 nt, Human
cgagcugggaagagccaggga

SEQ ID NO: 421045 - RNA, 18 nt, Human
cgcccggacggggcuggg

SEQ ID NO: 421046 - RNA, 22 nt, Human
cgccuaagccgacccgaaagcc

SEQ ID NO: 421047 - RNA, 19 nt, Human
cggccaaaagaaacagcag

SEQ ID NO: 421048 - RNA, 24 nt, Human
cuaaucaguaaaacuacugacacc

SEQ ID NO: 421049 - RNA, 18 nt, Human
cuccggugcugggggauc

SEQ ID NO: 421050 - RNA, 23 nt, Human
gaaagccggccuggacgcagccc

SEQ ID NO: 421051 - RNA, 18 nt, Human
gaacaaguuacaaaacca

SEQ ID NO: 421052 - RNA, 21 nt, Human
gaacccgcuggcuccaccccc

SEQ ID NO: 421053 - RNA, 19 nt, Human
gaaugucagaagucauucu

SEQ ID NO: 421054 - RNA, 25 nt, Human
gaccaaaauuaaugagaaaacaaac

SEQ ID NO: 421055 - RNA, 21 nt, Human
gagaaaaaccgggcaaaacau

SEQ ID NO: 421056 - RNA, 18 nt, Human
gagccagggaccgaaugg

SEQ ID NO: 421057 - RNA, 21 nt, Human
gagcgagccuggggcggcggg

SEQ ID NO: 421058 - RNA, 22 nt, Human
gccagggaccgaauggccuucg

SEQ ID NO: 421059 - RNA, 18 nt, Human
gcgcgacguagcccgcgg

SEQ ID NO: 421060 - RNA, 18 nt, Human
gcggacgguggcggcagc

SEQ ID NO: 421061 - RNA, 19 nt, Human
gcggacuuuccggcagagg

SEQ ID NO: 421062 - RNA, 20 nt, Human
ggcaugcguuggcaaaaccg

SEQ ID NO: 421063 - RNA, 22 nt, Human
ggcccgagcaccgaggcugagg

SEQ ID NO: 421064 - RNA, 24 nt, Human
ggccuccgagccccauuauuuccc

SEQ ID NO: 421065 - RNA, 24 nt, Human
ggcggcgcggacuuuccggcagag

SEQ ID NO: 421066 - RNA, 18 nt, Human
ggcggcggggggcccggc

SEQ ID NO: 421067 - RNA, 18 nt, Human
gggcaaaagagagcugga

SEQ ID NO: 421068 - RNA, 18 nt, Human
gggcggguccgccacgug

SEQ ID NO: 421069 - RNA, 18 nt, Human
gggcguggcagugggcag

SEQ ID NO: 421070 - RNA, 19 nt, Human
gggcguggcagugggcagc

SEQ ID NO: 421071 - RNA, 22 nt, Human
ggggugggugacuguuaggggc

SEQ ID NO: 421072 - RNA, 20 nt, Human
guaauaaagcccuugaguac

SEQ ID NO: 421073 - RNA, 20 nt, Human
guccccuggggcgagccacu

SEQ ID NO: 421074 - RNA, 19 nt, Human
gugaaaaacuuggaauguc

SEQ ID NO: 421075 - RNA, 24 nt, Human
uaaaaaaaaaaaagaaauauaaga

SEQ ID NO: 421076 - RNA, 19 nt, Human
uaaaacacaagucaaagac

SEQ ID NO: 421077 - RNA, 26 nt, Human
uaaaauagcagcaaauucacaaggca

SEQ ID NO: 421078 - RNA, 19 nt, Human
uaagccgacccgaaagccg

SEQ ID NO: 421079 - RNA, 18 nt, Human
uacaaugcaacagcaaac

SEQ ID NO: 421080 - RNA, 21 nt, Human
uacagaagacagacugguaag

SEQ ID NO: 421081 - RNA, 18 nt, Human
uacagcaaagacaaaacu

SEQ ID NO: 421082 - RNA, 22 nt, Human
uagcccgcgggggaaggaccag

SEQ ID NO: 421083 - RNA, 22 nt, Human
uauaagauggacacacagguac

SEQ ID NO: 421084 - RNA, 19 nt, Human
ucaaaauacagcuuucaac

SEQ ID NO: 421085 - RNA, 22 nt, Human
ucaaagacaagugcaaacaugu

SEQ ID NO: 421086 - RNA, 26 nt, Human
ucaaaggaaaaaaaaaaaaggcaaau

SEQ ID NO: 421087 - RNA, 20 nt, Human
ucaaauggcuaaucacagau

SEQ ID NO: 421088 - RNA, 23 nt, Human
ucacaguguucagggggaggugg

SEQ ID NO: 421089 - RNA, 21 nt, Human
ucagggggaggugggaaagga

SEQ ID NO: 421090 - RNA, 24 nt, Human
ucagugauuucaaccuagcuuccu

SEQ ID NO: 421091 - RNA, 21 nt, Human
uccaaaggagggaaagggugc

SEQ ID NO: 421092 - RNA, 23 nt, Human
uccaaugcacuagcuucaaaguu

SEQ ID NO: 421093 - RNA, 21 nt, Human
uccacagaaucaucaucccau

SEQ ID NO: 421094 - RNA, 21 nt, Human
ucccaugguucaugcaaugcc

SEQ ID NO: 421095 - RNA, 24 nt, Human
uccgcggccaaaagaaaccggggc

SEQ ID NO: 421096 - RNA, 20 nt, Human
uccgcggcuucccgcgaccg

SEQ ID NO: 421097 - RNA, 21 nt, Human
uccgggucucugcgagcuggg

SEQ ID NO: 421098 - RNA, 22 nt, Human
ucgccuaagccgacccgaaagc

SEQ ID NO: 421099 - RNA, 21 nt, Human
ucggcgccagccaagucuggg

SEQ ID NO: 421100 - RNA, 18 nt, Human
ucugaacugcgggagccg

SEQ ID NO: 421101 - RNA, 19 nt, Human
ugaaaaacuuggaauguca

SEQ ID NO: 421102 - RNA, 18 nt, Human
ugaaagccugacauagca

SEQ ID NO: 421103 - RNA, 20 nt, Human
ugacaccaaucgagaaaguu

SEQ ID NO: 421104 - RNA, 22 nt, Human
ugagcgagccuggggcggcggg

SEQ ID NO: 421105 - RNA, 26 nt, Human
ugcugggggaucugaagaggggcagg

SEQ ID NO: 421106 - RNA, 20 nt, Human
ugcuuaggcuggacacuggc

SEQ ID NO: 421107 - RNA, 18 nt, Human
uggaaugucagaagucau

SEQ ID NO: 421108 - RNA, 23 nt, Human
uggaaugucagaagucauucugg

SEQ ID NO: 421109 - RNA, 19 nt, Human
uggauucuaucagugauuu

SEQ ID NO: 421110 - RNA, 19 nt, Human
uggcagugggcagccacgu

SEQ ID NO: 421111 - RNA, 26 nt, Human
ugggaagagccagggaccgaauggug

SEQ ID NO: 421112 - RNA, 23 nt, Human
ugggaggaggccuccgagcccca

SEQ ID NO: 421113 - RNA, 20 nt, Human
ugggaggggcaaaagagagc

SEQ ID NO: 421114 - RNA, 21 nt, Human
uggggcggcggggggcccggc

SEQ ID NO: 421115 - RNA, 24 nt, Human
ugguguaacauccaacagugacac

SEQ ID NO: 421116 - RNA, 25 nt, Human
uguaacauccaacagugacacaucc

SEQ ID NO: 421117 - RNA, 21 nt, Human
uguaauucacaauaaaagucc

SEQ ID NO: 421118 - RNA, 22 nt, Human
ugugcuuaggcuggacacuggc

SEQ ID NO: 421119 - RNA, 21 nt, Human
uguuuacauuuguucgccagc

SEQ ID NO: 421120 - RNA, 23 nt, Human
uuaauacagcauuccaaaggagg

SEQ ID NO: 421121 - RNA, 26 nt, Human
uucaaaggaaaaaaaaaaaaggcaaa

SEQ ID NO: 421122 - RNA, 19 nt, Human
uucaaagggaggguauguc

SEQ ID NO: 421123 - RNA, 20 nt, Human
uucacaauuaaaaaaaaaaa

SEQ ID NO: 421124 - RNA, 24 nt, Human
uucacaauuaaaaaaaaaaaagaa

SEQ ID NO: 421125 - RNA, 20 nt, Human
uucagggggaggugggaaag

SEQ ID NO: 421126 - RNA, 20 nt, Human
uuccaaaggagggaaagggu

SEQ ID NO: 421127 - RNA, 18 nt, Human
uugaaaaaaaaaggaggg

SEQ ID NO: 421128 - RNA, 23 nt, Human
acaaagucacccaaccaggcugg

SEQ ID NO: 421129 - RNA, 19 nt, Human
agcaugcacagucugcugg

SEQ ID NO: 421130 - RNA, 18 nt, Human
ccagacgcacacagaaga

SEQ ID NO: 421131 - RNA, 20 nt, Human
ccaggaugguaaaacaggga

SEQ ID NO: 421132 - RNA, 20 nt, Human
ccaggcugggccaaacuggg

SEQ ID NO: 421133 - RNA, 20 nt, Human
cccaaccaggcugggccaaa

SEQ ID NO: 421134 - RNA, 20 nt, Human
cucguggagcugcagggccu

SEQ ID NO: 421135 - RNA, 19 nt, Human
gagccuugucuuagaaagg

SEQ ID NO: 421136 - RNA, 19 nt, Human
ggagcugcagggccuugcu

SEQ ID NO: 421137 - RNA, 24 nt, Human
gguuugagggccagguguccuguc

SEQ ID NO: 421138 - RNA, 19 nt, Human
uaaaacagggacccagagc

SEQ ID NO: 421139 - RNA, 23 nt, Human
uaaaacagggacccagagcuguu

SEQ ID NO: 421140 - RNA, 21 nt, Human
uaaaggucucguggagcugca

SEQ ID NO: 421141 - RNA, 25 nt, Human
uaaguggcucccacaaagucaccca

SEQ ID NO: 421142 - RNA, 22 nt, Human
uagaggaauguucuugcaaccu

SEQ ID NO: 421143 - RNA, 23 nt, Human
uagcagaaaguagaggaauguuu

SEQ ID NO: 421144 - RNA, 21 nt, Human
uaguaagcaaguucauuucca

SEQ ID NO: 421145 - RNA, 20 nt, Human
ucccaacuguuuccaaggcu

SEQ ID NO: 421146 - RNA, 19 nt, Human
ucccacaaagucacccaac

SEQ ID NO: 421147 - RNA, 19 nt, Human
ucccucggaucaugugucc

SEQ ID NO: 421148 - RNA, 21 nt, Human
ucccugggcagcgaccuucca

SEQ ID NO: 421149 - RNA, 21 nt, Human
uccgcguccagcacaugcccc

SEQ ID NO: 421150 - RNA, 23 nt, Human
ucucguggagcugcagggccuug

SEQ ID NO: 421151 - RNA, 19 nt, Human
ucuugcucugcugagcuga

SEQ ID NO: 421152 - RNA, 21 nt, Human
ugggcggcggcuucuucccgg

SEQ ID NO: 421153 - RNA, 23 nt, Human
uggggacaggagcaugcacaguc

SEQ ID NO: 421154 - RNA, 18 nt, Human
uggguacauaccucccag

SEQ ID NO: 421155 - RNA, 22 nt, Human
uuaaguggcucccacaaaguca

SEQ ID NO: 421156 - RNA, 22 nt, Human
uucaugggcggcggcuucuucc

SEQ ID NO: 421157 - RNA, 24 nt, Human
uucuuaguuccacccagcaggguc

SEQ ID NO: 421158 - RNA, 24 nt, Human
uuuuuuuuuuuucuuauuugguug

SEQ ID NO: 421159 - RNA, 21 nt, Human
uuuuuuuuuuuuuucuuauuu

SEQ ID NO: 421160 - RNA, 23 nt, Human
uuuuuuuuuuuuuucuuauuugg

SEQ ID NO: 421161 - RNA, 20 nt, Human
aaagugcuuuuccagacacc

SEQ ID NO: 421162 - RNA, 19 nt, Human
aagugcuuuuccagacacc

SEQ ID NO: 421163 - RNA, 18 nt, Human
acccuggcuuucugcucc

SEQ ID NO: 421164 - RNA, 19 nt, Human
acccuggcuuucugcucca

SEQ ID NO: 421165 - RNA, 19 nt, Human
agccgcccccacaggguuc

SEQ ID NO: 421166 - RNA, 22 nt, Human
cacacugccaaugugccgccuc

SEQ ID NO: 421167 - RNA, 21 nt, Human
cagaaaaguuguucgggagca

SEQ ID NO: 421168 - RNA, 26 nt, Human
cagcagccuucccuuugucggggucc

SEQ ID NO: 421169 - RNA, 18 nt, Human
caugcaauucccaacaca

SEQ ID NO: 421170 - RNA, 24 nt, Human
ccacgcaaucuacacauggucgca

SEQ ID NO: 421171 - RNA, 19 nt, Human
ccagaggcuuuuauuucag

SEQ ID NO: 421172 - RNA, 22 nt, Human
cccaacacacuugguauucaga

SEQ ID NO: 421173 - RNA, 25 nt, Human
ccccagccucugauggggccgggcc

SEQ ID NO: 421174 - RNA, 21 nt, Human
ccucauggcaacaugcacuuc

SEQ ID NO: 421175 - RNA, 22 nt, Human
ccugccggcccgugagugggcc

SEQ ID NO: 421176 - RNA, 22 nt, Human
cuccaaggcacugaacacaguc

SEQ ID NO: 421177 - RNA, 18 nt, Human
cucccccacagccgcccc

SEQ ID NO: 421178 - RNA, 20 nt, Human
cuucacacauucacccacua

SEQ ID NO: 421179 - RNA, 19 nt, Human
cuugaaggugggggaggag

SEQ ID NO: 421180 - RNA, 20 nt, Human
gaaggugggggaggagaggg

SEQ ID NO: 421181 - RNA, 20 nt, Human
gaaggugggggaggagaggg

SEQ ID NO: 421182 - RNA, 23 nt, Human
gagcagcugaacgcggcgcaaac

SEQ ID NO: 421183 - RNA, 19 nt, Human
gagugggccgcacgcggcg

SEQ ID NO: 421184 - RNA, 18 nt, Human
gcaugccugucgggcugg

SEQ ID NO: 421185 - RNA, 18 nt, Human
gcccuggggccucugggc

SEQ ID NO: 421186 - RNA, 19 nt, Human
gcccuggggccucugggcc

SEQ ID NO: 421187 - RNA, 20 nt, Human
gccgccucccccagccucuu

SEQ ID NO: 421188 - RNA, 22 nt, Human
ggaccucccccacagccgcccu

SEQ ID NO: 421189 - RNA, 20 nt, Human
ggcccgugagugggccgcac

SEQ ID NO: 421190 - RNA, 21 nt, Human
ggcgcugcgacgcccuggggc

SEQ ID NO: 421191 - RNA, 28 nt, Human
gggaccucccccacagccgcccccacag

SEQ ID NO: 421192 - RNA, 20 nt, Human
gggaggagagggaaucucau

SEQ ID NO: 421193 - RNA, 19 nt, Human
ggggaaaggccucauggca

SEQ ID NO: 421194 - RNA, 22 nt, Human
ggggaagagcugcuaaggugua

SEQ ID NO: 421195 - RNA, 25 nt, Human
ggugcaugccugucgggcuggggcc

SEQ ID NO: 421196 - RNA, 23 nt, Human
guaaagugcuuuuccagacaccg

SEQ ID NO: 421197 - RNA, 24 nt, Human
gugcaugccugucgggcuggggcc

SEQ ID NO: 421198 - RNA, 28 nt, Human
uaaacaaauccaacacaaaagaaagaaa

SEQ ID NO: 421199 - RNA, 20 nt, Human
uagcagugaccaaacaaaua

SEQ ID NO: 421200 - RNA, 21 nt, Human
uccaacacaaaagaaagaaag

SEQ ID NO: 421201 - RNA, 22 nt, Human
uccaacacaaaagaaagaaaga

SEQ ID NO: 421202 - RNA, 19 nt, Human
ucccccacagccgccccca

SEQ ID NO: 421203 - RNA, 22 nt, Human
ucgggagcagcugaacgcggcg

SEQ ID NO: 421204 - RNA, 20 nt, Human
ucuacacauggucgcaaggu

SEQ ID NO: 421205 - RNA, 24 nt, Human
ugaagagccggcuagcgcggccuu

SEQ ID NO: 421206 - RNA, 24 nt, Human
ugccggcccgugagugggccgcac

SEQ ID NO: 421207 - RNA, 23 nt, Human
ugcuggacaggagggucaugagg

SEQ ID NO: 421208 - RNA, 19 nt, Human
uggacagagcuacacagca

SEQ ID NO: 421209 - RNA, 23 nt, Human
uggcaacaugcacuggaagcucc

SEQ ID NO: 421210 - RNA, 21 nt, Human
ugggggaggagagggaaucuc

SEQ ID NO: 421211 - RNA, 22 nt, Human
ugggggaggagagggaaucuca

SEQ ID NO: 421212 - RNA, 25 nt, Human
uguagcagugaccaaacaaauaaga

SEQ ID NO: 421213 - RNA, 19 nt, Human
uuaaacaaauccaacacaa

SEQ ID NO: 421214 - RNA, 21 nt, Human
uuucugcuccaaggcacugaa

SEQ ID NO: 421215 - RNA, 21 nt, Human
uuuuaaacaaauccaacacaa

SEQ ID NO: 421216 - RNA, 22 nt, Human
aaacgcuggagcugacgaagcu

SEQ ID NO: 421217 - RNA, 19 nt, Human
aaggauggguagagaaugg

SEQ ID NO: 421218 - RNA, 21 nt, Human
acagacaacccagggaggagc

SEQ ID NO: 421219 - RNA, 20 nt, Human
accaggcaaacgcuggagcu

SEQ ID NO: 421220 - RNA, 19 nt, Human
acgcuugcucuuugggggc

SEQ ID NO: 421221 - RNA, 23 nt, Human
agugugagcuagggacagggcau

SEQ ID NO: 421222 - RNA, 21 nt, Human
augucagaaugggggucuggg

SEQ ID NO: 421223 - RNA, 22 nt, Human
cagacaacccagggaggagcuc

SEQ ID NO: 421224 - RNA, 21 nt, Human
caggugauguccucugcgccc

SEQ ID NO: 421225 - RNA, 18 nt, Human
ccagaccaggcaaacgcu

SEQ ID NO: 421226 - RNA, 19 nt, Human
ccagaccaggcaaacgcug

SEQ ID NO: 421227 - RNA, 24 nt, Human
cccaguccuggccucaaagaaagc

SEQ ID NO: 421228 - RNA, 24 nt, Human
ccccagaaacgaagucgggcuucg

SEQ ID NO: 421229 - RNA, 19 nt, Human
cgagggggccaggacugca

SEQ ID NO: 421230 - RNA, 22 nt, Human
cgcucagcucucaguugcccca

SEQ ID NO: 421231 - RNA, 22 nt, Human
cgcuucugggaaagaaaaugac

SEQ ID NO: 421232 - RNA, 23 nt, Human
gaaaaugacgagggggccaggac

SEQ ID NO: 421233 - RNA, 22 nt, Human
gagcauguggaugucagaaugg

SEQ ID NO: 421234 - RNA, 25 nt, Human
gcaccccaggugauguccucugcgc

SEQ ID NO: 421235 - RNA, 23 nt, Human
gcucucagugauggagugcuggu

SEQ ID NO: 421236 - RNA, 18 nt, Human
gcuugcucuuugggggcc

SEQ ID NO: 421237 - RNA, 21 nt, Human
ggguagagaauggcugagugg

SEQ ID NO: 421238 - RNA, 22 nt, Human
uaugucacccuggggaaagcug

SEQ ID NO: 421239 - RNA, 20 nt, Human
ucacccuggggaaagcugga

SEQ ID NO: 421240 - RNA, 23 nt, Human
uccagaccaggcaaacgcuggag

SEQ ID NO: 421241 - RNA, 25 nt, Human
ucucugucuccuccuucuugcuggg

SEQ ID NO: 421242 - RNA, 20 nt, Human
ucugucuccuccuucuugcu

SEQ ID NO: 421243 - RNA, 23 nt, Human
ugaagaugggggaauaaauacag

SEQ ID NO: 421244 - RNA, 24 nt, Human
ugcucuuugggggcccugggugag

SEQ ID NO: 421245 - RNA, 22 nt, Human
uggagcugacgaagcugggccg

SEQ ID NO: 421246 - RNA, 19 nt, Human
uggagugcugguuccucug

SEQ ID NO: 421247 - RNA, 19 nt, Human
ugggggaauaaauacaggg

SEQ ID NO: 421248 - RNA, 20 nt, Human
uggggggaucuuuggccugg

SEQ ID NO: 421249 - RNA, 19 nt, Human
ugggggucuggggggaucu

SEQ ID NO: 421250 - RNA, 25 nt, Human
ugggugaggagcugggccaccacgu

SEQ ID NO: 421251 - RNA, 22 nt, Human
ugucacccuggggaaagcugga

SEQ ID NO: 421252 - RNA, 23 nt, Human
ugugagaggcagcaccccaggug

SEQ ID NO: 421253 - RNA, 23 nt, Human
ugugcacgagggcuuaagugugg

SEQ ID NO: 421254 - RNA, 24 nt, Human
uuccucuggcuguaagauaugugg

SEQ ID NO: 421255 - RNA, 19 nt, Human
uugcugggcuguugggaug

SEQ ID NO: 421256 - RNA, 24 nt, Human
aaaaaaauauacaaaguuaucccc

SEQ ID NO: 421257 - RNA, 24 nt, Human
aaaaaaauauacaaaguuaucccc

SEQ ID NO: 421258 - RNA, 24 nt, Human
aaaaaaauauacaaaguuaucccc

SEQ ID NO: 421259 - RNA, 24 nt, Human
aaaaaaauauacaaaguuaucccc

SEQ ID NO: 421260 - RNA, 21 nt, Human
aaaaagaaccaagucuuaaaa

SEQ ID NO: 421261 - RNA, 21 nt, Human
aaaaagaaccaagucuuaaaa

SEQ ID NO: 421262 - RNA, 21 nt, Human
aaaaagaaccaagucuuaaaa

SEQ ID NO: 421263 - RNA, 24 nt, Human
aaaaagaaccaagucuuaaaacau

SEQ ID NO: 421264 - RNA, 24 nt, Human
aaaaagaaccaagucuuaaaacau

SEQ ID NO: 421265 - RNA, 24 nt, Human
aaaaagaaccaagucuuaaaacau

SEQ ID NO: 421266 - RNA, 20 nt, Human
aaaaaugcggacaccugggg

SEQ ID NO: 421267 - RNA, 19 nt, Human
aaaacauuccauaugccaa

SEQ ID NO: 421268 - RNA, 19 nt, Human
aaaacauuccauaugccaa

SEQ ID NO: 421269 - RNA, 19 nt, Human
aaaacauuccauaugccaa

SEQ ID NO: 421270 - RNA, 19 nt, Human
aaaacauuccauaugccaa

SEQ ID NO: 421271 - RNA, 19 nt, Human
aaaacucuuccugccucuu

SEQ ID NO: 421272 - RNA, 22 nt, Human
aaaagccuuucaagauagaguc

SEQ ID NO: 421273 - RNA, 22 nt, Human
aaaaggccaacaacuauaggua

SEQ ID NO: 421274 - RNA, 24 nt, Human
aaaaggccauaaaaaagcaccugc

SEQ ID NO: 421275 - RNA, 24 nt, Human
aaaaggccauaaaaaagcaccugc

SEQ ID NO: 421276 - RNA, 24 nt, Human
aaaaggccauaaaaaagcaccugc

SEQ ID NO: 421277 - RNA, 23 nt, Human
aaacaaaagcagacaaacuguac

SEQ ID NO: 421278 - RNA, 25 nt, Human
aaacaaaagcagacaaacuguacaa

SEQ ID NO: 421279 - RNA, 22 nt, Human
aaacaaaauucaccucaacaac

SEQ ID NO: 421280 - RNA, 26 nt, Human
aaacaaaugugaugaaagggaggaaa

SEQ ID NO: 421281 - RNA, 18 nt, Human
aaacagcaauucucaugg

SEQ ID NO: 421282 - RNA, 24 nt, Human
aaacaggcccacacgagugucccc

SEQ ID NO: 421283 - RNA, 24 nt, Human
aaacaggcccacacgagugucccc

SEQ ID NO: 421284 - RNA, 24 nt, Human
aaacaggcccacacgagugucccc

SEQ ID NO: 421285 - RNA, 25 nt, Human
aaacaggcccacacgagugucccca

SEQ ID NO: 421286 - RNA, 25 nt, Human
aaacaggcccacacgagugucccca

SEQ ID NO: 421287 - RNA, 25 nt, Human
aaacaggcccacacgagugucccca

SEQ ID NO: 421288 - RNA, 21 nt, Human
aaacauauguaguacucagau

SEQ ID NO: 421289 - RNA, 21 nt, Human
aaacauauguaguacucagau

SEQ ID NO: 421290 - RNA, 21 nt, Human
aaacauauguaguacucagau

SEQ ID NO: 421291 - RNA, 18 nt, Human
aaacaucacaaaaugcuu

SEQ ID NO: 421292 - RNA, 20 nt, Human
aaacaugaggcaagggccgg

SEQ ID NO: 421293 - RNA, 29 nt, Human
aaaccaaaacuaccuccgaacaaaaaaag

SEQ ID NO: 421294 - RNA, 18 nt, Human
aaacccugcaagcucagg

SEQ ID NO: 421295 - RNA, 19 nt, Human
aaacccugcaagcucaggg

SEQ ID NO: 421296 - RNA, 19 nt, Human
aaacccugcaagcucaggg

SEQ ID NO: 421297 - RNA, 22 nt, Human
aaacugguaaagaaaagccaaa

SEQ ID NO: 421298 - RNA, 22 nt, Human
aaacugguaaagaaaagccaaa

SEQ ID NO: 421299 - RNA, 22 nt, Human
aaacugguaaagaaaagccaaa

SEQ ID NO: 421300 - RNA, 22 nt, Human
aaacugguaaagaaaagccaaa

SEQ ID NO: 421301 - RNA, 23 nt, Human
aaagaaaagccaaaugaaaaaaa

SEQ ID NO: 421302 - RNA, 23 nt, Human
aaagaaaagccaaaugaaaaaaa

SEQ ID NO: 421303 - RNA, 23 nt, Human
aaagaaaagccaaaugaaaaaaa

SEQ ID NO: 421304 - RNA, 23 nt, Human
aaagaaaagccaaaugaaaaaaa

SEQ ID NO: 421305 - RNA, 21 nt, Human
aaagaaaugaagcaaguugcc

SEQ ID NO: 421306 - RNA, 21 nt, Human
aaagagcagaguaaugaucac

SEQ ID NO: 421307 - RNA, 21 nt, Human
aaagagcagaguaaugaucac

SEQ ID NO: 421308 - RNA, 21 nt, Human
aaagagcagaguaaugaucac

SEQ ID NO: 421309 - RNA, 21 nt, Human
aaagagcagaguaaugaucac

SEQ ID NO: 421310 - RNA, 21 nt, Human
aaagaugaggcugucgggcug

SEQ ID NO: 421311 - RNA, 19 nt, Human
aaagccaugaaaugcauga

SEQ ID NO: 421312 - RNA, 18 nt, Human
aaagcgccacacacacaa

SEQ ID NO: 421313 - RNA, 23 nt, Human
aaagcucuuuaaagcaaaaaucu

SEQ ID NO: 421314 - RNA, 19 nt, Human
aaaggaccaaagccaugaa

SEQ ID NO: 421315 - RNA, 20 nt, Human
aaagugcacugcaaagccga

SEQ ID NO: 421316 - RNA, 19 nt, Human
aaaucuuuggcuuccucca

SEQ ID NO: 421317 - RNA, 23 nt, Human
aaaugaaaaagaaaugaagcaag

SEQ ID NO: 421318 - RNA, 23 nt, Human
aaaugcccaucuccccaccccac

SEQ ID NO: 421319 - RNA, 24 nt, Human
aacaaaagcagacaaacuguacaa

SEQ ID NO: 421320 - RNA, 18 nt, Human
aacaaaauucaccucaac

SEQ ID NO: 421321 - RNA, 19 nt, Human
aacaaagcugggcagggcc

SEQ ID NO: 421322 - RNA, 19 nt, Human
aacaaagcugggcagggcc

SEQ ID NO: 421323 - RNA, 20 nt, Human
aacacaaaaucagaucuccc

SEQ ID NO: 421324 - RNA, 23 nt, Human
aacacacguacgaggcacgcaca

SEQ ID NO: 421325 - RNA, 18 nt, Human
aacaggguauggugaggc

SEQ ID NO: 421326 - RNA, 18 nt, Human
aacaggguauggugaggc

SEQ ID NO: 421327 - RNA, 18 nt, Human
aacaggguauggugaggc

SEQ ID NO: 421328 - RNA, 25 nt, Human
aacagggugagacucugucucuaaa

SEQ ID NO: 421329 - RNA, 19 nt, Human
aacaguauaagcaacaacu

SEQ ID NO: 421330 - RNA, 20 nt, Human
aacauggcgaaaucuugucu

SEQ ID NO: 421331 - RNA, 19 nt, Human
aaccaaaacuaccuccgaa

SEQ ID NO: 421332 - RNA, 24 nt, Human
aacccugcaagcucagggccgcua

SEQ ID NO: 421333 - RNA, 24 nt, Human
aacccugcaagcucagggccgcua

SEQ ID NO: 421334 - RNA, 24 nt, Human
aacccugcaagcucagggccgcua

SEQ ID NO: 421335 - RNA, 20 nt, Human
aacccuugccucacuacccu

SEQ ID NO: 421336 - RNA, 25 nt, Human
aaccgcacaccucagcaauuacccu

SEQ ID NO: 421337 - RNA, 20 nt, Human
aaccuggggccagcguggcu

SEQ ID NO: 421338 - RNA, 18 nt, Human
aacgaugucaccccaccc

SEQ ID NO: 421339 - RNA, 20 nt, Human
aacugaggcacaccccaucc

SEQ ID NO: 421340 - RNA, 18 nt, Human
aacugcccacaauacacc

SEQ ID NO: 421341 - RNA, 23 nt, Human
aacuggaccuuuuaaaaacuaaa

SEQ ID NO: 421342 - RNA, 28 nt, Human
aacuuuugcuaaacccaagagcugaaga

SEQ ID NO: 421343 - RNA, 20 nt, Human
aagaaagaaaggaaaaagga

SEQ ID NO: 421344 - RNA, 22 nt, Human
aagaagcagcagugggacagag

SEQ ID NO: 421345 - RNA, 27 nt, Human
aagaagccaauaacagcuuugugagua

SEQ ID NO: 421346 - RNA, 23 nt, Human
aagaauugcuggaaccaaggagg

SEQ ID NO: 421347 - RNA, 21 nt, Human
aagacagacaaacacugcgaa

SEQ ID NO: 421348 - RNA, 21 nt, Human
aagacagacaaacacugcgaa

SEQ ID NO: 421349 - RNA, 21 nt, Human
aagacagacaaacacugcgaa

SEQ ID NO: 421350 - RNA, 22 nt, Human
aagacucuuccgaucccucuga

SEQ ID NO: 421351 - RNA, 22 nt, Human
aagacucuuccgaucccucuga

SEQ ID NO: 421352 - RNA, 22 nt, Human
aagacucuuccgaucccucuga

SEQ ID NO: 421353 - RNA, 19 nt, Human
aagagcugaagaugcugcc

SEQ ID NO: 421354 - RNA, 21 nt, Human
aagaggcccuaaaacaucugc

SEQ ID NO: 421355 - RNA, 21 nt, Human
aagcaaaucccagacauauca

SEQ ID NO: 421356 - RNA, 20 nt, Human
aagcaacucuaacagggcca

SEQ ID NO: 421357 - RNA, 24 nt, Human
aagcacagacauaguguguggaag

SEQ ID NO: 421358 - RNA, 20 nt, Human
aagcacugguucuggcagaa

SEQ ID NO: 421359 - RNA, 20 nt, Human
aagcacugguucuggcagaa

SEQ ID NO: 421360 - RNA, 20 nt, Human
aagcacugguucuggcagaa

SEQ ID NO: 421361 - RNA, 22 nt, Human
aagccuacgcuacacauuucag

SEQ ID NO: 421362 - RNA, 22 nt, Human
aagccuacgcuacacauuucag

SEQ ID NO: 421363 - RNA, 21 nt, Human
aagccuacgcuacacauuucg

SEQ ID NO: 421364 - RNA, 21 nt, Human
aagccuacgcuacacauuucg

SEQ ID NO: 421365 - RNA, 22 nt, Human
aagcguuucugaggaacaauuc

SEQ ID NO: 421366 - RNA, 22 nt, Human
aagcguuucugaggaacaauuc

SEQ ID NO: 421367 - RNA, 22 nt, Human
aagcguuucugaggaacaauuc

SEQ ID NO: 421368 - RNA, 22 nt, Human
aagcguuucugaggaacaauuc

SEQ ID NO: 421369 - RNA, 25 nt, Human
aaggaucccucaaaaaaagaaccaa

SEQ ID NO: 421370 - RNA, 25 nt, Human
aaggaucccucaaaaaaagaaccaa

SEQ ID NO: 421371 - RNA, 25 nt, Human
aaggaucccucaaaaaaagaaccaa

SEQ ID NO: 421372 - RNA, 24 nt, Human
aagggccgggugcaguggcucaca

SEQ ID NO: 421373 - RNA, 18 nt, Human
aaguaacuaaaaaugugc

SEQ ID NO: 421374 - RNA, 23 nt, Human
aaguaguuuaauggaaaagaccc

SEQ ID NO: 421375 - RNA, 21 nt, Human
aagucaccacguccucagaac

SEQ ID NO: 421376 - RNA, 21 nt, Human
aagucaccacguccucagaac

SEQ ID NO: 421377 - RNA, 21 nt, Human
aagucaccacguccucagaac

SEQ ID NO: 421378 - RNA, 21 nt, Human
aagugaauaaccggaccaaaa

SEQ ID NO: 421379 - RNA, 24 nt, Human
aagugacagcggggcccuggggcc

SEQ ID NO: 421380 - RNA, 24 nt, Human
aagugacagcggggcccuggggcc

SEQ ID NO: 421381 - RNA, 24 nt, Human
aagugacagcggggcccuggggcc

SEQ ID NO: 421382 - RNA, 20 nt, Human
aauaaucuuuagacccaaag

SEQ ID NO: 421383 - RNA, 20 nt, Human
aauaaucuuuagacccaaag

SEQ ID NO: 421384 - RNA, 20 nt, Human
aauaaucuuuagacccaaag

SEQ ID NO: 421385 - RNA, 18 nt, Human
aauagaggaacccaacca

SEQ ID NO: 421386 - RNA, 20 nt, Human
aauauggcgaaacccugucu

SEQ ID NO: 421387 - RNA, 21 nt, Human
aaugcccaucuccccacccca

SEQ ID NO: 421388 - RNA, 18 nt, Human
aauuugacaucacugcca

SEQ ID NO: 421389 - RNA, 18 nt, Human
acaaaaccacggaguagc

SEQ ID NO: 421390 - RNA, 22 nt, Human
acaaaaugcuuaauuaucuaca

SEQ ID NO: 421391 - RNA, 21 nt, Human
acaagaaauuaaaacuccaaa

SEQ ID NO: 421392 - RNA, 20 nt, Human
acacaacauucuucagacag

SEQ ID NO: 421393 - RNA, 23 nt, Human
acacacaccucuggacacacaca

SEQ ID NO: 421394 - RNA, 23 nt, Human
acacagcauccucccuccuuucc

SEQ ID NO: 421395 - RNA, 24 nt, Human
acacagcauuuuacucuacugacu

SEQ ID NO: 421396 - RNA, 24 nt, Human
acacagcauuuuacucuacugacu

SEQ ID NO: 421397 - RNA, 24 nt, Human
acacagcauuuuacucuacugacu

SEQ ID NO: 421398 - RNA, 19 nt, Human
acaccauuuggucauuugc

SEQ ID NO: 421399 - RNA, 18 nt, Human
acaccgcaucauuuuacc

SEQ ID NO: 421400 - RNA, 18 nt, Human
acaccgcaucauuuuacc

SEQ ID NO: 421401 - RNA, 18 nt, Human
acaccgcaucauuuuacc

SEQ ID NO: 421402 - RNA, 18 nt, Human
acacucacaucaggcuuc

SEQ ID NO: 421403 - RNA, 20 nt, Human
acacugaguuaccacacagc

SEQ ID NO: 421404 - RNA, 20 nt, Human
acacugaguuaccacacagc

SEQ ID NO: 421405 - RNA, 20 nt, Human
acacugaguuaccacacagc

SEQ ID NO: 421406 - RNA, 20 nt, Human
acacugaguuaccacacagc

SEQ ID NO: 421407 - RNA, 18 nt, Human
acacugcagcgugggcag

SEQ ID NO: 421408 - RNA, 21 nt, Human
acagcaguaggaccgcccguc

SEQ ID NO: 421409 - RNA, 21 nt, Human
acagcaguaggaccgcccguc

SEQ ID NO: 421410 - RNA, 21 nt, Human
acagcaguaggaccgcccguc

SEQ ID NO: 421411 - RNA, 20 nt, Human
acagcauggcucucacacag

SEQ ID NO: 421412 - RNA, 24 nt, Human
acagggugagacucugucucuaaa

SEQ ID NO: 421413 - RNA, 19 nt, Human
acagguauaagagauaaaa

SEQ ID NO: 421414 - RNA, 19 nt, Human
acauaguguguggaagaug

SEQ ID NO: 421415 - RNA, 21 nt, Human
acauuccagccaacugcuaaa

SEQ ID NO: 421416 - RNA, 22 nt, Human
accacccgcaaggagagcaaag

SEQ ID NO: 421417 - RNA, 23 nt, Human
acccaccuccuucaggaaaccag

SEQ ID NO: 421418 - RNA, 24 nt, Human
accccaccccgucuuguuccccag

SEQ ID NO: 421419 - RNA, 23 nt, Human
accccacgcuuacaggucacaaa

SEQ ID NO: 421420 - RNA, 23 nt, Human
accccacgcuuacaggucacaaa

SEQ ID NO: 421421 - RNA, 23 nt, Human
accccacgcuuacaggucacaaa

SEQ ID NO: 421422 - RNA, 19 nt, Human
acccuaaagcgccacacac

SEQ ID NO: 421423 - RNA, 24 nt, Human
acccugucucuacuaaaaauacaa

SEQ ID NO: 421424 - RNA, 22 nt, Human
accugguuccacgucccccugc

SEQ ID NO: 421425 - RNA, 23 nt, Human
acgccaccugcagcagcauccug

SEQ ID NO: 421426 - RNA, 23 nt, Human
acgccaccugcagcagcauccug

SEQ ID NO: 421427 - RNA, 18 nt, Human
acgccuguaaucccagca

SEQ ID NO: 421428 - RNA, 23 nt, Human
acgccuguaaucccagcauuuug

SEQ ID NO: 421429 - RNA, 20 nt, Human
acucacacugcagcgugggc

SEQ ID NO: 421430 - RNA, 24 nt, Human
acuccagccuggccaacaggguga

SEQ ID NO: 421431 - RNA, 19 nt, Human
acuccucuucagaggcagc

SEQ ID NO: 421432 - RNA, 18 nt, Human
acugcacuccagccuggc

SEQ ID NO: 421433 - RNA, 24 nt, Human
acugcacuccagccuggccaacag

SEQ ID NO: 421434 - RNA, 24 nt, Human
acugcacuccagccuggccaacag

SEQ ID NO: 421435 - RNA, 20 nt, Human
acugugaauagcacaccuuc

SEQ ID NO: 421436 - RNA, 24 nt, Human
acuuuucaugccaaagcaaaauuu

SEQ ID NO: 421437 - RNA, 22 nt, Human
agaaacugguaaagaaaagcca

SEQ ID NO: 421438 - RNA, 22 nt, Human
agaaacugguaaagaaaagcca

SEQ ID NO: 421439 - RNA, 22 nt, Human
agaaacugguaaagaaaagcca

SEQ ID NO: 421440 - RNA, 22 nt, Human
agaaacugguaaagaaaagcca

SEQ ID NO: 421441 - RNA, 21 nt, Human
agaaauacauuccuucagggc

SEQ ID NO: 421442 - RNA, 22 nt, Human
agaaaugaagcaaguugccaaa

SEQ ID NO: 421443 - RNA, 22 nt, Human
agaacgaauuggggcagaggug

SEQ ID NO: 421444 - RNA, 22 nt, Human
agaaggaagcugauggcgagaa

SEQ ID NO: 421445 - RNA, 19 nt, Human
agaaguuaagaagccaaua

SEQ ID NO: 421446 - RNA, 23 nt, Human
agaaguucgagaccagccugggc

SEQ ID NO: 421447 - RNA, 23 nt, Human
agacaaacuguacaaugaacccc

SEQ ID NO: 421448 - RNA, 21 nt, Human
agacagacaaacacugcgaag

SEQ ID NO: 421449 - RNA, 22 nt, Human
agacagacaaacacugcgaagg

SEQ ID NO: 421450 - RNA, 22 nt, Human
agacagacaaacacugcgaagg

SEQ ID NO: 421451 - RNA, 23 nt, Human
agacagauacuucaguuuguguu

SEQ ID NO: 421452 - RNA, 23 nt, Human
agacagauacuucaguuuguguu

SEQ ID NO: 421453 - RNA, 23 nt, Human
agacagauacuucaguuuguguu

SEQ ID NO: 421454 - RNA, 21 nt, Human
agagcucuaugagccccgccc

SEQ ID NO: 421455 - RNA, 26 nt, Human
agaguuucccccacaggugaccacau

SEQ ID NO: 421456 - RNA, 26 nt, Human
agaguuucccccacaggugaccacau

SEQ ID NO: 421457 - RNA, 26 nt, Human
agaguuucccccacaggugaccacau

SEQ ID NO: 421458 - RNA, 18 nt, Human
agaugccaccuucuguga

SEQ ID NO: 421459 - RNA, 22 nt, Human
agcaaggccagggccagggcag

SEQ ID NO: 421460 - RNA, 21 nt, Human
agcaauuacccuauuuauaga

SEQ ID NO: 421461 - RNA, 20 nt, Human
agcacuuugggaggcugagg

SEQ ID NO: 421462 - RNA, 20 nt, Human
agcauuuugggagggugagg

SEQ ID NO: 421463 - RNA, 18 nt, Human
agccaaagaaucugccgg

SEQ ID NO: 421464 - RNA, 20 nt, Human
agccacauagccccaagcag

SEQ ID NO: 421465 - RNA, 22 nt, Human
agccagaaagggggcaacgcga

SEQ ID NO: 421466 - RNA, 22 nt, Human
agccagaaagggggcaacgcga

SEQ ID NO: 421467 - RNA, 22 nt, Human
agccagaaagggggcaacgcga

SEQ ID NO: 421468 - RNA, 22 nt, Human
agccagaaagggggcaacgcga

SEQ ID NO: 421469 - RNA, 21 nt, Human
agccauacaguccagcacccu

SEQ ID NO: 421470 - RNA, 18 nt, Human
agccaugaaaugcaugag

SEQ ID NO: 421471 - RNA, 21 nt, Human
agccccaguggcgagaaaccc

SEQ ID NO: 421472 - RNA, 21 nt, Human
agccccaguggcgagaaaccc

SEQ ID NO: 421473 - RNA, 21 nt, Human
agccccaguggcgagaaaccc

SEQ ID NO: 421474 - RNA, 22 nt, Human
agccuggccaacagggugagac

SEQ ID NO: 421475 - RNA, 24 nt, Human
agccuggccaacagggugagacuc

SEQ ID NO: 421476 - RNA, 24 nt, Human
agccuggccaauauggcgaaaccc

SEQ ID NO: 421477 - RNA, 18 nt, Human
agccuggcuggggaggcc

SEQ ID NO: 421478 - RNA, 21 nt, Human
agccugggcaacauggcgaaa

SEQ ID NO: 421479 - RNA, 24 nt, Human
agccugggcaacauggcgaaaucu

SEQ ID NO: 421480 - RNA, 26 nt, Human
agcgcucaccuacucuucagaguggc

SEQ ID NO: 421481 - RNA, 23 nt, Human
agcggaucacaaggucaggaguu

SEQ ID NO: 421482 - RNA, 20 nt, Human
agcggcugccccgguccccc

SEQ ID NO: 421483 - RNA, 20 nt, Human
agcggcugccccgguccccc

SEQ ID NO: 421484 - RNA, 26 nt, Human
agcggcugccccggucccccuccaug

SEQ ID NO: 421485 - RNA, 26 nt, Human
agcggcugccccggucccccuccaug

SEQ ID NO: 421486 - RNA, 26 nt, Human
agcggcugccccggucccccuccaug

SEQ ID NO: 421487 - RNA, 24 nt, Human
agcucguuuccccuggguccucug

SEQ ID NO: 421488 - RNA, 24 nt, Human
agcucguuuccccuggguccucug

SEQ ID NO: 421489 - RNA, 23 nt, Human
aggaacccaaccagcccucagcc

SEQ ID NO: 421490 - RNA, 19 nt, Human
aggaacccaaccagcccuu

SEQ ID NO: 421491 - RNA, 26 nt, Human
aggaagucuccacucccagagcaccc

SEQ ID NO: 421492 - RNA, 22 nt, Human
aggacaggcacgguggcucaug

SEQ ID NO: 421493 - RNA, 18 nt, Human
aggacccccaccccuacc

SEQ ID NO: 421494 - RNA, 21 nt, Human
aggagcauaaaucuaugagcc

SEQ ID NO: 421495 - RNA, 21 nt, Human
aggagcauaaaucuaugagcc

SEQ ID NO: 421496 - RNA, 21 nt, Human
aggagcauaaaucuaugagcc

SEQ ID NO: 421497 - RNA, 28 nt, Human
aggauggaaaagaagcguuucugaggaa

SEQ ID NO: 421498 - RNA, 23 nt, Human
aggcacaccccauccuuccuggg

SEQ ID NO: 421499 - RNA, 24 nt, Human
aggcacgguggcucaugccuguaa

SEQ ID NO: 421500 - RNA, 21 nt, Human
aggcagcagccccaaauggcu

SEQ ID NO: 421501 - RNA, 21 nt, Human
aggcagccacgcugcuaaagc

SEQ ID NO: 421502 - RNA, 21 nt, Human
aggcaggcgagguggaaagcu

SEQ ID NO: 421503 - RNA, 21 nt, Human
aggcaggcgagguggaaagcu

SEQ ID NO: 421504 - RNA, 21 nt, Human
aggcaggcgagguggaaagcu

SEQ ID NO: 421505 - RNA, 26 nt, Human
aggcaggcgagguggaaagcuccgca

SEQ ID NO: 421506 - RNA, 26 nt, Human
aggcaggcgagguggaaagcuccgca

SEQ ID NO: 421507 - RNA, 26 nt, Human
aggcaggcgagguggaaagcuccgca

SEQ ID NO: 421508 - RNA, 19 nt, Human
aggcagggccggccgcccu

SEQ ID NO: 421509 - RNA, 19 nt, Human
aggcagggccggccgcccu

SEQ ID NO: 421510 - RNA, 19 nt, Human
aggcagggccggccgcccu

SEQ ID NO: 421511 - RNA, 19 nt, Human
aggcagggccggccgcccu

SEQ ID NO: 421512 - RNA, 21 nt, Human
aggcccaacccggccaggccu

SEQ ID NO: 421513 - RNA, 21 nt, Human
aggcccaacccggccaggccu

SEQ ID NO: 421514 - RNA, 21 nt, Human
aggcccaacccggccaggccu

SEQ ID NO: 421515 - RNA, 21 nt, Human
aggcccaacccggccaggccu

SEQ ID NO: 421516 - RNA, 24 nt, Human
aggcgagcggaucacaaggucagg

SEQ ID NO: 421517 - RNA, 24 nt, Human
aggcggagguugcagugagccgag

SEQ ID NO: 421518 - RNA, 24 nt, Human
aggcggguggaucacgaggucagg

SEQ ID NO: 421519 - RNA, 25 nt, Human
aggcuagaaaaaaacacaaaugugg

SEQ ID NO: 421520 - RNA, 20 nt, Human
aggcugaggcagaagaauug

SEQ ID NO: 421521 - RNA, 21 nt, Human
aggcugaggcgagcggaucac

SEQ ID NO: 421522 - RNA, 21 nt, Human
agggcaucauaaggagcauaa

SEQ ID NO: 421523 - RNA, 21 nt, Human
agggcaucauaaggagcauaa

SEQ ID NO: 421524 - RNA, 21 nt, Human
agggcaucauaaggagcauaa

SEQ ID NO: 421525 - RNA, 21 nt, Human
agggugaggcggguggaucac

SEQ ID NO: 421526 - RNA, 24 nt, Human
aggugcaguggcuuacgccuguaa

SEQ ID NO: 421527 - RNA, 19 nt, Human
aguaaauaauucuuacugc

SEQ ID NO: 421528 - RNA, 18 nt, Human
aguccagaacacaggagu

SEQ ID NO: 421529 - RNA, 24 nt, Human
agucccaaaucucagucuacaacc

SEQ ID NO: 421530 - RNA, 18 nt, Human
aguggacguguuauuggc

SEQ ID NO: 421531 - RNA, 18 nt, Human
aguggacguguuauuggc

SEQ ID NO: 421532 - RNA, 18 nt, Human
aguggacguguuauuggc

SEQ ID NO: 421533 - RNA, 18 nt, Human
aguggacguguuauuggc

SEQ ID NO: 421534 - RNA, 19 nt, Human
aguggacguguuauuggca

SEQ ID NO: 421535 - RNA, 19 nt, Human
aguggacguguuauuggca

SEQ ID NO: 421536 - RNA, 19 nt, Human
aguggacguguuauuggca

SEQ ID NO: 421537 - RNA, 19 nt, Human
aguggacguguuauuggca

SEQ ID NO: 421538 - RNA, 23 nt, Human
aguggcucacaccugcaauucca

SEQ ID NO: 421539 - RNA, 24 nt, Human
aguggcuuacgccuguaaucccag

SEQ ID NO: 421540 - RNA, 18 nt, Human
agugggagggaaccuuga

SEQ ID NO: 421541 - RNA, 18 nt, Human
agugggagggaaccuuga

SEQ ID NO: 421542 - RNA, 18 nt, Human
agugggagggaaccuuga

SEQ ID NO: 421543 - RNA, 18 nt, Human
agugggagggaaccuuga

SEQ ID NO: 421544 - RNA, 20 nt, Human
agugguucuaggacaggcac

SEQ ID NO: 421545 - RNA, 18 nt, Human
agugugaaaucaagacua

SEQ ID NO: 421546 - RNA, 21 nt, Human
aguucacuugccccugcccac

SEQ ID NO: 421547 - RNA, 24 nt, Human
aguuuucaaggggaguucuguaaa

SEQ ID NO: 421548 - RNA, 24 nt, Human
aguuuucaaggggaguucuguaaa

SEQ ID NO: 421549 - RNA, 24 nt, Human
aguuuucaaggggaguucuguaaa

SEQ ID NO: 421550 - RNA, 24 nt, Human
auaaaacaauaaaaaugguaccca

SEQ ID NO: 421551 - RNA, 23 nt, Human
auacaccugcuuccacuggcaca

SEQ ID NO: 421552 - RNA, 24 nt, Human
auacagccauuuccaaagagcaga

SEQ ID NO: 421553 - RNA, 24 nt, Human
auacagccauuuccaaagagcaga

SEQ ID NO: 421554 - RNA, 19 nt, Human
auagggggcugcugguguc

SEQ ID NO: 421555 - RNA, 21 nt, Human
auagguaggcuagaaaaaaac

SEQ ID NO: 421556 - RNA, 22 nt, Human
aucacaaggucaggaguucaag

SEQ ID NO: 421557 - RNA, 21 nt, Human
aucacgaggucaggaguucaa

SEQ ID NO: 421558 - RNA, 21 nt, Human
aucaucuccucauaaacauga

SEQ ID NO: 421559 - RNA, 22 nt, Human
auccugcugccagacaagcauc

SEQ ID NO: 421560 - RNA, 22 nt, Human
auccugcugccagacaagcauc

SEQ ID NO: 421561 - RNA, 22 nt, Human
auccugcugccagacaagcauc

SEQ ID NO: 421562 - RNA, 22 nt, Human
augaagcaaguugccaaaguca

SEQ ID NO: 421563 - RNA, 21 nt, Human
augagccccgcccagguugcc

SEQ ID NO: 421564 - RNA, 19 nt, Human
augccuguaaucccagcac

SEQ ID NO: 421565 - RNA, 20 nt, Human
augguacccaaagggaucaa

SEQ ID NO: 421566 - RNA, 20 nt, Human
auguacacagacacugugug

SEQ ID NO: 421567 - RNA, 23 nt, Human
auuaaaacuccaaagcucuauga

SEQ ID NO: 421568 - RNA, 18 nt, Human
auucccauccacguuccc

SEQ ID NO: 421569 - RNA, 20 nt, Human
auucucuuaaaaacacugga

SEQ ID NO: 421570 - RNA, 22 nt, Human
auuuaucacauauaccuuuuuc

SEQ ID NO: 421571 - RNA, 24 nt, Human
auuuauucucuuccucagggugau

SEQ ID NO: 421572 - RNA, 27 nt, Human
auuucauccauaagaaguuuagcacaa

SEQ ID NO: 421573 - RNA, 25 nt, Human
caaaaaaagaaccaagucuuaaaac

SEQ ID NO: 421574 - RNA, 25 nt, Human
caaaaaaagaaccaagucuuaaaac

SEQ ID NO: 421575 - RNA, 25 nt, Human
caaaaaaagaaccaagucuuaaaac

SEQ ID NO: 421576 - RNA, 22 nt, Human
caaaagcagacaaacuguacaa

SEQ ID NO: 421577 - RNA, 25 nt, Human
caaaagccuuucaagauagagucuu

SEQ ID NO: 421578 - RNA, 23 nt, Human
caaaauauuacccgagaguuaua

SEQ ID NO: 421579 - RNA, 18 nt, Human
caaaaucagaucucccua

SEQ ID NO: 421580 - RNA, 23 nt, Human
caaaaugaagucgaagguuugcc

SEQ ID NO: 421581 - RNA, 23 nt, Human
caaaaugaagucgaagguuugcc

SEQ ID NO: 421582 - RNA, 23 nt, Human
caaaaugaagucgaagguuugcc

SEQ ID NO: 421583 - RNA, 23 nt, Human
caaaauuuauacuuuuggauaaa

SEQ ID NO: 421584 - RNA, 21 nt, Human
caaacaugaggcaagggccgg

SEQ ID NO: 421585 - RNA, 26 nt, Human
caaagaaaaacacagggaauucucca

SEQ ID NO: 421586 - RNA, 26 nt, Human
caaagaaaaacacagggaauucucca

SEQ ID NO: 421587 - RNA, 26 nt, Human
caaagaaaaacacagggaauucucca

SEQ ID NO: 421588 - RNA, 20 nt, Human
caaagcccugcugcagcucu

SEQ ID NO: 421589 - RNA, 21 nt, Human
caaagcgcucaccuacucuuc

SEQ ID NO: 421590 - RNA, 19 nt, Human
caaagguauccaaccaaaa

SEQ ID NO: 421591 - RNA, 21 nt, Human
caaagugcacugcaaagccga

SEQ ID NO: 421592 - RNA, 21 nt, Human
caaagugcacugcaaagccga

SEQ ID NO: 421593 - RNA, 21 nt, Human
caaagugcacugcaaagccga

SEQ ID NO: 421594 - RNA, 23 nt, Human
caaaguuuucuucagucugaaaa

SEQ ID NO: 421595 - RNA, 24 nt, Human
caaaucucagucuacaacaucuac

SEQ ID NO: 421596 - RNA, 21 nt, Human
caaaugcccaucuccccaccc

SEQ ID NO: 421597 - RNA, 24 nt, Human
caaauguggaccuaacacguaacc

SEQ ID NO: 421598 - RNA, 24 nt, Human
caacacuuugggaggacgaggcag

SEQ ID NO: 421599 - RNA, 21 nt, Human
caacaggaaaccacggagucc

SEQ ID NO: 421600 - RNA, 22 nt, Human
caacauggcgaaaucuugucuc

SEQ ID NO: 421601 - RNA, 21 nt, Human
caacauuugagcagagccaau

SEQ ID NO: 421602 - RNA, 19 nt, Human
caacucaagugaauaaccg

SEQ ID NO: 421603 - RNA, 20 nt, Human
caacuggcaagucucaacuc

SEQ ID NO: 421604 - RNA, 20 nt, Human
caacuggcaagucucaacuc

SEQ ID NO: 421605 - RNA, 20 nt, Human
caacuggcaagucucaacuc

SEQ ID NO: 421606 - RNA, 22 nt, Human
caagaaauuaaaacuccaaagc

SEQ ID NO: 421607 - RNA, 23 nt, Human
caagaauuaaauugcaguucuga

SEQ ID NO: 421608 - RNA, 20 nt, Human
caagagccuucucaggagcc

SEQ ID NO: 421609 - RNA, 18 nt, Human
caagcagccccucaggac

SEQ ID NO: 421610 - RNA, 18 nt, Human
caagcagccccucaggac

SEQ ID NO: 421611 - RNA, 18 nt, Human
caagcagccccucaggac

SEQ ID NO: 421612 - RNA, 18 nt, Human
caauaaaaaugguaccca

SEQ ID NO: 421613 - RNA, 18 nt, Human
caauacaccugcuuccac

SEQ ID NO: 421614 - RNA, 24 nt, Human
caauauggcgaaacccugucucua

SEQ ID NO: 421615 - RNA, 19 nt, Human
cacacacaccucuggacac

SEQ ID NO: 421616 - RNA, 21 nt, Human
cacacaccaugggcaagcaag

SEQ ID NO: 421617 - RNA, 18 nt, Human
cacacaccccugaacccc

SEQ ID NO: 421618 - RNA, 19 nt, Human
cacacaccccugaacccca

SEQ ID NO: 421619 - RNA, 19 nt, Human
cacacaccccugaacccca

SEQ ID NO: 421620 - RNA, 19 nt, Human
cacacaccccugaacccca

SEQ ID NO: 421621 - RNA, 24 nt, Human
cacacacgucacaaugaugccaag

SEQ ID NO: 421622 - RNA, 24 nt, Human
cacacacgucacaaugaugccaag

SEQ ID NO: 421623 - RNA, 24 nt, Human
cacacacgucacaaugaugccaag

SEQ ID NO: 421624 - RNA, 18 nt, Human
cacacaucuuccauaaaa

SEQ ID NO: 421625 - RNA, 18 nt, Human
cacacaucuuccauaaaa

SEQ ID NO: 421626 - RNA, 21 nt, Human
cacacaucuuccauaaaauga

SEQ ID NO: 421627 - RNA, 21 nt, Human
cacacaucuuccauaaaauga

SEQ ID NO: 421628 - RNA, 19 nt, Human
cacacccccucccagccac

SEQ ID NO: 421629 - RNA, 21 nt, Human
cacacccccucccagccaccg

SEQ ID NO: 421630 - RNA, 20 nt, Human
cacaccgcaucauuuuaccu

SEQ ID NO: 421631 - RNA, 20 nt, Human
cacaccgcaucauuuuaccu

SEQ ID NO: 421632 - RNA, 20 nt, Human
cacaccgcaucauuuuaccu

SEQ ID NO: 421633 - RNA, 19 nt, Human
cacaccucuggacacacac

SEQ ID NO: 421634 - RNA, 24 nt, Human
cacaccugcaauuccaacacuuug

SEQ ID NO: 421635 - RNA, 21 nt, Human
cacacguacgaggcacgcaca

SEQ ID NO: 421636 - RNA, 21 nt, Human
cacacguacgaggcacgcaca

SEQ ID NO: 421637 - RNA, 18 nt, Human
cacagagugcugagaugg

SEQ ID NO: 421638 - RNA, 18 nt, Human
cacagagugcugagaugg

SEQ ID NO: 421639 - RNA, 18 nt, Human
cacagagugcugagaugg

SEQ ID NO: 421640 - RNA, 18 nt, Human
cacagcaccagcugcccg

SEQ ID NO: 421641 - RNA, 18 nt, Human
cacagcaccagcugcccg

SEQ ID NO: 421642 - RNA, 18 nt, Human
cacagcaccagcugcccg

SEQ ID NO: 421643 - RNA, 21 nt, Human
cacagugcugagcaaaccccc

SEQ ID NO: 421644 - RNA, 18 nt, Human
caccacacccccucccag

SEQ ID NO: 421645 - RNA, 19 nt, Human
caccacacccccucccagc

SEQ ID NO: 421646 - RNA, 18 nt, Human
caccacagccaugcugcg

SEQ ID NO: 421647 - RNA, 25 nt, Human
caccacagccaugcugcggcacuga

SEQ ID NO: 421648 - RNA, 23 nt, Human
caccacagucgucuucuaaccug

SEQ ID NO: 421649 - RNA, 19 nt, Human
caccagcugcccgccauca

SEQ ID NO: 421650 - RNA, 19 nt, Human
caccagcugcccgccauca

SEQ ID NO: 421651 - RNA, 20 nt, Human
caccaggugacgugacucac

SEQ ID NO: 421652 - RNA, 22 nt, Human
cacccaccuccuucaggaaacc

SEQ ID NO: 421653 - RNA, 23 nt, Human
cacccaccuccuucaggaaacca

SEQ ID NO: 421654 - RNA, 22 nt, Human
cacccaugcaaaauucaucaug

SEQ ID NO: 421655 - RNA, 21 nt, Human
caccccacccaguauauguca

SEQ ID NO: 421656 - RNA, 20 nt, Human
caccccccgcugagauacac

SEQ ID NO: 421657 - RNA, 19 nt, Human
cacccccucccagccaccg

SEQ ID NO: 421658 - RNA, 19 nt, Human
caccgccccuggauccggc

SEQ ID NO: 421659 - RNA, 19 nt, Human
caccgccccuggauccggc

SEQ ID NO: 421660 - RNA, 19 nt, Human
caccgccccuggauccggc

SEQ ID NO: 421661 - RNA, 19 nt, Human
caccgccccuggauccggc

SEQ ID NO: 421662 - RNA, 23 nt, Human
caccucaacacucaaguaacuaa

SEQ ID NO: 421663 - RNA, 24 nt, Human
caccucagcaauuacccuauuuau

SEQ ID NO: 421664 - RNA, 20 nt, Human
caccuccccucuccaagcac

SEQ ID NO: 421665 - RNA, 25 nt, Human
caccuccccucuccaagcacagaca

SEQ ID NO: 421666 - RNA, 19 nt, Human
caccugcaauuccaacacu

SEQ ID NO: 421667 - RNA, 23 nt, Human
caccugcaauuccaacacuuugg

SEQ ID NO: 421668 - RNA, 24 nt, Human
caccugcaauuccaacacuuuggg

SEQ ID NO: 421669 - RNA, 18 nt, Human
caccugcuuccacuggca

SEQ ID NO: 421670 - RNA, 18 nt, Human
caccuggagucaguaugc

SEQ ID NO: 421671 - RNA, 19 nt, Human
caccuuuuauuucagauuu

SEQ ID NO: 421672 - RNA, 18 nt, Human
cacgcaccaggugacgug

SEQ ID NO: 421673 - RNA, 18 nt, Human
cacggagaaccaaauaac

SEQ ID NO: 421674 - RNA, 19 nt, Human
cacuaaggcaaaagggcuc

SEQ ID NO: 421675 - RNA, 19 nt, Human
cacuacucccacccugucu

SEQ ID NO: 421676 - RNA, 19 nt, Human
cacuacucccacccugucu

SEQ ID NO: 421677 - RNA, 19 nt, Human
cacuacucccacccugucu

SEQ ID NO: 421678 - RNA, 21 nt, Human
cacuacuguccaacacaaaaa

SEQ ID NO: 421679 - RNA, 21 nt, Human
cacuacuguccaacacaaaaa

SEQ ID NO: 421680 - RNA, 21 nt, Human
cacuacuguccaacacaaaaa

SEQ ID NO: 421681 - RNA, 20 nt, Human
cacuccagccuggccaacag

SEQ ID NO: 421682 - RNA, 23 nt, Human
cacuccagccuggccaacagggu

SEQ ID NO: 421683 - RNA, 24 nt, Human
cacuccagccuggccaacagggug

SEQ ID NO: 421684 - RNA, 23 nt, Human
cacucucagguccaaagacacug

SEQ ID NO: 421685 - RNA, 23 nt, Human
cacucucagguccaaagacacug

SEQ ID NO: 421686 - RNA, 23 nt, Human
cacucucagguccaaagacacug

SEQ ID NO: 421687 - RNA, 19 nt, Human
cacucuguagaacuggacc

SEQ ID NO: 421688 - RNA, 24 nt, Human
cacugcaauuggaggcuccacacc

SEQ ID NO: 421689 - RNA, 24 nt, Human
cacugcaauuggaggcuccacacc

SEQ ID NO: 421690 - RNA, 24 nt, Human
cacugcaauuggaggcuccacacc

SEQ ID NO: 421691 - RNA, 23 nt, Human
cacugcacaccacagucgucuuc

SEQ ID NO: 421692 - RNA, 19 nt, Human
cacugugcccuuucagaac

SEQ ID NO: 421693 - RNA, 18 nt, Human
cacuguguccugagcagc

SEQ ID NO: 421694 - RNA, 23 nt, Human
cagaacgaauuggggcagaggug

SEQ ID NO: 421695 - RNA, 23 nt, Human
cagaacgaauuggggcagaggug

SEQ ID NO: 421696 - RNA, 21 nt, Human
cagacaagcagccccucagga

SEQ ID NO: 421697 - RNA, 21 nt, Human
cagacaagcagccccucagga

SEQ ID NO: 421698 - RNA, 21 nt, Human
cagacaagcagccccucagga

SEQ ID NO: 421699 - RNA, 23 nt, Human
cagagugaggccagguggcugcu

SEQ ID NO: 421700 - RNA, 19 nt, Human
cagauugcagagauuccga

SEQ ID NO: 421701 - RNA, 21 nt, Human
cagcacugagauguaacuaca

SEQ ID NO: 421702 - RNA, 22 nt, Human
cagcacuuugggaggcugaggc

SEQ ID NO: 421703 - RNA, 23 nt, Human
cagcacuuugggaggcugaggcg

SEQ ID NO: 421704 - RNA, 19 nt, Human
cagcagugggacagaggag

SEQ ID NO: 421705 - RNA, 24 nt, Human
cagcauuuugggagggugaggcgg

SEQ ID NO: 421706 - RNA, 21 nt, Human
cagccaccggacagacaacua

SEQ ID NO: 421707 - RNA, 18 nt, Human
cagccauacaguccagca

SEQ ID NO: 421708 - RNA, 24 nt, Human
cagcggaaaccucggcucucaaau

SEQ ID NO: 421709 - RNA, 22 nt, Human
cagcuaaauggccuucauacca

SEQ ID NO: 421710 - RNA, 24 nt, Human
cagcuacucgggaggcugaggcag

SEQ ID NO: 421711 - RNA, 18 nt, Human
cagcucuggacagccccc

SEQ ID NO: 421712 - RNA, 31 nt, Human
caggacaacugccuaggccagggagacugaa

SEQ ID NO: 421713 - RNA, 19 nt, Human
caggacaccaggcugcucc

SEQ ID NO: 421714 - RNA, 21 nt, Human
caggacccccaccccuaccuc

SEQ ID NO: 421715 - RNA, 19 nt, Human
caggcaggccuccaccccc

SEQ ID NO: 421716 - RNA, 19 nt, Human
caggcaggccuccaccccc

SEQ ID NO: 421717 - RNA, 19 nt, Human
caggcaggccuccaccccc

SEQ ID NO: 421718 - RNA, 22 nt, Human
cagggucugggacccacauaca

SEQ ID NO: 421719 - RNA, 19 nt, Human
caggugccacacacucaca

SEQ ID NO: 421720 - RNA, 21 nt, Human
caguaaaaacagauuaucaca

SEQ ID NO: 421721 - RNA, 21 nt, Human
caguaaaaacagauuaucaca

SEQ ID NO: 421722 - RNA, 22 nt, Human
caguauaagcaacaacucaagu

SEQ ID NO: 421723 - RNA, 24 nt, Human
caguauaucccuccccccaaaaag

SEQ ID NO: 421724 - RNA, 24 nt, Human
caguauaucccuccccccaaaaag

SEQ ID NO: 421725 - RNA, 24 nt, Human
caguauaucccuccccccaaaaag

SEQ ID NO: 421726 - RNA, 22 nt, Human
cagugcccauaacacacguacg

SEQ ID NO: 421727 - RNA, 22 nt, Human
cagugcccauaacacacguacg

SEQ ID NO: 421728 - RNA, 22 nt, Human
cagugcccauaacacacguacg

SEQ ID NO: 421729 - RNA, 22 nt, Human
cagugguggggaggcgcucccu

SEQ ID NO: 421730 - RNA, 22 nt, Human
cagugguggggaggcgcucccu

SEQ ID NO: 421731 - RNA, 22 nt, Human
cagugguggggaggcgcucccu

SEQ ID NO: 421732 - RNA, 22 nt, Human
cagugguggggaggcgcucccu

SEQ ID NO: 421733 - RNA, 22 nt, Human
caguguggaccucaaacagcaa

SEQ ID NO: 421734 - RNA, 19 nt, Human
caguuaagaguuaccagug

SEQ ID NO: 421735 - RNA, 21 nt, Human
caguuaugggcuagcuggcug

SEQ ID NO: 421736 - RNA, 24 nt, Human
cauaagaaguuuagcacaaaucuc

SEQ ID NO: 421737 - RNA, 23 nt, Human
cauagccccaagcagguggcagc

SEQ ID NO: 421738 - RNA, 22 nt, Human
caucacggagaaccaaauaaca

SEQ ID NO: 421739 - RNA, 24 nt, Human
cauccugcugccagacaagcaucc

SEQ ID NO: 421740 - RNA, 24 nt, Human
cauccugcugccagacaagcaucc

SEQ ID NO: 421741 - RNA, 24 nt, Human
cauccugcugccagacaagcaucc

SEQ ID NO: 421742 - RNA, 20 nt, Human
caucuccccaccccaccccg

SEQ ID NO: 421743 - RNA, 20 nt, Human
caugaccuaaaguguucuga

SEQ ID NO: 421744 - RNA, 24 nt, Human
caugcaucagacagauuuuucguu

SEQ ID NO: 421745 - RNA, 20 nt, Human
caugccuguaaucccagcac

SEQ ID NO: 421746 - RNA, 24 nt, Human
caugccuguaaucccagcacuuug

SEQ ID NO: 421747 - RNA, 19 nt, Human
caugcucgcccucucccgc

SEQ ID NO: 421748 - RNA, 21 nt, Human
caugcucgcccucucccgcag

SEQ ID NO: 421749 - RNA, 21 nt, Human
caugcucgcccucucccgcag

SEQ ID NO: 421750 - RNA, 21 nt, Human
caugcucgcccucucccgcag

SEQ ID NO: 421751 - RNA, 21 nt, Human
caugcucgcccucucccgcag

SEQ ID NO: 421752 - RNA, 21 nt, Human
caugugaucagcagagacugc

SEQ ID NO: 421753 - RNA, 21 nt, Human
caugugaucagcagagacugc

SEQ ID NO: 421754 - RNA, 21 nt, Human
caugugaucagcagagacugc

SEQ ID NO: 421755 - RNA, 23 nt, Human
cauuuggaaaggaaaagugcagg

SEQ ID NO: 421756 - RNA, 19 nt, Human
ccaaagaaaaacacaggga

SEQ ID NO: 421757 - RNA, 19 nt, Human
ccaaagaaaaacacaggga

SEQ ID NO: 421758 - RNA, 19 nt, Human
ccaaagaaaaacacaggga

SEQ ID NO: 421759 - RNA, 24 nt, Human
ccaaauaacaagaaauuaaaacuc

SEQ ID NO: 421760 - RNA, 18 nt, Human
ccaaaugcccaucucccc

SEQ ID NO: 421761 - RNA, 20 nt, Human
ccaacccuugccucacuacu

SEQ ID NO: 421762 - RNA, 18 nt, Human
ccaagcacagacauagug

SEQ ID NO: 421763 - RNA, 22 nt, Human
ccaaugguccucccuaaguucu

SEQ ID NO: 421764 - RNA, 19 nt, Human
ccacacaccccugaacccc

SEQ ID NO: 421765 - RNA, 19 nt, Human
ccacacaccccugaacccc

SEQ ID NO: 421766 - RNA, 20 nt, Human
ccacagaaaagcagacagcu

SEQ ID NO: 421767 - RNA, 25 nt, Human
ccacagcaagccuuacuccagccgc

SEQ ID NO: 421768 - RNA, 18 nt, Human
ccaccacacccccuccca

SEQ ID NO: 421769 - RNA, 19 nt, Human
ccaccacacccccucccag

SEQ ID NO: 421770 - RNA, 24 nt, Human
ccaccacacccccucccagccacc

SEQ ID NO: 421771 - RNA, 18 nt, Human
ccaccccaccccgucuug

SEQ ID NO: 421772 - RNA, 23 nt, Human
ccacgcuuacaggucacaaaacc

SEQ ID NO: 421773 - RNA, 23 nt, Human
ccacgcuuacaggucacaaaacc

SEQ ID NO: 421774 - RNA, 23 nt, Human
ccacgcuuacaggucacaaaacc

SEQ ID NO: 421775 - RNA, 18 nt, Human
ccacgucccccugccaga

SEQ ID NO: 421776 - RNA, 22 nt, Human
ccagagcaccacugcacaccac

SEQ ID NO: 421777 - RNA, 21 nt, Human
ccagaggaagcuuugaaauua

SEQ ID NO: 421778 - RNA, 18 nt, Human
ccaggccucgaaagugcu

SEQ ID NO: 421779 - RNA, 18 nt, Human
ccaggccucgaaagugcu

SEQ ID NO: 421780 - RNA, 18 nt, Human
ccaggccucgaaagugcu

SEQ ID NO: 421781 - RNA, 18 nt, Human
ccaggccucgaaagugcu

SEQ ID NO: 421782 - RNA, 19 nt, Human
ccauaauauagagggagca

SEQ ID NO: 421783 - RNA, 27 nt, Human
ccauaugccaauuaacuuuaaccuaaa

SEQ ID NO: 421784 - RNA, 27 nt, Human
ccauaugccaauuaacuuuaaccuaaa

SEQ ID NO: 421785 - RNA, 27 nt, Human
ccauaugccaauuaacuuuaaccuaaa

SEQ ID NO: 421786 - RNA, 27 nt, Human
ccauaugccaauuaacuuuaaccuaaa

SEQ ID NO: 421787 - RNA, 19 nt, Human
cccacacgaguguccccau

SEQ ID NO: 421788 - RNA, 19 nt, Human
cccacacgaguguccccau

SEQ ID NO: 421789 - RNA, 19 nt, Human
cccacacgaguguccccau

SEQ ID NO: 421790 - RNA, 22 nt, Human
cccacagcaagccuuacuccag

SEQ ID NO: 421791 - RNA, 22 nt, Human
cccacauacagaauauagaccu

SEQ ID NO: 421792 - RNA, 24 nt, Human
cccacauacagaauauagaccuua

SEQ ID NO: 421793 - RNA, 20 nt, Human
cccaccccgucuuguucccc

SEQ ID NO: 421794 - RNA, 21 nt, Human
cccaccuucccaaugucccca

SEQ ID NO: 421795 - RNA, 21 nt, Human
cccacggucacagcugggggc

SEQ ID NO: 421796 - RNA, 21 nt, Human
cccacggucacagcugggggc

SEQ ID NO: 421797 - RNA, 21 nt, Human
cccacggucacagcugggggc

SEQ ID NO: 421798 - RNA, 24 nt, Human
cccacgugcugggguccccggggc

SEQ ID NO: 421799 - RNA, 24 nt, Human
cccacgugcugggguccccggggc

SEQ ID NO: 421800 - RNA, 24 nt, Human
cccacgugcugggguccccggggc

SEQ ID NO: 421801 - RNA, 26 nt, Human
ccccaaaaacaucaaccuggggccag

SEQ ID NO: 421802 - RNA, 18 nt, Human
ccccauguccucgcuacu

SEQ ID NO: 421803 - RNA, 20 nt, Human
cccccaaaaacaucaaccug

SEQ ID NO: 421804 - RNA, 22 nt, Human
cccccaaaaacaucaaccuggg

SEQ ID NO: 421805 - RNA, 24 nt, Human
cccccaacuggcaagucucaacuc

SEQ ID NO: 421806 - RNA, 24 nt, Human
cccccaacuggcaagucucaacuc

SEQ ID NO: 421807 - RNA, 24 nt, Human
cccccaacuggcaagucucaacuc

SEQ ID NO: 421808 - RNA, 18 nt, Human
cccccaggaccgcaccuc

SEQ ID NO: 421809 - RNA, 18 nt, Human
cccccaggaccgcaccuc

SEQ ID NO: 421810 - RNA, 18 nt, Human
cccccaggaccgcaccuc

SEQ ID NO: 421811 - RNA, 22 nt, Human
ccccccaaaaagugaauuucaa

SEQ ID NO: 421812 - RNA, 22 nt, Human
ccccccaaaaagugaauuucaa

SEQ ID NO: 421813 - RNA, 22 nt, Human
ccccccaaaaagugaauuucaa

SEQ ID NO: 421814 - RNA, 21 nt, Human
ccccucccagccaccggacag

SEQ ID NO: 421815 - RNA, 18 nt, Human
ccccugacucaugggcag

SEQ ID NO: 421816 - RNA, 20 nt, Human
ccccugguagcggcugcccc

SEQ ID NO: 421817 - RNA, 20 nt, Human
ccccugguagcggcugcccc

SEQ ID NO: 421818 - RNA, 20 nt, Human
ccccugguagcggcugcccc

SEQ ID NO: 421819 - RNA, 21 nt, Human
cccgcaggcagggccggccgc

SEQ ID NO: 421820 - RNA, 21 nt, Human
cccgcaggcagggccggccgc

SEQ ID NO: 421821 - RNA, 21 nt, Human
cccgcaggcagggccggccgc

SEQ ID NO: 421822 - RNA, 21 nt, Human
cccgcaggcagggccggccgc

SEQ ID NO: 421823 - RNA, 24 nt, Human
cccgggcuguccgagaccuugguc

SEQ ID NO: 421824 - RNA, 19 nt, Human
cccuaaaaaucaggaaacc

SEQ ID NO: 421825 - RNA, 22 nt, Human
cccuaaaacaucugcacuggca

SEQ ID NO: 421826 - RNA, 25 nt, Human
cccuccaugcacgucucaggcccag

SEQ ID NO: 421827 - RNA, 18 nt, Human
cccucccucccagacaag

SEQ ID NO: 421828 - RNA, 20 nt, Human
cccuccgccgccgccucuuc

SEQ ID NO: 421829 - RNA, 20 nt, Human
cccuccgccgccgccucuuc

SEQ ID NO: 421830 - RNA, 20 nt, Human
cccuccgccgccgccucuuc

SEQ ID NO: 421831 - RNA, 23 nt, Human
cccugaccuuccugcacuggaag

SEQ ID NO: 421832 - RNA, 18 nt, Human
cccugcaaagucacuccu

SEQ ID NO: 421833 - RNA, 18 nt, Human
cccugcaaagucacuccu

SEQ ID NO: 421834 - RNA, 18 nt, Human
cccugcaaagucacuccu

SEQ ID NO: 421835 - RNA, 24 nt, Human
cccugcaaagucacuccuuucgcc

SEQ ID NO: 421836 - RNA, 24 nt, Human
cccugcaaagucacuccuuucgcc

SEQ ID NO: 421837 - RNA, 24 nt, Human
cccugcaaagucacuccuuucgcc

SEQ ID NO: 421838 - RNA, 19 nt, Human
cccugcagggccacacacc

SEQ ID NO: 421839 - RNA, 19 nt, Human
cccugcagggccacacacc

SEQ ID NO: 421840 - RNA, 19 nt, Human
cccugcagggccacacacc

SEQ ID NO: 421841 - RNA, 20 nt, Human
cccuugggaaaagccuacgc

SEQ ID NO: 421842 - RNA, 21 nt, Human
cccuugggaaaagccuacgcu

SEQ ID NO: 421843 - RNA, 21 nt, Human
cccuugggaaaagccuacgcu

SEQ ID NO: 421844 - RNA, 21 nt, Human
cccuugggaaaagccuacgcu

SEQ ID NO: 421845 - RNA, 19 nt, Human
ccgcaaggagagcaaagua

SEQ ID NO: 421846 - RNA, 21 nt, Human
ccgcagagcucuaugagcccc

SEQ ID NO: 421847 - RNA, 19 nt, Human
ccgcaggcuccaccuccac

SEQ ID NO: 421848 - RNA, 23 nt, Human
ccgccagccccuccgccgccgcc

SEQ ID NO: 421849 - RNA, 23 nt, Human
ccgccagccccuccgccgccgcc

SEQ ID NO: 421850 - RNA, 23 nt, Human
ccgccagccccuccgccgccgcc

SEQ ID NO: 421851 - RNA, 18 nt, Human
ccgccaucaccgcagcgg

SEQ ID NO: 421852 - RNA, 18 nt, Human
ccgccaucaccgcagcgg

SEQ ID NO: 421853 - RNA, 20 nt, Human
ccgccaucaccgcagcggaa

SEQ ID NO: 421854 - RNA, 18 nt, Human
ccgccccuaagucaugcu

SEQ ID NO: 421855 - RNA, 18 nt, Human
ccgccccuaagucaugcu

SEQ ID NO: 421856 - RNA, 18 nt, Human
ccgccccuaagucaugcu

SEQ ID NO: 421857 - RNA, 23 nt, Human
ccgccucuuccccuucggcuucc

SEQ ID NO: 421858 - RNA, 23 nt, Human
ccgccucuuccccuucggcuucc

SEQ ID NO: 421859 - RNA, 23 nt, Human
ccgccucuuccccuucggcuucc

SEQ ID NO: 421860 - RNA, 20 nt, Human
ccgggacacagaggaggaca

SEQ ID NO: 421861 - RNA, 22 nt, Human
ccuacgcuacacauuucagagg

SEQ ID NO: 421862 - RNA, 22 nt, Human
ccuacgcuacacauuucagagg

SEQ ID NO: 421863 - RNA, 22 nt, Human
ccuacgcuacacauuucagagg

SEQ ID NO: 421864 - RNA, 22 nt, Human
ccuacgcuacacauuucagagg

SEQ ID NO: 421865 - RNA, 18 nt, Human
ccuagagcugcggggacc

SEQ ID NO: 421866 - RNA, 19 nt, Human
ccucacacgggccucaccc

SEQ ID NO: 421867 - RNA, 19 nt, Human
ccucacacgggccucaccc

SEQ ID NO: 421868 - RNA, 19 nt, Human
ccucacacgggccucaccc

SEQ ID NO: 421869 - RNA, 19 nt, Human
ccucacacgggccucaccc

SEQ ID NO: 421870 - RNA, 22 nt, Human
ccucacuacccuguuccaaaag

SEQ ID NO: 421871 - RNA, 24 nt, Human
ccuccacccccaggaccgcaccuc

SEQ ID NO: 421872 - RNA, 24 nt, Human
ccuccacccccaggaccgcaccuc

SEQ ID NO: 421873 - RNA, 19 nt, Human
ccuccgggccaguucaugc

SEQ ID NO: 421874 - RNA, 19 nt, Human
ccuccgggccaguucaugc

SEQ ID NO: 421875 - RNA, 19 nt, Human
ccuccgggccaguucaugc

SEQ ID NO: 421876 - RNA, 19 nt, Human
ccuccgggccaguucaugc

SEQ ID NO: 421877 - RNA, 19 nt, Human
ccucuuggcgaccaggccc

SEQ ID NO: 421878 - RNA, 19 nt, Human
ccucuuggcgaccaggccc

SEQ ID NO: 421879 - RNA, 19 nt, Human
ccucuuggcgaccaggccc

SEQ ID NO: 421880 - RNA, 24 nt, Human
ccugacucaugggcaggccucgac

SEQ ID NO: 421881 - RNA, 28 nt, Human
ccugcaagcucagggccgcuaccccaaa

SEQ ID NO: 421882 - RNA, 28 nt, Human
ccugcaagcucagggccgcuaccccaaa

SEQ ID NO: 421883 - RNA, 28 nt, Human
ccugcaagcucagggccgcuaccccaaa

SEQ ID NO: 421884 - RNA, 22 nt, Human
ccugccaggcaggccuccaccc

SEQ ID NO: 421885 - RNA, 22 nt, Human
ccugccaggcaggccuccaccc

SEQ ID NO: 421886 - RNA, 22 nt, Human
ccugccaggcaggccuccaccc

SEQ ID NO: 421887 - RNA, 22 nt, Human
ccugcugccagacaagcauccc

SEQ ID NO: 421888 - RNA, 22 nt, Human
ccugcugccagacaagcauccc

SEQ ID NO: 421889 - RNA, 22 nt, Human
ccugcugccagacaagcauccc

SEQ ID NO: 421890 - RNA, 20 nt, Human
ccuggccaacagggugagac

SEQ ID NO: 421891 - RNA, 24 nt, Human
ccuggccaacagggugagacucug

SEQ ID NO: 421892 - RNA, 22 nt, Human
ccuggccaauauggcgaaaccc

SEQ ID NO: 421893 - RNA, 24 nt, Human
ccuggccaauauggcgaaacccug

SEQ ID NO: 421894 - RNA, 19 nt, Human
ccugggcaacauggcgaaa

SEQ ID NO: 421895 - RNA, 24 nt, Human
ccugggcaacauggcgaaaucuug

SEQ ID NO: 421896 - RNA, 20 nt, Human
ccuguaaucccagcacuuug

SEQ ID NO: 421897 - RNA, 18 nt, Human
ccuguggccagagugagg

SEQ ID NO: 421898 - RNA, 22 nt, Human
ccuuggguuugaaggguuggaa

SEQ ID NO: 421899 - RNA, 23 nt, Human
ccuuggguuugaaggguuggaag

SEQ ID NO: 421900 - RNA, 23 nt, Human
ccuuggguuugaaggguuggaag

SEQ ID NO: 421901 - RNA, 23 nt, Human
ccuuggguuugaaggguuggaag

SEQ ID NO: 421902 - RNA, 19 nt, Human
ccuuugccaucugucuuga

SEQ ID NO: 421903 - RNA, 19 nt, Human
ccuuugccaucugucuuga

SEQ ID NO: 421904 - RNA, 19 nt, Human
ccuuugccaucugucuuga

SEQ ID NO: 421905 - RNA, 22 nt, Human
cgaccaggccccacccuuugcc

SEQ ID NO: 421906 - RNA, 22 nt, Human
cgaccaggccccacccuuugcc

SEQ ID NO: 421907 - RNA, 19 nt, Human
cgacuuuuucccaccacac

SEQ ID NO: 421908 - RNA, 19 nt, Human
cgagaugcauuuggaaagg

SEQ ID NO: 421909 - RNA, 22 nt, Human
cgaguguccccauucacugucc

SEQ ID NO: 421910 - RNA, 22 nt, Human
cgaguguccccauucacugucc

SEQ ID NO: 421911 - RNA, 19 nt, Human
cgcaugcauaaugcaguca

SEQ ID NO: 421912 - RNA, 24 nt, Human
cgccuguaaucccagcauuuuggg

SEQ ID NO: 421913 - RNA, 25 nt, Human
cgcgcaacagggcuaugcggcccga

SEQ ID NO: 421914 - RNA, 23 nt, Human
cgcuuguagucccagcuacucgg

SEQ ID NO: 421915 - RNA, 24 nt, Human
cgcuuguagucccagcuacucggg

SEQ ID NO: 421916 - RNA, 23 nt, Human
cggacagacaacuagccacaguc
